United States Patent Application Publication US 2025/0179441 A1 - sequence listing, part 2

SEQ ID NO: 21399 - DNA, 21 bp, synthetic construct
  misc_feature 1..21: note = Description of Artificial Sequence: Synthetic oligonucleotide
  source 1..21: mol_type = other DNA
agcagaagcgccagcaacgcc

SEQ ID NO: 21400 - DNA, 21 bp, synthetic construct
  misc_feature 1..21: note = Description of Artificial Sequence: Synthetic oligonucleotide
  source 1..21: mol_type = other DNA
agcgaccaagtcaaaagcaac

SEQ ID NO: 21401 - DNA, 21 bp, synthetic construct
  misc_feature 1..21: note = Description of Artificial Sequence: Synthetic oligonucleotide
  source 1..21: mol_type = other DNA
agcgccagcgaaagaagcctc

SEQ ID NO: 21402 - DNA, 21 bp, synthetic construct
  misc_feature 1..21: note = Description of Artificial Sequence: Synthetic oligonucleotide
  source 1..21: mol_type = other DNA
cagtcttcggggagtacgatg

SEQ ID NO: 21403 - DNA, 21 bp, synthetic construct
  misc_feature 1..21: note = Description of Artificial Sequence: Synthetic oligonucleotide
  source 1..21: mol_type = other DNA
catttgggttcttctaatgag

SEQ ID NO: 21404 - DNA, 21 bp, synthetic construct
  misc_feature 1..21: note = Description of Artificial Sequence: Synthetic oligonucleotide
  source 1..21: mol_type = other DNA
ctcggcaacagcaccaccagc

SEQ ID NO: 21405 - DNA, 21 bp, synthetic construct
  misc_feature 1..21: note = Description of Artificial Sequence: Synthetic oligonucleotide
  source 1..21: mol_type = other DNA
tcgcctacgggtaagggtgtt

SEQ ID NO: 21406 - DNA, 21 bp, synthetic construct
  misc_feature 1..21: note = Description of Artificial Sequence: Synthetic oligonucleotide
  source 1..21: mol_type = other DNA
tcgggtagtaatgttccttcg

SEQ ID NO: 21407 - DNA, 21 bp, synthetic construct
  misc_feature 1..21: note = Description of Artificial Sequence: Synthetic oligonucleotide
  source 1..21: mol_type = other DNA
tctaatactcctactactgtg

SEQ ID NO: 21408 - DNA, 21 bp, synthetic construct
  misc_feature 1..21: note = Description of Artificial Sequence: Synthetic oligonucleotide
  source 1..21: mol_type = other DNA
tctaggtcggatccgaaggtt

SEQ ID NO: 21409 - DNA, 21 bp, synthetic construct
  misc_feature 1..21: note = Description of Artificial Sequence: Synthetic oligonucleotide
  source 1..21: mol_type = other DNA
tctctggctgcgtcggctaat

SEQ ID NO: 21410 - DNA, 21 bp, synthetic construct
  misc_feature 1..21: note = Description of Artificial Sequence: Synthetic oligonucleotide
  source 1..21: mol_type = other DNA
tctggtgtttcttcggctact

SEQ ID NO: 21411 - DNA, 21 bp, synthetic construct
  misc_feature 1..21: note = Description of Artificial Sequence: Synthetic oligonucleotide
  source 1..21: mol_type = other DNA
tctgatagtccccataataag

SEQ ID NO: 21412 - DNA, 21 bp, synthetic construct
  misc_feature 1..21: note = Description of Artificial Sequence: Synthetic oligonucleotide
  source 1..21: mol_type = other DNA
ggtaaggctggtaatacgacg

SEQ ID NO: 21413 - DNA, 21 bp, synthetic construct
  misc_feature 1..21: note = Description of Artificial Sequence: Synthetic oligonucleotide
  source 1..21: mol_type = other DNA
aatcagggtaatcaggtgtct

SEQ ID NO: 21414 - DNA, 21 bp, synthetic construct
  misc_feature 1..21: note = Description of Artificial Sequence: Synthetic oligonucleotide
  source 1..21: mol_type = other DNA
gctggtagttcttcgccgcgg

SEQ ID NO: 21415 - DNA, 21 bp, synthetic construct
  misc_feature 1..21: note = Description of Artificial Sequence: Synthetic oligonucleotide
  source 1..21: mol_type = other DNA
aaagtcccccccacccaaggc

SEQ ID NO: 21416 - DNA, 21 bp, synthetic construct
  misc_feature 1..21: note = Description of Artificial Sequence: Synthetic oligonucleotide
  source 1..21: mol_type = other DNA
gagggtcagggtacttttgcg

SEQ ID NO: 21417 - DNA, 21 bp, synthetic construct
  misc_feature 1..21: note = Description of Artificial Sequence: Synthetic oligonucleotide
  source 1..21: mol_type = other DNA
gcgactaattcgcctagtttg

SEQ ID NO: 21418 - DNA, 21 bp, synthetic construct
  misc_feature 1..21: note = Description of Artificial Sequence: Synthetic oligonucleotide
  source 1..21: mol_type = other DNA
tcttctcggcagtcggatggg

SEQ ID NO: 21419 - DNA, 21 bp, synthetic construct
  misc_feature 1..21: note = Description of Artificial Sequence: Synthetic oligonucleotide
  source 1..21: mol_type = other DNA
gccctcagcgccacccccccc

SEQ ID NO: 21420 - DNA, 21 bp, synthetic construct
  misc_feature 1..21: note = Description of Artificial Sequence: Synthetic oligonucleotide
  source 1..21: mol_type = other DNA
gtggatgggggttctacgggg

SEQ ID NO: 21421 - DNA, 21 bp, synthetic construct
  misc_feature 1..21: note = Description of Artificial Sequence: Synthetic oligonucleotide
  source 1..21: mol_type = other DNA
ggcagcggcagcagcaacaaa

SEQ ID NO: 21422 - DNA, 21 bp, synthetic construct
  misc_feature 1..21: note = Description of Artificial Sequence: Synthetic oligonucleotide
  source 1..21: mol_type = other DNA
ggcagcgccaccaccgccagc

SEQ ID NO: 21423 - DNA, 21 bp, synthetic construct
  misc_feature 1..21: note = Description of Artificial Sequence: Synthetic oligonucleotide
  source 1..21: mol_type = other DNA
caaagcaaaggcgcccaaggc

SEQ ID NO: 21424 - DNA, 21 bp, synthetic construct
  misc_feature 1..21: note = Description of Artificial Sequence: Synthetic oligonucleotide
  source 1..21: mol_type = other DNA
ggcctcgacaaacacagcgtc

SEQ ID NO: 21425 - DNA, 21 bp, synthetic construct
  misc_feature 1..21: note = Description of Artificial Sequence: Synthetic oligonucleotide
  source 1..21: mol_type = other DNA
ggggatgtgagtcataagaat

SEQ ID NO: 21426 - DNA, 21 bp, synthetic construct
  misc_feature 1..21: note = Description of Artificial Sequence: Synthetic oligonucleotide
  source 1..21: mol_type = other DNA
ggcgtcagcgccacccccctc

SEQ ID NO: 21427 - DNA, 21 bp, synthetic construct
  misc_feature 1..21: note = Description of Artificial Sequence: Synthetic oligonucleotide
  source 1..21: mol_type = other DNA
actcgtgagtctcaggggtct

SEQ ID NO: 21428 - DNA, 21 bp, synthetic construct
  misc_feature 1..21: note = Description of Artificial Sequence: Synthetic oligonucleotide
  source 1..21: mol_type = other DNA
cagcataatggggatcgtagt

SEQ ID NO: 21429 - DNA, 21 bp, synthetic construct
  misc_feature 1..21: note = Description of Artificial Sequence: Synthetic oligonucleotide
  source 1..21: mol_type = other DNA
aacagcgtcaaagccaccagc

SEQ ID NO: 21430 - DNA, 21 bp, synthetic construct
  misc_feature 1..21: note = Description of Artificial Sequence: Synthetic oligonucleotide
  source 1..21: mol_type = other DNA
cagaagaattcgaatagtgcg

SEQ ID NO: 21431 - DNA, 21 bp, synthetic construct
  misc_feature 1..21: note = Description of Artificial Sequence: Synthetic oligonucleotide
  source 1..21: mol_type = other DNA
cgtcagacggataagatttct

SEQ ID NO: 21432 - DNA, 21 bp, synthetic construct
  misc_feature 1..21: note = Description of Artificial Sequence: Synthetic oligonucleotide
  source 1..21: mol_type = other DNA
ggtgggcctggttctactcat

SEQ ID NO: 21433 - DNA, 21 bp, synthetic construct
  misc_feature 1..21: note = Description of Artificial Sequence: Synthetic oligonucleotide
  source 1..21: mol_type = other DNA
tctagtggtcatacttcgggg

SEQ ID NO: 21434 - DNA, 21 bp, synthetic construct
  misc_feature 1..21: note = Description of Artificial Sequence: Synthetic oligonucleotide
  source 1..21: mol_type = other DNA
agtggtacttcttcggtgagt

SEQ ID NO: 21435 - DNA, 21 bp, synthetic construct
  misc_feature 1..21: note = Description of Artificial Sequence: Synthetic oligonucleotide
  source 1..21: mol_type = other DNA
caagccagcagcagcaacacc

SEQ ID NO: 21436 - DNA, 21 bp, synthetic construct
  misc_feature 1..21: note = Description of Artificial Sequence: Synthetic oligonucleotide
  source 1..21: mol_type = other DNA
ggtagggagtctggggcgtct

SEQ ID NO: 21437 - DNA, 21 bp, synthetic construct
  misc_feature 1..21: note = Description of Artificial Sequence: Synthetic oligonucleotide
  source 1..21: mol_type = other DNA
cagaagtcggatggttttcat

SEQ ID NO: 21438 - DNA, 21 bp, synthetic construct
  misc_feature 1..21: note = Description of Artificial Sequence: Synthetic oligonucleotide
  source 1..21: mol_type = other DNA
gcttctggttctgcggcttcg

SEQ ID NO: 21439 - DNA, 21 bp, synthetic construct
  misc_feature 1..21: note = Description of Artificial Sequence: Synthetic oligonucleotide
  source 1..21: mol_type = other DNA
gccgccgccatccccaacaac

SEQ ID NO: 21440 - DNA, 21 bp, synthetic construct
  misc_feature 1..21: note = Description of Artificial Sequence: Synthetic oligonucleotide
  source 1..21: mol_type = other DNA
ggcaaaggcaccgacgcccac

SEQ ID NO: 21441 - DNA, 21 bp, synthetic construct
  misc_feature 1..21: note = Description of Artificial Sequence: Synthetic oligonucleotide
  source 1..21: mol_type = other DNA
aacagcgtccaaggccaaggc

SEQ ID NO: 21442 - DNA, 21 bp, synthetic construct
  misc_feature 1..21: note = Description of Artificial Sequence: Synthetic oligonucleotide
  source 1..21: mol_type = other DNA
agcagccacagcccccacacc

SEQ ID NO: 21443 - DNA, 21 bp, synthetic construct
  misc_feature 1..21: note = Description of Artificial Sequence: Synthetic oligonucleotide
  source 1..21: mol_type = other DNA
ctcaacagaacccccaacgtc

SEQ ID NO: 21444 - DNA, 21 bp, synthetic construct
  misc_feature 1..21: note = Description of Artificial Sequence: Synthetic oligonucleotide
  source 1..21: mol_type = other DNA
gctggggggacttctagtgtg

SEQ ID NO: 21445 - DNA, 21 bp, synthetic construct
  misc_feature 1..21: note = Description of Artificial Sequence: Synthetic oligonucleotide
  source 1..21: mol_type = other DNA
gggacggggacgaattctccg

SEQ ID NO: 21446 - DNA, 21 bp, synthetic construct
  misc_feature 1..21: note = Description of Artificial Sequence: Synthetic oligonucleotide
  source 1..21: mol_type = other DNA
tcgcaggataagagtgcgtcg

SEQ ID NO: 21447 - DNA, 21 bp, synthetic construct
  misc_feature 1..21: note = Description of Artificial Sequence: Synthetic oligonucleotide
  source 1..21: mol_type = other DNA
aatggtatgacgcagaaggtg

SEQ ID NO: 21448 - DNA, 21 bp, synthetic construct
  misc_feature 1..21: note = Description of Artificial Sequence: Synthetic oligonucleotide
  source 1..21: mol_type = other DNA
ctcgccgacaacaaaagcacc

SEQ ID NO: 21449 - DNA, 21 bp, synthetic construct
  misc_feature 1..21: note = Description of Artificial Sequence: Synthetic oligonucleotide
  source 1..21: mol_type = other DNA
tctgctactactagtggtgct

SEQ ID NO: 21450 - DNA, 21 bp, synthetic construct
  misc_feature 1..21: note = Description of Artificial Sequence: Synthetic oligonucleotide
  source 1..21: mol_type = other DNA
aacgccaccagcacccccgtc

SEQ ID NO: 21451 - DNA, 21 bp, synthetic construct
  misc_feature 1..21: note = Description of Artificial Sequence: Synthetic oligonucleotide
  source 1..21: mol_type = other DNA
gatactgcttcgaggtctcat

SEQ ID NO: 21452 - DNA, 21 bp, synthetic construct
  misc_feature 1..21: note = Description of Artificial Sequence: Synthetic oligonucleotide
  source 1..21: mol_type = other DNA
ggcaccagcgtccccagagtc

SEQ ID NO: 21453 - DNA, 21 bp, synthetic construct
  misc_feature 1..21: note = Description of Artificial Sequence: Synthetic oligonucleotide
  source 1..21: mol_type = other DNA
caacccaaacccagaaccgaa

SEQ ID NO: 21454 - DNA, 21 bp, synthetic construct
  misc_feature 1..21: note = Description of Artificial Sequence: Synthetic oligonucleotide
  source 1..21: mol_type = other DNA
atccaacccggcagccccaaa

SEQ ID NO: 21455 - DNA, 21 bp, synthetic construct
  misc_feature 1..21: note = Description of Artificial Sequence: Synthetic oligonucleotide
  source 1..21: mol_type = other DNA
aagcaggaggctcctggtacg

SEQ ID NO: 21456 - DNA, 21 bp, synthetic construct
  misc_feature 1..21: note = Description of Artificial Sequence: Synthetic oligonucleotide
  source 1..21: mol_type = other DNA
agcaacagccccggcccccac

SEQ ID NO: 21457 - DNA, 21 bp, synthetic construct
  misc_feature 1..21: note = Description of Artificial Sequence: Synthetic oligonucleotide
  source 1..21: mol_type = other DNA
agcgacggcagcagcagagtc

SEQ ID NO: 21458 - DNA, 21 bp, synthetic construct
  misc_feature 1..21: note = Description of Artificial Sequence: Synthetic oligonucleotide
  source 1..21: mol_type = other DNA
agcgccggcgtcgccggcaaa

SEQ ID NO: 21459 - DNA, 21 bp, synthetic construct
  misc_feature 1..21: note = Description of Artificial Sequence: Synthetic oligonucleotide
  source 1..21: mol_type = other DNA
agcggcggcggcagcagcagc

SEQ ID NO: 21460 - DNA, 21 bp, synthetic construct
  misc_feature 1..21: note = Description of Artificial Sequence: Synthetic oligonucleotide
  source 1..21: mol_type = other DNA
cacaacagcaccgccacccac

SEQ ID NO: 21461 - DNA, 21 bp, synthetic construct
  misc_feature 1..21: note = Description of Artificial Sequence: Synthetic oligonucleotide
  source 1..21: mol_type = other DNA
gagggttcgcagggtgcggtg

SEQ ID NO: 21462 - DNA, 21 bp, synthetic construct
  misc_feature 1..21: note = Description of Artificial Sequence: Synthetic oligonucleotide
  source 1..21: mol_type = other DNA
gccagaaccaccaacaaagaa

SEQ ID NO: 21463 - DNA, 21 bp, synthetic construct
  misc_feature 1..21: note = Description of Artificial Sequence: Synthetic oligonucleotide
  source 1..21: mol_type = other DNA
ggggggaataggggtgatgtt

SEQ ID NO: 21464 - DNA, 21 bp, synthetic construct
  misc_feature 1..21: note = Description of Artificial Sequence: Synthetic oligonucleotide
  source 1..21: mol_type = other DNA
tctagtggtaaggttcctggt

SEQ ID NO: 21465 - DNA, 21 bp, synthetic construct
  misc_feature 1..21: note = Description of Artificial Sequence: Synthetic oligonucleotide
  source 1..21: mol_type = other DNA
atgacggctaaggggagtgtg

SEQ ID NO: 21466 - DNA, 21 bp, synthetic construct
  misc_feature 1..21: note = Description of Artificial Sequence: Synthetic oligonucleotide
  source 1..21: mol_type = other DNA
agcggcagcagcagcaccagc

SEQ ID NO: 21467 - DNA, 21 bp, synthetic construct
  misc_feature 1..21: note = Description of Artificial Sequence: Synthetic oligonucleotide
  source 1..21: mol_type = other DNA
acgaatactcagcagtatcag

SEQ ID NO: 21468 - DNA, 21 bp, synthetic construct
  misc_feature 1..21: note = Description of Artificial Sequence: Synthetic oligonucleotide
  source 1..21: mol_type = other DNA
gccaaacaaaacaccaccctc

SEQ ID NO: 21469 - DNA, 21 bp, synthetic construct
  misc_feature 1..21: note = Description of Artificial Sequence: Synthetic oligonucleotide
  source 1..21: mol_type = other DNA
ggtacgggtagtaagacggtt

SEQ ID NO: 21470 - DNA, 21 bp, synthetic construct
  misc_feature 1..21: note = Description of Artificial Sequence: Synthetic oligonucleotide
  source 1..21: mol_type = other DNA
accggcggcgaccccctcaaa

SEQ ID NO: 21471 - DNA, 21 bp, synthetic construct
  misc_feature 1..21: note = Description of Artificial Sequence: Synthetic oligonucleotide
  source 1..21: mol_type = other DNA
accagagtcaccagccccagc

SEQ ID NO: 21472 - DNA, 21 bp, synthetic construct
  misc_feature 1..21: note = Description of Artificial Sequence: Synthetic oligonucleotide
  source 1..21: mol_type = other DNA
caacacggcaacaaagaaagc

SEQ ID NO: 21473 - DNA, 21 bp, synthetic construct
  misc_feature 1..21: note = Description of Artificial Sequence: Synthetic oligonucleotide
  source 1..21: mol_type = other DNA
gacagaagccccaaccccgcc

SEQ ID NO: 21474 - DNA, 21 bp, synthetic construct
  misc_feature 1..21: note = Description of Artificial Sequence: Synthetic oligonucleotide
  source 1..21: mol_type = other DNA
aattctgctaagagtacgttt

SEQ ID NO: 21475 - DNA, 21 bp, synthetic construct
  misc_feature 1..21: note = Description of Artificial Sequence: Synthetic oligonucleotide
  source 1..21: mol_type = other DNA
ggccaaggccaacccagcagc

SEQ ID NO: 21476 - DNA, 21 bp, synthetic construct
  misc_feature 1..21: note = Description of Artificial Sequence: Synthetic oligonucleotide
  source 1..21: mol_type = other DNA
cttatttctgataagtcggct

SEQ ID NO: 21477 - DNA, 21 bp, synthetic construct
  misc_feature 1..21: note = Description of Artificial Sequence: Synthetic oligonucleotide
  source 1..21: mol_type = other DNA
agcgtcagccaaagccacgtc

SEQ ID NO: 21478 - DNA, 21 bp, synthetic construct
  misc_feature 1..21: note = Description of Artificial Sequence: Synthetic oligonucleotide
  source 1..21: mol_type = other DNA
aatcctgctcaggctaatcag

SEQ ID NO: 21479 - DNA, 21 bp, synthetic construct
  misc_feature 1..21: note = Description of Artificial Sequence: Synthetic oligonucleotide
  source 1..21: mol_type = other DNA
cacaacagcaccccccccgtc

SEQ ID NO: 21480 - DNA, 21 bp, synthetic construct
  misc_feature 1..21: note = Description of Artificial Sequence: Synthetic oligonucleotide
  source 1..21: mol_type = other DNA
ggcaaacaaagccaagccgcc

SEQ ID NO: 21481 - DNA, 21 bp, synthetic construct
  misc_feature 1..21: note = Description of Artificial Sequence: Synthetic oligonucleotide
  source 1..21: mol_type = other DNA
ggcatccaaacccccagcgcc

SEQ ID NO: 21482 - DNA, 21 bp, synthetic construct
  misc_feature 1..21: note = Description of Artificial Sequence: Synthetic oligonucleotide
  source 1..21: mol_type = other DNA
gagtcgagtaatgctaggagt

SEQ ID NO: 21483 - DNA, 21 bp, synthetic construct
  misc_feature 1..21: note = Description of Artificial Sequence: Synthetic oligonucleotide
  source 1..21: mol_type = other DNA
agcaccagagaacaaaaaggc

SEQ ID NO: 21484 - DNA, 21 bp, synthetic construct
  misc_feature 1..21: note = Description of Artificial Sequence: Synthetic oligonucleotide
  source 1..21: mol_type = other DNA
atgccttcgaattcttcggct

SEQ ID NO: 21485 - DNA, 21 bp, synthetic construct
  misc_feature 1..21: note = Description of Artificial Sequence: Synthetic oligonucleotide
  source 1..21: mol_type = other DNA
gacagcaccaccaaaaacacc

SEQ ID NO: 21486 - DNA, 21 bp, synthetic construct
  misc_feature 1..21: note = Description of Artificial Sequence: Synthetic oligonucleotide
  source 1..21: mol_type = other DNA
gatgtgtctgggagtaaggct

SEQ ID NO: 21487 - DNA, 21 bp, synthetic construct
  misc_feature 1..21: note = Description of Artificial Sequence: Synthetic oligonucleotide
  source 1..21: mol_type = other DNA
gatgttcctgctgcgaagatt

SEQ ID NO: 21488 - DNA, 21 bp, synthetic construct
  misc_feature 1..21: note = Description of Artificial Sequence: Synthetic oligonucleotide
  source 1..21: mol_type = other DNA
gccggcggcaacaaagaaagc

SEQ ID NO: 21489 - DNA, 21 bp, synthetic construct
  misc_feature 1..21: note = Description of Artificial Sequence: Synthetic oligonucleotide
  source 1..21: mol_type = other DNA
gctaatcaggctggtagtcag

SEQ ID NO: 21490 - DNA, 21 bp, synthetic construct
  misc_feature 1..21: note = Description of Artificial Sequence: Synthetic oligonucleotide
  source 1..21: mol_type = other DNA
ggtcggggggataatgtgggt

SEQ ID NO: 21491 - DNA, 21 bp, synthetic construct
  misc_feature 1..21: note = Description of Artificial Sequence: Synthetic oligonucleotide
  source 1..21: mol_type = other DNA
agtggtgattctcgggtgcat

SEQ ID NO: 21492 - DNA, 21 bp, synthetic construct
  misc_feature 1..21: note = Description of Artificial Sequence: Synthetic oligonucleotide
  source 1..21: mol_type = other DNA
aacggcagcaacaacaccacc

SEQ ID NO: 21493 - DNA, 21 bp, synthetic construct
  misc_feature 1..21: note = Description of Artificial Sequence: Synthetic oligonucleotide
  source 1..21: mol_type = other DNA
aacagcagaaccccccccaac

SEQ ID NO: 21494 - DNA, 21 bp, synthetic construct
  misc_feature 1..21: note = Description of Artificial Sequence: Synthetic oligonucleotide
  source 1..21: mol_type = other DNA
acccccagcagcgaaaccaga

SEQ ID NO: 21495 - DNA, 21 bp, synthetic construct
  misc_feature 1..21: note = Description of Artificial Sequence: Synthetic oligonucleotide
  source 1..21: mol_type = other DNA
accaacagcgccggcgccgcc

SEQ ID NO: 21496 - DNA, 21 bp, synthetic construct
  misc_feature 1..21: note = Description of Artificial Sequence: Synthetic oligonucleotide
  source 1..21: mol_type = other DNA
acttcgcgggatgctcagaag

SEQ ID NO: 21497 - DNA, 21 bp, synthetic construct
  misc_feature 1..21: note = Description of Artificial Sequence: Synthetic oligonucleotide
  source 1..21: mol_type = other DNA
ggcctcgaaagccccagaaaa

SEQ ID NO: 21498 - DNA, 21 bp, synthetic construct
  misc_feature 1..21: note = Description of Artificial Sequence: Synthetic oligonucleotide
  source 1..21: mol_type = other DNA
gggagtaatacttctgtggct

SEQ ID NO: 21499 - DNA, 21 bp, synthetic construct
  misc_feature 1..21: note = Description of Artificial Sequence: Synthetic oligonucleotide
  source 1..21: mol_type = other DNA
aaaggcctcagcagcagcacc

SEQ ID NO: 21500 - DNA, 21 bp, synthetic construct
  misc_feature 1..21: note = Description of Artificial Sequence: Synthetic oligonucleotide
  source 1..21: mol_type = other DNA
agcagcggcggccaacaccaa

SEQ ID NO: 21501 - DNA, 21 bp, synthetic construct
  misc_feature 1..21: note = Description of Artificial Sequence: Synthetic oligonucleotide
  source 1..21: mol_type = other DNA
cagtctacgaaggagcttgct

SEQ ID NO: 21502 - DNA, 21 bp, synthetic construct
  misc_feature 1..21: note = Description of Artificial Sequence: Synthetic oligonucleotide
  source 1..21: mol_type = other DNA
gcgaaggctaatctgtcgact

SEQ ID NO: 21503 - DNA, 21 bp, synthetic construct
  misc_feature 1..21: note = Description of Artificial Sequence: Synthetic oligonucleotide
  source 1..21: mol_type = other DNA
gctacgacttctccgagtacg

SEQ ID NO: 21504 - DNA, 21 bp, synthetic construct
  misc_feature 1..21: note = Description of Artificial Sequence: Synthetic oligonucleotide
  source 1..21: mol_type = other DNA
tctgggtcgccttcgagtggg

SEQ ID NO: 21505 - DNA, 21 bp, synthetic construct
  misc_feature 1..21: note = Description of Artificial Sequence: Synthetic oligonucleotide
  source 1..21: mol_type = other DNA
gaacccaaacccagcagcacc

SEQ ID NO: 21506 - DNA, 21 bp, synthetic construct
  misc_feature 1..21: note = Description of Artificial Sequence: Synthetic oligonucleotide
  source 1..21: mol_type = other DNA
agcggcagcggccaaaaccaa

SEQ ID NO: 21507 - DNA, 21 bp, synthetic construct
  misc_feature 1..21: note = Description of Artificial Sequence: Synthetic oligonucleotide
  source 1..21: mol_type = other DNA
gtcggcaccaacgccccccaa

SEQ ID NO: 21508 - DNA, 21 bp, synthetic construct
  misc_feature 1..21: note = Description of Artificial Sequence: Synthetic oligonucleotide
  source 1..21: mol_type = other DNA
accagcagcaaagaagccgtc

SEQ ID NO: 21509 - DNA, 21 bp, synthetic construct
  misc_feature 1..21: note = Description of Artificial Sequence: Synthetic oligonucleotide
  source 1..21: mol_type = other DNA
tctgcggggactaagcagact

SEQ ID NO: 21510 - DNA, 21 bp, synthetic construct
  misc_feature 1..21: note = Description of Artificial Sequence: Synthetic oligonucleotide
  source 1..21: mol_type = other DNA
attactgcggcttcgtctact

SEQ ID NO: 21511 - DNA, 21 bp, synthetic construct
  misc_feature 1..21: note = Description of Artificial Sequence: Synthetic oligonucleotide
  source 1..21: mol_type = other DNA
accagcgacaaaggccccaga

SEQ ID NO: 21512 - DNA, 21 bp, synthetic construct
  misc_feature 1..21: note = Description of Artificial Sequence: Synthetic oligonucleotide
  source 1..21: mol_type = other DNA
accgacccccccagcagaagc

SEQ ID NO: 21513 - DNA, 21 bp, synthetic construct
  misc_feature 1..21: note = Description of Artificial Sequence: Synthetic oligonucleotide
  source 1..21: mol_type = other DNA
agcaaaatgaacagcagcgtc

SEQ ID NO: 21514 - DNA, 21 bp, synthetic construct
  misc_feature 1..21: note = Description of Artificial Sequence: Synthetic oligonucleotide
  source 1..21: mol_type = other DNA
agcagcagcaaacccggcctc

SEQ ID NO: 21515 - DNA, 21 bp, synthetic construct
  misc_feature 1..21: note = Description of Artificial Sequence: Synthetic oligonucleotide
  source 1..21: mol_type = other DNA
gacaccggccccgcccacacc

SEQ ID NO: 21516 - DNA, 21 bp, synthetic construct
  misc_feature 1..21: note = Description of Artificial Sequence: Synthetic oligonucleotide
  source 1..21: mol_type = other DNA
gagcctacgaggggttcgtct

SEQ ID NO: 21517 - DNA, 21 bp, synthetic construct
  misc_feature 1..21: note = Description of Artificial Sequence: Synthetic oligonucleotide
  source 1..21: mol_type = other DNA
gcgactagtacggataagaat

SEQ ID NO: 21518 - DNA, 21 bp, synthetic construct
  misc_feature 1..21: note = Description of Artificial Sequence: Synthetic oligonucleotide
  source 1..21: mol_type = other DNA
ggcgaacacggcagcagcggc

SEQ ID NO: 21519 - DNA, 21 bp, synthetic construct
  misc_feature 1..21: note = Description of Artificial Sequence: Synthetic oligonucleotide
  source 1..21: mol_type = other DNA
ggcggccacaacgtcagcaac

SEQ ID NO: 21520 - DNA, 21 bp, synthetic construct
  misc_feature 1..21: note = Description of Artificial Sequence: Synthetic oligonucleotide
  source 1..21: mol_type = other DNA
gggagtactgctggggagcgg

SEQ ID NO: 21521 - DNA, 21 bp, synthetic construct
  misc_feature 1..21: note = Description of Artificial Sequence: Synthetic oligonucleotide
  source 1..21: mol_type = other DNA
gtcggcgacatgaccaaagcc

SEQ ID NO: 21522 - DNA, 21 bp, synthetic construct
  misc_feature 1..21: note = Description of Artificial Sequence: Synthetic oligonucleotide
  source 1..21: mol_type = other DNA
gttaagggtggtgctactaat

SEQ ID NO: 21523 - DNA, 21 bp, synthetic construct
  misc_feature 1..21: note = Description of Artificial Sequence: Synthetic oligonucleotide
  source 1..21: mol_type = other DNA
ctgggtaatggtattgctaat

SEQ ID NO: 21524 - DNA, 21 bp, synthetic construct
  misc_feature 1..21: note = Description of Artificial Sequence: Synthetic oligonucleotide
  source 1..21: mol_type = other DNA
accctcgcccccaccaacgcc

SEQ ID NO: 21525 - DNA, 21 bp, synthetic construct
  misc_feature 1..21: note = Description of Artificial Sequence: Synthetic oligonucleotide
  source 1..21: mol_type = other DNA
ggcggcaccaccagccccaaa

SEQ ID NO: 21526 - DNA, 21 bp, synthetic construct
  misc_feature 1..21: note = Description of Artificial Sequence: Synthetic oligonucleotide
  source 1..21: mol_type = other DNA
cagtcgcagaaggttcctgct

SEQ ID NO: 21527 - DNA, 21 bp, synthetic construct
  misc_feature 1..21: note = Description of Artificial Sequence: Synthetic oligonucleotide
  source 1..21: mol_type = other DNA
acgtcgggttcgaataggggg

SEQ ID NO: 21528 - DNA, 21 bp, synthetic construct
  misc_feature 1..21: note = Description of Artificial Sequence: Synthetic oligonucleotide
  source 1..21: mol_type = other DNA
ggcatcgaccccaaactcgcc

SEQ ID NO: 21529 - DNA, 21 bp, synthetic construct
  misc_feature 1..21: note = Description of Artificial Sequence: Synthetic oligonucleotide
  source 1..21: mol_type = other DNA
ctgagtggttctacgaatagt

SEQ ID NO: 21530 - DNA, 21 bp, synthetic construct
  misc_feature 1..21: note = Description of Artificial Sequence: Synthetic oligonucleotide
  source 1..21: mol_type = other DNA
ggcaccaccagcggcatgaaa

SEQ ID NO: 21531 - DNA, 21 bp, synthetic construct
  misc_feature 1..21: note = Description of Artificial Sequence: Synthetic oligonucleotide
  source 1..21: mol_type = other DNA
agcatcaaaagccccagcgac

SEQ ID NO: 21532 - DNA, 21 bp, synthetic construct
  misc_feature 1..21: note = Description of Artificial Sequence: Synthetic oligonucleotide
  source 1..21: mol_type = other DNA
agccccagccccagcggcggc

SEQ ID NO: 21533 - DNA, 21 bp, synthetic construct
  misc_feature 1..21: note = Description of Artificial Sequence: Synthetic oligonucleotide
  source 1..21: mol_type = other DNA
atgcccggcaccagcaaaagc

SEQ ID NO: 21534 - DNA, 21 bp, synthetic construct
  misc_feature 1..21: note = Description of Artificial Sequence: Synthetic oligonucleotide
  source 1..21: mol_type = other DNA
catcaggctacgacgtctcag

SEQ ID NO: 21535 - DNA, 21 bp, synthetic construct
  misc_feature 1..21: note = Description of Artificial Sequence: Synthetic oligonucleotide
  source 1..21: mol_type = other DNA
gctgctgttgcgggtaatggt

SEQ ID NO: 21536 - DNA, 21 bp, synthetic construct
  misc_feature 1..21: note = Description of Artificial Sequence: Synthetic oligonucleotide
  source 1..21: mol_type = other DNA
tcggatcataagagtggtgtg

SEQ ID NO: 21537 - DNA, 21 bp, synthetic construct
  misc_feature 1..21: note = Description of Artificial Sequence: Synthetic oligonucleotide
  source 1..21: mol_type = other DNA
tcgtcgagtaatgctgctaat

SEQ ID NO: 21538 - DNA, 21 bp, synthetic construct
  misc_feature 1..21: note = Description of Artificial Sequence: Synthetic oligonucleotide
  source 1..21: mol_type = other DNA
gattctcgtgggtctcctaag

SEQ ID NO: 21539 - DNA, 21 bp, synthetic construct
  misc_feature 1..21: note = Description of Artificial Sequence: Synthetic oligonucleotide
  source 1..21: mol_type = other DNA
agacaagacaacagaggcggc

SEQ ID NO: 21540 - DNA, 21 bp, synthetic construct
  misc_feature 1..21: note = Description of Artificial Sequence: Synthetic oligonucleotide
  source 1..21: mol_type = other DNA
agcagcggcagcaaactcggc

SEQ ID NO: 21541 - DNA, 21 bp, synthetic construct
  misc_feature 1..21: note = Description of Artificial Sequence: Synthetic oligonucleotide
  source 1..21: mol_type = other DNA
ggcagcggcggcaaccaaaac

SEQ ID NO: 21542 - DNA, 21 bp, synthetic construct
  misc_feature 1..21: note = Description of Artificial Sequence: Synthetic oligonucleotide
  source 1..21: mol_type = other DNA
gttgcttctcagccgacgtct

SEQ ID NO: 21543 - DNA, 21 bp, synthetic construct
  misc_feature 1..21: note = Description of Artificial Sequence: Synthetic oligonucleotide
  source 1..21: mol_type = other DNA
gctaaggcgtctggtttgtcg

SEQ ID NO: 21544 - DNA, 21 bp, synthetic construct
  misc_feature 1..21: note = Description of Artificial Sequence: Synthetic oligonucleotide
  source 1..21: mol_type = other DNA
gcggtgtcgcaggagaagcag

SEQ ID NO: 21545 - DNA, 21 bp, synthetic construct
  misc_feature 1..21: note = Description of Artificial Sequence: Synthetic oligonucleotide
  source 1..21: mol_type = other DNA
gctaagggggaggcgaatggt

SEQ ID NO: 21546 - DNA, 21 bp, synthetic construct
  misc_feature 1..21: note = Description of Artificial Sequence: Synthetic oligonucleotide
  source 1..21: mol_type = other DNA
ggtacgggtaatagtaggact

SEQ ID NO: 21547 - DNA, 21 bp, synthetic construct
  misc_feature 1..21: note = Description of Artificial Sequence: Synthetic oligonucleotide
  source 1..21: mol_type = other DNA
tcgggtcttggtaatagtgtt

SEQ ID NO: 21548 - DNA, 21 bp, synthetic construct
  misc_feature 1..21: note = Description of Artificial Sequence: Synthetic oligonucleotide
  source 1..21: mol_type = other DNA
tgtgattctaagtcttgtagt

SEQ ID NO: 21549 - DNA, 21 bp, synthetic construct
  misc_feature 1..21: note = Description of Artificial Sequence: Synthetic oligonucleotide
  source 1..21: mol_type = other DNA
gagcctaagcctgcgaatacg

SEQ ID NO: 21550 - DNA, 21 bp, synthetic construct
  misc_feature 1..21: note = Description of Artificial Sequence: Synthetic oligonucleotide
  source 1..21: mol_type = other DNA
ggttcgagtcaggcttctctt

SEQ ID NO: 21551 - DNA, 21 bp, synthetic construct
  misc_feature 1..21: note = Description of Artificial Sequence: Synthetic oligonucleotide
  source 1..21: mol_type = other DNA
acgcagtcgtctccgacttct

SEQ ID NO: 21552 - DNA, 21 bp, synthetic construct
  misc_feature 1..21: note = Description of Artificial Sequence: Synthetic oligonucleotide
  source 1..21: mol_type = other DNA
acgaatggtcagaagtttagt

SEQ ID NO: 21553 - DNA, 21 bp, synthetic construct
  misc_feature 1..21: note = Description of Artificial Sequence: Synthetic oligonucleotide
  source 1..21: mol_type = other DNA
agaagcgacgaaaaaagactc

SEQ ID NO: 21554 - DNA, 21 bp, synthetic construct
  misc_feature 1..21: note = Description of Artificial Sequence: Synthetic oligonucleotide
  source 1..21: mol_type = other DNA
agcatgcaaaaagaacaaacc

SEQ ID NO: 21555 - DNA, 21 bp, synthetic construct
  misc_feature 1..21: note = Description of Artificial Sequence: Synthetic oligonucleotide
  source 1..21: mol_type = other DNA
agtggggctggttctgttggt

SEQ ID NO: 21556 - DNA, 21 bp, synthetic construct
  misc_feature 1..21: note = Description of Artificial Sequence: Synthetic oligonucleotide
  source 1..21: mol_type = other DNA
gaaatgcccaccagaaacggc

SEQ ID NO: 21557 - DNA, 21 bp, synthetic construct
  misc_feature 1..21: note = Description of Artificial Sequence: Synthetic oligonucleotide
  source 1..21: mol_type = other DNA
gacgccatcaccaccaaaggc

SEQ ID NO: 21558 - DNA, 21 bp, synthetic construct
  misc_feature 1..21: note = Description of Artificial Sequence: Synthetic oligonucleotide
  source 1..21: mol_type = other DNA
gaggctactaagtctccttct

SEQ ID NO: 21559 - DNA, 21 bp, synthetic construct
  misc_feature 1..21: note = Description of Artificial Sequence: Synthetic oligonucleotide
  source 1..21: mol_type = other DNA
gatacgatggcgactagtaag

SEQ ID NO: 21560 - DNA, 21 bp, synthetic construct
  misc_feature 1..21: note = Description of Artificial Sequence: Synthetic oligonucleotide
  source 1..21: mol_type = other DNA
gccggcggcaacgccggcctc

SEQ ID NO: 21561 - DNA, 21 bp, synthetic construct
  misc_feature 1..21: note = Description of Artificial Sequence: Synthetic oligonucleotide
  source 1..21: mol_type = other DNA
ggtgttaatgggccgaattcg

SEQ ID NO: 21562 - DNA, 21 bp, synthetic construct
  misc_feature 1..21: note = Description of Artificial Sequence: Synthetic oligonucleotide
  source 1..21: mol_type = other DNA
gtcagccccggccccaaaagc

SEQ ID NO: 21563 - DNA, 21 bp, synthetic construct
  misc_feature 1..21: note = Description of Artificial Sequence: Synthetic oligonucleotide
  source 1..21: mol_type = other DNA
gttacggcgaatatgaatact

SEQ ID NO: 21564 - DNA, 21 bp, synthetic construct
  misc_feature 1..21: note = Description of Artificial Sequence: Synthetic oligonucleotide
  source 1..21: mol_type = other DNA
ctcggcaacaacaccaccgcc

SEQ ID NO: 21565 - DNA, 21 bp, synthetic construct
  misc_feature 1..21: note = Description of Artificial Sequence: Synthetic oligonucleotide
  source 1..21: mol_type = other DNA
ggtgcgacgagtcatactagt

SEQ ID NO: 21566 - DNA, 21 bp, synthetic construct
  misc_feature 1..21: note = Description of Artificial Sequence: Synthetic oligonucleotide
  source 1..21: mol_type = other DNA
agtccgtctgtgacgagtact

SEQ ID NO: 21567 - DNA, 21 bp, synthetic construct
  misc_feature 1..21: note = Description of Artificial Sequence: Synthetic oligonucleotide
  source 1..21: mol_type = other DNA
ggcaacgccaccgccaacagc

SEQ ID NO: 21568 - DNA, 21 bp, synthetic construct
  misc_feature 1..21: note = Description of Artificial Sequence: Synthetic oligonucleotide
  source 1..21: mol_type = other DNA
aacaacaaagtcaaacccgaa

SEQ ID NO: 21569 - DNA, 21 bp, synthetic construct
  misc_feature 1..21: note = Description of Artificial Sequence: Synthetic oligonucleotide
  source 1..21: mol_type = other DNA
caagccagcagccaccccagc

SEQ ID NO: 21570 - DNA, 21 bp, synthetic construct
  misc_feature 1..21: note = Description of Artificial Sequence: Synthetic oligonucleotide
  source 1..21: mol_type = other DNA
gggttggttgatcataaggag

SEQ ID NO: 21571 - DNA, 21 bp, synthetic construct
  misc_feature 1..21: note = Description of Artificial Sequence: Synthetic oligonucleotide
  source 1..21: mol_type = other DNA
tctgcgaatagtgggaatgtt

SEQ ID NO: 21572 - DNA, 21 bp, synthetic construct
  misc_feature 1..21: note = Description of Artificial Sequence: Synthetic oligonucleotide
  source 1..21: mol_type = other DNA
agcaacaacgaccccagaaga

SEQ ID NO: 21573 - DNA, 21 bp, synthetic construct
  misc_feature 1..21: note = Description of Artificial Sequence: Synthetic oligonucleotide
  source 1..21: mol_type = other DNA
gaggggaatactaggggtacg

SEQ ID NO: 21574 - DNA, 21 bp, synthetic construct
  misc_feature 1..21: note = Description of Artificial Sequence: Synthetic oligonucleotide
  source 1..21: mol_type = other DNA
gccaacagcggcggcagcagc

SEQ ID NO: 21575 - DNA, 21 bp, synthetic construct
  misc_feature 1..21: note = Description of Artificial Sequence: Synthetic oligonucleotide
  source 1..21: mol_type = other DNA
ggcagcaccagcacccccgtc

SEQ ID NO: 21576 - DNA, 21 bp, synthetic construct
  misc_feature 1..21: note = Description of Artificial Sequence: Synthetic oligonucleotide
  source 1..21: mol_type = other DNA
ggtcatggggaggctaatacg

SEQ ID NO: 21577 - DNA, 21 bp, synthetic construct
  misc_feature 1..21: note = Description of Artificial Sequence: Synthetic oligonucleotide
  source 1..21: mol_type = other DNA
ggcaacgtcgccaaacccagc

SEQ ID NO: 21578 - DNA, 21 bp, synthetic construct
  misc_feature 1..21: note = Description of Artificial Sequence: Synthetic oligonucleotide
  source 1..21: mol_type = other DNA
accctcagcaaccccgtcgcc

SEQ ID NO: 21579 - DNA, 21 bp, synthetic construct
  misc_feature 1..21: note = Description of Artificial Sequence: Synthetic oligonucleotide
  source 1..21: mol_type = other DNA
agcctcgccggcaacagaacc

SEQ ID NO: 21580 - DNA, 21 bp, synthetic construct
  misc_feature 1..21: note = Description of Artificial Sequence: Synthetic oligonucleotide
  source 1..21: mol_type = other DNA
agcgacggcgccagaagcacc

SEQ ID NO: 21581 - DNA, 21 bp, synthetic construct
  misc_feature 1..21: note = Description of Artificial Sequence: Synthetic oligonucleotide
  source 1..21: mol_type = other DNA
atgggtactaatactccggct

SEQ ID NO: 21582 - DNA, 21 bp, synthetic construct
  misc_feature 1..21: note = Description of Artificial Sequence: Synthetic oligonucleotide
  source 1..21: mol_type = other DNA
ctcggccaaagcagcaccaac

SEQ ID NO: 21583 - DNA, 21 bp, synthetic construct
  misc_feature 1..21: note = Description of Artificial Sequence: Synthetic oligonucleotide
  source 1..21: mol_type = other DNA
ggtcttgatagtagtgttaag

SEQ ID NO: 21584 - DNA, 21 bp, synthetic construct
  misc_feature 1..21: note = Description of Artificial Sequence: Synthetic oligonucleotide
  source 1..21: mol_type = other DNA
ggtgagcgtgttggtaatcgg

SEQ ID NO: 21585 - DNA, 21 bp, synthetic construct
  misc_feature 1..21: note = Description of Artificial Sequence: Synthetic oligonucleotide
  source 1..21: mol_type = other DNA
gtgcagggtcaggcgtctcat

SEQ ID NO: 21586 - DNA, 21 bp, synthetic construct
  misc_feature 1..21: note = Description of Artificial Sequence: Synthetic oligonucleotide
  source 1..21: mol_type = other DNA
agcaccagaagccccaccatc

SEQ ID NO: 21587 - DNA, 21 bp, synthetic construct
  misc_feature 1..21: note = Description of Artificial Sequence: Synthetic oligonucleotide
  source 1..21: mol_type = other DNA
ctgcagaattcgactacgctg

SEQ ID NO: 21588 - DNA, 21 bp, synthetic construct
  misc_feature 1..21: note = Description of Artificial Sequence: Synthetic oligonucleotide
  source 1..21: mol_type = other DNA
cacgccaccaaagccaccacc

SEQ ID NO: 21589 - DNA, 21 bp, synthetic construct
  misc_feature 1..21: note = Description of Artificial Sequence: Synthetic oligonucleotide
  source 1..21: mol_type = other DNA
accgtccaaagagacaaccaa

SEQ ID NO: 21590 - DNA, 21 bp, synthetic construct
  misc_feature 1..21: note = Description of Artificial Sequence: Synthetic oligonucleotide
  source 1..21: mol_type = other DNA
cttaagtcggggtctacgggg

SEQ ID NO: 21591 - DNA, 21 bp, synthetic construct
  misc_feature 1..21: note = Description of Artificial Sequence: Synthetic oligonucleotide
  source 1..21: mol_type = other DNA
tcgtctgagactcggactgcg

SEQ ID NO: 21592 - DNA, 21 bp, synthetic construct
  misc_feature 1..21: note = Description of Artificial Sequence: Synthetic oligonucleotide
  source 1..21: mol_type = other DNA
aatcgggtttcgtctgcgaat

SEQ ID NO: 21593 - DNA, 21 bp, synthetic construct
  misc_feature 1..21: note = Description of Artificial Sequence: Synthetic oligonucleotide
  source 1..21: mol_type = other DNA
acccccaacggccaaatgacc

SEQ ID NO: 21594 - DNA, 21 bp, synthetic construct
  misc_feature 1..21: note = Description of Artificial Sequence: Synthetic oligonucleotide
  source 1..21: mol_type = other DNA
accggcaccagaagcatgcaa

SEQ ID NO: 21595 - DNA, 21 bp, synthetic construct
  misc_feature 1..21: note = Description of Artificial Sequence: Synthetic oligonucleotide
  source 1..21: mol_type = other DNA
agcgtcggccaactccccaaa

SEQ ID NO: 21596 - DNA, 21 bp, synthetic construct
  misc_feature 1..21: note = Description of Artificial Sequence: Synthetic oligonucleotide
  source 1..21: mol_type = other DNA
tcggcgacgaatcagatgagt

SEQ ID NO: 21597 - DNA, 21 bp, synthetic construct
  misc_feature 1..21: note = Description of Artificial Sequence: Synthetic oligonucleotide
  source 1..21: mol_type = other DNA
aagggtgtggattcgcatggg

SEQ ID NO: 21598 - DNA, 21 bp, synthetic construct
  misc_feature 1..21: note = Description of Artificial Sequence: Synthetic oligonucleotide
  source 1..21: mol_type = other DNA
aatcagcataagccgtcggag

SEQ ID NO: 21599 - DNA, 21 bp, synthetic construct
  misc_feature 1..21: note = Description of Artificial Sequence: Synthetic oligonucleotide
  source 1..21: mol_type = other DNA
agcgcccaaagcagccccctc

SEQ ID NO: 21600 - DNA, 21 bp, synthetic construct
  misc_feature 1..21: note = Description of Artificial Sequence: Synthetic oligonucleotide
  source 1..21: mol_type = other DNA
agtggtattagtggtgtggct

SEQ ID NO: 21601 - DNA, 21 bp, synthetic construct
  misc_feature 1..21: note = Description of Artificial Sequence: Synthetic oligonucleotide
  source 1..21: mol_type = other DNA
catggtcagtcgtctgtggtg

SEQ ID NO: 21602 - DNA, 21 bp, synthetic construct
  misc_feature 1..21: note = Description of Artificial Sequence: Synthetic oligonucleotide
  source 1..21: mol_type = other DNA
gtccccagcaacccccccaac

SEQ ID NO: 21603 - DNA, 21 bp, synthetic construct
  misc_feature 1..21: note = Description of Artificial Sequence: Synthetic oligonucleotide
  source 1..21: mol_type = other DNA
tctactaagactgctccgacg

SEQ ID NO: 21604 - DNA, 21 bp, synthetic construct
  misc_feature 1..21: note = Description of Artificial Sequence: Synthetic oligonucleotide
  source 1..21: mol_type = other DNA
aatagggagtcggcgagtact

SEQ ID NO: 21605 - DNA, 21 bp, synthetic construct
  misc_feature 1..21: note = Description of Artificial Sequence: Synthetic oligonucleotide
  source 1..21: mol_type = other DNA
aatggttctggtgctcagatt

SEQ ID NO: 21606 - DNA, 21 bp, synthetic construct
  misc_feature 1..21: note = Description of Artificial Sequence: Synthetic oligonucleotide
  source 1..21: mol_type = other DNA
acgcttggtagtactcctgtg

SEQ ID NO: 21607 - DNA, 21 bp, synthetic construct
  misc_feature 1..21: note = Description of Artificial Sequence: Synthetic oligonucleotide
  source 1..21: mol_type = other DNA
agccccggcaacagaagcggc

SEQ ID NO: 21608 - DNA, 21 bp, synthetic construct
  misc_feature 1..21: note = Description of Artificial Sequence: Synthetic oligonucleotide
  source 1..21: mol_type = other DNA
aggggtcagggtgcgaatgtg

SEQ ID NO: 21609 - DNA, 21 bp, synthetic construct
  misc_feature 1..21: note = Description of Artificial Sequence: Synthetic oligonucleotide
  source 1..21: mol_type = other DNA
gataggactaagacgaatgtt

SEQ ID NO: 21610 - DNA, 21 bp, synthetic construct
  misc_feature 1..21: note = Description of Artificial Sequence: Synthetic oligonucleotide
  source 1..21: mol_type = other DNA
cggagtgagagtagtgcggtg

SEQ ID NO: 21611 - DNA, 21 bp, synthetic construct
  misc_feature 1..21: note = Description of Artificial Sequence: Synthetic oligonucleotide
  source 1..21: mol_type = other DNA
ctcgacagcaacaaagccccc

SEQ ID NO: 21612 - DNA, 21 bp, synthetic construct
  misc_feature 1..21: note = Description of Artificial Sequence: Synthetic oligonucleotide
  source 1..21: mol_type = other DNA
aaaggcgaaagcggcggcgtc

SEQ ID NO: 21613 - DNA, 21 bp, synthetic construct
  misc_feature 1..21: note = Description of Artificial Sequence: Synthetic oligonucleotide
  source 1..21: mol_type = other DNA
aacgccgaaaacagcagactc

SEQ ID NO: 21614 - DNA, 21 bp, synthetic construct
  misc_feature 1..21: note = Description of Artificial Sequence: Synthetic oligonucleotide
  source 1..21: mol_type = other DNA
gacggccaaagaaccagcagc

SEQ ID NO: 21615 - DNA, 21 bp, synthetic construct
  misc_feature 1..21: note = Description of Artificial Sequence: Synthetic oligonucleotide
  source 1..21: mol_type = other DNA
gccagcagccccggcggcatg

SEQ ID NO: 21616 - DNA, 21 bp, synthetic construct
  misc_feature 1..21: note = Description of Artificial Sequence: Synthetic oligonucleotide
  source 1..21: mol_type = other DNA
acggggagtactggtattaag

SEQ ID NO: 21617 - DNA, 21 bp, synthetic construct
  misc_feature 1..21: note = Description of Artificial Sequence: Synthetic oligonucleotide
  source 1..21: mol_type = other DNA
acgttgggggggactaattcg

SEQ ID NO: 21618 - DNA, 21 bp, synthetic construct
  misc_feature 1..21: note = Description of Artificial Sequence: Synthetic oligonucleotide
  source 1..21: mol_type = other DNA
attgggtctagtactgggggt

SEQ ID NO: 21619 - DNA, 21 bp, synthetic construct
  misc_feature 1..21: note = Description of Artificial Sequence: Synthetic oligonucleotide
  source 1..21: mol_type = other DNA
tctagtttgcataaggatggt

SEQ ID NO: 21620 - DNA, 21 bp, synthetic construct
  misc_feature 1..21: note = Description of Artificial Sequence: Synthetic oligonucleotide
  source 1..21: mol_type = other DNA
aacagcggcagcaaagccagc

SEQ ID NO: 21621 - DNA, 21 bp, synthetic construct
  misc_feature 1..21: note = Description of Artificial Sequence: Synthetic oligonucleotide
  source 1..21: mol_type = other DNA
tcgggggcgcagtcgaatcgt

SEQ ID NO: 21622 - DNA, 21 bp, synthetic construct
  misc_feature 1..21: note = Description of Artificial Sequence: Synthetic oligonucleotide
  source 1..21: mol_type = other DNA
acggatgagcataaggcgtat

SEQ ID NO: 21623 - DNA, 21 bp, synthetic construct
  misc_feature 1..21: note = Description of Artificial Sequence: Synthetic oligonucleotide
  source 1..21: mol_type = other DNA
caaggcgaaaacagcaccaaa

SEQ ID NO: 21624 - DNA, 21 bp, synthetic construct
  misc_feature 1..21: note = Description of Artificial Sequence: Synthetic oligonucleotide
  source 1..21: mol_type = other DNA
ggcatggaccccaaagccagc

SEQ ID NO: 21625 - DNA, 21 bp, synthetic construct
  misc_feature 1..21: note = Description of Artificial Sequence: Synthetic oligonucleotide
  source 1..21: mol_type = other DNA
gatggggctactggtacgcag

SEQ ID NO: 21626 - DNA, 21 bp, synthetic construct
  misc_feature 1..21: note = Description of Artificial Sequence: Synthetic oligonucleotide
  source 1..21: mol_type = other DNA
acccaagccaacggcggcaaa

SEQ ID NO: 21627 - DNA, 21 bp, synthetic construct
  misc_feature 1..21: note = Description of Artificial Sequence: Synthetic oligonucleotide
  source 1..21: mol_type = other DNA
ggcaacggccacaacgccatc

SEQ ID NO: 21628 - DNA, 21 bp, synthetic construct
  misc_feature 1..21: note = Description of Artificial Sequence: Synthetic oligonucleotide
  source 1..21: mol_type = other DNA
ggtccgtctgggcaggagcgt

SEQ ID NO: 21629 - DNA, 21 bp, synthetic construct
  misc_feature 1..21: note = Description of Artificial Sequence: Synthetic oligonucleotide
  source 1..21: mol_type = other DNA
aatggtacgtcttcgcatatg

SEQ ID NO: 21630 - DNA, 21 bp, synthetic construct
  misc_feature 1..21: note = Description of Artificial Sequence: Synthetic oligonucleotide
  source 1..21: mol_type = other DNA
gacgtccccaaaaccggcagc

SEQ ID NO: 21631 - DNA, 21 bp, synthetic construct
  misc_feature 1..21: note = Description of Artificial Sequence: Synthetic oligonucleotide
  source 1..21: mol_type = other DNA
ggtgcggttccggggcagact

SEQ ID NO: 21632 - DNA, 21 bp, synthetic construct
  misc_feature 1..21: note = Description of Artificial Sequence: Synthetic oligonucleotide
  source 1..21: mol_type = other DNA
gatcgtcctccgccgggttcg

SEQ ID NO: 21633 - DNA, 21 bp, synthetic construct
  misc_feature 1..21: note = Description of Artificial Sequence: Synthetic oligonucleotide
  source 1..21: mol_type = other DNA
accagagaaaccagcagcggc

SEQ ID NO: 21634 - DNA, 21 bp, synthetic construct
  misc_feature 1..21: note = Description of Artificial Sequence: Synthetic oligonucleotide
  source 1..21: mol_type = other DNA
cgttctggggcggatccggct

SEQ ID NO: 21635 - DNA, 21 bp, synthetic construct
  misc_feature 1..21: note = Description of Artificial Sequence: Synthetic oligonucleotide
  source 1..21: mol_type = other DNA
cttacgagtcagccggcgaat

SEQ ID NO: 21636 - DNA, 21 bp, synthetic construct
  misc_feature 1..21: note = Description of Artificial Sequence: Synthetic oligonucleotide
  source 1..21: mol_type = other DNA
agtctgactacggcgacgaag

SEQ ID NO: 21637 - DNA, 21 bp, synthetic construct
  misc_feature 1..21: note = Description of Artificial Sequence: Synthetic oligonucleotide
  source 1..21: mol_type = other DNA
gaccccgacagaagcgccaaa

SEQ ID NO: 21638 - DNA, 21 bp, synthetic construct
  misc_feature 1..21: note = Description of Artificial Sequence: Synthetic oligonucleotide
  source 1..21: mol_type = other DNA
agtccgagtggttcgctgtcg

SEQ ID NO: 21639 - DNA, 21 bp, synthetic construct
  misc_feature 1..21: note = Description of Artificial Sequence: Synthetic oligonucleotide
  source 1..21: mol_type = other DNA
agcaccagcggcaccagcagc

SEQ ID NO: 21640 - DNA, 21 bp, synthetic construct
  misc_feature 1..21: note = Description of Artificial Sequence: Synthetic oligonucleotide
  source 1..21: mol_type = other DNA
ctgactggtgcgactagtagt

SEQ ID NO: 21641 - DNA, 21 bp, synthetic construct
  misc_feature 1..21: note = Description of Artificial Sequence: Synthetic oligonucleotide
  source 1..21: mol_type = other DNA
ctgtctaattcgcctagtgcg

SEQ ID NO: 21642 - DNA, 21 bp, synthetic construct
  misc_feature 1..21: note = Description of Artificial Sequence: Synthetic oligonucleotide
  source 1..21: mol_type = other DNA
attacggggtcggggcctgcg

SEQ ID NO: 21643 - DNA, 21 bp, synthetic construct
  misc_feature 1..21: note = Description of Artificial Sequence: Synthetic oligonucleotide
  source 1..21: mol_type = other DNA
gggggggggaatgcttctggg

SEQ ID NO: 21644 - DNA, 21 bp, synthetic construct
  misc_feature 1..21: note = Description of Artificial Sequence: Synthetic oligonucleotide
  source 1..21: mol_type = other DNA
ggtacgaattcgagtttgaat

SEQ ID NO: 21645 - DNA, 21 bp, synthetic construct
  misc_feature 1..21: note = Description of Artificial Sequence: Synthetic oligonucleotide
  source 1..21: mol_type = other DNA
actatggatagtaggtctgcg

SEQ ID NO: 21646 - DNA, 21 bp, synthetic construct
  misc_feature 1..21: note = Description of Artificial Sequence: Synthetic oligonucleotide
  source 1..21: mol_type = other DNA
caaagaaacggcagccccctc

SEQ ID NO: 21647 - DNA, 21 bp, synthetic construct
  misc_feature 1..21: note = Description of Artificial Sequence: Synthetic oligonucleotide
  source 1..21: mol_type = other DNA
aacaacgccagcgccaaaagc

SEQ ID NO: 21648 - DNA, 21 bp, synthetic construct
  misc_feature 1..21: note = Description of Artificial Sequence: Synthetic oligonucleotide
  source 1..21: mol_type = other DNA
aagcctcaggataattcgtcg

SEQ ID NO: 21649 - DNA, 21 bp, synthetic construct
  misc_feature 1..21: note = Description of Artificial Sequence: Synthetic oligonucleotide
  source 1..21: mol_type = other DNA
attgctgggggtaagacggtg

SEQ ID NO: 21650 - DNA, 21 bp, synthetic construct
  misc_feature 1..21: note = Description of Artificial Sequence: Synthetic oligonucleotide
  source 1..21: mol_type = other DNA
cttctttcgggggattcgagg

SEQ ID NO: 21651 - DNA, 21 bp, synthetic construct
  misc_feature 1..21: note = Description of Artificial Sequence: Synthetic oligonucleotide
  source 1..21: mol_type = other DNA
ggcgtccaagtcagcagcggc

SEQ ID NO: 21652 - DNA, 21 bp, synthetic construct
  misc_feature 1..21: note = Description of Artificial Sequence: Synthetic oligonucleotide
  source 1..21: mol_type = other DNA
gttcagaatacgggtgggggg

SEQ ID NO: 21653 - DNA, 21 bp, synthetic construct
  misc_feature 1..21: note = Description of Artificial Sequence: Synthetic oligonucleotide
  source 1..21: mol_type = other DNA
agcagaaaccaaagcaacagc

SEQ ID NO: 21654 - DNA, 21 bp, synthetic construct
  misc_feature 1..21: note = Description of Artificial Sequence: Synthetic oligonucleotide
  source 1..21: mol_type = other DNA
gccggcatcaaacccagccaa

SEQ ID NO: 21655 - DNA, 21 bp, synthetic construct
  misc_feature 1..21: note = Description of Artificial Sequence: Synthetic oligonucleotide
  source 1..21: mol_type = other DNA
gccagccaacccgccggcagc

SEQ ID NO: 21656 - DNA, 21 bp, synthetic construct
  misc_feature 1..21: note = Description of Artificial Sequence: Synthetic oligonucleotide
  source 1..21: mol_type = other DNA
aaggcgaatccttctcctgct

SEQ ID NO: 21657 - DNA, 21 bp, synthetic construct
  misc_feature 1..21: note = Description of Artificial Sequence: Synthetic oligonucleotide
  source 1..21: mol_type = other DNA
aaggatcagcctagtacgaat

SEQ ID NO: 21658 - DNA, 21 bp, synthetic construct
  misc_feature 1..21: note = Description of Artificial Sequence: Synthetic oligonucleotide
  source 1..21: mol_type = other DNA
atggtcggcaaaagcagcagc

SEQ ID NO: 21659 - DNA, 21 bp, synthetic construct
  misc_feature 1..21: note = Description of Artificial Sequence: Synthetic oligonucleotide
  source 1..21: mol_type = other DNA
cagtctacggggtctccgact

SEQ ID NO: 21660 - DNA, 21 bp, synthetic construct
  misc_feature 1..21: note = Description of Artificial Sequence: Synthetic oligonucleotide
  source 1..21: mol_type = other DNA
ctccccagccccagcaccctc

SEQ ID NO: 21661 - DNA, 21 bp, synthetic construct
  misc_feature 1..21: note = Description of Artificial Sequence: Synthetic oligonucleotide
  source 1..21: mol_type = other DNA
gatgctattagtagtaagagg

SEQ ID NO: 21662 - DNA, 21 bp, synthetic construct
  misc_feature 1..21: note = Description of Artificial Sequence: Synthetic oligonucleotide
  source 1..21: mol_type = other DNA
tgttcggttcctagtttgggg

SEQ ID NO: 21663 - DNA, 21 bp, synthetic construct
  misc_feature 1..21: note = Description of Artificial Sequence: Synthetic oligonucleotide
  source 1..21: mol_type = other DNA
gtcagagacagcagcaccctc

SEQ ID NO: 21664 - DNA, 21 bp, synthetic construct
  misc_feature 1..21: note = Description of Artificial Sequence: Synthetic oligonucleotide
  source 1..21: mol_type = other DNA
ggggtgggtgatggtaagctt

SEQ ID NO: 21665 - DNA, 21 bp, synthetic construct
  misc_feature 1..21: note = Description of Artificial Sequence: Synthetic oligonucleotide
  source 1..21: mol_type = other DNA
atgcaggataataaggctatg

SEQ ID NO: 21666 - DNA, 21 bp, synthetic construct
  misc_feature 1..21: note = Description of Artificial Sequence: Synthetic oligonucleotide
  source 1..21: mol_type = other DNA
gccagcgacagcgtccccaaa

SEQ ID NO: 21667 - DNA, 21 bp, synthetic construct
  misc_feature 1..21: note = Description of Artificial Sequence: Synthetic oligonucleotide
  source 1..21: mol_type = other DNA
tcgggtaatgatgctcggcgt

SEQ ID NO: 21668 - DNA, 21 bp, synthetic construct
  misc_feature 1..21: note = Description of Artificial Sequence: Synthetic oligonucleotide
  source 1..21: mol_type = other DNA
actgcgggtaattcgtctcag

SEQ ID NO: 21669 - DNA, 21 bp, synthetic construct
  misc_feature 1..21: note = Description of Artificial Sequence: Synthetic oligonucleotide
  source 1..21: mol_type = other DNA
gagaaggcgaggcagagtgcg

SEQ ID NO: 21670 - DNA, 21 bp, synthetic construct
  misc_feature 1..21: note = Description of Artificial Sequence: Synthetic oligonucleotide
  source 1..21: mol_type = other DNA
gccggcaaagaaagcaacaga

SEQ ID NO: 21671 - DNA, 21 bp, synthetic construct
  misc_feature 1..21: note = Description of Artificial Sequence: Synthetic oligonucleotide
  source 1..21: mol_type = other DNA
gcgcatgggaatcctagtggt

SEQ ID NO: 21672 - DNA, 21 bp, synthetic construct
  misc_feature 1..21: note = Description of Artificial Sequence: Synthetic oligonucleotide
  source 1..21: mol_type = other DNA
gtcggcagcagcagcgccaaa

SEQ ID NO: 21673 - DNA, 21 bp, synthetic construct
  misc_feature 1..21: note = Description of Artificial Sequence: Synthetic oligonucleotide
  source 1..21: mol_type = other DNA
agcctcaccaaagcccaagcc

SEQ ID NO: 21674 - DNA, 21 bp, synthetic construct
  misc_feature 1..21: note = Description of Artificial Sequence: Synthetic oligonucleotide
  source 1..21: mol_type = other DNA
actgcgtctaatgcttcgact

SEQ ID NO: 21675 - DNA, 21 bp, synthetic construct
  misc_feature 1..21: note = Description of Artificial Sequence: Synthetic oligonucleotide
  source 1..21: mol_type = other DNA
agaaacgaaggcagccccaac

SEQ ID NO: 21676 - DNA, 21 bp, synthetic construct
  misc_feature 1..21: note = Description of Artificial Sequence: Synthetic oligonucleotide
  source 1..21: mol_type = other DNA
caaagcaaagaagccaccagc

SEQ ID NO: 21677 - DNA, 21 bp, synthetic construct
  misc_feature 1..21: note = Description of Artificial Sequence: Synthetic oligonucleotide
  source 1..21: mol_type = other DNA
catggtctgcctaatgctaag

SEQ ID NO: 21678 - DNA, 21 bp, synthetic construct
  misc_feature 1..21: note = Description of Artificial Sequence: Synthetic oligonucleotide
  source 1..21: mol_type = other DNA
agcggcgccgccaaccccgcc

SEQ ID NO: 21679 - DNA, 21 bp, synthetic construct
  misc_feature 1..21: note = Description of Artificial Sequence: Synthetic oligonucleotide
  source 1..21: mol_type = other DNA
ggcctcggcagcgaaaaccac

SEQ ID NO: 21680 - DNA, 21 bp, synthetic construct
  misc_feature 1..21: note = Description of Artificial Sequence: Synthetic oligonucleotide
  source 1..21: mol_type = other DNA
tctagtaattcggatgtgagg

SEQ ID NO: 21681 - DNA, 21 bp, synthetic construct
  misc_feature 1..21: note = Description of Artificial Sequence: Synthetic oligonucleotide
  source 1..21: mol_type = other DNA
agcgccaccggcagcaacaga

SEQ ID NO: 21682 - DNA, 21 bp, synthetic construct
  misc_feature 1..21: note = Description of Artificial Sequence: Synthetic oligonucleotide
  source 1..21: mol_type = other DNA
agtaggacggataggcctgtc

SEQ ID NO: 21683 - DNA, 21 bp, synthetic construct
  misc_feature 1..21: note = Description of Artificial Sequence: Synthetic oligonucleotide
  source 1..21: mol_type = other DNA
aacagccaaaaagtcaacatg

SEQ ID NO: 21684 - DNA, 21 bp, synthetic construct
  misc_feature 1..21: note = Description of Artificial Sequence: Synthetic oligonucleotide
  source 1..21: mol_type = other DNA
aatggtgagacggggccgaag

SEQ ID NO: 21685 - DNA, 21 bp, synthetic construct
  misc_feature 1..21: note = Description of Artificial Sequence: Synthetic oligonucleotide
  source 1..21: mol_type = other DNA
agccaagtccaaaccagcaaa

SEQ ID NO: 21686 - DNA, 21 bp, synthetic construct
  misc_feature 1..21: note = Description of Artificial Sequence: Synthetic oligonucleotide
  source 1..21: mol_type = other DNA
gggggtcagccttctaaggat

SEQ ID NO: 21687 - DNA, 21 bp, synthetic construct
  misc_feature 1..21: note = Description of Artificial Sequence: Synthetic oligonucleotide
  source 1..21: mol_type = other DNA
gggggtgttgcgcctaatcag

SEQ ID NO: 21688 - DNA, 21 bp, synthetic construct
  misc_feature 1..21: note = Description of Artificial Sequence: Synthetic oligonucleotide
  source 1..21: mol_type = other DNA
gtcaccaaaggcagccaaagc

SEQ ID NO: 21689 - DNA, 21 bp, synthetic construct
  misc_feature 1..21: note = Description of Artificial Sequence: Synthetic oligonucleotide
  source 1..21: mol_type = other DNA
gaaatgagcgccaccaacagc

SEQ ID NO: 21690 - DNA, 21 bp, synthetic construct
  misc_feature 1..21: note = Description of Artificial Sequence: Synthetic oligonucleotide
  source 1..21: mol_type = other DNA
gacctccaaatcgccaaaggc

SEQ ID NO: 21691 - DNA, 21 bp, synthetic construct
  misc_feature 1..21: note = Description of Artificial Sequence: Synthetic oligonucleotide
  source 1..21: mol_type = other DNA
gccaacaacagcagcatgcaa

SEQ ID NO: 21692 - DNA, 21 bp, synthetic construct
  misc_feature 1..21: note = Description of Artificial Sequence: Synthetic oligonucleotide
  source 1..21: mol_type = other DNA
agccaagtcgccgccaccgtc

SEQ ID NO: 21693 - DNA, 21 bp, synthetic construct
  misc_feature 1..21: note = Description of Artificial Sequence: Synthetic oligonucleotide
  source 1..21: mol_type = other DNA
ctcgtcaaaggcagcagcagc

SEQ ID NO: 21694 - DNA, 21 bp, synthetic construct
  misc_feature 1..21: note = Description of Artificial Sequence: Synthetic oligonucleotide
  source 1..21: mol_type = other DNA
gatgtgtcttctaaggtgcct

SEQ ID NO: 21695 - DNA, 21 bp, synthetic construct
  misc_feature 1..21: note = Description of Artificial Sequence: Synthetic oligonucleotide
  source 1..21: mol_type = other DNA
ttccccaacggcaacagcacc

SEQ ID NO: 21696 - DNA, 21 bp, synthetic construct
  misc_feature 1..21: note = Description of Artificial Sequence: Synthetic oligonucleotide
  source 1..21: mol_type = other DNA
agaaacagcacccccagcacc

SEQ ID NO: 21697 - DNA, 21 bp, synthetic construct
  misc_feature 1..21: note = Description of Artificial Sequence: Synthetic oligonucleotide
  source 1..21: mol_type = other DNA
agcgtcctcgacggcaaaagc

SEQ ID NO: 21698 - DNA, 21 bp, synthetic construct
  misc_feature 1..21: note = Description of Artificial Sequence: Synthetic oligonucleotide
  source 1..21: mol_type = other DNA
gataggcagaatgcttcgtct

SEQ ID NO: 21699 - DNA, 21 bp, synthetic construct
  misc_feature 1..21: note = Description of Artificial Sequence: Synthetic oligonucleotide
  source 1..21: mol_type = other DNA
gatggtggtagttctcttcgt

SEQ ID NO: 21700 - DNA, 21 bp, synthetic construct
  misc_feature 1..21: note = Description of Artificial Sequence: Synthetic oligonucleotide
  source 1..21: mol_type = other DNA
atgccgacgaagacgtctact

SEQ ID NO: 21701 - DNA, 21 bp, synthetic construct
  misc_feature 1..21: note = Description of Artificial Sequence: Synthetic oligonucleotide
  source 1..21: mol_type = other DNA
agccccgacaccgcccccaga

SEQ ID NO: 21702 - DNA, 21 bp, synthetic construct
  misc_feature 1..21: note = Description of Artificial Sequence: Synthetic oligonucleotide
  source 1..21: mol_type = other DNA
accaaaagccaaagcatcatg

SEQ ID NO: 21703 - DNA, 21 bp, synthetic construct
  misc_feature 1..21: note = Description of Artificial Sequence: Synthetic oligonucleotide
  source 1..21: mol_type = other DNA
agaggcaacggcgcccccgcc

SEQ ID NO: 21704 - DNA, 21 bp, synthetic construct
  misc_feature 1..21: note = Description of Artificial Sequence: Synthetic oligonucleotide
  source 1..21: mol_type = other DNA
caggggagtacgagttcgagg

SEQ ID NO: 21705 - DNA, 21 bp, synthetic construct
  misc_feature 1..21: note = Description of Artificial Sequence: Synthetic oligonucleotide
  source 1..21: mol_type = other DNA
accgaccccgcccccaaacac

SEQ ID NO: 21706 - DNA, 21 bp, synthetic construct
  misc_feature 1..21: note = Description of Artificial Sequence: Synthetic oligonucleotide
  source 1..21: mol_type = other DNA
tctgctacgtctccgaatcgt

SEQ ID NO: 21707 - DNA, 21 bp, synthetic construct
  misc_feature 1..21: note = Description of Artificial Sequence: Synthetic oligonucleotide
  source 1..21: mol_type = other DNA
agcgtcaacagcagcccccac

SEQ ID NO: 21708 - DNA, 21 bp, synthetic construct
  misc_feature 1..21: note = Description of Artificial Sequence: Synthetic oligonucleotide
  source 1..21: mol_type = other DNA
gacgtcggcgacagacccgtc

SEQ ID NO: 21709 - DNA, 21 bp, synthetic construct
  misc_feature 1..21: note = Description of Artificial Sequence: Synthetic oligonucleotide
  source 1..21: mol_type = other DNA
atgtctggtgcgtctacggct

SEQ ID NO: 21710 - DNA, 21 bp, synthetic construct
  misc_feature 1..21: note = Description of Artificial Sequence: Synthetic oligonucleotide
  source 1..21: mol_type = other DNA
ctccccgccggcaaactcgcc

SEQ ID NO: 21711 - DNA, 21 bp, synthetic construct
  misc_feature 1..21: note = Description of Artificial Sequence: Synthetic oligonucleotide
  source 1..21: mol_type = other DNA
agttcgttgaatggtaatagt

SEQ ID NO: 21712 - DNA, 21 bp, synthetic construct
  misc_feature 1..21: note = Description of Artificial Sequence: Synthetic oligonucleotide
  source 1..21: mol_type = other DNA
gattctatggggacgcgtaat

SEQ ID NO: 21713 - DNA, 21 bp, synthetic construct
  misc_feature 1..21: note = Description of Artificial Sequence: Synthetic oligonucleotide
  source 1..21: mol_type = other DNA
aacgccaacggcagcctcggc

SEQ ID NO: 21714 - DNA, 21 bp, synthetic construct
  misc_feature 1..21: note = Description of Artificial Sequence: Synthetic oligonucleotide
  source 1..21: mol_type = other DNA
aaccccgacgtcagcggcaaa

SEQ ID NO: 21715 - DNA, 21 bp, synthetic construct
  misc_feature 1..21: note = Description of Artificial Sequence: Synthetic oligonucleotide
  source 1..21: mol_type = other DNA
aatgctactacgccgactaac

SEQ ID NO: 21716 - DNA, 21 bp, synthetic construct
  misc_feature 1..21: note = Description of Artificial Sequence: Synthetic oligonucleotide
  source 1..21: mol_type = other DNA
accaccaacaaacaactcgcc

SEQ ID NO: 21717 - DNA, 21 bp, synthetic construct
  misc_feature 1..21: note = Description of Artificial Sequence: Synthetic oligonucleotide
  source 1..21: mol_type = other DNA
accacccaaagcaccgcccaa

SEQ ID NO: 21718 - DNA, 21 bp, synthetic construct
  misc_feature 1..21: note = Description of Artificial Sequence: Synthetic oligonucleotide
  source 1..21: mol_type = other DNA
accggcagcaaccaacccggc

SEQ ID NO: 21719 - DNA, 21 bp, synthetic construct
  misc_feature 1..21: note = Description of Artificial Sequence: Synthetic oligonucleotide
  source 1..21: mol_type = other DNA
acgaatagtaatccgtctttg

SEQ ID NO: 21720 - DNA, 21 bp, synthetic construct
  misc_feature 1..21: note = Description of Artificial Sequence: Synthetic oligonucleotide
  source 1..21: mol_type = other DNA
actactggtgcgacgatgtct

SEQ ID NO: 21721 - DNA, 21 bp, synthetic construct
  misc_feature 1..21: note = Description of Artificial Sequence: Synthetic oligonucleotide
  source 1..21: mol_type = other DNA
actcatggggatagtaagtcg

SEQ ID NO: 21722 - DNA, 21 bp, synthetic construct
  misc_feature 1..21: note = Description of Artificial Sequence: Synthetic oligonucleotide
  source 1..21: mol_type = other DNA
agcagcggcgccaccgccgtc

SEQ ID NO: 21723 - DNA, 21 bp, synthetic construct
  misc_feature 1..21: note = Description of Artificial Sequence: Synthetic oligonucleotide
  source 1..21: mol_type = other DNA
agcggcggccacaccaccgcc

SEQ ID NO: 21724 - DNA, 21 bp, synthetic construct
  misc_feature 1..21: note = Description of Artificial Sequence: Synthetic oligonucleotide
  source 1..21: mol_type = other DNA
aggaatgcgcagccgatgact

SEQ ID NO: 21725 - DNA, 21 bp, synthetic construct
  misc_feature 1..21: note = Description of Artificial Sequence: Synthetic oligonucleotide
  source 1..21: mol_type = other DNA
agggagtcgcagaagagtctg

SEQ ID NO: 21726 - DNA, 21 bp, synthetic construct
  misc_feature 1..21: note = Description of Artificial Sequence: Synthetic oligonucleotide
  source 1..21: mol_type = other DNA
agtaagacgtcgaataatgcg

SEQ ID NO: 21727 - DNA, 21 bp, synthetic construct
  misc_feature 1..21: note = Description of Artificial Sequence: Synthetic oligonucleotide
  source 1..21: mol_type = other DNA
agtaagcagccgggtggtatt

SEQ ID NO: 21728 - DNA, 21 bp, synthetic construct
  misc_feature 1..21: note = Description of Artificial Sequence: Synthetic oligonucleotide
  source 1..21: mol_type = other DNA
agtactggtgcgactatgagt

SEQ ID NO: 21729 - DNA, 21 bp, synthetic construct
  misc_feature 1..21: note = Description of Artificial Sequence: Synthetic oligonucleotide
  source 1..21: mol_type = other DNA
atggctcagtctgggactggt

SEQ ID NO: 21730 - DNA, 21 bp, synthetic construct
  misc_feature 1..21: note = Description of Artificial Sequence: Synthetic oligonucleotide
  source 1..21: mol_type = other DNA
atgggcggcgtcagcagcagc

SEQ ID NO: 21731 - DNA, 21 bp, synthetic construct
  misc_feature 1..21: note = Description of Artificial Sequence: Synthetic oligonucleotide
  source 1..21: mol_type = other DNA
caaaccagcagagacagcagc

SEQ ID NO: 21732 - DNA, 21 bp, synthetic construct
  misc_feature 1..21: note = Description of Artificial Sequence: Synthetic oligonucleotide
  source 1..21: mol_type = other DNA
caaggcaaaagcatcaccggc

SEQ ID NO: 21733 - DNA, 21 bp, synthetic construct
  misc_feature 1..21: note = Description of Artificial Sequence: Synthetic oligonucleotide
  source 1..21: mol_type = other DNA
cacaaaagcgccaacgtcggc

SEQ ID NO: 21734 - DNA, 21 bp, synthetic construct
  misc_feature 1..21: note = Description of Artificial Sequence: Synthetic oligonucleotide
  source 1..21: mol_type = other DNA
cacaccgccaaaagcagcctc

SEQ ID NO: 21735 - DNA, 21 bp, synthetic construct
  misc_feature 1..21: note = Description of Artificial Sequence: Synthetic oligonucleotide
  source 1..21: mol_type = other DNA
caccaaaaccaaagagacggc

SEQ ID NO: 21736 - DNA, 21 bp, synthetic construct
  misc_feature 1..21: note = Description of Artificial Sequence: Synthetic oligonucleotide
  source 1..21: mol_type = other DNA
caggagggtacgcatacggct

SEQ ID NO: 21737 - DNA, 21 bp, synthetic construct
  misc_feature 1..21: note = Description of Artificial Sequence: Synthetic oligonucleotide
  source 1..21: mol_type = other DNA
caggataagggtaatactggt

SEQ ID NO: 21738 - DNA, 21 bp, synthetic construct
  misc_feature 1..21: note = Description of Artificial Sequence: Synthetic oligonucleotide
  source 1..21: mol_type = other DNA
caggtgggtagtactcctgct

SEQ ID NO: 21739 - DNA, 21 bp, synthetic construct
  misc_feature 1..21: note = Description of Artificial Sequence: Synthetic oligonucleotide
  source 1..21: mol_type = other DNA
cgtggggagtctaaggctaat

SEQ ID NO: 21740 - DNA, 21 bp, synthetic construct
  misc_feature 1..21: note = Description of Artificial Sequence: Synthetic oligonucleotide
  source 1..21: mol_type = other DNA
ctcaccaccagcggcagccaa

SEQ ID NO: 21741 - DNA, 21 bp, synthetic construct
  misc_feature 1..21: note = Description of Artificial Sequence: Synthetic oligonucleotide
  source 1..21: mol_type = other DNA
ctcagcaccagccaacccagc

SEQ ID NO: 21742 - DNA, 21 bp, synthetic construct
  misc_feature 1..21: note = Description of Artificial Sequence: Synthetic oligonucleotide
  source 1..21: mol_type = other DNA
ctccaagacagaaaagccagc

SEQ ID NO: 21743 - DNA, 21 bp, synthetic construct
  misc_feature 1..21: note = Description of Artificial Sequence: Synthetic oligonucleotide
  source 1..21: mol_type = other DNA
ctcgccaacccccccgccggc

SEQ ID NO: 21744 - DNA, 21 bp, synthetic construct
  misc_feature 1..21: note = Description of Artificial Sequence: Synthetic oligonucleotide
  source 1..21: mol_type = other DNA
gaaggccccagcggcacccac

SEQ ID NO: 21745 - DNA, 21 bp, synthetic construct
  misc_feature 1..21: note = Description of Artificial Sequence: Synthetic oligonucleotide
  source 1..21: mol_type = other DNA
gaaggcggccaaagcagagtc

SEQ ID NO: 21746 - DNA, 21 bp, synthetic construct
  misc_feature 1..21: note = Description of Artificial Sequence: Synthetic oligonucleotide
  source 1..21: mol_type = other DNA
gacaccacccccagaagcagc

SEQ ID NO: 21747 - DNA, 21 bp, synthetic construct
  misc_feature 1..21: note = Description of Artificial Sequence: Synthetic oligonucleotide
  source 1..21: mol_type = other DNA
gacggcacccaagcccccgtc

SEQ ID NO: 21748 - DNA, 21 bp, synthetic construct
  misc_feature 1..21: note = Description of Artificial Sequence: Synthetic oligonucleotide
  source 1..21: mol_type = other DNA
gacggcagaaaccacagcgcc

SEQ ID NO: 21749 - DNA, 21 bp, synthetic construct
  misc_feature 1..21: note = Description of Artificial Sequence: Synthetic oligonucleotide
  source 1..21: mol_type = other DNA
gacggcggcagcgccgccaga

SEQ ID NO: 21750 - DNA, 21 bp, synthetic construct
  misc_feature 1..21: note = Description of Artificial Sequence: Synthetic oligonucleotide
  source 1..21: mol_type = other DNA
gagcagggggcgagttctcat

SEQ ID NO: 21751 - DNA, 21 bp, synthetic construct
  misc_feature 1..21: note = Description of Artificial Sequence: Synthetic oligonucleotide
  source 1..21: mol_type = other DNA
gatacggctcctagtaatcat

SEQ ID NO: 21752 - DNA, 21 bp, synthetic construct
  misc_feature 1..21: note = Description of Artificial Sequence: Synthetic oligonucleotide
  source 1..21: mol_type = other DNA
gatcggagtgggactcctctt

SEQ ID NO: 21753 - DNA, 21 bp, synthetic construct
  misc_feature 1..21: note = Description of Artificial Sequence: Synthetic oligonucleotide
  source 1..21: mol_type = other DNA
gccaaaagcaacggcagcaga

SEQ ID NO: 21754 - DNA, 21 bp, synthetic construct
  misc_feature 1..21: note = Description of Artificial Sequence: Synthetic oligonucleotide
  source 1..21: mol_type = other DNA
gccgacgccagaaacgccggc

SEQ ID NO: 21755 - DNA, 21 bp, synthetic construct
  misc_feature 1..21: note = Description of Artificial Sequence: Synthetic oligonucleotide
  source 1..21: mol_type = other DNA
gctcctactgataatcggtct

SEQ ID NO: 21756 - DNA, 21 bp, synthetic construct
  misc_feature 1..21: note = Description of Artificial Sequence: Synthetic oligonucleotide
  source 1..21: mol_type = other DNA
gctgtggagtctcggaatgtg

SEQ ID NO: 21757 - DNA, 21 bp, synthetic construct
  misc_feature 1..21: note = Description of Artificial Sequence: Synthetic oligonucleotide
  source 1..21: mol_type = other DNA
ggcagcaccggccaaggcaga

SEQ ID NO: 21758 - DNA, 21 bp, synthetic construct
  misc_feature 1..21: note = Description of Artificial Sequence: Synthetic oligonucleotide
  source 1..21: mol_type = other DNA
ggcagcgaaaacagccccaga

SEQ ID NO: 21759 - DNA, 21 bp, synthetic construct
  misc_feature 1..21: note = Description of Artificial Sequence: Synthetic oligonucleotide
  source 1..21: mol_type = other DNA
ggccacgacagagtcgccagc

SEQ ID NO: 21760 - DNA, 21 bp, synthetic construct
  misc_feature 1..21: note = Description of Artificial Sequence: Synthetic oligonucleotide
  source 1..21: mol_type = other DNA
ggcctcggcgaacccagagcc

SEQ ID NO: 21761 - DNA, 21 bp, synthetic construct
  misc_feature 1..21: note = Description of Artificial Sequence: Synthetic oligonucleotide
  source 1..21: mol_type = other DNA
gggatggctcaggctgggggt

SEQ ID NO: 21762 - DNA, 21 bp, synthetic construct
  misc_feature 1..21: note = Description of Artificial Sequence: Synthetic oligonucleotide
  source 1..21: mol_type = other DNA
gggcctgagagggcggcgttg

SEQ ID NO: 21763 - DNA, 21 bp, synthetic construct
  misc_feature 1..21: note = Description of Artificial Sequence: Synthetic oligonucleotide
  source 1..21: mol_type = other DNA
gggctgggggggaaggttaat

SEQ ID NO: 21764 - DNA, 21 bp, synthetic construct
  misc_feature 1..21: note = Description of Artificial Sequence: Synthetic oligonucleotide
  source 1..21: mol_type = other DNA
ggggcgactacgcagagtact

SEQ ID NO: 21765 - DNA, 21 bp, synthetic construct
  misc_feature 1..21: note = Description of Artificial Sequence: Synthetic oligonucleotide
  source 1..21: mol_type = other DNA
ggggtgggtggttctacgagt

SEQ ID NO: 21766 - DNA, 21 bp, synthetic construct
  misc_feature 1..21: note = Description of Artificial Sequence: Synthetic oligonucleotide
  source 1..21: mol_type = other DNA
ggtcagaattcggggatgact

SEQ ID NO: 21767 - DNA, 21 bp, synthetic construct
  misc_feature 1..21: note = Description of Artificial Sequence: Synthetic oligonucleotide
  source 1..21: mol_type = other DNA
ggtccgtctcagtctgggggg

SEQ ID NO: 21768 - DNA, 21 bp, synthetic construct
  misc_feature 1..21: note = Description of Artificial Sequence: Synthetic oligonucleotide
  source 1..21: mol_type = other DNA
gtcagcaccaacaaaaccccc

SEQ ID NO: 21769 - DNA, 21 bp, synthetic construct
  misc_feature 1..21: note = Description of Artificial Sequence: Synthetic oligonucleotide
  source 1..21: mol_type = other DNA
gtcagcgaaagcagacccggc

SEQ ID NO: 21770 - DNA, 21 bp, synthetic construct
  misc_feature 1..21: note = Description of Artificial Sequence: Synthetic oligonucleotide
  source 1..21: mol_type = other DNA
gtcgccaaagccagcaacacc

SEQ ID NO: 21771 - DNA, 21 bp, synthetic construct
  misc_feature 1..21: note = Description of Artificial Sequence: Synthetic oligonucleotide
  source 1..21: mol_type = other DNA
gtcgccagcgacagcagcaaa

SEQ ID NO: 21772 - DNA, 21 bp, synthetic construct
  misc_feature 1..21: note = Description of Artificial Sequence: Synthetic oligonucleotide
  source 1..21: mol_type = other DNA
gtcggcagcgccaccgtcatc

SEQ ID NO: 21773 - DNA, 21 bp, synthetic construct
  misc_feature 1..21: note = Description of Artificial Sequence: Synthetic oligonucleotide
  source 1..21: mol_type = other DNA
tcgcagtctcctcaggagagg

SEQ ID NO: 21774 - DNA, 21 bp, synthetic construct
  misc_feature 1..21: note = Description of Artificial Sequence: Synthetic oligonucleotide
  source 1..21: mol_type = other DNA
tcggggccgacgaatcgtgag

SEQ ID NO: 21775 - DNA, 21 bp, synthetic construct
  misc_feature 1..21: note = Description of Artificial Sequence: Synthetic oligonucleotide
  source 1..21: mol_type = other DNA
tcgggtgttgagcatactaat

SEQ ID NO: 21776 - DNA, 21 bp, synthetic construct
  misc_feature 1..21: note = Description of Artificial Sequence: Synthetic oligonucleotide
  source 1..21: mol_type = other DNA
ttcggcgccaccgcccccggc

SEQ ID NO: 21777 - DNA, 21 bp, synthetic construct
  misc_feature 1..21: note = Description of Artificial Sequence: Synthetic oligonucleotide
  source 1..21: mol_type = other DNA
agcgtcaccagcggcaccggc

SEQ ID NO: 21778 - DNA, 21 bp, synthetic construct
  misc_feature 1..21: note = Description of Artificial Sequence: Synthetic oligonucleotide
  source 1..21: mol_type = other DNA
actaatggttctactatgtcg

SEQ ID NO: 21779 - DNA, 21 bp, synthetic construct
  misc_feature 1..21: note = Description of Artificial Sequence: Synthetic oligonucleotide
  source 1..21: mol_type = other DNA
ggcagcctcagcaacagcggc

SEQ ID NO: 21780 - DNA, 21 bp, synthetic construct
  misc_feature 1..21: note = Description of Artificial Sequence: Synthetic oligonucleotide
  source 1..21: mol_type = other DNA
cgtaatcagtcgccgtctatt

SEQ ID NO: 21781 - DNA, 21 bp, synthetic construct
  misc_feature 1..21: note = Description of Artificial Sequence: Synthetic oligonucleotide
  source 1..21: mol_type = other DNA
accggcaccaacaaccccacc

SEQ ID NO: 21782 - DNA, 21 bp, synthetic construct
  misc_feature 1..21: note = Description of Artificial Sequence: Synthetic oligonucleotide
  source 1..21: mol_type = other DNA
acgagtgctcagcctacgacg

SEQ ID NO: 21783 - DNA, 21 bp, synthetic construct
  misc_feature 1..21: note = Description of Artificial Sequence: Synthetic oligonucleotide
  source 1..21: mol_type = other DNA
ctcaccaccgccaaagacccc

SEQ ID NO: 21784 - DNA, 21 bp, synthetic construct
  misc_feature 1..21: note = Description of Artificial Sequence: Synthetic oligonucleotide
  source 1..21: mol_type = other DNA
agcaccggcaccaccacccaa

SEQ ID NO: 21785 - DNA, 21 bp, synthetic construct
  misc_feature 1..21: note = Description of Artificial Sequence: Synthetic oligonucleotide
  source 1..21: mol_type = other DNA
agaaacggcaccagcaccaac

SEQ ID NO: 21786 - DNA, 21 bp, synthetic construct
  misc_feature 1..21: note = Description of Artificial Sequence: Synthetic oligonucleotide
  source 1..21: mol_type = other DNA
gaccaaatcagaagcacccac

SEQ ID NO: 21787 - DNA, 21 bp, synthetic construct
  misc_feature 1..21: note = Description of Artificial Sequence: Synthetic oligonucleotide
  source 1..21: mol_type = other DNA
gacgacggcaaacccggcacc

SEQ ID NO: 21788 - DNA, 21 bp, synthetic construct
  misc_feature 1..21: note = Description of Artificial Sequence: Synthetic oligonucleotide
  source 1..21: mol_type = other DNA
gtcgccagcaacagcagcgtc

SEQ ID NO: 21789 - DNA, 21 bp, synthetic construct
  misc_feature 1..21: note = Description of Artificial Sequence: Synthetic oligonucleotide
  source 1..21: mol_type = other DNA
ctcaccgaacccaaactcatc

SEQ ID NO: 21790 - DNA, 21 bp, synthetic construct
  misc_feature 1..21: note = Description of Artificial Sequence: Synthetic oligonucleotide
  source 1..21: mol_type = other DNA
tcgccttcgaataataaggct

SEQ ID NO: 21791 - DNA, 21 bp, synthetic construct
  misc_feature 1..21: note = Description of Artificial Sequence: Synthetic oligonucleotide
  source 1..21: mol_type = other DNA
gacgccaacggcaaaagcagc

SEQ ID NO: 21792 - DNA, 21 bp, synthetic construct
  misc_feature 1..21: note = Description of Artificial Sequence: Synthetic oligonucleotide
  source 1..21: mol_type = other DNA
agccacaacgacaaacacgtc

SEQ ID NO: 21793 - DNA, 21 bp, synthetic construct
  misc_feature 1..21: note = Description of Artificial Sequence: Synthetic oligonucleotide
  source 1..21: mol_type = other DNA
agcagagtcaccgtcaacgaa

SEQ ID NO: 21794 - DNA, 21 bp, synthetic construct
  misc_feature 1..21: note = Description of Artificial Sequence: Synthetic oligonucleotide
  source 1..21: mol_type = other DNA
aggactacttcggggcctact

SEQ ID NO: 21795 - DNA, 21 bp, synthetic construct
  misc_feature 1..21: note = Description of Artificial Sequence: Synthetic oligonucleotide
  source 1..21: mol_type = other DNA
gacaacggcaaaaaagtcgtc

SEQ ID NO: 21796 - DNA, 21 bp, synthetic construct
  misc_feature 1..21: note = Description of Artificial Sequence: Synthetic oligonucleotide
  source 1..21: mol_type = other DNA
tcgaataatggtgcgatggct

SEQ ID NO: 21797 - DNA, 21 bp, synthetic construct
  misc_feature 1..21: note = Description of Artificial Sequence: Synthetic oligonucleotide
  source 1..21: mol_type = other DNA
accacccacaccgccgccaaa

SEQ ID NO: 21798 - DNA, 21 bp, synthetic construct
  misc_feature 1..21: note = Description of Artificial Sequence: Synthetic oligonucleotide
  source 1..21: mol_type = other DNA
atgaacagcagcgccagcacc

SEQ ID NO: 21799 - DNA, 21 bp, synthetic construct
  misc_feature 1..21: note = Description of Artificial Sequence: Synthetic oligonucleotide
  source 1..21: mol_type = other DNA
atgagcaccgacaaaatcacc

SEQ ID NO: 21800 - DNA, 21 bp, synthetic construct
  misc_feature 1..21: note = Description of Artificial Sequence: Synthetic oligonucleotide
  source 1..21: mol_type = other DNA
atgggtgttaatgggactagt

SEQ ID NO: 21801 - DNA, 21 bp, synthetic construct
  misc_feature 1..21: note = Description of Artificial Sequence: Synthetic oligonucleotide
  source 1..21: mol_type = other DNA
gattctaattcgaagatggtt

SEQ ID NO: 21802 - DNA, 21 bp, synthetic construct
  misc_feature 1..21: note = Description of Artificial Sequence: Synthetic oligonucleotide
  source 1..21: mol_type = other DNA
tcgactggtggtgataggtcc

SEQ ID NO: 21803 - DNA, 21 bp, synthetic construct
  misc_feature 1..21: note = Description of Artificial Sequence: Synthetic oligonucleotide
  source 1..21: mol_type = other DNA
ctcaaaaacggcaacaccaac

SEQ ID NO: 21804 - DNA, 21 bp, synthetic construct
  misc_feature 1..21: note = Description of Artificial Sequence: Synthetic oligonucleotide
  source 1..21: mol_type = other DNA
ggcaccagcaaccacgacaaa

SEQ ID NO: 21805 - DNA, 21 bp, synthetic construct
  misc_feature 1..21: note = Description of Artificial Sequence: Synthetic oligonucleotide
  source 1..21: mol_type = other DNA
aaagacggcagcaccagcctc

SEQ ID NO: 21806 - DNA, 21 bp, synthetic construct
  misc_feature 1..21: note = Description of Artificial Sequence: Synthetic oligonucleotide
  source 1..21: mol_type = other DNA
aaaggcgtcagccaaaccagc

SEQ ID NO: 21807 - DNA, 21 bp, synthetic construct
  misc_feature 1..21: note = Description of Artificial Sequence: Synthetic oligonucleotide
  source 1..21: mol_type = other DNA
tcttctaatcgtgatactatg

SEQ ID NO: 21808 - DNA, 21 bp, synthetic construct
  misc_feature 1..21: note = Description of Artificial Sequence: Synthetic oligonucleotide
  source 1..21: mol_type = other DNA
accaaaggcagcgaaccccac

SEQ ID NO: 21809 - DNA, 21 bp, synthetic construct
  misc_feature 1..21: note = Description of Artificial Sequence: Synthetic oligonucleotide
  source 1..21: mol_type = other DNA
agcacccaaaaaggcgccatg

SEQ ID NO: 21810 - DNA, 21 bp, synthetic construct
  misc_feature 1..21: note = Description of Artificial Sequence: Synthetic oligonucleotide
  source 1..21: mol_type = other DNA
agcggcatccccgccggcgtc

SEQ ID NO: 21811 - DNA, 21 bp, synthetic construct
  misc_feature 1..21: note = Description of Artificial Sequence: Synthetic oligonucleotide
  source 1..21: mol_type = other DNA
agcggccaccccagcaacctc

SEQ ID NO: 21812 - DNA, 21 bp, synthetic construct
  misc_feature 1..21: note = Description of Artificial Sequence: Synthetic oligonucleotide
  source 1..21: mol_type = other DNA
gacaacaacaacagcagaggc

SEQ ID NO: 21813 - DNA, 21 bp, synthetic construct
  misc_feature 1..21: note = Description of Artificial Sequence: Synthetic oligonucleotide
  source 1..21: mol_type = other DNA
gggtcttcgcaggcgagggag

SEQ ID NO: 21814 - DNA, 21 bp, synthetic construct
  misc_feature 1..21: note = Description of Artificial Sequence: Synthetic oligonucleotide
  source 1..21: mol_type = other DNA
cgtacgggtactggtactgag

SEQ ID NO: 21815 - DNA, 21 bp, synthetic construct
  misc_feature 1..21: note = Description of Artificial Sequence: Synthetic oligonucleotide
  source 1..21: mol_type = other DNA
ggcaccggcagcaaaagcgtc

SEQ ID NO: 21816 - DNA, 21 bp, synthetic construct
  misc_feature 1..21: note = Description of Artificial Sequence: Synthetic oligonucleotide
  source 1..21: mol_type = other DNA
caaaccgccaaccaaaacgcc

SEQ ID NO: 21817 - DNA, 21 bp, synthetic construct
  misc_feature 1..21: note = Description of Artificial Sequence: Synthetic oligonucleotide
  source 1..21: mol_type = other DNA
gttagtgggagtagtacgggt

SEQ ID NO: 21818 - DNA, 21 bp, synthetic construct
  misc_feature 1..21: note = Description of Artificial Sequence: Synthetic oligonucleotide
  source 1..21: mol_type = other DNA
caagacaaaagcggcagcatg

SEQ ID NO: 21819 - DNA, 21 bp, synthetic construct
  misc_feature 1..21: note = Description of Artificial Sequence: Synthetic oligonucleotide
  source 1..21: mol_type = other DNA
ggccaaggccacgaaagagcc

SEQ ID NO: 21820 - DNA, 21 bp, synthetic construct
  misc_feature 1..21: note = Description of Artificial Sequence: Synthetic oligonucleotide
  source 1..21: mol_type = other DNA
tcgaataatggtagtatttcg

SEQ ID NO: 21821 - DNA, 21 bp, synthetic construct
  misc_feature 1..21: note = Description of Artificial Sequence: Synthetic oligonucleotide
  source 1..21: mol_type = other DNA
actcctaatacgggtagttcg

SEQ ID NO: 21822 - DNA, 21 bp, synthetic construct
  misc_feature 1..21: note = Description of Artificial Sequence: Synthetic oligonucleotide
  source 1..21: mol_type = other DNA
cagaggacgaagactccggag

SEQ ID NO: 21823 - DNA, 21 bp, synthetic construct
  misc_feature 1..21: note = Description of Artificial Sequence: Synthetic oligonucleotide
  source 1..21: mol_type = other DNA
gcgggtgtttcgaatacgggt

SEQ ID NO: 21824 - DNA, 21 bp, synthetic construct
  misc_feature 1..21: note = Description of Artificial Sequence: Synthetic oligonucleotide
  source 1..21: mol_type = other DNA
ggcaccggccccgtcaccagc

SEQ ID NO: 21825 - DNA, 21 bp, synthetic construct
  misc_feature 1..21: note = Description of Artificial Sequence: Synthetic oligonucleotide
  source 1..21: mol_type = other DNA
gggggtgtggcttcgaatggt

SEQ ID NO: 21826 - DNA, 21 bp, synthetic construct
  misc_feature 1..21: note = Description of Artificial Sequence: Synthetic oligonucleotide
  source 1..21: mol_type = other DNA
tcgggtcataatagttcgact

SEQ ID NO: 21827 - DNA, 21 bp, synthetic construct
  misc_feature 1..21: note = Description of Artificial Sequence: Synthetic oligonucleotide
  source 1..21: mol_type = other DNA
gacggcaccagagcccccagc

SEQ ID NO: 21828 - DNA, 21 bp, synthetic construct
  misc_feature 1..21: note = Description of Artificial Sequence: Synthetic oligonucleotide
  source 1..21: mol_type = other DNA
ttgcctagtgatcctaggtcg

SEQ ID NO: 21829 - DNA, 21 bp, synthetic construct
  misc_feature 1..21: note = Description of Artificial Sequence: Synthetic oligonucleotide
  source 1..21: mol_type = other DNA
cagaatacttcgaaggtgttg

SEQ ID NO: 21830 - DNA, 21 bp, synthetic construct
  misc_feature 1..21: note = Description of Artificial Sequence: Synthetic oligonucleotide
  source 1..21: mol_type = other DNA
ggcggcagcagagaccaaacc

SEQ ID NO: 21831 - DNA, 21 bp, synthetic construct
  misc_feature 1..21: note = Description of Artificial Sequence: Synthetic oligonucleotide
  source 1..21: mol_type = other DNA
atgcccagcaaaggcagccaa

SEQ ID NO: 21832 - DNA, 21 bp, synthetic construct
  misc_feature 1..21: note = Description of Artificial Sequence: Synthetic oligonucleotide
  source 1..21: mol_type = other DNA
aatgttgggtctacttcgaat

SEQ ID NO: 21833 - DNA, 21 bp, synthetic construct
  misc_feature 1..21: note = Description of Artificial Sequence: Synthetic oligonucleotide
  source 1..21: mol_type = other DNA
aattcgtcggggcaggttcat

SEQ ID NO: 21834 - DNA, 21 bp, synthetic construct
  misc_feature 1..21: note = Description of Artificial Sequence: Synthetic oligonucleotide
  source 1..21: mol_type = other DNA
acccaaaaccacgaaagcaaa

SEQ ID NO: 21835 - DNA, 21 bp, synthetic construct
  misc_feature 1..21: note = Description of Artificial Sequence: Synthetic oligonucleotide
  source 1..21: mol_type = other DNA
caggttacggggactttgggg

SEQ ID NO: 21836 - DNA, 21 bp, synthetic construct
  misc_feature 1..21: note = Description of Artificial Sequence: Synthetic oligonucleotide
  source 1..21: mol_type = other DNA
gcgatttctggtaatagtaag

SEQ ID NO: 21837 - DNA, 21 bp, synthetic construct
  misc_feature 1..21: note = Description of Artificial Sequence: Synthetic oligonucleotide
  source 1..21: mol_type = other DNA
accatggccaaaagcggcggc

SEQ ID NO: 21838 - DNA, 21 bp, synthetic construct
  misc_feature 1..21: note = Description of Artificial Sequence: Synthetic oligonucleotide
  source 1..21: mol_type = other DNA
agcaaagtcgacaaacccatg

SEQ ID NO: 21839 - DNA, 21 bp, synthetic construct
  misc_feature 1..21: note = Description of Artificial Sequence: Synthetic oligonucleotide
  source 1..21: mol_type = other DNA
aacagcagccccagcctcacc

SEQ ID NO: 21840 - DNA, 21 bp, synthetic construct
  misc_feature 1..21: note = Description of Artificial Sequence: Synthetic oligonucleotide
  source 1..21: mol_type = other DNA
agcctccaaagcgaaagcaaa

SEQ ID NO: 21841 - DNA, 21 bp, synthetic construct
  misc_feature 1..21: note = Description of Artificial Sequence: Synthetic oligonucleotide
  source 1..21: mol_type = other DNA
tcgggggcggcgactgcttct

SEQ ID NO: 21842 - DNA, 21 bp, synthetic construct
  misc_feature 1..21: note = Description of Artificial Sequence: Synthetic oligonucleotide
  source 1..21: mol_type = other DNA
aatcagaataaggagactctg

SEQ ID NO: 21843 - DNA, 21 bp, synthetic construct
  misc_feature 1..21: note = Description of Artificial Sequence: Synthetic oligonucleotide
  source 1..21: mol_type = other DNA
agttctacgggtgcgcctggt

SEQ ID NO: 21844 - DNA, 21 bp, synthetic construct
  misc_feature 1..21: note = Description of Artificial Sequence: Synthetic oligonucleotide
  source 1..21: mol_type = other DNA
cacggcgccaccggcggcgcc

SEQ ID NO: 21845 - DNA, 21 bp, synthetic construct
  misc_feature 1..21: note = Description of Artificial Sequence: Synthetic oligonucleotide
  source 1..21: mol_type = other DNA
gaaacccccggcgccggcaga

SEQ ID NO: 21846 - DNA, 21 bp, synthetic construct
  misc_feature 1..21: note = Description of Artificial Sequence: Synthetic oligonucleotide
  source 1..21: mol_type = other DNA
gggagtcatgatatgaagaag

SEQ ID NO: 21847 - DNA, 21 bp, synthetic construct
  misc_feature 1..21: note = Description of Artificial Sequence: Synthetic oligonucleotide
  source 1..21: mol_type = other DNA
gttattagtagtgatccgaag

SEQ ID NO: 21848 - DNA, 21 bp, synthetic construct
  misc_feature 1..21: note = Description of Artificial Sequence: Synthetic oligonucleotide
  source 1..21: mol_type = other DNA
tctcctggggttactcctggt

SEQ ID NO: 21849 - DNA, 21 bp, synthetic construct
  misc_feature 1..21: note = Description of Artificial Sequence: Synthetic oligonucleotide
  source 1..21: mol_type = other DNA
cacggcagcagccccaccacc

SEQ ID NO: 21850 - DNA, 21 bp, synthetic construct
  misc_feature 1..21: note = Description of Artificial Sequence: Synthetic oligonucleotide
  source 1..21: mol_type = other DNA
gataagaatactaagtcgagt

SEQ ID NO: 21851 - DNA, 21 bp, synthetic construct
  misc_feature 1..21: note = Description of Artificial Sequence: Synthetic oligonucleotide
  source 1..21: mol_type = other DNA
aacggcagcaaaaccagcctc

SEQ ID NO: 21852 - DNA, 21 bp, synthetic construct
  misc_feature 1..21: note = Description of Artificial Sequence: Synthetic oligonucleotide
  source 1..21: mol_type = other DNA
actggtgcgccttctaatagt

SEQ ID NO: 21853 - DNA, 21 bp, synthetic construct
  misc_feature 1..21: note = Description of Artificial Sequence: Synthetic oligonucleotide
  source 1..21: mol_type = other DNA
gcccccagcagcggcctcggc

SEQ ID NO: 21854 - DNA, 21 bp, synthetic construct
  misc_feature 1..21: note = Description of Artificial Sequence: Synthetic oligonucleotide
  source 1..21: mol_type = other DNA
ggccaaaccagcaccccctac

SEQ ID NO: 21855 - DNA, 21 bp, synthetic construct
  misc_feature 1..21: note = Description of Artificial Sequence: Synthetic oligonucleotide
  source 1..21: mol_type = other DNA
cattcgagtactgttagtcag

SEQ ID NO: 21856 - DNA, 21 bp, synthetic construct
  misc_feature 1..21: note = Description of Artificial Sequence: Synthetic oligonucleotide
  source 1..21: mol_type = other DNA
caccaaggcaacggcagccac

SEQ ID NO: 21857 - DNA, 21 bp, synthetic construct
  misc_feature 1..21: note = Description of Artificial Sequence: Synthetic oligonucleotide
  source 1..21: mol_type = other DNA
ctcggcctcggcaaaaccgaa

SEQ ID NO: 21858 - DNA, 21 bp, synthetic construct
  misc_feature 1..21: note = Description of Artificial Sequence: Synthetic oligonucleotide
  source 1..21: mol_type = other DNA
agtggtctggcgactcctacg

SEQ ID NO: 21859 - DNA, 21 bp, synthetic construct
  misc_feature 1..21: note = Description of Artificial Sequence: Synthetic oligonucleotide
  source 1..21: mol_type = other DNA
acccccgacagcaccccccaa

SEQ ID NO: 21860 - DNA, 21 bp, synthetic construct
  misc_feature 1..21: note = Description of Artificial Sequence: Synthetic oligonucleotide
  source 1..21: mol_type = other DNA
accctcagccaaaaccccacc

SEQ ID NO: 21861 - DNA, 21 bp, synthetic construct
  misc_feature 1..21: note = Description of Artificial Sequence: Synthetic oligonucleotide
  source 1..21: mol_type = other DNA
ggcaaaggccaaacccccagc

SEQ ID NO: 21862 - DNA, 21 bp, synthetic construct
  misc_feature 1..21: note = Description of Artificial Sequence: Synthetic oligonucleotide
  source 1..21: mol_type = other DNA
ggcagcgtccaagccaacaaa

SEQ ID NO: 21863 - DNA, 21 bp, synthetic construct
  misc_feature 1..21: note = Description of Artificial Sequence: Synthetic oligonucleotide
  source 1..21: mol_type = other DNA
ggtaatagtgatcataagaat

SEQ ID NO: 21864 - DNA, 21 bp, synthetic construct
  misc_feature 1..21: note = Description of Artificial Sequence: Synthetic oligonucleotide
  source 1..21: mol_type = other DNA
accccccaaagcacccacgcc

SEQ ID NO: 21865 - DNA, 21 bp, synthetic construct
  misc_feature 1..21: note = Description of Artificial Sequence: Synthetic oligonucleotide
  source 1..21: mol_type = other DNA
cacagcggcaaaggcagcagc

SEQ ID NO: 21866 - DNA, 21 bp, synthetic construct
  misc_feature 1..21: note = Description of Artificial Sequence: Synthetic oligonucleotide
  source 1..21: mol_type = other DNA
ctgtctcagaagtcggctaat

SEQ ID NO: 21867 - DNA, 21 bp, synthetic construct
  misc_feature 1..21: note = Description of Artificial Sequence: Synthetic oligonucleotide
  source 1..21: mol_type = other DNA
gccgccggcggcaccagcaga

SEQ ID NO: 21868 - DNA, 21 bp, synthetic construct
  misc_feature 1..21: note = Description of Artificial Sequence: Synthetic oligonucleotide
  source 1..21: mol_type = other DNA
tcgaggggtgctactacgtct

SEQ ID NO: 21869 - DNA, 21 bp, synthetic construct
  misc_feature 1..21: note = Description of Artificial Sequence: Synthetic oligonucleotide
  source 1..21: mol_type = other DNA
ggcagcaacgcccaaaccgtc

SEQ ID NO: 21870 - DNA, 21 bp, synthetic construct
  misc_feature 1..21: note = Description of Artificial Sequence: Synthetic oligonucleotide
  source 1..21: mol_type = other DNA
caaaacagcaccaccagcgcc

SEQ ID NO: 21871 - DNA, 21 bp, synthetic construct
  misc_feature 1..21: note = Description of Artificial Sequence: Synthetic oligonucleotide
  source 1..21: mol_type = other DNA
ctcggcagcggcaacagccac

SEQ ID NO: 21872 - DNA, 21 bp, synthetic construct
  misc_feature 1..21: note = Description of Artificial Sequence: Synthetic oligonucleotide
  source 1..21: mol_type = other DNA
gacggcggcaacgccggcaga

SEQ ID NO: 21873 - DNA, 21 bp, synthetic construct
  misc_feature 1..21: note = Description of Artificial Sequence: Synthetic oligonucleotide
  source 1..21: mol_type = other DNA
gataatgataagactaattct

SEQ ID NO: 21874 - DNA, 21 bp, synthetic construct
  misc_feature 1..21: note = Description of Artificial Sequence: Synthetic oligonucleotide
  source 1..21: mol_type = other DNA
aacagcgccaccagcgtcagc

SEQ ID NO: 21875 - DNA, 21 bp, synthetic construct
  misc_feature 1..21: note = Description of Artificial Sequence: Synthetic oligonucleotide
  source 1..21: mol_type = other DNA
accgacagccaacaaggcaga

SEQ ID NO: 21876 - DNA, 21 bp, synthetic construct
  misc_feature 1..21: note = Description of Artificial Sequence: Synthetic oligonucleotide
  source 1..21: mol_type = other DNA
aacatgggcgccagcagcagc

SEQ ID NO: 21877 - DNA, 21 bp, synthetic construct
  misc_feature 1..21: note = Description of Artificial Sequence: Synthetic oligonucleotide
  source 1..21: mol_type = other DNA
atgaatactcctaaggatggt

SEQ ID NO: 21878 - DNA, 21 bp, synthetic construct
  misc_feature 1..21: note = Description of Artificial Sequence: Synthetic oligonucleotide
  source 1..21: mol_type = other DNA
caactcagcaacagcagcgcc

SEQ ID NO: 21879 - DNA, 21 bp, synthetic construct
  misc_feature 1..21: note = Description of Artificial Sequence: Synthetic oligonucleotide
  source 1..21: mol_type = other DNA
gttacttctaattctagtagt

SEQ ID NO: 21880 - DNA, 21 bp, synthetic construct
  misc_feature 1..21: note = Description of Artificial Sequence: Synthetic oligonucleotide
  source 1..21: mol_type = other DNA
agtcagacgacgcctagtctg

SEQ ID NO: 21881 - DNA, 21 bp, synthetic construct
  misc_feature 1..21: note = Description of Artificial Sequence: Synthetic oligonucleotide
  source 1..21: mol_type = other DNA
actgggaatgctcctagtcat

SEQ ID NO: 21882 - DNA, 21 bp, synthetic construct
  misc_feature 1..21: note = Description of Artificial Sequence: Synthetic oligonucleotide
  source 1..21: mol_type = other DNA
actactgctgataggaagggt

SEQ ID NO: 21883 - DNA, 21 bp, synthetic construct
  misc_feature 1..21: note = Description of Artificial Sequence: Synthetic oligonucleotide
  source 1..21: mol_type = other DNA
accggcggcagcggcagccac

SEQ ID NO: 21884 - DNA, 21 bp, synthetic construct
  misc_feature 1..21: note = Description of Artificial Sequence: Synthetic oligonucleotide
  source 1..21: mol_type = other DNA
ctcaaaagcgcccaagacgcc

SEQ ID NO: 21885 - DNA, 21 bp, synthetic construct
  misc_feature 1..21: note = Description of Artificial Sequence: Synthetic oligonucleotide
  source 1..21: mol_type = other DNA
ctcgtcggcaccagcagcgcc

SEQ ID NO: 21886 - DNA, 21 bp, synthetic construct
  misc_feature 1..21: note = Description of Artificial Sequence: Synthetic oligonucleotide
  source 1..21: mol_type = other DNA
gatgatcttagtaagccgagg

SEQ ID NO: 21887 - DNA, 21 bp, synthetic construct
  misc_feature 1..21: note = Description of Artificial Sequence: Synthetic oligonucleotide
  source 1..21: mol_type = other DNA
gccagcgaccaagccagcaaa

SEQ ID NO: 21888 - DNA, 21 bp, synthetic construct
  misc_feature 1..21: note = Description of Artificial Sequence: Synthetic oligonucleotide
  source 1..21: mol_type = other DNA
gcccacagcagcaacagcgtc

SEQ ID NO: 21889 - DNA, 21 bp, synthetic construct
  misc_feature 1..21: note = Description of Artificial Sequence: Synthetic oligonucleotide
  source 1..21: mol_type = other DNA
tacaacgccagcggcatccaa

SEQ ID NO: 21890 - DNA, 21 bp, synthetic construct
  misc_feature 1..21: note = Description of Artificial Sequence: Synthetic oligonucleotide
  source 1..21: mol_type = other DNA
gacaacggcaaaagcaccgtc

SEQ ID NO: 21891 - DNA, 21 bp, synthetic construct
  misc_feature 1..21: note = Description of Artificial Sequence: Synthetic oligonucleotide
  source 1..21: mol_type = other DNA
tcgactcagtcgaatcctccg

SEQ ID NO: 21892 - DNA, 21 bp, synthetic construct
  misc_feature 1..21: note = Description of Artificial Sequence: Synthetic oligonucleotide
  source 1..21: mol_type = other DNA
agtttggggactccgactcgt

SEQ ID NO: 21893 - DNA, 21 bp, synthetic construct
  misc_feature 1..21: note = Description of Artificial Sequence: Synthetic oligonucleotide
  source 1..21: mol_type = other DNA
cgtaatggttctccttcggtt

SEQ ID NO: 21894 - DNA, 21 bp, synthetic construct
  misc_feature 1..21: note = Description of Artificial Sequence: Synthetic oligonucleotide
  source 1..21: mol_type = other DNA
ggttcggatggttctcgtggt

SEQ ID NO: 21895 - DNA, 21 bp, synthetic construct
  misc_feature 1..21: note = Description of Artificial Sequence: Synthetic oligonucleotide
  source 1..21: mol_type = other DNA
ctcggcaaaggcgaaaacaac

SEQ ID NO: 21896 - DNA, 21 bp, synthetic construct
  misc_feature 1..21: note = Description of Artificial Sequence: Synthetic oligonucleotide
  source 1..21: mol_type = other DNA
gacgtcaacagcagcaaagtc

SEQ ID NO: 21897 - DNA, 21 bp, synthetic construct
  misc_feature 1..21: note = Description of Artificial Sequence: Synthetic oligonucleotide
  source 1..21: mol_type = other DNA
gccagcacccacaccaacaac

SEQ ID NO: 21898 - DNA, 21 bp, synthetic construct
  misc_feature 1..21: note = Description of Artificial Sequence: Synthetic oligonucleotide
  source 1..21: mol_type = other DNA
gaaagcggcagcaccgccacc

SEQ ID NO: 21899 - DNA, 21 bp, synthetic construct
  misc_feature 1..21: note = Description of Artificial Sequence: Synthetic oligonucleotide
  source 1..21: mol_type = other DNA
agccccagcaacaacgccgtc

SEQ ID NO: 21900 - DNA, 21 bp, synthetic construct
  misc_feature 1..21: note = Description of Artificial Sequence: Synthetic oligonucleotide
  source 1..21: mol_type = other DNA
aattcgagtgatgcgaaggcg

SEQ ID NO: 21901 - DNA, 21 bp, synthetic construct
  misc_feature 1..21: note = Description of Artificial Sequence: Synthetic oligonucleotide
  source 1..21: mol_type = other DNA
agccacaccagcagccccgcc

SEQ ID NO: 21902 - DNA, 21 bp, synthetic construct
  misc_feature 1..21: note = Description of Artificial Sequence: Synthetic oligonucleotide
  source 1..21: mol_type = other DNA
gaaaccagcaaaaccagagcc

SEQ ID NO: 21903 - DNA, 21 bp, synthetic construct
  misc_feature 1..21: note = Description of Artificial Sequence: Synthetic oligonucleotide
  source 1..21: mol_type = other DNA
gtcgccggcgccaccaccagc

SEQ ID NO: 21904 - DNA, 21 bp, synthetic construct
  misc_feature 1..21: note = Description of Artificial Sequence: Synthetic oligonucleotide
  source 1..21: mol_type = other DNA
tctcatcaggggaataatact

SEQ ID NO: 21905 - DNA, 21 bp, synthetic construct
  misc_feature 1..21: note = Description of Artificial Sequence: Synthetic oligonucleotide
  source 1..21: mol_type = other DNA
actgctacttcttcgactgag

SEQ ID NO: 21906 - DNA, 21 bp, synthetic construct
  misc_feature 1..21: note = Description of Artificial Sequence: Synthetic oligonucleotide
  source 1..21: mol_type = other DNA
cacacccaaaacaccaacagc

SEQ ID NO: 21907 - DNA, 21 bp, synthetic construct
  misc_feature 1..21: note = Description of Artificial Sequence: Synthetic oligonucleotide
  source 1..21: mol_type = other DNA
tctgctgagcgtagtcctaat

SEQ ID NO: 21908 - DNA, 21 bp, synthetic construct
  misc_feature 1..21: note = Description of Artificial Sequence: Synthetic oligonucleotide
  source 1..21: mol_type = other DNA
agcaacagcagcggcctcacc

SEQ ID NO: 21909 - DNA, 21 bp, synthetic construct
  misc_feature 1..21: note = Description of Artificial Sequence: Synthetic oligonucleotide
  source 1..21: mol_type = other DNA
atgaatcagaaggagtcttcg

SEQ ID NO: 21910 - DNA, 21 bp, synthetic construct
  misc_feature 1..21: note = Description of Artificial Sequence: Synthetic oligonucleotide
  source 1..21: mol_type = other DNA
agcaacggcacccccatggtc

SEQ ID NO: 21911 - DNA, 21 bp, synthetic construct
  misc_feature 1..21: note = Description of Artificial Sequence: Synthetic oligonucleotide
  source 1..21: mol_type = other DNA
cagcagcataaggctagtgtt

SEQ ID NO: 21912 - DNA, 21 bp, synthetic construct
  misc_feature 1..21: note = Description of Artificial Sequence: Synthetic oligonucleotide
  source 1..21: mol_type = other DNA
tctcgtaattcgaaggatctt

SEQ ID NO: 21913 - DNA, 21 bp, synthetic construct
  misc_feature 1..21: note = Description of Artificial Sequence: Synthetic oligonucleotide
  source 1..21: mol_type = other DNA
gcttcgcagactgtgaatact

SEQ ID NO: 21914 - DNA, 21 bp, synthetic construct
  misc_feature 1..21: note = Description of Artificial Sequence: Synthetic oligonucleotide
  source 1..21: mol_type = other DNA
ctccccagagaaggcagcggc

SEQ ID NO: 21915 - DNA, 21 bp, synthetic construct
  misc_feature 1..21: note = Description of Artificial Sequence: Synthetic oligonucleotide
  source 1..21: mol_type = other DNA
gccgccagcgccagccccagc

SEQ ID NO: 21916 - DNA, 21 bp, synthetic construct
  misc_feature 1..21: note = Description of Artificial Sequence: Synthetic oligonucleotide
  source 1..21: mol_type = other DNA
ggcatcggcagcagcagcggc

SEQ ID NO: 21917 - DNA, 21 bp, synthetic construct
  misc_feature 1..21: note = Description of Artificial Sequence: Synthetic oligonucleotide
  source 1..21: mol_type = other DNA
gggcagaagggtgctcagctt

SEQ ID NO: 21918 - DNA, 21 bp, synthetic construct
  misc_feature 1..21: note = Description of Artificial Sequence: Synthetic oligonucleotide
  source 1..21: mol_type = other DNA
gtcgccaccaccaaagccagc

SEQ ID NO: 21919 - DNA, 21 bp, synthetic construct
  misc_feature 1..21: note = Description of Artificial Sequence: Synthetic oligonucleotide
  source 1..21: mol_type = other DNA
catcagtctactccttcgtct

SEQ ID NO: 21920 - DNA, 21 bp, synthetic construct
  misc_feature 1..21: note = Description of Artificial Sequence: Synthetic oligonucleotide
  source 1..21: mol_type = other DNA
agcagcagcagccaacccgtc

SEQ ID NO: 21921 - DNA, 21 bp, synthetic construct
  misc_feature 1..21: note = Description of Artificial Sequence: Synthetic oligonucleotide
  source 1..21: mol_type = other DNA
atgccttctggtcagaatctg

SEQ ID NO: 21922 - DNA, 21 bp, synthetic construct
  misc_feature 1..21: note = Description of Artificial Sequence: Synthetic oligonucleotide
  source 1..21: mol_type = other DNA
gaccccaccagaatcggcgcc

SEQ ID NO: 21923 - DNA, 21 bp, synthetic construct
  misc_feature 1..21: note = Description of Artificial Sequence: Synthetic oligonucleotide
  source 1..21: mol_type = other DNA
ggcagcggcggcaccaaccaa

SEQ ID NO: 21924 - DNA, 21 bp, synthetic construct
  misc_feature 1..21: note = Description of Artificial Sequence: Synthetic oligonucleotide
  source 1..21: mol_type = other DNA
ggccaagccggcagcaacccc

SEQ ID NO: 21925 - DNA, 21 bp, synthetic construct
  misc_feature 1..21: note = Description of Artificial Sequence: Synthetic oligonucleotide
  source 1..21: mol_type = other DNA
gtcggcagcaccagcgtcctc

SEQ ID NO: 21926 - DNA, 21 bp, synthetic construct
  misc_feature 1..21: note = Description of Artificial Sequence: Synthetic oligonucleotide
  source 1..21: mol_type = other DNA
tcggctggttcgaagactggg

SEQ ID NO: 21927 - DNA, 21 bp, synthetic construct
  misc_feature 1..21: note = Description of Artificial Sequence: Synthetic oligonucleotide
  source 1..21: mol_type = other DNA
tctgcttctacgaatcatgcg

SEQ ID NO: 21928 - DNA, 21 bp, synthetic construct
  misc_feature 1..21: note = Description of Artificial Sequence: Synthetic oligonucleotide
  source 1..21: mol_type = other DNA
agtagtactcaggctaagggg

SEQ ID NO: 21929 - DNA, 21 bp, synthetic construct
  misc_feature 1..21: note = Description of Artificial Sequence: Synthetic oligonucleotide
  source 1..21: mol_type = other DNA
accaccaaaagcgccagcacc

SEQ ID NO: 21930 - DNA, 21 bp, synthetic construct
  misc_feature 1..21: note = Description of Artificial Sequence: Synthetic oligonucleotide
  source 1..21: mol_type = other DNA
cacccccccagcaacggcacc

SEQ ID NO: 21931 - DNA, 21 bp, synthetic construct
  misc_feature 1..21: note = Description of Artificial Sequence: Synthetic oligonucleotide
  source 1..21: mol_type = other DNA
gaaggctacgacaaaaccaac

SEQ ID NO: 21932 - DNA, 21 bp, synthetic construct
  misc_feature 1..21: note = Description of Artificial Sequence: Synthetic oligonucleotide
  source 1..21: mol_type = other DNA
ggcgccggcggccaaaaccaa

SEQ ID NO: 21933 - DNA, 21 bp, synthetic construct
  misc_feature 1..21: note = Description of Artificial Sequence: Synthetic oligonucleotide
  source 1..21: mol_type = other DNA
gggcttgggggtaatgctccg

SEQ ID NO: 21934 - DNA, 21 bp, synthetic construct
  misc_feature 1..21: note = Description of Artificial Sequence: Synthetic oligonucleotide
  source 1..21: mol_type = other DNA
agccccgccacccacagcagc

SEQ ID NO: 21935 - DNA, 21 bp, synthetic construct
  misc_feature 1..21: note = Description of Artificial Sequence: Synthetic oligonucleotide
  source 1..21: mol_type = other DNA
gacagcagcgccggcagcaaa

SEQ ID NO: 21936 - DNA, 21 bp, synthetic construct
  misc_feature 1..21: note = Description of Artificial Sequence: Synthetic oligonucleotide
  source 1..21: mol_type = other DNA
ggtggttcgtcgagtactctg

SEQ ID NO: 21937 - DNA, 21 bp, synthetic construct
  misc_feature 1..21: note = Description of Artificial Sequence: Synthetic oligonucleotide
  source 1..21: mol_type = other DNA
agccccgtcgacagcaaaatg

SEQ ID NO: 21938 - DNA, 21 bp, synthetic construct
  misc_feature 1..21: note = Description of Artificial Sequence: Synthetic oligonucleotide
  source 1..21: mol_type = other DNA
gctagtacgtctcatacttct

SEQ ID NO: 21939 - DNA, 21 bp, synthetic construct
  misc_feature 1..21: note = Description of Artificial Sequence: Synthetic oligonucleotide
  source 1..21: mol_type = other DNA
ggcagcaccgtcaacatgggc

SEQ ID NO: 21940 - DNA, 21 bp, synthetic construct
  misc_feature 1..21: note = Description of Artificial Sequence: Synthetic oligonucleotide
  source 1..21: mol_type = other DNA
aaccccagcgacgccctcaaa

SEQ ID NO: 21941 - DNA, 21 bp, synthetic construct
  misc_feature 1..21: note = Description of Artificial Sequence: Synthetic oligonucleotide
  source 1..21: mol_type = other DNA
aattcgtctcagcaggctcgg

SEQ ID NO: 21942 - DNA, 21 bp, synthetic construct
  misc_feature 1..21: note = Description of Artificial Sequence: Synthetic oligonucleotide
  source 1..21: mol_type = other DNA
accagcgccaaagccgcccaa

SEQ ID NO: 21943 - DNA, 21 bp, synthetic construct
  misc_feature 1..21: note = Description of Artificial Sequence: Synthetic oligonucleotide
  source 1..21: mol_type = other DNA
agcgccgccagcgcccccctc

SEQ ID NO: 21944 - DNA, 21 bp, synthetic construct
  misc_feature 1..21: note = Description of Artificial Sequence: Synthetic oligonucleotide
  source 1..21: mol_type = other DNA
agtaatgagaagacgatgaat

SEQ ID NO: 21945 - DNA, 21 bp, synthetic construct
  misc_feature 1..21: note = Description of Artificial Sequence: Synthetic oligonucleotide
  source 1..21: mol_type = other DNA
atgcgggggaatgagggttcg

SEQ ID NO: 21946 - DNA, 21 bp, synthetic construct
  misc_feature 1..21: note = Description of Artificial Sequence: Synthetic oligonucleotide
  source 1..21: mol_type = other DNA
atggttaatgataagccgtct

SEQ ID NO: 21947 - DNA, 21 bp, synthetic construct
  misc_feature 1..21: note = Description of Artificial Sequence: Synthetic oligonucleotide
  source 1..21: mol_type = other DNA
caacaacccgaaatgaaaaga

SEQ ID NO: 21948 - DNA, 21 bp, synthetic construct
  misc_feature 1..21: note = Description of Artificial Sequence: Synthetic oligonucleotide
  source 1..21: mol_type = other DNA
gaaaccagcggcagcccccac

SEQ ID NO: 21949 - DNA, 21 bp, synthetic construct
  misc_feature 1..21: note = Description of Artificial Sequence: Synthetic oligonucleotide
  source 1..21: mol_type = other DNA
ggcaccgccaccggcagaggc

SEQ ID NO: 21950 - DNA, 21 bp, synthetic construct
  misc_feature 1..21: note = Description of Artificial Sequence: Synthetic oligonucleotide
  source 1..21: mol_type = other DNA
tcggctgggacgaagagtagt

SEQ ID NO: 21951 - DNA, 21 bp, synthetic construct
  misc_feature 1..21: note = Description of Artificial Sequence: Synthetic oligonucleotide
  source 1..21: mol_type = other DNA
caaaccgacagcagccccaga

SEQ ID NO: 21952 - DNA, 21 bp, synthetic construct
  misc_feature 1..21: note = Description of Artificial Sequence: Synthetic oligonucleotide
  source 1..21: mol_type = other DNA
aacgtcggcaccagcagcgcc

SEQ ID NO: 21953 - DNA, 21 bp, synthetic construct
  misc_feature 1..21: note = Description of Artificial Sequence: Synthetic oligonucleotide
  source 1..21: mol_type = other DNA
aaggttacgtcgtcgccggag

SEQ ID NO: 21954 - DNA, 21 bp, synthetic construct
  misc_feature 1..21: note = Description of Artificial Sequence: Synthetic oligonucleotide
  source 1..21: mol_type = other DNA
gaaagcaaacaacaacccagc

SEQ ID NO: 21955 - DNA, 21 bp, synthetic construct
  misc_feature 1..21: note = Description of Artificial Sequence: Synthetic oligonucleotide
  source 1..21: mol_type = other DNA
caaggcagccaaaccagagaa

SEQ ID NO: 21956 - DNA, 21 bp, synthetic construct
  misc_feature 1..21: note = Description of Artificial Sequence: Synthetic oligonucleotide
  source 1..21: mol_type = other DNA
gaaagcaccagcgaccacaga

SEQ ID NO: 21957 - DNA, 21 bp, synthetic construct
  misc_feature 1..21: note = Description of Artificial Sequence: Synthetic oligonucleotide
  source 1..21: mol_type = other DNA
gatgctaagtctgtgccgacg

SEQ ID NO: 21958 - DNA, 21 bp, synthetic construct
  misc_feature 1..21: note = Description of Artificial Sequence: Synthetic oligonucleotide
  source 1..21: mol_type = other DNA
accagcaccaacgccgtcagc

SEQ ID NO: 21959 - DNA, 21 bp, synthetic construct
  misc_feature 1..21: note = Description of Artificial Sequence: Synthetic oligonucleotide
  source 1..21: mol_type = other DNA
agcagccacggcgtcagcggc

SEQ ID NO: 21960 - DNA, 21 bp, synthetic construct
  misc_feature 1..21: note = Description of Artificial Sequence: Synthetic oligonucleotide
  source 1..21: mol_type = other DNA
agcagcggcggcctcgacaaa

SEQ ID NO: 21961 - DNA, 21 bp, synthetic construct
  misc_feature 1..21: note = Description of Artificial Sequence: Synthetic oligonucleotide
  source 1..21: mol_type = other DNA
agcgtcagcaaaagcagcggc

SEQ ID NO: 21962 - DNA, 21 bp, synthetic construct
  misc_feature 1..21: note = Description of Artificial Sequence: Synthetic oligonucleotide
  source 1..21: mol_type = other DNA
agtcagaaggggaatggggcg

SEQ ID NO: 21963 - DNA, 21 bp, synthetic construct
  misc_feature 1..21: note = Description of Artificial Sequence: Synthetic oligonucleotide
  source 1..21: mol_type = other DNA
cacagagaaggcagcggccac

SEQ ID NO: 21964 - DNA, 21 bp, synthetic construct
  misc_feature 1..21: note = Description of Artificial Sequence: Synthetic oligonucleotide
  source 1..21: mol_type = other DNA
ctcgccaacagcagccaagtc

SEQ ID NO: 21965 - DNA, 21 bp, synthetic construct
  misc_feature 1..21: note = Description of Artificial Sequence: Synthetic oligonucleotide
  source 1..21: mol_type = other DNA
gacggcagaaccccccccacc

SEQ ID NO: 21966 - DNA, 21 bp, synthetic construct
  misc_feature 1..21: note = Description of Artificial Sequence: Synthetic oligonucleotide
  source 1..21: mol_type = other DNA
gcgggtgcgagtgcggtggcg

SEQ ID NO: 21967 - DNA, 21 bp, synthetic construct
  misc_feature 1..21: note = Description of Artificial Sequence: Synthetic oligonucleotide
  source 1..21: mol_type = other DNA
aagggtgctaaggattcgggt

SEQ ID NO: 21968 - DNA, 21 bp, synthetic construct
  misc_feature 1..21: note = Description of Artificial Sequence: Synthetic oligonucleotide
  source 1..21: mol_type = other DNA
agtgcttcttcggataatcgg

SEQ ID NO: 21969 - DNA, 21 bp, synthetic construct
  misc_feature 1..21: note = Description of Artificial Sequence: Synthetic oligonucleotide
  source 1..21: mol_type = other DNA
catgggaatgagccgattaag

SEQ ID NO: 21970 - DNA, 21 bp, synthetic construct
  misc_feature 1..21: note = Description of Artificial Sequence: Synthetic oligonucleotide
  source 1..21: mol_type = other DNA
gggacgggtaggagtccgatg

SEQ ID NO: 21971 - DNA, 21 bp, synthetic construct
  misc_feature 1..21: note = Description of Artificial Sequence: Synthetic oligonucleotide
  source 1..21: mol_type = other DNA
gtcagcagcaaagacagcgcc

SEQ ID NO: 21972 - DNA, 21 bp, synthetic construct
  misc_feature 1..21: note = Description of Artificial Sequence: Synthetic oligonucleotide
  source 1..21: mol_type = other DNA
agcggcggccccagcaccctc

SEQ ID NO: 21973 - DNA, 21 bp, synthetic construct
  misc_feature 1..21: note = Description of Artificial Sequence: Synthetic oligonucleotide
  source 1..21: mol_type = other DNA
agaaacaacgcccacagcgtc

SEQ ID NO: 21974 - DNA, 21 bp, synthetic construct
  misc_feature 1..21: note = Description of Artificial Sequence: Synthetic oligonucleotide
  source 1..21: mol_type = other DNA
gccgacgacaaaaacagagcc

SEQ ID NO: 21975 - DNA, 21 bp, synthetic construct
  misc_feature 1..21: note = Description of Artificial Sequence: Synthetic oligonucleotide
  source 1..21: mol_type = other DNA
ctcaccagcagcaacggcagc

SEQ ID NO: 21976 - DNA, 21 bp, synthetic construct
  misc_feature 1..21: note = Description of Artificial Sequence: Synthetic oligonucleotide
  source 1..21: mol_type = other DNA
atccaaggcgccggcatgacc

SEQ ID NO: 21977 - DNA, 21 bp, synthetic construct
  misc_feature 1..21: note = Description of Artificial Sequence: Synthetic oligonucleotide
  source 1..21: mol_type = other DNA
atggaggagcgtaagcctaat

SEQ ID NO: 21978 - DNA, 21 bp, synthetic construct
  misc_feature 1..21: note = Description of Artificial Sequence: Synthetic oligonucleotide
  source 1..21: mol_type = other DNA
attactggggggaatgggggt

SEQ ID NO: 21979 - DNA, 21 bp, synthetic construct
  misc_feature 1..21: note = Description of Artificial Sequence: Synthetic oligonucleotide
  source 1..21: mol_type = other DNA
ctcagcgccaacgaaaccaaa

SEQ ID NO: 21980 - DNA, 21 bp, synthetic construct
  misc_feature 1..21: note = Description of Artificial Sequence: Synthetic oligonucleotide
  source 1..21: mol_type = other DNA
ctccaaggcgccaacgccacc

SEQ ID NO: 21981 - DNA, 21 bp, synthetic construct
  misc_feature 1..21: note = Description of Artificial Sequence: Synthetic oligonucleotide
  source 1..21: mol_type = other DNA
ctcggcgccggcgccagcacc

SEQ ID NO: 21982 - DNA, 21 bp, synthetic construct
  misc_feature 1..21: note = Description of Artificial Sequence: Synthetic oligonucleotide
  source 1..21: mol_type = other DNA
ggcatcggcgaaagacccgcc

SEQ ID NO: 21983 - DNA, 21 bp, synthetic construct
  misc_feature 1..21: note = Description of Artificial Sequence: Synthetic oligonucleotide
  source 1..21: mol_type = other DNA
gtgtcttctaattcttcgtct

SEQ ID NO: 21984 - DNA, 21 bp, synthetic construct
  misc_feature 1..21: note = Description of Artificial Sequence: Synthetic oligonucleotide
  source 1..21: mol_type = other DNA
tcggctacgaatgcgaagatt

SEQ ID NO: 21985 - DNA, 21 bp, synthetic construct
  misc_feature 1..21: note = Description of Artificial Sequence: Synthetic oligonucleotide
  source 1..21: mol_type = other DNA
tctggtcgtggtactagtact

SEQ ID NO: 21986 - DNA, 21 bp, synthetic construct
  misc_feature 1..21: note = Description of Artificial Sequence: Synthetic oligonucleotide
  source 1..21: mol_type = other DNA
tggggggggaataattcgacg

SEQ ID NO: 21987 - DNA, 21 bp, synthetic construct
  misc_feature 1..21: note = Description of Artificial Sequence: Synthetic oligonucleotide
  source 1..21: mol_type = other DNA
caagacaccagcaacaccaga

SEQ ID NO: 21988 - DNA, 21 bp, synthetic construct
  misc_feature 1..21: note = Description of Artificial Sequence: Synthetic oligonucleotide
  source 1..21: mol_type = other DNA
ggcaacgacgcccccagagtc

SEQ ID NO: 21989 - DNA, 21 bp, synthetic construct
  misc_feature 1..21: note = Description of Artificial Sequence: Synthetic oligonucleotide
  source 1..21: mol_type = other DNA
gcccaaagcggcaacagagtc

SEQ ID NO: 21990 - DNA, 21 bp, synthetic construct
  misc_feature 1..21: note = Description of Artificial Sequence: Synthetic oligonucleotide
  source 1..21: mol_type = other DNA
acccaaaccagcggcgtcccc

SEQ ID NO: 21991 - DNA, 21 bp, synthetic construct
  misc_feature 1..21: note = Description of Artificial Sequence: Synthetic oligonucleotide
  source 1..21: mol_type = other DNA
agcgacggcgccggcatgaaa

SEQ ID NO: 21992 - DNA, 21 bp, synthetic construct
  misc_feature 1..21: note = Description of Artificial Sequence: Synthetic oligonucleotide
  source 1..21: mol_type = other DNA
agcgccgcccaagccaaagtc

SEQ ID NO: 21993 - DNA, 21 bp, synthetic construct
  misc_feature 1..21: note = Description of Artificial Sequence: Synthetic oligonucleotide
  source 1..21: mol_type = other DNA
gacggcaccggcaaacaaggc

SEQ ID NO: 21994 - DNA, 21 bp, synthetic construct
  misc_feature 1..21: note = Description of Artificial Sequence: Synthetic oligonucleotide
  source 1..21: mol_type = other DNA
gtcagaggcgccagcagcgaa

SEQ ID NO: 21995 - DNA, 21 bp, synthetic construct
  misc_feature 1..21: note = Description of Artificial Sequence: Synthetic oligonucleotide
  source 1..21: mol_type = other DNA
agcggcaacaaaagcagcatc

SEQ ID NO: 21996 - DNA, 21 bp, synthetic construct
  misc_feature 1..21: note = Description of Artificial Sequence: Synthetic oligonucleotide
  source 1..21: mol_type = other DNA
acttcttctcctacttctgct

SEQ ID NO: 21997 - DNA, 21 bp, synthetic construct
  misc_feature 1..21: note = Description of Artificial Sequence: Synthetic oligonucleotide
  source 1..21: mol_type = other DNA
aatcagggtgatcgttcggtg

SEQ ID NO: 21998 - DNA, 21 bp, synthetic construct
  misc_feature 1..21: note = Description of Artificial Sequence: Synthetic oligonucleotide
  source 1..21: mol_type = other DNA
cagggtacgccgactcagagt

SEQ ID NO: 21999 - DNA, 21 bp, synthetic construct
  misc_feature 1..21: note = Description of Artificial Sequence: Synthetic oligonucleotide
  source 1..21: mol_type = other DNA
accagactcagcgaacaaaaa

SEQ ID NO: 22000 - DNA, 21 bp, synthetic construct
  misc_feature 1..21: note = Description of Artificial Sequence: Synthetic oligonucleotide
  source 1..21: mol_type = other DNA
ctcagccaaaaccccggcaaa

SEQ ID NO: 22001 - DNA, 21 bp, synthetic construct
  misc_feature 1..21: note = Description of Artificial Sequence: Synthetic oligonucleotide
  source 1..21: mol_type = other DNA
ctttcttctgcggggtctcag

SEQ ID NO: 22002 - DNA, 21 bp, synthetic construct
  misc_feature 1..21: note = Description of Artificial Sequence: Synthetic oligonucleotide
  source 1..21: mol_type = other DNA
gaggggagtagtaatacgcag

SEQ ID NO: 22003 - DNA, 21 bp, synthetic construct
  misc_feature 1..21: note = Description of Artificial Sequence: Synthetic oligonucleotide
  source 1..21: mol_type = other DNA
tcgccggagactcgtggttcc

SEQ ID NO: 22004 - DNA, 21 bp, synthetic construct
  misc_feature 1..21: note = Description of Artificial Sequence: Synthetic oligonucleotide
  source 1..21: mol_type = other DNA
catcagtcgaataagcctctg

SEQ ID NO: 22005 - DNA, 21 bp, synthetic construct
  misc_feature 1..21: note = Description of Artificial Sequence: Synthetic oligonucleotide
  source 1..21: mol_type = other DNA
ctgccggcggatcgttctagt

SEQ ID NO: 22006 - DNA, 21 bp, synthetic construct
  misc_feature 1..21: note = Description of Artificial Sequence: Synthetic oligonucleotide
  source 1..21: mol_type = other DNA
gacaacggccaagccccccaa

SEQ ID NO: 22007 - DNA, 21 bp, synthetic construct
  misc_feature 1..21: note = Description of Artificial Sequence: Synthetic oligonucleotide
  source 1..21: mol_type = other DNA
gccagaaacggcgccggcgcc

SEQ ID NO: 22008 - DNA, 21 bp, synthetic construct
  misc_feature 1..21: note = Description of Artificial Sequence: Synthetic oligonucleotide
  source 1..21: mol_type = other DNA
tcgagtagtccgtcgaatcat

SEQ ID NO: 22009 - DNA, 21 bp, synthetic construct
  misc_feature 1..21: note = Description of Artificial Sequence: Synthetic oligonucleotide
  source 1..21: mol_type = other DNA
acccccagccaaggcagcctc

SEQ ID NO: 22010 - DNA, 21 bp, synthetic construct
  misc_feature 1..21: note = Description of Artificial Sequence: Synthetic oligonucleotide
  source 1..21: mol_type = other DNA
gctgggggggctggtacttct

SEQ ID NO: 22011 - DNA, 21 bp, synthetic construct
  misc_feature 1..21: note = Description of Artificial Sequence: Synthetic oligonucleotide
  source 1..21: mol_type = other DNA
ggcaacggccaagaccacgcc

SEQ ID NO: 22012 - DNA, 21 bp, synthetic construct
  misc_feature 1..21: note = Description of Artificial Sequence: Synthetic oligonucleotide
  source 1..21: mol_type = other DNA
agcctcggcagcacccccatc

SEQ ID NO: 22013 - DNA, 21 bp, synthetic construct
  misc_feature 1..21: note = Description of Artificial Sequence: Synthetic oligonucleotide
  source 1..21: mol_type = other DNA
actacgggtgctagtactacg

SEQ ID NO: 22014 - DNA, 21 bp, synthetic construct
  misc_feature 1..21: note = Description of Artificial Sequence: Synthetic oligonucleotide
  source 1..21: mol_type = other DNA
gccaccgtcggcggcgccaaa

SEQ ID NO: 22015 - DNA, 21 bp, synthetic construct
  misc_feature 1..21: note = Description of Artificial Sequence: Synthetic oligonucleotide
  source 1..21: mol_type = other DNA
gcgggttctcctaaggattct

SEQ ID NO: 22016 - DNA, 21 bp, synthetic construct
  misc_feature 1..21: note = Description of Artificial Sequence: Synthetic oligonucleotide
  source 1..21: mol_type = other DNA
ggtagtgtttctcatagtact

SEQ ID NO: 22017 - DNA, 21 bp, synthetic construct
  misc_feature 1..21: note = Description of Artificial Sequence: Synthetic oligonucleotide
  source 1..21: mol_type = other DNA
atgcccaaagacagcaaccaa

SEQ ID NO: 22018 - DNA, 21 bp, synthetic construct
  misc_feature 1..21: note = Description of Artificial Sequence: Synthetic oligonucleotide
  source 1..21: mol_type = other DNA
gtcaaaaccaacggcaccagc

SEQ ID NO: 22019 - DNA, 21 bp, synthetic construct
  misc_feature 1..21: note = Description of Artificial Sequence: Synthetic oligonucleotide
  source 1..21: mol_type = other DNA
acttcgcagcctacgtcggtt

SEQ ID NO: 22020 - DNA, 21 bp, synthetic construct
  misc_feature 1..21: note = Description of Artificial Sequence: Synthetic oligonucleotide
  source 1..21: mol_type = other DNA
gacagcgccaaaagcagccac

SEQ ID NO: 22021 - DNA, 21 bp, synthetic construct
  misc_feature 1..21: note = Description of Artificial Sequence: Synthetic oligonucleotide
  source 1..21: mol_type = other DNA
agccaaaacaccaccggcaaa

SEQ ID NO: 22022 - DNA, 21 bp, synthetic construct
  misc_feature 1..21: note = Description of Artificial Sequence: Synthetic oligonucleotide
  source 1..21: mol_type = other DNA
catcctctggagaataagggt

SEQ ID NO: 22023 - DNA, 21 bp, synthetic construct
  misc_feature 1..21: note = Description of Artificial Sequence: Synthetic oligonucleotide
  source 1..21: mol_type = other DNA
aagactgcgcagtctgttgtg

SEQ ID NO: 22024 - DNA, 21 bp, synthetic construct
  misc_feature 1..21: note = Description of Artificial Sequence: Synthetic oligonucleotide
  source 1..21: mol_type = other DNA
accctcgacgccaaaagcaac

SEQ ID NO: 22025 - DNA, 21 bp, synthetic construct
  misc_feature 1..21: note = Description of Artificial Sequence: Synthetic oligonucleotide
  source 1..21: mol_type = other DNA
acttctagtgggaatagtcat

SEQ ID NO: 22026 - DNA, 21 bp, synthetic construct
  misc_feature 1..21: note = Description of Artificial Sequence: Synthetic oligonucleotide
  source 1..21: mol_type = other DNA
agagaacaaacccccaccagc

SEQ ID NO: 22027 - DNA, 21 bp, synthetic construct
  misc_feature 1..21: note = Description of Artificial Sequence: Synthetic oligonucleotide
  source 1..21: mol_type = other DNA
agcgaaaccgacagaaaaaga

SEQ ID NO: 22028 - DNA, 21 bp, synthetic construct
  misc_feature 1..21: note = Description of Artificial Sequence: Synthetic oligonucleotide
  source 1..21: mol_type = other DNA
cacggccccgaaaaacaaatc

SEQ ID NO: 22029 - DNA, 21 bp, synthetic construct
  misc_feature 1..21: note = Description of Artificial Sequence: Synthetic oligonucleotide
  source 1..21: mol_type = other DNA
ctttcggagacgtcgtctaag

SEQ ID NO: 22030 - DNA, 21 bp, synthetic construct
  misc_feature 1..21: note = Description of Artificial Sequence: Synthetic oligonucleotide
  source 1..21: mol_type = other DNA
gataatgctaagcctaatatt

SEQ ID NO: 22031 - DNA, 21 bp, synthetic construct
  misc_feature 1..21: note = Description of Artificial Sequence: Synthetic oligonucleotide
  source 1..21: mol_type = other DNA
gattctatgagggcgaatgtt

SEQ ID NO: 22032 - DNA, 21 bp, synthetic construct
  misc_feature 1..21: note = Description of Artificial Sequence: Synthetic oligonucleotide
  source 1..21: mol_type = other DNA
ggcaccagcgtcagcgcccac

SEQ ID NO: 22033 - DNA, 21 bp, synthetic construct
  misc_feature 1..21: note = Description of Artificial Sequence: Synthetic oligonucleotide
  source 1..21: mol_type = other DNA
ggccacaacggcaaaagcagc

SEQ ID NO: 22034 - DNA, 21 bp, synthetic construct
  misc_feature 1..21: note = Description of Artificial Sequence: Synthetic oligonucleotide
  source 1..21: mol_type = other DNA
ggtcatcagtcttcttctggt

SEQ ID NO: 22035 - DNA, 21 bp, synthetic construct
  misc_feature 1..21: note = Description of Artificial Sequence: Synthetic oligonucleotide
  source 1..21: mol_type = other DNA
gtcagcagcaccagcagcaaa

SEQ ID NO: 22036 - DNA, 21 bp, synthetic construct
  misc_feature 1..21: note = Description of Artificial Sequence: Synthetic oligonucleotide
  source 1..21: mol_type = other DNA
gtggcgtcggagaagccggtt

SEQ ID NO: 22037 - DNA, 21 bp, synthetic construct
  misc_feature 1..21: note = Description of Artificial Sequence: Synthetic oligonucleotide
  source 1..21: mol_type = other DNA
tttactggttcggcgccttcg

SEQ ID NO: 22038 - DNA, 21 bp, synthetic construct
  misc_feature 1..21: note = Description of Artificial Sequence: Synthetic oligonucleotide
  source 1..21: mol_type = other DNA
aacgtcgccaaaagccccctc

SEQ ID NO: 22039 - DNA, 21 bp, synthetic construct
  misc_feature 1..21: note = Description of Artificial Sequence: Synthetic oligonucleotide
  source 1..21: mol_type = other DNA
gagactattactaagcctgtg

SEQ ID NO: 22040 - DNA, 21 bp, synthetic construct
  misc_feature 1..21: note = Description of Artificial Sequence: Synthetic oligonucleotide
  source 1..21: mol_type = other DNA
ggcagcaccagccccaacctc

SEQ ID NO: 22041 - DNA, 21 bp, synthetic construct
  misc_feature 1..21: note = Description of Artificial Sequence: Synthetic oligonucleotide
  source 1..21: mol_type = other DNA
tcgcttaatactaaggctctg

SEQ ID NO: 22042 - DNA, 21 bp, synthetic construct
  misc_feature 1..21: note = Description of Artificial Sequence: Synthetic oligonucleotide
  source 1..21: mol_type = other DNA
accatggccgccagcccccac

SEQ ID NO: 22043 - DNA, 21 bp, synthetic construct
  misc_feature 1..21: note = Description of Artificial Sequence: Synthetic oligonucleotide
  source 1..21: mol_type = other DNA
accggcgtcggcaccatgagc

SEQ ID NO: 22044 - DNA, 21 bp, synthetic construct
  misc_feature 1..21: note = Description of Artificial Sequence: Synthetic oligonucleotide
  source 1..21: mol_type = other DNA
agcctcgccagccaacacagc

SEQ ID NO: 22045 - DNA, 21 bp, synthetic construct
  misc_feature 1..21: note = Description of Artificial Sequence: Synthetic oligonucleotide
  source 1..21: mol_type = other DNA
caccaagacaccagcaacaga

SEQ ID NO: 22046 - DNA, 21 bp, synthetic construct
  misc_feature 1..21: note = Description of Artificial Sequence: Synthetic oligonucleotide
  source 1..21: mol_type = other DNA
ctgcctcctgctgagagtaag

SEQ ID NO: 22047 - DNA, 21 bp, synthetic construct
  misc_feature 1..21: note = Description of Artificial Sequence: Synthetic oligonucleotide
  source 1..21: mol_type = other DNA
gaggttccgagtaagagtagg

SEQ ID NO: 22048 - DNA, 21 bp, synthetic construct
  misc_feature 1..21: note = Description of Artificial Sequence: Synthetic oligonucleotide
  source 1..21: mol_type = other DNA
gacggcaacagcagcaaacaa

SEQ ID NO: 22049 - DNA, 21 bp, synthetic construct
  misc_feature 1..21: note = Description of Artificial Sequence: Synthetic oligonucleotide
  source 1..21: mol_type = other DNA
accggcaaaccccccagcagc

SEQ ID NO: 22050 - DNA, 21 bp, synthetic construct
  misc_feature 1..21: note = Description of Artificial Sequence: Synthetic oligonucleotide
  source 1..21: mol_type = other DNA
agcggcagcaccagcagcagc

SEQ ID NO: 22051 - DNA, 21 bp, synthetic construct
  misc_feature 1..21: note = Description of Artificial Sequence: Synthetic oligonucleotide
  source 1..21: mol_type = other DNA
gccagaaccgccaccagcgtc

SEQ ID NO: 22052 - DNA, 21 bp, synthetic construct
  misc_feature 1..21: note = Description of Artificial Sequence: Synthetic oligonucleotide
  source 1..21: mol_type = other DNA
gctacggatcgggagaagggt

SEQ ID NO: 22053 - DNA, 21 bp, synthetic construct
  misc_feature 1..21: note = Description of Artificial Sequence: Synthetic oligonucleotide
  source 1..21: mol_type = other DNA
ggcaacagccccaccgccagc

SEQ ID NO: 22054 - DNA, 21 bp, synthetic construct
  misc_feature 1..21: note = Description of Artificial Sequence: Synthetic oligonucleotide
  source 1..21: mol_type = other DNA
ggcaccagaagcggcaccgcc

SEQ ID NO: 22055 - DNA, 21 bp, synthetic construct
  misc_feature 1..21: note = Description of Artificial Sequence: Synthetic oligonucleotide
  source 1..21: mol_type = other DNA
gtcggcagcggcagccaaacc

SEQ ID NO: 22056 - DNA, 21 bp, synthetic construct
  misc_feature 1..21: note = Description of Artificial Sequence: Synthetic oligonucleotide
  source 1..21: mol_type = other DNA
gtgcgggattctggttcgtct

SEQ ID NO: 22057 - DNA, 21 bp, synthetic construct
  misc_feature 1..21: note = Description of Artificial Sequence: Synthetic oligonucleotide
  source 1..21: mol_type = other DNA
actcgtgggcagcctgctggg

SEQ ID NO: 22058 - DNA, 21 bp, synthetic construct
  misc_feature 1..21: note = Description of Artificial Sequence: Synthetic oligonucleotide
  source 1..21: mol_type = other DNA
cagacggtgcctgcgcctagt

SEQ ID NO: 22059 - DNA, 21 bp, synthetic construct
  misc_feature 1..21: note = Description of Artificial Sequence: Synthetic oligonucleotide
  source 1..21: mol_type = other DNA
aataataatcagcagtcttct

SEQ ID NO: 22060 - DNA, 21 bp, synthetic construct
  misc_feature 1..21: note = Description of Artificial Sequence: Synthetic oligonucleotide
  source 1..21: mol_type = other DNA
agcagcgccgacagaagcacc

SEQ ID NO: 22061 - DNA, 21 bp, synthetic construct
  misc_feature 1..21: note = Description of Artificial Sequence: Synthetic oligonucleotide
  source 1..21: mol_type = other DNA
ggccaaagcagcaaaaaagaa

SEQ ID NO: 22062 - DNA, 21 bp, synthetic construct
  misc_feature 1..21: note = Description of Artificial Sequence: Synthetic oligonucleotide
  source 1..21: mol_type = other DNA
ggcgtcagcggccccaccagc

SEQ ID NO: 22063 - DNA, 21 bp, synthetic construct
  misc_feature 1..21: note = Description of Artificial Sequence: Synthetic oligonucleotide
  source 1..21: mol_type = other DNA
aaccccgccagcaccgcccaa

SEQ ID NO: 22064 - DNA, 21 bp, synthetic construct
  misc_feature 1..21: note = Description of Artificial Sequence: Synthetic oligonucleotide
  source 1..21: mol_type = other DNA
cagcctcgtcctagtcctact

SEQ ID NO: 22065 - DNA, 21 bp, synthetic construct
  misc_feature 1..21: note = Description of Artificial Sequence: Synthetic oligonucleotide
  source 1..21: mol_type = other DNA
cagtcttcggataagttgcgt

SEQ ID NO: 22066 - DNA, 21 bp, synthetic construct
  misc_feature 1..21: note = Description of Artificial Sequence: Synthetic oligonucleotide
  source 1..21: mol_type = other DNA
cttggtcagtcttctcagggt

SEQ ID NO: 22067 - DNA, 21 bp, synthetic construct
  misc_feature 1..21: note = Description of Artificial Sequence: Synthetic oligonucleotide
  source 1..21: mol_type = other DNA
ttggtggataatccgaagggg

SEQ ID NO: 22068 - DNA, 21 bp, synthetic construct
  misc_feature 1..21: note = Description of Artificial Sequence: Synthetic oligonucleotide
  source 1..21: mol_type = other DNA
aacagcaacggcaacaacagc

SEQ ID NO: 22069 - DNA, 21 bp, synthetic construct
  misc_feature 1..21: note = Description of Artificial Sequence: Synthetic oligonucleotide
  source 1..21: mol_type = other DNA
agcagcagacaacccgtcgtc

SEQ ID NO: 22070 - DNA, 21 bp, synthetic construct
  misc_feature 1..21: note = Description of Artificial Sequence: Synthetic oligonucleotide
  source 1..21: mol_type = other DNA
agtacttctgctaatcctgcg

SEQ ID NO: 22071 - DNA, 21 bp, synthetic construct
  misc_feature 1..21: note = Description of Artificial Sequence: Synthetic oligonucleotide
  source 1..21: mol_type = other DNA
ctttctcagggtggtggtgcg

SEQ ID NO: 22072 - DNA, 21 bp, synthetic construct
  misc_feature 1..21: note = Description of Artificial Sequence: Synthetic oligonucleotide
  source 1..21: mol_type = other DNA
gataagacttcgtcgcctttg

SEQ ID NO: 22073 - DNA, 21 bp, synthetic construct
  misc_feature 1..21: note = Description of Artificial Sequence: Synthetic oligonucleotide
  source 1..21: mol_type = other DNA
agcgtccaaaaagtcaacctc

SEQ ID NO: 22074 - DNA, 21 bp, synthetic construct
  misc_feature 1..21: note = Description of Artificial Sequence: Synthetic oligonucleotide
  source 1..21: mol_type = other DNA
caccccgcccaagccagcggc

SEQ ID NO: 22075 - DNA, 21 bp, synthetic construct
  misc_feature 1..21: note = Description of Artificial Sequence: Synthetic oligonucleotide
  source 1..21: mol_type = other DNA
gccagcgtcagcaccaccaaa

SEQ ID NO: 22076 - DNA, 21 bp, synthetic construct
  misc_feature 1..21: note = Description of Artificial Sequence: Synthetic oligonucleotide
  source 1..21: mol_type = other DNA
aacagcctcaaaggcagcagc

SEQ ID NO: 22077 - DNA, 21 bp, synthetic construct
  misc_feature 1..21: note = Description of Artificial Sequence: Synthetic oligonucleotide
  source 1..21: mol_type = other DNA
agtacttcgcgtgagaatttg

SEQ ID NO: 22078 - DNA, 21 bp, synthetic construct
  misc_feature 1..21: note = Description of Artificial Sequence: Synthetic oligonucleotide
  source 1..21: mol_type = other DNA
ctttcggttggtaataattcg

SEQ ID NO: 22079 - DNA, 21 bp, synthetic construct
  misc_feature 1..21: note = Description of Artificial Sequence: Synthetic oligonucleotide
  source 1..21: mol_type = other DNA
ggcatcaacagcagcagaacc

SEQ ID NO: 22080 - DNA, 21 bp, synthetic construct
  misc_feature 1..21: note = Description of Artificial Sequence: Synthetic oligonucleotide
  source 1..21: mol_type = other DNA
gaagccaaagccaacgccgcc

SEQ ID NO: 22081 - DNA, 21 bp, synthetic construct
  misc_feature 1..21: note = Description of Artificial Sequence: Synthetic oligonucleotide
  source 1..21: mol_type = other DNA
ggcaccctccccagccaacaa

SEQ ID NO: 22082 - DNA, 21 bp, synthetic construct
  misc_feature 1..21: note = Description of Artificial Sequence: Synthetic oligonucleotide
  source 1..21: mol_type = other DNA
aaccccctcgccagcaaagac

SEQ ID NO: 22083 - DNA, 21 bp, synthetic construct
  misc_feature 1..21: note = Description of Artificial Sequence: Synthetic oligonucleotide
  source 1..21: mol_type = other DNA
aacgccagcagccaacccgcc

SEQ ID NO: 22084 - DNA, 21 bp, synthetic construct
  misc_feature 1..21: note = Description of Artificial Sequence: Synthetic oligonucleotide
  source 1..21: mol_type = other DNA
gggaatgagatgagtgttaag

SEQ ID NO: 22085 - DNA, 21 bp, synthetic construct
  misc_feature 1..21: note = Description of Artificial Sequence: Synthetic oligonucleotide
  source 1..21: mol_type = other DNA
accagcgccaccgcccaccac

SEQ ID NO: 22086 - DNA, 21 bp, synthetic construct
  misc_feature 1..21: note = Description of Artificial Sequence: Synthetic oligonucleotide
  source 1..21: mol_type = other DNA
gtccaaaaaagcgtcagcacc

SEQ ID NO: 22087 - DNA, 21 bp, synthetic construct
  misc_feature 1..21: note = Description of Artificial Sequence: Synthetic oligonucleotide
  source 1..21: mol_type = other DNA
tctgtttctactacgaatgct

SEQ ID NO: 22088 - DNA, 21 bp, synthetic construct
  misc_feature 1..21: note = Description of Artificial Sequence: Synthetic oligonucleotide
  source 1..21: mol_type = other DNA
ctcagcggccaaagcgccaac

SEQ ID NO: 22089 - DNA, 21 bp, synthetic construct
  misc_feature 1..21: note = Description of Artificial Sequence: Synthetic oligonucleotide
  source 1..21: mol_type = other DNA
aatcagtctcagacgacgatt

SEQ ID NO: 22090 - DNA, 21 bp, synthetic construct
  misc_feature 1..21: note = Description of Artificial Sequence: Synthetic oligonucleotide
  source 1..21: mol_type = other DNA
aatgcgactaagggttctgtg

SEQ ID NO: 22091 - DNA, 21 bp, synthetic construct
  misc_feature 1..21: note = Description of Artificial Sequence: Synthetic oligonucleotide
  source 1..21: mol_type = other DNA
accagcagcgacgccagagtc

SEQ ID NO: 22092 - DNA, 21 bp, synthetic construct
  misc_feature 1..21: note = Description of Artificial Sequence: Synthetic oligonucleotide
  source 1..21: mol_type = other DNA
acccaaaaagacagcaaagtc

SEQ ID NO: 22093 - DNA, 21 bp, synthetic construct
  misc_feature 1..21: note = Description of Artificial Sequence: Synthetic oligonucleotide
  source 1..21: mol_type = other DNA
agagaagccgaaagcagcaga

SEQ ID NO: 22094 - DNA, 21 bp, synthetic construct
  misc_feature 1..21: note = Description of Artificial Sequence: Synthetic oligonucleotide
  source 1..21: mol_type = other DNA
agtactacgaagggtgagatg

SEQ ID NO: 22095 - DNA, 21 bp, synthetic construct
  misc_feature 1..21: note = Description of Artificial Sequence: Synthetic oligonucleotide
  source 1..21: mol_type = other DNA
agtgatggtaatgctaatagg

SEQ ID NO: 22096 - DNA, 21 bp, synthetic construct
  misc_feature 1..21: note = Description of Artificial Sequence: Synthetic oligonucleotide
  source 1..21: mol_type = other DNA
agtgggacggagtctggtagt

SEQ ID NO: 22097 - DNA, 21 bp, synthetic construct
  misc_feature 1..21: note = Description of Artificial Sequence: Synthetic oligonucleotide
  source 1..21: mol_type = other DNA
atgccgactacggatatgaag

SEQ ID NO: 22098 - DNA, 21 bp, synthetic construct
  misc_feature 1..21: note = Description of Artificial Sequence: Synthetic oligonucleotide
  source 1..21: mol_type = other DNA
cacggcgaaaaactcggccaa

SEQ ID NO: 22099 - DNA, 21 bp, synthetic construct
  misc_feature 1..21: note = Description of Artificial Sequence: Synthetic oligonucleotide
  source 1..21: mol_type = other DNA
catgggaggggtagtgagggt

SEQ ID NO: 22100 - DNA, 21 bp, synthetic construct
  misc_feature 1..21: note = Description of Artificial Sequence: Synthetic oligonucleotide
  source 1..21: mol_type = other DNA
catggtgttagtacggggtcg

SEQ ID NO: 22101 - DNA, 21 bp, synthetic construct
  misc_feature 1..21: note = Description of Artificial Sequence: Synthetic oligonucleotide
  source 1..21: mol_type = other DNA
gagagtgattctcgtaatcgg

SEQ ID NO: 22102 - DNA, 21 bp, synthetic construct
  misc_feature 1..21: note = Description of Artificial Sequence: Synthetic oligonucleotide
  source 1..21: mol_type = other DNA
gagcagactcagccggttagg

SEQ ID NO: 22103 - DNA, 21 bp, synthetic construct
  misc_feature 1..21: note = Description of Artificial Sequence: Synthetic oligonucleotide
  source 1..21: mol_type = other DNA
gccagcagcggcaccatgagc

SEQ ID NO: 22104 - DNA, 21 bp, synthetic construct
  misc_feature 1..21: note = Description of Artificial Sequence: Synthetic oligonucleotide
  source 1..21: mol_type = other DNA
gctccgaatagtaaggtggtg

SEQ ID NO: 22105 - DNA, 21 bp, synthetic construct
  misc_feature 1..21: note = Description of Artificial Sequence: Synthetic oligonucleotide
  source 1..21: mol_type = other DNA
ggcagcaacggcaaagtcttc

SEQ ID NO: 22106 - DNA, 21 bp, synthetic construct
  misc_feature 1..21: note = Description of Artificial Sequence: Synthetic oligonucleotide
  source 1..21: mol_type = other DNA
ggcagcaccaacaccaaagtc

SEQ ID NO: 22107 - DNA, 21 bp, synthetic construct
  misc_feature 1..21: note = Description of Artificial Sequence: Synthetic oligonucleotide
  source 1..21: mol_type = other DNA
ggccccaacaaacccagcttc

SEQ ID NO: 22108 - DNA, 21 bp, synthetic construct
  misc_feature 1..21: note = Description of Artificial Sequence: Synthetic oligonucleotide
  source 1..21: mol_type = other DNA
gggaatggtgagcatagtact

SEQ ID NO: 22109 - DNA, 21 bp, synthetic construct
  misc_feature 1..21: note = Description of Artificial Sequence: Synthetic oligonucleotide
  source 1..21: mol_type = other DNA
gggactaggcctgctgatacg

SEQ ID NO: 22110 - DNA, 21 bp, synthetic construct
  misc_feature 1..21: note = Description of Artificial Sequence: Synthetic oligonucleotide
  source 1..21: mol_type = other DNA
tctacggatagtaattttcgt

SEQ ID NO: 22111 - DNA, 21 bp, synthetic construct
  misc_feature 1..21: note = Description of Artificial Sequence: Synthetic oligonucleotide
  source 1..21: mol_type = other DNA
agcatcagcggcaaaaaccaa

SEQ ID NO: 22112 - DNA, 21 bp, synthetic construct
  misc_feature 1..21: note = Description of Artificial Sequence: Synthetic oligonucleotide
  source 1..21: mol_type = other DNA
gtccaaaccaccaaaagcaac

SEQ ID NO: 22113 - DNA, 21 bp, synthetic construct
  misc_feature 1..21: note = Description of Artificial Sequence: Synthetic oligonucleotide
  source 1..21: mol_type = other DNA
ggtgcttctaagcatacggct

SEQ ID NO: 22114 - DNA, 21 bp, synthetic construct
  misc_feature 1..21: note = Description of Artificial Sequence: Synthetic oligonucleotide
  source 1..21: mol_type = other DNA
cacaccaaaaccacccccgaa

SEQ ID NO: 22115 - DNA, 21 bp, synthetic construct
  misc_feature 1..21: note = Description of Artificial Sequence: Synthetic oligonucleotide
  source 1..21: mol_type = other DNA
caacaagccagcaaagccacc

SEQ ID NO: 22116 - DNA, 21 bp, synthetic construct
  misc_feature 1..21: note = Description of Artificial Sequence: Synthetic oligonucleotide
  source 1..21: mol_type = other DNA
acgagtaatgggattgctaag

SEQ ID NO: 22117 - DNA, 21 bp, synthetic construct
  misc_feature 1..21: note = Description of Artificial Sequence: Synthetic oligonucleotide
  source 1..21: mol_type = other DNA
acgaattcgtctaagatgact

SEQ ID NO: 22118 - DNA, 21 bp, synthetic construct
  misc_feature 1..21: note = Description of Artificial Sequence: Synthetic oligonucleotide
  source 1..21: mol_type = other DNA
agcaacggcagcagcgccagc

SEQ ID NO: 22119 - DNA, 21 bp, synthetic construct
  misc_feature 1..21: note = Description of Artificial Sequence: Synthetic oligonucleotide
  source 1..21: mol_type = other DNA
ggcggccaaagcgtcccccaa

SEQ ID NO: 22120 - DNA, 21 bp, synthetic construct
  misc_feature 1..21: note = Description of Artificial Sequence: Synthetic oligonucleotide
  source 1..21: mol_type = other DNA
accgacagcaccaaacacggc

SEQ ID NO: 22121 - DNA, 21 bp, synthetic construct
  misc_feature 1..21: note = Description of Artificial Sequence: Synthetic oligonucleotide
  source 1..21: mol_type = other DNA
cagggtatggggaatgttatt

SEQ ID NO: 22122 - DNA, 21 bp, synthetic construct
  misc_feature 1..21: note = Description of Artificial Sequence: Synthetic oligonucleotide
  source 1..21: mol_type = other DNA
gacaaaatcaaaacccaacaa

SEQ ID NO: 22123 - DNA, 21 bp, synthetic construct
  misc_feature 1..21: note = Description of Artificial Sequence: Synthetic oligonucleotide
  source 1..21: mol_type = other DNA
gagtctgagtcgagtaagggg

SEQ ID NO: 22124 - DNA, 21 bp, synthetic construct
  misc_feature 1..21: note = Description of Artificial Sequence: Synthetic oligonucleotide
  source 1..21: mol_type = other DNA
gtcgtcagcggcggcaacagc

SEQ ID NO: 22125 - DNA, 21 bp, synthetic construct
  misc_feature 1..21: note = Description of Artificial Sequence: Synthetic oligonucleotide
  source 1..21: mol_type = other DNA
gctgagggttctcggggtggt

SEQ ID NO: 22126 - DNA, 21 bp, synthetic construct
  misc_feature 1..21: note = Description of Artificial Sequence: Synthetic oligonucleotide
  source 1..21: mol_type = other DNA
ggcatggaaagaagcctcggc

SEQ ID NO: 22127 - DNA, 21 bp, synthetic construct
  misc_feature 1..21: note = Description of Artificial Sequence: Synthetic oligonucleotide
  source 1..21: mol_type = other DNA
ggtcagcagcgggagccgatg

SEQ ID NO: 22128 - DNA, 21 bp, synthetic construct
  misc_feature 1..21: note = Description of Artificial Sequence: Synthetic oligonucleotide
  source 1..21: mol_type = other DNA
atgcaaagcaacgacaccaaa

SEQ ID NO: 22129 - DNA, 21 bp, synthetic construct
  misc_feature 1..21: note = Description of Artificial Sequence: Synthetic oligonucleotide
  source 1..21: mol_type = other DNA
caggggacggctcagattgcg

SEQ ID NO: 22130 - DNA, 21 bp, synthetic construct
  misc_feature 1..21: note = Description of Artificial Sequence: Synthetic oligonucleotide
  source 1..21: mol_type = other DNA
agccccaccggcgacagcaaa

SEQ ID NO: 22131 - DNA, 21 bp, synthetic construct
  misc_feature 1..21: note = Description of Artificial Sequence: Synthetic oligonucleotide
  source 1..21: mol_type = other DNA
agcaccagcggcagcaccaaa

SEQ ID NO: 22132 - DNA, 21 bp, synthetic construct
  misc_feature 1..21: note = Description of Artificial Sequence: Synthetic oligonucleotide
  source 1..21: mol_type = other DNA
cataatgtggagaaggcgggg

SEQ ID NO: 22133 - DNA, 21 bp, synthetic construct
  misc_feature 1..21: note = Description of Artificial Sequence: Synthetic oligonucleotide
  source 1..21: mol_type = other DNA
gaaaacagcaaccccagaagc

SEQ ID NO: 22134 - DNA, 21 bp, synthetic construct
  misc_feature 1..21: note = Description of Artificial Sequence: Synthetic oligonucleotide
  source 1..21: mol_type = other DNA
gattctaaggcggggactgtg

SEQ ID NO: 22135 - DNA, 21 bp, synthetic construct
  misc_feature 1..21: note = Description of Artificial Sequence: Synthetic oligonucleotide
  source 1..21: mol_type = other DNA
agacacggcagcgaacaaggc

SEQ ID NO: 22136 - DNA, 21 bp, synthetic construct
  misc_feature 1..21: note = Description of Artificial Sequence: Synthetic oligonucleotide
  source 1..21: mol_type = other DNA
cacgccagcagcagcaaaggc

SEQ ID NO: 22137 - DNA, 21 bp, synthetic construct
  misc_feature 1..21: note = Description of Artificial Sequence: Synthetic oligonucleotide
  source 1..21: mol_type = other DNA
gccaccggcagcaccgccatc

SEQ ID NO: 22138 - DNA, 21 bp, synthetic construct
  misc_feature 1..21: note = Description of Artificial Sequence: Synthetic oligonucleotide
  source 1..21: mol_type = other DNA
acgatggctagtaagcctaat

SEQ ID NO: 22139 - DNA, 21 bp, synthetic construct
  misc_feature 1..21: note = Description of Artificial Sequence: Synthetic oligonucleotide
  source 1..21: mol_type = other DNA
gtcaaaaacggcaacgtcctc

SEQ ID NO: 22140 - DNA, 21 bp, synthetic construct
  misc_feature 1..21: note = Description of Artificial Sequence: Synthetic oligonucleotide
  source 1..21: mol_type = other DNA
accaccctccaaaaacccgtc

SEQ ID NO: 22141 - DNA, 21 bp, synthetic construct
  misc_feature 1..21: note = Description of Artificial Sequence: Synthetic oligonucleotide
  source 1..21: mol_type = other DNA
accgtccaaaacagcaaagaa

SEQ ID NO: 22142 - DNA, 21 bp, synthetic construct
  misc_feature 1..21: note = Description of Artificial Sequence: Synthetic oligonucleotide
  source 1..21: mol_type = other DNA
agccaaaaacccagcggcgcc

SEQ ID NO: 22143 - DNA, 21 bp, synthetic construct
  misc_feature 1..21: note = Description of Artificial Sequence: Synthetic oligonucleotide
  source 1..21: mol_type = other DNA
agcgccgtccaaagcagcggc

SEQ ID NO: 22144 - DNA, 21 bp, synthetic construct
  misc_feature 1..21: note = Description of Artificial Sequence: Synthetic oligonucleotide
  source 1..21: mol_type = other DNA
gataggagtgagcggtctatt

SEQ ID NO: 22145 - DNA, 21 bp, synthetic construct
  misc_feature 1..21: note = Description of Artificial Sequence: Synthetic oligonucleotide
  source 1..21: mol_type = other DNA
gccggcgtcaccccccccagc

SEQ ID NO: 22146 - DNA, 21 bp, synthetic construct
  misc_feature 1..21: note = Description of Artificial Sequence: Synthetic oligonucleotide
  source 1..21: mol_type = other DNA
gcgacgcgggataaggttgtg

SEQ ID NO: 22147 - DNA, 21 bp, synthetic construct
  misc_feature 1..21: note = Description of Artificial Sequence: Synthetic oligonucleotide
  source 1..21: mol_type = other DNA
tctgtgcatagtggttctgcg

SEQ ID NO: 22148 - DNA, 21 bp, synthetic construct
  misc_feature 1..21: note = Description of Artificial Sequence: Synthetic oligonucleotide
  source 1..21: mol_type = other DNA
accaccgccagcagcccccaa

SEQ ID NO: 22149 - DNA, 21 bp, synthetic construct
  misc_feature 1..21: note = Description of Artificial Sequence: Synthetic oligonucleotide
  source 1..21: mol_type = other DNA
aacgccaacggcagcagcgcc

SEQ ID NO: 22150 - DNA, 21 bp, synthetic construct
  misc_feature 1..21: note = Description of Artificial Sequence: Synthetic oligonucleotide
  source 1..21: mol_type = other DNA
agcggcagcacccccagagaa

SEQ ID NO: 22151 - DNA, 21 bp, synthetic construct
  misc_feature 1..21: note = Description of Artificial Sequence: Synthetic oligonucleotide
  source 1..21: mol_type = other DNA
cagaataagtcgggtagtatg

SEQ ID NO: 22152 - DNA, 21 bp, synthetic construct
  misc_feature 1..21: note = Description of Artificial Sequence: Synthetic oligonucleotide
  source 1..21: mol_type = other DNA
tctgctcttggtaaggagtcg

SEQ ID NO: 22153 - DNA, 21 bp, synthetic construct
  misc_feature 1..21: note = Description of Artificial Sequence: Synthetic oligonucleotide
  source 1..21: mol_type = other DNA
cagtctgggtctaaggttacg

SEQ ID NO: 22154 - DNA, 21 bp, synthetic construct
  misc_feature 1..21: note = Description of Artificial Sequence: Synthetic oligonucleotide
  source 1..21: mol_type = other DNA
atgacgtctgataagtctacg

SEQ ID NO: 22155 - DNA, 21 bp, synthetic construct
  misc_feature 1..21: note = Description of Artificial Sequence: Synthetic oligonucleotide
  source 1..21: mol_type = other DNA
ctttctaatgggaagtcgacg

SEQ ID NO: 22156 - DNA, 21 bp, synthetic construct
  misc_feature 1..21: note = Description of Artificial Sequence: Synthetic oligonucleotide
  source 1..21: mol_type = other DNA
gacaacagcaccggcatcaga

SEQ ID NO: 22157 - DNA, 21 bp, synthetic construct
  misc_feature 1..21: note = Description of Artificial Sequence: Synthetic oligonucleotide
  source 1..21: mol_type = other DNA
gatactcttgataggtctagg

SEQ ID NO: 22158 - DNA, 21 bp, synthetic construct
  misc_feature 1..21: note = Description of Artificial Sequence: Synthetic oligonucleotide
  source 1..21: mol_type = other DNA
gccagcaacaacagccaaagc

SEQ ID NO: 22159 - DNA, 21 bp, synthetic construct
  misc_feature 1..21: note = Description of Artificial Sequence: Synthetic oligonucleotide
  source 1..21: mol_type = other DNA
gccagccccaccaaaagcatc

SEQ ID NO: 22160 - DNA, 21 bp, synthetic construct
  misc_feature 1..21: note = Description of Artificial Sequence: Synthetic oligonucleotide
  source 1..21: mol_type = other DNA
ggtcctactaatgttcaggct

SEQ ID NO: 22161 - DNA, 21 bp, synthetic construct
  misc_feature 1..21: note = Description of Artificial Sequence: Synthetic oligonucleotide
  source 1..21: mol_type = other DNA
gtgggggtggataaggtggct

SEQ ID NO: 22162 - DNA, 21 bp, synthetic construct
  misc_feature 1..21: note = Description of Artificial Sequence: Synthetic oligonucleotide
  source 1..21: mol_type = other DNA
tcgtcgggtcagtctatgggt

SEQ ID NO: 22163 - DNA, 21 bp, synthetic construct
  misc_feature 1..21: note = Description of Artificial Sequence: Synthetic oligonucleotide
  source 1..21: mol_type = other DNA
agcggcaccaaagtcgccctc

SEQ ID NO: 22164 - DNA, 21 bp, synthetic construct
  misc_feature 1..21: note = Description of Artificial Sequence: Synthetic oligonucleotide
  source 1..21: mol_type = other DNA
gctgcggtgagttcgcctagt

SEQ ID NO: 22165 - DNA, 21 bp, synthetic construct
  misc_feature 1..21: note = Description of Artificial Sequence: Synthetic oligonucleotide
  source 1..21: mol_type = other DNA
cacggcgccaacaacgtccaa

SEQ ID NO: 22166 - DNA, 21 bp, synthetic construct
  misc_feature 1..21: note = Description of Artificial Sequence: Synthetic oligonucleotide
  source 1..21: mol_type = other DNA
aatacttcggatactaagaat

SEQ ID NO: 22167 - DNA, 21 bp, synthetic construct
  misc_feature 1..21: note = Description of Artificial Sequence: Synthetic oligonucleotide
  source 1..21: mol_type = other DNA
aatcccactaatgatcagaag

SEQ ID NO: 22168 - DNA, 21 bp, synthetic construct
  misc_feature 1..21: note = Description of Artificial Sequence: Synthetic oligonucleotide
  source 1..21: mol_type = other DNA
agcacccaaaaccacggcaac

SEQ ID NO: 22169 - DNA, 21 bp, synthetic construct
  misc_feature 1..21: note = Description of Artificial Sequence: Synthetic oligonucleotide
  source 1..21: mol_type = other DNA
caaggcaacaacaccctcatg

SEQ ID NO: 22170 - DNA, 21 bp, synthetic construct
  misc_feature 1..21: note = Description of Artificial Sequence: Synthetic oligonucleotide
  source 1..21: mol_type = other DNA
ctcgccatccccgacaaaggc

SEQ ID NO: 22171 - DNA, 21 bp, synthetic construct
  misc_feature 1..21: note = Description of Artificial Sequence: Synthetic oligonucleotide
  source 1..21: mol_type = other DNA
gccctcagcggcggcaacagc

SEQ ID NO: 22172 - DNA, 21 bp, synthetic construct
  misc_feature 1..21: note = Description of Artificial Sequence: Synthetic oligonucleotide
  source 1..21: mol_type = other DNA
gtcgccgccacccccccccaa

SEQ ID NO: 22173 - DNA, 21 bp, synthetic construct
  misc_feature 1..21: note = Description of Artificial Sequence: Synthetic oligonucleotide
  source 1..21: mol_type = other DNA
aaagccggcagcagcgtcggc

SEQ ID NO: 22174 - DNA, 21 bp, synthetic construct
  misc_feature 1..21: note = Description of Artificial Sequence: Synthetic oligonucleotide
  source 1..21: mol_type = other DNA
attggtgctgggaatccttct

SEQ ID NO: 22175 - DNA, 21 bp, synthetic construct
  misc_feature 1..21: note = Description of Artificial Sequence: Synthetic oligonucleotide
  source 1..21: mol_type = other DNA
cacaaagacagagaaaacaaa

SEQ ID NO: 22176 - DNA, 21 bp, synthetic construct
  misc_feature 1..21: note = Description of Artificial Sequence: Synthetic oligonucleotide
  source 1..21: mol_type = other DNA
cagaatagtaatcagctgaag

SEQ ID NO: 22177 - DNA, 21 bp, synthetic construct
  misc_feature 1..21: note = Description of Artificial Sequence: Synthetic oligonucleotide
  source 1..21: mol_type = other DNA
ggtacgactaatacgagtagt

SEQ ID NO: 22178 - DNA, 21 bp, synthetic construct
  misc_feature 1..21: note = Description of Artificial Sequence: Synthetic oligonucleotide
  source 1..21: mol_type = other DNA
tcgcctgatcatgctaagagt

SEQ ID NO: 22179 - DNA, 21 bp, synthetic construct
  misc_feature 1..21: note = Description of Artificial Sequence: Synthetic oligonucleotide
  source 1..21: mol_type = other DNA
ctgccggtgaattctactaag

SEQ ID NO: 22180 - DNA, 21 bp, synthetic construct
  misc_feature 1..21: note = Description of Artificial Sequence: Synthetic oligonucleotide
  source 1..21: mol_type = other DNA
agcggcaccaaagtcagcgaa

SEQ ID NO: 22181 - DNA, 21 bp, synthetic construct
  misc_feature 1..21: note = Description of Artificial Sequence: Synthetic oligonucleotide
  source 1..21: mol_type = other DNA
cccctcagcggcaaaggcccc

SEQ ID NO: 22182 - DNA, 21 bp, synthetic construct
  misc_feature 1..21: note = Description of Artificial Sequence: Synthetic oligonucleotide
  source 1..21: mol_type = other DNA
gccaacagccaccaaaacacc

SEQ ID NO: 22183 - DNA, 21 bp, synthetic construct
  misc_feature 1..21: note = Description of Artificial Sequence: Synthetic oligonucleotide
  source 1..21: mol_type = other DNA
ggtgttgattcgagtaggggt

SEQ ID NO: 22184 - DNA, 21 bp, synthetic construct
  misc_feature 1..21: note = Description of Artificial Sequence: Synthetic oligonucleotide
  source 1..21: mol_type = other DNA
ggttcgaatcatagttcttct

SEQ ID NO: 22185 - DNA, 21 bp, synthetic construct
  misc_feature 1..21: note = Description of Artificial Sequence: Synthetic oligonucleotide
  source 1..21: mol_type = other DNA
accgacggcagcaaaggcagc

SEQ ID NO: 22186 - DNA, 21 bp, synthetic construct
  misc_feature 1..21: note = Description of Artificial Sequence: Synthetic oligonucleotide
  source 1..21: mol_type = other DNA
aatgggggtacgccgatgcgg

SEQ ID NO: 22187 - DNA, 21 bp, synthetic construct
  misc_feature 1..21: note = Description of Artificial Sequence: Synthetic oligonucleotide
  source 1..21: mol_type = other DNA
tcggctactacggttaattct

SEQ ID NO: 22188 - DNA, 21 bp, synthetic construct
  misc_feature 1..21: note = Description of Artificial Sequence: Synthetic oligonucleotide
  source 1..21: mol_type = other DNA
aacaccagcagccccgtcgtc

SEQ ID NO: 22189 - DNA, 21 bp, synthetic construct
  misc_feature 1..21: note = Description of Artificial Sequence: Synthetic oligonucleotide
  source 1..21: mol_type = other DNA
gacagcagccaccacggcaga

SEQ ID NO: 22190 - DNA, 21 bp, synthetic construct
  misc_feature 1..21: note = Description of Artificial Sequence: Synthetic oligonucleotide
  source 1..21: mol_type = other DNA
gacctcctcccccccggcaaa

SEQ ID NO: 22191 - DNA, 21 bp, synthetic construct
  misc_feature 1..21: note = Description of Artificial Sequence: Synthetic oligonucleotide
  source 1..21: mol_type = other DNA
agttctggtattggtggtgcg

SEQ ID NO: 22192 - DNA, 21 bp, synthetic construct
  misc_feature 1..21: note = Description of Artificial Sequence: Synthetic oligonucleotide
  source 1..21: mol_type = other DNA
accggcaaaaccagccccacc

SEQ ID NO: 22193 - DNA, 21 bp, synthetic construct
  misc_feature 1..21: note = Description of Artificial Sequence: Synthetic oligonucleotide
  source 1..21: mol_type = other DNA
accaccgtcaacagccccagc

SEQ ID NO: 22194 - DNA, 21 bp, synthetic construct
  misc_feature 1..21: note = Description of Artificial Sequence: Synthetic oligonucleotide
  source 1..21: mol_type = other DNA
aagacggggactggttcgtcg

SEQ ID NO: 22195 - DNA, 21 bp, synthetic construct
  misc_feature 1..21: note = Description of Artificial Sequence: Synthetic oligonucleotide
  source 1..21: mol_type = other DNA
accaaaggccaaacccccggc

SEQ ID NO: 22196 - DNA, 21 bp, synthetic construct
  misc_feature 1..21: note = Description of Artificial Sequence: Synthetic oligonucleotide
  source 1..21: mol_type = other DNA
accggcggccacaaaggcagc

SEQ ID NO: 22197 - DNA, 21 bp, synthetic construct
  misc_feature 1..21: note = Description of Artificial Sequence: Synthetic oligonucleotide
  source 1..21: mol_type = other DNA
acgcataatggtactgctgcg

SEQ ID NO: 22198 - DNA, 21 bp, synthetic construct
  misc_feature 1..21: note = Description of Artificial Sequence: Synthetic oligonucleotide
  source 1..21: mol_type = other DNA
agcaacagcagccccaccgtc

SEQ ID NO: 22199 - DNA, 21 bp, synthetic construct
  misc_feature 1..21: note = Description of Artificial Sequence: Synthetic oligonucleotide
  source 1..21: mol_type = other DNA
agcagcgcccaaaaagaccaa

SEQ ID NO: 22200 - DNA, 21 bp, synthetic construct
  misc_feature 1..21: note = Description of Artificial Sequence: Synthetic oligonucleotide
  source 1..21: mol_type = other DNA
agttctgggcagcctgtttct

SEQ ID NO: 22201 - DNA, 21 bp, synthetic construct
  misc_feature 1..21: note = Description of Artificial Sequence: Synthetic oligonucleotide
  source 1..21: mol_type = other DNA
atgaatgatgtgaagtctaat

SEQ ID NO: 22202 - DNA, 21 bp, synthetic construct
  misc_feature 1..21: note = Description of Artificial Sequence: Synthetic oligonucleotide
  source 1..21: mol_type = other DNA
ctcagagccggccaaggcatg

SEQ ID NO: 22203 - DNA, 21 bp, synthetic construct
  misc_feature 1..21: note = Description of Artificial Sequence: Synthetic oligonucleotide
  source 1..21: mol_type = other DNA
ctttcgggtgcgactagtgtt

SEQ ID NO: 22204 - DNA, 21 bp, synthetic construct
  misc_feature 1..21: note = Description of Artificial Sequence: Synthetic oligonucleotide
  source 1..21: mol_type = other DNA
gatactaagcagcctcagctt

SEQ ID NO: 22205 - DNA, 21 bp, synthetic construct
  misc_feature 1..21: note = Description of Artificial Sequence: Synthetic oligonucleotide
  source 1..21: mol_type = other DNA
gcgaagacggtgagttctggt

SEQ ID NO: 22206 - DNA, 21 bp, synthetic construct
  misc_feature 1..21: note = Description of Artificial Sequence: Synthetic oligonucleotide
  source 1..21: mol_type = other DNA
ggccccacccccgccaacagc

SEQ ID NO: 22207 - DNA, 21 bp, synthetic construct
  misc_feature 1..21: note = Description of Artificial Sequence: Synthetic oligonucleotide
  source 1..21: mol_type = other DNA
ggccccgaaagcagaaacagc

SEQ ID NO: 22208 - DNA, 21 bp, synthetic construct
  misc_feature 1..21: note = Description of Artificial Sequence: Synthetic oligonucleotide
  source 1..21: mol_type = other DNA
ggggatgggcataatgcgggt

SEQ ID NO: 22209 - DNA, 21 bp, synthetic construct
  misc_feature 1..21: note = Description of Artificial Sequence: Synthetic oligonucleotide
  source 1..21: mol_type = other DNA
gtcaccaacggcaccaccaga

SEQ ID NO: 22210 - DNA, 21 bp, synthetic construct
  misc_feature 1..21: note = Description of Artificial Sequence: Synthetic oligonucleotide
  source 1..21: mol_type = other DNA
gtcgccgaaagcaaagtcaac

SEQ ID NO: 22211 - DNA, 21 bp, synthetic construct
  misc_feature 1..21: note = Description of Artificial Sequence: Synthetic oligonucleotide
  source 1..21: mol_type = other DNA
gtcggcgaaagcaaccacagc

SEQ ID NO: 22212 - DNA, 21 bp, synthetic construct
  misc_feature 1..21: note = Description of Artificial Sequence: Synthetic oligonucleotide
  source 1..21: mol_type = other DNA
tctgagccttcgcagaagacg

SEQ ID NO: 22213 - DNA, 21 bp, synthetic construct
  misc_feature 1..21: note = Description of Artificial Sequence: Synthetic oligonucleotide
  source 1..21: mol_type = other DNA
tctggtgggcaggcgacgatg

SEQ ID NO: 22214 - DNA, 21 bp, synthetic construct
  misc_feature 1..21: note = Description of Artificial Sequence: Synthetic oligonucleotide
  source 1..21: mol_type = other DNA
accaccagcaccagagccgaa

SEQ ID NO: 22215 - DNA, 21 bp, synthetic construct
  misc_feature 1..21: note = Description of Artificial Sequence: Synthetic oligonucleotide
  source 1..21: mol_type = other DNA
agccaaagcaccagcaccctc

SEQ ID NO: 22216 - DNA, 21 bp, synthetic construct
  misc_feature 1..21: note = Description of Artificial Sequence: Synthetic oligonucleotide
  source 1..21: mol_type = other DNA
agcgtcctccccaacaaagcc

SEQ ID NO: 22217 - DNA, 21 bp, synthetic construct
  misc_feature 1..21: note = Description of Artificial Sequence: Synthetic oligonucleotide
  source 1..21: mol_type = other DNA
agcggcagcaccagcctcgcc

SEQ ID NO: 22218 - DNA, 21 bp, synthetic construct
  misc_feature 1..21: note = Description of Artificial Sequence: Synthetic oligonucleotide
  source 1..21: mol_type = other DNA
gaccccctcagcaccaacaga

SEQ ID NO: 22219 - DNA, 21 bp, synthetic construct
  misc_feature 1..21: note = Description of Artificial Sequence: Synthetic oligonucleotide
  source 1..21: mol_type = other DNA
gacgccagcgaaagaacccac

SEQ ID NO: 22220 - DNA, 21 bp, synthetic construct
  misc_feature 1..21: note = Description of Artificial Sequence: Synthetic oligonucleotide
  source 1..21: mol_type = other DNA
actacgcaggggaatggtcat

SEQ ID NO: 22221 - DNA, 21 bp, synthetic construct
  misc_feature 1..21: note = Description of Artificial Sequence: Synthetic oligonucleotide
  source 1..21: mol_type = other DNA
gctctggcgaagagtggtagt

SEQ ID NO: 22222 - DNA, 21 bp, synthetic construct
  misc_feature 1..21: note = Description of Artificial Sequence: Synthetic oligonucleotide
  source 1..21: mol_type = other DNA
gatgtggggtcttcgtcgaat

SEQ ID NO: 22223 - DNA, 21 bp, synthetic construct
  misc_feature 1..21: note = Description of Artificial Sequence: Synthetic oligonucleotide
  source 1..21: mol_type = other DNA
ggtactacgactcaggttaag

SEQ ID NO: 22224 - DNA, 21 bp, synthetic construct
  misc_feature 1..21: note = Description of Artificial Sequence: Synthetic oligonucleotide
  source 1..21: mol_type = other DNA
aagaatactggggcgccttcg

SEQ ID NO: 22225 - DNA, 21 bp, synthetic construct
  misc_feature 1..21: note = Description of Artificial Sequence: Synthetic oligonucleotide
  source 1..21: mol_type = other DNA
gaacacgccgacaaactcaaa

SEQ ID NO: 22226 - DNA, 21 bp, synthetic construct
  misc_feature 1..21: note = Description of Artificial Sequence: Synthetic oligonucleotide
  source 1..21: mol_type = other DNA
ggcagcaaaggcaacagcacc

SEQ ID NO: 22227 - DNA, 21 bp, synthetic construct
  misc_feature 1..21: note = Description of Artificial Sequence: Synthetic oligonucleotide
  source 1..21: mol_type = other DNA
ctcgccagcaaaagcagcacc

SEQ ID NO: 22228 - DNA, 21 bp, synthetic construct
  misc_feature 1..21: note = Description of Artificial Sequence: Synthetic oligonucleotide
  source 1..21: mol_type = other DNA
gaacaaagcagcctcaaaaac

SEQ ID NO: 22229 - DNA, 21 bp, synthetic construct
  misc_feature 1..21: note = Description of Artificial Sequence: Synthetic oligonucleotide
  source 1..21: mol_type = other DNA
gtcagcaccagcagacccagc

SEQ ID NO: 22230 - DNA, 21 bp, synthetic construct
  misc_feature 1..21: note = Description of Artificial Sequence: Synthetic oligonucleotide
  source 1..21: mol_type = other DNA
ttgaaggatacttctagtatt

SEQ ID NO: 22231 - DNA, 21 bp, synthetic construct
  misc_feature 1..21: note = Description of Artificial Sequence: Synthetic oligonucleotide
  source 1..21: mol_type = other DNA
actggggctggttcggtggct

SEQ ID NO: 22232 - DNA, 21 bp, synthetic construct
  misc_feature 1..21: note = Description of Artificial Sequence: Synthetic oligonucleotide
  source 1..21: mol_type = other DNA
cagcagattgggagtaaggag

SEQ ID NO: 22233 - DNA, 21 bp, synthetic construct
  misc_feature 1..21: note = Description of Artificial Sequence: Synthetic oligonucleotide
  source 1..21: mol_type = other DNA
gccctcagcagcaaaaacgtc

SEQ ID NO: 22234 - DNA, 21 bp, synthetic construct
  misc_feature 1..21: note = Description of Artificial Sequence: Synthetic oligonucleotide
  source 1..21: mol_type = other DNA
gctggtgataattctcagaag

SEQ ID NO: 22235 - DNA, 21 bp, synthetic construct
  misc_feature 1..21: note = Description of Artificial Sequence: Synthetic oligonucleotide
  source 1..21: mol_type = other DNA
ggtggtgagactccgttgaag

SEQ ID NO: 22236 - DNA, 21 bp, synthetic construct
  misc_feature 1..21: note = Description of Artificial Sequence: Synthetic oligonucleotide
  source 1..21: mol_type = other DNA
aaagccagcggcaacgccgtc

SEQ ID NO: 22237 - DNA, 21 bp, synthetic construct
  misc_feature 1..21: note = Description of Artificial Sequence: Synthetic oligonucleotide
  source 1..21: mol_type = other DNA
actacggcttcggatcatcgg

SEQ ID NO: 22238 - DNA, 21 bp, synthetic construct
  misc_feature 1..21: note = Description of Artificial Sequence: Synthetic oligonucleotide
  source 1..21: mol_type = other DNA
gtgggtacttctgctactact

SEQ ID NO: 22239 - DNA, 21 bp, synthetic construct
  misc_feature 1..21: note = Description of Artificial Sequence: Synthetic oligonucleotide
  source 1..21: mol_type = other DNA
aaccccggcggcagcaacaaa

SEQ ID NO: 22240 - DNA, 21 bp, synthetic construct
  misc_feature 1..21: note = Description of Artificial Sequence: Synthetic oligonucleotide
  source 1..21: mol_type = other DNA
accagcgcccccaccaacaaa

SEQ ID NO: 22241 - DNA, 21 bp, synthetic construct
  misc_feature 1..21: note = Description of Artificial Sequence: Synthetic oligonucleotide
  source 1..21: mol_type = other DNA
agcaaaagcaccggcgccatc

SEQ ID NO: 22242 - DNA, 21 bp, synthetic construct
  misc_feature 1..21: note = Description of Artificial Sequence: Synthetic oligonucleotide
  source 1..21: mol_type = other DNA
agccaacaacccagccaaggc

SEQ ID NO: 22243 - DNA, 21 bp, synthetic construct
  misc_feature 1..21: note = Description of Artificial Sequence: Synthetic oligonucleotide
  source 1..21: mol_type = other DNA
atgcatgagagtaagtcgctg

SEQ ID NO: 22244 - DNA, 21 bp, synthetic construct
  misc_feature 1..21: note = Description of Artificial Sequence: Synthetic oligonucleotide
  source 1..21: mol_type = other DNA
cagaattctacgggtacgcag

SEQ ID NO: 22245 - DNA, 21 bp, synthetic construct
  misc_feature 1..21: note = Description of Artificial Sequence: Synthetic oligonucleotide
  source 1..21: mol_type = other DNA
caggctcatgatagtaagtcg

SEQ ID NO: 22246 - DNA, 21 bp, synthetic construct
  misc_feature 1..21: note = Description of Artificial Sequence: Synthetic oligonucleotide
  source 1..21: mol_type = other DNA
gaaggcagagacagcaacggc

SEQ ID NO: 22247 - DNA, 21 bp, synthetic construct
  misc_feature 1..21: note = Description of Artificial Sequence: Synthetic oligonucleotide
  source 1..21: mol_type = other DNA
gacagagccaacagcaccagc

SEQ ID NO: 22248 - DNA, 21 bp, synthetic construct
  misc_feature 1..21: note = Description of Artificial Sequence: Synthetic oligonucleotide
  source 1..21: mol_type = other DNA
gatgggagtacgggtcctcgt

SEQ ID NO: 22249 - DNA, 21 bp, synthetic construct
  misc_feature 1..21: note = Description of Artificial Sequence: Synthetic oligonucleotide
  source 1..21: mol_type = other DNA
ggcagcacccaaagcaccagc

SEQ ID NO: 22250 - DNA, 21 bp, synthetic construct
  misc_feature 1..21: note = Description of Artificial Sequence: Synthetic oligonucleotide
  source 1..21: mol_type = other DNA
gggagtactactagtgtgcat

SEQ ID NO: 22251 - DNA, 21 bp, synthetic construct
  misc_feature 1..21: note = Description of Artificial Sequence: Synthetic oligonucleotide
  source 1..21: mol_type = other DNA
gtcaacggcagccaaatgctc

SEQ ID NO: 22252 - DNA, 21 bp, synthetic construct
  misc_feature 1..21: note = Description of Artificial Sequence: Synthetic oligonucleotide
  source 1..21: mol_type = other DNA
aatccggcgcagactctttct

SEQ ID NO: 22253 - DNA, 21 bp, synthetic construct
  misc_feature 1..21: note = Description of Artificial Sequence: Synthetic oligonucleotide
  source 1..21: mol_type = other DNA
agcggcgccacccccatcatg

SEQ ID NO: 22254 - DNA, 21 bp, synthetic construct
  misc_feature 1..21: note = Description of Artificial Sequence: Synthetic oligonucleotide
  source 1..21: mol_type = other DNA
gacaacaccggcagcagaagc

SEQ ID NO: 22255 - DNA, 21 bp, synthetic construct
  misc_feature 1..21: note = Description of Artificial Sequence: Synthetic oligonucleotide
  source 1..21: mol_type = other DNA
ggtggtgcggcttcgactctc

SEQ ID NO: 22256 - DNA, 21 bp, synthetic construct
  misc_feature 1..21: note = Description of Artificial Sequence: Synthetic oligonucleotide
  source 1..21: mol_type = other DNA
acgactacgcgttctaatagt

SEQ ID NO: 22257 - DNA, 21 bp, synthetic construct
  misc_feature 1..21: note = Description of Artificial Sequence: Synthetic oligonucleotide
  source 1..21: mol_type = other DNA
aacgcccacgacaccaaaggc

SEQ ID NO: 22258 - DNA, 21 bp, synthetic construct
  misc_feature 1..21: note = Description of Artificial Sequence: Synthetic oligonucleotide
  source 1..21: mol_type = other DNA
accagccaaagcaaaatcatc

SEQ ID NO: 22259 - DNA, 21 bp, synthetic construct
  misc_feature 1..21: note = Description of Artificial Sequence: Synthetic oligonucleotide
  source 1..21: mol_type = other DNA
agaggcaacggcgccagcggc

SEQ ID NO: 22260 - DNA, 21 bp, synthetic construct
  misc_feature 1..21: note = Description of Artificial Sequence: Synthetic oligonucleotide
  source 1..21: mol_type = other DNA
catcattcgcaggattcgaag

SEQ ID NO: 22261 - DNA, 21 bp, synthetic construct
  misc_feature 1..21: note = Description of Artificial Sequence: Synthetic oligonucleotide
  source 1..21: mol_type = other DNA
gccagcgccaccggcaacgcc

SEQ ID NO: 22262 - DNA, 21 bp, synthetic construct
  misc_feature 1..21: note = Description of Artificial Sequence: Synthetic oligonucleotide
  source 1..21: mol_type = other DNA
tcggaggctaagacggtgcat

SEQ ID NO: 22263 - DNA, 21 bp, synthetic construct
  misc_feature 1..21: note = Description of Artificial Sequence: Synthetic oligonucleotide
  source 1..21: mol_type = other DNA
tctaataagtctagtgctgtt

SEQ ID NO: 22264 - DNA, 21 bp, synthetic construct
  misc_feature 1..21: note = Description of Artificial Sequence: Synthetic oligonucleotide
  source 1..21: mol_type = other DNA
gacagcacccccggcagaagc

SEQ ID NO: 22265 - DNA, 21 bp, synthetic construct
  misc_feature 1..21: note = Description of Artificial Sequence: Synthetic oligonucleotide
  source 1..21: mol_type = other DNA
atcgccaaacccgacagcacc

SEQ ID NO: 22266 - DNA, 21 bp, synthetic construct
  misc_feature 1..21: note = Description of Artificial Sequence: Synthetic oligonucleotide
  source 1..21: mol_type = other DNA
aacgccgaagtcagaagcagc

SEQ ID NO: 22267 - DNA, 21 bp, synthetic construct
  misc_feature 1..21: note = Description of Artificial Sequence: Synthetic oligonucleotide
  source 1..21: mol_type = other DNA
gagcgtcctaataatgcgggt

SEQ ID NO: 22268 - DNA, 21 bp, synthetic construct
  misc_feature 1..21: note = Description of Artificial Sequence: Synthetic oligonucleotide
  source 1..21: mol_type = other DNA
tctagtgggactagtagttcg

SEQ ID NO: 22269 - DNA, 21 bp, synthetic construct
  misc_feature 1..21: note = Description of Artificial Sequence: Synthetic oligonucleotide
  source 1..21: mol_type = other DNA
tctgagggacagattcggagt

SEQ ID NO: 22270 - DNA, 21 bp, synthetic construct
  misc_feature 1..21: note = Description of Artificial Sequence: Synthetic oligonucleotide
  source 1..21: mol_type = other DNA
acgagtcatacgcctcatacg

SEQ ID NO: 22271 - DNA, 21 bp, synthetic construct
  misc_feature 1..21: note = Description of Artificial Sequence: Synthetic oligonucleotide
  source 1..21: mol_type = other DNA
agcaacggcggcagcggcagc

SEQ ID NO: 22272 - DNA, 21 bp, synthetic construct
  misc_feature 1..21: note = Description of Artificial Sequence: Synthetic oligonucleotide
  source 1..21: mol_type = other DNA
atcaaaaccaccagcaacgcc

SEQ ID NO: 22273 - DNA, 21 bp, synthetic construct
  misc_feature 1..21: note = Description of Artificial Sequence: Synthetic oligonucleotide
  source 1..21: mol_type = other DNA
ggcaacatggtcaaacccagc

SEQ ID NO: 22274 - DNA, 21 bp, synthetic construct
  misc_feature 1..21: note = Description of Artificial Sequence: Synthetic oligonucleotide
  source 1..21: mol_type = other DNA
ggtagggagcctgttcagggg

SEQ ID NO: 22275 - DNA, 21 bp, synthetic construct
  misc_feature 1..21: note = Description of Artificial Sequence: Synthetic oligonucleotide
  source 1..21: mol_type = other DNA
caagtcagcagcgaagccagc

SEQ ID NO: 22276 - DNA, 21 bp, synthetic construct
  misc_feature 1..21: note = Description of Artificial Sequence: Synthetic oligonucleotide
  source 1..21: mol_type = other DNA
gacagcggcaacacccccaga

SEQ ID NO: 22277 - DNA, 21 bp, synthetic construct
  misc_feature 1..21: note = Description of Artificial Sequence: Synthetic oligonucleotide
  source 1..21: mol_type = other DNA
ggcaccaacaccagcatggcc

SEQ ID NO: 22278 - DNA, 21 bp, synthetic construct
  misc_feature 1..21: note = Description of Artificial Sequence: Synthetic oligonucleotide
  source 1..21: mol_type = other DNA
ggtgattctaagccgaatctt

SEQ ID NO: 22279 - DNA, 21 bp, synthetic construct
  misc_feature 1..21: note = Description of Artificial Sequence: Synthetic oligonucleotide
  source 1..21: mol_type = other DNA
gtcaccagcaccaccagcagc

SEQ ID NO: 22280 - DNA, 21 bp, synthetic construct
  misc_feature 1..21: note = Description of Artificial Sequence: Synthetic oligonucleotide
  source 1..21: mol_type = other DNA
tatgctgatgctagggcgtct

SEQ ID NO: 22281 - DNA, 21 bp, synthetic construct
  misc_feature 1..21: note = Description of Artificial Sequence: Synthetic oligonucleotide
  source 1..21: mol_type = other DNA
ctgcctatgggtgggcagaat

SEQ ID NO: 22282 - DNA, 21 bp, synthetic construct
  misc_feature 1..21: note = Description of Artificial Sequence: Synthetic oligonucleotide
  source 1..21: mol_type = other DNA
accatgagcggcaaaggcgaa

SEQ ID NO: 22283 - DNA, 21 bp, synthetic construct
  misc_feature 1..21: note = Description of Artificial Sequence: Synthetic oligonucleotide
  source 1..21: mol_type = other DNA
gctacgactccgagtacgggt

SEQ ID NO: 22284 - DNA, 21 bp, synthetic construct
  misc_feature 1..21: note = Description of Artificial Sequence: Synthetic oligonucleotide
  source 1..21: mol_type = other DNA
gtccaagaaagccaaagcaga

SEQ ID NO: 22285 - DNA, 21 bp, synthetic construct
  misc_feature 1..21: note = Description of Artificial Sequence: Synthetic oligonucleotide
  source 1..21: mol_type = other DNA
ttgagtggtgctagtgcgccg

SEQ ID NO: 22286 - DNA, 21 bp, synthetic construct
  misc_feature 1..21: note = Description of Artificial Sequence: Synthetic oligonucleotide
  source 1..21: mol_type = other DNA
ttggagactaataagcctcct

SEQ ID NO: 22287 - DNA, 21 bp, synthetic construct
  misc_feature 1..21: note = Description of Artificial Sequence: Synthetic oligonucleotide
  source 1..21: mol_type = other DNA
atgaaaagcgacagccaactc

SEQ ID NO: 22288 - DNA, 21 bp, synthetic construct
  misc_feature 1..21: note = Description of Artificial Sequence: Synthetic oligonucleotide
  source 1..21: mol_type = other DNA
ggcgtcaacggcacccaaaaa

SEQ ID NO: 22289 - DNA, 21 bp, synthetic construct
  misc_feature 1..21: note = Description of Artificial Sequence: Synthetic oligonucleotide
  source 1..21: mol_type = other DNA
gggagtgctaagcagaatgtg

SEQ ID NO: 22290 - DNA, 21 bp, synthetic construct
  misc_feature 1..21: note = Description of Artificial Sequence: Synthetic oligonucleotide
  source 1..21: mol_type = other DNA
aaaaccgtcagcaccagcagc

SEQ ID NO: 22291 - DNA, 21 bp, synthetic construct
  misc_feature 1..21: note = Description of Artificial Sequence: Synthetic oligonucleotide
  source 1..21: mol_type = other DNA
caaaccggcgccagcaacatc

SEQ ID NO: 22292 - DNA, 21 bp, synthetic construct
  misc_feature 1..21: note = Description of Artificial Sequence: Synthetic oligonucleotide
  source 1..21: mol_type = other DNA
gacaacagccacaaaatcagc

SEQ ID NO: 22293 - DNA, 21 bp, synthetic construct
  misc_feature 1..21: note = Description of Artificial Sequence: Synthetic oligonucleotide
  source 1..21: mol_type = other DNA
ggcagcaacgacggcgtcaaa

SEQ ID NO: 22294 - DNA, 21 bp, synthetic construct
  misc_feature 1..21: note = Description of Artificial Sequence: Synthetic oligonucleotide
  source 1..21: mol_type = other DNA
tctgctggtgcgcagagtact

SEQ ID NO: 22295 - DNA, 21 bp, synthetic construct
  misc_feature 1..21: note = Description of Artificial Sequence: Synthetic oligonucleotide
  source 1..21: mol_type = other DNA
gctaatactagtacgtcgtcg

SEQ ID NO: 22296 - DNA, 21 bp, synthetic construct
  misc_feature 1..21: note = Description of Artificial Sequence: Synthetic oligonucleotide
  source 1..21: mol_type = other DNA
cataatgggaagaatatgggg

SEQ ID NO: 22297 - DNA, 21 bp, synthetic construct
  misc_feature 1..21: note = Description of Artificial Sequence: Synthetic oligonucleotide
  source 1..21: mol_type = other DNA
agccacagcagccccgccaac

SEQ ID NO: 22298 - DNA, 21 bp, synthetic construct
  misc_feature 1..21: note = Description of Artificial Sequence: Synthetic oligonucleotide
  source 1..21: mol_type = other DNA
agtggtgagcgtgttgggcag

SEQ ID NO: 22299 - DNA, 21 bp, synthetic construct
  misc_feature 1..21: note = Description of Artificial Sequence: Synthetic oligonucleotide
  source 1..21: mol_type = other DNA
ctcaacaccggccaaagccac

SEQ ID NO: 22300 - DNA, 21 bp, synthetic construct
  misc_feature 1..21: note = Description of Artificial Sequence: Synthetic oligonucleotide
  source 1..21: mol_type = other DNA
gccaacaaaagcaacgccacc

SEQ ID NO: 22301 - DNA, 21 bp, synthetic construct
  misc_feature 1..21: note = Description of Artificial Sequence: Synthetic oligonucleotide
  source 1..21: mol_type = other DNA
gccgtcagcgccagccccgtc

SEQ ID NO: 22302 - DNA, 21 bp, synthetic construct
  misc_feature 1..21: note = Description of Artificial Sequence: Synthetic oligonucleotide
  source 1..21: mol_type = other DNA
gctaagaattctgctacgagt

SEQ ID NO: 22303 - DNA, 21 bp, synthetic construct
  misc_feature 1..21: note = Description of Artificial Sequence: Synthetic oligonucleotide
  source 1..21: mol_type = other DNA
tcgcataagagtgagaatgtt

SEQ ID NO: 22304 - DNA, 21 bp, synthetic construct
  misc_feature 1..21: note = Description of Artificial Sequence: Synthetic oligonucleotide
  source 1..21: mol_type = other DNA
aacggcacccaaagcatgagc

SEQ ID NO: 22305 - DNA, 21 bp, synthetic construct
  misc_feature 1..21: note = Description of Artificial Sequence: Synthetic oligonucleotide
  source 1..21: mol_type = other DNA
aaaagagaaagccaaagcgcc

SEQ ID NO: 22306 - DNA, 21 bp, synthetic construct
  misc_feature 1..21: note = Description of Artificial Sequence: Synthetic oligonucleotide
  source 1..21: mol_type = other DNA
accggcagcaaaaccgacagc

SEQ ID NO: 22307 - DNA, 21 bp, synthetic construct
  misc_feature 1..21: note = Description of Artificial Sequence: Synthetic oligonucleotide
  source 1..21: mol_type = other DNA
atcagcggcaaagaaagcagc

SEQ ID NO: 22308 - DNA, 21 bp, synthetic construct
  misc_feature 1..21: note = Description of Artificial Sequence: Synthetic oligonucleotide
  source 1..21: mol_type = other DNA
gacaaaggcagcggcaaaagc

SEQ ID NO: 22309 - DNA, 21 bp, synthetic construct
  misc_feature 1..21: note = Description of Artificial Sequence: Synthetic oligonucleotide
  source 1..21: mol_type = other DNA
gagaagtcgagtactccgggg

SEQ ID NO: 22310 - DNA, 21 bp, synthetic construct
  misc_feature 1..21: note = Description of Artificial Sequence: Synthetic oligonucleotide
  source 1..21: mol_type = other DNA
gatatggggtctactcagaag

SEQ ID NO: 22311 - DNA, 21 bp, synthetic construct
  misc_feature 1..21: note = Description of Artificial Sequence: Synthetic oligonucleotide
  source 1..21: mol_type = other DNA
gcccacaacacccccagcagc

SEQ ID NO: 22312 - DNA, 21 bp, synthetic construct
  misc_feature 1..21: note = Description of Artificial Sequence: Synthetic oligonucleotide
  source 1..21: mol_type = other DNA
tctaatgattctcgtttgcag

SEQ ID NO: 22313 - DNA, 21 bp, synthetic construct
  misc_feature 1..21: note = Description of Artificial Sequence: Synthetic oligonucleotide
  source 1..21: mol_type = other DNA
actgcggagaagtcgattaag

SEQ ID NO: 22314 - DNA, 21 bp, synthetic construct
  misc_feature 1..21: note = Description of Artificial Sequence: Synthetic oligonucleotide
  source 1..21: mol_type = other DNA
gaggggactactaattctaag

SEQ ID NO: 22315 - DNA, 21 bp, synthetic construct
  misc_feature 1..21: note = Description of Artificial Sequence: Synthetic oligonucleotide
  source 1..21: mol_type = other DNA
gacaccgtcggcaccaccaaa

SEQ ID NO: 22316 - DNA, 21 bp, synthetic construct
  misc_feature 1..21: note = Description of Artificial Sequence: Synthetic oligonucleotide
  source 1..21: mol_type = other DNA
caagacgtcaaaatggccccc

SEQ ID NO: 22317 - DNA, 21 bp, synthetic construct
  misc_feature 1..21: note = Description of Artificial Sequence: Synthetic oligonucleotide
  source 1..21: mol_type = other DNA
aaaaccgacagcggcggccaa

SEQ ID NO: 22318 - DNA, 21 bp, synthetic construct
  misc_feature 1..21: note = Description of Artificial Sequence: Synthetic oligonucleotide
  source 1..21: mol_type = other DNA
accgaaggcaaaagcatgggc

SEQ ID NO: 22319 - DNA, 21 bp, synthetic construct
  misc_feature 1..21: note = Description of Artificial Sequence: Synthetic oligonucleotide
  source 1..21: mol_type = other DNA
agcagcgccagcggccaaccc

SEQ ID NO: 22320 - DNA, 21 bp, synthetic construct
  misc_feature 1..21: note = Description of Artificial Sequence: Synthetic oligonucleotide
  source 1..21: mol_type = other DNA
agtcagaagccttcgtctggt

SEQ ID NO: 22321 - DNA, 21 bp, synthetic construct
  misc_feature 1..21: note = Description of Artificial Sequence: Synthetic oligonucleotide
  source 1..21: mol_type = other DNA
ggggttacgacgaatccgggt

SEQ ID NO: 22322 - DNA, 21 bp, synthetic construct
  misc_feature 1..21: note = Description of Artificial Sequence: Synthetic oligonucleotide
  source 1..21: mol_type = other DNA
tctgctgctcggaaggatggg

SEQ ID NO: 22323 - DNA, 21 bp, synthetic construct
  misc_feature 1..21: note = Description of Artificial Sequence: Synthetic oligonucleotide
  source 1..21: mol_type = other DNA
agcgaaagcaaacaaaccgtc

SEQ ID NO: 22324 - DNA, 21 bp, synthetic construct
  misc_feature 1..21: note = Description of Artificial Sequence: Synthetic oligonucleotide
  source 1..21: mol_type = other DNA
agcggcggcagccaaagcagc

SEQ ID NO: 22325 - DNA, 21 bp, synthetic construct
  misc_feature 1..21: note = Description of Artificial Sequence: Synthetic oligonucleotide
  source 1..21: mol_type = other DNA
atgggtaatgagagggtgatg

SEQ ID NO: 22326 - DNA, 21 bp, synthetic construct
  misc_feature 1..21: note = Description of Artificial Sequence: Synthetic oligonucleotide
  source 1..21: mol_type = other DNA
cagtctcctgcgaagagtggg

SEQ ID NO: 22327 - DNA, 21 bp, synthetic construct
  misc_feature 1..21: note = Description of Artificial Sequence: Synthetic oligonucleotide
  source 1..21: mol_type = other DNA
ctggtgtctgatcattcgaag

SEQ ID NO: 22328 - DNA, 21 bp, synthetic construct
  misc_feature 1..21: note = Description of Artificial Sequence: Synthetic oligonucleotide
  source 1..21: mol_type = other DNA
gacatcacccccggcaaaagc

SEQ ID NO: 22329 - DNA, 21 bp, synthetic construct
  misc_feature 1..21: note = Description of Artificial Sequence: Synthetic oligonucleotide
  source 1..21: mol_type = other DNA
gagatgtcggggaagaatgat

SEQ ID NO: 22330 - DNA, 21 bp, synthetic construct
  misc_feature 1..21: note = Description of Artificial Sequence: Synthetic oligonucleotide
  source 1..21: mol_type = other DNA
gccaacagcgacaaaatgaga

SEQ ID NO: 22331 - DNA, 21 bp, synthetic construct
  misc_feature 1..21: note = Description of Artificial Sequence: Synthetic oligonucleotide
  source 1..21: mol_type = other DNA
accaacgcccccagccccatg

SEQ ID NO: 22332 - DNA, 21 bp, synthetic construct
  misc_feature 1..21: note = Description of Artificial Sequence: Synthetic oligonucleotide
  source 1..21: mol_type = other DNA
gccgccgcccacggcaacgcc

SEQ ID NO: 22333 - DNA, 21 bp, synthetic construct
  misc_feature 1..21: note = Description of Artificial Sequence: Synthetic oligonucleotide
  source 1..21: mol_type = other DNA
tctagtaggacgccttcgacg

SEQ ID NO: 22334 - DNA, 21 bp, synthetic construct
  misc_feature 1..21: note = Description of Artificial Sequence: Synthetic oligonucleotide
  source 1..21: mol_type = other DNA
aaagacgccccccccacccaa

SEQ ID NO: 22335 - DNA, 21 bp, synthetic construct
  misc_feature 1..21: note = Description of Artificial Sequence: Synthetic oligonucleotide
  source 1..21: mol_type = other DNA
aacgtcagccccaacggcgcc

SEQ ID NO: 22336 - DNA, 21 bp, synthetic construct
  misc_feature 1..21: note = Description of Artificial Sequence: Synthetic oligonucleotide
  source 1..21: mol_type = other DNA
actacttctgggagttattcg

SEQ ID NO: 22337 - DNA, 21 bp, synthetic construct
  misc_feature 1..21: note = Description of Artificial Sequence: Synthetic oligonucleotide
  source 1..21: mol_type = other DNA
agaagagaaggcgaaagcaaa

SEQ ID NO: 22338 - DNA, 21 bp, synthetic construct
  misc_feature 1..21: note = Description of Artificial Sequence: Synthetic oligonucleotide
  source 1..21: mol_type = other DNA
agcaacaccagagaaatcacc

SEQ ID NO: 22339 - DNA, 21 bp, synthetic construct
  misc_feature 1..21: note = Description of Artificial Sequence: Synthetic oligonucleotide
  source 1..21: mol_type = other DNA
agcaacagcgacagacccatg

SEQ ID NO: 22340 - DNA, 21 bp, synthetic construct
  misc_feature 1..21: note = Description of Artificial Sequence: Synthetic oligonucleotide
  source 1..21: mol_type = other DNA
agcaccacccaccccagccaa

SEQ ID NO: 22341 - DNA, 21 bp, synthetic construct
  misc_feature 1..21: note = Description of Artificial Sequence: Synthetic oligonucleotide
  source 1..21: mol_type = other DNA
agtttgggttctggtccgcat

SEQ ID NO: 22342 - DNA, 21 bp, synthetic construct
  misc_feature 1..21: note = Description of Artificial Sequence: Synthetic oligonucleotide
  source 1..21: mol_type = other DNA
atcagcagcggcacccccagc

SEQ ID NO: 22343 - DNA, 21 bp, synthetic construct
  misc_feature 1..21: note = Description of Artificial Sequence: Synthetic oligonucleotide
  source 1..21: mol_type = other DNA
gacagcagcgaaagagtcaga

SEQ ID NO: 22344 - DNA, 21 bp, synthetic construct
  misc_feature 1..21: note = Description of Artificial Sequence: Synthetic oligonucleotide
  source 1..21: mol_type = other DNA
gagtctgggtcgtctcggggg

SEQ ID NO: 22345 - DNA, 21 bp, synthetic construct
  misc_feature 1..21: note = Description of Artificial Sequence: Synthetic oligonucleotide
  source 1..21: mol_type = other DNA
ggcagcaccaaccccggcgcc

SEQ ID NO: 22346 - DNA, 21 bp, synthetic construct
  misc_feature 1..21: note = Description of Artificial Sequence: Synthetic oligonucleotide
  source 1..21: mol_type = other DNA
caaggcagacccagcagcagc

SEQ ID NO: 22347 - DNA, 21 bp, synthetic construct
  misc_feature 1..21: note = Description of Artificial Sequence: Synthetic oligonucleotide
  source 1..21: mol_type = other DNA
aacggccaaaccgcccacagc

SEQ ID NO: 22348 - DNA, 21 bp, synthetic construct
  misc_feature 1..21: note = Description of Artificial Sequence: Synthetic oligonucleotide
  source 1..21: mol_type = other DNA
atgcctgctaaggatcgtggt

SEQ ID NO: 22349 - DNA, 21 bp, synthetic construct
  misc_feature 1..21: note = Description of Artificial Sequence: Synthetic oligonucleotide
  source 1..21: mol_type = other DNA
accgaagacagaagcctcaga

SEQ ID NO: 22350 - DNA, 21 bp, synthetic construct
  misc_feature 1..21: note = Description of Artificial Sequence: Synthetic oligonucleotide
  source 1..21: mol_type = other DNA
agcggcaccagcaaaagcgtc

SEQ ID NO: 22351 - DNA, 21 bp, synthetic construct
  misc_feature 1..21: note = Description of Artificial Sequence: Synthetic oligonucleotide
  source 1..21: mol_type = other DNA
aagggtgatcgggtgcagggt

SEQ ID NO: 22352 - DNA, 21 bp, synthetic construct
  misc_feature 1..21: note = Description of Artificial Sequence: Synthetic oligonucleotide
  source 1..21: mol_type = other DNA
aatactgcgactagtgagagg

SEQ ID NO: 22353 - DNA, 21 bp, synthetic construct
  misc_feature 1..21: note = Description of Artificial Sequence: Synthetic oligonucleotide
  source 1..21: mol_type = other DNA
ggcagcgacatcaaaaaaacc

SEQ ID NO: 22354 - DNA, 21 bp, synthetic construct
  misc_feature 1..21: note = Description of Artificial Sequence: Synthetic oligonucleotide
  source 1..21: mol_type = other DNA
agcaacgacaaaagcagccac

SEQ ID NO: 22355 - DNA, 21 bp, synthetic construct
  misc_feature 1..21: note = Description of Artificial Sequence: Synthetic oligonucleotide
  source 1..21: mol_type = other DNA
ggccaagaaagcaccgccaga

SEQ ID NO: 22356 - DNA, 21 bp, synthetic construct
  misc_feature 1..21: note = Description of Artificial Sequence: Synthetic oligonucleotide
  source 1..21: mol_type = other DNA
ggtggtcgtcctgagaatgcg

SEQ ID NO: 22357 - DNA, 21 bp, synthetic construct
  misc_feature 1..21: note = Description of Artificial Sequence: Synthetic oligonucleotide
  source 1..21: mol_type = other DNA
actcctaattctgcttcgaat

SEQ ID NO: 22358 - DNA, 21 bp, synthetic construct
  misc_feature 1..21: note = Description of Artificial Sequence: Synthetic oligonucleotide
  source 1..21: mol_type = other DNA
agcgccctcagcagccccagc

SEQ ID NO: 22359 - DNA, 21 bp, synthetic construct
  misc_feature 1..21: note = Description of Artificial Sequence: Synthetic oligonucleotide
  source 1..21: mol_type = other DNA
ctcgccagcaacggcaacgtc

SEQ ID NO: 22360 - DNA, 21 bp, synthetic construct
  misc_feature 1..21: note = Description of Artificial Sequence: Synthetic oligonucleotide
  source 1..21: mol_type = other DNA
gcttcgcagaagcctccggtt

SEQ ID NO: 22361 - DNA, 21 bp, synthetic construct
  misc_feature 1..21: note = Description of Artificial Sequence: Synthetic oligonucleotide
  source 1..21: mol_type = other DNA
accgccggcagcaaaggcaac

SEQ ID NO: 22362 - DNA, 21 bp, synthetic construct
  misc_feature 1..21: note = Description of Artificial Sequence: Synthetic oligonucleotide
  source 1..21: mol_type = other DNA
agcgcccaaaaaagcgtcggc

SEQ ID NO: 22363 - DNA, 21 bp, synthetic construct
  misc_feature 1..21: note = Description of Artificial Sequence: Synthetic oligonucleotide
  source 1..21: mol_type = other DNA
cgtggtgctcctaatactacg

SEQ ID NO: 22364 - DNA, 21 bp, synthetic construct
  misc_feature 1..21: note = Description of Artificial Sequence: Synthetic oligonucleotide
  source 1..21: mol_type = other DNA
gaaggcgccgcccccaacacc

SEQ ID NO: 22365 - DNA, 21 bp, synthetic construct
  misc_feature 1..21: note = Description of Artificial Sequence: Synthetic oligonucleotide
  source 1..21: mol_type = other DNA
gagaagtcggttaagtatgat

SEQ ID NO: 22366 - DNA, 21 bp, synthetic construct
  misc_feature 1..21: note = Description of Artificial Sequence: Synthetic oligonucleotide
  source 1..21: mol_type = other DNA
gagttgaatgataagaataag

SEQ ID NO: 22367 - DNA, 21 bp, synthetic construct
  misc_feature 1..21: note = Description of Artificial Sequence: Synthetic oligonucleotide
  source 1..21: mol_type = other DNA
ggttctaagggtgagcttaat

SEQ ID NO: 22368 - DNA, 21 bp, synthetic construct
  misc_feature 1..21: note = Description of Artificial Sequence: Synthetic oligonucleotide
  source 1..21: mol_type = other DNA
tatacggataagggttctcag

SEQ ID NO: 22369 - DNA, 21 bp, synthetic construct
  misc_feature 1..21: note = Description of Artificial Sequence: Synthetic oligonucleotide
  source 1..21: mol_type = other DNA
gaggggcgttcgtctaatcag

SEQ ID NO: 22370 - DNA, 21 bp, synthetic construct
  misc_feature 1..21: note = Description of Artificial Sequence: Synthetic oligonucleotide
  source 1..21: mol_type = other DNA
agcagcagccccaccatgacc

SEQ ID NO: 22371 - DNA, 21 bp, synthetic construct
  misc_feature 1..21: note = Description of Artificial Sequence: Synthetic oligonucleotide
  source 1..21: mol_type = other DNA
aacatggacaccaaacccctc

SEQ ID NO: 22372 - DNA, 21 bp, synthetic construct
  misc_feature 1..21: note = Description of Artificial Sequence: Synthetic oligonucleotide
  source 1..21: mol_type = other DNA
agagccaccagcgaaagaagc

SEQ ID NO: 22373 - DNA, 21 bp, synthetic construct
  misc_feature 1..21: note = Description of Artificial Sequence: Synthetic oligonucleotide
  source 1..21: mol_type = other DNA
ctcacccaacaaaccagcacc

SEQ ID NO: 22374 - DNA, 21 bp, synthetic construct
  misc_feature 1..21: note = Description of Artificial Sequence: Synthetic oligonucleotide
  source 1..21: mol_type = other DNA
gatgctcagaagactactttt

SEQ ID NO: 22375 - DNA, 21 bp, synthetic construct
  misc_feature 1..21: note = Description of Artificial Sequence: Synthetic oligonucleotide
  source 1..21: mol_type = other DNA
gctgggtctccttcgcataat

SEQ ID NO: 22376 - DNA, 21 bp, synthetic construct
  misc_feature 1..21: note = Description of Artificial Sequence: Synthetic oligonucleotide
  source 1..21: mol_type = other DNA
cttaattctaataagagtcag

SEQ ID NO: 22377 - DNA, 21 bp, synthetic construct
  misc_feature 1..21: note = Description of Artificial Sequence: Synthetic oligonucleotide
  source 1..21: mol_type = other DNA
aacgtcaccggcaccaccgcc

SEQ ID NO: 22378 - DNA, 21 bp, synthetic construct
  misc_feature 1..21: note = Description of Artificial Sequence: Synthetic oligonucleotide
  source 1..21: mol_type = other DNA
acccaaaacggcggccccaga

SEQ ID NO: 22379 - DNA, 21 bp, synthetic construct
  misc_feature 1..21: note = Description of Artificial Sequence: Synthetic oligonucleotide
  source 1..21: mol_type = other DNA
ggcctcgacgccagcagacac

SEQ ID NO: 22380 - DNA, 21 bp, synthetic construct
  misc_feature 1..21: note = Description of Artificial Sequence: Synthetic oligonucleotide
  source 1..21: mol_type = other DNA
atgggtggtacgtcttctaag

SEQ ID NO: 22381 - DNA, 21 bp, synthetic construct
  misc_feature 1..21: note = Description of Artificial Sequence: Synthetic oligonucleotide
  source 1..21: mol_type = other DNA
gccagcaaccaaagccccagc

SEQ ID NO: 22382 - DNA, 21 bp, synthetic construct
  misc_feature 1..21: note = Description of Artificial Sequence: Synthetic oligonucleotide
  source 1..21: mol_type = other DNA
agtggtgtggattcgccgcgt

SEQ ID NO: 22383 - DNA, 21 bp, synthetic construct
  misc_feature 1..21: note = Description of Artificial Sequence: Synthetic oligonucleotide
  source 1..21: mol_type = other DNA
gctatttcggggtctccgtcg

SEQ ID NO: 22384 - DNA, 21 bp, synthetic construct
  misc_feature 1..21: note = Description of Artificial Sequence: Synthetic oligonucleotide
  source 1..21: mol_type = other DNA
caacacagcaacccccccgcc

SEQ ID NO: 22385 - DNA, 21 bp, synthetic construct
  misc_feature 1..21: note = Description of Artificial Sequence: Synthetic oligonucleotide
  source 1..21: mol_type = other DNA
gccagcagccccgtcaacagc

SEQ ID NO: 22386 - DNA, 21 bp, synthetic construct
  misc_feature 1..21: note = Description of Artificial Sequence: Synthetic oligonucleotide
  source 1..21: mol_type = other DNA
aacaacaacccccccagcggc

SEQ ID NO: 22387 - DNA, 21 bp, synthetic construct
  misc_feature 1..21: note = Description of Artificial Sequence: Synthetic oligonucleotide
  source 1..21: mol_type = other DNA
agtcagtctagttctaaggag

SEQ ID NO: 22388 - DNA, 21 bp, synthetic construct
  misc_feature 1..21: note = Description of Artificial Sequence: Synthetic oligonucleotide
  source 1..21: mol_type = other DNA
agtgataataagactgagcgg

SEQ ID NO: 22389 - DNA, 21 bp, synthetic construct
  misc_feature 1..21: note = Description of Artificial Sequence: Synthetic oligonucleotide
  source 1..21: mol_type = other DNA
cacaacaacagcagcgccgtc

SEQ ID NO: 22390 - DNA, 21 bp, synthetic construct
  misc_feature 1..21: note = Description of Artificial Sequence: Synthetic oligonucleotide
  source 1..21: mol_type = other DNA
cttcagaagagtagtgtggag

SEQ ID NO: 22391 - DNA, 21 bp, synthetic construct
  misc_feature 1..21: note = Description of Artificial Sequence: Synthetic oligonucleotide
  source 1..21: mol_type = other DNA
aatactgcgcctccgccttct

SEQ ID NO: 22392 - DNA, 21 bp, synthetic construct
  misc_feature 1..21: note = Description of Artificial Sequence: Synthetic oligonucleotide
  source 1..21: mol_type = other DNA
cttggtacgggttcgaataat

SEQ ID NO: 22393 - DNA, 21 bp, synthetic construct
  misc_feature 1..21: note = Description of Artificial Sequence: Synthetic oligonucleotide
  source 1..21: mol_type = other DNA
aacggcaaacaaaccagcaac

SEQ ID NO: 22394 - DNA, 21 bp, synthetic construct
  misc_feature 1..21: note = Description of Artificial Sequence: Synthetic oligonucleotide
  source 1..21: mol_type = other DNA
aatcagtcgggtgctactaag

SEQ ID NO: 22395 - DNA, 21 bp, synthetic construct
  misc_feature 1..21: note = Description of Artificial Sequence: Synthetic oligonucleotide
  source 1..21: mol_type = other DNA
aatggggctagtaagcttcat

SEQ ID NO: 22396 - DNA, 21 bp, synthetic construct
  misc_feature 1..21: note = Description of Artificial Sequence: Synthetic oligonucleotide
  source 1..21: mol_type = other DNA
accaacaacggcgtccacgcc

SEQ ID NO: 22397 - DNA, 21 bp, synthetic construct
  misc_feature 1..21: note = Description of Artificial Sequence: Synthetic oligonucleotide
  source 1..21: mol_type = other DNA
acgaataatgggtctggtaat

SEQ ID NO: 22398 - DNA, 21 bp, synthetic construct
  misc_feature 1..21: note = Description of Artificial Sequence: Synthetic oligonucleotide
  source 1..21: mol_type = other DNA
acggagtcgggtaaggctatt

SEQ ID NO: 22399 - DNA, 21 bp, synthetic construct
  misc_feature 1..21: note = Description of Artificial Sequence: Synthetic oligonucleotide
  source 1..21: mol_type = other DNA
gacagcagcaccaacgccaga

SEQ ID NO: 22400 - DNA, 21 bp, synthetic construct
  misc_feature 1..21: note = Description of Artificial Sequence: Synthetic oligonucleotide
  source 1..21: mol_type = other DNA
cgtgctgttggtaagactgag

SEQ ID NO: 22401 - DNA, 21 bp, synthetic construct
  misc_feature 1..21: note = Description of Artificial Sequence: Synthetic oligonucleotide
  source 1..21: mol_type = other DNA
gccaccagcagcgaaaaaagc

SEQ ID NO: 22402 - DNA, 21 bp, synthetic construct
  misc_feature 1..21: note = Description of Artificial Sequence: Synthetic oligonucleotide
  source 1..21: mol_type = other DNA
aacaccggcggcgaaagcggc

SEQ ID NO: 22403 - DNA, 21 bp, synthetic construct
  misc_feature 1..21: note = Description of Artificial Sequence: Synthetic oligonucleotide
  source 1..21: mol_type = other DNA
agcggcaaaagcaacgacgtc

SEQ ID NO: 22404 - DNA, 21 bp, synthetic construct
  misc_feature 1..21: note = Description of Artificial Sequence: Synthetic oligonucleotide
  source 1..21: mol_type = other DNA
ctcggcacccaacacaccagc

SEQ ID NO: 22405 - DNA, 21 bp, synthetic construct
  misc_feature 1..21: note = Description of Artificial Sequence: Synthetic oligonucleotide
  source 1..21: mol_type = other DNA
gacgacagcagcgccaaaagc

SEQ ID NO: 22406 - DNA, 21 bp, synthetic construct
  misc_feature 1..21: note = Description of Artificial Sequence: Synthetic oligonucleotide
  source 1..21: mol_type = other DNA
ggcggccccaacaccacccac

SEQ ID NO: 22407 - DNA, 21 bp, synthetic construct
  misc_feature 1..21: note = Description of Artificial Sequence: Synthetic oligonucleotide
  source 1..21: mol_type = other DNA
tctatttcgactaaggagtcg

SEQ ID NO: 22408 - DNA, 21 bp, synthetic construct
  misc_feature 1..21: note = Description of Artificial Sequence: Synthetic oligonucleotide
  source 1..21: mol_type = other DNA
accaccagcgacgccagaaac

SEQ ID NO: 22409 - DNA, 21 bp, synthetic construct
  misc_feature 1..21: note = Description of Artificial Sequence: Synthetic oligonucleotide
  source 1..21: mol_type = other DNA
actgatgcgtctgctcggaat

SEQ ID NO: 22410 - DNA, 21 bp, synthetic construct
  misc_feature 1..21: note = Description of Artificial Sequence: Synthetic oligonucleotide
  source 1..21: mol_type = other DNA
agtagtgtgccggctaagggt

SEQ ID NO: 22411 - DNA, 21 bp, synthetic construct
  misc_feature 1..21: note = Description of Artificial Sequence: Synthetic oligonucleotide
  source 1..21: mol_type = other DNA
ggccacaacggccccaacagc

SEQ ID NO: 22412 - DNA, 21 bp, synthetic construct
  misc_feature 1..21: note = Description of Artificial Sequence: Synthetic oligonucleotide
  source 1..21: mol_type = other DNA
gggtctagtgggtcttctggt

SEQ ID NO: 22413 - DNA, 21 bp, synthetic construct
  misc_feature 1..21: note = Description of Artificial Sequence: Synthetic oligonucleotide
  source 1..21: mol_type = other DNA
gtcgtcagcgacaacagcaga

SEQ ID NO: 22414 - DNA, 21 bp, synthetic construct
  misc_feature 1..21: note = Description of Artificial Sequence: Synthetic oligonucleotide
  source 1..21: mol_type = other DNA
gatcgttctcctggttctcag

SEQ ID NO: 22415 - DNA, 21 bp, synthetic construct
  misc_feature 1..21: note = Description of Artificial Sequence: Synthetic oligonucleotide
  source 1..21: mol_type = other DNA
ggcaccaccccccccaacgcc

SEQ ID NO: 22416 - DNA, 21 bp, synthetic construct
  misc_feature 1..21: note = Description of Artificial Sequence: Synthetic oligonucleotide
  source 1..21: mol_type = other DNA
ctcgccgacaaaagcagctac

SEQ ID NO: 22417 - DNA, 21 bp, synthetic construct
  misc_feature 1..21: note = Description of Artificial Sequence: Synthetic oligonucleotide
  source 1..21: mol_type = other DNA
atgagcaccaccaccaacgcc

SEQ ID NO: 22418 - DNA, 21 bp, synthetic construct
  misc_feature 1..21: note = Description of Artificial Sequence: Synthetic oligonucleotide
  source 1..21: mol_type = other DNA
accaccggcgtcagccccgcc

SEQ ID NO: 22419 - DNA, 21 bp, synthetic construct
  misc_feature 1..21: note = Description of Artificial Sequence: Synthetic oligonucleotide
  source 1..21: mol_type = other DNA
agcaccgacagcagcaccaaa

SEQ ID NO: 22420 - DNA, 21 bp, synthetic construct
  misc_feature 1..21: note = Description of Artificial Sequence: Synthetic oligonucleotide
  source 1..21: mol_type = other DNA
gacgtccaaacccccaccacc

SEQ ID NO: 22421 - DNA, 21 bp, synthetic construct
  misc_feature 1..21: note = Description of Artificial Sequence: Synthetic oligonucleotide
  source 1..21: mol_type = other DNA
gctacttctgatcgtccggtt

SEQ ID NO: 22422 - DNA, 21 bp, synthetic construct
  misc_feature 1..21: note = Description of Artificial Sequence: Synthetic oligonucleotide
  source 1..21: mol_type = other DNA
agtgcttcgcattcggcttcg

SEQ ID NO: 22423 - DNA, 21 bp, synthetic construct
  misc_feature 1..21: note = Description of Artificial Sequence: Synthetic oligonucleotide
  source 1..21: mol_type = other DNA
atgagcagcaaccccaaaacc

SEQ ID NO: 22424 - DNA, 21 bp, synthetic construct
  misc_feature 1..21: note = Description of Artificial Sequence: Synthetic oligonucleotide
  source 1..21: mol_type = other DNA
gaccaaagaaacggccccacc

SEQ ID NO: 22425 - DNA, 21 bp, synthetic construct
  misc_feature 1..21: note = Description of Artificial Sequence: Synthetic oligonucleotide
  source 1..21: mol_type = other DNA
gagtcgcgtaataatggtcat

SEQ ID NO: 22426 - DNA, 21 bp, synthetic construct
  misc_feature 1..21: note = Description of Artificial Sequence: Synthetic oligonucleotide
  source 1..21: mol_type = other DNA
agttctagtaagggtcatgtt

SEQ ID NO: 22427 - DNA, 21 bp, synthetic construct
  misc_feature 1..21: note = Description of Artificial Sequence: Synthetic oligonucleotide
  source 1..21: mol_type = other DNA
ggcggcacccaacaaaacctc

SEQ ID NO: 22428 - DNA, 21 bp, synthetic construct
  misc_feature 1..21: note = Description of Artificial Sequence: Synthetic oligonucleotide
  source 1..21: mol_type = other DNA
cagcagggtacgaagtcgact

SEQ ID NO: 22429 - DNA, 21 bp, synthetic construct
  misc_feature 1..21: note = Description of Artificial Sequence: Synthetic oligonucleotide
  source 1..21: mol_type = other DNA
aatggtggtgggaaggggggt

SEQ ID NO: 22430 - DNA, 21 bp, synthetic construct
  misc_feature 1..21: note = Description of Artificial Sequence: Synthetic oligonucleotide
  source 1..21: mol_type = other DNA
aacaccagcaacaaagacacc

SEQ ID NO: 22431 - DNA, 21 bp, synthetic construct
  misc_feature 1..21: note = Description of Artificial Sequence: Synthetic oligonucleotide
  source 1..21: mol_type = other DNA
aacagaagcaaacaaggcgac

SEQ ID NO: 22432 - DNA, 21 bp, synthetic construct
  misc_feature 1..21: note = Description of Artificial Sequence: Synthetic oligonucleotide
  source 1..21: mol_type = other DNA
aacagcctcaccgccaacaaa

SEQ ID NO: 22433 - DNA, 21 bp, synthetic construct
  misc_feature 1..21: note = Description of Artificial Sequence: Synthetic oligonucleotide
  source 1..21: mol_type = other DNA
aatttggggactggtggtacg

SEQ ID NO: 22434 - DNA, 21 bp, synthetic construct
  misc_feature 1..21: note = Description of Artificial Sequence: Synthetic oligonucleotide
  source 1..21: mol_type = other DNA
acccaacacggcgaaagaagc

SEQ ID NO: 22435 - DNA, 21 bp, synthetic construct
  misc_feature 1..21: note = Description of Artificial Sequence: Synthetic oligonucleotide
  source 1..21: mol_type = other DNA
agcaaaagcaacggcgccagc

SEQ ID NO: 22436 - DNA, 21 bp, synthetic construct
  misc_feature 1..21: note = Description of Artificial Sequence: Synthetic oligonucleotide
  source 1..21: mol_type = other DNA
agccccaccagcagccccggc

SEQ ID NO: 22437 - DNA, 21 bp, synthetic construct
  misc_feature 1..21: note = Description of Artificial Sequence: Synthetic oligonucleotide
  source 1..21: mol_type = other DNA
agcgaaagcagcagaagcgcc

SEQ ID NO: 22438 - DNA, 21 bp, synthetic construct
  misc_feature 1..21: note = Description of Artificial Sequence: Synthetic oligonucleotide
  source 1..21: mol_type = other DNA
agcgcccccagcggcaaagcc

SEQ ID NO: 22439 - DNA, 21 bp, synthetic construct
  misc_feature 1..21: note = Description of Artificial Sequence: Synthetic oligonucleotide
  source 1..21: mol_type = other DNA
agtggtgggtcggggcctcag

SEQ ID NO: 22440 - DNA, 21 bp, synthetic construct
  misc_feature 1..21: note = Description of Artificial Sequence: Synthetic oligonucleotide
  source 1..21: mol_type = other DNA
agttctaatacgtctgctact

SEQ ID NO: 22441 - DNA, 21 bp, synthetic construct
  misc_feature 1..21: note = Description of Artificial Sequence: Synthetic oligonucleotide
  source 1..21: mol_type = other DNA
atgcgggaggatcaggttagg

SEQ ID NO: 22442 - DNA, 21 bp, synthetic construct
  misc_feature 1..21: note = Description of Artificial Sequence: Synthetic oligonucleotide
  source 1..21: mol_type = other DNA
caaagcacccccgccctcagc

SEQ ID NO: 22443 - DNA, 21 bp, synthetic construct
  misc_feature 1..21: note = Description of Artificial Sequence: Synthetic oligonucleotide
  source 1..21: mol_type = other DNA
ctcagagaaaccaaaatcaac

SEQ ID NO: 22444 - DNA, 21 bp, synthetic construct
  misc_feature 1..21: note = Description of Artificial Sequence: Synthetic oligonucleotide
  source 1..21: mol_type = other DNA
ctcagcagagacaaaatcgaa

SEQ ID NO: 22445 - DNA, 21 bp, synthetic construct
  misc_feature 1..21: note = Description of Artificial Sequence: Synthetic oligonucleotide
  source 1..21: mol_type = other DNA
ctgcgggggggggagggtgcg

SEQ ID NO: 22446 - DNA, 21 bp, synthetic construct
  misc_feature 1..21: note = Description of Artificial Sequence: Synthetic oligonucleotide
  source 1..21: mol_type = other DNA
gataatgggaatgctcggtct

SEQ ID NO: 22447 - DNA, 21 bp, synthetic construct
  misc_feature 1..21: note = Description of Artificial Sequence: Synthetic oligonucleotide
  source 1..21: mol_type = other DNA
gccaacaccggccacatggcc

SEQ ID NO: 22448 - DNA, 21 bp, synthetic construct
  misc_feature 1..21: note = Description of Artificial Sequence: Synthetic oligonucleotide
  source 1..21: mol_type = other DNA
gcccacaccaaagaaaacagc

SEQ ID NO: 22449 - DNA, 21 bp, synthetic construct
  misc_feature 1..21: note = Description of Artificial Sequence: Synthetic oligonucleotide
  source 1..21: mol_type = other DNA
gccgacaaaggcgtcggcggc

SEQ ID NO: 22450 - DNA, 21 bp, synthetic construct
  misc_feature 1..21: note = Description of Artificial Sequence: Synthetic oligonucleotide
  source 1..21: mol_type = other DNA
gccggccacggcaccagcgcc

SEQ ID NO: 22451 - DNA, 21 bp, synthetic construct
  misc_feature 1..21: note = Description of Artificial Sequence: Synthetic oligonucleotide
  source 1..21: mol_type = other DNA
gccgtcgcccaaagcaacaac

SEQ ID NO: 22452 - DNA, 21 bp, synthetic construct
  misc_feature 1..21: note = Description of Artificial Sequence: Synthetic oligonucleotide
  source 1..21: mol_type = other DNA
ggcagcagcggcagcagcacc

SEQ ID NO: 22453 - DNA, 21 bp, synthetic construct
  misc_feature 1..21: note = Description of Artificial Sequence: Synthetic oligonucleotide
  source 1..21: mol_type = other DNA
ggcggcatcgacggcaaaaac

SEQ ID NO: 22454 - DNA, 21 bp, synthetic construct
  misc_feature 1..21: note = Description of Artificial Sequence: Synthetic oligonucleotide
  source 1..21: mol_type = other DNA
ggcgtccccaacagagccggc

SEQ ID NO: 22455 - DNA, 21 bp, synthetic construct
  misc_feature 1..21: note = Description of Artificial Sequence: Synthetic oligonucleotide
  source 1..21: mol_type = other DNA
gggcgtagtgatagtgttcat

SEQ ID NO: 22456 - DNA, 21 bp, synthetic construct
  misc_feature 1..21: note = Description of Artificial Sequence: Synthetic oligonucleotide
  source 1..21: mol_type = other DNA
gtcacccaaggcaccgccagc

SEQ ID NO: 22457 - DNA, 21 bp, synthetic construct
  misc_feature 1..21: note = Description of Artificial Sequence: Synthetic oligonucleotide
  source 1..21: mol_type = other DNA
tacggccaacaacccggcggc

SEQ ID NO: 22458 - DNA, 21 bp, synthetic construct
  misc_feature 1..21: note = Description of Artificial Sequence: Synthetic oligonucleotide
  source 1..21: mol_type = other DNA
tcggctaaggcgaattcggtg

SEQ ID NO: 22459 - DNA, 21 bp, synthetic construct
  misc_feature 1..21: note = Description of Artificial Sequence: Synthetic oligonucleotide
  source 1..21: mol_type = other DNA
tcggctactggtacgcattcg

SEQ ID NO: 22460 - DNA, 21 bp, synthetic construct
  misc_feature 1..21: note = Description of Artificial Sequence: Synthetic oligonucleotide
  source 1..21: mol_type = other DNA
ctcaacagcaccaaacccgcc

SEQ ID NO: 22461 - DNA, 21 bp, synthetic construct
  misc_feature 1..21: note = Description of Artificial Sequence: Synthetic oligonucleotide
  source 1..21: mol_type = other DNA
gctactactacgtctggtggt

SEQ ID NO: 22462 - DNA, 21 bp, synthetic construct
  misc_feature 1..21: note = Description of Artificial Sequence: Synthetic oligonucleotide
  source 1..21: mol_type = other DNA
gacggcctccccaacggcaga

SEQ ID NO: 22463 - DNA, 21 bp, synthetic construct
  misc_feature 1..21: note = Description of Artificial Sequence: Synthetic oligonucleotide
  source 1..21: mol_type = other DNA
cgtacgaatgctactacgtcg

SEQ ID NO: 22464 - DNA, 21 bp, synthetic construct
  misc_feature 1..21: note = Description of Artificial Sequence: Synthetic oligonucleotide
  source 1..21: mol_type = other DNA
gtgcctactggtaatcatggt

SEQ ID NO: 22465 - DNA, 21 bp, synthetic construct
  misc_feature 1..21: note = Description of Artificial Sequence: Synthetic oligonucleotide
  source 1..21: mol_type = other DNA
aacggcagcgcccacaaagtc

SEQ ID NO: 22466 - DNA, 21 bp, synthetic construct
  misc_feature 1..21: note = Description of Artificial Sequence: Synthetic oligonucleotide
  source 1..21: mol_type = other DNA
agtacttctacgacttctagg

SEQ ID NO: 22467 - DNA, 21 bp, synthetic construct
  misc_feature 1..21: note = Description of Artificial Sequence: Synthetic oligonucleotide
  source 1..21: mol_type = other DNA
cacggcatgggcaccaccacc

SEQ ID NO: 22468 - DNA, 21 bp, synthetic construct
  misc_feature 1..21: note = Description of Artificial Sequence: Synthetic oligonucleotide
  source 1..21: mol_type = other DNA
catgggggtactgcgtctcat

SEQ ID NO: 22469 - DNA, 21 bp, synthetic construct
  misc_feature 1..21: note = Description of Artificial Sequence: Synthetic oligonucleotide
  source 1..21: mol_type = other DNA
ggtagtcatggttctactcag

SEQ ID NO: 22470 - DNA, 21 bp, synthetic construct
  misc_feature 1..21: note = Description of Artificial Sequence: Synthetic oligonucleotide
  source 1..21: mol_type = other DNA
cacaccagcgacaaaagcgcc

SEQ ID NO: 22471 - DNA, 21 bp, synthetic construct
  misc_feature 1..21: note = Description of Artificial Sequence: Synthetic oligonucleotide
  source 1..21: mol_type = other DNA
gccgtccacagcaacagcacc

SEQ ID NO: 22472 - DNA, 21 bp, synthetic construct
  misc_feature 1..21: note = Description of Artificial Sequence: Synthetic oligonucleotide
  source 1..21: mol_type = other DNA
ttggctacttctagtacggtt

SEQ ID NO: 22473 - DNA, 21 bp, synthetic construct
  misc_feature 1..21: note = Description of Artificial Sequence: Synthetic oligonucleotide
  source 1..21: mol_type = other DNA
aatgtggatgcgcgtaataat

SEQ ID NO: 22474 - DNA, 21 bp, synthetic construct
  misc_feature 1..21: note = Description of Artificial Sequence: Synthetic oligonucleotide
  source 1..21: mol_type = other DNA
atgaaaagccaaagcgccatc

SEQ ID NO: 22475 - DNA, 21 bp, synthetic construct
  misc_feature 1..21: note = Description of Artificial Sequence: Synthetic oligonucleotide
  source 1..21: mol_type = other DNA
agccccaaccaacaaagcagc

SEQ ID NO: 22476 - DNA, 21 bp, synthetic construct
  misc_feature 1..21: note = Description of Artificial Sequence: Synthetic oligonucleotide
  source 1..21: mol_type = other DNA
aataatggtacgacttctgcg

SEQ ID NO: 22477 - DNA, 21 bp, synthetic construct
  misc_feature 1..21: note = Description of Artificial Sequence: Synthetic oligonucleotide
  source 1..21: mol_type = other DNA
actagtgctcagcctaataat

SEQ ID NO: 22478 - DNA, 21 bp, synthetic construct
  misc_feature 1..21: note = Description of Artificial Sequence: Synthetic oligonucleotide
  source 1..21: mol_type = other DNA
caaaccaccaaaagcagcgtc

SEQ ID NO: 22479 - DNA, 21 bp, synthetic construct
  misc_feature 1..21: note = Description of Artificial Sequence: Synthetic oligonucleotide
  source 1..21: mol_type = other DNA
gacagcgtcaacaaaagagac

SEQ ID NO: 22480 - DNA, 21 bp, synthetic construct
  misc_feature 1..21: note = Description of Artificial Sequence: Synthetic oligonucleotide
  source 1..21: mol_type = other DNA
gccacccccggcaccagcggc

SEQ ID NO: 22481 - DNA, 21 bp, synthetic construct
  misc_feature 1..21: note = Description of Artificial Sequence: Synthetic oligonucleotide
  source 1..21: mol_type = other DNA
ggggttagttctactgcggtg

SEQ ID NO: 22482 - DNA, 21 bp, synthetic construct
  misc_feature 1..21: note = Description of Artificial Sequence: Synthetic oligonucleotide
  source 1..21: mol_type = other DNA
cagcgtggtggtgattctgcg

SEQ ID NO: 22483 - DNA, 21 bp, synthetic construct
  misc_feature 1..21: note = Description of Artificial Sequence: Synthetic oligonucleotide
  source 1..21: mol_type = other DNA
gctacttcgaataatagtcgg

SEQ ID NO: 22484 - DNA, 21 bp, synthetic construct
  misc_feature 1..21: note = Description of Artificial Sequence: Synthetic oligonucleotide
  source 1..21: mol_type = other DNA
accaaagccaacagcagcgaa

SEQ ID NO: 22485 - DNA, 21 bp, synthetic construct
  misc_feature 1..21: note = Description of Artificial Sequence: Synthetic oligonucleotide
  source 1..21: mol_type = other DNA
agcagcggcgaacaaagcaga

SEQ ID NO: 22486 - DNA, 21 bp, synthetic construct
  misc_feature 1..21: note = Description of Artificial Sequence: Synthetic oligonucleotide
  source 1..21: mol_type = other DNA
agcctcaacgacagcagaaga

SEQ ID NO: 22487 - DNA, 21 bp, synthetic construct
  misc_feature 1..21: note = Description of Artificial Sequence: Synthetic oligonucleotide
  source 1..21: mol_type = other DNA
catggttctcaggctccggct

SEQ ID NO: 22488 - DNA, 21 bp, synthetic construct
  misc_feature 1..21: note = Description of Artificial Sequence: Synthetic oligonucleotide
  source 1..21: mol_type = other DNA
tatccggataagtctcctatt

SEQ ID NO: 22489 - DNA, 21 bp, synthetic construct
  misc_feature 1..21: note = Description of Artificial Sequence: Synthetic oligonucleotide
  source 1..21: mol_type = other DNA
aacgccgacagagacaacaaa

SEQ ID NO: 22490 - DNA, 21 bp, synthetic construct
  misc_feature 1..21: note = Description of Artificial Sequence: Synthetic oligonucleotide
  source 1..21: mol_type = other DNA
actaagggtgggacgacgggg

SEQ ID NO: 22491 - DNA, 21 bp, synthetic construct
  misc_feature 1..21: note = Description of Artificial Sequence: Synthetic oligonucleotide
  source 1..21: mol_type = other DNA
agacaactccccgacaaagac

SEQ ID NO: 22492 - DNA, 21 bp, synthetic construct
  misc_feature 1..21: note = Description of Artificial Sequence: Synthetic oligonucleotide
  source 1..21: mol_type = other DNA
tcgacttctactggtaagagt

SEQ ID NO: 22493 - DNA, 21 bp, synthetic construct
  misc_feature 1..21: note = Description of Artificial Sequence: Synthetic oligonucleotide
  source 1..21: mol_type = other DNA
aacagcggcggcaacaaaaac

SEQ ID NO: 22494 - DNA, 21 bp, synthetic construct
  misc_feature 1..21: note = Description of Artificial Sequence: Synthetic oligonucleotide
  source 1..21: mol_type = other DNA
agcagcagaagcagcaccgtc

SEQ ID NO: 22495 - DNA, 21 bp, synthetic construct
  misc_feature 1..21: note = Description of Artificial Sequence: Synthetic oligonucleotide
  source 1..21: mol_type = other DNA
agcagcccccaaggcggcaac

SEQ ID NO: 22496 - DNA, 21 bp, synthetic construct
  misc_feature 1..21: note = Description of Artificial Sequence: Synthetic oligonucleotide
  source 1..21: mol_type = other DNA
agcatcaccggcaaaggcggc

SEQ ID NO: 22497 - DNA, 21 bp, synthetic construct
  misc_feature 1..21: note = Description of Artificial Sequence: Synthetic oligonucleotide
  source 1..21: mol_type = other DNA
atttctggggcggggtcgaag

SEQ ID NO: 22498 - DNA, 21 bp, synthetic construct
  misc_feature 1..21: note = Description of Artificial Sequence: Synthetic oligonucleotide
  source 1..21: mol_type = other DNA
gccagcaccgacagcagaggc

SEQ ID NO: 22499 - DNA, 21 bp, synthetic construct
  misc_feature 1..21: note = Description of Artificial Sequence: Synthetic oligonucleotide
  source 1..21: mol_type = other DNA
gctctggggacgggtaaggag

SEQ ID NO: 22500 - DNA, 21 bp, synthetic construct
  misc_feature 1..21: note = Description of Artificial Sequence: Synthetic oligonucleotide
  source 1..21: mol_type = other DNA
acgggtcatccttctactgcg

SEQ ID NO: 22501 - DNA, 21 bp, synthetic construct
  misc_feature 1..21: note = Description of Artificial Sequence: Synthetic oligonucleotide
  source 1..21: mol_type = other DNA
caaagccacagcgccagcagc

SEQ ID NO: 22502 - DNA, 21 bp, synthetic construct
  misc_feature 1..21: note = Description of Artificial Sequence: Synthetic oligonucleotide
  source 1..21: mol_type = other DNA
gacagccaagtcaaagccatg

SEQ ID NO: 22503 - DNA, 21 bp, synthetic construct
  misc_feature 1..21: note = Description of Artificial Sequence: Synthetic oligonucleotide
  source 1..21: mol_type = other DNA
agtaaggatacgcagctgatt

SEQ ID NO: 22504 - DNA, 21 bp, synthetic construct
  misc_feature 1..21: note = Description of Artificial Sequence: Synthetic oligonucleotide
  source 1..21: mol_type = other DNA
accaacgaccccagaagcagc

SEQ ID NO: 22505 - DNA, 21 bp, synthetic construct
  misc_feature 1..21: note = Description of Artificial Sequence: Synthetic oligonucleotide
  source 1..21: mol_type = other DNA
agtgctactaaggctggtggg

SEQ ID NO: 22506 - DNA, 21 bp, synthetic construct
  misc_feature 1..21: note = Description of Artificial Sequence: Synthetic oligonucleotide
  source 1..21: mol_type = other DNA
agtgggaataagcctgaggtt

SEQ ID NO: 22507 - DNA, 21 bp, synthetic construct
  misc_feature 1..21: note = Description of Artificial Sequence: Synthetic oligonucleotide
  source 1..21: mol_type = other DNA
caagccaacagaaacagcggc

SEQ ID NO: 22508 - DNA, 21 bp, synthetic construct
  misc_feature 1..21: note = Description of Artificial Sequence: Synthetic oligonucleotide
  source 1..21: mol_type = other DNA
gatagtgcggggagtgggaag

SEQ ID NO: 22509 - DNA, 21 bp, synthetic construct
  misc_feature 1..21: note = Description of Artificial Sequence: Synthetic oligonucleotide
  source 1..21: mol_type = other DNA
ggcagcaacaacaacggccaa

SEQ ID NO: 22510 - DNA, 21 bp, synthetic construct
  misc_feature 1..21: note = Description of Artificial Sequence: Synthetic oligonucleotide
  source 1..21: mol_type = other DNA
gggcggtcgggggatactaat

SEQ ID NO: 22511 - DNA, 21 bp, synthetic construct
  misc_feature 1..21: note = Description of Artificial Sequence: Synthetic oligonucleotide
  source 1..21: mol_type = other DNA
tcgaaggcgaatagtcagatg

SEQ ID NO: 22512 - DNA, 21 bp, synthetic construct
  misc_feature 1..21: note = Description of Artificial Sequence: Synthetic oligonucleotide
  source 1..21: mol_type = other DNA
tctagtgggaagtcgggtatg

SEQ ID NO: 22513 - DNA, 21 bp, synthetic construct
  misc_feature 1..21: note = Description of Artificial Sequence: Synthetic oligonucleotide
  source 1..21: mol_type = other DNA
agtagtgctactgcgcagggt

SEQ ID NO: 22514 - DNA, 21 bp, synthetic construct
  misc_feature 1..21: note = Description of Artificial Sequence: Synthetic oligonucleotide
  source 1..21: mol_type = other DNA
acgcggacgaatgcgaatggt

SEQ ID NO: 22515 - DNA, 21 bp, synthetic construct
  misc_feature 1..21: note = Description of Artificial Sequence: Synthetic oligonucleotide
  source 1..21: mol_type = other DNA
ctcaacagcgaaaaagccccc

SEQ ID NO: 22516 - DNA, 21 bp, synthetic construct
  misc_feature 1..21: note = Description of Artificial Sequence: Synthetic oligonucleotide
  source 1..21: mol_type = other DNA
gaaaaaatgagcagcagcagc

SEQ ID NO: 22517 - DNA, 21 bp, synthetic construct
  misc_feature 1..21: note = Description of Artificial Sequence: Synthetic oligonucleotide
  source 1..21: mol_type = other DNA
gcttctatttctggggcgggt

SEQ ID NO: 22518 - DNA, 21 bp, synthetic construct
  misc_feature 1..21: note = Description of Artificial Sequence: Synthetic oligonucleotide
  source 1..21: mol_type = other DNA
ggcaccagaagccaaagccaa

SEQ ID NO: 22519 - DNA, 21 bp, synthetic construct
  misc_feature 1..21: note = Description of Artificial Sequence: Synthetic oligonucleotide
  source 1..21: mol_type = other DNA
gtgtctgggaagactagtgct

SEQ ID NO: 22520 - DNA, 21 bp, synthetic construct
  misc_feature 1..21: note = Description of Artificial Sequence: Synthetic oligonucleotide
  source 1..21: mol_type = other DNA
actggtgtgaataatcatcat

SEQ ID NO: 22521 - DNA, 21 bp, synthetic construct
  misc_feature 1..21: note = Description of Artificial Sequence: Synthetic oligonucleotide
  source 1..21: mol_type = other DNA
agcggcgaccaccacaaaacc

SEQ ID NO: 22522 - DNA, 21 bp, synthetic construct
  misc_feature 1..21: note = Description of Artificial Sequence: Synthetic oligonucleotide
  source 1..21: mol_type = other DNA
ctccccagcggcgtcaccaaa

SEQ ID NO: 22523 - DNA, 21 bp, synthetic construct
  misc_feature 1..21: note = Description of Artificial Sequence: Synthetic oligonucleotide
  source 1..21: mol_type = other DNA
ctttcgggtggtacgatgctt

SEQ ID NO: 22524 - DNA, 21 bp, synthetic construct
  misc_feature 1..21: note = Description of Artificial Sequence: Synthetic oligonucleotide
  source 1..21: mol_type = other DNA
gccagcaccggcagcaccgcc

SEQ ID NO: 22525 - DNA, 21 bp, synthetic construct
  misc_feature 1..21: note = Description of Artificial Sequence: Synthetic oligonucleotide
  source 1..21: mol_type = other DNA
ctccaaagcagcggcaacaga

SEQ ID NO: 22526 - DNA, 21 bp, synthetic construct
  misc_feature 1..21: note = Description of Artificial Sequence: Synthetic oligonucleotide
  source 1..21: mol_type = other DNA
atgtcgacgagtcattctgtg

SEQ ID NO: 22527 - DNA, 21 bp, synthetic construct
  misc_feature 1..21: note = Description of Artificial Sequence: Synthetic oligonucleotide
  source 1..21: mol_type = other DNA
ggcgccggcaaccacgccagc

SEQ ID NO: 22528 - DNA, 21 bp, synthetic construct
  misc_feature 1..21: note = Description of Artificial Sequence: Synthetic oligonucleotide
  source 1..21: mol_type = other DNA
actaagacggagacgaatgcg

SEQ ID NO: 22529 - DNA, 21 bp, synthetic construct
  misc_feature 1..21: note = Description of Artificial Sequence: Synthetic oligonucleotide
  source 1..21: mol_type = other DNA
gacagaggccaaggccaaatg

SEQ ID NO: 22530 - DNA, 21 bp, synthetic construct
  misc_feature 1..21: note = Description of Artificial Sequence: Synthetic oligonucleotide
  source 1..21: mol_type = other DNA
gggtcttctactaataatgtg

SEQ ID NO: 22531 - DNA, 21 bp, synthetic construct
  misc_feature 1..21: note = Description of Artificial Sequence: Synthetic oligonucleotide
  source 1..21: mol_type = other DNA
ttcgccggcaacacccaagcc

SEQ ID NO: 22532 - DNA, 21 bp, synthetic construct
  misc_feature 1..21: note = Description of Artificial Sequence: Synthetic oligonucleotide
  source 1..21: mol_type = other DNA
agcgtcagcaacagcagccaa

SEQ ID NO: 22533 - DNA, 21 bp, synthetic construct
  misc_feature 1..21: note = Description of Artificial Sequence: Synthetic oligonucleotide
  source 1..21: mol_type = other DNA
cagtctacgaagccgtcgggt

SEQ ID NO: 22534 - DNA, 21 bp, synthetic construct
  misc_feature 1..21: note = Description of Artificial Sequence: Synthetic oligonucleotide
  source 1..21: mol_type = other DNA
atccccgccaaaagcaccagc

SEQ ID NO: 22535 - DNA, 21 bp, synthetic construct
  misc_feature 1..21: note = Description of Artificial Sequence: Synthetic oligonucleotide
  source 1..21: mol_type = other DNA
gctgggcgtgattctttgact

SEQ ID NO: 22536 - DNA, 21 bp, synthetic construct
  misc_feature 1..21: note = Description of Artificial Sequence: Synthetic oligonucleotide
  source 1..21: mol_type = other DNA
agcaacagcaaagacaccacc

SEQ ID NO: 22537 - DNA, 21 bp, synthetic construct
  misc_feature 1..21: note = Description of Artificial Sequence: Synthetic oligonucleotide
  source 1..21: mol_type = other DNA
aacaccagaaaccccgccgcc

SEQ ID NO: 22538 - DNA, 21 bp, synthetic construct
  misc_feature 1..21: note = Description of Artificial Sequence: Synthetic oligonucleotide
  source 1..21: mol_type = other DNA
aattatgatgcgaagtctgcg

SEQ ID NO: 22539 - DNA, 21 bp, synthetic construct
  misc_feature 1..21: note = Description of Artificial Sequence: Synthetic oligonucleotide
  source 1..21: mol_type = other DNA
gaaagcagcggcagcagactc

SEQ ID NO: 22540 - DNA, 21 bp, synthetic construct
  misc_feature 1..21: note = Description of Artificial Sequence: Synthetic oligonucleotide
  source 1..21: mol_type = other DNA
actaataatacgccttctggg

SEQ ID NO: 22541 - DNA, 21 bp, synthetic construct
  misc_feature 1..21: note = Description of Artificial Sequence: Synthetic oligonucleotide
  source 1..21: mol_type = other DNA
agccccggcagcaaagtcagc

SEQ ID NO: 22542 - DNA, 21 bp, synthetic construct
  misc_feature 1..21: note = Description of Artificial Sequence: Synthetic oligonucleotide
  source 1..21: mol_type = other DNA
agcggcaccacccccagcgtc

SEQ ID NO: 22543 - DNA, 21 bp, synthetic construct
  misc_feature 1..21: note = Description of Artificial Sequence: Synthetic oligonucleotide
  source 1..21: mol_type = other DNA
tctggtactgttaagttggat

SEQ ID NO: 22544 - DNA, 21 bp, synthetic construct
  misc_feature 1..21: note = Description of Artificial Sequence: Synthetic oligonucleotide
  source 1..21: mol_type = other DNA
aaggaggatcgtaatacttcg

SEQ ID NO: 22545 - DNA, 21 bp, synthetic construct
  misc_feature 1..21: note = Description of Artificial Sequence: Synthetic oligonucleotide
  source 1..21: mol_type = other DNA
agtgggggtggttctcttggt

SEQ ID NO: 22546 - DNA, 21 bp, synthetic construct
  misc_feature 1..21: note = Description of Artificial Sequence: Synthetic oligonucleotide
  source 1..21: mol_type = other DNA
caagccgccgcccacaccagc

SEQ ID NO: 22547 - DNA, 21 bp, synthetic construct
  misc_feature 1..21: note = Description of Artificial Sequence: Synthetic oligonucleotide
  source 1..21: mol_type = other DNA
gacggcggcgccggcgtcgtc

SEQ ID NO: 22548 - DNA, 21 bp, synthetic construct
  misc_feature 1..21: note = Description of Artificial Sequence: Synthetic oligonucleotide
  source 1..21: mol_type = other DNA
ggtagtgggaagatgaatgtt

SEQ ID NO: 22549 - DNA, 21 bp, synthetic construct
  misc_feature 1..21: note = Description of Artificial Sequence: Synthetic oligonucleotide
  source 1..21: mol_type = other DNA
ggtctggtgaatcagcagcag

SEQ ID NO: 22550 - DNA, 21 bp, synthetic construct
  misc_feature 1..21: note = Description of Artificial Sequence: Synthetic oligonucleotide
  source 1..21: mol_type = other DNA
gtcagcggcagcaccaccacc

SEQ ID NO: 22551 - DNA, 21 bp, synthetic construct
  misc_feature 1..21: note = Description of Artificial Sequence: Synthetic oligonucleotide
  source 1..21: mol_type = other DNA
tctagttttaaggggggtggt

SEQ ID NO: 22552 - DNA, 21 bp, synthetic construct
  misc_feature 1..21: note = Description of Artificial Sequence: Synthetic oligonucleotide
  source 1..21: mol_type = other DNA
tctagtgcgcagtcgccgtcg

SEQ ID NO: 22553 - DNA, 21 bp, synthetic construct
  misc_feature 1..21: note = Description of Artificial Sequence: Synthetic oligonucleotide
  source 1..21: mol_type = other DNA
gtcgaaagcaaacccagcaga

SEQ ID NO: 22554 - DNA, 21 bp, synthetic construct
  misc_feature 1..21: note = Description of Artificial Sequence: Synthetic oligonucleotide
  source 1..21: mol_type = other DNA
agcgccagcgaaagaaacctc

SEQ ID NO: 22555 - DNA, 21 bp, synthetic construct
  misc_feature 1..21: note = Description of Artificial Sequence: Synthetic oligonucleotide
  source 1..21: mol_type = other DNA
gatagtaaggagcattcgcag

SEQ ID NO: 22556 - DNA, 21 bp, synthetic construct
  misc_feature 1..21: note = Description of Artificial Sequence: Synthetic oligonucleotide
  source 1..21: mol_type = other DNA
gccagcgacaaagtcagaaac

SEQ ID NO: 22557 - DNA, 21 bp, synthetic construct
  misc_feature 1..21: note = Description of Artificial Sequence: Synthetic oligonucleotide
  source 1..21: mol_type = other DNA
ggcgtcgacagcaacagaaac

SEQ ID NO: 22558 - DNA, 21 bp, synthetic construct
  misc_feature 1..21: note = Description of Artificial Sequence: Synthetic oligonucleotide
  source 1..21: mol_type = other DNA
ttgtcggggcagcgtgttgag

SEQ ID NO: 22559 - DNA, 21 bp, synthetic construct
  misc_feature 1..21: note = Description of Artificial Sequence: Synthetic oligonucleotide
  source 1..21: mol_type = other DNA
tatattacgaaggaggcgggt

SEQ ID NO: 22560 - DNA, 21 bp, synthetic construct
  misc_feature 1..21: note = Description of Artificial Sequence: Synthetic oligonucleotide
  source 1..21: mol_type = other DNA
accagcaacaccacccaccaa

SEQ ID NO: 22561 - DNA, 21 bp, synthetic construct
  misc_feature 1..21: note = Description of Artificial Sequence: Synthetic oligonucleotide
  source 1..21: mol_type = other DNA
agaaaagaagacgtccaaaga

SEQ ID NO: 22562 - DNA, 21 bp, synthetic construct
  misc_feature 1..21: note = Description of Artificial Sequence: Synthetic oligonucleotide
  source 1..21: mol_type = other DNA
atgggcacccaaggcaacggc

SEQ ID NO: 22563 - DNA, 21 bp, synthetic construct
  misc_feature 1..21: note = Description of Artificial Sequence: Synthetic oligonucleotide
  source 1..21: mol_type = other DNA
ctcgccaccgacggccccaaa

SEQ ID NO: 22564 - DNA, 21 bp, synthetic construct
  misc_feature 1..21: note = Description of Artificial Sequence: Synthetic oligonucleotide
  source 1..21: mol_type = other DNA
gtcggcacccccagaagcgaa

SEQ ID NO: 22565 - DNA, 21 bp, synthetic construct
  misc_feature 1..21: note = Description of Artificial Sequence: Synthetic oligonucleotide
  source 1..21: mol_type = other DNA
gggcctaatcatacgacgaag

SEQ ID NO: 22566 - DNA, 21 bp, synthetic construct
  misc_feature 1..21: note = Description of Artificial Sequence: Synthetic oligonucleotide
  source 1..21: mol_type = other DNA
cacgtcggcaccaacaacagc

SEQ ID NO: 22567 - DNA, 21 bp, synthetic construct
  misc_feature 1..21: note = Description of Artificial Sequence: Synthetic oligonucleotide
  source 1..21: mol_type = other DNA
ggcaccggccccggcggcagc

SEQ ID NO: 22568 - DNA, 21 bp, synthetic construct
  misc_feature 1..21: note = Description of Artificial Sequence: Synthetic oligonucleotide
  source 1..21: mol_type = other DNA
aaaaacggcgaaaacaacaga

SEQ ID NO: 22569 - DNA, 21 bp, synthetic construct
  misc_feature 1..21: note = Description of Artificial Sequence: Synthetic oligonucleotide
  source 1..21: mol_type = other DNA
agttctgagaagacgatgtcg

SEQ ID NO: 22570 - DNA, 21 bp, synthetic construct
  misc_feature 1..21: note = Description of Artificial Sequence: Synthetic oligonucleotide
  source 1..21: mol_type = other DNA
ggcggcagcgccagcgccaga

SEQ ID NO: 22571 - DNA, 21 bp, synthetic construct
  misc_feature 1..21: note = Description of Artificial Sequence: Synthetic oligonucleotide
  source 1..21: mol_type = other DNA
gggtctggtgctcggaaggat

SEQ ID NO: 22572 - DNA, 21 bp, synthetic construct
  misc_feature 1..21: note = Description of Artificial Sequence: Synthetic oligonucleotide
  source 1..21: mol_type = other DNA
ggtgcgactggtgcgtcttcg

SEQ ID NO: 22573 - DNA, 21 bp, synthetic construct
  misc_feature 1..21: note = Description of Artificial Sequence: Synthetic oligonucleotide
  source 1..21: mol_type = other DNA
ggtttgggggctcagccgacg

SEQ ID NO: 22574 - DNA, 21 bp, synthetic construct
  misc_feature 1..21: note = Description of Artificial Sequence: Synthetic oligonucleotide
  source 1..21: mol_type = other DNA
gtgcctacgactactgctaag

SEQ ID NO: 22575 - DNA, 21 bp, synthetic construct
  misc_feature 1..21: note = Description of Artificial Sequence: Synthetic oligonucleotide
  source 1..21: mol_type = other DNA
agaagcgacaaaagaaacgaa

SEQ ID NO: 22576 - DNA, 21 bp, synthetic construct
  misc_feature 1..21: note = Description of Artificial Sequence: Synthetic oligonucleotide
  source 1..21: mol_type = other DNA
caaggcgtcagcggcggcagc

SEQ ID NO: 22577 - DNA, 21 bp, synthetic construct
  misc_feature 1..21: note = Description of Artificial Sequence: Synthetic oligonucleotide
  source 1..21: mol_type = other DNA
ctttcttctaaggatgttgcg

SEQ ID NO: 22578 - DNA, 21 bp, synthetic construct
  misc_feature 1..21: note = Description of Artificial Sequence: Synthetic oligonucleotide
  source 1..21: mol_type = other DNA
gacaacctcaacaaaaccaac

SEQ ID NO: 22579 - DNA, 21 bp, synthetic construct
  misc_feature 1..21: note = Description of Artificial Sequence: Synthetic oligonucleotide
  source 1..21: mol_type = other DNA
ggcatcaacaccaaaagcgcc

SEQ ID NO: 22580 - DNA, 21 bp, synthetic construct
  misc_feature 1..21: note = Description of Artificial Sequence: Synthetic oligonucleotide
  source 1..21: mol_type = other DNA
gtcgccaccggcgccgccaaa

SEQ ID NO: 22581 - DNA, 21 bp, synthetic construct
  misc_feature 1..21: note = Description of Artificial Sequence: Synthetic oligonucleotide
  source 1..21: mol_type = other DNA
aaccccaacaaacccggcacc

SEQ ID NO: 22582 - DNA, 21 bp, synthetic construct
  misc_feature 1..21: note = Description of Artificial Sequence: Synthetic oligonucleotide
  source 1..21: mol_type = other DNA
gttgcgacgcaggagacgaag

SEQ ID NO: 22583 - DNA, 21 bp, synthetic construct
  misc_feature 1..21: note = Description of Artificial Sequence: Synthetic oligonucleotide
  source 1..21: mol_type = other DNA
gacatgagcaacaaaaccgtc

SEQ ID NO: 22584 - DNA, 21 bp, synthetic construct
  misc_feature 1..21: note = Description of Artificial Sequence: Synthetic oligonucleotide
  source 1..21: mol_type = other DNA
gctggtggtgctagtaattct

SEQ ID NO: 22585 - DNA, 21 bp, synthetic construct
  misc_feature 1..21: note = Description of Artificial Sequence: Synthetic oligonucleotide
  source 1..21: mol_type = other DNA
gtcaccagcaccaaacccgac

SEQ ID NO: 22586 - DNA, 21 bp, synthetic construct
  misc_feature 1..21: note = Description of Artificial Sequence: Synthetic oligonucleotide
  source 1..21: mol_type = other DNA
ctcagcaccaaaagcgtcagc

SEQ ID NO: 22587 - DNA, 21 bp, synthetic construct
  misc_feature 1..21: note = Description of Artificial Sequence: Synthetic oligonucleotide
  source 1..21: mol_type = other DNA
agcgccggcggcggcagcaga

SEQ ID NO: 22588 - DNA, 21 bp, synthetic construct
  misc_feature 1..21: note = Description of Artificial Sequence: Synthetic oligonucleotide
  source 1..21: mol_type = other DNA
agcggcgtcaccaacagcgtc

SEQ ID NO: 22589 - DNA, 21 bp, synthetic construct
  misc_feature 1..21: note = Description of Artificial Sequence: Synthetic oligonucleotide
  source 1..21: mol_type = other DNA
caacacaacgaccccaaaagc

SEQ ID NO: 22590 - DNA, 21 bp, synthetic construct
  misc_feature 1..21: note = Description of Artificial Sequence: Synthetic oligonucleotide
  source 1..21: mol_type = other DNA
gagaataagaataagtcgacg

SEQ ID NO: 22591 - DNA, 21 bp, synthetic construct
  misc_feature 1..21: note = Description of Artificial Sequence: Synthetic oligonucleotide
  source 1..21: mol_type = other DNA
gaggttccgtctcagactcgt

SEQ ID NO: 22592 - DNA, 21 bp, synthetic construct
  misc_feature 1..21: note = Description of Artificial Sequence: Synthetic oligonucleotide
  source 1..21: mol_type = other DNA
gccaaaaccagagaaaccacc

SEQ ID NO: 22593 - DNA, 21 bp, synthetic construct
  misc_feature 1..21: note = Description of Artificial Sequence: Synthetic oligonucleotide
  source 1..21: mol_type = other DNA
gtcaccggcaccggcagcccc

SEQ ID NO: 22594 - DNA, 21 bp, synthetic construct
  misc_feature 1..21: note = Description of Artificial Sequence: Synthetic oligonucleotide
  source 1..21: mol_type = other DNA
tctgcgcagcagactggtagt

SEQ ID NO: 22595 - DNA, 21 bp, synthetic construct
  misc_feature 1..21: note = Description of Artificial Sequence: Synthetic oligonucleotide
  source 1..21: mol_type = other DNA
agcccccaaagccccagcagc

SEQ ID NO: 22596 - DNA, 21 bp, synthetic construct
  misc_feature 1..21: note = Description of Artificial Sequence: Synthetic oligonucleotide
  source 1..21: mol_type = other DNA
aacagcagcaaaagccccatc

SEQ ID NO: 22597 - DNA, 21 bp, synthetic construct
  misc_feature 1..21: note = Description of Artificial Sequence: Synthetic oligonucleotide
  source 1..21: mol_type = other DNA
gccgtcagcgacaaaggcatc

SEQ ID NO: 22598 - DNA, 21 bp, synthetic construct
  misc_feature 1..21: note = Description of Artificial Sequence: Synthetic oligonucleotide
  source 1..21: mol_type = other DNA
actggtaatgcgtcgacggct

SEQ ID NO: 22599 - DNA, 21 bp, synthetic construct
  misc_feature 1..21: note = Description of Artificial Sequence: Synthetic oligonucleotide
  source 1..21: mol_type = other DNA
accggcgccgccaccgtcatg

SEQ ID NO: 22600 - DNA, 21 bp, synthetic construct
  misc_feature 1..21: note = Description of Artificial Sequence: Synthetic oligonucleotide
  source 1..21: mol_type = other DNA
agccaaaccgactacaaaggc

SEQ ID NO: 22601 - DNA, 21 bp, synthetic construct
  misc_feature 1..21: note = Description of Artificial Sequence: Synthetic oligonucleotide
  source 1..21: mol_type = other DNA
gccagcggccacggcgccagc

SEQ ID NO: 22602 - DNA, 21 bp, synthetic construct
  misc_feature 1..21: note = Description of Artificial Sequence: Synthetic oligonucleotide
  source 1..21: mol_type = other DNA
gcggggactagtgcgccgaat

SEQ ID NO: 22603 - DNA, 21 bp, synthetic construct
  misc_feature 1..21: note = Description of Artificial Sequence: Synthetic oligonucleotide
  source 1..21: mol_type = other DNA
ggccccggcaccagcaacacc

SEQ ID NO: 22604 - DNA, 21 bp, synthetic construct
  misc_feature 1..21: note = Description of Artificial Sequence: Synthetic oligonucleotide
  source 1..21: mol_type = other DNA
tctcagcatactcctccttct

SEQ ID NO: 22605 - DNA, 21 bp, synthetic construct
  misc_feature 1..21: note = Description of Artificial Sequence: Synthetic oligonucleotide
  source 1..21: mol_type = other DNA
gaaaacagaacccaaaacagc

SEQ ID NO: 22606 - DNA, 21 bp, synthetic construct
  misc_feature 1..21: note = Description of Artificial Sequence: Synthetic oligonucleotide
  source 1..21: mol_type = other DNA
accatgagcaaccccggcgtc

SEQ ID NO: 22607 - DNA, 21 bp, synthetic construct
  misc_feature 1..21: note = Description of Artificial Sequence: Synthetic oligonucleotide
  source 1..21: mol_type = other DNA
cagactaataagatttctgtt

SEQ ID NO: 22608 - DNA, 21 bp, synthetic construct
  misc_feature 1..21: note = Description of Artificial Sequence: Synthetic oligonucleotide
  source 1..21: mol_type = other DNA
tcggatggtcagacgcgtagt

SEQ ID NO: 22609 - DNA, 21 bp, synthetic construct
  misc_feature 1..21: note = Description of Artificial Sequence: Synthetic oligonucleotide
  source 1..21: mol_type = other DNA
tcggcgaagccgcagtctaag

SEQ ID NO: 22610 - DNA, 21 bp, synthetic construct
  misc_feature 1..21: note = Description of Artificial Sequence: Synthetic oligonucleotide
  source 1..21: mol_type = other DNA
tttaggactacggctactgag

SEQ ID NO: 22611 - DNA, 21 bp, synthetic construct
  misc_feature 1..21: note = Description of Artificial Sequence: Synthetic oligonucleotide
  source 1..21: mol_type = other DNA
gaaagaagcggcacccccagc

SEQ ID NO: 22612 - DNA, 21 bp, synthetic construct
  misc_feature 1..21: note = Description of Artificial Sequence: Synthetic oligonucleotide
  source 1..21: mol_type = other DNA
gccctcagcgacagcagaagc

SEQ ID NO: 22613 - DNA, 21 bp, synthetic construct
  misc_feature 1..21: note = Description of Artificial Sequence: Synthetic oligonucleotide
  source 1..21: mol_type = other DNA
gctgatacgaagactgggtcg

SEQ ID NO: 22614 - DNA, 21 bp, synthetic construct
  misc_feature 1..21: note = Description of Artificial Sequence: Synthetic oligonucleotide
  source 1..21: mol_type = other DNA
gggactccgtctaataatacg

SEQ ID NO: 22615 - DNA, 21 bp, synthetic construct
  misc_feature 1..21: note = Description of Artificial Sequence: Synthetic oligonucleotide
  source 1..21: mol_type = other DNA
agtacggggtcggctttttct

SEQ ID NO: 22616 - DNA, 21 bp, synthetic construct
  misc_feature 1..21: note = Description of Artificial Sequence: Synthetic oligonucleotide
  source 1..21: mol_type = other DNA
gctacggtttctaagccggct

SEQ ID NO: 22617 - DNA, 21 bp, synthetic construct
  misc_feature 1..21: note = Description of Artificial Sequence: Synthetic oligonucleotide
  source 1..21: mol_type = other DNA
aatatgggtcagaatggggtt

SEQ ID NO: 22618 - DNA, 21 bp, synthetic construct
  misc_feature 1..21: note = Description of Artificial Sequence: Synthetic oligonucleotide
  source 1..21: mol_type = other DNA
agcagcatccccagcgaaaaa

SEQ ID NO: 22619 - DNA, 21 bp, synthetic construct
  misc_feature 1..21: note = Description of Artificial Sequence: Synthetic oligonucleotide
  source 1..21: mol_type = other DNA
agccccgaaagcagagccagc

SEQ ID NO: 22620 - DNA, 21 bp, synthetic construct
  misc_feature 1..21: note = Description of Artificial Sequence: Synthetic oligonucleotide
  source 1..21: mol_type = other DNA
agtaatagtaaggagcagttg

SEQ ID NO: 22621 - DNA, 21 bp, synthetic construct
  misc_feature 1..21: note = Description of Artificial Sequence: Synthetic oligonucleotide
  source 1..21: mol_type = other DNA
agtactaggacgtctactagt

SEQ ID NO: 22622 - DNA, 21 bp, synthetic construct
  misc_feature 1..21: note = Description of Artificial Sequence: Synthetic oligonucleotide
  source 1..21: mol_type = other DNA
agtattcagagtccttctagt

SEQ ID NO: 22623 - DNA, 21 bp, synthetic construct
  misc_feature 1..21: note = Description of Artificial Sequence: Synthetic oligonucleotide
  source 1..21: mol_type = other DNA
ctcgacaacaaaaccgtcatc

SEQ ID NO: 22624 - DNA, 21 bp, synthetic construct
  misc_feature 1..21: note = Description of Artificial Sequence: Synthetic oligonucleotide
  source 1..21: mol_type = other DNA
gagcctagtactatttcgcgt

SEQ ID NO: 22625 - DNA, 21 bp, synthetic construct
  misc_feature 1..21: note = Description of Artificial Sequence: Synthetic oligonucleotide
  source 1..21: mol_type = other DNA
gagggtacgtctgagtcgaag

SEQ ID NO: 22626 - DNA, 21 bp, synthetic construct
  misc_feature 1..21: note = Description of Artificial Sequence: Synthetic oligonucleotide
  source 1..21: mol_type = other DNA
ggtcagtcgacgagtacggcg

SEQ ID NO: 22627 - DNA, 21 bp, synthetic construct
  misc_feature 1..21: note = Description of Artificial Sequence: Synthetic oligonucleotide
  source 1..21: mol_type = other DNA
gtcaacggccccaaccccacc

SEQ ID NO: 22628 - DNA, 21 bp, synthetic construct
  misc_feature 1..21: note = Description of Artificial Sequence: Synthetic oligonucleotide
  source 1..21: mol_type = other DNA
aatgatactcgtggtggtcag

SEQ ID NO: 22629 - DNA, 21 bp, synthetic construct
  misc_feature 1..21: note = Description of Artificial Sequence: Synthetic oligonucleotide
  source 1..21: mol_type = other DNA
cagggggatcgggatgtgcat

SEQ ID NO: 22630 - DNA, 21 bp, synthetic construct
  misc_feature 1..21: note = Description of Artificial Sequence: Synthetic oligonucleotide
  source 1..21: mol_type = other DNA
cttcagaatgcttctcctggg

SEQ ID NO: 22631 - DNA, 21 bp, synthetic construct
  misc_feature 1..21: note = Description of Artificial Sequence: Synthetic oligonucleotide
  source 1..21: mol_type = other DNA
gcggcgcctacgacgcctggg

SEQ ID NO: 22632 - DNA, 21 bp, synthetic construct
  misc_feature 1..21: note = Description of Artificial Sequence: Synthetic oligonucleotide
  source 1..21: mol_type = other DNA
ggggggcaggcttctggtcat

SEQ ID NO: 22633 - DNA, 21 bp, synthetic construct
  misc_feature 1..21: note = Description of Artificial Sequence: Synthetic oligonucleotide
  source 1..21: mol_type = other DNA
accaacctccccaccgtcgcc

SEQ ID NO: 22634 - DNA, 21 bp, synthetic construct
  misc_feature 1..21: note = Description of Artificial Sequence: Synthetic oligonucleotide
  source 1..21: mol_type = other DNA
agcggcagagaagacatgaga

SEQ ID NO: 22635 - DNA, 21 bp, synthetic construct
  misc_feature 1..21: note = Description of Artificial Sequence: Synthetic oligonucleotide
  source 1..21: mol_type = other DNA
ggcaaaagcaacgaaagaggc

SEQ ID NO: 22636 - DNA, 21 bp, synthetic construct
  misc_feature 1..21: note = Description of Artificial Sequence: Synthetic oligonucleotide
  source 1..21: mol_type = other DNA
aacggcagcaccaacagcaga

SEQ ID NO: 22637 - DNA, 21 bp, synthetic construct
  misc_feature 1..21: note = Description of Artificial Sequence: Synthetic oligonucleotide
  source 1..21: mol_type = other DNA
agccaaagcaaaagcttccaa

SEQ ID NO: 22638 - DNA, 21 bp, synthetic construct
  misc_feature 1..21: note = Description of Artificial Sequence: Synthetic oligonucleotide
  source 1..21: mol_type = other DNA
gaaacccccagcaaacaaacc

SEQ ID NO: 22639 - DNA, 21 bp, synthetic construct
  misc_feature 1..21: note = Description of Artificial Sequence: Synthetic oligonucleotide
  source 1..21: mol_type = other DNA
gagtcttctcatacgagtcgg

SEQ ID NO: 22640 - DNA, 21 bp, synthetic construct
  misc_feature 1..21: note = Description of Artificial Sequence: Synthetic oligonucleotide
  source 1..21: mol_type = other DNA
ggggataatgattcgaggaag

SEQ ID NO: 22641 - DNA, 21 bp, synthetic construct
  misc_feature 1..21: note = Description of Artificial Sequence: Synthetic oligonucleotide
  source 1..21: mol_type = other DNA
agaaccgaaaacgccagaagc

SEQ ID NO: 22642 - DNA, 21 bp, synthetic construct
  misc_feature 1..21: note = Description of Artificial Sequence: Synthetic oligonucleotide
  source 1..21: mol_type = other DNA
atgggggggactgctcagggt

SEQ ID NO: 22643 - DNA, 21 bp, synthetic construct
  misc_feature 1..21: note = Description of Artificial Sequence: Synthetic oligonucleotide
  source 1..21: mol_type = other DNA
gctgctaccggtcagcatact

SEQ ID NO: 22644 - DNA, 21 bp, synthetic construct
  misc_feature 1..21: note = Description of Artificial Sequence: Synthetic oligonucleotide
  source 1..21: mol_type = other DNA
ggtacgtctagtgctcctcag

SEQ ID NO: 22645 - DNA, 21 bp, synthetic construct
  misc_feature 1..21: note = Description of Artificial Sequence: Synthetic oligonucleotide
  source 1..21: mol_type = other DNA
agccccaacgccaaaagagac

SEQ ID NO: 22646 - DNA, 21 bp, synthetic construct
  misc_feature 1..21: note = Description of Artificial Sequence: Synthetic oligonucleotide
  source 1..21: mol_type = other DNA
gccgtcggcaacagcggcaaa

SEQ ID NO: 22647 - DNA, 21 bp, synthetic construct
  misc_feature 1..21: note = Description of Artificial Sequence: Synthetic oligonucleotide
  source 1..21: mol_type = other DNA
tcggggagggggtcgcctatg

SEQ ID NO: 22648 - DNA, 21 bp, synthetic construct
  misc_feature 1..21: note = Description of Artificial Sequence: Synthetic oligonucleotide
  source 1..21: mol_type = other DNA
tcgtctcagacgacgtcttcg

SEQ ID NO: 22649 - DNA, 21 bp, synthetic construct
  misc_feature 1..21: note = Description of Artificial Sequence: Synthetic oligonucleotide
  source 1..21: mol_type = other DNA
aacaccggcagcggcagcgcc

SEQ ID NO: 22650 - DNA, 21 bp, synthetic construct
  misc_feature 1..21: note = Description of Artificial Sequence: Synthetic oligonucleotide
  source 1..21: mol_type = other DNA
cagaagattgatacggtgcgg

SEQ ID NO: 22651 - DNA, 21 bp, synthetic construct
  misc_feature 1..21: note = Description of Artificial Sequence: Synthetic oligonucleotide
  source 1..21: mol_type = other DNA
ggcacccacgccaacgccaaa

SEQ ID NO: 22652 - DNA, 21 bp, synthetic construct
  misc_feature 1..21: note = Description of Artificial Sequence: Synthetic oligonucleotide
  source 1..21: mol_type = other DNA
ggcgtcagcaaaagcctcagc

SEQ ID NO: 22653 - DNA, 21 bp, synthetic construct
  misc_feature 1..21: note = Description of Artificial Sequence: Synthetic oligonucleotide
  source 1..21: mol_type = other DNA
ggtactcagtcgtctcggcag

SEQ ID NO: 22654 - DNA, 21 bp, synthetic construct
  misc_feature 1..21: note = Description of Artificial Sequence: Synthetic oligonucleotide
  source 1..21: mol_type = other DNA
aattcgactgggacgtctacg

SEQ ID NO: 22655 - DNA, 21 bp, synthetic construct
  misc_feature 1..21: note = Description of Artificial Sequence: Synthetic oligonucleotide
  source 1..21: mol_type = other DNA
acgcgtaatacggaggttcat

SEQ ID NO: 22656 - DNA, 21 bp, synthetic construct
  misc_feature 1..21: note = Description of Artificial Sequence: Synthetic oligonucleotide
  source 1..21: mol_type = other DNA
actcctagggcgactgctgag

SEQ ID NO: 22657 - DNA, 21 bp, synthetic construct
  misc_feature 1..21: note = Description of Artificial Sequence: Synthetic oligonucleotide
  source 1..21: mol_type = other DNA
aatcagagtaatactaccgtt

SEQ ID NO: 22658 - DNA, 21 bp, synthetic construct
  misc_feature 1..21: note = Description of Artificial Sequence: Synthetic oligonucleotide
  source 1..21: mol_type = other DNA
acgcctattcaggatgctaag

SEQ ID NO: 22659 - DNA, 21 bp, synthetic construct
  misc_feature 1..21: note = Description of Artificial Sequence: Synthetic oligonucleotide
  source 1..21: mol_type = other DNA
agtgctaattcggatcgttcg

SEQ ID NO: 22660 - DNA, 21 bp, synthetic construct
  misc_feature 1..21: note = Description of Artificial Sequence: Synthetic oligonucleotide
  source 1..21: mol_type = other DNA
acgcctaatgctcatcctcag

SEQ ID NO: 22661 - DNA, 21 bp, synthetic construct
  misc_feature 1..21: note = Description of Artificial Sequence: Synthetic oligonucleotide
  source 1..21: mol_type = other DNA
agcctcaccaaaggcagcgtc

SEQ ID NO: 22662 - DNA, 21 bp, synthetic construct
  misc_feature 1..21: note = Description of Artificial Sequence: Synthetic oligonucleotide
  source 1..21: mol_type = other DNA
tctgcggcgaagtcgagtact

SEQ ID NO: 22663 - DNA, 21 bp, synthetic construct
  misc_feature 1..21: note = Description of Artificial Sequence: Synthetic oligonucleotide
  source 1..21: mol_type = other DNA
agcaacagcaccaaaaccgcc

SEQ ID NO: 22664 - DNA, 21 bp, synthetic construct
  misc_feature 1..21: note = Description of Artificial Sequence: Synthetic oligonucleotide
  source 1..21: mol_type = other DNA
accaacagccaaaccagcctc

SEQ ID NO: 22665 - DNA, 21 bp, synthetic construct
  misc_feature 1..21: note = Description of Artificial Sequence: Synthetic oligonucleotide
  source 1..21: mol_type = other DNA
aagaatgagacttctaatggg

SEQ ID NO: 22666 - DNA, 21 bp, synthetic construct
  misc_feature 1..21: note = Description of Artificial Sequence: Synthetic oligonucleotide
  source 1..21: mol_type = other DNA
aatatttctcataagggtgag

SEQ ID NO: 22667 - DNA, 21 bp, synthetic construct
  misc_feature 1..21: note = Description of Artificial Sequence: Synthetic oligonucleotide
  source 1..21: mol_type = other DNA
aatgcgtcgtctaagttgcag

SEQ ID NO: 22668 - DNA, 21 bp, synthetic construct
  misc_feature 1..21: note = Description of Artificial Sequence: Synthetic oligonucleotide
  source 1..21: mol_type = other DNA
aattctggggctgggttgatg

SEQ ID NO: 22669 - DNA, 21 bp, synthetic construct
  misc_feature 1..21: note = Description of Artificial Sequence: Synthetic oligonucleotide
  source 1..21: mol_type = other DNA
accatggcccaaaaccccagc

SEQ ID NO: 22670 - DNA, 21 bp, synthetic construct
  misc_feature 1..21: note = Description of Artificial Sequence: Synthetic oligonucleotide
  source 1..21: mol_type = other DNA
acccaccaaagcggcagcgtc

SEQ ID NO: 22671 - DNA, 21 bp, synthetic construct
  misc_feature 1..21: note = Description of Artificial Sequence: Synthetic oligonucleotide
  source 1..21: mol_type = other DNA
accggccaacaaagcagcatc

SEQ ID NO: 22672 - DNA, 21 bp, synthetic construct
  misc_feature 1..21: note = Description of Artificial Sequence: Synthetic oligonucleotide
  source 1..21: mol_type = other DNA
actgggggtgctcctgggggt

SEQ ID NO: 22673 - DNA, 21 bp, synthetic construct
  misc_feature 1..21: note = Description of Artificial Sequence: Synthetic oligonucleotide
  source 1..21: mol_type = other DNA
agagacggcggcgccagcatg

SEQ ID NO: 22674 - DNA, 21 bp, synthetic construct
  misc_feature 1..21: note = Description of Artificial Sequence: Synthetic oligonucleotide
  source 1..21: mol_type = other DNA
agaggcaacagcaacagcggc

SEQ ID NO: 22675 - DNA, 21 bp, synthetic construct
  misc_feature 1..21: note = Description of Artificial Sequence: Synthetic oligonucleotide
  source 1..21: mol_type = other DNA
agcaaaggcgacaacggcggc

SEQ ID NO: 22676 - DNA, 21 bp, synthetic construct
  misc_feature 1..21: note = Description of Artificial Sequence: Synthetic oligonucleotide
  source 1..21: mol_type = other DNA
agcagacccgaaaaagtcccc

SEQ ID NO: 22677 - DNA, 21 bp, synthetic construct
  misc_feature 1..21: note = Description of Artificial Sequence: Synthetic oligonucleotide
  source 1..21: mol_type = other DNA
agcagcagcagccccgtcagc

SEQ ID NO: 22678 - DNA, 21 bp, synthetic construct
  misc_feature 1..21: note = Description of Artificial Sequence: Synthetic oligonucleotide
  source 1..21: mol_type = other DNA
atcggcaccggcgtcagcagc

SEQ ID NO: 22679 - DNA, 21 bp, synthetic construct
  misc_feature 1..21: note = Description of Artificial Sequence: Synthetic oligonucleotide
  source 1..21: mol_type = other DNA
atgagcggcagcaacccccaa

SEQ ID NO: 22680 - DNA, 21 bp, synthetic construct
  misc_feature 1..21: note = Description of Artificial Sequence: Synthetic oligonucleotide
  source 1..21: mol_type = other DNA
attgcttctcagaaggttccg

SEQ ID NO: 22681 - DNA, 21 bp, synthetic construct
  misc_feature 1..21: note = Description of Artificial Sequence: Synthetic oligonucleotide
  source 1..21: mol_type = other DNA
ctcagcgtcagcagcgccggc

SEQ ID NO: 22682 - DNA, 21 bp, synthetic construct
  misc_feature 1..21: note = Description of Artificial Sequence: Synthetic oligonucleotide
  source 1..21: mol_type = other DNA
ctggctgcgtcttcgaatgcg

SEQ ID NO: 22683 - DNA, 21 bp, synthetic construct
  misc_feature 1..21: note = Description of Artificial Sequence: Synthetic oligonucleotide
  source 1..21: mol_type = other DNA
gacaacaccaaagaactcaga

SEQ ID NO: 22684 - DNA, 21 bp, synthetic construct
  misc_feature 1..21: note = Description of Artificial Sequence: Synthetic oligonucleotide
  source 1..21: mol_type = other DNA
gccagcggcaaacccggcgaa

SEQ ID NO: 22685 - DNA, 21 bp, synthetic construct
  misc_feature 1..21: note = Description of Artificial Sequence: Synthetic oligonucleotide
  source 1..21: mol_type = other DNA
gcgtctaattctcgtgataag

SEQ ID NO: 22686 - DNA, 21 bp, synthetic construct
  misc_feature 1..21: note = Description of Artificial Sequence: Synthetic oligonucleotide
  source 1..21: mol_type = other DNA
ggcatcctcgaaaaaaccaga

SEQ ID NO: 22687 - DNA, 21 bp, synthetic construct
  misc_feature 1..21: note = Description of Artificial Sequence: Synthetic oligonucleotide
  source 1..21: mol_type = other DNA
ggcggcggcagccaccaaagc

SEQ ID NO: 22688 - DNA, 21 bp, synthetic construct
  misc_feature 1..21: note = Description of Artificial Sequence: Synthetic oligonucleotide
  source 1..21: mol_type = other DNA
gggatggataagacttctcgg

SEQ ID NO: 22689 - DNA, 21 bp, synthetic construct
  misc_feature 1..21: note = Description of Artificial Sequence: Synthetic oligonucleotide
  source 1..21: mol_type = other DNA
gggtcggtgcctgatcgtaag

SEQ ID NO: 22690 - DNA, 21 bp, synthetic construct
  misc_feature 1..21: note = Description of Artificial Sequence: Synthetic oligonucleotide
  source 1..21: mol_type = other DNA
ggtagtcatgagaggaatacg

SEQ ID NO: 22691 - DNA, 21 bp, synthetic construct
  misc_feature 1..21: note = Description of Artificial Sequence: Synthetic oligonucleotide
  source 1..21: mol_type = other DNA
ggtattgagaatttgaaggag

SEQ ID NO: 22692 - DNA, 21 bp, synthetic construct
  misc_feature 1..21: note = Description of Artificial Sequence: Synthetic oligonucleotide
  source 1..21: mol_type = other DNA
ggtcctgtgtctggtactggt

SEQ ID NO: 22693 - DNA, 21 bp, synthetic construct
  misc_feature 1..21: note = Description of Artificial Sequence: Synthetic oligonucleotide
  source 1..21: mol_type = other DNA
gtcggcgccgccaacagccaa

SEQ ID NO: 22694 - DNA, 21 bp, synthetic construct
  misc_feature 1..21: note = Description of Artificial Sequence: Synthetic oligonucleotide
  source 1..21: mol_type = other DNA
tcttctactaatactagtgcg

SEQ ID NO: 22695 - DNA, 21 bp, synthetic construct
  misc_feature 1..21: note = Description of Artificial Sequence: Synthetic oligonucleotide
  source 1..21: mol_type = other DNA
ttttctgatagtccggctaag

SEQ ID NO: 22696 - DNA, 21 bp, synthetic construct
  misc_feature 1..21: note = Description of Artificial Sequence: Synthetic oligonucleotide
  source 1..21: mol_type = other DNA
accaacgaccacagcaccagc

SEQ ID NO: 22697 - DNA, 21 bp, synthetic construct
  misc_feature 1..21: note = Description of Artificial Sequence: Synthetic oligonucleotide
  source 1..21: mol_type = other DNA
ggtagtccggatccgcgttcg

SEQ ID NO: 22698 - DNA, 21 bp, synthetic construct
  misc_feature 1..21: note = Description of Artificial Sequence: Synthetic oligonucleotide
  source 1..21: mol_type = other DNA
accaacgacagcagacacgaa

SEQ ID NO: 22699 - DNA, 21 bp, synthetic construct
  misc_feature 1..21: note = Description of Artificial Sequence: Synthetic oligonucleotide
  source 1..21: mol_type = other DNA
agtactgcgagttcgacgctg

SEQ ID NO: 22700 - DNA, 21 bp, synthetic construct
  misc_feature 1..21: note = Description of Artificial Sequence: Synthetic oligonucleotide
  source 1..21: mol_type = other DNA
atggtgaataagcagtcgtcg

SEQ ID NO: 22701 - DNA, 21 bp, synthetic construct
  misc_feature 1..21: note = Description of Artificial Sequence: Synthetic oligonucleotide
  source 1..21: mol_type = other DNA
gaggctcgtagtgcttctacg

SEQ ID NO: 22702 - DNA, 21 bp, synthetic construct
  misc_feature 1..21: note = Description of Artificial Sequence: Synthetic oligonucleotide
  source 1..21: mol_type = other DNA
ggccaaggcagcgccagcgcc

SEQ ID NO: 22703 - DNA, 21 bp, synthetic construct
  misc_feature 1..21: note = Description of Artificial Sequence: Synthetic oligonucleotide
  source 1..21: mol_type = other DNA
gacggcaaaagcaaactcgcc

SEQ ID NO: 22704 - DNA, 21 bp, synthetic construct
  misc_feature 1..21: note = Description of Artificial Sequence: Synthetic oligonucleotide
  source 1..21: mol_type = other DNA
gctgggacgaatgggcttaat

SEQ ID NO: 22705 - DNA, 21 bp, synthetic construct
  misc_feature 1..21: note = Description of Artificial Sequence: Synthetic oligonucleotide
  source 1..21: mol_type = other DNA
tcggttgcggcggcgcctacg

SEQ ID NO: 22706 - DNA, 21 bp, synthetic construct
  misc_feature 1..21: note = Description of Artificial Sequence: Synthetic oligonucleotide
  source 1..21: mol_type = other DNA
agcagcaccaaccccggcacc

SEQ ID NO: 22707 - DNA, 21 bp, synthetic construct
  misc_feature 1..21: note = Description of Artificial Sequence: Synthetic oligonucleotide
  source 1..21: mol_type = other DNA
tgttgtactggtaagagtagt

SEQ ID NO: 22708 - DNA, 21 bp, synthetic construct
  misc_feature 1..21: note = Description of Artificial Sequence: Synthetic oligonucleotide
  source 1..21: mol_type = other DNA
aatagtggtagtacggctagt

SEQ ID NO: 22709 - DNA, 21 bp, synthetic construct
  misc_feature 1..21: note = Description of Artificial Sequence: Synthetic oligonucleotide
  source 1..21: mol_type = other DNA
accgccctcggcagcaacagc

SEQ ID NO: 22710 - DNA, 21 bp, synthetic construct
  misc_feature 1..21: note = Description of Artificial Sequence: Synthetic oligonucleotide
  source 1..21: mol_type = other DNA
agcggcggcggcaccgaaaac

SEQ ID NO: 22711 - DNA, 21 bp, synthetic construct
  misc_feature 1..21: note = Description of Artificial Sequence: Synthetic oligonucleotide
  source 1..21: mol_type = other DNA
gacggcggcagcaacaaagcc

SEQ ID NO: 22712 - DNA, 21 bp, synthetic construct
  misc_feature 1..21: note = Description of Artificial Sequence: Synthetic oligonucleotide
  source 1..21: mol_type = other DNA
gccgccaccaccggcggcgcc

SEQ ID NO: 22713 - DNA, 21 bp, synthetic construct
  misc_feature 1..21: note = Description of Artificial Sequence: Synthetic oligonucleotide
  source 1..21: mol_type = other DNA
ggccccgccaaaaccgacaga

SEQ ID NO: 22714 - DNA, 21 bp, synthetic construct
  misc_feature 1..21: note = Description of Artificial Sequence: Synthetic oligonucleotide
  source 1..21: mol_type = other DNA
ggcaccagcaacaacaaaatc

SEQ ID NO: 22715 - DNA, 21 bp, synthetic construct
  misc_feature 1..21: note = Description of Artificial Sequence: Synthetic oligonucleotide
  source 1..21: mol_type = other DNA
atcaaaaacagcaaagaaggc

SEQ ID NO: 22716 - DNA, 21 bp, synthetic construct
  misc_feature 1..21: note = Description of Artificial Sequence: Synthetic oligonucleotide
  source 1..21: mol_type = other DNA
cagcctgctagtacttctgtt

SEQ ID NO: 22717 - DNA, 21 bp, synthetic construct
  misc_feature 1..21: note = Description of Artificial Sequence: Synthetic oligonucleotide
  source 1..21: mol_type = other DNA
gacagcagcaaaaccgccgtc

SEQ ID NO: 22718 - DNA, 21 bp, synthetic construct
  misc_feature 1..21: note = Description of Artificial Sequence: Synthetic oligonucleotide
  source 1..21: mol_type = other DNA
ggggctcttaatgggcatggg

SEQ ID NO: 22719 - DNA, 21 bp, synthetic construct
  misc_feature 1..21: note = Description of Artificial Sequence: Synthetic oligonucleotide
  source 1..21: mol_type = other DNA
tggggcaacagcaccaacgcc

SEQ ID NO: 22720 - DNA, 21 bp, synthetic construct
  misc_feature 1..21: note = Description of Artificial Sequence: Synthetic oligonucleotide
  source 1..21: mol_type = other DNA
ctcaacggcaaacccagcaac

SEQ ID NO: 22721 - DNA, 21 bp, synthetic construct
  misc_feature 1..21: note = Description of Artificial Sequence: Synthetic oligonucleotide
  source 1..21: mol_type = other DNA
actggggcgtcttcgactctg

SEQ ID NO: 22722 - DNA, 21 bp, synthetic construct
  misc_feature 1..21: note = Description of Artificial Sequence: Synthetic oligonucleotide
  source 1..21: mol_type = other DNA
cagactgcggataggcgtgat

SEQ ID NO: 22723 - DNA, 21 bp, synthetic construct
  misc_feature 1..21: note = Description of Artificial Sequence: Synthetic oligonucleotide
  source 1..21: mol_type = other DNA
aacagcgcccaccccgccacc

SEQ ID NO: 22724 - DNA, 21 bp, synthetic construct
  misc_feature 1..21: note = Description of Artificial Sequence: Synthetic oligonucleotide
  source 1..21: mol_type = other DNA
acgactaatactggtcttgcg

SEQ ID NO: 22725 - DNA, 21 bp, synthetic construct
  misc_feature 1..21: note = Description of Artificial Sequence: Synthetic oligonucleotide
  source 1..21: mol_type = other DNA
gtgagttctggtaaggtgtct

SEQ ID NO: 22726 - DNA, 21 bp, synthetic construct
  misc_feature 1..21: note = Description of Artificial Sequence: Synthetic oligonucleotide
  source 1..21: mol_type = other DNA
agtccgacgtctgatcgtttg

SEQ ID NO: 22727 - DNA, 21 bp, synthetic construct
  misc_feature 1..21: note = Description of Artificial Sequence: Synthetic oligonucleotide
  source 1..21: mol_type = other DNA
ctgagtggtcataatagtggg

SEQ ID NO: 22728 - DNA, 21 bp, synthetic construct
  misc_feature 1..21: note = Description of Artificial Sequence: Synthetic oligonucleotide
  source 1..21: mol_type = other DNA
gccaaaagccccaacagctac

SEQ ID NO: 22729 - DNA, 21 bp, synthetic construct
  misc_feature 1..21: note = Description of Artificial Sequence: Synthetic oligonucleotide
  source 1..21: mol_type = other DNA
tttacgagtgagcatggtcgt

SEQ ID NO: 22730 - DNA, 21 bp, synthetic construct
  misc_feature 1..21: note = Description of Artificial Sequence: Synthetic oligonucleotide
  source 1..21: mol_type = other DNA
cagtcgggtgggcagacggct

SEQ ID NO: 22731 - DNA, 21 bp, synthetic construct
  misc_feature 1..21: note = Description of Artificial Sequence: Synthetic oligonucleotide
  source 1..21: mol_type = other DNA
agccaagccagcaccagcctc

SEQ ID NO: 22732 - DNA, 21 bp, synthetic construct
  misc_feature 1..21: note = Description of Artificial Sequence: Synthetic oligonucleotide
  source 1..21: mol_type = other DNA
gacggcagcagacaaagcatc

SEQ ID NO: 22733 - DNA, 21 bp, synthetic construct
  misc_feature 1..21: note = Description of Artificial Sequence: Synthetic oligonucleotide
  source 1..21: mol_type = other DNA
agccccaacaaacccacccac

SEQ ID NO: 22734 - DNA, 21 bp, synthetic construct
  misc_feature 1..21: note = Description of Artificial Sequence: Synthetic oligonucleotide
  source 1..21: mol_type = other DNA
agcaccaccagcgacagagcc

SEQ ID NO: 22735 - DNA, 21 bp, synthetic construct
  misc_feature 1..21: note = Description of Artificial Sequence: Synthetic oligonucleotide
  source 1..21: mol_type = other DNA
aattctgatgagtcgaatcgt

SEQ ID NO: 22736 - DNA, 21 bp, synthetic construct
  misc_feature 1..21: note = Description of Artificial Sequence: Synthetic oligonucleotide
  source 1..21: mol_type = other DNA
aacaccagcggccaaaacccc

SEQ ID NO: 22737 - DNA, 21 bp, synthetic construct
  misc_feature 1..21: note = Description of Artificial Sequence: Synthetic oligonucleotide
  source 1..21: mol_type = other DNA
aataataattcgtcgactaat

SEQ ID NO: 22738 - DNA, 21 bp, synthetic construct
  misc_feature 1..21: note = Description of Artificial Sequence: Synthetic oligonucleotide
  source 1..21: mol_type = other DNA
accagcggcgacgccagaagc

SEQ ID NO: 22739 - DNA, 21 bp, synthetic construct
  misc_feature 1..21: note = Description of Artificial Sequence: Synthetic oligonucleotide
  source 1..21: mol_type = other DNA
agggataatactcctgcgctg

SEQ ID NO: 22740 - DNA, 21 bp, synthetic construct
  misc_feature 1..21: note = Description of Artificial Sequence: Synthetic oligonucleotide
  source 1..21: mol_type = other DNA
atcgtccaagaaaacagcaaa

SEQ ID NO: 22741 - DNA, 21 bp, synthetic construct
  misc_feature 1..21: note = Description of Artificial Sequence: Synthetic oligonucleotide
  source 1..21: mol_type = other DNA
atgaatagtccgggtacgtcg

SEQ ID NO: 22742 - DNA, 21 bp, synthetic construct
  misc_feature 1..21: note = Description of Artificial Sequence: Synthetic oligonucleotide
  source 1..21: mol_type = other DNA
gaaaccagcagcagagccagc

SEQ ID NO: 22743 - DNA, 21 bp, synthetic construct
  misc_feature 1..21: note = Description of Artificial Sequence: Synthetic oligonucleotide
  source 1..21: mol_type = other DNA
gacctccaagacagcagaaaa

SEQ ID NO: 22744 - DNA, 21 bp, synthetic construct
  misc_feature 1..21: note = Description of Artificial Sequence: Synthetic oligonucleotide
  source 1..21: mol_type = other DNA
gatggtaaggtgagtactaag

SEQ ID NO: 22745 - DNA, 21 bp, synthetic construct
  misc_feature 1..21: note = Description of Artificial Sequence: Synthetic oligonucleotide
  source 1..21: mol_type = other DNA
ggccacgtccaaagcagcaaa

SEQ ID NO: 22746 - DNA, 21 bp, synthetic construct
  misc_feature 1..21: note = Description of Artificial Sequence: Synthetic oligonucleotide
  source 1..21: mol_type = other DNA
ggccccgacagcaacagagtc

SEQ ID NO: 22747 - DNA, 21 bp, synthetic construct
  misc_feature 1..21: note = Description of Artificial Sequence: Synthetic oligonucleotide
  source 1..21: mol_type = other DNA
ttgcagagtggggagcagcgt

SEQ ID NO: 22748 - DNA, 21 bp, synthetic construct
  misc_feature 1..21: note = Description of Artificial Sequence: Synthetic oligonucleotide
  source 1..21: mol_type = other DNA
aattcttcgactaaggcggtt

SEQ ID NO: 22749 - DNA, 21 bp, synthetic construct
  misc_feature 1..21: note = Description of Artificial Sequence: Synthetic oligonucleotide
  source 1..21: mol_type = other DNA
ggcggccaagaaagaaacaac

SEQ ID NO: 22750 - DNA, 21 bp, synthetic construct
  misc_feature 1..21: note = Description of Artificial Sequence: Synthetic oligonucleotide
  source 1..21: mol_type = other DNA
agcatgagcgccacccacgtc

SEQ ID NO: 22751 - DNA, 21 bp, synthetic construct
  misc_feature 1..21: note = Description of Artificial Sequence: Synthetic oligonucleotide
  source 1..21: mol_type = other DNA
gatgcgcgggaggttagtcgg

SEQ ID NO: 22752 - DNA, 21 bp, synthetic construct
  misc_feature 1..21: note = Description of Artificial Sequence: Synthetic oligonucleotide
  source 1..21: mol_type = other DNA
actttggataagactaatagt

SEQ ID NO: 22753 - DNA, 21 bp, synthetic construct
  misc_feature 1..21: note = Description of Artificial Sequence: Synthetic oligonucleotide
  source 1..21: mol_type = other DNA
agcaacaacaaacccaacagc

SEQ ID NO: 22754 - DNA, 21 bp, synthetic construct
  misc_feature 1..21: note = Description of Artificial Sequence: Synthetic oligonucleotide
  source 1..21: mol_type = other DNA
ctcaccagcgaaaaacacctc

SEQ ID NO: 22755 - DNA, 21 bp, synthetic construct
  misc_feature 1..21: note = Description of Artificial Sequence: Synthetic oligonucleotide
  source 1..21: mol_type = other DNA
gaaagcagcagcggcagcatg

SEQ ID NO: 22756 - DNA, 21 bp, synthetic construct
  misc_feature 1..21: note = Description of Artificial Sequence: Synthetic oligonucleotide
  source 1..21: mol_type = other DNA
gacctcaaagaccccagagcc

SEQ ID NO: 22757 - DNA, 21 bp, synthetic construct
  misc_feature 1..21: note = Description of Artificial Sequence: Synthetic oligonucleotide
  source 1..21: mol_type = other DNA
gacgtcagccaaagaaacctc

SEQ ID NO: 22758 - DNA, 21 bp, synthetic construct
  misc_feature 1..21: note = Description of Artificial Sequence: Synthetic oligonucleotide
  source 1..21: mol_type = other DNA
gatcagcttggtacttctcgt

SEQ ID NO: 22759 - DNA, 21 bp, synthetic construct
  misc_feature 1..21: note = Description of Artificial Sequence: Synthetic oligonucleotide
  source 1..21: mol_type = other DNA
tcggttaagaatccgactaat

SEQ ID NO: 22760 - DNA, 21 bp, synthetic construct
  misc_feature 1..21: note = Description of Artificial Sequence: Synthetic oligonucleotide
  source 1..21: mol_type = other DNA
tcttctagtgagtcgaagagt

SEQ ID NO: 22761 - DNA, 21 bp, synthetic construct
  misc_feature 1..21: note = Description of Artificial Sequence: Synthetic oligonucleotide
  source 1..21: mol_type = other DNA
gctggtagtcgtgagacttcg

SEQ ID NO: 22762 - DNA, 21 bp, synthetic construct
  misc_feature 1..21: note = Description of Artificial Sequence: Synthetic oligonucleotide
  source 1..21: mol_type = other DNA
accaacaccggcagcagcgtc

SEQ ID NO: 22763 - DNA, 21 bp, synthetic construct
  misc_feature 1..21: note = Description of Artificial Sequence: Synthetic oligonucleotide
  source 1..21: mol_type = other DNA
agcgaaggcagcggcggcaaa

SEQ ID NO: 22764 - DNA, 21 bp, synthetic construct
  misc_feature 1..21: note = Description of Artificial Sequence: Synthetic oligonucleotide
  source 1..21: mol_type = other DNA
atggtgcctggggataaggtt

SEQ ID NO: 22765 - DNA, 21 bp, synthetic construct
  misc_feature 1..21: note = Description of Artificial Sequence: Synthetic oligonucleotide
  source 1..21: mol_type = other DNA
cacaacggcagcaaaggcatg

SEQ ID NO: 22766 - DNA, 21 bp, synthetic construct
  misc_feature 1..21: note = Description of Artificial Sequence: Synthetic oligonucleotide
  source 1..21: mol_type = other DNA
gaccccagccacgtcaacaga

SEQ ID NO: 22767 - DNA, 21 bp, synthetic construct
  misc_feature 1..21: note = Description of Artificial Sequence: Synthetic oligonucleotide
  source 1..21: mol_type = other DNA
gccgccggcgacagaagcggc

SEQ ID NO: 22768 - DNA, 21 bp, synthetic construct
  misc_feature 1..21: note = Description of Artificial Sequence: Synthetic oligonucleotide
  source 1..21: mol_type = other DNA
gctagtagtggtcagagtggc

SEQ ID NO: 22769 - DNA, 21 bp, synthetic construct
  misc_feature 1..21: note = Description of Artificial Sequence: Synthetic oligonucleotide
  source 1..21: mol_type = other DNA
gtcgaagccagcggcaacaaa

SEQ ID NO: 22770 - DNA, 21 bp, synthetic construct
  misc_feature 1..21: note = Description of Artificial Sequence: Synthetic oligonucleotide
  source 1..21: mol_type = other DNA
ggcaacgcccccaacctcaaa

SEQ ID NO: 22771 - DNA, 21 bp, synthetic construct
  misc_feature 1..21: note = Description of Artificial Sequence: Synthetic oligonucleotide
  source 1..21: mol_type = other DNA
acccacagcagcgacaaccaa

SEQ ID NO: 22772 - DNA, 21 bp, synthetic construct
  misc_feature 1..21: note = Description of Artificial Sequence: Synthetic oligonucleotide
  source 1..21: mol_type = other DNA
tcggtttcgagtcctacgaag

SEQ ID NO: 22773 - DNA, 21 bp, synthetic construct
  misc_feature 1..21: note = Description of Artificial Sequence: Synthetic oligonucleotide
  source 1..21: mol_type = other DNA
acgattaatagtcagccgatt

SEQ ID NO: 22774 - DNA, 21 bp, synthetic construct
  misc_feature 1..21: note = Description of Artificial Sequence: Synthetic oligonucleotide
  source 1..21: mol_type = other DNA
agtcttagtcaggctccgact

SEQ ID NO: 22775 - DNA, 21 bp, synthetic construct
  misc_feature 1..21: note = Description of Artificial Sequence: Synthetic oligonucleotide
  source 1..21: mol_type = other DNA
gaaagcagcggcgccagactc

SEQ ID NO: 22776 - DNA, 21 bp, synthetic construct
  misc_feature 1..21: note = Description of Artificial Sequence: Synthetic oligonucleotide
  source 1..21: mol_type = other DNA
tctcagtctaagcaggttagt

SEQ ID NO: 22777 - DNA, 21 bp, synthetic construct
  misc_feature 1..21: note = Description of Artificial Sequence: Synthetic oligonucleotide
  source 1..21: mol_type = other DNA
tggagttctgagaagactcgt

SEQ ID NO: 22778 - DNA, 21 bp, synthetic construct
  misc_feature 1..21: note = Description of Artificial Sequence: Synthetic oligonucleotide
  source 1..21: mol_type = other DNA
gacagactcggcaaaggcccc

SEQ ID NO: 22779 - DNA, 21 bp, synthetic construct
  misc_feature 1..21: note = Description of Artificial Sequence: Synthetic oligonucleotide
  source 1..21: mol_type = other DNA
agtgttgttcaggcgtcgaag

SEQ ID NO: 22780 - DNA, 21 bp, synthetic construct
  misc_feature 1..21: note = Description of Artificial Sequence: Synthetic oligonucleotide
  source 1..21: mol_type = other DNA
agcagcagcagcagcagcaac

SEQ ID NO: 22781 - DNA, 21 bp, synthetic construct
  misc_feature 1..21: note = Description of Artificial Sequence: Synthetic oligonucleotide
  source 1..21: mol_type = other DNA
atgaattctcagtctagtcgg

SEQ ID NO: 22782 - DNA, 21 bp, synthetic construct
  misc_feature 1..21: note = Description of Artificial Sequence: Synthetic oligonucleotide
  source 1..21: mol_type = other DNA
cagacgtctggtacgcaggtt

SEQ ID NO: 22783 - DNA, 21 bp, synthetic construct
  misc_feature 1..21: note = Description of Artificial Sequence: Synthetic oligonucleotide
  source 1..21: mol_type = other DNA
cagtctaagggtactactggg

SEQ ID NO: 22784 - DNA, 21 bp, synthetic construct
  misc_feature 1..21: note = Description of Artificial Sequence: Synthetic oligonucleotide
  source 1..21: mol_type = other DNA
gatgttccttctaagcagttg

SEQ ID NO: 22785 - DNA, 21 bp, synthetic construct
  misc_feature 1..21: note = Description of Artificial Sequence: Synthetic oligonucleotide
  source 1..21: mol_type = other DNA
ggcgtcagcaaagacagaatg

SEQ ID NO: 22786 - DNA, 21 bp, synthetic construct
  misc_feature 1..21: note = Description of Artificial Sequence: Synthetic oligonucleotide
  source 1..21: mol_type = other DNA
atgggcagcaacagcagcatc

SEQ ID NO: 22787 - DNA, 21 bp, synthetic construct
  misc_feature 1..21: note = Description of Artificial Sequence: Synthetic oligonucleotide
  source 1..21: mol_type = other DNA
ggtactggtcgggatacggct

SEQ ID NO: 22788 - DNA, 21 bp, synthetic construct
  misc_feature 1..21: note = Description of Artificial Sequence: Synthetic oligonucleotide
  source 1..21: mol_type = other DNA
ggcaccggcaccgacctcaaa

SEQ ID NO: 22789 - DNA, 21 bp, synthetic construct
  misc_feature 1..21: note = Description of Artificial Sequence: Synthetic oligonucleotide
  source 1..21: mol_type = other DNA
attgatactaagggggggtct

SEQ ID NO: 22790 - DNA, 21 bp, synthetic construct
  misc_feature 1..21: note = Description of Artificial Sequence: Synthetic oligonucleotide
  source 1..21: mol_type = other DNA
agcagcagccaaagcaaaatg

SEQ ID NO: 22791 - DNA, 21 bp, synthetic construct
  misc_feature 1..21: note = Description of Artificial Sequence: Synthetic oligonucleotide
  source 1..21: mol_type = other DNA
gctgcgggggcgaattcgggt

SEQ ID NO: 22792 - DNA, 21 bp, synthetic construct
  misc_feature 1..21: note = Description of Artificial Sequence: Synthetic oligonucleotide
  source 1..21: mol_type = other DNA
aaaggcagcaacacccacggc

SEQ ID NO: 22793 - DNA, 21 bp, synthetic construct
  misc_feature 1..21: note = Description of Artificial Sequence: Synthetic oligonucleotide
  source 1..21: mol_type = other DNA
aacgcccccggccaacacggc

SEQ ID NO: 22794 - DNA, 21 bp, synthetic construct
  misc_feature 1..21: note = Description of Artificial Sequence: Synthetic oligonucleotide
  source 1..21: mol_type = other DNA
aacgtcagcgaaacccccaaa

SEQ ID NO: 22795 - DNA, 21 bp, synthetic construct
  misc_feature 1..21: note = Description of Artificial Sequence: Synthetic oligonucleotide
  source 1..21: mol_type = other DNA
aatactgatactaggtcgtct

SEQ ID NO: 22796 - DNA, 21 bp, synthetic construct
  misc_feature 1..21: note = Description of Artificial Sequence: Synthetic oligonucleotide
  source 1..21: mol_type = other DNA
agcagaacccccggcagcagc

SEQ ID NO: 22797 - DNA, 21 bp, synthetic construct
  misc_feature 1..21: note = Description of Artificial Sequence: Synthetic oligonucleotide
  source 1..21: mol_type = other DNA
agcggcaaaagcagcaacagc

SEQ ID NO: 22798 - DNA, 21 bp, synthetic construct
  misc_feature 1..21: note = Description of Artificial Sequence: Synthetic oligonucleotide
  source 1..21: mol_type = other DNA
agcggcgtcagccacgccgcc

SEQ ID NO: 22799 - DNA, 21 bp, synthetic construct
  misc_feature 1..21: note = Description of Artificial Sequence: Synthetic oligonucleotide
  source 1..21: mol_type = other DNA
caagccaccaccgccgccaga

SEQ ID NO: 22800 - DNA, 21 bp, synthetic construct
  misc_feature 1..21: note = Description of Artificial Sequence: Synthetic oligonucleotide
  source 1..21: mol_type = other DNA
gaccacgtcaacaaaggcggc

SEQ ID NO: 22801 - DNA, 21 bp, synthetic construct
  misc_feature 1..21: note = Description of Artificial Sequence: Synthetic oligonucleotide
  source 1..21: mol_type = other DNA
gttagtagtggttctttgagt

SEQ ID NO: 22802 - DNA, 21 bp, synthetic construct
  misc_feature 1..21: note = Description of Artificial Sequence: Synthetic oligonucleotide
  source 1..21: mol_type = other DNA
tcgcggggtgctgatctttcg

SEQ ID NO: 22803 - DNA, 21 bp, synthetic construct
  misc_feature 1..21: note = Description of Artificial Sequence: Synthetic oligonucleotide
  source 1..21: mol_type = other DNA
tcgggtactaatactgcgttg

SEQ ID NO: 22804 - DNA, 21 bp, synthetic construct
  misc_feature 1..21: note = Description of Artificial Sequence: Synthetic oligonucleotide
  source 1..21: mol_type = other DNA
tcgtcgactccttcgattggg

SEQ ID NO: 22805 - DNA, 21 bp, synthetic construct
  misc_feature 1..21: note = Description of Artificial Sequence: Synthetic oligonucleotide
  source 1..21: mol_type = other DNA
tttgctgagactaaggggggt

SEQ ID NO: 22806 - DNA, 21 bp, synthetic construct
  misc_feature 1..21: note = Description of Artificial Sequence: Synthetic oligonucleotide
  source 1..21: mol_type = other DNA
aggtcgacgggtgggagtagt

SEQ ID NO: 22807 - DNA, 21 bp, synthetic construct
  misc_feature 1..21: note = Description of Artificial Sequence: Synthetic oligonucleotide
  source 1..21: mol_type = other DNA
gggggtgggtctgggaagact

SEQ ID NO: 22808 - DNA, 21 bp, synthetic construct
  misc_feature 1..21: note = Description of Artificial Sequence: Synthetic oligonucleotide
  source 1..21: mol_type = other DNA
ctcaacaacagcggcagccac

SEQ ID NO: 22809 - DNA, 21 bp, synthetic construct
  misc_feature 1..21: note = Description of Artificial Sequence: Synthetic oligonucleotide
  source 1..21: mol_type = other DNA
accctcagcgccccccacagc

SEQ ID NO: 22810 - DNA, 21 bp, synthetic construct
  misc_feature 1..21: note = Description of Artificial Sequence: Synthetic oligonucleotide
  source 1..21: mol_type = other DNA
aacgccgacagcagcacccac

SEQ ID NO: 22811 - DNA, 21 bp, synthetic construct
  misc_feature 1..21: note = Description of Artificial Sequence: Synthetic oligonucleotide
  source 1..21: mol_type = other DNA
gccagcaacgtcaaaagcctc

SEQ ID NO: 22812 - DNA, 21 bp, synthetic construct
  misc_feature 1..21: note = Description of Artificial Sequence: Synthetic oligonucleotide
  source 1..21: mol_type = other DNA
tcgacttctactccgcatcag

SEQ ID NO: 22813 - DNA, 21 bp, synthetic construct
  misc_feature 1..21: note = Description of Artificial Sequence: Synthetic oligonucleotide
  source 1..21: mol_type = other DNA
ttgaatactccgccttcgaag

SEQ ID NO: 22814 - DNA, 21 bp, synthetic construct
  misc_feature 1..21: note = Description of Artificial Sequence: Synthetic oligonucleotide
  source 1..21: mol_type = other DNA
aacgccagcagagaaaccgtc

SEQ ID NO: 22815 - DNA, 21 bp, synthetic construct
  misc_feature 1..21: note = Description of Artificial Sequence: Synthetic oligonucleotide
  source 1..21: mol_type = other DNA
accgcccccgaaagaatggcc

SEQ ID NO: 22816 - DNA, 21 bp, synthetic construct
  misc_feature 1..21: note = Description of Artificial Sequence: Synthetic oligonucleotide
  source 1..21: mol_type = other DNA
gacaccggcaaaaccagaagc

SEQ ID NO: 22817 - DNA, 21 bp, synthetic construct
  misc_feature 1..21: note = Description of Artificial Sequence: Synthetic oligonucleotide
  source 1..21: mol_type = other DNA
ggcctcctcagcagcaccaaa

SEQ ID NO: 22818 - DNA, 21 bp, synthetic construct
  misc_feature 1..21: note = Description of Artificial Sequence: Synthetic oligonucleotide
  source 1..21: mol_type = other DNA
tcgctgtcggcgacttcgcag

SEQ ID NO: 22819 - DNA, 21 bp, synthetic construct
  misc_feature 1..21: note = Description of Artificial Sequence: Synthetic oligonucleotide
  source 1..21: mol_type = other DNA
tctaatgagcgtactccgaag

SEQ ID NO: 22820 - DNA, 21 bp, synthetic construct
  misc_feature 1..21: note = Description of Artificial Sequence: Synthetic oligonucleotide
  source 1..21: mol_type = other DNA
tttgagaagtcgactcctact

SEQ ID NO: 22821 - DNA, 21 bp, synthetic construct
  misc_feature 1..21: note = Description of Artificial Sequence: Synthetic oligonucleotide
  source 1..21: mol_type = other DNA
aacgccagcgcccaaagcaaa

SEQ ID NO: 22822 - DNA, 21 bp, synthetic construct
  misc_feature 1..21: note = Description of Artificial Sequence: Synthetic oligonucleotide
  source 1..21: mol_type = other DNA
accaccgaaaacagcagaggc

SEQ ID NO: 22823 - DNA, 21 bp, synthetic construct
  misc_feature 1..21: note = Description of Artificial Sequence: Synthetic oligonucleotide
  source 1..21: mol_type = other DNA
agcagcagcaccaaccccaaa

SEQ ID NO: 22824 - DNA, 21 bp, synthetic construct
  misc_feature 1..21: note = Description of Artificial Sequence: Synthetic oligonucleotide
  source 1..21: mol_type = other DNA
agtaatactcaggggctgact

SEQ ID NO: 22825 - DNA, 21 bp, synthetic construct
  misc_feature 1..21: note = Description of Artificial Sequence: Synthetic oligonucleotide
  source 1..21: mol_type = other DNA
agtgctaagcctgaggggagt

SEQ ID NO: 22826 - DNA, 21 bp, synthetic construct
  misc_feature 1..21: note = Description of Artificial Sequence: Synthetic oligonucleotide
  source 1..21: mol_type = other DNA
tctaggagtaagactgatgcg

SEQ ID NO: 22827 - DNA, 21 bp, synthetic construct
  misc_feature 1..21: note = Description of Artificial Sequence: Synthetic oligonucleotide
  source 1..21: mol_type = other DNA
caaggcagcaccaccgccagc

SEQ ID NO: 22828 - DNA, 21 bp, synthetic construct
  misc_feature 1..21: note = Description of Artificial Sequence: Synthetic oligonucleotide
  source 1..21: mol_type = other DNA
ggcaaccccaacagcgccacc

SEQ ID NO: 22829 - DNA, 21 bp, synthetic construct
  misc_feature 1..21: note = Description of Artificial Sequence: Synthetic oligonucleotide
  source 1..21: mol_type = other DNA
accggcagcacccccgtccac

SEQ ID NO: 22830 - DNA, 21 bp, synthetic construct
  misc_feature 1..21: note = Description of Artificial Sequence: Synthetic oligonucleotide
  source 1..21: mol_type = other DNA
agcagccccggcggcagccaa

SEQ ID NO: 22831 - DNA, 21 bp, synthetic construct
  misc_feature 1..21: note = Description of Artificial Sequence: Synthetic oligonucleotide
  source 1..21: mol_type = other DNA
gaaaccaccgccaaaaacggc

SEQ ID NO: 22832 - DNA, 21 bp, synthetic construct
  misc_feature 1..21: note = Description of Artificial Sequence: Synthetic oligonucleotide
  source 1..21: mol_type = other DNA
gcgtcgggtgcgccttcgaag

SEQ ID NO: 22833 - DNA, 21 bp, synthetic construct
  misc_feature 1..21: note = Description of Artificial Sequence: Synthetic oligonucleotide
  source 1..21: mol_type = other DNA
gtcagcagcaaagaaaccgcc

SEQ ID NO: 22834 - DNA, 21 bp, synthetic construct
  misc_feature 1..21: note = Description of Artificial Sequence: Synthetic oligonucleotide
  source 1..21: mol_type = other DNA
tcggagactaaggttggtatt

SEQ ID NO: 22835 - DNA, 21 bp, synthetic construct
  misc_feature 1..21: note = Description of Artificial Sequence: Synthetic oligonucleotide
  source 1..21: mol_type = other DNA
ggtactgcggctgttgcgtct

SEQ ID NO: 22836 - DNA, 21 bp, synthetic construct
  misc_feature 1..21: note = Description of Artificial Sequence: Synthetic oligonucleotide
  source 1..21: mol_type = other DNA
aacaacgccgccagcgtcaaa

SEQ ID NO: 22837 - DNA, 21 bp, synthetic construct
  misc_feature 1..21: note = Description of Artificial Sequence: Synthetic oligonucleotide
  source 1..21: mol_type = other DNA
cacggcgccgccaaaagcagc

SEQ ID NO: 22838 - DNA, 21 bp, synthetic construct
  misc_feature 1..21: note = Description of Artificial Sequence: Synthetic oligonucleotide
  source 1..21: mol_type = other DNA
aacaccgtcagcagcggcggc

SEQ ID NO: 22839 - DNA, 21 bp, synthetic construct
  misc_feature 1..21: note = Description of Artificial Sequence: Synthetic oligonucleotide
  source 1..21: mol_type = other DNA
aagagtaatgatagtagtggg

SEQ ID NO: 22840 - DNA, 21 bp, synthetic construct
  misc_feature 1..21: note = Description of Artificial Sequence: Synthetic oligonucleotide
  source 1..21: mol_type = other DNA
aataatgttcagactacgcat

SEQ ID NO: 22841 - DNA, 21 bp, synthetic construct
  misc_feature 1..21: note = Description of Artificial Sequence: Synthetic oligonucleotide
  source 1..21: mol_type = other DNA
cagggggctagtacgggtagt

SEQ ID NO: 22842 - DNA, 21 bp, synthetic construct
  misc_feature 1..21: note = Description of Artificial Sequence: Synthetic oligonucleotide
  source 1..21: mol_type = other DNA
gaactcggcagcaaaggccac

SEQ ID NO: 22843 - DNA, 21 bp, synthetic construct
  misc_feature 1..21: note = Description of Artificial Sequence: Synthetic oligonucleotide
  source 1..21: mol_type = other DNA
ggtgatcgggcgtctccgaag

SEQ ID NO: 22844 - DNA, 21 bp, synthetic construct
  misc_feature 1..21: note = Description of Artificial Sequence: Synthetic oligonucleotide
  source 1..21: mol_type = other DNA
ggttctagtgggaagagtttt

SEQ ID NO: 22845 - DNA, 21 bp, synthetic construct
  misc_feature 1..21: note = Description of Artificial Sequence: Synthetic oligonucleotide
  source 1..21: mol_type = other DNA
gttaaggcgaatgaggcgtcg

SEQ ID NO: 22846 - DNA, 21 bp, synthetic construct
  misc_feature 1..21: note = Description of Artificial Sequence: Synthetic oligonucleotide
  source 1..21: mol_type = other DNA
tctgagggtgctcgtcatggt

SEQ ID NO: 22847 - DNA, 21 bp, synthetic construct
  misc_feature 1..21: note = Description of Artificial Sequence: Synthetic oligonucleotide
  source 1..21: mol_type = other DNA
caagtcgccaccggcaccagc

SEQ ID NO: 22848 - DNA, 21 bp, synthetic construct
  misc_feature 1..21: note = Description of Artificial Sequence: Synthetic oligonucleotide
  source 1..21: mol_type = other DNA
tcgaatggtgctggtcttacg

SEQ ID NO: 22849 - DNA, 21 bp, synthetic construct
  misc_feature 1..21: note = Description of Artificial Sequence: Synthetic oligonucleotide
  source 1..21: mol_type = other DNA
ctcgaccccaaacccaccagc

SEQ ID NO: 22850 - DNA, 21 bp, synthetic construct
  misc_feature 1..21: note = Description of Artificial Sequence: Synthetic oligonucleotide
  source 1..21: mol_type = other DNA
tcggctagtaagagtagtacg

SEQ ID NO: 22851 - DNA, 21 bp, synthetic construct
  misc_feature 1..21: note = Description of Artificial Sequence: Synthetic oligonucleotide
  source 1..21: mol_type = other DNA
actcagtctcaggttccgatt

SEQ ID NO: 22852 - DNA, 21 bp, synthetic construct
  misc_feature 1..21: note = Description of Artificial Sequence: Synthetic oligonucleotide
  source 1..21: mol_type = other DNA
agcgtcaacgccagaaccagc

SEQ ID NO: 22853 - DNA, 21 bp, synthetic construct
  misc_feature 1..21: note = Description of Artificial Sequence: Synthetic oligonucleotide
  source 1..21: mol_type = other DNA
cacggccccagcagccaaacc

SEQ ID NO: 22854 - DNA, 21 bp, synthetic construct
  misc_feature 1..21: note = Description of Artificial Sequence: Synthetic oligonucleotide
  source 1..21: mol_type = other DNA
agtaatgcgagttctccttcg

SEQ ID NO: 22855 - DNA, 21 bp, synthetic construct
  misc_feature 1..21: note = Description of Artificial Sequence: Synthetic oligonucleotide
  source 1..21: mol_type = other DNA
aaagacaccaaacaacccaac

SEQ ID NO: 22856 - DNA, 21 bp, synthetic construct
  misc_feature 1..21: note = Description of Artificial Sequence: Synthetic oligonucleotide
  source 1..21: mol_type = other DNA
accaacaccagcggcagcggc

SEQ ID NO: 22857 - DNA, 21 bp, synthetic construct
  misc_feature 1..21: note = Description of Artificial Sequence: Synthetic oligonucleotide
  source 1..21: mol_type = other DNA
cttaatacttcgaagtctgtg

SEQ ID NO: 22858 - DNA, 21 bp, synthetic construct
  misc_feature 1..21: note = Description of Artificial Sequence: Synthetic oligonucleotide
  source 1..21: mol_type = other DNA
ggtatgagtactggggagggg

SEQ ID NO: 22859 - DNA, 21 bp, synthetic construct
  misc_feature 1..21: note = Description of Artificial Sequence: Synthetic oligonucleotide
  source 1..21: mol_type = other DNA
ttgcggactccgaatgcgggg

SEQ ID NO: 22860 - DNA, 21 bp, synthetic construct
  misc_feature 1..21: note = Description of Artificial Sequence: Synthetic oligonucleotide
  source 1..21: mol_type = other DNA
agcaaagccgcccaaagcatc

SEQ ID NO: 22861 - DNA, 21 bp, synthetic construct
  misc_feature 1..21: note = Description of Artificial Sequence: Synthetic oligonucleotide
  source 1..21: mol_type = other DNA
atgactgatggttcgtcgaag

SEQ ID NO: 22862 - DNA, 21 bp, synthetic construct
  misc_feature 1..21: note = Description of Artificial Sequence: Synthetic oligonucleotide
  source 1..21: mol_type = other DNA
gatagtactaataaggctgct

SEQ ID NO: 22863 - DNA, 21 bp, synthetic construct
  misc_feature 1..21: note = Description of Artificial Sequence: Synthetic oligonucleotide
  source 1..21: mol_type = other DNA
ggggggagtacgctgtctaag

SEQ ID NO: 22864 - DNA, 21 bp, synthetic construct
  misc_feature 1..21: note = Description of Artificial Sequence: Synthetic oligonucleotide
  source 1..21: mol_type = other DNA
tcgacggctacggggagtaag

SEQ ID NO: 22865 - DNA, 21 bp, synthetic construct
  misc_feature 1..21: note = Description of Artificial Sequence: Synthetic oligonucleotide
  source 1..21: mol_type = other DNA
ttgccgtctaaggttaatact

SEQ ID NO: 22866 - DNA, 21 bp, synthetic construct
  misc_feature 1..21: note = Description of Artificial Sequence: Synthetic oligonucleotide
  source 1..21: mol_type = other DNA
gtgccgagtaataagaatggt

SEQ ID NO: 22867 - DNA, 21 bp, synthetic construct
  misc_feature 1..21: note = Description of Artificial Sequence: Synthetic oligonucleotide
  source 1..21: mol_type = other DNA
aaccccgccagcaaagccaac

SEQ ID NO: 22868 - DNA, 21 bp, synthetic construct
  misc_feature 1..21: note = Description of Artificial Sequence: Synthetic oligonucleotide
  source 1..21: mol_type = other DNA
caggggaatcatccgtcttcg

SEQ ID NO: 22869 - DNA, 21 bp, synthetic construct
  misc_feature 1..21: note = Description of Artificial Sequence: Synthetic oligonucleotide
  source 1..21: mol_type = other DNA
gccagaaccggcagccccagc

SEQ ID NO: 22870 - DNA, 21 bp, synthetic construct
  misc_feature 1..21: note = Description of Artificial Sequence: Synthetic oligonucleotide
  source 1..21: mol_type = other DNA
accaccagcagcaaaaccagc

SEQ ID NO: 22871 - DNA, 21 bp, synthetic construct
  misc_feature 1..21: note = Description of Artificial Sequence: Synthetic oligonucleotide
  source 1..21: mol_type = other DNA
gacatcaaaagccccagccaa

SEQ ID NO: 22872 - DNA, 21 bp, synthetic construct
  misc_feature 1..21: note = Description of Artificial Sequence: Synthetic oligonucleotide
  source 1..21: mol_type = other DNA
acccaagccaccggcaaaggc

SEQ ID NO: 22873 - DNA, 21 bp, synthetic construct
  misc_feature 1..21: note = Description of Artificial Sequence: Synthetic oligonucleotide
  source 1..21: mol_type = other DNA
acgagtggggttagtacgggt

SEQ ID NO: 22874 - DNA, 21 bp, synthetic construct
  misc_feature 1..21: note = Description of Artificial Sequence: Synthetic oligonucleotide
  source 1..21: mol_type = other DNA
actaatacgaatctgaaggcg

SEQ ID NO: 22875 - DNA, 21 bp, synthetic construct
  misc_feature 1..21: note = Description of Artificial Sequence: Synthetic oligonucleotide
  source 1..21: mol_type = other DNA
agcaaagccagcagcggcctc

SEQ ID NO: 22876 - DNA, 21 bp, synthetic construct
  misc_feature 1..21: note = Description of Artificial Sequence: Synthetic oligonucleotide
  source 1..21: mol_type = other DNA
agcaccggcagcagcatcggc

SEQ ID NO: 22877 - DNA, 21 bp, synthetic construct
  misc_feature 1..21: note = Description of Artificial Sequence: Synthetic oligonucleotide
  source 1..21: mol_type = other DNA
agcgtcaaccccagcatggcc

SEQ ID NO: 22878 - DNA, 21 bp, synthetic construct
  misc_feature 1..21: note = Description of Artificial Sequence: Synthetic oligonucleotide
  source 1..21: mol_type = other DNA
cacagagtcagcaaagacggc

SEQ ID NO: 22879 - DNA, 21 bp, synthetic construct
  misc_feature 1..21: note = Description of Artificial Sequence: Synthetic oligonucleotide
  source 1..21: mol_type = other DNA
caccaaagcggcaccagcggc

SEQ ID NO: 22880 - DNA, 21 bp, synthetic construct
  misc_feature 1..21: note = Description of Artificial Sequence: Synthetic oligonucleotide
  source 1..21: mol_type = other DNA
catgagtctgggcagaagagt

SEQ ID NO: 22881 - DNA, 21 bp, synthetic construct
  misc_feature 1..21: note = Description of Artificial Sequence: Synthetic oligonucleotide
  source 1..21: mol_type = other DNA
ctcagcagcgacaaaaacagc

SEQ ID NO: 22882 - DNA, 21 bp, synthetic construct
  misc_feature 1..21: note = Description of Artificial Sequence: Synthetic oligonucleotide
  source 1..21: mol_type = other DNA
gatacggtgaagtcggggact

SEQ ID NO: 22883 - DNA, 21 bp, synthetic construct
  misc_feature 1..21: note = Description of Artificial Sequence: Synthetic oligonucleotide
  source 1..21: mol_type = other DNA
gctacgacgtctgagcagcat

SEQ ID NO: 22884 - DNA, 21 bp, synthetic construct
  misc_feature 1..21: note = Description of Artificial Sequence: Synthetic oligonucleotide
  source 1..21: mol_type = other DNA
tatcgtgggacggagaattcg

SEQ ID NO: 22885 - DNA, 21 bp, synthetic construct
  misc_feature 1..21: note = Description of Artificial Sequence: Synthetic oligonucleotide
  source 1..21: mol_type = other DNA
agcaccaacagcaccgccaga

SEQ ID NO: 22886 - DNA, 21 bp, synthetic construct
  misc_feature 1..21: note = Description of Artificial Sequence: Synthetic oligonucleotide
  source 1..21: mol_type = other DNA
agcaacggcgccagcctcaac

SEQ ID NO: 22887 - DNA, 21 bp, synthetic construct
  misc_feature 1..21: note = Description of Artificial Sequence: Synthetic oligonucleotide
  source 1..21: mol_type = other DNA
catagtacgggtacgccgatg

SEQ ID NO: 22888 - DNA, 21 bp, synthetic construct
  misc_feature 1..21: note = Description of Artificial Sequence: Synthetic oligonucleotide
  source 1..21: mol_type = other DNA
gacgaaaccagagccagaagc

SEQ ID NO: 22889 - DNA, 21 bp, synthetic construct
  misc_feature 1..21: note = Description of Artificial Sequence: Synthetic oligonucleotide
  source 1..21: mol_type = other DNA
gagtcgacttcttcggttcat

SEQ ID NO: 22890 - DNA, 21 bp, synthetic construct
  misc_feature 1..21: note = Description of Artificial Sequence: Synthetic oligonucleotide
  source 1..21: mol_type = other DNA
gccaccgtcgacagaaaccac

SEQ ID NO: 22891 - DNA, 21 bp, synthetic construct
  misc_feature 1..21: note = Description of Artificial Sequence: Synthetic oligonucleotide
  source 1..21: mol_type = other DNA
ggcctcgacgccaaacccatg

SEQ ID NO: 22892 - DNA, 21 bp, synthetic construct
  misc_feature 1..21: note = Description of Artificial Sequence: Synthetic oligonucleotide
  source 1..21: mol_type = other DNA
aacagcagcgacctcaaaacc

SEQ ID NO: 22893 - DNA, 21 bp, synthetic construct
  misc_feature 1..21: note = Description of Artificial Sequence: Synthetic oligonucleotide
  source 1..21: mol_type = other DNA
aacggcagcggccaaatccaa

SEQ ID NO: 22894 - DNA, 21 bp, synthetic construct
  misc_feature 1..21: note = Description of Artificial Sequence: Synthetic oligonucleotide
  source 1..21: mol_type = other DNA
atggcgattgataaggggaag

SEQ ID NO: 22895 - DNA, 21 bp, synthetic construct
  misc_feature 1..21: note = Description of Artificial Sequence: Synthetic oligonucleotide
  source 1..21: mol_type = other DNA
gaaagaagagaacacggcacc

SEQ ID NO: 22896 - DNA, 21 bp, synthetic construct
  misc_feature 1..21: note = Description of Artificial Sequence: Synthetic oligonucleotide
  source 1..21: mol_type = other DNA
gagccggcggataagagttct

SEQ ID NO: 22897 - DNA, 21 bp, synthetic construct
  misc_feature 1..21: note = Description of Artificial Sequence: Synthetic oligonucleotide
  source 1..21: mol_type = other DNA
gctacgacggttactcctaag

SEQ ID NO: 22898 - DNA, 21 bp, synthetic construct
  misc_feature 1..21: note = Description of Artificial Sequence: Synthetic oligonucleotide
  source 1..21: mol_type = other DNA
ggcagcggccccgcccaacaa

SEQ ID NO: 22899 - DNA, 21 bp, synthetic construct
  misc_feature 1..21: note = Description of Artificial Sequence: Synthetic oligonucleotide
  source 1..21: mol_type = other DNA
tcttctgttagttctacgagt

SEQ ID NO: 22900 - DNA, 21 bp, synthetic construct
  misc_feature 1..21: note = Description of Artificial Sequence: Synthetic oligonucleotide
  source 1..21: mol_type = other DNA
aacaccagcagccccaccacc

SEQ ID NO: 22901 - DNA, 21 bp, synthetic construct
  misc_feature 1..21: note = Description of Artificial Sequence: Synthetic oligonucleotide
  source 1..21: mol_type = other DNA
caaaccaccaccgccgccagc

SEQ ID NO: 22902 - DNA, 21 bp, synthetic construct
  misc_feature 1..21: note = Description of Artificial Sequence: Synthetic oligonucleotide
  source 1..21: mol_type = other DNA
gtcagcgaaggcaccaccaaa

SEQ ID NO: 22903 - DNA, 21 bp, synthetic construct
  misc_feature 1..21: note = Description of Artificial Sequence: Synthetic oligonucleotide
  source 1..21: mol_type = other DNA
gagtcgaggggtagttcttct

SEQ ID NO: 22904 - DNA, 21 bp, synthetic construct
  misc_feature 1..21: note = Description of Artificial Sequence: Synthetic oligonucleotide
  source 1..21: mol_type = other DNA
acgatgcatggttctagtgcg

SEQ ID NO: 22905 - DNA, 21 bp, synthetic construct
  misc_feature 1..21: note = Description of Artificial Sequence: Synthetic oligonucleotide
  source 1..21: mol_type = other DNA
agcaacgccaacaccgtccac

SEQ ID NO: 22906 - DNA, 21 bp, synthetic construct
  misc_feature 1..21: note = Description of Artificial Sequence: Synthetic oligonucleotide
  source 1..21: mol_type = other DNA
agcctcggcgaaaaaagacaa

SEQ ID NO: 22907 - DNA, 21 bp, synthetic construct
  misc_feature 1..21: note = Description of Artificial Sequence: Synthetic oligonucleotide
  source 1..21: mol_type = other DNA
cttgggcttaagacgtctaat

SEQ ID NO: 22908 - DNA, 21 bp, synthetic construct
  misc_feature 1..21: note = Description of Artificial Sequence: Synthetic oligonucleotide
  source 1..21: mol_type = other DNA
gacaacgcccccgccaacaga

SEQ ID NO: 22909 - DNA, 21 bp, synthetic construct
  misc_feature 1..21: note = Description of Artificial Sequence: Synthetic oligonucleotide
  source 1..21: mol_type = other DNA
gataatacggctgcggttaag

SEQ ID NO: 22910 - DNA, 21 bp, synthetic construct
  misc_feature 1..21: note = Description of Artificial Sequence: Synthetic oligonucleotide
  source 1..21: mol_type = other DNA
gatcgtacgtctggtgttgcg

SEQ ID NO: 22911 - DNA, 21 bp, synthetic construct
  misc_feature 1..21: note = Description of Artificial Sequence: Synthetic oligonucleotide
  source 1..21: mol_type = other DNA
gcggtttctggtaagtctatt

SEQ ID NO: 22912 - DNA, 21 bp, synthetic construct
  misc_feature 1..21: note = Description of Artificial Sequence: Synthetic oligonucleotide
  source 1..21: mol_type = other DNA
gctatggggtcgagtcctggt

SEQ ID NO: 22913 - DNA, 21 bp, synthetic construct
  misc_feature 1..21: note = Description of Artificial Sequence: Synthetic oligonucleotide
  source 1..21: mol_type = other DNA
ggcagcaaaggcagcccccac

SEQ ID NO: 22914 - DNA, 21 bp, synthetic construct
  misc_feature 1..21: note = Description of Artificial Sequence: Synthetic oligonucleotide
  source 1..21: mol_type = other DNA
ggcggcgacagcgtcaccaaa

SEQ ID NO: 22915 - DNA, 21 bp, synthetic construct
  misc_feature 1..21: note = Description of Artificial Sequence: Synthetic oligonucleotide
  source 1..21: mol_type = other DNA
gggaggacggatcagaattct

SEQ ID NO: 22916 - DNA, 21 bp, synthetic construct
  misc_feature 1..21: note = Description of Artificial Sequence: Synthetic oligonucleotide
  source 1..21: mol_type = other DNA
ggtcaggctccggggtctact

SEQ ID NO: 22917 - DNA, 21 bp, synthetic construct
  misc_feature 1..21: note = Description of Artificial Sequence: Synthetic oligonucleotide
  source 1..21: mol_type = other DNA
gtccaaagcagcaaaagcagc

SEQ ID NO: 22918 - DNA, 21 bp, synthetic construct
  misc_feature 1..21: note = Description of Artificial Sequence: Synthetic oligonucleotide
  source 1..21: mol_type = other DNA
tcgcagggtaagtcgagttct

SEQ ID NO: 22919 - DNA, 21 bp, synthetic construct
  misc_feature 1..21: note = Description of Artificial Sequence: Synthetic oligonucleotide
  source 1..21: mol_type = other DNA
acgcctacgggtgctggtggg

SEQ ID NO: 22920 - DNA, 21 bp, synthetic construct
  misc_feature 1..21: note = Description of Artificial Sequence: Synthetic oligonucleotide
  source 1..21: mol_type = other DNA
agcaacgacgccggcaaaaac

SEQ ID NO: 22921 - DNA, 21 bp, synthetic construct
  misc_feature 1..21: note = Description of Artificial Sequence: Synthetic oligonucleotide
  source 1..21: mol_type = other DNA
gctcctgggcgtgattcttcg

SEQ ID NO: 22922 - DNA, 21 bp, synthetic construct
  misc_feature 1..21: note = Description of Artificial Sequence: Synthetic oligonucleotide
  source 1..21: mol_type = other DNA
ggcaacagcaccagcagcagc

SEQ ID NO: 22923 - DNA, 21 bp, synthetic construct
  misc_feature 1..21: note = Description of Artificial Sequence: Synthetic oligonucleotide
  source 1..21: mol_type = other DNA
agcagcggcagcagcatgggc

SEQ ID NO: 22924 - DNA, 21 bp, synthetic construct
  misc_feature 1..21: note = Description of Artificial Sequence: Synthetic oligonucleotide
  source 1..21: mol_type = other DNA
agtcatgggcagggtcctcag

SEQ ID NO: 22925 - DNA, 21 bp, synthetic construct
  misc_feature 1..21: note = Description of Artificial Sequence: Synthetic oligonucleotide
  source 1..21: mol_type = other DNA
accaacgaaagcaccctcaga

SEQ ID NO: 22926 - DNA, 21 bp, synthetic construct
  misc_feature 1..21: note = Description of Artificial Sequence: Synthetic oligonucleotide
  source 1..21: mol_type = other DNA
agtagtggtcagccgggtcgg

SEQ ID NO: 22927 - DNA, 21 bp, synthetic construct
  misc_feature 1..21: note = Description of Artificial Sequence: Synthetic oligonucleotide
  source 1..21: mol_type = other DNA
cagcagatggataataagact

SEQ ID NO: 22928 - DNA, 21 bp, synthetic construct
  misc_feature 1..21: note = Description of Artificial Sequence: Synthetic oligonucleotide
  source 1..21: mol_type = other DNA
gccgacggccaaagcagcagc

SEQ ID NO: 22929 - DNA, 21 bp, synthetic construct
  misc_feature 1..21: note = Description of Artificial Sequence: Synthetic oligonucleotide
  source 1..21: mol_type = other DNA
ggcggccccagcagcgacaga

SEQ ID NO: 22930 - DNA, 21 bp, synthetic construct
  misc_feature 1..21: note = Description of Artificial Sequence: Synthetic oligonucleotide
  source 1..21: mol_type = other DNA
aaccccgtcgcccaaggcaac

SEQ ID NO: 22931 - DNA, 21 bp, synthetic construct
  misc_feature 1..21: note = Description of Artificial Sequence: Synthetic oligonucleotide
  source 1..21: mol_type = other DNA
aataatgataagtctggtctt

SEQ ID NO: 22932 - DNA, 21 bp, synthetic construct
  misc_feature 1..21: note = Description of Artificial Sequence: Synthetic oligonucleotide
  source 1..21: mol_type = other DNA
actagttcttctgagaaggcg

SEQ ID NO: 22933 - DNA, 21 bp, synthetic construct
  misc_feature 1..21: note = Description of Artificial Sequence: Synthetic oligonucleotide
  source 1..21: mol_type = other DNA
atcaccaacagcgccaccaga

SEQ ID NO: 22934 - DNA, 21 bp, synthetic construct
  misc_feature 1..21: note = Description of Artificial Sequence: Synthetic oligonucleotide
  source 1..21: mol_type = other DNA
caggcggcgaaggatcagcat

SEQ ID NO: 22935 - DNA, 21 bp, synthetic construct
  misc_feature 1..21: note = Description of Artificial Sequence: Synthetic oligonucleotide
  source 1..21: mol_type = other DNA
cattctagtacgggtggttct

SEQ ID NO: 22936 - DNA, 21 bp, synthetic construct
  misc_feature 1..21: note = Description of Artificial Sequence: Synthetic oligonucleotide
  source 1..21: mol_type = other DNA
gaaagcggcagccaaaacaga

SEQ ID NO: 22937 - DNA, 21 bp, synthetic construct
  misc_feature 1..21: note = Description of Artificial Sequence: Synthetic oligonucleotide
  source 1..21: mol_type = other DNA
gcggagggtaagactgctgcg

SEQ ID NO: 22938 - DNA, 21 bp, synthetic construct
  misc_feature 1..21: note = Description of Artificial Sequence: Synthetic oligonucleotide
  source 1..21: mol_type = other DNA
ggcaccggcgccaacaccacc

SEQ ID NO: 22939 - DNA, 21 bp, synthetic construct
  misc_feature 1..21: note = Description of Artificial Sequence: Synthetic oligonucleotide
  source 1..21: mol_type = other DNA
ggcatggccagcgccgacaaa

SEQ ID NO: 22940 - DNA, 21 bp, synthetic construct
  misc_feature 1..21: note = Description of Artificial Sequence: Synthetic oligonucleotide
  source 1..21: mol_type = other DNA
tacaaagccggccaacaacaa

SEQ ID NO: 22941 - DNA, 21 bp, synthetic construct
  misc_feature 1..21: note = Description of Artificial Sequence: Synthetic oligonucleotide
  source 1..21: mol_type = other DNA
tttcaggggagtaaggctggc

SEQ ID NO: 22942 - DNA, 21 bp, synthetic construct
  misc_feature 1..21: note = Description of Artificial Sequence: Synthetic oligonucleotide
  source 1..21: mol_type = other DNA
tctcgtggtcagtcgtcgaat

SEQ ID NO: 22943 - DNA, 21 bp, synthetic construct
  misc_feature 1..21: note = Description of Artificial Sequence: Synthetic oligonucleotide
  source 1..21: mol_type = other DNA
aaaggcagcagcaacagcacc

SEQ ID NO: 22944 - DNA, 21 bp, synthetic construct
  misc_feature 1..21: note = Description of Artificial Sequence: Synthetic oligonucleotide
  source 1..21: mol_type = other DNA
agtccgagctctaagccttct

SEQ ID NO: 22945 - DNA, 21 bp, synthetic construct
  misc_feature 1..21: note = Description of Artificial Sequence: Synthetic oligonucleotide
  source 1..21: mol_type = other DNA
agcagcgccaccgccagcgcc

SEQ ID NO: 22946 - DNA, 21 bp, synthetic construct
  misc_feature 1..21: note = Description of Artificial Sequence: Synthetic oligonucleotide
  source 1..21: mol_type = other DNA
aagacggatacgagtgcgcat

SEQ ID NO: 22947 - DNA, 21 bp, synthetic construct
  misc_feature 1..21: note = Description of Artificial Sequence: Synthetic oligonucleotide
  source 1..21: mol_type = other DNA
ggtaatgcgcctcctacgcgg

SEQ ID NO: 22948 - DNA, 21 bp, synthetic construct
  misc_feature 1..21: note = Description of Artificial Sequence: Synthetic oligonucleotide
  source 1..21: mol_type = other DNA
tctcagaatcatacttcttcg

SEQ ID NO: 22949 - DNA, 21 bp, synthetic construct
  misc_feature 1..21: note = Description of Artificial Sequence: Synthetic oligonucleotide
  source 1..21: mol_type = other DNA
agcgacaacaaaacccacacc

SEQ ID NO: 22950 - DNA, 21 bp, synthetic construct
  misc_feature 1..21: note = Description of Artificial Sequence: Synthetic oligonucleotide
  source 1..21: mol_type = other DNA
ggcgtcgaaaaccccagagcc

SEQ ID NO: 22951 - DNA, 21 bp, synthetic construct
  misc_feature 1..21: note = Description of Artificial Sequence: Synthetic oligonucleotide
  source 1..21: mol_type = other DNA
agccaacccagcagcgtcggc

SEQ ID NO: 22952 - DNA, 21 bp, synthetic construct
  misc_feature 1..21: note = Description of Artificial Sequence: Synthetic oligonucleotide
  source 1..21: mol_type = other DNA
gatagtagtgctactaagttg

SEQ ID NO: 22953 - DNA, 21 bp, synthetic construct
  misc_feature 1..21: note = Description of Artificial Sequence: Synthetic oligonucleotide
  source 1..21: mol_type = other DNA
gttcctaatagttctgcgggg

SEQ ID NO: 22954 - DNA, 21 bp, synthetic construct
  misc_feature 1..21: note = Description of Artificial Sequence: Synthetic oligonucleotide
  source 1..21: mol_type = other DNA
tcgtcttcgaataagcctggg

SEQ ID NO: 22955 - DNA, 21 bp, synthetic construct
  misc_feature 1..21: note = Description of Artificial Sequence: Synthetic oligonucleotide
  source 1..21: mol_type = other DNA
tgcaccggcacccccagcggc

SEQ ID NO: 22956 - DNA, 21 bp, synthetic construct
  misc_feature 1..21: note = Description of Artificial Sequence: Synthetic oligonucleotide
  source 1..21: mol_type = other DNA
ttgactaatacggcttctcag

SEQ ID NO: 22957 - DNA, 21 bp, synthetic construct
  misc_feature 1..21: note = Description of Artificial Sequence: Synthetic oligonucleotide
  source 1..21: mol_type = other DNA
gttagtgggggtgctgcgagg

SEQ ID NO: 22958 - DNA, 21 bp, synthetic construct
  misc_feature 1..21: note = Description of Artificial Sequence: Synthetic oligonucleotide
  source 1..21: mol_type = other DNA
gtcagcaaacaacaaagcgcc

SEQ ID NO: 22959 - DNA, 21 bp, synthetic construct
  misc_feature 1..21: note = Description of Artificial Sequence: Synthetic oligonucleotide
  source 1..21: mol_type = other DNA
ggcgtcaaccccagcgccagc

SEQ ID NO: 22960 - DNA, 21 bp, synthetic construct
  misc_feature 1..21: note = Description of Artificial Sequence: Synthetic oligonucleotide
  source 1..21: mol_type = other DNA
agtgggtcgggggcgcctgct

SEQ ID NO: 22961 - DNA, 21 bp, synthetic construct
  misc_feature 1..21: note = Description of Artificial Sequence: Synthetic oligonucleotide
  source 1..21: mol_type = other DNA
caaagcagcaacagcaacgcc

SEQ ID NO: 22962 - DNA, 21 bp, synthetic construct
  misc_feature 1..21: note = Description of Artificial Sequence: Synthetic oligonucleotide
  source 1..21: mol_type = other DNA
accgccaccgccagcaaccaa

SEQ ID NO: 22963 - DNA, 21 bp, synthetic construct
  misc_feature 1..21: note = Description of Artificial Sequence: Synthetic oligonucleotide
  source 1..21: mol_type = other DNA
ggggatggtcggtctccgaat

SEQ ID NO: 22964 - DNA, 21 bp, synthetic construct
  misc_feature 1..21: note = Description of Artificial Sequence: Synthetic oligonucleotide
  source 1..21: mol_type = other DNA
aagtctgtgcctagtgttagt

SEQ ID NO: 22965 - DNA, 21 bp, synthetic construct
  misc_feature 1..21: note = Description of Artificial Sequence: Synthetic oligonucleotide
  source 1..21: mol_type = other DNA
aatcagtcgtctggtgggtct

SEQ ID NO: 22966 - DNA, 21 bp, synthetic construct
  misc_feature 1..21: note = Description of Artificial Sequence: Synthetic oligonucleotide
  source 1..21: mol_type = other DNA
agcagcgaaaaacccgccagc

SEQ ID NO: 22967 - DNA, 21 bp, synthetic construct
  misc_feature 1..21: note = Description of Artificial Sequence: Synthetic oligonucleotide
  source 1..21: mol_type = other DNA
agtacgaaggctagtaatggt

SEQ ID NO: 22968 - DNA, 21 bp, synthetic construct
  misc_feature 1..21: note = Description of Artificial Sequence: Synthetic oligonucleotide
  source 1..21: mol_type = other DNA
atttcttcgagtaaggttgtg

SEQ ID NO: 22969 - DNA, 21 bp, synthetic construct
  misc_feature 1..21: note = Description of Artificial Sequence: Synthetic oligonucleotide
  source 1..21: mol_type = other DNA
caaagcagcagcagcaccagc

SEQ ID NO: 22970 - DNA, 21 bp, synthetic construct
  misc_feature 1..21: note = Description of Artificial Sequence: Synthetic oligonucleotide
  source 1..21: mol_type = other DNA
gaaagagtccccagcagcggc

SEQ ID NO: 22971 - DNA, 21 bp, synthetic construct
  misc_feature 1..21: note = Description of Artificial Sequence: Synthetic oligonucleotide
  source 1..21: mol_type = other DNA
gataataggagttctaatgcg

SEQ ID NO: 22972 - DNA, 21 bp, synthetic construct
  misc_feature 1..21: note = Description of Artificial Sequence: Synthetic oligonucleotide
  source 1..21: mol_type = other DNA
ggtgctgtggattcggttaag

SEQ ID NO: 22973 - DNA, 21 bp, synthetic construct
  misc_feature 1..21: note = Description of Artificial Sequence: Synthetic oligonucleotide
  source 1..21: mol_type = other DNA
gtcacccaaggcgaaatgaaa

SEQ ID NO: 22974 - DNA, 21 bp, synthetic construct
  misc_feature 1..21: note = Description of Artificial Sequence: Synthetic oligonucleotide
  source 1..21: mol_type = other DNA
gtggcgcagaatgcgccgact

SEQ ID NO: 22975 - DNA, 21 bp, synthetic construct
  misc_feature 1..21: note = Description of Artificial Sequence: Synthetic oligonucleotide
  source 1..21: mol_type = other DNA
gttaataattctccgagtcag

SEQ ID NO: 22976 - DNA, 21 bp, synthetic construct
  misc_feature 1..21: note = Description of Artificial Sequence: Synthetic oligonucleotide
  source 1..21: mol_type = other DNA
ctcagcggcaccgccagcaac

SEQ ID NO: 22977 - DNA, 21 bp, synthetic construct
  misc_feature 1..21: note = Description of Artificial Sequence: Synthetic oligonucleotide
  source 1..21: mol_type = other DNA
gaaggcagagccagcagcgtc

SEQ ID NO: 22978 - DNA, 21 bp, synthetic construct
  misc_feature 1..21: note = Description of Artificial Sequence: Synthetic oligonucleotide
  source 1..21: mol_type = other DNA
gacggcgccgccaccgtcaaa

SEQ ID NO: 22979 - DNA, 21 bp, synthetic construct
  misc_feature 1..21: note = Description of Artificial Sequence: Synthetic oligonucleotide
  source 1..21: mol_type = other DNA
gtccaaggcaaagtcaccaac

SEQ ID NO: 22980 - DNA, 21 bp, synthetic construct
  misc_feature 1..21: note = Description of Artificial Sequence: Synthetic oligonucleotide
  source 1..21: mol_type = other DNA
aatagtactaaggatgggtct

SEQ ID NO: 22981 - DNA, 21 bp, synthetic construct
  misc_feature 1..21: note = Description of Artificial Sequence: Synthetic oligonucleotide
  source 1..21: mol_type = other DNA
agcaacagagaaagcatccaa

SEQ ID NO: 22982 - DNA, 21 bp, synthetic construct
  misc_feature 1..21: note = Description of Artificial Sequence: Synthetic oligonucleotide
  source 1..21: mol_type = other DNA
agcagcagcaaacccaaagac

SEQ ID NO: 22983 - DNA, 21 bp, synthetic construct
  misc_feature 1..21: note = Description of Artificial Sequence: Synthetic oligonucleotide
  source 1..21: mol_type = other DNA
cacgccaaaaacagcaacggc

SEQ ID NO: 22984 - DNA, 21 bp, synthetic construct
  misc_feature 1..21: note = Description of Artificial Sequence: Synthetic oligonucleotide
  source 1..21: mol_type = other DNA
cttgatgggtcgaagatgggt

SEQ ID NO: 22985 - DNA, 21 bp, synthetic construct
  misc_feature 1..21: note = Description of Artificial Sequence: Synthetic oligonucleotide
  source 1..21: mol_type = other DNA
gttagtactggggctacgagg

SEQ ID NO: 22986 - DNA, 21 bp, synthetic construct
  misc_feature 1..21: note = Description of Artificial Sequence: Synthetic oligonucleotide
  source 1..21: mol_type = other DNA
agcagcgacaaaatcagaagc

SEQ ID NO: 22987 - DNA, 21 bp, synthetic construct
  misc_feature 1..21: note = Description of Artificial Sequence: Synthetic oligonucleotide
  source 1..21: mol_type = other DNA
aatgaggttaggcagtctaat

SEQ ID NO: 22988 - DNA, 21 bp, synthetic construct
  misc_feature 1..21: note = Description of Artificial Sequence: Synthetic oligonucleotide
  source 1..21: mol_type = other DNA
ctcaccggcgaccaagtcaaa

SEQ ID NO: 22989 - DNA, 21 bp, synthetic construct
  misc_feature 1..21: note = Description of Artificial Sequence: Synthetic oligonucleotide
  source 1..21: mol_type = other DNA
gaacccggcaccagcgcccaa

SEQ ID NO: 22990 - DNA, 21 bp, synthetic construct
  misc_feature 1..21: note = Description of Artificial Sequence: Synthetic oligonucleotide
  source 1..21: mol_type = other DNA
gctgagatgaagccggttctg

SEQ ID NO: 22991 - DNA, 21 bp, synthetic construct
  misc_feature 1..21: note = Description of Artificial Sequence: Synthetic oligonucleotide
  source 1..21: mol_type = other DNA
acttctactgggacgcttaag

SEQ ID NO: 22992 - DNA, 21 bp, synthetic construct
  misc_feature 1..21: note = Description of Artificial Sequence: Synthetic oligonucleotide
  source 1..21: mol_type = other DNA
agcggcaccagcagccccaac

SEQ ID NO: 22993 - DNA, 21 bp, synthetic construct
  misc_feature 1..21: note = Description of Artificial Sequence: Synthetic oligonucleotide
  source 1..21: mol_type = other DNA
caccaacccgaacccagaggc

SEQ ID NO: 22994 - DNA, 21 bp, synthetic construct
  misc_feature 1..21: note = Description of Artificial Sequence: Synthetic oligonucleotide
  source 1..21: mol_type = other DNA
cattcgggtggtactagtcat

SEQ ID NO: 22995 - DNA, 21 bp, synthetic construct
  misc_feature 1..21: note = Description of Artificial Sequence: Synthetic oligonucleotide
  source 1..21: mol_type = other DNA
ctcagcaaaagcaccagcggc

SEQ ID NO: 22996 - DNA, 21 bp, synthetic construct
  misc_feature 1..21: note = Description of Artificial Sequence: Synthetic oligonucleotide
  source 1..21: mol_type = other DNA
gataaggtgggtagtccgcct

SEQ ID NO: 22997 - DNA, 21 bp, synthetic construct
  misc_feature 1..21: note = Description of Artificial Sequence: Synthetic oligonucleotide
  source 1..21: mol_type = other DNA
gatactcagaagtcttctcat

SEQ ID NO: 22998 - DNA, 21 bp, synthetic construct
  misc_feature 1..21: note = Description of Artificial Sequence: Synthetic oligonucleotide
  source 1..21: mol_type = other DNA
actgataagcctgcgtctcgt

SEQ ID NO: 22999 - DNA, 21 bp, synthetic construct
  misc_feature 1..21: note = Description of Artificial Sequence: Synthetic oligonucleotide
  source 1..21: mol_type = other DNA
agcaacagccccggcggcctc

SEQ ID NO: 23000 - DNA, 21 bp, synthetic construct
  misc_feature 1..21: note = Description of Artificial Sequence: Synthetic oligonucleotide
  source 1..21: mol_type = other DNA
gatagtgcgaatactaaggct

SEQ ID NO: 23001 - DNA, 21 bp, synthetic construct
  misc_feature 1..21: note = Description of Artificial Sequence: Synthetic oligonucleotide
  source 1..21: mol_type = other DNA
ggcctcaacaaaaccaccgaa

SEQ ID NO: 23002 - DNA, 21 bp, synthetic construct
  misc_feature 1..21: note = Description of Artificial Sequence: Synthetic oligonucleotide
  source 1..21: mol_type = other DNA
ggcgtccaaggcgacagcatg

SEQ ID NO: 23003 - DNA, 21 bp, synthetic construct
  misc_feature 1..21: note = Description of Artificial Sequence: Synthetic oligonucleotide
  source 1..21: mol_type = other DNA
gccagcgtcaaaagccaaccc

SEQ ID NO: 23004 - DNA, 21 bp, synthetic construct
  misc_feature 1..21: note = Description of Artificial Sequence: Synthetic oligonucleotide
  source 1..21: mol_type = other DNA
cagggtacgagtcctacggtt

SEQ ID NO: 23005 - DNA, 21 bp, synthetic construct
  misc_feature 1..21: note = Description of Artificial Sequence: Synthetic oligonucleotide
  source 1..21: mol_type = other DNA
accggcctccaaagcagcagc

SEQ ID NO: 23006 - DNA, 21 bp, synthetic construct
  misc_feature 1..21: note = Description of Artificial Sequence: Synthetic oligonucleotide
  source 1..21: mol_type = other DNA
atgcccctcaaaagcggcgtc

SEQ ID NO: 23007 - DNA, 21 bp, synthetic construct
  misc_feature 1..21: note = Description of Artificial Sequence: Synthetic oligonucleotide
  source 1..21: mol_type = other DNA
tctactactagtgctaatgtt

SEQ ID NO: 23008 - DNA, 21 bp, synthetic construct
  misc_feature 1..21: note = Description of Artificial Sequence: Synthetic oligonucleotide
  source 1..21: mol_type = other DNA
gcgacttctggggatcgtact

SEQ ID NO: 23009 - DNA, 21 bp, synthetic construct
  misc_feature 1..21: note = Description of Artificial Sequence: Synthetic oligonucleotide
  source 1..21: mol_type = other DNA
gtgagtggtaatcattctgct

SEQ ID NO: 23010 - DNA, 21 bp, synthetic construct
  misc_feature 1..21: note = Description of Artificial Sequence: Synthetic oligonucleotide
  source 1..21: mol_type = other DNA
gaacccagcagagccgcccaa

SEQ ID NO: 23011 - DNA, 21 bp, synthetic construct
  misc_feature 1..21: note = Description of Artificial Sequence: Synthetic oligonucleotide
  source 1..21: mol_type = other DNA
caagacggcagcaacagaagc

SEQ ID NO: 23012 - DNA, 21 bp, synthetic construct
  misc_feature 1..21: note = Description of Artificial Sequence: Synthetic oligonucleotide
  source 1..21: mol_type = other DNA
aattcgtctcctggtctgaat

SEQ ID NO: 23013 - DNA, 21 bp, synthetic construct
  misc_feature 1..21: note = Description of Artificial Sequence: Synthetic oligonucleotide
  source 1..21: mol_type = other DNA
atgggcagcagccccaacatc

SEQ ID NO: 23014 - DNA, 21 bp, synthetic construct
  misc_feature 1..21: note = Description of Artificial Sequence: Synthetic oligonucleotide
  source 1..21: mol_type = other DNA
catacgcaggataagttgtcg

SEQ ID NO: 23015 - DNA, 21 bp, synthetic construct
  misc_feature 1..21: note = Description of Artificial Sequence: Synthetic oligonucleotide
  source 1..21: mol_type = other DNA
ctcaacagcaccagcaccacc

SEQ ID NO: 23016 - DNA, 21 bp, synthetic construct
  misc_feature 1..21: note = Description of Artificial Sequence: Synthetic oligonucleotide
  source 1..21: mol_type = other DNA
ctgggtgggactactggtaag

SEQ ID NO: 23017 - DNA, 21 bp, synthetic construct
  misc_feature 1..21: note = Description of Artificial Sequence: Synthetic oligonucleotide
  source 1..21: mol_type = other DNA
gatagtggtaatgataggtct

SEQ ID NO: 23018 - DNA, 21 bp, synthetic construct
  misc_feature 1..21: note = Description of Artificial Sequence: Synthetic oligonucleotide
  source 1..21: mol_type = other DNA
gccgccgaaggcaacaaaaaa

SEQ ID NO: 23019 - DNA, 21 bp, synthetic construct
  misc_feature 1..21: note = Description of Artificial Sequence: Synthetic oligonucleotide
  source 1..21: mol_type = other DNA
ggcggcaccaaaagcgccgtc

SEQ ID NO: 23020 - DNA, 21 bp, synthetic construct
  misc_feature 1..21: note = Description of Artificial Sequence: Synthetic oligonucleotide
  source 1..21: mol_type = other DNA
agcgacaaagaaagaggcaga

SEQ ID NO: 23021 - DNA, 21 bp, synthetic construct
  misc_feature 1..21: note = Description of Artificial Sequence: Synthetic oligonucleotide
  source 1..21: mol_type = other DNA
gtcagcagcagcaccgtcagc

SEQ ID NO: 23022 - DNA, 21 bp, synthetic construct
  misc_feature 1..21: note = Description of Artificial Sequence: Synthetic oligonucleotide
  source 1..21: mol_type = other DNA
gaaagcccccaacaaagcgcc

SEQ ID NO: 23023 - DNA, 21 bp, synthetic construct
  misc_feature 1..21: note = Description of Artificial Sequence: Synthetic oligonucleotide
  source 1..21: mol_type = other DNA
cagagtaatggggctgttagt

SEQ ID NO: 23024 - DNA, 21 bp, synthetic construct
  misc_feature 1..21: note = Description of Artificial Sequence: Synthetic oligonucleotide
  source 1..21: mol_type = other DNA
cgtacgggtaatacttctatg

SEQ ID NO: 23025 - DNA, 21 bp, synthetic construct
  misc_feature 1..21: note = Description of Artificial Sequence: Synthetic oligonucleotide
  source 1..21: mol_type = other DNA
gggagttctaagactgctcct

SEQ ID NO: 23026 - DNA, 21 bp, synthetic construct
  misc_feature 1..21: note = Description of Artificial Sequence: Synthetic oligonucleotide
  source 1..21: mol_type = other DNA
agccaaagcgccagccacagc

SEQ ID NO: 23027 - DNA, 21 bp, synthetic construct
  misc_feature 1..21: note = Description of Artificial Sequence: Synthetic oligonucleotide
  source 1..21: mol_type = other DNA
agccacgccagcaacaacgtc

SEQ ID NO: 23028 - DNA, 21 bp, synthetic construct
  misc_feature 1..21: note = Description of Artificial Sequence: Synthetic oligonucleotide
  source 1..21: mol_type = other DNA
agcagcgccaaaggcagcggc

SEQ ID NO: 23029 - DNA, 21 bp, synthetic construct
  misc_feature 1..21: note = Description of Artificial Sequence: Synthetic oligonucleotide
  source 1..21: mol_type = other DNA
agcggcagcaccagcatggtc

SEQ ID NO: 23030 - DNA, 21 bp, synthetic construct
  misc_feature 1..21: note = Description of Artificial Sequence: Synthetic oligonucleotide
  source 1..21: mol_type = other DNA
atccccaaacaaagcgtcggc

SEQ ID NO: 23031 - DNA, 21 bp, synthetic construct
  misc_feature 1..21: note = Description of Artificial Sequence: Synthetic oligonucleotide
  source 1..21: mol_type = other DNA
caaggcaaccaaacccccgtc

SEQ ID NO: 23032 - DNA, 21 bp, synthetic construct
  misc_feature 1..21: note = Description of Artificial Sequence: Synthetic oligonucleotide
  source 1..21: mol_type = other DNA
actgataagggtgctggttct

SEQ ID NO: 23033 - DNA, 21 bp, synthetic construct
  misc_feature 1..21: note = Description of Artificial Sequence: Synthetic oligonucleotide
  source 1..21: mol_type = other DNA
atcagcgaaggcaccgccaga

SEQ ID NO: 23034 - DNA, 21 bp, synthetic construct
  misc_feature 1..21: note = Description of Artificial Sequence: Synthetic oligonucleotide
  source 1..21: mol_type = other DNA
ggcagcctcagccaaagcggc

SEQ ID NO: 23035 - DNA, 21 bp, synthetic construct
  misc_feature 1..21: note = Description of Artificial Sequence: Synthetic oligonucleotide
  source 1..21: mol_type = other DNA
ggccccgacagcgccctcaga

SEQ ID NO: 23036 - DNA, 21 bp, synthetic construct
  misc_feature 1..21: note = Description of Artificial Sequence: Synthetic oligonucleotide
  source 1..21: mol_type = other DNA
ggtagtctgccgcaggatcgt

SEQ ID NO: 23037 - DNA, 21 bp, synthetic construct
  misc_feature 1..21: note = Description of Artificial Sequence: Synthetic oligonucleotide
  source 1..21: mol_type = other DNA
aagattgagacggggggtggg

SEQ ID NO: 23038 - DNA, 21 bp, synthetic construct
  misc_feature 1..21: note = Description of Artificial Sequence: Synthetic oligonucleotide
  source 1..21: mol_type = other DNA
cacggcgaaaacgtccaaggc

SEQ ID NO: 23039 - DNA, 21 bp, synthetic construct
  misc_feature 1..21: note = Description of Artificial Sequence: Synthetic oligonucleotide
  source 1..21: mol_type = other DNA
gacagcgccaacacccacaaa

SEQ ID NO: 23040 - DNA, 21 bp, synthetic construct
  misc_feature 1..21: note = Description of Artificial Sequence: Synthetic oligonucleotide
  source 1..21: mol_type = other DNA
ggcagcgaaaaagaaagacac

SEQ ID NO: 23041 - DNA, 21 bp, synthetic construct
  misc_feature 1..21: note = Description of Artificial Sequence: Synthetic oligonucleotide
  source 1..21: mol_type = other DNA
ggcctcgtcaaagaaggcagc

SEQ ID NO: 23042 - DNA, 21 bp, synthetic construct
  misc_feature 1..21: note = Description of Artificial Sequence: Synthetic oligonucleotide
  source 1..21: mol_type = other DNA
gtcgccagcagaagcaacggc

SEQ ID NO: 23043 - DNA, 21 bp, synthetic construct
  misc_feature 1..21: note = Description of Artificial Sequence: Synthetic oligonucleotide
  source 1..21: mol_type = other DNA
gatgcggctgtggcgcgtagt

SEQ ID NO: 23044 - DNA, 21 bp, synthetic construct
  misc_feature 1..21: note = Description of Artificial Sequence: Synthetic oligonucleotide
  source 1..21: mol_type = other DNA
agcccccaaaacaacggcagc

SEQ ID NO: 23045 - DNA, 21 bp, synthetic construct
  misc_feature 1..21: note = Description of Artificial Sequence: Synthetic oligonucleotide
  source 1..21: mol_type = other DNA
gggtctactcctgggctttct

SEQ ID NO: 23046 - DNA, 21 bp, synthetic construct
  misc_feature 1..21: note = Description of Artificial Sequence: Synthetic oligonucleotide
  source 1..21: mol_type = other DNA
agtgctagtgggtctggtaat

SEQ ID NO: 23047 - DNA, 21 bp, synthetic construct
  misc_feature 1..21: note = Description of Artificial Sequence: Synthetic oligonucleotide
  source 1..21: mol_type = other DNA
cagggtgctcctattaatggt

SEQ ID NO: 23048 - DNA, 21 bp, synthetic construct
  misc_feature 1..21: note = Description of Artificial Sequence: Synthetic oligonucleotide
  source 1..21: mol_type = other DNA
ggcagcaaaagcgccctccaa

SEQ ID NO: 23049 - DNA, 21 bp, synthetic construct
  misc_feature 1..21: note = Description of Artificial Sequence: Synthetic oligonucleotide
  source 1..21: mol_type = other DNA
tcgcttgctgggggtcagggg

SEQ ID NO: 23050 - DNA, 21 bp, synthetic construct
  misc_feature 1..21: note = Description of Artificial Sequence: Synthetic oligonucleotide
  source 1..21: mol_type = other DNA
ctgggtaagcagcagacgggg

SEQ ID NO: 23051 - DNA, 21 bp, synthetic construct
  misc_feature 1..21: note = Description of Artificial Sequence: Synthetic oligonucleotide
  source 1..21: mol_type = other DNA
atcaaaaacagccaaagcacc

SEQ ID NO: 23052 - DNA, 21 bp, synthetic construct
  misc_feature 1..21: note = Description of Artificial Sequence: Synthetic oligonucleotide
  source 1..21: mol_type = other DNA
aacagcctcgacagacccatg

SEQ ID NO: 23053 - DNA, 21 bp, synthetic construct
  misc_feature 1..21: note = Description of Artificial Sequence: Synthetic oligonucleotide
  source 1..21: mol_type = other DNA
accaccggcagcggcgccacc

SEQ ID NO: 23054 - DNA, 21 bp, synthetic construct
  misc_feature 1..21: note = Description of Artificial Sequence: Synthetic oligonucleotide
  source 1..21: mol_type = other DNA
accagcggcagcagaaacggc

SEQ ID NO: 23055 - DNA, 21 bp, synthetic construct
  misc_feature 1..21: note = Description of Artificial Sequence: Synthetic oligonucleotide
  source 1..21: mol_type = other DNA
caacccggcagcgaaagacaa

SEQ ID NO: 23056 - DNA, 21 bp, synthetic construct
  misc_feature 1..21: note = Description of Artificial Sequence: Synthetic oligonucleotide
  source 1..21: mol_type = other DNA
atgcaaagcgcccccagcacc

SEQ ID NO: 23057 - DNA, 21 bp, synthetic construct
  misc_feature 1..21: note = Description of Artificial Sequence: Synthetic oligonucleotide
  source 1..21: mol_type = other DNA
agagaaagcgacagccccaaa

SEQ ID NO: 23058 - DNA, 21 bp, synthetic construct
  misc_feature 1..21: note = Description of Artificial Sequence: Synthetic oligonucleotide
  source 1..21: mol_type = other DNA
caacccgtcagcaaaaccgcc

SEQ ID NO: 23059 - DNA, 21 bp, synthetic construct
  misc_feature 1..21: note = Description of Artificial Sequence: Synthetic oligonucleotide
  source 1..21: mol_type = other DNA
agcggccaacccgtcaaaggc

SEQ ID NO: 23060 - DNA, 21 bp, synthetic construct
  misc_feature 1..21: note = Description of Artificial Sequence: Synthetic oligonucleotide
  source 1..21: mol_type = other DNA
agtgggttgagtagtaagcag

SEQ ID NO: 23061 - DNA, 21 bp, synthetic construct
  misc_feature 1..21: note = Description of Artificial Sequence: Synthetic oligonucleotide
  source 1..21: mol_type = other DNA
cagccgacggatggttcgaag

SEQ ID NO: 23062 - DNA, 21 bp, synthetic construct
  misc_feature 1..21: note = Description of Artificial Sequence: Synthetic oligonucleotide
  source 1..21: mol_type = other DNA
gaggggaattctattcataag

SEQ ID NO: 23063 - DNA, 21 bp, synthetic construct
  misc_feature 1..21: note = Description of Artificial Sequence: Synthetic oligonucleotide
  source 1..21: mol_type = other DNA
accaccacccaagccaaaatg

SEQ ID NO: 23064 - DNA, 21 bp, synthetic construct
  misc_feature 1..21: note = Description of Artificial Sequence: Synthetic oligonucleotide
  source 1..21: mol_type = other DNA
aatgctgcttctaagcctttg

SEQ ID NO: 23065 - DNA, 21 bp, synthetic construct
  misc_feature 1..21: note = Description of Artificial Sequence: Synthetic oligonucleotide
  source 1..21: mol_type = other DNA
ggtgcggggaatcagcctaag

SEQ ID NO: 23066 - DNA, 21 bp, synthetic construct
  misc_feature 1..21: note = Description of Artificial Sequence: Synthetic oligonucleotide
  source 1..21: mol_type = other DNA
ggcaaagtcgacaaagacaaa

SEQ ID NO: 23067 - DNA, 21 bp, synthetic construct
  misc_feature 1..21: note = Description of Artificial Sequence: Synthetic oligonucleotide
  source 1..21: mol_type = other DNA
gctggggtgcagggggctact

SEQ ID NO: 23068 - DNA, 21 bp, synthetic construct
  misc_feature 1..21: note = Description of Artificial Sequence: Synthetic oligonucleotide
  source 1..21: mol_type = other DNA
agccccgacgtcaaagtcgcc

SEQ ID NO: 23069 - DNA, 21 bp, synthetic construct
  misc_feature 1..21: note = Description of Artificial Sequence: Synthetic oligonucleotide
  source 1..21: mol_type = other DNA
atccccagcagcaaagccgtc

SEQ ID NO: 23070 - DNA, 21 bp, synthetic construct
  misc_feature 1..21: note = Description of Artificial Sequence: Synthetic oligonucleotide
  source 1..21: mol_type = other DNA
gatcagggtagtcataatcgc

SEQ ID NO: 23071 - DNA, 21 bp, synthetic construct
  misc_feature 1..21: note = Description of Artificial Sequence: Synthetic oligonucleotide
  source 1..21: mol_type = other DNA
aaagccgaagccaacacccaa

SEQ ID NO: 23072 - DNA, 21 bp, synthetic construct
  misc_feature 1..21: note = Description of Artificial Sequence: Synthetic oligonucleotide
  source 1..21: mol_type = other DNA
aaggatagtgcggggggttct

SEQ ID NO: 23073 - DNA, 21 bp, synthetic construct
  misc_feature 1..21: note = Description of Artificial Sequence: Synthetic oligonucleotide
  source 1..21: mol_type = other DNA
acggctgagaagagtcttgtt

SEQ ID NO: 23074 - DNA, 21 bp, synthetic construct
  misc_feature 1..21: note = Description of Artificial Sequence: Synthetic oligonucleotide
  source 1..21: mol_type = other DNA
agcgtcgcccacaccagcgcc

SEQ ID NO: 23075 - DNA, 21 bp, synthetic construct
  misc_feature 1..21: note = Description of Artificial Sequence: Synthetic oligonucleotide
  source 1..21: mol_type = other DNA
aatcctgaggctaagagtaag

SEQ ID NO: 23076 - DNA, 21 bp, synthetic construct
  misc_feature 1..21: note = Description of Artificial Sequence: Synthetic oligonucleotide
  source 1..21: mol_type = other DNA
caggggacttctgtttcgggt

SEQ ID NO: 23077 - DNA, 21 bp, synthetic construct
  misc_feature 1..21: note = Description of Artificial Sequence: Synthetic oligonucleotide
  source 1..21: mol_type = other DNA
gccaccaacaaagccggcctc

SEQ ID NO: 23078 - DNA, 21 bp, synthetic construct
  misc_feature 1..21: note = Description of Artificial Sequence: Synthetic oligonucleotide
  source 1..21: mol_type = other DNA
agcaccagccaaagcaacctc

SEQ ID NO: 23079 - DNA, 21 bp, synthetic construct
  misc_feature 1..21: note = Description of Artificial Sequence: Synthetic oligonucleotide
  source 1..21: mol_type = other DNA
catgcgggtgagcatcggact

SEQ ID NO: 23080 - DNA, 21 bp, synthetic construct
  misc_feature 1..21: note = Description of Artificial Sequence: Synthetic oligonucleotide
  source 1..21: mol_type = other DNA
ggcagcagcagccaaagcagc

SEQ ID NO: 23081 - DNA, 21 bp, synthetic construct
  misc_feature 1..21: note = Description of Artificial Sequence: Synthetic oligonucleotide
  source 1..21: mol_type = other DNA
accgtcggcagcgaaagaagc

SEQ ID NO: 23082 - DNA, 21 bp, synthetic construct
  misc_feature 1..21: note = Description of Artificial Sequence: Synthetic oligonucleotide
  source 1..21: mol_type = other DNA
catagtagtgggagtaatgct

SEQ ID NO: 23083 - DNA, 21 bp, synthetic construct
  misc_feature 1..21: note = Description of Artificial Sequence: Synthetic oligonucleotide
  source 1..21: mol_type = other DNA
cggtctgggaatgggatttcg

SEQ ID NO: 23084 - DNA, 21 bp, synthetic construct
  misc_feature 1..21: note = Description of Artificial Sequence: Synthetic oligonucleotide
  source 1..21: mol_type = other DNA
gacagccaaagaagcaaccaa

SEQ ID NO: 23085 - DNA, 21 bp, synthetic construct
  misc_feature 1..21: note = Description of Artificial Sequence: Synthetic oligonucleotide
  source 1..21: mol_type = other DNA
gacagccacaaaggcagcaaa

SEQ ID NO: 23086 - DNA, 21 bp, synthetic construct
  misc_feature 1..21: note = Description of Artificial Sequence: Synthetic oligonucleotide
  source 1..21: mol_type = other DNA
ggtacgtcgaagtctgagagg

SEQ ID NO: 23087 - DNA, 21 bp, synthetic construct
  misc_feature 1..21: note = Description of Artificial Sequence: Synthetic oligonucleotide
  source 1..21: mol_type = other DNA
gtggctacgaatactcctaag

SEQ ID NO: 23088 - DNA, 21 bp, synthetic construct
  misc_feature 1..21: note = Description of Artificial Sequence: Synthetic oligonucleotide
  source 1..21: mol_type = other DNA
tctgggggtcagtcggcgcat

SEQ ID NO: 23089 - DNA, 21 bp, synthetic construct
  misc_feature 1..21: note = Description of Artificial Sequence: Synthetic oligonucleotide
  source 1..21: mol_type = other DNA
agcggcgtcgacctcaaaacc

SEQ ID NO: 23090 - DNA, 21 bp, synthetic construct
  misc_feature 1..21: note = Description of Artificial Sequence: Synthetic oligonucleotide
  source 1..21: mol_type = other DNA
accgccggcagccaacacacc

SEQ ID NO: 23091 - DNA, 21 bp, synthetic construct
  misc_feature 1..21: note = Description of Artificial Sequence: Synthetic oligonucleotide
  source 1..21: mol_type = other DNA
caccaaagcggcagcggcagc

SEQ ID NO: 23092 - DNA, 21 bp, synthetic construct
  misc_feature 1..21: note = Description of Artificial Sequence: Synthetic oligonucleotide
  source 1..21: mol_type = other DNA
ggggatggtcctcctactagg

SEQ ID NO: 23093 - DNA, 21 bp, synthetic construct
  misc_feature 1..21: note = Description of Artificial Sequence: Synthetic oligonucleotide
  source 1..21: mol_type = other DNA
aagcagttgtcggctacgacg

SEQ ID NO: 23094 - DNA, 21 bp, synthetic construct
  misc_feature 1..21: note = Description of Artificial Sequence: Synthetic oligonucleotide
  source 1..21: mol_type = other DNA
agcagcgccaaagccagcccc

SEQ ID NO: 23095 - DNA, 21 bp, synthetic construct
  misc_feature 1..21: note = Description of Artificial Sequence: Synthetic oligonucleotide
  source 1..21: mol_type = other DNA
catccgtcgcaggcgtctaag

SEQ ID NO: 23096 - DNA, 21 bp, synthetic construct
  misc_feature 1..21: note = Description of Artificial Sequence: Synthetic oligonucleotide
  source 1..21: mol_type = other DNA
gaaagaaacagcaaactcagc

SEQ ID NO: 23097 - DNA, 21 bp, synthetic construct
  misc_feature 1..21: note = Description of Artificial Sequence: Synthetic oligonucleotide
  source 1..21: mol_type = other DNA
gtgcctgatacgggtcgtaag

SEQ ID NO: 23098 - DNA, 21 bp, synthetic construct
  misc_feature 1..21: note = Description of Artificial Sequence: Synthetic oligonucleotide
  source 1..21: mol_type = other DNA
gagtctaagcctagttcgggt

SEQ ID NO: 23099 - DNA, 21 bp, synthetic construct
  misc_feature 1..21: note = Description of Artificial Sequence: Synthetic oligonucleotide
  source 1..21: mol_type = other DNA
agcatcagcacccccaccagc

SEQ ID NO: 23100 - DNA, 21 bp, synthetic construct
  misc_feature 1..21: note = Description of Artificial Sequence: Synthetic oligonucleotide
  source 1..21: mol_type = other DNA
gcccaaggcagccccatcaac

SEQ ID NO: 23101 - DNA, 21 bp, synthetic construct
  misc_feature 1..21: note = Description of Artificial Sequence: Synthetic oligonucleotide
  source 1..21: mol_type = other DNA
cagcctaattctccgtctgtt

SEQ ID NO: 23102 - DNA, 21 bp, synthetic construct
  misc_feature 1..21: note = Description of Artificial Sequence: Synthetic oligonucleotide
  source 1..21: mol_type = other DNA
ggtgttaattcggcttcgcat

SEQ ID NO: 23103 - DNA, 21 bp, synthetic construct
  misc_feature 1..21: note = Description of Artificial Sequence: Synthetic oligonucleotide
  source 1..21: mol_type = other DNA
acgtcgaatactaagcagggt

SEQ ID NO: 23104 - DNA, 21 bp, synthetic construct
  misc_feature 1..21: note = Description of Artificial Sequence: Synthetic oligonucleotide
  source 1..21: mol_type = other DNA
gaaagcagcagcagcgtcagc

SEQ ID NO: 23105 - DNA, 21 bp, synthetic construct
  misc_feature 1..21: note = Description of Artificial Sequence: Synthetic oligonucleotide
  source 1..21: mol_type = other DNA
gtgaatgcgaagcctagtctt

SEQ ID NO: 23106 - DNA, 21 bp, synthetic construct
  misc_feature 1..21: note = Description of Artificial Sequence: Synthetic oligonucleotide
  source 1..21: mol_type = other DNA
gggagggatgttcctactagg

SEQ ID NO: 23107 - DNA, 21 bp, synthetic construct
  misc_feature 1..21: note = Description of Artificial Sequence: Synthetic oligonucleotide
  source 1..21: mol_type = other DNA
gagggtgtgactaagaataag

SEQ ID NO: 23108 - DNA, 21 bp, synthetic construct
  misc_feature 1..21: note = Description of Artificial Sequence: Synthetic oligonucleotide
  source 1..21: mol_type = other DNA
gcggctagtcctgctacggcg

SEQ ID NO: 23109 - DNA, 21 bp, synthetic construct
  misc_feature 1..21: note = Description of Artificial Sequence: Synthetic oligonucleotide
  source 1..21: mol_type = other DNA
accagagaaggcgcccccagc

SEQ ID NO: 23110 - DNA, 21 bp, synthetic construct
  misc_feature 1..21: note = Description of Artificial Sequence: Synthetic oligonucleotide
  source 1..21: mol_type = other DNA
aacgtcaacaaaatcagagac

SEQ ID NO: 23111 - DNA, 21 bp, synthetic construct
  misc_feature 1..21: note = Description of Artificial Sequence: Synthetic oligonucleotide
  source 1..21: mol_type = other DNA
gctggtggtaaggggctgaat

SEQ ID NO: 23112 - DNA, 21 bp, synthetic construct
  misc_feature 1..21: note = Description of Artificial Sequence: Synthetic oligonucleotide
  source 1..21: mol_type = other DNA
tcgggtcatgggagtaattcg

SEQ ID NO: 23113 - DNA, 21 bp, synthetic construct
  misc_feature 1..21: note = Description of Artificial Sequence: Synthetic oligonucleotide
  source 1..21: mol_type = other DNA
ctcgaaggcaaacccaaccaa

SEQ ID NO: 23114 - DNA, 21 bp, synthetic construct
  misc_feature 1..21: note = Description of Artificial Sequence: Synthetic oligonucleotide
  source 1..21: mol_type = other DNA
aaaaaagccaccaccaacgaa

SEQ ID NO: 23115 - DNA, 21 bp, synthetic construct
  misc_feature 1..21: note = Description of Artificial Sequence: Synthetic oligonucleotide
  source 1..21: mol_type = other DNA
aaaagcgacgacaaaaccaga

SEQ ID NO: 23116 - DNA, 21 bp, synthetic construct
  misc_feature 1..21: note = Description of Artificial Sequence: Synthetic oligonucleotide
  source 1..21: mol_type = other DNA
aacagcaccagcgtcaacgcc

SEQ ID NO: 23117 - DNA, 21 bp, synthetic construct
  misc_feature 1..21: note = Description of Artificial Sequence: Synthetic oligonucleotide
  source 1..21: mol_type = other DNA
aaggaggataagattaattcg

SEQ ID NO: 23118 - DNA, 21 bp, synthetic construct
  misc_feature 1..21: note = Description of Artificial Sequence: Synthetic oligonucleotide
  source 1..21: mol_type = other DNA
aagggttctggttcgaatgtg

SEQ ID NO: 23119 - DNA, 21 bp, synthetic construct
  misc_feature 1..21: note = Description of Artificial Sequence: Synthetic oligonucleotide
  source 1..21: mol_type = other DNA
aatattggttcgcagaagggt

SEQ ID NO: 23120 - DNA, 21 bp, synthetic construct
  misc_feature 1..21: note = Description of Artificial Sequence: Synthetic oligonucleotide
  source 1..21: mol_type = other DNA
aattctgggcaggttgtggcg

SEQ ID NO: 23121 - DNA, 21 bp, synthetic construct
  misc_feature 1..21: note = Description of Artificial Sequence: Synthetic oligonucleotide
  source 1..21: mol_type = other DNA
accacccaaaacagcagcgcc

SEQ ID NO: 23122 - DNA, 21 bp, synthetic construct
  misc_feature 1..21: note = Description of Artificial Sequence: Synthetic oligonucleotide
  source 1..21: mol_type = other DNA
accggccaacacaccagcagc

SEQ ID NO: 23123 - DNA, 21 bp, synthetic construct
  misc_feature 1..21: note = Description of Artificial Sequence: Synthetic oligonucleotide
  source 1..21: mol_type = other DNA
acgaggaatagtcctggtgag

SEQ ID NO: 23124 - DNA, 21 bp, synthetic construct
  misc_feature 1..21: note = Description of Artificial Sequence: Synthetic oligonucleotide
  source 1..21: mol_type = other DNA
acggatgataggagttctcag

SEQ ID NO: 23125 - DNA, 21 bp, synthetic construct
  misc_feature 1..21: note = Description of Artificial Sequence: Synthetic oligonucleotide
  source 1..21: mol_type = other DNA
acttcgagggagaagattact

SEQ ID NO: 23126 - DNA, 21 bp, synthetic construct
  misc_feature 1..21: note = Description of Artificial Sequence: Synthetic oligonucleotide
  source 1..21: mol_type = other DNA
agagacaacaccagaagcagc

SEQ ID NO: 23127 - DNA, 21 bp, synthetic construct
  misc_feature 1..21: note = Description of Artificial Sequence: Synthetic oligonucleotide
  source 1..21: mol_type = other DNA
agcaaagaccaaagcaccggc

SEQ ID NO: 23128 - DNA, 21 bp, synthetic construct
  misc_feature 1..21: note = Description of Artificial Sequence: Synthetic oligonucleotide
  source 1..21: mol_type = other DNA
agcaaccacggcgaaaaaggc

SEQ ID NO: 23129 - DNA, 21 bp, synthetic construct
  misc_feature 1..21: note = Description of Artificial Sequence: Synthetic oligonucleotide
  source 1..21: mol_type = other DNA
agcaccaacagcagccacgcc

SEQ ID NO: 23130 - DNA, 21 bp, synthetic construct
  misc_feature 1..21: note = Description of Artificial Sequence: Synthetic oligonucleotide
  source 1..21: mol_type = other DNA
agcagcgacggcacccacgcc

SEQ ID NO: 23131 - DNA, 21 bp, synthetic construct
  misc_feature 1..21: note = Description of Artificial Sequence: Synthetic oligonucleotide
  source 1..21: mol_type = other DNA
agccaaaaagaacaccccacc

SEQ ID NO: 23132 - DNA, 21 bp, synthetic construct
  misc_feature 1..21: note = Description of Artificial Sequence: Synthetic oligonucleotide
  source 1..21: mol_type = other DNA
agcgccagcagcagcctcaaa

SEQ ID NO: 23133 - DNA, 21 bp, synthetic construct
  misc_feature 1..21: note = Description of Artificial Sequence: Synthetic oligonucleotide
  source 1..21: mol_type = other DNA
atcgccaccggcctcaccaaa

SEQ ID NO: 23134 - DNA, 21 bp, synthetic construct
  misc_feature 1..21: note = Description of Artificial Sequence: Synthetic oligonucleotide
  source 1..21: mol_type = other DNA
atgaaagacacccacgccagc

SEQ ID NO: 23135 - DNA, 21 bp, synthetic construct
  misc_feature 1..21: note = Description of Artificial Sequence: Synthetic oligonucleotide
  source 1..21: mol_type = other DNA
caaaacaccaccagcgtcctc

SEQ ID NO: 23136 - DNA, 21 bp, synthetic construct
  misc_feature 1..21: note = Description of Artificial Sequence: Synthetic oligonucleotide
  source 1..21: mol_type = other DNA
caaaacgccaccagaagcgaa

SEQ ID NO: 23137 - DNA, 21 bp, synthetic construct
  misc_feature 1..21: note = Description of Artificial Sequence: Synthetic oligonucleotide
  source 1..21: mol_type = other DNA
cagcatgggaaggatctgggg

SEQ ID NO: 23138 - DNA, 21 bp, synthetic construct
  misc_feature 1..21: note = Description of Artificial Sequence: Synthetic oligonucleotide
  source 1..21: mol_type = other DNA
caggggcatgatagtgctagg

SEQ ID NO: 23139 - DNA, 21 bp, synthetic construct
  misc_feature 1..21: note = Description of Artificial Sequence: Synthetic oligonucleotide
  source 1..21: mol_type = other DNA
cggaatgagggtggtatgact

SEQ ID NO: 23140 - DNA, 21 bp, synthetic construct
  misc_feature 1..21: note = Description of Artificial Sequence: Synthetic oligonucleotide
  source 1..21: mol_type = other DNA
cggggtgataatcctgctagt

SEQ ID NO: 23141 - DNA, 21 bp, synthetic construct
  misc_feature 1..21: note = Description of Artificial Sequence: Synthetic oligonucleotide
  source 1..21: mol_type = other DNA
ctcgccaccgaaaaaagcacc

SEQ ID NO: 23142 - DNA, 21 bp, synthetic construct
  misc_feature 1..21: note = Description of Artificial Sequence: Synthetic oligonucleotide
  source 1..21: mol_type = other DNA
cttactgagacgcctaagagt

SEQ ID NO: 23143 - DNA, 21 bp, synthetic construct
  misc_feature 1..21: note = Description of Artificial Sequence: Synthetic oligonucleotide
  source 1..21: mol_type = other DNA
gaaaacacccaaggcggcaga

SEQ ID NO: 23144 - DNA, 21 bp, synthetic construct
  misc_feature 1..21: note = Description of Artificial Sequence: Synthetic oligonucleotide
  source 1..21: mol_type = other DNA
gaacccaccgccagcgtcaga

SEQ ID NO: 23145 - DNA, 21 bp, synthetic construct
  misc_feature 1..21: note = Description of Artificial Sequence: Synthetic oligonucleotide
  source 1..21: mol_type = other DNA
gacaacagagccagcgccacc

SEQ ID NO: 23146 - DNA, 21 bp, synthetic construct
  misc_feature 1..21: note = Description of Artificial Sequence: Synthetic oligonucleotide
  source 1..21: mol_type = other DNA
gacaacagcaacaaaatgggc

SEQ ID NO: 23147 - DNA, 21 bp, synthetic construct
  misc_feature 1..21: note = Description of Artificial Sequence: Synthetic oligonucleotide
  source 1..21: mol_type = other DNA
gagagttctaataatttgaag

SEQ ID NO: 23148 - DNA, 21 bp, synthetic construct
  misc_feature 1..21: note = Description of Artificial Sequence: Synthetic oligonucleotide
  source 1..21: mol_type = other DNA
gataatgataggggtaagtcg

SEQ ID NO: 23149 - DNA, 21 bp, synthetic construct
  misc_feature 1..21: note = Description of Artificial Sequence: Synthetic oligonucleotide
  source 1..21: mol_type = other DNA
gattcgcataagggtattagt

SEQ ID NO: 23150 - DNA, 21 bp, synthetic construct
  misc_feature 1..21: note = Description of Artificial Sequence: Synthetic oligonucleotide
  source 1..21: mol_type = other DNA
gccaccggcggcggcggcgcc

SEQ ID NO: 23151 - DNA, 21 bp, synthetic construct
  misc_feature 1..21: note = Description of Artificial Sequence: Synthetic oligonucleotide
  source 1..21: mol_type = other DNA
gccgccaccggccaaatgagc

SEQ ID NO: 23152 - DNA, 21 bp, synthetic construct
  misc_feature 1..21: note = Description of Artificial Sequence: Synthetic oligonucleotide
  source 1..21: mol_type = other DNA
gccgccagcaaaagcagcgaa

SEQ ID NO: 23153 - DNA, 21 bp, synthetic construct
  misc_feature 1..21: note = Description of Artificial Sequence: Synthetic oligonucleotide
  source 1..21: mol_type = other DNA
gccggccccagcagccccacc

SEQ ID NO: 23154 - DNA, 21 bp, synthetic construct
  misc_feature 1..21: note = Description of Artificial Sequence: Synthetic oligonucleotide
  source 1..21: mol_type = other DNA
gccggcgcccccaacaaaacc

SEQ ID NO: 23155 - DNA, 21 bp, synthetic construct
  misc_feature 1..21: note = Description of Artificial Sequence: Synthetic oligonucleotide
  source 1..21: mol_type = other DNA
gcgactaaggaggggattgct

SEQ ID NO: 23156 - DNA, 21 bp, synthetic construct
  misc_feature 1..21: note = Description of Artificial Sequence: Synthetic oligonucleotide
  source 1..21: mol_type = other DNA
gctaatagttctacggagaag

SEQ ID NO: 23157 - DNA, 21 bp, synthetic construct
  misc_feature 1..21: note = Description of Artificial Sequence: Synthetic oligonucleotide
  source 1..21: mol_type = other DNA
gctgataggcctactactgtt

SEQ ID NO: 23158 - DNA, 21 bp, synthetic construct
  misc_feature 1..21: note = Description of Artificial Sequence: Synthetic oligonucleotide
  source 1..21: mol_type = other DNA
ggcaacagccaaagcagcggc

SEQ ID NO: 23159 - DNA, 21 bp, synthetic construct
  misc_feature 1..21: note = Description of Artificial Sequence: Synthetic oligonucleotide
  source 1..21: mol_type = other DNA
ggcaccaccaccgccggcaga

SEQ ID NO: 23160 - DNA, 21 bp, synthetic construct
  misc_feature 1..21: note = Description of Artificial Sequence: Synthetic oligonucleotide
  source 1..21: mol_type = other DNA
ggcaccctcgccgacaccaaa

SEQ ID NO: 23161 - DNA, 21 bp, synthetic construct
  misc_feature 1..21: note = Description of Artificial Sequence: Synthetic oligonucleotide
  source 1..21: mol_type = other DNA
ggcagcaaaaccgacatgaga

SEQ ID NO: 23162 - DNA, 21 bp, synthetic construct
  misc_feature 1..21: note = Description of Artificial Sequence: Synthetic oligonucleotide
  source 1..21: mol_type = other DNA
ggcggcatcagcaacagcgcc

SEQ ID NO: 23163 - DNA, 21 bp, synthetic construct
  misc_feature 1..21: note = Description of Artificial Sequence: Synthetic oligonucleotide
  source 1..21: mol_type = other DNA
ggcgtccccctcagcaccggc

SEQ ID NO: 23164 - DNA, 21 bp, synthetic construct
  misc_feature 1..21: note = Description of Artificial Sequence: Synthetic oligonucleotide
  source 1..21: mol_type = other DNA
ggggtgaatcgtgatgctgcg

SEQ ID NO: 23165 - DNA, 21 bp, synthetic construct
  misc_feature 1..21: note = Description of Artificial Sequence: Synthetic oligonucleotide
  source 1..21: mol_type = other DNA
ggtacgactggacagatggtt

SEQ ID NO: 23166 - DNA, 21 bp, synthetic construct
  misc_feature 1..21: note = Description of Artificial Sequence: Synthetic oligonucleotide
  source 1..21: mol_type = other DNA
ggtactactttgagtgagaag

SEQ ID NO: 23167 - DNA, 21 bp, synthetic construct
  misc_feature 1..21: note = Description of Artificial Sequence: Synthetic oligonucleotide
  source 1..21: mol_type = other DNA
ggtctggatacgcagaaggct

SEQ ID NO: 23168 - DNA, 21 bp, synthetic construct
  misc_feature 1..21: note = Description of Artificial Sequence: Synthetic oligonucleotide
  source 1..21: mol_type = other DNA
ggtgggttgcaggaggttaag

SEQ ID NO: 23169 - DNA, 21 bp, synthetic construct
  misc_feature 1..21: note = Description of Artificial Sequence: Synthetic oligonucleotide
  source 1..21: mol_type = other DNA
gtcggcagcagcggccacgtc

SEQ ID NO: 23170 - DNA, 21 bp, synthetic construct
  misc_feature 1..21: note = Description of Artificial Sequence: Synthetic oligonucleotide
  source 1..21: mol_type = other DNA
gtcggccaaagagacaccggc

SEQ ID NO: 23171 - DNA, 21 bp, synthetic construct
  misc_feature 1..21: note = Description of Artificial Sequence: Synthetic oligonucleotide
  source 1..21: mol_type = other DNA
gtgaataattcgtctacgacg

SEQ ID NO: 23172 - DNA, 21 bp, synthetic construct
  misc_feature 1..21: note = Description of Artificial Sequence: Synthetic oligonucleotide
  source 1..21: mol_type = other DNA
gtgacgcagtctgctaatggt

SEQ ID NO: 23173 - DNA, 21 bp, synthetic construct
  misc_feature 1..21: note = Description of Artificial Sequence: Synthetic oligonucleotide
  source 1..21: mol_type = other DNA
gttacttctaattcgagtgtt

SEQ ID NO: 23174 - DNA, 21 bp, synthetic construct
  misc_feature 1..21: note = Description of Artificial Sequence: Synthetic oligonucleotide
  source 1..21: mol_type = other DNA
tatggggatagtccgaagaat

SEQ ID NO: 23175 - DNA, 21 bp, synthetic construct
  misc_feature 1..21: note = Description of Artificial Sequence: Synthetic oligonucleotide
  source 1..21: mol_type = other DNA
tcgggtagtcaggctgttttg

SEQ ID NO: 23176 - DNA, 21 bp, synthetic construct
  misc_feature 1..21: note = Description of Artificial Sequence: Synthetic oligonucleotide
  source 1..21: mol_type = other DNA
tctcctcctgagcataaggtg

SEQ ID NO: 23177 - DNA, 21 bp, synthetic construct
  misc_feature 1..21: note = Description of Artificial Sequence: Synthetic oligonucleotide
  source 1..21: mol_type = other DNA
ttggcgacgtcgtctacgggt

SEQ ID NO: 23178 - DNA, 21 bp, synthetic construct
  misc_feature 1..21: note = Description of Artificial Sequence: Synthetic oligonucleotide
  source 1..21: mol_type = other DNA
tctcagcgtccgagttcggtt

SEQ ID NO: 23179 - DNA, 21 bp, synthetic construct
  misc_feature 1..21: note = Description of Artificial Sequence: Synthetic oligonucleotide
  source 1..21: mol_type = other DNA
agtagtcgtgattcgaagtct

SEQ ID NO: 23180 - DNA, 21 bp, synthetic construct
  misc_feature 1..21: note = Description of Artificial Sequence: Synthetic oligonucleotide
  source 1..21: mol_type = other DNA
gggatgggtgggcagaatgtg

SEQ ID NO: 23181 - DNA, 21 bp, synthetic construct
  misc_feature 1..21: note = Description of Artificial Sequence: Synthetic oligonucleotide
  source 1..21: mol_type = other DNA
gcgggtcgtagtgataagggt

SEQ ID NO: 23182 - DNA, 21 bp, synthetic construct
  misc_feature 1..21: note = Description of Artificial Sequence: Synthetic oligonucleotide
  source 1..21: mol_type = other DNA
agcgccaccaccagcgaaaga

SEQ ID NO: 23183 - DNA, 21 bp, synthetic construct
  misc_feature 1..21: note = Description of Artificial Sequence: Synthetic oligonucleotide
  source 1..21: mol_type = other DNA
agtgctaatgcggctcgtaat

SEQ ID NO: 23184 - DNA, 21 bp, synthetic construct
  misc_feature 1..21: note = Description of Artificial Sequence: Synthetic oligonucleotide
  source 1..21: mol_type = other DNA
agcggcgccaccccccccaga

SEQ ID NO: 23185 - DNA, 21 bp, synthetic construct
  misc_feature 1..21: note = Description of Artificial Sequence: Synthetic oligonucleotide
  source 1..21: mol_type = other DNA
aaccacgaaggcaaagtccaa

SEQ ID NO: 23186 - DNA, 21 bp, synthetic construct
  misc_feature 1..21: note = Description of Artificial Sequence: Synthetic oligonucleotide
  source 1..21: mol_type = other DNA
gttcgtgatggttctaatgtt

SEQ ID NO: 23187 - DNA, 21 bp, synthetic construct
  misc_feature 1..21: note = Description of Artificial Sequence: Synthetic oligonucleotide
  source 1..21: mol_type = other DNA
agcctcaccagaagcagcgtc

SEQ ID NO: 23188 - DNA, 21 bp, synthetic construct
  misc_feature 1..21: note = Description of Artificial Sequence: Synthetic oligonucleotide
  source 1..21: mol_type = other DNA
cagactcttggtggtagtggt

SEQ ID NO: 23189 - DNA, 21 bp, synthetic construct
  misc_feature 1..21: note = Description of Artificial Sequence: Synthetic oligonucleotide
  source 1..21: mol_type = other DNA
atgtctgatgggcattcgact

SEQ ID NO: 23190 - DNA, 21 bp, synthetic construct
  misc_feature 1..21: note = Description of Artificial Sequence: Synthetic oligonucleotide
  source 1..21: mol_type = other DNA
ctcaccgccggcagcggcacc

SEQ ID NO: 23191 - DNA, 21 bp, synthetic construct
  misc_feature 1..21: note = Description of Artificial Sequence: Synthetic oligonucleotide
  source 1..21: mol_type = other DNA
gatacgacttctaagcgtgct

SEQ ID NO: 23192 - DNA, 21 bp, synthetic construct
  misc_feature 1..21: note = Description of Artificial Sequence: Synthetic oligonucleotide
  source 1..21: mol_type = other DNA
cacaccgccggcaacaacgtc

SEQ ID NO: 23193 - DNA, 21 bp, synthetic construct
  misc_feature 1..21: note = Description of Artificial Sequence: Synthetic oligonucleotide
  source 1..21: mol_type = other DNA
gcccacagcgccaaagacgcc

SEQ ID NO: 23194 - DNA, 21 bp, synthetic construct
  misc_feature 1..21: note = Description of Artificial Sequence: Synthetic oligonucleotide
  source 1..21: mol_type = other DNA
accaccgaaagcaccaccaga

SEQ ID NO: 23195 - DNA, 21 bp, synthetic construct
  misc_feature 1..21: note = Description of Artificial Sequence: Synthetic oligonucleotide
  source 1..21: mol_type = other DNA
accaccgaagccagcaacaga

SEQ ID NO: 23196 - DNA, 21 bp, synthetic construct
  misc_feature 1..21: note = Description of Artificial Sequence: Synthetic oligonucleotide
  source 1..21: mol_type = other DNA
gacagcaaaagcgcccacgcc

SEQ ID NO: 23197 - DNA, 21 bp, synthetic construct
  misc_feature 1..21: note = Description of Artificial Sequence: Synthetic oligonucleotide
  source 1..21: mol_type = other DNA
ggcggcctcgacaaaggcgtc

SEQ ID NO: 23198 - DNA, 21 bp, synthetic construct
  misc_feature 1..21: note = Description of Artificial Sequence: Synthetic oligonucleotide
  source 1..21: mol_type = other DNA
gtcaaagtcggcgaacaacac

SEQ ID NO: 23199 - DNA, 21 bp, synthetic construct
  misc_feature 1..21: note = Description of Artificial Sequence: Synthetic oligonucleotide
  source 1..21: mol_type = other DNA
actaagtctaatggtaatact

SEQ ID NO: 23200 - DNA, 21 bp, synthetic construct
  misc_feature 1..21: note = Description of Artificial Sequence: Synthetic oligonucleotide
  source 1..21: mol_type = other DNA
gttggggcgactccggttcag

SEQ ID NO: 23201 - DNA, 21 bp, synthetic construct
  misc_feature 1..21: note = Description of Artificial Sequence: Synthetic oligonucleotide
  source 1..21: mol_type = other DNA
accaacgacagcaaaagcaaa

SEQ ID NO: 23202 - DNA, 21 bp, synthetic construct
  misc_feature 1..21: note = Description of Artificial Sequence: Synthetic oligonucleotide
  source 1..21: mol_type = other DNA
atggccagcaacagccccgtc

SEQ ID NO: 23203 - DNA, 21 bp, synthetic construct
  misc_feature 1..21: note = Description of Artificial Sequence: Synthetic oligonucleotide
  source 1..21: mol_type = other DNA
gagcctgcggacaagggtacg

SEQ ID NO: 23204 - DNA, 21 bp, synthetic construct
  misc_feature 1..21: note = Description of Artificial Sequence: Synthetic oligonucleotide
  source 1..21: mol_type = other DNA
gtcaccaccgccggcggcagc

SEQ ID NO: 23205 - DNA, 21 bp, synthetic construct
  misc_feature 1..21: note = Description of Artificial Sequence: Synthetic oligonucleotide
  source 1..21: mol_type = other DNA
gttagtactagttcgacgagg

SEQ ID NO: 23206 - DNA, 21 bp, synthetic construct
  misc_feature 1..21: note = Description of Artificial Sequence: Synthetic oligonucleotide
  source 1..21: mol_type = other DNA
gctaattcgactaagacgatg

SEQ ID NO: 23207 - DNA, 21 bp, synthetic construct
  misc_feature 1..21: note = Description of Artificial Sequence: Synthetic oligonucleotide
  source 1..21: mol_type = other DNA
gataaggttagggatactcag

SEQ ID NO: 23208 - DNA, 21 bp, synthetic construct
  misc_feature 1..21: note = Description of Artificial Sequence: Synthetic oligonucleotide
  source 1..21: mol_type = other DNA
ggccccgtcggcagcagccaa

SEQ ID NO: 23209 - DNA, 21 bp, synthetic construct
  misc_feature 1..21: note = Description of Artificial Sequence: Synthetic oligonucleotide
  source 1..21: mol_type = other DNA
atgaaaaccgaaagccaaatg

SEQ ID NO: 23210 - DNA, 21 bp, synthetic construct
  misc_feature 1..21: note = Description of Artificial Sequence: Synthetic oligonucleotide
  source 1..21: mol_type = other DNA
accaccgacaaaggcagagac

SEQ ID NO: 23211 - DNA, 21 bp, synthetic construct
  misc_feature 1..21: note = Description of Artificial Sequence: Synthetic oligonucleotide
  source 1..21: mol_type = other DNA
agacaaggcgacggcggcgtc

SEQ ID NO: 23212 - DNA, 21 bp, synthetic construct
  misc_feature 1..21: note = Description of Artificial Sequence: Synthetic oligonucleotide
  source 1..21: mol_type = other DNA
ggcagcagcaacagcgccagc

SEQ ID NO: 23213 - DNA, 21 bp, synthetic construct
  misc_feature 1..21: note = Description of Artificial Sequence: Synthetic oligonucleotide
  source 1..21: mol_type = other DNA
ggtcaggttggtactcatcct

SEQ ID NO: 23214 - DNA, 21 bp, synthetic construct
  misc_feature 1..21: note = Description of Artificial Sequence: Synthetic oligonucleotide
  source 1..21: mol_type = other DNA
tctgaggtggctcagaagtct

SEQ ID NO: 23215 - DNA, 21 bp, synthetic construct
  misc_feature 1..21: note = Description of Artificial Sequence: Synthetic oligonucleotide
  source 1..21: mol_type = other DNA
catggtactagttcgacttct

SEQ ID NO: 23216 - DNA, 21 bp, synthetic construct
  misc_feature 1..21: note = Description of Artificial Sequence: Synthetic oligonucleotide
  source 1..21: mol_type = other DNA
ggggctgaggggagtattcgg

SEQ ID NO: 23217 - DNA, 21 bp, synthetic construct
  misc_feature 1..21: note = Description of Artificial Sequence: Synthetic oligonucleotide
  source 1..21: mol_type = other DNA
ttcgaacaaggcagcagaagc

SEQ ID NO: 23218 - DNA, 21 bp, synthetic construct
  misc_feature 1..21: note = Description of Artificial Sequence: Synthetic oligonucleotide
  source 1..21: mol_type = other DNA
gccaacaaaagcagcgccatg

SEQ ID NO: 23219 - DNA, 21 bp, synthetic construct
  misc_feature 1..21: note = Description of Artificial Sequence: Synthetic oligonucleotide
  source 1..21: mol_type = other DNA
ctcgacaaaaacggcagcgcc

SEQ ID NO: 23220 - DNA, 21 bp, synthetic construct
  misc_feature 1..21: note = Description of Artificial Sequence: Synthetic oligonucleotide
  source 1..21: mol_type = other DNA
gaaaaaagcaacagcaacggc

SEQ ID NO: 23221 - DNA, 21 bp, synthetic construct
  misc_feature 1..21: note = Description of Artificial Sequence: Synthetic oligonucleotide
  source 1..21: mol_type = other DNA
ggttcgaatcagcggactact

SEQ ID NO: 23222 - DNA, 21 bp, synthetic construct
  misc_feature 1..21: note = Description of Artificial Sequence: Synthetic oligonucleotide
  source 1..21: mol_type = other DNA
agcggcagcagccccttcaaa

SEQ ID NO: 23223 - DNA, 21 bp, synthetic construct
  misc_feature 1..21: note = Description of Artificial Sequence: Synthetic oligonucleotide
  source 1..21: mol_type = other DNA
agaaacgccgaaaaagccgtc

SEQ ID NO: 23224 - DNA, 21 bp, synthetic construct
  misc_feature 1..21: note = Description of Artificial Sequence: Synthetic oligonucleotide
  source 1..21: mol_type = other DNA
agccaagaaaaaaacagcgcc

SEQ ID NO: 23225 - DNA, 21 bp, synthetic construct
  misc_feature 1..21: note = Description of Artificial Sequence: Synthetic oligonucleotide
  source 1..21: mol_type = other DNA
caaaacggcaaacaagccccc

SEQ ID NO: 23226 - DNA, 21 bp, synthetic construct
  misc_feature 1..21: note = Description of Artificial Sequence: Synthetic oligonucleotide
  source 1..21: mol_type = other DNA
cggcagaattctaaggatact

SEQ ID NO: 23227 - DNA, 21 bp, synthetic construct
  misc_feature 1..21: note = Description of Artificial Sequence: Synthetic oligonucleotide
  source 1..21: mol_type = other DNA
gccagcgaaaaagccagcctc

SEQ ID NO: 23228 - DNA, 21 bp, synthetic construct
  misc_feature 1..21: note = Description of Artificial Sequence: Synthetic oligonucleotide
  source 1..21: mol_type = other DNA
ctcggcagcaacagccccacc

SEQ ID NO: 23229 - DNA, 21 bp, synthetic construct
  misc_feature 1..21: note = Description of Artificial Sequence: Synthetic oligonucleotide
  source 1..21: mol_type = other DNA
actagtgagagtaagtcggcg

SEQ ID NO: 23230 - DNA, 21 bp, synthetic construct
  misc_feature 1..21: note = Description of Artificial Sequence: Synthetic oligonucleotide
  source 1..21: mol_type = other DNA
aacgccggcgcccaaaacaga

SEQ ID NO: 23231 - DNA, 21 bp, synthetic construct
  misc_feature 1..21: note = Description of Artificial Sequence: Synthetic oligonucleotide
  source 1..21: mol_type = other DNA
atgagcaccagcggccaccac

SEQ ID NO: 23232 - DNA, 21 bp, synthetic construct
  misc_feature 1..21: note = Description of Artificial Sequence: Synthetic oligonucleotide
  source 1..21: mol_type = other DNA
caaggccccgaaagaggcggc

SEQ ID NO: 23233 - DNA, 21 bp, synthetic construct
  misc_feature 1..21: note = Description of Artificial Sequence: Synthetic oligonucleotide
  source 1..21: mol_type = other DNA
cttggtcatggtaatcatagt

SEQ ID NO: 23234 - DNA, 21 bp, synthetic construct
  misc_feature 1..21: note = Description of Artificial Sequence: Synthetic oligonucleotide
  source 1..21: mol_type = other DNA
gaaagcgtcgacagaagcaga

SEQ ID NO: 23235 - DNA, 21 bp, synthetic construct
  misc_feature 1..21: note = Description of Artificial Sequence: Synthetic oligonucleotide
  source 1..21: mol_type = other DNA
gccagaagccccggcagcggc

SEQ ID NO: 23236 - DNA, 21 bp, synthetic construct
  misc_feature 1..21: note = Description of Artificial Sequence: Synthetic oligonucleotide
  source 1..21: mol_type = other DNA
gtcagcaaccccggcaaccaa

SEQ ID NO: 23237 - DNA, 21 bp, synthetic construct
  misc_feature 1..21: note = Description of Artificial Sequence: Synthetic oligonucleotide
  source 1..21: mol_type = other DNA
ggtactactgattctcgtgct

SEQ ID NO: 23238 - DNA, 21 bp, synthetic construct
  misc_feature 1..21: note = Description of Artificial Sequence: Synthetic oligonucleotide
  source 1..21: mol_type = other DNA
gcggggaataatgatcagaag

SEQ ID NO: 23239 - DNA, 21 bp, synthetic construct
  misc_feature 1..21: note = Description of Artificial Sequence: Synthetic oligonucleotide
  source 1..21: mol_type = other DNA
acgcctgctgttaataatgtt

SEQ ID NO: 23240 - DNA, 21 bp, synthetic construct
  misc_feature 1..21: note = Description of Artificial Sequence: Synthetic oligonucleotide
  source 1..21: mol_type = other DNA
catcgtaatacggatgttagt

SEQ ID NO: 23241 - DNA, 21 bp, synthetic construct
  misc_feature 1..21: note = Description of Artificial Sequence: Synthetic oligonucleotide
  source 1..21: mol_type = other DNA
gatatgaatagtgtgagtaag

SEQ ID NO: 23242 - DNA, 21 bp, synthetic construct
  misc_feature 1..21: note = Description of Artificial Sequence: Synthetic oligonucleotide
  source 1..21: mol_type = other DNA
ggcagcgaaagcggcagccac

SEQ ID NO: 23243 - DNA, 21 bp, synthetic construct
  misc_feature 1..21: note = Description of Artificial Sequence: Synthetic oligonucleotide
  source 1..21: mol_type = other DNA
gccgtcggcgccagcagcagc

SEQ ID NO: 23244 - DNA, 21 bp, synthetic construct
  misc_feature 1..21: note = Description of Artificial Sequence: Synthetic oligonucleotide
  source 1..21: mol_type = other DNA
cagccgtctcagactcctaag

SEQ ID NO: 23245 - DNA, 21 bp, synthetic construct
  misc_feature 1..21: note = Description of Artificial Sequence: Synthetic oligonucleotide
  source 1..21: mol_type = other DNA
tctcctaatcagccgagtgcg

SEQ ID NO: 23246 - DNA, 21 bp, synthetic construct
  misc_feature 1..21: note = Description of Artificial Sequence: Synthetic oligonucleotide
  source 1..21: mol_type = other DNA
gccgacggcggcaaaaccaac

SEQ ID NO: 23247 - DNA, 21 bp, synthetic construct
  misc_feature 1..21: note = Description of Artificial Sequence: Synthetic oligonucleotide
  source 1..21: mol_type = other DNA
aaaggcgccagcgccagcatg

SEQ ID NO: 23248 - DNA, 21 bp, synthetic construct
  misc_feature 1..21: note = Description of Artificial Sequence: Synthetic oligonucleotide
  source 1..21: mol_type = other DNA
aacagccccagcaaaagcacc

SEQ ID NO: 23249 - DNA, 21 bp, synthetic construct
  misc_feature 1..21: note = Description of Artificial Sequence: Synthetic oligonucleotide
  source 1..21: mol_type = other DNA
acgatggatagtaggagggat

SEQ ID NO: 23250 - DNA, 21 bp, synthetic construct
  misc_feature 1..21: note = Description of Artificial Sequence: Synthetic oligonucleotide
  source 1..21: mol_type = other DNA
acttcgggtttgactagtacg

SEQ ID NO: 23251 - DNA, 21 bp, synthetic construct
  misc_feature 1..21: note = Description of Artificial Sequence: Synthetic oligonucleotide
  source 1..21: mol_type = other DNA
agcagcagcagcaccggcggc

SEQ ID NO: 23252 - DNA, 21 bp, synthetic construct
  misc_feature 1..21: note = Description of Artificial Sequence: Synthetic oligonucleotide
  source 1..21: mol_type = other DNA
agcccccccggcagcaaaagc

SEQ ID NO: 23253 - DNA, 21 bp, synthetic construct
  misc_feature 1..21: note = Description of Artificial Sequence: Synthetic oligonucleotide
  source 1..21: mol_type = other DNA
agtggtaatccgactaaggtt

SEQ ID NO: 23254 - DNA, 21 bp, synthetic construct
  misc_feature 1..21: note = Description of Artificial Sequence: Synthetic oligonucleotide
  source 1..21: mol_type = other DNA
gaaggcctcagccaaagcaga

SEQ ID NO: 23255 - DNA, 21 bp, synthetic construct
  misc_feature 1..21: note = Description of Artificial Sequence: Synthetic oligonucleotide
  source 1..21: mol_type = other DNA
gatacgggggtgcagagtagg

SEQ ID NO: 23256 - DNA, 21 bp, synthetic construct
  misc_feature 1..21: note = Description of Artificial Sequence: Synthetic oligonucleotide
  source 1..21: mol_type = other DNA
gatggggttcagacggctaat

SEQ ID NO: 23257 - DNA, 21 bp, synthetic construct
  misc_feature 1..21: note = Description of Artificial Sequence: Synthetic oligonucleotide
  source 1..21: mol_type = other DNA
ggcggcagcgcccaagaaaga

SEQ ID NO: 23258 - DNA, 21 bp, synthetic construct
  misc_feature 1..21: note = Description of Artificial Sequence: Synthetic oligonucleotide
  source 1..21: mol_type = other DNA
ggggctgggtctacttctaag

SEQ ID NO: 23259 - DNA, 21 bp, synthetic construct
  misc_feature 1..21: note = Description of Artificial Sequence: Synthetic oligonucleotide
  source 1..21: mol_type = other DNA
tcttcgtctggttctactcag

SEQ ID NO: 23260 - DNA, 21 bp, synthetic construct
  misc_feature 1..21: note = Description of Artificial Sequence: Synthetic oligonucleotide
  source 1..21: mol_type = other DNA
gccagcgtccccaccagcagc

SEQ ID NO: 23261 - DNA, 21 bp, synthetic construct
  misc_feature 1..21: note = Description of Artificial Sequence: Synthetic oligonucleotide
  source 1..21: mol_type = other DNA
gcggtgagtaagaatacgttg

SEQ ID NO: 23262 - DNA, 21 bp, synthetic construct
  misc_feature 1..21: note = Description of Artificial Sequence: Synthetic oligonucleotide
  source 1..21: mol_type = other DNA
tcgcatactccgcctaatggg

SEQ ID NO: 23263 - DNA, 21 bp, synthetic construct
  misc_feature 1..21: note = Description of Artificial Sequence: Synthetic oligonucleotide
  source 1..21: mol_type = other DNA
accggcgtcgacaccaacaga

SEQ ID NO: 23264 - DNA, 21 bp, synthetic construct
  misc_feature 1..21: note = Description of Artificial Sequence: Synthetic oligonucleotide
  source 1..21: mol_type = other DNA
aatcagggtgggaagggtgat

SEQ ID NO: 23265 - DNA, 21 bp, synthetic construct
  misc_feature 1..21: note = Description of Artificial Sequence: Synthetic oligonucleotide
  source 1..21: mol_type = other DNA
agcaacagcaccgtccacacc

SEQ ID NO: 23266 - DNA, 21 bp, synthetic construct
  misc_feature 1..21: note = Description of Artificial Sequence: Synthetic oligonucleotide
  source 1..21: mol_type = other DNA
agcagcaacaaacccggcctc

SEQ ID NO: 23267 - DNA, 21 bp, synthetic construct
  misc_feature 1..21: note = Description of Artificial Sequence: Synthetic oligonucleotide
  source 1..21: mol_type = other DNA
agcagcggcaaacccaacggc

SEQ ID NO: 23268 - DNA, 21 bp, synthetic construct
  misc_feature 1..21: note = Description of Artificial Sequence: Synthetic oligonucleotide
  source 1..21: mol_type = other DNA
agcagcggccccagcggcaga

SEQ ID NO: 23269 - DNA, 21 bp, synthetic construct
  misc_feature 1..21: note = Description of Artificial Sequence: Synthetic oligonucleotide
  source 1..21: mol_type = other DNA
gagaagttgtctactgcggct

SEQ ID NO: 23270 - DNA, 21 bp, synthetic construct
  misc_feature 1..21: note = Description of Artificial Sequence: Synthetic oligonucleotide
  source 1..21: mol_type = other DNA
gatacgagttctcttgctaag

SEQ ID NO: 23271 - DNA, 21 bp, synthetic construct
  misc_feature 1..21: note = Description of Artificial Sequence: Synthetic oligonucleotide
  source 1..21: mol_type = other DNA
tgcgccagcaaagacagcaga

SEQ ID NO: 23272 - DNA, 21 bp, synthetic construct
  misc_feature 1..21: note = Description of Artificial Sequence: Synthetic oligonucleotide
  source 1..21: mol_type = other DNA
actgcttctgggcataataat

SEQ ID NO: 23273 - DNA, 21 bp, synthetic construct
  misc_feature 1..21: note = Description of Artificial Sequence: Synthetic oligonucleotide
  source 1..21: mol_type = other DNA
agtaattctactccgtcgctg

SEQ ID NO: 23274 - DNA, 21 bp, synthetic construct
  misc_feature 1..21: note = Description of Artificial Sequence: Synthetic oligonucleotide
  source 1..21: mol_type = other DNA
caacccaccaacaccagcaaa

SEQ ID NO: 23275 - DNA, 21 bp, synthetic construct
  misc_feature 1..21: note = Description of Artificial Sequence: Synthetic oligonucleotide
  source 1..21: mol_type = other DNA
gccgaccaaaaaggcagcacc

SEQ ID NO: 23276 - DNA, 21 bp, synthetic construct
  misc_feature 1..21: note = Description of Artificial Sequence: Synthetic oligonucleotide
  source 1..21: mol_type = other DNA
cggagtaatggtacgacgcag

SEQ ID NO: 23277 - DNA, 21 bp, synthetic construct
  misc_feature 1..21: note = Description of Artificial Sequence: Synthetic oligonucleotide
  source 1..21: mol_type = other DNA
agaaccgaaggcagcggcggc

SEQ ID NO: 23278 - DNA, 21 bp, synthetic construct
  misc_feature 1..21: note = Description of Artificial Sequence: Synthetic oligonucleotide
  source 1..21: mol_type = other DNA
agcggcagcgaacccagaaaa

SEQ ID NO: 23279 - DNA, 21 bp, synthetic construct
  misc_feature 1..21: note = Description of Artificial Sequence: Synthetic oligonucleotide
  source 1..21: mol_type = other DNA
gacaccagcgcccaaagaagc

SEQ ID NO: 23280 - DNA, 21 bp, synthetic construct
  misc_feature 1..21: note = Description of Artificial Sequence: Synthetic oligonucleotide
  source 1..21: mol_type = other DNA
gacagaaccaaaaacgtcggc

SEQ ID NO: 23281 - DNA, 21 bp, synthetic construct
  misc_feature 1..21: note = Description of Artificial Sequence: Synthetic oligonucleotide
  source 1..21: mol_type = other DNA
gacgccggcagcagccccaga

SEQ ID NO: 23282 - DNA, 21 bp, synthetic construct
  misc_feature 1..21: note = Description of Artificial Sequence: Synthetic oligonucleotide
  source 1..21: mol_type = other DNA
ggcaccgtcgccagagacggc

SEQ ID NO: 23283 - DNA, 21 bp, synthetic construct
  misc_feature 1..21: note = Description of Artificial Sequence: Synthetic oligonucleotide
  source 1..21: mol_type = other DNA
ggcgtccaaacccccaaccac

SEQ ID NO: 23284 - DNA, 21 bp, synthetic construct
  misc_feature 1..21: note = Description of Artificial Sequence: Synthetic oligonucleotide
  source 1..21: mol_type = other DNA
ggtcttagtaattctaatcgt

SEQ ID NO: 23285 - DNA, 21 bp, synthetic construct
  misc_feature 1..21: note = Description of Artificial Sequence: Synthetic oligonucleotide
  source 1..21: mol_type = other DNA
gttacgtcttcttcggtgttg

SEQ ID NO: 23286 - DNA, 21 bp, synthetic construct
  misc_feature 1..21: note = Description of Artificial Sequence: Synthetic oligonucleotide
  source 1..21: mol_type = other DNA
ttgcattctgatcctcattct

SEQ ID NO: 23287 - DNA, 21 bp, synthetic construct
  misc_feature 1..21: note = Description of Artificial Sequence: Synthetic oligonucleotide
  source 1..21: mol_type = other DNA
tttgggcagcagactgttaag

SEQ ID NO: 23288 - DNA, 21 bp, synthetic construct
  misc_feature 1..21: note = Description of Artificial Sequence: Synthetic oligonucleotide
  source 1..21: mol_type = other DNA
tctaataaggcgcagtctatt

SEQ ID NO: 23289 - DNA, 21 bp, synthetic construct
  misc_feature 1..21: note = Description of Artificial Sequence: Synthetic oligonucleotide
  source 1..21: mol_type = other DNA
gccagcaccagcagcaccgcc

SEQ ID NO: 23290 - DNA, 21 bp, synthetic construct
  misc_feature 1..21: note = Description of Artificial Sequence: Synthetic oligonucleotide
  source 1..21: mol_type = other DNA
tcgccttctcagtctcatggt

SEQ ID NO: 23291 - DNA, 21 bp, synthetic construct
  misc_feature 1..21: note = Description of Artificial Sequence: Synthetic oligonucleotide
  source 1..21: mol_type = other DNA
caaaaccacggcagcagcagc

SEQ ID NO: 23292 - DNA, 21 bp, synthetic construct
  misc_feature 1..21: note = Description of Artificial Sequence: Synthetic oligonucleotide
  source 1..21: mol_type = other DNA
gtcggcggcaaacccagcacc

SEQ ID NO: 23293 - DNA, 21 bp, synthetic construct
  misc_feature 1..21: note = Description of Artificial Sequence: Synthetic oligonucleotide
  source 1..21: mol_type = other DNA
agcagcgccagcaacagcagc

SEQ ID NO: 23294 - DNA, 21 bp, synthetic construct
  misc_feature 1..21: note = Description of Artificial Sequence: Synthetic oligonucleotide
  source 1..21: mol_type = other DNA
ttgaaggatagtgggagtagt

SEQ ID NO: 23295 - DNA, 21 bp, synthetic construct
  misc_feature 1..21: note = Description of Artificial Sequence: Synthetic oligonucleotide
  source 1..21: mol_type = other DNA
accaccgccagagacaccaac

SEQ ID NO: 23296 - DNA, 21 bp, synthetic construct
  misc_feature 1..21: note = Description of Artificial Sequence: Synthetic oligonucleotide
  source 1..21: mol_type = other DNA
accgccgtcccccacagcggc

SEQ ID NO: 23297 - DNA, 21 bp, synthetic construct
  misc_feature 1..21: note = Description of Artificial Sequence: Synthetic oligonucleotide
  source 1..21: mol_type = other DNA
agcaccaccggcagcaccagc

SEQ ID NO: 23298 - DNA, 21 bp, synthetic construct
  misc_feature 1..21: note = Description of Artificial Sequence: Synthetic oligonucleotide
  source 1..21: mol_type = other DNA
atgaacagccaaagccccagc

SEQ ID NO: 23299 - DNA, 21 bp, synthetic construct
  misc_feature 1..21: note = Description of Artificial Sequence: Synthetic oligonucleotide
  source 1..21: mol_type = other DNA
ccccccagcggccccaccaaa

SEQ ID NO: 23300 - DNA, 21 bp, synthetic construct
  misc_feature 1..21: note = Description of Artificial Sequence: Synthetic oligonucleotide
  source 1..21: mol_type = other DNA
tctagtgggggtcagccttct

SEQ ID NO: 23301 - DNA, 21 bp, synthetic construct
  misc_feature 1..21: note = Description of Artificial Sequence: Synthetic oligonucleotide
  source 1..21: mol_type = other DNA
tctagtacttctactcctcgt

SEQ ID NO: 23302 - DNA, 21 bp, synthetic construct
  misc_feature 1..21: note = Description of Artificial Sequence: Synthetic oligonucleotide
  source 1..21: mol_type = other DNA
gtgggtcagaagtcgtctatg

SEQ ID NO: 23303 - DNA, 21 bp, synthetic construct
  misc_feature 1..21: note = Description of Artificial Sequence: Synthetic oligonucleotide
  source 1..21: mol_type = other DNA
gatgagggtggtccgcatagg

SEQ ID NO: 23304 - DNA, 21 bp, synthetic construct
  misc_feature 1..21: note = Description of Artificial Sequence: Synthetic oligonucleotide
  source 1..21: mol_type = other DNA
aacgccaccagaaccagcagc

SEQ ID NO: 23305 - DNA, 21 bp, synthetic construct
  misc_feature 1..21: note = Description of Artificial Sequence: Synthetic oligonucleotide
  source 1..21: mol_type = other DNA
aacagaggcgccaccaaccaa

SEQ ID NO: 23306 - DNA, 21 bp, synthetic construct
  misc_feature 1..21: note = Description of Artificial Sequence: Synthetic oligonucleotide
  source 1..21: mol_type = other DNA
agcaccagaagcagcaccagc

SEQ ID NO: 23307 - DNA, 21 bp, synthetic construct
  misc_feature 1..21: note = Description of Artificial Sequence: Synthetic oligonucleotide
  source 1..21: mol_type = other DNA
gtgggtactccgtctaaggag

SEQ ID NO: 23308 - DNA, 21 bp, synthetic construct
  misc_feature 1..21: note = Description of Artificial Sequence: Synthetic oligonucleotide
  source 1..21: mol_type = other DNA
ctgtcgacggcgaagtcgtcg

SEQ ID NO: 23309 - DNA, 21 bp, synthetic construct
  misc_feature 1..21: note = Description of Artificial Sequence: Synthetic oligonucleotide
  source 1..21: mol_type = other DNA
aagctgagtggtagttcttcg

SEQ ID NO: 23310 - DNA, 21 bp, synthetic construct
  misc_feature 1..21: note = Description of Artificial Sequence: Synthetic oligonucleotide
  source 1..21: mol_type = other DNA
accctcggcggcaaccacatg

SEQ ID NO: 23311 - DNA, 21 bp, synthetic construct
  misc_feature 1..21: note = Description of Artificial Sequence: Synthetic oligonucleotide
  source 1..21: mol_type = other DNA
agcaacggcagcgacagaaac

SEQ ID NO: 23312 - DNA, 21 bp, synthetic construct
  misc_feature 1..21: note = Description of Artificial Sequence: Synthetic oligonucleotide
  source 1..21: mol_type = other DNA
caacaaagcggccaaaacatc

SEQ ID NO: 23313 - DNA, 21 bp, synthetic construct
  misc_feature 1..21: note = Description of Artificial Sequence: Synthetic oligonucleotide
  source 1..21: mol_type = other DNA
gataagagtggtcagagtcgg

SEQ ID NO: 23314 - DNA, 21 bp, synthetic construct
  misc_feature 1..21: note = Description of Artificial Sequence: Synthetic oligonucleotide
  source 1..21: mol_type = other DNA
gccggcaacaccatgggcagc

SEQ ID NO: 23315 - DNA, 21 bp, synthetic construct
  misc_feature 1..21: note = Description of Artificial Sequence: Synthetic oligonucleotide
  source 1..21: mol_type = other DNA
gctatgggtgagcagcgggct

SEQ ID NO: 23316 - DNA, 21 bp, synthetic construct
  misc_feature 1..21: note = Description of Artificial Sequence: Synthetic oligonucleotide
  source 1..21: mol_type = other DNA
gtccacgcccaagaccaacac

SEQ ID NO: 23317 - DNA, 21 bp, synthetic construct
  misc_feature 1..21: note = Description of Artificial Sequence: Synthetic oligonucleotide
  source 1..21: mol_type = other DNA
tttgataatcagcctacgtcg

SEQ ID NO: 23318 - DNA, 21 bp, synthetic construct
  misc_feature 1..21: note = Description of Artificial Sequence: Synthetic oligonucleotide
  source 1..21: mol_type = other DNA
cacagcagcgccgaaagcaga

SEQ ID NO: 23319 - DNA, 21 bp, synthetic construct
  misc_feature 1..21: note = Description of Artificial Sequence: Synthetic oligonucleotide
  source 1..21: mol_type = other DNA
cacggcagcccccaaaacgaa

SEQ ID NO: 23320 - DNA, 21 bp, synthetic construct
  misc_feature 1..21: note = Description of Artificial Sequence: Synthetic oligonucleotide
  source 1..21: mol_type = other DNA
ctttctgatggggcgattaag

SEQ ID NO: 23321 - DNA, 21 bp, synthetic construct
  misc_feature 1..21: note = Description of Artificial Sequence: Synthetic oligonucleotide
  source 1..21: mol_type = other DNA
gacagcggcgacgccagagtc

SEQ ID NO: 23322 - DNA, 21 bp, synthetic construct
  misc_feature 1..21: note = Description of Artificial Sequence: Synthetic oligonucleotide
  source 1..21: mol_type = other DNA
ggtacgggttcgcagaggtcg

SEQ ID NO: 23323 - DNA, 21 bp, synthetic construct
  misc_feature 1..21: note = Description of Artificial Sequence: Synthetic oligonucleotide
  source 1..21: mol_type = other DNA
ggtactgataaggctatgggt

SEQ ID NO: 23324 - DNA, 21 bp, synthetic construct
  misc_feature 1..21: note = Description of Artificial Sequence: Synthetic oligonucleotide
  source 1..21: mol_type = other DNA
ggtctgactactccgaataat

SEQ ID NO: 23325 - DNA, 21 bp, synthetic construct
  misc_feature 1..21: note = Description of Artificial Sequence: Synthetic oligonucleotide
  source 1..21: mol_type = other DNA
gtccccggcgtcagccaaccc

SEQ ID NO: 23326 - DNA, 21 bp, synthetic construct
  misc_feature 1..21: note = Description of Artificial Sequence: Synthetic oligonucleotide
  source 1..21: mol_type = other DNA
tcggggagttcgggtacgagg

SEQ ID NO: 23327 - DNA, 21 bp, synthetic construct
  misc_feature 1..21: note = Description of Artificial Sequence: Synthetic oligonucleotide
  source 1..21: mol_type = other DNA
accatcaacagcggcccccac

SEQ ID NO: 23328 - DNA, 21 bp, synthetic construct
  misc_feature 1..21: note = Description of Artificial Sequence: Synthetic oligonucleotide
  source 1..21: mol_type = other DNA
gagagggcgacgggtactgct

SEQ ID NO: 23329 - DNA, 21 bp, synthetic construct
  misc_feature 1..21: note = Description of Artificial Sequence: Synthetic oligonucleotide
  source 1..21: mol_type = other DNA
ggcatcaccggcaccaacgcc

SEQ ID NO: 23330 - DNA, 21 bp, synthetic construct
  misc_feature 1..21: note = Description of Artificial Sequence: Synthetic oligonucleotide
  source 1..21: mol_type = other DNA
agtacggcgtctggtgtgtcg

SEQ ID NO: 23331 - DNA, 21 bp, synthetic construct
  misc_feature 1..21: note = Description of Artificial Sequence: Synthetic oligonucleotide
  source 1..21: mol_type = other DNA
ggcagccccccccccgtcaaa

SEQ ID NO: 23332 - DNA, 21 bp, synthetic construct
  misc_feature 1..21: note = Description of Artificial Sequence: Synthetic oligonucleotide
  source 1..21: mol_type = other DNA
ggcagcgccggcaaactcagc

SEQ ID NO: 23333 - DNA, 21 bp, synthetic construct
  misc_feature 1..21: note = Description of Artificial Sequence: Synthetic oligonucleotide
  source 1..21: mol_type = other DNA
aagactggtgcggataatgct

SEQ ID NO: 23334 - DNA, 21 bp, synthetic construct
  misc_feature 1..21: note = Description of Artificial Sequence: Synthetic oligonucleotide
  source 1..21: mol_type = other DNA
agagacagcaccaaccccaaa

SEQ ID NO: 23335 - DNA, 21 bp, synthetic construct
  misc_feature 1..21: note = Description of Artificial Sequence: Synthetic oligonucleotide
  source 1..21: mol_type = other DNA
agagtcggcagcagcacccaa

SEQ ID NO: 23336 - DNA, 21 bp, synthetic construct
  misc_feature 1..21: note = Description of Artificial Sequence: Synthetic oligonucleotide
  source 1..21: mol_type = other DNA
agcgccagcagccaacccagc

SEQ ID NO: 23337 - DNA, 21 bp, synthetic construct
  misc_feature 1..21: note = Description of Artificial Sequence: Synthetic oligonucleotide
  source 1..21: mol_type = other DNA
agcggcatcgaacaaaaaaaa

SEQ ID NO: 23338 - DNA, 21 bp, synthetic construct
  misc_feature 1..21: note = Description of Artificial Sequence: Synthetic oligonucleotide
  source 1..21: mol_type = other DNA
aggacgacggatcagcagtct

SEQ ID NO: 23339 - DNA, 21 bp, synthetic construct
  misc_feature 1..21: note = Description of Artificial Sequence: Synthetic oligonucleotide
  source 1..21: mol_type = other DNA
atcgccggcaccagcagcagc

SEQ ID NO: 23340 - DNA, 21 bp, synthetic construct
  misc_feature 1..21: note = Description of Artificial Sequence: Synthetic oligonucleotide
  source 1..21: mol_type = other DNA
cacggcagcgccagccaaggc

SEQ ID NO: 23341 - DNA, 21 bp, synthetic construct
  misc_feature 1..21: note = Description of Artificial Sequence: Synthetic oligonucleotide
  source 1..21: mol_type = other DNA
cagctgggtactaaggaggct

SEQ ID NO: 23342 - DNA, 21 bp, synthetic construct
  misc_feature 1..21: note = Description of Artificial Sequence: Synthetic oligonucleotide
  source 1..21: mol_type = other DNA
cataatggggatcggaatgtg

SEQ ID NO: 23343 - DNA, 21 bp, synthetic construct
  misc_feature 1..21: note = Description of Artificial Sequence: Synthetic oligonucleotide
  source 1..21: mol_type = other DNA
ctcagaagcaccgaaaccaaa

SEQ ID NO: 23344 - DNA, 21 bp, synthetic construct
  misc_feature 1..21: note = Description of Artificial Sequence: Synthetic oligonucleotide
  source 1..21: mol_type = other DNA
ggcagccaaaccagccccatg

SEQ ID NO: 23345 - DNA, 21 bp, synthetic construct
  misc_feature 1..21: note = Description of Artificial Sequence: Synthetic oligonucleotide
  source 1..21: mol_type = other DNA
aacgtcgaccacgccgccaaa

SEQ ID NO: 23346 - DNA, 21 bp, synthetic construct
  misc_feature 1..21: note = Description of Artificial Sequence: Synthetic oligonucleotide
  source 1..21: mol_type = other DNA
accggcgtcaacggcgccacc

SEQ ID NO: 23347 - DNA, 21 bp, synthetic construct
  misc_feature 1..21: note = Description of Artificial Sequence: Synthetic oligonucleotide
  source 1..21: mol_type = other DNA
gatgggcttaagtctactggg

SEQ ID NO: 23348 - DNA, 21 bp, synthetic construct
  misc_feature 1..21: note = Description of Artificial Sequence: Synthetic oligonucleotide
  source 1..21: mol_type = other DNA
gttacgtctaatagtccgaag

SEQ ID NO: 23349 - DNA, 21 bp, synthetic construct
  misc_feature 1..21: note = Description of Artificial Sequence: Synthetic oligonucleotide
  source 1..21: mol_type = other DNA
agcggcaccgaacacagcaga

SEQ ID NO: 23350 - DNA, 21 bp, synthetic construct
  misc_feature 1..21: note = Description of Artificial Sequence: Synthetic oligonucleotide
  source 1..21: mol_type = other DNA
aaccaaagacccagcgtcgaa

SEQ ID NO: 23351 - DNA, 21 bp, synthetic construct
  misc_feature 1..21: note = Description of Artificial Sequence: Synthetic oligonucleotide
  source 1..21: mol_type = other DNA
actacttctagtccgcgtttg

SEQ ID NO: 23352 - DNA, 21 bp, synthetic construct
  misc_feature 1..21: note = Description of Artificial Sequence: Synthetic oligonucleotide
  source 1..21: mol_type = other DNA
gatgctctgaagactaatacg

SEQ ID NO: 23353 - DNA, 21 bp, synthetic construct
  misc_feature 1..21: note = Description of Artificial Sequence: Synthetic oligonucleotide
  source 1..21: mol_type = other DNA
ctcagaaacggcaccagcgcc

SEQ ID NO: 23354 - DNA, 21 bp, synthetic construct
  misc_feature 1..21: note = Description of Artificial Sequence: Synthetic oligonucleotide
  source 1..21: mol_type = other DNA
agcagcaccgaaaaaagcacc

SEQ ID NO: 23355 - DNA, 21 bp, synthetic construct
  misc_feature 1..21: note = Description of Artificial Sequence: Synthetic oligonucleotide
  source 1..21: mol_type = other DNA
agcggcgtcccccccgccgcc

SEQ ID NO: 23356 - DNA, 21 bp, synthetic construct
  misc_feature 1..21: note = Description of Artificial Sequence: Synthetic oligonucleotide
  source 1..21: mol_type = other DNA
agtcggaatggtactttggcg

SEQ ID NO: 23357 - DNA, 21 bp, synthetic construct
  misc_feature 1..21: note = Description of Artificial Sequence: Synthetic oligonucleotide
  source 1..21: mol_type = other DNA
atcgacaaaggcaccaccctc

SEQ ID NO: 23358 - DNA, 21 bp, synthetic construct
  misc_feature 1..21: note = Description of Artificial Sequence: Synthetic oligonucleotide
  source 1..21: mol_type = other DNA
cagcgtcaggatacgactaat

SEQ ID NO: 23359 - DNA, 21 bp, synthetic construct
  misc_feature 1..21: note = Description of Artificial Sequence: Synthetic oligonucleotide
  source 1..21: mol_type = other DNA
gtccaagaacccaaaatgcaa

SEQ ID NO: 23360 - DNA, 21 bp, synthetic construct
  misc_feature 1..21: note = Description of Artificial Sequence: Synthetic oligonucleotide
  source 1..21: mol_type = other DNA
aacgtcgaaaccagcagcaaa

SEQ ID NO: 23361 - DNA, 21 bp, synthetic construct
  misc_feature 1..21: note = Description of Artificial Sequence: Synthetic oligonucleotide
  source 1..21: mol_type = other DNA
agccccgccagccaccccgtc

SEQ ID NO: 23362 - DNA, 21 bp, synthetic construct
  misc_feature 1..21: note = Description of Artificial Sequence: Synthetic oligonucleotide
  source 1..21: mol_type = other DNA
cagaagggttctgatattgct

SEQ ID NO: 23363 - DNA, 21 bp, synthetic construct
  misc_feature 1..21: note = Description of Artificial Sequence: Synthetic oligonucleotide
  source 1..21: mol_type = other DNA
ctcagagacagcaacaacaaa

SEQ ID NO: 23364 - DNA, 21 bp, synthetic construct
  misc_feature 1..21: note = Description of Artificial Sequence: Synthetic oligonucleotide
  source 1..21: mol_type = other DNA
tctggtggtgatcctcagagg

SEQ ID NO: 23365 - DNA, 21 bp, synthetic construct
  misc_feature 1..21: note = Description of Artificial Sequence: Synthetic oligonucleotide
  source 1..21: mol_type = other DNA
ttgtcttctgagaagacgtcg

SEQ ID NO: 23366 - DNA, 21 bp, synthetic construct
  misc_feature 1..21: note = Description of Artificial Sequence: Synthetic oligonucleotide
  source 1..21: mol_type = other DNA
aataagacggatcgtcctacg

SEQ ID NO: 23367 - DNA, 21 bp, synthetic construct
  misc_feature 1..21: note = Description of Artificial Sequence: Synthetic oligonucleotide
  source 1..21: mol_type = other DNA
atgagcaccaacagcccccaa

SEQ ID NO: 23368 - DNA, 21 bp, synthetic construct
  misc_feature 1..21: note = Description of Artificial Sequence: Synthetic oligonucleotide
  source 1..21: mol_type = other DNA
aatggtcagggtgtgcagcag

SEQ ID NO: 23369 - DNA, 21 bp, synthetic construct
  misc_feature 1..21: note = Description of Artificial Sequence: Synthetic oligonucleotide
  source 1..21: mol_type = other DNA
aattcgggtgtgtcgcctgct

SEQ ID NO: 23370 - DNA, 21 bp, synthetic construct
  misc_feature 1..21: note = Description of Artificial Sequence: Synthetic oligonucleotide
  source 1..21: mol_type = other DNA
agcaaagtccaacaagccacc

SEQ ID NO: 23371 - DNA, 21 bp, synthetic construct
  misc_feature 1..21: note = Description of Artificial Sequence: Synthetic oligonucleotide
  source 1..21: mol_type = other DNA
cagtcgaaggttccggtttcg

SEQ ID NO: 23372 - DNA, 21 bp, synthetic construct
  misc_feature 1..21: note = Description of Artificial Sequence: Synthetic oligonucleotide
  source 1..21: mol_type = other DNA
gaaagcaccgcccacgccacc

SEQ ID NO: 23373 - DNA, 21 bp, synthetic construct
  misc_feature 1..21: note = Description of Artificial Sequence: Synthetic oligonucleotide
  source 1..21: mol_type = other DNA
gacggcgccgtcagccacggc

SEQ ID NO: 23374 - DNA, 21 bp, synthetic construct
  misc_feature 1..21: note = Description of Artificial Sequence: Synthetic oligonucleotide
  source 1..21: mol_type = other DNA
gagggggttcaggctaggggt

SEQ ID NO: 23375 - DNA, 21 bp, synthetic construct
  misc_feature 1..21: note = Description of Artificial Sequence: Synthetic oligonucleotide
  source 1..21: mol_type = other DNA
gccctcagcagcagcaaagcc

SEQ ID NO: 23376 - DNA, 21 bp, synthetic construct
  misc_feature 1..21: note = Description of Artificial Sequence: Synthetic oligonucleotide
  source 1..21: mol_type = other DNA
gcttttggtaagagttctgcg

SEQ ID NO: 23377 - DNA, 21 bp, synthetic construct
  misc_feature 1..21: note = Description of Artificial Sequence: Synthetic oligonucleotide
  source 1..21: mol_type = other DNA
ggcagcaaaggcagccaaatg

SEQ ID NO: 23378 - DNA, 21 bp, synthetic construct
  misc_feature 1..21: note = Description of Artificial Sequence: Synthetic oligonucleotide
  source 1..21: mol_type = other DNA
ggggttcatgaggcgaagagg

SEQ ID NO: 23379 - DNA, 21 bp, synthetic construct
  misc_feature 1..21: note = Description of Artificial Sequence: Synthetic oligonucleotide
  source 1..21: mol_type = other DNA
ggtagtaataaggttgttgct

SEQ ID NO: 23380 - DNA, 21 bp, synthetic construct
  misc_feature 1..21: note = Description of Artificial Sequence: Synthetic oligonucleotide
  source 1..21: mol_type = other DNA
tctatgaataaggataggctg

SEQ ID NO: 23381 - DNA, 21 bp, synthetic construct
  misc_feature 1..21: note = Description of Artificial Sequence: Synthetic oligonucleotide
  source 1..21: mol_type = other DNA
accagcgacgtcaaaaccctc

SEQ ID NO: 23382 - DNA, 21 bp, synthetic construct
  misc_feature 1..21: note = Description of Artificial Sequence: Synthetic oligonucleotide
  source 1..21: mol_type = other DNA
aacgccagcaaagacctcaga

SEQ ID NO: 23383 - DNA, 21 bp, synthetic construct
  misc_feature 1..21: note = Description of Artificial Sequence: Synthetic oligonucleotide
  source 1..21: mol_type = other DNA
gtgtcgggtccttctgcgact

SEQ ID NO: 23384 - DNA, 21 bp, synthetic construct
  misc_feature 1..21: note = Description of Artificial Sequence: Synthetic oligonucleotide
  source 1..21: mol_type = other DNA
ggcagcaaagaacacggcagc

SEQ ID NO: 23385 - DNA, 21 bp, synthetic construct
  misc_feature 1..21: note = Description of Artificial Sequence: Synthetic oligonucleotide
  source 1..21: mol_type = other DNA
aatgatgggcttgctaatagt

SEQ ID NO: 23386 - DNA, 21 bp, synthetic construct
  misc_feature 1..21: note = Description of Artificial Sequence: Synthetic oligonucleotide
  source 1..21: mol_type = other DNA
accagccacgcccccagcatg

SEQ ID NO: 23387 - DNA, 21 bp, synthetic construct
  misc_feature 1..21: note = Description of Artificial Sequence: Synthetic oligonucleotide
  source 1..21: mol_type = other DNA
acttctggtccgtctattggg

SEQ ID NO: 23388 - DNA, 21 bp, synthetic construct
  misc_feature 1..21: note = Description of Artificial Sequence: Synthetic oligonucleotide
  source 1..21: mol_type = other DNA
agcgaaaccagaagcgccgtc

SEQ ID NO: 23389 - DNA, 21 bp, synthetic construct
  misc_feature 1..21: note = Description of Artificial Sequence: Synthetic oligonucleotide
  source 1..21: mol_type = other DNA
agtagtactgggtctccgggg

SEQ ID NO: 23390 - DNA, 21 bp, synthetic construct
  misc_feature 1..21: note = Description of Artificial Sequence: Synthetic oligonucleotide
  source 1..21: mol_type = other DNA
gaggcttttaaggatggtggt

SEQ ID NO: 23391 - DNA, 21 bp, synthetic construct
  misc_feature 1..21: note = Description of Artificial Sequence: Synthetic oligonucleotide
  source 1..21: mol_type = other DNA
gcgggtggggcgcctatgact

SEQ ID NO: 23392 - DNA, 21 bp, synthetic construct
  misc_feature 1..21: note = Description of Artificial Sequence: Synthetic oligonucleotide
  source 1..21: mol_type = other DNA
gtccccagcaccagcaccgcc

SEQ ID NO: 23393 - DNA, 21 bp, synthetic construct
  misc_feature 1..21: note = Description of Artificial Sequence: Synthetic oligonucleotide
  source 1..21: mol_type = other DNA
cagggtacggggcatgttgct

SEQ ID NO: 23394 - DNA, 21 bp, synthetic construct
  misc_feature 1..21: note = Description of Artificial Sequence: Synthetic oligonucleotide
  source 1..21: mol_type = other DNA
aaccaaggcgccaccctcggc

SEQ ID NO: 23395 - DNA, 21 bp, synthetic construct
  misc_feature 1..21: note = Description of Artificial Sequence: Synthetic oligonucleotide
  source 1..21: mol_type = other DNA
aacctcggcagcagcgccaac

SEQ ID NO: 23396 - DNA, 21 bp, synthetic construct
  misc_feature 1..21: note = Description of Artificial Sequence: Synthetic oligonucleotide
  source 1..21: mol_type = other DNA
accatcacccccaccagcgcc

SEQ ID NO: 23397 - DNA, 21 bp, synthetic construct
  misc_feature 1..21: note = Description of Artificial Sequence: Synthetic oligonucleotide
  source 1..21: mol_type = other DNA
agcctcggccaagccaccgcc

SEQ ID NO: 23398 - DNA, 21 bp, synthetic construct
  misc_feature 1..21: note = Description of Artificial Sequence: Synthetic oligonucleotide
  source 1..21: mol_type = other DNA
agtgaggggagggctacgggg

SEQ ID NO: 23399 - DNA, 21 bp, synthetic construct
  misc_feature 1..21: note = Description of Artificial Sequence: Synthetic oligonucleotide
  source 1..21: mol_type = other DNA
atgggtaataatactccgatg

SEQ ID NO: 23400 - DNA, 21 bp, synthetic construct
  misc_feature 1..21: note = Description of Artificial Sequence: Synthetic oligonucleotide
  source 1..21: mol_type = other DNA
gaaggccacagcaccgccctc

SEQ ID NO: 23401 - DNA, 21 bp, synthetic construct
  misc_feature 1..21: note = Description of Artificial Sequence: Synthetic oligonucleotide
  source 1..21: mol_type = other DNA
gctcttggtcaggataagaat

SEQ ID NO: 23402 - DNA, 21 bp, synthetic construct
  misc_feature 1..21: note = Description of Artificial Sequence: Synthetic oligonucleotide
  source 1..21: mol_type = other DNA
gggacgattaatacgtcttct

SEQ ID NO: 23403 - DNA, 21 bp, synthetic construct
  misc_feature 1..21: note = Description of Artificial Sequence: Synthetic oligonucleotide
  source 1..21: mol_type = other DNA
tctgctacgtctcagaatcat

SEQ ID NO: 23404 - DNA, 21 bp, synthetic construct
  misc_feature 1..21: note = Description of Artificial Sequence: Synthetic oligonucleotide
  source 1..21: mol_type = other DNA
gaggggaaggcgaataagggt

SEQ ID NO: 23405 - DNA, 21 bp, synthetic construct
  misc_feature 1..21: note = Description of Artificial Sequence: Synthetic oligonucleotide
  source 1..21: mol_type = other DNA
ctgcctgctcagaatgtgact

SEQ ID NO: 23406 - DNA, 21 bp, synthetic construct
  misc_feature 1..21: note = Description of Artificial Sequence: Synthetic oligonucleotide
  source 1..21: mol_type = other DNA
aacacccaaacccacagcaaa

SEQ ID NO: 23407 - DNA, 21 bp, synthetic construct
  misc_feature 1..21: note = Description of Artificial Sequence: Synthetic oligonucleotide
  source 1..21: mol_type = other DNA
agcctcaccaacaacggcaaa

SEQ ID NO: 23408 - DNA, 21 bp, synthetic construct
  misc_feature 1..21: note = Description of Artificial Sequence: Synthetic oligonucleotide
  source 1..21: mol_type = other DNA
agcgcccccaacggcgccgcc

SEQ ID NO: 23409 - DNA, 21 bp, synthetic construct
  misc_feature 1..21: note = Description of Artificial Sequence: Synthetic oligonucleotide
  source 1..21: mol_type = other DNA
cagcattctggttctagtgct

SEQ ID NO: 23410 - DNA, 21 bp, synthetic construct
  misc_feature 1..21: note = Description of Artificial Sequence: Synthetic oligonucleotide
  source 1..21: mol_type = other DNA
ggcagcgccagcacccccacc

SEQ ID NO: 23411 - DNA, 21 bp, synthetic construct
  misc_feature 1..21: note = Description of Artificial Sequence: Synthetic oligonucleotide
  source 1..21: mol_type = other DNA
ggttcttcgaatagtaatgct

SEQ ID NO: 23412 - DNA, 21 bp, synthetic construct
  misc_feature 1..21: note = Description of Artificial Sequence: Synthetic oligonucleotide
  source 1..21: mol_type = other DNA
gtgaatgggggtgcggtgcag

SEQ ID NO: 23413 - DNA, 21 bp, synthetic construct
  misc_feature 1..21: note = Description of Artificial Sequence: Synthetic oligonucleotide
  source 1..21: mol_type = other DNA
tcttcgggtaatcttggggct

SEQ ID NO: 23414 - DNA, 21 bp, synthetic construct
  misc_feature 1..21: note = Description of Artificial Sequence: Synthetic oligonucleotide
  source 1..21: mol_type = other DNA
aattctaagtcggctatgacg

SEQ ID NO: 23415 - DNA, 21 bp, synthetic construct
  misc_feature 1..21: note = Description of Artificial Sequence: Synthetic oligonucleotide
  source 1..21: mol_type = other DNA
aattcgcctaatagttcgtct

SEQ ID NO: 23416 - DNA, 21 bp, synthetic construct
  misc_feature 1..21: note = Description of Artificial Sequence: Synthetic oligonucleotide
  source 1..21: mol_type = other DNA
aacaccctccaaaccagccac

SEQ ID NO: 23417 - DNA, 21 bp, synthetic construct
  misc_feature 1..21: note = Description of Artificial Sequence: Synthetic oligonucleotide
  source 1..21: mol_type = other DNA
acccccagcaccagcagaggc

SEQ ID NO: 23418 - DNA, 21 bp, synthetic construct
  misc_feature 1..21: note = Description of Artificial Sequence: Synthetic oligonucleotide
  source 1..21: mol_type = other DNA
gaaagactccacgaaaccaga

SEQ ID NO: 23419 - DNA, 21 bp, synthetic construct
  misc_feature 1..21: note = Description of Artificial Sequence: Synthetic oligonucleotide
  source 1..21: mol_type = other DNA
gatcagacgacgggtaatcag

SEQ ID NO: 23420 - DNA, 21 bp, synthetic construct
  misc_feature 1..21: note = Description of Artificial Sequence: Synthetic oligonucleotide
  source 1..21: mol_type = other DNA
accaacagcgacagccccaga

SEQ ID NO: 23421 - DNA, 21 bp, synthetic construct
  misc_feature 1..21: note = Description of Artificial Sequence: Synthetic oligonucleotide
  source 1..21: mol_type = other DNA
gatgctgtgaagcagtctagg

SEQ ID NO: 23422 - DNA, 21 bp, synthetic construct
  misc_feature 1..21: note = Description of Artificial Sequence: Synthetic oligonucleotide
  source 1..21: mol_type = other DNA
tttggggatcatggtgctaag

SEQ ID NO: 23423 - DNA, 21 bp, synthetic construct
  misc_feature 1..21: note = Description of Artificial Sequence: Synthetic oligonucleotide
  source 1..21: mol_type = other DNA
aacgccagccccgccagcggc

SEQ ID NO: 23424 - DNA, 21 bp, synthetic construct
  misc_feature 1..21: note = Description of Artificial Sequence: Synthetic oligonucleotide
  source 1..21: mol_type = other DNA
accacccacgccaaagtcggc

SEQ ID NO: 23425 - DNA, 21 bp, synthetic construct
  misc_feature 1..21: note = Description of Artificial Sequence: Synthetic oligonucleotide
  source 1..21: mol_type = other DNA
accagaggcggccacgccgaa

SEQ ID NO: 23426 - DNA, 21 bp, synthetic construct
  misc_feature 1..21: note = Description of Artificial Sequence: Synthetic oligonucleotide
  source 1..21: mol_type = other DNA
agcaccggccaaaaaggcagc

SEQ ID NO: 23427 - DNA, 21 bp, synthetic construct
  misc_feature 1..21: note = Description of Artificial Sequence: Synthetic oligonucleotide
  source 1..21: mol_type = other DNA
agtgaggctaagagtgtgaat

SEQ ID NO: 23428 - DNA, 21 bp, synthetic construct
  misc_feature 1..21: note = Description of Artificial Sequence: Synthetic oligonucleotide
  source 1..21: mol_type = other DNA
agtggggagaatcggtccttg

SEQ ID NO: 23429 - DNA, 21 bp, synthetic construct
  misc_feature 1..21: note = Description of Artificial Sequence: Synthetic oligonucleotide
  source 1..21: mol_type = other DNA
atgcgtggggagacttcgctt

SEQ ID NO: 23430 - DNA, 21 bp, synthetic construct
  misc_feature 1..21: note = Description of Artificial Sequence: Synthetic oligonucleotide
  source 1..21: mol_type = other DNA
caaagcaacggcaaaaccgaa

SEQ ID NO: 23431 - DNA, 21 bp, synthetic construct
  misc_feature 1..21: note = Description of Artificial Sequence: Synthetic oligonucleotide
  source 1..21: mol_type = other DNA
cacggcgaaagcagcagaacc

SEQ ID NO: 23432 - DNA, 21 bp, synthetic construct
  misc_feature 1..21: note = Description of Artificial Sequence: Synthetic oligonucleotide
  source 1..21: mol_type = other DNA
ctcagcggcagcgccagcggc

SEQ ID NO: 23433 - DNA, 21 bp, synthetic construct
  misc_feature 1..21: note = Description of Artificial Sequence: Synthetic oligonucleotide
  source 1..21: mol_type = other DNA
gaaaacaacaacagcggcaga

SEQ ID NO: 23434 - DNA, 21 bp, synthetic construct
  misc_feature 1..21: note = Description of Artificial Sequence: Synthetic oligonucleotide
  source 1..21: mol_type = other DNA
gggcatcagaagaatgagctg

SEQ ID NO: 23435 - DNA, 21 bp, synthetic construct
  misc_feature 1..21: note = Description of Artificial Sequence: Synthetic oligonucleotide
  source 1..21: mol_type = other DNA
ggtaaggagcagagggtgggt

SEQ ID NO: 23436 - DNA, 21 bp, synthetic construct
  misc_feature 1..21: note = Description of Artificial Sequence: Synthetic oligonucleotide
  source 1..21: mol_type = other DNA
ttcggcagcagcagccccacc

SEQ ID NO: 23437 - DNA, 21 bp, synthetic construct
  misc_feature 1..21: note = Description of Artificial Sequence: Synthetic oligonucleotide
  source 1..21: mol_type = other DNA
ctgactagtcaggcgagtacg

SEQ ID NO: 23438 - DNA, 21 bp, synthetic construct
  misc_feature 1..21: note = Description of Artificial Sequence: Synthetic oligonucleotide
  source 1..21: mol_type = other DNA
cgtgcggatggtggtaatggt

SEQ ID NO: 23439 - DNA, 21 bp, synthetic construct
  misc_feature 1..21: note = Description of Artificial Sequence: Synthetic oligonucleotide
  source 1..21: mol_type = other DNA
tctcagccgccgccttctcac

SEQ ID NO: 23440 - DNA, 21 bp, synthetic construct
  misc_feature 1..21: note = Description of Artificial Sequence: Synthetic oligonucleotide
  source 1..21: mol_type = other DNA
aacgccgccgccagccccaaa

SEQ ID NO: 23441 - DNA, 21 bp, synthetic construct
  misc_feature 1..21: note = Description of Artificial Sequence: Synthetic oligonucleotide
  source 1..21: mol_type = other DNA
aacggcaacagcgaccacaga

SEQ ID NO: 23442 - DNA, 21 bp, synthetic construct
  misc_feature 1..21: note = Description of Artificial Sequence: Synthetic oligonucleotide
  source 1..21: mol_type = other DNA
ctcaaagaagtcccccaaagc

SEQ ID NO: 23443 - DNA, 21 bp, synthetic construct
  misc_feature 1..21: note = Description of Artificial Sequence: Synthetic oligonucleotide
  source 1..21: mol_type = other DNA
ggcgccctcggcaaaggcccc

SEQ ID NO: 23444 - DNA, 21 bp, synthetic construct
  misc_feature 1..21: note = Description of Artificial Sequence: Synthetic oligonucleotide
  source 1..21: mol_type = other DNA
accagcggcagcagcgccacc

SEQ ID NO: 23445 - DNA, 21 bp, synthetic construct
  misc_feature 1..21: note = Description of Artificial Sequence: Synthetic oligonucleotide
  source 1..21: mol_type = other DNA
gggactacggcgcctggtacg

SEQ ID NO: 23446 - DNA, 21 bp, synthetic construct
  misc_feature 1..21: note = Description of Artificial Sequence: Synthetic oligonucleotide
  source 1..21: mol_type = other DNA
accagcgccagcaacaacagc

SEQ ID NO: 23447 - DNA, 21 bp, synthetic construct
  misc_feature 1..21: note = Description of Artificial Sequence: Synthetic oligonucleotide
  source 1..21: mol_type = other DNA
agagacaacggcaaacacgac

SEQ ID NO: 23448 - DNA, 21 bp, synthetic construct
  misc_feature 1..21: note = Description of Artificial Sequence: Synthetic oligonucleotide
  source 1..21: mol_type = other DNA
cacaacaacagcggcctcacc

SEQ ID NO: 23449 - DNA, 21 bp, synthetic construct
  misc_feature 1..21: note = Description of Artificial Sequence: Synthetic oligonucleotide
  source 1..21: mol_type = other DNA
gacagacaaaaagccaccaac

SEQ ID NO: 23450 - DNA, 21 bp, synthetic construct
  misc_feature 1..21: note = Description of Artificial Sequence: Synthetic oligonucleotide
  source 1..21: mol_type = other DNA
gcgggtagggatgctgcgagt

SEQ ID NO: 23451 - DNA, 21 bp, synthetic construct
  misc_feature 1..21: note = Description of Artificial Sequence: Synthetic oligonucleotide
  source 1..21: mol_type = other DNA
ggcggcgacggcgcccacaaa

SEQ ID NO: 23452 - DNA, 21 bp, synthetic construct
  misc_feature 1..21: note = Description of Artificial Sequence: Synthetic oligonucleotide
  source 1..21: mol_type = other DNA
acgattacgtcttctccgtct

SEQ ID NO: 23453 - DNA, 21 bp, synthetic construct
  misc_feature 1..21: note = Description of Artificial Sequence: Synthetic oligonucleotide
  source 1..21: mol_type = other DNA
aacgtcggcgccagccccgtc

SEQ ID NO: 23454 - DNA, 21 bp, synthetic construct
  misc_feature 1..21: note = Description of Artificial Sequence: Synthetic oligonucleotide
  source 1..21: mol_type = other DNA
atccagtctggtaattcggct

SEQ ID NO: 23455 - DNA, 21 bp, synthetic construct
  misc_feature 1..21: note = Description of Artificial Sequence: Synthetic oligonucleotide
  source 1..21: mol_type = other DNA
ggtaatgggagtccggtgctt

SEQ ID NO: 23456 - DNA, 21 bp, synthetic construct
  misc_feature 1..21: note = Description of Artificial Sequence: Synthetic oligonucleotide
  source 1..21: mol_type = other DNA
acccaaaacaaaggcctcagc

SEQ ID NO: 23457 - DNA, 21 bp, synthetic construct
  misc_feature 1..21: note = Description of Artificial Sequence: Synthetic oligonucleotide
  source 1..21: mol_type = other DNA
acccacgaagacaaaggctac

SEQ ID NO: 23458 - DNA, 21 bp, synthetic construct
  misc_feature 1..21: note = Description of Artificial Sequence: Synthetic oligonucleotide
  source 1..21: mol_type = other DNA
accggcacccacaacaccgtc

SEQ ID NO: 23459 - DNA, 21 bp, synthetic construct
  misc_feature 1..21: note = Description of Artificial Sequence: Synthetic oligonucleotide
  source 1..21: mol_type = other DNA
agcaccatgcccgccagcaaa

SEQ ID NO: 23460 - DNA, 21 bp, synthetic construct
  misc_feature 1..21: note = Description of Artificial Sequence: Synthetic oligonucleotide
  source 1..21: mol_type = other DNA
agcgacggcaaagtcatggtc

SEQ ID NO: 23461 - DNA, 21 bp, synthetic construct
  misc_feature 1..21: note = Description of Artificial Sequence: Synthetic oligonucleotide
  source 1..21: mol_type = other DNA
atggctaagccgggggagacg

SEQ ID NO: 23462 - DNA, 21 bp, synthetic construct
  misc_feature 1..21: note = Description of Artificial Sequence: Synthetic oligonucleotide
  source 1..21: mol_type = other DNA
cagacgaattcgtctaagggg

SEQ ID NO: 23463 - DNA, 21 bp, synthetic construct
  misc_feature 1..21: note = Description of Artificial Sequence: Synthetic oligonucleotide
  source 1..21: mol_type = other DNA
gcgacttcgtctggttctacg

SEQ ID NO: 23464 - DNA, 21 bp, synthetic construct
  misc_feature 1..21: note = Description of Artificial Sequence: Synthetic oligonucleotide
  source 1..21: mol_type = other DNA
ggggatcaggatcgtactaag

SEQ ID NO: 23465 - DNA, 21 bp, synthetic construct
  misc_feature 1..21: note = Description of Artificial Sequence: Synthetic oligonucleotide
  source 1..21: mol_type = other DNA
tcggcggatgctaaggggagg

SEQ ID NO: 23466 - DNA, 21 bp, synthetic construct
  misc_feature 1..21: note = Description of Artificial Sequence: Synthetic oligonucleotide
  source 1..21: mol_type = other DNA
tcggctggtcctacgggtcat

SEQ ID NO: 23467 - DNA, 21 bp, synthetic construct
  misc_feature 1..21: note = Description of Artificial Sequence: Synthetic oligonucleotide
  source 1..21: mol_type = other DNA
cacagcagcaccacccccgcc

SEQ ID NO: 23468 - DNA, 21 bp, synthetic construct
  misc_feature 1..21: note = Description of Artificial Sequence: Synthetic oligonucleotide
  source 1..21: mol_type = other DNA
gaggcgcgggctccgattacg

SEQ ID NO: 23469 - DNA, 21 bp, synthetic construct
  misc_feature 1..21: note = Description of Artificial Sequence: Synthetic oligonucleotide
  source 1..21: mol_type = other DNA
agcgccaccagaagcggcagc

SEQ ID NO: 23470 - DNA, 21 bp, synthetic construct
  misc_feature 1..21: note = Description of Artificial Sequence: Synthetic oligonucleotide
  source 1..21: mol_type = other DNA
aattcggcgtcgaggccgagt

SEQ ID NO: 23471 - DNA, 21 bp, synthetic construct
  misc_feature 1..21: note = Description of Artificial Sequence: Synthetic oligonucleotide
  source 1..21: mol_type = other DNA
ggcagaggcgaaagaatcagc

SEQ ID NO: 23472 - DNA, 21 bp, synthetic construct
  misc_feature 1..21: note = Description of Artificial Sequence: Synthetic oligonucleotide
  source 1..21: mol_type = other DNA
atgacgaagggttctactctt

SEQ ID NO: 23473 - DNA, 21 bp, synthetic construct
  misc_feature 1..21: note = Description of Artificial Sequence: Synthetic oligonucleotide
  source 1..21: mol_type = other DNA
acgggtactaatactatgagt

SEQ ID NO: 23474 - DNA, 21 bp, synthetic construct
  misc_feature 1..21: note = Description of Artificial Sequence: Synthetic oligonucleotide
  source 1..21: mol_type = other DNA
atgaacagcagcagaagcgtc

SEQ ID NO: 23475 - DNA, 21 bp, synthetic construct
  misc_feature 1..21: note = Description of Artificial Sequence: Synthetic oligonucleotide
  source 1..21: mol_type = other DNA
cagagtgttggtacgacgcgt

SEQ ID NO: 23476 - DNA, 21 bp, synthetic construct
  misc_feature 1..21: note = Description of Artificial Sequence: Synthetic oligonucleotide
  source 1..21: mol_type = other DNA
gaggcgtcgggtaagagtact

SEQ ID NO: 23477 - DNA, 21 bp, synthetic construct
  misc_feature 1..21: note = Description of Artificial Sequence: Synthetic oligonucleotide
  source 1..21: mol_type = other DNA
agcaccagcagcagcccccac

SEQ ID NO: 23478 - DNA, 21 bp, synthetic construct
  misc_feature 1..21: note = Description of Artificial Sequence: Synthetic oligonucleotide
  source 1..21: mol_type = other DNA
gaaagcagcagcgccctcaaa

SEQ ID NO: 23479 - DNA, 21 bp, synthetic construct
  misc_feature 1..21: note = Description of Artificial Sequence: Synthetic oligonucleotide
  source 1..21: mol_type = other DNA
cacccccaaagccaacccaac

SEQ ID NO: 23480 - DNA, 21 bp, synthetic construct
  misc_feature 1..21: note = Description of Artificial Sequence: Synthetic oligonucleotide
  source 1..21: mol_type = other DNA
agcaacagccaaaccggcagc

SEQ ID NO: 23481 - DNA, 21 bp, synthetic construct
  misc_feature 1..21: note = Description of Artificial Sequence: Synthetic oligonucleotide
  source 1..21: mol_type = other DNA
atgaccagcagcaccgccagc

SEQ ID NO: 23482 - DNA, 21 bp, synthetic construct
  misc_feature 1..21: note = Description of Artificial Sequence: Synthetic oligonucleotide
  source 1..21: mol_type = other DNA
aacaccaacaaccaacccgcc

SEQ ID NO: 23483 - DNA, 21 bp, synthetic construct
  misc_feature 1..21: note = Description of Artificial Sequence: Synthetic oligonucleotide
  source 1..21: mol_type = other DNA
ggtaatacttctaagaatttg

SEQ ID NO: 23484 - DNA, 21 bp, synthetic construct
  misc_feature 1..21: note = Description of Artificial Sequence: Synthetic oligonucleotide
  source 1..21: mol_type = other DNA
aaggtggctgataggccgagt

SEQ ID NO: 23485 - DNA, 21 bp, synthetic construct
  misc_feature 1..21: note = Description of Artificial Sequence: Synthetic oligonucleotide
  source 1..21: mol_type = other DNA
aatacttctaagtcgactgat

SEQ ID NO: 23486 - DNA, 21 bp, synthetic construct
  misc_feature 1..21: note = Description of Artificial Sequence: Synthetic oligonucleotide
  source 1..21: mol_type = other DNA
aatagtggtgcgactattacg

SEQ ID NO: 23487 - DNA, 21 bp, synthetic construct
  misc_feature 1..21: note = Description of Artificial Sequence: Synthetic oligonucleotide
  source 1..21: mol_type = other DNA
agagaaaacgccacccccagc

SEQ ID NO: 23488 - DNA, 21 bp, synthetic construct
  misc_feature 1..21: note = Description of Artificial Sequence: Synthetic oligonucleotide
  source 1..21: mol_type = other DNA
agcaacagcggcaacagcaaa

SEQ ID NO: 23489 - DNA, 21 bp, synthetic construct
  misc_feature 1..21: note = Description of Artificial Sequence: Synthetic oligonucleotide
  source 1..21: mol_type = other DNA
agcagcaccaaacaaatcggc

SEQ ID NO: 23490 - DNA, 21 bp, synthetic construct
  misc_feature 1..21: note = Description of Artificial Sequence: Synthetic oligonucleotide
  source 1..21: mol_type = other DNA
agcgccgaaagaagcgtcagc

SEQ ID NO: 23491 - DNA, 21 bp, synthetic construct
  misc_feature 1..21: note = Description of Artificial Sequence: Synthetic oligonucleotide
  source 1..21: mol_type = other DNA
agtgatactaatcgggcttcg

SEQ ID NO: 23492 - DNA, 21 bp, synthetic construct
  misc_feature 1..21: note = Description of Artificial Sequence: Synthetic oligonucleotide
  source 1..21: mol_type = other DNA
atggacaaacccaccgccgcc

SEQ ID NO: 23493 - DNA, 21 bp, synthetic construct
  misc_feature 1..21: note = Description of Artificial Sequence: Synthetic oligonucleotide
  source 1..21: mol_type = other DNA
gaacacaaagacaacaccaaa

SEQ ID NO: 23494 - DNA, 21 bp, synthetic construct
  misc_feature 1..21: note = Description of Artificial Sequence: Synthetic oligonucleotide
  source 1..21: mol_type = other DNA
gacgccaccaccaaaaccgcc

SEQ ID NO: 23495 - DNA, 21 bp, synthetic construct
  misc_feature 1..21: note = Description of Artificial Sequence: Synthetic oligonucleotide
  source 1..21: mol_type = other DNA
gccgccaccgccccccacggc

SEQ ID NO: 23496 - DNA, 21 bp, synthetic construct
  misc_feature 1..21: note = Description of Artificial Sequence: Synthetic oligonucleotide
  source 1..21: mol_type = other DNA
ggtaatcaggagaatcggggt

SEQ ID NO: 23497 - DNA, 21 bp, synthetic construct
  misc_feature 1..21: note = Description of Artificial Sequence: Synthetic oligonucleotide
  source 1..21: mol_type = other DNA
ggtgatttgccgactcagagg

SEQ ID NO: 23498 - DNA, 21 bp, synthetic construct
  misc_feature 1..21: note = Description of Artificial Sequence: Synthetic oligonucleotide
  source 1..21: mol_type = other DNA
gtggtggggacttcgactggg

SEQ ID NO: 23499 - DNA, 21 bp, synthetic construct
  misc_feature 1..21: note = Description of Artificial Sequence: Synthetic oligonucleotide
  source 1..21: mol_type = other DNA
tctagtacggcgccgggtact

SEQ ID NO: 23500 - DNA, 21 bp, synthetic construct
  misc_feature 1..21: note = Description of Artificial Sequence: Synthetic oligonucleotide
  source 1..21: mol_type = other DNA
tctagtgagccgcgtagttcg

SEQ ID NO: 23501 - DNA, 21 bp, synthetic construct
  misc_feature 1..21: note = Description of Artificial Sequence: Synthetic oligonucleotide
  source 1..21: mol_type = other DNA
ttggttgctaatacttctaag

SEQ ID NO: 23502 - DNA, 21 bp, synthetic construct
  misc_feature 1..21: note = Description of Artificial Sequence: Synthetic oligonucleotide
  source 1..21: mol_type = other DNA
ctcgaaggcaaaggcctcaaa

SEQ ID NO: 23503 - DNA, 21 bp, synthetic construct
  misc_feature 1..21: note = Description of Artificial Sequence: Synthetic oligonucleotide
  source 1..21: mol_type = other DNA
gacaccaccgccaaactcagc

SEQ ID NO: 23504 - DNA, 21 bp, synthetic construct
  misc_feature 1..21: note = Description of Artificial Sequence: Synthetic oligonucleotide
  source 1..21: mol_type = other DNA
aaccccgtcgccggcaacaac

SEQ ID NO: 23505 - DNA, 21 bp, synthetic construct
  misc_feature 1..21: note = Description of Artificial Sequence: Synthetic oligonucleotide
  source 1..21: mol_type = other DNA
agcggcgccaccaccgccacc

SEQ ID NO: 23506 - DNA, 21 bp, synthetic construct
  misc_feature 1..21: note = Description of Artificial Sequence: Synthetic oligonucleotide
  source 1..21: mol_type = other DNA
cgttctgaggctgctgtgcat

SEQ ID NO: 23507 - DNA, 21 bp, synthetic construct
  misc_feature 1..21: note = Description of Artificial Sequence: Synthetic oligonucleotide
  source 1..21: mol_type = other DNA
ggcgaaaaccccaccagaacc

SEQ ID NO: 23508 - DNA, 21 bp, synthetic construct
  misc_feature 1..21: note = Description of Artificial Sequence: Synthetic oligonucleotide
  source 1..21: mol_type = other DNA
ggcgcccacgacaaaaccatc

SEQ ID NO: 23509 - DNA, 21 bp, synthetic construct
  misc_feature 1..21: note = Description of Artificial Sequence: Synthetic oligonucleotide
  source 1..21: mol_type = other DNA
ggtagtactaagagtgcttgt

SEQ ID NO: 23510 - DNA, 21 bp, synthetic construct
  misc_feature 1..21: note = Description of Artificial Sequence: Synthetic oligonucleotide
  source 1..21: mol_type = other DNA
gtcagaaacagcagcagcacc

SEQ ID NO: 23511 - DNA, 21 bp, synthetic construct
  misc_feature 1..21: note = Description of Artificial Sequence: Synthetic oligonucleotide
  source 1..21: mol_type = other DNA
gaccaaagaagcgccagcgcc

SEQ ID NO: 23512 - DNA, 21 bp, synthetic construct
  misc_feature 1..21: note = Description of Artificial Sequence: Synthetic oligonucleotide
  source 1..21: mol_type = other DNA
ggcaccaacaccggcaaaggc

SEQ ID NO: 23513 - DNA, 21 bp, synthetic construct
  misc_feature 1..21: note = Description of Artificial Sequence: Synthetic oligonucleotide
  source 1..21: mol_type = other DNA
agcgtcgccaacgccccccac

SEQ ID NO: 23514 - DNA, 21 bp, synthetic construct
  misc_feature 1..21: note = Description of Artificial Sequence: Synthetic oligonucleotide
  source 1..21: mol_type = other DNA
caagccatggaaaaaaccagc

SEQ ID NO: 23515 - DNA, 21 bp, synthetic construct
  misc_feature 1..21: note = Description of Artificial Sequence: Synthetic oligonucleotide
  source 1..21: mol_type = other DNA
gatacgactaataataggcag

SEQ ID NO: 23516 - DNA, 21 bp, synthetic construct
  misc_feature 1..21: note = Description of Artificial Sequence: Synthetic oligonucleotide
  source 1..21: mol_type = other DNA
gtttcgggggttagtaatact

SEQ ID NO: 23517 - DNA, 21 bp, synthetic construct
  misc_feature 1..21: note = Description of Artificial Sequence: Synthetic oligonucleotide
  source 1..21: mol_type = other DNA
acgggtaatccgtcggtgcat

SEQ ID NO: 23518 - DNA, 21 bp, synthetic construct
  misc_feature 1..21: note = Description of Artificial Sequence: Synthetic oligonucleotide
  source 1..21: mol_type = other DNA
cagtcggatagtccgcatacg

SEQ ID NO: 23519 - DNA, 21 bp, synthetic construct
  misc_feature 1..21: note = Description of Artificial Sequence: Synthetic oligonucleotide
  source 1..21: mol_type = other DNA
ctcaacaccagccccaaccaa

SEQ ID NO: 23520 - DNA, 21 bp, synthetic construct
  misc_feature 1..21: note = Description of Artificial Sequence: Synthetic oligonucleotide
  source 1..21: mol_type = other DNA
ggtccgggtaagagtgagggg

SEQ ID NO: 23521 - DNA, 21 bp, synthetic construct
  misc_feature 1..21: note = Description of Artificial Sequence: Synthetic oligonucleotide
  source 1..21: mol_type = other DNA
aacggcgtcagcagcgtcaac

SEQ ID NO: 23522 - DNA, 21 bp, synthetic construct
  misc_feature 1..21: note = Description of Artificial Sequence: Synthetic oligonucleotide
  source 1..21: mol_type = other DNA
aaccaaagcaacgtccaaggc

SEQ ID NO: 23523 - DNA, 21 bp, synthetic construct
  misc_feature 1..21: note = Description of Artificial Sequence: Synthetic oligonucleotide
  source 1..21: mol_type = other DNA
agtagtacttctaatagggct

SEQ ID NO: 23524 - DNA, 21 bp, synthetic construct
  misc_feature 1..21: note = Description of Artificial Sequence: Synthetic oligonucleotide
  source 1..21: mol_type = other DNA
gagcgggagaaggagactggt

SEQ ID NO: 23525 - DNA, 21 bp, synthetic construct
  misc_feature 1..21: note = Description of Artificial Sequence: Synthetic oligonucleotide
  source 1..21: mol_type = other DNA
cagacgggttctacgagtatt

SEQ ID NO: 23526 - DNA, 21 bp, synthetic construct
  misc_feature 1..21: note = Description of Artificial Sequence: Synthetic oligonucleotide
  source 1..21: mol_type = other DNA
ctcagcggccacaaaaccagc

SEQ ID NO: 23527 - DNA, 21 bp, synthetic construct
  misc_feature 1..21: note = Description of Artificial Sequence: Synthetic oligonucleotide
  source 1..21: mol_type = other DNA
caggcttcgacgaaggctgtg

SEQ ID NO: 23528 - DNA, 21 bp, synthetic construct
  misc_feature 1..21: note = Description of Artificial Sequence: Synthetic oligonucleotide
  source 1..21: mol_type = other DNA
gaaggcggccaaaaactcgcc

SEQ ID NO: 23529 - DNA, 21 bp, synthetic construct
  misc_feature 1..21: note = Description of Artificial Sequence: Synthetic oligonucleotide
  source 1..21: mol_type = other DNA
gaccccgaaagaaacggcggc

SEQ ID NO: 23530 - DNA, 21 bp, synthetic construct
  misc_feature 1..21: note = Description of Artificial Sequence: Synthetic oligonucleotide
  source 1..21: mol_type = other DNA
gcgggtaatgctcctgttagt

SEQ ID NO: 23531 - DNA, 21 bp, synthetic construct
  misc_feature 1..21: note = Description of Artificial Sequence: Synthetic oligonucleotide
  source 1..21: mol_type = other DNA
tctgcggtgagtagtgcttct

SEQ ID NO: 23532 - DNA, 21 bp, synthetic construct
  misc_feature 1..21: note = Description of Artificial Sequence: Synthetic oligonucleotide
  source 1..21: mol_type = other DNA
tctggtaaggatagggttatt

SEQ ID NO: 23533 - DNA, 21 bp, synthetic construct
  misc_feature 1..21: note = Description of Artificial Sequence: Synthetic oligonucleotide
  source 1..21: mol_type = other DNA
tctggtaatagtcagactcag

SEQ ID NO: 23534 - DNA, 21 bp, synthetic construct
  misc_feature 1..21: note = Description of Artificial Sequence: Synthetic oligonucleotide
  source 1..21: mol_type = other DNA
gggacttctggtagtgggtct

SEQ ID NO: 23535 - DNA, 21 bp, synthetic construct
  misc_feature 1..21: note = Description of Artificial Sequence: Synthetic oligonucleotide
  source 1..21: mol_type = other DNA
aagccttctccgagtagtggg

SEQ ID NO: 23536 - DNA, 21 bp, synthetic construct
  misc_feature 1..21: note = Description of Artificial Sequence: Synthetic oligonucleotide
  source 1..21: mol_type = other DNA
aacggcatcaacagcccccaa

SEQ ID NO: 23537 - DNA, 21 bp, synthetic construct
  misc_feature 1..21: note = Description of Artificial Sequence: Synthetic oligonucleotide
  source 1..21: mol_type = other DNA
caaggcgtccaaggcctccaa

SEQ ID NO: 23538 - DNA, 21 bp, synthetic construct
  misc_feature 1..21: note = Description of Artificial Sequence: Synthetic oligonucleotide
  source 1..21: mol_type = other DNA
gacagagtcagcagcagcaaa

SEQ ID NO: 23539 - DNA, 21 bp, synthetic construct
  misc_feature 1..21: note = Description of Artificial Sequence: Synthetic oligonucleotide
  source 1..21: mol_type = other DNA
ggtactaataaggttagtttg

SEQ ID NO: 23540 - DNA, 21 bp, synthetic construct
  misc_feature 1..21: note = Description of Artificial Sequence: Synthetic oligonucleotide
  source 1..21: mol_type = other DNA
aaggggacgcctgtttcgtcg

SEQ ID NO: 23541 - DNA, 21 bp, synthetic construct
  misc_feature 1..21: note = Description of Artificial Sequence: Synthetic oligonucleotide
  source 1..21: mol_type = other DNA
acgggttcgagtcgtagtact

SEQ ID NO: 23542 - DNA, 21 bp, synthetic construct
  misc_feature 1..21: note = Description of Artificial Sequence: Synthetic oligonucleotide
  source 1..21: mol_type = other DNA
agcaacaaaggcagcgacagc

SEQ ID NO: 23543 - DNA, 21 bp, synthetic construct
  misc_feature 1..21: note = Description of Artificial Sequence: Synthetic oligonucleotide
  source 1..21: mol_type = other DNA
atgacggagcataggccgcct

SEQ ID NO: 23544 - DNA, 21 bp, synthetic construct
  misc_feature 1..21: note = Description of Artificial Sequence: Synthetic oligonucleotide
  source 1..21: mol_type = other DNA
atttctgggacgactaatact

SEQ ID NO: 23545 - DNA, 21 bp, synthetic construct
  misc_feature 1..21: note = Description of Artificial Sequence: Synthetic oligonucleotide
  source 1..21: mol_type = other DNA
cacagcgcccccagcagcgcc

SEQ ID NO: 23546 - DNA, 21 bp, synthetic construct
  misc_feature 1..21: note = Description of Artificial Sequence: Synthetic oligonucleotide
  source 1..21: mol_type = other DNA
gacaaaagcagcaaacacagc

SEQ ID NO: 23547 - DNA, 21 bp, synthetic construct
  misc_feature 1..21: note = Description of Artificial Sequence: Synthetic oligonucleotide
  source 1..21: mol_type = other DNA
gctggttctcctcagcttggg

SEQ ID NO: 23548 - DNA, 21 bp, synthetic construct
  misc_feature 1..21: note = Description of Artificial Sequence: Synthetic oligonucleotide
  source 1..21: mol_type = other DNA
ggcagaaacaacgaacccctc

SEQ ID NO: 23549 - DNA, 21 bp, synthetic construct
  misc_feature 1..21: note = Description of Artificial Sequence: Synthetic oligonucleotide
  source 1..21: mol_type = other DNA
ctcggcagcagcgtcgtccaa

SEQ ID NO: 23550 - DNA, 21 bp, synthetic construct
  misc_feature 1..21: note = Description of Artificial Sequence: Synthetic oligonucleotide
  source 1..21: mol_type = other DNA
atgcatgagtctccgaatcgg

SEQ ID NO: 23551 - DNA, 21 bp, synthetic construct
  misc_feature 1..21: note = Description of Artificial Sequence: Synthetic oligonucleotide
  source 1..21: mol_type = other DNA
actcagcggcaatctacgggg

SEQ ID NO: 23552 - DNA, 21 bp, synthetic construct
  misc_feature 1..21: note = Description of Artificial Sequence: Synthetic oligonucleotide
  source 1..21: mol_type = other DNA
ggtctggcgacgccggctgtt

SEQ ID NO: 23553 - DNA, 21 bp, synthetic construct
  misc_feature 1..21: note = Description of Artificial Sequence: Synthetic oligonucleotide
  source 1..21: mol_type = other DNA
gtcagcaaaaaagaccaagtc

SEQ ID NO: 23554 - DNA, 21 bp, synthetic construct
  misc_feature 1..21: note = Description of Artificial Sequence: Synthetic oligonucleotide
  source 1..21: mol_type = other DNA
tctacggcgactccgcattcg

SEQ ID NO: 23555 - DNA, 21 bp, synthetic construct
  misc_feature 1..21: note = Description of Artificial Sequence: Synthetic oligonucleotide
  source 1..21: mol_type = other DNA
caaagcaccccccccggcacc

SEQ ID NO: 23556 - DNA, 21 bp, synthetic construct
  misc_feature 1..21: note = Description of Artificial Sequence: Synthetic oligonucleotide
  source 1..21: mol_type = other DNA
cagggggatattactaagggt

SEQ ID NO: 23557 - DNA, 21 bp, synthetic construct
  misc_feature 1..21: note = Description of Artificial Sequence: Synthetic oligonucleotide
  source 1..21: mol_type = other DNA
gggattggtaatgataatatg

SEQ ID NO: 23558 - DNA, 21 bp, synthetic construct
  misc_feature 1..21: note = Description of Artificial Sequence: Synthetic oligonucleotide
  source 1..21: mol_type = other DNA
ggggcggattctaggaagaat

SEQ ID NO: 23559 - DNA, 21 bp, synthetic construct
  misc_feature 1..21: note = Description of Artificial Sequence: Synthetic oligonucleotide
  source 1..21: mol_type = other DNA
tataaggatgagctgcagagg

SEQ ID NO: 23560 - DNA, 21 bp, synthetic construct
  misc_feature 1..21: note = Description of Artificial Sequence: Synthetic oligonucleotide
  source 1..21: mol_type = other DNA
agcagcgacatcaaaatgcaa

SEQ ID NO: 23561 - DNA, 21 bp, synthetic construct
  misc_feature 1..21: note = Description of Artificial Sequence: Synthetic oligonucleotide
  source 1..21: mol_type = other DNA
actgtgggttctaatgcgttg

SEQ ID NO: 23562 - DNA, 21 bp, synthetic construct
  misc_feature 1..21: note = Description of Artificial Sequence: Synthetic oligonucleotide
  source 1..21: mol_type = other DNA
gttgggtcgaattctactcat

SEQ ID NO: 23563 - DNA, 21 bp, synthetic construct
  misc_feature 1..21: note = Description of Artificial Sequence: Synthetic oligonucleotide
  source 1..21: mol_type = other DNA
aagagtgatggttctacgagt

SEQ ID NO: 23564 - DNA, 21 bp, synthetic construct
  misc_feature 1..21: note = Description of Artificial Sequence: Synthetic oligonucleotide
  source 1..21: mol_type = other DNA
acccccagcagcaccaacgtc

SEQ ID NO: 23565 - DNA, 21 bp, synthetic construct
  misc_feature 1..21: note = Description of Artificial Sequence: Synthetic oligonucleotide
  source 1..21: mol_type = other DNA
gctcctacgaagagttctgag

SEQ ID NO: 23566 - DNA, 21 bp, synthetic construct
  misc_feature 1..21: note = Description of Artificial Sequence: Synthetic oligonucleotide
  source 1..21: mol_type = other DNA
ggcagcatgaaaagcagcaac

SEQ ID NO: 23567 - DNA, 21 bp, synthetic construct
  misc_feature 1..21: note = Description of Artificial Sequence: Synthetic oligonucleotide
  source 1..21: mol_type = other DNA
ggtctttcgggtgagaagccg

SEQ ID NO: 23568 - DNA, 21 bp, synthetic construct
  misc_feature 1..21: note = Description of Artificial Sequence: Synthetic oligonucleotide
  source 1..21: mol_type = other DNA
tctgctgctaatacttctagg

SEQ ID NO: 23569 - DNA, 21 bp, synthetic construct
  misc_feature 1..21: note = Description of Artificial Sequence: Synthetic oligonucleotide
  source 1..21: mol_type = other DNA
ggcaccgacagcaccaccaga

SEQ ID NO: 23570 - DNA, 21 bp, synthetic construct
  misc_feature 1..21: note = Description of Artificial Sequence: Synthetic oligonucleotide
  source 1..21: mol_type = other DNA
agaaccaacaccacccccacc

SEQ ID NO: 23571 - DNA, 21 bp, synthetic construct
  misc_feature 1..21: note = Description of Artificial Sequence: Synthetic oligonucleotide
  source 1..21: mol_type = other DNA
agtgctggtgggcatggtcag

SEQ ID NO: 23572 - DNA, 21 bp, synthetic construct
  misc_feature 1..21: note = Description of Artificial Sequence: Synthetic oligonucleotide
  source 1..21: mol_type = other DNA
caacccctcaaaggcaacgcc

SEQ ID NO: 23573 - DNA, 21 bp, synthetic construct
  misc_feature 1..21: note = Description of Artificial Sequence: Synthetic oligonucleotide
  source 1..21: mol_type = other DNA
catagggagaaggcttctggg

SEQ ID NO: 23574 - DNA, 21 bp, synthetic construct
  misc_feature 1..21: note = Description of Artificial Sequence: Synthetic oligonucleotide
  source 1..21: mol_type = other DNA
ctcaccaccagaaccagcacc

SEQ ID NO: 23575 - DNA, 21 bp, synthetic construct
  misc_feature 1..21: note = Description of Artificial Sequence: Synthetic oligonucleotide
  source 1..21: mol_type = other DNA
gctacggatcagggtaagctt

SEQ ID NO: 23576 - DNA, 21 bp, synthetic construct
  misc_feature 1..21: note = Description of Artificial Sequence: Synthetic oligonucleotide
  source 1..21: mol_type = other DNA
gctagtaaggaggcgtctagt

SEQ ID NO: 23577 - DNA, 21 bp, synthetic construct
  misc_feature 1..21: note = Description of Artificial Sequence: Synthetic oligonucleotide
  source 1..21: mol_type = other DNA
ggcgtcgtcggcagccccacc

SEQ ID NO: 23578 - DNA, 21 bp, synthetic construct
  misc_feature 1..21: note = Description of Artificial Sequence: Synthetic oligonucleotide
  source 1..21: mol_type = other DNA
gcgaaggatgggcagtctcgt

SEQ ID NO: 23579 - DNA, 21 bp, synthetic construct
  misc_feature 1..21: note = Description of Artificial Sequence: Synthetic oligonucleotide
  source 1..21: mol_type = other DNA
accagcgaccacagcagcagc

SEQ ID NO: 23580 - DNA, 21 bp, synthetic construct
  misc_feature 1..21: note = Description of Artificial Sequence: Synthetic oligonucleotide
  source 1..21: mol_type = other DNA
ggcggcagccccggcgtccac

SEQ ID NO: 23581 - DNA, 21 bp, synthetic construct
  misc_feature 1..21: note = Description of Artificial Sequence: Synthetic oligonucleotide
  source 1..21: mol_type = other DNA
aagggggaggggagtgttcat

SEQ ID NO: 23582 - DNA, 21 bp, synthetic construct
  misc_feature 1..21: note = Description of Artificial Sequence: Synthetic oligonucleotide
  source 1..21: mol_type = other DNA
aagggttctgggaatacggtt

SEQ ID NO: 23583 - DNA, 21 bp, synthetic construct
  misc_feature 1..21: note = Description of Artificial Sequence: Synthetic oligonucleotide
  source 1..21: mol_type = other DNA
aatagtgggtctactcctacg

SEQ ID NO: 23584 - DNA, 21 bp, synthetic construct
  misc_feature 1..21: note = Description of Artificial Sequence: Synthetic oligonucleotide
  source 1..21: mol_type = other DNA
accaaagccggcagcaccgtc

SEQ ID NO: 23585 - DNA, 21 bp, synthetic construct
  misc_feature 1..21: note = Description of Artificial Sequence: Synthetic oligonucleotide
  source 1..21: mol_type = other DNA
actgataaggctacttcgggg

SEQ ID NO: 23586 - DNA, 21 bp, synthetic construct
  misc_feature 1..21: note = Description of Artificial Sequence: Synthetic oligonucleotide
  source 1..21: mol_type = other DNA
agccaaggcagcagcagcacc

SEQ ID NO: 23587 - DNA, 21 bp, synthetic construct
  misc_feature 1..21: note = Description of Artificial Sequence: Synthetic oligonucleotide
  source 1..21: mol_type = other DNA
agcgccggcaccagcggcggc

SEQ ID NO: 23588 - DNA, 21 bp, synthetic construct
  misc_feature 1..21: note = Description of Artificial Sequence: Synthetic oligonucleotide
  source 1..21: mol_type = other DNA
agcggcagcaccaaccacggc

SEQ ID NO: 23589 - DNA, 21 bp, synthetic construct
  misc_feature 1..21: note = Description of Artificial Sequence: Synthetic oligonucleotide
  source 1..21: mol_type = other DNA
agcggcgccgaaaaagtccac

SEQ ID NO: 23590 - DNA, 21 bp, synthetic construct
  misc_feature 1..21: note = Description of Artificial Sequence: Synthetic oligonucleotide
  source 1..21: mol_type = other DNA
agtcctgcgcattcgggtggt

SEQ ID NO: 23591 - DNA, 21 bp, synthetic construct
  misc_feature 1..21: note = Description of Artificial Sequence: Synthetic oligonucleotide
  source 1..21: mol_type = other DNA
agttctaattcgcggagttcg

SEQ ID NO: 23592 - DNA, 21 bp, synthetic construct
  misc_feature 1..21: note = Description of Artificial Sequence: Synthetic oligonucleotide
  source 1..21: mol_type = other DNA
atgagtacgtctcctgggacg

SEQ ID NO: 23593 - DNA, 21 bp, synthetic construct
  misc_feature 1..21: note = Description of Artificial Sequence: Synthetic oligonucleotide
  source 1..21: mol_type = other DNA
cacagcgaagtcaaaagcggc

SEQ ID NO: 23594 - DNA, 21 bp, synthetic construct
  misc_feature 1..21: note = Description of Artificial Sequence: Synthetic oligonucleotide
  source 1..21: mol_type = other DNA
gaaagaggcggccaaaccacc

SEQ ID NO: 23595 - DNA, 21 bp, synthetic construct
  misc_feature 1..21: note = Description of Artificial Sequence: Synthetic oligonucleotide
  source 1..21: mol_type = other DNA
gacagcgaaagcaaaaacgtc

SEQ ID NO: 23596 - DNA, 21 bp, synthetic construct
  misc_feature 1..21: note = Description of Artificial Sequence: Synthetic oligonucleotide
  source 1..21: mol_type = other DNA
gaggatggggcgtcgagggtg

SEQ ID NO: 23597 - DNA, 21 bp, synthetic construct
  misc_feature 1..21: note = Description of Artificial Sequence: Synthetic oligonucleotide
  source 1..21: mol_type = other DNA
gataggcaggggtctgttgcg

SEQ ID NO: 23598 - DNA, 21 bp, synthetic construct
  misc_feature 1..21: note = Description of Artificial Sequence: Synthetic oligonucleotide
  source 1..21: mol_type = other DNA
gccaccgccaccaaaggcaac

SEQ ID NO: 23599 - DNA, 21 bp, synthetic construct
  misc_feature 1..21: note = Description of Artificial Sequence: Synthetic oligonucleotide
  source 1..21: mol_type = other DNA
gcgaataagagtcctcctgat

SEQ ID NO: 23600 - DNA, 21 bp, synthetic construct
  misc_feature 1..21: note = Description of Artificial Sequence: Synthetic oligonucleotide
  source 1..21: mol_type = other DNA
gctcggggggcgtctactatt

SEQ ID NO: 23601 - DNA, 21 bp, synthetic construct
  misc_feature 1..21: note = Description of Artificial Sequence: Synthetic oligonucleotide
  source 1..21: mol_type = other DNA
ggcaccgccaacggcggcccc

SEQ ID NO: 23602 - DNA, 21 bp, synthetic construct
  misc_feature 1..21: note = Description of Artificial Sequence: Synthetic oligonucleotide
  source 1..21: mol_type = other DNA
ggcggcaccaaagccctcggc

SEQ ID NO: 23603 - DNA, 21 bp, synthetic construct
  misc_feature 1..21: note = Description of Artificial Sequence: Synthetic oligonucleotide
  source 1..21: mol_type = other DNA
ggggttagttcgcctaagcag

SEQ ID NO: 23604 - DNA, 21 bp, synthetic construct
  misc_feature 1..21: note = Description of Artificial Sequence: Synthetic oligonucleotide
  source 1..21: mol_type = other DNA
gttactgagtcgtctagtcgg

SEQ ID NO: 23605 - DNA, 21 bp, synthetic construct
  misc_feature 1..21: note = Description of Artificial Sequence: Synthetic oligonucleotide
  source 1..21: mol_type = other DNA
tcgtctaaggatcatcctaat

SEQ ID NO: 23606 - DNA, 21 bp, synthetic construct
  misc_feature 1..21: note = Description of Artificial Sequence: Synthetic oligonucleotide
  source 1..21: mol_type = other DNA
ttcggcaaaagccccagcaac

SEQ ID NO: 23607 - DNA, 21 bp, synthetic construct
  misc_feature 1..21: note = Description of Artificial Sequence: Synthetic oligonucleotide
  source 1..21: mol_type = other DNA
atgatggcgaatgctaatcag

SEQ ID NO: 23608 - DNA, 21 bp, synthetic construct
  misc_feature 1..21: note = Description of Artificial Sequence: Synthetic oligonucleotide
  source 1..21: mol_type = other DNA
aacggcagcaaacccaccatc

SEQ ID NO: 23609 - DNA, 21 bp, synthetic construct
  misc_feature 1..21: note = Description of Artificial Sequence: Synthetic oligonucleotide
  source 1..21: mol_type = other DNA
cagagggggaatacgcctgag

SEQ ID NO: 23610 - DNA, 21 bp, synthetic construct
  misc_feature 1..21: note = Description of Artificial Sequence: Synthetic oligonucleotide
  source 1..21: mol_type = other DNA
gaaacccaccccaaagccacc

SEQ ID NO: 23611 - DNA, 21 bp, synthetic construct
  misc_feature 1..21: note = Description of Artificial Sequence: Synthetic oligonucleotide
  source 1..21: mol_type = other DNA
ggggttacgtctcataattcg

SEQ ID NO: 23612 - DNA, 21 bp, synthetic construct
  misc_feature 1..21: note = Description of Artificial Sequence: Synthetic oligonucleotide
  source 1..21: mol_type = other DNA
ttgtctgggtcgcaggctgcg

SEQ ID NO: 23613 - DNA, 21 bp, synthetic construct
  misc_feature 1..21: note = Description of Artificial Sequence: Synthetic oligonucleotide
  source 1..21: mol_type = other DNA
aacggcgccagcagccccaac

SEQ ID NO: 23614 - DNA, 21 bp, synthetic construct
  misc_feature 1..21: note = Description of Artificial Sequence: Synthetic oligonucleotide
  source 1..21: mol_type = other DNA
atcagcaacagcaccagcggc

SEQ ID NO: 23615 - DNA, 21 bp, synthetic construct
  misc_feature 1..21: note = Description of Artificial Sequence: Synthetic oligonucleotide
  source 1..21: mol_type = other DNA
cagacggtggataagcctcgt

SEQ ID NO: 23616 - DNA, 21 bp, synthetic construct
  misc_feature 1..21: note = Description of Artificial Sequence: Synthetic oligonucleotide
  source 1..21: mol_type = other DNA
cggaggaatggtacggctgag

SEQ ID NO: 23617 - DNA, 21 bp, synthetic construct
  misc_feature 1..21: note = Description of Artificial Sequence: Synthetic oligonucleotide
  source 1..21: mol_type = other DNA
ggtcttttggattcgaagtcg

SEQ ID NO: 23618 - DNA, 21 bp, synthetic construct
  misc_feature 1..21: note = Description of Artificial Sequence: Synthetic oligonucleotide
  source 1..21: mol_type = other DNA
accagcaaaaccagccaactc

SEQ ID NO: 23619 - DNA, 21 bp, synthetic construct
  misc_feature 1..21: note = Description of Artificial Sequence: Synthetic oligonucleotide
  source 1..21: mol_type = other DNA
agcaacagaagcagcaccgcc

SEQ ID NO: 23620 - DNA, 21 bp, synthetic construct
  misc_feature 1..21: note = Description of Artificial Sequence: Synthetic oligonucleotide
  source 1..21: mol_type = other DNA
agcaacgccaccgccagcgcc

SEQ ID NO: 23621 - DNA, 21 bp, synthetic construct
  misc_feature 1..21: note = Description of Artificial Sequence: Synthetic oligonucleotide
  source 1..21: mol_type = other DNA
caaaacggcggcaaaagcgtc

SEQ ID NO: 23622 - DNA, 21 bp, synthetic construct
  misc_feature 1..21: note = Description of Artificial Sequence: Synthetic oligonucleotide
  source 1..21: mol_type = other DNA
tctagggagtcgaatcatagt

SEQ ID NO: 23623 - DNA, 21 bp, synthetic construct
  misc_feature 1..21: note = Description of Artificial Sequence: Synthetic oligonucleotide
  source 1..21: mol_type = other DNA
actcaggcgacttcttcgtcg

SEQ ID NO: 23624 - DNA, 21 bp, synthetic construct
  misc_feature 1..21: note = Description of Artificial Sequence: Synthetic oligonucleotide
  source 1..21: mol_type = other DNA
agcaccagcaaaaacagcccc

SEQ ID NO: 23625 - DNA, 21 bp, synthetic construct
  misc_feature 1..21: note = Description of Artificial Sequence: Synthetic oligonucleotide
  source 1..21: mol_type = other DNA
agccaaaaagccggcagcgcc

SEQ ID NO: 23626 - DNA, 21 bp, synthetic construct
  misc_feature 1..21: note = Description of Artificial Sequence: Synthetic oligonucleotide
  source 1..21: mol_type = other DNA
agcgcccccggcaacagcggc

SEQ ID NO: 23627 - DNA, 21 bp, synthetic construct
  misc_feature 1..21: note = Description of Artificial Sequence: Synthetic oligonucleotide
  source 1..21: mol_type = other DNA
agtcttcggaaggatgggtct

SEQ ID NO: 23628 - DNA, 21 bp, synthetic construct
  misc_feature 1..21: note = Description of Artificial Sequence: Synthetic oligonucleotide
  source 1..21: mol_type = other DNA
caaaacgaaacccccagaagc

SEQ ID NO: 23629 - DNA, 21 bp, synthetic construct
  misc_feature 1..21: note = Description of Artificial Sequence: Synthetic oligonucleotide
  source 1..21: mol_type = other DNA
gacatccaaaacccccccaga

SEQ ID NO: 23630 - DNA, 21 bp, synthetic construct
  misc_feature 1..21: note = Description of Artificial Sequence: Synthetic oligonucleotide
  source 1..21: mol_type = other DNA
gataataatcatgggaagctg

SEQ ID NO: 23631 - DNA, 21 bp, synthetic construct
  misc_feature 1..21: note = Description of Artificial Sequence: Synthetic oligonucleotide
  source 1..21: mol_type = other DNA
gcgggggctggtcttcagagt

SEQ ID NO: 23632 - DNA, 21 bp, synthetic construct
  misc_feature 1..21: note = Description of Artificial Sequence: Synthetic oligonucleotide
  source 1..21: mol_type = other DNA
gggagtgataaggtttcgaat

SEQ ID NO: 23633 - DNA, 21 bp, synthetic construct
  misc_feature 1..21: note = Description of Artificial Sequence: Synthetic oligonucleotide
  source 1..21: mol_type = other DNA
tctcagacgccggtgggtgtt

SEQ ID NO: 23634 - DNA, 21 bp, synthetic construct
  misc_feature 1..21: note = Description of Artificial Sequence: Synthetic oligonucleotide
  source 1..21: mol_type = other DNA
gataagtctcagcatgcgatg

SEQ ID NO: 23635 - DNA, 21 bp, synthetic construct
  misc_feature 1..21: note = Description of Artificial Sequence: Synthetic oligonucleotide
  source 1..21: mol_type = other DNA
ggtgctagtccgtctaatggt

SEQ ID NO: 23636 - DNA, 21 bp, synthetic construct
  misc_feature 1..21: note = Description of Artificial Sequence: Synthetic oligonucleotide
  source 1..21: mol_type = other DNA
cacgtcagcagcaaagccgac

SEQ ID NO: 23637 - DNA, 21 bp, synthetic construct
  misc_feature 1..21: note = Description of Artificial Sequence: Synthetic oligonucleotide
  source 1..21: mol_type = other DNA
ctcgcccaaaaaagcagcacc

SEQ ID NO: 23638 - DNA, 21 bp, synthetic construct
  misc_feature 1..21: note = Description of Artificial Sequence: Synthetic oligonucleotide
  source 1..21: mol_type = other DNA
attggtaagtctaatttgtcg

SEQ ID NO: 23639 - DNA, 21 bp, synthetic construct
  misc_feature 1..21: note = Description of Artificial Sequence: Synthetic oligonucleotide
  source 1..21: mol_type = other DNA
caagccagcagcagccaaacc

SEQ ID NO: 23640 - DNA, 21 bp, synthetic construct
  misc_feature 1..21: note = Description of Artificial Sequence: Synthetic oligonucleotide
  source 1..21: mol_type = other DNA
agaaccaccaccgacagagcc

SEQ ID NO: 23641 - DNA, 21 bp, synthetic construct
  misc_feature 1..21: note = Description of Artificial Sequence: Synthetic oligonucleotide
  source 1..21: mol_type = other DNA
caagacctcaaaaccccccaa

SEQ ID NO: 23642 - DNA, 21 bp, synthetic construct
  misc_feature 1..21: note = Description of Artificial Sequence: Synthetic oligonucleotide
  source 1..21: mol_type = other DNA
ggggctcctgtttctaatctg

SEQ ID NO: 23643 - DNA, 21 bp, synthetic construct
  misc_feature 1..21: note = Description of Artificial Sequence: Synthetic oligonucleotide
  source 1..21: mol_type = other DNA
gtcaccagaaaagacagcatg

SEQ ID NO: 23644 - DNA, 21 bp, synthetic construct
  misc_feature 1..21: note = Description of Artificial Sequence: Synthetic oligonucleotide
  source 1..21: mol_type = other DNA
gagcgtgctaatcatacgact

SEQ ID NO: 23645 - DNA, 21 bp, synthetic construct
  misc_feature 1..21: note = Description of Artificial Sequence: Synthetic oligonucleotide
  source 1..21: mol_type = other DNA
acgcatgataataagtctatt

SEQ ID NO: 23646 - DNA, 21 bp, synthetic construct
  misc_feature 1..21: note = Description of Artificial Sequence: Synthetic oligonucleotide
  source 1..21: mol_type = other DNA
gagacgagtagtactaatagg

SEQ ID NO: 23647 - DNA, 21 bp, synthetic construct
  misc_feature 1..21: note = Description of Artificial Sequence: Synthetic oligonucleotide
  source 1..21: mol_type = other DNA
gagccggataatccgagtcgt

SEQ ID NO: 23648 - DNA, 21 bp, synthetic construct
  misc_feature 1..21: note = Description of Artificial Sequence: Synthetic oligonucleotide
  source 1..21: mol_type = other DNA
gggactgggcagtctcgtgct

SEQ ID NO: 23649 - DNA, 21 bp, synthetic construct
  misc_feature 1..21: note = Description of Artificial Sequence: Synthetic oligonucleotide
  source 1..21: mol_type = other DNA
tcgggtgtgcgggatacggct

SEQ ID NO: 23650 - DNA, 21 bp, synthetic construct
  misc_feature 1..21: note = Description of Artificial Sequence: Synthetic oligonucleotide
  source 1..21: mol_type = other DNA
gatccgggtgcgaagcctttg

SEQ ID NO: 23651 - DNA, 21 bp, synthetic construct
  misc_feature 1..21: note = Description of Artificial Sequence: Synthetic oligonucleotide
  source 1..21: mol_type = other DNA
ggcgtcctcaacagagacaaa

SEQ ID NO: 23652 - DNA, 21 bp, synthetic construct
  misc_feature 1..21: note = Description of Artificial Sequence: Synthetic oligonucleotide
  source 1..21: mol_type = other DNA
tctcagcatgggacgagtagt

SEQ ID NO: 23653 - DNA, 21 bp, synthetic construct
  misc_feature 1..21: note = Description of Artificial Sequence: Synthetic oligonucleotide
  source 1..21: mol_type = other DNA
actaaggatcatcaggctaat

SEQ ID NO: 23654 - DNA, 21 bp, synthetic construct
  misc_feature 1..21: note = Description of Artificial Sequence: Synthetic oligonucleotide
  source 1..21: mol_type = other DNA
accggcaccaaccacgccctc

SEQ ID NO: 23655 - DNA, 21 bp, synthetic construct
  misc_feature 1..21: note = Description of Artificial Sequence: Synthetic oligonucleotide
  source 1..21: mol_type = other DNA
cagaattcgaagccgagttct

SEQ ID NO: 23656 - DNA, 21 bp, synthetic construct
  misc_feature 1..21: note = Description of Artificial Sequence: Synthetic oligonucleotide
  source 1..21: mol_type = other DNA
agcaccaacggcagccacggc

SEQ ID NO: 23657 - DNA, 21 bp, synthetic construct
  misc_feature 1..21: note = Description of Artificial Sequence: Synthetic oligonucleotide
  source 1..21: mol_type = other DNA
aattctgggactcatggtagt

SEQ ID NO: 23658 - DNA, 21 bp, synthetic construct
  misc_feature 1..21: note = Description of Artificial Sequence: Synthetic oligonucleotide
  source 1..21: mol_type = other DNA
acggggtctgagcatcagaat

SEQ ID NO: 23659 - DNA, 21 bp, synthetic construct
  misc_feature 1..21: note = Description of Artificial Sequence: Synthetic oligonucleotide
  source 1..21: mol_type = other DNA
agcagaaacgacagcaacaaa

SEQ ID NO: 23660 - DNA, 21 bp, synthetic construct
  misc_feature 1..21: note = Description of Artificial Sequence: Synthetic oligonucleotide
  source 1..21: mol_type = other DNA
agcctcaccagcgccaacgtc

SEQ ID NO: 23661 - DNA, 21 bp, synthetic construct
  misc_feature 1..21: note = Description of Artificial Sequence: Synthetic oligonucleotide
  source 1..21: mol_type = other DNA
caccacagcaccgccagccaa

SEQ ID NO: 23662 - DNA, 21 bp, synthetic construct
  misc_feature 1..21: note = Description of Artificial Sequence: Synthetic oligonucleotide
  source 1..21: mol_type = other DNA
gaggagagtcctaagaagggt

SEQ ID NO: 23663 - DNA, 21 bp, synthetic construct
  misc_feature 1..21: note = Description of Artificial Sequence: Synthetic oligonucleotide
  source 1..21: mol_type = other DNA
gccggcgccagcagccaaggc

SEQ ID NO: 23664 - DNA, 21 bp, synthetic construct
  misc_feature 1..21: note = Description of Artificial Sequence: Synthetic oligonucleotide
  source 1..21: mol_type = other DNA
actaatcagggtggtaatcat

SEQ ID NO: 23665 - DNA, 21 bp, synthetic construct
  misc_feature 1..21: note = Description of Artificial Sequence: Synthetic oligonucleotide
  source 1..21: mol_type = other DNA
gccaccaccgccgcccccgtc

SEQ ID NO: 23666 - DNA, 21 bp, synthetic construct
  misc_feature 1..21: note = Description of Artificial Sequence: Synthetic oligonucleotide
  source 1..21: mol_type = other DNA
aacggcatgagcagcagcacc

SEQ ID NO: 23667 - DNA, 21 bp, synthetic construct
  misc_feature 1..21: note = Description of Artificial Sequence: Synthetic oligonucleotide
  source 1..21: mol_type = other DNA
agcaacagcgaaaccgccagc

SEQ ID NO: 23668 - DNA, 21 bp, synthetic construct
  misc_feature 1..21: note = Description of Artificial Sequence: Synthetic oligonucleotide
  source 1..21: mol_type = other DNA
caacccgtcaccagcaaccaa

SEQ ID NO: 23669 - DNA, 21 bp, synthetic construct
  misc_feature 1..21: note = Description of Artificial Sequence: Synthetic oligonucleotide
  source 1..21: mol_type = other DNA
gagggtaggggtacgtctcct

SEQ ID NO: 23670 - DNA, 21 bp, synthetic construct
  misc_feature 1..21: note = Description of Artificial Sequence: Synthetic oligonucleotide
  source 1..21: mol_type = other DNA
gatcttaatgcgcagaagtct

SEQ ID NO: 23671 - DNA, 21 bp, synthetic construct
  misc_feature 1..21: note = Description of Artificial Sequence: Synthetic oligonucleotide
  source 1..21: mol_type = other DNA
ggcgccgccaacgacaccaga

SEQ ID NO: 23672 - DNA, 21 bp, synthetic construct
  misc_feature 1..21: note = Description of Artificial Sequence: Synthetic oligonucleotide
  source 1..21: mol_type = other DNA
ctcaacaacaccagcagcggc

SEQ ID NO: 23673 - DNA, 21 bp, synthetic construct
  misc_feature 1..21: note = Description of Artificial Sequence: Synthetic oligonucleotide
  source 1..21: mol_type = other DNA
aaccaaaccagcaacccccac

SEQ ID NO: 23674 - DNA, 21 bp, synthetic construct
  misc_feature 1..21: note = Description of Artificial Sequence: Synthetic oligonucleotide
  source 1..21: mol_type = other DNA
accagacaaaacagcagcaac

SEQ ID NO: 23675 - DNA, 21 bp, synthetic construct
  misc_feature 1..21: note = Description of Artificial Sequence: Synthetic oligonucleotide
  source 1..21: mol_type = other DNA
agcaacgccggcggcaaaagc

SEQ ID NO: 23676 - DNA, 21 bp, synthetic construct
  misc_feature 1..21: note = Description of Artificial Sequence: Synthetic oligonucleotide
  source 1..21: mol_type = other DNA
agcagcgacaccagcaaaggc

SEQ ID NO: 23677 - DNA, 21 bp, synthetic construct
  misc_feature 1..21: note = Description of Artificial Sequence: Synthetic oligonucleotide
  source 1..21: mol_type = other DNA
agcgaagtcgccaaaagcggc

SEQ ID NO: 23678 - DNA, 21 bp, synthetic construct
  misc_feature 1..21: note = Description of Artificial Sequence: Synthetic oligonucleotide
  source 1..21: mol_type = other DNA
agcgacgtcaaagcccacaac

SEQ ID NO: 23679 - DNA, 21 bp, synthetic construct
  misc_feature 1..21: note = Description of Artificial Sequence: Synthetic oligonucleotide
  source 1..21: mol_type = other DNA
ctcggcgccgacagagtcgcc

SEQ ID NO: 23680 - DNA, 21 bp, synthetic construct
  misc_feature 1..21: note = Description of Artificial Sequence: Synthetic oligonucleotide
  source 1..21: mol_type = other DNA
gacagcagaaccaccagcggc

SEQ ID NO: 23681 - DNA, 21 bp, synthetic construct
  misc_feature 1..21: note = Description of Artificial Sequence: Synthetic oligonucleotide
  source 1..21: mol_type = other DNA
gccagcagcaccagcaccaga

SEQ ID NO: 23682 - DNA, 21 bp, synthetic construct
  misc_feature 1..21: note = Description of Artificial Sequence: Synthetic oligonucleotide
  source 1..21: mol_type = other DNA
tgttctcagcctaaggctggt

SEQ ID NO: 23683 - DNA, 21 bp, synthetic construct
  misc_feature 1..21: note = Description of Artificial Sequence: Synthetic oligonucleotide
  source 1..21: mol_type = other DNA
ggcctcgaaggcgccagcaga

SEQ ID NO: 23684 - DNA, 21 bp, synthetic construct
  misc_feature 1..21: note = Description of Artificial Sequence: Synthetic oligonucleotide
  source 1..21: mol_type = other DNA
acccaaagcgacagacccccc

SEQ ID NO: 23685 - DNA, 21 bp, synthetic construct
  misc_feature 1..21: note = Description of Artificial Sequence: Synthetic oligonucleotide
  source 1..21: mol_type = other DNA
actcagactcagtcggctagt

SEQ ID NO: 23686 - DNA, 21 bp, synthetic construct
  misc_feature 1..21: note = Description of Artificial Sequence: Synthetic oligonucleotide
  source 1..21: mol_type = other DNA
caaggcagcgaaaacggcaga

SEQ ID NO: 23687 - DNA, 21 bp, synthetic construct
  misc_feature 1..21: note = Description of Artificial Sequence: Synthetic oligonucleotide
  source 1..21: mol_type = other DNA
gaaggcaacagcagcagaagc

SEQ ID NO: 23688 - DNA, 21 bp, synthetic construct
  misc_feature 1..21: note = Description of Artificial Sequence: Synthetic oligonucleotide
  source 1..21: mol_type = other DNA
gatacgccggctgctgctaag

SEQ ID NO: 23689 - DNA, 21 bp, synthetic construct
  misc_feature 1..21: note = Description of Artificial Sequence: Synthetic oligonucleotide
  source 1..21: mol_type = other DNA
gcggcgtcgaatgggccgagt

SEQ ID NO: 23690 - DNA, 21 bp, synthetic construct
  misc_feature 1..21: note = Description of Artificial Sequence: Synthetic oligonucleotide
  source 1..21: mol_type = other DNA
ggggctacgtcgagtgcttct

SEQ ID NO: 23691 - DNA, 21 bp, synthetic construct
  misc_feature 1..21: note = Description of Artificial Sequence: Synthetic oligonucleotide
  source 1..21: mol_type = other DNA
agccaaagcacccccagcgtc

SEQ ID NO: 23692 - DNA, 21 bp, synthetic construct
  misc_feature 1..21: note = Description of Artificial Sequence: Synthetic oligonucleotide
  source 1..21: mol_type = other DNA
acgtctaagtctacttcgacg

SEQ ID NO: 23693 - DNA, 21 bp, synthetic construct
  misc_feature 1..21: note = Description of Artificial Sequence: Synthetic oligonucleotide
  source 1..21: mol_type = other DNA
gatgggcctcgtacttctgtt

SEQ ID NO: 23694 - DNA, 21 bp, synthetic construct
  misc_feature 1..21: note = Description of Artificial Sequence: Synthetic oligonucleotide
  source 1..21: mol_type = other DNA
agcaacagcgccagactcggc

SEQ ID NO: 23695 - DNA, 21 bp, synthetic construct
  misc_feature 1..21: note = Description of Artificial Sequence: Synthetic oligonucleotide
  source 1..21: mol_type = other DNA
actccgacggatggtaggtct

SEQ ID NO: 23696 - DNA, 21 bp, synthetic construct
  misc_feature 1..21: note = Description of Artificial Sequence: Synthetic oligonucleotide
  source 1..21: mol_type = other DNA
acccccaacagcagacccgaa

SEQ ID NO: 23697 - DNA, 21 bp, synthetic construct
  misc_feature 1..21: note = Description of Artificial Sequence: Synthetic oligonucleotide
  source 1..21: mol_type = other DNA
acgagtaatgcgcataatgtt

SEQ ID NO: 23698 - DNA, 21 bp, synthetic construct
  misc_feature 1..21: note = Description of Artificial Sequence: Synthetic oligonucleotide
  source 1..21: mol_type = other DNA
agcaccgccgccagcaccgcc

SEQ ID NO: 23699 - DNA, 21 bp, synthetic construct
  misc_feature 1..21: note = Description of Artificial Sequence: Synthetic oligonucleotide
  source 1..21: mol_type = other DNA
agtctggggaatcagggtgcg

SEQ ID NO: 23700 - DNA, 21 bp, synthetic construct
  misc_feature 1..21: note = Description of Artificial Sequence: Synthetic oligonucleotide
  source 1..21: mol_type = other DNA
gaaaacagcagagtcggcacc

SEQ ID NO: 23701 - DNA, 21 bp, synthetic construct
  misc_feature 1..21: note = Description of Artificial Sequence: Synthetic oligonucleotide
  source 1..21: mol_type = other DNA
gaaggcaaagccagcgtcctc

SEQ ID NO: 23702 - DNA, 21 bp, synthetic construct
  misc_feature 1..21: note = Description of Artificial Sequence: Synthetic oligonucleotide
  source 1..21: mol_type = other DNA
gattctaggactgcggggaat

SEQ ID NO: 23703 - DNA, 21 bp, synthetic construct
  misc_feature 1..21: note = Description of Artificial Sequence: Synthetic oligonucleotide
  source 1..21: mol_type = other DNA
ggcagacaaggcaccgacaaa

SEQ ID NO: 23704 - DNA, 21 bp, synthetic construct
  misc_feature 1..21: note = Description of Artificial Sequence: Synthetic oligonucleotide
  source 1..21: mol_type = other DNA
ggccccagcagcaccatcagc

SEQ ID NO: 23705 - DNA, 21 bp, synthetic construct
  misc_feature 1..21: note = Description of Artificial Sequence: Synthetic oligonucleotide
  source 1..21: mol_type = other DNA
ggcgccctccccagccaaacc

SEQ ID NO: 23706 - DNA, 21 bp, synthetic construct
  misc_feature 1..21: note = Description of Artificial Sequence: Synthetic oligonucleotide
  source 1..21: mol_type = other DNA
ggtagtaatgggggtaggtct

SEQ ID NO: 23707 - DNA, 21 bp, synthetic construct
  misc_feature 1..21: note = Description of Artificial Sequence: Synthetic oligonucleotide
  source 1..21: mol_type = other DNA
ggtttgggggaggatcgggtt

SEQ ID NO: 23708 - DNA, 21 bp, synthetic construct
  misc_feature 1..21: note = Description of Artificial Sequence: Synthetic oligonucleotide
  source 1..21: mol_type = other DNA
tcgcagaatactgggcatccg

SEQ ID NO: 23709 - DNA, 21 bp, synthetic construct
  misc_feature 1..21: note = Description of Artificial Sequence: Synthetic oligonucleotide
  source 1..21: mol_type = other DNA
actagtgggtctgctcgggat

SEQ ID NO: 23710 - DNA, 21 bp, synthetic construct
  misc_feature 1..21: note = Description of Artificial Sequence: Synthetic oligonucleotide
  source 1..21: mol_type = other DNA
gctcagggtcaggggcatgct

SEQ ID NO: 23711 - DNA, 21 bp, synthetic construct
  misc_feature 1..21: note = Description of Artificial Sequence: Synthetic oligonucleotide
  source 1..21: mol_type = other DNA
ctcgccgccggcagcagcggc

SEQ ID NO: 23712 - DNA, 21 bp, synthetic construct
  misc_feature 1..21: note = Description of Artificial Sequence: Synthetic oligonucleotide
  source 1..21: mol_type = other DNA
aacctcagcaccgccggcagc

SEQ ID NO: 23713 - DNA, 21 bp, synthetic construct
  misc_feature 1..21: note = Description of Artificial Sequence: Synthetic oligonucleotide
  source 1..21: mol_type = other DNA
accagcaacgccaacaacaaa

SEQ ID NO: 23714 - DNA, 21 bp, synthetic construct
  misc_feature 1..21: note = Description of Artificial Sequence: Synthetic oligonucleotide
  source 1..21: mol_type = other DNA
agaggcaccccccccagcgac

SEQ ID NO: 23715 - DNA, 21 bp, synthetic construct
  misc_feature 1..21: note = Description of Artificial Sequence: Synthetic oligonucleotide
  source 1..21: mol_type = other DNA
agcgccaaccaagccggcagc

SEQ ID NO: 23716 - DNA, 21 bp, synthetic construct
  misc_feature 1..21: note = Description of Artificial Sequence: Synthetic oligonucleotide
  source 1..21: mol_type = other DNA
cagaagggtgagactgtggcg

SEQ ID NO: 23717 - DNA, 21 bp, synthetic construct
  misc_feature 1..21: note = Description of Artificial Sequence: Synthetic oligonucleotide
  source 1..21: mol_type = other DNA
tctcagtcgtctggtgtgagt

SEQ ID NO: 23718 - DNA, 21 bp, synthetic construct
  misc_feature 1..21: note = Description of Artificial Sequence: Synthetic oligonucleotide
  source 1..21: mol_type = other DNA
ctgtctggtaaggctgggggt

SEQ ID NO: 23719 - DNA, 21 bp, synthetic construct
  misc_feature 1..21: note = Description of Artificial Sequence: Synthetic oligonucleotide
  source 1..21: mol_type = other DNA
agcagcggcagcaaccacatc

SEQ ID NO: 23720 - DNA, 21 bp, synthetic construct
  misc_feature 1..21: note = Description of Artificial Sequence: Synthetic oligonucleotide
  source 1..21: mol_type = other DNA
aggcagggttctactcctgct

SEQ ID NO: 23721 - DNA, 21 bp, synthetic construct
  misc_feature 1..21: note = Description of Artificial Sequence: Synthetic oligonucleotide
  source 1..21: mol_type = other DNA
gacgccctcagcaaaaccagc

SEQ ID NO: 23722 - DNA, 21 bp, synthetic construct
  misc_feature 1..21: note = Description of Artificial Sequence: Synthetic oligonucleotide
  source 1..21: mol_type = other DNA
ggcgccagaagccccaccaac

SEQ ID NO: 23723 - DNA, 21 bp, synthetic construct
  misc_feature 1..21: note = Description of Artificial Sequence: Synthetic oligonucleotide
  source 1..21: mol_type = other DNA
ctgcctacgcagcattcttcg

SEQ ID NO: 23724 - DNA, 21 bp, synthetic construct
  misc_feature 1..21: note = Description of Artificial Sequence: Synthetic oligonucleotide
  source 1..21: mol_type = other DNA
gttacttcgtctggttctcag

SEQ ID NO: 23725 - DNA, 21 bp, synthetic construct
  misc_feature 1..21: note = Description of Artificial Sequence: Synthetic oligonucleotide
  source 1..21: mol_type = other DNA
aaaaccgaaagccccatggcc

SEQ ID NO: 23726 - DNA, 21 bp, synthetic construct
  misc_feature 1..21: note = Description of Artificial Sequence: Synthetic oligonucleotide
  source 1..21: mol_type = other DNA
acccccgaccaaaaaatggtc

SEQ ID NO: 23727 - DNA, 21 bp, synthetic construct
  misc_feature 1..21: note = Description of Artificial Sequence: Synthetic oligonucleotide
  source 1..21: mol_type = other DNA
agcaacatggaaagacccagc

SEQ ID NO: 23728 - DNA, 21 bp, synthetic construct
  misc_feature 1..21: note = Description of Artificial Sequence: Synthetic oligonucleotide
  source 1..21: mol_type = other DNA
agcaacgacaaactcaacgcc

SEQ ID NO: 23729 - DNA, 21 bp, synthetic construct
  misc_feature 1..21: note = Description of Artificial Sequence: Synthetic oligonucleotide
  source 1..21: mol_type = other DNA
ctgctgagtaataagtcgggg

SEQ ID NO: 23730 - DNA, 21 bp, synthetic construct
  misc_feature 1..21: note = Description of Artificial Sequence: Synthetic oligonucleotide
  source 1..21: mol_type = other DNA
gccggcgccagccccggcaga

SEQ ID NO: 23731 - DNA, 21 bp, synthetic construct
  misc_feature 1..21: note = Description of Artificial Sequence: Synthetic oligonucleotide
  source 1..21: mol_type = other DNA
tctgggcagggtgagcatagt

SEQ ID NO: 23732 - DNA, 21 bp, synthetic construct
  misc_feature 1..21: note = Description of Artificial Sequence: Synthetic oligonucleotide
  source 1..21: mol_type = other DNA
accggcaaacccagcaccctc

SEQ ID NO: 23733 - DNA, 21 bp, synthetic construct
  misc_feature 1..21: note = Description of Artificial Sequence: Synthetic oligonucleotide
  source 1..21: mol_type = other DNA
tctcctacggagcctgtgagg

SEQ ID NO: 23734 - DNA, 21 bp, synthetic construct
  misc_feature 1..21: note = Description of Artificial Sequence: Synthetic oligonucleotide
  source 1..21: mol_type = other DNA
ggtgcgggtacgcatggtgcg

SEQ ID NO: 23735 - DNA, 21 bp, synthetic construct
  misc_feature 1..21: note = Description of Artificial Sequence: Synthetic oligonucleotide
  source 1..21: mol_type = other DNA
aaccaacaacaaaccaccacc

SEQ ID NO: 23736 - DNA, 21 bp, synthetic construct
  misc_feature 1..21: note = Description of Artificial Sequence: Synthetic oligonucleotide
  source 1..21: mol_type = other DNA
gagggttcgagtccggttatg

SEQ ID NO: 23737 - DNA, 21 bp, synthetic construct
  misc_feature 1..21: note = Description of Artificial Sequence: Synthetic oligonucleotide
  source 1..21: mol_type = other DNA
tcgcgtgagaatgttcctagt

SEQ ID NO: 23738 - DNA, 21 bp, synthetic construct
  misc_feature 1..21: note = Description of Artificial Sequence: Synthetic oligonucleotide
  source 1..21: mol_type = other DNA
tctgggcagactcagcgtgcg

SEQ ID NO: 23739 - DNA, 21 bp, synthetic construct
  misc_feature 1..21: note = Description of Artificial Sequence: Synthetic oligonucleotide
  source 1..21: mol_type = other DNA
actggtgttagtggtcatttg

SEQ ID NO: 23740 - DNA, 21 bp, synthetic construct
  misc_feature 1..21: note = Description of Artificial Sequence: Synthetic oligonucleotide
  source 1..21: mol_type = other DNA
gaggcgcagtcgggttctcgg

SEQ ID NO: 23741 - DNA, 21 bp, synthetic construct
  misc_feature 1..21: note = Description of Artificial Sequence: Synthetic oligonucleotide
  source 1..21: mol_type = other DNA
acgaatgcttcgaagccgtct

SEQ ID NO: 23742 - DNA, 21 bp, synthetic construct
  misc_feature 1..21: note = Description of Artificial Sequence: Synthetic oligonucleotide
  source 1..21: mol_type = other DNA
aacaccggccaaaaaggcctc

SEQ ID NO: 23743 - DNA, 21 bp, synthetic construct
  misc_feature 1..21: note = Description of Artificial Sequence: Synthetic oligonucleotide
  source 1..21: mol_type = other DNA
gtcaaagacgcccccaaaacc

SEQ ID NO: 23744 - DNA, 21 bp, synthetic construct
  misc_feature 1..21: note = Description of Artificial Sequence: Synthetic oligonucleotide
  source 1..21: mol_type = other DNA
caggtgggtaagaatcctctg

SEQ ID NO: 23745 - DNA, 21 bp, synthetic construct
  misc_feature 1..21: note = Description of Artificial Sequence: Synthetic oligonucleotide
  source 1..21: mol_type = other DNA
gacaaacaaaaaagcagctac

SEQ ID NO: 23746 - DNA, 21 bp, synthetic construct
  misc_feature 1..21: note = Description of Artificial Sequence: Synthetic oligonucleotide
  source 1..21: mol_type = other DNA
gatggttcggggaatttgagg

SEQ ID NO: 23747 - DNA, 21 bp, synthetic construct
  misc_feature 1..21: note = Description of Artificial Sequence: Synthetic oligonucleotide
  source 1..21: mol_type = other DNA
gccgaacaaagcgtcaccaaa

SEQ ID NO: 23748 - DNA, 21 bp, synthetic construct
  misc_feature 1..21: note = Description of Artificial Sequence: Synthetic oligonucleotide
  source 1..21: mol_type = other DNA
gcgggtgtgacggggcatagg

SEQ ID NO: 23749 - DNA, 21 bp, synthetic construct
  misc_feature 1..21: note = Description of Artificial Sequence: Synthetic oligonucleotide
  source 1..21: mol_type = other DNA
gttaagggtcaggcgggtcag

SEQ ID NO: 23750 - DNA, 21 bp, synthetic construct
  misc_feature 1..21: note = Description of Artificial Sequence: Synthetic oligonucleotide
  source 1..21: mol_type = other DNA
attggtacgggggcgtctagg

SEQ ID NO: 23751 - DNA, 21 bp, synthetic construct
  misc_feature 1..21: note = Description of Artificial Sequence: Synthetic oligonucleotide
  source 1..21: mol_type = other DNA
tcgagtaagccttctcctgat

SEQ ID NO: 23752 - DNA, 21 bp, synthetic construct
  misc_feature 1..21: note = Description of Artificial Sequence: Synthetic oligonucleotide
  source 1..21: mol_type = other DNA
atccacaacgacagcgtcaaa

SEQ ID NO: 23753 - DNA, 21 bp, synthetic construct
  misc_feature 1..21: note = Description of Artificial Sequence: Synthetic oligonucleotide
  source 1..21: mol_type = other DNA
caaaaccccgccgccaccagc

SEQ ID NO: 23754 - DNA, 21 bp, synthetic construct
  misc_feature 1..21: note = Description of Artificial Sequence: Synthetic oligonucleotide
  source 1..21: mol_type = other DNA
agaaccgaaagcaccgccaga

SEQ ID NO: 23755 - DNA, 21 bp, synthetic construct
  misc_feature 1..21: note = Description of Artificial Sequence: Synthetic oligonucleotide
  source 1..21: mol_type = other DNA
atgaacaccggcagccccacc

SEQ ID NO: 23756 - DNA, 21 bp, synthetic construct
  misc_feature 1..21: note = Description of Artificial Sequence: Synthetic oligonucleotide
  source 1..21: mol_type = other DNA
gccggcgaaggcaaactcagc

SEQ ID NO: 23757 - DNA, 21 bp, synthetic construct
  misc_feature 1..21: note = Description of Artificial Sequence: Synthetic oligonucleotide
  source 1..21: mol_type = other DNA
tcttcttctaatgcgatgaag

SEQ ID NO: 23758 - DNA, 21 bp, synthetic construct
  misc_feature 1..21: note = Description of Artificial Sequence: Synthetic oligonucleotide
  source 1..21: mol_type = other DNA
accgacggcaaacaccaaggc

SEQ ID NO: 23759 - DNA, 21 bp, synthetic construct
  misc_feature 1..21: note = Description of Artificial Sequence: Synthetic oligonucleotide
  source 1..21: mol_type = other DNA
gatgcgagtcctgggcatact

SEQ ID NO: 23760 - DNA, 21 bp, synthetic construct
  misc_feature 1..21: note = Description of Artificial Sequence: Synthetic oligonucleotide
  source 1..21: mol_type = other DNA
tctactggtagtcagagtcct

SEQ ID NO: 23761 - DNA, 21 bp, synthetic construct
  misc_feature 1..21: note = Description of Artificial Sequence: Synthetic oligonucleotide
  source 1..21: mol_type = other DNA
ctgaatggtgctacgacggct

SEQ ID NO: 23762 - DNA, 21 bp, synthetic construct
  misc_feature 1..21: note = Description of Artificial Sequence: Synthetic oligonucleotide
  source 1..21: mol_type = other DNA
aacctcaccagcagcggcggc

SEQ ID NO: 23763 - DNA, 21 bp, synthetic construct
  misc_feature 1..21: note = Description of Artificial Sequence: Synthetic oligonucleotide
  source 1..21: mol_type = other DNA
aacgccagcagcgaaagacac

SEQ ID NO: 23764 - DNA, 21 bp, synthetic construct
  misc_feature 1..21: note = Description of Artificial Sequence: Synthetic oligonucleotide
  source 1..21: mol_type = other DNA
agcctccccagcaacggcggc

SEQ ID NO: 23765 - DNA, 21 bp, synthetic construct
  misc_feature 1..21: note = Description of Artificial Sequence: Synthetic oligonucleotide
  source 1..21: mol_type = other DNA
atggacagcagaaacagcggc

SEQ ID NO: 23766 - DNA, 21 bp, synthetic construct
  misc_feature 1..21: note = Description of Artificial Sequence: Synthetic oligonucleotide
  source 1..21: mol_type = other DNA
ggggctagtaagggtccttat

SEQ ID NO: 23767 - DNA, 21 bp, synthetic construct
  misc_feature 1..21: note = Description of Artificial Sequence: Synthetic oligonucleotide
  source 1..21: mol_type = other DNA
tcgttggctcagacgcctaag

SEQ ID NO: 23768 - DNA, 21 bp, synthetic construct
  misc_feature 1..21: note = Description of Artificial Sequence: Synthetic oligonucleotide
  source 1..21: mol_type = other DNA
cacagcgaaagcaaacaaagc

SEQ ID NO: 23769 - DNA, 21 bp, synthetic construct
  misc_feature 1..21: note = Description of Artificial Sequence: Synthetic oligonucleotide
  source 1..21: mol_type = other DNA
aaagtcaccgacaaaagcctc

SEQ ID NO: 23770 - DNA, 21 bp, synthetic construct
  misc_feature 1..21: note = Description of Artificial Sequence: Synthetic oligonucleotide
  source 1..21: mol_type = other DNA
caaatgcccggcgaacacagc

SEQ ID NO: 23771 - DNA, 21 bp, synthetic construct
  misc_feature 1..21: note = Description of Artificial Sequence: Synthetic oligonucleotide
  source 1..21: mol_type = other DNA
caagacacccaacaacccaga

SEQ ID NO: 23772 - DNA, 21 bp, synthetic construct
  misc_feature 1..21: note = Description of Artificial Sequence: Synthetic oligonucleotide
  source 1..21: mol_type = other DNA
caaggcaaaaccggcagcacc

SEQ ID NO: 23773 - DNA, 21 bp, synthetic construct
  misc_feature 1..21: note = Description of Artificial Sequence: Synthetic oligonucleotide
  source 1..21: mol_type = other DNA
ggcaacagcaccagcgccgtc

SEQ ID NO: 23774 - DNA, 21 bp, synthetic construct
  misc_feature 1..21: note = Description of Artificial Sequence: Synthetic oligonucleotide
  source 1..21: mol_type = other DNA
ggcggcaacagcaaaggcgtc

SEQ ID NO: 23775 - DNA, 21 bp, synthetic construct
  misc_feature 1..21: note = Description of Artificial Sequence: Synthetic oligonucleotide
  source 1..21: mol_type = other DNA
tcgagtgcggggtcttctgcg

SEQ ID NO: 23776 - DNA, 21 bp, synthetic construct
  misc_feature 1..21: note = Description of Artificial Sequence: Synthetic oligonucleotide
  source 1..21: mol_type = other DNA
cagggggatgcggctagggtt

SEQ ID NO: 23777 - DNA, 21 bp, synthetic construct
  misc_feature 1..21: note = Description of Artificial Sequence: Synthetic oligonucleotide
  source 1..21: mol_type = other DNA
catcatgggcagaatgggtcg

SEQ ID NO: 23778 - DNA, 21 bp, synthetic construct
  misc_feature 1..21: note = Description of Artificial Sequence: Synthetic oligonucleotide
  source 1..21: mol_type = other DNA
gccaacgaacccaacctcaga

SEQ ID NO: 23779 - DNA, 21 bp, synthetic construct
  misc_feature 1..21: note = Description of Artificial Sequence: Synthetic oligonucleotide
  source 1..21: mol_type = other DNA
gttaattcggggcatactgtt

SEQ ID NO: 23780 - DNA, 21 bp, synthetic construct
  misc_feature 1..21: note = Description of Artificial Sequence: Synthetic oligonucleotide
  source 1..21: mol_type = other DNA
gttccttcgagtcagagtaag

SEQ ID NO: 23781 - DNA, 21 bp, synthetic construct
  misc_feature 1..21: note = Description of Artificial Sequence: Synthetic oligonucleotide
  source 1..21: mol_type = other DNA
ggcctcagcaccaaagacagc

SEQ ID NO: 23782 - DNA, 21 bp, synthetic construct
  misc_feature 1..21: note = Description of Artificial Sequence: Synthetic oligonucleotide
  source 1..21: mol_type = other DNA
agtactcagccgtcggttaag

SEQ ID NO: 23783 - DNA, 21 bp, synthetic construct
  misc_feature 1..21: note = Description of Artificial Sequence: Synthetic oligonucleotide
  source 1..21: mol_type = other DNA
cagatgtcggagcccaagcag

SEQ ID NO: 23784 - DNA, 21 bp, synthetic construct
  misc_feature 1..21: note = Description of Artificial Sequence: Synthetic oligonucleotide
  source 1..21: mol_type = other DNA
aaccacaacccccccagcggc

SEQ ID NO: 23785 - DNA, 21 bp, synthetic construct
  misc_feature 1..21: note = Description of Artificial Sequence: Synthetic oligonucleotide
  source 1..21: mol_type = other DNA
aagggtcagcttgctaatgtt

SEQ ID NO: 23786 - DNA, 21 bp, synthetic construct
  misc_feature 1..21: note = Description of Artificial Sequence: Synthetic oligonucleotide
  source 1..21: mol_type = other DNA
accgacaccgccaaccccaga

SEQ ID NO: 23787 - DNA, 21 bp, synthetic construct
  misc_feature 1..21: note = Description of Artificial Sequence: Synthetic oligonucleotide
  source 1..21: mol_type = other DNA
agcgtccaaagaaacggcgaa

SEQ ID NO: 23788 - DNA, 21 bp, synthetic construct
  misc_feature 1..21: note = Description of Artificial Sequence: Synthetic oligonucleotide
  source 1..21: mol_type = other DNA
ggcaccaaaagccccacccaa

SEQ ID NO: 23789 - DNA, 21 bp, synthetic construct
  misc_feature 1..21: note = Description of Artificial Sequence: Synthetic oligonucleotide
  source 1..21: mol_type = other DNA
tctagtacgtctactcatggg

SEQ ID NO: 23790 - DNA, 21 bp, synthetic construct
  misc_feature 1..21: note = Description of Artificial Sequence: Synthetic oligonucleotide
  source 1..21: mol_type = other DNA
ggggtgacgaagggttcgtcg

SEQ ID NO: 23791 - DNA, 21 bp, synthetic construct
  misc_feature 1..21: note = Description of Artificial Sequence: Synthetic oligonucleotide
  source 1..21: mol_type = other DNA
aacagcggcagcaacggcggc

SEQ ID NO: 23792 - DNA, 21 bp, synthetic construct
  misc_feature 1..21: note = Description of Artificial Sequence: Synthetic oligonucleotide
  source 1..21: mol_type = other DNA
agcgtcggcagcaccaacggc

SEQ ID NO: 23793 - DNA, 21 bp, synthetic construct
  misc_feature 1..21: note = Description of Artificial Sequence: Synthetic oligonucleotide
  source 1..21: mol_type = other DNA
gatgttgctacttctaatcgt

SEQ ID NO: 23794 - DNA, 21 bp, synthetic construct
  misc_feature 1..21: note = Description of Artificial Sequence: Synthetic oligonucleotide
  source 1..21: mol_type = other DNA
ggtttggtgaagccgaatatg

SEQ ID NO: 23795 - DNA, 21 bp, synthetic construct
  misc_feature 1..21: note = Description of Artificial Sequence: Synthetic oligonucleotide
  source 1..21: mol_type = other DNA
agcaaagccagcgcccccagc

SEQ ID NO: 23796 - DNA, 21 bp, synthetic construct
  misc_feature 1..21: note = Description of Artificial Sequence: Synthetic oligonucleotide
  source 1..21: mol_type = other DNA
agcatgagcagcagcaacacc

SEQ ID NO: 23797 - DNA, 21 bp, synthetic construct
  misc_feature 1..21: note = Description of Artificial Sequence: Synthetic oligonucleotide
  source 1..21: mol_type = other DNA
agcggcgccggcggcaccagc

SEQ ID NO: 23798 - DNA, 21 bp, synthetic construct
  misc_feature 1..21: note = Description of Artificial Sequence: Synthetic oligonucleotide
  source 1..21: mol_type = other DNA
atgagggataatcagacgcag

SEQ ID NO: 23799 - DNA, 21 bp, synthetic construct
  misc_feature 1..21: note = Description of Artificial Sequence: Synthetic oligonucleotide
  source 1..21: mol_type = other DNA
gggaataagcagcagccgctt

SEQ ID NO: 23800 - DNA, 21 bp, synthetic construct
  misc_feature 1..21: note = Description of Artificial Sequence: Synthetic oligonucleotide
  source 1..21: mol_type = other DNA
tcgccgttgagttcgaaggat

SEQ ID NO: 23801 - DNA, 21 bp, synthetic construct
  misc_feature 1..21: note = Description of Artificial Sequence: Synthetic oligonucleotide
  source 1..21: mol_type = other DNA
acgggtagtgatcctcttaag

SEQ ID NO: 23802 - DNA, 21 bp, synthetic construct
  misc_feature 1..21: note = Description of Artificial Sequence: Synthetic oligonucleotide
  source 1..21: mol_type = other DNA
atgactactgggagtactccg

SEQ ID NO: 23803 - DNA, 21 bp, synthetic construct
  misc_feature 1..21: note = Description of Artificial Sequence: Synthetic oligonucleotide
  source 1..21: mol_type = other DNA
cagaatgatggtaatcggcat

SEQ ID NO: 23804 - DNA, 21 bp, synthetic construct
  misc_feature 1..21: note = Description of Artificial Sequence: Synthetic oligonucleotide
  source 1..21: mol_type = other DNA
gatagtggtaatggtaagctg

SEQ ID NO: 23805 - DNA, 21 bp, synthetic construct
  misc_feature 1..21: note = Description of Artificial Sequence: Synthetic oligonucleotide
  source 1..21: mol_type = other DNA
gccagagacaacaacaacatc

SEQ ID NO: 23806 - DNA, 21 bp, synthetic construct
  misc_feature 1..21: note = Description of Artificial Sequence: Synthetic oligonucleotide
  source 1..21: mol_type = other DNA
agcaccaccagccccaacagc

SEQ ID NO: 23807 - DNA, 21 bp, synthetic construct
  misc_feature 1..21: note = Description of Artificial Sequence: Synthetic oligonucleotide
  source 1..21: mol_type = other DNA
aacagaaccaccagcagccaa

SEQ ID NO: 23808 - DNA, 21 bp, synthetic construct
  misc_feature 1..21: note = Description of Artificial Sequence: Synthetic oligonucleotide
  source 1..21: mol_type = other DNA
atcgccaccagccacagcacc

SEQ ID NO: 23809 - DNA, 21 bp, synthetic construct
  misc_feature 1..21: note = Description of Artificial Sequence: Synthetic oligonucleotide
  source 1..21: mol_type = other DNA
caaccccaaaaagacagcgtc

SEQ ID NO: 23810 - DNA, 21 bp, synthetic construct
  misc_feature 1..21: note = Description of Artificial Sequence: Synthetic oligonucleotide
  source 1..21: mol_type = other DNA
cacgccggcaaaaccaccctc

SEQ ID NO: 23811 - DNA, 21 bp, synthetic construct
  misc_feature 1..21: note = Description of Artificial Sequence: Synthetic oligonucleotide
  source 1..21: mol_type = other DNA
ctccaagccgccggcagcacc

SEQ ID NO: 23812 - DNA, 21 bp, synthetic construct
  misc_feature 1..21: note = Description of Artificial Sequence: Synthetic oligonucleotide
  source 1..21: mol_type = other DNA
cagggttctgctccggtgcag

SEQ ID NO: 23813 - DNA, 21 bp, synthetic construct
  misc_feature 1..21: note = Description of Artificial Sequence: Synthetic oligonucleotide
  source 1..21: mol_type = other DNA
acgtcgggtaatacgtcgggt

SEQ ID NO: 23814 - DNA, 21 bp, synthetic construct
  misc_feature 1..21: note = Description of Artificial Sequence: Synthetic oligonucleotide
  source 1..21: mol_type = other DNA
caggtgaagactccgaatgtg

SEQ ID NO: 23815 - DNA, 21 bp, synthetic construct
  misc_feature 1..21: note = Description of Artificial Sequence: Synthetic oligonucleotide
  source 1..21: mol_type = other DNA
agcggcaacacccccagcctc

SEQ ID NO: 23816 - DNA, 21 bp, synthetic construct
  misc_feature 1..21: note = Description of Artificial Sequence: Synthetic oligonucleotide
  source 1..21: mol_type = other DNA
gggaatacgcagggtatttcg

SEQ ID NO: 23817 - DNA, 21 bp, synthetic construct
  misc_feature 1..21: note = Description of Artificial Sequence: Synthetic oligonucleotide
  source 1..21: mol_type = other DNA
aaaggcaccaacggcgccagc

SEQ ID NO: 23818 - DNA, 21 bp, synthetic construct
  misc_feature 1..21: note = Description of Artificial Sequence: Synthetic oligonucleotide
  source 1..21: mol_type = other DNA
aattcggggcagaagattgat

SEQ ID NO: 23819 - DNA, 21 bp, synthetic construct
  misc_feature 1..21: note = Description of Artificial Sequence: Synthetic oligonucleotide
  source 1..21: mol_type = other DNA
accaaaatcagcggcgccacc

SEQ ID NO: 23820 - DNA, 21 bp, synthetic construct
  misc_feature 1..21: note = Description of Artificial Sequence: Synthetic oligonucleotide
  source 1..21: mol_type = other DNA
accatgcccaaaggcgacaac

SEQ ID NO: 23821 - DNA, 21 bp, synthetic construct
  misc_feature 1..21: note = Description of Artificial Sequence: Synthetic oligonucleotide
  source 1..21: mol_type = other DNA
acgcgttcgaattcgaataat

SEQ ID NO: 23822 - DNA, 21 bp, synthetic construct
  misc_feature 1..21: note = Description of Artificial Sequence: Synthetic oligonucleotide
  source 1..21: mol_type = other DNA
acgggtgatagtcctactcat

SEQ ID NO: 23823 - DNA, 21 bp, synthetic construct
  misc_feature 1..21: note = Description of Artificial Sequence: Synthetic oligonucleotide
  source 1..21: mol_type = other DNA
actcctggtacttcgcgggtt

SEQ ID NO: 23824 - DNA, 21 bp, synthetic construct
  misc_feature 1..21: note = Description of Artificial Sequence: Synthetic oligonucleotide
  source 1..21: mol_type = other DNA
acttctccgggtagtcatact

SEQ ID NO: 23825 - DNA, 21 bp, synthetic construct
  misc_feature 1..21: note = Description of Artificial Sequence: Synthetic oligonucleotide
  source 1..21: mol_type = other DNA
agcaaaagcaccctcgccacc

SEQ ID NO: 23826 - DNA, 21 bp, synthetic construct
  misc_feature 1..21: note = Description of Artificial Sequence: Synthetic oligonucleotide
  source 1..21: mol_type = other DNA
agcaccgccagcaaccccgtc

SEQ ID NO: 23827 - DNA, 21 bp, synthetic construct
  misc_feature 1..21: note = Description of Artificial Sequence: Synthetic oligonucleotide
  source 1..21: mol_type = other DNA
agcagcaccaacgcccaaagc

SEQ ID NO: 23828 - DNA, 21 bp, synthetic construct
  misc_feature 1..21: note = Description of Artificial Sequence: Synthetic oligonucleotide
  source 1..21: mol_type = other DNA
agcgccgacaccaaaaccagc

SEQ ID NO: 23829 - DNA, 21 bp, synthetic construct
  misc_feature 1..21: note = Description of Artificial Sequence: Synthetic oligonucleotide
  source 1..21: mol_type = other DNA
agtcctatggcgagtaagggt

SEQ ID NO: 23830 - DNA, 21 bp, synthetic construct
  misc_feature 1..21: note = Description of Artificial Sequence: Synthetic oligonucleotide
  source 1..21: mol_type = other DNA
agtggtgatacggtgcatcgt

SEQ ID NO: 23831 - DNA, 21 bp, synthetic construct
  misc_feature 1..21: note = Description of Artificial Sequence: Synthetic oligonucleotide
  source 1..21: mol_type = other DNA
caaaccggcagagacagcacc

SEQ ID NO: 23832 - DNA, 21 bp, synthetic construct
  misc_feature 1..21: note = Description of Artificial Sequence: Synthetic oligonucleotide
  source 1..21: mol_type = other DNA
cagcctaataatggtactagg

SEQ ID NO: 23833 - DNA, 21 bp, synthetic construct
  misc_feature 1..21: note = Description of Artificial Sequence: Synthetic oligonucleotide
  source 1..21: mol_type = other DNA
cagcctgcgaaggggaatatg

SEQ ID NO: 23834 - DNA, 21 bp, synthetic construct
  misc_feature 1..21: note = Description of Artificial Sequence: Synthetic oligonucleotide
  source 1..21: mol_type = other DNA
cggaatggtcagacggctggt

SEQ ID NO: 23835 - DNA, 21 bp, synthetic construct
  misc_feature 1..21: note = Description of Artificial Sequence: Synthetic oligonucleotide
  source 1..21: mol_type = other DNA
cttaagagttcttcggggggt

SEQ ID NO: 23836 - DNA, 21 bp, synthetic construct
  misc_feature 1..21: note = Description of Artificial Sequence: Synthetic oligonucleotide
  source 1..21: mol_type = other DNA
gaaatcaacaaaagcaacatg

SEQ ID NO: 23837 - DNA, 21 bp, synthetic construct
  misc_feature 1..21: note = Description of Artificial Sequence: Synthetic oligonucleotide
  source 1..21: mol_type = other DNA
gacagaggcggcagcacccac

SEQ ID NO: 23838 - DNA, 21 bp, synthetic construct
  misc_feature 1..21: note = Description of Artificial Sequence: Synthetic oligonucleotide
  source 1..21: mol_type = other DNA
gacagcggccacgaaaaaccc

SEQ ID NO: 23839 - DNA, 21 bp, synthetic construct
  misc_feature 1..21: note = Description of Artificial Sequence: Synthetic oligonucleotide
  source 1..21: mol_type = other DNA
gagacgggtagtgagaggact

SEQ ID NO: 23840 - DNA, 21 bp, synthetic construct
  misc_feature 1..21: note = Description of Artificial Sequence: Synthetic oligonucleotide
  source 1..21: mol_type = other DNA
gaggcgaaggagcctcgttct

SEQ ID NO: 23841 - DNA, 21 bp, synthetic construct
  misc_feature 1..21: note = Description of Artificial Sequence: Synthetic oligonucleotide
  source 1..21: mol_type = other DNA
gaggggggttcgactcaggtg

SEQ ID NO: 23842 - DNA, 21 bp, synthetic construct
  misc_feature 1..21: note = Description of Artificial Sequence: Synthetic oligonucleotide
  source 1..21: mol_type = other DNA
gagggttctcgtaagatggat

SEQ ID NO: 23843 - DNA, 21 bp, synthetic construct
  misc_feature 1..21: note = Description of Artificial Sequence: Synthetic oligonucleotide
  source 1..21: mol_type = other DNA
gatgttaatgatcgtcgtacg

SEQ ID NO: 23844 - DNA, 21 bp, synthetic construct
  misc_feature 1..21: note = Description of Artificial Sequence: Synthetic oligonucleotide
  source 1..21: mol_type = other DNA
gccaaagccgacaaaaacacc

SEQ ID NO: 23845 - DNA, 21 bp, synthetic construct
  misc_feature 1..21: note = Description of Artificial Sequence: Synthetic oligonucleotide
  source 1..21: mol_type = other DNA
gcgggggggcaggttactagg

SEQ ID NO: 23846 - DNA, 21 bp, synthetic construct
  misc_feature 1..21: note = Description of Artificial Sequence: Synthetic oligonucleotide
  source 1..21: mol_type = other DNA
gctggtcattctgcgcctgct

SEQ ID NO: 23847 - DNA, 21 bp, synthetic construct
  misc_feature 1..21: note = Description of Artificial Sequence: Synthetic oligonucleotide
  source 1..21: mol_type = other DNA
ggcatcaccagcagcaacaaa

SEQ ID NO: 23848 - DNA, 21 bp, synthetic construct
  misc_feature 1..21: note = Description of Artificial Sequence: Synthetic oligonucleotide
  source 1..21: mol_type = other DNA
ggtaagggtaatagtacggcg

SEQ ID NO: 23849 - DNA, 21 bp, synthetic construct
  misc_feature 1..21: note = Description of Artificial Sequence: Synthetic oligonucleotide
  source 1..21: mol_type = other DNA
tcgacgaatgctcattcgggt

SEQ ID NO: 23850 - DNA, 21 bp, synthetic construct
  misc_feature 1..21: note = Description of Artificial Sequence: Synthetic oligonucleotide
  source 1..21: mol_type = other DNA
tctgatagtcgggctactgtg

SEQ ID NO: 23851 - DNA, 21 bp, synthetic construct
  misc_feature 1..21: note = Description of Artificial Sequence: Synthetic oligonucleotide
  source 1..21: mol_type = other DNA
tctgtgaattcgccggcgctc

SEQ ID NO: 23852 - DNA, 21 bp, synthetic construct
  misc_feature 1..21: note = Description of Artificial Sequence: Synthetic oligonucleotide
  source 1..21: mol_type = other DNA
ggcagcagcaaaggcagcggc

SEQ ID NO: 23853 - DNA, 21 bp, synthetic construct
  misc_feature 1..21: note = Description of Artificial Sequence: Synthetic oligonucleotide
  source 1..21: mol_type = other DNA
gccggcggcgaaagacccaac

SEQ ID NO: 23854 - DNA, 21 bp, synthetic construct
  misc_feature 1..21: note = Description of Artificial Sequence: Synthetic oligonucleotide
  source 1..21: mol_type = other DNA
agtggtagtgatcgtactcgt

SEQ ID NO: 23855 - DNA, 21 bp, synthetic construct
  misc_feature 1..21: note = Description of Artificial Sequence: Synthetic oligonucleotide
  source 1..21: mol_type = other DNA
gccaccaccagcgacagaagc

SEQ ID NO: 23856 - DNA, 21 bp, synthetic construct
  misc_feature 1..21: note = Description of Artificial Sequence: Synthetic oligonucleotide
  source 1..21: mol_type = other DNA
gagcgtagtcagtcggtgtcg

SEQ ID NO: 23857 - DNA, 21 bp, synthetic construct
  misc_feature 1..21: note = Description of Artificial Sequence: Synthetic oligonucleotide
  source 1..21: mol_type = other DNA
agcagaacccaaagcgtcagc

SEQ ID NO: 23858 - DNA, 21 bp, synthetic construct
  misc_feature 1..21: note = Description of Artificial Sequence: Synthetic oligonucleotide
  source 1..21: mol_type = other DNA
gacggcagcagcacccacatc

SEQ ID NO: 23859 - DNA, 21 bp, synthetic construct
  misc_feature 1..21: note = Description of Artificial Sequence: Synthetic oligonucleotide
  source 1..21: mol_type = other DNA
acggcgacgcaggctagtact

SEQ ID NO: 23860 - DNA, 21 bp, synthetic construct
  misc_feature 1..21: note = Description of Artificial Sequence: Synthetic oligonucleotide
  source 1..21: mol_type = other DNA
gggtctgctactcagcattcg

SEQ ID NO: 23861 - DNA, 21 bp, synthetic construct
  misc_feature 1..21: note = Description of Artificial Sequence: Synthetic oligonucleotide
  source 1..21: mol_type = other DNA
ttcaccgaacccagcagcaaa

SEQ ID NO: 23862 - DNA, 21 bp, synthetic construct
  misc_feature 1..21: note = Description of Artificial Sequence: Synthetic oligonucleotide
  source 1..21: mol_type = other DNA
gatcagactatgaagactggt

SEQ ID NO: 23863 - DNA, 21 bp, synthetic construct
  misc_feature 1..21: note = Description of Artificial Sequence: Synthetic oligonucleotide
  source 1..21: mol_type = other DNA
gacctccaacccaccagcaga

SEQ ID NO: 23864 - DNA, 21 bp, synthetic construct
  misc_feature 1..21: note = Description of Artificial Sequence: Synthetic oligonucleotide
  source 1..21: mol_type = other DNA
gtgcagagtggtaaggggtcg

SEQ ID NO: 23865 - DNA, 21 bp, synthetic construct
  misc_feature 1..21: note = Description of Artificial Sequence: Synthetic oligonucleotide
  source 1..21: mol_type = other DNA
tcgaggtctgatagtgttagt

SEQ ID NO: 23866 - DNA, 21 bp, synthetic construct
  misc_feature 1..21: note = Description of Artificial Sequence: Synthetic oligonucleotide
  source 1..21: mol_type = other DNA
caaaccagcaaacccagcgcc

SEQ ID NO: 23867 - DNA, 21 bp, synthetic construct
  misc_feature 1..21: note = Description of Artificial Sequence: Synthetic oligonucleotide
  source 1..21: mol_type = other DNA
caaaccagcgaaagacccgtc

SEQ ID NO: 23868 - DNA, 21 bp, synthetic construct
  misc_feature 1..21: note = Description of Artificial Sequence: Synthetic oligonucleotide
  source 1..21: mol_type = other DNA
gacagcagcagagtcagcagc

SEQ ID NO: 23869 - DNA, 21 bp, synthetic construct
  misc_feature 1..21: note = Description of Artificial Sequence: Synthetic oligonucleotide
  source 1..21: mol_type = other DNA
ggcatcggcaacgacaccacc

SEQ ID NO: 23870 - DNA, 21 bp, synthetic construct
  misc_feature 1..21: note = Description of Artificial Sequence: Synthetic oligonucleotide
  source 1..21: mol_type = other DNA
tctacggttgttaagtcggag

SEQ ID NO: 23871 - DNA, 21 bp, synthetic construct
  misc_feature 1..21: note = Description of Artificial Sequence: Synthetic oligonucleotide
  source 1..21: mol_type = other DNA
tctccggttactagtgagggg

SEQ ID NO: 23872 - DNA, 21 bp, synthetic construct
  misc_feature 1..21: note = Description of Artificial Sequence: Synthetic oligonucleotide
  source 1..21: mol_type = other DNA
ttcggcagcaccagcgcccac

SEQ ID NO: 23873 - DNA, 21 bp, synthetic construct
  misc_feature 1..21: note = Description of Artificial Sequence: Synthetic oligonucleotide
  source 1..21: mol_type = other DNA
gttggtaaggggccgtctaat

SEQ ID NO: 23874 - DNA, 21 bp, synthetic construct
  misc_feature 1..21: note = Description of Artificial Sequence: Synthetic oligonucleotide
  source 1..21: mol_type = other DNA
ggtgatcgtccgtcggctatg

SEQ ID NO: 23875 - DNA, 21 bp, synthetic construct
  misc_feature 1..21: note = Description of Artificial Sequence: Synthetic oligonucleotide
  source 1..21: mol_type = other DNA
caaagagacgtcggcgccaaa

SEQ ID NO: 23876 - DNA, 21 bp, synthetic construct
  misc_feature 1..21: note = Description of Artificial Sequence: Synthetic oligonucleotide
  source 1..21: mol_type = other DNA
acccaaggcaccacccccgtc

SEQ ID NO: 23877 - DNA, 21 bp, synthetic construct
  misc_feature 1..21: note = Description of Artificial Sequence: Synthetic oligonucleotide
  source 1..21: mol_type = other DNA
gcgaagtctgagcagggtact

SEQ ID NO: 23878 - DNA, 21 bp, synthetic construct
  misc_feature 1..21: note = Description of Artificial Sequence: Synthetic oligonucleotide
  source 1..21: mol_type = other DNA
gcgttgaatagttctaagtcg

SEQ ID NO: 23879 - DNA, 21 bp, synthetic construct
  misc_feature 1..21: note = Description of Artificial Sequence: Synthetic oligonucleotide
  source 1..21: mol_type = other DNA
ggcagcagcggcagcaaaagc

SEQ ID NO: 23880 - DNA, 21 bp, synthetic construct
  misc_feature 1..21: note = Description of Artificial Sequence: Synthetic oligonucleotide
  source 1..21: mol_type = other DNA
tcgagtagttctcaggcgaat

SEQ ID NO: 23881 - DNA, 21 bp, synthetic construct
  misc_feature 1..21: note = Description of Artificial Sequence: Synthetic oligonucleotide
  source 1..21: mol_type = other DNA
gttttgactaagggttctgcg

SEQ ID NO: 23882 - DNA, 21 bp, synthetic construct
  misc_feature 1..21: note = Description of Artificial Sequence: Synthetic oligonucleotide
  source 1..21: mol_type = other DNA
aatagggcgccgaattctgct

SEQ ID NO: 23883 - DNA, 21 bp, synthetic construct
  misc_feature 1..21: note = Description of Artificial Sequence: Synthetic oligonucleotide
  source 1..21: mol_type = other DNA
gaaggcagcagcgccagcggc

SEQ ID NO: 23884 - DNA, 21 bp, synthetic construct
  misc_feature 1..21: note = Description of Artificial Sequence: Synthetic oligonucleotide
  source 1..21: mol_type = other DNA
acgacggcttcgagtccgggt

SEQ ID NO: 23885 - DNA, 21 bp, synthetic construct
  misc_feature 1..21: note = Description of Artificial Sequence: Synthetic oligonucleotide
  source 1..21: mol_type = other DNA
agcgaagccagaggcaacaac

SEQ ID NO: 23886 - DNA, 21 bp, synthetic construct
  misc_feature 1..21: note = Description of Artificial Sequence: Synthetic oligonucleotide
  source 1..21: mol_type = other DNA
aatgagaagggtgcgactaag

SEQ ID NO: 23887 - DNA, 21 bp, synthetic construct
  misc_feature 1..21: note = Description of Artificial Sequence: Synthetic oligonucleotide
  source 1..21: mol_type = other DNA
agtagttctgagaagttgcag

SEQ ID NO: 23888 - DNA, 21 bp, synthetic construct
  misc_feature 1..21: note = Description of Artificial Sequence: Synthetic oligonucleotide
  source 1..21: mol_type = other DNA
gatggtaatcctactaaggag

SEQ ID NO: 23889 - DNA, 21 bp, synthetic construct
  misc_feature 1..21: note = Description of Artificial Sequence: Synthetic oligonucleotide
  source 1..21: mol_type = other DNA
tctggtcgggatactaattct

SEQ ID NO: 23890 - DNA, 21 bp, synthetic construct
  misc_feature 1..21: note = Description of Artificial Sequence: Synthetic oligonucleotide
  source 1..21: mol_type = other DNA
agaaccaccaccgacagcaaa

SEQ ID NO: 23891 - DNA, 21 bp, synthetic construct
  misc_feature 1..21: note = Description of Artificial Sequence: Synthetic oligonucleotide
  source 1..21: mol_type = other DNA
gaaagcagagcccccgtcagc

SEQ ID NO: 23892 - DNA, 21 bp, synthetic construct
  misc_feature 1..21: note = Description of Artificial Sequence: Synthetic oligonucleotide
  source 1..21: mol_type = other DNA
gccagaaacgacagcatgatc

SEQ ID NO: 23893 - DNA, 21 bp, synthetic construct
  misc_feature 1..21: note = Description of Artificial Sequence: Synthetic oligonucleotide
  source 1..21: mol_type = other DNA
tctactaatcaggctcctatg

SEQ ID NO: 23894 - DNA, 21 bp, synthetic construct
  misc_feature 1..21: note = Description of Artificial Sequence: Synthetic oligonucleotide
  source 1..21: mol_type = other DNA
gcggggatgcagaagtttact

SEQ ID NO: 23895 - DNA, 21 bp, synthetic construct
  misc_feature 1..21: note = Description of Artificial Sequence: Synthetic oligonucleotide
  source 1..21: mol_type = other DNA
agcagccaacccagcaacaaa

SEQ ID NO: 23896 - DNA, 21 bp, synthetic construct
  misc_feature 1..21: note = Description of Artificial Sequence: Synthetic oligonucleotide
  source 1..21: mol_type = other DNA
cagcctgggaagattgcgacg

SEQ ID NO: 23897 - DNA, 21 bp, synthetic construct
  misc_feature 1..21: note = Description of Artificial Sequence: Synthetic oligonucleotide
  source 1..21: mol_type = other DNA
cttcagaagtctccgtctatt

SEQ ID NO: 23898 - DNA, 21 bp, synthetic construct
  misc_feature 1..21: note = Description of Artificial Sequence: Synthetic oligonucleotide
  source 1..21: mol_type = other DNA
gcccccacccaaggcagcggc

SEQ ID NO: 23899 - DNA, 21 bp, synthetic construct
  misc_feature 1..21: note = Description of Artificial Sequence: Synthetic oligonucleotide
  source 1..21: mol_type = other DNA
ttgccggatggtctgaagggg

SEQ ID NO: 23900 - DNA, 21 bp, synthetic construct
  misc_feature 1..21: note = Description of Artificial Sequence: Synthetic oligonucleotide
  source 1..21: mol_type = other DNA
acgacggagcagaataggcag

SEQ ID NO: 23901 - DNA, 21 bp, synthetic construct
  misc_feature 1..21: note = Description of Artificial Sequence: Synthetic oligonucleotide
  source 1..21: mol_type = other DNA
gctgcgaatgataagttgcgt

SEQ ID NO: 23902 - DNA, 21 bp, synthetic construct
  misc_feature 1..21: note = Description of Artificial Sequence: Synthetic oligonucleotide
  source 1..21: mol_type = other DNA
acgagtggtgataagcagctt

SEQ ID NO: 23903 - DNA, 21 bp, synthetic construct
  misc_feature 1..21: note = Description of Artificial Sequence: Synthetic oligonucleotide
  source 1..21: mol_type = other DNA
acggtgactcctgcgacttct

SEQ ID NO: 23904 - DNA, 21 bp, synthetic construct
  misc_feature 1..21: note = Description of Artificial Sequence: Synthetic oligonucleotide
  source 1..21: mol_type = other DNA
cacagccaaaaaggcggcatg

SEQ ID NO: 23905 - DNA, 21 bp, synthetic construct
  misc_feature 1..21: note = Description of Artificial Sequence: Synthetic oligonucleotide
  source 1..21: mol_type = other DNA
gatccgggtgtttcggcgcgt

SEQ ID NO: 23906 - DNA, 21 bp, synthetic construct
  misc_feature 1..21: note = Description of Artificial Sequence: Synthetic oligonucleotide
  source 1..21: mol_type = other DNA
ggtacgtcgaagactcagtct

SEQ ID NO: 23907 - DNA, 21 bp, synthetic construct
  misc_feature 1..21: note = Description of Artificial Sequence: Synthetic oligonucleotide
  source 1..21: mol_type = other DNA
actgggagttctcagtctcat

SEQ ID NO: 23908 - DNA, 21 bp, synthetic construct
  misc_feature 1..21: note = Description of Artificial Sequence: Synthetic oligonucleotide
  source 1..21: mol_type = other DNA
gagcttcttcagaagcctact

SEQ ID NO: 23909 - DNA, 21 bp, synthetic construct
  misc_feature 1..21: note = Description of Artificial Sequence: Synthetic oligonucleotide
  source 1..21: mol_type = other DNA
gaggcttcgtctaatcggggt

SEQ ID NO: 23910 - DNA, 21 bp, synthetic construct
  misc_feature 1..21: note = Description of Artificial Sequence: Synthetic oligonucleotide
  source 1..21: mol_type = other DNA
ggccccggccccagcaccaac

SEQ ID NO: 23911 - DNA, 21 bp, synthetic construct
  misc_feature 1..21: note = Description of Artificial Sequence: Synthetic oligonucleotide
  source 1..21: mol_type = other DNA
gggacgggttctaagttgggg

SEQ ID NO: 23912 - DNA, 21 bp, synthetic construct
  misc_feature 1..21: note = Description of Artificial Sequence: Synthetic oligonucleotide
  source 1..21: mol_type = other DNA
gggattcatcagaattcgggg

SEQ ID NO: 23913 - DNA, 21 bp, synthetic construct
  misc_feature 1..21: note = Description of Artificial Sequence: Synthetic oligonucleotide
  source 1..21: mol_type = other DNA
agcaccggcaacccccccaga

SEQ ID NO: 23914 - DNA, 21 bp, synthetic construct
  misc_feature 1..21: note = Description of Artificial Sequence: Synthetic oligonucleotide
  source 1..21: mol_type = other DNA
gatcagcatgatcggcgtgct

SEQ ID NO: 23915 - DNA, 21 bp, synthetic construct
  misc_feature 1..21: note = Description of Artificial Sequence: Synthetic oligonucleotide
  source 1..21: mol_type = other DNA
ggcagcggcgccaacaaaccc

SEQ ID NO: 23916 - DNA, 21 bp, synthetic construct
  misc_feature 1..21: note = Description of Artificial Sequence: Synthetic oligonucleotide
  source 1..21: mol_type = other DNA
caaggcagcagcaacggcatc

SEQ ID NO: 23917 - DNA, 21 bp, synthetic construct
  misc_feature 1..21: note = Description of Artificial Sequence: Synthetic oligonucleotide
  source 1..21: mol_type = other DNA
gacagacccggcgaaaaagcc

SEQ ID NO: 23918 - DNA, 21 bp, synthetic construct
  misc_feature 1..21: note = Description of Artificial Sequence: Synthetic oligonucleotide
  source 1..21: mol_type = other DNA
gagggtgggtctagtggttcg

SEQ ID NO: 23919 - DNA, 21 bp, synthetic construct
  misc_feature 1..21: note = Description of Artificial Sequence: Synthetic oligonucleotide
  source 1..21: mol_type = other DNA
gttcaggggaagcatacgcag

SEQ ID NO: 23920 - DNA, 21 bp, synthetic construct
  misc_feature 1..21: note = Description of Artificial Sequence: Synthetic oligonucleotide
  source 1..21: mol_type = other DNA
aaccccaaaagcaccgtcacc

SEQ ID NO: 23921 - DNA, 21 bp, synthetic construct
  misc_feature 1..21: note = Description of Artificial Sequence: Synthetic oligonucleotide
  source 1..21: mol_type = other DNA
ttggcttcttcttctcagact

SEQ ID NO: 23922 - DNA, 21 bp, synthetic construct
  misc_feature 1..21: note = Description of Artificial Sequence: Synthetic oligonucleotide
  source 1..21: mol_type = other DNA
tcgcctaatggtgcgagtcgg

SEQ ID NO: 23923 - DNA, 21 bp, synthetic construct
  misc_feature 1..21: note = Description of Artificial Sequence: Synthetic oligonucleotide
  source 1..21: mol_type = other DNA
gccggcgacaaaatcagactc

SEQ ID NO: 23924 - DNA, 21 bp, synthetic construct
  misc_feature 1..21: note = Description of Artificial Sequence: Synthetic oligonucleotide
  source 1..21: mol_type = other DNA
aacggcatgaaaaccggcacc

SEQ ID NO: 23925 - DNA, 21 bp, synthetic construct
  misc_feature 1..21: note = Description of Artificial Sequence: Synthetic oligonucleotide
  source 1..21: mol_type = other DNA
agcaacggcagcaaagtcagc

SEQ ID NO: 23926 - DNA, 21 bp, synthetic construct
  misc_feature 1..21: note = Description of Artificial Sequence: Synthetic oligonucleotide
  source 1..21: mol_type = other DNA
aagaatacgtctacttcgcag

SEQ ID NO: 23927 - DNA, 21 bp, synthetic construct
  misc_feature 1..21: note = Description of Artificial Sequence: Synthetic oligonucleotide
  source 1..21: mol_type = other DNA
aagggtcagcctcctaaggag

SEQ ID NO: 23928 - DNA, 21 bp, synthetic construct
  misc_feature 1..21: note = Description of Artificial Sequence: Synthetic oligonucleotide
  source 1..21: mol_type = other DNA
aatgtgcatactgctactgct

SEQ ID NO: 23929 - DNA, 21 bp, synthetic construct
  misc_feature 1..21: note = Description of Artificial Sequence: Synthetic oligonucleotide
  source 1..21: mol_type = other DNA
agcaacagcaaagacaccctc

SEQ ID NO: 23930 - DNA, 21 bp, synthetic construct
  misc_feature 1..21: note = Description of Artificial Sequence: Synthetic oligonucleotide
  source 1..21: mol_type = other DNA
atgccgaatgggtcgaataag

SEQ ID NO: 23931 - DNA, 21 bp, synthetic construct
  misc_feature 1..21: note = Description of Artificial Sequence: Synthetic oligonucleotide
  source 1..21: mol_type = other DNA
gaaagaggcgcccacagcgtc

SEQ ID NO: 23932 - DNA, 21 bp, synthetic construct
  misc_feature 1..21: note = Description of Artificial Sequence: Synthetic oligonucleotide
  source 1..21: mol_type = other DNA
gaaggcagccccctcggccac

SEQ ID NO: 23933 - DNA, 21 bp, synthetic construct
  misc_feature 1..21: note = Description of Artificial Sequence: Synthetic oligonucleotide
  source 1..21: mol_type = other DNA
gataataataatgctcgtcag

SEQ ID NO: 23934 - DNA, 21 bp, synthetic construct
  misc_feature 1..21: note = Description of Artificial Sequence: Synthetic oligonucleotide
  source 1..21: mol_type = other DNA
ggcggcaaaggcaacaacgtc

SEQ ID NO: 23935 - DNA, 21 bp, synthetic construct
  misc_feature 1..21: note = Description of Artificial Sequence: Synthetic oligonucleotide
  source 1..21: mol_type = other DNA
tctcaggcgcagtctaataat

SEQ ID NO: 23936 - DNA, 21 bp, synthetic construct
  misc_feature 1..21: note = Description of Artificial Sequence: Synthetic oligonucleotide
  source 1..21: mol_type = other DNA
acgcatacgtctccgtctatt

SEQ ID NO: 23937 - DNA, 21 bp, synthetic construct
  misc_feature 1..21: note = Description of Artificial Sequence: Synthetic oligonucleotide
  source 1..21: mol_type = other DNA
gagactgctacttctcggggt

SEQ ID NO: 23938 - DNA, 21 bp, synthetic construct
  misc_feature 1..21: note = Description of Artificial Sequence: Synthetic oligonucleotide
  source 1..21: mol_type = other DNA
gctactgaggataatcgtaag

SEQ ID NO: 23939 - DNA, 21 bp, synthetic construct
  misc_feature 1..21: note = Description of Artificial Sequence: Synthetic oligonucleotide
  source 1..21: mol_type = other DNA
aatgcggttggtactcatagt

SEQ ID NO: 23940 - DNA, 21 bp, synthetic construct
  misc_feature 1..21: note = Description of Artificial Sequence: Synthetic oligonucleotide
  source 1..21: mol_type = other DNA
ggcaacaccgaaagaaaaggc

SEQ ID NO: 23941 - DNA, 21 bp, synthetic construct
  misc_feature 1..21: note = Description of Artificial Sequence: Synthetic oligonucleotide
  source 1..21: mol_type = other DNA
ggccacagccaaggcctcgcc

SEQ ID NO: 23942 - DNA, 21 bp, synthetic construct
  misc_feature 1..21: note = Description of Artificial Sequence: Synthetic oligonucleotide
  source 1..21: mol_type = other DNA
gttaagagtacgtctacggag

SEQ ID NO: 23943 - DNA, 21 bp, synthetic construct
  misc_feature 1..21: note = Description of Artificial Sequence: Synthetic oligonucleotide
  source 1..21: mol_type = other DNA
tctcgttcgggtcaggggcct

SEQ ID NO: 23944 - DNA, 21 bp, synthetic construct
  misc_feature 1..21: note = Description of Artificial Sequence: Synthetic oligonucleotide
  source 1..21: mol_type = other DNA
agcgccaccggcagcggcgtc

SEQ ID NO: 23945 - DNA, 21 bp, synthetic construct
  misc_feature 1..21: note = Description of Artificial Sequence: Synthetic oligonucleotide
  source 1..21: mol_type = other DNA
cacagcagcaacggcacccaa

SEQ ID NO: 23946 - DNA, 21 bp, synthetic construct
  misc_feature 1..21: note = Description of Artificial Sequence: Synthetic oligonucleotide
  source 1..21: mol_type = other DNA
accaccgtcagcggcagcacc

SEQ ID NO: 23947 - DNA, 21 bp, synthetic construct
  misc_feature 1..21: note = Description of Artificial Sequence: Synthetic oligonucleotide
  source 1..21: mol_type = other DNA
agcaaagtcagcagccccccc

SEQ ID NO: 23948 - DNA, 21 bp, synthetic construct
  misc_feature 1..21: note = Description of Artificial Sequence: Synthetic oligonucleotide
  source 1..21: mol_type = other DNA
agcaacggcgaaagaagcaac

SEQ ID NO: 23949 - DNA, 21 bp, synthetic construct
  misc_feature 1..21: note = Description of Artificial Sequence: Synthetic oligonucleotide
  source 1..21: mol_type = other DNA
agtaatgcgaagggtgttgtg

SEQ ID NO: 23950 - DNA, 21 bp, synthetic construct
  misc_feature 1..21: note = Description of Artificial Sequence: Synthetic oligonucleotide
  source 1..21: mol_type = other DNA
tttaagaatacgaaggatggg

SEQ ID NO: 23951 - DNA, 21 bp, synthetic construct
  misc_feature 1..21: note = Description of Artificial Sequence: Synthetic oligonucleotide
  source 1..21: mol_type = other DNA
acgacgaatacggctgttgcg

SEQ ID NO: 23952 - DNA, 21 bp, synthetic construct
  misc_feature 1..21: note = Description of Artificial Sequence: Synthetic oligonucleotide
  source 1..21: mol_type = other DNA
accaacggcaacggcggcagc

SEQ ID NO: 23953 - DNA, 21 bp, synthetic construct
  misc_feature 1..21: note = Description of Artificial Sequence: Synthetic oligonucleotide
  source 1..21: mol_type = other DNA
accatcggcagcagcagcacc

SEQ ID NO: 23954 - DNA, 21 bp, synthetic construct
  misc_feature 1..21: note = Description of Artificial Sequence: Synthetic oligonucleotide
  source 1..21: mol_type = other DNA
agcatggccaacctcaaagac

SEQ ID NO: 23955 - DNA, 21 bp, synthetic construct
  misc_feature 1..21: note = Description of Artificial Sequence: Synthetic oligonucleotide
  source 1..21: mol_type = other DNA
gacgtcagcaaagccaccagc

SEQ ID NO: 23956 - DNA, 21 bp, synthetic construct
  misc_feature 1..21: note = Description of Artificial Sequence: Synthetic oligonucleotide
  source 1..21: mol_type = other DNA
gccgtcagcggcgccaaaggc

SEQ ID NO: 23957 - DNA, 21 bp, synthetic construct
  misc_feature 1..21: note = Description of Artificial Sequence: Synthetic oligonucleotide
  source 1..21: mol_type = other DNA
ggcagcatccccagcagcagc

SEQ ID NO: 23958 - DNA, 21 bp, synthetic construct
  misc_feature 1..21: note = Description of Artificial Sequence: Synthetic oligonucleotide
  source 1..21: mol_type = other DNA
ggcagcggcaacaccgccgaa

SEQ ID NO: 23959 - DNA, 21 bp, synthetic construct
  misc_feature 1..21: note = Description of Artificial Sequence: Synthetic oligonucleotide
  source 1..21: mol_type = other DNA
ggttctgggtcggcgaagctg

SEQ ID NO: 23960 - DNA, 21 bp, synthetic construct
  misc_feature 1..21: note = Description of Artificial Sequence: Synthetic oligonucleotide
  source 1..21: mol_type = other DNA
acgactcgttctaagaatgag

SEQ ID NO: 23961 - DNA, 21 bp, synthetic construct
  misc_feature 1..21: note = Description of Artificial Sequence: Synthetic oligonucleotide
  source 1..21: mol_type = other DNA
ggcctcagcgccagcatcaga

SEQ ID NO: 23962 - DNA, 21 bp, synthetic construct
  misc_feature 1..21: note = Description of Artificial Sequence: Synthetic oligonucleotide
  source 1..21: mol_type = other DNA
actcagatgaagccgacgagg

SEQ ID NO: 23963 - DNA, 21 bp, synthetic construct
  misc_feature 1..21: note = Description of Artificial Sequence: Synthetic oligonucleotide
  source 1..21: mol_type = other DNA
agtcagactaatggtgctgtg

SEQ ID NO: 23964 - DNA, 21 bp, synthetic construct
  misc_feature 1..21: note = Description of Artificial Sequence: Synthetic oligonucleotide
  source 1..21: mol_type = other DNA
gccggcgaccaaaccagaatc

SEQ ID NO: 23965 - DNA, 21 bp, synthetic construct
  misc_feature 1..21: note = Description of Artificial Sequence: Synthetic oligonucleotide
  source 1..21: mol_type = other DNA
gcgacgacttcttctcctaag

SEQ ID NO: 23966 - DNA, 21 bp, synthetic construct
  misc_feature 1..21: note = Description of Artificial Sequence: Synthetic oligonucleotide
  source 1..21: mol_type = other DNA
ggcaccatcgccaacgccaga

SEQ ID NO: 23967 - DNA, 21 bp, synthetic construct
  misc_feature 1..21: note = Description of Artificial Sequence: Synthetic oligonucleotide
  source 1..21: mol_type = other DNA
ggcagcggcagccccagcgcc

SEQ ID NO: 23968 - DNA, 21 bp, synthetic construct
  misc_feature 1..21: note = Description of Artificial Sequence: Synthetic oligonucleotide
  source 1..21: mol_type = other DNA
aacagcaacagcagagaaaaa

SEQ ID NO: 23969 - DNA, 21 bp, synthetic construct
  misc_feature 1..21: note = Description of Artificial Sequence: Synthetic oligonucleotide
  source 1..21: mol_type = other DNA
aacagcaccggcaccggcagc

SEQ ID NO: 23970 - DNA, 21 bp, synthetic construct
  misc_feature 1..21: note = Description of Artificial Sequence: Synthetic oligonucleotide
  source 1..21: mol_type = other DNA
aaccaaagcaacgtccccctc

SEQ ID NO: 23971 - DNA, 21 bp, synthetic construct
  misc_feature 1..21: note = Description of Artificial Sequence: Synthetic oligonucleotide
  source 1..21: mol_type = other DNA
acgccggcgaatgctcaggct

SEQ ID NO: 23972 - DNA, 21 bp, synthetic construct
  misc_feature 1..21: note = Description of Artificial Sequence: Synthetic oligonucleotide
  source 1..21: mol_type = other DNA
agcatcggcaacaaaaccctc

SEQ ID NO: 23973 - DNA, 21 bp, synthetic construct
  misc_feature 1..21: note = Description of Artificial Sequence: Synthetic oligonucleotide
  source 1..21: mol_type = other DNA
agtagttataagggtgagggg

SEQ ID NO: 23974 - DNA, 21 bp, synthetic construct
  misc_feature 1..21: note = Description of Artificial Sequence: Synthetic oligonucleotide
  source 1..21: mol_type = other DNA
cttgataaggttaagactact

SEQ ID NO: 23975 - DNA, 21 bp, synthetic construct
  misc_feature 1..21: note = Description of Artificial Sequence: Synthetic oligonucleotide
  source 1..21: mol_type = other DNA
gagtctgatggtggtaagagt

SEQ ID NO: 23976 - DNA, 21 bp, synthetic construct
  misc_feature 1..21: note = Description of Artificial Sequence: Synthetic oligonucleotide
  source 1..21: mol_type = other DNA
gatcggactcaggatgcgcat

SEQ ID NO: 23977 - DNA, 21 bp, synthetic construct
  misc_feature 1..21: note = Description of Artificial Sequence: Synthetic oligonucleotide
  source 1..21: mol_type = other DNA
gccaacaccgacaaaagagtc

SEQ ID NO: 23978 - DNA, 21 bp, synthetic construct
  misc_feature 1..21: note = Description of Artificial Sequence: Synthetic oligonucleotide
  source 1..21: mol_type = other DNA
gccggcaacaccctcgccgcc

SEQ ID NO: 23979 - DNA, 21 bp, synthetic construct
  misc_feature 1..21: note = Description of Artificial Sequence: Synthetic oligonucleotide
  source 1..21: mol_type = other DNA
gccggcaccagcaccatgagc

SEQ ID NO: 23980 - DNA, 21 bp, synthetic construct
  misc_feature 1..21: note = Description of Artificial Sequence: Synthetic oligonucleotide
  source 1..21: mol_type = other DNA
gctatgagtaagaaggaggcg

SEQ ID NO: 23981 - DNA, 21 bp, synthetic construct
  misc_feature 1..21: note = Description of Artificial Sequence: Synthetic oligonucleotide
  source 1..21: mol_type = other DNA
gggcggaaggatgctgctgtg

SEQ ID NO: 23982 - DNA, 21 bp, synthetic construct
  misc_feature 1..21: note = Description of Artificial Sequence: Synthetic oligonucleotide
  source 1..21: mol_type = other DNA
gtcgccggcagcagcaccgtc

SEQ ID NO: 23983 - DNA, 21 bp, synthetic construct
  misc_feature 1..21: note = Description of Artificial Sequence: Synthetic oligonucleotide
  source 1..21: mol_type = other DNA
tacaaagtcggcaccgaaagc

SEQ ID NO: 23984 - DNA, 21 bp, synthetic construct
  misc_feature 1..21: note = Description of Artificial Sequence: Synthetic oligonucleotide
  source 1..21: mol_type = other DNA
acgaatgctaatgtgcctcgt

SEQ ID NO: 23985 - DNA, 21 bp, synthetic construct
  misc_feature 1..21: note = Description of Artificial Sequence: Synthetic oligonucleotide
  source 1..21: mol_type = other DNA
ctcggcagcggcagacccgaa

SEQ ID NO: 23986 - DNA, 21 bp, synthetic construct
  misc_feature 1..21: note = Description of Artificial Sequence: Synthetic oligonucleotide
  source 1..21: mol_type = other DNA
ctcggcaacgccagcaacaac

SEQ ID NO: 23987 - DNA, 21 bp, synthetic construct
  misc_feature 1..21: note = Description of Artificial Sequence: Synthetic oligonucleotide
  source 1..21: mol_type = other DNA
acccccagcacccccgccagc

SEQ ID NO: 23988 - DNA, 21 bp, synthetic construct
  misc_feature 1..21: note = Description of Artificial Sequence: Synthetic oligonucleotide
  source 1..21: mol_type = other DNA
ctcagcggcagcaacagcagc

SEQ ID NO: 23989 - DNA, 21 bp, synthetic construct
  misc_feature 1..21: note = Description of Artificial Sequence: Synthetic oligonucleotide
  source 1..21: mol_type = other DNA
gatttgagtgtgaagacgcag

SEQ ID NO: 23990 - DNA, 21 bp, synthetic construct
  misc_feature 1..21: note = Description of Artificial Sequence: Synthetic oligonucleotide
  source 1..21: mol_type = other DNA
ggcctcgccaccagcagccaa

SEQ ID NO: 23991 - DNA, 21 bp, synthetic construct
  misc_feature 1..21: note = Description of Artificial Sequence: Synthetic oligonucleotide
  source 1..21: mol_type = other DNA
atcggcgccgaaagaagcgtc

SEQ ID NO: 23992 - DNA, 21 bp, synthetic construct
  misc_feature 1..21: note = Description of Artificial Sequence: Synthetic oligonucleotide
  source 1..21: mol_type = other DNA
gggaatctgacgacgactaag

SEQ ID NO: 23993 - DNA, 21 bp, synthetic construct
  misc_feature 1..21: note = Description of Artificial Sequence: Synthetic oligonucleotide
  source 1..21: mol_type = other DNA
gatggttcggctaagcttgtg

SEQ ID NO: 23994 - DNA, 21 bp, synthetic construct
  misc_feature 1..21: note = Description of Artificial Sequence: Synthetic oligonucleotide
  source 1..21: mol_type = other DNA
tcggattcgcgggcggggggg

SEQ ID NO: 23995 - DNA, 21 bp, synthetic construct
  misc_feature 1..21: note = Description of Artificial Sequence: Synthetic oligonucleotide
  source 1..21: mol_type = other DNA
ctcagccacagcaaagccacc

SEQ ID NO: 23996 - DNA, 21 bp, synthetic construct
  misc_feature 1..21: note = Description of Artificial Sequence: Synthetic oligonucleotide
  source 1..21: mol_type = other DNA
agaagcgaaagcgccagcacc

SEQ ID NO: 23997 - DNA, 21 bp, synthetic construct
  misc_feature 1..21: note = Description of Artificial Sequence: Synthetic oligonucleotide
  source 1..21: mol_type = other DNA
agcaccaacagaagcagcggc

SEQ ID NO: 23998 - DNA, 21 bp, synthetic construct
  misc_feature 1..21: note = Description of Artificial Sequence: Synthetic oligonucleotide
  source 1..21: mol_type = other DNA
gctagtgagaagaaggtgctt

SEQ ID NO: 23999 - DNA, 21 bp, synthetic construct
  misc_feature 1..21: note = Description of Artificial Sequence: Synthetic oligonucleotide
  source 1..21: mol_type = other DNA
gggaataaggcggttagtggt

SEQ ID NO: 24000 - DNA, 21 bp, synthetic construct
  misc_feature 1..21: note = Description of Artificial Sequence: Synthetic oligonucleotide
  source 1..21: mol_type = other DNA
ggggggtcgaaggctgtggat

SEQ ID NO: 24001 - DNA, 21 bp, synthetic construct
  misc_feature 1..21: note = Description of Artificial Sequence: Synthetic oligonucleotide
  source 1..21: mol_type = other DNA
ggggttgataagaagtctcct

SEQ ID NO: 24002 - DNA, 21 bp, synthetic construct
  misc_feature 1..21: note = Description of Artificial Sequence: Synthetic oligonucleotide
  source 1..21: mol_type = other DNA
tctgctggtaattcgaagatt

SEQ ID NO: 24003 - DNA, 21 bp, synthetic construct
  misc_feature 1..21: note = Description of Artificial Sequence: Synthetic oligonucleotide
  source 1..21: mol_type = other DNA
cataatggggggtctaataag

SEQ ID NO: 24004 - DNA, 21 bp, synthetic construct
  misc_feature 1..21: note = Description of Artificial Sequence: Synthetic oligonucleotide
  source 1..21: mol_type = other DNA
acgggttctgggcatatttcg

SEQ ID NO: 24005 - DNA, 21 bp, synthetic construct
  misc_feature 1..21: note = Description of Artificial Sequence: Synthetic oligonucleotide
  source 1..21: mol_type = other DNA
ttgcagaagccgagtgggacg

SEQ ID NO: 24006 - DNA, 21 bp, synthetic construct
  misc_feature 1..21: note = Description of Artificial Sequence: Synthetic oligonucleotide
  source 1..21: mol_type = other DNA
atgagcaccagcagcagcaga

SEQ ID NO: 24007 - DNA, 21 bp, synthetic construct
  misc_feature 1..21: note = Description of Artificial Sequence: Synthetic oligonucleotide
  source 1..21: mol_type = other DNA
gccaacagcaccaaccacacc

SEQ ID NO: 24008 - DNA, 21 bp, synthetic construct
  misc_feature 1..21: note = Description of Artificial Sequence: Synthetic oligonucleotide
  source 1..21: mol_type = other DNA
aacagcagccccgtcagcaac

SEQ ID NO: 24009 - DNA, 21 bp, synthetic construct
  misc_feature 1..21: note = Description of Artificial Sequence: Synthetic oligonucleotide
  source 1..21: mol_type = other DNA
accaacaacgccaccgccacc

SEQ ID NO: 24010 - DNA, 21 bp, synthetic construct
  misc_feature 1..21: note = Description of Artificial Sequence: Synthetic oligonucleotide
  source 1..21: mol_type = other DNA
acgggtactaatcctaatggg

SEQ ID NO: 24011 - DNA, 21 bp, synthetic construct
  misc_feature 1..21: note = Description of Artificial Sequence: Synthetic oligonucleotide
  source 1..21: mol_type = other DNA
agaaacggcgaccaagccgcc

SEQ ID NO: 24012 - DNA, 21 bp, synthetic construct
  misc_feature 1..21: note = Description of Artificial Sequence: Synthetic oligonucleotide
  source 1..21: mol_type = other DNA
agcagaggcgaaagcaaaagc

SEQ ID NO: 24013 - DNA, 21 bp, synthetic construct
  misc_feature 1..21: note = Description of Artificial Sequence: Synthetic oligonucleotide
  source 1..21: mol_type = other DNA
gaggtggggaagcattcgtcg

SEQ ID NO: 24014 - DNA, 21 bp, synthetic construct
  misc_feature 1..21: note = Description of Artificial Sequence: Synthetic oligonucleotide
  source 1..21: mol_type = other DNA
gccaacagagaaaaaatcctc

SEQ ID NO: 24015 - DNA, 21 bp, synthetic construct
  misc_feature 1..21: note = Description of Artificial Sequence: Synthetic oligonucleotide
  source 1..21: mol_type = other DNA
gcggggactaatgcgaataag

SEQ ID NO: 24016 - DNA, 21 bp, synthetic construct
  misc_feature 1..21: note = Description of Artificial Sequence: Synthetic oligonucleotide
  source 1..21: mol_type = other DNA
gtccccgacaacaaacaactc

SEQ ID NO: 24017 - DNA, 21 bp, synthetic construct
  misc_feature 1..21: note = Description of Artificial Sequence: Synthetic oligonucleotide
  source 1..21: mol_type = other DNA
gcgggtccgtcggggaagatt

SEQ ID NO: 24018 - DNA, 21 bp, synthetic construct
  misc_feature 1..21: note = Description of Artificial Sequence: Synthetic oligonucleotide
  source 1..21: mol_type = other DNA
gacaccggcagaggcggcaac

SEQ ID NO: 24019 - DNA, 21 bp, synthetic construct
  misc_feature 1..21: note = Description of Artificial Sequence: Synthetic oligonucleotide
  source 1..21: mol_type = other DNA
cgtgatggtacgagtcctgag

SEQ ID NO: 24020 - DNA, 21 bp, synthetic construct
  misc_feature 1..21: note = Description of Artificial Sequence: Synthetic oligonucleotide
  source 1..21: mol_type = other DNA
caaagcgcccaagccagcaaa

SEQ ID NO: 24021 - DNA, 21 bp, synthetic construct
  misc_feature 1..21: note = Description of Artificial Sequence: Synthetic oligonucleotide
  source 1..21: mol_type = other DNA
accaccgacaaaggcggcaga

SEQ ID NO: 24022 - DNA, 21 bp, synthetic construct
  misc_feature 1..21: note = Description of Artificial Sequence: Synthetic oligonucleotide
  source 1..21: mol_type = other DNA
caggctagtacgtcgcctctt

SEQ ID NO: 24023 - DNA, 21 bp, synthetic construct
  misc_feature 1..21: note = Description of Artificial Sequence: Synthetic oligonucleotide
  source 1..21: mol_type = other DNA
gataggagtcctagtgcggtt

SEQ ID NO: 24024 - DNA, 21 bp, synthetic construct
  misc_feature 1..21: note = Description of Artificial Sequence: Synthetic oligonucleotide
  source 1..21: mol_type = other DNA
gccgcccccggcgccggcggc

SEQ ID NO: 24025 - DNA, 21 bp, synthetic construct
  misc_feature 1..21: note = Description of Artificial Sequence: Synthetic oligonucleotide
  source 1..21: mol_type = other DNA
ttgcctaatcagaaggatact

SEQ ID NO: 24026 - DNA, 21 bp, synthetic construct
  misc_feature 1..21: note = Description of Artificial Sequence: Synthetic oligonucleotide
  source 1..21: mol_type = other DNA
tttccgaataataagaatggt

SEQ ID NO: 24027 - DNA, 21 bp, synthetic construct
  misc_feature 1..21: note = Description of Artificial Sequence: Synthetic oligonucleotide
  source 1..21: mol_type = other DNA
ggtcctcttactcgggatggt

SEQ ID NO: 24028 - DNA, 21 bp, synthetic construct
  misc_feature 1..21: note = Description of Artificial Sequence: Synthetic oligonucleotide
  source 1..21: mol_type = other DNA
acgccgaattcttcgaatggc

SEQ ID NO: 24029 - DNA, 21 bp, synthetic construct
  misc_feature 1..21: note = Description of Artificial Sequence: Synthetic oligonucleotide
  source 1..21: mol_type = other DNA
cacaaagaagtcgccaccgcc

SEQ ID NO: 24030 - DNA, 21 bp, synthetic construct
  misc_feature 1..21: note = Description of Artificial Sequence: Synthetic oligonucleotide
  source 1..21: mol_type = other DNA
aaaaccggcagcccccaagac

SEQ ID NO: 24031 - DNA, 21 bp, synthetic construct
  misc_feature 1..21: note = Description of Artificial Sequence: Synthetic oligonucleotide
  source 1..21: mol_type = other DNA
acggatggtaatagtacgagg

SEQ ID NO: 24032 - DNA, 21 bp, synthetic construct
  misc_feature 1..21: note = Description of Artificial Sequence: Synthetic oligonucleotide
  source 1..21: mol_type = other DNA
agaaaagacaccgaaacccac

SEQ ID NO: 24033 - DNA, 21 bp, synthetic construct
  misc_feature 1..21: note = Description of Artificial Sequence: Synthetic oligonucleotide
  source 1..21: mol_type = other DNA
agcagcagcaccaccagagtc

SEQ ID NO: 24034 - DNA, 21 bp, synthetic construct
  misc_feature 1..21: note = Description of Artificial Sequence: Synthetic oligonucleotide
  source 1..21: mol_type = other DNA
cagagtggtggggtttctggt

SEQ ID NO: 24035 - DNA, 21 bp, synthetic construct
  misc_feature 1..21: note = Description of Artificial Sequence: Synthetic oligonucleotide
  source 1..21: mol_type = other DNA
gtgccgtctggtgggtctaat

SEQ ID NO: 24036 - DNA, 21 bp, synthetic construct
  misc_feature 1..21: note = Description of Artificial Sequence: Synthetic oligonucleotide
  source 1..21: mol_type = other DNA
tctaatcagaggggtaattcg

SEQ ID NO: 24037 - DNA, 21 bp, synthetic construct
  misc_feature 1..21: note = Description of Artificial Sequence: Synthetic oligonucleotide
  source 1..21: mol_type = other DNA
agcagcggcaacggcctccac

SEQ ID NO: 24038 - DNA, 21 bp, synthetic construct
  misc_feature 1..21: note = Description of Artificial Sequence: Synthetic oligonucleotide
  source 1..21: mol_type = other DNA
agagacggcagcagcaaagac

SEQ ID NO: 24039 - DNA, 21 bp, synthetic construct
  misc_feature 1..21: note = Description of Artificial Sequence: Synthetic oligonucleotide
  source 1..21: mol_type = other DNA
agtactagtggtaatcatgcg

SEQ ID NO: 24040 - DNA, 21 bp, synthetic construct
  misc_feature 1..21: note = Description of Artificial Sequence: Synthetic oligonucleotide
  source 1..21: mol_type = other DNA
ctccccgccaaaaccgacagc

SEQ ID NO: 24041 - DNA, 21 bp, synthetic construct
  misc_feature 1..21: note = Description of Artificial Sequence: Synthetic oligonucleotide
  source 1..21: mol_type = other DNA
ctcgccgaaaaaaccaccccc

SEQ ID NO: 24042 - DNA, 21 bp, synthetic construct
  misc_feature 1..21: note = Description of Artificial Sequence: Synthetic oligonucleotide
  source 1..21: mol_type = other DNA
gcgcataatgatacgaagaag

SEQ ID NO: 24043 - DNA, 21 bp, synthetic construct
  misc_feature 1..21: note = Description of Artificial Sequence: Synthetic oligonucleotide
  source 1..21: mol_type = other DNA
ggggttacgggtcctcgttcg

SEQ ID NO: 24044 - DNA, 21 bp, synthetic construct
  misc_feature 1..21: note = Description of Artificial Sequence: Synthetic oligonucleotide
  source 1..21: mol_type = other DNA
gtcaccaacgcccacaacagc

SEQ ID NO: 24045 - DNA, 21 bp, synthetic construct
  misc_feature 1..21: note = Description of Artificial Sequence: Synthetic oligonucleotide
  source 1..21: mol_type = other DNA
tcgagtacttcgtcggggggg

SEQ ID NO: 24046 - DNA, 21 bp, synthetic construct
  misc_feature 1..21: note = Description of Artificial Sequence: Synthetic oligonucleotide
  source 1..21: mol_type = other DNA
agccccagcgacaaagtcagc

SEQ ID NO: 24047 - DNA, 21 bp, synthetic construct
  misc_feature 1..21: note = Description of Artificial Sequence: Synthetic oligonucleotide
  source 1..21: mol_type = other DNA
caaaacgccagccccggcaac

SEQ ID NO: 24048 - DNA, 21 bp, synthetic construct
  misc_feature 1..21: note = Description of Artificial Sequence: Synthetic oligonucleotide
  source 1..21: mol_type = other DNA
agcatcgaccaagccagaagc

SEQ ID NO: 24049 - DNA, 21 bp, synthetic construct
  misc_feature 1..21: note = Description of Artificial Sequence: Synthetic oligonucleotide
  source 1..21: mol_type = other DNA
gtcgccagccccggcggcaac

SEQ ID NO: 24050 - DNA, 21 bp, synthetic construct
  misc_feature 1..21: note = Description of Artificial Sequence: Synthetic oligonucleotide
  source 1..21: mol_type = other DNA
accggcacccaaggcagcagc

SEQ ID NO: 24051 - DNA, 21 bp, synthetic construct
  misc_feature 1..21: note = Description of Artificial Sequence: Synthetic oligonucleotide
  source 1..21: mol_type = other DNA
gtcaaactcgacagaagcgtc

SEQ ID NO: 24052 - DNA, 21 bp, synthetic construct
  misc_feature 1..21: note = Description of Artificial Sequence: Synthetic oligonucleotide
  source 1..21: mol_type = other DNA
gtcaccagcaccgccagcgtc

SEQ ID NO: 24053 - DNA, 21 bp, synthetic construct
  misc_feature 1..21: note = Description of Artificial Sequence: Synthetic oligonucleotide
  source 1..21: mol_type = other DNA
agtacggatacttctgcgtct

SEQ ID NO: 24054 - DNA, 21 bp, synthetic construct
  misc_feature 1..21: note = Description of Artificial Sequence: Synthetic oligonucleotide
  source 1..21: mol_type = other DNA
ggtgattcttctcgtgcgagt

SEQ ID NO: 24055 - DNA, 21 bp, synthetic construct
  misc_feature 1..21: note = Description of Artificial Sequence: Synthetic oligonucleotide
  source 1..21: mol_type = other DNA
agtactcagtctcctacgcgg

SEQ ID NO: 24056 - DNA, 21 bp, synthetic construct
  misc_feature 1..21: note = Description of Artificial Sequence: Synthetic oligonucleotide
  source 1..21: mol_type = other DNA
aaagtcggcggcaccaacacc

SEQ ID NO: 24057 - DNA, 21 bp, synthetic construct
  misc_feature 1..21: note = Description of Artificial Sequence: Synthetic oligonucleotide
  source 1..21: mol_type = other DNA
aataggacgtcgggggagaag

SEQ ID NO: 24058 - DNA, 21 bp, synthetic construct
  misc_feature 1..21: note = Description of Artificial Sequence: Synthetic oligonucleotide
  source 1..21: mol_type = other DNA
accctcgccagcccccacggc

SEQ ID NO: 24059 - DNA, 21 bp, synthetic construct
  misc_feature 1..21: note = Description of Artificial Sequence: Synthetic oligonucleotide
  source 1..21: mol_type = other DNA
accggcctcaacaaccccagc

SEQ ID NO: 24060 - DNA, 21 bp, synthetic construct
  misc_feature 1..21: note = Description of Artificial Sequence: Synthetic oligonucleotide
  source 1..21: mol_type = other DNA
acgaaggataatgttcataag

SEQ ID NO: 24061 - DNA, 21 bp, synthetic construct
  misc_feature 1..21: note = Description of Artificial Sequence: Synthetic oligonucleotide
  source 1..21: mol_type = other DNA
agcaccagcagcgccccctac

SEQ ID NO: 24062 - DNA, 21 bp, synthetic construct
  misc_feature 1..21: note = Description of Artificial Sequence: Synthetic oligonucleotide
  source 1..21: mol_type = other DNA
aggcatgatgcgacttcgcag

SEQ ID NO: 24063 - DNA, 21 bp, synthetic construct
  misc_feature 1..21: note = Description of Artificial Sequence: Synthetic oligonucleotide
  source 1..21: mol_type = other DNA
agtcctaatccgactgggagt

SEQ ID NO: 24064 - DNA, 21 bp, synthetic construct
  misc_feature 1..21: note = Description of Artificial Sequence: Synthetic oligonucleotide
  source 1..21: mol_type = other DNA
agtggtagtgcgcatggtttg

SEQ ID NO: 24065 - DNA, 21 bp, synthetic construct
  misc_feature 1..21: note = Description of Artificial Sequence: Synthetic oligonucleotide
  source 1..21: mol_type = other DNA
agttctggttcggggattggg

SEQ ID NO: 24066 - DNA, 21 bp, synthetic construct
  misc_feature 1..21: note = Description of Artificial Sequence: Synthetic oligonucleotide
  source 1..21: mol_type = other DNA
atgaattcgagtggtgggaag

SEQ ID NO: 24067 - DNA, 21 bp, synthetic construct
  misc_feature 1..21: note = Description of Artificial Sequence: Synthetic oligonucleotide
  source 1..21: mol_type = other DNA
caaaacgacagaaccagcacc

SEQ ID NO: 24068 - DNA, 21 bp, synthetic construct
  misc_feature 1..21: note = Description of Artificial Sequence: Synthetic oligonucleotide
  source 1..21: mol_type = other DNA
caaggccaagaacccaaaaga

SEQ ID NO: 24069 - DNA, 21 bp, synthetic construct
  misc_feature 1..21: note = Description of Artificial Sequence: Synthetic oligonucleotide
  source 1..21: mol_type = other DNA
catagtagtcctcctaattcg

SEQ ID NO: 24070 - DNA, 21 bp, synthetic construct
  misc_feature 1..21: note = Description of Artificial Sequence: Synthetic oligonucleotide
  source 1..21: mol_type = other DNA
gaaatcagcagcagcaaactc

SEQ ID NO: 24071 - DNA, 21 bp, synthetic construct
  misc_feature 1..21: note = Description of Artificial Sequence: Synthetic oligonucleotide
  source 1..21: mol_type = other DNA
gaacaaagaagcaccagcagc

SEQ ID NO: 24072 - DNA, 21 bp, synthetic construct
  misc_feature 1..21: note = Description of Artificial Sequence: Synthetic oligonucleotide
  source 1..21: mol_type = other DNA
gacgccaccagccccaaagtc

SEQ ID NO: 24073 - DNA, 21 bp, synthetic construct
  misc_feature 1..21: note = Description of Artificial Sequence: Synthetic oligonucleotide
  source 1..21: mol_type = other DNA
gaggatgggcggtcgtctgcg

SEQ ID NO: 24074 - DNA, 21 bp, synthetic construct
  misc_feature 1..21: note = Description of Artificial Sequence: Synthetic oligonucleotide
  source 1..21: mol_type = other DNA
gcccaaagccaaaccaacacc

SEQ ID NO: 24075 - DNA, 21 bp, synthetic construct
  misc_feature 1..21: note = Description of Artificial Sequence: Synthetic oligonucleotide
  source 1..21: mol_type = other DNA
gcggggcagaagcaggggatg

SEQ ID NO: 24076 - DNA, 21 bp, synthetic construct
  misc_feature 1..21: note = Description of Artificial Sequence: Synthetic oligonucleotide
  source 1..21: mol_type = other DNA
ggcaccgccggcaccaacacc

SEQ ID NO: 24077 - DNA, 21 bp, synthetic construct
  misc_feature 1..21: note = Description of Artificial Sequence: Synthetic oligonucleotide
  source 1..21: mol_type = other DNA
ggcggccacagcgaaagaaga

SEQ ID NO: 24078 - DNA, 21 bp, synthetic construct
  misc_feature 1..21: note = Description of Artificial Sequence: Synthetic oligonucleotide
  source 1..21: mol_type = other DNA
gggacgattggtgttcataag

SEQ ID NO: 24079 - DNA, 21 bp, synthetic construct
  misc_feature 1..21: note = Description of Artificial Sequence: Synthetic oligonucleotide
  source 1..21: mol_type = other DNA
ggttcgccttcgaatcagggt

SEQ ID NO: 24080 - DNA, 21 bp, synthetic construct
  misc_feature 1..21: note = Description of Artificial Sequence: Synthetic oligonucleotide
  source 1..21: mol_type = other DNA
gtcaaccaaagccacagcatg

SEQ ID NO: 24081 - DNA, 21 bp, synthetic construct
  misc_feature 1..21: note = Description of Artificial Sequence: Synthetic oligonucleotide
  source 1..21: mol_type = other DNA
tcgccgcagggttcgcttggt

SEQ ID NO: 24082 - DNA, 21 bp, synthetic construct
  misc_feature 1..21: note = Description of Artificial Sequence: Synthetic oligonucleotide
  source 1..21: mol_type = other DNA
tctactcagcctcgtagtcag

SEQ ID NO: 24083 - DNA, 21 bp, synthetic construct
  misc_feature 1..21: note = Description of Artificial Sequence: Synthetic oligonucleotide
  source 1..21: mol_type = other DNA
tttaaggagtctgggggtggg

SEQ ID NO: 24084 - DNA, 21 bp, synthetic construct
  misc_feature 1..21: note = Description of Artificial Sequence: Synthetic oligonucleotide
  source 1..21: mol_type = other DNA
gacagaaacagagacaccacc

SEQ ID NO: 24085 - DNA, 21 bp, synthetic construct
  misc_feature 1..21: note = Description of Artificial Sequence: Synthetic oligonucleotide
  source 1..21: mol_type = other DNA
ctcaacaacagccaacacgcc

SEQ ID NO: 24086 - DNA, 21 bp, synthetic construct
  misc_feature 1..21: note = Description of Artificial Sequence: Synthetic oligonucleotide
  source 1..21: mol_type = other DNA
cattcgggttctggtctttcg

SEQ ID NO: 24087 - DNA, 21 bp, synthetic construct
  misc_feature 1..21: note = Description of Artificial Sequence: Synthetic oligonucleotide
  source 1..21: mol_type = other DNA
acgacgggtggtactatgcag

SEQ ID NO: 24088 - DNA, 21 bp, synthetic construct
  misc_feature 1..21: note = Description of Artificial Sequence: Synthetic oligonucleotide
  source 1..21: mol_type = other DNA
actggtcagcggtcggctagt

SEQ ID NO: 24089 - DNA, 21 bp, synthetic construct
  misc_feature 1..21: note = Description of Artificial Sequence: Synthetic oligonucleotide
  source 1..21: mol_type = other DNA
atggatactggtcctcgtgag

SEQ ID NO: 24090 - DNA, 21 bp, synthetic construct
  misc_feature 1..21: note = Description of Artificial Sequence: Synthetic oligonucleotide
  source 1..21: mol_type = other DNA
gaacccctcagcagccccaaa

SEQ ID NO: 24091 - DNA, 21 bp, synthetic construct
  misc_feature 1..21: note = Description of Artificial Sequence: Synthetic oligonucleotide
  source 1..21: mol_type = other DNA
tctattgagagtaagtcggcg

SEQ ID NO: 24092 - DNA, 21 bp, synthetic construct
  misc_feature 1..21: note = Description of Artificial Sequence: Synthetic oligonucleotide
  source 1..21: mol_type = other DNA
tctggttctaatgcttcttct

SEQ ID NO: 24093 - DNA, 21 bp, synthetic construct
  misc_feature 1..21: note = Description of Artificial Sequence: Synthetic oligonucleotide
  source 1..21: mol_type = other DNA
agagtcaacggcggcagcggc

SEQ ID NO: 24094 - DNA, 21 bp, synthetic construct
  misc_feature 1..21: note = Description of Artificial Sequence: Synthetic oligonucleotide
  source 1..21: mol_type = other DNA
agcggcatggaaagcagagtc

SEQ ID NO: 24095 - DNA, 21 bp, synthetic construct
  misc_feature 1..21: note = Description of Artificial Sequence: Synthetic oligonucleotide
  source 1..21: mol_type = other DNA
gaaggcggcaacggccaaatg

SEQ ID NO: 24096 - DNA, 21 bp, synthetic construct
  misc_feature 1..21: note = Description of Artificial Sequence: Synthetic oligonucleotide
  source 1..21: mol_type = other DNA
gggcagactaaggagaggcct

SEQ ID NO: 24097 - DNA, 21 bp, synthetic construct
  misc_feature 1..21: note = Description of Artificial Sequence: Synthetic oligonucleotide
  source 1..21: mol_type = other DNA
ggggatttgcctagttctggg

SEQ ID NO: 24098 - DNA, 21 bp, synthetic construct
  misc_feature 1..21: note = Description of Artificial Sequence: Synthetic oligonucleotide
  source 1..21: mol_type = other DNA
agcggcaaaggcggcaccgtc

SEQ ID NO: 24099 - DNA, 21 bp, synthetic construct
  misc_feature 1..21: note = Description of Artificial Sequence: Synthetic oligonucleotide
  source 1..21: mol_type = other DNA
atgaataatagtccgacgaag

SEQ ID NO: 24100 - DNA, 21 bp, synthetic construct
  misc_feature 1..21: note = Description of Artificial Sequence: Synthetic oligonucleotide
  source 1..21: mol_type = other DNA
gttagtgctggtgctccgtct

SEQ ID NO: 24101 - DNA, 21 bp, synthetic construct
  misc_feature 1..21: note = Description of Artificial Sequence: Synthetic oligonucleotide
  source 1..21: mol_type = other DNA
acccaaggcgtcagcagagaa

SEQ ID NO: 24102 - DNA, 21 bp, synthetic construct
  misc_feature 1..21: note = Description of Artificial Sequence: Synthetic oligonucleotide
  source 1..21: mol_type = other DNA
agcagcaccagccccagcaga

SEQ ID NO: 24103 - DNA, 21 bp, synthetic construct
  misc_feature 1..21: note = Description of Artificial Sequence: Synthetic oligonucleotide
  source 1..21: mol_type = other DNA
cacaaccaaggcaaaagcgcc

SEQ ID NO: 24104 - DNA, 21 bp, synthetic construct
  misc_feature 1..21: note = Description of Artificial Sequence: Synthetic oligonucleotide
  source 1..21: mol_type = other DNA
gctgggattaaggatgttcgg

SEQ ID NO: 24105 - DNA, 21 bp, synthetic construct
  misc_feature 1..21: note = Description of Artificial Sequence: Synthetic oligonucleotide
  source 1..21: mol_type = other DNA
accacccacaaagccaccgtc

SEQ ID NO: 24106 - DNA, 21 bp, synthetic construct
  misc_feature 1..21: note = Description of Artificial Sequence: Synthetic oligonucleotide
  source 1..21: mol_type = other DNA
acccccgaaaaaggcaccgtc

SEQ ID NO: 24107 - DNA, 21 bp, synthetic construct
  misc_feature 1..21: note = Description of Artificial Sequence: Synthetic oligonucleotide
  source 1..21: mol_type = other DNA
agcaccggcagcaccctcggc

SEQ ID NO: 24108 - DNA, 21 bp, synthetic construct
  misc_feature 1..21: note = Description of Artificial Sequence: Synthetic oligonucleotide
  source 1..21: mol_type = other DNA
gaccccgtcagcgaaagaaaa

SEQ ID NO: 24109 - DNA, 21 bp, synthetic construct
  misc_feature 1..21: note = Description of Artificial Sequence: Synthetic oligonucleotide
  source 1..21: mol_type = other DNA
gccggcaacagcggcctcggc

SEQ ID NO: 24110 - DNA, 21 bp, synthetic construct
  misc_feature 1..21: note = Description of Artificial Sequence: Synthetic oligonucleotide
  source 1..21: mol_type = other DNA
gctaatgggagtactcgggcg

SEQ ID NO: 24111 - DNA, 21 bp, synthetic construct
  misc_feature 1..21: note = Description of Artificial Sequence: Synthetic oligonucleotide
  source 1..21: mol_type = other DNA
gacagcagaaaaggcagcaac

SEQ ID NO: 24112 - DNA, 21 bp, synthetic construct
  misc_feature 1..21: note = Description of Artificial Sequence: Synthetic oligonucleotide
  source 1..21: mol_type = other DNA
ctgccgtcggataagcagtct

SEQ ID NO: 24113 - DNA, 21 bp, synthetic construct
  misc_feature 1..21: note = Description of Artificial Sequence: Synthetic oligonucleotide
  source 1..21: mol_type = other DNA
gagcgtgatcgggtgactgct

SEQ ID NO: 24114 - DNA, 21 bp, synthetic construct
  misc_feature 1..21: note = Description of Artificial Sequence: Synthetic oligonucleotide
  source 1..21: mol_type = other DNA
gctgctactgcgcctaatcgt

SEQ ID NO: 24115 - DNA, 21 bp, synthetic construct
  misc_feature 1..21: note = Description of Artificial Sequence: Synthetic oligonucleotide
  source 1..21: mol_type = other DNA
agcaccggcaacggccccagc

SEQ ID NO: 24116 - DNA, 21 bp, synthetic construct
  misc_feature 1..21: note = Description of Artificial Sequence: Synthetic oligonucleotide
  source 1..21: mol_type = other DNA
aatggggttacggggaatcat

SEQ ID NO: 24117 - DNA, 21 bp, synthetic construct
  misc_feature 1..21: note = Description of Artificial Sequence: Synthetic oligonucleotide
  source 1..21: mol_type = other DNA
ggcaaccccagcgccgccacc

SEQ ID NO: 24118 - DNA, 21 bp, synthetic construct
  misc_feature 1..21: note = Description of Artificial Sequence: Synthetic oligonucleotide
  source 1..21: mol_type = other DNA
tcggggggtgataatgcgcgg

SEQ ID NO: 24119 - DNA, 21 bp, synthetic construct
  misc_feature 1..21: note = Description of Artificial Sequence: Synthetic oligonucleotide
  source 1..21: mol_type = other DNA
agcagcagcagcaaaaccttc

SEQ ID NO: 24120 - DNA, 21 bp, synthetic construct
  misc_feature 1..21: note = Description of Artificial Sequence: Synthetic oligonucleotide
  source 1..21: mol_type = other DNA
attgggacgggttcgccgcct

SEQ ID NO: 24121 - DNA, 21 bp, synthetic construct
  misc_feature 1..21: note = Description of Artificial Sequence: Synthetic oligonucleotide
  source 1..21: mol_type = other DNA
gtccccagcggccaacccgtc

SEQ ID NO: 24122 - DNA, 21 bp, synthetic construct
  misc_feature 1..21: note = Description of Artificial Sequence: Synthetic oligonucleotide
  source 1..21: mol_type = other DNA
tcggatgctaggtcttcgact

SEQ ID NO: 24123 - DNA, 21 bp, synthetic construct
  misc_feature 1..21: note = Description of Artificial Sequence: Synthetic oligonucleotide
  source 1..21: mol_type = other DNA
aagcagcagccttctccgacg

SEQ ID NO: 24124 - DNA, 21 bp, synthetic construct
  misc_feature 1..21: note = Description of Artificial Sequence: Synthetic oligonucleotide
  source 1..21: mol_type = other DNA
agcagcgtcaaaagcaacgcc

SEQ ID NO: 24125 - DNA, 21 bp, synthetic construct
  misc_feature 1..21: note = Description of Artificial Sequence: Synthetic oligonucleotide
  source 1..21: mol_type = other DNA
accctcagcagaagcagcagc

SEQ ID NO: 24126 - DNA, 21 bp, synthetic construct
  misc_feature 1..21: note = Description of Artificial Sequence: Synthetic oligonucleotide
  source 1..21: mol_type = other DNA
agtcggactaatacgtctttg

SEQ ID NO: 24127 - DNA, 21 bp, synthetic construct
  misc_feature 1..21: note = Description of Artificial Sequence: Synthetic oligonucleotide
  source 1..21: mol_type = other DNA
cagcagggtgagagttcgcat

SEQ ID NO: 24128 - DNA, 21 bp, synthetic construct
  misc_feature 1..21: note = Description of Artificial Sequence: Synthetic oligonucleotide
  source 1..21: mol_type = other DNA
cggcaggattctagtagtggg

SEQ ID NO: 24129 - DNA, 21 bp, synthetic construct
  misc_feature 1..21: note = Description of Artificial Sequence: Synthetic oligonucleotide
  source 1..21: mol_type = other DNA
ctcgccaccagcgacaccaaa

SEQ ID NO: 24130 - DNA, 21 bp, synthetic construct
  misc_feature 1..21: note = Description of Artificial Sequence: Synthetic oligonucleotide
  source 1..21: mol_type = other DNA
gaagtcgccagcggcggcaaa

SEQ ID NO: 24131 - DNA, 21 bp, synthetic construct
  misc_feature 1..21: note = Description of Artificial Sequence: Synthetic oligonucleotide
  source 1..21: mol_type = other DNA
ggcagcaacgacctcagaacc

SEQ ID NO: 24132 - DNA, 21 bp, synthetic construct
  misc_feature 1..21: note = Description of Artificial Sequence: Synthetic oligonucleotide
  source 1..21: mol_type = other DNA
gtcaccggcagcaccctcggc

SEQ ID NO: 24133 - DNA, 21 bp, synthetic construct
  misc_feature 1..21: note = Description of Artificial Sequence: Synthetic oligonucleotide
  source 1..21: mol_type = other DNA
gtcaccggcggcagcggcgtc

SEQ ID NO: 24134 - DNA, 21 bp, synthetic construct
  misc_feature 1..21: note = Description of Artificial Sequence: Synthetic oligonucleotide
  source 1..21: mol_type = other DNA
accatcggcagccaccccacc

SEQ ID NO: 24135 - DNA, 21 bp, synthetic construct
  misc_feature 1..21: note = Description of Artificial Sequence: Synthetic oligonucleotide
  source 1..21: mol_type = other DNA
aacaacaccccccaaagcggc

SEQ ID NO: 24136 - DNA, 21 bp, synthetic construct
  misc_feature 1..21: note = Description of Artificial Sequence: Synthetic oligonucleotide
  source 1..21: mol_type = other DNA
agttcttcgaagagtgatggg

SEQ ID NO: 24137 - DNA, 21 bp, synthetic construct
  misc_feature 1..21: note = Description of Artificial Sequence: Synthetic oligonucleotide
  source 1..21: mol_type = other DNA
atgagggaggggcagatgatg

SEQ ID NO: 24138 - DNA, 21 bp, synthetic construct
  misc_feature 1..21: note = Description of Artificial Sequence: Synthetic oligonucleotide
  source 1..21: mol_type = other DNA
cagaagggtgagtctagtact

SEQ ID NO: 24139 - DNA, 21 bp, synthetic construct
  misc_feature 1..21: note = Description of Artificial Sequence: Synthetic oligonucleotide
  source 1..21: mol_type = other DNA
catggtggtccgacgtcttcg

SEQ ID NO: 24140 - DNA, 21 bp, synthetic construct
  misc_feature 1..21: note = Description of Artificial Sequence: Synthetic oligonucleotide
  source 1..21: mol_type = other DNA
gatgttcgtactacttcgtcg

SEQ ID NO: 24141 - DNA, 21 bp, synthetic construct
  misc_feature 1..21: note = Description of Artificial Sequence: Synthetic oligonucleotide
  source 1..21: mol_type = other DNA
ggcatcgaaagccacaaaatg

SEQ ID NO: 24142 - DNA, 21 bp, synthetic construct
  misc_feature 1..21: note = Description of Artificial Sequence: Synthetic oligonucleotide
  source 1..21: mol_type = other DNA
tatggtaatccgactccgggt

SEQ ID NO: 24143 - DNA, 21 bp, synthetic construct
  misc_feature 1..21: note = Description of Artificial Sequence: Synthetic oligonucleotide
  source 1..21: mol_type = other DNA
tctccgaatgggcatcttaag

SEQ ID NO: 24144 - DNA, 21 bp, synthetic construct
  misc_feature 1..21: note = Description of Artificial Sequence: Synthetic oligonucleotide
  source 1..21: mol_type = other DNA
ttgaggagtgattctcagagt

SEQ ID NO: 24145 - DNA, 21 bp, synthetic construct
  misc_feature 1..21: note = Description of Artificial Sequence: Synthetic oligonucleotide
  source 1..21: mol_type = other DNA
caacaaggcaacaacatcacc

SEQ ID NO: 24146 - DNA, 21 bp, synthetic construct
  misc_feature 1..21: note = Description of Artificial Sequence: Synthetic oligonucleotide
  source 1..21: mol_type = other DNA
gacagaaccaacgccaaaggc

SEQ ID NO: 24147 - DNA, 21 bp, synthetic construct
  misc_feature 1..21: note = Description of Artificial Sequence: Synthetic oligonucleotide
  source 1..21: mol_type = other DNA
aacggcagcggccaaaaccac

SEQ ID NO: 24148 - DNA, 21 bp, synthetic construct
  misc_feature 1..21: note = Description of Artificial Sequence: Synthetic oligonucleotide
  source 1..21: mol_type = other DNA
atgagcagccacagcagcacc

SEQ ID NO: 24149 - DNA, 21 bp, synthetic construct
  misc_feature 1..21: note = Description of Artificial Sequence: Synthetic oligonucleotide
  source 1..21: mol_type = other DNA
caagccgtcagcagcaacagc

SEQ ID NO: 24150 - DNA, 21 bp, synthetic construct
  misc_feature 1..21: note = Description of Artificial Sequence: Synthetic oligonucleotide
  source 1..21: mol_type = other DNA
gggacgagtggtaatctgaat

SEQ ID NO: 24151 - DNA, 21 bp, synthetic construct
  misc_feature 1..21: note = Description of Artificial Sequence: Synthetic oligonucleotide
  source 1..21: mol_type = other DNA
tcgactaaggagagggctgat

SEQ ID NO: 24152 - DNA, 21 bp, synthetic construct
  misc_feature 1..21: note = Description of Artificial Sequence: Synthetic oligonucleotide
  source 1..21: mol_type = other DNA
tcgcctagtgtgaatccggcg

SEQ ID NO: 24153 - DNA, 21 bp, synthetic construct
  misc_feature 1..21: note = Description of Artificial Sequence: Synthetic oligonucleotide
  source 1..21: mol_type = other DNA
tcggcgggtcgggagcatgct

SEQ ID NO: 24154 - DNA, 21 bp, synthetic construct
  misc_feature 1..21: note = Description of Artificial Sequence: Synthetic oligonucleotide
  source 1..21: mol_type = other DNA
caaagcggcgccgccagcaaa

SEQ ID NO: 24155 - DNA, 21 bp, synthetic construct
  misc_feature 1..21: note = Description of Artificial Sequence: Synthetic oligonucleotide
  source 1..21: mol_type = other DNA
accagagccgacagcagcagc

SEQ ID NO: 24156 - DNA, 21 bp, synthetic construct
  misc_feature 1..21: note = Description of Artificial Sequence: Synthetic oligonucleotide
  source 1..21: mol_type = other DNA
agtgtttctactagttcttct

SEQ ID NO: 24157 - DNA, 21 bp, synthetic construct
  misc_feature 1..21: note = Description of Artificial Sequence: Synthetic oligonucleotide
  source 1..21: mol_type = other DNA
gaaggcatggacagaggcagc

SEQ ID NO: 24158 - DNA, 21 bp, synthetic construct
  misc_feature 1..21: note = Description of Artificial Sequence: Synthetic oligonucleotide
  source 1..21: mol_type = other DNA
gcggctgggccttctgctggg

SEQ ID NO: 24159 - DNA, 21 bp, synthetic construct
  misc_feature 1..21: note = Description of Artificial Sequence: Synthetic oligonucleotide
  source 1..21: mol_type = other DNA
agcgaaaaaagcagacccaac

SEQ ID NO: 24160 - DNA, 21 bp, synthetic construct
  misc_feature 1..21: note = Description of Artificial Sequence: Synthetic oligonucleotide
  source 1..21: mol_type = other DNA
ggcaccatggacaccaaagtc

SEQ ID NO: 24161 - DNA, 21 bp, synthetic construct
  misc_feature 1..21: note = Description of Artificial Sequence: Synthetic oligonucleotide
  source 1..21: mol_type = other DNA
ggtactgtgattggggataag

SEQ ID NO: 24162 - DNA, 21 bp, synthetic construct
  misc_feature 1..21: note = Description of Artificial Sequence: Synthetic oligonucleotide
  source 1..21: mol_type = other DNA
aacaaagtcgaaagacaagaa

SEQ ID NO: 24163 - DNA, 21 bp, synthetic construct
  misc_feature 1..21: note = Description of Artificial Sequence: Synthetic oligonucleotide
  source 1..21: mol_type = other DNA
acgccggctattagtggtagt

SEQ ID NO: 24164 - DNA, 21 bp, synthetic construct
  misc_feature 1..21: note = Description of Artificial Sequence: Synthetic oligonucleotide
  source 1..21: mol_type = other DNA
atgggcacccaaagcagagaa

SEQ ID NO: 24165 - DNA, 21 bp, synthetic construct
  misc_feature 1..21: note = Description of Artificial Sequence: Synthetic oligonucleotide
  source 1..21: mol_type = other DNA
caaaacggcagcggcgtcagc

SEQ ID NO: 24166 - DNA, 21 bp, synthetic construct
  misc_feature 1..21: note = Description of Artificial Sequence: Synthetic oligonucleotide
  source 1..21: mol_type = other DNA
ctcggcgacaaaggcgccaga

SEQ ID NO: 24167 - DNA, 21 bp, synthetic construct
  misc_feature 1..21: note = Description of Artificial Sequence: Synthetic oligonucleotide
  source 1..21: mol_type = other DNA
gaagccgtccaaagaggcacc

SEQ ID NO: 24168 - DNA, 21 bp, synthetic construct
  misc_feature 1..21: note = Description of Artificial Sequence: Synthetic oligonucleotide
  source 1..21: mol_type = other DNA
gcgaatgcttcgggttctaag

SEQ ID NO: 24169 - DNA, 21 bp, synthetic construct
  misc_feature 1..21: note = Description of Artificial Sequence: Synthetic oligonucleotide
  source 1..21: mol_type = other DNA
ggcagcaccgtcaaaagcggc

SEQ ID NO: 24170 - DNA, 21 bp, synthetic construct
  misc_feature 1..21: note = Description of Artificial Sequence: Synthetic oligonucleotide
  source 1..21: mol_type = other DNA
ggtgttaatgatgttaataag

SEQ ID NO: 24171 - DNA, 21 bp, synthetic construct
  misc_feature 1..21: note = Description of Artificial Sequence: Synthetic oligonucleotide
  source 1..21: mol_type = other DNA
gtgactaataagggtactact

SEQ ID NO: 24172 - DNA, 21 bp, synthetic construct
  misc_feature 1..21: note = Description of Artificial Sequence: Synthetic oligonucleotide
  source 1..21: mol_type = other DNA
aacagcgtcaacggcatcacc

SEQ ID NO: 24173 - DNA, 21 bp, synthetic construct
  misc_feature 1..21: note = Description of Artificial Sequence: Synthetic oligonucleotide
  source 1..21: mol_type = other DNA
aaccacggcgacgtccaaaaa

SEQ ID NO: 24174 - DNA, 21 bp, synthetic construct
  misc_feature 1..21: note = Description of Artificial Sequence: Synthetic oligonucleotide
  source 1..21: mol_type = other DNA
agccaaagcagcagcgtcagc

SEQ ID NO: 24175 - DNA, 21 bp, synthetic construct
  misc_feature 1..21: note = Description of Artificial Sequence: Synthetic oligonucleotide
  source 1..21: mol_type = other DNA
gcgggtagtggtcaggctcgg

SEQ ID NO: 24176 - DNA, 21 bp, synthetic construct
  misc_feature 1..21: note = Description of Artificial Sequence: Synthetic oligonucleotide
  source 1..21: mol_type = other DNA
acccaaagccaaagcgtcacc

SEQ ID NO: 24177 - DNA, 21 bp, synthetic construct
  misc_feature 1..21: note = Description of Artificial Sequence: Synthetic oligonucleotide
  source 1..21: mol_type = other DNA
accgccgacgccgtccccaaa

SEQ ID NO: 24178 - DNA, 21 bp, synthetic construct
  misc_feature 1..21: note = Description of Artificial Sequence: Synthetic oligonucleotide
  source 1..21: mol_type = other DNA
caggcgacgaatactcctctg

SEQ ID NO: 24179 - DNA, 21 bp, synthetic construct
  misc_feature 1..21: note = Description of Artificial Sequence: Synthetic oligonucleotide
  source 1..21: mol_type = other DNA
ggtactacgtctcggaatgtt

SEQ ID NO: 24180 - DNA, 21 bp, synthetic construct
  misc_feature 1..21: note = Description of Artificial Sequence: Synthetic oligonucleotide
  source 1..21: mol_type = other DNA
gagaattctactcggagtggt

SEQ ID NO: 24181 - DNA, 21 bp, synthetic construct
  misc_feature 1..21: note = Description of Artificial Sequence: Synthetic oligonucleotide
  source 1..21: mol_type = other DNA
gattcgggtaagtctagggag

SEQ ID NO: 24182 - DNA, 21 bp, synthetic construct
  misc_feature 1..21: note = Description of Artificial Sequence: Synthetic oligonucleotide
  source 1..21: mol_type = other DNA
ggcaccagcggcgccctcacc

SEQ ID NO: 24183 - DNA, 21 bp, synthetic construct
  misc_feature 1..21: note = Description of Artificial Sequence: Synthetic oligonucleotide
  source 1..21: mol_type = other DNA
ggcagaaccgaaaacagaacc

SEQ ID NO: 24184 - DNA, 21 bp, synthetic construct
  misc_feature 1..21: note = Description of Artificial Sequence: Synthetic oligonucleotide
  source 1..21: mol_type = other DNA
caccccaccaacaacggcctc

SEQ ID NO: 24185 - DNA, 21 bp, synthetic construct
  misc_feature 1..21: note = Description of Artificial Sequence: Synthetic oligonucleotide
  source 1..21: mol_type = other DNA
aacaccagccccgtcggcaac

SEQ ID NO: 24186 - DNA, 21 bp, synthetic construct
  misc_feature 1..21: note = Description of Artificial Sequence: Synthetic oligonucleotide
  source 1..21: mol_type = other DNA
aaccacagcaaagacaccagc

SEQ ID NO: 24187 - DNA, 21 bp, synthetic construct
  misc_feature 1..21: note = Description of Artificial Sequence: Synthetic oligonucleotide
  source 1..21: mol_type = other DNA
accggcaccggcggcatgacc

SEQ ID NO: 24188 - DNA, 21 bp, synthetic construct
  misc_feature 1..21: note = Description of Artificial Sequence: Synthetic oligonucleotide
  source 1..21: mol_type = other DNA
acgtcgaatcagcggaatagt

SEQ ID NO: 24189 - DNA, 21 bp, synthetic construct
  misc_feature 1..21: note = Description of Artificial Sequence: Synthetic oligonucleotide
  source 1..21: mol_type = other DNA
actacggggaattctacgggt

SEQ ID NO: 24190 - DNA, 21 bp, synthetic construct
  misc_feature 1..21: note = Description of Artificial Sequence: Synthetic oligonucleotide
  source 1..21: mol_type = other DNA
agagtcgccgccagcggcggc

SEQ ID NO: 24191 - DNA, 21 bp, synthetic construct
  misc_feature 1..21: note = Description of Artificial Sequence: Synthetic oligonucleotide
  source 1..21: mol_type = other DNA
atcaccggcgacaaacccatc

SEQ ID NO: 24192 - DNA, 21 bp, synthetic construct
  misc_feature 1..21: note = Description of Artificial Sequence: Synthetic oligonucleotide
  source 1..21: mol_type = other DNA
caaaaacaaggccccaccgcc

SEQ ID NO: 24193 - DNA, 21 bp, synthetic construct
  misc_feature 1..21: note = Description of Artificial Sequence: Synthetic oligonucleotide
  source 1..21: mol_type = other DNA
caggctaagggggcgcagcag

SEQ ID NO: 24194 - DNA, 21 bp, synthetic construct
  misc_feature 1..21: note = Description of Artificial Sequence: Synthetic oligonucleotide
  source 1..21: mol_type = other DNA
catacgcagactactagtagt

SEQ ID NO: 24195 - DNA, 21 bp, synthetic construct
  misc_feature 1..21: note = Description of Artificial Sequence: Synthetic oligonucleotide
  source 1..21: mol_type = other DNA
catactgcggcgggggttact

SEQ ID NO: 24196 - DNA, 21 bp, synthetic construct
  misc_feature 1..21: note = Description of Artificial Sequence: Synthetic oligonucleotide
  source 1..21: mol_type = other DNA
ctcaaaaccgaacacaccacc

SEQ ID NO: 24197 - DNA, 21 bp, synthetic construct
  misc_feature 1..21: note = Description of Artificial Sequence: Synthetic oligonucleotide
  source 1..21: mol_type = other DNA
ctcgccagcagcagcgtccaa

SEQ ID NO: 24198 - DNA, 21 bp, synthetic construct
  misc_feature 1..21: note = Description of Artificial Sequence: Synthetic oligonucleotide
  source 1..21: mol_type = other DNA
ctcggcaacaaaagcaacagc

SEQ ID NO: 24199 - DNA, 21 bp, synthetic construct
  misc_feature 1..21: note = Description of Artificial Sequence: Synthetic oligonucleotide
  source 1..21: mol_type = other DNA
ggcagcaccggcagccacaaa

SEQ ID NO: 24200 - DNA, 21 bp, synthetic construct
  misc_feature 1..21: note = Description of Artificial Sequence: Synthetic oligonucleotide
  source 1..21: mol_type = other DNA
ggtaatactggtactacgttt

SEQ ID NO: 24201 - DNA, 21 bp, synthetic construct
  misc_feature 1..21: note = Description of Artificial Sequence: Synthetic oligonucleotide
  source 1..21: mol_type = other DNA
gtccacaccagcagcaccacc

SEQ ID NO: 24202 - DNA, 21 bp, synthetic construct
  misc_feature 1..21: note = Description of Artificial Sequence: Synthetic oligonucleotide
  source 1..21: mol_type = other DNA
ttgaatgctcagcagacggcg

SEQ ID NO: 24203 - DNA, 21 bp, synthetic construct
  misc_feature 1..21: note = Description of Artificial Sequence: Synthetic oligonucleotide
  source 1..21: mol_type = other DNA
acgagtggggattctcgtaat

SEQ ID NO: 24204 - DNA, 21 bp, synthetic construct
  misc_feature 1..21: note = Description of Artificial Sequence: Synthetic oligonucleotide
  source 1..21: mol_type = other DNA
gtcggcaacagcacccaccaa

SEQ ID NO: 24205 - DNA, 21 bp, synthetic construct
  misc_feature 1..21: note = Description of Artificial Sequence: Synthetic oligonucleotide
  source 1..21: mol_type = other DNA
caagtcagcaccacccccgcc

SEQ ID NO: 24206 - DNA, 21 bp, synthetic construct
  misc_feature 1..21: note = Description of Artificial Sequence: Synthetic oligonucleotide
  source 1..21: mol_type = other DNA
catacggctgggactaatggt

SEQ ID NO: 24207 - DNA, 21 bp, synthetic construct
  misc_feature 1..21: note = Description of Artificial Sequence: Synthetic oligonucleotide
  source 1..21: mol_type = other DNA
ctcggcaacagcagcagcaga

SEQ ID NO: 24208 - DNA, 21 bp, synthetic construct
  misc_feature 1..21: note = Description of Artificial Sequence: Synthetic oligonucleotide
  source 1..21: mol_type = other DNA
ggtgatcggagttctcagcat

SEQ ID NO: 24209 - DNA, 21 bp, synthetic construct
  misc_feature 1..21: note = Description of Artificial Sequence: Synthetic oligonucleotide
  source 1..21: mol_type = other DNA
ggtttggcttcggctcgggag

SEQ ID NO: 24210 - DNA, 21 bp, synthetic construct
  misc_feature 1..21: note = Description of Artificial Sequence: Synthetic oligonucleotide
  source 1..21: mol_type = other DNA
agcggcaacgcccccagaacc

SEQ ID NO: 24211 - DNA, 21 bp, synthetic construct
  misc_feature 1..21: note = Description of Artificial Sequence: Synthetic oligonucleotide
  source 1..21: mol_type = other DNA
aacggcatcaaaagcagcatg

SEQ ID NO: 24212 - DNA, 21 bp, synthetic construct
  misc_feature 1..21: note = Description of Artificial Sequence: Synthetic oligonucleotide
  source 1..21: mol_type = other DNA
accatcaaacccaacagcggc

SEQ ID NO: 24213 - DNA, 21 bp, synthetic construct
  misc_feature 1..21: note = Description of Artificial Sequence: Synthetic oligonucleotide
  source 1..21: mol_type = other DNA
tcggctgagcgtgctacgacg

SEQ ID NO: 24214 - DNA, 21 bp, synthetic construct
  misc_feature 1..21: note = Description of Artificial Sequence: Synthetic oligonucleotide
  source 1..21: mol_type = other DNA
aatgggactggttctggtcgt

SEQ ID NO: 24215 - DNA, 21 bp, synthetic construct
  misc_feature 1..21: note = Description of Artificial Sequence: Synthetic oligonucleotide
  source 1..21: mol_type = other DNA
aatggtactaatacggggggt

SEQ ID NO: 24216 - DNA, 21 bp, synthetic construct
  misc_feature 1..21: note = Description of Artificial Sequence: Synthetic oligonucleotide
  source 1..21: mol_type = other DNA
atgaatacgaagggtcctatt

SEQ ID NO: 24217 - DNA, 21 bp, synthetic construct
  misc_feature 1..21: note = Description of Artificial Sequence: Synthetic oligonucleotide
  source 1..21: mol_type = other DNA
gagcatactggttcgaagctt

SEQ ID NO: 24218 - DNA, 21 bp, synthetic construct
  misc_feature 1..21: note = Description of Artificial Sequence: Synthetic oligonucleotide
  source 1..21: mol_type = other DNA
gggcagaatcgggagactgtg

SEQ ID NO: 24219 - DNA, 21 bp, synthetic construct
  misc_feature 1..21: note = Description of Artificial Sequence: Synthetic oligonucleotide
  source 1..21: mol_type = other DNA
aacagcaacagaagccccgcc

SEQ ID NO: 24220 - DNA, 21 bp, synthetic construct
  misc_feature 1..21: note = Description of Artificial Sequence: Synthetic oligonucleotide
  source 1..21: mol_type = other DNA
acgaaggctgctgctactatt

SEQ ID NO: 24221 - DNA, 21 bp, synthetic construct
  misc_feature 1..21: note = Description of Artificial Sequence: Synthetic oligonucleotide
  source 1..21: mol_type = other DNA
ggcgtcagcaacggcgcccaa

SEQ ID NO: 24222 - DNA, 21 bp, synthetic construct
  misc_feature 1..21: note = Description of Artificial Sequence: Synthetic oligonucleotide
  source 1..21: mol_type = other DNA
aaccccgccgccacccccgcc

SEQ ID NO: 24223 - DNA, 21 bp, synthetic construct
  misc_feature 1..21: note = Description of Artificial Sequence: Synthetic oligonucleotide
  source 1..21: mol_type = other DNA
aatccgggtgataataggttg

SEQ ID NO: 24224 - DNA, 21 bp, synthetic construct
  misc_feature 1..21: note = Description of Artificial Sequence: Synthetic oligonucleotide
  source 1..21: mol_type = other DNA
accggcagccacaaccccagc

SEQ ID NO: 24225 - DNA, 21 bp, synthetic construct
  misc_feature 1..21: note = Description of Artificial Sequence: Synthetic oligonucleotide
  source 1..21: mol_type = other DNA
agcagcctcaacaccaccagc

SEQ ID NO: 24226 - DNA, 21 bp, synthetic construct
  misc_feature 1..21: note = Description of Artificial Sequence: Synthetic oligonucleotide
  source 1..21: mol_type = other DNA
caacccggcaacaccagactc

SEQ ID NO: 24227 - DNA, 21 bp, synthetic construct
  misc_feature 1..21: note = Description of Artificial Sequence: Synthetic oligonucleotide
  source 1..21: mol_type = other DNA
cagacgtctcgtgagtctggg

SEQ ID NO: 24228 - DNA, 21 bp, synthetic construct
  misc_feature 1..21: note = Description of Artificial Sequence: Synthetic oligonucleotide
  source 1..21: mol_type = other DNA
ctgccgcgggagcatagtgtt

SEQ ID NO: 24229 - DNA, 21 bp, synthetic construct
  misc_feature 1..21: note = Description of Artificial Sequence: Synthetic oligonucleotide
  source 1..21: mol_type = other DNA
gacagactcagccaaaccaac

SEQ ID NO: 24230 - DNA, 21 bp, synthetic construct
  misc_feature 1..21: note = Description of Artificial Sequence: Synthetic oligonucleotide
  source 1..21: mol_type = other DNA
gatactggtactaagaatagt

SEQ ID NO: 24231 - DNA, 21 bp, synthetic construct
  misc_feature 1..21: note = Description of Artificial Sequence: Synthetic oligonucleotide
  source 1..21: mol_type = other DNA
gcccacgaacaaagaaacgcc

SEQ ID NO: 24232 - DNA, 21 bp, synthetic construct
  misc_feature 1..21: note = Description of Artificial Sequence: Synthetic oligonucleotide
  source 1..21: mol_type = other DNA
ggcagcagccccggccccaac

SEQ ID NO: 24233 - DNA, 21 bp, synthetic construct
  misc_feature 1..21: note = Description of Artificial Sequence: Synthetic oligonucleotide
  source 1..21: mol_type = other DNA
ggccccagcagcggcaccccc

SEQ ID NO: 24234 - DNA, 21 bp, synthetic construct
  misc_feature 1..21: note = Description of Artificial Sequence: Synthetic oligonucleotide
  source 1..21: mol_type = other DNA
accagcggcaacgccaacaac

SEQ ID NO: 24235 - DNA, 21 bp, synthetic construct
  misc_feature 1..21: note = Description of Artificial Sequence: Synthetic oligonucleotide
  source 1..21: mol_type = other DNA
gctggtatttcttcgacgtct

SEQ ID NO: 24236 - DNA, 21 bp, synthetic construct
  misc_feature 1..21: note = Description of Artificial Sequence: Synthetic oligonucleotide
  source 1..21: mol_type = other DNA
tctggtggtaatttgaatgcg

SEQ ID NO: 24237 - DNA, 21 bp, synthetic construct
  misc_feature 1..21: note = Description of Artificial Sequence: Synthetic oligonucleotide
  source 1..21: mol_type = other DNA
accagcgccagcaaaggcacc

SEQ ID NO: 24238 - DNA, 21 bp, synthetic construct
  misc_feature 1..21: note = Description of Artificial Sequence: Synthetic oligonucleotide
  source 1..21: mol_type = other DNA
agcgtcaccggcaacagcaaa

SEQ ID NO: 24239 - DNA, 21 bp, synthetic construct
  misc_feature 1..21: note = Description of Artificial Sequence: Synthetic oligonucleotide
  source 1..21: mol_type = other DNA
gaaggcaaaagccaaggcaga

SEQ ID NO: 24240 - DNA, 21 bp, synthetic construct
  misc_feature 1..21: note = Description of Artificial Sequence: Synthetic oligonucleotide
  source 1..21: mol_type = other DNA
gctgcgaataagtctaaggag

SEQ ID NO: 24241 - DNA, 21 bp, synthetic construct
  misc_feature 1..21: note = Description of Artificial Sequence: Synthetic oligonucleotide
  source 1..21: mol_type = other DNA
gttagtactgggccgactact

SEQ ID NO: 24242 - DNA, 21 bp, synthetic construct
  misc_feature 1..21: note = Description of Artificial Sequence: Synthetic oligonucleotide
  source 1..21: mol_type = other DNA
ttgctgcaggggtctggtgct

SEQ ID NO: 24243 - DNA, 21 bp, synthetic construct
  misc_feature 1..21: note = Description of Artificial Sequence: Synthetic oligonucleotide
  source 1..21: mol_type = other DNA
aacgcccacagcgccggcggc

SEQ ID NO: 24244 - DNA, 21 bp, synthetic construct
  misc_feature 1..21: note = Description of Artificial Sequence: Synthetic oligonucleotide
  source 1..21: mol_type = other DNA
accagagccagccccgccagc

SEQ ID NO: 24245 - DNA, 21 bp, synthetic construct
  misc_feature 1..21: note = Description of Artificial Sequence: Synthetic oligonucleotide
  source 1..21: mol_type = other DNA
accctcgacgtcggcggcaaa

SEQ ID NO: 24246 - DNA, 21 bp, synthetic construct
  misc_feature 1..21: note = Description of Artificial Sequence: Synthetic oligonucleotide
  source 1..21: mol_type = other DNA
acggttgggagtgctcagggt

SEQ ID NO: 24247 - DNA, 21 bp, synthetic construct
  misc_feature 1..21: note = Description of Artificial Sequence: Synthetic oligonucleotide
  source 1..21: mol_type = other DNA
actcctattccttctaagggg

SEQ ID NO: 24248 - DNA, 21 bp, synthetic construct
  misc_feature 1..21: note = Description of Artificial Sequence: Synthetic oligonucleotide
  source 1..21: mol_type = other DNA
gacagagtcagcgccagcagc

SEQ ID NO: 24249 - DNA, 21 bp, synthetic construct
  misc_feature 1..21: note = Description of Artificial Sequence: Synthetic oligonucleotide
  source 1..21: mol_type = other DNA
ggcgcccaaagcaacagagcc

SEQ ID NO: 24250 - DNA, 21 bp, synthetic construct
  misc_feature 1..21: note = Description of Artificial Sequence: Synthetic oligonucleotide
  source 1..21: mol_type = other DNA
cggtctgcgggtacgtctgct

SEQ ID NO: 24251 - DNA, 21 bp, synthetic construct
  misc_feature 1..21: note = Description of Artificial Sequence: Synthetic oligonucleotide
  source 1..21: mol_type = other DNA
cgtaatggtgtttcgccggct

SEQ ID NO: 24252 - DNA, 21 bp, synthetic construct
  misc_feature 1..21: note = Description of Artificial Sequence: Synthetic oligonucleotide
  source 1..21: mol_type = other DNA
gaccaaagcagcagccacgtc

SEQ ID NO: 24253 - DNA, 21 bp, synthetic construct
  misc_feature 1..21: note = Description of Artificial Sequence: Synthetic oligonucleotide
  source 1..21: mol_type = other DNA
ggcagcggcaaccaaagaacc

SEQ ID NO: 24254 - DNA, 21 bp, synthetic construct
  misc_feature 1..21: note = Description of Artificial Sequence: Synthetic oligonucleotide
  source 1..21: mol_type = other DNA
atgagagacgccaaaacccaa

SEQ ID NO: 24255 - DNA, 21 bp, synthetic construct
  misc_feature 1..21: note = Description of Artificial Sequence: Synthetic oligonucleotide
  source 1..21: mol_type = other DNA
accacccacacccccaaccaa

SEQ ID NO: 24256 - DNA, 21 bp, synthetic construct
  misc_feature 1..21: note = Description of Artificial Sequence: Synthetic oligonucleotide
  source 1..21: mol_type = other DNA
aaagtcgacagcagaggcgaa

SEQ ID NO: 24257 - DNA, 21 bp, synthetic construct
  misc_feature 1..21: note = Description of Artificial Sequence: Synthetic oligonucleotide
  source 1..21: mol_type = other DNA
aatggtgatcagaagttggtt

SEQ ID NO: 24258 - DNA, 21 bp, synthetic construct
  misc_feature 1..21: note = Description of Artificial Sequence: Synthetic oligonucleotide
  source 1..21: mol_type = other DNA
aatggttcgaatcatggtacg

SEQ ID NO: 24259 - DNA, 21 bp, synthetic construct
  misc_feature 1..21: note = Description of Artificial Sequence: Synthetic oligonucleotide
  source 1..21: mol_type = other DNA
acccccagcaaaaccaacacc

SEQ ID NO: 24260 - DNA, 21 bp, synthetic construct
  misc_feature 1..21: note = Description of Artificial Sequence: Synthetic oligonucleotide
  source 1..21: mol_type = other DNA
acggatgctgggactcagagt

SEQ ID NO: 24261 - DNA, 21 bp, synthetic construct
  misc_feature 1..21: note = Description of Artificial Sequence: Synthetic oligonucleotide
  source 1..21: mol_type = other DNA
agtgttgttacttctcagggt

SEQ ID NO: 24262 - DNA, 21 bp, synthetic construct
  misc_feature 1..21: note = Description of Artificial Sequence: Synthetic oligonucleotide
  source 1..21: mol_type = other DNA
atgaaccaaaaaagcacctac

SEQ ID NO: 24263 - DNA, 21 bp, synthetic construct
  misc_feature 1..21: note = Description of Artificial Sequence: Synthetic oligonucleotide
  source 1..21: mol_type = other DNA
caccccagccaaggcggcagc

SEQ ID NO: 24264 - DNA, 21 bp, synthetic construct
  misc_feature 1..21: note = Description of Artificial Sequence: Synthetic oligonucleotide
  source 1..21: mol_type = other DNA
catccttctgctagtgttggg

SEQ ID NO: 24265 - DNA, 21 bp, synthetic construct
  misc_feature 1..21: note = Description of Artificial Sequence: Synthetic oligonucleotide
  source 1..21: mol_type = other DNA
gaggctgggtcgaagagtgtt

SEQ ID NO: 24266 - DNA, 21 bp, synthetic construct
  misc_feature 1..21: note = Description of Artificial Sequence: Synthetic oligonucleotide
  source 1..21: mol_type = other DNA
gccagagacagaaacaacacc

SEQ ID NO: 24267 - DNA, 21 bp, synthetic construct
  misc_feature 1..21: note = Description of Artificial Sequence: Synthetic oligonucleotide
  source 1..21: mol_type = other DNA
gccagcaaagacagcaccgcc

SEQ ID NO: 24268 - DNA, 21 bp, synthetic construct
  misc_feature 1..21: note = Description of Artificial Sequence: Synthetic oligonucleotide
  source 1..21: mol_type = other DNA
gccagcaacagccccatcggc

SEQ ID NO: 24269 - DNA, 21 bp, synthetic construct
  misc_feature 1..21: note = Description of Artificial Sequence: Synthetic oligonucleotide
  source 1..21: mol_type = other DNA
gcgatgtctgagactagtcgg

SEQ ID NO: 24270 - DNA, 21 bp, synthetic construct
  misc_feature 1..21: note = Description of Artificial Sequence: Synthetic oligonucleotide
  source 1..21: mol_type = other DNA
ggcgccagcaacagcaaactc

SEQ ID NO: 24271 - DNA, 21 bp, synthetic construct
  misc_feature 1..21: note = Description of Artificial Sequence: Synthetic oligonucleotide
  source 1..21: mol_type = other DNA
ggggcgaataagactgctccg

SEQ ID NO: 24272 - DNA, 21 bp, synthetic construct
  misc_feature 1..21: note = Description of Artificial Sequence: Synthetic oligonucleotide
  source 1..21: mol_type = other DNA
tcgaattctgagcggagtaat

SEQ ID NO: 24273 - DNA, 21 bp, synthetic construct
  misc_feature 1..21: note = Description of Artificial Sequence: Synthetic oligonucleotide
  source 1..21: mol_type = other DNA
tctagtaatcagtcttctgct

SEQ ID NO: 24274 - DNA, 21 bp, synthetic construct
  misc_feature 1..21: note = Description of Artificial Sequence: Synthetic oligonucleotide
  source 1..21: mol_type = other DNA
ctccccgccaccagcgccaga

SEQ ID NO: 24275 - DNA, 21 bp, synthetic construct
  misc_feature 1..21: note = Description of Artificial Sequence: Synthetic oligonucleotide
  source 1..21: mol_type = other DNA
actcctgatcgtacgtctatt

SEQ ID NO: 24276 - DNA, 21 bp, synthetic construct
  misc_feature 1..21: note = Description of Artificial Sequence: Synthetic oligonucleotide
  source 1..21: mol_type = other DNA
gacaccctccaagccaccaaa

SEQ ID NO: 24277 - DNA, 21 bp, synthetic construct
  misc_feature 1..21: note = Description of Artificial Sequence: Synthetic oligonucleotide
  source 1..21: mol_type = other DNA
gacagcaacagcgtcagcaaa

SEQ ID NO: 24278 - DNA, 21 bp, synthetic construct
  misc_feature 1..21: note = Description of Artificial Sequence: Synthetic oligonucleotide
  source 1..21: mol_type = other DNA
acccccaccagccacgcccaa

SEQ ID NO: 24279 - DNA, 21 bp, synthetic construct
  misc_feature 1..21: note = Description of Artificial Sequence: Synthetic oligonucleotide
  source 1..21: mol_type = other DNA
acgagtgatgtgacggctact

SEQ ID NO: 24280 - DNA, 21 bp, synthetic construct
  misc_feature 1..21: note = Description of Artificial Sequence: Synthetic oligonucleotide
  source 1..21: mol_type = other DNA
gctagtaattcgcatgctggg

SEQ ID NO: 24281 - DNA, 21 bp, synthetic construct
  misc_feature 1..21: note = Description of Artificial Sequence: Synthetic oligonucleotide
  source 1..21: mol_type = other DNA
gtgacggagcagaaggttggt

SEQ ID NO: 24282 - DNA, 21 bp, synthetic construct
  misc_feature 1..21: note = Description of Artificial Sequence: Synthetic oligonucleotide
  source 1..21: mol_type = other DNA
gttgggtctactggtaatcat

SEQ ID NO: 24283 - DNA, 21 bp, synthetic construct
  misc_feature 1..21: note = Description of Artificial Sequence: Synthetic oligonucleotide
  source 1..21: mol_type = other DNA
gtttctcagtctggtccgact

SEQ ID NO: 24284 - DNA, 21 bp, synthetic construct
  misc_feature 1..21: note = Description of Artificial Sequence: Synthetic oligonucleotide
  source 1..21: mol_type = other DNA
tctcctcatggtgggtcgaat

SEQ ID NO: 24285 - DNA, 21 bp, synthetic construct
  misc_feature 1..21: note = Description of Artificial Sequence: Synthetic oligonucleotide
  source 1..21: mol_type = other DNA
aaacccatggcccaagccgaa

SEQ ID NO: 24286 - DNA, 21 bp, synthetic construct
  misc_feature 1..21: note = Description of Artificial Sequence: Synthetic oligonucleotide
  source 1..21: mol_type = other DNA
acccaaagcggccaccccacc

SEQ ID NO: 24287 - DNA, 21 bp, synthetic construct
  misc_feature 1..21: note = Description of Artificial Sequence: Synthetic oligonucleotide
  source 1..21: mol_type = other DNA
atcagcggccaagtcaacagc

SEQ ID NO: 24288 - DNA, 21 bp, synthetic construct
  misc_feature 1..21: note = Description of Artificial Sequence: Synthetic oligonucleotide
  source 1..21: mol_type = other DNA
gagactgtgtctaagcagagt

SEQ ID NO: 24289 - DNA, 21 bp, synthetic construct
  misc_feature 1..21: note = Description of Artificial Sequence: Synthetic oligonucleotide
  source 1..21: mol_type = other DNA
gatccgacgggtggttctggt

SEQ ID NO: 24290 - DNA, 21 bp, synthetic construct
  misc_feature 1..21: note = Description of Artificial Sequence: Synthetic oligonucleotide
  source 1..21: mol_type = other DNA
ggcagcagcaacggcagccac

SEQ ID NO: 24291 - DNA, 21 bp, synthetic construct
  misc_feature 1..21: note = Description of Artificial Sequence: Synthetic oligonucleotide
  source 1..21: mol_type = other DNA
tacaaaaacgccgccaccagc

SEQ ID NO: 24292 - DNA, 21 bp, synthetic construct
  misc_feature 1..21: note = Description of Artificial Sequence: Synthetic oligonucleotide
  source 1..21: mol_type = other DNA
gccaacgccacccccctcaaa

SEQ ID NO: 24293 - DNA, 21 bp, synthetic construct
  misc_feature 1..21: note = Description of Artificial Sequence: Synthetic oligonucleotide
  source 1..21: mol_type = other DNA
aacaccagcgaagtcgccaga

SEQ ID NO: 24294 - DNA, 21 bp, synthetic construct
  misc_feature 1..21: note = Description of Artificial Sequence: Synthetic oligonucleotide
  source 1..21: mol_type = other DNA
aatgggacgggtaatggtatt

SEQ ID NO: 24295 - DNA, 21 bp, synthetic construct
  misc_feature 1..21: note = Description of Artificial Sequence: Synthetic oligonucleotide
  source 1..21: mol_type = other DNA
agaaccggcaccgaaaccaga

SEQ ID NO: 24296 - DNA, 21 bp, synthetic construct
  misc_feature 1..21: note = Description of Artificial Sequence: Synthetic oligonucleotide
  source 1..21: mol_type = other DNA
agcgaaaccaacaaaagcagc

SEQ ID NO: 24297 - DNA, 21 bp, synthetic construct
  misc_feature 1..21: note = Description of Artificial Sequence: Synthetic oligonucleotide
  source 1..21: mol_type = other DNA
atgaaggatacggggcctgtt

SEQ ID NO: 24298 - DNA, 21 bp, synthetic construct
  misc_feature 1..21: note = Description of Artificial Sequence: Synthetic oligonucleotide
  source 1..21: mol_type = other DNA
gaccccagcagcggcaacgtc

SEQ ID NO: 24299 - DNA, 21 bp, synthetic construct
  misc_feature 1..21: note = Description of Artificial Sequence: Synthetic oligonucleotide
  source 1..21: mol_type = other DNA
gctgtgactggtagtacgaat

SEQ ID NO: 24300 - DNA, 21 bp, synthetic construct
  misc_feature 1..21: note = Description of Artificial Sequence: Synthetic oligonucleotide
  source 1..21: mol_type = other DNA
gagtctggtacgcagggtaag

SEQ ID NO: 24301 - DNA, 21 bp, synthetic construct
  misc_feature 1..21: note = Description of Artificial Sequence: Synthetic oligonucleotide
  source 1..21: mol_type = other DNA
agtggtggtgcgaatcatttg

SEQ ID NO: 24302 - DNA, 21 bp, synthetic construct
  misc_feature 1..21: note = Description of Artificial Sequence: Synthetic oligonucleotide
  source 1..21: mol_type = other DNA
gataggcagggttctgcgagg

SEQ ID NO: 24303 - DNA, 21 bp, synthetic construct
  misc_feature 1..21: note = Description of Artificial Sequence: Synthetic oligonucleotide
  source 1..21: mol_type = other DNA
ggcagcaaaggcaacggcagc

SEQ ID NO: 24304 - DNA, 21 bp, synthetic construct
  misc_feature 1..21: note = Description of Artificial Sequence: Synthetic oligonucleotide
  source 1..21: mol_type = other DNA
caggttagtgggcataatgag

SEQ ID NO: 24305 - DNA, 21 bp, synthetic construct
  misc_feature 1..21: note = Description of Artificial Sequence: Synthetic oligonucleotide
  source 1..21: mol_type = other DNA
ggcaccagcaaaagcatcggc

SEQ ID NO: 24306 - DNA, 21 bp, synthetic construct
  misc_feature 1..21: note = Description of Artificial Sequence: Synthetic oligonucleotide
  source 1..21: mol_type = other DNA
tacgccaccgaaagaacccaa

SEQ ID NO: 24307 - DNA, 21 bp, synthetic construct
  misc_feature 1..21: note = Description of Artificial Sequence: Synthetic oligonucleotide
  source 1..21: mol_type = other DNA
gcgtctactacgcgtacgggt

SEQ ID NO: 24308 - DNA, 21 bp, synthetic construct
  misc_feature 1..21: note = Description of Artificial Sequence: Synthetic oligonucleotide
  source 1..21: mol_type = other DNA
ggtagtcagggttcgcatgct

SEQ ID NO: 24309 - DNA, 21 bp, synthetic construct
  misc_feature 1..21: note = Description of Artificial Sequence: Synthetic oligonucleotide
  source 1..21: mol_type = other DNA
tctcagtctacgtctcatctt

SEQ ID NO: 24310 - DNA, 21 bp, synthetic construct
  misc_feature 1..21: note = Description of Artificial Sequence: Synthetic oligonucleotide
  source 1..21: mol_type = other DNA
gacggcgccagaagcagcgcc

SEQ ID NO: 24311 - DNA, 21 bp, synthetic construct
  misc_feature 1..21: note = Description of Artificial Sequence: Synthetic oligonucleotide
  source 1..21: mol_type = other DNA
attcgtgagtctccggctaag

SEQ ID NO: 24312 - DNA, 21 bp, synthetic construct
  misc_feature 1..21: note = Description of Artificial Sequence: Synthetic oligonucleotide
  source 1..21: mol_type = other DNA
agcagccaacccgccctcgtc

SEQ ID NO: 24313 - DNA, 21 bp, synthetic construct
  misc_feature 1..21: note = Description of Artificial Sequence: Synthetic oligonucleotide
  source 1..21: mol_type = other DNA
aacatcagcaaagccaccatc

SEQ ID NO: 24314 - DNA, 21 bp, synthetic construct
  misc_feature 1..21: note = Description of Artificial Sequence: Synthetic oligonucleotide
  source 1..21: mol_type = other DNA
aacggcagcggccaaaacctc

SEQ ID NO: 24315 - DNA, 21 bp, synthetic construct
  misc_feature 1..21: note = Description of Artificial Sequence: Synthetic oligonucleotide
  source 1..21: mol_type = other DNA
acgaggaatgatacgagtaat

SEQ ID NO: 24316 - DNA, 21 bp, synthetic construct
  misc_feature 1..21: note = Description of Artificial Sequence: Synthetic oligonucleotide
  source 1..21: mol_type = other DNA
actcctagtgataatacgcgg

SEQ ID NO: 24317 - DNA, 21 bp, synthetic construct
  misc_feature 1..21: note = Description of Artificial Sequence: Synthetic oligonucleotide
  source 1..21: mol_type = other DNA
agcgacaccgccagaaccgcc

SEQ ID NO: 24318 - DNA, 21 bp, synthetic construct
  misc_feature 1..21: note = Description of Artificial Sequence: Synthetic oligonucleotide
  source 1..21: mol_type = other DNA
agcggcaccagcgccaccgtc

SEQ ID NO: 24319 - DNA, 21 bp, synthetic construct
  misc_feature 1..21: note = Description of Artificial Sequence: Synthetic oligonucleotide
  source 1..21: mol_type = other DNA
cattcggggggtagtacttcg

SEQ ID NO: 24320 - DNA, 21 bp, synthetic construct
  misc_feature 1..21: note = Description of Artificial Sequence: Synthetic oligonucleotide
  source 1..21: mol_type = other DNA
gacagagccagcagcagcacc

SEQ ID NO: 24321 - DNA, 21 bp, synthetic construct
  misc_feature 1..21: note = Description of Artificial Sequence: Synthetic oligonucleotide
  source 1..21: mol_type = other DNA
gatacgtctttgagtccgcat

SEQ ID NO: 24322 - DNA, 21 bp, synthetic construct
  misc_feature 1..21: note = Description of Artificial Sequence: Synthetic oligonucleotide
  source 1..21: mol_type = other DNA
gtggattctgatcgggcgaag

SEQ ID NO: 24323 - DNA, 21 bp, synthetic construct
  misc_feature 1..21: note = Description of Artificial Sequence: Synthetic oligonucleotide
  source 1..21: mol_type = other DNA
ggtcctactcgggatactacg

SEQ ID NO: 24324 - DNA, 21 bp, synthetic construct
  misc_feature 1..21: note = Description of Artificial Sequence: Synthetic oligonucleotide
  source 1..21: mol_type = other DNA
accaacgacgcccccggcaga

SEQ ID NO: 24325 - DNA, 21 bp, synthetic construct
  misc_feature 1..21: note = Description of Artificial Sequence: Synthetic oligonucleotide
  source 1..21: mol_type = other DNA
atcagagacaaaagcagcgtc

SEQ ID NO: 24326 - DNA, 21 bp, synthetic construct
  misc_feature 1..21: note = Description of Artificial Sequence: Synthetic oligonucleotide
  source 1..21: mol_type = other DNA
gcgcagaatggtgcgggtacg

SEQ ID NO: 24327 - DNA, 21 bp, synthetic construct
  misc_feature 1..21: note = Description of Artificial Sequence: Synthetic oligonucleotide
  source 1..21: mol_type = other DNA
gcgggtcagtcgactcatgcg

SEQ ID NO: 24328 - DNA, 21 bp, synthetic construct
  misc_feature 1..21: note = Description of Artificial Sequence: Synthetic oligonucleotide
  source 1..21: mol_type = other DNA
gctcaggtgaagacgccgatt

SEQ ID NO: 24329 - DNA, 21 bp, synthetic construct
  misc_feature 1..21: note = Description of Artificial Sequence: Synthetic oligonucleotide
  source 1..21: mol_type = other DNA
acccaagccagcaacccccac

SEQ ID NO: 24330 - DNA, 21 bp, synthetic construct
  misc_feature 1..21: note = Description of Artificial Sequence: Synthetic oligonucleotide
  source 1..21: mol_type = other DNA
aatccgaagaatggttcgagt

SEQ ID NO: 24331 - DNA, 21 bp, synthetic construct
  misc_feature 1..21: note = Description of Artificial Sequence: Synthetic oligonucleotide
  source 1..21: mol_type = other DNA
accagcaccagcggcaacgcc

SEQ ID NO: 24332 - DNA, 21 bp, synthetic construct
  misc_feature 1..21: note = Description of Artificial Sequence: Synthetic oligonucleotide
  source 1..21: mol_type = other DNA
agcagcagcagccccaaaatg

SEQ ID NO: 24333 - DNA, 21 bp, synthetic construct
  misc_feature 1..21: note = Description of Artificial Sequence: Synthetic oligonucleotide
  source 1..21: mol_type = other DNA
agcagcgccaacagaagcgaa

SEQ ID NO: 24334 - DNA, 21 bp, synthetic construct
  misc_feature 1..21: note = Description of Artificial Sequence: Synthetic oligonucleotide
  source 1..21: mol_type = other DNA
agtgtgagtaaggataagtat

SEQ ID NO: 24335 - DNA, 21 bp, synthetic construct
  misc_feature 1..21: note = Description of Artificial Sequence: Synthetic oligonucleotide
  source 1..21: mol_type = other DNA
catctgggtaagaatggtgag

SEQ ID NO: 24336 - DNA, 21 bp, synthetic construct
  misc_feature 1..21: note = Description of Artificial Sequence: Synthetic oligonucleotide
  source 1..21: mol_type = other DNA
gaagccggcagaggccccagc

SEQ ID NO: 24337 - DNA, 21 bp, synthetic construct
  misc_feature 1..21: note = Description of Artificial Sequence: Synthetic oligonucleotide
  source 1..21: mol_type = other DNA
gagcagcataataattcgggg

SEQ ID NO: 24338 - DNA, 21 bp, synthetic construct
  misc_feature 1..21: note = Description of Artificial Sequence: Synthetic oligonucleotide
  source 1..21: mol_type = other DNA
gccagcagcggcgaacaaaga

SEQ ID NO: 24339 - DNA, 21 bp, synthetic construct
  misc_feature 1..21: note = Description of Artificial Sequence: Synthetic oligonucleotide
  source 1..21: mol_type = other DNA
tctgagtctcctaagctggcg

SEQ ID NO: 24340 - DNA, 21 bp, synthetic construct
  misc_feature 1..21: note = Description of Artificial Sequence: Synthetic oligonucleotide
  source 1..21: mol_type = other DNA
tctggttctccgtcgattgtt

SEQ ID NO: 24341 - DNA, 21 bp, synthetic construct
  misc_feature 1..21: note = Description of Artificial Sequence: Synthetic oligonucleotide
  source 1..21: mol_type = other DNA
actagtactaagccgtatgat

SEQ ID NO: 24342 - DNA, 21 bp, synthetic construct
  misc_feature 1..21: note = Description of Artificial Sequence: Synthetic oligonucleotide
  source 1..21: mol_type = other DNA
agcaacgacggccccctcaaa

SEQ ID NO: 24343 - DNA, 21 bp, synthetic construct
  misc_feature 1..21: note = Description of Artificial Sequence: Synthetic oligonucleotide
  source 1..21: mol_type = other DNA
agtacgctgaagactggtagt

SEQ ID NO: 24344 - DNA, 21 bp, synthetic construct
  misc_feature 1..21: note = Description of Artificial Sequence: Synthetic oligonucleotide
  source 1..21: mol_type = other DNA
ctcccccacgacaaacccaga

SEQ ID NO: 24345 - DNA, 21 bp, synthetic construct
  misc_feature 1..21: note = Description of Artificial Sequence: Synthetic oligonucleotide
  source 1..21: mol_type = other DNA
atgtcgtcgacttcgagtact

SEQ ID NO: 24346 - DNA, 21 bp, synthetic construct
  misc_feature 1..21: note = Description of Artificial Sequence: Synthetic oligonucleotide
  source 1..21: mol_type = other DNA
aaacacagcagccccgtcgaa

SEQ ID NO: 24347 - DNA, 21 bp, synthetic construct
  misc_feature 1..21: note = Description of Artificial Sequence: Synthetic oligonucleotide
  source 1..21: mol_type = other DNA
agaagcgacggcgacaaacaa

SEQ ID NO: 24348 - DNA, 21 bp, synthetic construct
  misc_feature 1..21: note = Description of Artificial Sequence: Synthetic oligonucleotide
  source 1..21: mol_type = other DNA
agcaaagaaggcaaatacgaa

SEQ ID NO: 24349 - DNA, 21 bp, synthetic construct
  misc_feature 1..21: note = Description of Artificial Sequence: Synthetic oligonucleotide
  source 1..21: mol_type = other DNA
gacagaaccggccaaagaggc

SEQ ID NO: 24350 - DNA, 21 bp, synthetic construct
  misc_feature 1..21: note = Description of Artificial Sequence: Synthetic oligonucleotide
  source 1..21: mol_type = other DNA
gacagcgtccccaccagcgcc

SEQ ID NO: 24351 - DNA, 21 bp, synthetic construct
  misc_feature 1..21: note = Description of Artificial Sequence: Synthetic oligonucleotide
  source 1..21: mol_type = other DNA
gacctcagcacccccaccaaa

SEQ ID NO: 24352 - DNA, 21 bp, synthetic construct
  misc_feature 1..21: note = Description of Artificial Sequence: Synthetic oligonucleotide
  source 1..21: mol_type = other DNA
gccagaggcgccaacagcatg

SEQ ID NO: 24353 - DNA, 21 bp, synthetic construct
  misc_feature 1..21: note = Description of Artificial Sequence: Synthetic oligonucleotide
  source 1..21: mol_type = other DNA
gccgtcgacaaccaaagaatc

SEQ ID NO: 24354 - DNA, 21 bp, synthetic construct
  misc_feature 1..21: note = Description of Artificial Sequence: Synthetic oligonucleotide
  source 1..21: mol_type = other DNA
gtccaagccagcagcaacgcc

SEQ ID NO: 24355 - DNA, 21 bp, synthetic construct
  misc_feature 1..21: note = Description of Artificial Sequence: Synthetic oligonucleotide
  source 1..21: mol_type = other DNA
tctgcttcttcggagcggaat

SEQ ID NO: 24356 - DNA, 21 bp, synthetic construct
  misc_feature 1..21: note = Description of Artificial Sequence: Synthetic oligonucleotide
  source 1..21: mol_type = other DNA
ggcaacggcagccccgtcgtc

SEQ ID NO: 24357 - DNA, 21 bp, synthetic construct
  misc_feature 1..21: note = Description of Artificial Sequence: Synthetic oligonucleotide
  source 1..21: mol_type = other DNA
ggcgccaccggcaaacaagcc

SEQ ID NO: 24358 - DNA, 21 bp, synthetic construct
  misc_feature 1..21: note = Description of Artificial Sequence: Synthetic oligonucleotide
  source 1..21: mol_type = other DNA
accaccagcaaaggcaacagc

SEQ ID NO: 24359 - DNA, 21 bp, synthetic construct
  misc_feature 1..21: note = Description of Artificial Sequence: Synthetic oligonucleotide
  source 1..21: mol_type = other DNA
actcgggatacgggtcattcg

SEQ ID NO: 24360 - DNA, 21 bp, synthetic construct
  misc_feature 1..21: note = Description of Artificial Sequence: Synthetic oligonucleotide
  source 1..21: mol_type = other DNA
ggcagaaccccccccagcgcc

SEQ ID NO: 24361 - DNA, 21 bp, synthetic construct
  misc_feature 1..21: note = Description of Artificial Sequence: Synthetic oligonucleotide
  source 1..21: mol_type = other DNA
agcgacgacaaaagcctcaaa

SEQ ID NO: 24362 - DNA, 21 bp, synthetic construct
  misc_feature 1..21: note = Description of Artificial Sequence: Synthetic oligonucleotide
  source 1..21: mol_type = other DNA
cgtcagaatgataagtctgtt

SEQ ID NO: 24363 - DNA, 21 bp, synthetic construct
  misc_feature 1..21: note = Description of Artificial Sequence: Synthetic oligonucleotide
  source 1..21: mol_type = other DNA
ctgaataatagttcttcgggt

SEQ ID NO: 24364 - DNA, 21 bp, synthetic construct
  misc_feature 1..21: note = Description of Artificial Sequence: Synthetic oligonucleotide
  source 1..21: mol_type = other DNA
gctagttcggtgccgacgaag

SEQ ID NO: 24365 - DNA, 21 bp, synthetic construct
  misc_feature 1..21: note = Description of Artificial Sequence: Synthetic oligonucleotide
  source 1..21: mol_type = other DNA
gggagttctacgacgatgaag

SEQ ID NO: 24366 - DNA, 21 bp, synthetic construct
  misc_feature 1..21: note = Description of Artificial Sequence: Synthetic oligonucleotide
  source 1..21: mol_type = other DNA
cagagtgggtcgggtcagggg

SEQ ID NO: 24367 - DNA, 21 bp, synthetic construct
  misc_feature 1..21: note = Description of Artificial Sequence: Synthetic oligonucleotide
  source 1..21: mol_type = other DNA
aacagcagcgacagagccacc

SEQ ID NO: 24368 - DNA, 21 bp, synthetic construct
  misc_feature 1..21: note = Description of Artificial Sequence: Synthetic oligonucleotide
  source 1..21: mol_type = other DNA
gacagcgtcaacgccagaacc

SEQ ID NO: 24369 - DNA, 21 bp, synthetic construct
  misc_feature 1..21: note = Description of Artificial Sequence: Synthetic oligonucleotide
  source 1..21: mol_type = other DNA
accagcagcggcagcaacctc

SEQ ID NO: 24370 - DNA, 21 bp, synthetic construct
  misc_feature 1..21: note = Description of Artificial Sequence: Synthetic oligonucleotide
  source 1..21: mol_type = other DNA
caaatgaccaccaaagccaac

SEQ ID NO: 24371 - DNA, 21 bp, synthetic construct
  misc_feature 1..21: note = Description of Artificial Sequence: Synthetic oligonucleotide
  source 1..21: mol_type = other DNA
ggttatgatagtgagcggagg

SEQ ID NO: 24372 - DNA, 21 bp, synthetic construct
  misc_feature 1..21: note = Description of Artificial Sequence: Synthetic oligonucleotide
  source 1..21: mol_type = other DNA
ggttctgctcagaaggctttt

SEQ ID NO: 24373 - DNA, 21 bp, synthetic construct
  misc_feature 1..21: note = Description of Artificial Sequence: Synthetic oligonucleotide
  source 1..21: mol_type = other DNA
gttggggttcagtctgtttct

SEQ ID NO: 24374 - DNA, 21 bp, synthetic construct
  misc_feature 1..21: note = Description of Artificial Sequence: Synthetic oligonucleotide
  source 1..21: mol_type = other DNA
agaagcggcacccccgacaga

SEQ ID NO: 24375 - DNA, 21 bp, synthetic construct
  misc_feature 1..21: note = Description of Artificial Sequence: Synthetic oligonucleotide
  source 1..21: mol_type = other DNA
ggccaacccaacctcaacaaa

SEQ ID NO: 24376 - DNA, 21 bp, synthetic construct
  misc_feature 1..21: note = Description of Artificial Sequence: Synthetic oligonucleotide
  source 1..21: mol_type = other DNA
gaacccgtcagcaaaaacatg

SEQ ID NO: 24377 - DNA, 21 bp, synthetic construct
  misc_feature 1..21: note = Description of Artificial Sequence: Synthetic oligonucleotide
  source 1..21: mol_type = other DNA
gacaccagaagccccagcacc

SEQ ID NO: 24378 - DNA, 21 bp, synthetic construct
  misc_feature 1..21: note = Description of Artificial Sequence: Synthetic oligonucleotide
  source 1..21: mol_type = other DNA
gctgctgggactgggactact

SEQ ID NO: 24379 - DNA, 21 bp, synthetic construct
  misc_feature 1..21: note = Description of Artificial Sequence: Synthetic oligonucleotide
  source 1..21: mol_type = other DNA
ggtgagagtaagagtgggaag

SEQ ID NO: 24380 - DNA, 21 bp, synthetic construct
  misc_feature 1..21: note = Description of Artificial Sequence: Synthetic oligonucleotide
  source 1..21: mol_type = other DNA
accggcaacagcgccctcacc

SEQ ID NO: 24381 - DNA, 21 bp, synthetic construct
  misc_feature 1..21: note = Description of Artificial Sequence: Synthetic oligonucleotide
  source 1..21: mol_type = other DNA
gcgcgtactgaggctagtcgg

SEQ ID NO: 24382 - DNA, 21 bp, synthetic construct
  misc_feature 1..21: note = Description of Artificial Sequence: Synthetic oligonucleotide
  source 1..21: mol_type = other DNA
agccccagcaaacccggcagc

SEQ ID NO: 24383 - DNA, 21 bp, synthetic construct
  misc_feature 1..21: note = Description of Artificial Sequence: Synthetic oligonucleotide
  source 1..21: mol_type = other DNA
agcgtcggcggcaaaggcgcc

SEQ ID NO: 24384 - DNA, 21 bp, synthetic construct
  misc_feature 1..21: note = Description of Artificial Sequence: Synthetic oligonucleotide
  source 1..21: mol_type = other DNA
acgcaggcgagtacggctcag

SEQ ID NO: 24385 - DNA, 21 bp, synthetic construct
  misc_feature 1..21: note = Description of Artificial Sequence: Synthetic oligonucleotide
  source 1..21: mol_type = other DNA
caggggggtcatgggtctgct

SEQ ID NO: 24386 - DNA, 21 bp, synthetic construct
  misc_feature 1..21: note = Description of Artificial Sequence: Synthetic oligonucleotide
  source 1..21: mol_type = other DNA
ctccccaaccccaccagcggc

SEQ ID NO: 24387 - DNA, 21 bp, synthetic construct
  misc_feature 1..21: note = Description of Artificial Sequence: Synthetic oligonucleotide
  source 1..21: mol_type = other DNA
gattcgattggggggaagaat

SEQ ID NO: 24388 - DNA, 21 bp, synthetic construct
  misc_feature 1..21: note = Description of Artificial Sequence: Synthetic oligonucleotide
  source 1..21: mol_type = other DNA
gccaaaagcagcgaaaccagc

SEQ ID NO: 24389 - DNA, 21 bp, synthetic construct
  misc_feature 1..21: note = Description of Artificial Sequence: Synthetic oligonucleotide
  source 1..21: mol_type = other DNA
tcggcttctgggtcgatgaag

SEQ ID NO: 24390 - DNA, 21 bp, synthetic construct
  misc_feature 1..21: note = Description of Artificial Sequence: Synthetic oligonucleotide
  source 1..21: mol_type = other DNA
tctgggagtcagactatgaag

SEQ ID NO: 24391 - DNA, 21 bp, synthetic construct
  misc_feature 1..21: note = Description of Artificial Sequence: Synthetic oligonucleotide
  source 1..21: mol_type = other DNA
cttctgaagagtcctccgact

SEQ ID NO: 24392 - DNA, 21 bp, synthetic construct
  misc_feature 1..21: note = Description of Artificial Sequence: Synthetic oligonucleotide
  source 1..21: mol_type = other DNA
aacagcatcagcaacgtcaaa

SEQ ID NO: 24393 - DNA, 21 bp, synthetic construct
  misc_feature 1..21: note = Description of Artificial Sequence: Synthetic oligonucleotide
  source 1..21: mol_type = other DNA
gccatgggcggcagcaaacaa

SEQ ID NO: 24394 - DNA, 21 bp, synthetic construct
  misc_feature 1..21: note = Description of Artificial Sequence: Synthetic oligonucleotide
  source 1..21: mol_type = other DNA
aacagcgccgacagaggcgcc

SEQ ID NO: 24395 - DNA, 21 bp, synthetic construct
  misc_feature 1..21: note = Description of Artificial Sequence: Synthetic oligonucleotide
  source 1..21: mol_type = other DNA
agcgccggcagcgccgcccaa

SEQ ID NO: 24396 - DNA, 21 bp, synthetic construct
  misc_feature 1..21: note = Description of Artificial Sequence: Synthetic oligonucleotide
  source 1..21: mol_type = other DNA
cttgtgaattctacggggggg

SEQ ID NO: 24397 - DNA, 21 bp, synthetic construct
  misc_feature 1..21: note = Description of Artificial Sequence: Synthetic oligonucleotide
  source 1..21: mol_type = other DNA
gatagtgggaaggggcatgag

SEQ ID NO: 24398 - DNA, 21 bp, synthetic construct
  misc_feature 1..21: note = Description of Artificial Sequence: Synthetic oligonucleotide
  source 1..21: mol_type = other DNA
gatccgttgcagaataggaat

SEQ ID NO: 24399 - DNA, 21 bp, synthetic construct
  misc_feature 1..21: note = Description of Artificial Sequence: Synthetic oligonucleotide
  source 1..21: mol_type = other DNA
ggcaaagaagccctcccccaa

SEQ ID NO: 24400 - DNA, 21 bp, synthetic construct
  misc_feature 1..21: note = Description of Artificial Sequence: Synthetic oligonucleotide
  source 1..21: mol_type = other DNA
ggcaacggcaaaaccaaagac

SEQ ID NO: 24401 - DNA, 21 bp, synthetic construct
  misc_feature 1..21: note = Description of Artificial Sequence: Synthetic oligonucleotide
  source 1..21: mol_type = other DNA
ggcaccgccgccagccaactc

SEQ ID NO: 24402 - DNA, 21 bp, synthetic construct
  misc_feature 1..21: note = Description of Artificial Sequence: Synthetic oligonucleotide
  source 1..21: mol_type = other DNA
caaatggacacccccaccaaa

SEQ ID NO: 24403 - DNA, 21 bp, synthetic construct
  misc_feature 1..21: note = Description of Artificial Sequence: Synthetic oligonucleotide
  source 1..21: mol_type = other DNA
gatagtgttcctacggctgct

SEQ ID NO: 24404 - DNA, 21 bp, synthetic construct
  misc_feature 1..21: note = Description of Artificial Sequence: Synthetic oligonucleotide
  source 1..21: mol_type = other DNA
gatcgtgtttcttctccgatg

SEQ ID NO: 24405 - DNA, 21 bp, synthetic construct
  misc_feature 1..21: note = Description of Artificial Sequence: Synthetic oligonucleotide
  source 1..21: mol_type = other DNA
gctaatggggcgcctcagaag

SEQ ID NO: 24406 - DNA, 21 bp, synthetic construct
  misc_feature 1..21: note = Description of Artificial Sequence: Synthetic oligonucleotide
  source 1..21: mol_type = other DNA
agtacgagtgatggtaatcgt

SEQ ID NO: 24407 - DNA, 21 bp, synthetic construct
  misc_feature 1..21: note = Description of Artificial Sequence: Synthetic oligonucleotide
  source 1..21: mol_type = other DNA
accaccggcagcaacacccac

SEQ ID NO: 24408 - DNA, 21 bp, synthetic construct
  misc_feature 1..21: note = Description of Artificial Sequence: Synthetic oligonucleotide
  source 1..21: mol_type = other DNA
aggtcgagtaaggagcttgat

SEQ ID NO: 24409 - DNA, 21 bp, synthetic construct
  misc_feature 1..21: note = Description of Artificial Sequence: Synthetic oligonucleotide
  source 1..21: mol_type = other DNA
cagaagactgatagtttgaag

SEQ ID NO: 24410 - DNA, 21 bp, synthetic construct
  misc_feature 1..21: note = Description of Artificial Sequence: Synthetic oligonucleotide
  source 1..21: mol_type = other DNA
gacgccgccaccaaacccaac

SEQ ID NO: 24411 - DNA, 21 bp, synthetic construct
  misc_feature 1..21: note = Description of Artificial Sequence: Synthetic oligonucleotide
  source 1..21: mol_type = other DNA
aatgcgaatcctgagaggggt

SEQ ID NO: 24412 - DNA, 21 bp, synthetic construct
  misc_feature 1..21: note = Description of Artificial Sequence: Synthetic oligonucleotide
  source 1..21: mol_type = other DNA
accagcaacaacggccccaga

SEQ ID NO: 24413 - DNA, 21 bp, synthetic construct
  misc_feature 1..21: note = Description of Artificial Sequence: Synthetic oligonucleotide
  source 1..21: mol_type = other DNA
cacagagacgtcaaacccgac

SEQ ID NO: 24414 - DNA, 21 bp, synthetic construct
  misc_feature 1..21: note = Description of Artificial Sequence: Synthetic oligonucleotide
  source 1..21: mol_type = other DNA
ctcaccggcagcggcatcagc

SEQ ID NO: 24415 - DNA, 21 bp, synthetic construct
  misc_feature 1..21: note = Description of Artificial Sequence: Synthetic oligonucleotide
  source 1..21: mol_type = other DNA
agccacaacgccaccaacacc

SEQ ID NO: 24416 - DNA, 21 bp, synthetic construct
  misc_feature 1..21: note = Description of Artificial Sequence: Synthetic oligonucleotide
  source 1..21: mol_type = other DNA
cagtcggatgctagggcgaag

SEQ ID NO: 24417 - DNA, 21 bp, synthetic construct
  misc_feature 1..21: note = Description of Artificial Sequence: Synthetic oligonucleotide
  source 1..21: mol_type = other DNA
tacagagaaagcgaagccaga

SEQ ID NO: 24418 - DNA, 21 bp, synthetic construct
  misc_feature 1..21: note = Description of Artificial Sequence: Synthetic oligonucleotide
  source 1..21: mol_type = other DNA
cacaccaccaaagaaagctac

SEQ ID NO: 24419 - DNA, 21 bp, synthetic construct
  misc_feature 1..21: note = Description of Artificial Sequence: Synthetic oligonucleotide
  source 1..21: mol_type = other DNA
agcgccaccggcaaccacagc

SEQ ID NO: 24420 - DNA, 21 bp, synthetic construct
  misc_feature 1..21: note = Description of Artificial Sequence: Synthetic oligonucleotide
  source 1..21: mol_type = other DNA
gacctccccaccaaacacacc

SEQ ID NO: 24421 - DNA, 21 bp, synthetic construct
  misc_feature 1..21: note = Description of Artificial Sequence: Synthetic oligonucleotide
  source 1..21: mol_type = other DNA
ggcctcggcaccaacaaactc

SEQ ID NO: 24422 - DNA, 21 bp, synthetic construct
  misc_feature 1..21: note = Description of Artificial Sequence: Synthetic oligonucleotide
  source 1..21: mol_type = other DNA
acttcggatagtaaggttggt

SEQ ID NO: 24423 - DNA, 21 bp, synthetic construct
  misc_feature 1..21: note = Description of Artificial Sequence: Synthetic oligonucleotide
  source 1..21: mol_type = other DNA
atggggcagaatgcgccgcag

SEQ ID NO: 24424 - DNA, 21 bp, synthetic construct
  misc_feature 1..21: note = Description of Artificial Sequence: Synthetic oligonucleotide
  source 1..21: mol_type = other DNA
ctccccagccacgaaaccaga

SEQ ID NO: 24425 - DNA, 21 bp, synthetic construct
  misc_feature 1..21: note = Description of Artificial Sequence: Synthetic oligonucleotide
  source 1..21: mol_type = other DNA
ggcagcgaaagcgccctcaga

SEQ ID NO: 24426 - DNA, 21 bp, synthetic construct
  misc_feature 1..21: note = Description of Artificial Sequence: Synthetic oligonucleotide
  source 1..21: mol_type = other DNA
tctcatagtccttctaatatg

SEQ ID NO: 24427 - DNA, 21 bp, synthetic construct
  misc_feature 1..21: note = Description of Artificial Sequence: Synthetic oligonucleotide
  source 1..21: mol_type = other DNA
tttgttgagaagccgaattct

SEQ ID NO: 24428 - DNA, 21 bp, synthetic construct
  misc_feature 1..21: note = Description of Artificial Sequence: Synthetic oligonucleotide
  source 1..21: mol_type = other DNA
gccaacagccaaggcaacctc

SEQ ID NO: 24429 - DNA, 21 bp, synthetic construct
  misc_feature 1..21: note = Description of Artificial Sequence: Synthetic oligonucleotide
  source 1..21: mol_type = other DNA
tctactagtcgtactcctgtt

SEQ ID NO: 24430 - DNA, 21 bp, synthetic construct
  misc_feature 1..21: note = Description of Artificial Sequence: Synthetic oligonucleotide
  source 1..21: mol_type = other DNA
cgtgatagtggggcgaagaat

SEQ ID NO: 24431 - DNA, 21 bp, synthetic construct
  misc_feature 1..21: note = Description of Artificial Sequence: Synthetic oligonucleotide
  source 1..21: mol_type = other DNA
acccaagccggcgaccacaga

SEQ ID NO: 24432 - DNA, 21 bp, synthetic construct
  misc_feature 1..21: note = Description of Artificial Sequence: Synthetic oligonucleotide
  source 1..21: mol_type = other DNA
gctagtggggtgcagggtcag

SEQ ID NO: 24433 - DNA, 21 bp, synthetic construct
  misc_feature 1..21: note = Description of Artificial Sequence: Synthetic oligonucleotide
  source 1..21: mol_type = other DNA
ggggctaatggtcgtgggtct

SEQ ID NO: 24434 - DNA, 21 bp, synthetic construct
  misc_feature 1..21: note = Description of Artificial Sequence: Synthetic oligonucleotide
  source 1..21: mol_type = other DNA
tatgcgacgaaggagcctcgt

SEQ ID NO: 24435 - DNA, 21 bp, synthetic construct
  misc_feature 1..21: note = Description of Artificial Sequence: Synthetic oligonucleotide
  source 1..21: mol_type = other DNA
aacgtcaccaccagcacccaa

SEQ ID NO: 24436 - DNA, 21 bp, synthetic construct
  misc_feature 1..21: note = Description of Artificial Sequence: Synthetic oligonucleotide
  source 1..21: mol_type = other DNA
gatgggcagcctcgttctgcg

SEQ ID NO: 24437 - DNA, 21 bp, synthetic construct
  misc_feature 1..21: note = Description of Artificial Sequence: Synthetic oligonucleotide
  source 1..21: mol_type = other DNA
ggggatcgtaatcagcctcat

SEQ ID NO: 24438 - DNA, 21 bp, synthetic construct
  misc_feature 1..21: note = Description of Artificial Sequence: Synthetic oligonucleotide
  source 1..21: mol_type = other DNA
gacggcgccagaacccccacc

SEQ ID NO: 24439 - DNA, 21 bp, synthetic construct
  misc_feature 1..21: note = Description of Artificial Sequence: Synthetic oligonucleotide
  source 1..21: mol_type = other DNA
aaaagccacgacaaaagcagc

SEQ ID NO: 24440 - DNA, 21 bp, synthetic construct
  misc_feature 1..21: note = Description of Artificial Sequence: Synthetic oligonucleotide
  source 1..21: mol_type = other DNA
catttgggttctgataagagt

SEQ ID NO: 24441 - DNA, 21 bp, synthetic construct
  misc_feature 1..21: note = Description of Artificial Sequence: Synthetic oligonucleotide
  source 1..21: mol_type = other DNA
acttcttcgaagccttatacg

SEQ ID NO: 24442 - DNA, 21 bp, synthetic construct
  misc_feature 1..21: note = Description of Artificial Sequence: Synthetic oligonucleotide
  source 1..21: mol_type = other DNA
agcaaaaccaacaccgccagc

SEQ ID NO: 24443 - DNA, 21 bp, synthetic construct
  misc_feature 1..21: note = Description of Artificial Sequence: Synthetic oligonucleotide
  source 1..21: mol_type = other DNA
agcctcagcaaaagccacgaa

SEQ ID NO: 24444 - DNA, 21 bp, synthetic construct
  misc_feature 1..21: note = Description of Artificial Sequence: Synthetic oligonucleotide
  source 1..21: mol_type = other DNA
gaaagcagcgccaaagtcccc

SEQ ID NO: 24445 - DNA, 21 bp, synthetic construct
  misc_feature 1..21: note = Description of Artificial Sequence: Synthetic oligonucleotide
  source 1..21: mol_type = other DNA
gccggcgacggcagagtcaac

SEQ ID NO: 24446 - DNA, 21 bp, synthetic construct
  misc_feature 1..21: note = Description of Artificial Sequence: Synthetic oligonucleotide
  source 1..21: mol_type = other DNA
ggcctcaccaaacccaccgcc

SEQ ID NO: 24447 - DNA, 21 bp, synthetic construct
  misc_feature 1..21: note = Description of Artificial Sequence: Synthetic oligonucleotide
  source 1..21: mol_type = other DNA
gtcggcaaaggccaagccccc

SEQ ID NO: 24448 - DNA, 21 bp, synthetic construct
  misc_feature 1..21: note = Description of Artificial Sequence: Synthetic oligonucleotide
  source 1..21: mol_type = other DNA
tcgacttctactcatcagggg

SEQ ID NO: 24449 - DNA, 21 bp, synthetic construct
  misc_feature 1..21: note = Description of Artificial Sequence: Synthetic oligonucleotide
  source 1..21: mol_type = other DNA
tctgctattggtgctaatacg

SEQ ID NO: 24450 - DNA, 21 bp, synthetic construct
  misc_feature 1..21: note = Description of Artificial Sequence: Synthetic oligonucleotide
  source 1..21: mol_type = other DNA
accagcaccaacgtcaaagaa

SEQ ID NO: 24451 - DNA, 21 bp, synthetic construct
  misc_feature 1..21: note = Description of Artificial Sequence: Synthetic oligonucleotide
  source 1..21: mol_type = other DNA
acgcatcaggagcataattct

SEQ ID NO: 24452 - DNA, 21 bp, synthetic construct
  misc_feature 1..21: note = Description of Artificial Sequence: Synthetic oligonucleotide
  source 1..21: mol_type = other DNA
agcagaagccccgacaccacc

SEQ ID NO: 24453 - DNA, 21 bp, synthetic construct
  misc_feature 1..21: note = Description of Artificial Sequence: Synthetic oligonucleotide
  source 1..21: mol_type = other DNA
aggaatgctgatccgcagcag

SEQ ID NO: 24454 - DNA, 21 bp, synthetic construct
  misc_feature 1..21: note = Description of Artificial Sequence: Synthetic oligonucleotide
  source 1..21: mol_type = other DNA
ggccccaacaacgaacccaga

SEQ ID NO: 24455 - DNA, 21 bp, synthetic construct
  misc_feature 1..21: note = Description of Artificial Sequence: Synthetic oligonucleotide
  source 1..21: mol_type = other DNA
ttgccgtcgaagtctacgggg

SEQ ID NO: 24456 - DNA, 21 bp, synthetic construct
  misc_feature 1..21: note = Description of Artificial Sequence: Synthetic oligonucleotide
  source 1..21: mol_type = other DNA
ggcaccagcggcgacagccac

SEQ ID NO: 24457 - DNA, 21 bp, synthetic construct
  misc_feature 1..21: note = Description of Artificial Sequence: Synthetic oligonucleotide
  source 1..21: mol_type = other DNA
actgcgaatgggacgaattct

SEQ ID NO: 24458 - DNA, 21 bp, synthetic construct
  misc_feature 1..21: note = Description of Artificial Sequence: Synthetic oligonucleotide
  source 1..21: mol_type = other DNA
accaacagcaacatgcacacc

SEQ ID NO: 24459 - DNA, 21 bp, synthetic construct
  misc_feature 1..21: note = Description of Artificial Sequence: Synthetic oligonucleotide
  source 1..21: mol_type = other DNA
accagccccggcgccggcaga

SEQ ID NO: 24460 - DNA, 21 bp, synthetic construct
  misc_feature 1..21: note = Description of Artificial Sequence: Synthetic oligonucleotide
  source 1..21: mol_type = other DNA
actgggaggtcttcgatgtcg

SEQ ID NO: 24461 - DNA, 21 bp, synthetic construct
  misc_feature 1..21: note = Description of Artificial Sequence: Synthetic oligonucleotide
  source 1..21: mol_type = other DNA
actggtatggcggataagggt

SEQ ID NO: 24462 - DNA, 21 bp, synthetic construct
  misc_feature 1..21: note = Description of Artificial Sequence: Synthetic oligonucleotide
  source 1..21: mol_type = other DNA
acttctgggacttcgtctctg

SEQ ID NO: 24463 - DNA, 21 bp, synthetic construct
  misc_feature 1..21: note = Description of Artificial Sequence: Synthetic oligonucleotide
  source 1..21: mol_type = other DNA
agccaaaccagccacaccgtc

SEQ ID NO: 24464 - DNA, 21 bp, synthetic construct
  misc_feature 1..21: note = Description of Artificial Sequence: Synthetic oligonucleotide
  source 1..21: mol_type = other DNA
ggcctcatgggcgccagcaaa

SEQ ID NO: 24465 - DNA, 21 bp, synthetic construct
  misc_feature 1..21: note = Description of Artificial Sequence: Synthetic oligonucleotide
  source 1..21: mol_type = other DNA
gtgcctaataattcgcctaat

SEQ ID NO: 24466 - DNA, 21 bp, synthetic construct
  misc_feature 1..21: note = Description of Artificial Sequence: Synthetic oligonucleotide
  source 1..21: mol_type = other DNA
ggccacagcaaaagccccatc

SEQ ID NO: 24467 - DNA, 21 bp, synthetic construct
  misc_feature 1..21: note = Description of Artificial Sequence: Synthetic oligonucleotide
  source 1..21: mol_type = other DNA
accgacgtcaaaaccccccac

SEQ ID NO: 24468 - DNA, 21 bp, synthetic construct
  misc_feature 1..21: note = Description of Artificial Sequence: Synthetic oligonucleotide
  source 1..21: mol_type = other DNA
accgccagcagaagcaacagc

SEQ ID NO: 24469 - DNA, 21 bp, synthetic construct
  misc_feature 1..21: note = Description of Artificial Sequence: Synthetic oligonucleotide
  source 1..21: mol_type = other DNA
cataatggtgatattaagggt

SEQ ID NO: 24470 - DNA, 21 bp, synthetic construct
  misc_feature 1..21: note = Description of Artificial Sequence: Synthetic oligonucleotide
  source 1..21: mol_type = other DNA
gctggttcgagtcatacgggt

SEQ ID NO: 24471 - DNA, 21 bp, synthetic construct
  misc_feature 1..21: note = Description of Artificial Sequence: Synthetic oligonucleotide
  source 1..21: mol_type = other DNA
ggcagcctcggcaacgaaaga

SEQ ID NO: 24472 - DNA, 21 bp, synthetic construct
  misc_feature 1..21: note = Description of Artificial Sequence: Synthetic oligonucleotide
  source 1..21: mol_type = other DNA
aacagaacccacaccaacgtc

SEQ ID NO: 24473 - DNA, 21 bp, synthetic construct
  misc_feature 1..21: note = Description of Artificial Sequence: Synthetic oligonucleotide
  source 1..21: mol_type = other DNA
accgaaagagccgccagcgtc

SEQ ID NO: 24474 - DNA, 21 bp, synthetic construct
  misc_feature 1..21: note = Description of Artificial Sequence: Synthetic oligonucleotide
  source 1..21: mol_type = other DNA
attaatcagactaagcctgag

SEQ ID NO: 24475 - DNA, 21 bp, synthetic construct
  misc_feature 1..21: note = Description of Artificial Sequence: Synthetic oligonucleotide
  source 1..21: mol_type = other DNA
agaaccagcaacggcaccagc

SEQ ID NO: 24476 - DNA, 21 bp, synthetic construct
  misc_feature 1..21: note = Description of Artificial Sequence: Synthetic oligonucleotide
  source 1..21: mol_type = other DNA
ggtagggctaatggtgttgct

SEQ ID NO: 24477 - DNA, 21 bp, synthetic construct
  misc_feature 1..21: note = Description of Artificial Sequence: Synthetic oligonucleotide
  source 1..21: mol_type = other DNA
agcaccaaccccgtcaacgtc

SEQ ID NO: 24478 - DNA, 21 bp, synthetic construct
  misc_feature 1..21: note = Description of Artificial Sequence: Synthetic oligonucleotide
  source 1..21: mol_type = other DNA
gatggtaagtcttctccggtg

SEQ ID NO: 24479 - DNA, 21 bp, synthetic construct
  misc_feature 1..21: note = Description of Artificial Sequence: Synthetic oligonucleotide
  source 1..21: mol_type = other DNA
atgcaacaaaccagcaccgcc

SEQ ID NO: 24480 - DNA, 21 bp, synthetic construct
  misc_feature 1..21: note = Description of Artificial Sequence: Synthetic oligonucleotide
  source 1..21: mol_type = other DNA
ctgggtgctagtagtgcggcg

SEQ ID NO: 24481 - DNA, 21 bp, synthetic construct
  misc_feature 1..21: note = Description of Artificial Sequence: Synthetic oligonucleotide
  source 1..21: mol_type = other DNA
gcgaagactacttcgctggct

SEQ ID NO: 24482 - DNA, 21 bp, synthetic construct
  misc_feature 1..21: note = Description of Artificial Sequence: Synthetic oligonucleotide
  source 1..21: mol_type = other DNA
agcagcagcaccaccaacacc

SEQ ID NO: 24483 - DNA, 21 bp, synthetic construct
  misc_feature 1..21: note = Description of Artificial Sequence: Synthetic oligonucleotide
  source 1..21: mol_type = other DNA
aacaccggcagcggcaacagc

SEQ ID NO: 24484 - DNA, 21 bp, synthetic construct
  misc_feature 1..21: note = Description of Artificial Sequence: Synthetic oligonucleotide
  source 1..21: mol_type = other DNA
accaccgccaccaacttcgcc

SEQ ID NO: 24485 - DNA, 21 bp, synthetic construct
  misc_feature 1..21: note = Description of Artificial Sequence: Synthetic oligonucleotide
  source 1..21: mol_type = other DNA
caaagccccggcgcccacaac

SEQ ID NO: 24486 - DNA, 21 bp, synthetic construct
  misc_feature 1..21: note = Description of Artificial Sequence: Synthetic oligonucleotide
  source 1..21: mol_type = other DNA
tctgttgcttcggatcgtatt

SEQ ID NO: 24487 - DNA, 21 bp, synthetic construct
  misc_feature 1..21: note = Description of Artificial Sequence: Synthetic oligonucleotide
  source 1..21: mol_type = other DNA
ctcgccgacagaagcaacacc

SEQ ID NO: 24488 - DNA, 21 bp, synthetic construct
  misc_feature 1..21: note = Description of Artificial Sequence: Synthetic oligonucleotide
  source 1..21: mol_type = other DNA
agccaagccaccgtcagcaga

SEQ ID NO: 24489 - DNA, 21 bp, synthetic construct
  misc_feature 1..21: note = Description of Artificial Sequence: Synthetic oligonucleotide
  source 1..21: mol_type = other DNA
aacggcagaggcaccgtcgtc

SEQ ID NO: 24490 - DNA, 21 bp, synthetic construct
  misc_feature 1..21: note = Description of Artificial Sequence: Synthetic oligonucleotide
  source 1..21: mol_type = other DNA
gtttcgtctgcgtcgcctact

SEQ ID NO: 24491 - DNA, 21 bp, synthetic construct
  misc_feature 1..21: note = Description of Artificial Sequence: Synthetic oligonucleotide
  source 1..21: mol_type = other DNA
tctggttctgatgtttcgcgt

SEQ ID NO: 24492 - DNA, 21 bp, synthetic construct
  misc_feature 1..21: note = Description of Artificial Sequence: Synthetic oligonucleotide
  source 1..21: mol_type = other DNA
accaacgtcgccgcccaaggc

SEQ ID NO: 24493 - DNA, 21 bp, synthetic construct
  misc_feature 1..21: note = Description of Artificial Sequence: Synthetic oligonucleotide
  source 1..21: mol_type = other DNA
gtcaccagcagccccaccctc

SEQ ID NO: 24494 - DNA, 21 bp, synthetic construct
  misc_feature 1..21: note = Description of Artificial Sequence: Synthetic oligonucleotide
  source 1..21: mol_type = other DNA
agtacgactacgccttctact

SEQ ID NO: 24495 - DNA, 21 bp, synthetic construct
  misc_feature 1..21: note = Description of Artificial Sequence: Synthetic oligonucleotide
  source 1..21: mol_type = other DNA
ggcgacggcaccagacccaaa

SEQ ID NO: 24496 - DNA, 21 bp, synthetic construct
  misc_feature 1..21: note = Description of Artificial Sequence: Synthetic oligonucleotide
  source 1..21: mol_type = other DNA
tcttcgactactcattctaag

SEQ ID NO: 24497 - DNA, 21 bp, synthetic construct
  misc_feature 1..21: note = Description of Artificial Sequence: Synthetic oligonucleotide
  source 1..21: mol_type = other DNA
gccagccaacccaaaggcggc

SEQ ID NO: 24498 - DNA, 21 bp, synthetic construct
  misc_feature 1..21: note = Description of Artificial Sequence: Synthetic oligonucleotide
  source 1..21: mol_type = other DNA
tcggctagtagttcgccggtt

SEQ ID NO: 24499 - DNA, 21 bp, synthetic construct
  misc_feature 1..21: note = Description of Artificial Sequence: Synthetic oligonucleotide
  source 1..21: mol_type = other DNA
caccaaaacggcccccaaaaa

SEQ ID NO: 24500 - DNA, 21 bp, synthetic construct
  misc_feature 1..21: note = Description of Artificial Sequence: Synthetic oligonucleotide
  source 1..21: mol_type = other DNA
ggcaacggcgaacaaagaggc

SEQ ID NO: 24501 - DNA, 21 bp, synthetic construct
  misc_feature 1..21: note = Description of Artificial Sequence: Synthetic oligonucleotide
  source 1..21: mol_type = other DNA
ggcacccaaaacagcaaactc

SEQ ID NO: 24502 - DNA, 21 bp, synthetic construct
  misc_feature 1..21: note = Description of Artificial Sequence: Synthetic oligonucleotide
  source 1..21: mol_type = other DNA
aatcgtcttccgagtgctagt

SEQ ID NO: 24503 - DNA, 21 bp, synthetic construct
  misc_feature 1..21: note = Description of Artificial Sequence: Synthetic oligonucleotide
  source 1..21: mol_type = other DNA
ttgcctacggcgccgcgggat

SEQ ID NO: 24504 - DNA, 21 bp, synthetic construct
  misc_feature 1..21: note = Description of Artificial Sequence: Synthetic oligonucleotide
  source 1..21: mol_type = other DNA
caaggcgacaaccaattcaaa

SEQ ID NO: 24505 - DNA, 21 bp, synthetic construct
  misc_feature 1..21: note = Description of Artificial Sequence: Synthetic oligonucleotide
  source 1..21: mol_type = other DNA
tcgactgggtctactactggt

SEQ ID NO: 24506 - DNA, 21 bp, synthetic construct
  misc_feature 1..21: note = Description of Artificial Sequence: Synthetic oligonucleotide
  source 1..21: mol_type = other DNA
acgggtgcttcgtctggtaat

SEQ ID NO: 24507 - DNA, 21 bp, synthetic construct
  misc_feature 1..21: note = Description of Artificial Sequence: Synthetic oligonucleotide
  source 1..21: mol_type = other DNA
gaccacggcaaaaccagcgtc

SEQ ID NO: 24508 - DNA, 21 bp, synthetic construct
  misc_feature 1..21: note = Description of Artificial Sequence: Synthetic oligonucleotide
  source 1..21: mol_type = other DNA
gagtcggatcgtgctaagcat

SEQ ID NO: 24509 - DNA, 21 bp, synthetic construct
  misc_feature 1..21: note = Description of Artificial Sequence: Synthetic oligonucleotide
  source 1..21: mol_type = other DNA
aacaacggccacgccgacaga

SEQ ID NO: 24510 - DNA, 21 bp, synthetic construct
  misc_feature 1..21: note = Description of Artificial Sequence: Synthetic oligonucleotide
  source 1..21: mol_type = other DNA
aacagcgccaccaacagcctc

SEQ ID NO: 24511 - DNA, 21 bp, synthetic construct
  misc_feature 1..21: note = Description of Artificial Sequence: Synthetic oligonucleotide
  source 1..21: mol_type = other DNA
aagcagagtccgcctgataag

SEQ ID NO: 24512 - DNA, 21 bp, synthetic construct
  misc_feature 1..21: note = Description of Artificial Sequence: Synthetic oligonucleotide
  source 1..21: mol_type = other DNA
aagggtacggagcagccgcat

SEQ ID NO: 24513 - DNA, 21 bp, synthetic construct
  misc_feature 1..21: note = Description of Artificial Sequence: Synthetic oligonucleotide
  source 1..21: mol_type = other DNA
aatgcgacttctaatccgcat

SEQ ID NO: 24514 - DNA, 21 bp, synthetic construct
  misc_feature 1..21: note = Description of Artificial Sequence: Synthetic oligonucleotide
  source 1..21: mol_type = other DNA
accacccaaaaagccaccatg

SEQ ID NO: 24515 - DNA, 21 bp, synthetic construct
  misc_feature 1..21: note = Description of Artificial Sequence: Synthetic oligonucleotide
  source 1..21: mol_type = other DNA
accaccctcgacggcgccaaa

SEQ ID NO: 24516 - DNA, 21 bp, synthetic construct
  misc_feature 1..21: note = Description of Artificial Sequence: Synthetic oligonucleotide
  source 1..21: mol_type = other DNA
accaccgacatgaaactcggc

SEQ ID NO: 24517 - DNA, 21 bp, synthetic construct
  misc_feature 1..21: note = Description of Artificial Sequence: Synthetic oligonucleotide
  source 1..21: mol_type = other DNA
accagcagagaaagccccccc

SEQ ID NO: 24518 - DNA, 21 bp, synthetic construct
  misc_feature 1..21: note = Description of Artificial Sequence: Synthetic oligonucleotide
  source 1..21: mol_type = other DNA
accctcagcaaaagcagcatc

SEQ ID NO: 24519 - DNA, 21 bp, synthetic construct
  misc_feature 1..21: note = Description of Artificial Sequence: Synthetic oligonucleotide
  source 1..21: mol_type = other DNA
acggatgctacttctagtggg

SEQ ID NO: 24520 - DNA, 21 bp, synthetic construct
  misc_feature 1..21: note = Description of Artificial Sequence: Synthetic oligonucleotide
  source 1..21: mol_type = other DNA
acgggtacgacttctactatg

SEQ ID NO: 24521 - DNA, 21 bp, synthetic construct
  misc_feature 1..21: note = Description of Artificial Sequence: Synthetic oligonucleotide
  source 1..21: mol_type = other DNA
agcaaagtcagcagccaagaa

SEQ ID NO: 24522 - DNA, 21 bp, synthetic construct
  misc_feature 1..21: note = Description of Artificial Sequence: Synthetic oligonucleotide
  source 1..21: mol_type = other DNA
agcagcatgcccgccgccggc

SEQ ID NO: 24523 - DNA, 21 bp, synthetic construct
  misc_feature 1..21: note = Description of Artificial Sequence: Synthetic oligonucleotide
  source 1..21: mol_type = other DNA
agcagcggcagcgcccaaccc

SEQ ID NO: 24524 - DNA, 21 bp, synthetic construct
  misc_feature 1..21: note = Description of Artificial Sequence: Synthetic oligonucleotide
  source 1..21: mol_type = other DNA
agccaagcccacgtcaccaaa

SEQ ID NO: 24525 - DNA, 21 bp, synthetic construct
  misc_feature 1..21: note = Description of Artificial Sequence: Synthetic oligonucleotide
  source 1..21: mol_type = other DNA
agccccgccaccaacaaaatc

SEQ ID NO: 24526 - DNA, 21 bp, synthetic construct
  misc_feature 1..21: note = Description of Artificial Sequence: Synthetic oligonucleotide
  source 1..21: mol_type = other DNA
agcgaaagcaccagaaccacc

SEQ ID NO: 24527 - DNA, 21 bp, synthetic construct
  misc_feature 1..21: note = Description of Artificial Sequence: Synthetic oligonucleotide
  source 1..21: mol_type = other DNA
agcggccacagcaaactcccc

SEQ ID NO: 24528 - DNA, 21 bp, synthetic construct
  misc_feature 1..21: note = Description of Artificial Sequence: Synthetic oligonucleotide
  source 1..21: mol_type = other DNA
agcgtcagcgccgccaaaggc

SEQ ID NO: 24529 - DNA, 21 bp, synthetic construct
  misc_feature 1..21: note = Description of Artificial Sequence: Synthetic oligonucleotide
  source 1..21: mol_type = other DNA
aggactgagcaggggtcgaat

SEQ ID NO: 24530 - DNA, 21 bp, synthetic construct
  misc_feature 1..21: note = Description of Artificial Sequence: Synthetic oligonucleotide
  source 1..21: mol_type = other DNA
agttcttcgagtaggaatacg

SEQ ID NO: 24531 - DNA, 21 bp, synthetic construct
  misc_feature 1..21: note = Description of Artificial Sequence: Synthetic oligonucleotide
  source 1..21: mol_type = other DNA
atggccggccaaagagacagc

SEQ ID NO: 24532 - DNA, 21 bp, synthetic construct
  misc_feature 1..21: note = Description of Artificial Sequence: Synthetic oligonucleotide
  source 1..21: mol_type = other DNA
caaagcacccccaacctcaaa

SEQ ID NO: 24533 - DNA, 21 bp, synthetic construct
  misc_feature 1..21: note = Description of Artificial Sequence: Synthetic oligonucleotide
  source 1..21: mol_type = other DNA
cagggtgttcaggcggcttcg

SEQ ID NO: 24534 - DNA, 21 bp, synthetic construct
  misc_feature 1..21: note = Description of Artificial Sequence: Synthetic oligonucleotide
  source 1..21: mol_type = other DNA
cagtcgtcgcattcttctgct

SEQ ID NO: 24535 - DNA, 21 bp, synthetic construct
  misc_feature 1..21: note = Description of Artificial Sequence: Synthetic oligonucleotide
  source 1..21: mol_type = other DNA
cagttgggtaagcctgatagt

SEQ ID NO: 24536 - DNA, 21 bp, synthetic construct
  misc_feature 1..21: note = Description of Artificial Sequence: Synthetic oligonucleotide
  source 1..21: mol_type = other DNA
ctccaacccggcagcgccggc

SEQ ID NO: 24537 - DNA, 21 bp, synthetic construct
  misc_feature 1..21: note = Description of Artificial Sequence: Synthetic oligonucleotide
  source 1..21: mol_type = other DNA
ctgacggatactaagggggct

SEQ ID NO: 24538 - DNA, 21 bp, synthetic construct
  misc_feature 1..21: note = Description of Artificial Sequence: Synthetic oligonucleotide
  source 1..21: mol_type = other DNA
ctgtcggtgaagcctatgagt

SEQ ID NO: 24539 - DNA, 21 bp, synthetic construct
  misc_feature 1..21: note = Description of Artificial Sequence: Synthetic oligonucleotide
  source 1..21: mol_type = other DNA
gaagacagcgccagaagcaac

SEQ ID NO: 24540 - DNA, 21 bp, synthetic construct
  misc_feature 1..21: note = Description of Artificial Sequence: Synthetic oligonucleotide
  source 1..21: mol_type = other DNA
gaaggcaacggcgtccacaac

SEQ ID NO: 24541 - DNA, 21 bp, synthetic construct
  misc_feature 1..21: note = Description of Artificial Sequence: Synthetic oligonucleotide
  source 1..21: mol_type = other DNA
gacagcaaagacagaagcatc

SEQ ID NO: 24542 - DNA, 21 bp, synthetic construct
  misc_feature 1..21: note = Description of Artificial Sequence: Synthetic oligonucleotide
  source 1..21: mol_type = other DNA
gacccccccaaaaccagcccc

SEQ ID NO: 24543 - DNA, 21 bp, synthetic construct
  misc_feature 1..21: note = Description of Artificial Sequence: Synthetic oligonucleotide
  source 1..21: mol_type = other DNA
gagaagggggcgtcttcggct

SEQ ID NO: 24544 - DNA, 21 bp, synthetic construct
  misc_feature 1..21: note = Description of Artificial Sequence: Synthetic oligonucleotide
  source 1..21: mol_type = other DNA
gagcctggtacgtctcctaat

SEQ ID NO: 24545 - DNA, 21 bp, synthetic construct
  misc_feature 1..21: note = Description of Artificial Sequence: Synthetic oligonucleotide
  source 1..21: mol_type = other DNA
gataatcattcgtctaagtcg

SEQ ID NO: 24546 - DNA, 21 bp, synthetic construct
  misc_feature 1..21: note = Description of Artificial Sequence: Synthetic oligonucleotide
  source 1..21: mol_type = other DNA
gatagttctaagtcgatggtg

SEQ ID NO: 24547 - DNA, 21 bp, synthetic construct
  misc_feature 1..21: note = Description of Artificial Sequence: Synthetic oligonucleotide
  source 1..21: mol_type = other DNA
gccagcaccggcgacaaaaga

SEQ ID NO: 24548 - DNA, 21 bp, synthetic construct
  misc_feature 1..21: note = Description of Artificial Sequence: Synthetic oligonucleotide
  source 1..21: mol_type = other DNA
gccatgaacaccgccagcagc

SEQ ID NO: 24549 - DNA, 21 bp, synthetic construct
  misc_feature 1..21: note = Description of Artificial Sequence: Synthetic oligonucleotide
  source 1..21: mol_type = other DNA
gccgaccaacaacccaccaga

SEQ ID NO: 24550 - DNA, 21 bp, synthetic construct
  misc_feature 1..21: note = Description of Artificial Sequence: Synthetic oligonucleotide
  source 1..21: mol_type = other DNA
gccggcgacgtcgccagacaa

SEQ ID NO: 24551 - DNA, 21 bp, synthetic construct
  misc_feature 1..21: note = Description of Artificial Sequence: Synthetic oligonucleotide
  source 1..21: mol_type = other DNA
gccggcggcagcaccagcaaa

SEQ ID NO: 24552 - DNA, 21 bp, synthetic construct
  misc_feature 1..21: note = Description of Artificial Sequence: Synthetic oligonucleotide
  source 1..21: mol_type = other DNA
gcgatggctagtggttcgagt

SEQ ID NO: 24553 - DNA, 21 bp, synthetic construct
  misc_feature 1..21: note = Description of Artificial Sequence: Synthetic oligonucleotide
  source 1..21: mol_type = other DNA
ggcaaccccaccgaccaaaaa

SEQ ID NO: 24554 - DNA, 21 bp, synthetic construct
  misc_feature 1..21: note = Description of Artificial Sequence: Synthetic oligonucleotide
  source 1..21: mol_type = other DNA
ggcagcacccccagcaccctc

SEQ ID NO: 24555 - DNA, 21 bp, synthetic construct
  misc_feature 1..21: note = Description of Artificial Sequence: Synthetic oligonucleotide
  source 1..21: mol_type = other DNA
gggcctcagacttctaagagt

SEQ ID NO: 24556 - DNA, 21 bp, synthetic construct
  misc_feature 1..21: note = Description of Artificial Sequence: Synthetic oligonucleotide
  source 1..21: mol_type = other DNA
ggggggactaatggtattcag

SEQ ID NO: 24557 - DNA, 21 bp, synthetic construct
  misc_feature 1..21: note = Description of Artificial Sequence: Synthetic oligonucleotide
  source 1..21: mol_type = other DNA
ggttctaagggtgatttgact

SEQ ID NO: 24558 - DNA, 21 bp, synthetic construct
  misc_feature 1..21: note = Description of Artificial Sequence: Synthetic oligonucleotide
  source 1..21: mol_type = other DNA
ggttctgagaaggatcggcat

SEQ ID NO: 24559 - DNA, 21 bp, synthetic construct
  misc_feature 1..21: note = Description of Artificial Sequence: Synthetic oligonucleotide
  source 1..21: mol_type = other DNA
gtcagcgccaaaggcgtcatg

SEQ ID NO: 24560 - DNA, 21 bp, synthetic construct
  misc_feature 1..21: note = Description of Artificial Sequence: Synthetic oligonucleotide
  source 1..21: mol_type = other DNA
gtggagagtaagattaattcg

SEQ ID NO: 24561 - DNA, 21 bp, synthetic construct
  misc_feature 1..21: note = Description of Artificial Sequence: Synthetic oligonucleotide
  source 1..21: mol_type = other DNA
gttggtgcgtctagtattgct

SEQ ID NO: 24562 - DNA, 21 bp, synthetic construct
  misc_feature 1..21: note = Description of Artificial Sequence: Synthetic oligonucleotide
  source 1..21: mol_type = other DNA
tctactaaggctccgtctggt

SEQ ID NO: 24563 - DNA, 21 bp, synthetic construct
  misc_feature 1..21: note = Description of Artificial Sequence: Synthetic oligonucleotide
  source 1..21: mol_type = other DNA
tctagtaagtctcagccttcg

SEQ ID NO: 24564 - DNA, 21 bp, synthetic construct
  misc_feature 1..21: note = Description of Artificial Sequence: Synthetic oligonucleotide
  source 1..21: mol_type = other DNA
tctggtaggggttcttcggag

SEQ ID NO: 24565 - DNA, 21 bp, synthetic construct
  misc_feature 1..21: note = Description of Artificial Sequence: Synthetic oligonucleotide
  source 1..21: mol_type = other DNA
ttgaagactacgggttctggg

SEQ ID NO: 24566 - DNA, 21 bp, synthetic construct
  misc_feature 1..21: note = Description of Artificial Sequence: Synthetic oligonucleotide
  source 1..21: mol_type = other DNA
ttgccgagtggtaaggatccg

SEQ ID NO: 24567 - DNA, 21 bp, synthetic construct
  misc_feature 1..21: note = Description of Artificial Sequence: Synthetic oligonucleotide
  source 1..21: mol_type = other DNA
actgggaatcctggtaatact

SEQ ID NO: 24568 - DNA, 21 bp, synthetic construct
  misc_feature 1..21: note = Description of Artificial Sequence: Synthetic oligonucleotide
  source 1..21: mol_type = other DNA
atgggccaaaccagcctcagc

SEQ ID NO: 24569 - DNA, 21 bp, synthetic construct
  misc_feature 1..21: note = Description of Artificial Sequence: Synthetic oligonucleotide
  source 1..21: mol_type = other DNA
acccccagcgcccccagcaac

SEQ ID NO: 24570 - DNA, 21 bp, synthetic construct
  misc_feature 1..21: note = Description of Artificial Sequence: Synthetic oligonucleotide
  source 1..21: mol_type = other DNA
agcagcagcaaccaccccacc

SEQ ID NO: 24571 - DNA, 21 bp, synthetic construct
  misc_feature 1..21: note = Description of Artificial Sequence: Synthetic oligonucleotide
  source 1..21: mol_type = other DNA
gctagtgagcagtcggctaag

SEQ ID NO: 24572 - DNA, 21 bp, synthetic construct
  misc_feature 1..21: note = Description of Artificial Sequence: Synthetic oligonucleotide
  source 1..21: mol_type = other DNA
tcgggtacgtctcatgtgctt

SEQ ID NO: 24573 - DNA, 21 bp, synthetic construct
  misc_feature 1..21: note = Description of Artificial Sequence: Synthetic oligonucleotide
  source 1..21: mol_type = other DNA
gttggttctccttctgcgtcg

SEQ ID NO: 24574 - DNA, 21 bp, synthetic construct
  misc_feature 1..21: note = Description of Artificial Sequence: Synthetic oligonucleotide
  source 1..21: mol_type = other DNA
aacatcaacagcgcccacagc

SEQ ID NO: 24575 - DNA, 21 bp, synthetic construct
  misc_feature 1..21: note = Description of Artificial Sequence: Synthetic oligonucleotide
  source 1..21: mol_type = other DNA
ctcaccggcaccagcaccccc

SEQ ID NO: 24576 - DNA, 21 bp, synthetic construct
  misc_feature 1..21: note = Description of Artificial Sequence: Synthetic oligonucleotide
  source 1..21: mol_type = other DNA
agcggcggccaacccctcaac

SEQ ID NO: 24577 - DNA, 21 bp, synthetic construct
  misc_feature 1..21: note = Description of Artificial Sequence: Synthetic oligonucleotide
  source 1..21: mol_type = other DNA
gaaaacaccagcaccgtccac

SEQ ID NO: 24578 - DNA, 21 bp, synthetic construct
  misc_feature 1..21: note = Description of Artificial Sequence: Synthetic oligonucleotide
  source 1..21: mol_type = other DNA
aatggtggtgatgtttctcgg

SEQ ID NO: 24579 - DNA, 21 bp, synthetic construct
  misc_feature 1..21: note = Description of Artificial Sequence: Synthetic oligonucleotide
  source 1..21: mol_type = other DNA
gattttggtaagacgtctacg

SEQ ID NO: 24580 - DNA, 21 bp, synthetic construct
  misc_feature 1..21: note = Description of Artificial Sequence: Synthetic oligonucleotide
  source 1..21: mol_type = other DNA
ggcatcgtccacagcgaaaga

SEQ ID NO: 24581 - DNA, 21 bp, synthetic construct
  misc_feature 1..21: note = Description of Artificial Sequence: Synthetic oligonucleotide
  source 1..21: mol_type = other DNA
agaggcagcgaacccgtcaac

SEQ ID NO: 24582 - DNA, 21 bp, synthetic construct
  misc_feature 1..21: note = Description of Artificial Sequence: Synthetic oligonucleotide
  source 1..21: mol_type = other DNA
agcaccaccagcagcagcaga

SEQ ID NO: 24583 - DNA, 21 bp, synthetic construct
  misc_feature 1..21: note = Description of Artificial Sequence: Synthetic oligonucleotide
  source 1..21: mol_type = other DNA
ggtggggtggatacgagtcgt

SEQ ID NO: 24584 - DNA, 21 bp, synthetic construct
  misc_feature 1..21: note = Description of Artificial Sequence: Synthetic oligonucleotide
  source 1..21: mol_type = other DNA
ggcagcggcggcgtcagaggc

SEQ ID NO: 24585 - DNA, 21 bp, synthetic construct
  misc_feature 1..21: note = Description of Artificial Sequence: Synthetic oligonucleotide
  source 1..21: mol_type = other DNA
aaccaaagcaccagacccgac

SEQ ID NO: 24586 - DNA, 21 bp, synthetic construct
  misc_feature 1..21: note = Description of Artificial Sequence: Synthetic oligonucleotide
  source 1..21: mol_type = other DNA
actcgtgatagtactaagtct

SEQ ID NO: 24587 - DNA, 21 bp, synthetic construct
  misc_feature 1..21: note = Description of Artificial Sequence: Synthetic oligonucleotide
  source 1..21: mol_type = other DNA
agcaacaccacccacagcgcc

SEQ ID NO: 24588 - DNA, 21 bp, synthetic construct
  misc_feature 1..21: note = Description of Artificial Sequence: Synthetic oligonucleotide
  source 1..21: mol_type = other DNA
agcagaaacgccaccagcgcc

SEQ ID NO: 24589 - DNA, 21 bp, synthetic construct
  misc_feature 1..21: note = Description of Artificial Sequence: Synthetic oligonucleotide
  source 1..21: mol_type = other DNA
agcggcagcggcaccgtcaga

SEQ ID NO: 24590 - DNA, 21 bp, synthetic construct
  misc_feature 1..21: note = Description of Artificial Sequence: Synthetic oligonucleotide
  source 1..21: mol_type = other DNA
agtaggacggtgtctagtacg

SEQ ID NO: 24591 - DNA, 21 bp, synthetic construct
  misc_feature 1..21: note = Description of Artificial Sequence: Synthetic oligonucleotide
  source 1..21: mol_type = other DNA
gctcctggggaggctcagtcg

SEQ ID NO: 24592 - DNA, 21 bp, synthetic construct
  misc_feature 1..21: note = Description of Artificial Sequence: Synthetic oligonucleotide
  source 1..21: mol_type = other DNA
gaacccagcaacaacagcaaa

SEQ ID NO: 24593 - DNA, 21 bp, synthetic construct
  misc_feature 1..21: note = Description of Artificial Sequence: Synthetic oligonucleotide
  source 1..21: mol_type = other DNA
gaccaacaaagcaccaacaga

SEQ ID NO: 24594 - DNA, 21 bp, synthetic construct
  misc_feature 1..21: note = Description of Artificial Sequence: Synthetic oligonucleotide
  source 1..21: mol_type = other DNA
ggcctcaccaaacaagaaacc

SEQ ID NO: 24595 - DNA, 21 bp, synthetic construct
  misc_feature 1..21: note = Description of Artificial Sequence: Synthetic oligonucleotide
  source 1..21: mol_type = other DNA
agcgacaaaagcggcatcgtc

SEQ ID NO: 24596 - DNA, 21 bp, synthetic construct
  misc_feature 1..21: note = Description of Artificial Sequence: Synthetic oligonucleotide
  source 1..21: mol_type = other DNA
gagggtcagaagacggagtcg

SEQ ID NO: 24597 - DNA, 21 bp, synthetic construct
  misc_feature 1..21: note = Description of Artificial Sequence: Synthetic oligonucleotide
  source 1..21: mol_type = other DNA
gccagagacagccacaccacc

SEQ ID NO: 24598 - DNA, 21 bp, synthetic construct
  misc_feature 1..21: note = Description of Artificial Sequence: Synthetic oligonucleotide
  source 1..21: mol_type = other DNA
tcgaatcctcagagtatgggg

SEQ ID NO: 24599 - DNA, 21 bp, synthetic construct
  misc_feature 1..21: note = Description of Artificial Sequence: Synthetic oligonucleotide
  source 1..21: mol_type = other DNA
cagaataaggagtcgtataag

SEQ ID NO: 24600 - DNA, 21 bp, synthetic construct
  misc_feature 1..21: note = Description of Artificial Sequence: Synthetic oligonucleotide
  source 1..21: mol_type = other DNA
ggcaacagaggcggcaccagc

SEQ ID NO: 24601 - DNA, 21 bp, synthetic construct
  misc_feature 1..21: note = Description of Artificial Sequence: Synthetic oligonucleotide
  source 1..21: mol_type = other DNA
aaccccatggtcaacggcaaa

SEQ ID NO: 24602 - DNA, 21 bp, synthetic construct
  misc_feature 1..21: note = Description of Artificial Sequence: Synthetic oligonucleotide
  source 1..21: mol_type = other DNA
aacgtccaagccgccaccaaa

SEQ ID NO: 24603 - DNA, 21 bp, synthetic construct
  misc_feature 1..21: note = Description of Artificial Sequence: Synthetic oligonucleotide
  source 1..21: mol_type = other DNA
agttcgtctagtaagggggtt

SEQ ID NO: 24604 - DNA, 21 bp, synthetic construct
  misc_feature 1..21: note = Description of Artificial Sequence: Synthetic oligonucleotide
  source 1..21: mol_type = other DNA
atcagaaccaaagaaagccac

SEQ ID NO: 24605 - DNA, 21 bp, synthetic construct
  misc_feature 1..21: note = Description of Artificial Sequence: Synthetic oligonucleotide
  source 1..21: mol_type = other DNA
caaagcagcccccccaaaacc

SEQ ID NO: 24606 - DNA, 21 bp, synthetic construct
  misc_feature 1..21: note = Description of Artificial Sequence: Synthetic oligonucleotide
  source 1..21: mol_type = other DNA
gacaccagaggcaaaggcatc

SEQ ID NO: 24607 - DNA, 21 bp, synthetic construct
  misc_feature 1..21: note = Description of Artificial Sequence: Synthetic oligonucleotide
  source 1..21: mol_type = other DNA
gaggttaattctgcgagggct

SEQ ID NO: 24608 - DNA, 21 bp, synthetic construct
  misc_feature 1..21: note = Description of Artificial Sequence: Synthetic oligonucleotide
  source 1..21: mol_type = other DNA
gaggttggtaagcattctaat

SEQ ID NO: 24609 - DNA, 21 bp, synthetic construct
  misc_feature 1..21: note = Description of Artificial Sequence: Synthetic oligonucleotide
  source 1..21: mol_type = other DNA
tctattggtggtactaatggg

SEQ ID NO: 24610 - DNA, 21 bp, synthetic construct
  misc_feature 1..21: note = Description of Artificial Sequence: Synthetic oligonucleotide
  source 1..21: mol_type = other DNA
acccccaccaccaaaagagaa

SEQ ID NO: 24611 - DNA, 21 bp, synthetic construct
  misc_feature 1..21: note = Description of Artificial Sequence: Synthetic oligonucleotide
  source 1..21: mol_type = other DNA
caggttgcttcggctaatccg

SEQ ID NO: 24612 - DNA, 21 bp, synthetic construct
  misc_feature 1..21: note = Description of Artificial Sequence: Synthetic oligonucleotide
  source 1..21: mol_type = other DNA
gaccaagccaaaagcatcaga

SEQ ID NO: 24613 - DNA, 21 bp, synthetic construct
  misc_feature 1..21: note = Description of Artificial Sequence: Synthetic oligonucleotide
  source 1..21: mol_type = other DNA
ggcagcatgggcaccgccaaa

SEQ ID NO: 24614 - DNA, 21 bp, synthetic construct
  misc_feature 1..21: note = Description of Artificial Sequence: Synthetic oligonucleotide
  source 1..21: mol_type = other DNA
gtgaatgggggtcatggtaag

SEQ ID NO: 24615 - DNA, 21 bp, synthetic construct
  misc_feature 1..21: note = Description of Artificial Sequence: Synthetic oligonucleotide
  source 1..21: mol_type = other DNA
gtcagcagcggcggcaccgcc

SEQ ID NO: 24616 - DNA, 21 bp, synthetic construct
  misc_feature 1..21: note = Description of Artificial Sequence: Synthetic oligonucleotide
  source 1..21: mol_type = other DNA
agtttgggtcagtctacggcg

SEQ ID NO: 24617 - DNA, 21 bp, synthetic construct
  misc_feature 1..21: note = Description of Artificial Sequence: Synthetic oligonucleotide
  source 1..21: mol_type = other DNA
cagggtgtgactaataagtct

SEQ ID NO: 24618 - DNA, 21 bp, synthetic construct
  misc_feature 1..21: note = Description of Artificial Sequence: Synthetic oligonucleotide
  source 1..21: mol_type = other DNA
gagggtgtgactacggggtcg

SEQ ID NO: 24619 - DNA, 21 bp, synthetic construct
  misc_feature 1..21: note = Description of Artificial Sequence: Synthetic oligonucleotide
  source 1..21: mol_type = other DNA
agtcagtctgcgcagaatcag

SEQ ID NO: 24620 - DNA, 21 bp, synthetic construct
  misc_feature 1..21: note = Description of Artificial Sequence: Synthetic oligonucleotide
  source 1..21: mol_type = other DNA
agcagcgccaacggcaccaga

SEQ ID NO: 24621 - DNA, 21 bp, synthetic construct
  misc_feature 1..21: note = Description of Artificial Sequence: Synthetic oligonucleotide
  source 1..21: mol_type = other DNA
gaggttaatgctccgcgtaag

SEQ ID NO: 24622 - DNA, 21 bp, synthetic construct
  misc_feature 1..21: note = Description of Artificial Sequence: Synthetic oligonucleotide
  source 1..21: mol_type = other DNA
actatgacgtcttcggcggcg

SEQ ID NO: 24623 - DNA, 21 bp, synthetic construct
  misc_feature 1..21: note = Description of Artificial Sequence: Synthetic oligonucleotide
  source 1..21: mol_type = other DNA
agagacccccccagcagcagc

SEQ ID NO: 24624 - DNA, 21 bp, synthetic construct
  misc_feature 1..21: note = Description of Artificial Sequence: Synthetic oligonucleotide
  source 1..21: mol_type = other DNA
agagtcaacaaaagcagcgaa

SEQ ID NO: 24625 - DNA, 21 bp, synthetic construct
  misc_feature 1..21: note = Description of Artificial Sequence: Synthetic oligonucleotide
  source 1..21: mol_type = other DNA
caaagcgacaaagaacccaga

SEQ ID NO: 24626 - DNA, 21 bp, synthetic construct
  misc_feature 1..21: note = Description of Artificial Sequence: Synthetic oligonucleotide
  source 1..21: mol_type = other DNA
gtgagtgttccgcctagtaat

SEQ ID NO: 24627 - DNA, 21 bp, synthetic construct
  misc_feature 1..21: note = Description of Artificial Sequence: Synthetic oligonucleotide
  source 1..21: mol_type = other DNA
aacagcgacggcaaagtcaga

SEQ ID NO: 24628 - DNA, 21 bp, synthetic construct
  misc_feature 1..21: note = Description of Artificial Sequence: Synthetic oligonucleotide
  source 1..21: mol_type = other DNA
agtggtaataatgggaatgct

SEQ ID NO: 24629 - DNA, 21 bp, synthetic construct
  misc_feature 1..21: note = Description of Artificial Sequence: Synthetic oligonucleotide
  source 1..21: mol_type = other DNA
caagtcaacaccaacggcggc

SEQ ID NO: 24630 - DNA, 21 bp, synthetic construct
  misc_feature 1..21: note = Description of Artificial Sequence: Synthetic oligonucleotide
  source 1..21: mol_type = other DNA
gcccacaaagccaccaacgtc

SEQ ID NO: 24631 - DNA, 21 bp, synthetic construct
  misc_feature 1..21: note = Description of Artificial Sequence: Synthetic oligonucleotide
  source 1..21: mol_type = other DNA
gccgccagccaagccaccgtc

SEQ ID NO: 24632 - DNA, 21 bp, synthetic construct
  misc_feature 1..21: note = Description of Artificial Sequence: Synthetic oligonucleotide
  source 1..21: mol_type = other DNA
gtcggcggcagccccaacagc

SEQ ID NO: 24633 - DNA, 21 bp, synthetic construct
  misc_feature 1..21: note = Description of Artificial Sequence: Synthetic oligonucleotide
  source 1..21: mol_type = other DNA
gttggggggtctagtaagggt

SEQ ID NO: 24634 - DNA, 21 bp, synthetic construct
  misc_feature 1..21: note = Description of Artificial Sequence: Synthetic oligonucleotide
  source 1..21: mol_type = other DNA
ggtacgacgactgtggctggt

SEQ ID NO: 24635 - DNA, 21 bp, synthetic construct
  misc_feature 1..21: note = Description of Artificial Sequence: Synthetic oligonucleotide
  source 1..21: mol_type = other DNA
acccaagtcaccagccccgcc

SEQ ID NO: 24636 - DNA, 21 bp, synthetic construct
  misc_feature 1..21: note = Description of Artificial Sequence: Synthetic oligonucleotide
  source 1..21: mol_type = other DNA
ggtactgagagtcagcgtttg

SEQ ID NO: 24637 - DNA, 21 bp, synthetic construct
  misc_feature 1..21: note = Description of Artificial Sequence: Synthetic oligonucleotide
  source 1..21: mol_type = other DNA
accggcgccgccgccaaccac

SEQ ID NO: 24638 - DNA, 21 bp, synthetic construct
  misc_feature 1..21: note = Description of Artificial Sequence: Synthetic oligonucleotide
  source 1..21: mol_type = other DNA
agcaacaacaacggcagcacc

SEQ ID NO: 24639 - DNA, 21 bp, synthetic construct
  misc_feature 1..21: note = Description of Artificial Sequence: Synthetic oligonucleotide
  source 1..21: mol_type = other DNA
agcagcgaccaaagaaacggc

SEQ ID NO: 24640 - DNA, 21 bp, synthetic construct
  misc_feature 1..21: note = Description of Artificial Sequence: Synthetic oligonucleotide
  source 1..21: mol_type = other DNA
agcggcctcaacaaaagcggc

SEQ ID NO: 24641 - DNA, 21 bp, synthetic construct
  misc_feature 1..21: note = Description of Artificial Sequence: Synthetic oligonucleotide
  source 1..21: mol_type = other DNA
caggttaatgcgcctaatagt

SEQ ID NO: 24642 - DNA, 21 bp, synthetic construct
  misc_feature 1..21: note = Description of Artificial Sequence: Synthetic oligonucleotide
  source 1..21: mol_type = other DNA
agtgggcatgatcgttctggt

SEQ ID NO: 24643 - DNA, 21 bp, synthetic construct
  misc_feature 1..21: note = Description of Artificial Sequence: Synthetic oligonucleotide
  source 1..21: mol_type = other DNA
tcgactcgttctggtgagggt

SEQ ID NO: 24644 - DNA, 21 bp, synthetic construct
  misc_feature 1..21: note = Description of Artificial Sequence: Synthetic oligonucleotide
  source 1..21: mol_type = other DNA
agcaccagcagccaccccatc

SEQ ID NO: 24645 - DNA, 21 bp, synthetic construct
  misc_feature 1..21: note = Description of Artificial Sequence: Synthetic oligonucleotide
  source 1..21: mol_type = other DNA
gccaccgacagacaaggcgcc

SEQ ID NO: 24646 - DNA, 21 bp, synthetic construct
  misc_feature 1..21: note = Description of Artificial Sequence: Synthetic oligonucleotide
  source 1..21: mol_type = other DNA
tctccggttgagcgtaagtcg

SEQ ID NO: 24647 - DNA, 21 bp, synthetic construct
  misc_feature 1..21: note = Description of Artificial Sequence: Synthetic oligonucleotide
  source 1..21: mol_type = other DNA
tctccttcgaatagtaggacg

SEQ ID NO: 24648 - DNA, 21 bp, synthetic construct
  misc_feature 1..21: note = Description of Artificial Sequence: Synthetic oligonucleotide
  source 1..21: mol_type = other DNA
gctgataatcagaagtcgcag

SEQ ID NO: 24649 - DNA, 21 bp, synthetic construct
  misc_feature 1..21: note = Description of Artificial Sequence: Synthetic oligonucleotide
  source 1..21: mol_type = other DNA
aatgctactactactggtcat

SEQ ID NO: 24650 - DNA, 21 bp, synthetic construct
  misc_feature 1..21: note = Description of Artificial Sequence: Synthetic oligonucleotide
  source 1..21: mol_type = other DNA
accagcgacaaacaattcccc

SEQ ID NO: 24651 - DNA, 21 bp, synthetic construct
  misc_feature 1..21: note = Description of Artificial Sequence: Synthetic oligonucleotide
  source 1..21: mol_type = other DNA
actccggaggggaggacgagt

SEQ ID NO: 24652 - DNA, 21 bp, synthetic construct
  misc_feature 1..21: note = Description of Artificial Sequence: Synthetic oligonucleotide
  source 1..21: mol_type = other DNA
agcaacaacaaagccatgctc

SEQ ID NO: 24653 - DNA, 21 bp, synthetic construct
  misc_feature 1..21: note = Description of Artificial Sequence: Synthetic oligonucleotide
  source 1..21: mol_type = other DNA
agtgatagtcgtaaggatggg

SEQ ID NO: 24654 - DNA, 21 bp, synthetic construct
  misc_feature 1..21: note = Description of Artificial Sequence: Synthetic oligonucleotide
  source 1..21: mol_type = other DNA
ctcaccagccaaggcaaaaac

SEQ ID NO: 24655 - DNA, 21 bp, synthetic construct
  misc_feature 1..21: note = Description of Artificial Sequence: Synthetic oligonucleotide
  source 1..21: mol_type = other DNA
ggtagtaagacttctttgacg

SEQ ID NO: 24656 - DNA, 21 bp, synthetic construct
  misc_feature 1..21: note = Description of Artificial Sequence: Synthetic oligonucleotide
  source 1..21: mol_type = other DNA
tatggtacggggagtgtggtg

SEQ ID NO: 24657 - DNA, 21 bp, synthetic construct
  misc_feature 1..21: note = Description of Artificial Sequence: Synthetic oligonucleotide
  source 1..21: mol_type = other DNA
tcgacgggtagtggtgctaat

SEQ ID NO: 24658 - DNA, 21 bp, synthetic construct
  misc_feature 1..21: note = Description of Artificial Sequence: Synthetic oligonucleotide
  source 1..21: mol_type = other DNA
atccccaacgccaaagaacaa

SEQ ID NO: 24659 - DNA, 21 bp, synthetic construct
  misc_feature 1..21: note = Description of Artificial Sequence: Synthetic oligonucleotide
  source 1..21: mol_type = other DNA
tctgcggataagtcgttgtcg

SEQ ID NO: 24660 - DNA, 21 bp, synthetic construct
  misc_feature 1..21: note = Description of Artificial Sequence: Synthetic oligonucleotide
  source 1..21: mol_type = other DNA
gatccgggtattccgaagtct

SEQ ID NO: 24661 - DNA, 21 bp, synthetic construct
  misc_feature 1..21: note = Description of Artificial Sequence: Synthetic oligonucleotide
  source 1..21: mol_type = other DNA
gggttgtcggtgcctcctaat

SEQ ID NO: 24662 - DNA, 21 bp, synthetic construct
  misc_feature 1..21: note = Description of Artificial Sequence: Synthetic oligonucleotide
  source 1..21: mol_type = other DNA
agcgtcgacaacaaaggcctc

SEQ ID NO: 24663 - DNA, 21 bp, synthetic construct
  misc_feature 1..21: note = Description of Artificial Sequence: Synthetic oligonucleotide
  source 1..21: mol_type = other DNA
cacaccgacgccagcagaagc

SEQ ID NO: 24664 - DNA, 21 bp, synthetic construct
  misc_feature 1..21: note = Description of Artificial Sequence: Synthetic oligonucleotide
  source 1..21: mol_type = other DNA
agcagcaacagcagcaccgtc

SEQ ID NO: 24665 - DNA, 21 bp, synthetic construct
  misc_feature 1..21: note = Description of Artificial Sequence: Synthetic oligonucleotide
  source 1..21: mol_type = other DNA
gctcagcgtgctgagatgaag

SEQ ID NO: 24666 - DNA, 21 bp, synthetic construct
  misc_feature 1..21: note = Description of Artificial Sequence: Synthetic oligonucleotide
  source 1..21: mol_type = other DNA
accagcgccaacgccagcacc

SEQ ID NO: 24667 - DNA, 21 bp, synthetic construct
  misc_feature 1..21: note = Description of Artificial Sequence: Synthetic oligonucleotide
  source 1..21: mol_type = other DNA
agcaacagaacccccaccacc

SEQ ID NO: 24668 - DNA, 21 bp, synthetic construct
  misc_feature 1..21: note = Description of Artificial Sequence: Synthetic oligonucleotide
  source 1..21: mol_type = other DNA
agtggggattcgcattcgcgg

SEQ ID NO: 24669 - DNA, 21 bp, synthetic construct
  misc_feature 1..21: note = Description of Artificial Sequence: Synthetic oligonucleotide
  source 1..21: mol_type = other DNA
gaccaaaccagcaccgccaga

SEQ ID NO: 24670 - DNA, 21 bp, synthetic construct
  misc_feature 1..21: note = Description of Artificial Sequence: Synthetic oligonucleotide
  source 1..21: mol_type = other DNA
gatagtcattcgccgggtagt

SEQ ID NO: 24671 - DNA, 21 bp, synthetic construct
  misc_feature 1..21: note = Description of Artificial Sequence: Synthetic oligonucleotide
  source 1..21: mol_type = other DNA
gccagcagcagcagcaccctc

SEQ ID NO: 24672 - DNA, 21 bp, synthetic construct
  misc_feature 1..21: note = Description of Artificial Sequence: Synthetic oligonucleotide
  source 1..21: mol_type = other DNA
gctgagcattcgaagattcag

SEQ ID NO: 24673 - DNA, 21 bp, synthetic construct
  misc_feature 1..21: note = Description of Artificial Sequence: Synthetic oligonucleotide
  source 1..21: mol_type = other DNA
tcggcggcgactagtaatatt

SEQ ID NO: 24674 - DNA, 21 bp, synthetic construct
  misc_feature 1..21: note = Description of Artificial Sequence: Synthetic oligonucleotide
  source 1..21: mol_type = other DNA
tcttctgatactcggccttcg

SEQ ID NO: 24675 - DNA, 21 bp, synthetic construct
  misc_feature 1..21: note = Description of Artificial Sequence: Synthetic oligonucleotide
  source 1..21: mol_type = other DNA
ctgccgtctacgagtggttcg

SEQ ID NO: 24676 - DNA, 21 bp, synthetic construct
  misc_feature 1..21: note = Description of Artificial Sequence: Synthetic oligonucleotide
  source 1..21: mol_type = other DNA
aatactgatacttctaggaat

SEQ ID NO: 24677 - DNA, 21 bp, synthetic construct
  misc_feature 1..21: note = Description of Artificial Sequence: Synthetic oligonucleotide
  source 1..21: mol_type = other DNA
acccccaccaacgacagaagc

SEQ ID NO: 24678 - DNA, 21 bp, synthetic construct
  misc_feature 1..21: note = Description of Artificial Sequence: Synthetic oligonucleotide
  source 1..21: mol_type = other DNA
acgggtggtagtgcgttgggt

SEQ ID NO: 24679 - DNA, 21 bp, synthetic construct
  misc_feature 1..21: note = Description of Artificial Sequence: Synthetic oligonucleotide
  source 1..21: mol_type = other DNA
agcagcaacaccagccaaggc

SEQ ID NO: 24680 - DNA, 21 bp, synthetic construct
  misc_feature 1..21: note = Description of Artificial Sequence: Synthetic oligonucleotide
  source 1..21: mol_type = other DNA
agcggcgtcggcagcatgaac

SEQ ID NO: 24681 - DNA, 21 bp, synthetic construct
  misc_feature 1..21: note = Description of Artificial Sequence: Synthetic oligonucleotide
  source 1..21: mol_type = other DNA
agttcttctcagtcttctcat

SEQ ID NO: 24682 - DNA, 21 bp, synthetic construct
  misc_feature 1..21: note = Description of Artificial Sequence: Synthetic oligonucleotide
  source 1..21: mol_type = other DNA
cacgaactcagcggcaccaaa

SEQ ID NO: 24683 - DNA, 21 bp, synthetic construct
  misc_feature 1..21: note = Description of Artificial Sequence: Synthetic oligonucleotide
  source 1..21: mol_type = other DNA
cagatggctactgggaatgtt

SEQ ID NO: 24684 - DNA, 21 bp, synthetic construct
  misc_feature 1..21: note = Description of Artificial Sequence: Synthetic oligonucleotide
  source 1..21: mol_type = other DNA
gacgaaagcgtcaaaccccaa

SEQ ID NO: 24685 - DNA, 21 bp, synthetic construct
  misc_feature 1..21: note = Description of Artificial Sequence: Synthetic oligonucleotide
  source 1..21: mol_type = other DNA
gattcggttaatactcggact

SEQ ID NO: 24686 - DNA, 21 bp, synthetic construct
  misc_feature 1..21: note = Description of Artificial Sequence: Synthetic oligonucleotide
  source 1..21: mol_type = other DNA
gattctgtgacgaagcgtgcg

SEQ ID NO: 24687 - DNA, 21 bp, synthetic construct
  misc_feature 1..21: note = Description of Artificial Sequence: Synthetic oligonucleotide
  source 1..21: mol_type = other DNA
ggtactgggactagtgttctt

SEQ ID NO: 24688 - DNA, 21 bp, synthetic construct
  misc_feature 1..21: note = Description of Artificial Sequence: Synthetic oligonucleotide
  source 1..21: mol_type = other DNA
tcgttgagtaattcgagtggt

SEQ ID NO: 24689 - DNA, 21 bp, synthetic construct
  misc_feature 1..21: note = Description of Artificial Sequence: Synthetic oligonucleotide
  source 1..21: mol_type = other DNA
acccaagccagcagagtcagc

SEQ ID NO: 24690 - DNA, 21 bp, synthetic construct
  misc_feature 1..21: note = Description of Artificial Sequence: Synthetic oligonucleotide
  source 1..21: mol_type = other DNA
atcagcaacaccgccaccccc

SEQ ID NO: 24691 - DNA, 21 bp, synthetic construct
  misc_feature 1..21: note = Description of Artificial Sequence: Synthetic oligonucleotide
  source 1..21: mol_type = other DNA
ctcagagacagcgccacccac

SEQ ID NO: 24692 - DNA, 21 bp, synthetic construct
  misc_feature 1..21: note = Description of Artificial Sequence: Synthetic oligonucleotide
  source 1..21: mol_type = other DNA
aacgacgccaaaagcggcaac

SEQ ID NO: 24693 - DNA, 21 bp, synthetic construct
  misc_feature 1..21: note = Description of Artificial Sequence: Synthetic oligonucleotide
  source 1..21: mol_type = other DNA
accgaccccacccccagcaaa

SEQ ID NO: 24694 - DNA, 21 bp, synthetic construct
  misc_feature 1..21: note = Description of Artificial Sequence: Synthetic oligonucleotide
  source 1..21: mol_type = other DNA
gctgatactcctaggaatcag

SEQ ID NO: 24695 - DNA, 21 bp, synthetic construct
  misc_feature 1..21: note = Description of Artificial Sequence: Synthetic oligonucleotide
  source 1..21: mol_type = other DNA
gctgggaataatgctccgtcg

SEQ ID NO: 24696 - DNA, 21 bp, synthetic construct
  misc_feature 1..21: note = Description of Artificial Sequence: Synthetic oligonucleotide
  source 1..21: mol_type = other DNA
gggtcgactaatagtcataat

SEQ ID NO: 24697 - DNA, 21 bp, synthetic construct
  misc_feature 1..21: note = Description of Artificial Sequence: Synthetic oligonucleotide
  source 1..21: mol_type = other DNA
ttggctgctggggctggtgct

SEQ ID NO: 24698 - DNA, 21 bp, synthetic construct
  misc_feature 1..21: note = Description of Artificial Sequence: Synthetic oligonucleotide
  source 1..21: mol_type = other DNA
agtggttctgggaagatggtt

SEQ ID NO: 24699 - DNA, 21 bp, synthetic construct
  misc_feature 1..21: note = Description of Artificial Sequence: Synthetic oligonucleotide
  source 1..21: mol_type = other DNA
cgtcctaagccgtcggatggg

SEQ ID NO: 24700 - DNA, 21 bp, synthetic construct
  misc_feature 1..21: note = Description of Artificial Sequence: Synthetic oligonucleotide
  source 1..21: mol_type = other DNA
tcggcgactaatagtaagttg

SEQ ID NO: 24701 - DNA, 21 bp, synthetic construct
  misc_feature 1..21: note = Description of Artificial Sequence: Synthetic oligonucleotide
  source 1..21: mol_type = other DNA
aattctgatacgcggactgct

SEQ ID NO: 24702 - DNA, 21 bp, synthetic construct
  misc_feature 1..21: note = Description of Artificial Sequence: Synthetic oligonucleotide
  source 1..21: mol_type = other DNA
accacccccgcccaacacgcc

SEQ ID NO: 24703 - DNA, 21 bp, synthetic construct
  misc_feature 1..21: note = Description of Artificial Sequence: Synthetic oligonucleotide
  source 1..21: mol_type = other DNA
accagaagcagccccagcatg

SEQ ID NO: 24704 - DNA, 21 bp, synthetic construct
  misc_feature 1..21: note = Description of Artificial Sequence: Synthetic oligonucleotide
  source 1..21: mol_type = other DNA
accggcggcaacaacatgcaa

SEQ ID NO: 24705 - DNA, 21 bp, synthetic construct
  misc_feature 1..21: note = Description of Artificial Sequence: Synthetic oligonucleotide
  source 1..21: mol_type = other DNA
agcaaagaccaccaaaacgcc

SEQ ID NO: 24706 - DNA, 21 bp, synthetic construct
  misc_feature 1..21: note = Description of Artificial Sequence: Synthetic oligonucleotide
  source 1..21: mol_type = other DNA
caaagcagcggcaccaacctc

SEQ ID NO: 24707 - DNA, 21 bp, synthetic construct
  misc_feature 1..21: note = Description of Artificial Sequence: Synthetic oligonucleotide
  source 1..21: mol_type = other DNA
ctcgtcagcgaaaacggcaga

SEQ ID NO: 24708 - DNA, 21 bp, synthetic construct
  misc_feature 1..21: note = Description of Artificial Sequence: Synthetic oligonucleotide
  source 1..21: mol_type = other DNA
cttcaggggacgggtgggagt

SEQ ID NO: 24709 - DNA, 21 bp, synthetic construct
  misc_feature 1..21: note = Description of Artificial Sequence: Synthetic oligonucleotide
  source 1..21: mol_type = other DNA
gacagcgtcagcgccagaacc

SEQ ID NO: 24710 - DNA, 21 bp, synthetic construct
  misc_feature 1..21: note = Description of Artificial Sequence: Synthetic oligonucleotide
  source 1..21: mol_type = other DNA
gctactcaggggtcttcggtt

SEQ ID NO: 24711 - DNA, 21 bp, synthetic construct
  misc_feature 1..21: note = Description of Artificial Sequence: Synthetic oligonucleotide
  source 1..21: mol_type = other DNA
aatttgaaggcgtctagtggg

SEQ ID NO: 24712 - DNA, 21 bp, synthetic construct
  misc_feature 1..21: note = Description of Artificial Sequence: Synthetic oligonucleotide
  source 1..21: mol_type = other DNA
tcgggtaagtcgtcgagtcag

SEQ ID NO: 24713 - DNA, 21 bp, synthetic construct
  misc_feature 1..21: note = Description of Artificial Sequence: Synthetic oligonucleotide
  source 1..21: mol_type = other DNA
aaccccagcaccccccaccac

SEQ ID NO: 24714 - DNA, 21 bp, synthetic construct
  misc_feature 1..21: note = Description of Artificial Sequence: Synthetic oligonucleotide
  source 1..21: mol_type = other DNA
agcaccaaaacccaaagcagc

SEQ ID NO: 24715 - DNA, 21 bp, synthetic construct
  misc_feature 1..21: note = Description of Artificial Sequence: Synthetic oligonucleotide
  source 1..21: mol_type = other DNA
agtctggatagttcgcgtaat

SEQ ID NO: 24716 - DNA, 21 bp, synthetic construct
  misc_feature 1..21: note = Description of Artificial Sequence: Synthetic oligonucleotide
  source 1..21: mol_type = other DNA
atcagcagcaacagcagcagc

SEQ ID NO: 24717 - DNA, 21 bp, synthetic construct
  misc_feature 1..21: note = Description of Artificial Sequence: Synthetic oligonucleotide
  source 1..21: mol_type = other DNA
caaggcaacagccaattcacc

SEQ ID NO: 24718 - DNA, 21 bp, synthetic construct
  misc_feature 1..21: note = Description of Artificial Sequence: Synthetic oligonucleotide
  source 1..21: mol_type = other DNA
gacaccggcagcagcagccac

SEQ ID NO: 24719 - DNA, 21 bp, synthetic construct
  misc_feature 1..21: note = Description of Artificial Sequence: Synthetic oligonucleotide
  source 1..21: mol_type = other DNA
ggggttaatgggggttcgaat

SEQ ID NO: 24720 - DNA, 21 bp, synthetic construct
  misc_feature 1..21: note = Description of Artificial Sequence: Synthetic oligonucleotide
  source 1..21: mol_type = other DNA
gggtctggggataaggttctt

SEQ ID NO: 24721 - DNA, 21 bp, synthetic construct
  misc_feature 1..21: note = Description of Artificial Sequence: Synthetic oligonucleotide
  source 1..21: mol_type = other DNA
gatggtaagactaagaatggt

SEQ ID NO: 24722 - DNA, 21 bp, synthetic construct
  misc_feature 1..21: note = Description of Artificial Sequence: Synthetic oligonucleotide
  source 1..21: mol_type = other DNA
agaaccagcgacaccagcgtc

SEQ ID NO: 24723 - DNA, 21 bp, synthetic construct
  misc_feature 1..21: note = Description of Artificial Sequence: Synthetic oligonucleotide
  source 1..21: mol_type = other DNA
agccaacccgacaaagccaac

SEQ ID NO: 24724 - DNA, 21 bp, synthetic construct
  misc_feature 1..21: note = Description of Artificial Sequence: Synthetic oligonucleotide
  source 1..21: mol_type = other DNA
agccaagcccaacccgtcagc

SEQ ID NO: 24725 - DNA, 21 bp, synthetic construct
  misc_feature 1..21: note = Description of Artificial Sequence: Synthetic oligonucleotide
  source 1..21: mol_type = other DNA
atgcagcagactagtgcgctt

SEQ ID NO: 24726 - DNA, 21 bp, synthetic construct
  misc_feature 1..21: note = Description of Artificial Sequence: Synthetic oligonucleotide
  source 1..21: mol_type = other DNA
ggtgttaagtcgcctcatcag

SEQ ID NO: 24727 - DNA, 21 bp, synthetic construct
  misc_feature 1..21: note = Description of Artificial Sequence: Synthetic oligonucleotide
  source 1..21: mol_type = other DNA
agaaacggcccccccagccaa

SEQ ID NO: 24728 - DNA, 21 bp, synthetic construct
  misc_feature 1..21: note = Description of Artificial Sequence: Synthetic oligonucleotide
  source 1..21: mol_type = other DNA
aacagcagcgaaaaagtcaaa

SEQ ID NO: 24729 - DNA, 21 bp, synthetic construct
  misc_feature 1..21: note = Description of Artificial Sequence: Synthetic oligonucleotide
  source 1..21: mol_type = other DNA
actggtaatcatgggccgtct

SEQ ID NO: 24730 - DNA, 21 bp, synthetic construct
  misc_feature 1..21: note = Description of Artificial Sequence: Synthetic oligonucleotide
  source 1..21: mol_type = other DNA
agcggcatggacggcaaacac

SEQ ID NO: 24731 - DNA, 21 bp, synthetic construct
  misc_feature 1..21: note = Description of Artificial Sequence: Synthetic oligonucleotide
  source 1..21: mol_type = other DNA
atcctcgacagcaaaagcgcc

SEQ ID NO: 24732 - DNA, 21 bp, synthetic construct
  misc_feature 1..21: note = Description of Artificial Sequence: Synthetic oligonucleotide
  source 1..21: mol_type = other DNA
gacagaagcgccagcgacaaa

SEQ ID NO: 24733 - DNA, 21 bp, synthetic construct
  misc_feature 1..21: note = Description of Artificial Sequence: Synthetic oligonucleotide
  source 1..21: mol_type = other DNA
tcttctactagtagtaagact

SEQ ID NO: 24734 - DNA, 21 bp, synthetic construct
  misc_feature 1..21: note = Description of Artificial Sequence: Synthetic oligonucleotide
  source 1..21: mol_type = other DNA
ttggagggcaggacgaatagt

SEQ ID NO: 24735 - DNA, 21 bp, synthetic construct
  misc_feature 1..21: note = Description of Artificial Sequence: Synthetic oligonucleotide
  source 1..21: mol_type = other DNA
agacaagcccccgccctcagc

SEQ ID NO: 24736 - DNA, 21 bp, synthetic construct
  misc_feature 1..21: note = Description of Artificial Sequence: Synthetic oligonucleotide
  source 1..21: mol_type = other DNA
agtaaggttactgctgaggcg

SEQ ID NO: 24737 - DNA, 21 bp, synthetic construct
  misc_feature 1..21: note = Description of Artificial Sequence: Synthetic oligonucleotide
  source 1..21: mol_type = other DNA
caaagcaccagcaccagcgcc

SEQ ID NO: 24738 - DNA, 21 bp, synthetic construct
  misc_feature 1..21: note = Description of Artificial Sequence: Synthetic oligonucleotide
  source 1..21: mol_type = other DNA
caaggcctcaccgacaaaaac

SEQ ID NO: 24739 - DNA, 21 bp, synthetic construct
  misc_feature 1..21: note = Description of Artificial Sequence: Synthetic oligonucleotide
  source 1..21: mol_type = other DNA
ggcctcaacaacaccaccacc

SEQ ID NO: 24740 - DNA, 21 bp, synthetic construct
  misc_feature 1..21: note = Description of Artificial Sequence: Synthetic oligonucleotide
  source 1..21: mol_type = other DNA
gtcagcgacaaaaacctcccc

SEQ ID NO: 24741 - DNA, 21 bp, synthetic construct
  misc_feature 1..21: note = Description of Artificial Sequence: Synthetic oligonucleotide
  source 1..21: mol_type = other DNA
agcagcggcggcgacagcaga

SEQ ID NO: 24742 - DNA, 21 bp, synthetic construct
  misc_feature 1..21: note = Description of Artificial Sequence: Synthetic oligonucleotide
  source 1..21: mol_type = other DNA
aatggtgcttctaatgcgcgt

SEQ ID NO: 24743 - DNA, 21 bp, synthetic construct
  misc_feature 1..21: note = Description of Artificial Sequence: Synthetic oligonucleotide
  source 1..21: mol_type = other DNA
agcggcgtccccagcatgaac

SEQ ID NO: 24744 - DNA, 21 bp, synthetic construct
  misc_feature 1..21: note = Description of Artificial Sequence: Synthetic oligonucleotide
  source 1..21: mol_type = other DNA
gctccggctgtgtcttctggt

SEQ ID NO: 24745 - DNA, 21 bp, synthetic construct
  misc_feature 1..21: note = Description of Artificial Sequence: Synthetic oligonucleotide
  source 1..21: mol_type = other DNA
aaagccgccggccccaacggc

SEQ ID NO: 24746 - DNA, 21 bp, synthetic construct
  misc_feature 1..21: note = Description of Artificial Sequence: Synthetic oligonucleotide
  source 1..21: mol_type = other DNA
aagactagtggtggtacggag

SEQ ID NO: 24747 - DNA, 21 bp, synthetic construct
  misc_feature 1..21: note = Description of Artificial Sequence: Synthetic oligonucleotide
  source 1..21: mol_type = other DNA
agcgccaacagcagcaacacc

SEQ ID NO: 24748 - DNA, 21 bp, synthetic construct
  misc_feature 1..21: note = Description of Artificial Sequence: Synthetic oligonucleotide
  source 1..21: mol_type = other DNA
agcggcagcacccaagccccc

SEQ ID NO: 24749 - DNA, 21 bp, synthetic construct
  misc_feature 1..21: note = Description of Artificial Sequence: Synthetic oligonucleotide
  source 1..21: mol_type = other DNA
cacgccggcagcagcagcgcc

SEQ ID NO: 24750 - DNA, 21 bp, synthetic construct
  misc_feature 1..21: note = Description of Artificial Sequence: Synthetic oligonucleotide
  source 1..21: mol_type = other DNA
caggagaagacgggtacttct

SEQ ID NO: 24751 - DNA, 21 bp, synthetic construct
  misc_feature 1..21: note = Description of Artificial Sequence: Synthetic oligonucleotide
  source 1..21: mol_type = other DNA
caggggtcttctactggggtt

SEQ ID NO: 24752 - DNA, 21 bp, synthetic construct
  misc_feature 1..21: note = Description of Artificial Sequence: Synthetic oligonucleotide
  source 1..21: mol_type = other DNA
ggcctcgaaggcaacagcaaa

SEQ ID NO: 24753 - DNA, 21 bp, synthetic construct
  misc_feature 1..21: note = Description of Artificial Sequence: Synthetic oligonucleotide
  source 1..21: mol_type = other DNA
gggactccggagagggcgaat

SEQ ID NO: 24754 - DNA, 21 bp, synthetic construct
  misc_feature 1..21: note = Description of Artificial Sequence: Synthetic oligonucleotide
  source 1..21: mol_type = other DNA
ggtgttacgaataagtcgttt

SEQ ID NO: 24755 - DNA, 21 bp, synthetic construct
  misc_feature 1..21: note = Description of Artificial Sequence: Synthetic oligonucleotide
  source 1..21: mol_type = other DNA
gtcagcgacaaacccctcatg

SEQ ID NO: 24756 - DNA, 21 bp, synthetic construct
  misc_feature 1..21: note = Description of Artificial Sequence: Synthetic oligonucleotide
  source 1..21: mol_type = other DNA
gtgcaggcgcctacgcttggg

SEQ ID NO: 24757 - DNA, 21 bp, synthetic construct
  misc_feature 1..21: note = Description of Artificial Sequence: Synthetic oligonucleotide
  source 1..21: mol_type = other DNA
gacagcaaaacccccaccgtc

SEQ ID NO: 24758 - DNA, 21 bp, synthetic construct
  misc_feature 1..21: note = Description of Artificial Sequence: Synthetic oligonucleotide
  source 1..21: mol_type = other DNA
ggcaacagcaccgccatcaaa

SEQ ID NO: 24759 - DNA, 21 bp, synthetic construct
  misc_feature 1..21: note = Description of Artificial Sequence: Synthetic oligonucleotide
  source 1..21: mol_type = other DNA
acgaaggagactcagacgatt

SEQ ID NO: 24760 - DNA, 21 bp, synthetic construct
  misc_feature 1..21: note = Description of Artificial Sequence: Synthetic oligonucleotide
  source 1..21: mol_type = other DNA
ctccaaagaggcacccaaggc

SEQ ID NO: 24761 - DNA, 21 bp, synthetic construct
  misc_feature 1..21: note = Description of Artificial Sequence: Synthetic oligonucleotide
  source 1..21: mol_type = other DNA
ctttctggttcggggagtagt

SEQ ID NO: 24762 - DNA, 21 bp, synthetic construct
  misc_feature 1..21: note = Description of Artificial Sequence: Synthetic oligonucleotide
  source 1..21: mol_type = other DNA
ggcagcagcaacaaaaccctc

SEQ ID NO: 24763 - DNA, 21 bp, synthetic construct
  misc_feature 1..21: note = Description of Artificial Sequence: Synthetic oligonucleotide
  source 1..21: mol_type = other DNA
gacaccgacgccagagcccac

SEQ ID NO: 24764 - DNA, 21 bp, synthetic construct
  misc_feature 1..21: note = Description of Artificial Sequence: Synthetic oligonucleotide
  source 1..21: mol_type = other DNA
agcaaaatcagaagcagcgaa

SEQ ID NO: 24765 - DNA, 21 bp, synthetic construct
  misc_feature 1..21: note = Description of Artificial Sequence: Synthetic oligonucleotide
  source 1..21: mol_type = other DNA
ggcatgaccagcaaacccatc

SEQ ID NO: 24766 - DNA, 21 bp, synthetic construct
  misc_feature 1..21: note = Description of Artificial Sequence: Synthetic oligonucleotide
  source 1..21: mol_type = other DNA
gtcctcagcagcaacaacagc

SEQ ID NO: 24767 - DNA, 21 bp, synthetic construct
  misc_feature 1..21: note = Description of Artificial Sequence: Synthetic oligonucleotide
  source 1..21: mol_type = other DNA
tcggctagtaagggtagtcag

SEQ ID NO: 24768 - DNA, 21 bp, synthetic construct
  misc_feature 1..21: note = Description of Artificial Sequence: Synthetic oligonucleotide
  source 1..21: mol_type = other DNA
aatacgtcgagtaagagtcag

SEQ ID NO: 24769 - DNA, 21 bp, synthetic construct
  misc_feature 1..21: note = Description of Artificial Sequence: Synthetic oligonucleotide
  source 1..21: mol_type = other DNA
agcacccccagcagcaaaacc

SEQ ID NO: 24770 - DNA, 21 bp, synthetic construct
  misc_feature 1..21: note = Description of Artificial Sequence: Synthetic oligonucleotide
  source 1..21: mol_type = other DNA
agcctcggcagcaaaggcacc

SEQ ID NO: 24771 - DNA, 21 bp, synthetic construct
  misc_feature 1..21: note = Description of Artificial Sequence: Synthetic oligonucleotide
  source 1..21: mol_type = other DNA
agcgtcagcagcagcgtcggc

SEQ ID NO: 24772 - DNA, 21 bp, synthetic construct
  misc_feature 1..21: note = Description of Artificial Sequence: Synthetic oligonucleotide
  source 1..21: mol_type = other DNA
gacgtcgccggcaacagactc

SEQ ID NO: 24773 - DNA, 21 bp, synthetic construct
  misc_feature 1..21: note = Description of Artificial Sequence: Synthetic oligonucleotide
  source 1..21: mol_type = other DNA
ggcggcggccaaagcagcttc

SEQ ID NO: 24774 - DNA, 21 bp, synthetic construct
  misc_feature 1..21: note = Description of Artificial Sequence: Synthetic oligonucleotide
  source 1..21: mol_type = other DNA
cataatacgcctccgtcgggg

SEQ ID NO: 24775 - DNA, 21 bp, synthetic construct
  misc_feature 1..21: note = Description of Artificial Sequence: Synthetic oligonucleotide
  source 1..21: mol_type = other DNA
ttgccgaatagttctactact

SEQ ID NO: 24776 - DNA, 21 bp, synthetic construct
  misc_feature 1..21: note = Description of Artificial Sequence: Synthetic oligonucleotide
  source 1..21: mol_type = other DNA
caaggcaccggcaaattcatc

SEQ ID NO: 24777 - DNA, 21 bp, synthetic construct
  misc_feature 1..21: note = Description of Artificial Sequence: Synthetic oligonucleotide
  source 1..21: mol_type = other DNA
gggacgactgctagtcatggt

SEQ ID NO: 24778 - DNA, 21 bp, synthetic construct
  misc_feature 1..21: note = Description of Artificial Sequence: Synthetic oligonucleotide
  source 1..21: mol_type = other DNA
accgtcagcagcaaccccgcc

SEQ ID NO: 24779 - DNA, 21 bp, synthetic construct
  misc_feature 1..21: note = Description of Artificial Sequence: Synthetic oligonucleotide
  source 1..21: mol_type = other DNA
agcagcgacaaagtcagagac

SEQ ID NO: 24780 - DNA, 21 bp, synthetic construct
  misc_feature 1..21: note = Description of Artificial Sequence: Synthetic oligonucleotide
  source 1..21: mol_type = other DNA
atcggcatcggcaccagccac

SEQ ID NO: 24781 - DNA, 21 bp, synthetic construct
  misc_feature 1..21: note = Description of Artificial Sequence: Synthetic oligonucleotide
  source 1..21: mol_type = other DNA
caacccagcagcaccagcgtc

SEQ ID NO: 24782 - DNA, 21 bp, synthetic construct
  misc_feature 1..21: note = Description of Artificial Sequence: Synthetic oligonucleotide
  source 1..21: mol_type = other DNA
gaaagcgccagcggcgtcagc

SEQ ID NO: 24783 - DNA, 21 bp, synthetic construct
  misc_feature 1..21: note = Description of Artificial Sequence: Synthetic oligonucleotide
  source 1..21: mol_type = other DNA
gacatgagcgcccacggcaaa

SEQ ID NO: 24784 - DNA, 21 bp, synthetic construct
  misc_feature 1..21: note = Description of Artificial Sequence: Synthetic oligonucleotide
  source 1..21: mol_type = other DNA
ggcaacggcaacaccatgcaa

SEQ ID NO: 24785 - DNA, 21 bp, synthetic construct
  misc_feature 1..21: note = Description of Artificial Sequence: Synthetic oligonucleotide
  source 1..21: mol_type = other DNA
ggcgaaagcaacaaaatgacc

SEQ ID NO: 24786 - DNA, 21 bp, synthetic construct
  misc_feature 1..21: note = Description of Artificial Sequence: Synthetic oligonucleotide
  source 1..21: mol_type = other DNA
gggtcgacttcggctagggat

SEQ ID NO: 24787 - DNA, 21 bp, synthetic construct
  misc_feature 1..21: note = Description of Artificial Sequence: Synthetic oligonucleotide
  source 1..21: mol_type = other DNA
gtggggctgaagagtgggggg

SEQ ID NO: 24788 - DNA, 21 bp, synthetic construct
  misc_feature 1..21: note = Description of Artificial Sequence: Synthetic oligonucleotide
  source 1..21: mol_type = other DNA
tacggcgacagcgtcgtcaga

SEQ ID NO: 24789 - DNA, 21 bp, synthetic construct
  misc_feature 1..21: note = Description of Artificial Sequence: Synthetic oligonucleotide
  source 1..21: mol_type = other DNA
caaggcagccccagccaccac

SEQ ID NO: 24790 - DNA, 21 bp, synthetic construct
  misc_feature 1..21: note = Description of Artificial Sequence: Synthetic oligonucleotide
  source 1..21: mol_type = other DNA
aaccaagccgcccacagcgcc

SEQ ID NO: 24791 - DNA, 21 bp, synthetic construct
  misc_feature 1..21: note = Description of Artificial Sequence: Synthetic oligonucleotide
  source 1..21: mol_type = other DNA
aaaagcaccggcagcagcgtc

SEQ ID NO: 24792 - DNA, 21 bp, synthetic construct
  misc_feature 1..21: note = Description of Artificial Sequence: Synthetic oligonucleotide
  source 1..21: mol_type = other DNA
aacccccaaagcagcagcagc

SEQ ID NO: 24793 - DNA, 21 bp, synthetic construct
  misc_feature 1..21: note = Description of Artificial Sequence: Synthetic oligonucleotide
  source 1..21: mol_type = other DNA
actccggctcaggattctcgt

SEQ ID NO: 24794 - DNA, 21 bp, synthetic construct
  misc_feature 1..21: note = Description of Artificial Sequence: Synthetic oligonucleotide
  source 1..21: mol_type = other DNA
gataaggctcagcatacgctg

SEQ ID NO: 24795 - DNA, 21 bp, synthetic construct
  misc_feature 1..21: note = Description of Artificial Sequence: Synthetic oligonucleotide
  source 1..21: mol_type = other DNA
ggtaatactcaggctttgggg

SEQ ID NO: 24796 - DNA, 21 bp, synthetic construct
  misc_feature 1..21: note = Description of Artificial Sequence: Synthetic oligonucleotide
  source 1..21: mol_type = other DNA
acttctaatagtccttcgctt

SEQ ID NO: 24797 - DNA, 21 bp, synthetic construct
  misc_feature 1..21: note = Description of Artificial Sequence: Synthetic oligonucleotide
  source 1..21: mol_type = other DNA
agcggcatcggcagcggccaa

SEQ ID NO: 24798 - DNA, 21 bp, synthetic construct
  misc_feature 1..21: note = Description of Artificial Sequence: Synthetic oligonucleotide
  source 1..21: mol_type = other DNA
cttggtactaagaatggtcag

SEQ ID NO: 24799 - DNA, 21 bp, synthetic construct
  misc_feature 1..21: note = Description of Artificial Sequence: Synthetic oligonucleotide
  source 1..21: mol_type = other DNA
tcgacgtctggtactcagcat

SEQ ID NO: 24800 - DNA, 21 bp, synthetic construct
  misc_feature 1..21: note = Description of Artificial Sequence: Synthetic oligonucleotide
  source 1..21: mol_type = other DNA
accaccagcaacagcaacctc

SEQ ID NO: 24801 - DNA, 21 bp, synthetic construct
  misc_feature 1..21: note = Description of Artificial Sequence: Synthetic oligonucleotide
  source 1..21: mol_type = other DNA
acttcgcagcctacgcatgtt

SEQ ID NO: 24802 - DNA, 21 bp, synthetic construct
  misc_feature 1..21: note = Description of Artificial Sequence: Synthetic oligonucleotide
  source 1..21: mol_type = other DNA
cagcaggcttcgggggcgatg

SEQ ID NO: 24803 - DNA, 21 bp, synthetic construct
  misc_feature 1..21: note = Description of Artificial Sequence: Synthetic oligonucleotide
  source 1..21: mol_type = other DNA
cattctaagcctcaggttacg

SEQ ID NO: 24804 - DNA, 21 bp, synthetic construct
  misc_feature 1..21: note = Description of Artificial Sequence: Synthetic oligonucleotide
  source 1..21: mol_type = other DNA
aacggcagcagcagcatcagc

SEQ ID NO: 24805 - DNA, 21 bp, synthetic construct
  misc_feature 1..21: note = Description of Artificial Sequence: Synthetic oligonucleotide
  source 1..21: mol_type = other DNA
acgagtgcgactgctgcggtt

SEQ ID NO: 24806 - DNA, 21 bp, synthetic construct
  misc_feature 1..21: note = Description of Artificial Sequence: Synthetic oligonucleotide
  source 1..21: mol_type = other DNA
acggagtctagtaagttgggg

SEQ ID NO: 24807 - DNA, 21 bp, synthetic construct
  misc_feature 1..21: note = Description of Artificial Sequence: Synthetic oligonucleotide
  source 1..21: mol_type = other DNA
atcagagaaacccccacccac

SEQ ID NO: 24808 - DNA, 21 bp, synthetic construct
  misc_feature 1..21: note = Description of Artificial Sequence: Synthetic oligonucleotide
  source 1..21: mol_type = other DNA
cacggccaaagcagcctcgcc

SEQ ID NO: 24809 - DNA, 21 bp, synthetic construct
  misc_feature 1..21: note = Description of Artificial Sequence: Synthetic oligonucleotide
  source 1..21: mol_type = other DNA
cagtcgacttcgaaggctggt

SEQ ID NO: 24810 - DNA, 21 bp, synthetic construct
  misc_feature 1..21: note = Description of Artificial Sequence: Synthetic oligonucleotide
  source 1..21: mol_type = other DNA
gataatgatcagaagagggcg

SEQ ID NO: 24811 - DNA, 21 bp, synthetic construct
  misc_feature 1..21: note = Description of Artificial Sequence: Synthetic oligonucleotide
  source 1..21: mol_type = other DNA
tcgtcgggtgataagagttct

SEQ ID NO: 24812 - DNA, 21 bp, synthetic construct
  misc_feature 1..21: note = Description of Artificial Sequence: Synthetic oligonucleotide
  source 1..21: mol_type = other DNA
tctgagtcgaaggattatacg

SEQ ID NO: 24813 - DNA, 21 bp, synthetic construct
  misc_feature 1..21: note = Description of Artificial Sequence: Synthetic oligonucleotide
  source 1..21: mol_type = other DNA
agcatcagcgacagaaacaga

SEQ ID NO: 24814 - DNA, 21 bp, synthetic construct
  misc_feature 1..21: note = Description of Artificial Sequence: Synthetic oligonucleotide
  source 1..21: mol_type = other DNA
cacgccagcgccacccccctc

SEQ ID NO: 24815 - DNA, 21 bp, synthetic construct
  misc_feature 1..21: note = Description of Artificial Sequence: Synthetic oligonucleotide
  source 1..21: mol_type = other DNA
gcgtcgcatgggacgaatact

SEQ ID NO: 24816 - DNA, 21 bp, synthetic construct
  misc_feature 1..21: note = Description of Artificial Sequence: Synthetic oligonucleotide
  source 1..21: mol_type = other DNA
ggccaaacccccagcgccaac

SEQ ID NO: 24817 - DNA, 21 bp, synthetic construct
  misc_feature 1..21: note = Description of Artificial Sequence: Synthetic oligonucleotide
  source 1..21: mol_type = other DNA
gttcgtactggtaaggagcag

SEQ ID NO: 24818 - DNA, 21 bp, synthetic construct
  misc_feature 1..21: note = Description of Artificial Sequence: Synthetic oligonucleotide
  source 1..21: mol_type = other DNA
ttgaaggatcgttcgtctacg

SEQ ID NO: 24819 - DNA, 21 bp, synthetic construct
  misc_feature 1..21: note = Description of Artificial Sequence: Synthetic oligonucleotide
  source 1..21: mol_type = other DNA
aacgccagaagccccagcagc

SEQ ID NO: 24820 - DNA, 21 bp, synthetic construct
  misc_feature 1..21: note = Description of Artificial Sequence: Synthetic oligonucleotide
  source 1..21: mol_type = other DNA
aagagtgatggtagtactggt

SEQ ID NO: 24821 - DNA, 21 bp, synthetic construct
  misc_feature 1..21: note = Description of Artificial Sequence: Synthetic oligonucleotide
  source 1..21: mol_type = other DNA
agcaaaaacagcagccccagc

SEQ ID NO: 24822 - DNA, 21 bp, synthetic construct
  misc_feature 1..21: note = Description of Artificial Sequence: Synthetic oligonucleotide
  source 1..21: mol_type = other DNA
caaaccgaaggcaccctcaga

SEQ ID NO: 24823 - DNA, 21 bp, synthetic construct
  misc_feature 1..21: note = Description of Artificial Sequence: Synthetic oligonucleotide
  source 1..21: mol_type = other DNA
cgtacggggactaatccttct

SEQ ID NO: 24824 - DNA, 21 bp, synthetic construct
  misc_feature 1..21: note = Description of Artificial Sequence: Synthetic oligonucleotide
  source 1..21: mol_type = other DNA
gctgggtctaggtctccggct

SEQ ID NO: 24825 - DNA, 21 bp, synthetic construct
  misc_feature 1..21: note = Description of Artificial Sequence: Synthetic oligonucleotide
  source 1..21: mol_type = other DNA
tcgcctcagattgcggagaag

SEQ ID NO: 24826 - DNA, 21 bp, synthetic construct
  misc_feature 1..21: note = Description of Artificial Sequence: Synthetic oligonucleotide
  source 1..21: mol_type = other DNA
aagcagtcgactgcttcgttg

SEQ ID NO: 24827 - DNA, 21 bp, synthetic construct
  misc_feature 1..21: note = Description of Artificial Sequence: Synthetic oligonucleotide
  source 1..21: mol_type = other DNA
agaaccgacggccccgtcaaa

SEQ ID NO: 24828 - DNA, 21 bp, synthetic construct
  misc_feature 1..21: note = Description of Artificial Sequence: Synthetic oligonucleotide
  source 1..21: mol_type = other DNA
cacagcggcagcaaagaaacc

SEQ ID NO: 24829 - DNA, 21 bp, synthetic construct
  misc_feature 1..21: note = Description of Artificial Sequence: Synthetic oligonucleotide
  source 1..21: mol_type = other DNA
cagaccagtcagcatacgtcg

SEQ ID NO: 24830 - DNA, 21 bp, synthetic construct
  misc_feature 1..21: note = Description of Artificial Sequence: Synthetic oligonucleotide
  source 1..21: mol_type = other DNA
gataagggtgctggggcgccg

SEQ ID NO: 24831 - DNA, 21 bp, synthetic construct
  misc_feature 1..21: note = Description of Artificial Sequence: Synthetic oligonucleotide
  source 1..21: mol_type = other DNA
gcccccgacaacaccagcaaa

SEQ ID NO: 24832 - DNA, 21 bp, synthetic construct
  misc_feature 1..21: note = Description of Artificial Sequence: Synthetic oligonucleotide
  source 1..21: mol_type = other DNA
agcaccagcagccccgccacc

SEQ ID NO: 24833 - DNA, 21 bp, synthetic construct
  misc_feature 1..21: note = Description of Artificial Sequence: Synthetic oligonucleotide
  source 1..21: mol_type = other DNA
catggtagtgagcagcctcgg

SEQ ID NO: 24834 - DNA, 21 bp, synthetic construct
  misc_feature 1..21: note = Description of Artificial Sequence: Synthetic oligonucleotide
  source 1..21: mol_type = other DNA
cattctgatgcgaagggtaag

SEQ ID NO: 24835 - DNA, 21 bp, synthetic construct
  misc_feature 1..21: note = Description of Artificial Sequence: Synthetic oligonucleotide
  source 1..21: mol_type = other DNA
ggcgacaccacccccgtcaga

SEQ ID NO: 24836 - DNA, 21 bp, synthetic construct
  misc_feature 1..21: note = Description of Artificial Sequence: Synthetic oligonucleotide
  source 1..21: mol_type = other DNA
gaaggccaaagcagcagaggc

SEQ ID NO: 24837 - DNA, 21 bp, synthetic construct
  misc_feature 1..21: note = Description of Artificial Sequence: Synthetic oligonucleotide
  source 1..21: mol_type = other DNA
gacatggccaaaagcaccaaa

SEQ ID NO: 24838 - DNA, 21 bp, synthetic construct
  misc_feature 1..21: note = Description of Artificial Sequence: Synthetic oligonucleotide
  source 1..21: mol_type = other DNA
gatgggcattctagtagggtt

SEQ ID NO: 24839 - DNA, 21 bp, synthetic construct
  misc_feature 1..21: note = Description of Artificial Sequence: Synthetic oligonucleotide
  source 1..21: mol_type = other DNA
agcaccggcgtcgccaccaaa

SEQ ID NO: 24840 - DNA, 21 bp, synthetic construct
  misc_feature 1..21: note = Description of Artificial Sequence: Synthetic oligonucleotide
  source 1..21: mol_type = other DNA
gttggtgggagtcggtctcag

SEQ ID NO: 24841 - DNA, 21 bp, synthetic construct
  misc_feature 1..21: note = Description of Artificial Sequence: Synthetic oligonucleotide
  source 1..21: mol_type = other DNA
agccaagccagcgcccccaga

SEQ ID NO: 24842 - DNA, 21 bp, synthetic construct
  misc_feature 1..21: note = Description of Artificial Sequence: Synthetic oligonucleotide
  source 1..21: mol_type = other DNA
aacaccggcggcgacctcaga

SEQ ID NO: 24843 - DNA, 21 bp, synthetic construct
  misc_feature 1..21: note = Description of Artificial Sequence: Synthetic oligonucleotide
  source 1..21: mol_type = other DNA
aataaggtttctgcgcctagt

SEQ ID NO: 24844 - DNA, 21 bp, synthetic construct
  misc_feature 1..21: note = Description of Artificial Sequence: Synthetic oligonucleotide
  source 1..21: mol_type = other DNA
aatgcgacggtgactccgcgt

SEQ ID NO: 24845 - DNA, 21 bp, synthetic construct
  misc_feature 1..21: note = Description of Artificial Sequence: Synthetic oligonucleotide
  source 1..21: mol_type = other DNA
acgcaggctggtccgaaggag

SEQ ID NO: 24846 - DNA, 21 bp, synthetic construct
  misc_feature 1..21: note = Description of Artificial Sequence: Synthetic oligonucleotide
  source 1..21: mol_type = other DNA
actaaggagggttcgattgtt

SEQ ID NO: 24847 - DNA, 21 bp, synthetic construct
  misc_feature 1..21: note = Description of Artificial Sequence: Synthetic oligonucleotide
  source 1..21: mol_type = other DNA
actggttcgcctacttctggg

SEQ ID NO: 24848 - DNA, 21 bp, synthetic construct
  misc_feature 1..21: note = Description of Artificial Sequence: Synthetic oligonucleotide
  source 1..21: mol_type = other DNA
agcgaaaccaaaggccacccc

SEQ ID NO: 24849 - DNA, 21 bp, synthetic construct
  misc_feature 1..21: note = Description of Artificial Sequence: Synthetic oligonucleotide
  source 1..21: mol_type = other DNA
agcggccccggcagccaagtc

SEQ ID NO: 24850 - DNA, 21 bp, synthetic construct
  misc_feature 1..21: note = Description of Artificial Sequence: Synthetic oligonucleotide
  source 1..21: mol_type = other DNA
agcgtcaccagcgccacccaa

SEQ ID NO: 24851 - DNA, 21 bp, synthetic construct
  misc_feature 1..21: note = Description of Artificial Sequence: Synthetic oligonucleotide
  source 1..21: mol_type = other DNA
gaaagaaccagcggcagctac

SEQ ID NO: 24852 - DNA, 21 bp, synthetic construct
  misc_feature 1..21: note = Description of Artificial Sequence: Synthetic oligonucleotide
  source 1..21: mol_type = other DNA
gacaccctcaaagacagattc

SEQ ID NO: 24853 - DNA, 21 bp, synthetic construct
  misc_feature 1..21: note = Description of Artificial Sequence: Synthetic oligonucleotide
  source 1..21: mol_type = other DNA
gacagagccggcagccacacc

SEQ ID NO: 24854 - DNA, 21 bp, synthetic construct
  misc_feature 1..21: note = Description of Artificial Sequence: Synthetic oligonucleotide
  source 1..21: mol_type = other DNA
gagcaggggcagaatcgtatt

SEQ ID NO: 24855 - DNA, 21 bp, synthetic construct
  misc_feature 1..21: note = Description of Artificial Sequence: Synthetic oligonucleotide
  source 1..21: mol_type = other DNA
gcgagtggttctactagtact

SEQ ID NO: 24856 - DNA, 21 bp, synthetic construct
  misc_feature 1..21: note = Description of Artificial Sequence: Synthetic oligonucleotide
  source 1..21: mol_type = other DNA
ggccacaccgccgaagtcggc

SEQ ID NO: 24857 - DNA, 21 bp, synthetic construct
  misc_feature 1..21: note = Description of Artificial Sequence: Synthetic oligonucleotide
  source 1..21: mol_type = other DNA
ggtgcgtcggataatccgagg

SEQ ID NO: 24858 - DNA, 21 bp, synthetic construct
  misc_feature 1..21: note = Description of Artificial Sequence: Synthetic oligonucleotide
  source 1..21: mol_type = other DNA
gtttcgacggctaagcttgcg

SEQ ID NO: 24859 - DNA, 21 bp, synthetic construct
  misc_feature 1..21: note = Description of Artificial Sequence: Synthetic oligonucleotide
  source 1..21: mol_type = other DNA
tcgttgaatggggcttcgggt

SEQ ID NO: 24860 - DNA, 21 bp, synthetic construct
  misc_feature 1..21: note = Description of Artificial Sequence: Synthetic oligonucleotide
  source 1..21: mol_type = other DNA
tctagtgagatgggtagtaag

SEQ ID NO: 24861 - DNA, 21 bp, synthetic construct
  misc_feature 1..21: note = Description of Artificial Sequence: Synthetic oligonucleotide
  source 1..21: mol_type = other DNA
tctgatgcgcaggcttcttct

SEQ ID NO: 24862 - DNA, 21 bp, synthetic construct
  misc_feature 1..21: note = Description of Artificial Sequence: Synthetic oligonucleotide
  source 1..21: mol_type = other DNA
tgttcggggtcgtcgcctggt

SEQ ID NO: 24863 - DNA, 21 bp, synthetic construct
  misc_feature 1..21: note = Description of Artificial Sequence: Synthetic oligonucleotide
  source 1..21: mol_type = other DNA
aatcgtggggagaatagtgtg

SEQ ID NO: 24864 - DNA, 21 bp, synthetic construct
  misc_feature 1..21: note = Description of Artificial Sequence: Synthetic oligonucleotide
  source 1..21: mol_type = other DNA
gggggtaagtctaatgcgggt

SEQ ID NO: 24865 - DNA, 21 bp, synthetic construct
  misc_feature 1..21: note = Description of Artificial Sequence: Synthetic oligonucleotide
  source 1..21: mol_type = other DNA
tctaattctactaagtctggg

SEQ ID NO: 24866 - DNA, 21 bp, synthetic construct
  misc_feature 1..21: note = Description of Artificial Sequence: Synthetic oligonucleotide
  source 1..21: mol_type = other DNA
aacaccagcggcagcaaagcc

SEQ ID NO: 24867 - DNA, 21 bp, synthetic construct
  misc_feature 1..21: note = Description of Artificial Sequence: Synthetic oligonucleotide
  source 1..21: mol_type = other DNA
accgtcagccaaacccccatc

SEQ ID NO: 24868 - DNA, 21 bp, synthetic construct
  misc_feature 1..21: note = Description of Artificial Sequence: Synthetic oligonucleotide
  source 1..21: mol_type = other DNA
actggtctgaatggggtgggt

SEQ ID NO: 24869 - DNA, 21 bp, synthetic construct
  misc_feature 1..21: note = Description of Artificial Sequence: Synthetic oligonucleotide
  source 1..21: mol_type = other DNA
agcagccaaggcagcggcagc

SEQ ID NO: 24870 - DNA, 21 bp, synthetic construct
  misc_feature 1..21: note = Description of Artificial Sequence: Synthetic oligonucleotide
  source 1..21: mol_type = other DNA
gatcgtgttaaggatgtgaag

SEQ ID NO: 24871 - DNA, 21 bp, synthetic construct
  misc_feature 1..21: note = Description of Artificial Sequence: Synthetic oligonucleotide
  source 1..21: mol_type = other DNA
gcggagactcgggcggcgtct

SEQ ID NO: 24872 - DNA, 21 bp, synthetic construct
  misc_feature 1..21: note = Description of Artificial Sequence: Synthetic oligonucleotide
  source 1..21: mol_type = other DNA
ggtcatggtcagtctatgcat

SEQ ID NO: 24873 - DNA, 21 bp, synthetic construct
  misc_feature 1..21: note = Description of Artificial Sequence: Synthetic oligonucleotide
  source 1..21: mol_type = other DNA
accagcagcgaaagacccccc

SEQ ID NO: 24874 - DNA, 21 bp, synthetic construct
  misc_feature 1..21: note = Description of Artificial Sequence: Synthetic oligonucleotide
  source 1..21: mol_type = other DNA
ctcagaaccaccaaagaaagc

SEQ ID NO: 24875 - DNA, 21 bp, synthetic construct
  misc_feature 1..21: note = Description of Artificial Sequence: Synthetic oligonucleotide
  source 1..21: mol_type = other DNA
accaccgaaaaaaacatgcac

SEQ ID NO: 24876 - DNA, 21 bp, synthetic construct
  misc_feature 1..21: note = Description of Artificial Sequence: Synthetic oligonucleotide
  source 1..21: mol_type = other DNA
acccccagcacccacgtcacc

SEQ ID NO: 24877 - DNA, 21 bp, synthetic construct
  misc_feature 1..21: note = Description of Artificial Sequence: Synthetic oligonucleotide
  source 1..21: mol_type = other DNA
gggcattcgcctcctggtggt

SEQ ID NO: 24878 - DNA, 21 bp, synthetic construct
  misc_feature 1..21: note = Description of Artificial Sequence: Synthetic oligonucleotide
  source 1..21: mol_type = other DNA
ggggcttctcctgtgaattcg

SEQ ID NO: 24879 - DNA, 21 bp, synthetic construct
  misc_feature 1..21: note = Description of Artificial Sequence: Synthetic oligonucleotide
  source 1..21: mol_type = other DNA
gtccaaggccaaaaaatggaa

SEQ ID NO: 24880 - DNA, 21 bp, synthetic construct
  misc_feature 1..21: note = Description of Artificial Sequence: Synthetic oligonucleotide
  source 1..21: mol_type = other DNA
gttaagaattcttctacgcat

SEQ ID NO: 24881 - DNA, 21 bp, synthetic construct
  misc_feature 1..21: note = Description of Artificial Sequence: Synthetic oligonucleotide
  source 1..21: mol_type = other DNA
catgaggatccgcgtactaag

SEQ ID NO: 24882 - DNA, 21 bp, synthetic construct
  misc_feature 1..21: note = Description of Artificial Sequence: Synthetic oligonucleotide
  source 1..21: mol_type = other DNA
atgaccggcaaaaccaccacc

SEQ ID NO: 24883 - DNA, 21 bp, synthetic construct
  misc_feature 1..21: note = Description of Artificial Sequence: Synthetic oligonucleotide
  source 1..21: mol_type = other DNA
catacggataatgctaagggg

SEQ ID NO: 24884 - DNA, 21 bp, synthetic construct
  misc_feature 1..21: note = Description of Artificial Sequence: Synthetic oligonucleotide
  source 1..21: mol_type = other DNA
gaggggattaatcgtaatact

SEQ ID NO: 24885 - DNA, 21 bp, synthetic construct
  misc_feature 1..21: note = Description of Artificial Sequence: Synthetic oligonucleotide
  source 1..21: mol_type = other DNA
gccggcgacgcccacaaaagc

SEQ ID NO: 24886 - DNA, 21 bp, synthetic construct
  misc_feature 1..21: note = Description of Artificial Sequence: Synthetic oligonucleotide
  source 1..21: mol_type = other DNA
tatggtgataggaataatctg

SEQ ID NO: 24887 - DNA, 21 bp, synthetic construct
  misc_feature 1..21: note = Description of Artificial Sequence: Synthetic oligonucleotide
  source 1..21: mol_type = other DNA
tctgatggttctcatcatggt

SEQ ID NO: 24888 - DNA, 21 bp, synthetic construct
  misc_feature 1..21: note = Description of Artificial Sequence: Synthetic oligonucleotide
  source 1..21: mol_type = other DNA
tcttctgcggcggttcctact

SEQ ID NO: 24889 - DNA, 21 bp, synthetic construct
  misc_feature 1..21: note = Description of Artificial Sequence: Synthetic oligonucleotide
  source 1..21: mol_type = other DNA
ggtcctgcgaattctgcgacg

SEQ ID NO: 24890 - DNA, 21 bp, synthetic construct
  misc_feature 1..21: note = Description of Artificial Sequence: Synthetic oligonucleotide
  source 1..21: mol_type = other DNA
aatggttctcagactggtcag

SEQ ID NO: 24891 - DNA, 21 bp, synthetic construct
  misc_feature 1..21: note = Description of Artificial Sequence: Synthetic oligonucleotide
  source 1..21: mol_type = other DNA
accaaaggcgaaagcatgaac

SEQ ID NO: 24892 - DNA, 21 bp, synthetic construct
  misc_feature 1..21: note = Description of Artificial Sequence: Synthetic oligonucleotide
  source 1..21: mol_type = other DNA
cacaccaccggcagcagagac

SEQ ID NO: 24893 - DNA, 21 bp, synthetic construct
  misc_feature 1..21: note = Description of Artificial Sequence: Synthetic oligonucleotide
  source 1..21: mol_type = other DNA
ctccccagacccgacagcacc

SEQ ID NO: 24894 - DNA, 21 bp, synthetic construct
  misc_feature 1..21: note = Description of Artificial Sequence: Synthetic oligonucleotide
  source 1..21: mol_type = other DNA
ggtaatcttaatgggtcgcct

SEQ ID NO: 24895 - DNA, 21 bp, synthetic construct
  misc_feature 1..21: note = Description of Artificial Sequence: Synthetic oligonucleotide
  source 1..21: mol_type = other DNA
ggtgatcatgatcggaagatg

SEQ ID NO: 24896 - DNA, 21 bp, synthetic construct
  misc_feature 1..21: note = Description of Artificial Sequence: Synthetic oligonucleotide
  source 1..21: mol_type = other DNA
accacccaaagcagcgccctc

SEQ ID NO: 24897 - DNA, 21 bp, synthetic construct
  misc_feature 1..21: note = Description of Artificial Sequence: Synthetic oligonucleotide
  source 1..21: mol_type = other DNA
ctcgcccaaacccaaccccaa

SEQ ID NO: 24898 - DNA, 21 bp, synthetic construct
  misc_feature 1..21: note = Description of Artificial Sequence: Synthetic oligonucleotide
  source 1..21: mol_type = other DNA
ctcgccaccagcagccaaagc

SEQ ID NO: 24899 - DNA, 21 bp, synthetic construct
  misc_feature 1..21: note = Description of Artificial Sequence: Synthetic oligonucleotide
  source 1..21: mol_type = other DNA
accaccacccaacccgtcctc

SEQ ID NO: 24900 - DNA, 21 bp, synthetic construct
  misc_feature 1..21: note = Description of Artificial Sequence: Synthetic oligonucleotide
  source 1..21: mol_type = other DNA
agcggcatccccagcggccac

SEQ ID NO: 24901 - DNA, 21 bp, synthetic construct
  misc_feature 1..21: note = Description of Artificial Sequence: Synthetic oligonucleotide
  source 1..21: mol_type = other DNA
caaagcgccggcagcagacaa

SEQ ID NO: 24902 - DNA, 21 bp, synthetic construct
  misc_feature 1..21: note = Description of Artificial Sequence: Synthetic oligonucleotide
  source 1..21: mol_type = other DNA
gatagggtgggttcgtctgct

SEQ ID NO: 24903 - DNA, 21 bp, synthetic construct
  misc_feature 1..21: note = Description of Artificial Sequence: Synthetic oligonucleotide
  source 1..21: mol_type = other DNA
gccatcggcaaagacaacacc

SEQ ID NO: 24904 - DNA, 21 bp, synthetic construct
  misc_feature 1..21: note = Description of Artificial Sequence: Synthetic oligonucleotide
  source 1..21: mol_type = other DNA
ggcagcgaaaaaaaactcccc

SEQ ID NO: 24905 - DNA, 21 bp, synthetic construct
  misc_feature 1..21: note = Description of Artificial Sequence: Synthetic oligonucleotide
  source 1..21: mol_type = other DNA
gttcagggtggtaataattcg

SEQ ID NO: 24906 - DNA, 21 bp, synthetic construct
  misc_feature 1..21: note = Description of Artificial Sequence: Synthetic oligonucleotide
  source 1..21: mol_type = other DNA
accagcaaagacagcaccacc

SEQ ID NO: 24907 - DNA, 21 bp, synthetic construct
  misc_feature 1..21: note = Description of Artificial Sequence: Synthetic oligonucleotide
  source 1..21: mol_type = other DNA
gctagtgttcctgcttcttcg

SEQ ID NO: 24908 - DNA, 21 bp, synthetic construct
  misc_feature 1..21: note = Description of Artificial Sequence: Synthetic oligonucleotide
  source 1..21: mol_type = other DNA
gagtctgctcgtagtgctcct

SEQ ID NO: 24909 - DNA, 21 bp, synthetic construct
  misc_feature 1..21: note = Description of Artificial Sequence: Synthetic oligonucleotide
  source 1..21: mol_type = other DNA
atgggccaaagcacccccagc

SEQ ID NO: 24910 - DNA, 21 bp, synthetic construct
  misc_feature 1..21: note = Description of Artificial Sequence: Synthetic oligonucleotide
  source 1..21: mol_type = other DNA
gggactgctaagtcgatttcg

SEQ ID NO: 24911 - DNA, 21 bp, synthetic construct
  misc_feature 1..21: note = Description of Artificial Sequence: Synthetic oligonucleotide
  source 1..21: mol_type = other DNA
agccccgacagcaaaatccac

SEQ ID NO: 24912 - DNA, 21 bp, synthetic construct
  misc_feature 1..21: note = Description of Artificial Sequence: Synthetic oligonucleotide
  source 1..21: mol_type = other DNA
cataataatacgacgtcgcag

SEQ ID NO: 24913 - DNA, 21 bp, synthetic construct
  misc_feature 1..21: note = Description of Artificial Sequence: Synthetic oligonucleotide
  source 1..21: mol_type = other DNA
catccgcagacttctccggtt

SEQ ID NO: 24914 - DNA, 21 bp, synthetic construct
  misc_feature 1..21: note = Description of Artificial Sequence: Synthetic oligonucleotide
  source 1..21: mol_type = other DNA
gaaaccaccaaaggcagcgcc

SEQ ID NO: 24915 - DNA, 21 bp, synthetic construct
  misc_feature 1..21: note = Description of Artificial Sequence: Synthetic oligonucleotide
  source 1..21: mol_type = other DNA
gagtctccgcagaaggctagt

SEQ ID NO: 24916 - DNA, 21 bp, synthetic construct
  misc_feature 1..21: note = Description of Artificial Sequence: Synthetic oligonucleotide
  source 1..21: mol_type = other DNA
ggcgacgtcagccaaagaaac

SEQ ID NO: 24917 - DNA, 21 bp, synthetic construct
  misc_feature 1..21: note = Description of Artificial Sequence: Synthetic oligonucleotide
  source 1..21: mol_type = other DNA
catgcgtctactccggctcgt

SEQ ID NO: 24918 - DNA, 21 bp, synthetic construct
  misc_feature 1..21: note = Description of Artificial Sequence: Synthetic oligonucleotide
  source 1..21: mol_type = other DNA
gacagcggcacccacgccgtc

SEQ ID NO: 24919 - DNA, 21 bp, synthetic construct
  misc_feature 1..21: note = Description of Artificial Sequence: Synthetic oligonucleotide
  source 1..21: mol_type = other DNA
gttagtggtacgcctcctgct

SEQ ID NO: 24920 - DNA, 21 bp, synthetic construct
  misc_feature 1..21: note = Description of Artificial Sequence: Synthetic oligonucleotide
  source 1..21: mol_type = other DNA
agcagaggcgaagccgtcagc

SEQ ID NO: 24921 - DNA, 21 bp, synthetic construct
  misc_feature 1..21: note = Description of Artificial Sequence: Synthetic oligonucleotide
  source 1..21: mol_type = other DNA
agcggcgccgaagtcaaacaa

SEQ ID NO: 24922 - DNA, 21 bp, synthetic construct
  misc_feature 1..21: note = Description of Artificial Sequence: Synthetic oligonucleotide
  source 1..21: mol_type = other DNA
agtcagtctggggttaataat

SEQ ID NO: 24923 - DNA, 21 bp, synthetic construct
  misc_feature 1..21: note = Description of Artificial Sequence: Synthetic oligonucleotide
  source 1..21: mol_type = other DNA
atgggcaacaccagcctcagc

SEQ ID NO: 24924 - DNA, 21 bp, synthetic construct
  misc_feature 1..21: note = Description of Artificial Sequence: Synthetic oligonucleotide
  source 1..21: mol_type = other DNA
cgtgagactgcgaagggtgat

SEQ ID NO: 24925 - DNA, 21 bp, synthetic construct
  misc_feature 1..21: note = Description of Artificial Sequence: Synthetic oligonucleotide
  source 1..21: mol_type = other DNA
ctcaacgccagcgcccccccc

SEQ ID NO: 24926 - DNA, 21 bp, synthetic construct
  misc_feature 1..21: note = Description of Artificial Sequence: Synthetic oligonucleotide
  source 1..21: mol_type = other DNA
ctcagaggcaacagcaacggc

SEQ ID NO: 24927 - DNA, 21 bp, synthetic construct
  misc_feature 1..21: note = Description of Artificial Sequence: Synthetic oligonucleotide
  source 1..21: mol_type = other DNA
gaaagaaccgccgaagtcaaa

SEQ ID NO: 24928 - DNA, 21 bp, synthetic construct
  misc_feature 1..21: note = Description of Artificial Sequence: Synthetic oligonucleotide
  source 1..21: mol_type = other DNA
agcagcaacagaagcaacgcc

SEQ ID NO: 24929 - DNA, 21 bp, synthetic construct
  misc_feature 1..21: note = Description of Artificial Sequence: Synthetic oligonucleotide
  source 1..21: mol_type = other DNA
agcagcgtccccagccccaaa

SEQ ID NO: 24930 - DNA, 21 bp, synthetic construct
  misc_feature 1..21: note = Description of Artificial Sequence: Synthetic oligonucleotide
  source 1..21: mol_type = other DNA
ctcaccgaccaaaaaggcttc

SEQ ID NO: 24931 - DNA, 21 bp, synthetic construct
  misc_feature 1..21: note = Description of Artificial Sequence: Synthetic oligonucleotide
  source 1..21: mol_type = other DNA
caagtcagcgaccccaaaacc

SEQ ID NO: 24932 - DNA, 21 bp, synthetic construct
  misc_feature 1..21: note = Description of Artificial Sequence: Synthetic oligonucleotide
  source 1..21: mol_type = other DNA
ctcaccgtcggcacccacccc

SEQ ID NO: 24933 - DNA, 21 bp, synthetic construct
  misc_feature 1..21: note = Description of Artificial Sequence: Synthetic oligonucleotide
  source 1..21: mol_type = other DNA
gatcgtgataaggctaatacg

SEQ ID NO: 24934 - DNA, 21 bp, synthetic construct
  misc_feature 1..21: note = Description of Artificial Sequence: Synthetic oligonucleotide
  source 1..21: mol_type = other DNA
agtagtggggttgctagtgtt

SEQ ID NO: 24935 - DNA, 21 bp, synthetic construct
  misc_feature 1..21: note = Description of Artificial Sequence: Synthetic oligonucleotide
  source 1..21: mol_type = other DNA
aatactcatggggataagggt

SEQ ID NO: 24936 - DNA, 21 bp, synthetic construct
  misc_feature 1..21: note = Description of Artificial Sequence: Synthetic oligonucleotide
  source 1..21: mol_type = other DNA
accaccctccaaagacccgaa

SEQ ID NO: 24937 - DNA, 21 bp, synthetic construct
  misc_feature 1..21: note = Description of Artificial Sequence: Synthetic oligonucleotide
  source 1..21: mol_type = other DNA
agccaaaacctcgccagcggc

SEQ ID NO: 24938 - DNA, 21 bp, synthetic construct
  misc_feature 1..21: note = Description of Artificial Sequence: Synthetic oligonucleotide
  source 1..21: mol_type = other DNA
agtactggtagtcagaatcag

SEQ ID NO: 24939 - DNA, 21 bp, synthetic construct
  misc_feature 1..21: note = Description of Artificial Sequence: Synthetic oligonucleotide
  source 1..21: mol_type = other DNA
atcgccggcaacgtccccacc

SEQ ID NO: 24940 - DNA, 21 bp, synthetic construct
  misc_feature 1..21: note = Description of Artificial Sequence: Synthetic oligonucleotide
  source 1..21: mol_type = other DNA
atggacagcgcccaaatcaaa

SEQ ID NO: 24941 - DNA, 21 bp, synthetic construct
  misc_feature 1..21: note = Description of Artificial Sequence: Synthetic oligonucleotide
  source 1..21: mol_type = other DNA
gagtcggggggtaagcatccg

SEQ ID NO: 24942 - DNA, 21 bp, synthetic construct
  misc_feature 1..21: note = Description of Artificial Sequence: Synthetic oligonucleotide
  source 1..21: mol_type = other DNA
gctactacgacgcagaatcat

SEQ ID NO: 24943 - DNA, 21 bp, synthetic construct
  misc_feature 1..21: note = Description of Artificial Sequence: Synthetic oligonucleotide
  source 1..21: mol_type = other DNA
ggccccagcagagaaggcacc

SEQ ID NO: 24944 - DNA, 21 bp, synthetic construct
  misc_feature 1..21: note = Description of Artificial Sequence: Synthetic oligonucleotide
  source 1..21: mol_type = other DNA
ggtgggattcctaagaagggt

SEQ ID NO: 24945 - DNA, 21 bp, synthetic construct
  misc_feature 1..21: note = Description of Artificial Sequence: Synthetic oligonucleotide
  source 1..21: mol_type = other DNA
ttgcctgagaggtcggcgagt

SEQ ID NO: 24946 - DNA, 21 bp, synthetic construct
  misc_feature 1..21: note = Description of Artificial Sequence: Synthetic oligonucleotide
  source 1..21: mol_type = other DNA
gacaaagtccccagcggcacc

SEQ ID NO: 24947 - DNA, 21 bp, synthetic construct
  misc_feature 1..21: note = Description of Artificial Sequence: Synthetic oligonucleotide
  source 1..21: mol_type = other DNA
aacagcagcggcacccaaatc

SEQ ID NO: 24948 - DNA, 21 bp, synthetic construct
  misc_feature 1..21: note = Description of Artificial Sequence: Synthetic oligonucleotide
  source 1..21: mol_type = other DNA
aaggtgggttcgaatagtggt

SEQ ID NO: 24949 - DNA, 21 bp, synthetic construct
  misc_feature 1..21: note = Description of Artificial Sequence: Synthetic oligonucleotide
  source 1..21: mol_type = other DNA
aatcggacggatcggtctctg

SEQ ID NO: 24950 - DNA, 21 bp, synthetic construct
  misc_feature 1..21: note = Description of Artificial Sequence: Synthetic oligonucleotide
  source 1..21: mol_type = other DNA
accatggacgccagaagcggc

SEQ ID NO: 24951 - DNA, 21 bp, synthetic construct
  misc_feature 1..21: note = Description of Artificial Sequence: Synthetic oligonucleotide
  source 1..21: mol_type = other DNA
acgacgggggattcgaggtcg

SEQ ID NO: 24952 - DNA, 21 bp, synthetic construct
  misc_feature 1..21: note = Description of Artificial Sequence: Synthetic oligonucleotide
  source 1..21: mol_type = other DNA
ggcagccacggcaccgccacc

SEQ ID NO: 24953 - DNA, 21 bp, synthetic construct
  misc_feature 1..21: note = Description of Artificial Sequence: Synthetic oligonucleotide
  source 1..21: mol_type = other DNA
acgacgaatgagagtcgtgct

SEQ ID NO: 24954 - DNA, 21 bp, synthetic construct
  misc_feature 1..21: note = Description of Artificial Sequence: Synthetic oligonucleotide
  source 1..21: mol_type = other DNA
acgattgataatgttcctaag

SEQ ID NO: 24955 - DNA, 21 bp, synthetic construct
  misc_feature 1..21: note = Description of Artificial Sequence: Synthetic oligonucleotide
  source 1..21: mol_type = other DNA
ctcgtcggcgacaaaggcaac

SEQ ID NO: 24956 - DNA, 21 bp, synthetic construct
  misc_feature 1..21: note = Description of Artificial Sequence: Synthetic oligonucleotide
  source 1..21: mol_type = other DNA
agcaacaccaaagtcgccgtc

SEQ ID NO: 24957 - DNA, 21 bp, synthetic construct
  misc_feature 1..21: note = Description of Artificial Sequence: Synthetic oligonucleotide
  source 1..21: mol_type = other DNA
ctcagcagcagcagcaccctc

SEQ ID NO: 24958 - DNA, 21 bp, synthetic construct
  misc_feature 1..21: note = Description of Artificial Sequence: Synthetic oligonucleotide
  source 1..21: mol_type = other DNA
gtcaaaaccagcagcaacaac

SEQ ID NO: 24959 - DNA, 21 bp, synthetic construct
  misc_feature 1..21: note = Description of Artificial Sequence: Synthetic oligonucleotide
  source 1..21: mol_type = other DNA
catcctattagtcagccgacg

SEQ ID NO: 24960 - DNA, 21 bp, synthetic construct
  misc_feature 1..21: note = Description of Artificial Sequence: Synthetic oligonucleotide
  source 1..21: mol_type = other DNA
gaggcgaatgggcagtcgcgt

SEQ ID NO: 24961 - DNA, 21 bp, synthetic construct
  misc_feature 1..21: note = Description of Artificial Sequence: Synthetic oligonucleotide
  source 1..21: mol_type = other DNA
tctactatgtcgcctacttct

SEQ ID NO: 24962 - DNA, 21 bp, synthetic construct
  misc_feature 1..21: note = Description of Artificial Sequence: Synthetic oligonucleotide
  source 1..21: mol_type = other DNA
actggtcttaattctccggtg

SEQ ID NO: 24963 - DNA, 21 bp, synthetic construct
  misc_feature 1..21: note = Description of Artificial Sequence: Synthetic oligonucleotide
  source 1..21: mol_type = other DNA
gggaataattctcctgttgct

SEQ ID NO: 24964 - DNA, 21 bp, synthetic construct
  misc_feature 1..21: note = Description of Artificial Sequence: Synthetic oligonucleotide
  source 1..21: mol_type = other DNA
aaagaaggcagcagaagcgtc

SEQ ID NO: 24965 - DNA, 21 bp, synthetic construct
  misc_feature 1..21: note = Description of Artificial Sequence: Synthetic oligonucleotide
  source 1..21: mol_type = other DNA
aagcgggagtcttctacgttg

SEQ ID NO: 24966 - DNA, 21 bp, synthetic construct
  misc_feature 1..21: note = Description of Artificial Sequence: Synthetic oligonucleotide
  source 1..21: mol_type = other DNA
aatcagacgtcgtcgaagtct

SEQ ID NO: 24967 - DNA, 21 bp, synthetic construct
  misc_feature 1..21: note = Description of Artificial Sequence: Synthetic oligonucleotide
  source 1..21: mol_type = other DNA
aatgattcgtcgagggtgacg

SEQ ID NO: 24968 - DNA, 21 bp, synthetic construct
  misc_feature 1..21: note = Description of Artificial Sequence: Synthetic oligonucleotide
  source 1..21: mol_type = other DNA
accagaaccgaaaccacccaa

SEQ ID NO: 24969 - DNA, 21 bp, synthetic construct
  misc_feature 1..21: note = Description of Artificial Sequence: Synthetic oligonucleotide
  source 1..21: mol_type = other DNA
accagcaacaccagccccacc

SEQ ID NO: 24970 - DNA, 21 bp, synthetic construct
  misc_feature 1..21: note = Description of Artificial Sequence: Synthetic oligonucleotide
  source 1..21: mol_type = other DNA
agcagaaccagcagcagcggc

SEQ ID NO: 24971 - DNA, 21 bp, synthetic construct
  misc_feature 1..21: note = Description of Artificial Sequence: Synthetic oligonucleotide
  source 1..21: mol_type = other DNA
agccccgacacccacctcaaa

SEQ ID NO: 24972 - DNA, 21 bp, synthetic construct
  misc_feature 1..21: note = Description of Artificial Sequence: Synthetic oligonucleotide
  source 1..21: mol_type = other DNA
agcgaaatccaaagcaaaggc

SEQ ID NO: 24973 - DNA, 21 bp, synthetic construct
  misc_feature 1..21: note = Description of Artificial Sequence: Synthetic oligonucleotide
  source 1..21: mol_type = other DNA
atggattcgaaggggggtcct

SEQ ID NO: 24974 - DNA, 21 bp, synthetic construct
  misc_feature 1..21: note = Description of Artificial Sequence: Synthetic oligonucleotide
  source 1..21: mol_type = other DNA
caaagccacaacggcagcctc

SEQ ID NO: 24975 - DNA, 21 bp, synthetic construct
  misc_feature 1..21: note = Description of Artificial Sequence: Synthetic oligonucleotide
  source 1..21: mol_type = other DNA
caaagcggcagcgacaaagtc

SEQ ID NO: 24976 - DNA, 21 bp, synthetic construct
  misc_feature 1..21: note = Description of Artificial Sequence: Synthetic oligonucleotide
  source 1..21: mol_type = other DNA
caaatgcaagtcagcaaccaa

SEQ ID NO: 24977 - DNA, 21 bp, synthetic construct
  misc_feature 1..21: note = Description of Artificial Sequence: Synthetic oligonucleotide
  source 1..21: mol_type = other DNA
caccaacaaaaaacccccacc

SEQ ID NO: 24978 - DNA, 21 bp, synthetic construct
  misc_feature 1..21: note = Description of Artificial Sequence: Synthetic oligonucleotide
  source 1..21: mol_type = other DNA
cgtgttcagggtaattcgggg

SEQ ID NO: 24979 - DNA, 21 bp, synthetic construct
  misc_feature 1..21: note = Description of Artificial Sequence: Synthetic oligonucleotide
  source 1..21: mol_type = other DNA
cttgctgataatactaggggt

SEQ ID NO: 24980 - DNA, 21 bp, synthetic construct
  misc_feature 1..21: note = Description of Artificial Sequence: Synthetic oligonucleotide
  source 1..21: mol_type = other DNA
gaaagcggcagcaacagcagc

SEQ ID NO: 24981 - DNA, 21 bp, synthetic construct
  misc_feature 1..21: note = Description of Artificial Sequence: Synthetic oligonucleotide
  source 1..21: mol_type = other DNA
gacaaaggcaaagccgccgcc

SEQ ID NO: 24982 - DNA, 21 bp, synthetic construct
  misc_feature 1..21: note = Description of Artificial Sequence: Synthetic oligonucleotide
  source 1..21: mol_type = other DNA
gagttgactaagccgaatgag

SEQ ID NO: 24983 - DNA, 21 bp, synthetic construct
  misc_feature 1..21: note = Description of Artificial Sequence: Synthetic oligonucleotide
  source 1..21: mol_type = other DNA
gccagcgaccaccccagcaga

SEQ ID NO: 24984 - DNA, 21 bp, synthetic construct
  misc_feature 1..21: note = Description of Artificial Sequence: Synthetic oligonucleotide
  source 1..21: mol_type = other DNA
gccagcggccccgccagaagc

SEQ ID NO: 24985 - DNA, 21 bp, synthetic construct
  misc_feature 1..21: note = Description of Artificial Sequence: Synthetic oligonucleotide
  source 1..21: mol_type = other DNA
gctcaggctgagcatagtcag

SEQ ID NO: 24986 - DNA, 21 bp, synthetic construct
  misc_feature 1..21: note = Description of Artificial Sequence: Synthetic oligonucleotide
  source 1..21: mol_type = other DNA
gctgagaagccgggtagtctt

SEQ ID NO: 24987 - DNA, 21 bp, synthetic construct
  misc_feature 1..21: note = Description of Artificial Sequence: Synthetic oligonucleotide
  source 1..21: mol_type = other DNA
ggcagcaccaacgacgccaga

SEQ ID NO: 24988 - DNA, 21 bp, synthetic construct
  misc_feature 1..21: note = Description of Artificial Sequence: Synthetic oligonucleotide
  source 1..21: mol_type = other DNA
gttggtacgagtcatattcag

SEQ ID NO: 24989 - DNA, 21 bp, synthetic construct
  misc_feature 1..21: note = Description of Artificial Sequence: Synthetic oligonucleotide
  source 1..21: mol_type = other DNA
tatgggacgagtaatgttggg

SEQ ID NO: 24990 - DNA, 21 bp, synthetic construct
  misc_feature 1..21: note = Description of Artificial Sequence: Synthetic oligonucleotide
  source 1..21: mol_type = other DNA
gttacgcagtctcctcctctt

SEQ ID NO: 24991 - DNA, 21 bp, synthetic construct
  misc_feature 1..21: note = Description of Artificial Sequence: Synthetic oligonucleotide
  source 1..21: mol_type = other DNA
agcggcagccaacacgtcacc

SEQ ID NO: 24992 - DNA, 21 bp, synthetic construct
  misc_feature 1..21: note = Description of Artificial Sequence: Synthetic oligonucleotide
  source 1..21: mol_type = other DNA
accgccatcagcaaacccgcc

SEQ ID NO: 24993 - DNA, 21 bp, synthetic construct
  misc_feature 1..21: note = Description of Artificial Sequence: Synthetic oligonucleotide
  source 1..21: mol_type = other DNA
gccgccagcgccaaccccctc

SEQ ID NO: 24994 - DNA, 21 bp, synthetic construct
  misc_feature 1..21: note = Description of Artificial Sequence: Synthetic oligonucleotide
  source 1..21: mol_type = other DNA
gcgaatgcttcgccgaatgtt

SEQ ID NO: 24995 - DNA, 21 bp, synthetic construct
  misc_feature 1..21: note = Description of Artificial Sequence: Synthetic oligonucleotide
  source 1..21: mol_type = other DNA
aatgttagtccttcgtctctt

SEQ ID NO: 24996 - DNA, 21 bp, synthetic construct
  misc_feature 1..21: note = Description of Artificial Sequence: Synthetic oligonucleotide
  source 1..21: mol_type = other DNA
agtggtgggagtgcttctgct

SEQ ID NO: 24997 - DNA, 21 bp, synthetic construct
  misc_feature 1..21: note = Description of Artificial Sequence: Synthetic oligonucleotide
  source 1..21: mol_type = other DNA
ctccccctcgcccaaagccaa

SEQ ID NO: 24998 - DNA, 21 bp, synthetic construct
  misc_feature 1..21: note = Description of Artificial Sequence: Synthetic oligonucleotide
  source 1..21: mol_type = other DNA
gaagccagcagcaaccccacc

SEQ ID NO: 24999 - DNA, 21 bp, synthetic construct
  misc_feature 1..21: note = Description of Artificial Sequence: Synthetic oligonucleotide
  source 1..21: mol_type = other DNA
ggcctcggcggcgacatgaaa

SEQ ID NO: 25000 - DNA, 21 bp, synthetic construct
  misc_feature 1..21: note = Description of Artificial Sequence: Synthetic oligonucleotide
  source 1..21: mol_type = other DNA
gggcatcttacgggtgggtct

SEQ ID NO: 25001 - DNA, 21 bp, synthetic construct
  misc_feature 1..21: note = Description of Artificial Sequence: Synthetic oligonucleotide
  source 1..21: mol_type = other DNA
ggtccttctgctaagtcggcg

SEQ ID NO: 25002 - DNA, 21 bp, synthetic construct
  misc_feature 1..21: note = Description of Artificial Sequence: Synthetic oligonucleotide
  source 1..21: mol_type = other DNA
tctcagacgaatactgggact

SEQ ID NO: 25003 - DNA, 21 bp, synthetic construct
  misc_feature 1..21: note = Description of Artificial Sequence: Synthetic oligonucleotide
  source 1..21: mol_type = other DNA
ggtgttagtaaggcgaatgct

SEQ ID NO: 25004 - DNA, 21 bp, synthetic construct
  misc_feature 1..21: note = Description of Artificial Sequence: Synthetic oligonucleotide
  source 1..21: mol_type = other DNA
aaaaccgccccccacaccacc

SEQ ID NO: 25005 - DNA, 21 bp, synthetic construct
  misc_feature 1..21: note = Description of Artificial Sequence: Synthetic oligonucleotide
  source 1..21: mol_type = other DNA
actccttctgatcatgctgtg

SEQ ID NO: 25006 - DNA, 21 bp, synthetic construct
  misc_feature 1..21: note = Description of Artificial Sequence: Synthetic oligonucleotide
  source 1..21: mol_type = other DNA
agtattgcgagtagtggtagt

SEQ ID NO: 25007 - DNA, 21 bp, synthetic construct
  misc_feature 1..21: note = Description of Artificial Sequence: Synthetic oligonucleotide
  source 1..21: mol_type = other DNA
cttggttctagtgctggtggt

SEQ ID NO: 25008 - DNA, 21 bp, synthetic construct
  misc_feature 1..21: note = Description of Artificial Sequence: Synthetic oligonucleotide
  source 1..21: mol_type = other DNA
gacagcagaaacgtcagcggc

SEQ ID NO: 25009 - DNA, 21 bp, synthetic construct
  misc_feature 1..21: note = Description of Artificial Sequence: Synthetic oligonucleotide
  source 1..21: mol_type = other DNA
gatcatcgttctgagaagtct

SEQ ID NO: 25010 - DNA, 21 bp, synthetic construct
  misc_feature 1..21: note = Description of Artificial Sequence: Synthetic oligonucleotide
  source 1..21: mol_type = other DNA
gatgttgataatcagaagaag

SEQ ID NO: 25011 - DNA, 21 bp, synthetic construct
  misc_feature 1..21: note = Description of Artificial Sequence: Synthetic oligonucleotide
  source 1..21: mol_type = other DNA
gccgaaggcaccggcagagtc

SEQ ID NO: 25012 - DNA, 21 bp, synthetic construct
  misc_feature 1..21: note = Description of Artificial Sequence: Synthetic oligonucleotide
  source 1..21: mol_type = other DNA
atgtcgggtcaggatcagaag

SEQ ID NO: 25013 - DNA, 21 bp, synthetic construct
  misc_feature 1..21: note = Description of Artificial Sequence: Synthetic oligonucleotide
  source 1..21: mol_type = other DNA
acgacgaatgggtcgatgact

SEQ ID NO: 25014 - DNA, 21 bp, synthetic construct
  misc_feature 1..21: note = Description of Artificial Sequence: Synthetic oligonucleotide
  source 1..21: mol_type = other DNA
aatgttaagagtggttcgggg

SEQ ID NO: 25015 - DNA, 21 bp, synthetic construct
  misc_feature 1..21: note = Description of Artificial Sequence: Synthetic oligonucleotide
  source 1..21: mol_type = other DNA
gccgccggcgcccacgccagc

SEQ ID NO: 25016 - DNA, 21 bp, synthetic construct
  misc_feature 1..21: note = Description of Artificial Sequence: Synthetic oligonucleotide
  source 1..21: mol_type = other DNA
agtacgaataatagtaatgtt

SEQ ID NO: 25017 - DNA, 21 bp, synthetic construct
  misc_feature 1..21: note = Description of Artificial Sequence: Synthetic oligonucleotide
  source 1..21: mol_type = other DNA
cacacccaaagcagcagcggc

SEQ ID NO: 25018 - DNA, 21 bp, synthetic construct
  misc_feature 1..21: note = Description of Artificial Sequence: Synthetic oligonucleotide
  source 1..21: mol_type = other DNA
gagggtgtggggccgcttcgt

SEQ ID NO: 25019 - DNA, 21 bp, synthetic construct
  misc_feature 1..21: note = Description of Artificial Sequence: Synthetic oligonucleotide
  source 1..21: mol_type = other DNA
gccgccaacggcaccaacggc

SEQ ID NO: 25020 - DNA, 21 bp, synthetic construct
  misc_feature 1..21: note = Description of Artificial Sequence: Synthetic oligonucleotide
  source 1..21: mol_type = other DNA
ggttctgataggacgaggttg

SEQ ID NO: 25021 - DNA, 21 bp, synthetic construct
  misc_feature 1..21: note = Description of Artificial Sequence: Synthetic oligonucleotide
  source 1..21: mol_type = other DNA
aaagccagcggcaacagcagc

SEQ ID NO: 25022 - DNA, 21 bp, synthetic construct
  misc_feature 1..21: note = Description of Artificial Sequence: Synthetic oligonucleotide
  source 1..21: mol_type = other DNA
gaaagacacaaagtcaccgaa

SEQ ID NO: 25023 - DNA, 21 bp, synthetic construct
  misc_feature 1..21: note = Description of Artificial Sequence: Synthetic oligonucleotide
  source 1..21: mol_type = other DNA
gagagtggtcctaatgggtcg

SEQ ID NO: 25024 - DNA, 21 bp, synthetic construct
  misc_feature 1..21: note = Description of Artificial Sequence: Synthetic oligonucleotide
  source 1..21: mol_type = other DNA
aacaccgccacccaaggcacc

SEQ ID NO: 25025 - DNA, 21 bp, synthetic construct
  misc_feature 1..21: note = Description of Artificial Sequence: Synthetic oligonucleotide
  source 1..21: mol_type = other DNA
agcgtcaacggcagcaacgcc

SEQ ID NO: 25026 - DNA, 21 bp, synthetic construct
  misc_feature 1..21: note = Description of Artificial Sequence: Synthetic oligonucleotide
  source 1..21: mol_type = other DNA
gccgccaacgaagccgtcaga

SEQ ID NO: 25027 - DNA, 21 bp, synthetic construct
  misc_feature 1..21: note = Description of Artificial Sequence: Synthetic oligonucleotide
  source 1..21: mol_type = other DNA
caaagcaaccacaaaaacacc

SEQ ID NO: 25028 - DNA, 21 bp, synthetic construct
  misc_feature 1..21: note = Description of Artificial Sequence: Synthetic oligonucleotide
  source 1..21: mol_type = other DNA
agtgctcatactggttcgagt

SEQ ID NO: 25029 - DNA, 21 bp, synthetic construct
  misc_feature 1..21: note = Description of Artificial Sequence: Synthetic oligonucleotide
  source 1..21: mol_type = other DNA
atgggtaattctcagggtatg

SEQ ID NO: 25030 - DNA, 21 bp, synthetic construct
  misc_feature 1..21: note = Description of Artificial Sequence: Synthetic oligonucleotide
  source 1..21: mol_type = other DNA
aacaaagaaaccaaagccacc

SEQ ID NO: 25031 - DNA, 21 bp, synthetic construct
  misc_feature 1..21: note = Description of Artificial Sequence: Synthetic oligonucleotide
  source 1..21: mol_type = other DNA
agccacggcaccagcagcgaa

SEQ ID NO: 25032 - DNA, 21 bp, synthetic construct
  misc_feature 1..21: note = Description of Artificial Sequence: Synthetic oligonucleotide
  source 1..21: mol_type = other DNA
agccacggcagcaccagcgcc

SEQ ID NO: 25033 - DNA, 21 bp, synthetic construct
  misc_feature 1..21: note = Description of Artificial Sequence: Synthetic oligonucleotide
  source 1..21: mol_type = other DNA
agcctcggccaacccagcacc

SEQ ID NO: 25034 - DNA, 21 bp, synthetic construct
  misc_feature 1..21: note = Description of Artificial Sequence: Synthetic oligonucleotide
  source 1..21: mol_type = other DNA
agcgaagccagcgccaacaga

SEQ ID NO: 25035 - DNA, 21 bp, synthetic construct
  misc_feature 1..21: note = Description of Artificial Sequence: Synthetic oligonucleotide
  source 1..21: mol_type = other DNA
atcaacagcgacagaagcgcc

SEQ ID NO: 25036 - DNA, 21 bp, synthetic construct
  misc_feature 1..21: note = Description of Artificial Sequence: Synthetic oligonucleotide
  source 1..21: mol_type = other DNA
caccccaaaagccaaggcgaa

SEQ ID NO: 25037 - DNA, 21 bp, synthetic construct
  misc_feature 1..21: note = Description of Artificial Sequence: Synthetic oligonucleotide
  source 1..21: mol_type = other DNA
gacgaccacacccccagaaaa

SEQ ID NO: 25038 - DNA, 21 bp, synthetic construct
  misc_feature 1..21: note = Description of Artificial Sequence: Synthetic oligonucleotide
  source 1..21: mol_type = other DNA
gatcgggtggtgaagagtgat

SEQ ID NO: 25039 - DNA, 21 bp, synthetic construct
  misc_feature 1..21: note = Description of Artificial Sequence: Synthetic oligonucleotide
  source 1..21: mol_type = other DNA
ggcagagaaagcgccgtcacc

SEQ ID NO: 25040 - DNA, 21 bp, synthetic construct
  misc_feature 1..21: note = Description of Artificial Sequence: Synthetic oligonucleotide
  source 1..21: mol_type = other DNA
ggccccaacagcagcccccaa

SEQ ID NO: 25041 - DNA, 21 bp, synthetic construct
  misc_feature 1..21: note = Description of Artificial Sequence: Synthetic oligonucleotide
  source 1..21: mol_type = other DNA
aacgtcaccaaaagcagcggc

SEQ ID NO: 25042 - DNA, 21 bp, synthetic construct
  misc_feature 1..21: note = Description of Artificial Sequence: Synthetic oligonucleotide
  source 1..21: mol_type = other DNA
gtgcagtcgactaatactaag

SEQ ID NO: 25043 - DNA, 21 bp, synthetic construct
  misc_feature 1..21: note = Description of Artificial Sequence: Synthetic oligonucleotide
  source 1..21: mol_type = other DNA
agcgccagcggcagcaccacc

SEQ ID NO: 25044 - DNA, 21 bp, synthetic construct
  misc_feature 1..21: note = Description of Artificial Sequence: Synthetic oligonucleotide
  source 1..21: mol_type = other DNA
ggcgtcaaagccagcatgggc

SEQ ID NO: 25045 - DNA, 21 bp, synthetic construct
  misc_feature 1..21: note = Description of Artificial Sequence: Synthetic oligonucleotide
  source 1..21: mol_type = other DNA
tctacggttcagaagtctggg

SEQ ID NO: 25046 - DNA, 21 bp, synthetic construct
  misc_feature 1..21: note = Description of Artificial Sequence: Synthetic oligonucleotide
  source 1..21: mol_type = other DNA
ggcaacaaccccagcagcgtc

SEQ ID NO: 25047 - DNA, 21 bp, synthetic construct
  misc_feature 1..21: note = Description of Artificial Sequence: Synthetic oligonucleotide
  source 1..21: mol_type = other DNA
cagaggactagttctcctgag

SEQ ID NO: 25048 - DNA, 21 bp, synthetic construct
  misc_feature 1..21: note = Description of Artificial Sequence: Synthetic oligonucleotide
  source 1..21: mol_type = other DNA
accagcgccaaaagcgacggc

SEQ ID NO: 25049 - DNA, 21 bp, synthetic construct
  misc_feature 1..21: note = Description of Artificial Sequence: Synthetic oligonucleotide
  source 1..21: mol_type = other DNA
agttcggctcctaatgggggt

SEQ ID NO: 25050 - DNA, 21 bp, synthetic construct
  misc_feature 1..21: note = Description of Artificial Sequence: Synthetic oligonucleotide
  source 1..21: mol_type = other DNA
ctcgaaggcagcaacgccaaa

SEQ ID NO: 25051 - DNA, 21 bp, synthetic construct
  misc_feature 1..21: note = Description of Artificial Sequence: Synthetic oligonucleotide
  source 1..21: mol_type = other DNA
ggcttcgaaaaagaaagaggc

SEQ ID NO: 25052 - DNA, 21 bp, synthetic construct
  misc_feature 1..21: note = Description of Artificial Sequence: Synthetic oligonucleotide
  source 1..21: mol_type = other DNA
tctactgggagtgctttgaag

SEQ ID NO: 25053 - DNA, 21 bp, synthetic construct
  misc_feature 1..21: note = Description of Artificial Sequence: Synthetic oligonucleotide
  source 1..21: mol_type = other DNA
aaaagcagcgaaggcaccaac

SEQ ID NO: 25054 - DNA, 21 bp, synthetic construct
  misc_feature 1..21: note = Description of Artificial Sequence: Synthetic oligonucleotide
  source 1..21: mol_type = other DNA
accggcggccccaccaacaga

SEQ ID NO: 25055 - DNA, 21 bp, synthetic construct
  misc_feature 1..21: note = Description of Artificial Sequence: Synthetic oligonucleotide
  source 1..21: mol_type = other DNA
caggcgactacgccgagtcag

SEQ ID NO: 25056 - DNA, 21 bp, synthetic construct
  misc_feature 1..21: note = Description of Artificial Sequence: Synthetic oligonucleotide
  source 1..21: mol_type = other DNA
ctgaatggtgcttcgtctcat

SEQ ID NO: 25057 - DNA, 21 bp, synthetic construct
  misc_feature 1..21: note = Description of Artificial Sequence: Synthetic oligonucleotide
  source 1..21: mol_type = other DNA
gacctcaccgaaaaaagaacc

SEQ ID NO: 25058 - DNA, 21 bp, synthetic construct
  misc_feature 1..21: note = Description of Artificial Sequence: Synthetic oligonucleotide
  source 1..21: mol_type = other DNA
aacaacggcagcagcgtcagc

SEQ ID NO: 25059 - DNA, 21 bp, synthetic construct
  misc_feature 1..21: note = Description of Artificial Sequence: Synthetic oligonucleotide
  source 1..21: mol_type = other DNA
accagccacgcccccaacacc

SEQ ID NO: 25060 - DNA, 21 bp, synthetic construct
  misc_feature 1..21: note = Description of Artificial Sequence: Synthetic oligonucleotide
  source 1..21: mol_type = other DNA
ggcagcgccaaagccgtcgcc

SEQ ID NO: 25061 - DNA, 21 bp, synthetic construct
  misc_feature 1..21: note = Description of Artificial Sequence: Synthetic oligonucleotide
  source 1..21: mol_type = other DNA
agcggcaacaaaccctacacc

SEQ ID NO: 25062 - DNA, 21 bp, synthetic construct
  misc_feature 1..21: note = Description of Artificial Sequence: Synthetic oligonucleotide
  source 1..21: mol_type = other DNA
gataagattgataagcaggtt

SEQ ID NO: 25063 - DNA, 21 bp, synthetic construct
  misc_feature 1..21: note = Description of Artificial Sequence: Synthetic oligonucleotide
  source 1..21: mol_type = other DNA
aatgagaggagtccggtgcat

SEQ ID NO: 25064 - DNA, 21 bp, synthetic construct
  misc_feature 1..21: note = Description of Artificial Sequence: Synthetic oligonucleotide
  source 1..21: mol_type = other DNA
agcaacagcccccaaaaaatg

SEQ ID NO: 25065 - DNA, 21 bp, synthetic construct
  misc_feature 1..21: note = Description of Artificial Sequence: Synthetic oligonucleotide
  source 1..21: mol_type = other DNA
agtgcgatgaatgggactgct

SEQ ID NO: 25066 - DNA, 21 bp, synthetic construct
  misc_feature 1..21: note = Description of Artificial Sequence: Synthetic oligonucleotide
  source 1..21: mol_type = other DNA
ctcgacggccacaaaagcagc

SEQ ID NO: 25067 - DNA, 21 bp, synthetic construct
  misc_feature 1..21: note = Description of Artificial Sequence: Synthetic oligonucleotide
  source 1..21: mol_type = other DNA
ctcgacggccacggccaagcc

SEQ ID NO: 25068 - DNA, 21 bp, synthetic construct
  misc_feature 1..21: note = Description of Artificial Sequence: Synthetic oligonucleotide
  source 1..21: mol_type = other DNA
gagagtcttacgaagtctaat

SEQ ID NO: 25069 - DNA, 21 bp, synthetic construct
  misc_feature 1..21: note = Description of Artificial Sequence: Synthetic oligonucleotide
  source 1..21: mol_type = other DNA
gcgatgagtagtgggggtggg

SEQ ID NO: 25070 - DNA, 21 bp, synthetic construct
  misc_feature 1..21: note = Description of Artificial Sequence: Synthetic oligonucleotide
  source 1..21: mol_type = other DNA
ggcaacgacaaacaaatgggc

SEQ ID NO: 25071 - DNA, 21 bp, synthetic construct
  misc_feature 1..21: note = Description of Artificial Sequence: Synthetic oligonucleotide
  source 1..21: mol_type = other DNA
ggcgccagcaacagcaccaga

SEQ ID NO: 25072 - DNA, 21 bp, synthetic construct
  misc_feature 1..21: note = Description of Artificial Sequence: Synthetic oligonucleotide
  source 1..21: mol_type = other DNA
gggcaggtggcgggtcaggct

SEQ ID NO: 25073 - DNA, 21 bp, synthetic construct
  misc_feature 1..21: note = Description of Artificial Sequence: Synthetic oligonucleotide
  source 1..21: mol_type = other DNA
gggggtacgcagacgccgcct

SEQ ID NO: 25074 - DNA, 21 bp, synthetic construct
  misc_feature 1..21: note = Description of Artificial Sequence: Synthetic oligonucleotide
  source 1..21: mol_type = other DNA
ggtgagacgaattcgaggaat

SEQ ID NO: 25075 - DNA, 21 bp, synthetic construct
  misc_feature 1..21: note = Description of Artificial Sequence: Synthetic oligonucleotide
  source 1..21: mol_type = other DNA
gtcagcacccccagcgccgcc

SEQ ID NO: 25076 - DNA, 21 bp, synthetic construct
  misc_feature 1..21: note = Description of Artificial Sequence: Synthetic oligonucleotide
  source 1..21: mol_type = other DNA
gtcggcggcagcagcgtcgcc

SEQ ID NO: 25077 - DNA, 21 bp, synthetic construct
  misc_feature 1..21: note = Description of Artificial Sequence: Synthetic oligonucleotide
  source 1..21: mol_type = other DNA
tacggcaacagcacccccagc

SEQ ID NO: 25078 - DNA, 21 bp, synthetic construct
  misc_feature 1..21: note = Description of Artificial Sequence: Synthetic oligonucleotide
  source 1..21: mol_type = other DNA
tcggaggcggagaagactaag

SEQ ID NO: 25079 - DNA, 21 bp, synthetic construct
  misc_feature 1..21: note = Description of Artificial Sequence: Synthetic oligonucleotide
  source 1..21: mol_type = other DNA
tgtacggggaattcgaataat

SEQ ID NO: 25080 - DNA, 21 bp, synthetic construct
  misc_feature 1..21: note = Description of Artificial Sequence: Synthetic oligonucleotide
  source 1..21: mol_type = other DNA
gacgccaccacccccagaagc

SEQ ID NO: 25081 - DNA, 21 bp, synthetic construct
  misc_feature 1..21: note = Description of Artificial Sequence: Synthetic oligonucleotide
  source 1..21: mol_type = other DNA
caagtcaaagaccacaccctc

SEQ ID NO: 25082 - DNA, 21 bp, synthetic construct
  misc_feature 1..21: note = Description of Artificial Sequence: Synthetic oligonucleotide
  source 1..21: mol_type = other DNA
attgggtcgcctaatgctcgg

SEQ ID NO: 25083 - DNA, 21 bp, synthetic construct
  misc_feature 1..21: note = Description of Artificial Sequence: Synthetic oligonucleotide
  source 1..21: mol_type = other DNA
cttcaggggtctccgcataat

SEQ ID NO: 25084 - DNA, 21 bp, synthetic construct
  misc_feature 1..21: note = Description of Artificial Sequence: Synthetic oligonucleotide
  source 1..21: mol_type = other DNA
ggggtggcttcttctcagact

SEQ ID NO: 25085 - DNA, 21 bp, synthetic construct
  misc_feature 1..21: note = Description of Artificial Sequence: Synthetic oligonucleotide
  source 1..21: mol_type = other DNA
acggctctgtctgggccgaag

SEQ ID NO: 25086 - DNA, 21 bp, synthetic construct
  misc_feature 1..21: note = Description of Artificial Sequence: Synthetic oligonucleotide
  source 1..21: mol_type = other DNA
agcggcgccaacaccaacagc

SEQ ID NO: 25087 - DNA, 21 bp, synthetic construct
  misc_feature 1..21: note = Description of Artificial Sequence: Synthetic oligonucleotide
  source 1..21: mol_type = other DNA
gatacgaaggagggtgttggg

SEQ ID NO: 25088 - DNA, 21 bp, synthetic construct
  misc_feature 1..21: note = Description of Artificial Sequence: Synthetic oligonucleotide
  source 1..21: mol_type = other DNA
gatactaagaatcatcctgcg

SEQ ID NO: 25089 - DNA, 21 bp, synthetic construct
  misc_feature 1..21: note = Description of Artificial Sequence: Synthetic oligonucleotide
  source 1..21: mol_type = other DNA
atccaaaacgacagaagccaa

SEQ ID NO: 25090 - DNA, 21 bp, synthetic construct
  misc_feature 1..21: note = Description of Artificial Sequence: Synthetic oligonucleotide
  source 1..21: mol_type = other DNA
atggcgtctccggggagtaag

SEQ ID NO: 25091 - DNA, 21 bp, synthetic construct
  misc_feature 1..21: note = Description of Artificial Sequence: Synthetic oligonucleotide
  source 1..21: mol_type = other DNA
cagcgggggcatgatcagtcg

SEQ ID NO: 25092 - DNA, 21 bp, synthetic construct
  misc_feature 1..21: note = Description of Artificial Sequence: Synthetic oligonucleotide
  source 1..21: mol_type = other DNA
gacggcggcagccacatcaga

SEQ ID NO: 25093 - DNA, 21 bp, synthetic construct
  misc_feature 1..21: note = Description of Artificial Sequence: Synthetic oligonucleotide
  source 1..21: mol_type = other DNA
gaggtgactcctcgttcgact

SEQ ID NO: 25094 - DNA, 21 bp, synthetic construct
  misc_feature 1..21: note = Description of Artificial Sequence: Synthetic oligonucleotide
  source 1..21: mol_type = other DNA
ggcaacaaccccggcagcacc

SEQ ID NO: 25095 - DNA, 21 bp, synthetic construct
  misc_feature 1..21: note = Description of Artificial Sequence: Synthetic oligonucleotide
  source 1..21: mol_type = other DNA
tttggtaatagtgctgcgaag

SEQ ID NO: 25096 - DNA, 21 bp, synthetic construct
  misc_feature 1..21: note = Description of Artificial Sequence: Synthetic oligonucleotide
  source 1..21: mol_type = other DNA
agcagcgtcaacggcaacaaa

SEQ ID NO: 25097 - DNA, 21 bp, synthetic construct
  misc_feature 1..21: note = Description of Artificial Sequence: Synthetic oligonucleotide
  source 1..21: mol_type = other DNA
cagagtagtccgagttcgcgt

SEQ ID NO: 25098 - DNA, 21 bp, synthetic construct
  misc_feature 1..21: note = Description of Artificial Sequence: Synthetic oligonucleotide
  source 1..21: mol_type = other DNA
acccaaccccaaaaacaaagc

SEQ ID NO: 25099 - DNA, 21 bp, synthetic construct
  misc_feature 1..21: note = Description of Artificial Sequence: Synthetic oligonucleotide
  source 1..21: mol_type = other DNA
cgggcggataagcctagtctg

SEQ ID NO: 25100 - DNA, 21 bp, synthetic construct
  misc_feature 1..21: note = Description of Artificial Sequence: Synthetic oligonucleotide
  source 1..21: mol_type = other DNA
gcccaacccagccacagccaa

SEQ ID NO: 25101 - DNA, 21 bp, synthetic construct
  misc_feature 1..21: note = Description of Artificial Sequence: Synthetic oligonucleotide
  source 1..21: mol_type = other DNA
cttacggggactcattcggcg

SEQ ID NO: 25102 - DNA, 21 bp, synthetic construct
  misc_feature 1..21: note = Description of Artificial Sequence: Synthetic oligonucleotide
  source 1..21: mol_type = other DNA
gctgcggtttcgactcctgct

SEQ ID NO: 25103 - DNA, 21 bp, synthetic construct
  misc_feature 1..21: note = Description of Artificial Sequence: Synthetic oligonucleotide
  source 1..21: mol_type = other DNA
actgttggtgataatcggtct

SEQ ID NO: 25104 - DNA, 21 bp, synthetic construct
  misc_feature 1..21: note = Description of Artificial Sequence: Synthetic oligonucleotide
  source 1..21: mol_type = other DNA
agcgacagcagcaaagccgcc

SEQ ID NO: 25105 - DNA, 21 bp, synthetic construct
  misc_feature 1..21: note = Description of Artificial Sequence: Synthetic oligonucleotide
  source 1..21: mol_type = other DNA
gaaagaggccacgaaaacggc

SEQ ID NO: 25106 - DNA, 21 bp, synthetic construct
  misc_feature 1..21: note = Description of Artificial Sequence: Synthetic oligonucleotide
  source 1..21: mol_type = other DNA
gacaacgtcggcgtcagcaga

SEQ ID NO: 25107 - DNA, 21 bp, synthetic construct
  misc_feature 1..21: note = Description of Artificial Sequence: Synthetic oligonucleotide
  source 1..21: mol_type = other DNA
ggggaggggcgggttacgact

SEQ ID NO: 25108 - DNA, 21 bp, synthetic construct
  misc_feature 1..21: note = Description of Artificial Sequence: Synthetic oligonucleotide
  source 1..21: mol_type = other DNA
tcgaagaatacgccgacggcg

SEQ ID NO: 25109 - DNA, 21 bp, synthetic construct
  misc_feature 1..21: note = Description of Artificial Sequence: Synthetic oligonucleotide
  source 1..21: mol_type = other DNA
gattcgggtgcgagtaagatg

SEQ ID NO: 25110 - DNA, 21 bp, synthetic construct
  misc_feature 1..21: note = Description of Artificial Sequence: Synthetic oligonucleotide
  source 1..21: mol_type = other DNA
gggcaggctaagacgcttacg

SEQ ID NO: 25111 - DNA, 21 bp, synthetic construct
  misc_feature 1..21: note = Description of Artificial Sequence: Synthetic oligonucleotide
  source 1..21: mol_type = other DNA
gattctggtaatactacgcgt

SEQ ID NO: 25112 - DNA, 21 bp, synthetic construct
  misc_feature 1..21: note = Description of Artificial Sequence: Synthetic oligonucleotide
  source 1..21: mol_type = other DNA
aacctcagcaccaacaaagac

SEQ ID NO: 25113 - DNA, 21 bp, synthetic construct
  misc_feature 1..21: note = Description of Artificial Sequence: Synthetic oligonucleotide
  source 1..21: mol_type = other DNA
aacggcagcagccaagccaac

SEQ ID NO: 25114 - DNA, 21 bp, synthetic construct
  misc_feature 1..21: note = Description of Artificial Sequence: Synthetic oligonucleotide
  source 1..21: mol_type = other DNA
accatgagcgacagacccacc

SEQ ID NO: 25115 - DNA, 21 bp, synthetic construct
  misc_feature 1..21: note = Description of Artificial Sequence: Synthetic oligonucleotide
  source 1..21: mol_type = other DNA
gggaataatccttcggctcgg

SEQ ID NO: 25116 - DNA, 21 bp, synthetic construct
  misc_feature 1..21: note = Description of Artificial Sequence: Synthetic oligonucleotide
  source 1..21: mol_type = other DNA
gttggtaatccgggtgcgggt

SEQ ID NO: 25117 - DNA, 21 bp, synthetic construct
  misc_feature 1..21: note = Description of Artificial Sequence: Synthetic oligonucleotide
  source 1..21: mol_type = other DNA
tatcgggagagtagttctgtt

SEQ ID NO: 25118 - DNA, 21 bp, synthetic construct
  misc_feature 1..21: note = Description of Artificial Sequence: Synthetic oligonucleotide
  source 1..21: mol_type = other DNA
accagcagcggccaaaactgc

SEQ ID NO: 25119 - DNA, 21 bp, synthetic construct
  misc_feature 1..21: note = Description of Artificial Sequence: Synthetic oligonucleotide
  source 1..21: mol_type = other DNA
acccccagccccaacaccaaa

SEQ ID NO: 25120 - DNA, 21 bp, synthetic construct
  misc_feature 1..21: note = Description of Artificial Sequence: Synthetic oligonucleotide
  source 1..21: mol_type = other DNA
actcagaggaagccgacggag

SEQ ID NO: 25121 - DNA, 21 bp, synthetic construct
  misc_feature 1..21: note = Description of Artificial Sequence: Synthetic oligonucleotide
  source 1..21: mol_type = other DNA
agcagcaacagcagccccaga

SEQ ID NO: 25122 - DNA, 21 bp, synthetic construct
  misc_feature 1..21: note = Description of Artificial Sequence: Synthetic oligonucleotide
  source 1..21: mol_type = other DNA
actagtgcggcgacgtataat

SEQ ID NO: 25123 - DNA, 21 bp, synthetic construct
  misc_feature 1..21: note = Description of Artificial Sequence: Synthetic oligonucleotide
  source 1..21: mol_type = other DNA
ttgacggagtctaagcctcgt

SEQ ID NO: 25124 - DNA, 21 bp, synthetic construct
  misc_feature 1..21: note = Description of Artificial Sequence: Synthetic oligonucleotide
  source 1..21: mol_type = other DNA
ggcagcctccccaacggcagc

SEQ ID NO: 25125 - DNA, 21 bp, synthetic construct
  misc_feature 1..21: note = Description of Artificial Sequence: Synthetic oligonucleotide
  source 1..21: mol_type = other DNA
accaccagcgaccccgccaga

SEQ ID NO: 25126 - DNA, 21 bp, synthetic construct
  misc_feature 1..21: note = Description of Artificial Sequence: Synthetic oligonucleotide
  source 1..21: mol_type = other DNA
atccccagcaacagccccagc

SEQ ID NO: 25127 - DNA, 21 bp, synthetic construct
  misc_feature 1..21: note = Description of Artificial Sequence: Synthetic oligonucleotide
  source 1..21: mol_type = other DNA
gtcagcagcggcaccaccatc

SEQ ID NO: 25128 - DNA, 21 bp, synthetic construct
  misc_feature 1..21: note = Description of Artificial Sequence: Synthetic oligonucleotide
  source 1..21: mol_type = other DNA
aataatctgggttcgcagtct

SEQ ID NO: 25129 - DNA, 21 bp, synthetic construct
  misc_feature 1..21: note = Description of Artificial Sequence: Synthetic oligonucleotide
  source 1..21: mol_type = other DNA
agcgacgccagaaaccccacc

SEQ ID NO: 25130 - DNA, 21 bp, synthetic construct
  misc_feature 1..21: note = Description of Artificial Sequence: Synthetic oligonucleotide
  source 1..21: mol_type = other DNA
ctcgacgacagcaaaatcaga

SEQ ID NO: 25131 - DNA, 21 bp, synthetic construct
  misc_feature 1..21: note = Description of Artificial Sequence: Synthetic oligonucleotide
  source 1..21: mol_type = other DNA
gctacgtctaatcaggcttcg

SEQ ID NO: 25132 - DNA, 21 bp, synthetic construct
  misc_feature 1..21: note = Description of Artificial Sequence: Synthetic oligonucleotide
  source 1..21: mol_type = other DNA
gctccttctcagtcggtgaag

SEQ ID NO: 25133 - DNA, 21 bp, synthetic construct
  misc_feature 1..21: note = Description of Artificial Sequence: Synthetic oligonucleotide
  source 1..21: mol_type = other DNA
ggcagagccaacgaccaaagc

SEQ ID NO: 25134 - DNA, 21 bp, synthetic construct
  misc_feature 1..21: note = Description of Artificial Sequence: Synthetic oligonucleotide
  source 1..21: mol_type = other DNA
ggtattgatgctaatcagagg

SEQ ID NO: 25135 - DNA, 21 bp, synthetic construct
  misc_feature 1..21: note = Description of Artificial Sequence: Synthetic oligonucleotide
  source 1..21: mol_type = other DNA
gccaacaccagcaacgccacc

SEQ ID NO: 25136 - DNA, 21 bp, synthetic construct
  misc_feature 1..21: note = Description of Artificial Sequence: Synthetic oligonucleotide
  source 1..21: mol_type = other DNA
gacaccccccccctcaaaaac

SEQ ID NO: 25137 - DNA, 21 bp, synthetic construct
  misc_feature 1..21: note = Description of Artificial Sequence: Synthetic oligonucleotide
  source 1..21: mol_type = other DNA
aaccccggccccgccatgaac

SEQ ID NO: 25138 - DNA, 21 bp, synthetic construct
  misc_feature 1..21: note = Description of Artificial Sequence: Synthetic oligonucleotide
  source 1..21: mol_type = other DNA
accggcaccaacagcctcggc

SEQ ID NO: 25139 - DNA, 21 bp, synthetic construct
  misc_feature 1..21: note = Description of Artificial Sequence: Synthetic oligonucleotide
  source 1..21: mol_type = other DNA
agcgtcggcaccagccccccc

SEQ ID NO: 25140 - DNA, 21 bp, synthetic construct
  misc_feature 1..21: note = Description of Artificial Sequence: Synthetic oligonucleotide
  source 1..21: mol_type = other DNA
aggcatgatgcttctgcgggt

SEQ ID NO: 25141 - DNA, 21 bp, synthetic construct
  misc_feature 1..21: note = Description of Artificial Sequence: Synthetic oligonucleotide
  source 1..21: mol_type = other DNA
accacccaacccacccccagc

SEQ ID NO: 25142 - DNA, 21 bp, synthetic construct
  misc_feature 1..21: note = Description of Artificial Sequence: Synthetic oligonucleotide
  source 1..21: mol_type = other DNA
agcggcatgggcagccccaaa

SEQ ID NO: 25143 - DNA, 21 bp, synthetic construct
  misc_feature 1..21: note = Description of Artificial Sequence: Synthetic oligonucleotide
  source 1..21: mol_type = other DNA
cacgccagcgaacccagaacc

SEQ ID NO: 25144 - DNA, 21 bp, synthetic construct
  misc_feature 1..21: note = Description of Artificial Sequence: Synthetic oligonucleotide
  source 1..21: mol_type = other DNA
gctgggaatgataggcgggtt

SEQ ID NO: 25145 - DNA, 21 bp, synthetic construct
  misc_feature 1..21: note = Description of Artificial Sequence: Synthetic oligonucleotide
  source 1..21: mol_type = other DNA
tctgatgtgaagtcggagaag

SEQ ID NO: 25146 - DNA, 21 bp, synthetic construct
  misc_feature 1..21: note = Description of Artificial Sequence: Synthetic oligonucleotide
  source 1..21: mol_type = other DNA
gagagtagggtttctcaggcg

SEQ ID NO: 25147 - DNA, 21 bp, synthetic construct
  misc_feature 1..21: note = Description of Artificial Sequence: Synthetic oligonucleotide
  source 1..21: mol_type = other DNA
accaccgtcaaccaaagcggc

SEQ ID NO: 25148 - DNA, 21 bp, synthetic construct
  misc_feature 1..21: note = Description of Artificial Sequence: Synthetic oligonucleotide
  source 1..21: mol_type = other DNA
agccacgccgaaagacccagc

SEQ ID NO: 25149 - DNA, 21 bp, synthetic construct
  misc_feature 1..21: note = Description of Artificial Sequence: Synthetic oligonucleotide
  source 1..21: mol_type = other DNA
agcggcgcccaaggcatgcac

SEQ ID NO: 25150 - DNA, 21 bp, synthetic construct
  misc_feature 1..21: note = Description of Artificial Sequence: Synthetic oligonucleotide
  source 1..21: mol_type = other DNA
agtatgtcggttaagacggag

SEQ ID NO: 25151 - DNA, 21 bp, synthetic construct
  misc_feature 1..21: note = Description of Artificial Sequence: Synthetic oligonucleotide
  source 1..21: mol_type = other DNA
caaatcgaaggcagaggcgcc

SEQ ID NO: 25152 - DNA, 21 bp, synthetic construct
  misc_feature 1..21: note = Description of Artificial Sequence: Synthetic oligonucleotide
  source 1..21: mol_type = other DNA
gatcagcagggtcatgagaag

SEQ ID NO: 25153 - DNA, 21 bp, synthetic construct
  misc_feature 1..21: note = Description of Artificial Sequence: Synthetic oligonucleotide
  source 1..21: mol_type = other DNA
ggcagagccaacacccccacc

SEQ ID NO: 25154 - DNA, 21 bp, synthetic construct
  misc_feature 1..21: note = Description of Artificial Sequence: Synthetic oligonucleotide
  source 1..21: mol_type = other DNA
gtcaacagccaaagcgcccaa

SEQ ID NO: 25155 - DNA, 21 bp, synthetic construct
  misc_feature 1..21: note = Description of Artificial Sequence: Synthetic oligonucleotide
  source 1..21: mol_type = other DNA
tgtcctcctggtgagaagtct

SEQ ID NO: 25156 - DNA, 21 bp, synthetic construct
  misc_feature 1..21: note = Description of Artificial Sequence: Synthetic oligonucleotide
  source 1..21: mol_type = other DNA
aatcctagtagtcattctacg

SEQ ID NO: 25157 - DNA, 21 bp, synthetic construct
  misc_feature 1..21: note = Description of Artificial Sequence: Synthetic oligonucleotide
  source 1..21: mol_type = other DNA
agcaacagcgccggcagcctc

SEQ ID NO: 25158 - DNA, 21 bp, synthetic construct
  misc_feature 1..21: note = Description of Artificial Sequence: Synthetic oligonucleotide
  source 1..21: mol_type = other DNA
caaggcagcagagaccccgcc

SEQ ID NO: 25159 - DNA, 21 bp, synthetic construct
  misc_feature 1..21: note = Description of Artificial Sequence: Synthetic oligonucleotide
  source 1..21: mol_type = other DNA
gaaagaggcgacagcgcctac

SEQ ID NO: 25160 - DNA, 21 bp, synthetic construct
  misc_feature 1..21: note = Description of Artificial Sequence: Synthetic oligonucleotide
  source 1..21: mol_type = other DNA
gccaacaccatgaccaccaaa

SEQ ID NO: 25161 - DNA, 21 bp, synthetic construct
  misc_feature 1..21: note = Description of Artificial Sequence: Synthetic oligonucleotide
  source 1..21: mol_type = other DNA
ctcggcaccaacaaagaccaa

SEQ ID NO: 25162 - DNA, 21 bp, synthetic construct
  misc_feature 1..21: note = Description of Artificial Sequence: Synthetic oligonucleotide
  source 1..21: mol_type = other DNA
tctgggcagcctacggttctt

SEQ ID NO: 25163 - DNA, 21 bp, synthetic construct
  misc_feature 1..21: note = Description of Artificial Sequence: Synthetic oligonucleotide
  source 1..21: mol_type = other DNA
accaccgccagcagaggcctc

SEQ ID NO: 25164 - DNA, 21 bp, synthetic construct
  misc_feature 1..21: note = Description of Artificial Sequence: Synthetic oligonucleotide
  source 1..21: mol_type = other DNA
cataatggttctcatactatt

SEQ ID NO: 25165 - DNA, 21 bp, synthetic construct
  misc_feature 1..21: note = Description of Artificial Sequence: Synthetic oligonucleotide
  source 1..21: mol_type = other DNA
gccaacggcgccaccgtcgcc

SEQ ID NO: 25166 - DNA, 21 bp, synthetic construct
  misc_feature 1..21: note = Description of Artificial Sequence: Synthetic oligonucleotide
  source 1..21: mol_type = other DNA
ggcgccaaaaccggcagcgtc

SEQ ID NO: 25167 - DNA, 21 bp, synthetic construct
  misc_feature 1..21: note = Description of Artificial Sequence: Synthetic oligonucleotide
  source 1..21: mol_type = other DNA
tctggtagtacgagtcctcgt

SEQ ID NO: 25168 - DNA, 21 bp, synthetic construct
  misc_feature 1..21: note = Description of Artificial Sequence: Synthetic oligonucleotide
  source 1..21: mol_type = other DNA
gccagccaacccaacggcatc

SEQ ID NO: 25169 - DNA, 21 bp, synthetic construct
  misc_feature 1..21: note = Description of Artificial Sequence: Synthetic oligonucleotide
  source 1..21: mol_type = other DNA
ggtaatacgcgtacgccgcct

SEQ ID NO: 25170 - DNA, 21 bp, synthetic construct
  misc_feature 1..21: note = Description of Artificial Sequence: Synthetic oligonucleotide
  source 1..21: mol_type = other DNA
ggtcataatgggtctaaggtt

SEQ ID NO: 25171 - DNA, 21 bp, synthetic construct
  misc_feature 1..21: note = Description of Artificial Sequence: Synthetic oligonucleotide
  source 1..21: mol_type = other DNA
tatggtgataagtctggggct

SEQ ID NO: 25172 - DNA, 21 bp, synthetic construct
  misc_feature 1..21: note = Description of Artificial Sequence: Synthetic oligonucleotide
  source 1..21: mol_type = other DNA
aatggtcagccttcggctctt

SEQ ID NO: 25173 - DNA, 21 bp, synthetic construct
  misc_feature 1..21: note = Description of Artificial Sequence: Synthetic oligonucleotide
  source 1..21: mol_type = other DNA
aacggcagaagcaccagcagc

SEQ ID NO: 25174 - DNA, 21 bp, synthetic construct
  misc_feature 1..21: note = Description of Artificial Sequence: Synthetic oligonucleotide
  source 1..21: mol_type = other DNA
aacggcagcggcggccccagc

SEQ ID NO: 25175 - DNA, 21 bp, synthetic construct
  misc_feature 1..21: note = Description of Artificial Sequence: Synthetic oligonucleotide
  source 1..21: mol_type = other DNA
aacggccacagcagcacccaa

SEQ ID NO: 25176 - DNA, 21 bp, synthetic construct
  misc_feature 1..21: note = Description of Artificial Sequence: Synthetic oligonucleotide
  source 1..21: mol_type = other DNA
aataatcaggcgagtaataag

SEQ ID NO: 25177 - DNA, 21 bp, synthetic construct
  misc_feature 1..21: note = Description of Artificial Sequence: Synthetic oligonucleotide
  source 1..21: mol_type = other DNA
aataatgataagaatcagcag

SEQ ID NO: 25178 - DNA, 21 bp, synthetic construct
  misc_feature 1..21: note = Description of Artificial Sequence: Synthetic oligonucleotide
  source 1..21: mol_type = other DNA
aatacggcgaggtctagtgcg

SEQ ID NO: 25179 - DNA, 21 bp, synthetic construct
  misc_feature 1..21: note = Description of Artificial Sequence: Synthetic oligonucleotide
  source 1..21: mol_type = other DNA
accggcgccagcaccggcagc

SEQ ID NO: 25180 - DNA, 21 bp, synthetic construct
  misc_feature 1..21: note = Description of Artificial Sequence: Synthetic oligonucleotide
  source 1..21: mol_type = other DNA
accgtcggcgccacccccatc

SEQ ID NO: 25181 - DNA, 21 bp, synthetic construct
  misc_feature 1..21: note = Description of Artificial Sequence: Synthetic oligonucleotide
  source 1..21: mol_type = other DNA
acgaaggcgaagggggatcat

SEQ ID NO: 25182 - DNA, 21 bp, synthetic construct
  misc_feature 1..21: note = Description of Artificial Sequence: Synthetic oligonucleotide
  source 1..21: mol_type = other DNA
actggtactgataagcctggt

SEQ ID NO: 25183 - DNA, 21 bp, synthetic construct
  misc_feature 1..21: note = Description of Artificial Sequence: Synthetic oligonucleotide
  source 1..21: mol_type = other DNA
agcaccagccccgacagcaaa

SEQ ID NO: 25184 - DNA, 21 bp, synthetic construct
  misc_feature 1..21: note = Description of Artificial Sequence: Synthetic oligonucleotide
  source 1..21: mol_type = other DNA
agccaaagcagcggccacctc

SEQ ID NO: 25185 - DNA, 21 bp, synthetic construct
  misc_feature 1..21: note = Description of Artificial Sequence: Synthetic oligonucleotide
  source 1..21: mol_type = other DNA
agcccccaaagcgccatcaaa

SEQ ID NO: 25186 - DNA, 21 bp, synthetic construct
  misc_feature 1..21: note = Description of Artificial Sequence: Synthetic oligonucleotide
  source 1..21: mol_type = other DNA
agcgacagccccaaactcggc

SEQ ID NO: 25187 - DNA, 21 bp, synthetic construct
  misc_feature 1..21: note = Description of Artificial Sequence: Synthetic oligonucleotide
  source 1..21: mol_type = other DNA
agcggcgtcgccaacaccgcc

SEQ ID NO: 25188 - DNA, 21 bp, synthetic construct
  misc_feature 1..21: note = Description of Artificial Sequence: Synthetic oligonucleotide
  source 1..21: mol_type = other DNA
agtggggttagtgctcagaat

SEQ ID NO: 25189 - DNA, 21 bp, synthetic construct
  misc_feature 1..21: note = Description of Artificial Sequence: Synthetic oligonucleotide
  source 1..21: mol_type = other DNA
attcctaataagagtgggggg

SEQ ID NO: 25190 - DNA, 21 bp, synthetic construct
  misc_feature 1..21: note = Description of Artificial Sequence: Synthetic oligonucleotide
  source 1..21: mol_type = other DNA
attgctagggatgcgcagcag

SEQ ID NO: 25191 - DNA, 21 bp, synthetic construct
  misc_feature 1..21: note = Description of Artificial Sequence: Synthetic oligonucleotide
  source 1..21: mol_type = other DNA
caaagagaagaccacagcaaa

SEQ ID NO: 25192 - DNA, 21 bp, synthetic construct
  misc_feature 1..21: note = Description of Artificial Sequence: Synthetic oligonucleotide
  source 1..21: mol_type = other DNA
cacaccgcccaaacccccggc

SEQ ID NO: 25193 - DNA, 21 bp, synthetic construct
  misc_feature 1..21: note = Description of Artificial Sequence: Synthetic oligonucleotide
  source 1..21: mol_type = other DNA
ctcggccacaacaaaagcgcc

SEQ ID NO: 25194 - DNA, 21 bp, synthetic construct
  misc_feature 1..21: note = Description of Artificial Sequence: Synthetic oligonucleotide
  source 1..21: mol_type = other DNA
gaaagcagaagcagcgtcctc

SEQ ID NO: 25195 - DNA, 21 bp, synthetic construct
  misc_feature 1..21: note = Description of Artificial Sequence: Synthetic oligonucleotide
  source 1..21: mol_type = other DNA
gacaaccaacccagcagcaac

SEQ ID NO: 25196 - DNA, 21 bp, synthetic construct
  misc_feature 1..21: note = Description of Artificial Sequence: Synthetic oligonucleotide
  source 1..21: mol_type = other DNA
gaccacagagaaaccagcaaa

SEQ ID NO: 25197 - DNA, 21 bp, synthetic construct
  misc_feature 1..21: note = Description of Artificial Sequence: Synthetic oligonucleotide
  source 1..21: mol_type = other DNA
gaggttccgaagactcctagt

SEQ ID NO: 25198 - DNA, 21 bp, synthetic construct
  misc_feature 1..21: note = Description of Artificial Sequence: Synthetic oligonucleotide
  source 1..21: mol_type = other DNA
gatccgaaggggtcgcagggt

SEQ ID NO: 25199 - DNA, 21 bp, synthetic construct
  misc_feature 1..21: note = Description of Artificial Sequence: Synthetic oligonucleotide
  source 1..21: mol_type = other DNA
gatgggcgggggtcttcgctg

SEQ ID NO: 25200 - DNA, 21 bp, synthetic construct
  misc_feature 1..21: note = Description of Artificial Sequence: Synthetic oligonucleotide
  source 1..21: mol_type = other DNA
gccggccccagagacctccaa

SEQ ID NO: 25201 - DNA, 21 bp, synthetic construct
  misc_feature 1..21: note = Description of Artificial Sequence: Synthetic oligonucleotide
  source 1..21: mol_type = other DNA
gcttctagttcgtctccgggt

SEQ ID NO: 25202 - DNA, 21 bp, synthetic construct
  misc_feature 1..21: note = Description of Artificial Sequence: Synthetic oligonucleotide
  source 1..21: mol_type = other DNA
ggcaacaccggcacccccccc

SEQ ID NO: 25203 - DNA, 21 bp, synthetic construct
  misc_feature 1..21: note = Description of Artificial Sequence: Synthetic oligonucleotide
  source 1..21: mol_type = other DNA
ggcagccaaaaaaccgtcggc

SEQ ID NO: 25204 - DNA, 21 bp, synthetic construct
  misc_feature 1..21: note = Description of Artificial Sequence: Synthetic oligonucleotide
  source 1..21: mol_type = other DNA
ggcgtcagcagccaaccccaa

SEQ ID NO: 25205 - DNA, 21 bp, synthetic construct
  misc_feature 1..21: note = Description of Artificial Sequence: Synthetic oligonucleotide
  source 1..21: mol_type = other DNA
ggtcaggggtcgtctgttgtg

SEQ ID NO: 25206 - DNA, 21 bp, synthetic construct
  misc_feature 1..21: note = Description of Artificial Sequence: Synthetic oligonucleotide
  source 1..21: mol_type = other DNA
gtcaacagcacccccgtcaaa

SEQ ID NO: 25207 - DNA, 21 bp, synthetic construct
  misc_feature 1..21: note = Description of Artificial Sequence: Synthetic oligonucleotide
  source 1..21: mol_type = other DNA
gtcagcaacacccaaggccaa

SEQ ID NO: 25208 - DNA, 21 bp, synthetic construct
  misc_feature 1..21: note = Description of Artificial Sequence: Synthetic oligonucleotide
  source 1..21: mol_type = other DNA
gtcggccaccccaccgccatg

SEQ ID NO: 25209 - DNA, 21 bp, synthetic construct
  misc_feature 1..21: note = Description of Artificial Sequence: Synthetic oligonucleotide
  source 1..21: mol_type = other DNA
tcgatgaatcagtcgtctaag

SEQ ID NO: 25210 - DNA, 21 bp, synthetic construct
  misc_feature 1..21: note = Description of Artificial Sequence: Synthetic oligonucleotide
  source 1..21: mol_type = other DNA
tctactctggctggggttaat

SEQ ID NO: 25211 - DNA, 21 bp, synthetic construct
  misc_feature 1..21: note = Description of Artificial Sequence: Synthetic oligonucleotide
  source 1..21: mol_type = other DNA
tcttcgcaggcggatattcgg

SEQ ID NO: 25212 - DNA, 21 bp, synthetic construct
  misc_feature 1..21: note = Description of Artificial Sequence: Synthetic oligonucleotide
  source 1..21: mol_type = other DNA
aatagtgtggggtcgatgatg

SEQ ID NO: 25213 - DNA, 21 bp, synthetic construct
  misc_feature 1..21: note = Description of Artificial Sequence: Synthetic oligonucleotide
  source 1..21: mol_type = other DNA
agaaccgacagaggcagcggc

SEQ ID NO: 25214 - DNA, 21 bp, synthetic construct
  misc_feature 1..21: note = Description of Artificial Sequence: Synthetic oligonucleotide
  source 1..21: mol_type = other DNA
ctggggggtcagcatcctagt

SEQ ID NO: 25215 - DNA, 21 bp, synthetic construct
  misc_feature 1..21: note = Description of Artificial Sequence: Synthetic oligonucleotide
  source 1..21: mol_type = other DNA
caaggcaacggcagcgtcgtc

SEQ ID NO: 25216 - DNA, 21 bp, synthetic construct
  misc_feature 1..21: note = Description of Artificial Sequence: Synthetic oligonucleotide
  source 1..21: mol_type = other DNA
cacaaagacaccagcaccgcc

SEQ ID NO: 25217 - DNA, 21 bp, synthetic construct
  misc_feature 1..21: note = Description of Artificial Sequence: Synthetic oligonucleotide
  source 1..21: mol_type = other DNA
gacaccgccaaaatcaacgtc

SEQ ID NO: 25218 - DNA, 21 bp, synthetic construct
  misc_feature 1..21: note = Description of Artificial Sequence: Synthetic oligonucleotide
  source 1..21: mol_type = other DNA
gttgctagtcaggctaatgcg

SEQ ID NO: 25219 - DNA, 21 bp, synthetic construct
  misc_feature 1..21: note = Description of Artificial Sequence: Synthetic oligonucleotide
  source 1..21: mol_type = other DNA
gtttcgtcgcagacggttcgg

SEQ ID NO: 25220 - DNA, 21 bp, synthetic construct
  misc_feature 1..21: note = Description of Artificial Sequence: Synthetic oligonucleotide
  source 1..21: mol_type = other DNA
aaccaaaccaaactcggccaa

SEQ ID NO: 25221 - DNA, 21 bp, synthetic construct
  misc_feature 1..21: note = Description of Artificial Sequence: Synthetic oligonucleotide
  source 1..21: mol_type = other DNA
agcgacagcgtcaaagacagc

SEQ ID NO: 25222 - DNA, 21 bp, synthetic construct
  misc_feature 1..21: note = Description of Artificial Sequence: Synthetic oligonucleotide
  source 1..21: mol_type = other DNA
gcgtcggctggtactcatacg

SEQ ID NO: 25223 - DNA, 21 bp, synthetic construct
  misc_feature 1..21: note = Description of Artificial Sequence: Synthetic oligonucleotide
  source 1..21: mol_type = other DNA
ggcgaaaaaaccggcgtcgcc

SEQ ID NO: 25224 - DNA, 21 bp, synthetic construct
  misc_feature 1..21: note = Description of Artificial Sequence: Synthetic oligonucleotide
  source 1..21: mol_type = other DNA
acccaaagcaaagccatggcc

SEQ ID NO: 25225 - DNA, 21 bp, synthetic construct
  misc_feature 1..21: note = Description of Artificial Sequence: Synthetic oligonucleotide
  source 1..21: mol_type = other DNA
agcaacgacaccagaagaacc

SEQ ID NO: 25226 - DNA, 21 bp, synthetic construct
  misc_feature 1..21: note = Description of Artificial Sequence: Synthetic oligonucleotide
  source 1..21: mol_type = other DNA
atgggcagcagagaagtcatg

SEQ ID NO: 25227 - DNA, 21 bp, synthetic construct
  misc_feature 1..21: note = Description of Artificial Sequence: Synthetic oligonucleotide
  source 1..21: mol_type = other DNA
cattcgagtgggactttgagt

SEQ ID NO: 25228 - DNA, 21 bp, synthetic construct
  misc_feature 1..21: note = Description of Artificial Sequence: Synthetic oligonucleotide
  source 1..21: mol_type = other DNA
ctccaaggcagcaacgccagc

SEQ ID NO: 25229 - DNA, 21 bp, synthetic construct
  misc_feature 1..21: note = Description of Artificial Sequence: Synthetic oligonucleotide
  source 1..21: mol_type = other DNA
gaccccggcaacagcctcaga

SEQ ID NO: 25230 - DNA, 21 bp, synthetic construct
  misc_feature 1..21: note = Description of Artificial Sequence: Synthetic oligonucleotide
  source 1..21: mol_type = other DNA
gacgtccaaaccccccccaga

SEQ ID NO: 25231 - DNA, 21 bp, synthetic construct
  misc_feature 1..21: note = Description of Artificial Sequence: Synthetic oligonucleotide
  source 1..21: mol_type = other DNA
gagcgtatgaatactcagggt

SEQ ID NO: 25232 - DNA, 21 bp, synthetic construct
  misc_feature 1..21: note = Description of Artificial Sequence: Synthetic oligonucleotide
  source 1..21: mol_type = other DNA
gatgggggtgaggcgcagagg

SEQ ID NO: 25233 - DNA, 21 bp, synthetic construct
  misc_feature 1..21: note = Description of Artificial Sequence: Synthetic oligonucleotide
  source 1..21: mol_type = other DNA
ggtacgaatgattctcgtgtt

SEQ ID NO: 25234 - DNA, 21 bp, synthetic construct
  misc_feature 1..21: note = Description of Artificial Sequence: Synthetic oligonucleotide
  source 1..21: mol_type = other DNA
gaaagcctcagcaccagcaga

SEQ ID NO: 25235 - DNA, 21 bp, synthetic construct
  misc_feature 1..21: note = Description of Artificial Sequence: Synthetic oligonucleotide
  source 1..21: mol_type = other DNA
actacgaggacgcctacggct

SEQ ID NO: 25236 - DNA, 21 bp, synthetic construct
  misc_feature 1..21: note = Description of Artificial Sequence: Synthetic oligonucleotide
  source 1..21: mol_type = other DNA
gggggggataagcctacgtcg

SEQ ID NO: 25237 - DNA, 21 bp, synthetic construct
  misc_feature 1..21: note = Description of Artificial Sequence: Synthetic oligonucleotide
  source 1..21: mol_type = other DNA
aaggagctgtctggtactact

SEQ ID NO: 25238 - DNA, 21 bp, synthetic construct
  misc_feature 1..21: note = Description of Artificial Sequence: Synthetic oligonucleotide
  source 1..21: mol_type = other DNA
accaacagcggccaccccccc

SEQ ID NO: 25239 - DNA, 21 bp, synthetic construct
  misc_feature 1..21: note = Description of Artificial Sequence: Synthetic oligonucleotide
  source 1..21: mol_type = other DNA
actgagcagtcgcggtctgtg

SEQ ID NO: 25240 - DNA, 21 bp, synthetic construct
  misc_feature 1..21: note = Description of Artificial Sequence: Synthetic oligonucleotide
  source 1..21: mol_type = other DNA
agcagcgacggcggcaacaga

SEQ ID NO: 25241 - DNA, 21 bp, synthetic construct
  misc_feature 1..21: note = Description of Artificial Sequence: Synthetic oligonucleotide
  source 1..21: mol_type = other DNA
gaactccccaaaaccggcaga

SEQ ID NO: 25242 - DNA, 21 bp, synthetic construct
  misc_feature 1..21: note = Description of Artificial Sequence: Synthetic oligonucleotide
  source 1..21: mol_type = other DNA
ggcgacaccacccccagaggc

SEQ ID NO: 25243 - DNA, 21 bp, synthetic construct
  misc_feature 1..21: note = Description of Artificial Sequence: Synthetic oligonucleotide
  source 1..21: mol_type = other DNA
gtcaccagcgacaaagccgcc

SEQ ID NO: 25244 - DNA, 21 bp, synthetic construct
  misc_feature 1..21: note = Description of Artificial Sequence: Synthetic oligonucleotide
  source 1..21: mol_type = other DNA
gtgggttctacggcgaatgag

SEQ ID NO: 25245 - DNA, 21 bp, synthetic construct
  misc_feature 1..21: note = Description of Artificial Sequence: Synthetic oligonucleotide
  source 1..21: mol_type = other DNA
tctcttaattcgactgggggg

SEQ ID NO: 25246 - DNA, 21 bp, synthetic construct
  misc_feature 1..21: note = Description of Artificial Sequence: Synthetic oligonucleotide
  source 1..21: mol_type = other DNA
tcttcgggtgggtcgatgcgg

SEQ ID NO: 25247 - DNA, 21 bp, synthetic construct
  misc_feature 1..21: note = Description of Artificial Sequence: Synthetic oligonucleotide
  source 1..21: mol_type = other DNA
tttgttgaggatcggacgaag

SEQ ID NO: 25248 - DNA, 21 bp, synthetic construct
  misc_feature 1..21: note = Description of Artificial Sequence: Synthetic oligonucleotide
  source 1..21: mol_type = other DNA
aacgacgccagacccggcatc

SEQ ID NO: 25249 - DNA, 21 bp, synthetic construct
  misc_feature 1..21: note = Description of Artificial Sequence: Synthetic oligonucleotide
  source 1..21: mol_type = other DNA
ggcgcccccaccgccgccacc

SEQ ID NO: 25250 - DNA, 21 bp, synthetic construct
  misc_feature 1..21: note = Description of Artificial Sequence: Synthetic oligonucleotide
  source 1..21: mol_type = other DNA
ggtattggtgagcgtcgtggt

SEQ ID NO: 25251 - DNA, 21 bp, synthetic construct
  misc_feature 1..21: note = Description of Artificial Sequence: Synthetic oligonucleotide
  source 1..21: mol_type = other DNA
aatccgagtactaatagtccg

SEQ ID NO: 25252 - DNA, 21 bp, synthetic construct
  misc_feature 1..21: note = Description of Artificial Sequence: Synthetic oligonucleotide
  source 1..21: mol_type = other DNA
acccacgccggcagcagaggc

SEQ ID NO: 25253 - DNA, 21 bp, synthetic construct
  misc_feature 1..21: note = Description of Artificial Sequence: Synthetic oligonucleotide
  source 1..21: mol_type = other DNA
acgttggataatactaatcgt

SEQ ID NO: 25254 - DNA, 21 bp, synthetic construct
  misc_feature 1..21: note = Description of Artificial Sequence: Synthetic oligonucleotide
  source 1..21: mol_type = other DNA
cgtagtgatacgaaccagggg

SEQ ID NO: 25255 - DNA, 21 bp, synthetic construct
  misc_feature 1..21: note = Description of Artificial Sequence: Synthetic oligonucleotide
  source 1..21: mol_type = other DNA
gctttgaagtcgggtaatgcg

SEQ ID NO: 25256 - DNA, 21 bp, synthetic construct
  misc_feature 1..21: note = Description of Artificial Sequence: Synthetic oligonucleotide
  source 1..21: mol_type = other DNA
aatgctgggcagcgttcgtcg

SEQ ID NO: 25257 - DNA, 21 bp, synthetic construct
  misc_feature 1..21: note = Description of Artificial Sequence: Synthetic oligonucleotide
  source 1..21: mol_type = other DNA
catccggggcctacgcagggg

SEQ ID NO: 25258 - DNA, 21 bp, synthetic construct
  misc_feature 1..21: note = Description of Artificial Sequence: Synthetic oligonucleotide
  source 1..21: mol_type = other DNA
tcgcgtactgcttcgacggag

SEQ ID NO: 25259 - DNA, 21 bp, synthetic construct
  misc_feature 1..21: note = Description of Artificial Sequence: Synthetic oligonucleotide
  source 1..21: mol_type = other DNA
acccccggcagcaccgtcctc

SEQ ID NO: 25260 - DNA, 21 bp, synthetic construct
  misc_feature 1..21: note = Description of Artificial Sequence: Synthetic oligonucleotide
  source 1..21: mol_type = other DNA
aatttggggcagtcgaataag

SEQ ID NO: 25261 - DNA, 21 bp, synthetic construct
  misc_feature 1..21: note = Description of Artificial Sequence: Synthetic oligonucleotide
  source 1..21: mol_type = other DNA
accgccggcaaaaacagcggc

SEQ ID NO: 25262 - DNA, 21 bp, synthetic construct
  misc_feature 1..21: note = Description of Artificial Sequence: Synthetic oligonucleotide
  source 1..21: mol_type = other DNA
agccccggcggcagcgtcagc

SEQ ID NO: 25263 - DNA, 21 bp, synthetic construct
  misc_feature 1..21: note = Description of Artificial Sequence: Synthetic oligonucleotide
  source 1..21: mol_type = other DNA
agcgtcagcgccgccaccaac

SEQ ID NO: 25264 - DNA, 21 bp, synthetic construct
  misc_feature 1..21: note = Description of Artificial Sequence: Synthetic oligonucleotide
  source 1..21: mol_type = other DNA
agcgtcggcggcaacgccctc

SEQ ID NO: 25265 - DNA, 21 bp, synthetic construct
  misc_feature 1..21: note = Description of Artificial Sequence: Synthetic oligonucleotide
  source 1..21: mol_type = other DNA
atggctaatactgcggttgcg

SEQ ID NO: 25266 - DNA, 21 bp, synthetic construct
  misc_feature 1..21: note = Description of Artificial Sequence: Synthetic oligonucleotide
  source 1..21: mol_type = other DNA
caagaagccggcagcaaagcc

SEQ ID NO: 25267 - DNA, 21 bp, synthetic construct
  misc_feature 1..21: note = Description of Artificial Sequence: Synthetic oligonucleotide
  source 1..21: mol_type = other DNA
cttgtgcagaaggataatagt

SEQ ID NO: 25268 - DNA, 21 bp, synthetic construct
  misc_feature 1..21: note = Description of Artificial Sequence: Synthetic oligonucleotide
  source 1..21: mol_type = other DNA
gatactacgggtaataggaat

SEQ ID NO: 25269 - DNA, 21 bp, synthetic construct
  misc_feature 1..21: note = Description of Artificial Sequence: Synthetic oligonucleotide
  source 1..21: mol_type = other DNA
gggacggaggggactcatagg

SEQ ID NO: 25270 - DNA, 21 bp, synthetic construct
  misc_feature 1..21: note = Description of Artificial Sequence: Synthetic oligonucleotide
  source 1..21: mol_type = other DNA
ggtacggtgtcgagtggtggt

SEQ ID NO: 25271 - DNA, 21 bp, synthetic construct
  misc_feature 1..21: note = Description of Artificial Sequence: Synthetic oligonucleotide
  source 1..21: mol_type = other DNA
gtggagggtaataagggttat

SEQ ID NO: 25272 - DNA, 21 bp, synthetic construct
  misc_feature 1..21: note = Description of Artificial Sequence: Synthetic oligonucleotide
  source 1..21: mol_type = other DNA
ttgatgacttcttcgccggcg

SEQ ID NO: 25273 - DNA, 21 bp, synthetic construct
  misc_feature 1..21: note = Description of Artificial Sequence: Synthetic oligonucleotide
  source 1..21: mol_type = other DNA
gagaagtctactccgtcgtct

SEQ ID NO: 25274 - DNA, 21 bp, synthetic construct
  misc_feature 1..21: note = Description of Artificial Sequence: Synthetic oligonucleotide
  source 1..21: mol_type = other DNA
gccgacgccagcagagccagc

SEQ ID NO: 25275 - DNA, 21 bp, synthetic construct
  misc_feature 1..21: note = Description of Artificial Sequence: Synthetic oligonucleotide
  source 1..21: mol_type = other DNA
gctgggacttcgccttctgtt

SEQ ID NO: 25276 - DNA, 21 bp, synthetic construct
  misc_feature 1..21: note = Description of Artificial Sequence: Synthetic oligonucleotide
  source 1..21: mol_type = other DNA
accaaagaaggcgccggcgcc

SEQ ID NO: 25277 - DNA, 21 bp, synthetic construct
  misc_feature 1..21: note = Description of Artificial Sequence: Synthetic oligonucleotide
  source 1..21: mol_type = other DNA
agcagcggccaacccagccac

SEQ ID NO: 25278 - DNA, 21 bp, synthetic construct
  misc_feature 1..21: note = Description of Artificial Sequence: Synthetic oligonucleotide
  source 1..21: mol_type = other DNA
agtgggagtcctagggatggg

SEQ ID NO: 25279 - DNA, 21 bp, synthetic construct
  misc_feature 1..21: note = Description of Artificial Sequence: Synthetic oligonucleotide
  source 1..21: mol_type = other DNA
cagcagaaggctactgtggag

SEQ ID NO: 25280 - DNA, 21 bp, synthetic construct
  misc_feature 1..21: note = Description of Artificial Sequence: Synthetic oligonucleotide
  source 1..21: mol_type = other DNA
gaccaccccagcagagacaaa

SEQ ID NO: 25281 - DNA, 21 bp, synthetic construct
  misc_feature 1..21: note = Description of Artificial Sequence: Synthetic oligonucleotide
  source 1..21: mol_type = other DNA
gacgcccccggcaaagtcacc

SEQ ID NO: 25282 - DNA, 21 bp, synthetic construct
  misc_feature 1..21: note = Description of Artificial Sequence: Synthetic oligonucleotide
  source 1..21: mol_type = other DNA
gactacggcgaacccaaaagc

SEQ ID NO: 25283 - DNA, 21 bp, synthetic construct
  misc_feature 1..21: note = Description of Artificial Sequence: Synthetic oligonucleotide
  source 1..21: mol_type = other DNA
gatcagagtagtaagcagcat

SEQ ID NO: 25284 - DNA, 21 bp, synthetic construct
  misc_feature 1..21: note = Description of Artificial Sequence: Synthetic oligonucleotide
  source 1..21: mol_type = other DNA
gtggagggtaatcctccgaag

SEQ ID NO: 25285 - DNA, 21 bp, synthetic construct
  misc_feature 1..21: note = Description of Artificial Sequence: Synthetic oligonucleotide
  source 1..21: mol_type = other DNA
ttcaccggcggcaccggcagc

SEQ ID NO: 25286 - DNA, 21 bp, synthetic construct
  misc_feature 1..21: note = Description of Artificial Sequence: Synthetic oligonucleotide
  source 1..21: mol_type = other DNA
ttggggcatcctaagaattcg

SEQ ID NO: 25287 - DNA, 21 bp, synthetic construct
  misc_feature 1..21: note = Description of Artificial Sequence: Synthetic oligonucleotide
  source 1..21: mol_type = other DNA
aagactggtacgagttcgaat

SEQ ID NO: 25288 - DNA, 21 bp, synthetic construct
  misc_feature 1..21: note = Description of Artificial Sequence: Synthetic oligonucleotide
  source 1..21: mol_type = other DNA
tctcagtcgaatgcggctact

SEQ ID NO: 25289 - DNA, 21 bp, synthetic construct
  misc_feature 1..21: note = Description of Artificial Sequence: Synthetic oligonucleotide
  source 1..21: mol_type = other DNA
accgccaccaaagaaaacatc

SEQ ID NO: 25290 - DNA, 21 bp, synthetic construct
  misc_feature 1..21: note = Description of Artificial Sequence: Synthetic oligonucleotide
  source 1..21: mol_type = other DNA
agcggcctcaaacccctcaac

SEQ ID NO: 25291 - DNA, 21 bp, synthetic construct
  misc_feature 1..21: note = Description of Artificial Sequence: Synthetic oligonucleotide
  source 1..21: mol_type = other DNA
gaggctgttaagccggctacg

SEQ ID NO: 25292 - DNA, 21 bp, synthetic construct
  misc_feature 1..21: note = Description of Artificial Sequence: Synthetic oligonucleotide
  source 1..21: mol_type = other DNA
gatgggcttactaatcatatt

SEQ ID NO: 25293 - DNA, 21 bp, synthetic construct
  misc_feature 1..21: note = Description of Artificial Sequence: Synthetic oligonucleotide
  source 1..21: mol_type = other DNA
gccaacgaaaccagacccccc

SEQ ID NO: 25294 - DNA, 21 bp, synthetic construct
  misc_feature 1..21: note = Description of Artificial Sequence: Synthetic oligonucleotide
  source 1..21: mol_type = other DNA
gggggtggtcagaattcgctg

SEQ ID NO: 25295 - DNA, 21 bp, synthetic construct
  misc_feature 1..21: note = Description of Artificial Sequence: Synthetic oligonucleotide
  source 1..21: mol_type = other DNA
gtccaaagcgaagccagaacc

SEQ ID NO: 25296 - DNA, 21 bp, synthetic construct
  misc_feature 1..21: note = Description of Artificial Sequence: Synthetic oligonucleotide
  source 1..21: mol_type = other DNA
agccacggcagccccagcgtc

SEQ ID NO: 25297 - DNA, 21 bp, synthetic construct
  misc_feature 1..21: note = Description of Artificial Sequence: Synthetic oligonucleotide
  source 1..21: mol_type = other DNA
aacaccgaagccgtcctcaaa

SEQ ID NO: 25298 - DNA, 21 bp, synthetic construct
  misc_feature 1..21: note = Description of Artificial Sequence: Synthetic oligonucleotide
  source 1..21: mol_type = other DNA
accagcggcggcaccgtcccc

SEQ ID NO: 25299 - DNA, 21 bp, synthetic construct
  misc_feature 1..21: note = Description of Artificial Sequence: Synthetic oligonucleotide
  source 1..21: mol_type = other DNA
atggccaccaaaaccagcgtc

SEQ ID NO: 25300 - DNA, 21 bp, synthetic construct
  misc_feature 1..21: note = Description of Artificial Sequence: Synthetic oligonucleotide
  source 1..21: mol_type = other DNA
gccagcggcagcagcgtcctc

SEQ ID NO: 25301 - DNA, 21 bp, synthetic construct
  misc_feature 1..21: note = Description of Artificial Sequence: Synthetic oligonucleotide
  source 1..21: mol_type = other DNA
gcttctaatacgattactaag

SEQ ID NO: 25302 - DNA, 21 bp, synthetic construct
  misc_feature 1..21: note = Description of Artificial Sequence: Synthetic oligonucleotide
  source 1..21: mol_type = other DNA
ggcagcgtcgacatccaaaaa

SEQ ID NO: 25303 - DNA, 21 bp, synthetic construct
  misc_feature 1..21: note = Description of Artificial Sequence: Synthetic oligonucleotide
  source 1..21: mol_type = other DNA
gtgtctactaatcaggttacg

SEQ ID NO: 25304 - DNA, 21 bp, synthetic construct
  misc_feature 1..21: note = Description of Artificial Sequence: Synthetic oligonucleotide
  source 1..21: mol_type = other DNA
aacgccggcgccagcaaaaac

SEQ ID NO: 25305 - DNA, 21 bp, synthetic construct
  misc_feature 1..21: note = Description of Artificial Sequence: Synthetic oligonucleotide
  source 1..21: mol_type = other DNA
accagccacaccaaacccccc

SEQ ID NO: 25306 - DNA, 21 bp, synthetic construct
  misc_feature 1..21: note = Description of Artificial Sequence: Synthetic oligonucleotide
  source 1..21: mol_type = other DNA
agtcctggggatggtcggcgt

SEQ ID NO: 25307 - DNA, 21 bp, synthetic construct
  misc_feature 1..21: note = Description of Artificial Sequence: Synthetic oligonucleotide
  source 1..21: mol_type = other DNA
gctagtgagggtaagtatctg

SEQ ID NO: 25308 - DNA, 21 bp, synthetic construct
  misc_feature 1..21: note = Description of Artificial Sequence: Synthetic oligonucleotide
  source 1..21: mol_type = other DNA
ggcgtcagcaaagacaccaac

SEQ ID NO: 25309 - DNA, 21 bp, synthetic construct
  misc_feature 1..21: note = Description of Artificial Sequence: Synthetic oligonucleotide
  source 1..21: mol_type = other DNA
tcgctgggtggtgggtctggg

SEQ ID NO: 25310 - DNA, 21 bp, synthetic construct
  misc_feature 1..21: note = Description of Artificial Sequence: Synthetic oligonucleotide
  source 1..21: mol_type = other DNA
tcgcttagtggtcagcgggag

SEQ ID NO: 25311 - DNA, 21 bp, synthetic construct
  misc_feature 1..21: note = Description of Artificial Sequence: Synthetic oligonucleotide
  source 1..21: mol_type = other DNA
tctgggactagtaggactgtc

SEQ ID NO: 25312 - DNA, 21 bp, synthetic construct
  misc_feature 1..21: note = Description of Artificial Sequence: Synthetic oligonucleotide
  source 1..21: mol_type = other DNA
ggcagcgccaccgccagcagc

SEQ ID NO: 25313 - DNA, 21 bp, synthetic construct
  misc_feature 1..21: note = Description of Artificial Sequence: Synthetic oligonucleotide
  source 1..21: mol_type = other DNA
gacaccggcacccacagcaac

SEQ ID NO: 25314 - DNA, 21 bp, synthetic construct
  misc_feature 1..21: note = Description of Artificial Sequence: Synthetic oligonucleotide
  source 1..21: mol_type = other DNA
aacaacggcggcgtcaacgcc

SEQ ID NO: 25315 - DNA, 21 bp, synthetic construct
  misc_feature 1..21: note = Description of Artificial Sequence: Synthetic oligonucleotide
  source 1..21: mol_type = other DNA
aacacccccaccacccaaggc

SEQ ID NO: 25316 - DNA, 21 bp, synthetic construct
  misc_feature 1..21: note = Description of Artificial Sequence: Synthetic oligonucleotide
  source 1..21: mol_type = other DNA
cttaatgagactcggccttct

SEQ ID NO: 25317 - DNA, 21 bp, synthetic construct
  misc_feature 1..21: note = Description of Artificial Sequence: Synthetic oligonucleotide
  source 1..21: mol_type = other DNA
gacgcccccaaacaagtcgcc

SEQ ID NO: 25318 - DNA, 21 bp, synthetic construct
  misc_feature 1..21: note = Description of Artificial Sequence: Synthetic oligonucleotide
  source 1..21: mol_type = other DNA
gagggtaggaatgcttcgggt

SEQ ID NO: 25319 - DNA, 21 bp, synthetic construct
  misc_feature 1..21: note = Description of Artificial Sequence: Synthetic oligonucleotide
  source 1..21: mol_type = other DNA
gccggcacccaaaacaaagcc

SEQ ID NO: 25320 - DNA, 21 bp, synthetic construct
  misc_feature 1..21: note = Description of Artificial Sequence: Synthetic oligonucleotide
  source 1..21: mol_type = other DNA
ggcctcggcgcccccggcacc

SEQ ID NO: 25321 - DNA, 21 bp, synthetic construct
  misc_feature 1..21: note = Description of Artificial Sequence: Synthetic oligonucleotide
  source 1..21: mol_type = other DNA
ggttcggcttctaaggatgtt

SEQ ID NO: 25322 - DNA, 21 bp, synthetic construct
  misc_feature 1..21: note = Description of Artificial Sequence: Synthetic oligonucleotide
  source 1..21: mol_type = other DNA
tcgaatagtaagacgctgcag

SEQ ID NO: 25323 - DNA, 21 bp, synthetic construct
  misc_feature 1..21: note = Description of Artificial Sequence: Synthetic oligonucleotide
  source 1..21: mol_type = other DNA
acccaaggcaacggcatccaa

SEQ ID NO: 25324 - DNA, 21 bp, synthetic construct
  misc_feature 1..21: note = Description of Artificial Sequence: Synthetic oligonucleotide
  source 1..21: mol_type = other DNA
aacagagtcaacggcaacacc

SEQ ID NO: 25325 - DNA, 21 bp, synthetic construct
  misc_feature 1..21: note = Description of Artificial Sequence: Synthetic oligonucleotide
  source 1..21: mol_type = other DNA
acggggatgcaggggagtcat

SEQ ID NO: 25326 - DNA, 21 bp, synthetic construct
  misc_feature 1..21: note = Description of Artificial Sequence: Synthetic oligonucleotide
  source 1..21: mol_type = other DNA
actatggattctaagggtcag

SEQ ID NO: 25327 - DNA, 21 bp, synthetic construct
  misc_feature 1..21: note = Description of Artificial Sequence: Synthetic oligonucleotide
  source 1..21: mol_type = other DNA
agcagcagcggcggcatcacc

SEQ ID NO: 25328 - DNA, 21 bp, synthetic construct
  misc_feature 1..21: note = Description of Artificial Sequence: Synthetic oligonucleotide
  source 1..21: mol_type = other DNA
agcgaccaacccagcagaggc

SEQ ID NO: 25329 - DNA, 21 bp, synthetic construct
  misc_feature 1..21: note = Description of Artificial Sequence: Synthetic oligonucleotide
  source 1..21: mol_type = other DNA
agcggcagccccggcatccaa

SEQ ID NO: 25330 - DNA, 21 bp, synthetic construct
  misc_feature 1..21: note = Description of Artificial Sequence: Synthetic oligonucleotide
  source 1..21: mol_type = other DNA
atgggggataagagtctttat

SEQ ID NO: 25331 - DNA, 21 bp, synthetic construct
  misc_feature 1..21: note = Description of Artificial Sequence: Synthetic oligonucleotide
  source 1..21: mol_type = other DNA
caccacagcgaaaaaagagac

SEQ ID NO: 25332 - DNA, 21 bp, synthetic construct
  misc_feature 1..21: note = Description of Artificial Sequence: Synthetic oligonucleotide
  source 1..21: mol_type = other DNA
ctccaaggcagcagccaaccc

SEQ ID NO: 25333 - DNA, 21 bp, synthetic construct
  misc_feature 1..21: note = Description of Artificial Sequence: Synthetic oligonucleotide
  source 1..21: mol_type = other DNA
gaaaacaccagcatccccaaa

SEQ ID NO: 25334 - DNA, 21 bp, synthetic construct
  misc_feature 1..21: note = Description of Artificial Sequence: Synthetic oligonucleotide
  source 1..21: mol_type = other DNA
gaaggcgtcagcaaagccgac

SEQ ID NO: 25335 - DNA, 21 bp, synthetic construct
  misc_feature 1..21: note = Description of Artificial Sequence: Synthetic oligonucleotide
  source 1..21: mol_type = other DNA
gacaaaagcagcagcagagaa

SEQ ID NO: 25336 - DNA, 21 bp, synthetic construct
  misc_feature 1..21: note = Description of Artificial Sequence: Synthetic oligonucleotide
  source 1..21: mol_type = other DNA
gggacttctgctggggggtcg

SEQ ID NO: 25337 - DNA, 21 bp, synthetic construct
  misc_feature 1..21: note = Description of Artificial Sequence: Synthetic oligonucleotide
  source 1..21: mol_type = other DNA
gtcaccagcaaaggcaccaac

SEQ ID NO: 25338 - DNA, 21 bp, synthetic construct
  misc_feature 1..21: note = Description of Artificial Sequence: Synthetic oligonucleotide
  source 1..21: mol_type = other DNA
tgtactgatgggaagagtgct

SEQ ID NO: 25339 - DNA, 21 bp, synthetic construct
  misc_feature 1..21: note = Description of Artificial Sequence: Synthetic oligonucleotide
  source 1..21: mol_type = other DNA
gaagtcaccaacaaaaccctc

SEQ ID NO: 25340 - DNA, 21 bp, synthetic construct
  misc_feature 1..21: note = Description of Artificial Sequence: Synthetic oligonucleotide
  source 1..21: mol_type = other DNA
aattcgcatacggcttctacg

SEQ ID NO: 25341 - DNA, 21 bp, synthetic construct
  misc_feature 1..21: note = Description of Artificial Sequence: Synthetic oligonucleotide
  source 1..21: mol_type = other DNA
ctcaccaccagcaccggcggc

SEQ ID NO: 25342 - DNA, 21 bp, synthetic construct
  misc_feature 1..21: note = Description of Artificial Sequence: Synthetic oligonucleotide
  source 1..21: mol_type = other DNA
gtcgccagcgccaccagcacc

SEQ ID NO: 25343 - DNA, 21 bp, synthetic construct
  misc_feature 1..21: note = Description of Artificial Sequence: Synthetic oligonucleotide
  source 1..21: mol_type = other DNA
accagcaccgccaccagcatc

SEQ ID NO: 25344 - DNA, 21 bp, synthetic construct
  misc_feature 1..21: note = Description of Artificial Sequence: Synthetic oligonucleotide
  source 1..21: mol_type = other DNA
atcagcaccaacaccagccac

SEQ ID NO: 25345 - DNA, 21 bp, synthetic construct
  misc_feature 1..21: note = Description of Artificial Sequence: Synthetic oligonucleotide
  source 1..21: mol_type = other DNA
ggcgaaagcaaccaccacacc

SEQ ID NO: 25346 - DNA, 21 bp, synthetic construct
  misc_feature 1..21: note = Description of Artificial Sequence: Synthetic oligonucleotide
  source 1..21: mol_type = other DNA
gtgcagactcagacggcggct

SEQ ID NO: 25347 - DNA, 21 bp, synthetic construct
  misc_feature 1..21: note = Description of Artificial Sequence: Synthetic oligonucleotide
  source 1..21: mol_type = other DNA
agcaacgccgtcaaaagcagc

SEQ ID NO: 25348 - DNA, 21 bp, synthetic construct
  misc_feature 1..21: note = Description of Artificial Sequence: Synthetic oligonucleotide
  source 1..21: mol_type = other DNA
agcgtcaccacccccagaaac

SEQ ID NO: 25349 - DNA, 21 bp, synthetic construct
  misc_feature 1..21: note = Description of Artificial Sequence: Synthetic oligonucleotide
  source 1..21: mol_type = other DNA
aatggggggtctactctttcg

SEQ ID NO: 25350 - DNA, 21 bp, synthetic construct
  misc_feature 1..21: note = Description of Artificial Sequence: Synthetic oligonucleotide
  source 1..21: mol_type = other DNA
accgccgaaggcgccagaacc

SEQ ID NO: 25351 - DNA, 21 bp, synthetic construct
  misc_feature 1..21: note = Description of Artificial Sequence: Synthetic oligonucleotide
  source 1..21: mol_type = other DNA
atccaagccagcgccaacaaa

SEQ ID NO: 25352 - DNA, 21 bp, synthetic construct
  misc_feature 1..21: note = Description of Artificial Sequence: Synthetic oligonucleotide
  source 1..21: mol_type = other DNA
ggcgccacccacggcagcagc

SEQ ID NO: 25353 - DNA, 21 bp, synthetic construct
  misc_feature 1..21: note = Description of Artificial Sequence: Synthetic oligonucleotide
  source 1..21: mol_type = other DNA
gtcagcagcggcaccctcggc

SEQ ID NO: 25354 - DNA, 21 bp, synthetic construct
  misc_feature 1..21: note = Description of Artificial Sequence: Synthetic oligonucleotide
  source 1..21: mol_type = other DNA
tctattggtgctgctaatgct

SEQ ID NO: 25355 - DNA, 21 bp, synthetic construct
  misc_feature 1..21: note = Description of Artificial Sequence: Synthetic oligonucleotide
  source 1..21: mol_type = other DNA
agtatggctgcgaggccgtct

SEQ ID NO: 25356 - DNA, 21 bp, synthetic construct
  misc_feature 1..21: note = Description of Artificial Sequence: Synthetic oligonucleotide
  source 1..21: mol_type = other DNA
tctgctaattctactccgggt

SEQ ID NO: 25357 - DNA, 21 bp, synthetic construct
  misc_feature 1..21: note = Description of Artificial Sequence: Synthetic oligonucleotide
  source 1..21: mol_type = other DNA
tctgtgtcgtcttctaatatg

SEQ ID NO: 25358 - DNA, 21 bp, synthetic construct
  misc_feature 1..21: note = Description of Artificial Sequence: Synthetic oligonucleotide
  source 1..21: mol_type = other DNA
gttccgtcttcgtctccgacg

SEQ ID NO: 25359 - DNA, 21 bp, synthetic construct
  misc_feature 1..21: note = Description of Artificial Sequence: Synthetic oligonucleotide
  source 1..21: mol_type = other DNA
acgacttcgccgccttcttcg

SEQ ID NO: 25360 - DNA, 21 bp, synthetic construct
  misc_feature 1..21: note = Description of Artificial Sequence: Synthetic oligonucleotide
  source 1..21: mol_type = other DNA
accctcagccccgacgccaaa

SEQ ID NO: 25361 - DNA, 21 bp, synthetic construct
  misc_feature 1..21: note = Description of Artificial Sequence: Synthetic oligonucleotide
  source 1..21: mol_type = other DNA
ggcctccccgccagcaacagc

SEQ ID NO: 25362 - DNA, 21 bp, synthetic construct
  misc_feature 1..21: note = Description of Artificial Sequence: Synthetic oligonucleotide
  source 1..21: mol_type = other DNA
gtcagcgtcaaacccgaaagc

SEQ ID NO: 25363 - DNA, 21 bp, synthetic construct
  misc_feature 1..21: note = Description of Artificial Sequence: Synthetic oligonucleotide
  source 1..21: mol_type = other DNA
gtgaagagtgagtcgcaggct

SEQ ID NO: 25364 - DNA, 21 bp, synthetic construct
  misc_feature 1..21: note = Description of Artificial Sequence: Synthetic oligonucleotide
  source 1..21: mol_type = other DNA
ctcaacagcaccagcctcagc

SEQ ID NO: 25365 - DNA, 21 bp, synthetic construct
  misc_feature 1..21: note = Description of Artificial Sequence: Synthetic oligonucleotide
  source 1..21: mol_type = other DNA
aagcagactcagtctcctacg

SEQ ID NO: 25366 - DNA, 21 bp, synthetic construct
  misc_feature 1..21: note = Description of Artificial Sequence: Synthetic oligonucleotide
  source 1..21: mol_type = other DNA
cacgcccaaagaaccaacgaa

SEQ ID NO: 25367 - DNA, 21 bp, synthetic construct
  misc_feature 1..21: note = Description of Artificial Sequence: Synthetic oligonucleotide
  source 1..21: mol_type = other DNA
ggcaccggcagagaaagaagc

SEQ ID NO: 25368 - DNA, 21 bp, synthetic construct
  misc_feature 1..21: note = Description of Artificial Sequence: Synthetic oligonucleotide
  source 1..21: mol_type = other DNA
gccagcaccagcaccaccagc

SEQ ID NO: 25369 - DNA, 21 bp, synthetic construct
  misc_feature 1..21: note = Description of Artificial Sequence: Synthetic oligonucleotide
  source 1..21: mol_type = other DNA
acgggtcagcgggatgtgact

SEQ ID NO: 25370 - DNA, 21 bp, synthetic construct
  misc_feature 1..21: note = Description of Artificial Sequence: Synthetic oligonucleotide
  source 1..21: mol_type = other DNA
agcggcgtcggcaccgtcgtc

SEQ ID NO: 25371 - DNA, 21 bp, synthetic construct
  misc_feature 1..21: note = Description of Artificial Sequence: Synthetic oligonucleotide
  source 1..21: mol_type = other DNA
catgcggcttctccttcgatt

SEQ ID NO: 25372 - DNA, 21 bp, synthetic construct
  misc_feature 1..21: note = Description of Artificial Sequence: Synthetic oligonucleotide
  source 1..21: mol_type = other DNA
ggcaccggcaccgacagccac

SEQ ID NO: 25373 - DNA, 21 bp, synthetic construct
  misc_feature 1..21: note = Description of Artificial Sequence: Synthetic oligonucleotide
  source 1..21: mol_type = other DNA
gggagtgcgagtagtaatggg

SEQ ID NO: 25374 - DNA, 21 bp, synthetic construct
  misc_feature 1..21: note = Description of Artificial Sequence: Synthetic oligonucleotide
  source 1..21: mol_type = other DNA
agccaaagcagccaaagcgcc

SEQ ID NO: 25375 - DNA, 21 bp, synthetic construct
  misc_feature 1..21: note = Description of Artificial Sequence: Synthetic oligonucleotide
  source 1..21: mol_type = other DNA
agcgaaagcgtcaaaggcagc

SEQ ID NO: 25376 - DNA, 21 bp, synthetic construct
  misc_feature 1..21: note = Description of Artificial Sequence: Synthetic oligonucleotide
  source 1..21: mol_type = other DNA
ctcaacagcagccccacccac

SEQ ID NO: 25377 - DNA, 21 bp, synthetic construct
  misc_feature 1..21: note = Description of Artificial Sequence: Synthetic oligonucleotide
  source 1..21: mol_type = other DNA
gacggcaaagacagaagcccc

SEQ ID NO: 25378 - DNA, 21 bp, synthetic construct
  misc_feature 1..21: note = Description of Artificial Sequence: Synthetic oligonucleotide
  source 1..21: mol_type = other DNA
gcgggtgtgacggagcgttcg

SEQ ID NO: 25379 - DNA, 21 bp, synthetic construct
  misc_feature 1..21: note = Description of Artificial Sequence: Synthetic oligonucleotide
  source 1..21: mol_type = other DNA
ggcaacgccaccacccaagcc

SEQ ID NO: 25380 - DNA, 21 bp, synthetic construct
  misc_feature 1..21: note = Description of Artificial Sequence: Synthetic oligonucleotide
  source 1..21: mol_type = other DNA
gggacggctcgttcgactctg

SEQ ID NO: 25381 - DNA, 21 bp, synthetic construct
  misc_feature 1..21: note = Description of Artificial Sequence: Synthetic oligonucleotide
  source 1..21: mol_type = other DNA
gggtctgataagccgcagaat

SEQ ID NO: 25382 - DNA, 21 bp, synthetic construct
  misc_feature 1..21: note = Description of Artificial Sequence: Synthetic oligonucleotide
  source 1..21: mol_type = other DNA
gtgaagaatgggagttcgaat

SEQ ID NO: 25383 - DNA, 21 bp, synthetic construct
  misc_feature 1..21: note = Description of Artificial Sequence: Synthetic oligonucleotide
  source 1..21: mol_type = other DNA
gtgactgatcgtccgtctgtc

SEQ ID NO: 25384 - DNA, 21 bp, synthetic construct
  misc_feature 1..21: note = Description of Artificial Sequence: Synthetic oligonucleotide
  source 1..21: mol_type = other DNA
agcaccggcagcaaacaagac

SEQ ID NO: 25385 - DNA, 21 bp, synthetic construct
  misc_feature 1..21: note = Description of Artificial Sequence: Synthetic oligonucleotide
  source 1..21: mol_type = other DNA
agccaaagcagcggcgtcaga

SEQ ID NO: 25386 - DNA, 21 bp, synthetic construct
  misc_feature 1..21: note = Description of Artificial Sequence: Synthetic oligonucleotide
  source 1..21: mol_type = other DNA
gggcctggggagaaggtgcag

SEQ ID NO: 25387 - DNA, 21 bp, synthetic construct
  misc_feature 1..21: note = Description of Artificial Sequence: Synthetic oligonucleotide
  source 1..21: mol_type = other DNA
tctcaggatcgtggtagtcag

SEQ ID NO: 25388 - DNA, 21 bp, synthetic construct
  misc_feature 1..21: note = Description of Artificial Sequence: Synthetic oligonucleotide
  source 1..21: mol_type = other DNA
caaagcagcggcaccggcacc

SEQ ID NO: 25389 - DNA, 21 bp, synthetic construct
  misc_feature 1..21: note = Description of Artificial Sequence: Synthetic oligonucleotide
  source 1..21: mol_type = other DNA
ggttctgttgataggtcttct

SEQ ID NO: 25390 - DNA, 21 bp, synthetic construct
  misc_feature 1..21: note = Description of Artificial Sequence: Synthetic oligonucleotide
  source 1..21: mol_type = other DNA
accaccgaccccgccagcaga

SEQ ID NO: 25391 - DNA, 21 bp, synthetic construct
  misc_feature 1..21: note = Description of Artificial Sequence: Synthetic oligonucleotide
  source 1..21: mol_type = other DNA
cttgcgtctactagtccgagt

SEQ ID NO: 25392 - DNA, 21 bp, synthetic construct
  misc_feature 1..21: note = Description of Artificial Sequence: Synthetic oligonucleotide
  source 1..21: mol_type = other DNA
cgtgatggttcgtcgtcgagg

SEQ ID NO: 25393 - DNA, 21 bp, synthetic construct
  misc_feature 1..21: note = Description of Artificial Sequence: Synthetic oligonucleotide
  source 1..21: mol_type = other DNA
gggacgactctgtcggagggt

SEQ ID NO: 25394 - DNA, 21 bp, synthetic construct
  misc_feature 1..21: note = Description of Artificial Sequence: Synthetic oligonucleotide
  source 1..21: mol_type = other DNA
tctgggctgaagggtactaat

SEQ ID NO: 25395 - DNA, 21 bp, synthetic construct
  misc_feature 1..21: note = Description of Artificial Sequence: Synthetic oligonucleotide
  source 1..21: mol_type = other DNA
aaaggcgtcaaacccgaatgc

SEQ ID NO: 25396 - DNA, 21 bp, synthetic construct
  misc_feature 1..21: note = Description of Artificial Sequence: Synthetic oligonucleotide
  source 1..21: mol_type = other DNA
aacggcctcgacaaaagcctc

SEQ ID NO: 25397 - DNA, 21 bp, synthetic construct
  misc_feature 1..21: note = Description of Artificial Sequence: Synthetic oligonucleotide
  source 1..21: mol_type = other DNA
acgggtactcattcgtctgtt

SEQ ID NO: 25398 - DNA, 21 bp, synthetic construct
  misc_feature 1..21: note = Description of Artificial Sequence: Synthetic oligonucleotide
  source 1..21: mol_type = other DNA
agacacgaagaaaaaatgagc

SEQ ID NO: 25399 - DNA, 21 bp, synthetic construct
  misc_feature 1..21: note = Description of Artificial Sequence: Synthetic oligonucleotide
  source 1..21: mol_type = other DNA
agtagggagagtaagggggat

SEQ ID NO: 25400 - DNA, 21 bp, synthetic construct
  misc_feature 1..21: note = Description of Artificial Sequence: Synthetic oligonucleotide
  source 1..21: mol_type = other DNA
atgaacagcaaagaacccagc

SEQ ID NO: 25401 - DNA, 21 bp, synthetic construct
  misc_feature 1..21: note = Description of Artificial Sequence: Synthetic oligonucleotide
  source 1..21: mol_type = other DNA
caggggggttctaatctgaag

SEQ ID NO: 25402 - DNA, 21 bp, synthetic construct
  misc_feature 1..21: note = Description of Artificial Sequence: Synthetic oligonucleotide
  source 1..21: mol_type = other DNA
catactactccggctactgtt

SEQ ID NO: 25403 - DNA, 21 bp, synthetic construct
  misc_feature 1..21: note = Description of Artificial Sequence: Synthetic oligonucleotide
  source 1..21: mol_type = other DNA
catgttagtactccgactagg

SEQ ID NO: 25404 - DNA, 21 bp, synthetic construct
  misc_feature 1..21: note = Description of Artificial Sequence: Synthetic oligonucleotide
  source 1..21: mol_type = other DNA
cgttcggataatccttctacg

SEQ ID NO: 25405 - DNA, 21 bp, synthetic construct
  misc_feature 1..21: note = Description of Artificial Sequence: Synthetic oligonucleotide
  source 1..21: mol_type = other DNA
gatatgcagcagaagccgtgt

SEQ ID NO: 25406 - DNA, 21 bp, synthetic construct
  misc_feature 1..21: note = Description of Artificial Sequence: Synthetic oligonucleotide
  source 1..21: mol_type = other DNA
ggtgattcgccgggtagtact

SEQ ID NO: 25407 - DNA, 21 bp, synthetic construct
  misc_feature 1..21: note = Description of Artificial Sequence: Synthetic oligonucleotide
  source 1..21: mol_type = other DNA
ggtttggctgaggggcagagt

SEQ ID NO: 25408 - DNA, 21 bp, synthetic construct
  misc_feature 1..21: note = Description of Artificial Sequence: Synthetic oligonucleotide
  source 1..21: mol_type = other DNA
gtcaaaaccgccagcaccgcc

SEQ ID NO: 25409 - DNA, 21 bp, synthetic construct
  misc_feature 1..21: note = Description of Artificial Sequence: Synthetic oligonucleotide
  source 1..21: mol_type = other DNA
gtcaacggcaaaagccccgcc

SEQ ID NO: 25410 - DNA, 21 bp, synthetic construct
  misc_feature 1..21: note = Description of Artificial Sequence: Synthetic oligonucleotide
  source 1..21: mol_type = other DNA
tcgaatgcgactgtgtctaag

SEQ ID NO: 25411 - DNA, 21 bp, synthetic construct
  misc_feature 1..21: note = Description of Artificial Sequence: Synthetic oligonucleotide
  source 1..21: mol_type = other DNA
tctaataagagtacgacgagt

SEQ ID NO: 25412 - DNA, 21 bp, synthetic construct
  misc_feature 1..21: note = Description of Artificial Sequence: Synthetic oligonucleotide
  source 1..21: mol_type = other DNA
tctactagtgttgggccggtt

SEQ ID NO: 25413 - DNA, 21 bp, synthetic construct
  misc_feature 1..21: note = Description of Artificial Sequence: Synthetic oligonucleotide
  source 1..21: mol_type = other DNA
tgcggcagcgtcagctgccaa

SEQ ID NO: 25414 - DNA, 21 bp, synthetic construct
  misc_feature 1..21: note = Description of Artificial Sequence: Synthetic oligonucleotide
  source 1..21: mol_type = other DNA
ttgggtacgcagagtatgaag

SEQ ID NO: 25415 - DNA, 21 bp, synthetic construct
  misc_feature 1..21: note = Description of Artificial Sequence: Synthetic oligonucleotide
  source 1..21: mol_type = other DNA
tttcgtggggataagagtgct

SEQ ID NO: 25416 - DNA, 21 bp, synthetic construct
  misc_feature 1..21: note = Description of Artificial Sequence: Synthetic oligonucleotide
  source 1..21: mol_type = other DNA
ttttctaaggagaagtctcag

SEQ ID NO: 25417 - DNA, 21 bp, synthetic construct
  misc_feature 1..21: note = Description of Artificial Sequence: Synthetic oligonucleotide
  source 1..21: mol_type = other DNA
agcccccaacaaagccacaac

SEQ ID NO: 25418 - DNA, 21 bp, synthetic construct
  misc_feature 1..21: note = Description of Artificial Sequence: Synthetic oligonucleotide
  source 1..21: mol_type = other DNA
caccaaaacagcgccagcgtc

SEQ ID NO: 25419 - DNA, 21 bp, synthetic construct
  misc_feature 1..21: note = Description of Artificial Sequence: Synthetic oligonucleotide
  source 1..21: mol_type = other DNA
aacgaaaacagccccagaggc

SEQ ID NO: 25420 - DNA, 21 bp, synthetic construct
  misc_feature 1..21: note = Description of Artificial Sequence: Synthetic oligonucleotide
  source 1..21: mol_type = other DNA
agcgtcaaccccaaagaaggc

SEQ ID NO: 25421 - DNA, 21 bp, synthetic construct
  misc_feature 1..21: note = Description of Artificial Sequence: Synthetic oligonucleotide
  source 1..21: mol_type = other DNA
ctggggtcttcttcggggggt

SEQ ID NO: 25422 - DNA, 21 bp, synthetic construct
  misc_feature 1..21: note = Description of Artificial Sequence: Synthetic oligonucleotide
  source 1..21: mol_type = other DNA
acgcgggcgaatccgggtaat

SEQ ID NO: 25423 - DNA, 21 bp, synthetic construct
  misc_feature 1..21: note = Description of Artificial Sequence: Synthetic oligonucleotide
  source 1..21: mol_type = other DNA
ctgaagaataatggtactggg

SEQ ID NO: 25424 - DNA, 21 bp, synthetic construct
  misc_feature 1..21: note = Description of Artificial Sequence: Synthetic oligonucleotide
  source 1..21: mol_type = other DNA
cttgatgggaagcagcgtgct

SEQ ID NO: 25425 - DNA, 21 bp, synthetic construct
  misc_feature 1..21: note = Description of Artificial Sequence: Synthetic oligonucleotide
  source 1..21: mol_type = other DNA
ctcaccaacggcagcgtcccc

SEQ ID NO: 25426 - DNA, 21 bp, synthetic construct
  misc_feature 1..21: note = Description of Artificial Sequence: Synthetic oligonucleotide
  source 1..21: mol_type = other DNA
agcaccgtcaaccacagcgtc

SEQ ID NO: 25427 - DNA, 21 bp, synthetic construct
  misc_feature 1..21: note = Description of Artificial Sequence: Synthetic oligonucleotide
  source 1..21: mol_type = other DNA
atgagcgccagcaccaacgtc

SEQ ID NO: 25428 - DNA, 21 bp, synthetic construct
  misc_feature 1..21: note = Description of Artificial Sequence: Synthetic oligonucleotide
  source 1..21: mol_type = other DNA
aaccaagccaccggcaccagc

SEQ ID NO: 25429 - DNA, 21 bp, synthetic construct
  misc_feature 1..21: note = Description of Artificial Sequence: Synthetic oligonucleotide
  source 1..21: mol_type = other DNA
ctcaacaccaacagcgtcatc

SEQ ID NO: 25430 - DNA, 21 bp, synthetic construct
  misc_feature 1..21: note = Description of Artificial Sequence: Synthetic oligonucleotide
  source 1..21: mol_type = other DNA
ggcaacggcaacgtcctcaga

SEQ ID NO: 25431 - DNA, 21 bp, synthetic construct
  misc_feature 1..21: note = Description of Artificial Sequence: Synthetic oligonucleotide
  source 1..21: mol_type = other DNA
agtgataagtcgtcggctcat

SEQ ID NO: 25432 - DNA, 21 bp, synthetic construct
  misc_feature 1..21: note = Description of Artificial Sequence: Synthetic oligonucleotide
  source 1..21: mol_type = other DNA
ctgggtacttcgccgggtcat

SEQ ID NO: 25433 - DNA, 21 bp, synthetic construct
  misc_feature 1..21: note = Description of Artificial Sequence: Synthetic oligonucleotide
  source 1..21: mol_type = other DNA
cttcctagtcctcagtcgggg

SEQ ID NO: 25434 - DNA, 21 bp, synthetic construct
  misc_feature 1..21: note = Description of Artificial Sequence: Synthetic oligonucleotide
  source 1..21: mol_type = other DNA
gacggcatgaccaaccacaaa

SEQ ID NO: 25435 - DNA, 21 bp, synthetic construct
  misc_feature 1..21: note = Description of Artificial Sequence: Synthetic oligonucleotide
  source 1..21: mol_type = other DNA
gagtctgatcataagtctggt

SEQ ID NO: 25436 - DNA, 21 bp, synthetic construct
  misc_feature 1..21: note = Description of Artificial Sequence: Synthetic oligonucleotide
  source 1..21: mol_type = other DNA
gccgccgaaaaaagcaacacc

SEQ ID NO: 25437 - DNA, 21 bp, synthetic construct
  misc_feature 1..21: note = Description of Artificial Sequence: Synthetic oligonucleotide
  source 1..21: mol_type = other DNA
ggcaccaaaaccgccagcgcc

SEQ ID NO: 25438 - DNA, 21 bp, synthetic construct
  misc_feature 1..21: note = Description of Artificial Sequence: Synthetic oligonucleotide
  source 1..21: mol_type = other DNA
ggcagcgacggcaccaaactc

SEQ ID NO: 25439 - DNA, 21 bp, synthetic construct
  misc_feature 1..21: note = Description of Artificial Sequence: Synthetic oligonucleotide
  source 1..21: mol_type = other DNA
ggtactcgtacggatccgaat

SEQ ID NO: 25440 - DNA, 21 bp, synthetic construct
  misc_feature 1..21: note = Description of Artificial Sequence: Synthetic oligonucleotide
  source 1..21: mol_type = other DNA
agcggccccggcaccgcccaa

SEQ ID NO: 25441 - DNA, 21 bp, synthetic construct
  misc_feature 1..21: note = Description of Artificial Sequence: Synthetic oligonucleotide
  source 1..21: mol_type = other DNA
agcgtcgaaagcaaccccgcc

SEQ ID NO: 25442 - DNA, 21 bp, synthetic construct
  misc_feature 1..21: note = Description of Artificial Sequence: Synthetic oligonucleotide
  source 1..21: mol_type = other DNA
cacggcggcagcgccgtcagc

SEQ ID NO: 25443 - DNA, 21 bp, synthetic construct
  misc_feature 1..21: note = Description of Artificial Sequence: Synthetic oligonucleotide
  source 1..21: mol_type = other DNA
ctcgacaacaaaagcaccagc

SEQ ID NO: 25444 - DNA, 21 bp, synthetic construct
  misc_feature 1..21: note = Description of Artificial Sequence: Synthetic oligonucleotide
  source 1..21: mol_type = other DNA
ctcggccaaagcaccctcagc

SEQ ID NO: 25445 - DNA, 21 bp, synthetic construct
  misc_feature 1..21: note = Description of Artificial Sequence: Synthetic oligonucleotide
  source 1..21: mol_type = other DNA
gctacgcctgctaaggatggg

SEQ ID NO: 25446 - DNA, 21 bp, synthetic construct
  misc_feature 1..21: note = Description of Artificial Sequence: Synthetic oligonucleotide
  source 1..21: mol_type = other DNA
gctcagggtgattctgttacg

SEQ ID NO: 25447 - DNA, 21 bp, synthetic construct
  misc_feature 1..21: note = Description of Artificial Sequence: Synthetic oligonucleotide
  source 1..21: mol_type = other DNA
gttcagcagggtagtgcgggt

SEQ ID NO: 25448 - DNA, 21 bp, synthetic construct
  misc_feature 1..21: note = Description of Artificial Sequence: Synthetic oligonucleotide
  source 1..21: mol_type = other DNA
tcggggaattctggtctggcg

SEQ ID NO: 25449 - DNA, 21 bp, synthetic construct
  misc_feature 1..21: note = Description of Artificial Sequence: Synthetic oligonucleotide
  source 1..21: mol_type = other DNA
gccaacgccccccccagaaac

SEQ ID NO: 25450 - DNA, 21 bp, synthetic construct
  misc_feature 1..21: note = Description of Artificial Sequence: Synthetic oligonucleotide
  source 1..21: mol_type = other DNA
aatccgtcgactaagagtgat

SEQ ID NO: 25451 - DNA, 21 bp, synthetic construct
  misc_feature 1..21: note = Description of Artificial Sequence: Synthetic oligonucleotide
  source 1..21: mol_type = other DNA
accaacagcaaagaccaaacc

SEQ ID NO: 25452 - DNA, 21 bp, synthetic construct
  misc_feature 1..21: note = Description of Artificial Sequence: Synthetic oligonucleotide
  source 1..21: mol_type = other DNA
accgccgaaggcaccagaatc

SEQ ID NO: 25453 - DNA, 21 bp, synthetic construct
  misc_feature 1..21: note = Description of Artificial Sequence: Synthetic oligonucleotide
  source 1..21: mol_type = other DNA
acgccgcgtgaggctggtggg

SEQ ID NO: 25454 - DNA, 21 bp, synthetic construct
  misc_feature 1..21: note = Description of Artificial Sequence: Synthetic oligonucleotide
  source 1..21: mol_type = other DNA
actcaggatcctcagtttaag

SEQ ID NO: 25455 - DNA, 21 bp, synthetic construct
  misc_feature 1..21: note = Description of Artificial Sequence: Synthetic oligonucleotide
  source 1..21: mol_type = other DNA
actttggggtcgagtactaat

SEQ ID NO: 25456 - DNA, 21 bp, synthetic construct
  misc_feature 1..21: note = Description of Artificial Sequence: Synthetic oligonucleotide
  source 1..21: mol_type = other DNA
attggtagtgggtcgtctccg

SEQ ID NO: 25457 - DNA, 21 bp, synthetic construct
  misc_feature 1..21: note = Description of Artificial Sequence: Synthetic oligonucleotide
  source 1..21: mol_type = other DNA
atttcggggtcggatacgaag

SEQ ID NO: 25458 - DNA, 21 bp, synthetic construct
  misc_feature 1..21: note = Description of Artificial Sequence: Synthetic oligonucleotide
  source 1..21: mol_type = other DNA
caaagcggcaacaacgccgcc

SEQ ID NO: 25459 - DNA, 21 bp, synthetic construct
  misc_feature 1..21: note = Description of Artificial Sequence: Synthetic oligonucleotide
  source 1..21: mol_type = other DNA
cagggtcgttcgcctgctact

SEQ ID NO: 25460 - DNA, 21 bp, synthetic construct
  misc_feature 1..21: note = Description of Artificial Sequence: Synthetic oligonucleotide
  source 1..21: mol_type = other DNA
gatactggggataagcagagt

SEQ ID NO: 25461 - DNA, 21 bp, synthetic construct
  misc_feature 1..21: note = Description of Artificial Sequence: Synthetic oligonucleotide
  source 1..21: mol_type = other DNA
gtcggccaagccagcacccaa

SEQ ID NO: 25462 - DNA, 21 bp, synthetic construct
  misc_feature 1..21: note = Description of Artificial Sequence: Synthetic oligonucleotide
  source 1..21: mol_type = other DNA
agcagcagcagcagcagcagc

SEQ ID NO: 25463 - DNA, 21 bp, synthetic construct
  misc_feature 1..21: note = Description of Artificial Sequence: Synthetic oligonucleotide
  source 1..21: mol_type = other DNA
actagtacgggtgttaatgcg

SEQ ID NO: 25464 - DNA, 21 bp, synthetic construct
  misc_feature 1..21: note = Description of Artificial Sequence: Synthetic oligonucleotide
  source 1..21: mol_type = other DNA
actatgggtactacgcatact

SEQ ID NO: 25465 - DNA, 21 bp, synthetic construct
  misc_feature 1..21: note = Description of Artificial Sequence: Synthetic oligonucleotide
  source 1..21: mol_type = other DNA
accggcgccaccaccgtcagc

SEQ ID NO: 25466 - DNA, 21 bp, synthetic construct
  misc_feature 1..21: note = Description of Artificial Sequence: Synthetic oligonucleotide
  source 1..21: mol_type = other DNA
accaaaaccaccagcaacagc

SEQ ID NO: 25467 - DNA, 21 bp, synthetic construct
  misc_feature 1..21: note = Description of Artificial Sequence: Synthetic oligonucleotide
  source 1..21: mol_type = other DNA
agcagcgacagaggcagaagc

SEQ ID NO: 25468 - DNA, 21 bp, synthetic construct
  misc_feature 1..21: note = Description of Artificial Sequence: Synthetic oligonucleotide
  source 1..21: mol_type = other DNA
agcgaagccagccccagccac

SEQ ID NO: 25469 - protein, 7 aa, synthetic construct
  REGION 1..7: note = Description of Artificial Sequence: Synthetic peptide
AAQPSLK

SEQ ID NO: 25470 - protein, 7 aa, synthetic construct
  REGION 1..7: note = Description of Artificial Sequence: Synthetic peptide
GARPVLQ

SEQ ID NO: 25471 - protein, 7 aa, synthetic construct
  REGION 1..7: note = Description of Artificial Sequence: Synthetic peptide
HMNRKLE

SEQ ID NO: 25472 - protein, 7 aa, synthetic construct
  REGION 1..7: note = Description of Artificial Sequence: Synthetic peptide
GLSPVLK

SEQ ID NO: 25473 - protein, 7 aa, synthetic construct
  REGION 1..7: note = Description of Artificial Sequence: Synthetic peptide
SGAGSAG

SEQ ID NO: 25474 - protein, 7 aa, synthetic construct
  REGION 1..7: note = Description of Artificial Sequence: Synthetic peptide
NNTQKNS

SEQ ID NO: 25475 - protein, 7 aa, synthetic construct
  REGION 1..7: note = Description of Artificial Sequence: Synthetic peptide
IRTSKMN

SEQ ID NO: 25476 - protein, 7 aa, synthetic construct
  REGION 1..7: note = Description of Artificial Sequence: Synthetic peptide
PSGETSK

SEQ ID NO: 25477 - protein, 7 aa, synthetic construct
  REGION 1..7: note = Description of Artificial Sequence: Synthetic peptide
MKNTTVV

SEQ ID NO: 25478 - protein, 7 aa, synthetic construct
  REGION 1..7: note = Description of Artificial Sequence: Synthetic peptide
SSTSSPY

SEQ ID NO: 25479 - protein, 7 aa, synthetic construct
  REGION 1..7: note = Description of Artificial Sequence: Synthetic peptide
TGHSLVS

SEQ ID NO: 25480 - protein, 7 aa, synthetic construct
  REGION 1..7: note = Description of Artificial Sequence: Synthetic peptide
YSDNKTT

SEQ ID NO: 25481 - protein, 7 aa, synthetic construct
  REGION 1..7: note = Description of Artificial Sequence: Synthetic peptide
VSDGISK

SEQ ID NO: 25482 - protein, 7 aa, synthetic construct
  REGION 1..7: note = Description of Artificial Sequence: Synthetic peptide
PGSGSNN

SEQ ID NO: 25483 - protein, 7 aa, synthetic construct
  REGION 1..7: note = Description of Artificial Sequence: Synthetic peptide
NNSKSQI

SEQ ID NO: 25484 - protein, 7 aa, synthetic construct
  REGION 1..7: note = Description of Artificial Sequence: Synthetic peptide
QFPGTLR

SEQ ID NO: 25485 - protein, 7 aa, synthetic construct
  REGION 1..7: note = Description of Artificial Sequence: Synthetic peptide
FPSNGRT

SEQ ID NO: 25486 - protein, 7 aa, synthetic construct
  REGION 1..7: note = Description of Artificial Sequence: Synthetic peptide
GAKESQS

SEQ ID NO: 25487 - protein, 7 aa, synthetic construct
  REGION 1..7: note = Description of Artificial Sequence: Synthetic peptide
RLSNAYA

SEQ ID NO: 25488 - protein, 7 aa, synthetic construct
  REGION 1..7: note = Description of Artificial Sequence: Synthetic peptide
SGSNNFL

SEQ ID NO: 25489 - protein, 7 aa, synthetic construct
  REGION 1..7: note = Description of Artificial Sequence: Synthetic peptide
HGGPGAV

SEQ ID NO: 25490 - protein, 7 aa, synthetic construct
  REGION 1..7: note = Description of Artificial Sequence: Synthetic peptide
SNSSQQK

SEQ ID NO: 25491 - protein, 7 aa, synthetic construct
  REGION 1..7: note = Description of Artificial Sequence: Synthetic peptide
LISTAQR

SEQ ID NO: 25492 - protein, 7 aa, synthetic construct
  REGION 1..7: note = Description of Artificial Sequence: Synthetic peptide
MDGRSTT

SEQ ID NO: 25493 - protein, 7 aa, synthetic construct
  REGION 1..7: note = Description of Artificial Sequence: Synthetic peptide
TTNTVSR

SEQ ID NO: 25494 - protein, 7 aa, synthetic construct
  REGION 1..7: note = Description of Artificial Sequence: Synthetic peptide
VPHGATS

SEQ ID NO: 25495 - protein, 7 aa, synthetic construct
  REGION 1..7: note = Description of Artificial Sequence: Synthetic peptide
PFSEMQK

SEQ ID NO: 25496 - protein, 7 aa, synthetic construct
  REGION 1..7: note = Description of Artificial Sequence: Synthetic peptide
GGDNKLT

SEQ ID NO: 25497 - protein, 7 aa, synthetic construct
  REGION 1..7: note = Description of Artificial Sequence: Synthetic peptide
NSHQKPS

SEQ ID NO: 25498 - protein, 7 aa, synthetic construct
  REGION 1..7: note = Description of Artificial Sequence: Synthetic peptide
MLSGSRN

SEQ ID NO: 25499 - protein, 7 aa, synthetic construct
  REGION 1..7: note = Description of Artificial Sequence: Synthetic peptide
SSGGNMS

SEQ ID NO: 25500 - protein, 7 aa, synthetic construct
  REGION 1..7: note = Description of Artificial Sequence: Synthetic peptide
KIASKSE

SEQ ID NO: 25501 - protein, 7 aa, synthetic construct
  REGION 1..7: note = Description of Artificial Sequence: Synthetic peptide
TASGNLS

SEQ ID NO: 25502 - protein, 7 aa, synthetic construct
  REGION 1..7: note = Description of Artificial Sequence: Synthetic peptide
TGQQPAT

SEQ ID NO: 25503 - protein, 7 aa, synthetic construct
  REGION 1..7: note = Description of Artificial Sequence: Synthetic peptide
TASGSNA

SEQ ID NO: 25504 - protein, 7 aa, synthetic construct
  REGION 1..7: note = Description of Artificial Sequence: Synthetic peptide
HGQTGMI

SEQ ID NO: 25505 - protein, 7 aa, synthetic construct
  REGION 1..7: note = Description of Artificial Sequence: Synthetic peptide
SASPSIK

SEQ ID NO: 25506 - protein, 7 aa, synthetic construct
  REGION 1..7: note = Description of Artificial Sequence: Synthetic peptide
VSTGSFT

SEQ ID NO: 25507 - protein, 7 aa, synthetic construct
  REGION 1..7: note = Description of Artificial Sequence: Synthetic peptide
GSYSNPT

SEQ ID NO: 25508 - protein, 7 aa, synthetic construct
  REGION 1..7: note = Description of Artificial Sequence: Synthetic peptide
TTYGGNR

SEQ ID NO: 25509 - protein, 7 aa, synthetic construct
  REGION 1..7: note = Description of Artificial Sequence: Synthetic peptide
LNGTPQS

SEQ ID NO: 25510 - protein, 7 aa, synthetic construct
  REGION 1..7: note = Description of Artificial Sequence: Synthetic peptide
TNVDKPF

SEQ ID NO: 25511 - protein, 7 aa, synthetic construct
  REGION 1..7: note = Description of Artificial Sequence: Synthetic peptide
MSSERPG

SEQ ID NO: 25512 - protein, 7 aa, synthetic construct
  REGION 1..7: note = Description of Artificial Sequence: Synthetic peptide
NGITKSS

SEQ ID NO: 25513 - protein, 7 aa, synthetic construct
  REGION 1..7: note = Description of Artificial Sequence: Synthetic peptide
NGSGQNK

SEQ ID NO: 25514 - protein, 7 aa, synthetic construct
  REGION 1..7: note = Description of Artificial Sequence: Synthetic peptide
REDTKMH

SEQ ID NO: 25515 - protein, 7 aa, synthetic construct
  REGION 1..7: note = Description of Artificial Sequence: Synthetic peptide
VRDERPS

SEQ ID NO: 25516 - protein, 7 aa, synthetic construct
  REGION 1..7: note = Description of Artificial Sequence: Synthetic peptide
AKTQSVN

SEQ ID NO: 25517 - protein, 7 aa, synthetic construct
  REGION 1..7: note = Description of Artificial Sequence: Synthetic peptide
LNLKPIN

SEQ ID NO: 25518 - protein, 7 aa, synthetic construct
  REGION 1..7: note = Description of Artificial Sequence: Synthetic peptide
DPRNSTS

SEQ ID NO: 25519 - protein, 7 aa, synthetic construct
  REGION 1..7: note = Description of Artificial Sequence: Synthetic peptide
TTGGHAL

SEQ ID NO: 25520 - protein, 7 aa, synthetic construct
  REGION 1..7: note = Description of Artificial Sequence: Synthetic peptide
NNPKNVV

SEQ ID NO: 25521 - protein, 7 aa, synthetic construct
  REGION 1..7: note = Description of Artificial Sequence: Synthetic peptide
EPLSKQS

SEQ ID NO: 25522 - protein, 7 aa, synthetic construct
  REGION 1..7: note = Description of Artificial Sequence: Synthetic peptide
NYNQAGL

SEQ ID NO: 25523 - protein, 7 aa, synthetic construct
  REGION 1..7: note = Description of Artificial Sequence: Synthetic peptide
SPAYDTR

SEQ ID NO: 25524 - protein, 7 aa, synthetic construct
  REGION 1..7: note = Description of Artificial Sequence: Synthetic peptide
SPTSPMN

SEQ ID NO: 25525 - protein, 7 aa, synthetic construct
  REGION 1..7: note = Description of Artificial Sequence: Synthetic peptide
NNRSGMG

SEQ ID NO: 25526 - protein, 7 aa, synthetic construct
  REGION 1..7: note = Description of Artificial Sequence: Synthetic peptide
GVKTNPL

SEQ ID NO: 25527 - protein, 7 aa, synthetic construct
  REGION 1..7: note = Description of Artificial Sequence: Synthetic peptide
SGTTTFG

SEQ ID NO: 25528 - protein, 7 aa, synthetic construct
  REGION 1..7: note = Description of Artificial Sequence: Synthetic peptide
NGSRQNQ

SEQ ID NO: 25529 - protein, 7 aa, synthetic construct
  REGION 1..7: note = Description of Artificial Sequence: Synthetic peptide
TPHDGQR

SEQ ID NO: 25530 - protein, 7 aa, synthetic construct
  REGION 1..7: note = Description of Artificial Sequence: Synthetic peptide
SITGNRT

SEQ ID NO: 25531 - protein, 7 aa, synthetic construct
  REGION 1..7: note = Description of Artificial Sequence: Synthetic peptide
NSASLNH

SEQ ID NO: 25532 - protein, 7 aa, synthetic construct
  REGION 1..7: note = Description of Artificial Sequence: Synthetic peptide
DIPAKTA

SEQ ID NO: 25533 - protein, 7 aa, synthetic construct
  REGION 1..7: note = Description of Artificial Sequence: Synthetic peptide
RTGHYQD

SEQ ID NO: 25534 - protein, 7 aa, synthetic construct
  REGION 1..7: note = Description of Artificial Sequence: Synthetic peptide
NANQNQM

SEQ ID NO: 25535 - protein, 7 aa, synthetic construct
  REGION 1..7: note = Description of Artificial Sequence: Synthetic peptide
ESATPIR

SEQ ID NO: 25536 - protein, 7 aa, synthetic construct
  REGION 1..7: note = Description of Artificial Sequence: Synthetic peptide
MPARNVS

SEQ ID NO: 25537 - protein, 7 aa, synthetic construct
  REGION 1..7: note = Description of Artificial Sequence: Synthetic peptide
PSNKTNS

SEQ ID NO: 25538 - protein, 7 aa, synthetic construct
  REGION 1..7: note = Description of Artificial Sequence: Synthetic peptide
SASNTSV

SEQ ID NO: 25539 - protein, 7 aa, synthetic construct
  REGION 1..7: note = Description of Artificial Sequence: Synthetic peptide
NSSHNSP

SEQ ID NO: 25540 - protein, 7 aa, synthetic construct
  REGION 1..7: note = Description of Artificial Sequence: Synthetic peptide
STATNVY

SEQ ID NO: 25541 - protein, 7 aa, synthetic construct
  REGION 1..7: note = Description of Artificial Sequence: Synthetic peptide
LNIANSK

SEQ ID NO: 25542 - protein, 7 aa, synthetic construct
  REGION 1..7: note = Description of Artificial Sequence: Synthetic peptide
HGSKPYI

SEQ ID NO: 25543 - protein, 7 aa, synthetic construct
  REGION 1..7: note = Description of Artificial Sequence: Synthetic peptide
DKTQKQL

SEQ ID NO: 25544 - protein, 7 aa, synthetic construct
  REGION 1..7: note = Description of Artificial Sequence: Synthetic peptide
QKTQTTS

SEQ ID NO: 25545 - protein, 7 aa, synthetic construct
  REGION 1..7: note = Description of Artificial Sequence: Synthetic peptide
TNAKQAI

SEQ ID NO: 25546 - protein, 7 aa, synthetic construct
  REGION 1..7: note = Description of Artificial Sequence: Synthetic peptide
LHDGQTR

SEQ ID NO: 25547 - protein, 7 aa, synthetic construct
  REGION 1..7: note = Description of Artificial Sequence: Synthetic peptide
NTQSYTS

SEQ ID NO: 25548 - protein, 7 aa, synthetic construct
  REGION 1..7: note = Description of Artificial Sequence: Synthetic peptide
QSHSGIS

SEQ ID NO: 25549 - protein, 7 aa, synthetic construct
  REGION 1..7: note = Description of Artificial Sequence: Synthetic peptide
GLGHSAF

SEQ ID NO: 25550 - protein, 7 aa, synthetic construct
  REGION 1..7: note = Description of Artificial Sequence: Synthetic peptide
SFSKGSS

SEQ ID NO: 25551 - protein, 7 aa, synthetic construct
  REGION 1..7: note = Description of Artificial Sequence: Synthetic peptide
GTFSTQS

SEQ ID NO: 25552 - protein, 7 aa, synthetic construct
  REGION 1..7: note = Description of Artificial Sequence: Synthetic peptide
SDSRNTN

SEQ ID NO: 25553 - protein, 7 aa, synthetic construct
  REGION 1..7: note = Description of Artificial Sequence: Synthetic peptide
TSNSNIA

SEQ ID NO: 25554 - protein, 7 aa, synthetic construct
  REGION 1..7: note = Description of Artificial Sequence: Synthetic peptide
MGIANIG

SEQ ID NO: 25555 - protein, 7 aa, synthetic construct
  REGION 1..7: note = Description of Artificial Sequence: Synthetic peptide
SSLGHND

SEQ ID NO: 25556 - protein, 7 aa, synthetic construct
  REGION 1..7: note = Description of Artificial Sequence: Synthetic peptide
RALSKGG

SEQ ID NO: 25557 - protein, 7 aa, synthetic construct
  REGION 1..7: note = Description of Artificial Sequence: Synthetic peptide
KTGDQMG

SEQ ID NO: 25558 - protein, 7 aa, synthetic construct
  REGION 1..7: note = Description of Artificial Sequence: Synthetic peptide
NMDGATR

SEQ ID NO: 25559 - protein, 7 aa, synthetic construct
  REGION 1..7: note = Description of Artificial Sequence: Synthetic peptide
ANGTKSS

SEQ ID NO: 25560 - protein, 7 aa, synthetic construct
  REGION 1..7: note = Description of Artificial Sequence: Synthetic peptide
LILPGNN

SEQ ID NO: 25561 - protein, 7 aa, synthetic construct
  REGION 1..7: note = Description of Artificial Sequence: Synthetic peptide
HVIAPQQ

SEQ ID NO: 25562 - protein, 7 aa, synthetic construct
  REGION 1..7: note = Description of Artificial Sequence: Synthetic peptide
NGSGQNL

SEQ ID NO: 25563 - protein, 7 aa, synthetic construct
  REGION 1..7: note = Description of Artificial Sequence: Synthetic peptide
IRSKESA

SEQ ID NO: 25564 - protein, 7 aa, synthetic construct
  REGION 1..7: note = Description of Artificial Sequence: Synthetic peptide
QQYAKQA

SEQ ID NO: 25565 - protein, 7 aa, synthetic construct
  REGION 1..7: note = Description of Artificial Sequence: Synthetic peptide
LGTSPMK

SEQ ID NO: 25566 - protein, 7 aa, synthetic construct
  REGION 1..7: note = Description of Artificial Sequence: Synthetic peptide
NLSGSRY

SEQ ID NO: 25567 - protein, 7 aa, synthetic construct
  REGION 1..7: note = Description of Artificial Sequence: Synthetic peptide
NSEARLS

SEQ ID NO: 25568 - protein, 7 aa, synthetic construct
  REGION 1..7: note = Description of Artificial Sequence: Synthetic peptide
PTGEKRL

SEQ ID NO: 25569 - protein, 7 aa, synthetic construct
  REGION 1..7: note = Description of Artificial Sequence: Synthetic peptide
DMTHLSN

SEQ ID NO: 25570 - protein, 7 aa, synthetic construct
  REGION 1..7: note = Description of Artificial Sequence: Synthetic peptide
PSTSGAM

SEQ ID NO: 25571 - protein, 7 aa, synthetic construct
  REGION 1..7: note = Description of Artificial Sequence: Synthetic peptide
QNVGGIR

SEQ ID NO: 25572 - protein, 7 aa, synthetic construct
  REGION 1..7: note = Description of Artificial Sequence: Synthetic peptide
SISKTQA

SEQ ID NO: 25573 - protein, 7 aa, synthetic construct
  REGION 1..7: note = Description of Artificial Sequence: Synthetic peptide
SSSPNVK

SEQ ID NO: 25574 - protein, 7 aa, synthetic construct
  REGION 1..7: note = Description of Artificial Sequence: Synthetic peptide
LAKNPVI

SEQ ID NO: 25575 - protein, 7 aa, synthetic construct
  REGION 1..7: note = Description of Artificial Sequence: Synthetic peptide
GQGVTAK

SEQ ID NO: 25576 - protein, 7 aa, synthetic construct
  REGION 1..7: note = Description of Artificial Sequence: Synthetic peptide
SASRSAY

SEQ ID NO: 25577 - protein, 7 aa, synthetic construct
  REGION 1..7: note = Description of Artificial Sequence: Synthetic peptide
SYGGQSR

SEQ ID NO: 25578 - protein, 7 aa, synthetic construct
  REGION 1..7: note = Description of Artificial Sequence: Synthetic peptide
GQSNVTL

SEQ ID NO: 25579 - protein, 7 aa, synthetic construct
  REGION 1..7: note = Description of Artificial Sequence: Synthetic peptide
TTSHMLK

SEQ ID NO: 25580 - protein, 7 aa, synthetic construct
  REGION 1..7: note = Description of Artificial Sequence: Synthetic peptide
VQGTGNT

SEQ ID NO: 25581 - protein, 7 aa, synthetic construct
  REGION 1..7: note = Description of Artificial Sequence: Synthetic peptide
WDSKTPR

SEQ ID NO: 25582 - protein, 7 aa, synthetic construct
  REGION 1..7: note = Description of Artificial Sequence: Synthetic peptide
LNQHSSI

SEQ ID NO: 25583 - protein, 7 aa, synthetic construct
  REGION 1..7: note = Description of Artificial Sequence: Synthetic peptide
GVLGSKN

SEQ ID NO: 25584 - protein, 7 aa, synthetic construct
  REGION 1..7: note = Description of Artificial Sequence: Synthetic peptide
EQGSGNH

SEQ ID NO: 25585 - protein, 7 aa, synthetic construct
  REGION 1..7: note = Description of Artificial Sequence: Synthetic peptide
CVSNVTN

SEQ ID NO: 25586 - protein, 7 aa, synthetic construct
  REGION 1..7: note = Description of Artificial Sequence: Synthetic peptide
SKPANNV

SEQ ID NO: 25587 - protein, 7 aa, synthetic construct
  REGION 1..7: note = Description of Artificial Sequence: Synthetic peptide
GHGNNGA

SEQ ID NO: 25588 - protein, 7 aa, synthetic construct
  REGION 1..7: note = Description of Artificial Sequence: Synthetic peptide
PAHQKLS

SEQ ID NO: 25589 - protein, 7 aa, synthetic construct
  REGION 1..7: note = Description of Artificial Sequence: Synthetic peptide
NANSRPV

SEQ ID NO: 25590 - protein, 7 aa, synthetic construct
  REGION 1..7: note = Description of Artificial Sequence: Synthetic peptide
TATQKGQ

SEQ ID NO: 25591 - protein, 7 aa, synthetic construct
  REGION 1..7: note = Description of Artificial Sequence: Synthetic peptide
DIMSPLK

SEQ ID NO: 25592 - protein, 7 aa, synthetic construct
  REGION 1..7: note = Description of Artificial Sequence: Synthetic peptide
FLKGTGS

SEQ ID NO: 25593 - protein, 7 aa, synthetic construct
  REGION 1..7: note = Description of Artificial Sequence: Synthetic peptide
HANSPAT

SEQ ID NO: 25594 - protein, 7 aa, synthetic construct
  REGION 1..7: note = Description of Artificial Sequence: Synthetic peptide
GDSKSTW

SEQ ID NO: 25595 - protein, 7 aa, synthetic construct
  REGION 1..7: note = Description of Artificial Sequence: Synthetic peptide
RVVTNNL

SEQ ID NO: 25596 - protein, 7 aa, synthetic construct
  REGION 1..7: note = Description of Artificial Sequence: Synthetic peptide
ATNNGSK

SEQ ID NO: 25597 - protein, 7 aa, synthetic construct
  REGION 1..7: note = Description of Artificial Sequence: Synthetic peptide
HNNSKSA

SEQ ID NO: 25598 - protein, 7 aa, synthetic construct
  REGION 1..7: note = Description of Artificial Sequence: Synthetic peptide
TQQNGRN

SEQ ID NO: 25599 - protein, 7 aa, synthetic construct
  REGION 1..7: note = Description of Artificial Sequence: Synthetic peptide
ETTTPRK

SEQ ID NO: 25600 - protein, 7 aa, synthetic construct
  REGION 1..7: note = Description of Artificial Sequence: Synthetic peptide
NAGPNYD

SEQ ID NO: 25601 - protein, 7 aa, synthetic construct
  REGION 1..7: note = Description of Artificial Sequence: Synthetic peptide
DPLRNSN

SEQ ID NO: 25602 - protein, 7 aa, synthetic construct
  REGION 1..7: note = Description of Artificial Sequence: Synthetic peptide
DQNRVPY

SEQ ID NO: 25603 - protein, 7 aa, synthetic construct
  REGION 1..7: note = Description of Artificial Sequence: Synthetic peptide
SYGKESS

SEQ ID NO: 25604 - protein, 7 aa, synthetic construct
  REGION 1..7: note = Description of Artificial Sequence: Synthetic peptide
LDRSTYG

SEQ ID NO: 25605 - protein, 7 aa, synthetic construct
  REGION 1..7: note = Description of Artificial Sequence: Synthetic peptide
SRKNNTL

SEQ ID NO: 25606 - protein, 7 aa, synthetic construct
  REGION 1..7: note = Description of Artificial Sequence: Synthetic peptide
AISPTYM

SEQ ID NO: 25607 - protein, 7 aa, synthetic construct
  REGION 1..7: note = Description of Artificial Sequence: Synthetic peptide
YAMERVG

SEQ ID NO: 25608 - protein, 7 aa, synthetic construct
  REGION 1..7: note = Description of Artificial Sequence: Synthetic peptide
ELMNKSK

SEQ ID NO: 25609 - protein, 7 aa, synthetic construct
  REGION 1..7: note = Description of Artificial Sequence: Synthetic peptide
HDSKVIS

SEQ ID NO: 25610 - protein, 7 aa, synthetic construct
  REGION 1..7: note = Description of Artificial Sequence: Synthetic peptide
ARASSNS

SEQ ID NO: 25611 - protein, 7 aa, synthetic construct
  REGION 1..7: note = Description of Artificial Sequence: Synthetic peptide
ASRSTNP

SEQ ID NO: 25612 - protein, 7 aa, synthetic construct
  REGION 1..7: note = Description of Artificial Sequence: Synthetic peptide
SSLEKSN

SEQ ID NO: 25613 - protein, 7 aa, synthetic construct
  REGION 1..7: note = Description of Artificial Sequence: Synthetic peptide
SDQVRSA

SEQ ID NO: 25614 - protein, 7 aa, synthetic construct
  REGION 1..7: note = Description of Artificial Sequence: Synthetic peptide
LINPAGS

SEQ ID NO: 25615 - protein, 7 aa, synthetic construct
  REGION 1..7: note = Description of Artificial Sequence: Synthetic peptide
YGNPRQA

SEQ ID NO: 25616 - protein, 7 aa, synthetic construct
  REGION 1..7: note = Description of Artificial Sequence: Synthetic peptide
DINRQRT

SEQ ID NO: 25617 - protein, 7 aa, synthetic construct
  REGION 1..7: note = Description of Artificial Sequence: Synthetic peptide
LASTYSG

SEQ ID NO: 25618 - protein, 7 aa, synthetic construct
  REGION 1..7: note = Description of Artificial Sequence: Synthetic peptide
VPSQNRA

SEQ ID NO: 25619 - protein, 7 aa, synthetic construct
  REGION 1..7: note = Description of Artificial Sequence: Synthetic peptide
PRETHKQ

SEQ ID NO: 25620 - protein, 7 aa, synthetic construct
  REGION 1..7: note = Description of Artificial Sequence: Synthetic peptide
DGGNQRS

SEQ ID NO: 25621 - protein, 7 aa, synthetic construct
  REGION 1..7: note = Description of Artificial Sequence: Synthetic peptide
MGGVTSS

SEQ ID NO: 25622 - protein, 7 aa, synthetic construct
  REGION 1..7: note = Description of Artificial Sequence: Synthetic peptide
NNLAGSK

SEQ ID NO: 25623 - protein, 7 aa, synthetic construct
  REGION 1..7: note = Description of Artificial Sequence: Synthetic peptide
QPNSASH

SEQ ID NO: 25624 - protein, 7 aa, synthetic construct
  REGION 1..7: note = Description of Artificial Sequence: Synthetic peptide
PNGAHVT

SEQ ID NO: 25625 - protein, 7 aa, synthetic construct
  REGION 1..7: note = Description of Artificial Sequence: Synthetic peptide
SSDNRGL

SEQ ID NO: 25626 - protein, 7 aa, synthetic construct
  REGION 1..7: note = Description of Artificial Sequence: Synthetic peptide
ENTKTYS

SEQ ID NO: 25627 - protein, 7 aa, synthetic construct
  REGION 1..7: note = Description of Artificial Sequence: Synthetic peptide
NGSGQYQ

SEQ ID NO: 25628 - protein, 7 aa, synthetic construct
  REGION 1..7: note = Description of Artificial Sequence: Synthetic peptide
DPGTRKS

SEQ ID NO: 25629 - protein, 7 aa, synthetic construct
  REGION 1..7: note = Description of Artificial Sequence: Synthetic peptide
FRTQSTK

SEQ ID NO: 25630 - protein, 7 aa, synthetic construct
  REGION 1..7: note = Description of Artificial Sequence: Synthetic peptide
GVINNER

SEQ ID NO: 25631 - protein, 7 aa, synthetic construct
  REGION 1..7: note = Description of Artificial Sequence: Synthetic peptide
AAAVKGG

SEQ ID NO: 25632 - protein, 7 aa, synthetic construct
  REGION 1..7: note = Description of Artificial Sequence: Synthetic peptide
SGNDKNN

SEQ ID NO: 25633 - protein, 7 aa, synthetic construct
  REGION 1..7: note = Description of Artificial Sequence: Synthetic peptide
KDNTPGR

SEQ ID NO: 25634 - protein, 7 aa, synthetic construct
  REGION 1..7: note = Description of Artificial Sequence: Synthetic peptide
LMQTHGS

SEQ ID NO: 25635 - protein, 7 aa, synthetic construct
  REGION 1..7: note = Description of Artificial Sequence: Synthetic peptide
QVPATNR

SEQ ID NO: 25636 - protein, 7 aa, synthetic construct
  REGION 1..7: note = Description of Artificial Sequence: Synthetic peptide
ATRDSHS

SEQ ID NO: 25637 - protein, 7 aa, synthetic construct
  REGION 1..7: note = Description of Artificial Sequence: Synthetic peptide
MGVGMNG

SEQ ID NO: 25638 - protein, 7 aa, synthetic construct
  REGION 1..7: note = Description of Artificial Sequence: Synthetic peptide
GLSSGKT

SEQ ID NO: 25639 - protein, 7 aa, synthetic construct
  REGION 1..7: note = Description of Artificial Sequence: Synthetic peptide
RPSGSEP

SEQ ID NO: 25640 - protein, 7 aa, synthetic construct
  REGION 1..7: note = Description of Artificial Sequence: Synthetic peptide
GDTRLNA

SEQ ID NO: 25641 - protein, 7 aa, synthetic construct
  REGION 1..7: note = Description of Artificial Sequence: Synthetic peptide
DSGSSTK

SEQ ID NO: 25642 - protein, 7 aa, synthetic construct
  REGION 1..7: note = Description of Artificial Sequence: Synthetic peptide
PTLGTTK

SEQ ID NO: 25643 - protein, 7 aa, synthetic construct
  REGION 1..7: note = Description of Artificial Sequence: Synthetic peptide
DGKNNNV

SEQ ID NO: 25644 - protein, 7 aa, synthetic construct
  REGION 1..7: note = Description of Artificial Sequence: Synthetic peptide
PSVANVM

SEQ ID NO: 25645 - protein, 7 aa, synthetic construct
  REGION 1..7: note = Description of Artificial Sequence: Synthetic peptide
LGPGKNT

SEQ ID NO: 25646 - protein, 7 aa, synthetic construct
  REGION 1..7: note = Description of Artificial Sequence: Synthetic peptide
RNQLVSG

SEQ ID NO: 25647 - protein, 7 aa, synthetic construct
  REGION 1..7: note = Description of Artificial Sequence: Synthetic peptide
RDVDVRN

SEQ ID NO: 25648 - protein, 7 aa, synthetic construct
  REGION 1..7: note = Description of Artificial Sequence: Synthetic peptide
DRTNTQR

SEQ ID NO: 25649 - protein, 7 aa, synthetic construct
  REGION 1..7: note = Description of Artificial Sequence: Synthetic peptide
PQNNQAH

SEQ ID NO: 25650 - protein, 7 aa, synthetic construct
  REGION 1..7: note = Description of Artificial Sequence: Synthetic peptide
LPSGNTS

SEQ ID NO: 25651 - protein, 7 aa, synthetic construct
  REGION 1..7: note = Description of Artificial Sequence: Synthetic peptide
SRANSVP

SEQ ID NO: 25652 - protein, 7 aa, synthetic construct
  REGION 1..7: note = Description of Artificial Sequence: Synthetic peptide
ASSRESL

SEQ ID NO: 25653 - protein, 7 aa, synthetic construct
  REGION 1..7: note = Description of Artificial Sequence: Synthetic peptide
RVTDDHL

SEQ ID NO: 25654 - protein, 7 aa, synthetic construct
  REGION 1..7: note = Description of Artificial Sequence: Synthetic peptide
AVNELHD

SEQ ID NO: 25655 - protein, 7 aa, synthetic construct
  REGION 1..7: note = Description of Artificial Sequence: Synthetic peptide
SGSLSSA

SEQ ID NO: 25656 - protein, 7 aa, synthetic construct
  REGION 1..7: note = Description of Artificial Sequence: Synthetic peptide
NGTRQNQ

SEQ ID NO: 25657 - protein, 7 aa, synthetic construct
  REGION 1..7: note = Description of Artificial Sequence: Synthetic peptide
AATNSLT

SEQ ID NO: 25658 - protein, 7 aa, synthetic construct
  REGION 1..7: note = Description of Artificial Sequence: Synthetic peptide
STHHPAS

SEQ ID NO: 25659 - protein, 7 aa, synthetic construct
  REGION 1..7: note = Description of Artificial Sequence: Synthetic peptide
APLQSNL

SEQ ID NO: 25660 - protein, 7 aa, synthetic construct
  REGION 1..7: note = Description of Artificial Sequence: Synthetic peptide
SGGKSAL

SEQ ID NO: 25661 - protein, 7 aa, synthetic construct
  REGION 1..7: note = Description of Artificial Sequence: Synthetic peptide
KLVNSNG

SEQ ID NO: 25662 - protein, 7 aa, synthetic construct
  REGION 1..7: note = Description of Artificial Sequence: Synthetic peptide
SITDRHS

SEQ ID NO: 25663 - protein, 7 aa, synthetic construct
  REGION 1..7: note = Description of Artificial Sequence: Synthetic peptide
GCITNCS

SEQ ID NO: 25664 - protein, 7 aa, synthetic construct
  REGION 1..7: note = Description of Artificial Sequence: Synthetic peptide
TPGASLS

SEQ ID NO: 25665 - protein, 7 aa, synthetic construct
  REGION 1..7: note = Description of Artificial Sequence: Synthetic peptide
SSISRTS

SEQ ID NO: 25666 - protein, 7 aa, synthetic construct
  REGION 1..7: note = Description of Artificial Sequence: Synthetic peptide
NSVVSVS

SEQ ID NO: 25667 - protein, 7 aa, synthetic construct
  REGION 1..7: note = Description of Artificial Sequence: Synthetic peptide
NGSTSSG

SEQ ID NO: 25668 - protein, 7 aa, synthetic construct
  REGION 1..7: note = Description of Artificial Sequence: Synthetic peptide
DMVSPRN

SEQ ID NO: 25669 - protein, 7 aa, synthetic construct
  REGION 1..7: note = Description of Artificial Sequence: Synthetic peptide
RVRADDD

SEQ ID NO: 25670 - protein, 7 aa, synthetic construct
  REGION 1..7: note = Description of Artificial Sequence: Synthetic peptide
AQINTPT

SEQ ID NO: 25671 - protein, 7 aa, synthetic construct
  REGION 1..7: note = Description of Artificial Sequence: Synthetic peptide
AGSNSQG

SEQ ID NO: 25672 - protein, 7 aa, synthetic construct
  REGION 1..7: note = Description of Artificial Sequence: Synthetic peptide
DSIGSSK

SEQ ID NO: 25673 - protein, 7 aa, synthetic construct
  REGION 1..7: note = Description of Artificial Sequence: Synthetic peptide
NPAHGLN

SEQ ID NO: 25674 - protein, 7 aa, synthetic construct
  REGION 1..7: note = Description of Artificial Sequence: Synthetic peptide
NGVQQPK

SEQ ID NO: 25675 - protein, 7 aa, synthetic construct
  REGION 1..7: note = Description of Artificial Sequence: Synthetic peptide
RITSSNQ

SEQ ID NO: 25676 - protein, 7 aa, synthetic construct
  REGION 1..7: note = Description of Artificial Sequence: Synthetic peptide
IGNKQSQ

SEQ ID NO: 25677 - protein, 7 aa, synthetic construct
  REGION 1..7: note = Description of Artificial Sequence: Synthetic peptide
PTTLKHD

SEQ ID NO: 25678 - protein, 7 aa, synthetic construct
  REGION 1..7: note = Description of Artificial Sequence: Synthetic peptide
HTTGMLG

SEQ ID NO: 25679 - protein, 7 aa, synthetic construct
  REGION 1..7: note = Description of Artificial Sequence: Synthetic peptide
GSGHGTN

SEQ ID NO: 25680 - protein, 7 aa, synthetic construct
  REGION 1..7: note = Description of Artificial Sequence: Synthetic peptide
VTNSSLV

SEQ ID NO: 25681 - protein, 7 aa, synthetic construct
  REGION 1..7: note = Description of Artificial Sequence: Synthetic peptide
GTSNRYT

SEQ ID NO: 25682 - protein, 7 aa, synthetic construct
  REGION 1..7: note = Description of Artificial Sequence: Synthetic peptide
TPITPMT

SEQ ID NO: 25683 - protein, 7 aa, synthetic construct
  REGION 1..7: note = Description of Artificial Sequence: Synthetic peptide
SANTRVQ

SEQ ID NO: 25684 - protein, 7 aa, synthetic construct
  REGION 1..7: note = Description of Artificial Sequence: Synthetic peptide
PMTNLGT

SEQ ID NO: 25685 - protein, 7 aa, synthetic construct
  REGION 1..7: note = Description of Artificial Sequence: Synthetic peptide
NAQGTAK

SEQ ID NO: 25686 - protein, 7 aa, synthetic construct
  REGION 1..7: note = Description of Artificial Sequence: Synthetic peptide
ATTKEGI

SEQ ID NO: 25687 - protein, 7 aa, synthetic construct
  REGION 1..7: note = Description of Artificial Sequence: Synthetic peptide
NGISKSN

SEQ ID NO: 25688 - protein, 7 aa, synthetic construct
  REGION 1..7: note = Description of Artificial Sequence: Synthetic peptide
STHKNSP

SEQ ID NO: 25689 - protein, 7 aa, synthetic construct
  REGION 1..7: note = Description of Artificial Sequence: Synthetic peptide
NAFTTTV

SEQ ID NO: 25690 - protein, 7 aa, synthetic construct
  REGION 1..7: note = Description of Artificial Sequence: Synthetic peptide
YLSERNC

SEQ ID NO: 25691 - protein, 7 aa, synthetic construct
  REGION 1..7: note = Description of Artificial Sequence: Synthetic peptide
PVNLQNG

SEQ ID NO: 25692 - protein, 7 aa, synthetic construct
  REGION 1..7: note = Description of Artificial Sequence: Synthetic peptide
AYGKGSS

SEQ ID NO: 25693 - protein, 7 aa, synthetic construct
  REGION 1..7: note = Description of Artificial Sequence: Synthetic peptide
RLTQSSQ

SEQ ID NO: 25694 - protein, 7 aa, synthetic construct
  REGION 1..7: note = Description of Artificial Sequence: Synthetic peptide
ATGRSPN

SEQ ID NO: 25695 - protein, 7 aa, synthetic construct
  REGION 1..7: note = Description of Artificial Sequence: Synthetic peptide
GRQVTPT

SEQ ID NO: 25696 - protein, 7 aa, synthetic construct
  REGION 1..7: note = Description of Artificial Sequence: Synthetic peptide
SPGRTQS

SEQ ID NO: 25697 - protein, 7 aa, synthetic construct
  REGION 1..7: note = Description of Artificial Sequence: Synthetic peptide
DGSSRVG

SEQ ID NO: 25698 - protein, 7 aa, synthetic construct
  REGION 1..7: note = Description of Artificial Sequence: Synthetic peptide
MSTGVSP

SEQ ID NO: 25699 - protein, 7 aa, synthetic construct
  REGION 1..7: note = Description of Artificial Sequence: Synthetic peptide
RQVSTPL

SEQ ID NO: 25700 - protein, 7 aa, synthetic construct
  REGION 1..7: note = Description of Artificial Sequence: Synthetic peptide
RTNKSVT

SEQ ID NO: 25701 - protein, 7 aa, synthetic construct
  REGION 1..7: note = Description of Artificial Sequence: Synthetic peptide
YGSDKSI

SEQ ID NO: 25702 - protein, 7 aa, synthetic construct
  REGION 1..7: note = Description of Artificial Sequence: Synthetic peptide
ITTRSSM

SEQ ID NO: 25703 - protein, 7 aa, synthetic construct
  REGION 1..7: note = Description of Artificial Sequence: Synthetic peptide
DTITSRG

SEQ ID NO: 25704 - protein, 7 aa, synthetic construct
  REGION 1..7: note = Description of Artificial Sequence: Synthetic peptide
DSRNNMT

SEQ ID NO: 25705 - protein, 7 aa, synthetic construct
  REGION 1..7: note = Description of Artificial Sequence: Synthetic peptide
YPRQRTE

SEQ ID NO: 25706 - protein, 7 aa, synthetic construct
  REGION 1..7: note = Description of Artificial Sequence: Synthetic peptide
YVPRSSL

SEQ ID NO: 25707 - protein, 7 aa, synthetic construct
  REGION 1..7: note = Description of Artificial Sequence: Synthetic peptide
PLNTHQS

SEQ ID NO: 25708 - protein, 7 aa, synthetic construct
  REGION 1..7: note = Description of Artificial Sequence: Synthetic peptide
VPGNLPS

SEQ ID NO: 25709 - protein, 7 aa, synthetic construct
  REGION 1..7: note = Description of Artificial Sequence: Synthetic peptide
ALTGKLS

SEQ ID NO: 25710 - protein, 7 aa, synthetic construct
  REGION 1..7: note = Description of Artificial Sequence: Synthetic peptide
PVLNKAT

SEQ ID NO: 25711 - protein, 7 aa, synthetic construct
  REGION 1..7: note = Description of Artificial Sequence: Synthetic peptide
HLAYDNN

SEQ ID NO: 25712 - protein, 7 aa, synthetic construct
  REGION 1..7: note = Description of Artificial Sequence: Synthetic peptide
DSSERIR

SEQ ID NO: 25713 - protein, 7 aa, synthetic construct
  REGION 1..7: note = Description of Artificial Sequence: Synthetic peptide
SFSGANK

SEQ ID NO: 25714 - protein, 7 aa, synthetic construct
  REGION 1..7: note = Description of Artificial Sequence: Synthetic peptide
LKANATG

SEQ ID NO: 25715 - protein, 7 aa, synthetic construct
  REGION 1..7: note = Description of Artificial Sequence: Synthetic peptide
MPHPSSK

SEQ ID NO: 25716 - protein, 7 aa, synthetic construct
  REGION 1..7: note = Description of Artificial Sequence: Synthetic peptide
QDKGNAG

SEQ ID NO: 25717 - protein, 7 aa, synthetic construct
  REGION 1..7: note = Description of Artificial Sequence: Synthetic peptide
INFSGTR

SEQ ID NO: 25718 - protein, 7 aa, synthetic construct
  REGION 1..7: note = Description of Artificial Sequence: Synthetic peptide
QTSSHAY

SEQ ID NO: 25719 - protein, 7 aa, synthetic construct
  REGION 1..7: note = Description of Artificial Sequence: Synthetic peptide
SHSVTPG

SEQ ID NO: 25720 - protein, 7 aa, synthetic construct
  REGION 1..7: note = Description of Artificial Sequence: Synthetic peptide
IGITNHS

SEQ ID NO: 25721 - protein, 7 aa, synthetic construct
  REGION 1..7: note = Description of Artificial Sequence: Synthetic peptide
HYTGKQN

SEQ ID NO: 25722 - protein, 7 aa, synthetic construct
  REGION 1..7: note = Description of Artificial Sequence: Synthetic peptide
QRVSSTL

SEQ ID NO: 25723 - protein, 7 aa, synthetic construct
  REGION 1..7: note = Description of Artificial Sequence: Synthetic peptide
GLAGSLQ

SEQ ID NO: 25724 - protein, 7 aa, synthetic construct
  REGION 1..7: note = Description of Artificial Sequence: Synthetic peptide
DLSMQTR

SEQ ID NO: 25725 - protein, 7 aa, synthetic construct
  REGION 1..7: note = Description of Artificial Sequence: Synthetic peptide
TPAGPNK

SEQ ID NO: 25726 - protein, 7 aa, synthetic construct
  REGION 1..7: note = Description of Artificial Sequence: Synthetic peptide
VRISTQA

SEQ ID NO: 25727 - protein, 7 aa, synthetic construct
  REGION 1..7: note = Description of Artificial Sequence: Synthetic peptide
VLAGSNT

SEQ ID NO: 25728 - protein, 7 aa, synthetic construct
  REGION 1..7: note = Description of Artificial Sequence: Synthetic peptide
ASSKGLT

SEQ ID NO: 25729 - protein, 7 aa, synthetic construct
  REGION 1..7: note = Description of Artificial Sequence: Synthetic peptide
RTLNLNT

SEQ ID NO: 25730 - protein, 7 aa, synthetic construct
  REGION 1..7: note = Description of Artificial Sequence: Synthetic peptide
NREQLRD

SEQ ID NO: 25731 - protein, 7 aa, synthetic construct
  REGION 1..7: note = Description of Artificial Sequence: Synthetic peptide
PGEVHRS

SEQ ID NO: 25732 - protein, 7 aa, synthetic construct
  REGION 1..7: note = Description of Artificial Sequence: Synthetic peptide
SIHSDRT

SEQ ID NO: 25733 - protein, 7 aa, synthetic construct
  REGION 1..7: note = Description of Artificial Sequence: Synthetic peptide
YATDGLK

SEQ ID NO: 25734 - protein, 7 aa, synthetic construct
  REGION 1..7: note = Description of Artificial Sequence: Synthetic peptide
DTNKTSY

SEQ ID NO: 25735 - protein, 7 aa, synthetic construct
  REGION 1..7: note = Description of Artificial Sequence: Synthetic peptide
YGSRPPS

SEQ ID NO: 25736 - protein, 7 aa, synthetic construct
  REGION 1..7: note = Description of Artificial Sequence: Synthetic peptide
PLINRTM

SEQ ID NO: 25737 - protein, 7 aa, synthetic construct
  REGION 1..7: note = Description of Artificial Sequence: Synthetic peptide
SKSVAQS

SEQ ID NO: 25738 - protein, 7 aa, synthetic construct
  REGION 1..7: note = Description of Artificial Sequence: Synthetic peptide
RDPTPVR

SEQ ID NO: 25739 - protein, 7 aa, synthetic construct
  REGION 1..7: note = Description of Artificial Sequence: Synthetic peptide
YGSESNK

SEQ ID NO: 25740 - protein, 7 aa, synthetic construct
  REGION 1..7: note = Description of Artificial Sequence: Synthetic peptide
DRVLSQG

SEQ ID NO: 25741 - protein, 7 aa, synthetic construct
  REGION 1..7: note = Description of Artificial Sequence: Synthetic peptide
LVASGQK

SEQ ID NO: 25742 - protein, 7 aa, synthetic construct
  REGION 1..7: note = Description of Artificial Sequence: Synthetic peptide
NSSDSLT

SEQ ID NO: 25743 - protein, 7 aa, synthetic construct
  REGION 1..7: note = Description of Artificial Sequence: Synthetic peptide
GASGKIG

SEQ ID NO: 25744 - protein, 7 aa, synthetic construct
  REGION 1..7: note = Description of Artificial Sequence: Synthetic peptide
NTTGHAG

SEQ ID NO: 25745 - protein, 7 aa, synthetic construct
  REGION 1..7: note = Description of Artificial Sequence: Synthetic peptide
YRVGSIS

SEQ ID NO: 25746 - protein, 7 aa, synthetic construct
  REGION 1..7: note = Description of Artificial Sequence: Synthetic peptide
VTLPPNA

SEQ ID NO: 25747 - protein, 7 aa, synthetic construct
  REGION 1..7: note = Description of Artificial Sequence: Synthetic peptide
CATRASY

SEQ ID NO: 25748 - protein, 7 aa, synthetic construct
  REGION 1..7: note = Description of Artificial Sequence: Synthetic peptide
SISHSSS

SEQ ID NO: 25749 - protein, 7 aa, synthetic construct
  REGION 1..7: note = Description of Artificial Sequence: Synthetic peptide
CNNARVS

SEQ ID NO: 25750 - protein, 7 aa, synthetic construct
  REGION 1..7: note = Description of Artificial Sequence: Synthetic peptide
TVPGRST

SEQ ID NO: 25751 - protein, 7 aa, synthetic construct
  REGION 1..7: note = Description of Artificial Sequence: Synthetic peptide
NALPNRG

SEQ ID NO: 25752 - protein, 7 aa, synthetic construct
  REGION 1..7: note = Description of Artificial Sequence: Synthetic peptide
NPSEKML

SEQ ID NO: 25753 - protein, 7 aa, synthetic construct
  REGION 1..7: note = Description of Artificial Sequence: Synthetic peptide
PGTGSNH

SEQ ID NO: 25754 - protein, 7 aa, synthetic construct
  REGION 1..7: note = Description of Artificial Sequence: Synthetic peptide
HITPATS

SEQ ID NO: 25755 - protein, 7 aa, synthetic construct
  REGION 1..7: note = Description of Artificial Sequence: Synthetic peptide
SRNPNMI

SEQ ID NO: 25756 - protein, 7 aa, synthetic construct
  REGION 1..7: note = Description of Artificial Sequence: Synthetic peptide
GENSAKR

SEQ ID NO: 25757 - protein, 7 aa, synthetic construct
  REGION 1..7: note = Description of Artificial Sequence: Synthetic peptide
SLSSKQM

SEQ ID NO: 25758 - protein, 7 aa, synthetic construct
  REGION 1..7: note = Description of Artificial Sequence: Synthetic peptide
CNSVNDR

SEQ ID NO: 25759 - protein, 7 aa, synthetic construct
  REGION 1..7: note = Description of Artificial Sequence: Synthetic peptide
ESKNSVV

SEQ ID NO: 25760 - protein, 7 aa, synthetic construct
  REGION 1..7: note = Description of Artificial Sequence: Synthetic peptide
DYHNSKL

SEQ ID NO: 25761 - protein, 7 aa, synthetic construct
  REGION 1..7: note = Description of Artificial Sequence: Synthetic peptide
GQNTVSR

SEQ ID NO: 25762 - protein, 7 aa, synthetic construct
  REGION 1..7: note = Description of Artificial Sequence: Synthetic peptide
DSVAGFT

SEQ ID NO: 25763 - protein, 7 aa, synthetic construct
  REGION 1..7: note = Description of Artificial Sequence: Synthetic peptide
PYKNKPS

SEQ ID NO: 25764 - protein, 7 aa, synthetic construct
  REGION 1..7: note = Description of Artificial Sequence: Synthetic peptide
VADKGSM

SEQ ID NO: 25765 - protein, 7 aa, synthetic construct
  REGION 1..7: note = Description of Artificial Sequence: Synthetic peptide
GQNRNNT

SEQ ID NO: 25766 - protein, 7 aa, synthetic construct
  REGION 1..7: note = Description of Artificial Sequence: Synthetic peptide
RSYEGMQ

SEQ ID NO: 25767 - protein, 7 aa, synthetic construct
  REGION 1..7: note = Description of Artificial Sequence: Synthetic peptide
KQRSAPN

SEQ ID NO: 25768 - protein, 7 aa, synthetic construct
  REGION 1..7: note = Description of Artificial Sequence: Synthetic peptide
TARGGPT

SEQ ID NO: 25769 - protein, 7 aa, synthetic construct
  REGION 1..7: note = Description of Artificial Sequence: Synthetic peptide
SMGKLSS

SEQ ID NO: 25770 - protein, 7 aa, synthetic construct
  REGION 1..7: note = Description of Artificial Sequence: Synthetic peptide
VVLDTNR

SEQ ID NO: 25771 - protein, 7 aa, synthetic construct
  REGION 1..7: note = Description of Artificial Sequence: Synthetic peptide
NGATKNS

SEQ ID NO: 25772 - protein, 7 aa, synthetic construct
  REGION 1..7: note = Description of Artificial Sequence: Synthetic peptide
SSPLEHS

SEQ ID NO: 25773 - protein, 7 aa, synthetic construct
  REGION 1..7: note = Description of Artificial Sequence: Synthetic peptide
AKTNLSS

SEQ ID NO: 25774 - protein, 7 aa, synthetic construct
  REGION 1..7: note = Description of Artificial Sequence: Synthetic peptide
SLPNTNG

SEQ ID NO: 25775 - protein, 7 aa, synthetic construct
  REGION 1..7: note = Description of Artificial Sequence: Synthetic peptide
LGLRDNT

SEQ ID NO: 25776 - protein, 7 aa, synthetic construct
  REGION 1..7: note = Description of Artificial Sequence: Synthetic peptide
SNETKSS

SEQ ID NO: 25777 - protein, 7 aa, synthetic construct
  REGION 1..7: note = Description of Artificial Sequence: Synthetic peptide
SVNSHHG

SEQ ID NO: 25778 - protein, 7 aa, synthetic construct
  REGION 1..7: note = Description of Artificial Sequence: Synthetic peptide
TKGGSQL

SEQ ID NO: 25779 - protein, 7 aa, synthetic construct
  REGION 1..7: note = Description of Artificial Sequence: Synthetic peptide
RNGAMSN

SEQ ID NO: 25780 - protein, 7 aa, synthetic construct
  REGION 1..7: note = Description of Artificial Sequence: Synthetic peptide
TGVSPLA

SEQ ID NO: 25781 - protein, 7 aa, synthetic construct
  REGION 1..7: note = Description of Artificial Sequence: Synthetic peptide
AMTGSHT

SEQ ID NO: 25782 - protein, 7 aa, synthetic construct
  REGION 1..7: note = Description of Artificial Sequence: Synthetic peptide
GTPNTKV

SEQ ID NO: 25783 - protein, 7 aa, synthetic construct
  REGION 1..7: note = Description of Artificial Sequence: Synthetic peptide
HGIGNSA

SEQ ID NO: 25784 - protein, 7 aa, synthetic construct
  REGION 1..7: note = Description of Artificial Sequence: Synthetic peptide
EGSGRLT

SEQ ID NO: 25785 - protein, 7 aa, synthetic construct
  REGION 1..7: note = Description of Artificial Sequence: Synthetic peptide
SGASSNS

SEQ ID NO: 25786 - protein, 7 aa, synthetic construct
  REGION 1..7: note = Description of Artificial Sequence: Synthetic peptide
QNRNTVG

SEQ ID NO: 25787 - protein, 7 aa, synthetic construct
  REGION 1..7: note = Description of Artificial Sequence: Synthetic peptide
GTQKQTS

SEQ ID NO: 25788 - protein, 7 aa, synthetic construct
  REGION 1..7: note = Description of Artificial Sequence: Synthetic peptide
YNSTTAT

SEQ ID NO: 25789 - protein, 7 aa, synthetic construct
  REGION 1..7: note = Description of Artificial Sequence: Synthetic peptide
MGNAGVR

SEQ ID NO: 25790 - protein, 7 aa, synthetic construct
  REGION 1..7: note = Description of Artificial Sequence: Synthetic peptide
FSLKGGN

SEQ ID NO: 25791 - protein, 7 aa, synthetic construct
  REGION 1..7: note = Description of Artificial Sequence: Synthetic peptide
NGSGQTQ

SEQ ID NO: 25792 - protein, 7 aa, synthetic construct
  REGION 1..7: note = Description of Artificial Sequence: Synthetic peptide
LNKSTLP

SEQ ID NO: 25793 - protein, 7 aa, synthetic construct
  REGION 1..7: note = Description of Artificial Sequence: Synthetic peptide
PSNSGNN

SEQ ID NO: 25794 - protein, 7 aa, synthetic construct
  REGION 1..7: note = Description of Artificial Sequence: Synthetic peptide
QPTTSAL

SEQ ID NO: 25795 - protein, 7 aa, synthetic construct
  REGION 1..7: note = Description of Artificial Sequence: Synthetic peptide
VASSAHV

SEQ ID NO: 25796 - protein, 7 aa, synthetic construct
  REGION 1..7: note = Description of Artificial Sequence: Synthetic peptide
GIATTNR

SEQ ID NO: 25797 - protein, 7 aa, synthetic construct
  REGION 1..7: note = Description of Artificial Sequence: Synthetic peptide
RLHNMSA

SEQ ID NO: 25798 - protein, 7 aa, synthetic construct
  REGION 1..7: note = Description of Artificial Sequence: Synthetic peptide
SQQSAAL

SEQ ID NO: 25799 - protein, 7 aa, synthetic construct
  REGION 1..7: note = Description of Artificial Sequence: Synthetic peptide
MLNTSHY

SEQ ID NO: 25800 - protein, 7 aa, synthetic construct
  REGION 1..7: note = Description of Artificial Sequence: Synthetic peptide
QGLSKSG

SEQ ID NO: 25801 - protein, 7 aa, synthetic construct
  REGION 1..7: note = Description of Artificial Sequence: Synthetic peptide
RPIASSG

SEQ ID NO: 25802 - protein, 7 aa, synthetic construct
  REGION 1..7: note = Description of Artificial Sequence: Synthetic peptide
DVHRSSG

SEQ ID NO: 25803 - protein, 7 aa, synthetic construct
  REGION 1..7: note = Description of Artificial Sequence: Synthetic peptide
FNSGSGR

SEQ ID NO: 25804 - protein, 7 aa, synthetic construct
  REGION 1..7: note = Description of Artificial Sequence: Synthetic peptide
IGSNARQ

SEQ ID NO: 25805 - protein, 7 aa, synthetic construct
  REGION 1..7: note = Description of Artificial Sequence: Synthetic peptide
PHVARQM

SEQ ID NO: 25806 - protein, 7 aa, synthetic construct
  REGION 1..7: note = Description of Artificial Sequence: Synthetic peptide
LTAVSPK

SEQ ID NO: 25807 - protein, 7 aa, synthetic construct
  REGION 1..7: note = Description of Artificial Sequence: Synthetic peptide
YPSPTVT

SEQ ID NO: 25808 - protein, 7 aa, synthetic construct
  REGION 1..7: note = Description of Artificial Sequence: Synthetic peptide
IQQGSRT

SEQ ID NO: 25809 - protein, 7 aa, synthetic construct
  REGION 1..7: note = Description of Artificial Sequence: Synthetic peptide
NVSGQNQ

SEQ ID NO: 25810 - protein, 7 aa, synthetic construct
  REGION 1..7: note = Description of Artificial Sequence: Synthetic peptide
GSGSRLI

SEQ ID NO: 25811 - protein, 7 aa, synthetic construct
  REGION 1..7: note = Description of Artificial Sequence: Synthetic peptide
NQQNGSN

SEQ ID NO: 25812 - protein, 7 aa, synthetic construct
  REGION 1..7: note = Description of Artificial Sequence: Synthetic peptide
MVSGKSY

SEQ ID NO: 25813 - protein, 7 aa, synthetic construct
  REGION 1..7: note = Description of Artificial Sequence: Synthetic peptide
LGGRSSN

SEQ ID NO: 25814 - protein, 7 aa, synthetic construct
  REGION 1..7: note = Description of Artificial Sequence: Synthetic peptide
NGSAQNQ

SEQ ID NO: 25815 - protein, 7 aa, synthetic construct
  REGION 1..7: note = Description of Artificial Sequence: Synthetic peptide
TGQQTAT

SEQ ID NO: 25816 - protein, 7 aa, synthetic construct
  REGION 1..7: note = Description of Artificial Sequence: Synthetic peptide
ASTAINQ

SEQ ID NO: 25817 - protein, 7 aa, synthetic construct
  REGION 1..7: note = Description of Artificial Sequence: Synthetic peptide
GQPNSAR

SEQ ID NO: 25818 - protein, 7 aa, synthetic construct
  REGION 1..7: note = Description of Artificial Sequence: Synthetic peptide
NSISRVT

SEQ ID NO: 25819 - protein, 7 aa, synthetic construct
  REGION 1..7: note = Description of Artificial Sequence: Synthetic peptide
VNTSHTN

SEQ ID NO: 25820 - protein, 7 aa, synthetic construct
  REGION 1..7: note = Description of Artificial Sequence: Synthetic peptide
STNGNGL

SEQ ID NO: 25821 - protein, 7 aa, synthetic construct
  REGION 1..7: note = Description of Artificial Sequence: Synthetic peptide
NSGARLS

SEQ ID NO: 25822 - protein, 7 aa, synthetic construct
  REGION 1..7: note = Description of Artificial Sequence: Synthetic peptide
SSTSPGR

SEQ ID NO: 25823 - protein, 7 aa, synthetic construct
  REGION 1..7: note = Description of Artificial Sequence: Synthetic peptide
KSDAHTA

SEQ ID NO: 25824 - protein, 7 aa, synthetic construct
  REGION 1..7: note = Description of Artificial Sequence: Synthetic peptide
VHQAGAN

SEQ ID NO: 25825 - protein, 7 aa, synthetic construct
  REGION 1..7: note = Description of Artificial Sequence: Synthetic peptide
SDTKPFT

SEQ ID NO: 25826 - protein, 7 aa, synthetic construct
  REGION 1..7: note = Description of Artificial Sequence: Synthetic peptide
TAFSTNR

SEQ ID NO: 25827 - protein, 7 aa, synthetic construct
  REGION 1..7: note = Description of Artificial Sequence: Synthetic peptide
LSMNTSK

SEQ ID NO: 25828 - protein, 7 aa, synthetic construct
  REGION 1..7: note = Description of Artificial Sequence: Synthetic peptide
MTESSRT

SEQ ID NO: 25829 - protein, 7 aa, synthetic construct
  REGION 1..7: note = Description of Artificial Sequence: Synthetic peptide
ERAKGSS

SEQ ID NO: 25830 - protein, 7 aa, synthetic construct
  REGION 1..7: note = Description of Artificial Sequence: Synthetic peptide
RLTGIST

SEQ ID NO: 25831 - protein, 7 aa, synthetic construct
  REGION 1..7: note = Description of Artificial Sequence: Synthetic peptide
MKSQKYA

SEQ ID NO: 25832 - protein, 7 aa, synthetic construct
  REGION 1..7: note = Description of Artificial Sequence: Synthetic peptide
SPGNKST

SEQ ID NO: 25833 - protein, 7 aa, synthetic construct
  REGION 1..7: note = Description of Artificial Sequence: Synthetic peptide
FSSASFT

SEQ ID NO: 25834 - protein, 7 aa, synthetic construct
  REGION 1..7: note = Description of Artificial Sequence: Synthetic peptide
RGIDNKG

SEQ ID NO: 25835 - protein, 7 aa, synthetic construct
  REGION 1..7: note = Description of Artificial Sequence: Synthetic peptide
IVSPVSK

SEQ ID NO: 25836 - protein, 7 aa, synthetic construct
  REGION 1..7: note = Description of Artificial Sequence: Synthetic peptide
TTHNIQG

SEQ ID NO: 25837 - protein, 7 aa, synthetic construct
  REGION 1..7: note = Description of Artificial Sequence: Synthetic peptide
GDAGSFS

SEQ ID NO: 25838 - protein, 7 aa, synthetic construct
  REGION 1..7: note = Description of Artificial Sequence: Synthetic peptide
LGVKTPT

SEQ ID NO: 25839 - protein, 7 aa, synthetic construct
  REGION 1..7: note = Description of Artificial Sequence: Synthetic peptide
TNRVGYG

SEQ ID NO: 25840 - protein, 7 aa, synthetic construct
  REGION 1..7: note = Description of Artificial Sequence: Synthetic peptide
SARDRAS

SEQ ID NO: 25841 - protein, 7 aa, synthetic construct
  REGION 1..7: note = Description of Artificial Sequence: Synthetic peptide
KDFGQMR

SEQ ID NO: 25842 - protein, 7 aa, synthetic construct
  REGION 1..7: note = Description of Artificial Sequence: Synthetic peptide
DISVRPG

SEQ ID NO: 25843 - protein, 7 aa, synthetic construct
  REGION 1..7: note = Description of Artificial Sequence: Synthetic peptide
PSQEGQQ

SEQ ID NO: 25844 - protein, 7 aa, synthetic construct
  REGION 1..7: note = Description of Artificial Sequence: Synthetic peptide
PITHPLR

SEQ ID NO: 25845 - protein, 7 aa, synthetic construct
  REGION 1..7: note = Description of Artificial Sequence: Synthetic peptide
PGHATQS

SEQ ID NO: 25846 - protein, 7 aa, synthetic construct
  REGION 1..7: note = Description of Artificial Sequence: Synthetic peptide
RPVGGLA

SEQ ID NO: 25847 - protein, 7 aa, synthetic construct
  REGION 1..7: note = Description of Artificial Sequence: Synthetic peptide
MSTARSA

SEQ ID NO: 25848 - protein, 7 aa, synthetic construct
  REGION 1..7: note = Description of Artificial Sequence: Synthetic peptide
SNPSGFS

SEQ ID NO: 25849 - protein, 7 aa, synthetic construct
  REGION 1..7: note = Description of Artificial Sequence: Synthetic peptide
GMQKMSS

SEQ ID NO: 25850 - protein, 7 aa, synthetic construct
  REGION 1..7: note = Description of Artificial Sequence: Synthetic peptide
PLDKSMM

SEQ ID NO: 25851 - protein, 7 aa, synthetic construct
  REGION 1..7: note = Description of Artificial Sequence: Synthetic peptide
VQRSSNQ

SEQ ID NO: 25852 - protein, 7 aa, synthetic construct
  REGION 1..7: note = Description of Artificial Sequence: Synthetic peptide
SGGKGPT

SEQ ID NO: 25853 - protein, 7 aa, synthetic construct
  REGION 1..7: note = Description of Artificial Sequence: Synthetic peptide
DQVSHKL

SEQ ID NO: 25854 - protein, 7 aa, synthetic construct
  REGION 1..7: note = Description of Artificial Sequence: Synthetic peptide
SHDSRVA

SEQ ID NO: 25855 - protein, 7 aa, synthetic construct
  REGION 1..7: note = Description of Artificial Sequence: Synthetic peptide
GTAGRFN

SEQ ID NO: 25856 - protein, 7 aa, synthetic construct
  REGION 1..7: note = Description of Artificial Sequence: Synthetic peptide
RDRTNAA

SEQ ID NO: 25857 - protein, 7 aa, synthetic construct
  REGION 1..7: note = Description of Artificial Sequence: Synthetic peptide
PVSGATI

SEQ ID NO: 25858 - protein, 7 aa, synthetic construct
  REGION 1..7: note = Description of Artificial Sequence: Synthetic peptide
VLNAKSS

SEQ ID NO: 25859 - protein, 7 aa, synthetic construct
  REGION 1..7: note = Description of Artificial Sequence: Synthetic peptide
HVTKSTA

SEQ ID NO: 25860 - protein, 7 aa, synthetic construct
  REGION 1..7: note = Description of Artificial Sequence: Synthetic peptide
SIKSVTN

SEQ ID NO: 25861 - protein, 7 aa, synthetic construct
  REGION 1..7: note = Description of Artificial Sequence: Synthetic peptide
SAGGAVS

SEQ ID NO: 25862 - protein, 7 aa, synthetic construct
  REGION 1..7: note = Description of Artificial Sequence: Synthetic peptide
MGQGTLR

SEQ ID NO: 25863 - protein, 7 aa, synthetic construct
  REGION 1..7: note = Description of Artificial Sequence: Synthetic peptide
GRLTSSI

SEQ ID NO: 25864 - protein, 7 aa, synthetic construct
  REGION 1..7: note = Description of Artificial Sequence: Synthetic peptide
TQSHNLA

SEQ ID NO: 25865 - protein, 7 aa, synthetic construct
  REGION 1..7: note = Description of Artificial Sequence: Synthetic peptide
HISTRSA

SEQ ID NO: 25866 - protein, 7 aa, synthetic construct
  REGION 1..7: note = Description of Artificial Sequence: Synthetic peptide
DQGNGYG

SEQ ID NO: 25867 - protein, 7 aa, synthetic construct
  REGION 1..7: note = Description of Artificial Sequence: Synthetic peptide
TPQNSVK

SEQ ID NO: 25868 - protein, 7 aa, synthetic construct
  REGION 1..7: note = Description of Artificial Sequence: Synthetic peptide
KSAQGGN

SEQ ID NO: 25869 - protein, 7 aa, synthetic construct
  REGION 1..7: note = Description of Artificial Sequence: Synthetic peptide
ESSSSMG

SEQ ID NO: 25870 - protein, 7 aa, synthetic construct
  REGION 1..7: note = Description of Artificial Sequence: Synthetic peptide
RNNNTPG

SEQ ID NO: 25871 - protein, 7 aa, synthetic construct
  REGION 1..7: note = Description of Artificial Sequence: Synthetic peptide
YQNVSSK

SEQ ID NO: 25872 - protein, 7 aa, synthetic construct
  REGION 1..7: note = Description of Artificial Sequence: Synthetic peptide
YNNGGTR

SEQ ID NO: 25873 - protein, 7 aa, synthetic construct
  REGION 1..7: note = Description of Artificial Sequence: Synthetic peptide
NGSGTNQ

SEQ ID NO: 25874 - protein, 7 aa, synthetic construct
  REGION 1..7: note = Description of Artificial Sequence: Synthetic peptide
IPLSSQR

SEQ ID NO: 25875 - protein, 7 aa, synthetic construct
  REGION 1..7: note = Description of Artificial Sequence: Synthetic peptide
GLHPTYS

SEQ ID NO: 25876 - protein, 7 aa, synthetic construct
  REGION 1..7: note = Description of Artificial Sequence: Synthetic peptide
DAQRRGV

SEQ ID NO: 25877 - protein, 7 aa, synthetic construct
  REGION 1..7: note = Description of Artificial Sequence: Synthetic peptide
NVSTGAT

SEQ ID NO: 25878 - protein, 7 aa, synthetic construct
  REGION 1..7: note = Description of Artificial Sequence: Synthetic peptide
PTQNGRS

SEQ ID NO: 25879 - protein, 7 aa, synthetic construct
  REGION 1..7: note = Description of Artificial Sequence: Synthetic peptide
SSVSRSH

SEQ ID NO: 25880 - protein, 7 aa, synthetic construct
  REGION 1..7: note = Description of Artificial Sequence: Synthetic peptide
PDVKVTR

SEQ ID NO: 25881 - protein, 7 aa, synthetic construct
  REGION 1..7: note = Description of Artificial Sequence: Synthetic peptide
NVSSAIK

SEQ ID NO: 25882 - protein, 7 aa, synthetic construct
  REGION 1..7: note = Description of Artificial Sequence: Synthetic peptide
MSSRSSV

SEQ ID NO: 25883 - protein, 7 aa, synthetic construct
  REGION 1..7: note = Description of Artificial Sequence: Synthetic peptide
GRLNTNG

SEQ ID NO: 25884 - protein, 7 aa, synthetic construct
  REGION 1..7: note = Description of Artificial Sequence: Synthetic peptide
DISRSHG

SEQ ID NO: 25885 - protein, 7 aa, synthetic construct
  REGION 1..7: note = Description of Artificial Sequence: Synthetic peptide
EATSSTK

SEQ ID NO: 25886 - protein, 7 aa, synthetic construct
  REGION 1..7: note = Description of Artificial Sequence: Synthetic peptide
GISPGTA

SEQ ID NO: 25887 - protein, 7 aa, synthetic construct
  REGION 1..7: note = Description of Artificial Sequence: Synthetic peptide
PLTTRPS

SEQ ID NO: 25888 - protein, 7 aa, synthetic construct
  REGION 1..7: note = Description of Artificial Sequence: Synthetic peptide
AMNREVS

SEQ ID NO: 25889 - protein, 7 aa, synthetic construct
  REGION 1..7: note = Description of Artificial Sequence: Synthetic peptide
PSQTKPS

SEQ ID NO: 25890 - protein, 7 aa, synthetic construct
  REGION 1..7: note = Description of Artificial Sequence: Synthetic peptide
SSNEKDR

SEQ ID NO: 25891 - protein, 7 aa, synthetic construct
  REGION 1..7: note = Description of Artificial Sequence: Synthetic peptide
HHSTLQT

SEQ ID NO: 25892 - protein, 7 aa, synthetic construct
  REGION 1..7: note = Description of Artificial Sequence: Synthetic peptide
NASGQNQ

SEQ ID NO: 25893 - protein, 7 aa, synthetic construct
  REGION 1..7: note = Description of Artificial Sequence: Synthetic peptide
SMGNSIS

SEQ ID NO: 25894 - protein, 7 aa, synthetic construct
  REGION 1..7: note = Description of Artificial Sequence: Synthetic peptide
SAVGKAS

SEQ ID NO: 25895 - protein, 7 aa, synthetic construct
  REGION 1..7: note = Description of Artificial Sequence: Synthetic peptide
PSHNPTN

SEQ ID NO: 25896 - protein, 7 aa, synthetic construct
  REGION 1..7: note = Description of Artificial Sequence: Synthetic peptide
SDKGNTR

SEQ ID NO: 25897 - protein, 7 aa, synthetic construct
  REGION 1..7: note = Description of Artificial Sequence: Synthetic peptide
SRLEKSN

SEQ ID NO: 25898 - protein, 7 aa, synthetic construct
  REGION 1..7: note = Description of Artificial Sequence: Synthetic peptide
RPSMPHS

SEQ ID NO: 25899 - protein, 7 aa, synthetic construct
  REGION 1..7: note = Description of Artificial Sequence: Synthetic peptide
LRDTNMN

SEQ ID NO: 25900 - protein, 7 aa, synthetic construct
  REGION 1..7: note = Description of Artificial Sequence: Synthetic peptide
RVNLNEL

SEQ ID NO: 25901 - protein, 7 aa, synthetic construct
  REGION 1..7: note = Description of Artificial Sequence: Synthetic peptide
GTTNSRN

SEQ ID NO: 25902 - protein, 7 aa, synthetic construct
  REGION 1..7: note = Description of Artificial Sequence: Synthetic peptide
NSNGFNN

SEQ ID NO: 25903 - protein, 7 aa, synthetic construct
  REGION 1..7: note = Description of Artificial Sequence: Synthetic peptide
NQGGYHG

SEQ ID NO: 25904 - protein, 7 aa, synthetic construct
  REGION 1..7: note = Description of Artificial Sequence: Synthetic peptide
ISPVPLT

SEQ ID NO: 25905 - protein, 7 aa, synthetic construct
  REGION 1..7: note = Description of Artificial Sequence: Synthetic peptide
HVPSKLA

SEQ ID NO: 25906 - protein, 7 aa, synthetic construct
  REGION 1..7: note = Description of Artificial Sequence: Synthetic peptide
SIPSTSQ

SEQ ID NO: 25907 - protein, 7 aa, synthetic construct
  REGION 1..7: note = Description of Artificial Sequence: Synthetic peptide
NRVEHTQ

SEQ ID NO: 25908 - protein, 7 aa, synthetic construct
  REGION 1..7: note = Description of Artificial Sequence: Synthetic peptide
RMSSTHG

SEQ ID NO: 25909 - protein, 7 aa, synthetic construct
  REGION 1..7: note = Description of Artificial Sequence: Synthetic peptide
GMKGSVN

SEQ ID NO: 25910 - protein, 7 aa, synthetic construct
  REGION 1..7: note = Description of Artificial Sequence: Synthetic peptide
SVAGTSR

SEQ ID NO: 25911 - protein, 7 aa, synthetic construct
  REGION 1..7: note = Description of Artificial Sequence: Synthetic peptide
NKSNTFL

SEQ ID NO: 25912 - protein, 7 aa, synthetic construct
  REGION 1..7: note = Description of Artificial Sequence: Synthetic peptide
DPHSGGK

SEQ ID NO: 25913 - protein, 7 aa, synthetic construct
  REGION 1..7: note = Description of Artificial Sequence: Synthetic peptide
GTSTSLR

SEQ ID NO: 25914 - protein, 7 aa, synthetic construct
  REGION 1..7: note = Description of Artificial Sequence: Synthetic peptide
LATNRSN

SEQ ID NO: 25915 - protein, 7 aa, synthetic construct
  REGION 1..7: note = Description of Artificial Sequence: Synthetic peptide
NRQVPGL

SEQ ID NO: 25916 - protein, 7 aa, synthetic construct
  REGION 1..7: note = Description of Artificial Sequence: Synthetic peptide
STGSVSK

SEQ ID NO: 25917 - protein, 7 aa, synthetic construct
  REGION 1..7: note = Description of Artificial Sequence: Synthetic peptide
GLPLRSV

SEQ ID NO: 25918 - protein, 7 aa, synthetic construct
  REGION 1..7: note = Description of Artificial Sequence: Synthetic peptide
QVTSIGA

SEQ ID NO: 25919 - protein, 7 aa, synthetic construct
  REGION 1..7: note = Description of Artificial Sequence: Synthetic peptide
PQSRKGE

SEQ ID NO: 25920 - protein, 7 aa, synthetic construct
  REGION 1..7: note = Description of Artificial Sequence: Synthetic peptide
SYADKQG

SEQ ID NO: 25921 - protein, 7 aa, synthetic construct
  REGION 1..7: note = Description of Artificial Sequence: Synthetic peptide
PLQQNRS

SEQ ID NO: 25922 - protein, 7 aa, synthetic construct
  REGION 1..7: note = Description of Artificial Sequence: Synthetic peptide
HSENGNR

SEQ ID NO: 25923 - protein, 7 aa, synthetic construct
  REGION 1..7: note = Description of Artificial Sequence: Synthetic peptide
RASQSVG

SEQ ID NO: 25924 - protein, 7 aa, synthetic construct
  REGION 1..7: note = Description of Artificial Sequence: Synthetic peptide
FNSSSGS

SEQ ID NO: 25925 - protein, 7 aa, synthetic construct
  REGION 1..7: note = Description of Artificial Sequence: Synthetic peptide
NGSGQSQ

SEQ ID NO: 25926 - protein, 7 aa, synthetic construct
  REGION 1..7: note = Description of Artificial Sequence: Synthetic peptide
NTTAKSS

SEQ ID NO: 25927 - protein, 7 aa, synthetic construct
  REGION 1..7: note = Description of Artificial Sequence: Synthetic peptide
SVSSPRD

SEQ ID NO: 25928 - protein, 7 aa, synthetic construct
  REGION 1..7: note = Description of Artificial Sequence: Synthetic peptide
SHGPQIT

SEQ ID NO: 25929 - protein, 7 aa, synthetic construct
  REGION 1..7: note = Description of Artificial Sequence: Synthetic peptide
KLPDSRF

SEQ ID NO: 25930 - protein, 7 aa, synthetic construct
  REGION 1..7: note = Description of Artificial Sequence: Synthetic peptide
AGGINKL

SEQ ID NO: 25931 - protein, 7 aa, synthetic construct
  REGION 1..7: note = Description of Artificial Sequence: Synthetic peptide
GAERILR

SEQ ID NO: 25932 - protein, 7 aa, synthetic construct
  REGION 1..7: note = Description of Artificial Sequence: Synthetic peptide
PSAGREK

SEQ ID NO: 25933 - protein, 7 aa, synthetic construct
  REGION 1..7: note = Description of Artificial Sequence: Synthetic peptide
VSTTPAL

SEQ ID NO: 25934 - protein, 7 aa, synthetic construct
  REGION 1..7: note = Description of Artificial Sequence: Synthetic peptide
HSTSLSK

SEQ ID NO: 25935 - protein, 7 aa, synthetic construct
  REGION 1..7: note = Description of Artificial Sequence: Synthetic peptide
GSSIPWQ

SEQ ID NO: 25936 - protein, 7 aa, synthetic construct
  REGION 1..7: note = Description of Artificial Sequence: Synthetic peptide
WSTSKQV

SEQ ID NO: 25937 - protein, 7 aa, synthetic construct
  REGION 1..7: note = Description of Artificial Sequence: Synthetic peptide
GSAGNML

SEQ ID NO: 25938 - protein, 7 aa, synthetic construct
  REGION 1..7: note = Description of Artificial Sequence: Synthetic peptide
NGPGQNQ

SEQ ID NO: 25939 - protein, 7 aa, synthetic construct
  REGION 1..7: note = Description of Artificial Sequence: Synthetic peptide
TTSGAGR

SEQ ID NO: 25940 - protein, 7 aa, synthetic construct
  REGION 1..7: note = Description of Artificial Sequence: Synthetic peptide
SRNTQSM

SEQ ID NO: 25941 - protein, 7 aa, synthetic construct
  REGION 1..7: note = Description of Artificial Sequence: Synthetic peptide
TTMSKVG

SEQ ID NO: 25942 - protein, 7 aa, synthetic construct
  REGION 1..7: note = Description of Artificial Sequence: Synthetic peptide
SGGTPGR

SEQ ID NO: 25943 - protein, 7 aa, synthetic construct
  REGION 1..7: note = Description of Artificial Sequence: Synthetic peptide
IRAKESA

SEQ ID NO: 25944 - protein, 7 aa, synthetic construct
  REGION 1..7: note = Description of Artificial Sequence: Synthetic peptide
GNRGSVI

SEQ ID NO: 25945 - protein, 7 aa, synthetic construct
  REGION 1..7: note = Description of Artificial Sequence: Synthetic peptide
DDYQHKG

SEQ ID NO: 25946 - protein, 7 aa, synthetic construct
  REGION 1..7: note = Description of Artificial Sequence: Synthetic peptide
NRVGSIS

SEQ ID NO: 25947 - protein, 7 aa, synthetic construct
  REGION 1..7: note = Description of Artificial Sequence: Synthetic peptide
DLTRATS

SEQ ID NO: 25948 - protein, 7 aa, synthetic construct
  REGION 1..7: note = Description of Artificial Sequence: Synthetic peptide
HATSGTR

SEQ ID NO: 25949 - protein, 7 aa, synthetic construct
  REGION 1..7: note = Description of Artificial Sequence: Synthetic peptide
KNYDNAV

SEQ ID NO: 25950 - protein, 7 aa, synthetic construct
  REGION 1..7: note = Description of Artificial Sequence: Synthetic peptide
SFAKSAS

SEQ ID NO: 25951 - protein, 7 aa, synthetic construct
  REGION 1..7: note = Description of Artificial Sequence: Synthetic peptide
HHDASPN

SEQ ID NO: 25952 - protein, 7 aa, synthetic construct
  REGION 1..7: note = Description of Artificial Sequence: Synthetic peptide
DVLSKSQ

SEQ ID NO: 25953 - protein, 7 aa, synthetic construct
  REGION 1..7: note = Description of Artificial Sequence: Synthetic peptide
HPETAFK

SEQ ID NO: 25954 - protein, 7 aa, synthetic construct
  REGION 1..7: note = Description of Artificial Sequence: Synthetic peptide
RAGGNAV

SEQ ID NO: 25955 - protein, 7 aa, synthetic construct
  REGION 1..7: note = Description of Artificial Sequence: Synthetic peptide
VGGGRDN

SEQ ID NO: 25956 - protein, 7 aa, synthetic construct
  REGION 1..7: note = Description of Artificial Sequence: Synthetic peptide
CTTRQGN

SEQ ID NO: 25957 - protein, 7 aa, synthetic construct
  REGION 1..7: note = Description of Artificial Sequence: Synthetic peptide
YGSNTPT

SEQ ID NO: 25958 - protein, 7 aa, synthetic construct
  REGION 1..7: note = Description of Artificial Sequence: Synthetic peptide
GPMRPFQ

SEQ ID NO: 25959 - protein, 7 aa, synthetic construct
  REGION 1..7: note = Description of Artificial Sequence: Synthetic peptide
DRHNTTS

SEQ ID NO: 25960 - protein, 7 aa, synthetic construct
  REGION 1..7: note = Description of Artificial Sequence: Synthetic peptide
LPHHTSA

SEQ ID NO: 25961 - protein, 7 aa, synthetic construct
  REGION 1..7: note = Description of Artificial Sequence: Synthetic peptide
RTVDSSD

SEQ ID NO: 25962 - protein, 7 aa, synthetic construct
  REGION 1..7: note = Description of Artificial Sequence: Synthetic peptide
SVHSNAI

SEQ ID NO: 25963 - protein, 7 aa, synthetic construct
  REGION 1..7: note = Description of Artificial Sequence: Synthetic peptide
EGPSSPH

SEQ ID NO: 25964 - protein, 7 aa, synthetic construct
  REGION 1..7: note = Description of Artificial Sequence: Synthetic peptide
TFSKGTN

SEQ ID NO: 25965 - protein, 7 aa, synthetic construct
  REGION 1..7: note = Description of Artificial Sequence: Synthetic peptide
SSPVRNT

SEQ ID NO: 25966 - protein, 7 aa, synthetic construct
  REGION 1..7: note = Description of Artificial Sequence: Synthetic peptide
NSSSSNH

SEQ ID NO: 25967 - protein, 7 aa, synthetic construct
  REGION 1..7: note = Description of Artificial Sequence: Synthetic peptide
DRSATVK

SEQ ID NO: 25968 - protein, 7 aa, synthetic construct
  REGION 1..7: note = Description of Artificial Sequence: Synthetic peptide
SVPGVSR

SEQ ID NO: 25969 - protein, 7 aa, synthetic construct
  REGION 1..7: note = Description of Artificial Sequence: Synthetic peptide
REGGQMV

SEQ ID NO: 25970 - protein, 7 aa, synthetic construct
  REGION 1..7: note = Description of Artificial Sequence: Synthetic peptide
LSTVNQN

SEQ ID NO: 25971 - protein, 7 aa, synthetic construct
  REGION 1..7: note = Description of Artificial Sequence: Synthetic peptide
RNTSDLA

SEQ ID NO: 25972 - protein, 7 aa, synthetic construct
  REGION 1..7: note = Description of Artificial Sequence: Synthetic peptide
NGSGLNQ

SEQ ID NO: 25973 - protein, 7 aa, synthetic construct
  REGION 1..7: note = Description of Artificial Sequence: Synthetic peptide
PGLRDTA

SEQ ID NO: 25974 - protein, 7 aa, synthetic construct
  REGION 1..7: note = Description of Artificial Sequence: Synthetic peptide
MSTHSSG

SEQ ID NO: 25975 - protein, 7 aa, synthetic construct
  REGION 1..7: note = Description of Artificial Sequence: Synthetic peptide
VSTGKSV

SEQ ID NO: 25976 - protein, 7 aa, synthetic construct
  REGION 1..7: note = Description of Artificial Sequence: Synthetic peptide
NPSMAMK

SEQ ID NO: 25977 - protein, 7 aa, synthetic construct
  REGION 1..7: note = Description of Artificial Sequence: Synthetic peptide
RLPENVR

SEQ ID NO: 25978 - protein, 7 aa, synthetic construct
  REGION 1..7: note = Description of Artificial Sequence: Synthetic peptide
RPDRTTL

SEQ ID NO: 25979 - protein, 7 aa, synthetic construct
  REGION 1..7: note = Description of Artificial Sequence: Synthetic peptide
SRETVPT

SEQ ID NO: 25980 - protein, 7 aa, synthetic construct
  REGION 1..7: note = Description of Artificial Sequence: Synthetic peptide
DPHNTSR

SEQ ID NO: 25981 - protein, 7 aa, synthetic construct
  REGION 1..7: note = Description of Artificial Sequence: Synthetic peptide
RDGGQDR

SEQ ID NO: 25982 - protein, 7 aa, synthetic construct
  REGION 1..7: note = Description of Artificial Sequence: Synthetic peptide
SFDSKPP

SEQ ID NO: 25983 - protein, 7 aa, synthetic construct
  REGION 1..7: note = Description of Artificial Sequence: Synthetic peptide
SNATRSS

SEQ ID NO: 25984 - protein, 7 aa, synthetic construct
  REGION 1..7: note = Description of Artificial Sequence: Synthetic peptide
PQNLAHV

SEQ ID NO: 25985 - protein, 7 aa, synthetic construct
  REGION 1..7: note = Description of Artificial Sequence: Synthetic peptide
NTGSGSR

SEQ ID NO: 25986 - protein, 7 aa, synthetic construct
  REGION 1..7: note = Description of Artificial Sequence: Synthetic peptide
MNSGPKV

SEQ ID NO: 25987 - protein, 7 aa, synthetic construct
  REGION 1..7: note = Description of Artificial Sequence: Synthetic peptide
QSGPGVT

SEQ ID NO: 25988 - protein, 7 aa, synthetic construct
  REGION 1..7: note = Description of Artificial Sequence: Synthetic peptide
KQGGPTG

SEQ ID NO: 25989 - protein, 7 aa, synthetic construct
  REGION 1..7: note = Description of Artificial Sequence: Synthetic peptide
TGSGSNH

SEQ ID NO: 25990 - protein, 7 aa, synthetic construct
  REGION 1..7: note = Description of Artificial Sequence: Synthetic peptide
PANHKTM

SEQ ID NO: 25991 - protein, 7 aa, synthetic construct
  REGION 1..7: note = Description of Artificial Sequence: Synthetic peptide
APSAGNS

SEQ ID NO: 25992 - protein, 7 aa, synthetic construct
  REGION 1..7: note = Description of Artificial Sequence: Synthetic peptide
LSLNKSQ

SEQ ID NO: 25993 - protein, 7 aa, synthetic construct
  REGION 1..7: note = Description of Artificial Sequence: Synthetic peptide
PGASGKV

SEQ ID NO: 25994 - protein, 7 aa, synthetic construct
  REGION 1..7: note = Description of Artificial Sequence: Synthetic peptide
LRSAPSI

SEQ ID NO: 25995 - protein, 7 aa, synthetic construct
  REGION 1..7: note = Description of Artificial Sequence: Synthetic peptide
SMASAYK

SEQ ID NO: 25996 - protein, 7 aa, synthetic construct
  REGION 1..7: note = Description of Artificial Sequence: Synthetic peptide
PYAGTSP

SEQ ID NO: 25997 - protein, 7 aa, synthetic construct
  REGION 1..7: note = Description of Artificial Sequence: Synthetic peptide
VNKINGS

SEQ ID NO: 25998 - protein, 7 aa, synthetic construct
  REGION 1..7: note = Description of Artificial Sequence: Synthetic peptide
LPTVTRS

SEQ ID NO: 25999 - protein, 7 aa, synthetic construct
  REGION 1..7: note = Description of Artificial Sequence: Synthetic peptide
NPGSGYG

SEQ ID NO: 26000 - protein, 7 aa, synthetic construct
  REGION 1..7: note = Description of Artificial Sequence: Synthetic peptide
QPNSGTT

SEQ ID NO: 26001 - protein, 7 aa, synthetic construct
  REGION 1..7: note = Description of Artificial Sequence: Synthetic peptide
LGNAHQL

SEQ ID NO: 26002 - protein, 7 aa, synthetic construct
  REGION 1..7: note = Description of Artificial Sequence: Synthetic peptide
RTQSLTA

SEQ ID NO: 26003 - protein, 7 aa, synthetic construct
  REGION 1..7: note = Description of Artificial Sequence: Synthetic peptide
SGAPGSS

SEQ ID NO: 26004 - protein, 7 aa, synthetic construct
  REGION 1..7: note = Description of Artificial Sequence: Synthetic peptide
NLTSSSS

SEQ ID NO: 26005 - protein, 7 aa, synthetic construct
  REGION 1..7: note = Description of Artificial Sequence: Synthetic peptide
PFSHSVA

SEQ ID NO: 26006 - protein, 7 aa, synthetic construct
  REGION 1..7: note = Description of Artificial Sequence: Synthetic peptide
LLKNDAS

SEQ ID NO: 26007 - protein, 7 aa, synthetic construct
  REGION 1..7: note = Description of Artificial Sequence: Synthetic peptide
VRESRSS

SEQ ID NO: 26008 - protein, 7 aa, synthetic construct
  REGION 1..7: note = Description of Artificial Sequence: Synthetic peptide
REPMKGS

SEQ ID NO: 26009 - protein, 7 aa, synthetic construct
  REGION 1..7: note = Description of Artificial Sequence: Synthetic peptide
VQQSKAY

SEQ ID NO: 26010 - protein, 7 aa, synthetic construct
  REGION 1..7: note = Description of Artificial Sequence: Synthetic peptide
KSADQGR

SEQ ID NO: 26011 - protein, 7 aa, synthetic construct
  REGION 1..7: note = Description of Artificial Sequence: Synthetic peptide
GTGTPRT

SEQ ID NO: 26012 - protein, 7 aa, synthetic construct
  REGION 1..7: note = Description of Artificial Sequence: Synthetic peptide
QNTPKST

SEQ ID NO: 26013 - protein, 7 aa, synthetic construct
  REGION 1..7: note = Description of Artificial Sequence: Synthetic peptide
SRDSSIH

SEQ ID NO: 26014 - protein, 7 aa, synthetic construct
  REGION 1..7: note = Description of Artificial Sequence: Synthetic peptide
HTANSQS

SEQ ID NO: 26015 - protein, 7 aa, synthetic construct
  REGION 1..7: note = Description of Artificial Sequence: Synthetic peptide
TQQHGSN

SEQ ID NO: 26016 - protein, 7 aa, synthetic construct
  REGION 1..7: note = Description of Artificial Sequence: Synthetic peptide
STSKDYT

SEQ ID NO: 26017 - protein, 7 aa, synthetic construct
  REGION 1..7: note = Description of Artificial Sequence: Synthetic peptide
LPGVRVA

SEQ ID NO: 26018 - protein, 7 aa, synthetic construct
  REGION 1..7: note = Description of Artificial Sequence: Synthetic peptide
SLPGESK

SEQ ID NO: 26019 - protein, 7 aa, synthetic construct
  REGION 1..7: note = Description of Artificial Sequence: Synthetic peptide
HTSPGKN

SEQ ID NO: 26020 - protein, 7 aa, synthetic construct
  REGION 1..7: note = Description of Artificial Sequence: Synthetic peptide
PVVGKMS

SEQ ID NO: 26021 - protein, 7 aa, synthetic construct
  REGION 1..7: note = Description of Artificial Sequence: Synthetic peptide
PSLERGS

SEQ ID NO: 26022 - protein, 7 aa, synthetic construct
  REGION 1..7: note = Description of Artificial Sequence: Synthetic peptide
YINSPSN

SEQ ID NO: 26023 - protein, 7 aa, synthetic construct
  REGION 1..7: note = Description of Artificial Sequence: Synthetic peptide
SSQAQPT

SEQ ID NO: 26024 - protein, 7 aa, synthetic construct
  REGION 1..7: note = Description of Artificial Sequence: Synthetic peptide
DPVRKTS

SEQ ID NO: 26025 - protein, 7 aa, synthetic construct
  REGION 1..7: note = Description of Artificial Sequence: Synthetic peptide
NSHNGAS

SEQ ID NO: 26026 - protein, 7 aa, synthetic construct
  REGION 1..7: note = Description of Artificial Sequence: Synthetic peptide
PGPEVGR

SEQ ID NO: 26027 - protein, 7 aa, synthetic construct
  REGION 1..7: note = Description of Artificial Sequence: Synthetic peptide
LPITARN

SEQ ID NO: 26028 - protein, 7 aa, synthetic construct
  REGION 1..7: note = Description of Artificial Sequence: Synthetic peptide
VASQPVR

SEQ ID NO: 26029 - protein, 7 aa, synthetic construct
  REGION 1..7: note = Description of Artificial Sequence: Synthetic peptide
NLSSSGG

SEQ ID NO: 26030 - protein, 7 aa, synthetic construct
  REGION 1..7: note = Description of Artificial Sequence: Synthetic peptide
ERNGNFT

SEQ ID NO: 26031 - protein, 7 aa, synthetic construct
  REGION 1..7: note = Description of Artificial Sequence: Synthetic peptide
PGSSNRN

SEQ ID NO: 26032 - protein, 7 aa, synthetic construct
  REGION 1..7: note = Description of Artificial Sequence: Synthetic peptide
KRMDKSS

SEQ ID NO: 26033 - protein, 7 aa, synthetic construct
  REGION 1..7: note = Description of Artificial Sequence: Synthetic peptide
VKCSGCS

SEQ ID NO: 26034 - protein, 7 aa, synthetic construct
  REGION 1..7: note = Description of Artificial Sequence: Synthetic peptide
CVLPSGN

SEQ ID NO: 26035 - protein, 7 aa, synthetic construct
  REGION 1..7: note = Description of Artificial Sequence: Synthetic peptide
FTSNKAS

SEQ ID NO: 26036 - protein, 7 aa, synthetic construct
  REGION 1..7: note = Description of Artificial Sequence: Synthetic peptide
LSSDKNV

SEQ ID NO: 26037 - protein, 7 aa, synthetic construct
  REGION 1..7: note = Description of Artificial Sequence: Synthetic peptide
SSSTHAV

SEQ ID NO: 26038 - protein, 7 aa, synthetic construct
  REGION 1..7: note = Description of Artificial Sequence: Synthetic peptide
TNPKSSS

SEQ ID NO: 26039 - protein, 7 aa, synthetic construct
  REGION 1..7: note = Description of Artificial Sequence: Synthetic peptide
SSEQTTR

SEQ ID NO: 26040 - protein, 7 aa, synthetic construct
  REGION 1..7: note = Description of Artificial Sequence: Synthetic peptide
EPLQGSR

SEQ ID NO: 26041 - protein, 7 aa, synthetic construct
  REGION 1..7: note = Description of Artificial Sequence: Synthetic peptide
SKTGTSL

SEQ ID NO: 26042 - protein, 7 aa, synthetic construct
  REGION 1..7: note = Description of Artificial Sequence: Synthetic peptide
RVVNRGD

SEQ ID NO: 26043 - protein, 7 aa, synthetic construct
  REGION 1..7: note = Description of Artificial Sequence: Synthetic peptide
PMSGTRL

SEQ ID NO: 26044 - protein, 7 aa, synthetic construct
  REGION 1..7: note = Description of Artificial Sequence: Synthetic peptide
TSNTKQG

SEQ ID NO: 26045 - protein, 7 aa, synthetic construct
  REGION 1..7: note = Description of Artificial Sequence: Synthetic peptide
GPNQSGR

SEQ ID NO: 26046 - protein, 7 aa, synthetic construct
  REGION 1..7: note = Description of Artificial Sequence: Synthetic peptide
TNPNPHR

SEQ ID NO: 26047 - protein, 7 aa, synthetic construct
  REGION 1..7: note = Description of Artificial Sequence: Synthetic peptide
PGREKTV

SEQ ID NO: 26048 - protein, 7 aa, synthetic construct
  REGION 1..7: note = Description of Artificial Sequence: Synthetic peptide
FANTANR

SEQ ID NO: 26049 - protein, 7 aa, synthetic construct
  REGION 1..7: note = Description of Artificial Sequence: Synthetic peptide
TVLGARG

SEQ ID NO: 26050 - protein, 7 aa, synthetic construct
  REGION 1..7: note = Description of Artificial Sequence: Synthetic peptide
NVTTPLI

SEQ ID NO: 26051 - protein, 7 aa, synthetic construct
  REGION 1..7: note = Description of Artificial Sequence: Synthetic peptide
YRASGIS

SEQ ID NO: 26052 - protein, 7 aa, synthetic construct
  REGION 1..7: note = Description of Artificial Sequence: Synthetic peptide
GSNRNPL

SEQ ID NO: 26053 - protein, 7 aa, synthetic construct
  REGION 1..7: note = Description of Artificial Sequence: Synthetic peptide
SRGQPPL

SEQ ID NO: 26054 - protein, 7 aa, synthetic construct
  REGION 1..7: note = Description of Artificial Sequence: Synthetic peptide
GVTGTHV

SEQ ID NO: 26055 - protein, 7 aa, synthetic construct
  REGION 1..7: note = Description of Artificial Sequence: Synthetic peptide
NLKTKGE

SEQ ID NO: 26056 - protein, 7 aa, synthetic construct
  REGION 1..7: note = Description of Artificial Sequence: Synthetic peptide
RSPGSNT

SEQ ID NO: 26057 - protein, 7 aa, synthetic construct
  REGION 1..7: note = Description of Artificial Sequence: Synthetic peptide
WGTGIGS

SEQ ID NO: 26058 - protein, 7 aa, synthetic construct
  REGION 1..7: note = Description of Artificial Sequence: Synthetic peptide
GSISTAH

SEQ ID NO: 26059 - protein, 7 aa, synthetic construct
  REGION 1..7: note = Description of Artificial Sequence: Synthetic peptide
LPGQGVG

SEQ ID NO: 26060 - protein, 7 aa, synthetic construct
  REGION 1..7: note = Description of Artificial Sequence: Synthetic peptide
NSGKPNA

SEQ ID NO: 26061 - protein, 7 aa, synthetic construct
  REGION 1..7: note = Description of Artificial Sequence: Synthetic peptide
FASRPVQ

SEQ ID NO: 26062 - protein, 7 aa, synthetic construct
  REGION 1..7: note = Description of Artificial Sequence: Synthetic peptide
GQVKAIG

SEQ ID NO: 26063 - protein, 7 aa, synthetic construct
  REGION 1..7: note = Description of Artificial Sequence: Synthetic peptide
QSSRTVT

SEQ ID NO: 26064 - protein, 7 aa, synthetic construct
  REGION 1..7: note = Description of Artificial Sequence: Synthetic peptide
TSSPQPS

SEQ ID NO: 26065 - protein, 7 aa, synthetic construct
  REGION 1..7: note = Description of Artificial Sequence: Synthetic peptide
LGASTIL

SEQ ID NO: 26066 - protein, 7 aa, synthetic construct
  REGION 1..7: note = Description of Artificial Sequence: Synthetic peptide
NDQAKLT

SEQ ID NO: 26067 - protein, 7 aa, synthetic construct
  REGION 1..7: note = Description of Artificial Sequence: Synthetic peptide
TRSKESP

SEQ ID NO: 26068 - protein, 7 aa, synthetic construct
  REGION 1..7: note = Description of Artificial Sequence: Synthetic peptide
QGSGSNH

SEQ ID NO: 26069 - protein, 7 aa, synthetic construct
  REGION 1..7: note = Description of Artificial Sequence: Synthetic peptide
NSANKTP

SEQ ID NO: 26070 - protein, 7 aa, synthetic construct
  REGION 1..7: note = Description of Artificial Sequence: Synthetic peptide
ATHNSSQ

SEQ ID NO: 26071 - protein, 7 aa, synthetic construct
  REGION 1..7: note = Description of Artificial Sequence: Synthetic peptide
FPVNGLS

SEQ ID NO: 26072 - protein, 7 aa, synthetic construct
  REGION 1..7: note = Description of Artificial Sequence: Synthetic peptide
SVGSGAL

SEQ ID NO: 26073 - protein, 7 aa, synthetic construct
  REGION 1..7: note = Description of Artificial Sequence: Synthetic peptide
QGSSLRT

SEQ ID NO: 26074 - protein, 7 aa, synthetic construct
  REGION 1..7: note = Description of Artificial Sequence: Synthetic peptide
SRVDQYK

SEQ ID NO: 26075 - protein, 7 aa, synthetic construct
  REGION 1..7: note = Description of Artificial Sequence: Synthetic peptide
PLAAGGT

SEQ ID NO: 26076 - protein, 7 aa, synthetic construct
  REGION 1..7: note = Description of Artificial Sequence: Synthetic peptide
IKQSSSA

SEQ ID NO: 26077 - protein, 7 aa, synthetic construct
  REGION 1..7: note = Description of Artificial Sequence: Synthetic peptide
TPSMRNT

SEQ ID NO: 26078 - protein, 7 aa, synthetic construct
  REGION 1..7: note = Description of Artificial Sequence: Synthetic peptide
TRMNKQT

SEQ ID NO: 26079 - protein, 7 aa, synthetic construct
  REGION 1..7: note = Description of Artificial Sequence: Synthetic peptide
DFSEKRL

SEQ ID NO: 26080 - protein, 7 aa, synthetic construct
  REGION 1..7: note = Description of Artificial Sequence: Synthetic peptide
SAYERTS

SEQ ID NO: 26081 - protein, 7 aa, synthetic construct
  REGION 1..7: note = Description of Artificial Sequence: Synthetic peptide
STSGTSS

SEQ ID NO: 26082 - protein, 7 aa, synthetic construct
  REGION 1..7: note = Description of Artificial Sequence: Synthetic peptide
GTTSSRD

SEQ ID NO: 26083 - protein, 7 aa, synthetic construct
  REGION 1..7: note = Description of Artificial Sequence: Synthetic peptide
QSTPRMG

SEQ ID NO: 26084 - protein, 7 aa, synthetic construct
  REGION 1..7: note = Description of Artificial Sequence: Synthetic peptide
GQVKALG

SEQ ID NO: 26085 - protein, 7 aa, synthetic construct
  REGION 1..7: note = Description of Artificial Sequence: Synthetic peptide
VGTKAAT

SEQ ID NO: 26086 - protein, 7 aa, synthetic construct
  REGION 1..7: note = Description of Artificial Sequence: Synthetic peptide
SDMSGQR

SEQ ID NO: 26087 - protein, 7 aa, synthetic construct
  REGION 1..7: note = Description of Artificial Sequence: Synthetic peptide
PISHTTG

SEQ ID NO: 26088 - protein, 7 aa, synthetic construct
  REGION 1..7: note = Description of Artificial Sequence: Synthetic peptide
GSSPSLR

SEQ ID NO: 26089 - protein, 7 aa, synthetic construct
  REGION 1..7: note = Description of Artificial Sequence: Synthetic peptide
LSSNRHN

SEQ ID NO: 26090 - protein, 7 aa, synthetic construct
  REGION 1..7: note = Description of Artificial Sequence: Synthetic peptide
HTHDVGK

SEQ ID NO: 26091 - protein, 7 aa, synthetic construct
  REGION 1..7: note = Description of Artificial Sequence: Synthetic peptide
GLKNEPA

SEQ ID NO: 26092 - protein, 7 aa, synthetic construct
  REGION 1..7: note = Description of Artificial Sequence: Synthetic peptide
SRIGMST

SEQ ID NO: 26093 - protein, 7 aa, synthetic construct
  REGION 1..7: note = Description of Artificial Sequence: Synthetic peptide
TANSPAT

SEQ ID NO: 26094 - protein, 7 aa, synthetic construct
  REGION 1..7: note = Description of Artificial Sequence: Synthetic peptide
SVEKAQS

SEQ ID NO: 26095 - protein, 7 aa, synthetic construct
  REGION 1..7: note = Description of Artificial Sequence: Synthetic peptide
VSGMSGS

SEQ ID NO: 26096 - protein, 7 aa, synthetic construct
  REGION 1..7: note = Description of Artificial Sequence: Synthetic peptide
HTSSNSL

SEQ ID NO: 26097 - protein, 7 aa, synthetic construct
  REGION 1..7: note = Description of Artificial Sequence: Synthetic peptide
GSPNHSS

SEQ ID NO: 26098 - protein, 7 aa, synthetic construct
  REGION 1..7: note = Description of Artificial Sequence: Synthetic peptide
GQAMPFK

SEQ ID NO: 26099 - protein, 7 aa, synthetic construct
  REGION 1..7: note = Description of Artificial Sequence: Synthetic peptide
RMKSLDN

SEQ ID NO: 26100 - protein, 7 aa, synthetic construct
  REGION 1..7: note = Description of Artificial Sequence: Synthetic peptide
YRSAANS

SEQ ID NO: 26101 - protein, 7 aa, synthetic construct
  REGION 1..7: note = Description of Artificial Sequence: Synthetic peptide
LGTSHQQ

SEQ ID NO: 26102 - protein, 7 aa, synthetic construct
  REGION 1..7: note = Description of Artificial Sequence: Synthetic peptide
NISTRQS

SEQ ID NO: 26103 - protein, 7 aa, synthetic construct
  REGION 1..7: note = Description of Artificial Sequence: Synthetic peptide
PGINTNS

SEQ ID NO: 26104 - protein, 7 aa, synthetic construct
  REGION 1..7: note = Description of Artificial Sequence: Synthetic peptide
MEIKPNR

SEQ ID NO: 26105 - protein, 7 aa, synthetic construct
  REGION 1..7: note = Description of Artificial Sequence: Synthetic peptide
LPQDRVG

SEQ ID NO: 26106 - protein, 7 aa, synthetic construct
  REGION 1..7: note = Description of Artificial Sequence: Synthetic peptide
EGLNTSR

SEQ ID NO: 26107 - protein, 7 aa, synthetic construct
  REGION 1..7: note = Description of Artificial Sequence: Synthetic peptide
FHVGASS

SEQ ID NO: 26108 - protein, 7 aa, synthetic construct
  REGION 1..7: note = Description of Artificial Sequence: Synthetic peptide
GPSSPRL

SEQ ID NO: 26109 - protein, 7 aa, synthetic construct
  REGION 1..7: note = Description of Artificial Sequence: Synthetic peptide
DSTHRAT

SEQ ID NO: 26110 - protein, 7 aa, synthetic construct
  REGION 1..7: note = Description of Artificial Sequence: Synthetic peptide
PPTDSGL

SEQ ID NO: 26111 - protein, 7 aa, synthetic construct
  REGION 1..7: note = Description of Artificial Sequence: Synthetic peptide
TATTLSS

SEQ ID NO: 26112 - protein, 7 aa, synthetic construct
  REGION 1..7: note = Description of Artificial Sequence: Synthetic peptide
LKSVSGQ

SEQ ID NO: 26113 - protein, 7 aa, synthetic construct
  REGION 1..7: note = Description of Artificial Sequence: Synthetic peptide
PLQTSRT

SEQ ID NO: 26114 - protein, 7 aa, synthetic construct
  REGION 1..7: note = Description of Artificial Sequence: Synthetic peptide
ATGNGRG

SEQ ID NO: 26115 - protein, 7 aa, synthetic construct
  REGION 1..7: note = Description of Artificial Sequence: Synthetic peptide
DLHVQKA

SEQ ID NO: 26116 - protein, 7 aa, synthetic construct
  REGION 1..7: note = Description of Artificial Sequence: Synthetic peptide
PGTKQSS

SEQ ID NO: 26117 - protein, 7 aa, synthetic construct
  REGION 1..7: note = Description of Artificial Sequence: Synthetic peptide
ASRDRAG

SEQ ID NO: 26118 - protein, 7 aa, synthetic construct
  REGION 1..7: note = Description of Artificial Sequence: Synthetic peptide
FNSSSSK

SEQ ID NO: 26119 - protein, 7 aa, synthetic construct
  REGION 1..7: note = Description of Artificial Sequence: Synthetic peptide
SSSAKSI

SEQ ID NO: 26120 - protein, 7 aa, synthetic construct
  REGION 1..7: note = Description of Artificial Sequence: Synthetic peptide
GRAQLAS

SEQ ID NO: 26121 - protein, 7 aa, synthetic construct
  REGION 1..7: note = Description of Artificial Sequence: Synthetic peptide
FVNTSAQ

SEQ ID NO: 26122 - protein, 7 aa, synthetic construct
  REGION 1..7: note = Description of Artificial Sequence: Synthetic peptide
RNQGALQ

SEQ ID NO: 26123 - protein, 7 aa, synthetic construct
  REGION 1..7: note = Description of Artificial Sequence: Synthetic peptide
DLPHHTR

SEQ ID NO: 26124 - protein, 7 aa, synthetic construct
  REGION 1..7: note = Description of Artificial Sequence: Synthetic peptide
YLKTGDN

SEQ ID NO: 26125 - protein, 7 aa, synthetic construct
  REGION 1..7: note = Description of Artificial Sequence: Synthetic peptide
RPSSTHA

SEQ ID NO: 26126 - protein, 7 aa, synthetic construct
  REGION 1..7: note = Description of Artificial Sequence: Synthetic peptide
ILGNKSS

SEQ ID NO: 26127 - protein, 7 aa, synthetic construct
  REGION 1..7: note = Description of Artificial Sequence: Synthetic peptide
GLAGRLS

SEQ ID NO: 26128 - protein, 7 aa, synthetic construct
  REGION 1..7: note = Description of Artificial Sequence: Synthetic peptide
TNGGRVT

SEQ ID NO: 26129 - protein, 7 aa, synthetic construct
  REGION 1..7: note = Description of Artificial Sequence: Synthetic peptide
TGMSNNR

SEQ ID NO: 26130 - protein, 7 aa, synthetic construct
  REGION 1..7: note = Description of Artificial Sequence: Synthetic peptide
PKLSHTG

SEQ ID NO: 26131 - protein, 7 aa, synthetic construct
  REGION 1..7: note = Description of Artificial Sequence: Synthetic peptide
SIGKGYN

SEQ ID NO: 26132 - protein, 7 aa, synthetic construct
  REGION 1..7: note = Description of Artificial Sequence: Synthetic peptide
TTMSKPS

SEQ ID NO: 26133 - protein, 7 aa, synthetic construct
  REGION 1..7: note = Description of Artificial Sequence: Synthetic peptide
TERTKAT

SEQ ID NO: 26134 - protein, 7 aa, synthetic construct
  REGION 1..7: note = Description of Artificial Sequence: Synthetic peptide
VSSNASM

SEQ ID NO: 26135 - protein, 7 aa, synthetic construct
  REGION 1..7: note = Description of Artificial Sequence: Synthetic peptide
PNLQSSK

SEQ ID NO: 26136 - protein, 7 aa, synthetic construct
  REGION 1..7: note = Description of Artificial Sequence: Synthetic peptide
SPGNVRK

SEQ ID NO: 26137 - protein, 7 aa, synthetic construct
  REGION 1..7: note = Description of Artificial Sequence: Synthetic peptide
QGSSKTT

SEQ ID NO: 26138 - protein, 7 aa, synthetic construct
  REGION 1..7: note = Description of Artificial Sequence: Synthetic peptide
NAVRSEN

SEQ ID NO: 26139 - protein, 7 aa, synthetic construct
  REGION 1..7: note = Description of Artificial Sequence: Synthetic peptide
TEARSAN

SEQ ID NO: 26140 - protein, 7 aa, synthetic construct
  REGION 1..7: note = Description of Artificial Sequence: Synthetic peptide
LTTHGMK

SEQ ID NO: 26141 - protein, 7 aa, synthetic construct
  REGION 1..7: note = Description of Artificial Sequence: Synthetic peptide
RQNGGVK

SEQ ID NO: 26142 - protein, 7 aa, synthetic construct
  REGION 1..7: note = Description of Artificial Sequence: Synthetic peptide
RVSDRHI

SEQ ID NO: 26143 - protein, 7 aa, synthetic construct
  REGION 1..7: note = Description of Artificial Sequence: Synthetic peptide
EGSSGRR

SEQ ID NO: 26144 - protein, 7 aa, synthetic construct
  REGION 1..7: note = Description of Artificial Sequence: Synthetic peptide
RGDTKNL

SEQ ID NO: 26145 - protein, 7 aa, synthetic construct
  REGION 1..7: note = Description of Artificial Sequence: Synthetic peptide
NINSRLA

SEQ ID NO: 26146 - protein, 7 aa, synthetic construct
  REGION 1..7: note = Description of Artificial Sequence: Synthetic peptide
TSRGNLS

SEQ ID NO: 26147 - protein, 7 aa, synthetic construct
  REGION 1..7: note = Description of Artificial Sequence: Synthetic peptide
NGSARMT

SEQ ID NO: 26148 - protein, 7 aa, synthetic construct
  REGION 1..7: note = Description of Artificial Sequence: Synthetic peptide
GSSPKLT

SEQ ID NO: 26149 - protein, 7 aa, synthetic construct
  REGION 1..7: note = Description of Artificial Sequence: Synthetic peptide
YQNKSLT

SEQ ID NO: 26150 - protein, 7 aa, synthetic construct
  REGION 1..7: note = Description of Artificial Sequence: Synthetic peptide
SPLLDYK

SEQ ID NO: 26151 - protein, 7 aa, synthetic construct
  REGION 1..7: note = Description of Artificial Sequence: Synthetic peptide
PSNTGTI

SEQ ID NO: 26152 - protein, 7 aa, synthetic construct
  REGION 1..7: note = Description of Artificial Sequence: Synthetic peptide
SATKSSC

SEQ ID NO: 26153 - protein, 7 aa, synthetic construct
  REGION 1..7: note = Description of Artificial Sequence: Synthetic peptide
QNLNSFS

SEQ ID NO: 26154 - protein, 7 aa, synthetic construct
  REGION 1..7: note = Description of Artificial Sequence: Synthetic peptide
GSASIEK

SEQ ID NO: 26155 - protein, 7 aa, synthetic construct
  REGION 1..7: note = Description of Artificial Sequence: Synthetic peptide
YRPVSVQ

SEQ ID NO: 26156 - protein, 7 aa, synthetic construct
  REGION 1..7: note = Description of Artificial Sequence: Synthetic peptide
FRTTAST

SEQ ID NO: 26157 - protein, 7 aa, synthetic construct
  REGION 1..7: note = Description of Artificial Sequence: Synthetic peptide
NNAATHS

SEQ ID NO: 26158 - protein, 7 aa, synthetic construct
  REGION 1..7: note = Description of Artificial Sequence: Synthetic peptide
TQRSQAA

SEQ ID NO: 26159 - protein, 7 aa, synthetic construct
  REGION 1..7: note = Description of Artificial Sequence: Synthetic peptide
PGSAMLN

SEQ ID NO: 26160 - protein, 7 aa, synthetic construct
  REGION 1..7: note = Description of Artificial Sequence: Synthetic peptide
PYKGNGL

SEQ ID NO: 26161 - protein, 7 aa, synthetic construct
  REGION 1..7: note = Description of Artificial Sequence: Synthetic peptide
ISSGTHG

SEQ ID NO: 26162 - protein, 7 aa, synthetic construct
  REGION 1..7: note = Description of Artificial Sequence: Synthetic peptide
QNLPKAS

SEQ ID NO: 26163 - protein, 7 aa, synthetic construct
  REGION 1..7: note = Description of Artificial Sequence: Synthetic peptide
NPSHTSV

SEQ ID NO: 26164 - protein, 7 aa, synthetic construct
  REGION 1..7: note = Description of Artificial Sequence: Synthetic peptide
YQMTTPQ

SEQ ID NO: 26165 - protein, 7 aa, synthetic construct
  REGION 1..7: note = Description of Artificial Sequence: Synthetic peptide
DSSTRGQ

SEQ ID NO: 26166 - protein, 7 aa, synthetic construct
  REGION 1..7: note = Description of Artificial Sequence: Synthetic peptide
QGHSSFL

SEQ ID NO: 26167 - protein, 7 aa, synthetic construct
  REGION 1..7: note = Description of Artificial Sequence: Synthetic peptide
TSSGNLS

SEQ ID NO: 26168 - protein, 7 aa, synthetic construct
  REGION 1..7: note = Description of Artificial Sequence: Synthetic peptide
SLTSTGK

SEQ ID NO: 26169 - protein, 7 aa, synthetic construct
  REGION 1..7: note = Description of Artificial Sequence: Synthetic peptide
GTDSKRH

SEQ ID NO: 26170 - protein, 7 aa, synthetic construct
  REGION 1..7: note = Description of Artificial Sequence: Synthetic peptide
EGNRSNM

SEQ ID NO: 26171 - protein, 7 aa, synthetic construct
  REGION 1..7: note = Description of Artificial Sequence: Synthetic peptide
YNRTSIV

SEQ ID NO: 26172 - protein, 7 aa, synthetic construct
  REGION 1..7: note = Description of Artificial Sequence: Synthetic peptide
SLNAPNR

SEQ ID NO: 26173 - protein, 7 aa, synthetic construct
  REGION 1..7: note = Description of Artificial Sequence: Synthetic peptide
VLSSSPK

SEQ ID NO: 26174 - protein, 7 aa, synthetic construct
  REGION 1..7: note = Description of Artificial Sequence: Synthetic peptide
PGQKQGI

SEQ ID NO: 26175 - protein, 7 aa, synthetic construct
  REGION 1..7: note = Description of Artificial Sequence: Synthetic peptide
ETRKQGV

SEQ ID NO: 26176 - protein, 7 aa, synthetic construct
  REGION 1..7: note = Description of Artificial Sequence: Synthetic peptide
TPQNVRN

SEQ ID NO: 26177 - protein, 7 aa, synthetic construct
  REGION 1..7: note = Description of Artificial Sequence: Synthetic peptide
QDATPRS

SEQ ID NO: 26178 - protein, 7 aa, synthetic construct
  REGION 1..7: note = Description of Artificial Sequence: Synthetic peptide
SPNANSV

SEQ ID NO: 26179 - protein, 7 aa, synthetic construct
  REGION 1..7: note = Description of Artificial Sequence: Synthetic peptide
QDMRLSG

SEQ ID NO: 26180 - protein, 7 aa, synthetic construct
  REGION 1..7: note = Description of Artificial Sequence: Synthetic peptide
NRVKPMV

SEQ ID NO: 26181 - protein, 7 aa, synthetic construct
  REGION 1..7: note = Description of Artificial Sequence: Synthetic peptide
PGESGKV

SEQ ID NO: 26182 - protein, 7 aa, synthetic construct
  REGION 1..7: note = Description of Artificial Sequence: Synthetic peptide
YRNVNAM

SEQ ID NO: 26183 - protein, 7 aa, synthetic construct
  REGION 1..7: note = Description of Artificial Sequence: Synthetic peptide
FPSVSTT

SEQ ID NO: 26184 - protein, 7 aa, synthetic construct
  REGION 1..7: note = Description of Artificial Sequence: Synthetic peptide
STVATSF

SEQ ID NO: 26185 - protein, 7 aa, synthetic construct
  REGION 1..7: note = Description of Artificial Sequence: Synthetic peptide
PSARMSG

SEQ ID NO: 26186 - protein, 7 aa, synthetic construct
  REGION 1..7: note = Description of Artificial Sequence: Synthetic peptide
HLRGSNT

SEQ ID NO: 26187 - protein, 7 aa, synthetic construct
  REGION 1..7: note = Description of Artificial Sequence: Synthetic peptide
VGAATIR

SEQ ID NO: 26188 - protein, 7 aa, synthetic construct
  REGION 1..7: note = Description of Artificial Sequence: Synthetic peptide
GSRDKST

SEQ ID NO: 26189 - protein, 7 aa, synthetic construct
  REGION 1..7: note = Description of Artificial Sequence: Synthetic peptide
RLVPASG

SEQ ID NO: 26190 - protein, 7 aa, synthetic construct
  REGION 1..7: note = Description of Artificial Sequence: Synthetic peptide
ISQSTTR

SEQ ID NO: 26191 - protein, 7 aa, synthetic construct
  REGION 1..7: note = Description of Artificial Sequence: Synthetic peptide
SSSAPRL

SEQ ID NO: 26192 - protein, 7 aa, synthetic construct
  REGION 1..7: note = Description of Artificial Sequence: Synthetic peptide
WMSGKNS

SEQ ID NO: 26193 - protein, 7 aa, synthetic construct
  REGION 1..7: note = Description of Artificial Sequence: Synthetic peptide
QHTTTNQ

SEQ ID NO: 26194 - protein, 7 aa, synthetic construct
  REGION 1..7: note = Description of Artificial Sequence: Synthetic peptide
YSGGTQQ

SEQ ID NO: 26195 - protein, 7 aa, synthetic construct
  REGION 1..7: note = Description of Artificial Sequence: Synthetic peptide
LLSAKGG

SEQ ID NO: 26196 - protein, 7 aa, synthetic construct
  REGION 1..7: note = Description of Artificial Sequence: Synthetic peptide
QEGVRSS

SEQ ID NO: 26197 - protein, 7 aa, synthetic construct
  REGION 1..7: note = Description of Artificial Sequence: Synthetic peptide
ASRAPPG

SEQ ID NO: 26198 - protein, 7 aa, synthetic construct
  REGION 1..7: note = Description of Artificial Sequence: Synthetic peptide
QRTVGTA

SEQ ID NO: 26199 - protein, 7 aa, synthetic construct
  REGION 1..7: note = Description of Artificial Sequence: Synthetic peptide
SSSTSPR

SEQ ID NO: 26200 - protein, 7 aa, synthetic construct
  REGION 1..7: note = Description of Artificial Sequence: Synthetic peptide
QTQGQLK

SEQ ID NO: 26201 - protein, 7 aa, synthetic construct
  REGION 1..7: note = Description of Artificial Sequence: Synthetic peptide
GPTDHKL

SEQ ID NO: 26202 - protein, 7 aa, synthetic construct
  REGION 1..7: note = Description of Artificial Sequence: Synthetic peptide
GVNNNIN

SEQ ID NO: 26203 - protein, 7 aa, synthetic construct
  REGION 1..7: note = Description of Artificial Sequence: Synthetic peptide
AGRASNT

SEQ ID NO: 26204 - protein, 7 aa, synthetic construct
  REGION 1..7: note = Description of Artificial Sequence: Synthetic peptide
SSAKSSL

SEQ ID NO: 26205 - protein, 7 aa, synthetic construct
  REGION 1..7: note = Description of Artificial Sequence: Synthetic peptide
TSKNAAM

SEQ ID NO: 26206 - protein, 7 aa, synthetic construct
  REGION 1..7: note = Description of Artificial Sequence: Synthetic peptide
AAQPSLK

SEQ ID NO: 26207 - protein, 7 aa, synthetic construct
  REGION 1..7: note = Description of Artificial Sequence: Synthetic peptide
HREIVMK

SEQ ID NO: 26208 - protein, 7 aa, synthetic construct
  REGION 1..7: note = Description of Artificial Sequence: Synthetic peptide
NNTQKNS

SEQ ID NO: 26209 - protein, 7 aa, synthetic construct
  REGION 1..7: note = Description of Artificial Sequence: Synthetic peptide
GARPVLQ

SEQ ID NO: 26210 - protein, 7 aa, synthetic construct
  REGION 1..7: note = Description of Artificial Sequence: Synthetic peptide
GGDNKLT

SEQ ID NO: 26211 - protein, 7 aa, synthetic construct
  REGION 1..7: note = Description of Artificial Sequence: Synthetic peptide
NCSGQNQ

SEQ ID NO: 26212 - protein, 7 aa, synthetic construct
  REGION 1..7: note = Description of Artificial Sequence: Synthetic peptide
NGSPGFY

SEQ ID NO: 26213 - protein, 7 aa, synthetic construct
  REGION 1..7: note = Description of Artificial Sequence: Synthetic peptide
RRQDTQE

SEQ ID NO: 26214 - protein, 7 aa, synthetic construct
  REGION 1..7: note = Description of Artificial Sequence: Synthetic peptide
ISGLDGN

SEQ ID NO: 26215 - protein, 7 aa, synthetic construct
  REGION 1..7: note = Description of Artificial Sequence: Synthetic peptide
NRNGFNN

SEQ ID NO: 26216 - protein, 7 aa, synthetic construct
  REGION 1..7: note = Description of Artificial Sequence: Synthetic peptide
NSSGQNQ

SEQ ID NO: 26217 - protein, 7 aa, synthetic construct
  REGION 1..7: note = Description of Artificial Sequence: Synthetic peptide
NNNSGSG

SEQ ID NO: 26218 - protein, 7 aa, synthetic construct
  REGION 1..7: note = Description of Artificial Sequence: Synthetic peptide
GLSPVLK

SEQ ID NO: 26219 - protein, 7 aa, synthetic construct
  REGION 1..7: note = Description of Artificial Sequence: Synthetic peptide
NGAGQNQ

SEQ ID NO: 26220 - protein, 7 aa, synthetic construct
  REGION 1..7: note = Description of Artificial Sequence: Synthetic peptide
NGSGQSQ

SEQ ID NO: 26221 - protein, 7 aa, synthetic construct
  REGION 1..7: note = Description of Artificial Sequence: Synthetic peptide
DFSEKRL

SEQ ID NO: 26222 - protein, 7 aa, synthetic construct
  REGION 1..7: note = Description of Artificial Sequence: Synthetic peptide
GTDNNTR

SEQ ID NO: 26223 - protein, 7 aa, synthetic construct
  REGION 1..7: note = Description of Artificial Sequence: Synthetic peptide
EVFSSQK

SEQ ID NO: 26224 - protein, 7 aa, synthetic construct
  REGION 1..7: note = Description of Artificial Sequence: Synthetic peptide
PSNTGTI

SEQ ID NO: 26225 - protein, 7 aa, synthetic construct
  REGION 1..7: note = Description of Artificial Sequence: Synthetic peptide
MGAGALT

SEQ ID NO: 26226 - protein, 7 aa, synthetic construct
  REGION 1..7: note = Description of Artificial Sequence: Synthetic peptide
FRSKESA

SEQ ID NO: 26227 - protein, 7 aa, synthetic construct
  REGION 1..7: note = Description of Artificial Sequence: Synthetic peptide
QQGVGNN

SEQ ID NO: 26228 - protein, 7 aa, synthetic construct
  REGION 1..7: note = Description of Artificial Sequence: Synthetic peptide
DSRNNMT

SEQ ID NO: 26229 - protein, 7 aa, synthetic construct
  REGION 1..7: note = Description of Artificial Sequence: Synthetic peptide
MSRSDPP

SEQ ID NO: 26230 - protein, 7 aa, synthetic construct
  REGION 1..7: note = Description of Artificial Sequence: Synthetic peptide
QYDSSSG

SEQ ID NO: 26231 - protein, 7 aa, synthetic construct
  REGION 1..7: note = Description of Artificial Sequence: Synthetic peptide
FNSSSGS

SEQ ID NO: 26232 - protein, 7 aa, synthetic construct
  REGION 1..7: note = Description of Artificial Sequence: Synthetic peptide
YPSSVQQ

SEQ ID NO: 26233 - protein, 7 aa, synthetic construct
  REGION 1..7: note = Description of Artificial Sequence: Synthetic peptide
NATSPRK

SEQ ID NO: 26234 - protein, 7 aa, synthetic construct
  REGION 1..7: note = Description of Artificial Sequence: Synthetic peptide
NGSGQIQ

SEQ ID NO: 26235 - protein, 7 aa, synthetic construct
  REGION 1..7: note = Description of Artificial Sequence: Synthetic peptide
RPESSYS

SEQ ID NO: 26236 - protein, 7 aa, synthetic construct
  REGION 1..7: note = Description of Artificial Sequence: Synthetic peptide
NAVRSEN

SEQ ID NO: 26237 - protein, 7 aa, synthetic construct
  REGION 1..7: note = Description of Artificial Sequence: Synthetic peptide
SVGSGAL

SEQ ID NO: 26238 - protein, 7 aa, synthetic construct
  REGION 1..7: note = Description of Artificial Sequence: Synthetic peptide
TTQTPYK

SEQ ID NO: 26239 - protein, 7 aa, synthetic construct
  REGION 1..7: note = Description of Artificial Sequence: Synthetic peptide
NGCGQNQ

SEQ ID NO: 26240 - protein, 7 aa, synthetic construct
  REGION 1..7: note = Description of Artificial Sequence: Synthetic peptide
YSDNKTT

SEQ ID NO: 26241 - protein, 7 aa, synthetic construct
  REGION 1..7: note = Description of Artificial Sequence: Synthetic peptide
MRQDTSK

SEQ ID NO: 26242 - protein, 7 aa, synthetic construct
  REGION 1..7: note = Description of Artificial Sequence: Synthetic peptide
LNSGNGS

SEQ ID NO: 26243 - protein, 7 aa, synthetic construct
  REGION 1..7: note = Description of Artificial Sequence: Synthetic peptide
SSNEKDR

SEQ ID NO: 26244 - protein, 7 aa, synthetic construct
  REGION 1..7: note = Description of Artificial Sequence: Synthetic peptide
LPSGNTS

SEQ ID NO: 26245 - protein, 7 aa, synthetic construct
  REGION 1..7: note = Description of Artificial Sequence: Synthetic peptide
NPGHKLT

SEQ ID NO: 26246 - protein, 7 aa, synthetic construct
  REGION 1..7: note = Description of Artificial Sequence: Synthetic peptide
QTSSHAY

SEQ ID NO: 26247 - protein, 7 aa, synthetic construct
  REGION 1..7: note = Description of Artificial Sequence: Synthetic peptide
SNNGTQK

SEQ ID NO: 26248 - protein, 7 aa, synthetic construct
  REGION 1..7: note = Description of Artificial Sequence: Synthetic peptide
GDHNRIN

SEQ ID NO: 26249 - protein, 7 aa, synthetic construct
  REGION 1..7: note = Description of Artificial Sequence: Synthetic peptide
VSGTKIE

SEQ ID NO: 26250 - protein, 7 aa, synthetic construct
  REGION 1..7: note = Description of Artificial Sequence: Synthetic peptide
VGEAGKA

SEQ ID NO: 26251 - protein, 7 aa, synthetic construct
  REGION 1..7: note = Description of Artificial Sequence: Synthetic peptide
IAGRGLG

SEQ ID NO: 26252 - protein, 7 aa, synthetic construct
  REGION 1..7: note = Description of Artificial Sequence: Synthetic peptide
NVLGREG

SEQ ID NO: 26253 - protein, 7 aa, synthetic construct
  REGION 1..7: note = Description of Artificial Sequence: Synthetic peptide
SGQHSLN

SEQ ID NO: 26254 - protein, 7 aa, synthetic construct
  REGION 1..7: note = Description of Artificial Sequence: Synthetic peptide
NGSGQTQ

SEQ ID NO: 26255 - protein, 7 aa, synthetic construct
  REGION 1..7: note = Description of Artificial Sequence: Synthetic peptide
DMVSPRN

SEQ ID NO: 26256 - protein, 7 aa, synthetic construct
  REGION 1..7: note = Description of Artificial Sequence: Synthetic peptide
MTTQLNS

SEQ ID NO: 26257 - protein, 7 aa, synthetic construct
  REGION 1..7: note = Description of Artificial Sequence: Synthetic peptide
QTPVSAP

SEQ ID NO: 26258 - protein, 7 aa, synthetic construct
  REGION 1..7: note = Description of Artificial Sequence: Synthetic peptide
NVATLSA

SEQ ID NO: 26259 - protein, 7 aa, synthetic construct
  REGION 1..7: note = Description of Artificial Sequence: Synthetic peptide
SADHIRN

SEQ ID NO: 26260 - protein, 7 aa, synthetic construct
  REGION 1..7: note = Description of Artificial Sequence: Synthetic peptide
SVSTNFS

SEQ ID NO: 26261 - protein, 7 aa, synthetic construct
  REGION 1..7: note = Description of Artificial Sequence: Synthetic peptide
NDSGQNQ

SEQ ID NO: 26262 - protein, 7 aa, synthetic construct
  REGION 1..7: note = Description of Artificial Sequence: Synthetic peptide
ATGSPSK

SEQ ID NO: 26263 - protein, 7 aa, synthetic construct
  REGION 1..7: note = Description of Artificial Sequence: Synthetic peptide
TQQHGSN

SEQ ID NO: 26264 - protein, 7 aa, synthetic construct
  REGION 1..7: note = Description of Artificial Sequence: Synthetic peptide
ENRTSVQ

SEQ ID NO: 26265 - protein, 7 aa, synthetic construct
  REGION 1..7: note = Description of Artificial Sequence: Synthetic peptide
TSQVSHG

SEQ ID NO: 26266 - protein, 7 aa, synthetic construct
  REGION 1..7: note = Description of Artificial Sequence: Synthetic peptide
DRVLSQG

SEQ ID NO: 26267 - protein, 7 aa, synthetic construct
  REGION 1..7: note = Description of Artificial Sequence: Synthetic peptide
DSGSSTK

SEQ ID NO: 26268 - protein, 7 aa, synthetic construct
  REGION 1..7: note = Description of Artificial Sequence: Synthetic peptide
PTHASSL

SEQ ID NO: 26269 - protein, 7 aa, synthetic construct
  REGION 1..7: note = Description of Artificial Sequence: Synthetic peptide
NGSGQNP

SEQ ID NO: 26270 - protein, 7 aa, synthetic construct
  REGION 1..7: note = Description of Artificial Sequence: Synthetic peptide
PNGAHVT

SEQ ID NO: 26271 - protein, 7 aa, synthetic construct
  REGION 1..7: note = Description of Artificial Sequence: Synthetic peptide
GAKESQS

SEQ ID NO: 26272 - protein, 7 aa, synthetic construct
  REGION 1..7: note = Description of Artificial Sequence: Synthetic peptide
GHDGQSR

SEQ ID NO: 26273 - protein, 7 aa, synthetic construct
  REGION 1..7: note = Description of Artificial Sequence: Synthetic peptide
RSYEGMQ

SEQ ID NO: 26274 - protein, 7 aa, synthetic construct
  REGION 1..7: note = Description of Artificial Sequence: Synthetic peptide
TTVGSGY

SEQ ID NO: 26275 - protein, 7 aa, synthetic construct
  REGION 1..7: note = Description of Artificial Sequence: Synthetic peptide
GIATTNR

SEQ ID NO: 26276 - protein, 7 aa, synthetic construct
  REGION 1..7: note = Description of Artificial Sequence: Synthetic peptide
SYSGTLG

SEQ ID NO: 26277 - protein, 7 aa, synthetic construct
  REGION 1..7: note = Description of Artificial Sequence: Synthetic peptide
FSTHEVS

SEQ ID NO: 26278 - protein, 7 aa, synthetic construct
  REGION 1..7: note = Description of Artificial Sequence: Synthetic peptide
ITGNQGV

SEQ ID NO: 26279 - protein, 7 aa, synthetic construct
  REGION 1..7: note = Description of Artificial Sequence: Synthetic peptide
STVGHMN

SEQ ID NO: 26280 - protein, 7 aa, synthetic construct
  REGION 1..7: note = Description of Artificial Sequence: Synthetic peptide
SGVKAFS

SEQ ID NO: 26281 - protein, 7 aa, synthetic construct
  REGION 1..7: note = Description of Artificial Sequence: Synthetic peptide
HKVPGSG

SEQ ID NO: 26282 - protein, 7 aa, synthetic construct
  REGION 1..7: note = Description of Artificial Sequence: Synthetic peptide
SNDSNKK

SEQ ID NO: 26283 - protein, 7 aa, synthetic construct
  REGION 1..7: note = Description of Artificial Sequence: Synthetic peptide
NNGASVV

SEQ ID NO: 26284 - protein, 7 aa, synthetic construct
  REGION 1..7: note = Description of Artificial Sequence: Synthetic peptide
TASPNNR

SEQ ID NO: 26285 - protein, 7 aa, synthetic construct
  REGION 1..7: note = Description of Artificial Sequence: Synthetic peptide
TNPKSSS

SEQ ID NO: 26286 - protein, 7 aa, synthetic construct
  REGION 1..7: note = Description of Artificial Sequence: Synthetic peptide
FNQHSSL

SEQ ID NO: 26287 - protein, 7 aa, synthetic construct
  REGION 1..7: note = Description of Artificial Sequence: Synthetic peptide
TPQNSVK

SEQ ID NO: 26288 - protein, 7 aa, synthetic construct
  REGION 1..7: note = Description of Artificial Sequence: Synthetic peptide
GGLSPKV

SEQ ID NO: 26289 - protein, 7 aa, synthetic construct
  REGION 1..7: note = Description of Artificial Sequence: Synthetic peptide
STGSVSK

SEQ ID NO: 26290 - protein, 7 aa, synthetic construct
  REGION 1..7: note = Description of Artificial Sequence: Synthetic peptide
TLPSNYM

SEQ ID NO: 26291 - protein, 7 aa, synthetic construct
  REGION 1..7: note = Description of Artificial Sequence: Synthetic peptide
MAAKPND

SEQ ID NO: 26292 - protein, 7 aa, synthetic construct
  REGION 1..7: note = Description of Artificial Sequence: Synthetic peptide
PGTGSNH

SEQ ID NO: 26293 - protein, 7 aa, synthetic construct
  REGION 1..7: note = Description of Artificial Sequence: Synthetic peptide
GSAGNML

SEQ ID NO: 26294 - protein, 7 aa, synthetic construct
  REGION 1..7: note = Description of Artificial Sequence: Synthetic peptide
DANSTHA

SEQ ID NO: 26295 - protein, 7 aa, synthetic construct
  REGION 1..7: note = Description of Artificial Sequence: Synthetic peptide
QLRSDQT

SEQ ID NO: 26296 - protein, 7 aa, synthetic construct
  REGION 1..7: note = Description of Artificial Sequence: Synthetic peptide
NLKTKGE

SEQ ID NO: 26297 - protein, 7 aa, synthetic construct
  REGION 1..7: note = Description of Artificial Sequence: Synthetic peptide
SISDKLG

SEQ ID NO: 26298 - protein, 7 aa, synthetic construct
  REGION 1..7: note = Description of Artificial Sequence: Synthetic peptide
ERPGGTP

SEQ ID NO: 26299 - protein, 7 aa, synthetic construct
  REGION 1..7: note = Description of Artificial Sequence: Synthetic peptide
SNSRQAD

SEQ ID NO: 26300 - protein, 7 aa, synthetic construct
  REGION 1..7: note = Description of Artificial Sequence: Synthetic peptide
ESVSNSL

SEQ ID NO: 26301 - protein, 7 aa, synthetic construct
  REGION 1..7: note = Description of Artificial Sequence: Synthetic peptide
NASGQNQ

SEQ ID NO: 26302 - protein, 7 aa, synthetic construct
  REGION 1..7: note = Description of Artificial Sequence: Synthetic peptide
LLSQHSD

SEQ ID NO: 26303 - protein, 7 aa, synthetic construct
  REGION 1..7: note = Description of Artificial Sequence: Synthetic peptide
SVTSPNK

SEQ ID NO: 26304 - protein, 7 aa, synthetic construct
  REGION 1..7: note = Description of Artificial Sequence: Synthetic peptide
ATGNGRG

SEQ ID NO: 26305 - protein, 7 aa, synthetic construct
  REGION 1..7: note = Description of Artificial Sequence: Synthetic peptide
IRSKESE

SEQ ID NO: 26306 - protein, 7 aa, synthetic construct
  REGION 1..7: note = Description of Artificial Sequence: Synthetic peptide
SGTNMWQ

SEQ ID NO: 26307 - protein, 7 aa, synthetic construct
  REGION 1..7: note = Description of Artificial Sequence: Synthetic peptide
PTTRMVN

SEQ ID NO: 26308 - protein, 7 aa, synthetic construct
  REGION 1..7: note = Description of Artificial Sequence: Synthetic peptide
GDKNHGS

SEQ ID NO: 26309 - protein, 7 aa, synthetic construct
  REGION 1..7: note = Description of Artificial Sequence: Synthetic peptide
QSHGITN

SEQ ID NO: 26310 - protein, 7 aa, synthetic construct
  REGION 1..7: note = Description of Artificial Sequence: Synthetic peptide
NSTPSTR

SEQ ID NO: 26311 - protein, 7 aa, synthetic construct
  REGION 1..7: note = Description of Artificial Sequence: Synthetic peptide
LVQGGVN

SEQ ID NO: 26312 - protein, 7 aa, synthetic construct
  REGION 1..7: note = Description of Artificial Sequence: Synthetic peptide
IPTARAA

SEQ ID NO: 26313 - protein, 7 aa, synthetic construct
  REGION 1..7: note = Description of Artificial Sequence: Synthetic peptide
YNHGSVD

SEQ ID NO: 26314 - protein, 7 aa, synthetic construct
  REGION 1..7: note = Description of Artificial Sequence: Synthetic peptide
WSLGHND

SEQ ID NO: 26315 - protein, 7 aa, synthetic construct
  REGION 1..7: note = Description of Artificial Sequence: Synthetic peptide
TQSHNLA

SEQ ID NO: 26316 - protein, 7 aa, synthetic construct
  REGION 1..7: note = Description of Artificial Sequence: Synthetic peptide
NPGSGYG

SEQ ID NO: 26317 - protein, 7 aa, synthetic construct
  REGION 1..7: note = Description of Artificial Sequence: Synthetic peptide
NPSHTSV

SEQ ID NO: 26318 - protein, 7 aa, synthetic construct
  REGION 1..7: note = Description of Artificial Sequence: Synthetic peptide
QSNTSPT

SEQ ID NO: 26319 - protein, 7 aa, synthetic construct
  REGION 1..7: note = Description of Artificial Sequence: Synthetic peptide
PGSGSNH

SEQ ID NO: 26320 - protein, 7 aa, synthetic construct
  REGION 1..7: note = Description of Artificial Sequence: Synthetic peptide
ARGASTN

SEQ ID NO: 26321 - protein, 7 aa, synthetic construct
  REGION 1..7: note = Description of Artificial Sequence: Synthetic peptide
DNMSTPK

SEQ ID NO: 26322 - protein, 7 aa, synthetic construct
  REGION 1..7: note = Description of Artificial Sequence: Synthetic peptide
TATQKGQ

SEQ ID NO: 26323 - protein, 7 aa, synthetic construct
  REGION 1..7: note = Description of Artificial Sequence: Synthetic peptide
MPTSSLN

SEQ ID NO: 26324 - protein, 7 aa, synthetic construct
  REGION 1..7: note = Description of Artificial Sequence: Synthetic peptide
SSHKDYL

SEQ ID NO: 26325 - protein, 7 aa, synthetic construct
  REGION 1..7: note = Description of Artificial Sequence: Synthetic peptide
AGASSNT

SEQ ID NO: 26326 - protein, 7 aa, synthetic construct
  REGION 1..7: note = Description of Artificial Sequence: Synthetic peptide
SVHSNAI

SEQ ID NO: 26327 - protein, 7 aa, synthetic construct
  REGION 1..7: note = Description of Artificial Sequence: Synthetic peptide
VLAGSNT

SEQ ID NO: 26328 - protein, 7 aa, synthetic construct
  REGION 1..7: note = Description of Artificial Sequence: Synthetic peptide
QTGTSST

SEQ ID NO: 26329 - protein, 7 aa, synthetic construct
  REGION 1..7: note = Description of Artificial Sequence: Synthetic peptide
ASTPNNT

SEQ ID NO: 26330 - protein, 7 aa, synthetic construct
  REGION 1..7: note = Description of Artificial Sequence: Synthetic peptide
TNIQASK

SEQ ID NO: 26331 - protein, 7 aa, synthetic construct
  REGION 1..7: note = Description of Artificial Sequence: Synthetic peptide
APSHASL

SEQ ID NO: 26332 - protein, 7 aa, synthetic construct
  REGION 1..7: note = Description of Artificial Sequence: Synthetic peptide
GQIKNLG

SEQ ID NO: 26333 - protein, 7 aa, synthetic construct
  REGION 1..7: note = Description of Artificial Sequence: Synthetic peptide
GLDHLRT

SEQ ID NO: 26334 - protein, 7 aa, synthetic construct
  REGION 1..7: note = Description of Artificial Sequence: Synthetic peptide
SLSREHM

SEQ ID NO: 26335 - protein, 7 aa, synthetic construct
  REGION 1..7: note = Description of Artificial Sequence: Synthetic peptide
TPTLAHG

SEQ ID NO: 26336 - protein, 7 aa, synthetic construct
  REGION 1..7: note = Description of Artificial Sequence: Synthetic peptide
SVHQNRA

SEQ ID NO: 26337 - protein, 7 aa, synthetic construct
  REGION 1..7: note = Description of Artificial Sequence: Synthetic peptide
SRDSGGA

SEQ ID NO: 26338 - protein, 7 aa, synthetic construct
  REGION 1..7: note = Description of Artificial Sequence: Synthetic peptide
SSEARLM

SEQ ID NO: 26339 - protein, 7 aa, synthetic construct
  REGION 1..7: note = Description of Artificial Sequence: Synthetic peptide
STSRDAT

SEQ ID NO: 26340 - protein, 7 aa, synthetic construct
  REGION 1..7: note = Description of Artificial Sequence: Synthetic peptide
CNQSPNR

SEQ ID NO: 26341 - protein, 7 aa, synthetic construct
  REGION 1..7: note = Description of Artificial Sequence: Synthetic peptide
GQTRESS

SEQ ID NO: 26342 - protein, 7 aa, synthetic construct
  REGION 1..7: note = Description of Artificial Sequence: Synthetic peptide
SSTKSSL

SEQ ID NO: 26343 - protein, 7 aa, synthetic construct
  REGION 1..7: note = Description of Artificial Sequence: Synthetic peptide
PLASPMV

SEQ ID NO: 26344 - protein, 7 aa, synthetic construct
  REGION 1..7: note = Description of Artificial Sequence: Synthetic peptide
GTSPSTM

SEQ ID NO: 26345 - protein, 7 aa, synthetic construct
  REGION 1..7: note = Description of Artificial Sequence: Synthetic peptide
ISKASTH

SEQ ID NO: 26346 - protein, 7 aa, synthetic construct
  REGION 1..7: note = Description of Artificial Sequence: Synthetic peptide
NGNISIG

SEQ ID NO: 26347 - protein, 7 aa, synthetic construct
  REGION 1..7: note = Description of Artificial Sequence: Synthetic peptide
TAVTANQ

SEQ ID NO: 26348 - protein, 7 aa, synthetic construct
  REGION 1..7: note = Description of Artificial Sequence: Synthetic peptide
DGGNQRS

SEQ ID NO: 26349 - protein, 7 aa, synthetic construct
  REGION 1..7: note = Description of Artificial Sequence: Synthetic peptide
DDRSNLS

SEQ ID NO: 26350 - protein, 7 aa, synthetic construct
  REGION 1..7: note = Description of Artificial Sequence: Synthetic peptide
PVPYRAD

SEQ ID NO: 26351 - protein, 7 aa, synthetic construct
  REGION 1..7: note = Description of Artificial Sequence: Synthetic peptide
NSREKGA

SEQ ID NO: 26352 - protein, 7 aa, synthetic construct
  REGION 1..7: note = Description of Artificial Sequence: Synthetic peptide
RLPAHQA

SEQ ID NO: 26353 - protein, 7 aa, synthetic construct
  REGION 1..7: note = Description of Artificial Sequence: Synthetic peptide
NANQNQM

SEQ ID NO: 26354 - protein, 7 aa, synthetic construct
  REGION 1..7: note = Description of Artificial Sequence: Synthetic peptide
YNVNRNT

SEQ ID NO: 26355 - protein, 7 aa, synthetic construct
  REGION 1..7: note = Description of Artificial Sequence: Synthetic peptide
YSGGNMS

SEQ ID NO: 26356 - protein, 7 aa, synthetic construct
  REGION 1..7: note = Description of Artificial Sequence: Synthetic peptide
ATNNGSK

SEQ ID NO: 26357 - protein, 7 aa, synthetic construct
  REGION 1..7: note = Description of Artificial Sequence: Synthetic peptide
DSIGSSK

SEQ ID NO: 26358 - protein, 7 aa, synthetic construct
  REGION 1..7: note = Description of Artificial Sequence: Synthetic peptide
DGIKSYA

SEQ ID NO: 26359 - protein, 7 aa, synthetic construct
  REGION 1..7: note = Description of Artificial Sequence: Synthetic peptide
SRPSNMA

SEQ ID NO: 26360 - protein, 7 aa, synthetic construct
  REGION 1..7: note = Description of Artificial Sequence: Synthetic peptide
GLPTEKM

SEQ ID NO: 26361 - protein, 7 aa, synthetic construct
  REGION 1..7: note = Description of Artificial Sequence: Synthetic peptide
NGSAQNQ

SEQ ID NO: 26362 - protein, 7 aa, synthetic construct
  REGION 1..7: note = Description of Artificial Sequence: Synthetic peptide
TSRVGQV

SEQ ID NO: 26363 - protein, 7 aa, synthetic construct
  REGION 1..7: note = Description of Artificial Sequence: Synthetic peptide
STSNIAS

SEQ ID NO: 26364 - protein, 7 aa, synthetic construct
  REGION 1..7: note = Description of Artificial Sequence: Synthetic peptide
NANPSLR

SEQ ID NO: 26365 - protein, 7 aa, synthetic construct
  REGION 1..7: note = Description of Artificial Sequence: Synthetic peptide
ESNSSRG

SEQ ID NO: 26366 - protein, 7 aa, synthetic construct
  REGION 1..7: note = Description of Artificial Sequence: Synthetic peptide
SGGQAMG

SEQ ID NO: 26367 - protein, 7 aa, synthetic construct
  REGION 1..7: note = Description of Artificial Sequence: Synthetic peptide
FVNTSAQ

SEQ ID NO: 26368 - protein, 7 aa, synthetic construct
  REGION 1..7: note = Description of Artificial Sequence: Synthetic peptide
MMGGVKN

SEQ ID NO: 26369 - protein, 7 aa, synthetic construct
  REGION 1..7: note = Description of Artificial Sequence: Synthetic peptide
HTPDVGK

SEQ ID NO: 26370 - protein, 7 aa, synthetic construct
  REGION 1..7: note = Description of Artificial Sequence: Synthetic peptide
RSSSAMT

SEQ ID NO: 26371 - protein, 7 aa, synthetic construct
  REGION 1..7: note = Description of Artificial Sequence: Synthetic peptide
SQIPPST

SEQ ID NO: 26372 - protein, 7 aa, synthetic construct
  REGION 1..7: note = Description of Artificial Sequence: Synthetic peptide
SGSNNFL

SEQ ID NO: 26373 - protein, 7 aa, synthetic construct
  REGION 1..7: note = Description of Artificial Sequence: Synthetic peptide
MRAESGQ

SEQ ID NO: 26374 - protein, 7 aa, synthetic construct
  REGION 1..7: note = Description of Artificial Sequence: Synthetic peptide
SISHSSS

SEQ ID NO: 26375 - protein, 7 aa, synthetic construct
  REGION 1..7: note = Description of Artificial Sequence: Synthetic peptide
YRASGIS

SEQ ID NO: 26376 - protein, 7 aa, synthetic construct
  REGION 1..7: note = Description of Artificial Sequence: Synthetic peptide
SGTTTFG

SEQ ID NO: 26377 - protein, 7 aa, synthetic construct
  REGION 1..7: note = Description of Artificial Sequence: Synthetic peptide
ALSSQKG

SEQ ID NO: 26378 - protein, 7 aa, synthetic construct
  REGION 1..7: note = Description of Artificial Sequence: Synthetic peptide
LGVKTPT

SEQ ID NO: 26379 - protein, 7 aa, synthetic construct
  REGION 1..7: note = Description of Artificial Sequence: Synthetic peptide
NDRGQNG

SEQ ID NO: 26380 - protein, 7 aa, synthetic construct
  REGION 1..7: note = Description of Artificial Sequence: Synthetic peptide
FHANSTV

SEQ ID NO: 26381 - protein, 7 aa, synthetic construct
  REGION 1..7: note = Description of Artificial Sequence: Synthetic peptide
KSVNPLL

SEQ ID NO: 26382 - protein, 7 aa, synthetic construct
  REGION 1..7: note = Description of Artificial Sequence: Synthetic peptide
HSSRPLE

SEQ ID NO: 26383 - protein, 7 aa, synthetic construct
  REGION 1..7: note = Description of Artificial Sequence: Synthetic peptide
SDNKGSV

SEQ ID NO: 26384 - protein, 7 aa, synthetic construct
  REGION 1..7: note = Description of Artificial Sequence: Synthetic peptide
RMGNKEA

SEQ ID NO: 26385 - protein, 7 aa, synthetic construct
  REGION 1..7: note = Description of Artificial Sequence: Synthetic peptide
GLADPRT

SEQ ID NO: 26386 - protein, 7 aa, synthetic construct
  REGION 1..7: note = Description of Artificial Sequence: Synthetic peptide
ITSTGSS

SEQ ID NO: 26387 - protein, 7 aa, synthetic construct
  REGION 1..7: note = Description of Artificial Sequence: Synthetic peptide
AGSSPPT

SEQ ID NO: 26388 - protein, 7 aa, synthetic construct
  REGION 1..7: note = Description of Artificial Sequence: Synthetic peptide
PLPKNSS

SEQ ID NO: 26389 - protein, 7 aa, synthetic construct
  REGION 1..7: note = Description of Artificial Sequence: Synthetic peptide
SRVDQYK

SEQ ID NO: 26390 - protein, 7 aa, synthetic construct
  REGION 1..7: note = Description of Artificial Sequence: Synthetic peptide
GMTQGGK

SEQ ID NO: 26391 - protein, 7 aa, synthetic construct
  REGION 1..7: note = Description of Artificial Sequence: Synthetic peptide
QFPGTLR

SEQ ID NO: 26392 - protein, 7 aa, synthetic construct
  REGION 1..7: note = Description of Artificial Sequence: Synthetic peptide
GANTNPG

SEQ ID NO: 26393 - protein, 7 aa, synthetic construct
  REGION 1..7: note = Description of Artificial Sequence: Synthetic peptide
DRADANS

SEQ ID NO: 26394 - protein, 7 aa, synthetic construct
  REGION 1..7: note = Description of Artificial Sequence: Synthetic peptide
TTHNIKG

SEQ ID NO: 26395 - protein, 7 aa, synthetic construct
  REGION 1..7: note = Description of Artificial Sequence: Synthetic peptide
VGSQTNS

SEQ ID NO: 26396 - protein, 7 aa, synthetic construct
  REGION 1..7: note = Description of Artificial Sequence: Synthetic peptide
HTATPLL

SEQ ID NO: 26397 - protein, 7 aa, synthetic construct
  REGION 1..7: note = Description of Artificial Sequence: Synthetic peptide
AVGKSTE

SEQ ID NO: 26398 - protein, 7 aa, synthetic construct
  REGION 1..7: note = Description of Artificial Sequence: Synthetic peptide
GAAVQAN

SEQ ID NO: 26399 - protein, 7 aa, synthetic construct
  REGION 1..7: note = Description of Artificial Sequence: Synthetic peptide
DPLGKQG

SEQ ID NO: 26400 - protein, 7 aa, synthetic construct
  REGION 1..7: note = Description of Artificial Sequence: Synthetic peptide
SIKSAAA

SEQ ID NO: 26401 - protein, 7 aa, synthetic construct
  REGION 1..7: note = Description of Artificial Sequence: Synthetic peptide
SNQRGEG

SEQ ID NO: 26402 - protein, 7 aa, synthetic construct
  REGION 1..7: note = Description of Artificial Sequence: Synthetic peptide
HGISNQS

SEQ ID NO: 26403 - protein, 7 aa, synthetic construct
  REGION 1..7: note = Description of Artificial Sequence: Synthetic peptide
GTGVPGK

SEQ ID NO: 26404 - protein, 7 aa, synthetic construct
  REGION 1..7: note = Description of Artificial Sequence: Synthetic peptide
TGSGQNQ

SEQ ID NO: 26405 - protein, 7 aa, synthetic construct
  REGION 1..7: note = Description of Artificial Sequence: Synthetic peptide
PNLSKSL

SEQ ID NO: 26406 - protein, 7 aa, synthetic construct
  REGION 1..7: note = Description of Artificial Sequence: Synthetic peptide
DYHNSKL

SEQ ID NO: 26407 - protein, 7 aa, synthetic construct
  REGION 1..7: note = Description of Artificial Sequence: Synthetic peptide
SVNSRSE

SEQ ID NO: 26408 - protein, 7 aa, synthetic construct
  REGION 1..7: note = Description of Artificial Sequence: Synthetic peptide
QPNRADN

SEQ ID NO: 26409 - protein, 7 aa, synthetic construct
  REGION 1..7: note = Description of Artificial Sequence: Synthetic peptide
AATMRNS

SEQ ID NO: 26410 - protein, 7 aa, synthetic construct
  REGION 1..7: note = Description of Artificial Sequence: Synthetic peptide
SQQSPSM

SEQ ID NO: 26411 - protein, 7 aa, synthetic construct
  REGION 1..7: note = Description of Artificial Sequence: Synthetic peptide
HRDQVSL

SEQ ID NO: 26412 - protein, 7 aa, synthetic construct
  REGION 1..7: note = Description of Artificial Sequence: Synthetic peptide
SNETKSS

SEQ ID NO: 26413 - protein, 7 aa, synthetic construct
  REGION 1..7: note = Description of Artificial Sequence: Synthetic peptide
SGSGQNQ

SEQ ID NO: 26414 - protein, 7 aa, synthetic construct
  REGION 1..7: note = Description of Artificial Sequence: Synthetic peptide
SSEAATR

SEQ ID NO: 26415 - protein, 7 aa, synthetic construct
  REGION 1..7: note = Description of Artificial Sequence: Synthetic peptide
SGSDKFS

SEQ ID NO: 26416 - protein, 7 aa, synthetic construct
  REGION 1..7: note = Description of Artificial Sequence: Synthetic peptide
PNNQSTR

SEQ ID NO: 26417 - protein, 7 aa, synthetic construct
  REGION 1..7: note = Description of Artificial Sequence: Synthetic peptide
SHNSKDS

SEQ ID NO: 26418 - protein, 7 aa, synthetic construct
  REGION 1..7: note = Description of Artificial Sequence: Synthetic peptide
CTTRQGN

SEQ ID NO: 26419 - protein, 7 aa, synthetic construct
  REGION 1..7: note = Description of Artificial Sequence: Synthetic peptide
VFNHASK

SEQ ID NO: 26420 - protein, 7 aa, synthetic construct
  REGION 1..7: note = Description of Artificial Sequence: Synthetic peptide
ELHSKNA

SEQ ID NO: 26421 - protein, 7 aa, synthetic construct
  REGION 1..7: note = Description of Artificial Sequence: Synthetic peptide
GPGRNLI

SEQ ID NO: 26422 - protein, 7 aa, synthetic construct
  REGION 1..7: note = Description of Artificial Sequence: Synthetic peptide
SLGRDHA

SEQ ID NO: 26423 - protein, 7 aa, synthetic construct
  REGION 1..7: note = Description of Artificial Sequence: Synthetic peptide
YGQTKTQ

SEQ ID NO: 26424 - protein, 7 aa, synthetic construct
  REGION 1..7: note = Description of Artificial Sequence: Synthetic peptide
ATNHSPQ

SEQ ID NO: 26425 - protein, 7 aa, synthetic construct
  REGION 1..7: note = Description of Artificial Sequence: Synthetic peptide
NVTTPLI

SEQ ID NO: 26426 - protein, 7 aa, synthetic construct
  REGION 1..7: note = Description of Artificial Sequence: Synthetic peptide
PTKGANA

SEQ ID NO: 26427 - protein, 7 aa, synthetic construct
  REGION 1..7: note = Description of Artificial Sequence: Synthetic peptide
GSSHLTT

SEQ ID NO: 26428 - protein, 7 aa, synthetic construct
  REGION 1..7: note = Description of Artificial Sequence: Synthetic peptide
SLTTKAN

SEQ ID NO: 26429 - protein, 7 aa, synthetic construct
  REGION 1..7: note = Description of Artificial Sequence: Synthetic peptide
TGSSKVG

SEQ ID NO: 26430 - protein, 7 aa, synthetic construct
  REGION 1..7: note = Description of Artificial Sequence: Synthetic peptide
SQSPNRG

SEQ ID NO: 26431 - protein, 7 aa, synthetic construct
  REGION 1..7: note = Description of Artificial Sequence: Synthetic peptide
GLKGSFP

SEQ ID NO: 26432 - protein, 7 aa, synthetic construct
  REGION 1..7: note = Description of Artificial Sequence: Synthetic peptide
SMGNSIS

SEQ ID NO: 26433 - protein, 7 aa, synthetic construct
  REGION 1..7: note = Description of Artificial Sequence: Synthetic peptide
ETNSRLG

SEQ ID NO: 26434 - protein, 7 aa, synthetic construct
  REGION 1..7: note = Description of Artificial Sequence: Synthetic peptide
APNGTLS

SEQ ID NO: 26435 - protein, 7 aa, synthetic construct
  REGION 1..7: note = Description of Artificial Sequence: Synthetic peptide
LSTANKS

SEQ ID NO: 26436 - protein, 7 aa, synthetic construct
  REGION 1..7: note = Description of Artificial Sequence: Synthetic peptide
MQTSQST

SEQ ID NO: 26437 - protein, 7 aa, synthetic construct
  REGION 1..7: note = Description of Artificial Sequence: Synthetic peptide
NSANKTP

SEQ ID NO: 26438 - protein, 7 aa, synthetic construct
  REGION 1..7: note = Description of Artificial Sequence: Synthetic peptide
IGTSINS

SEQ ID NO: 26439 - protein, 7 aa, synthetic construct
  REGION 1..7: note = Description of Artificial Sequence: Synthetic peptide
FRTTAST

SEQ ID NO: 26440 - protein, 7 aa, synthetic construct
  REGION 1..7: note = Description of Artificial Sequence: Synthetic peptide
SAYERTS

SEQ ID NO: 26441 - protein, 7 aa, synthetic construct
  REGION 1..7: note = Description of Artificial Sequence: Synthetic peptide
SITGNRT

SEQ ID NO: 26442 - protein, 7 aa, synthetic construct
  REGION 1..7: note = Description of Artificial Sequence: Synthetic peptide
AFGGETK

SEQ ID NO: 26443 - protein, 7 aa, synthetic construct
  REGION 1..7: note = Description of Artificial Sequence: Synthetic peptide
GTARGVA

SEQ ID NO: 26444 - protein, 7 aa, synthetic construct
  REGION 1..7: note = Description of Artificial Sequence: Synthetic peptide
SHGPQIT

SEQ ID NO: 26445 - protein, 7 aa, synthetic construct
  REGION 1..7: note = Description of Artificial Sequence: Synthetic peptide
LVSSKSS

SEQ ID NO: 26446 - protein, 7 aa, synthetic construct
  REGION 1..7: note = Description of Artificial Sequence: Synthetic peptide
AQVDKRS

SEQ ID NO: 26447 - protein, 7 aa, synthetic construct
  REGION 1..7: note = Description of Artificial Sequence: Synthetic peptide
ENTKTYS

SEQ ID NO: 26448 - protein, 7 aa, synthetic construct
  REGION 1..7: note = Description of Artificial Sequence: Synthetic peptide
SNMPGMV

SEQ ID NO: 26449 - protein, 7 aa, synthetic construct
  REGION 1..7: note = Description of Artificial Sequence: Synthetic peptide
AEHQSGK

SEQ ID NO: 26450 - protein, 7 aa, synthetic construct
  REGION 1..7: note = Description of Artificial Sequence: Synthetic peptide
GKTGPNS

SEQ ID NO: 26451 - protein, 7 aa, synthetic construct
  REGION 1..7: note = Description of Artificial Sequence: Synthetic peptide
GNISTSS

SEQ ID NO: 26452 - protein, 7 aa, synthetic construct
  REGION 1..7: note = Description of Artificial Sequence: Synthetic peptide
TVAHPSH

SEQ ID NO: 26453 - protein, 7 aa, synthetic construct
  REGION 1..7: note = Description of Artificial Sequence: Synthetic peptide
PTMQGVH

SEQ ID NO: 26454 - protein, 7 aa, synthetic construct
  REGION 1..7: note = Description of Artificial Sequence: Synthetic peptide
RMNGGGP

SEQ ID NO: 26455 - protein, 7 aa, synthetic construct
  REGION 1..7: note = Description of Artificial Sequence: Synthetic peptide
NQSSSAR

SEQ ID NO: 26456 - protein, 7 aa, synthetic construct
  REGION 1..7: note = Description of Artificial Sequence: Synthetic peptide
IGSGQNQ

SEQ ID NO: 26457 - protein, 7 aa, synthetic construct
  REGION 1..7: note = Description of Artificial Sequence: Synthetic peptide
MEIKPNR

SEQ ID NO: 26458 - protein, 7 aa, synthetic construct
  REGION 1..7: note = Description of Artificial Sequence: Synthetic peptide
NAVGVGY

SEQ ID NO: 26459 - protein, 7 aa, synthetic construct
  REGION 1..7: note = Description of Artificial Sequence: Synthetic peptide
HQGNVIS

SEQ ID NO: 26460 - protein, 7 aa, synthetic construct
  REGION 1..7: note = Description of Artificial Sequence: Synthetic peptide
HNVGGGD

SEQ ID NO: 26461 - protein, 7 aa, synthetic construct
  REGION 1..7: note = Description of Artificial Sequence: Synthetic peptide
TPTLSHT

SEQ ID NO: 26462 - protein, 7 aa, synthetic construct
  REGION 1..7: note = Description of Artificial Sequence: Synthetic peptide
NNTSTHL

SEQ ID NO: 26463 - protein, 7 aa, synthetic construct
  REGION 1..7: note = Description of Artificial Sequence: Synthetic peptide
NIASKGP

SEQ ID NO: 26464 - protein, 7 aa, synthetic construct
  REGION 1..7: note = Description of Artificial Sequence: Synthetic peptide
NGSEQNQ

SEQ ID NO: 26465 - protein, 7 aa, synthetic construct
  REGION 1..7: note = Description of Artificial Sequence: Synthetic peptide
GSRSSTT

SEQ ID NO: 26466 - protein, 7 aa, synthetic construct
  REGION 1..7: note = Description of Artificial Sequence: Synthetic peptide
FNTSKLS

SEQ ID NO: 26467 - protein, 7 aa, synthetic construct
  REGION 1..7: note = Description of Artificial Sequence: Synthetic peptide
RPTQVGA

SEQ ID NO: 26468 - protein, 7 aa, synthetic construct
  REGION 1..7: note = Description of Artificial Sequence: Synthetic peptide
QSTERLA

SEQ ID NO: 26469 - protein, 7 aa, synthetic construct
  REGION 1..7: note = Description of Artificial Sequence: Synthetic peptide
MSTHSSG

SEQ ID NO: 26470 - protein, 7 aa, synthetic construct
  REGION 1..7: note = Description of Artificial Sequence: Synthetic peptide
QQASLSS

SEQ ID NO: 26471 - protein, 7 aa, synthetic construct
  REGION 1..7: note = Description of Artificial Sequence: Synthetic peptide
IDGHRNG

SEQ ID NO: 26472 - protein, 7 aa, synthetic construct
  REGION 1..7: note = Description of Artificial Sequence: Synthetic peptide
CSPPTRG

SEQ ID NO: 26473 - protein, 7 aa, synthetic construct
  REGION 1..7: note = Description of Artificial Sequence: Synthetic peptide
SGAGSAG

SEQ ID NO: 26474 - protein, 7 aa, synthetic construct
  REGION 1..7: note = Description of Artificial Sequence: Synthetic peptide
RESSPSL

SEQ ID NO: 26475 - protein, 7 aa, synthetic construct
  REGION 1..7: note = Description of Artificial Sequence: Synthetic peptide
VNTSHTN

SEQ ID NO: 26476 - protein, 7 aa, synthetic construct
  REGION 1..7: note = Description of Artificial Sequence: Synthetic peptide
AYPKNSN

SEQ ID NO: 26477 - protein, 7 aa, synthetic construct
  REGION 1..7: note = Description of Artificial Sequence: Synthetic peptide
FANTANR

SEQ ID NO: 26478 - protein, 7 aa, synthetic construct
  REGION 1..7: note = Description of Artificial Sequence: Synthetic peptide
NSASLNH

SEQ ID NO: 26479 - protein, 7 aa, synthetic construct
  REGION 1..7: note = Description of Artificial Sequence: Synthetic peptide
GDAGSFS

SEQ ID NO: 26480 - protein, 7 aa, synthetic construct
  REGION 1..7: note = Description of Artificial Sequence: Synthetic peptide
FNEQRVS

SEQ ID NO: 26481 - protein, 7 aa, synthetic construct
  REGION 1..7: note = Description of Artificial Sequence: Synthetic peptide
LRSKESA

SEQ ID NO: 26482 - protein, 7 aa, synthetic construct
  REGION 1..7: note = Description of Artificial Sequence: Synthetic peptide
FRTQSTK

SEQ ID NO: 26483 - protein, 7 aa, synthetic construct
  REGION 1..7: note = Description of Artificial Sequence: Synthetic peptide
PTGEKRL

SEQ ID NO: 26484 - protein, 7 aa, synthetic construct
  REGION 1..7: note = Description of Artificial Sequence: Synthetic peptide
GRESNLS

SEQ ID NO: 26485 - protein, 7 aa, synthetic construct
  REGION 1..7: note = Description of Artificial Sequence: Synthetic peptide
QGPKNAD

SEQ ID NO: 26486 - protein, 7 aa, synthetic construct
  REGION 1..7: note = Description of Artificial Sequence: Synthetic peptide
HATSGTR

SEQ ID NO: 26487 - protein, 7 aa, synthetic construct
  REGION 1..7: note = Description of Artificial Sequence: Synthetic peptide
GGSNLRT

SEQ ID NO: 26488 - protein, 7 aa, synthetic construct
  REGION 1..7: note = Description of Artificial Sequence: Synthetic peptide
NASTANM

SEQ ID NO: 26489 - protein, 7 aa, synthetic construct
  REGION 1..7: note = Description of Artificial Sequence: Synthetic peptide
ALANPQT

SEQ ID NO: 26490 - protein, 7 aa, synthetic construct
  REGION 1..7: note = Description of Artificial Sequence: Synthetic peptide
RSGNATI

SEQ ID NO: 26491 - protein, 7 aa, synthetic construct
  REGION 1..7: note = Description of Artificial Sequence: Synthetic peptide
QSEIVNK

SEQ ID NO: 26492 - protein, 7 aa, synthetic construct
  REGION 1..7: note = Description of Artificial Sequence: Synthetic peptide
NGYGQNQ

SEQ ID NO: 26493 - protein, 7 aa, synthetic construct
  REGION 1..7: note = Description of Artificial Sequence: Synthetic peptide
RSSPASL

SEQ ID NO: 26494 - protein, 7 aa, synthetic construct
  REGION 1..7: note = Description of Artificial Sequence: Synthetic peptide
AVTGASG

SEQ ID NO: 26495 - protein, 7 aa, synthetic construct
  REGION 1..7: note = Description of Artificial Sequence: Synthetic peptide
SGSEHLR

SEQ ID NO: 26496 - protein, 7 aa, synthetic construct
  REGION 1..7: note = Description of Artificial Sequence: Synthetic peptide
HMNRKLE

SEQ ID NO: 26497 - protein, 7 aa, synthetic construct
  REGION 1..7: note = Description of Artificial Sequence: Synthetic peptide
DNTGRNA

SEQ ID NO: 26498 - protein, 7 aa, synthetic construct
  REGION 1..7: note = Description of Artificial Sequence: Synthetic peptide
PGAALSI

SEQ ID NO: 26499 - protein, 7 aa, synthetic construct
  REGION 1..7: note = Description of Artificial Sequence: Synthetic peptide
RTDHGGV

SEQ ID NO: 26500 - protein, 7 aa, synthetic construct
  REGION 1..7: note = Description of Artificial Sequence: Synthetic peptide
LNSTAGK

SEQ ID NO: 26501 - protein, 7 aa, synthetic construct
  REGION 1..7: note = Description of Artificial Sequence: Synthetic peptide
SHLDRLN

SEQ ID NO: 26502 - protein, 7 aa, synthetic construct
  REGION 1..7: note = Description of Artificial Sequence: Synthetic peptide
SYADKQG

SEQ ID NO: 26503 - protein, 7 aa, synthetic construct
  REGION 1..7: note = Description of Artificial Sequence: Synthetic peptide
TATTLSS

SEQ ID NO: 26504 - protein, 7 aa, synthetic construct
  REGION 1..7: note = Description of Artificial Sequence: Synthetic peptide
PRTGTLM

SEQ ID NO: 26505 - protein, 7 aa, synthetic construct
  REGION 1..7: note = Description of Artificial Sequence: Synthetic peptide
ASTNSMQ

SEQ ID NO: 26506 - protein, 7 aa, synthetic construct
  REGION 1..7: note = Description of Artificial Sequence: Synthetic peptide
GNSMAGT

SEQ ID NO: 26507 - protein, 7 aa, synthetic construct
  REGION 1..7: note = Description of Artificial Sequence: Synthetic peptide
AVSSKVG

SEQ ID NO: 26508 - protein, 7 aa, synthetic construct
  REGION 1..7: note = Description of Artificial Sequence: Synthetic peptide
SASPSIK

SEQ ID NO: 26509 - protein, 7 aa, synthetic construct
  REGION 1..7: note = Description of Artificial Sequence: Synthetic peptide
LSMNTSK

SEQ ID NO: 26510 - protein, 7 aa, synthetic construct
  REGION 1..7: note = Description of Artificial Sequence: Synthetic peptide
PNGSPLS

SEQ ID NO: 26511 - protein, 7 aa, synthetic construct
  REGION 1..7: note = Description of Artificial Sequence: Synthetic peptide
NGSGQNK

SEQ ID NO: 26512 - protein, 7 aa, synthetic construct
  REGION 1..7: note = Description of Artificial Sequence: Synthetic peptide
VKTAKVN

SEQ ID NO: 26513 - protein, 7 aa, synthetic construct
  REGION 1..7: note = Description of Artificial Sequence: Synthetic peptide
HRVDNQG

SEQ ID NO: 26514 - protein, 7 aa, synthetic construct
  REGION 1..7: note = Description of Artificial Sequence: Synthetic peptide
PLVPRGT

SEQ ID NO: 26515 - protein, 7 aa, synthetic construct
  REGION 1..7: note = Description of Artificial Sequence: Synthetic peptide
SSQAQPT

SEQ ID NO: 26516 - protein, 7 aa, synthetic construct
  REGION 1..7: note = Description of Artificial Sequence: Synthetic peptide
AGNTGSH

SEQ ID NO: 26517 - protein, 7 aa, synthetic construct
  REGION 1..7: note = Description of Artificial Sequence: Synthetic peptide
SIPSTSQ

SEQ ID NO: 26518 - protein, 7 aa, synthetic construct
  REGION 1..7: note = Description of Artificial Sequence: Synthetic peptide
MSHTKSN

SEQ ID NO: 26519 - protein, 7 aa, synthetic construct
  REGION 1..7: note = Description of Artificial Sequence: Synthetic peptide
QGAGVSS

SEQ ID NO: 26520 - protein, 7 aa, synthetic construct
  REGION 1..7: note = Description of Artificial Sequence: Synthetic peptide
QETRGNS

SEQ ID NO: 26521 - protein, 7 aa, synthetic construct
  REGION 1..7: note = Description of Artificial Sequence: Synthetic peptide
VSGSNSL

SEQ ID NO: 26522 - protein, 7 aa, synthetic construct
  REGION 1..7: note = Description of Artificial Sequence: Synthetic peptide
SAGTSVG

SEQ ID NO: 26523 - protein, 7 aa, synthetic construct
  REGION 1..7: note = Description of Artificial Sequence: Synthetic peptide
NSAGTRV

SEQ ID NO: 26524 - protein, 7 aa, synthetic construct
  REGION 1..7: note = Description of Artificial Sequence: Synthetic peptide
RLEGSMA

SEQ ID NO: 26525 - protein, 7 aa, synthetic construct
  REGION 1..7: note = Description of Artificial Sequence: Synthetic peptide
PADHGKL

SEQ ID NO: 26526 - protein, 7 aa, synthetic construct
  REGION 1..7: note = Description of Artificial Sequence: Synthetic peptide
MDGRSTT

SEQ ID NO: 26527 - protein, 7 aa, synthetic construct
  REGION 1..7: note = Description of Artificial Sequence: Synthetic peptide
TGTDSRS

SEQ ID NO: 26528 - protein, 7 aa, synthetic construct
  REGION 1..7: note = Description of Artificial Sequence: Synthetic peptide
IRTKESA

SEQ ID NO: 26529 - protein, 7 aa, synthetic construct
  REGION 1..7: note = Description of Artificial Sequence: Synthetic peptide
RDVDVRN

SEQ ID NO: 26530 - protein, 7 aa, synthetic construct
  REGION 1..7: note = Description of Artificial Sequence: Synthetic peptide
YVSSGKA

SEQ ID NO: 26531 - protein, 7 aa, synthetic construct
  REGION 1..7: note = Description of Artificial Sequence: Synthetic peptide
SFPPGNV

SEQ ID NO: 26532 - protein, 7 aa, synthetic construct
  REGION 1..7: note = Description of Artificial Sequence: Synthetic peptide
QLPTMTV

SEQ ID NO: 26533 - protein, 7 aa, synthetic construct
  REGION 1..7: note = Description of Artificial Sequence: Synthetic peptide
PTTLKHD

SEQ ID NO: 26534 - protein, 7 aa, synthetic construct
  REGION 1..7: note = Description of Artificial Sequence: Synthetic peptide
GPSTHSG

SEQ ID NO: 26535 - protein, 7 aa, synthetic construct
  REGION 1..7: note = Description of Artificial Sequence: Synthetic peptide
HRSPSTQ

SEQ ID NO: 26536 - protein, 7 aa, synthetic construct
  REGION 1..7: note = Description of Artificial Sequence: Synthetic peptide
QRVNTAS

SEQ ID NO: 26537 - protein, 7 aa, synthetic construct
  REGION 1..7: note = Description of Artificial Sequence: Synthetic peptide
HNSGNGS

SEQ ID NO: 26538 - protein, 7 aa, synthetic construct
  REGION 1..7: note = Description of Artificial Sequence: Synthetic peptide
TAQGPSA

SEQ ID NO: 26539 - protein, 7 aa, synthetic construct
  REGION 1..7: note = Description of Artificial Sequence: Synthetic peptide
PVTRSKD

SEQ ID NO: 26540 - protein, 7 aa, synthetic construct
  REGION 1..7: note = Description of Artificial Sequence: Synthetic peptide
AATNSLT

SEQ ID NO: 26541 - protein, 7 aa, synthetic construct
  REGION 1..7: note = Description of Artificial Sequence: Synthetic peptide
SGAPGSS

SEQ ID NO: 26542 - protein, 7 aa, synthetic construct
  REGION 1..7: note = Description of Artificial Sequence: Synthetic peptide
TSNTKQG

SEQ ID NO: 26543 - protein, 7 aa, synthetic construct
  REGION 1..7: note = Description of Artificial Sequence: Synthetic peptide
RTPTASG

SEQ ID NO: 26544 - protein, 7 aa, synthetic construct
  REGION 1..7: note = Description of Artificial Sequence: Synthetic peptide
GASTPRL

SEQ ID NO: 26545 - protein, 7 aa, synthetic construct
  REGION 1..7: note = Description of Artificial Sequence: Synthetic peptide
MLNNASA

SEQ ID NO: 26546 - protein, 7 aa, synthetic construct
  REGION 1..7: note = Description of Artificial Sequence: Synthetic peptide
DYGKGSS

SEQ ID NO: 26547 - protein, 7 aa, synthetic construct
  REGION 1..7: note = Description of Artificial Sequence: Synthetic peptide
GNMRNLA

SEQ ID NO: 26548 - protein, 7 aa, synthetic construct
  REGION 1..7: note = Description of Artificial Sequence: Synthetic peptide
HANSPAT

SEQ ID NO: 26549 - protein, 7 aa, synthetic construct
  REGION 1..7: note = Description of Artificial Sequence: Synthetic peptide
ASRSVNA

SEQ ID NO: 26550 - protein, 7 aa, synthetic construct
  REGION 1..7: note = Description of Artificial Sequence: Synthetic peptide
ENRVKVN

SEQ ID NO: 26551 - protein, 7 aa, synthetic construct
  REGION 1..7: note = Description of Artificial Sequence: Synthetic peptide
NVSGQNQ

SEQ ID NO: 26552 - protein, 7 aa, synthetic construct
  REGION 1..7: note = Description of Artificial Sequence: Synthetic peptide
FMGRPNV

SEQ ID NO: 26553 - protein, 7 aa, synthetic construct
  REGION 1..7: note = Description of Artificial Sequence: Synthetic peptide
DSRSIKG

SEQ ID NO: 26554 - protein, 7 aa, synthetic construct
  REGION 1..7: note = Description of Artificial Sequence: Synthetic peptide
LQKPSLV

SEQ ID NO: 26555 - protein, 7 aa, synthetic construct
  REGION 1..7: note = Description of Artificial Sequence: Synthetic peptide
SKDRSTV

SEQ ID NO: 26556 - protein, 7 aa, synthetic construct
  REGION 1..7: note = Description of Artificial Sequence: Synthetic peptide
TQNTKSI

SEQ ID NO: 26557 - protein, 7 aa, synthetic construct
  REGION 1..7: note = Description of Artificial Sequence: Synthetic peptide
NPVALRD

SEQ ID NO: 26558 - protein, 7 aa, synthetic construct
  REGION 1..7: note = Description of Artificial Sequence: Synthetic peptide
GQSNVTL

SEQ ID NO: 26559 - protein, 7 aa, synthetic construct
  REGION 1..7: note = Description of Artificial Sequence: Synthetic peptide
SSSGGVK

SEQ ID NO: 26560 - protein, 7 aa, synthetic construct
  REGION 1..7: note = Description of Artificial Sequence: Synthetic peptide
SDINRST

SEQ ID NO: 26561 - protein, 7 aa, synthetic construct
  REGION 1..7: note = Description of Artificial Sequence: Synthetic peptide
NRVEHTQ

SEQ ID NO: 26562 - protein, 7 aa, synthetic construct
  REGION 1..7: note = Description of Artificial Sequence: Synthetic peptide
DQGNGYG

SEQ ID NO: 26563 - protein, 7 aa, synthetic construct
  REGION 1..7: note = Description of Artificial Sequence: Synthetic peptide
RLETKSG

SEQ ID NO: 26564 - protein, 7 aa, synthetic construct
  REGION 1..7: note = Description of Artificial Sequence: Synthetic peptide
STPIRSV

SEQ ID NO: 26565 - protein, 7 aa, synthetic construct
  REGION 1..7: note = Description of Artificial Sequence: Synthetic peptide
TSSARVT

SEQ ID NO: 26566 - protein, 7 aa, synthetic construct
  REGION 1..7: note = Description of Artificial Sequence: Synthetic peptide
EAVTMHG

SEQ ID NO: 26567 - protein, 7 aa, synthetic construct
  REGION 1..7: note = Description of Artificial Sequence: Synthetic peptide
TKGGSQL

SEQ ID NO: 26568 - protein, 7 aa, synthetic construct
  REGION 1..7: note = Description of Artificial Sequence: Synthetic peptide
GTGNSNL

SEQ ID NO: 26569 - protein, 7 aa, synthetic construct
  REGION 1..7: note = Description of Artificial Sequence: Synthetic peptide
GTSTSLR

SEQ ID NO: 26570 - protein, 7 aa, synthetic construct
  REGION 1..7: note = Description of Artificial Sequence: Synthetic peptide
LGPHPTH

SEQ ID NO: 26571 - protein, 7 aa, synthetic construct
  REGION 1..7: note = Description of Artificial Sequence: Synthetic peptide
ASVSQRS

SEQ ID NO: 26572 - protein, 7 aa, synthetic construct
  REGION 1..7: note = Description of Artificial Sequence: Synthetic peptide
PSTPTIK

SEQ ID NO: 26573 - protein, 7 aa, synthetic construct
  REGION 1..7: note = Description of Artificial Sequence: Synthetic peptide
RSSGGLT

SEQ ID NO: 26574 - protein, 7 aa, synthetic construct
  REGION 1..7: note = Description of Artificial Sequence: Synthetic peptide
SRSHAMT

SEQ ID NO: 26575 - protein, 7 aa, synthetic construct
  REGION 1..7: note = Description of Artificial Sequence: Synthetic peptide
FLKGTGS

SEQ ID NO: 26576 - protein, 7 aa, synthetic construct
  REGION 1..7: note = Description of Artificial Sequence: Synthetic peptide
PSTSSAG

SEQ ID NO: 26577 - protein, 7 aa, synthetic construct
  REGION 1..7: note = Description of Artificial Sequence: Synthetic peptide
DPLRSMH

SEQ ID NO: 26578 - protein, 7 aa, synthetic construct
  REGION 1..7: note = Description of Artificial Sequence: Synthetic peptide
YQVGDTR

SEQ ID NO: 26579 - protein, 7 aa, synthetic construct
  REGION 1..7: note = Description of Artificial Sequence: Synthetic peptide
EGSGRLT

SEQ ID NO: 26580 - protein, 7 aa, synthetic construct
  REGION 1..7: note = Description of Artificial Sequence: Synthetic peptide
SDSRSRS

SEQ ID NO: 26581 - protein, 7 aa, synthetic construct
  REGION 1..7: note = Description of Artificial Sequence: Synthetic peptide
SLERLKT

SEQ ID NO: 26582 - protein, 7 aa, synthetic construct
  REGION 1..7: note = Description of Artificial Sequence: Synthetic peptide
TTNNIQG

SEQ ID NO: 26583 - protein, 7 aa, synthetic construct
  REGION 1..7: note = Description of Artificial Sequence: Synthetic peptide
SNGQRKE

SEQ ID NO: 26584 - protein, 7 aa, synthetic construct
  REGION 1..7: note = Description of Artificial Sequence: Synthetic peptide
KDNTPGR

SEQ ID NO: 26585 - protein, 7 aa, synthetic construct
  REGION 1..7: note = Description of Artificial Sequence: Synthetic peptide
QTSHSAK

SEQ ID NO: 26586 - protein, 7 aa, synthetic construct
  REGION 1..7: note = Description of Artificial Sequence: Synthetic peptide
GMGGLKN

SEQ ID NO: 26587 - protein, 7 aa, synthetic construct
  REGION 1..7: note = Description of Artificial Sequence: Synthetic peptide
HERGQNG

SEQ ID NO: 26588 - protein, 7 aa, synthetic construct
  REGION 1..7: note = Description of Artificial Sequence: Synthetic peptide
STSTVHS

SEQ ID NO: 26589 - protein, 7 aa, synthetic construct
  REGION 1..7: note = Description of Artificial Sequence: Synthetic peptide
GGHPPTS

SEQ ID NO: 26590 - protein, 7 aa, synthetic construct
  REGION 1..7: note = Description of Artificial Sequence: Synthetic peptide
GSISTAH

SEQ ID NO: 26591 - protein, 7 aa, synthetic construct
  REGION 1..7: note = Description of Artificial Sequence: Synthetic peptide
SSPSKMA

SEQ ID NO: 26592 - protein, 7 aa, synthetic construct
  REGION 1..7: note = Description of Artificial Sequence: Synthetic peptide
WGTGIGS

SEQ ID NO: 26593 - protein, 7 aa, synthetic construct
  REGION 1..7: note = Description of Artificial Sequence: Synthetic peptide
RAPGSNT

SEQ ID NO: 26594 - protein, 7 aa, synthetic construct
  REGION 1..7: note = Description of Artificial Sequence: Synthetic peptide
VVPERSK

SEQ ID NO: 26595 - protein, 7 aa, synthetic construct
  REGION 1..7: note = Description of Artificial Sequence: Synthetic peptide
LGMRDNT

SEQ ID NO: 26596 - protein, 7 aa, synthetic construct
  REGION 1..7: note = Description of Artificial Sequence: Synthetic peptide
GPSSINR

SEQ ID NO: 26597 - protein, 7 aa, synthetic construct
  REGION 1..7: note = Description of Artificial Sequence: Synthetic peptide
NFSNPTV

SEQ ID NO: 26598 - protein, 7 aa, synthetic construct
  REGION 1..7: note = Description of Artificial Sequence: Synthetic peptide
TGRGTDV

SEQ ID NO: 26599 - protein, 7 aa, synthetic construct
  REGION 1..7: note = Description of Artificial Sequence: Synthetic peptide
YRVTQSS

SEQ ID NO: 26600 - protein, 7 aa, synthetic construct
  REGION 1..7: note = Description of Artificial Sequence: Synthetic peptide
TSNTKSV

SEQ ID NO: 26601 - protein, 7 aa, synthetic construct
  REGION 1..7: note = Description of Artificial Sequence: Synthetic peptide
RLTQSSQ

SEQ ID NO: 26602 - protein, 7 aa, synthetic construct
  REGION 1..7: note = Description of Artificial Sequence: Synthetic peptide
PANSPAT

SEQ ID NO: 26603 - protein, 7 aa, synthetic construct
  REGION 1..7: note = Description of Artificial Sequence: Synthetic peptide
PRSQPVP

SEQ ID NO: 26604 - protein, 7 aa, synthetic construct
  REGION 1..7: note = Description of Artificial Sequence: Synthetic peptide
PDTLTRQ

SEQ ID NO: 26605 - protein, 7 aa, synthetic construct
  REGION 1..7: note = Description of Artificial Sequence: Synthetic peptide
NGRGSDV

SEQ ID NO: 26606 - protein, 7 aa, synthetic construct
  REGION 1..7: note = Description of Artificial Sequence: Synthetic peptide
ANGTKSS

SEQ ID NO: 26607 - protein, 7 aa, synthetic construct
  REGION 1..7: note = Description of Artificial Sequence: Synthetic peptide
PGGTTKG

SEQ ID NO: 26608 - protein, 7 aa, synthetic construct
  REGION 1..7: note = Description of Artificial Sequence: Synthetic peptide
PTHSSRD

SEQ ID NO: 26609 - protein, 7 aa, synthetic construct
  REGION 1..7: note = Description of Artificial Sequence: Synthetic peptide
SGMASVT

SEQ ID NO: 26610 - protein, 7 aa, synthetic construct
  REGION 1..7: note = Description of Artificial Sequence: Synthetic peptide
GPVNAHS

SEQ ID NO: 26611 - protein, 7 aa, synthetic construct
  REGION 1..7: note = Description of Artificial Sequence: Synthetic peptide
GNTGSYQ

SEQ ID NO: 26612 - protein, 7 aa, synthetic construct
  REGION 1..7: note = Description of Artificial Sequence: Synthetic peptide
ALSSPAN

SEQ ID NO: 26613 - protein, 7 aa, synthetic construct
  REGION 1..7: note = Description of Artificial Sequence: Synthetic peptide
QQSPRNG

SEQ ID NO: 26614 - protein, 7 aa, synthetic construct
  REGION 1..7: note = Description of Artificial Sequence: Synthetic peptide
PSQTKPS

SEQ ID NO: 26615 - protein, 7 aa, synthetic construct
  REGION 1..7: note = Description of Artificial Sequence: Synthetic peptide
QTSSREM

SEQ ID NO: 26616 - protein, 7 aa, synthetic construct
  REGION 1..7: note = Description of Artificial Sequence: Synthetic peptide
NTTAKSS

SEQ ID NO: 26617 - protein, 7 aa, synthetic construct
  REGION 1..7: note = Description of Artificial Sequence: Synthetic peptide
ERVGSIS

SEQ ID NO: 26618 - protein, 7 aa, synthetic construct
  REGION 1..7: note = Description of Artificial Sequence: Synthetic peptide
QTRTDVT

SEQ ID NO: 26619 - protein, 7 aa, synthetic construct
  REGION 1..7: note = Description of Artificial Sequence: Synthetic peptide
GNRPTTL

SEQ ID NO: 26620 - protein, 7 aa, synthetic construct
  REGION 1..7: note = Description of Artificial Sequence: Synthetic peptide
VGTNHTS

SEQ ID NO: 26621 - protein, 7 aa, synthetic construct
  REGION 1..7: note = Description of Artificial Sequence: Synthetic peptide
DHRNISS

SEQ ID NO: 26622 - protein, 7 aa, synthetic construct
  REGION 1..7: note = Description of Artificial Sequence: Synthetic peptide
NTSNNIQ

SEQ ID NO: 26623 - protein, 7 aa, synthetic construct
  REGION 1..7: note = Description of Artificial Sequence: Synthetic peptide
GTTNSRN

SEQ ID NO: 26624 - protein, 7 aa, synthetic construct
  REGION 1..7: note = Description of Artificial Sequence: Synthetic peptide
SYGKESS

SEQ ID NO: 26625 - protein, 7 aa, synthetic construct
  REGION 1..7: note = Description of Artificial Sequence: Synthetic peptide
RSDTNRG

SEQ ID NO: 26626 - protein, 7 aa, synthetic construct
  REGION 1..7: note = Description of Artificial Sequence: Synthetic peptide
PLNARGS

SEQ ID NO: 26627 - protein, 7 aa, synthetic construct
  REGION 1..7: note = Description of Artificial Sequence: Synthetic peptide
DLHVQKA

SEQ ID NO: 26628 - protein, 7 aa, synthetic construct
  REGION 1..7: note = Description of Artificial Sequence: Synthetic peptide
SGGTHIA

SEQ ID NO: 26629 - protein, 7 aa, synthetic construct
  REGION 1..7: note = Description of Artificial Sequence: Synthetic peptide
SASTSTL

SEQ ID NO: 26630 - protein, 7 aa, synthetic construct
  REGION 1..7: note = Description of Artificial Sequence: Synthetic peptide
AATRQPD

SEQ ID NO: 26631 - protein, 7 aa, synthetic construct
  REGION 1..7: note = Description of Artificial Sequence: Synthetic peptide
VGSSSVM

SEQ ID NO: 26632 - protein, 7 aa, synthetic construct
  REGION 1..7: note = Description of Artificial Sequence: Synthetic peptide
SSSPNVK

SEQ ID NO: 26633 - protein, 7 aa, synthetic construct
  REGION 1..7: note = Description of Artificial Sequence: Synthetic peptide
NNAHSSS

SEQ ID NO: 26634 - protein, 7 aa, synthetic construct
  REGION 1..7: note = Description of Artificial Sequence: Synthetic peptide
RDSTKLV

SEQ ID NO: 26635 - protein, 7 aa, synthetic construct
  REGION 1..7: note = Description of Artificial Sequence: Synthetic peptide
TLSSTGG

SEQ ID NO: 26636 - protein, 7 aa, synthetic construct
  REGION 1..7: note = Description of Artificial Sequence: Synthetic peptide
RIGQGSS

SEQ ID NO: 26637 - protein, 7 aa, synthetic construct
  REGION 1..7: note = Description of Artificial Sequence: Synthetic peptide
SISHARE

SEQ ID NO: 26638 - protein, 7 aa, synthetic construct
  REGION 1..7: note = Description of Artificial Sequence: Synthetic peptide
DPRNSTS

SEQ ID NO: 26639 - protein, 7 aa, synthetic construct
  REGION 1..7: note = Description of Artificial Sequence: Synthetic peptide
DSHPRSI

SEQ ID NO: 26640 - protein, 7 aa, synthetic construct
  REGION 1..7: note = Description of Artificial Sequence: Synthetic peptide
LPGHPRA

SEQ ID NO: 26641 - protein, 7 aa, synthetic construct
  REGION 1..7: note = Description of Artificial Sequence: Synthetic peptide
YGSGQNQ

SEQ ID NO: 26642 - protein, 7 aa, synthetic construct
  REGION 1..7: note = Description of Artificial Sequence: Synthetic peptide
SANRPSA

SEQ ID NO: 26643 - protein, 7 aa, synthetic construct
  REGION 1..7: note = Description of Artificial Sequence: Synthetic peptide
TPGASLS

SEQ ID NO: 26644 - protein, 7 aa, synthetic construct
  REGION 1..7: note = Description of Artificial Sequence: Synthetic peptide
EGMGVHG

SEQ ID NO: 26645 - protein, 7 aa, synthetic construct
  REGION 1..7: note = Description of Artificial Sequence: Synthetic peptide
TTAPGLR

SEQ ID NO: 26646 - protein, 7 aa, synthetic construct
  REGION 1..7: note = Description of Artificial Sequence: Synthetic peptide
PLSGSKA

SEQ ID NO: 26647 - protein, 7 aa, synthetic construct
  REGION 1..7: note = Description of Artificial Sequence: Synthetic peptide
HQISSLK

SEQ ID NO: 26648 - protein, 7 aa, synthetic construct
  REGION 1..7: note = Description of Artificial Sequence: Synthetic peptide
PSKGTYP

SEQ ID NO: 26649 - protein, 7 aa, synthetic construct
  REGION 1..7: note = Description of Artificial Sequence: Synthetic peptide
SDMSGQR

SEQ ID NO: 26650 - protein, 7 aa, synthetic construct
  REGION 1..7: note = Description of Artificial Sequence: Synthetic peptide
VADKGSM

SEQ ID NO: 26651 - protein, 7 aa, synthetic construct
  REGION 1..7: note = Description of Artificial Sequence: Synthetic peptide
GYEANRG

SEQ ID NO: 26652 - protein, 7 aa, synthetic construct
  REGION 1..7: note = Description of Artificial Sequence: Synthetic peptide
DESGKSK

SEQ ID NO: 26653 - protein, 7 aa, synthetic construct
  REGION 1..7: note = Description of Artificial Sequence: Synthetic peptide
GVRTAMS

SEQ ID NO: 26654 - protein, 7 aa, synthetic construct
  REGION 1..7: note = Description of Artificial Sequence: Synthetic peptide
SGSTKGQ

SEQ ID NO: 26655 - protein, 7 aa, synthetic construct
  REGION 1..7: note = Description of Artificial Sequence: Synthetic peptide
LGSNRYS

SEQ ID NO: 26656 - protein, 7 aa, synthetic construct
  REGION 1..7: note = Description of Artificial Sequence: Synthetic peptide
GGGTSFG

SEQ ID NO: 26657 - protein, 7 aa, synthetic construct
  REGION 1..7: note = Description of Artificial Sequence: Synthetic peptide
VNLRSNT

SEQ ID NO: 26658 - protein, 7 aa, synthetic construct
  REGION 1..7: note = Description of Artificial Sequence: Synthetic peptide
PYAGTSP

SEQ ID NO: 26659 - protein, 7 aa, synthetic construct
  REGION 1..7: note = Description of Artificial Sequence: Synthetic peptide
HTHDVGK

SEQ ID NO: 26660 - protein, 7 aa, synthetic construct
  REGION 1..7: note = Description of Artificial Sequence: Synthetic peptide
TGTKSDN

SEQ ID NO: 26661 - protein, 7 aa, synthetic construct
  REGION 1..7: note = Description of Artificial Sequence: Synthetic peptide
SKSTHQA

SEQ ID NO: 26662 - protein, 7 aa, synthetic construct
  REGION 1..7: note = Description of Artificial Sequence: Synthetic peptide
DSRQTSL

SEQ ID NO: 26663 - protein, 7 aa, synthetic construct
  REGION 1..7: note = Description of Artificial Sequence: Synthetic peptide
LAPGHGN

SEQ ID NO: 26664 - protein, 7 aa, synthetic construct
  REGION 1..7: note = Description of Artificial Sequence: Synthetic peptide
SVHGNQL

SEQ ID NO: 26665 - protein, 7 aa, synthetic construct
  REGION 1..7: note = Description of Artificial Sequence: Synthetic peptide
SSTSPGR

SEQ ID NO: 26666 - protein, 7 aa, synthetic construct
  REGION 1..7: note = Description of Artificial Sequence: Synthetic peptide
TNPTGYR

SEQ ID NO: 26667 - protein, 7 aa, synthetic construct
  REGION 1..7: note = Description of Artificial Sequence: Synthetic peptide
HVPSKLA

SEQ ID NO: 26668 - protein, 7 aa, synthetic construct
  REGION 1..7: note = Description of Artificial Sequence: Synthetic peptide
QVTGASH

SEQ ID NO: 26669 - protein, 7 aa, synthetic construct
  REGION 1..7: note = Description of Artificial Sequence: Synthetic peptide
RPGGKDG

SEQ ID NO: 26670 - protein, 7 aa, synthetic construct
  REGION 1..7: note = Description of Artificial Sequence: Synthetic peptide
HTSNTRV

SEQ ID NO: 26671 - protein, 7 aa, synthetic construct
  REGION 1..7: note = Description of Artificial Sequence: Synthetic peptide
RSTSSAP

SEQ ID NO: 26672 - protein, 7 aa, synthetic construct
  REGION 1..7: note = Description of Artificial Sequence: Synthetic peptide
MGNPRHV

SEQ ID NO: 26673 - protein, 7 aa, synthetic construct
  REGION 1..7: note = Description of Artificial Sequence: Synthetic peptide
TPAGPNK

SEQ ID NO: 26674 - protein, 7 aa, synthetic construct
  REGION 1..7: note = Description of Artificial Sequence: Synthetic peptide
SGGGTRT

SEQ ID NO: 26675 - protein, 7 aa, synthetic construct
  REGION 1..7: note = Description of Artificial Sequence: Synthetic peptide
AGSSSPA

SEQ ID NO: 26676 - protein, 7 aa, synthetic construct
  REGION 1..7: note = Description of Artificial Sequence: Synthetic peptide
VSFKPNE

SEQ ID NO: 26677 - protein, 7 aa, synthetic construct
  REGION 1..7: note = Description of Artificial Sequence: Synthetic peptide
SYPSQLN

SEQ ID NO: 26678 - protein, 7 aa, synthetic construct
  REGION 1..7: note = Description of Artificial Sequence: Synthetic peptide
PSHMASA

SEQ ID NO: 26679 - protein, 7 aa, synthetic construct
  REGION 1..7: note = Description of Artificial Sequence: Synthetic peptide
RTLSNNG

SEQ ID NO: 26680 - protein, 7 aa, synthetic construct
  REGION 1..7: note = Description of Artificial Sequence: Synthetic peptide
NGPGQNQ

SEQ ID NO: 26681 - protein, 7 aa, synthetic construct
  REGION 1..7: note = Description of Artificial Sequence: Synthetic peptide
DLPHHTR

SEQ ID NO: 26682 - protein, 7 aa, synthetic construct
  REGION 1..7: note = Description of Artificial Sequence: Synthetic peptide
NGSGQNR

SEQ ID NO: 26683 - protein, 7 aa, synthetic construct
  REGION 1..7: note = Description of Artificial Sequence: Synthetic peptide
HGSGQNQ

SEQ ID NO: 26684 - protein, 7 aa, synthetic construct
  REGION 1..7: note = Description of Artificial Sequence: Synthetic peptide
SQTVKTG

SEQ ID NO: 26685 - protein, 7 aa, synthetic construct
  REGION 1..7: note = Description of Artificial Sequence: Synthetic peptide
SSAPSLS

SEQ ID NO: 26686 - protein, 7 aa, synthetic construct
  REGION 1..7: note = Description of Artificial Sequence: Synthetic peptide
RTLSASS

SEQ ID NO: 26687 - protein, 7 aa, synthetic construct
  REGION 1..7: note = Description of Artificial Sequence: Synthetic peptide
HPTSPAM

SEQ ID NO: 26688 - protein, 7 aa, synthetic construct
  REGION 1..7: note = Description of Artificial Sequence: Synthetic peptide
EPSRSST

SEQ ID NO: 26689 - protein, 7 aa, synthetic construct
  REGION 1..7: note = Description of Artificial Sequence: Synthetic peptide
HNTAHAS

SEQ ID NO: 26690 - protein, 7 aa, synthetic construct
  REGION 1..7: note = Description of Artificial Sequence: Synthetic peptide
QVTSIGA

SEQ ID NO: 26691 - protein, 7 aa, synthetic construct
  REGION 1..7: note = Description of Artificial Sequence: Synthetic peptide
PGSVTGS

SEQ ID NO: 26692 - protein, 7 aa, synthetic construct
  REGION 1..7: note = Description of Artificial Sequence: Synthetic peptide
QSSRTVT

SEQ ID NO: 26693 - protein, 7 aa, synthetic construct
  REGION 1..7: note = Description of Artificial Sequence: Synthetic peptide
GRLNTNG

SEQ ID NO: 26694 - protein, 7 aa, synthetic construct
  REGION 1..7: note = Description of Artificial Sequence: Synthetic peptide
TRSQGIL

SEQ ID NO: 26695 - protein, 7 aa, synthetic construct
  REGION 1..7: note = Description of Artificial Sequence: Synthetic peptide
RDVGSAA

SEQ ID NO: 26696 - protein, 7 aa, synthetic construct
  REGION 1..7: note = Description of Artificial Sequence: Synthetic peptide
NGSGQYQ

SEQ ID NO: 26697 - protein, 7 aa, synthetic construct
  REGION 1..7: note = Description of Artificial Sequence: Synthetic peptide
AGAPKTD

SEQ ID NO: 26698 - protein, 7 aa, synthetic construct
  REGION 1..7: note = Description of Artificial Sequence: Synthetic peptide
GTVDKAS

SEQ ID NO: 26699 - protein, 7 aa, synthetic construct
  REGION 1..7: note = Description of Artificial Sequence: Synthetic peptide
NKMTSVS

SEQ ID NO: 26700 - protein, 7 aa, synthetic construct
  REGION 1..7: note = Description of Artificial Sequence: Synthetic peptide
EFTKVGA

SEQ ID NO: 26701 - protein, 7 aa, synthetic construct
  REGION 1..7: note = Description of Artificial Sequence: Synthetic peptide
ATSPRLS

SEQ ID NO: 26702 - protein, 7 aa, synthetic construct
  REGION 1..7: note = Description of Artificial Sequence: Synthetic peptide
VTQSSSK

SEQ ID NO: 26703 - protein, 7 aa, synthetic construct
  REGION 1..7: note = Description of Artificial Sequence: Synthetic peptide
PKGVHSM

SEQ ID NO: 26704 - protein, 7 aa, synthetic construct
  REGION 1..7: note = Description of Artificial Sequence: Synthetic peptide
RGVSTPT

SEQ ID NO: 26705 - protein, 7 aa, synthetic construct
  REGION 1..7: note = Description of Artificial Sequence: Synthetic peptide
DIPAKTA

SEQ ID NO: 26706 - protein, 7 aa, synthetic construct
  REGION 1..7: note = Description of Artificial Sequence: Synthetic peptide
STSGIRS

SEQ ID NO: 26707 - protein, 7 aa, synthetic construct
  REGION 1..7: note = Description of Artificial Sequence: Synthetic peptide
SRDSSIH

SEQ ID NO: 26708 - protein, 7 aa, synthetic construct
  REGION 1..7: note = Description of Artificial Sequence: Synthetic peptide
NSTSTSQ

SEQ ID NO: 26709 - protein, 7 aa, synthetic construct
  REGION 1..7: note = Description of Artificial Sequence: Synthetic peptide
NGTGQNQ

SEQ ID NO: 26710 - protein, 7 aa, synthetic construct
  REGION 1..7: note = Description of Artificial Sequence: Synthetic peptide
VKSNNLP

SEQ ID NO: 26711 - protein, 7 aa, synthetic construct
  REGION 1..7: note = Description of Artificial Sequence: Synthetic peptide
GQTGDMR

SEQ ID NO: 26712 - protein, 7 aa, synthetic construct
  REGION 1..7: note = Description of Artificial Sequence: Synthetic peptide
VQPRTST

SEQ ID NO: 26713 - protein, 7 aa, synthetic construct
  REGION 1..7: note = Description of Artificial Sequence: Synthetic peptide
QGSSLRT

SEQ ID NO: 26714 - protein, 7 aa, synthetic construct
  REGION 1..7: note = Description of Artificial Sequence: Synthetic peptide
MRSNPTS

SEQ ID NO: 26715 - protein, 7 aa, synthetic construct
  REGION 1..7: note = Description of Artificial Sequence: Synthetic peptide
ENISRSH

SEQ ID NO: 26716 - protein, 7 aa, synthetic construct
  REGION 1..7: note = Description of Artificial Sequence: Synthetic peptide
GLAGRLS

SEQ ID NO: 26717 - protein, 7 aa, synthetic construct
  REGION 1..7: note = Description of Artificial Sequence: Synthetic peptide
TPLSASC

SEQ ID NO: 26718 - protein, 7 aa, synthetic construct
  REGION 1..7: note = Description of Artificial Sequence: Synthetic peptide
GPTDHKL

SEQ ID NO: 26719 - protein, 7 aa, synthetic construct
  REGION 1..7: note = Description of Artificial Sequence: Synthetic peptide
ERFTSSS

SEQ ID NO: 26720 - protein, 7 aa, synthetic construct
  REGION 1..7: note = Description of Artificial Sequence: Synthetic peptide
TAGQASV

SEQ ID NO: 26721 - protein, 7 aa, synthetic construct
  REGION 1..7: note = Description of Artificial Sequence: Synthetic peptide
RVITPST

SEQ ID NO: 26722 - protein, 7 aa, synthetic construct
  REGION 1..7: note = Description of Artificial Sequence: Synthetic peptide
GTFQSGT

SEQ ID NO: 26723 - protein, 7 aa, synthetic construct
  REGION 1..7: note = Description of Artificial Sequence: Synthetic peptide
TVSAPSA

SEQ ID NO: 26724 - protein, 7 aa, synthetic construct
  REGION 1..7: note = Description of Artificial Sequence: Synthetic peptide
RPSSTHA

SEQ ID NO: 26725 - protein, 7 aa, synthetic construct
  REGION 1..7: note = Description of Artificial Sequence: Synthetic peptide
SGASSNS

SEQ ID NO: 26726 - protein, 7 aa, synthetic construct
  REGION 1..7: note = Description of Artificial Sequence: Synthetic peptide
PPVTTRP

SEQ ID NO: 26727 - protein, 7 aa, synthetic construct
  REGION 1..7: note = Description of Artificial Sequence: Synthetic peptide
AFSHSSG

SEQ ID NO: 26728 - protein, 7 aa, synthetic construct
  REGION 1..7: note = Description of Artificial Sequence: Synthetic peptide
NGSGQHQ

SEQ ID NO: 26729 - protein, 7 aa, synthetic construct
  REGION 1..7: note = Description of Artificial Sequence: Synthetic peptide
NGSGLNQ

SEQ ID NO: 26730 - protein, 7 aa, synthetic construct
  REGION 1..7: note = Description of Artificial Sequence: Synthetic peptide
LVNSAVQ

SEQ ID NO: 26731 - protein, 7 aa, synthetic construct
  REGION 1..7: note = Description of Artificial Sequence: Synthetic peptide
QSSNARN

SEQ ID NO: 26732 - protein, 7 aa, synthetic construct
  REGION 1..7: note = Description of Artificial Sequence: Synthetic peptide
GVLGSKN

SEQ ID NO: 26733 - protein, 7 aa, synthetic construct
  REGION 1..7: note = Description of Artificial Sequence: Synthetic peptide
SPNSHPS

SEQ ID NO: 26734 - protein, 7 aa, synthetic construct
  REGION 1..7: note = Description of Artificial Sequence: Synthetic peptide
TSSANTV

SEQ ID NO: 26735 - protein, 7 aa, synthetic construct
  REGION 1..7: note = Description of Artificial Sequence: Synthetic peptide
GSTKPSP

SEQ ID NO: 26736 - protein, 7 aa, synthetic construct
  REGION 1..7: note = Description of Artificial Sequence: Synthetic peptide
YASSRDG

SEQ ID NO: 26737 - protein, 7 aa, synthetic construct
  REGION 1..7: note = Description of Artificial Sequence: Synthetic peptide
NNVPLIK

SEQ ID NO: 26738 - protein, 7 aa, synthetic construct
  REGION 1..7: note = Description of Artificial Sequence: Synthetic peptide
SSASTYK

SEQ ID NO: 26739 - protein, 7 aa, synthetic construct
  REGION 1..7: note = Description of Artificial Sequence: Synthetic peptide
RSGNGSL

SEQ ID NO: 26740 - protein, 7 aa, synthetic construct
  REGION 1..7: note = Description of Artificial Sequence: Synthetic peptide
AGVTTVN

SEQ ID NO: 26741 - protein, 7 aa, synthetic construct
  REGION 1..7: note = Description of Artificial Sequence: Synthetic peptide
PRTNVMP

SEQ ID NO: 26742 - protein, 7 aa, synthetic construct
  REGION 1..7: note = Description of Artificial Sequence: Synthetic peptide
YADGARN

SEQ ID NO: 26743 - protein, 7 aa, synthetic construct
  REGION 1..7: note = Description of Artificial Sequence: Synthetic peptide
SSSRGQN

SEQ ID NO: 26744 - protein, 7 aa, synthetic construct
  REGION 1..7: note = Description of Artificial Sequence: Synthetic peptide
VSTKSAP

SEQ ID NO: 26745 - protein, 7 aa, synthetic construct
  REGION 1..7: note = Description of Artificial Sequence: Synthetic peptide
MGQGTLR

SEQ ID NO: 26746 - protein, 7 aa, synthetic construct
  REGION 1..7: note = Description of Artificial Sequence: Synthetic peptide
RGTGIGS

SEQ ID NO: 26747 - protein, 7 aa, synthetic construct
  REGION 1..7: note = Description of Artificial Sequence: Synthetic peptide
SASHGAL

SEQ ID NO: 26748 - protein, 7 aa, synthetic construct
  REGION 1..7: note = Description of Artificial Sequence: Synthetic peptide
SHPSSFG

SEQ ID NO: 26749 - protein, 7 aa, synthetic construct
  REGION 1..7: note = Description of Artificial Sequence: Synthetic peptide
PTPVSNR

SEQ ID NO: 26750 - protein, 7 aa, synthetic construct
  REGION 1..7: note = Description of Artificial Sequence: Synthetic peptide
SAASNGR

SEQ ID NO: 26751 - protein, 7 aa, synthetic construct
  REGION 1..7: note = Description of Artificial Sequence: Synthetic peptide
VLHNASS

SEQ ID NO: 26752 - protein, 7 aa, synthetic construct
  REGION 1..7: note = Description of Artificial Sequence: Synthetic peptide
GHLSPSS

SEQ ID NO: 26753 - protein, 7 aa, synthetic construct
  REGION 1..7: note = Description of Artificial Sequence: Synthetic peptide
AGAGMYA

SEQ ID NO: 26754 - protein, 7 aa, synthetic construct
  REGION 1..7: note = Description of Artificial Sequence: Synthetic peptide
GTNTGIV

SEQ ID NO: 26755 - protein, 7 aa, synthetic construct
  REGION 1..7: note = Description of Artificial Sequence: Synthetic peptide
SMDIKPR

SEQ ID NO: 26756 - protein, 7 aa, synthetic construct
  REGION 1..7: note = Description of Artificial Sequence: Synthetic peptide
PANSHAT

SEQ ID NO: 26757 - protein, 7 aa, synthetic construct
  REGION 1..7: note = Description of Artificial Sequence: Synthetic peptide
GVGTPRS

SEQ ID NO: 26758 - protein, 7 aa, synthetic construct
  REGION 1..7: note = Description of Artificial Sequence: Synthetic peptide
SQPAGRS

SEQ ID NO: 26759 - protein, 7 aa, synthetic construct
  REGION 1..7: note = Description of Artificial Sequence: Synthetic peptide
PGMKVSP

SEQ ID NO: 26760 - protein, 7 aa, synthetic construct
  REGION 1..7: note = Description of Artificial Sequence: Synthetic peptide
AGAGKVY

SEQ ID NO: 26761 - protein, 7 aa, synthetic construct
  REGION 1..7: note = Description of Artificial Sequence: Synthetic peptide
GSLTPKA

SEQ ID NO: 26762 - protein, 7 aa, synthetic construct
  REGION 1..7: note = Description of Artificial Sequence: Synthetic peptide
PPTLNTR

SEQ ID NO: 26763 - protein, 7 aa, synthetic construct
  REGION 1..7: note = Description of Artificial Sequence: Synthetic peptide
ALPAKSA

SEQ ID NO: 26764 - protein, 7 aa, synthetic construct
  REGION 1..7: note = Description of Artificial Sequence: Synthetic peptide
LMPSSSS

SEQ ID NO: 26765 - protein, 7 aa, synthetic construct
  REGION 1..7: note = Description of Artificial Sequence: Synthetic peptide
CLAQPRV

SEQ ID NO: 26766 - protein, 7 aa, synthetic construct
  REGION 1..7: note = Description of Artificial Sequence: Synthetic peptide
QGTTARS

SEQ ID NO: 26767 - protein, 7 aa, synthetic construct
  REGION 1..7: note = Description of Artificial Sequence: Synthetic peptide
SASNVSR

SEQ ID NO: 26768 - protein, 7 aa, synthetic construct
  REGION 1..7: note = Description of Artificial Sequence: Synthetic peptide
STVGHMT

SEQ ID NO: 26769 - protein, 7 aa, synthetic construct
  REGION 1..7: note = Description of Artificial Sequence: Synthetic peptide
MGAVSVS

SEQ ID NO: 26770 - protein, 7 aa, synthetic construct
  REGION 1..7: note = Description of Artificial Sequence: Synthetic peptide
GTSLKMS

SEQ ID NO: 26771 - protein, 7 aa, synthetic construct
  REGION 1..7: note = Description of Artificial Sequence: Synthetic peptide
SSAGTYT

SEQ ID NO: 26772 - protein, 7 aa, synthetic construct
  REGION 1..7: note = Description of Artificial Sequence: Synthetic peptide
GTPNTKV

SEQ ID NO: 26773 - protein, 7 aa, synthetic construct
  REGION 1..7: note = Description of Artificial Sequence: Synthetic peptide
QKTQTTS

SEQ ID NO: 26774 - protein, 7 aa, synthetic construct
  REGION 1..7: note = Description of Artificial Sequence: Synthetic peptide
ASTAINQ

SEQ ID NO: 26775 - protein, 7 aa, synthetic construct
  REGION 1..7: note = Description of Artificial Sequence: Synthetic peptide
GLHPPRT

SEQ ID NO: 26776 - protein, 7 aa, synthetic construct
  REGION 1..7: note = Description of Artificial Sequence: Synthetic peptide
PSLERGS

SEQ ID NO: 26777 - protein, 7 aa, synthetic construct
  REGION 1..7: note = Description of Artificial Sequence: Synthetic peptide
MALQPNR

SEQ ID NO: 26778 - protein, 7 aa, synthetic construct
  REGION 1..7: note = Description of Artificial Sequence: Synthetic peptide
PRSTTGG

SEQ ID NO: 26779 - protein, 7 aa, synthetic construct
  REGION 1..7: note = Description of Artificial Sequence: Synthetic peptide
NGSRQNQ

SEQ ID NO: 26780 - protein, 7 aa, synthetic construct
  REGION 1..7: note = Description of Artificial Sequence: Synthetic peptide
ANATPHH

SEQ ID NO: 26781 - protein, 7 aa, synthetic construct
  REGION 1..7: note = Description of Artificial Sequence: Synthetic peptide
PRMQEAN

SEQ ID NO: 26782 - protein, 7 aa, synthetic construct
  REGION 1..7: note = Description of Artificial Sequence: Synthetic peptide
STTTASS

SEQ ID NO: 26783 - protein, 7 aa, synthetic construct
  REGION 1..7: note = Description of Artificial Sequence: Synthetic peptide
HGVNKTE

SEQ ID NO: 26784 - protein, 7 aa, synthetic construct
  REGION 1..7: note = Description of Artificial Sequence: Synthetic peptide
TTSNKDS

SEQ ID NO: 26785 - protein, 7 aa, synthetic construct
  REGION 1..7: note = Description of Artificial Sequence: Synthetic peptide
GNNNGRT

SEQ ID NO: 26786 - protein, 7 aa, synthetic construct
  REGION 1..7: note = Description of Artificial Sequence: Synthetic peptide
SGVVKSS

SEQ ID NO: 26787 - protein, 7 aa, synthetic construct
  REGION 1..7: note = Description of Artificial Sequence: Synthetic peptide
SSLTTPH

SEQ ID NO: 26788 - protein, 7 aa, synthetic construct
  REGION 1..7: note = Description of Artificial Sequence: Synthetic peptide
YTQSTSR

SEQ ID NO: 26789 - protein, 7 aa, synthetic construct
  REGION 1..7: note = Description of Artificial Sequence: Synthetic peptide
HVTKSTA

SEQ ID NO: 26790 - protein, 7 aa, synthetic construct
  REGION 1..7: note = Description of Artificial Sequence: Synthetic peptide
SSSNKHV

SEQ ID NO: 26791 - protein, 7 aa, synthetic construct
  REGION 1..7: note = Description of Artificial Sequence: Synthetic peptide
SDQRTAN

SEQ ID NO: 26792 - protein, 7 aa, synthetic construct
  REGION 1..7: note = Description of Artificial Sequence: Synthetic peptide
KGSGQNQ

SEQ ID NO: 26793 - protein, 7 aa, synthetic construct
  REGION 1..7: note = Description of Artificial Sequence: Synthetic peptide
DSGFKSP

SEQ ID NO: 26794 - protein, 7 aa, synthetic construct
  REGION 1..7: note = Description of Artificial Sequence: Synthetic peptide
STPHHTT

SEQ ID NO: 26795 - protein, 7 aa, synthetic construct
  REGION 1..7: note = Description of Artificial Sequence: Synthetic peptide
NGSGENQ

SEQ ID NO: 26796 - protein, 7 aa, synthetic construct
  REGION 1..7: note = Description of Artificial Sequence: Synthetic peptide
SSPVRNT

SEQ ID NO: 26797 - protein, 7 aa, synthetic construct
  REGION 1..7: note = Description of Artificial Sequence: Synthetic peptide
SSRTQSL

SEQ ID NO: 26798 - protein, 7 aa, synthetic construct
  REGION 1..7: note = Description of Artificial Sequence: Synthetic peptide
GTNSTRG

SEQ ID NO: 26799 - protein, 7 aa, synthetic construct
  REGION 1..7: note = Description of Artificial Sequence: Synthetic peptide
LNGSATA

SEQ ID NO: 26800 - protein, 7 aa, synthetic construct
  REGION 1..7: note = Description of Artificial Sequence: Synthetic peptide
SSPPVGR

SEQ ID NO: 26801 - protein, 7 aa, synthetic construct
  REGION 1..7: note = Description of Artificial Sequence: Synthetic peptide
THAAHSS

SEQ ID NO: 26802 - protein, 7 aa, synthetic construct
  REGION 1..7: note = Description of Artificial Sequence: Synthetic peptide
GSAQSPR

SEQ ID NO: 26803 - protein, 7 aa, synthetic construct
  REGION 1..7: note = Description of Artificial Sequence: Synthetic peptide
PIHPSSG

SEQ ID NO: 26804 - protein, 7 aa, synthetic construct
  REGION 1..7: note = Description of Artificial Sequence: Synthetic peptide
RNQGALQ

SEQ ID NO: 26805 - protein, 7 aa, synthetic construct
  REGION 1..7: note = Description of Artificial Sequence: Synthetic peptide
GQVNHTT

SEQ ID NO: 26806 - protein, 7 aa, synthetic construct
  REGION 1..7: note = Description of Artificial Sequence: Synthetic peptide
GSSQRSD

SEQ ID NO: 26807 - protein, 7 aa, synthetic construct
  REGION 1..7: note = Description of Artificial Sequence: Synthetic peptide
TGRAPSS

SEQ ID NO: 26808 - protein, 7 aa, synthetic construct
  REGION 1..7: note = Description of Artificial Sequence: Synthetic peptide
GGTPTHR

SEQ ID NO: 26809 - protein, 7 aa, synthetic construct
  REGION 1..7: note = Description of Artificial Sequence: Synthetic peptide
VPQVSSA

SEQ ID NO: 26810 - protein, 7 aa, synthetic construct
  REGION 1..7: note = Description of Artificial Sequence: Synthetic peptide
TNGQAAR

SEQ ID NO: 26811 - protein, 7 aa, synthetic construct
  REGION 1..7: note = Description of Artificial Sequence: Synthetic peptide
ALGHNHN

SEQ ID NO: 26812 - protein, 7 aa, synthetic construct
  REGION 1..7: note = Description of Artificial Sequence: Synthetic peptide
GSGHGTN

SEQ ID NO: 26813 - protein, 7 aa, synthetic construct
  REGION 1..7: note = Description of Artificial Sequence: Synthetic peptide
PTVRSST

SEQ ID NO: 26814 - protein, 7 aa, synthetic construct
  REGION 1..7: note = Description of Artificial Sequence: Synthetic peptide
SVNTKAL

SEQ ID NO: 26815 - protein, 7 aa, synthetic construct
  REGION 1..7: note = Description of Artificial Sequence: Synthetic peptide
EPTHPRG

SEQ ID NO: 26816 - protein, 7 aa, synthetic construct
  REGION 1..7: note = Description of Artificial Sequence: Synthetic peptide
QHSPRNG

SEQ ID NO: 26817 - protein, 7 aa, synthetic construct
  REGION 1..7: note = Description of Artificial Sequence: Synthetic peptide
SGSSTFR

SEQ ID NO: 26818 - protein, 7 aa, synthetic construct
  REGION 1..7: note = Description of Artificial Sequence: Synthetic peptide
HGSSSFT

SEQ ID NO: 26819 - protein, 7 aa, synthetic construct
  REGION 1..7: note = Description of Artificial Sequence: Synthetic peptide
AGSHKGV

SEQ ID NO: 26820 - protein, 7 aa, synthetic construct
  REGION 1..7: note = Description of Artificial Sequence: Synthetic peptide
SSPTRGL

SEQ ID NO: 26821 - protein, 7 aa, synthetic construct
  REGION 1..7: note = Description of Artificial Sequence: Synthetic peptide
SRNSPPQ

SEQ ID NO: 26822 - protein, 7 aa, synthetic construct
  REGION 1..7: note = Description of Artificial Sequence: Synthetic peptide
PVGSVRG

SEQ ID NO: 26823 - protein, 7 aa, synthetic construct
  REGION 1..7: note = Description of Artificial Sequence: Synthetic peptide
GTGHQRS

SEQ ID NO: 26824 - protein, 7 aa, synthetic construct
  REGION 1..7: note = Description of Artificial Sequence: Synthetic peptide
TTQSRSL

SEQ ID NO: 26825 - protein, 7 aa, synthetic construct
  REGION 1..7: note = Description of Artificial Sequence: Synthetic peptide
ASRDRAG

SEQ ID NO: 26826 - protein, 7 aa, synthetic construct
  REGION 1..7: note = Description of Artificial Sequence: Synthetic peptide
TGMQSLS

SEQ ID NO: 26827 - protein, 7 aa, synthetic construct
  REGION 1..7: note = Description of Artificial Sequence: Synthetic peptide
SSSSTHG

SEQ ID NO: 26828 - protein, 7 aa, synthetic construct
  REGION 1..7: note = Description of Artificial Sequence: Synthetic peptide
NISTMSK

SEQ ID NO: 26829 - protein, 7 aa, synthetic construct
  REGION 1..7: note = Description of Artificial Sequence: Synthetic peptide
GRAHNVI

SEQ ID NO: 26830 - protein, 7 aa, synthetic construct
  REGION 1..7: note = Description of Artificial Sequence: Synthetic peptide
SPGNKLL

SEQ ID NO: 26831 - protein, 7 aa, synthetic construct
  REGION 1..7: note = Description of Artificial Sequence: Synthetic peptide
VQPVKMS

SEQ ID NO: 26832 - protein, 7 aa, synthetic construct
  REGION 1..7: note = Description of Artificial Sequence: Synthetic peptide
QGSSKTT

SEQ ID NO: 26833 - protein, 7 aa, synthetic construct
  REGION 1..7: note = Description of Artificial Sequence: Synthetic peptide
VTKSGNG

SEQ ID NO: 26834 - protein, 7 aa, synthetic construct
  REGION 1..7: note = Description of Artificial Sequence: Synthetic peptide
GTYGEMR

SEQ ID NO: 26835 - protein, 7 aa, synthetic construct
  REGION 1..7: note = Description of Artificial Sequence: Synthetic peptide
VNTNRAA

SEQ ID NO: 26836 - protein, 7 aa, synthetic construct
  REGION 1..7: note = Description of Artificial Sequence: Synthetic peptide
NGSGQNE

SEQ ID NO: 26837 - protein, 7 aa, synthetic construct
  REGION 1..7: note = Description of Artificial Sequence: Synthetic peptide
DAGSRSS

SEQ ID NO: 26838 - protein, 7 aa, synthetic construct
  REGION 1..7: note = Description of Artificial Sequence: Synthetic peptide
PLPAHSP

SEQ ID NO: 26839 - protein, 7 aa, synthetic construct
  REGION 1..7: note = Description of Artificial Sequence: Synthetic peptide
TSGTKAH

SEQ ID NO: 26840 - protein, 7 aa, synthetic construct
  REGION 1..7: note = Description of Artificial Sequence: Synthetic peptide
LQQHNTK

SEQ ID NO: 26841 - protein, 7 aa, synthetic construct
  REGION 1..7: note = Description of Artificial Sequence: Synthetic peptide
HQSSSSS

SEQ ID NO: 26842 - protein, 7 aa, synthetic construct
  REGION 1..7: note = Description of Artificial Sequence: Synthetic peptide
FRAQANV

SEQ ID NO: 26843 - protein, 7 aa, synthetic construct
  REGION 1..7: note = Description of Artificial Sequence: Synthetic peptide
PYNSKAS

SEQ ID NO: 26844 - protein, 7 aa, synthetic construct
  REGION 1..7: note = Description of Artificial Sequence: Synthetic peptide
AHSNNSY

SEQ ID NO: 26845 - protein, 7 aa, synthetic construct
  REGION 1..7: note = Description of Artificial Sequence: Synthetic peptide
TTASRPS

SEQ ID NO: 26846 - protein, 7 aa, synthetic construct
  REGION 1..7: note = Description of Artificial Sequence: Synthetic peptide
VSTGKSV

SEQ ID NO: 26847 - protein, 7 aa, synthetic construct
  REGION 1..7: note = Description of Artificial Sequence: Synthetic peptide
GASVNQG

SEQ ID NO: 26848 - protein, 7 aa, synthetic construct
  REGION 1..7: note = Description of Artificial Sequence: Synthetic peptide
NGSGQNL

SEQ ID NO: 26849 - protein, 7 aa, synthetic construct
  REGION 1..7: note = Description of Artificial Sequence: Synthetic peptide
QLGSTTR

SEQ ID NO: 26850 - protein, 7 aa, synthetic construct
  REGION 1..7: note = Description of Artificial Sequence: Synthetic peptide
SGRDKIS

SEQ ID NO: 26851 - protein, 7 aa, synthetic construct
  REGION 1..7: note = Description of Artificial Sequence: Synthetic peptide
NGSVQNQ

SEQ ID NO: 26852 - protein, 7 aa, synthetic construct
  REGION 1..7: note = Description of Artificial Sequence: Synthetic peptide
MPSQRDG

SEQ ID NO: 26853 - protein, 7 aa, synthetic construct
  REGION 1..7: note = Description of Artificial Sequence: Synthetic peptide
VTTSTGR

SEQ ID NO: 26854 - protein, 7 aa, synthetic construct
  REGION 1..7: note = Description of Artificial Sequence: Synthetic peptide
NGSGHNQ

SEQ ID NO: 26855 - protein, 7 aa, synthetic construct
  REGION 1..7: note = Description of Artificial Sequence: Synthetic peptide
TGIGSHL

SEQ ID NO: 26856 - protein, 7 aa, synthetic construct
  REGION 1..7: note = Description of Artificial Sequence: Synthetic peptide
NGSGRNQ

SEQ ID NO: 26857 - protein, 7 aa, synthetic construct
  REGION 1..7: note = Description of Artificial Sequence: Synthetic peptide
VRESRSS

SEQ ID NO: 26858 - protein, 7 aa, synthetic construct
  REGION 1..7: note = Description of Artificial Sequence: Synthetic peptide
PQNLAHV

SEQ ID NO: 26859 - protein, 7 aa, synthetic construct
  REGION 1..7: note = Description of Artificial Sequence: Synthetic peptide
KNPSSAP

SEQ ID NO: 26860 - protein, 7 aa, synthetic construct
  REGION 1..7: note = Description of Artificial Sequence: Synthetic peptide
NSGKPNA

SEQ ID NO: 26861 - protein, 7 aa, synthetic construct
  REGION 1..7: note = Description of Artificial Sequence: Synthetic peptide
NGSGQKQ

SEQ ID NO: 26862 - protein, 7 aa, synthetic construct
  REGION 1..7: note = Description of Artificial Sequence: Synthetic peptide
NGVPQPK

SEQ ID NO: 26863 - protein, 7 aa, synthetic construct
  REGION 1..7: note = Description of Artificial Sequence: Synthetic peptide
NGSGKNQ

SEQ ID NO: 26864 - protein, 7 aa, synthetic construct
  REGION 1..7: note = Description of Artificial Sequence: Synthetic peptide
NGSGQDQ

SEQ ID NO: 26865 - protein, 7 aa, synthetic construct
  REGION 1..7: note = Description of Artificial Sequence: Synthetic peptide
GFSRPNT

SEQ ID NO: 26866 - protein, 7 aa, synthetic construct
  REGION 1..7: note = Description of Artificial Sequence: Synthetic peptide
SRQATSS

SEQ ID NO: 26867 - protein, 7 aa, synthetic construct
  REGION 1..7: note = Description of Artificial Sequence: Synthetic peptide
YANNLNR

SEQ ID NO: 26868 - protein, 7 aa, synthetic construct
  REGION 1..7: note = Description of Artificial Sequence: Synthetic peptide
EVTNAPK

SEQ ID NO: 26869 - protein, 7 aa, synthetic construct
  REGION 1..7: note = Description of Artificial Sequence: Synthetic peptide
SGTQTWS

SEQ ID NO: 26870 - protein, 7 aa, synthetic construct
  REGION 1..7: note = Description of Artificial Sequence: Synthetic peptide
AVPAKGA

SEQ ID NO: 26871 - protein, 7 aa, synthetic construct
  REGION 1..7: note = Description of Artificial Sequence: Synthetic peptide
RNYTGDS

SEQ ID NO: 26872 - protein, 7 aa, synthetic construct
  REGION 1..7: note = Description of Artificial Sequence: Synthetic peptide
NGFGQNQ

SEQ ID NO: 26873 - protein, 7 aa, synthetic construct
  REGION 1..7: note = Description of Artificial Sequence: Synthetic peptide
LRATSGN

SEQ ID NO: 26874 - protein, 7 aa, synthetic construct
  REGION 1..7: note = Description of Artificial Sequence: Synthetic peptide
AAQPSLK

SEQ ID NO: 26875 - protein, 7 aa, synthetic construct
  REGION 1..7: note = Description of Artificial Sequence: Synthetic peptide
HMNRKLE

SEQ ID NO: 26876 - protein, 7 aa, synthetic construct
  REGION 1..7: note = Description of Artificial Sequence: Synthetic peptide
GARPVLQ

SEQ ID NO: 26877 - protein, 7 aa, synthetic construct
  REGION 1..7: note = Description of Artificial Sequence: Synthetic peptide
RHTMTHV

SEQ ID NO: 26878 - protein, 7 aa, synthetic construct
  REGION 1..7: note = Description of Artificial Sequence: Synthetic peptide
GLSPVLK

SEQ ID NO: 26879 - protein, 7 aa, synthetic construct
  REGION 1..7: note = Description of Artificial Sequence: Synthetic peptide
QFPGTLR

SEQ ID NO: 26880 - protein, 7 aa, synthetic construct
  REGION 1..7: note = Description of Artificial Sequence: Synthetic peptide
HNLHMPG

SEQ ID NO: 26881 - protein, 7 aa, synthetic construct
  REGION 1..7: note = Description of Artificial Sequence: Synthetic peptide
PKARQHN

SEQ ID NO: 26882 - protein, 7 aa, synthetic construct
  REGION 1..7: note = Description of Artificial Sequence: Synthetic peptide
RPPVDAV

SEQ ID NO: 26883 - protein, 7 aa, synthetic construct
  REGION 1..7: note = Description of Artificial Sequence: Synthetic peptide
KPTRSTA

SEQ ID NO: 26884 - protein, 7 aa, synthetic construct
  REGION 1..7: note = Description of Artificial Sequence: Synthetic peptide
NYVGQRS

SEQ ID NO: 26885 - protein, 7 aa, synthetic construct
  REGION 1..7: note = Description of Artificial Sequence: Synthetic peptide
SQAKKTG

SEQ ID NO: 26886 - protein, 7 aa, synthetic construct
  REGION 1..7: note = Description of Artificial Sequence: Synthetic peptide
YGNSGRY

SEQ ID NO: 26887 - protein, 7 aa, synthetic construct
  REGION 1..7: note = Description of Artificial Sequence: Synthetic peptide
RGPGHNT

SEQ ID NO: 26888 - protein, 7 aa, synthetic construct
  REGION 1..7: note = Description of Artificial Sequence: Synthetic peptide
CAVSKSR

SEQ ID NO: 26889 - protein, 7 aa, synthetic construct
  REGION 1..7: note = Description of Artificial Sequence: Synthetic peptide
KLNKSQA

SEQ ID NO: 26890 - protein, 7 aa, synthetic construct
  REGION 1..7: note = Description of Artificial Sequence: Synthetic peptide
DQKTVNR

SEQ ID NO: 26891 - protein, 7 aa, synthetic construct
  REGION 1..7: note = Description of Artificial Sequence: Synthetic peptide
PAALNEL

SEQ ID NO: 26892 - protein, 7 aa, synthetic construct
  REGION 1..7: note = Description of Artificial Sequence: Synthetic peptide
NPGHKLT

SEQ ID NO: 26893 - protein, 7 aa, synthetic construct
  REGION 1..7: note = Description of Artificial Sequence: Synthetic peptide
NTQSYTR

SEQ ID NO: 26894 - protein, 7 aa, synthetic construct
  REGION 1..7: note = Description of Artificial Sequence: Synthetic peptide
QVVPATN

SEQ ID NO: 26895 - protein, 7 aa, synthetic construct
  REGION 1..7: note = Description of Artificial Sequence: Synthetic peptide
TASYKPS

SEQ ID NO: 26896 - protein, 7 aa, synthetic construct
  REGION 1..7: note = Description of Artificial Sequence: Synthetic peptide
EMRVERP

SEQ ID NO: 26897 - protein, 7 aa, synthetic construct
  REGION 1..7: note = Description of Artificial Sequence: Synthetic peptide
MKSQKYA

SEQ ID NO: 26898 - protein, 7 aa, synthetic construct
  REGION 1..7: note = Description of Artificial Sequence: Synthetic peptide
KDFGQMR

SEQ ID NO: 26899 - protein, 7 aa, synthetic construct
  REGION 1..7: note = Description of Artificial Sequence: Synthetic peptide
EHIGHNH

SEQ ID NO: 26900 - protein, 7 aa, synthetic construct
  REGION 1..7: note = Description of Artificial Sequence: Synthetic peptide
NNTQKNS

SEQ ID NO: 26901 - protein, 7 aa, synthetic construct
  REGION 1..7: note = Description of Artificial Sequence: Synthetic peptide
SSSGGVK

SEQ ID NO: 26902 - protein, 7 aa, synthetic construct
  REGION 1..7: note = Description of Artificial Sequence: Synthetic peptide
VSGTKIE

SEQ ID NO: 26903 - protein, 7 aa, synthetic construct
  REGION 1..7: note = Description of Artificial Sequence: Synthetic peptide
YGMRLVN

SEQ ID NO: 26904 - protein, 7 aa, synthetic construct
  REGION 1..7: note = Description of Artificial Sequence: Synthetic peptide
PKLSHTG

SEQ ID NO: 26905 - protein, 7 aa, synthetic construct
  REGION 1..7: note = Description of Artificial Sequence: Synthetic peptide
ERKVQNC

SEQ ID NO: 26906 - protein, 7 aa, synthetic construct
  REGION 1..7: note = Description of Artificial Sequence: Synthetic peptide
PGTSDSV

SEQ ID NO: 26907 - protein, 7 aa, synthetic construct
  REGION 1..7: note = Description of Artificial Sequence: Synthetic peptide
CVYSGTR

SEQ ID NO: 26908 - protein, 7 aa, synthetic construct
  REGION 1..7: note = Description of Artificial Sequence: Synthetic peptide
SYVTTAG

SEQ ID NO: 26909 - protein, 7 aa, synthetic construct
  REGION 1..7: note = Description of Artificial Sequence: Synthetic peptide
KSNGHRI

SEQ ID NO: 26910 - protein, 7 aa, synthetic construct
  REGION 1..7: note = Description of Artificial Sequence: Synthetic peptide
GNELVHL

SEQ ID NO: 26911 - protein, 7 aa, synthetic construct
  REGION 1..7: note = Description of Artificial Sequence: Synthetic peptide
SMAPAGL

SEQ ID NO: 26912 - protein, 7 aa, synthetic construct
  REGION 1..7: note = Description of Artificial Sequence: Synthetic peptide
QQEMSKK

SEQ ID NO: 26913 - protein, 7 aa, synthetic construct
  REGION 1..7: note = Description of Artificial Sequence: Synthetic peptide
KNQSLMS

SEQ ID NO: 26914 - protein, 7 aa, synthetic construct
  REGION 1..7: note = Description of Artificial Sequence: Synthetic peptide
HVERTGV

SEQ ID NO: 26915 - protein, 7 aa, synthetic construct
  REGION 1..7: note = Description of Artificial Sequence: Synthetic peptide
LKANATG

SEQ ID NO: 26916 - protein, 7 aa, synthetic construct
  REGION 1..7: note = Description of Artificial Sequence: Synthetic peptide
NSTQITP

SEQ ID NO: 26917 - protein, 7 aa, synthetic construct
  REGION 1..7: note = Description of Artificial Sequence: Synthetic peptide
SKTSKVH

SEQ ID NO: 26918 - protein, 7 aa, synthetic construct
  REGION 1..7: note = Description of Artificial Sequence: Synthetic peptide
RHYTGDS

SEQ ID NO: 26919 - protein, 7 aa, synthetic construct
  REGION 1..7: note = Description of Artificial Sequence: Synthetic peptide
NGRPQFR

SEQ ID NO: 26920 - protein, 7 aa, synthetic construct
  REGION 1..7: note = Description of Artificial Sequence: Synthetic peptide
NSVGHSR

SEQ ID NO: 26921 - protein, 7 aa, synthetic construct
  REGION 1..7: note = Description of Artificial Sequence: Synthetic peptide
GPTPYSR

SEQ ID NO: 26922 - protein, 7 aa, synthetic construct
  REGION 1..7: note = Description of Artificial Sequence: Synthetic peptide
SPGNVRK

SEQ ID NO: 26923 - protein, 7 aa, synthetic construct
  REGION 1..7: note = Description of Artificial Sequence: Synthetic peptide
QSSEKRQ

SEQ ID NO: 26924 - protein, 7 aa, synthetic construct
  REGION 1..7: note = Description of Artificial Sequence: Synthetic peptide
IDGHRNG

SEQ ID NO: 26925 - protein, 7 aa, synthetic construct
  REGION 1..7: note = Description of Artificial Sequence: Synthetic peptide
GSQIPRI

SEQ ID NO: 26926 - protein, 7 aa, synthetic construct
  REGION 1..7: note = Description of Artificial Sequence: Synthetic peptide
DRGRPAG

SEQ ID NO: 26927 - protein, 7 aa, synthetic construct
  REGION 1..7: note = Description of Artificial Sequence: Synthetic peptide
SDSRNTN

SEQ ID NO: 26928 - protein, 7 aa, synthetic construct
  REGION 1..7: note = Description of Artificial Sequence: Synthetic peptide
SRTQSYC

SEQ ID NO: 26929 - protein, 7 aa, synthetic construct
  REGION 1..7: note = Description of Artificial Sequence: Synthetic peptide
NNPKNAV

SEQ ID NO: 26930 - protein, 7 aa, synthetic construct
  REGION 1..7: note = Description of Artificial Sequence: Synthetic peptide
PSSGHSR

SEQ ID NO: 26931 - protein, 7 aa, synthetic construct
  REGION 1..7: note = Description of Artificial Sequence: Synthetic peptide
LLSNSFK

SEQ ID NO: 26932 - protein, 7 aa, synthetic construct
  REGION 1..7: note = Description of Artificial Sequence: Synthetic peptide
PLGATFA

SEQ ID NO: 26933 - protein, 7 aa, synthetic construct
  REGION 1..7: note = Description of Artificial Sequence: Synthetic peptide
RVPLSTI

SEQ ID NO: 26934 - protein, 7 aa, synthetic construct
  REGION 1..7: note = Description of Artificial Sequence: Synthetic peptide
NLKNQVA

SEQ ID NO: 26935 - protein, 7 aa, synthetic construct
  REGION 1..7: note = Description of Artificial Sequence: Synthetic peptide
GLQSQSR

SEQ ID NO: 26936 - protein, 7 aa, synthetic construct
  REGION 1..7: note = Description of Artificial Sequence: Synthetic peptide
ASRAPPG

SEQ ID NO: 26937 - protein, 7 aa, synthetic construct
  REGION 1..7: note = Description of Artificial Sequence: Synthetic peptide
GTDRTLH

SEQ ID NO: 26938 - protein, 7 aa, synthetic construct
  REGION 1..7: note = Description of Artificial Sequence: Synthetic peptide
NSFSRNS

SEQ ID NO: 26939 - protein, 7 aa, synthetic construct
  REGION 1..7: note = Description of Artificial Sequence: Synthetic peptide
YIKSVTN

SEQ ID NO: 26940 - protein, 7 aa, synthetic construct
  REGION 1..7: note = Description of Artificial Sequence: Synthetic peptide
VLRNISK

SEQ ID NO: 26941 - protein, 7 aa, synthetic construct
  REGION 1..7: note = Description of Artificial Sequence: Synthetic peptide
AGHSGRD

SEQ ID NO: 26942 - protein, 7 aa, synthetic construct
  REGION 1..7: note = Description of Artificial Sequence: Synthetic peptide
RELKNSS

SEQ ID NO: 26943 - protein, 7 aa, synthetic construct
  REGION 1..7: note = Description of Artificial Sequence: Synthetic peptide
ARTNMVK

SEQ ID NO: 26944 - protein, 7 aa, synthetic construct
  REGION 1..7: note = Description of Artificial Sequence: Synthetic peptide
IPANSFK

SEQ ID NO: 26945 - protein, 7 aa, synthetic construct
  REGION 1..7: note = Description of Artificial Sequence: Synthetic peptide
QTGSNNK

SEQ ID NO: 26946 - protein, 7 aa, synthetic construct
  REGION 1..7: note = Description of Artificial Sequence: Synthetic peptide
RQPKKDS

SEQ ID NO: 26947 - protein, 7 aa, synthetic construct
  REGION 1..7: note = Description of Artificial Sequence: Synthetic peptide
NSGRNSV

SEQ ID NO: 26948 - protein, 7 aa, synthetic construct
  REGION 1..7: note = Description of Artificial Sequence: Synthetic peptide
SFPVGVG

SEQ ID NO: 26949 - protein, 7 aa, synthetic construct
  REGION 1..7: note = Description of Artificial Sequence: Synthetic peptide
VMDVQHR

SEQ ID NO: 26950 - protein, 7 aa, synthetic construct
  REGION 1..7: note = Description of Artificial Sequence: Synthetic peptide
SITSVTN

SEQ ID NO: 26951 - protein, 7 aa, synthetic construct
  REGION 1..7: note = Description of Artificial Sequence: Synthetic peptide
KAGQERT

SEQ ID NO: 26952 - protein, 7 aa, synthetic construct
  REGION 1..7: note = Description of Artificial Sequence: Synthetic peptide
NPGRQQF

SEQ ID NO: 26953 - protein, 7 aa, synthetic construct
  REGION 1..7: note = Description of Artificial Sequence: Synthetic peptide
KLPDSRF

SEQ ID NO: 26954 - protein, 7 aa, synthetic construct
  REGION 1..7: note = Description of Artificial Sequence: Synthetic peptide
HNLSLVK

SEQ ID NO: 26955 - protein, 7 aa, synthetic construct
  REGION 1..7: note = Description of Artificial Sequence: Synthetic peptide
NSNGFNN

SEQ ID NO: 26956 - protein, 7 aa, synthetic construct
  REGION 1..7: note = Description of Artificial Sequence: Synthetic peptide
PMGTGRG

SEQ ID NO: 26957 - protein, 7 aa, synthetic construct
  REGION 1..7: note = Description of Artificial Sequence: Synthetic peptide
AQTKGTQ

SEQ ID NO: 26958 - protein, 7 aa, synthetic construct
  REGION 1..7: note = Description of Artificial Sequence: Synthetic peptide
TATQKGQ

SEQ ID NO: 26959 - protein, 7 aa, synthetic construct
  REGION 1..7: note = Description of Artificial Sequence: Synthetic peptide
IQTHTSN

SEQ ID NO: 26960 - protein, 7 aa, synthetic construct
  REGION 1..7: note = Description of Artificial Sequence: Synthetic peptide
NLGIPKG

SEQ ID NO: 26961 - protein, 7 aa, synthetic construct
  REGION 1..7: note = Description of Artificial Sequence: Synthetic peptide
SPAIQRR

SEQ ID NO: 26962 - protein, 7 aa, synthetic construct
  REGION 1..7: note = Description of Artificial Sequence: Synthetic peptide
GSNAISG

SEQ ID NO: 26963 - protein, 7 aa, synthetic construct
  REGION 1..7: note = Description of Artificial Sequence: Synthetic peptide
CLHSNEG

SEQ ID NO: 26964 - protein, 7 aa, synthetic construct
  REGION 1..7: note = Description of Artificial Sequence: Synthetic peptide
RRDDKDR

SEQ ID NO: 26965 - protein, 7 aa, synthetic construct
  REGION 1..7: note = Description of Artificial Sequence: Synthetic peptide
RVVGQTT

SEQ ID NO: 26966 - protein, 7 aa, synthetic construct
  REGION 1..7: note = Description of Artificial Sequence: Synthetic peptide
QDGSKGK

SEQ ID NO: 26967 - protein, 7 aa, synthetic construct
  REGION 1..7: note = Description of Artificial Sequence: Synthetic peptide
TRMNKQT

SEQ ID NO: 26968 - protein, 7 aa, synthetic construct
  REGION 1..7: note = Description of Artificial Sequence: Synthetic peptide
ISGQQTT

SEQ ID NO: 26969 - protein, 7 aa, synthetic construct
  REGION 1..7: note = Description of Artificial Sequence: Synthetic peptide
HVVEQFK

SEQ ID NO: 26970 - protein, 7 aa, synthetic construct
  REGION 1..7: note = Description of Artificial Sequence: Synthetic peptide
IPSRNLS

SEQ ID NO: 26971 - protein, 7 aa, synthetic construct
  REGION 1..7: note = Description of Artificial Sequence: Synthetic peptide
NPVNTKS

SEQ ID NO: 26972 - protein, 7 aa, synthetic construct
  REGION 1..7: note = Description of Artificial Sequence: Synthetic peptide
RYSRDNV

SEQ ID NO: 26973 - protein, 7 aa, synthetic construct
  REGION 1..7: note = Description of Artificial Sequence: Synthetic peptide
GQYGRTS

SEQ ID NO: 26974 - protein, 7 aa, synthetic construct
  REGION 1..7: note = Description of Artificial Sequence: Synthetic peptide
DRTNTQR

SEQ ID NO: 26975 - protein, 7 aa, synthetic construct
  REGION 1..7: note = Description of Artificial Sequence: Synthetic peptide
TNSPSPG

SEQ ID NO: 26976 - protein, 7 aa, synthetic construct
  REGION 1..7: note = Description of Artificial Sequence: Synthetic peptide
NPSEKML

SEQ ID NO: 26977 - protein, 7 aa, synthetic construct
  REGION 1..7: note = Description of Artificial Sequence: Synthetic peptide
DESGKSK

SEQ ID NO: 26978 - protein, 7 aa, synthetic construct
  REGION 1..7: note = Description of Artificial Sequence: Synthetic peptide
PQHSVYS

SEQ ID NO: 26979 - protein, 7 aa, synthetic construct
  REGION 1..7: note = Description of Artificial Sequence: Synthetic peptide
RRAELLT

SEQ ID NO: 26980 - protein, 7 aa, synthetic construct
  REGION 1..7: note = Description of Artificial Sequence: Synthetic peptide
CPQSREK

SEQ ID NO: 26981 - protein, 7 aa, synthetic construct
  REGION 1..7: note = Description of Artificial Sequence: Synthetic peptide
NGQAGNR

SEQ ID NO: 26982 - protein, 7 aa, synthetic construct
  REGION 1..7: note = Description of Artificial Sequence: Synthetic peptide
TPHDGQR

SEQ ID NO: 26983 - protein, 7 aa, synthetic construct
  REGION 1..7: note = Description of Artificial Sequence: Synthetic peptide
SASPSIK

SEQ ID NO: 26984 - protein, 7 aa, synthetic construct
  REGION 1..7: note = Description of Artificial Sequence: Synthetic peptide
SVSGRHI

SEQ ID NO: 26985 - protein, 7 aa, synthetic construct
  REGION 1..7: note = Description of Artificial Sequence: Synthetic peptide
NHGAAQG

SEQ ID NO: 26986 - protein, 7 aa, synthetic construct
  REGION 1..7: note = Description of Artificial Sequence: Synthetic peptide
SAQKNLI

SEQ ID NO: 26987 - protein, 7 aa, synthetic construct
  REGION 1..7: note = Description of Artificial Sequence: Synthetic peptide
GHGGQSR

SEQ ID NO: 26988 - protein, 7 aa, synthetic construct
  REGION 1..7: note = Description of Artificial Sequence: Synthetic peptide
MNMRSTH

SEQ ID NO: 26989 - protein, 7 aa, synthetic construct
  REGION 1..7: note = Description of Artificial Sequence: Synthetic peptide
QDKHNPG

SEQ ID NO: 26990 - protein, 7 aa, synthetic construct
  REGION 1..7: note = Description of Artificial Sequence: Synthetic peptide
NCSGQNQ

SEQ ID NO: 26991 - protein, 7 aa, synthetic construct
  REGION 1..7: note = Description of Artificial Sequence: Synthetic peptide
SVGSGYK

SEQ ID NO: 26992 - protein, 7 aa, synthetic construct
  REGION 1..7: note = Description of Artificial Sequence: Synthetic peptide
GRGKDYR

SEQ ID NO: 26993 - protein, 7 aa, synthetic construct
  REGION 1..7: note = Description of Artificial Sequence: Synthetic peptide
PAHRRSE

SEQ ID NO: 26994 - protein, 7 aa, synthetic construct
  REGION 1..7: note = Description of Artificial Sequence: Synthetic peptide
NDVKQGH

SEQ ID NO: 26995 - protein, 7 aa, synthetic construct
  REGION 1..7: note = Description of Artificial Sequence: Synthetic peptide
GMKGSVN

SEQ ID NO: 26996 - protein, 7 aa, synthetic construct
  REGION 1..7: note = Description of Artificial Sequence: Synthetic peptide
HTSPGKN

SEQ ID NO: 26997 - protein, 7 aa, synthetic construct
  REGION 1..7: note = Description of Artificial Sequence: Synthetic peptide
GLAAGFG

SEQ ID NO: 26998 - protein, 7 aa, synthetic construct
  REGION 1..7: note = Description of Artificial Sequence: Synthetic peptide
ASLHRNN

SEQ ID NO: 26999 - protein, 7 aa, synthetic construct
  REGION 1..7: note = Description of Artificial Sequence: Synthetic peptide
DRSRVLG

SEQ ID NO: 27000 - protein, 7 aa, synthetic construct
  REGION 1..7: note = Description of Artificial Sequence: Synthetic peptide
PGDRGKV

SEQ ID NO: 27001 - protein, 7 aa, synthetic construct
  REGION 1..7: note = Description of Artificial Sequence: Synthetic peptide
KTSETRS

SEQ ID NO: 27002 - protein, 7 aa, synthetic construct
  REGION 1..7: note = Description of Artificial Sequence: Synthetic peptide
VKVTHQQ

SEQ ID NO: 27003 - protein, 7 aa, synthetic construct
  REGION 1..7: note = Description of Artificial Sequence: Synthetic peptide
HSTPSTR

SEQ ID NO: 27004 - protein, 7 aa, synthetic construct
  REGION 1..7: note = Description of Artificial Sequence: Synthetic peptide
ALNNHRA

SEQ ID NO: 27005 - protein, 7 aa, synthetic construct
  REGION 1..7: note = Description of Artificial Sequence: Synthetic peptide
NSITRSS

SEQ ID NO: 27006 - protein, 7 aa, synthetic construct
  REGION 1..7: note = Description of Artificial Sequence: Synthetic peptide
PNRTSSY

SEQ ID NO: 27007 - protein, 7 aa, synthetic construct
  REGION 1..7: note = Description of Artificial Sequence: Synthetic peptide
RPESSYS

SEQ ID NO: 27008 - protein, 7 aa, synthetic construct
  REGION 1..7: note = Description of Artificial Sequence: Synthetic peptide
ALANPQT

SEQ ID NO: 27009 - protein, 7 aa, synthetic construct
  REGION 1..7: note = Description of Artificial Sequence: Synthetic peptide
CNNARVS

SEQ ID NO: 27010 - protein, 7 aa, synthetic construct
  REGION 1..7: note = Description of Artificial Sequence: Synthetic peptide
HRDQVSL

SEQ ID NO: 27011 - protein, 7 aa, synthetic construct
  REGION 1..7: note = Description of Artificial Sequence: Synthetic peptide
RGNENIN

SEQ ID NO: 27012 - protein, 7 aa, synthetic construct
  REGION 1..7: note = Description of Artificial Sequence: Synthetic peptide
QIKTISA

SEQ ID NO: 27013 - protein, 7 aa, synthetic construct
  REGION 1..7: note = Description of Artificial Sequence: Synthetic peptide
DIRNLQR

SEQ ID NO: 27014 - protein, 7 aa, synthetic construct
  REGION 1..7: note = Description of Artificial Sequence: Synthetic peptide
MLTVPQQ

SEQ ID NO: 27015 - protein, 7 aa, synthetic construct
  REGION 1..7: note = Description of Artificial Sequence: Synthetic peptide
LQSGGHR

SEQ ID NO: 27016 - protein, 7 aa, synthetic construct
  REGION 1..7: note = Description of Artificial Sequence: Synthetic peptide
GPIRPIQ

SEQ ID NO: 27017 - protein, 7 aa, synthetic construct
  REGION 1..7: note = Description of Artificial Sequence: Synthetic peptide
VSNGQNP

SEQ ID NO: 27018 - protein, 7 aa, synthetic construct
  REGION 1..7: note = Description of Artificial Sequence: Synthetic peptide
CRGISGK

SEQ ID NO: 27019 - protein, 7 aa, synthetic construct
  REGION 1..7: note = Description of Artificial Sequence: Synthetic peptide
FTYAEGN

SEQ ID NO: 27020 - protein, 7 aa, synthetic construct
  REGION 1..7: note = Description of Artificial Sequence: Synthetic peptide
LTTHGMK

SEQ ID NO: 27021 - protein, 7 aa, synthetic construct
  REGION 1..7: note = Description of Artificial Sequence: Synthetic peptide
ALLNINT

SEQ ID NO: 27022 - protein, 7 aa, synthetic construct
  REGION 1..7: note = Description of Artificial Sequence: Synthetic peptide
LTFNSSG

SEQ ID NO: 27023 - protein, 7 aa, synthetic construct
  REGION 1..7: note = Description of Artificial Sequence: Synthetic peptide
TGDSPLA

SEQ ID NO: 27024 - protein, 7 aa, synthetic construct
  REGION 1..7: note = Description of Artificial Sequence: Synthetic peptide
FHSRDSS

SEQ ID NO: 27025 - protein, 7 aa, synthetic construct
  REGION 1..7: note = Description of Artificial Sequence: Synthetic peptide
VKTARAT

SEQ ID NO: 27026 - protein, 7 aa, synthetic construct
  REGION 1..7: note = Description of Artificial Sequence: Synthetic peptide
GTARTTG

SEQ ID NO: 27027 - protein, 7 aa, synthetic construct
  REGION 1..7: note = Description of Artificial Sequence: Synthetic peptide
QHIQLSR

SEQ ID NO: 27028 - protein, 7 aa, synthetic construct
  REGION 1..7: note = Description of Artificial Sequence: Synthetic peptide
SKLRTST

SEQ ID NO: 27029 - protein, 7 aa, synthetic construct
  REGION 1..7: note = Description of Artificial Sequence: Synthetic peptide
TRSKESP

SEQ ID NO: 27030 - protein, 7 aa, synthetic construct
  REGION 1..7: note = Description of Artificial Sequence: Synthetic peptide
LPTGKML

SEQ ID NO: 27031 - protein, 7 aa, synthetic construct
  REGION 1..7: note = Description of Artificial Sequence: Synthetic peptide
MGTHSIG

SEQ ID NO: 27032 - protein, 7 aa, synthetic construct
  REGION 1..7: note = Description of Artificial Sequence: Synthetic peptide
KSSSGWT

SEQ ID NO: 27033 - protein, 7 aa, synthetic construct
  REGION 1..7: note = Description of Artificial Sequence: Synthetic peptide
SITGNRT

SEQ ID NO: 27034 - protein, 7 aa, synthetic construct
  REGION 1..7: note = Description of Artificial Sequence: Synthetic peptide
MNLSTER

SEQ ID NO: 27035 - protein, 7 aa, synthetic construct
  REGION 1..7: note = Description of Artificial Sequence: Synthetic peptide
GQSLSVI

SEQ ID NO: 27036 - protein, 7 aa, synthetic construct
  REGION 1..7: note = Description of Artificial Sequence: Synthetic peptide
KNATGIL

SEQ ID NO: 27037 - protein, 7 aa, synthetic construct
  REGION 1..7: note = Description of Artificial Sequence: Synthetic peptide
PLRELKP

SEQ ID NO: 27038 - protein, 7 aa, synthetic construct
  REGION 1..7: note = Description of Artificial Sequence: Synthetic peptide
SLSTLTL

SEQ ID NO: 27039 - protein, 7 aa, synthetic construct
  REGION 1..7: note = Description of Artificial Sequence: Synthetic peptide
QAKGSRD

SEQ ID NO: 27040 - protein, 7 aa, synthetic construct
  REGION 1..7: note = Description of Artificial Sequence: Synthetic peptide
KRVTYTD

SEQ ID NO: 27041 - protein, 7 aa, synthetic construct
  REGION 1..7: note = Description of Artificial Sequence: Synthetic peptide
THLTGVQ

SEQ ID NO: 27042 - protein, 7 aa, synthetic construct
  REGION 1..7: note = Description of Artificial Sequence: Synthetic peptide
GHTARLY

SEQ ID NO: 27043 - protein, 7 aa, synthetic construct
  REGION 1..7: note = Description of Artificial Sequence: Synthetic peptide
FVKTHSA

SEQ ID NO: 27044 - protein, 7 aa, synthetic construct
  REGION 1..7: note = Description of Artificial Sequence: Synthetic peptide
PGSVTGS

SEQ ID NO: 27045 - protein, 7 aa, synthetic construct
  REGION 1..7: note = Description of Artificial Sequence: Synthetic peptide
QTGTSST

SEQ ID NO: 27046 - protein, 7 aa, synthetic construct
  REGION 1..7: note = Description of Artificial Sequence: Synthetic peptide
SNNGTQK

SEQ ID NO: 27047 - protein, 7 aa, synthetic construct
  REGION 1..7: note = Description of Artificial Sequence: Synthetic peptide
LGTSPMK

SEQ ID NO: 27048 - protein, 7 aa, synthetic construct
  REGION 1..7: note = Description of Artificial Sequence: Synthetic peptide
TRGQKPQ

SEQ ID NO: 27049 - protein, 7 aa, synthetic construct
  REGION 1..7: note = Description of Artificial Sequence: Synthetic peptide
GHSSNNA

SEQ ID NO: 27050 - protein, 7 aa, synthetic construct
  REGION 1..7: note = Description of Artificial Sequence: Synthetic peptide
ARGASTN

SEQ ID NO: 27051 - protein, 7 aa, synthetic construct
  REGION 1..7: note = Description of Artificial Sequence: Synthetic peptide
MRQDTSK

SEQ ID NO: 27052 - protein, 7 aa, synthetic construct
  REGION 1..7: note = Description of Artificial Sequence: Synthetic peptide
RASGVTN

SEQ ID NO: 27053 - protein, 7 aa, synthetic construct
  REGION 1..7: note = Description of Artificial Sequence: Synthetic peptide
LGASTIL

SEQ ID NO: 27054 - protein, 7 aa, synthetic construct
  REGION 1..7: note = Description of Artificial Sequence: Synthetic peptide
YGGLHNP

SEQ ID NO: 27055 - protein, 7 aa, synthetic construct
  REGION 1..7: note = Description of Artificial Sequence: Synthetic peptide
DSGSSTK

SEQ ID NO: 27056 - protein, 7 aa, synthetic construct
  REGION 1..7: note = Description of Artificial Sequence: Synthetic peptide
EARKVTS

SEQ ID NO: 27057 - protein, 7 aa, synthetic construct
  REGION 1..7: note = Description of Artificial Sequence: Synthetic peptide
EYPQQAK

SEQ ID NO: 27058 - protein, 7 aa, synthetic construct
  REGION 1..7: note = Description of Artificial Sequence: Synthetic peptide
GQRGDHL

SEQ ID NO: 27059 - protein, 7 aa, synthetic construct
  REGION 1..7: note = Description of Artificial Sequence: Synthetic peptide
SSRTDSP

SEQ ID NO: 27060 - protein, 7 aa, synthetic construct
  REGION 1..7: note = Description of Artificial Sequence: Synthetic peptide
LNAGNTR

SEQ ID NO: 27061 - protein, 7 aa, synthetic construct
  REGION 1..7: note = Description of Artificial Sequence: Synthetic peptide
PGQKQGI

SEQ ID NO: 27062 - protein, 7 aa, synthetic construct
  REGION 1..7: note = Description of Artificial Sequence: Synthetic peptide
SRYSGHS

SEQ ID NO: 27063 - protein, 7 aa, synthetic construct
  REGION 1..7: note = Description of Artificial Sequence: Synthetic peptide
PVLGTIS

SEQ ID NO: 27064 - protein, 7 aa, synthetic construct
  REGION 1..7: note = Description of Artificial Sequence: Synthetic peptide
QRPSTGN

SEQ ID NO: 27065 - protein, 7 aa, synthetic construct
  REGION 1..7: note = Description of Artificial Sequence: Synthetic peptide
RIAGPTV

SEQ ID NO: 27066 - protein, 7 aa, synthetic construct
  REGION 1..7: note = Description of Artificial Sequence: Synthetic peptide
QTSSHAY

SEQ ID NO: 27067 - protein, 7 aa, synthetic construct
  REGION 1..7: note = Description of Artificial Sequence: Synthetic peptide
NGTRQNQ

SEQ ID NO: 27068 - protein, 7 aa, synthetic construct
  REGION 1..7: note = Description of Artificial Sequence: Synthetic peptide
NANPSLR

SEQ ID NO: 27069 - protein, 7 aa, synthetic construct
  REGION 1..7: note = Description of Artificial Sequence: Synthetic peptide
FNEQRVS

SEQ ID NO: 27070 - protein, 7 aa, synthetic construct
  REGION 1..7: note = Description of Artificial Sequence: Synthetic peptide
RVITPST

SEQ ID NO: 27071 - protein, 7 aa, synthetic construct
  REGION 1..7: note = Description of Artificial Sequence: Synthetic peptide
EPVTSKS

SEQ ID NO: 27072 - protein, 7 aa, synthetic construct
  REGION 1..7: note = Description of Artificial Sequence: Synthetic peptide
SNVAKRT

SEQ ID NO: 27073 - protein, 7 aa, synthetic construct
  REGION 1..7: note = Description of Artificial Sequence: Synthetic peptide
QRKSGTS

SEQ ID NO: 27074 - protein, 7 aa, synthetic construct
  REGION 1..7: note = Description of Artificial Sequence: Synthetic peptide
KGKSTDP

SEQ ID NO: 27075 - protein, 7 aa, synthetic construct
  REGION 1..7: note = Description of Artificial Sequence: Synthetic peptide
QYMGANS

SEQ ID NO: 27076 - protein, 7 aa, synthetic construct
  REGION 1..7: note = Description of Artificial Sequence: Synthetic peptide
SSDQPRL

SEQ ID NO: 27077 - protein, 7 aa, synthetic construct
  REGION 1..7: note = Description of Artificial Sequence: Synthetic peptide
GFSSQQR

SEQ ID NO: 27078 - protein, 7 aa, synthetic construct
  REGION 1..7: note = Description of Artificial Sequence: Synthetic peptide
CHKRPGE

SEQ ID NO: 27079 - protein, 7 aa, synthetic construct
  REGION 1..7: note = Description of Artificial Sequence: Synthetic peptide
DSTLGQS

SEQ ID NO: 27080 - protein, 7 aa, synthetic construct
  REGION 1..7: note = Description of Artificial Sequence: Synthetic peptide
PGREKTV

SEQ ID NO: 27081 - protein, 7 aa, synthetic construct
  REGION 1..7: note = Description of Artificial Sequence: Synthetic peptide
AESGGSR

SEQ ID NO: 27082 - protein, 7 aa, synthetic construct
  REGION 1..7: note = Description of Artificial Sequence: Synthetic peptide
LRDTNMN

SEQ ID NO: 27083 - protein, 7 aa, synthetic construct
  REGION 1..7: note = Description of Artificial Sequence: Synthetic peptide
CPSTKSC

SEQ ID NO: 27084 - protein, 7 aa, synthetic construct
  REGION 1..7: note = Description of Artificial Sequence: Synthetic peptide
HSSSKIH

SEQ ID NO: 27085 - protein, 7 aa, synthetic construct
  REGION 1..7: note = Description of Artificial Sequence: Synthetic peptide
GLQTPPR

SEQ ID NO: 27086 - protein, 7 aa, synthetic construct
  REGION 1..7: note = Description of Artificial Sequence: Synthetic peptide
ESNSSRG

SEQ ID NO: 27087 - protein, 7 aa, synthetic construct
  REGION 1..7: note = Description of Artificial Sequence: Synthetic peptide
VTTGGSK

SEQ ID NO: 27088 - protein, 7 aa, synthetic construct
  REGION 1..7: note = Description of Artificial Sequence: Synthetic peptide
GSLDNRK

SEQ ID NO: 27089 - protein, 7 aa, synthetic construct
  REGION 1..7: note = Description of Artificial Sequence: Synthetic peptide
NGVQQPK

SEQ ID NO: 27090 - protein, 7 aa, synthetic construct
  REGION 1..7: note = Description of Artificial Sequence: Synthetic peptide
QPSQGHS

SEQ ID NO: 27091 - protein, 7 aa, synthetic construct
  REGION 1..7: note = Description of Artificial Sequence: Synthetic peptide
GTDNNTR

SEQ ID NO: 27092 - protein, 7 aa, synthetic construct
  REGION 1..7: note = Description of Artificial Sequence: Synthetic peptide
HQPHQNQ

SEQ ID NO: 27093 - protein, 7 aa, synthetic construct
  REGION 1..7: note = Description of Artificial Sequence: Synthetic peptide
STASVNQ

SEQ ID NO: 27094 - protein, 7 aa, synthetic construct
  REGION 1..7: note = Description of Artificial Sequence: Synthetic peptide
NSANKTP

SEQ ID NO: 27095 - protein, 7 aa, synthetic construct
  REGION 1..7: note = Description of Artificial Sequence: Synthetic peptide
NRSTDFK

SEQ ID NO: 27096 - protein, 7 aa, synthetic construct
  REGION 1..7: note = Description of Artificial Sequence: Synthetic peptide
LNIANSK

SEQ ID NO: 27097 - protein, 7 aa, synthetic construct
  REGION 1..7: note = Description of Artificial Sequence: Synthetic peptide
YNQPVGK

SEQ ID NO: 27098 - protein, 7 aa, synthetic construct
  REGION 1..7: note = Description of Artificial Sequence: Synthetic peptide
NLGNSLK

SEQ ID NO: 27099 - protein, 7 aa, synthetic construct
  REGION 1..7: note = Description of Artificial Sequence: Synthetic peptide
GPNPGNH

SEQ ID NO: 27100 - protein, 7 aa, synthetic construct
  REGION 1..7: note = Description of Artificial Sequence: Synthetic peptide
MGGHTHT

SEQ ID NO: 27101 - protein, 7 aa, synthetic construct
  REGION 1..7: note = Description of Artificial Sequence: Synthetic peptide
QSGSKPG

SEQ ID NO: 27102 - protein, 7 aa, synthetic construct
  REGION 1..7: note = Description of Artificial Sequence: Synthetic peptide
SNDSNKK

SEQ ID NO: 27103 - protein, 7 aa, synthetic construct
  REGION 1..7: note = Description of Artificial Sequence: Synthetic peptide
SSQAVFR

SEQ ID NO: 27104 - protein, 7 aa, synthetic construct
  REGION 1..7: note = Description of Artificial Sequence: Synthetic peptide
SHDNGQS

SEQ ID NO: 27105 - protein, 7 aa, synthetic construct
  REGION 1..7: note = Description of Artificial Sequence: Synthetic peptide
FRSKESA

SEQ ID NO: 27106 - protein, 7 aa, synthetic construct
  REGION 1..7: note = Description of Artificial Sequence: Synthetic peptide
QGSSKTT

SEQ ID NO: 27107 - protein, 7 aa, synthetic construct
  REGION 1..7: note = Description of Artificial Sequence: Synthetic peptide
TGQQPAT

SEQ ID NO: 27108 - protein, 7 aa, synthetic construct
  REGION 1..7: note = Description of Artificial Sequence: Synthetic peptide
TNRNTYV

SEQ ID NO: 27109 - protein, 7 aa, synthetic construct
  REGION 1..7: note = Description of Artificial Sequence: Synthetic peptide
ALQYKAS

SEQ ID NO: 27110 - protein, 7 aa, synthetic construct
  REGION 1..7: note = Description of Artificial Sequence: Synthetic peptide
GSNRNPL

SEQ ID NO: 27111 - protein, 7 aa, synthetic construct
  REGION 1..7: note = Description of Artificial Sequence: Synthetic peptide
GTVPKPR

SEQ ID NO: 27112 - protein, 7 aa, synthetic construct
  REGION 1..7: note = Description of Artificial Sequence: Synthetic peptide
GTGNSNL

SEQ ID NO: 27113 - protein, 7 aa, synthetic construct
  REGION 1..7: note = Description of Artificial Sequence: Synthetic peptide
NRESPQR

SEQ ID NO: 27114 - protein, 7 aa, synthetic construct
  REGION 1..7: note = Description of Artificial Sequence: Synthetic peptide
SSTVKSG

SEQ ID NO: 27115 - protein, 7 aa, synthetic construct
  REGION 1..7: note = Description of Artificial Sequence: Synthetic peptide
FNMQRSQ

SEQ ID NO: 27116 - protein, 7 aa, synthetic construct
  REGION 1..7: note = Description of Artificial Sequence: Synthetic peptide
HSENGNR

SEQ ID NO: 27117 - protein, 7 aa, synthetic construct
  REGION 1..7: note = Description of Artificial Sequence: Synthetic peptide
SNETKSS

SEQ ID NO: 27118 - protein, 7 aa, synthetic construct
  REGION 1..7: note = Description of Artificial Sequence: Synthetic peptide
LQPSVIA

SEQ ID NO: 27119 - protein, 7 aa, synthetic construct
  REGION 1..7: note = Description of Artificial Sequence: Synthetic peptide
NVASNYS

SEQ ID NO: 27120 - protein, 7 aa, synthetic construct
  REGION 1..7: note = Description of Artificial Sequence: Synthetic peptide
MDGRSTT

SEQ ID NO: 27121 - protein, 7 aa, synthetic construct
  REGION 1..7: note = Description of Artificial Sequence: Synthetic peptide
SRNPNMI

SEQ ID NO: 27122 - protein, 7 aa, synthetic construct
  REGION 1..7: note = Description of Artificial Sequence: Synthetic peptide
KFPPNSG

SEQ ID NO: 27123 - protein, 7 aa, synthetic construct
  REGION 1..7: note = Description of Artificial Sequence: Synthetic peptide
CIRAGSC

SEQ ID NO: 27124 - protein, 7 aa, synthetic construct
  REGION 1..7: note = Description of Artificial Sequence: Synthetic peptide
GSHIAYT

SEQ ID NO: 27125 - protein, 7 aa, synthetic construct
  REGION 1..7: note = Description of Artificial Sequence: Synthetic peptide
SSSAKSI

SEQ ID NO: 27126 - protein, 7 aa, synthetic construct
  REGION 1..7: note = Description of Artificial Sequence: Synthetic peptide
AAHSTMN

SEQ ID NO: 27127 - protein, 7 aa, synthetic construct
  REGION 1..7: note = Description of Artificial Sequence: Synthetic peptide
SVGSGAL

SEQ ID NO: 27128 - protein, 7 aa, synthetic construct
  REGION 1..7: note = Description of Artificial Sequence: Synthetic peptide
PNGAHVT

SEQ ID NO: 27129 - protein, 7 aa, synthetic construct
  REGION 1..7: note = Description of Artificial Sequence: Synthetic peptide
PDRRPLE

SEQ ID NO: 27130 - protein, 7 aa, synthetic construct
  REGION 1..7: note = Description of Artificial Sequence: Synthetic peptide
SDRGQSH

SEQ ID NO: 27131 - protein, 7 aa, synthetic construct
  REGION 1..7: note = Description of Artificial Sequence: Synthetic peptide
SPVKGSV

SEQ ID NO: 27132 - protein, 7 aa, synthetic construct
  REGION 1..7: note = Description of Artificial Sequence: Synthetic peptide
DATKNHS

SEQ ID NO: 27133 - protein, 7 aa, synthetic construct
  REGION 1..7: note = Description of Artificial Sequence: Synthetic peptide
ERLTRSS

SEQ ID NO: 27134 - protein, 7 aa, synthetic construct
  REGION 1..7: note = Description of Artificial Sequence: Synthetic peptide
DSRAGVH

SEQ ID NO: 27135 - protein, 7 aa, synthetic construct
  REGION 1..7: note = Description of Artificial Sequence: Synthetic peptide
GQTGDMR

SEQ ID NO: 27136 - protein, 7 aa, synthetic construct
  REGION 1..7: note = Description of Artificial Sequence: Synthetic peptide
GRLEAQK

SEQ ID NO: 27137 - protein, 7 aa, synthetic construct
  REGION 1..7: note = Description of Artificial Sequence: Synthetic peptide
SSGLSSS

SEQ ID NO: 27138 - protein, 7 aa, synthetic construct
  REGION 1..7: note = Description of Artificial Sequence: Synthetic peptide
DPPKGSR

SEQ ID NO: 27139 - protein, 7 aa, synthetic construct
  REGION 1..7: note = Description of Artificial Sequence: Synthetic peptide
GDHNRIN

SEQ ID NO: 27140 - protein, 7 aa, synthetic construct
  REGION 1..7: note = Description of Artificial Sequence: Synthetic peptide
ASALRSH

SEQ ID NO: 27141 - protein, 7 aa, synthetic construct
  REGION 1..7: note = Description of Artificial Sequence: Synthetic peptide
YSTHLNN

SEQ ID NO: 27142 - protein, 7 aa, synthetic construct
  REGION 1..7: note = Description of Artificial Sequence: Synthetic peptide
TYNSSQA

SEQ ID NO: 27143 - protein, 7 aa, synthetic construct
  REGION 1..7: note = Description of Artificial Sequence: Synthetic peptide
NGSRQNQ

SEQ ID NO: 27144 - protein, 7 aa, synthetic construct
  REGION 1..7: note = Description of Artificial Sequence: Synthetic peptide
VVPERSK

SEQ ID NO: 27145 - protein, 7 aa, synthetic construct
  REGION 1..7: note = Description of Artificial Sequence: Synthetic peptide
VGLQSPE

SEQ ID NO: 27146 - protein, 7 aa, synthetic construct
  REGION 1..7: note = Description of Artificial Sequence: Synthetic peptide
TIKSVTN

SEQ ID NO: 27147 - protein, 7 aa, synthetic construct
  REGION 1..7: note = Description of Artificial Sequence: Synthetic peptide
RNDKQNS

SEQ ID NO: 27148 - protein, 7 aa, synthetic construct
  REGION 1..7: note = Description of Artificial Sequence: Synthetic peptide
GDKGLQR

SEQ ID NO: 27149 - protein, 7 aa, synthetic construct
  REGION 1..7: note = Description of Artificial Sequence: Synthetic peptide
CSSDTHR

SEQ ID NO: 27150 - protein, 7 aa, synthetic construct
  REGION 1..7: note = Description of Artificial Sequence: Synthetic peptide
SADHIRN

SEQ ID NO: 27151 - protein, 7 aa, synthetic construct
  REGION 1..7: note = Description of Artificial Sequence: Synthetic peptide
NGISKSN

SEQ ID NO: 27152 - protein, 7 aa, synthetic construct
  REGION 1..7: note = Description of Artificial Sequence: Synthetic peptide
RATPLSG

SEQ ID NO: 27153 - protein, 7 aa, synthetic construct
  REGION 1..7: note = Description of Artificial Sequence: Synthetic peptide
DGGNQRS

SEQ ID NO: 27154 - protein, 7 aa, synthetic construct
  REGION 1..7: note = Description of Artificial Sequence: Synthetic peptide
VSDNTYK

SEQ ID NO: 27155 - protein, 7 aa, synthetic construct
  REGION 1..7: note = Description of Artificial Sequence: Synthetic peptide
NVSGQNQ

SEQ ID NO: 27156 - protein, 7 aa, synthetic construct
  REGION 1..7: note = Description of Artificial Sequence: Synthetic peptide
SNQVRQI

SEQ ID NO: 27157 - protein, 7 aa, synthetic construct
  REGION 1..7: note = Description of Artificial Sequence: Synthetic peptide
PGGDRLR

SEQ ID NO: 27158 - protein, 7 aa, synthetic construct
  REGION 1..7: note = Description of Artificial Sequence: Synthetic peptide
FIRTASI

SEQ ID NO: 27159 - protein, 7 aa, synthetic construct
  REGION 1..7: note = Description of Artificial Sequence: Synthetic peptide
SMHALQC

SEQ ID NO: 27160 - protein, 7 aa, synthetic construct
  REGION 1..7: note = Description of Artificial Sequence: Synthetic peptide
RTGSYTQ

SEQ ID NO: 27161 - protein, 7 aa, synthetic construct
  REGION 1..7: note = Description of Artificial Sequence: Synthetic peptide
IIKKDQV

SEQ ID NO: 27162 - protein, 7 aa, synthetic construct
  REGION 1..7: note = Description of Artificial Sequence: Synthetic peptide
RPVGGLA

SEQ ID NO: 27163 - protein, 7 aa, synthetic construct
  REGION 1..7: note = Description of Artificial Sequence: Synthetic peptide
GMGGLKN

SEQ ID NO: 27164 - protein, 7 aa, synthetic construct
  REGION 1..7: note = Description of Artificial Sequence: Synthetic peptide
GVINNER

SEQ ID NO: 27165 - protein, 7 aa, synthetic construct
  REGION 1..7: note = Description of Artificial Sequence: Synthetic peptide
IISQKGM

SEQ ID NO: 27166 - protein, 7 aa, synthetic construct
  REGION 1..7: note = Description of Artificial Sequence: Synthetic peptide
LLDQPRN

SEQ ID NO: 27167 - protein, 7 aa, synthetic construct
  REGION 1..7: note = Description of Artificial Sequence: Synthetic peptide
GVTGSRG

SEQ ID NO: 27168 - protein, 7 aa, synthetic construct
  REGION 1..7: note = Description of Artificial Sequence: Synthetic peptide
EVNTRSR

SEQ ID NO: 27169 - protein, 7 aa, synthetic construct
  REGION 1..7: note = Description of Artificial Sequence: Synthetic peptide
NNNSGSG

SEQ ID NO: 27170 - protein, 7 aa, synthetic construct
  REGION 1..7: note = Description of Artificial Sequence: Synthetic peptide
LAKNPVI

SEQ ID NO: 27171 - protein, 7 aa, synthetic construct
  REGION 1..7: note = Description of Artificial Sequence: Synthetic peptide
PGGTTKG

SEQ ID NO: 27172 - protein, 7 aa, synthetic construct
  REGION 1..7: note = Description of Artificial Sequence: Synthetic peptide
WRSQHNS

SEQ ID NO: 27173 - protein, 7 aa, synthetic construct
  REGION 1..7: note = Description of Artificial Sequence: Synthetic peptide
SQSSRSG

SEQ ID NO: 27174 - protein, 7 aa, synthetic construct
  REGION 1..7: note = Description of Artificial Sequence: Synthetic peptide
GLHPPRT

SEQ ID NO: 27175 - protein, 7 aa, synthetic construct
  REGION 1..7: note = Description of Artificial Sequence: Synthetic peptide
GQERTNM

SEQ ID NO: 27176 - protein, 7 aa, synthetic construct
  REGION 1..7: note = Description of Artificial Sequence: Synthetic peptide
YLGKVQV

SEQ ID NO: 27177 - protein, 7 aa, synthetic construct
  REGION 1..7: note = Description of Artificial Sequence: Synthetic peptide
YADGARN

SEQ ID NO: 27178 - protein, 7 aa, synthetic construct
  REGION 1..7: note = Description of Artificial Sequence: Synthetic peptide
SREQGVG

SEQ ID NO: 27179 - protein, 7 aa, synthetic construct
  REGION 1..7: note = Description of Artificial Sequence: Synthetic peptide
STSIPGM

SEQ ID NO: 27180 - protein, 7 aa, synthetic construct
  REGION 1..7: note = Description of Artificial Sequence: Synthetic peptide
LHPKGQT

SEQ ID NO: 27181 - protein, 7 aa, synthetic construct
  REGION 1..7: note = Description of Artificial Sequence: Synthetic peptide
PRTDRNT

SEQ ID NO: 27182 - protein, 7 aa, synthetic construct
  REGION 1..7: note = Description of Artificial Sequence: Synthetic peptide
PRSLSTS

SEQ ID NO: 27183 - protein, 7 aa, synthetic construct
  REGION 1..7: note = Description of Artificial Sequence: Synthetic peptide
FPSNGRT

SEQ ID NO: 27184 - protein, 7 aa, synthetic construct
  REGION 1..7: note = Description of Artificial Sequence: Synthetic peptide
SMASAYK

SEQ ID NO: 27185 - protein, 7 aa, synthetic construct
  REGION 1..7: note = Description of Artificial Sequence: Synthetic peptide
LDAGVAR

SEQ ID NO: 27186 - protein, 7 aa, synthetic construct
  REGION 1..7: note = Description of Artificial Sequence: Synthetic peptide
HPSNKPL

SEQ ID NO: 27187 - protein, 7 aa, synthetic construct
  REGION 1..7: note = Description of Artificial Sequence: Synthetic peptide
ENISRSH

SEQ ID NO: 27188 - protein, 7 aa, synthetic construct
  REGION 1..7: note = Description of Artificial Sequence: Synthetic peptide
MGIANIG

SEQ ID NO: 27189 - protein, 7 aa, synthetic construct
  REGION 1..7: note = Description of Artificial Sequence: Synthetic peptide
QSEIVNK

SEQ ID NO: 27190 - protein, 7 aa, synthetic construct
  REGION 1..7: note = Description of Artificial Sequence: Synthetic peptide
FQKERYQ

SEQ ID NO: 27191 - protein, 7 aa, synthetic construct
  REGION 1..7: note = Description of Artificial Sequence: Synthetic peptide
PGAGNTR

SEQ ID NO: 27192 - protein, 7 aa, synthetic construct
  REGION 1..7: note = Description of Artificial Sequence: Synthetic peptide
SVPGVSR

SEQ ID NO: 27193 - protein, 7 aa, synthetic construct
  REGION 1..7: note = Description of Artificial Sequence: Synthetic peptide
RVSSGMS

SEQ ID NO: 27194 - protein, 7 aa, synthetic construct
  REGION 1..7: note = Description of Artificial Sequence: Synthetic peptide
HNNSKSA

SEQ ID NO: 27195 - protein, 7 aa, synthetic construct
  REGION 1..7: note = Description of Artificial Sequence: Synthetic peptide
VGARTGG

SEQ ID NO: 27196 - protein, 7 aa, synthetic construct
  REGION 1..7: note = Description of Artificial Sequence: Synthetic peptide
RENNTSS

SEQ ID NO: 27197 - protein, 7 aa, synthetic construct
  REGION 1..7: note = Description of Artificial Sequence: Synthetic peptide
SPGRTQS

SEQ ID NO: 27198 - protein, 7 aa, synthetic construct
  REGION 1..7: note = Description of Artificial Sequence: Synthetic peptide
NAPNSSG

SEQ ID NO: 27199 - protein, 7 aa, synthetic construct
  REGION 1..7: note = Description of Artificial Sequence: Synthetic peptide
PGSAMLN

SEQ ID NO: 27200 - protein, 7 aa, synthetic construct
  REGION 1..7: note = Description of Artificial Sequence: Synthetic peptide
HGQTGLI

SEQ ID NO: 27201 - protein, 7 aa, synthetic construct
  REGION 1..7: note = Description of Artificial Sequence: Synthetic peptide
SMMPSSS

SEQ ID NO: 27202 - protein, 7 aa, synthetic construct
  REGION 1..7: note = Description of Artificial Sequence: Synthetic peptide
QKTQTTS

SEQ ID NO: 27203 - protein, 7 aa, synthetic construct
  REGION 1..7: note = Description of Artificial Sequence: Synthetic peptide
VPGNLPS

SEQ ID NO: 27204 - protein, 7 aa, synthetic construct
  REGION 1..7: note = Description of Artificial Sequence: Synthetic peptide
SSGSNRS

SEQ ID NO: 27205 - protein, 7 aa, synthetic construct
  REGION 1..7: note = Description of Artificial Sequence: Synthetic peptide
SGVKAFS

SEQ ID NO: 27206 - protein, 7 aa, synthetic construct
  REGION 1..7: note = Description of Artificial Sequence: Synthetic peptide
KGDGRVM

SEQ ID NO: 27207 - protein, 7 aa, synthetic construct
  REGION 1..7: note = Description of Artificial Sequence: Synthetic peptide
GVVISSR

SEQ ID NO: 27208 - protein, 7 aa, synthetic construct
  REGION 1..7: note = Description of Artificial Sequence: Synthetic peptide
RLVPASG

SEQ ID NO: 27209 - protein, 7 aa, synthetic construct
  REGION 1..7: note = Description of Artificial Sequence: Synthetic peptide
RVLSNET

SEQ ID NO: 27210 - protein, 7 aa, synthetic construct
  REGION 1..7: note = Description of Artificial Sequence: Synthetic peptide
IRTSKMN

SEQ ID NO: 27211 - protein, 7 aa, synthetic construct
  REGION 1..7: note = Description of Artificial Sequence: Synthetic peptide
WSTSKQV

SEQ ID NO: 27212 - protein, 7 aa, synthetic construct
  REGION 1..7: note = Description of Artificial Sequence: Synthetic peptide
QPNASPT

SEQ ID NO: 27213 - protein, 7 aa, synthetic construct
  REGION 1..7: note = Description of Artificial Sequence: Synthetic peptide
SNATRAI

SEQ ID NO: 27214 - protein, 7 aa, synthetic construct
  REGION 1..7: note = Description of Artificial Sequence: Synthetic peptide
STTPGLK

SEQ ID NO: 27215 - protein, 7 aa, synthetic construct
  REGION 1..7: note = Description of Artificial Sequence: Synthetic peptide
IGTSINS

SEQ ID NO: 27216 - protein, 7 aa, synthetic construct
  REGION 1..7: note = Description of Artificial Sequence: Synthetic peptide
ENRVKVN

SEQ ID NO: 27217 - protein, 7 aa, synthetic construct
  REGION 1..7: note = Description of Artificial Sequence: Synthetic peptide
IGKNSMA

SEQ ID NO: 27218 - protein, 7 aa, synthetic construct
  REGION 1..7: note = Description of Artificial Sequence: Synthetic peptide
DNMSTPK

SEQ ID NO: 27219 - protein, 7 aa, synthetic construct
  REGION 1..7: note = Description of Artificial Sequence: Synthetic peptide
YGRGRDL

SEQ ID NO: 27220 - protein, 7 aa, synthetic construct
  REGION 1..7: note = Description of Artificial Sequence: Synthetic peptide
GSRNSSA

SEQ ID NO: 27221 - protein, 7 aa, synthetic construct
  REGION 1..7: note = Description of Artificial Sequence: Synthetic peptide
HVYPKQS

SEQ ID NO: 27222 - protein, 7 aa, synthetic construct
  REGION 1..7: note = Description of Artificial Sequence: Synthetic peptide
FNRSKVT

SEQ ID NO: 27223 - protein, 7 aa, synthetic construct
  REGION 1..7: note = Description of Artificial Sequence: Synthetic peptide
GSRPPGT

SEQ ID NO: 27224 - protein, 7 aa, synthetic construct
  REGION 1..7: note = Description of Artificial Sequence: Synthetic peptide
ANATPHH

SEQ ID NO: 27225 - protein, 7 aa, synthetic construct
  REGION 1..7: note = Description of Artificial Sequence: Synthetic peptide
VAGAAQR

SEQ ID NO: 27226 - protein, 7 aa, synthetic construct
  REGION 1..7: note = Description of Artificial Sequence: Synthetic peptide
PKVRDGY

SEQ ID NO: 27227 - protein, 7 aa, synthetic construct
  REGION 1..7: note = Description of Artificial Sequence: Synthetic peptide
PPNGYQS

SEQ ID NO: 27228 - protein, 7 aa, synthetic construct
  REGION 1..7: note = Description of Artificial Sequence: Synthetic peptide
NVPSISR

SEQ ID NO: 27229 - protein, 7 aa, synthetic construct
  REGION 1..7: note = Description of Artificial Sequence: Synthetic peptide
TPQNSVK

SEQ ID NO: 27230 - protein, 7 aa, synthetic construct
  REGION 1..7: note = Description of Artificial Sequence: Synthetic peptide
SHTGNMV

SEQ ID NO: 27231 - protein, 7 aa, synthetic construct
  REGION 1..7: note = Description of Artificial Sequence: Synthetic peptide
RDPTPVR

SEQ ID NO: 27232 - protein, 7 aa, synthetic construct
  REGION 1..7: note = Description of Artificial Sequence: Synthetic peptide
YVTSSGG

SEQ ID NO: 27233 - protein, 7 aa, synthetic construct
  REGION 1..7: note = Description of Artificial Sequence: Synthetic peptide
GTGHQRS

SEQ ID NO: 27234 - protein, 7 aa, synthetic construct
  REGION 1..7: note = Description of Artificial Sequence: Synthetic peptide
GSGIKRE

SEQ ID NO: 27235 - protein, 7 aa, synthetic construct
  REGION 1..7: note = Description of Artificial Sequence: Synthetic peptide
VKTAKVN

SEQ ID NO: 27236 - protein, 7 aa, synthetic construct
  REGION 1..7: note = Description of Artificial Sequence: Synthetic peptide
VTGQNQT

SEQ ID NO: 27237 - protein, 7 aa, synthetic construct
  REGION 1..7: note = Description of Artificial Sequence: Synthetic peptide
SGRSVGN

SEQ ID NO: 27238 - protein, 7 aa, synthetic construct
  REGION 1..7: note = Description of Artificial Sequence: Synthetic peptide
PPSTLKN

SEQ ID NO: 27239 - protein, 7 aa, synthetic construct
  REGION 1..7: note = Description of Artificial Sequence: Synthetic peptide
PNLQSSK

SEQ ID NO: 27240 - protein, 7 aa, synthetic construct
  REGION 1..7: note = Description of Artificial Sequence: Synthetic peptide
REPRVQE

SEQ ID NO: 27241 - protein, 7 aa, synthetic construct
  REGION 1..7: note = Description of Artificial Sequence: Synthetic peptide
NRSGQNQ

SEQ ID NO: 27242 - protein, 7 aa, synthetic construct
  REGION 1..7: note = Description of Artificial Sequence: Synthetic peptide
QVSAKSA

SEQ ID NO: 27243 - protein, 7 aa, synthetic construct
  REGION 1..7: note = Description of Artificial Sequence: Synthetic peptide
STHKNSP

SEQ ID NO: 27244 - protein, 7 aa, synthetic construct
  REGION 1..7: note = Description of Artificial Sequence: Synthetic peptide
TFSKGTN

SEQ ID NO: 27245 - protein, 7 aa, synthetic construct
  REGION 1..7: note = Description of Artificial Sequence: Synthetic peptide
GLEHNRA

SEQ ID NO: 27246 - protein, 7 aa, synthetic construct
  REGION 1..7: note = Description of Artificial Sequence: Synthetic peptide
RSTKTEN

SEQ ID NO: 27247 - protein, 7 aa, synthetic construct
  REGION 1..7: note = Description of Artificial Sequence: Synthetic peptide
QLGDRNR

SEQ ID NO: 27248 - protein, 7 aa, synthetic construct
  REGION 1..7: note = Description of Artificial Sequence: Synthetic peptide
HNSKSQI

SEQ ID NO: 27249 - protein, 7 aa, synthetic construct
  REGION 1..7: note = Description of Artificial Sequence: Synthetic peptide
PRERDRS

SEQ ID NO: 27250 - protein, 7 aa, synthetic construct
  REGION 1..7: note = Description of Artificial Sequence: Synthetic peptide
QEGVRSS

SEQ ID NO: 27251 - protein, 7 aa, synthetic construct
  REGION 1..7: note = Description of Artificial Sequence: Synthetic peptide
NVNGRTH

SEQ ID NO: 27252 - protein, 7 aa, synthetic construct
  REGION 1..7: note = Description of Artificial Sequence: Synthetic peptide
ATNKTTN

SEQ ID NO: 27253 - protein, 7 aa, synthetic construct
  REGION 1..7: note = Description of Artificial Sequence: Synthetic peptide
QSTGRER

SEQ ID NO: 27254 - protein, 7 aa, synthetic construct
  REGION 1..7: note = Description of Artificial Sequence: Synthetic peptide
YHSKGTT

SEQ ID NO: 27255 - protein, 7 aa, synthetic construct
  REGION 1..7: note = Description of Artificial Sequence: Synthetic peptide
GNRPTTL

SEQ ID NO: 27256 - protein, 7 aa, synthetic construct
  REGION 1..7: note = Description of Artificial Sequence: Synthetic peptide
QRNVSVV

SEQ ID NO: 27257 - protein, 7 aa, synthetic construct
  REGION 1..7: note = Description of Artificial Sequence: Synthetic peptide
DNTGRNA

SEQ ID NO: 27258 - protein, 7 aa, synthetic construct
  REGION 1..7: note = Description of Artificial Sequence: Synthetic peptide
QTQGQLK

SEQ ID NO: 27259 - protein, 7 aa, synthetic construct
  REGION 1..7: note = Description of Artificial Sequence: Synthetic peptide
NGSGQNK

SEQ ID NO: 27260 - protein, 7 aa, synthetic construct
  REGION 1..7: note = Description of Artificial Sequence: Synthetic peptide
NSEARLS

SEQ ID NO: 27261 - protein, 7 aa, synthetic construct
  REGION 1..7: note = Description of Artificial Sequence: Synthetic peptide
LCRAQTG

SEQ ID NO: 27262 - protein, 7 aa, synthetic construct
  REGION 1..7: note = Description of Artificial Sequence: Synthetic peptide
RDGTPPT

SEQ ID NO: 27263 - protein, 7 aa, synthetic construct
  REGION 1..7: note = Description of Artificial Sequence: Synthetic peptide
RMNGGGP

SEQ ID NO: 27264 - protein, 7 aa, synthetic construct
  REGION 1..7: note = Description of Artificial Sequence: Synthetic peptide
AGRTHSC

SEQ ID NO: 27265 - protein, 7 aa, synthetic construct
  REGION 1..7: note = Description of Artificial Sequence: Synthetic peptide
KRDAHTA

SEQ ID NO: 27266 - protein, 7 aa, synthetic construct
  REGION 1..7: note = Description of Artificial Sequence: Synthetic peptide
TSMNGNK

SEQ ID NO: 27267 - protein, 7 aa, synthetic construct
  REGION 1..7: note = Description of Artificial Sequence: Synthetic peptide
QEHPDRR

SEQ ID NO: 27268 - protein, 7 aa, synthetic construct
  REGION 1..7: note = Description of Artificial Sequence: Synthetic peptide
QSKIPHP

SEQ ID NO: 27269 - protein, 7 aa, synthetic construct
  REGION 1..7: note = Description of Artificial Sequence: Synthetic peptide
VCSPEGK

SEQ ID NO: 27270 - protein, 7 aa, synthetic construct
  REGION 1..7: note = Description of Artificial Sequence: Synthetic peptide
QLNEEHG

SEQ ID NO: 27271 - protein, 7 aa, synthetic construct
  REGION 1..7: note = Description of Artificial Sequence: Synthetic peptide
ETTTPRK

SEQ ID NO: 27272 - protein, 7 aa, synthetic construct
  REGION 1..7: note = Description of Artificial Sequence: Synthetic peptide
EMKGHTA

SEQ ID NO: 27273 - protein, 7 aa, synthetic construct
  REGION 1..7: note = Description of Artificial Sequence: Synthetic peptide
TNRGGTP

SEQ ID NO: 27274 - protein, 7 aa, synthetic construct
  REGION 1..7: note = Description of Artificial Sequence: Synthetic peptide
SGSNNFL

SEQ ID NO: 27275 - protein, 7 aa, synthetic construct
  REGION 1..7: note = Description of Artificial Sequence: Synthetic peptide
SSAKSSL

SEQ ID NO: 27276 - protein, 7 aa, synthetic construct
  REGION 1..7: note = Description of Artificial Sequence: Synthetic peptide
WAGSNPR

SEQ ID NO: 27277 - protein, 7 aa, synthetic construct
  REGION 1..7: note = Description of Artificial Sequence: Synthetic peptide
NNKSASQ

SEQ ID NO: 27278 - protein, 7 aa, synthetic construct
  REGION 1..7: note = Description of Artificial Sequence: Synthetic peptide
KSAQGGN

SEQ ID NO: 27279 - protein, 7 aa, synthetic construct
  REGION 1..7: note = Description of Artificial Sequence: Synthetic peptide
SSGPSSG

SEQ ID NO: 27280 - protein, 7 aa, synthetic construct
  REGION 1..7: note = Description of Artificial Sequence: Synthetic peptide
ETLPSLI

SEQ ID NO: 27281 - protein, 7 aa, synthetic construct
  REGION 1..7: note = Description of Artificial Sequence: Synthetic peptide
QANTSTE

SEQ ID NO: 27282 - protein, 7 aa, synthetic construct
  REGION 1..7: note = Description of Artificial Sequence: Synthetic peptide
GINKNGT

SEQ ID NO: 27283 - protein, 7 aa, synthetic construct
  REGION 1..7: note = Description of Artificial Sequence: Synthetic peptide
RPMKSTN

SEQ ID NO: 27284 - protein, 7 aa, synthetic construct
  REGION 1..7: note = Description of Artificial Sequence: Synthetic peptide
PEIGKQR

SEQ ID NO: 27285 - protein, 7 aa, synthetic construct
  REGION 1..7: note = Description of Artificial Sequence: Synthetic peptide
KVDKRTD

SEQ ID NO: 27286 - protein, 7 aa, synthetic construct
  REGION 1..7: note = Description of Artificial Sequence: Synthetic peptide
IPLTLSL

SEQ ID NO: 27287 - protein, 7 aa, synthetic construct
  REGION 1..7: note = Description of Artificial Sequence: Synthetic peptide
FPLKLGR

SEQ ID NO: 27288 - protein, 7 aa, synthetic construct
  REGION 1..7: note = Description of Artificial Sequence: Synthetic peptide
LSRSKQG

SEQ ID NO: 27289 - protein, 7 aa, synthetic construct
  REGION 1..7: note = Description of Artificial Sequence: Synthetic peptide
DKPAGSL

SEQ ID NO: 27290 - protein, 7 aa, synthetic construct
  REGION 1..7: note = Description of Artificial Sequence: Synthetic peptide
LNPNVAR

SEQ ID NO: 27291 - protein, 7 aa, synthetic construct
  REGION 1..7: note = Description of Artificial Sequence: Synthetic peptide
QSKAGNS

SEQ ID NO: 27292 - protein, 7 aa, synthetic construct
  REGION 1..7: note = Description of Artificial Sequence: Synthetic peptide
PNRVPNH

SEQ ID NO: 27293 - protein, 7 aa, synthetic construct
  REGION 1..7: note = Description of Artificial Sequence: Synthetic peptide
TTIPKRQ

SEQ ID NO: 27294 - protein, 7 aa, synthetic construct
  REGION 1..7: note = Description of Artificial Sequence: Synthetic peptide
FGDHTRT

SEQ ID NO: 27295 - protein, 7 aa, synthetic construct
  REGION 1..7: note = Description of Artificial Sequence: Synthetic peptide
PRISGNL

SEQ ID NO: 27296 - protein, 7 aa, synthetic construct
  REGION 1..7: note = Description of Artificial Sequence: Synthetic peptide
RNNPTTV

SEQ ID NO: 27297 - protein, 7 aa, synthetic construct
  REGION 1..7: note = Description of Artificial Sequence: Synthetic peptide
ATTKDGI

SEQ ID NO: 27298 - protein, 7 aa, synthetic construct
  REGION 1..7: note = Description of Artificial Sequence: Synthetic peptide
SKPSGSS

SEQ ID NO: 27299 - protein, 7 aa, synthetic construct
  REGION 1..7: note = Description of Artificial Sequence: Synthetic peptide
PSTKTRV

SEQ ID NO: 27300 - protein, 7 aa, synthetic construct
  REGION 1..7: note = Description of Artificial Sequence: Synthetic peptide
DPLGKQG

SEQ ID NO: 27301 - protein, 7 aa, synthetic construct
  REGION 1..7: note = Description of Artificial Sequence: Synthetic peptide
HTRPNSM

SEQ ID NO: 27302 - protein, 7 aa, synthetic construct
  REGION 1..7: note = Description of Artificial Sequence: Synthetic peptide
TQSHNLA

SEQ ID NO: 27303 - protein, 7 aa, synthetic construct
  REGION 1..7: note = Description of Artificial Sequence: Synthetic peptide
LGKSAHS

SEQ ID NO: 27304 - protein, 7 aa, synthetic construct
  REGION 1..7: note = Description of Artificial Sequence: Synthetic peptide
HNGRNVS

SEQ ID NO: 27305 - protein, 7 aa, synthetic construct
  REGION 1..7: note = Description of Artificial Sequence: Synthetic peptide
YNNGGTR

SEQ ID NO: 27306 - protein, 7 aa, synthetic construct
  REGION 1..7: note = Description of Artificial Sequence: Synthetic peptide
STTAQVK

SEQ ID NO: 27307 - protein, 7 aa, synthetic construct
  REGION 1..7: note = Description of Artificial Sequence: Synthetic peptide
FRNNGSH

SEQ ID NO: 27308 - protein, 7 aa, synthetic construct
  REGION 1..7: note = Description of Artificial Sequence: Synthetic peptide
GQIKNLG

SEQ ID NO: 27309 - protein, 7 aa, synthetic construct
  REGION 1..7: note = Description of Artificial Sequence: Synthetic peptide
NPVAAAT

SEQ ID NO: 27310 - protein, 7 aa, synthetic construct
  REGION 1..7: note = Description of Artificial Sequence: Synthetic peptide
PSAGREK

SEQ ID NO: 27311 - protein, 7 aa, synthetic construct
  REGION 1..7: note = Description of Artificial Sequence: Synthetic peptide
TGVSPLA

SEQ ID NO: 27312 - protein, 7 aa, synthetic construct
  REGION 1..7: note = Description of Artificial Sequence: Synthetic peptide
FPVNAGA

SEQ ID NO: 27313 - protein, 7 aa, synthetic construct
  REGION 1..7: note = Description of Artificial Sequence: Synthetic peptide
SFSGANK

SEQ ID NO: 27314 - protein, 7 aa, synthetic construct
  REGION 1..7: note = Description of Artificial Sequence: Synthetic peptide
KQGGPTG

SEQ ID NO: 27315 - protein, 7 aa, synthetic construct
  REGION 1..7: note = Description of Artificial Sequence: Synthetic peptide
TKSTSHV

SEQ ID NO: 27316 - protein, 7 aa, synthetic construct
  REGION 1..7: note = Description of Artificial Sequence: Synthetic peptide
GSIKAPP

SEQ ID NO: 27317 - protein, 7 aa, synthetic construct
  REGION 1..7: note = Description of Artificial Sequence: Synthetic peptide
YGLPSSR

SEQ ID NO: 27318 - protein, 7 aa, synthetic construct
  REGION 1..7: note = Description of Artificial Sequence: Synthetic peptide
RQDSTPG

SEQ ID NO: 27319 - protein, 7 aa, synthetic construct
  REGION 1..7: note = Description of Artificial Sequence: Synthetic peptide
PTLASGR

SEQ ID NO: 27320 - protein, 7 aa, synthetic construct
  REGION 1..7: note = Description of Artificial Sequence: Synthetic peptide
NPGSGYG

SEQ ID NO: 27321 - protein, 7 aa, synthetic construct
  REGION 1..7: note = Description of Artificial Sequence: Synthetic peptide
LVASGQK

SEQ ID NO: 27322 - protein, 7 aa, synthetic construct
  REGION 1..7: note = Description of Artificial Sequence: Synthetic peptide
GLPTEKM

SEQ ID NO: 27323 - protein, 7 aa, synthetic construct
  REGION 1..7: note = Description of Artificial Sequence: Synthetic peptide
TVGTTTI

SEQ ID NO: 27324 - protein, 7 aa, synthetic construct
  REGION 1..7: note = Description of Artificial Sequence: Synthetic peptide
PSVNRTP

SEQ ID NO: 27325 - protein, 7 aa, synthetic construct
  REGION 1..7: note = Description of Artificial Sequence: Synthetic peptide
LGTSQMK

SEQ ID NO: 27326 - protein, 7 aa, synthetic construct
  REGION 1..7: note = Description of Artificial Sequence: Synthetic peptide
QKTNKLY

SEQ ID NO: 27327 - protein, 7 aa, synthetic construct
  REGION 1..7: note = Description of Artificial Sequence: Synthetic peptide
TSKPNSP

SEQ ID NO: 27328 - protein, 7 aa, synthetic construct
  REGION 1..7: note = Description of Artificial Sequence: Synthetic peptide
TSTQKGQ

SEQ ID NO: 27329 - protein, 7 aa, synthetic construct
  REGION 1..7: note = Description of Artificial Sequence: Synthetic peptide
SISNQRS

SEQ ID NO: 27330 - protein, 7 aa, synthetic construct
  REGION 1..7: note = Description of Artificial Sequence: Synthetic peptide
YTITPQK

SEQ ID NO: 27331 - protein, 7 aa, synthetic construct
  REGION 1..7: note = Description of Artificial Sequence: Synthetic peptide
LGIRDNT

SEQ ID NO: 27332 - protein, 7 aa, synthetic construct
  REGION 1..7: note = Description of Artificial Sequence: Synthetic peptide
KVSAQAL

SEQ ID NO: 27333 - protein, 7 aa, synthetic construct
  REGION 1..7: note = Description of Artificial Sequence: Synthetic peptide
PSTFTEV

SEQ ID NO: 27334 - protein, 7 aa, synthetic construct
  REGION 1..7: note = Description of Artificial Sequence: Synthetic peptide
NRSKESA

SEQ ID NO: 27335 - protein, 7 aa, synthetic construct
  REGION 1..7: note = Description of Artificial Sequence: Synthetic peptide
SHNSKVS

SEQ ID NO: 27336 - protein, 7 aa, synthetic construct
  REGION 1..7: note = Description of Artificial Sequence: Synthetic peptide
ETPNRSQ

SEQ ID NO: 27337 - protein, 7 aa, synthetic construct
  REGION 1..7: note = Description of Artificial Sequence: Synthetic peptide
ETKRSNM

SEQ ID NO: 27338 - protein, 7 aa, synthetic construct
  REGION 1..7: note = Description of Artificial Sequence: Synthetic peptide
LPSFRPP

SEQ ID NO: 27339 - protein, 7 aa, synthetic construct
  REGION 1..7: note = Description of Artificial Sequence: Synthetic peptide
PGTGSNH

SEQ ID NO: 27340 - protein, 7 aa, synthetic construct
  REGION 1..7: note = Description of Artificial Sequence: Synthetic peptide
PGSRALT

SEQ ID NO: 27341 - protein, 7 aa, synthetic construct
  REGION 1..7: note = Description of Artificial Sequence: Synthetic peptide
NNSRVLG

SEQ ID NO: 27342 - protein, 7 aa, synthetic construct
  REGION 1..7: note = Description of Artificial Sequence: Synthetic peptide
MNRAPTN

SEQ ID NO: 27343 - protein, 7 aa, synthetic construct
  REGION 1..7: note = Description of Artificial Sequence: Synthetic peptide
GPHTAVG

SEQ ID NO: 27344 - protein, 7 aa, synthetic construct
  REGION 1..7: note = Description of Artificial Sequence: Synthetic peptide
QSHSGIS

SEQ ID NO: 27345 - protein, 7 aa, synthetic construct
  REGION 1..7: note = Description of Artificial Sequence: Synthetic peptide
HGGPGAV

SEQ ID NO: 27346 - protein, 7 aa, synthetic construct
  REGION 1..7: note = Description of Artificial Sequence: Synthetic peptide
LNRAHTS

SEQ ID NO: 27347 - protein, 7 aa, synthetic construct
  REGION 1..7: note = Description of Artificial Sequence: Synthetic peptide
AGSKTTS

SEQ ID NO: 27348 - protein, 7 aa, synthetic construct
  REGION 1..7: note = Description of Artificial Sequence: Synthetic peptide
ELMNKSK

SEQ ID NO: 27349 - protein, 7 aa, synthetic construct
  REGION 1..7: note = Description of Artificial Sequence: Synthetic peptide
EGSGRLT

SEQ ID NO: 27350 - protein, 7 aa, synthetic construct
  REGION 1..7: note = Description of Artificial Sequence: Synthetic peptide
AVGKSTE

SEQ ID NO: 27351 - protein, 7 aa, synthetic construct
  REGION 1..7: note = Description of Artificial Sequence: Synthetic peptide
YRSKEIG

SEQ ID NO: 27352 - protein, 7 aa, synthetic construct
  REGION 1..7: note = Description of Artificial Sequence: Synthetic peptide
SRNSPPQ

SEQ ID NO: 27353 - protein, 7 aa, synthetic construct
  REGION 1..7: note = Description of Artificial Sequence: Synthetic peptide
TGSGQNQ

SEQ ID NO: 27354 - protein, 7 aa, synthetic construct
  REGION 1..7: note = Description of Artificial Sequence: Synthetic peptide
PNNQSTR

SEQ ID NO: 27355 - protein, 7 aa, synthetic construct
  REGION 1..7: note = Description of Artificial Sequence: Synthetic peptide
GTFSTQS

SEQ ID NO: 27356 - protein, 7 aa, synthetic construct
  REGION 1..7: note = Description of Artificial Sequence: Synthetic peptide
NISSKVA

SEQ ID NO: 27357 - protein, 7 aa, synthetic construct
  REGION 1..7: note = Description of Artificial Sequence: Synthetic peptide
QAVARQA

SEQ ID NO: 27358 - protein, 7 aa, synthetic construct
  REGION 1..7: note = Description of Artificial Sequence: Synthetic peptide
PLERTTK

SEQ ID NO: 27359 - protein, 7 aa, synthetic construct
  REGION 1..7: note = Description of Artificial Sequence: Synthetic peptide
YQTNNKH

SEQ ID NO: 27360 - protein, 7 aa, synthetic construct
  REGION 1..7: note = Description of Artificial Sequence: Synthetic peptide
RTDTHSL

SEQ ID NO: 27361 - protein, 7 aa, synthetic construct
  REGION 1..7: note = Description of Artificial Sequence: Synthetic peptide
SFRAQEG

SEQ ID NO: 27362 - protein, 7 aa, synthetic construct
  REGION 1..7: note = Description of Artificial Sequence: Synthetic peptide
TTGGHAL

SEQ ID NO: 27363 - protein, 7 aa, synthetic construct
  REGION 1..7: note = Description of Artificial Sequence: Synthetic peptide
MSSKQVS

SEQ ID NO: 27364 - protein, 7 aa, synthetic construct
  REGION 1..7: note = Description of Artificial Sequence: Synthetic peptide
PYNVRPA

SEQ ID NO: 27365 - protein, 7 aa, synthetic construct
  REGION 1..7: note = Description of Artificial Sequence: Synthetic peptide
QQSPRNG

SEQ ID NO: 27366 - protein, 7 aa, synthetic construct
  REGION 1..7: note = Description of Artificial Sequence: Synthetic peptide
TTMSKVG

SEQ ID NO: 27367 - protein, 7 aa, synthetic construct
  REGION 1..7: note = Description of Artificial Sequence: Synthetic peptide
PYNSKAS

SEQ ID NO: 27368 - protein, 7 aa, synthetic construct
  REGION 1..7: note = Description of Artificial Sequence: Synthetic peptide
RAITQSN

SEQ ID NO: 27369 - protein, 7 aa, synthetic construct
  REGION 1..7: note = Description of Artificial Sequence: Synthetic peptide
RHASDFY

SEQ ID NO: 27370 - protein, 7 aa, synthetic construct
  REGION 1..7: note = Description of Artificial Sequence: Synthetic peptide
NTQSYTS

SEQ ID NO: 27371 - protein, 7 aa, synthetic construct
  REGION 1..7: note = Description of Artificial Sequence: Synthetic peptide
PTDRINR

SEQ ID NO: 27372 - protein, 7 aa, synthetic construct
  REGION 1..7: note = Description of Artificial Sequence: Synthetic peptide
NAQQAQR

SEQ ID NO: 27373 - protein, 7 aa, synthetic construct
  REGION 1..7: note = Description of Artificial Sequence: Synthetic peptide
MSLSKNH

SEQ ID NO: 27374 - protein, 7 aa, synthetic construct
  REGION 1..7: note = Description of Artificial Sequence: Synthetic peptide
ATTSRIS

SEQ ID NO: 27375 - protein, 7 aa, synthetic construct
  REGION 1..7: note = Description of Artificial Sequence: Synthetic peptide
SLGSGFQ

SEQ ID NO: 27376 - protein, 7 aa, synthetic construct
  REGION 1..7: note = Description of Artificial Sequence: Synthetic peptide
EGLNTSR

SEQ ID NO: 27377 - protein, 7 aa, synthetic construct
  REGION 1..7: note = Description of Artificial Sequence: Synthetic peptide
SSQEVLR

SEQ ID NO: 27378 - protein, 7 aa, synthetic construct
  REGION 1..7: note = Description of Artificial Sequence: Synthetic peptide
RATEGVF

SEQ ID NO: 27379 - protein, 7 aa, synthetic construct
  REGION 1..7: note = Description of Artificial Sequence: Synthetic peptide
GTTSSRD

SEQ ID NO: 27380 - protein, 7 aa, synthetic construct
  REGION 1..7: note = Description of Artificial Sequence: Synthetic peptide
NRQGILS

SEQ ID NO: 27381 - protein, 7 aa, synthetic construct
  REGION 1..7: note = Description of Artificial Sequence: Synthetic peptide
STTKDGI

SEQ ID NO: 27382 - protein, 7 aa, synthetic construct
  REGION 1..7: note = Description of Artificial Sequence: Synthetic peptide
RSGSVNP

SEQ ID NO: 27383 - protein, 7 aa, synthetic construct
  REGION 1..7: note = Description of Artificial Sequence: Synthetic peptide
DTNKTSY

SEQ ID NO: 27384 - protein, 7 aa, synthetic construct
  REGION 1..7: note = Description of Artificial Sequence: Synthetic peptide
LPGQLRT

SEQ ID NO: 27385 - protein, 7 aa, synthetic construct
  REGION 1..7: note = Description of Artificial Sequence: Synthetic peptide
TTSGAGR

SEQ ID NO: 27386 - protein, 7 aa, synthetic construct
  REGION 1..7: note = Description of Artificial Sequence: Synthetic peptide
AFGGETK

SEQ ID NO: 27387 - protein, 7 aa, synthetic construct
  REGION 1..7: note = Description of Artificial Sequence: Synthetic peptide
STGVRVG

SEQ ID NO: 27388 - protein, 7 aa, synthetic construct
  REGION 1..7: note = Description of Artificial Sequence: Synthetic peptide
PARDSKS

SEQ ID NO: 27389 - protein, 7 aa, synthetic construct
  REGION 1..7: note = Description of Artificial Sequence: Synthetic peptide
GHPTNTT

SEQ ID NO: 27390 - protein, 7 aa, synthetic construct
  REGION 1..7: note = Description of Artificial Sequence: Synthetic peptide
SSAGTYT

SEQ ID NO: 27391 - protein, 7 aa, synthetic construct
  REGION 1..7: note = Description of Artificial Sequence: Synthetic peptide
TPITPMT

SEQ ID NO: 27392 - protein, 7 aa, synthetic construct
  REGION 1..7: note = Description of Artificial Sequence: Synthetic peptide
IRSKASA

SEQ ID NO: 27393 - protein, 7 aa, synthetic construct
  REGION 1..7: note = Description of Artificial Sequence: Synthetic peptide
PVGSSGP

SEQ ID NO: 27394 - protein, 7 aa, synthetic construct
  REGION 1..7: note = Description of Artificial Sequence: Synthetic peptide
TQQHGSN

SEQ ID NO: 27395 - protein, 7 aa, synthetic construct
  REGION 1..7: note = Description of Artificial Sequence: Synthetic peptide
STTNSKN

SEQ ID NO: 27396 - protein, 7 aa, synthetic construct
  REGION 1..7: note = Description of Artificial Sequence: Synthetic peptide
PGSSNRN

SEQ ID NO: 27397 - protein, 7 aa, synthetic construct
  REGION 1..7: note = Description of Artificial Sequence: Synthetic peptide
PIGSQHI

SEQ ID NO: 27398 - protein, 7 aa, synthetic construct
  REGION 1..7: note = Description of Artificial Sequence: Synthetic peptide
NNAHSSS

SEQ ID NO: 27399 - protein, 7 aa, synthetic construct
  REGION 1..7: note = Description of Artificial Sequence: Synthetic peptide
NTLQGHR

SEQ ID NO: 27400 - protein, 7 aa, synthetic construct
  REGION 1..7: note = Description of Artificial Sequence: Synthetic peptide
YNRSERP

SEQ ID NO: 27401 - protein, 7 aa, synthetic construct
  REGION 1..7: note = Description of Artificial Sequence: Synthetic peptide
PTKGANA

SEQ ID NO: 27402 - protein, 7 aa, synthetic construct
  REGION 1..7: note = Description of Artificial Sequence: Synthetic peptide
PLGQSYR

SEQ ID NO: 27403 - protein, 7 aa, synthetic construct
  REGION 1..7: note = Description of Artificial Sequence: Synthetic peptide
TNPKSSS

SEQ ID NO: 27404 - protein, 7 aa, synthetic construct
  REGION 1..7: note = Description of Artificial Sequence: Synthetic peptide
AEQRPGQ

SEQ ID NO: 27405 - protein, 7 aa, synthetic construct
  REGION 1..7: note = Description of Artificial Sequence: Synthetic peptide
DPRNSTS

SEQ ID NO: 27406 - protein, 7 aa, synthetic construct
  REGION 1..7: note = Description of Artificial Sequence: Synthetic peptide
VSTRSIS

SEQ ID NO: 27407 - protein, 7 aa, synthetic construct
  REGION 1..7: note = Description of Artificial Sequence: Synthetic peptide
WRTSKAT

SEQ ID NO: 27408 - protein, 7 aa, synthetic construct
  REGION 1..7: note = Description of Artificial Sequence: Synthetic peptide
YTGSQYM

SEQ ID NO: 27409 - protein, 7 aa, synthetic construct
  REGION 1..7: note = Description of Artificial Sequence: Synthetic peptide
CGRPQIR

SEQ ID NO: 27410 - protein, 7 aa, synthetic construct
  REGION 1..7: note = Description of Artificial Sequence: Synthetic peptide
VFNRNAS

SEQ ID NO: 27411 - protein, 7 aa, synthetic construct
  REGION 1..7: note = Description of Artificial Sequence: Synthetic peptide
GTSGGIV

SEQ ID NO: 27412 - protein, 7 aa, synthetic construct
  REGION 1..7: note = Description of Artificial Sequence: Synthetic peptide
RVVTNNL

SEQ ID NO: 27413 - protein, 7 aa, synthetic construct
  REGION 1..7: note = Description of Artificial Sequence: Synthetic peptide
QTRSAER

SEQ ID NO: 27414 - protein, 7 aa, synthetic construct
  REGION 1..7: note = Description of Artificial Sequence: Synthetic peptide
LNHSKYS

SEQ ID NO: 27415 - protein, 7 aa, synthetic construct
  REGION 1..7: note = Description of Artificial Sequence: Synthetic peptide
ATNHSPQ

SEQ ID NO: 27416 - protein, 7 aa, synthetic construct
  REGION 1..7: note = Description of Artificial Sequence: Synthetic peptide
CSNQRML

SEQ ID NO: 27417 - protein, 7 aa, synthetic construct
  REGION 1..7: note = Description of Artificial Sequence: Synthetic peptide
HGSGQNQ

SEQ ID NO: 27418 - protein, 7 aa, synthetic construct
  REGION 1..7: note = Description of Artificial Sequence: Synthetic peptide
PGTTSVG

SEQ ID NO: 27419 - protein, 7 aa, synthetic construct
  REGION 1..7: note = Description of Artificial Sequence: Synthetic peptide
IGNKQSQ

SEQ ID NO: 27420 - protein, 7 aa, synthetic construct
  REGION 1..7: note = Description of Artificial Sequence: Synthetic peptide
NPGKGSS

SEQ ID NO: 27421 - protein, 7 aa, synthetic construct
  REGION 1..7: note = Description of Artificial Sequence: Synthetic peptide
NSNTRGP

SEQ ID NO: 27422 - protein, 7 aa, synthetic construct
  REGION 1..7: note = Description of Artificial Sequence: Synthetic peptide
AGSSPPT

SEQ ID NO: 27423 - protein, 7 aa, synthetic construct
  REGION 1..7: note = Description of Artificial Sequence: Synthetic peptide
QNQNSGR

SEQ ID NO: 27424 - protein, 7 aa, synthetic construct
  REGION 1..7: note = Description of Artificial Sequence: Synthetic peptide
SMANTVA

SEQ ID NO: 27425 - protein, 7 aa, synthetic construct
  REGION 1..7: note = Description of Artificial Sequence: Synthetic peptide
VQRSSNQ

SEQ ID NO: 27426 - protein, 7 aa, synthetic construct
  REGION 1..7: note = Description of Artificial Sequence: Synthetic peptide
NGNISIG

SEQ ID NO: 27427 - protein, 7 aa, synthetic construct
  REGION 1..7: note = Description of Artificial Sequence: Synthetic peptide
SPEKNMR

SEQ ID NO: 27428 - protein, 7 aa, synthetic construct
  REGION 1..7: note = Description of Artificial Sequence: Synthetic peptide
QDMRLSG

SEQ ID NO: 27429 - protein, 7 aa, synthetic construct
  REGION 1..7: note = Description of Artificial Sequence: Synthetic peptide
GNGISTK

SEQ ID NO: 27430 - protein, 7 aa, synthetic construct
  REGION 1..7: note = Description of Artificial Sequence: Synthetic peptide
FQPRSST

SEQ ID NO: 27431 - protein, 7 aa, synthetic construct
  REGION 1..7: note = Description of Artificial Sequence: Synthetic peptide
DPVTRQS

SEQ ID NO: 27432 - protein, 7 aa, synthetic construct
  REGION 1..7: note = Description of Artificial Sequence: Synthetic peptide
SISHSSS

SEQ ID NO: 27433 - protein, 7 aa, synthetic construct
  REGION 1..7: note = Description of Artificial Sequence: Synthetic peptide
PGNMTSR

SEQ ID NO: 27434 - protein, 7 aa, synthetic construct
  REGION 1..7: note = Description of Artificial Sequence: Synthetic peptide
LCASKCD

SEQ ID NO: 27435 - protein, 7 aa, synthetic construct
  REGION 1..7: note = Description of Artificial Sequence: Synthetic peptide
NDSGQNQ

SEQ ID NO: 27436 - protein, 7 aa, synthetic construct
  REGION 1..7: note = Description of Artificial Sequence: Synthetic peptide
PSNSGNN

SEQ ID NO: 27437 - protein, 7 aa, synthetic construct
  REGION 1..7: note = Description of Artificial Sequence: Synthetic peptide
RQNGGVK

SEQ ID NO: 27438 - protein, 7 aa, synthetic construct
  REGION 1..7: note = Description of Artificial Sequence: Synthetic peptide
TSERPTC

SEQ ID NO: 27439 - protein, 7 aa, synthetic construct
  REGION 1..7: note = Description of Artificial Sequence: Synthetic peptide
TRYDNVG

SEQ ID NO: 27440 - protein, 7 aa, synthetic construct
  REGION 1..7: note = Description of Artificial Sequence: Synthetic peptide
GAGRALQ

SEQ ID NO: 27441 - protein, 7 aa, synthetic construct
  REGION 1..7: note = Description of Artificial Sequence: Synthetic peptide
NGVPHPK

SEQ ID NO: 27442 - protein, 7 aa, synthetic construct
  REGION 1..7: note = Description of Artificial Sequence: Synthetic peptide
PSTQSSS

SEQ ID NO: 27443 - protein, 7 aa, synthetic construct
  REGION 1..7: note = Description of Artificial Sequence: Synthetic peptide
TKPGVGS

SEQ ID NO: 27444 - protein, 7 aa, synthetic construct
  REGION 1..7: note = Description of Artificial Sequence: Synthetic peptide
SIKTVTN

SEQ ID NO: 27445 - protein, 7 aa, synthetic construct
  REGION 1..7: note = Description of Artificial Sequence: Synthetic peptide
RQSTNIG

SEQ ID NO: 27446 - protein, 7 aa, synthetic construct
  REGION 1..7: note = Description of Artificial Sequence: Synthetic peptide
PTSQQRP

SEQ ID NO: 27447 - protein, 7 aa, synthetic construct
  REGION 1..7: note = Description of Artificial Sequence: Synthetic peptide
PTVQVTK

SEQ ID NO: 27448 - protein, 7 aa, synthetic construct
  REGION 1..7: note = Description of Artificial Sequence: Synthetic peptide
NTSNNIQ

SEQ ID NO: 27449 - protein, 7 aa, synthetic construct
  REGION 1..7: note = Description of Artificial Sequence: Synthetic peptide
QPAGKVV

SEQ ID NO: 27450 - protein, 7 aa, synthetic construct
  REGION 1..7: note = Description of Artificial Sequence: Synthetic peptide
VRESRSS

SEQ ID NO: 27451 - protein, 7 aa, synthetic construct
  REGION 1..7: note = Description of Artificial Sequence: Synthetic peptide
MGSVAML

SEQ ID NO: 27452 - protein, 7 aa, synthetic construct
  REGION 1..7: note = Description of Artificial Sequence: Synthetic peptide
LPGQGVG

SEQ ID NO: 27453 - protein, 7 aa, synthetic construct
  REGION 1..7: note = Description of Artificial Sequence: Synthetic peptide
SNGQRKE

SEQ ID NO: 27454 - protein, 7 aa, synthetic construct
  REGION 1..7: note = Description of Artificial Sequence: Synthetic peptide
PGINTNS

SEQ ID NO: 27455 - protein, 7 aa, synthetic construct
  REGION 1..7: note = Description of Artificial Sequence: Synthetic peptide
PTTRMVN

SEQ ID NO: 27456 - protein, 7 aa, synthetic construct
  REGION 1..7: note = Description of Artificial Sequence: Synthetic peptide
YGKSVTP

SEQ ID NO: 27457 - protein, 7 aa, synthetic construct
  REGION 1..7: note = Description of Artificial Sequence: Synthetic peptide
SLHQVGG

SEQ ID NO: 27458 - protein, 7 aa, synthetic construct
  REGION 1..7: note = Description of Artificial Sequence: Synthetic peptide
ENSSKAK

SEQ ID NO: 27459 - protein, 7 aa, synthetic construct
  REGION 1..7: note = Description of Artificial Sequence: Synthetic peptide
MSSERPG

SEQ ID NO: 27460 - protein, 7 aa, synthetic construct
  REGION 1..7: note = Description of Artificial Sequence: Synthetic peptide
SKAGRVT

SEQ ID NO: 27461 - protein, 7 aa, synthetic construct
  REGION 1..7: note = Description of Artificial Sequence: Synthetic peptide
HKVPGSG

SEQ ID NO: 27462 - protein, 7 aa, synthetic construct
  REGION 1..7: note = Description of Artificial Sequence: Synthetic peptide
HLRDKYS

SEQ ID NO: 27463 - protein, 7 aa, synthetic construct
  REGION 1..7: note = Description of Artificial Sequence: Synthetic peptide
KNGSVAL

SEQ ID NO: 27464 - protein, 7 aa, synthetic construct
  REGION 1..7: note = Description of Artificial Sequence: Synthetic peptide
FTSNKAS

SEQ ID NO: 27465 - protein, 7 aa, synthetic construct
  REGION 1..7: note = Description of Artificial Sequence: Synthetic peptide
GTGKIMP

SEQ ID NO: 27466 - protein, 7 aa, synthetic construct
  REGION 1..7: note = Description of Artificial Sequence: Synthetic peptide
PSGSPVR

SEQ ID NO: 27467 - protein, 7 aa, synthetic construct
  REGION 1..7: note = Description of Artificial Sequence: Synthetic peptide
PRETHKQ

SEQ ID NO: 27468 - protein, 7 aa, synthetic construct
  REGION 1..7: note = Description of Artificial Sequence: Synthetic peptide
QGPKNAD

SEQ ID NO: 27469 - protein, 7 aa, synthetic construct
  REGION 1..7: note = Description of Artificial Sequence: Synthetic peptide
TSNGGSA

SEQ ID NO: 27470 - protein, 7 aa, synthetic construct
  REGION 1..7: note = Description of Artificial Sequence: Synthetic peptide
QGAGVSS

SEQ ID NO: 27471 - protein, 7 aa, synthetic construct
  REGION 1..7: note = Description of Artificial Sequence: Synthetic peptide
IGGNKPL

SEQ ID NO: 27472 - protein, 7 aa, synthetic construct
  REGION 1..7: note = Description of Artificial Sequence: Synthetic peptide
YPLSRST

SEQ ID NO: 27473 - protein, 7 aa, synthetic construct
  REGION 1..7: note = Description of Artificial Sequence: Synthetic peptide
STTGGAS

SEQ ID NO: 27474 - protein, 7 aa, synthetic construct
  REGION 1..7: note = Description of Artificial Sequence: Synthetic peptide
YSGGTQQ

SEQ ID NO: 27475 - protein, 7 aa, synthetic construct
  REGION 1..7: note = Description of Artificial Sequence: Synthetic peptide
GVVPPTK

SEQ ID NO: 27476 - protein, 7 aa, synthetic construct
  REGION 1..7: note = Description of Artificial Sequence: Synthetic peptide
SRTNATA

SEQ ID NO: 27477 - protein, 7 aa, synthetic construct
  REGION 1..7: note = Description of Artificial Sequence: Synthetic peptide
KNESMVL

SEQ ID NO: 27478 - protein, 7 aa, synthetic construct
  REGION 1..7: note = Description of Artificial Sequence: Synthetic peptide
TMRATPP

SEQ ID NO: 27479 - protein, 7 aa, synthetic construct
  REGION 1..7: note = Description of Artificial Sequence: Synthetic peptide
EQGSGNH

SEQ ID NO: 27480 - protein, 7 aa, synthetic construct
  REGION 1..7: note = Description of Artificial Sequence: Synthetic peptide
VNTNLVG

SEQ ID NO: 27481 - protein, 7 aa, synthetic construct
  REGION 1..7: note = Description of Artificial Sequence: Synthetic peptide
SGNDKNN

SEQ ID NO: 27482 - protein, 7 aa, synthetic construct
  REGION 1..7: note = Description of Artificial Sequence: Synthetic peptide
PLSHSKM

SEQ ID NO: 27483 - protein, 7 aa, synthetic construct
  REGION 1..7: note = Description of Artificial Sequence: Synthetic peptide
AQQLNGV

SEQ ID NO: 27484 - protein, 7 aa, synthetic construct
  REGION 1..7: note = Description of Artificial Sequence: Synthetic peptide
KKVTGQG

SEQ ID NO: 27485 - protein, 7 aa, synthetic construct
  REGION 1..7: note = Description of Artificial Sequence: Synthetic peptide
DNVSTFT

SEQ ID NO: 27486 - protein, 7 aa, synthetic construct
  REGION 1..7: note = Description of Artificial Sequence: Synthetic peptide
ASSKGLT

SEQ ID NO: 27487 - protein, 7 aa, synthetic construct
  REGION 1..7: note = Description of Artificial Sequence: Synthetic peptide
RDGGQDR

SEQ ID NO: 27488 - protein, 7 aa, synthetic construct
  REGION 1..7: note = Description of Artificial Sequence: Synthetic peptide
LPSGNTS

SEQ ID NO: 27489 - protein, 7 aa, synthetic construct
  REGION 1..7: note = Description of Artificial Sequence: Synthetic peptide
SKATHNI

SEQ ID NO: 27490 - protein, 7 aa, synthetic construct
  REGION 1..7: note = Description of Artificial Sequence: Synthetic peptide
SGTQMHL

SEQ ID NO: 27491 - protein, 7 aa, synthetic construct
  REGION 1..7: note = Description of Artificial Sequence: Synthetic peptide
ATVQSAT

SEQ ID NO: 27492 - protein, 7 aa, synthetic construct
  REGION 1..7: note = Description of Artificial Sequence: Synthetic peptide
PVRDGGR

SEQ ID NO: 27493 - protein, 7 aa, synthetic construct
  REGION 1..7: note = Description of Artificial Sequence: Synthetic peptide
YVRPGTG

SEQ ID NO: 27494 - protein, 7 aa, synthetic construct
  REGION 1..7: note = Description of Artificial Sequence: Synthetic peptide
TGSGRGL

SEQ ID NO: 27495 - protein, 7 aa, synthetic construct
  REGION 1..7: note = Description of Artificial Sequence: Synthetic peptide
MSSRSSV

SEQ ID NO: 27496 - protein, 7 aa, synthetic construct
  REGION 1..7: note = Description of Artificial Sequence: Synthetic peptide
DYGKGSS

SEQ ID NO: 27497 - protein, 7 aa, synthetic construct
  REGION 1..7: note = Description of Artificial Sequence: Synthetic peptide
SKTGTSL

SEQ ID NO: 27498 - protein, 7 aa, synthetic construct
  REGION 1..7: note = Description of Artificial Sequence: Synthetic peptide
MPSQRDG

SEQ ID NO: 27499 - protein, 7 aa, synthetic construct
  REGION 1..7: note = Description of Artificial Sequence: Synthetic peptide
GQSGSRL

SEQ ID NO: 27500 - protein, 7 aa, synthetic construct
  REGION 1..7: note = Description of Artificial Sequence: Synthetic peptide
SRNVNAM

SEQ ID NO: 27501 - protein, 7 aa, synthetic construct
  REGION 1..7: note = Description of Artificial Sequence: Synthetic peptide
QVSPLNA

SEQ ID NO: 27502 - protein, 7 aa, synthetic construct
  REGION 1..7: note = Description of Artificial Sequence: Synthetic peptide
LNSTAGK

SEQ ID NO: 27503 - protein, 7 aa, synthetic construct
  REGION 1..7: note = Description of Artificial Sequence: Synthetic peptide
PTQPRYQ

SEQ ID NO: 27504 - protein, 7 aa, synthetic construct
  REGION 1..7: note = Description of Artificial Sequence: Synthetic peptide
TRSDRVA

SEQ ID NO: 27505 - protein, 7 aa, synthetic construct
  REGION 1..7: note = Description of Artificial Sequence: Synthetic peptide
CSTGTRK

SEQ ID NO: 27506 - protein, 7 aa, synthetic construct
  REGION 1..7: note = Description of Artificial Sequence: Synthetic peptide
GTPNTKV

SEQ ID NO: 27507 - protein, 7 aa, synthetic construct
  REGION 1..7: note = Description of Artificial Sequence: Synthetic peptide
AGSSRNL

SEQ ID NO: 27508 - protein, 7 aa, synthetic construct
  REGION 1..7: note = Description of Artificial Sequence: Synthetic peptide
YTASRME

SEQ ID NO: 27509 - protein, 7 aa, synthetic construct
  REGION 1..7: note = Description of Artificial Sequence: Synthetic peptide
GQNRNNT

SEQ ID NO: 27510 - protein, 7 aa, synthetic construct
  REGION 1..7: note = Description of Artificial Sequence: Synthetic peptide
NPYTANN

SEQ ID NO: 27511 - protein, 7 aa, synthetic construct
  REGION 1..7: note = Description of Artificial Sequence: Synthetic peptide
RSLSTEN

SEQ ID NO: 27512 - protein, 7 aa, synthetic construct
  REGION 1..7: note = Description of Artificial Sequence: Synthetic peptide
SGPRGNS

SEQ ID NO: 27513 - protein, 7 aa, synthetic construct
  REGION 1..7: note = Description of Artificial Sequence: Synthetic peptide
TQDHHVK

SEQ ID NO: 27514 - protein, 7 aa, synthetic construct
  REGION 1..7: note = Description of Artificial Sequence: Synthetic peptide
EVTPLRK

SEQ ID NO: 27515 - protein, 7 aa, synthetic construct
  REGION 1..7: note = Description of Artificial Sequence: Synthetic peptide
DMVSPRN

SEQ ID NO: 27516 - protein, 7 aa, synthetic construct
  REGION 1..7: note = Description of Artificial Sequence: Synthetic peptide
DYSETRR

SEQ ID NO: 27517 - protein, 7 aa, synthetic construct
  REGION 1..7: note = Description of Artificial Sequence: Synthetic peptide
PRSTASL

SEQ ID NO: 27518 - protein, 7 aa, synthetic construct
  REGION 1..7: note = Description of Artificial Sequence: Synthetic peptide
YFNSHSN

SEQ ID NO: 27519 - protein, 7 aa, synthetic construct
  REGION 1..7: note = Description of Artificial Sequence: Synthetic peptide
NLVQDRR

SEQ ID NO: 27520 - protein, 7 aa, synthetic construct
  REGION 1..7: note = Description of Artificial Sequence: Synthetic peptide
ADDKSLR

SEQ ID NO: 27521 - protein, 7 aa, synthetic construct
  REGION 1..7: note = Description of Artificial Sequence: Synthetic peptide
EARERKG

SEQ ID NO: 27522 - protein, 7 aa, synthetic construct
  REGION 1..7: note = Description of Artificial Sequence: Synthetic peptide
YRSAANS

SEQ ID NO: 27523 - protein, 7 aa, synthetic construct
  REGION 1..7: note = Description of Artificial Sequence: Synthetic peptide
SHNSKDS

SEQ ID NO: 27524 - protein, 7 aa, synthetic construct
  REGION 1..7: note = Description of Artificial Sequence: Synthetic peptide
LSGHSPQ

SEQ ID NO: 27525 - protein, 7 aa, synthetic construct
  REGION 1..7: note = Description of Artificial Sequence: Synthetic peptide
CTGSRSM

SEQ ID NO: 27526 - protein, 7 aa, synthetic construct
  REGION 1..7: note = Description of Artificial Sequence: Synthetic peptide
RHYTGES

SEQ ID NO: 27527 - protein, 7 aa, synthetic construct
  REGION 1..7: note = Description of Artificial Sequence: Synthetic peptide
NSSSSNH

SEQ ID NO: 27528 - protein, 7 aa, synthetic construct
  REGION 1..7: note = Description of Artificial Sequence: Synthetic peptide
TPTLSHT

SEQ ID NO: 27529 - protein, 7 aa, synthetic construct
  REGION 1..7: note = Description of Artificial Sequence: Synthetic peptide
NSISRVT

SEQ ID NO: 27530 - protein, 7 aa, synthetic construct
  REGION 1..7: note = Description of Artificial Sequence: Synthetic peptide
NNLPRNL

SEQ ID NO: 27531 - protein, 7 aa, synthetic construct
  REGION 1..7: note = Description of Artificial Sequence: Synthetic peptide
GRQNEYR

SEQ ID NO: 27532 - protein, 7 aa, synthetic construct
  REGION 1..7: note = Description of Artificial Sequence: Synthetic peptide
ANTTRLT

SEQ ID NO: 27533 - protein, 7 aa, synthetic construct
  REGION 1..7: note = Description of Artificial Sequence: Synthetic peptide
NLSHSAG

SEQ ID NO: 27534 - protein, 7 aa, synthetic construct
  REGION 1..7: note = Description of Artificial Sequence: Synthetic peptide
QTRSTGN

SEQ ID NO: 27535 - protein, 7 aa, synthetic construct
  REGION 1..7: note = Description of Artificial Sequence: Synthetic peptide
NNVGVRG

SEQ ID NO: 27536 - protein, 7 aa, synthetic construct
  REGION 1..7: note = Description of Artificial Sequence: Synthetic peptide
GMTQGGK

SEQ ID NO: 27537 - protein, 7 aa, synthetic construct
  REGION 1..7: note = Description of Artificial Sequence: Synthetic peptide
PVARAAQ

SEQ ID NO: 27538 - protein, 7 aa, synthetic construct
  REGION 1..7: note = Description of Artificial Sequence: Synthetic peptide
SHSTRLG

SEQ ID NO: 27539 - protein, 7 aa, synthetic construct
  REGION 1..7: note = Description of Artificial Sequence: Synthetic peptide
TNSQKLA

SEQ ID NO: 27540 - protein, 7 aa, synthetic construct
  REGION 1..7: note = Description of Artificial Sequence: Synthetic peptide
PTHSSRD

SEQ ID NO: 27541 - protein, 7 aa, synthetic construct
  REGION 1..7: note = Description of Artificial Sequence: Synthetic peptide
SHSVTPG

SEQ ID NO: 27542 - protein, 7 aa, synthetic construct
  REGION 1..7: note = Description of Artificial Sequence: Synthetic peptide
PNLSKSL

SEQ ID NO: 27543 - protein, 7 aa, synthetic construct
  REGION 1..7: note = Description of Artificial Sequence: Synthetic peptide
IIQNQSK

SEQ ID NO: 27544 - protein, 7 aa, synthetic construct
  REGION 1..7: note = Description of Artificial Sequence: Synthetic peptide
QTSHSAK

SEQ ID NO: 27545 - protein, 7 aa, synthetic construct
  REGION 1..7: note = Description of Artificial Sequence: Synthetic peptide
DGNHARA

SEQ ID NO: 27546 - protein, 7 aa, synthetic construct
  REGION 1..7: note = Description of Artificial Sequence: Synthetic peptide
ERMGKNQ

SEQ ID NO: 27547 - protein, 7 aa, synthetic construct
  REGION 1..7: note = Description of Artificial Sequence: Synthetic peptide
SVLNRNG

SEQ ID NO: 27548 - protein, 7 aa, synthetic construct
  REGION 1..7: note = Description of Artificial Sequence: Synthetic peptide
QSSSQQR

SEQ ID NO: 27549 - protein, 7 aa, synthetic construct
  REGION 1..7: note = Description of Artificial Sequence: Synthetic peptide
PYKGNGL

SEQ ID NO: 27550 - protein, 7 aa, synthetic construct
  REGION 1..7: note = Description of Artificial Sequence: Synthetic peptide
SSQQKAS

SEQ ID NO: 27551 - protein, 7 aa, synthetic construct
  REGION 1..7: note = Description of Artificial Sequence: Synthetic peptide
SNPSGFS

SEQ ID NO: 27552 - protein, 7 aa, synthetic construct
  REGION 1..7: note = Description of Artificial Sequence: Synthetic peptide
HVQDGRT

SEQ ID NO: 27553 - protein, 7 aa, synthetic construct
  REGION 1..7: note = Description of Artificial Sequence: Synthetic peptide
GSHNDSR

SEQ ID NO: 27554 - protein, 7 aa, synthetic construct
  REGION 1..7: note = Description of Artificial Sequence: Synthetic peptide
AKTNLRS

SEQ ID NO: 27555 - protein, 7 aa, synthetic construct
  REGION 1..7: note = Description of Artificial Sequence: Synthetic peptide
VQPSGRP

SEQ ID NO: 27556 - protein, 7 aa, synthetic construct
  REGION 1..7: note = Description of Artificial Sequence: Synthetic peptide
SESGQQR

SEQ ID NO: 27557 - protein, 7 aa, synthetic construct
  REGION 1..7: note = Description of Artificial Sequence: Synthetic peptide
FSSASFT

SEQ ID NO: 27558 - protein, 7 aa, synthetic construct
  REGION 1..7: note = Description of Artificial Sequence: Synthetic peptide
VQPVKMS

SEQ ID NO: 27559 - protein, 7 aa, synthetic construct
  REGION 1..7: note = Description of Artificial Sequence: Synthetic peptide
TGTGSFH

SEQ ID NO: 27560 - protein, 7 aa, synthetic construct
  REGION 1..7: note = Description of Artificial Sequence: Synthetic peptide
NGSGQSQ

SEQ ID NO: 27561 - protein, 7 aa, synthetic construct
  REGION 1..7: note = Description of Artificial Sequence: Synthetic peptide
LPTDSLR

SEQ ID NO: 27562 - protein, 7 aa, synthetic construct
  REGION 1..7: note = Description of Artificial Sequence: Synthetic peptide
DPATRKS

SEQ ID NO: 27563 - protein, 7 aa, synthetic construct
  REGION 1..7: note = Description of Artificial Sequence: Synthetic peptide
RVTNQNA

SEQ ID NO: 27564 - protein, 7 aa, synthetic construct
  REGION 1..7: note = Description of Artificial Sequence: Synthetic peptide
LNNQRIA

SEQ ID NO: 27565 - protein, 7 aa, synthetic construct
  REGION 1..7: note = Description of Artificial Sequence: Synthetic peptide
VNGHGVS

SEQ ID NO: 27566 - protein, 7 aa, synthetic construct
  REGION 1..7: note = Description of Artificial Sequence: Synthetic peptide
NQSKASV

SEQ ID NO: 27567 - protein, 7 aa, synthetic construct
  REGION 1..7: note = Description of Artificial Sequence: Synthetic peptide
PTGEKRL

SEQ ID NO: 27568 - protein, 7 aa, synthetic construct
  REGION 1..7: note = Description of Artificial Sequence: Synthetic peptide
SNATRSS

SEQ ID NO: 27569 - protein, 7 aa, synthetic construct
  REGION 1..7: note = Description of Artificial Sequence: Synthetic peptide
PGASGKV

SEQ ID NO: 27570 - protein, 7 aa, synthetic construct
  REGION 1..7: note = Description of Artificial Sequence: Synthetic peptide
YANNLNR

SEQ ID NO: 27571 - protein, 7 aa, synthetic construct
  REGION 1..7: note = Description of Artificial Sequence: Synthetic peptide
GLNVNSN

SEQ ID NO: 27572 - protein, 7 aa, synthetic construct
  REGION 1..7: note = Description of Artificial Sequence: Synthetic peptide
SSPQDHN

SEQ ID NO: 27573 - protein, 7 aa, synthetic construct
  REGION 1..7: note = Description of Artificial Sequence: Synthetic peptide
NQGGYHG

SEQ ID NO: 27574 - protein, 7 aa, synthetic construct
  REGION 1..7: note = Description of Artificial Sequence: Synthetic peptide
DLDTKAL

SEQ ID NO: 27575 - protein, 7 aa, synthetic construct
  REGION 1..7: note = Description of Artificial Sequence: Synthetic peptide
TMDVRSD

SEQ ID NO: 27576 - protein, 7 aa, synthetic construct
  REGION 1..7: note = Description of Artificial Sequence: Synthetic peptide
NNKGNPG

SEQ ID NO: 27577 - protein, 7 aa, synthetic construct
  REGION 1..7: note = Description of Artificial Sequence: Synthetic peptide
NLSSSGG

SEQ ID NO: 27578 - protein, 7 aa, synthetic construct
  REGION 1..7: note = Description of Artificial Sequence: Synthetic peptide
SSSPSSL

SEQ ID NO: 27579 - protein, 7 aa, synthetic construct
  REGION 1..7: note = Description of Artificial Sequence: Synthetic peptide
STNGNGL

SEQ ID NO: 27580 - protein, 7 aa, synthetic construct
  REGION 1..7: note = Description of Artificial Sequence: Synthetic peptide
NASGQNQ

SEQ ID NO: 27581 - protein, 7 aa, synthetic construct
  REGION 1..7: note = Description of Artificial Sequence: Synthetic peptide
PRTRENQ

SEQ ID NO: 27582 - protein, 7 aa, synthetic construct
  REGION 1..7: note = Description of Artificial Sequence: Synthetic peptide
QQGVGNN

SEQ ID NO: 27583 - protein, 7 aa, synthetic construct
  REGION 1..7: note = Description of Artificial Sequence: Synthetic peptide
ARASSNS

SEQ ID NO: 27584 - protein, 7 aa, synthetic construct
  REGION 1..7: note = Description of Artificial Sequence: Synthetic peptide
GSNLNST

SEQ ID NO: 27585 - protein, 7 aa, synthetic construct
  REGION 1..7: note = Description of Artificial Sequence: Synthetic peptide
TSSGHSV

SEQ ID NO: 27586 - protein, 7 aa, synthetic construct
  REGION 1..7: note = Description of Artificial Sequence: Synthetic peptide
PSHEGQQ

SEQ ID NO: 27587 - protein, 7 aa, synthetic construct
  REGION 1..7: note = Description of Artificial Sequence: Synthetic peptide
YTQSTSR

SEQ ID NO: 27588 - protein, 7 aa, synthetic construct
  REGION 1..7: note = Description of Artificial Sequence: Synthetic peptide
VRAKVAS

SEQ ID NO: 27589 - protein, 7 aa, synthetic construct
  REGION 1..7: note = Description of Artificial Sequence: Synthetic peptide
DIPSRAA

SEQ ID NO: 27590 - protein, 7 aa, synthetic construct
  REGION 1..7: note = Description of Artificial Sequence: Synthetic peptide
PPHDGQR

SEQ ID NO: 27591 - protein, 7 aa, synthetic construct
  REGION 1..7: note = Description of Artificial Sequence: Synthetic peptide
MEIKPNR

SEQ ID NO: 27592 - protein, 7 aa, synthetic construct
  REGION 1..7: note = Description of Artificial Sequence: Synthetic peptide
WVGSPVC

SEQ ID NO: 27593 - protein, 7 aa, synthetic construct
  REGION 1..7: note = Description of Artificial Sequence: Synthetic peptide
GYEANRG

SEQ ID NO: 27594 - protein, 7 aa, synthetic construct
  REGION 1..7: note = Description of Artificial Sequence: Synthetic peptide
LVSKSGT

SEQ ID NO: 27595 - protein, 7 aa, synthetic construct
  REGION 1..7: note = Description of Artificial Sequence: Synthetic peptide
KGYSSNE

SEQ ID NO: 27596 - protein, 7 aa, synthetic construct
  REGION 1..7: note = Description of Artificial Sequence: Synthetic peptide
PLAEMHG

SEQ ID NO: 27597 - protein, 7 aa, synthetic construct
  REGION 1..7: note = Description of Artificial Sequence: Synthetic peptide
PSRASIT

SEQ ID NO: 27598 - protein, 7 aa, synthetic construct
  REGION 1..7: note = Description of Artificial Sequence: Synthetic peptide
LRNSTSV

SEQ ID NO: 27599 - protein, 7 aa, synthetic construct
  REGION 1..7: note = Description of Artificial Sequence: Synthetic peptide
EPLSKQS

SEQ ID NO: 27600 - protein, 7 aa, synthetic construct
  REGION 1..7: note = Description of Artificial Sequence: Synthetic peptide
ASHLPVN

SEQ ID NO: 27601 - protein, 7 aa, synthetic construct
  REGION 1..7: note = Description of Artificial Sequence: Synthetic peptide
SSGKSFS

SEQ ID NO: 27602 - protein, 7 aa, synthetic construct
  REGION 1..7: note = Description of Artificial Sequence: Synthetic peptide
PLSGRIG

SEQ ID NO: 27603 - protein, 7 aa, synthetic construct
  REGION 1..7: note = Description of Artificial Sequence: Synthetic peptide
GQSNVTL

SEQ ID NO: 27604 - protein, 7 aa, synthetic construct
  REGION 1..7: note = Description of Artificial Sequence: Synthetic peptide
MNMSARQ

SEQ ID NO: 27605 - protein, 7 aa, synthetic construct
  REGION 1..7: note = Description of Artificial Sequence: Synthetic peptide
VNQSGFS

SEQ ID NO: 27606 - protein, 7 aa, synthetic construct
  REGION 1..7: note = Description of Artificial Sequence: Synthetic peptide
SVTSPNK

SEQ ID NO: 27607 - protein, 7 aa, synthetic construct
  REGION 1..7: note = Description of Artificial Sequence: Synthetic peptide
SSASTYK

SEQ ID NO: 27608 - protein, 7 aa, synthetic construct
  REGION 1..7: note = Description of Artificial Sequence: Synthetic peptide
LVQGGVN

SEQ ID NO: 27609 - protein, 7 aa, synthetic construct
  REGION 1..7: note = Description of Artificial Sequence: Synthetic peptide
RPLLSHE

SEQ ID NO: 27610 - protein, 7 aa, synthetic construct
  REGION 1..7: note = Description of Artificial Sequence: Synthetic peptide
FRTQSVG

SEQ ID NO: 27611 - protein, 7 aa, synthetic construct
  REGION 1..7: note = Description of Artificial Sequence: Synthetic peptide
GTEGASG

SEQ ID NO: 27612 - protein, 7 aa, synthetic construct
  REGION 1..7: note = Description of Artificial Sequence: Synthetic peptide
PSRNTSL

SEQ ID NO: 27613 - protein, 7 aa, synthetic construct
  REGION 1..7: note = Description of Artificial Sequence: Synthetic peptide
KLSQTSQ

SEQ ID NO: 27614 - protein, 7 aa, synthetic construct
  REGION 1..7: note = Description of Artificial Sequence: Synthetic peptide
NNGKVRS

SEQ ID NO: 27615 - protein, 7 aa, synthetic construct
  REGION 1..7: note = Description of Artificial Sequence: Synthetic peptide
TARGGPT

SEQ ID NO: 27616 - protein, 7 aa, synthetic construct
  REGION 1..7: note = Description of Artificial Sequence: Synthetic peptide
VRSRESP

SEQ ID NO: 27617 - protein, 7 aa, synthetic construct
  REGION 1..7: note = Description of Artificial Sequence: Synthetic peptide
NSAAAMK

SEQ ID NO: 27618 - protein, 7 aa, synthetic construct
  REGION 1..7: note = Description of Artificial Sequence: Synthetic peptide
SNMPGMV

SEQ ID NO: 27619 - protein, 7 aa, synthetic construct
  REGION 1..7: note = Description of Artificial Sequence: Synthetic peptide
RANNSQM

SEQ ID NO: 27620 - protein, 7 aa, synthetic construct
  REGION 1..7: note = Description of Artificial Sequence: Synthetic peptide
MLPQNGR

SEQ ID NO: 27621 - protein, 7 aa, synthetic construct
  REGION 1..7: note = Description of Artificial Sequence: Synthetic peptide
SSLEKSN

SEQ ID NO: 27622 - protein, 7 aa, synthetic construct
  REGION 1..7: note = Description of Artificial Sequence: Synthetic peptide
HRVDNQG

SEQ ID NO: 27623 - protein, 7 aa, synthetic construct
  REGION 1..7: note = Description of Artificial Sequence: Synthetic peptide
ATRGISS

SEQ ID NO: 27624 - protein, 7 aa, synthetic construct
  REGION 1..7: note = Description of Artificial Sequence: Synthetic peptide
QMKHLQG

SEQ ID NO: 27625 - protein, 7 aa, synthetic construct
  REGION 1..7: note = Description of Artificial Sequence: Synthetic peptide
NTSTQKI

SEQ ID NO: 27626 - protein, 7 aa, synthetic construct
  REGION 1..7: note = Description of Artificial Sequence: Synthetic peptide
MKVKLNQ

SEQ ID NO: 27627 - protein, 7 aa, synthetic construct
  REGION 1..7: note = Description of Artificial Sequence: Synthetic peptide
GPANTSG

SEQ ID NO: 27628 - protein, 7 aa, synthetic construct
  REGION 1..7: note = Description of Artificial Sequence: Synthetic peptide
QREQLLK

SEQ ID NO: 27629 - protein, 7 aa, synthetic construct
  REGION 1..7: note = Description of Artificial Sequence: Synthetic peptide
GVNRSSG

SEQ ID NO: 27630 - protein, 7 aa, synthetic construct
  REGION 1..7: note = Description of Artificial Sequence: Synthetic peptide
DPQVRAL

SEQ ID NO: 27631 - protein, 7 aa, synthetic construct
  REGION 1..7: note = Description of Artificial Sequence: Synthetic peptide
AGINSQV

SEQ ID NO: 27632 - protein, 7 aa, synthetic construct
  REGION 1..7: note = Description of Artificial Sequence: Synthetic peptide
RMSPPTG

SEQ ID NO: 27633 - protein, 7 aa, synthetic construct
  REGION 1..7: note = Description of Artificial Sequence: Synthetic peptide
VRNASSA

SEQ ID NO: 27634 - protein, 7 aa, synthetic construct
  REGION 1..7: note = Description of Artificial Sequence: Synthetic peptide
NTTPSRG

SEQ ID NO: 27635 - protein, 7 aa, synthetic construct
  REGION 1..7: note = Description of Artificial Sequence: Synthetic peptide
YVSNSNA

SEQ ID NO: 27636 - protein, 7 aa, synthetic construct
  REGION 1..7: note = Description of Artificial Sequence: Synthetic peptide
NSSHNVS

SEQ ID NO: 27637 - protein, 7 aa, synthetic construct
  REGION 1..7: note = Description of Artificial Sequence: Synthetic peptide
WSNGRTS

SEQ ID NO: 27638 - protein, 7 aa, synthetic construct
  REGION 1..7: note = Description of Artificial Sequence: Synthetic peptide
TISTRQS

SEQ ID NO: 27639 - protein, 7 aa, synthetic construct
  REGION 1..7: note = Description of Artificial Sequence: Synthetic peptide
MKGNNLS

SEQ ID NO: 27640 - protein, 7 aa, synthetic construct
  REGION 1..7: note = Description of Artificial Sequence: Synthetic peptide
PGESGKV

SEQ ID NO: 27641 - protein, 7 aa, synthetic construct
  REGION 1..7: note = Description of Artificial Sequence: Synthetic peptide
GTQKQTS

SEQ ID NO: 27642 - protein, 7 aa, synthetic construct
  REGION 1..7: note = Description of Artificial Sequence: Synthetic peptide
DTNNRAN

SEQ ID NO: 27643 - protein, 7 aa, synthetic construct
  REGION 1..7: note = Description of Artificial Sequence: Synthetic peptide
MSGGNMR

SEQ ID NO: 27644 - protein, 7 aa, synthetic construct
  REGION 1..7: note = Description of Artificial Sequence: Synthetic peptide
NGPIRNS

SEQ ID NO: 27645 - protein, 7 aa, synthetic construct
  REGION 1..7: note = Description of Artificial Sequence: Synthetic peptide
GSSDKST

SEQ ID NO: 27646 - protein, 7 aa, synthetic construct
  REGION 1..7: note = Description of Artificial Sequence: Synthetic peptide
PSQTKPS

SEQ ID NO: 27647 - protein, 7 aa, synthetic construct
  REGION 1..7: note = Description of Artificial Sequence: Synthetic peptide
SVSNTNT

SEQ ID NO: 27648 - protein, 7 aa, synthetic construct
  REGION 1..7: note = Description of Artificial Sequence: Synthetic peptide
TASGNLS

SEQ ID NO: 27649 - protein, 7 aa, synthetic construct
  REGION 1..7: note = Description of Artificial Sequence: Synthetic peptide
SYSGTLG

SEQ ID NO: 27650 - protein, 7 aa, synthetic construct
  REGION 1..7: note = Description of Artificial Sequence: Synthetic peptide
GAKPGLA

SEQ ID NO: 27651 - protein, 7 aa, synthetic construct
  REGION 1..7: note = Description of Artificial Sequence: Synthetic peptide
LKSTGTT

SEQ ID NO: 27652 - protein, 7 aa, synthetic construct
  REGION 1..7: note = Description of Artificial Sequence: Synthetic peptide
HGSRSMS

SEQ ID NO: 27653 - protein, 7 aa, synthetic construct
  REGION 1..7: note = Description of Artificial Sequence: Synthetic peptide
HSSRPLE

SEQ ID NO: 27654 - protein, 7 aa, synthetic construct
  REGION 1..7: note = Description of Artificial Sequence: Synthetic peptide
GTYGEMR

SEQ ID NO: 27655 - protein, 7 aa, synthetic construct
  REGION 1..7: note = Description of Artificial Sequence: Synthetic peptide
FNTSKLS

SEQ ID NO: 27656 - protein, 7 aa, synthetic construct
  REGION 1..7: note = Description of Artificial Sequence: Synthetic peptide
STSRDAT

SEQ ID NO: 27657 - protein, 7 aa, synthetic construct
  REGION 1..7: note = Description of Artificial Sequence: Synthetic peptide
SNRPSIV

SEQ ID NO: 27658 - protein, 7 aa, synthetic construct
  REGION 1..7: note = Description of Artificial Sequence: Synthetic peptide
GLAKDQR

SEQ ID NO: 27659 - protein, 7 aa, synthetic construct
  REGION 1..7: note = Description of Artificial Sequence: Synthetic peptide
SPRASLN

SEQ ID NO: 27660 - protein, 7 aa, synthetic construct
  REGION 1..7: note = Description of Artificial Sequence: Synthetic peptide
NGSGQNL

SEQ ID NO: 27661 - protein, 7 aa, synthetic construct
  REGION 1..7: note = Description of Artificial Sequence: Synthetic peptide
KNSSGST

SEQ ID NO: 27662 - protein, 7 aa, synthetic construct
  REGION 1..7: note = Description of Artificial Sequence: Synthetic peptide
SSPSRSS

SEQ ID NO: 27663 - protein, 7 aa, synthetic construct
  REGION 1..7: note = Description of Artificial Sequence: Synthetic peptide
KGSAGSV

SEQ ID NO: 27664 - protein, 7 aa, synthetic construct
  REGION 1..7: note = Description of Artificial Sequence: Synthetic peptide
MGPTTHK

SEQ ID NO: 27665 - protein, 7 aa, synthetic construct
  REGION 1..7: note = Description of Artificial Sequence: Synthetic peptide
DAGSRSS

SEQ ID NO: 27666 - protein, 7 aa, synthetic construct
  REGION 1..7: note = Description of Artificial Sequence: Synthetic peptide
TGERQSS

SEQ ID NO: 27667 - protein, 7 aa, synthetic construct
  REGION 1..7: note = Description of Artificial Sequence: Synthetic peptide
QNVGGIR

SEQ ID NO: 27668 - protein, 7 aa, synthetic construct
  REGION 1..7: note = Description of Artificial Sequence: Synthetic peptide
TNAKQAI

SEQ ID NO: 27669 - protein, 7 aa, synthetic construct
  REGION 1..7: note = Description of Artificial Sequence: Synthetic peptide
ATGSPSK

SEQ ID NO: 27670 - protein, 7 aa, synthetic construct
  REGION 1..7: note = Description of Artificial Sequence: Synthetic peptide
RSSNSDH

SEQ ID NO: 27671 - protein, 7 aa, synthetic construct
  REGION 1..7: note = Description of Artificial Sequence: Synthetic peptide
GTNSTRG

SEQ ID NO: 27672 - protein, 7 aa, synthetic construct
  REGION 1..7: note = Description of Artificial Sequence: Synthetic peptide
SSTRALS

SEQ ID NO: 27673 - protein, 7 aa, synthetic construct
  REGION 1..7: note = Description of Artificial Sequence: Synthetic peptide
PKLHQDR

SEQ ID NO: 27674 - protein, 7 aa, synthetic construct
  REGION 1..7: note = Description of Artificial Sequence: Synthetic peptide
DSSERIR

SEQ ID NO: 27675 - protein, 7 aa, synthetic construct
  REGION 1..7: note = Description of Artificial Sequence: Synthetic peptide
KGSNHSG

SEQ ID NO: 27676 - protein, 7 aa, synthetic construct
  REGION 1..7: note = Description of Artificial Sequence: Synthetic peptide
KTDKTVD

SEQ ID NO: 27677 - protein, 7 aa, synthetic construct
  REGION 1..7: note = Description of Artificial Sequence: Synthetic peptide
NKSNGQS

SEQ ID NO: 27678 - protein, 7 aa, synthetic construct
  REGION 1..7: note = Description of Artificial Sequence: Synthetic peptide
GPRSMSN

SEQ ID NO: 27679 - protein, 7 aa, synthetic construct
  REGION 1..7: note = Description of Artificial Sequence: Synthetic peptide
VLAGSNT

SEQ ID NO: 27680 - protein, 7 aa, synthetic construct
  REGION 1..7: note = Description of Artificial Sequence: Synthetic peptide
HDRGKNG

SEQ ID NO: 27681 - protein, 7 aa, synthetic construct
  REGION 1..7: note = Description of Artificial Sequence: Synthetic peptide
LNSRQVT

SEQ ID NO: 27682 - protein, 7 aa, synthetic construct
  REGION 1..7: note = Description of Artificial Sequence: Synthetic peptide
IQNSSNT

SEQ ID NO: 27683 - protein, 7 aa, synthetic construct
  REGION 1..7: note = Description of Artificial Sequence: Synthetic peptide
NQSAKST

SEQ ID NO: 27684 - protein, 7 aa, synthetic construct
  REGION 1..7: note = Description of Artificial Sequence: Synthetic peptide
DTATRNR

SEQ ID NO: 27685 - protein, 7 aa, synthetic construct
  REGION 1..7: note = Description of Artificial Sequence: Synthetic peptide
SRSNAMA

SEQ ID NO: 27686 - protein, 7 aa, synthetic construct
  REGION 1..7: note = Description of Artificial Sequence: Synthetic peptide
VASQRTL

SEQ ID NO: 27687 - protein, 7 aa, synthetic construct
  REGION 1..7: note = Description of Artificial Sequence: Synthetic peptide
FSQHSSN

SEQ ID NO: 27688 - protein, 7 aa, synthetic construct
  REGION 1..7: note = Description of Artificial Sequence: Synthetic peptide
MKNTTVV

SEQ ID NO: 27689 - protein, 7 aa, synthetic construct
  REGION 1..7: note = Description of Artificial Sequence: Synthetic peptide
HYTGKQN

SEQ ID NO: 27690 - protein, 7 aa, synthetic construct
  REGION 1..7: note = Description of Artificial Sequence: Synthetic peptide
YRVTQSS

SEQ ID NO: 27691 - protein, 7 aa, synthetic construct
  REGION 1..7: note = Description of Artificial Sequence: Synthetic peptide
PSQEGQQ

SEQ ID NO: 27692 - protein, 7 aa, synthetic construct
  REGION 1..7: note = Description of Artificial Sequence: Synthetic peptide
STDRSFN

SEQ ID NO: 27693 - protein, 7 aa, synthetic construct
  REGION 1..7: note = Description of Artificial Sequence: Synthetic peptide
NMDGATR

SEQ ID NO: 27694 - protein, 7 aa, synthetic construct
  REGION 1..7: note = Description of Artificial Sequence: Synthetic peptide
DGSGQNQ

SEQ ID NO: 27695 - protein, 7 aa, synthetic construct
  REGION 1..7: note = Description of Artificial Sequence: Synthetic peptide
YQANALG

SEQ ID NO: 27696 - protein, 7 aa, synthetic construct
  REGION 1..7: note = Description of Artificial Sequence: Synthetic peptide
NGSPGFY

SEQ ID NO: 27697 - protein, 7 aa, synthetic construct
  REGION 1..7: note = Description of Artificial Sequence: Synthetic peptide
RREIASS

SEQ ID NO: 27698 - protein, 7 aa, synthetic construct
  REGION 1..7: note = Description of Artificial Sequence: Synthetic peptide
FCSPVGK

SEQ ID NO: 27699 - protein, 7 aa, synthetic construct
  REGION 1..7: note = Description of Artificial Sequence: Synthetic peptide
NVCTNQI

SEQ ID NO: 27700 - protein, 7 aa, synthetic construct
  REGION 1..7: note = Description of Artificial Sequence: Synthetic peptide
ASSPQEK

SEQ ID NO: 27701 - protein, 7 aa, synthetic construct
  REGION 1..7: note = Description of Artificial Sequence: Synthetic peptide
GIHKEYL

SEQ ID NO: 27702 - protein, 7 aa, synthetic construct
  REGION 1..7: note = Description of Artificial Sequence: Synthetic peptide
GDHNRLN

SEQ ID NO: 27703 - protein, 7 aa, synthetic construct
  REGION 1..7: note = Description of Artificial Sequence: Synthetic peptide
PRDTTGS

SEQ ID NO: 27704 - protein, 7 aa, synthetic construct
  REGION 1..7: note = Description of Artificial Sequence: Synthetic peptide
GYTVGTN

SEQ ID NO: 27705 - protein, 7 aa, synthetic construct
  REGION 1..7: note = Description of Artificial Sequence: Synthetic peptide
SRVTSGG

SEQ ID NO: 27706 - protein, 7 aa, synthetic construct
  REGION 1..7: note = Description of Artificial Sequence: Synthetic peptide
ERKTSNA

SEQ ID NO: 27707 - protein, 7 aa, synthetic construct
  REGION 1..7: note = Description of Artificial Sequence: Synthetic peptide
NREKLSY

SEQ ID NO: 27708 - protein, 7 aa, synthetic construct
  REGION 1..7: note = Description of Artificial Sequence: Synthetic peptide
VSSPRQI

SEQ ID NO: 27709 - protein, 7 aa, synthetic construct
  REGION 1..7: note = Description of Artificial Sequence: Synthetic peptide
SPNANSV

SEQ ID NO: 27710 - protein, 7 aa, synthetic construct
  REGION 1..7: note = Description of Artificial Sequence: Synthetic peptide
LPITARN

SEQ ID NO: 27711 - protein, 7 aa, synthetic construct
  REGION 1..7: note = Description of Artificial Sequence: Synthetic peptide
VSKSPST

SEQ ID NO: 27712 - protein, 7 aa, synthetic construct
  REGION 1..7: note = Description of Artificial Sequence: Synthetic peptide
PLSHSNM

SEQ ID NO: 27713 - protein, 7 aa, synthetic construct
  REGION 1..7: note = Description of Artificial Sequence: Synthetic peptide
TGAQSTM

SEQ ID NO: 27714 - protein, 7 aa, synthetic construct
  REGION 1..7: note = Description of Artificial Sequence: Synthetic peptide
FVSREHT

SEQ ID NO: 27715 - protein, 7 aa, synthetic construct
  REGION 1..7: note = Description of Artificial Sequence: Synthetic peptide
IISQNGL

SEQ ID NO: 27716 - protein, 7 aa, synthetic construct
  REGION 1..7: note = Description of Artificial Sequence: Synthetic peptide
VGEAGKA

SEQ ID NO: 27717 - protein, 7 aa, synthetic construct
  REGION 1..7: note = Description of Artificial Sequence: Synthetic peptide
GGHSPNR

SEQ ID NO: 27718 - protein, 7 aa, synthetic construct
  REGION 1..7: note = Description of Artificial Sequence: Synthetic peptide
TQLGGFK

SEQ ID NO: 27719 - protein, 7 aa, synthetic construct
  REGION 1..7: note = Description of Artificial Sequence: Synthetic peptide
GKHGTNS

SEQ ID NO: 27720 - protein, 7 aa, synthetic construct
  REGION 1..7: note = Description of Artificial Sequence: Synthetic peptide
YGLHNAR

SEQ ID NO: 27721 - protein, 7 aa, synthetic construct
  REGION 1..7: note = Description of Artificial Sequence: Synthetic peptide
TISTRKS

SEQ ID NO: 27722 - protein, 7 aa, synthetic construct
  REGION 1..7: note = Description of Artificial Sequence: Synthetic peptide
LPSSIVP

SEQ ID NO: 27723 - protein, 7 aa, synthetic construct
  REGION 1..7: note = Description of Artificial Sequence: Synthetic peptide
RVQSNLK

SEQ ID NO: 27724 - protein, 7 aa, synthetic construct
  REGION 1..7: note = Description of Artificial Sequence: Synthetic peptide
PLAYENN

SEQ ID NO: 27725 - protein, 7 aa, synthetic construct
  REGION 1..7: note = Description of Artificial Sequence: Synthetic peptide
GALNSRG

SEQ ID NO: 27726 - protein, 7 aa, synthetic construct
  REGION 1..7: note = Description of Artificial Sequence: Synthetic peptide
GIATTNR

SEQ ID NO: 27727 - protein, 7 aa, synthetic construct
  REGION 1..7: note = Description of Artificial Sequence: Synthetic peptide
MRSERAA

SEQ ID NO: 27728 - protein, 7 aa, synthetic construct
  REGION 1..7: note = Description of Artificial Sequence: Synthetic peptide
PMSHVSG

SEQ ID NO: 27729 - protein, 7 aa, synthetic construct
  REGION 1..7: note = Description of Artificial Sequence: Synthetic peptide
MSARPVS

SEQ ID NO: 27730 - protein, 7 aa, synthetic construct
  REGION 1..7: note = Description of Artificial Sequence: Synthetic peptide
RDHSGSR

SEQ ID NO: 27731 - protein, 7 aa, synthetic construct
  REGION 1..7: note = Description of Artificial Sequence: Synthetic peptide
LTATNPR

SEQ ID NO: 27732 - protein, 7 aa, synthetic construct
  REGION 1..7: note = Description of Artificial Sequence: Synthetic peptide
NMRASTE

SEQ ID NO: 27733 - protein, 7 aa, synthetic construct
  REGION 1..7: note = Description of Artificial Sequence: Synthetic peptide
KGTPGHS

SEQ ID NO: 27734 - protein, 7 aa, synthetic construct
  REGION 1..7: note = Description of Artificial Sequence: Synthetic peptide
ESRKSVS

SEQ ID NO: 27735 - protein, 7 aa, synthetic construct
  REGION 1..7: note = Description of Artificial Sequence: Synthetic peptide
PADRTHI

SEQ ID NO: 27736 - protein, 7 aa, synthetic construct
  REGION 1..7: note = Description of Artificial Sequence: Synthetic peptide
RSTDPHG

SEQ ID NO: 27737 - protein, 7 aa, synthetic construct
  REGION 1..7: note = Description of Artificial Sequence: Synthetic peptide
RSASGQL

SEQ ID NO: 27738 - protein, 7 aa, synthetic construct
  REGION 1..7: note = Description of Artificial Sequence: Synthetic peptide
GASGKIG

SEQ ID NO: 27739 - protein, 7 aa, synthetic construct
  REGION 1..7: note = Description of Artificial Sequence: Synthetic peptide
HSTRSSL

SEQ ID NO: 27740 - protein, 7 aa, synthetic construct
  REGION 1..7: note = Description of Artificial Sequence: Synthetic peptide
GMSSPHI

SEQ ID NO: 27741 - protein, 7 aa, synthetic construct
  REGION 1..7: note = Description of Artificial Sequence: Synthetic peptide
RSSGGLT

SEQ ID NO: 27742 - protein, 7 aa, synthetic construct
  REGION 1..7: note = Description of Artificial Sequence: Synthetic peptide
NGATKNS

SEQ ID NO: 27743 - protein, 7 aa, synthetic construct
  REGION 1..7: note = Description of Artificial Sequence: Synthetic peptide
NGSVQNQ

SEQ ID NO: 27744 - protein, 7 aa, synthetic construct
  REGION 1..7: note = Description of Artificial Sequence: Synthetic peptide
TTDKSRL

SEQ ID NO: 27745 - protein, 7 aa, synthetic construct
  REGION 1..7: note = Description of Artificial Sequence: Synthetic peptide
SRSPGTS

SEQ ID NO: 27746 - protein, 7 aa, synthetic construct
  REGION 1..7: note = Description of Artificial Sequence: Synthetic peptide
SFTKGAG

SEQ ID NO: 27747 - protein, 7 aa, synthetic construct
  REGION 1..7: note = Description of Artificial Sequence: Synthetic peptide
NVTTPLI

SEQ ID NO: 27748 - protein, 7 aa, synthetic construct
  REGION 1..7: note = Description of Artificial Sequence: Synthetic peptide
TLGQAVR

SEQ ID NO: 27749 - protein, 7 aa, synthetic construct
  REGION 1..7: note = Description of Artificial Sequence: Synthetic peptide
STTTASS

SEQ ID NO: 27750 - protein, 7 aa, synthetic construct
  REGION 1..7: note = Description of Artificial Sequence: Synthetic peptide
SGTIGQV

SEQ ID NO: 27751 - protein, 7 aa, synthetic construct
  REGION 1..7: note = Description of Artificial Sequence: Synthetic peptide
PSTERNR

SEQ ID NO: 27752 - protein, 7 aa, synthetic construct
  REGION 1..7: note = Description of Artificial Sequence: Synthetic peptide
LLTSPNS

SEQ ID NO: 27753 - protein, 7 aa, synthetic construct
  REGION 1..7: note = Description of Artificial Sequence: Synthetic peptide
SRDSSIH

SEQ ID NO: 27754 - protein, 7 aa, synthetic construct
  REGION 1..7: note = Description of Artificial Sequence: Synthetic peptide
NLASSSY

SEQ ID NO: 27755 - protein, 7 aa, synthetic construct
  REGION 1..7: note = Description of Artificial Sequence: Synthetic peptide
LRAGTVR

SEQ ID NO: 27756 - protein, 7 aa, synthetic construct
  REGION 1..7: note = Description of Artificial Sequence: Synthetic peptide
MVSGKSY

SEQ ID NO: 27757 - protein, 7 aa, synthetic construct
  REGION 1..7: note = Description of Artificial Sequence: Synthetic peptide
VPSTAGK

SEQ ID NO: 27758 - protein, 7 aa, synthetic construct
  REGION 1..7: note = Description of Artificial Sequence: Synthetic peptide
GFSRPNT

SEQ ID NO: 27759 - protein, 7 aa, synthetic construct
  REGION 1..7: note = Description of Artificial Sequence: Synthetic peptide
QVGRPNA

SEQ ID NO: 27760 - protein, 7 aa, synthetic construct
  REGION 1..7: note = Description of Artificial Sequence: Synthetic peptide
DTARPTK

SEQ ID NO: 27761 - protein, 7 aa, synthetic construct
  REGION 1..7: note = Description of Artificial Sequence: Synthetic peptide
RLDGLSR

SEQ ID NO: 27762 - protein, 7 aa, synthetic construct
  REGION 1..7: note = Description of Artificial Sequence: Synthetic peptide
DRHNTTS

SEQ ID NO: 27763 - protein, 7 aa, synthetic construct
  REGION 1..7: note = Description of Artificial Sequence: Synthetic peptide
YAKDQQS

SEQ ID NO: 27764 - protein, 7 aa, synthetic construct
  REGION 1..7: note = Description of Artificial Sequence: Synthetic peptide
NSTPSTR

SEQ ID NO: 27765 - protein, 7 aa, synthetic construct
  REGION 1..7: note = Description of Artificial Sequence: Synthetic peptide
APLQSNL

SEQ ID NO: 27766 - protein, 7 aa, synthetic construct
  REGION 1..7: note = Description of Artificial Sequence: Synthetic peptide
EGISSIS

SEQ ID NO: 27767 - protein, 7 aa, synthetic construct
  REGION 1..7: note = Description of Artificial Sequence: Synthetic peptide
QSLTRTH

SEQ ID NO: 27768 - protein, 7 aa, synthetic construct
  REGION 1..7: note = Description of Artificial Sequence: Synthetic peptide
VVSATGT

SEQ ID NO: 27769 - protein, 7 aa, synthetic construct
  REGION 1..7: note = Description of Artificial Sequence: Synthetic peptide
RNGAMSN

SEQ ID NO: 27770 - protein, 7 aa, synthetic construct
  REGION 1..7: note = Description of Artificial Sequence: Synthetic peptide
QLNHSAK

SEQ ID NO: 27771 - protein, 7 aa, synthetic construct
  REGION 1..7: note = Description of Artificial Sequence: Synthetic peptide
SFTGNTV

SEQ ID NO: 27772 - protein, 7 aa, synthetic construct
  REGION 1..7: note = Description of Artificial Sequence: Synthetic peptide
RDTKSGM

SEQ ID NO: 27773 - protein, 7 aa, synthetic construct
  REGION 1..7: note = Description of Artificial Sequence: Synthetic peptide
DSRSIKG

SEQ ID NO: 27774 - protein, 7 aa, synthetic construct
  REGION 1..7: note = Description of Artificial Sequence: Synthetic peptide
SHGPQIT

SEQ ID NO: 27775 - protein, 7 aa, synthetic construct
  REGION 1..7: note = Description of Artificial Sequence: Synthetic peptide
IVSPVSK

SEQ ID NO: 27776 - protein, 7 aa, synthetic construct
  REGION 1..7: note = Description of Artificial Sequence: Synthetic peptide
GSPNHSS

SEQ ID NO: 27777 - protein, 7 aa, synthetic construct
  REGION 1..7: note = Description of Artificial Sequence: Synthetic peptide
SPLLDYK

SEQ ID NO: 27778 - protein, 7 aa, synthetic construct
  REGION 1..7: note = Description of Artificial Sequence: Synthetic peptide
RMQPSGN

SEQ ID NO: 27779 - protein, 7 aa, synthetic construct
  REGION 1..7: note = Description of Artificial Sequence: Synthetic peptide
PGPEVGR

SEQ ID NO: 27780 - protein, 7 aa, synthetic construct
  REGION 1..7: note = Description of Artificial Sequence: Synthetic peptide
STPSNVL

SEQ ID NO: 27781 - protein, 7 aa, synthetic construct
  REGION 1..7: note = Description of Artificial Sequence: Synthetic peptide
SNSGRGM

SEQ ID NO: 27782 - protein, 7 aa, synthetic construct
  REGION 1..7: note = Description of Artificial Sequence: Synthetic peptide
ALSSPAN

SEQ ID NO: 27783 - protein, 7 aa, synthetic construct
  REGION 1..7: note = Description of Artificial Sequence: Synthetic peptide
LGETSMR

SEQ ID NO: 27784 - protein, 7 aa, synthetic construct
  REGION 1..7: note = Description of Artificial Sequence: Synthetic peptide
LISSKSS

SEQ ID NO: 27785 - protein, 7 aa, synthetic construct
  REGION 1..7: note = Description of Artificial Sequence: Synthetic peptide
PVRPANL

SEQ ID NO: 27786 - protein, 7 aa, synthetic construct
  REGION 1..7: note = Description of Artificial Sequence: Synthetic peptide
GIQPGSN

SEQ ID NO: 27787 - protein, 7 aa, synthetic construct
  REGION 1..7: note = Description of Artificial Sequence: Synthetic peptide
MNSGPKV

SEQ ID NO: 27788 - protein, 7 aa, synthetic construct
  REGION 1..7: note = Description of Artificial Sequence: Synthetic peptide
LISTAQR

SEQ ID NO: 27789 - protein, 7 aa, synthetic construct
  REGION 1..7: note = Description of Artificial Sequence: Synthetic peptide
SSDLGKR

SEQ ID NO: 27790 - protein, 7 aa, synthetic construct
  REGION 1..7: note = Description of Artificial Sequence: Synthetic peptide
DIGNPTN

SEQ ID NO: 27791 - protein, 7 aa, synthetic construct
  REGION 1..7: note = Description of Artificial Sequence: Synthetic peptide
SGINNPP

SEQ ID NO: 27792 - protein, 7 aa, synthetic construct
  REGION 1..7: note = Description of Artificial Sequence: Synthetic peptide
SSPSKMA

SEQ ID NO: 27793 - protein, 7 aa, synthetic construct
  REGION 1..7: note = Description of Artificial Sequence: Synthetic peptide
GRDNSRQ

SEQ ID NO: 27794 - protein, 7 aa, synthetic construct
  REGION 1..7: note = Description of Artificial Sequence: Synthetic peptide
MSLPGQR

SEQ ID NO: 27795 - protein, 7 aa, synthetic construct
  REGION 1..7: note = Description of Artificial Sequence: Synthetic peptide
SVDQRRL

SEQ ID NO: 27796 - protein, 7 aa, synthetic construct
  REGION 1..7: note = Description of Artificial Sequence: Synthetic peptide
GVRSVAG

SEQ ID NO: 27797 - protein, 7 aa, synthetic construct
  REGION 1..7: note = Description of Artificial Sequence: Synthetic peptide
SDQVRSA

SEQ ID NO: 27798 - protein, 7 aa, synthetic construct
  REGION 1..7: note = Description of Artificial Sequence: Synthetic peptide
KRMDKSS

SEQ ID NO: 27799 - protein, 7 aa, synthetic construct
  REGION 1..7: note = Description of Artificial Sequence: Synthetic peptide
HSGTRTS

SEQ ID NO: 27800 - protein, 7 aa, synthetic construct
  REGION 1..7: note = Description of Artificial Sequence: Synthetic peptide
MPHPSSK

SEQ ID NO: 27801 - protein, 7 aa, synthetic construct
  REGION 1..7: note = Description of Artificial Sequence: Synthetic peptide
AGASSNT

SEQ ID NO: 27802 - protein, 7 aa, synthetic construct
  REGION 1..7: note = Description of Artificial Sequence: Synthetic peptide
PSNKTNS

SEQ ID NO: 27803 - protein, 7 aa, synthetic construct
  REGION 1..7: note = Description of Artificial Sequence: Synthetic peptide
SNVSKPQ

SEQ ID NO: 27804 - protein, 7 aa, synthetic construct
  REGION 1..7: note = Description of Artificial Sequence: Synthetic peptide
YNVNRNT

SEQ ID NO: 27805 - protein, 7 aa, synthetic construct
  REGION 1..7: note = Description of Artificial Sequence: Synthetic peptide
PHSTGSI

SEQ ID NO: 27806 - protein, 7 aa, synthetic construct
  REGION 1..7: note = Description of Artificial Sequence: Synthetic peptide
PRSNTQR

SEQ ID NO: 27807 - protein, 7 aa, synthetic construct
  REGION 1..7: note = Description of Artificial Sequence: Synthetic peptide
HGQTGMI

SEQ ID NO: 27808 - protein, 7 aa, synthetic construct
  REGION 1..7: note = Description of Artificial Sequence: Synthetic peptide
HGVNKTE

SEQ ID NO: 27809 - protein, 7 aa, synthetic construct
  REGION 1..7: note = Description of Artificial Sequence: Synthetic peptide
FSTIKGV

SEQ ID NO: 27810 - protein, 7 aa, synthetic construct
  REGION 1..7: note = Description of Artificial Sequence: Synthetic peptide
NGSGQNE

SEQ ID NO: 27811 - protein, 7 aa, synthetic construct
  REGION 1..7: note = Description of Artificial Sequence: Synthetic peptide
RLSSRDS

SEQ ID NO: 27812 - protein, 7 aa, synthetic construct
  REGION 1..7: note = Description of Artificial Sequence: Synthetic peptide
CHAREHI

SEQ ID NO: 27813 - protein, 7 aa, synthetic construct
  REGION 1..7: note = Description of Artificial Sequence: Synthetic peptide
MRTSSFY

SEQ ID NO: 27814 - protein, 7 aa, synthetic construct
  REGION 1..7: note = Description of Artificial Sequence: Synthetic peptide
VSGRPTG

SEQ ID NO: 27815 - protein, 7 aa, synthetic construct
  REGION 1..7: note = Description of Artificial Sequence: Synthetic peptide
GITKNLA

SEQ ID NO: 27816 - protein, 7 aa, synthetic construct
  REGION 1..7: note = Description of Artificial Sequence: Synthetic peptide
VRIPKSN

SEQ ID NO: 27817 - protein, 7 aa, synthetic construct
  REGION 1..7: note = Description of Artificial Sequence: Synthetic peptide
QNLPKAS

SEQ ID NO: 27818 - protein, 7 aa, synthetic construct
  REGION 1..7: note = Description of Artificial Sequence: Synthetic peptide
LRATSGN

SEQ ID NO: 27819 - protein, 7 aa, synthetic construct
  REGION 1..7: note = Description of Artificial Sequence: Synthetic peptide
VSGSKVG

SEQ ID NO: 27820 - protein, 7 aa, synthetic construct
  REGION 1..7: note = Description of Artificial Sequence: Synthetic peptide
RSGNATI

SEQ ID NO: 27821 - protein, 7 aa, synthetic construct
  REGION 1..7: note = Description of Artificial Sequence: Synthetic peptide
AEKTRSL

SEQ ID NO: 27822 - protein, 7 aa, synthetic construct
  REGION 1..7: note = Description of Artificial Sequence: Synthetic peptide
GGHKSLN

SEQ ID NO: 27823 - protein, 7 aa, synthetic construct
  REGION 1..7: note = Description of Artificial Sequence: Synthetic peptide
VGDRSWS

SEQ ID NO: 27824 - protein, 7 aa, synthetic construct
  REGION 1..7: note = Description of Artificial Sequence: Synthetic peptide
RDSTAAR

SEQ ID NO: 27825 - protein, 7 aa, synthetic construct
  REGION 1..7: note = Description of Artificial Sequence: Synthetic peptide
MAPRTVP

SEQ ID NO: 27826 - protein, 7 aa, synthetic construct
  REGION 1..7: note = Description of Artificial Sequence: Synthetic peptide
LLGDTKP

SEQ ID NO: 27827 - protein, 7 aa, synthetic construct
  REGION 1..7: note = Description of Artificial Sequence: Synthetic peptide
DSHLVDK

SEQ ID NO: 27828 - protein, 7 aa, synthetic construct
  REGION 1..7: note = Description of Artificial Sequence: Synthetic peptide
RSTNTDN

SEQ ID NO: 27829 - protein, 7 aa, synthetic construct
  REGION 1..7: note = Description of Artificial Sequence: Synthetic peptide
SSFQANK

SEQ ID NO: 27830 - protein, 7 aa, synthetic construct
  REGION 1..7: note = Description of Artificial Sequence: Synthetic peptide
PTSNGSL

SEQ ID NO: 27831 - protein, 7 aa, synthetic construct
  REGION 1..7: note = Description of Artificial Sequence: Synthetic peptide
LSANPHN

SEQ ID NO: 27832 - protein, 7 aa, synthetic construct
  REGION 1..7: note = Description of Artificial Sequence: Synthetic peptide
QPNSGTT

SEQ ID NO: 27833 - protein, 7 aa, synthetic construct
  REGION 1..7: note = Description of Artificial Sequence: Synthetic peptide
ATANTHM

SEQ ID NO: 27834 - protein, 7 aa, synthetic construct
  REGION 1..7: note = Description of Artificial Sequence: Synthetic peptide
PYAGTSP

SEQ ID NO: 27835 - protein, 7 aa, synthetic construct
  REGION 1..7: note = Description of Artificial Sequence: Synthetic peptide
PLGSRVN

SEQ ID NO: 27836 - protein, 7 aa, synthetic construct
  REGION 1..7: note = Description of Artificial Sequence: Synthetic peptide
VNTNRAA

SEQ ID NO: 27837 - protein, 7 aa, synthetic construct
  REGION 1..7: note = Description of Artificial Sequence: Synthetic peptide
SPNSHPS

SEQ ID NO: 27838 - protein, 7 aa, synthetic construct
  REGION 1..7: note = Description of Artificial Sequence: Synthetic peptide
SLNSREG

SEQ ID NO: 27839 - protein, 7 aa, synthetic construct
  REGION 1..7: note = Description of Artificial Sequence: Synthetic peptide
CNQSPNR

SEQ ID NO: 27840 - protein, 7 aa, synthetic construct
  REGION 1..7: note = Description of Artificial Sequence: Synthetic peptide
SFDSKPP

SEQ ID NO: 27841 - protein, 7 aa, synthetic construct
  REGION 1..7: note = Description of Artificial Sequence: Synthetic peptide
PNGGIPP

SEQ ID NO: 27842 - protein, 7 aa, synthetic construct
  REGION 1..7: note = Description of Artificial Sequence: Synthetic peptide
QGSFNAL

SEQ ID NO: 27843 - protein, 7 aa, synthetic construct
  REGION 1..7: note = Description of Artificial Sequence: Synthetic peptide
HTDTSAV

SEQ ID NO: 27844 - protein, 7 aa, synthetic construct
  REGION 1..7: note = Description of Artificial Sequence: Synthetic peptide
LLDRRAA

SEQ ID NO: 27845 - protein, 7 aa, synthetic construct
  REGION 1..7: note = Description of Artificial Sequence: Synthetic peptide
RLETKSG

SEQ ID NO: 27846 - protein, 7 aa, synthetic construct
  REGION 1..7: note = Description of Artificial Sequence: Synthetic peptide
VADKGSM

SEQ ID NO: 27847 - protein, 7 aa, synthetic construct
  REGION 1..7: note = Description of Artificial Sequence: Synthetic peptide
SMLPGDN

SEQ ID NO: 27848 - protein, 7 aa, synthetic construct
  REGION 1..7: note = Description of Artificial Sequence: Synthetic peptide
CATRASY

SEQ ID NO: 27849 - protein, 7 aa, synthetic construct
  REGION 1..7: note = Description of Artificial Sequence: Synthetic peptide
QTPVSAP

SEQ ID NO: 27850 - protein, 7 aa, synthetic construct
  REGION 1..7: note = Description of Artificial Sequence: Synthetic peptide
TESRSAN

SEQ ID NO: 27851 - protein, 7 aa, synthetic construct
  REGION 1..7: note = Description of Artificial Sequence: Synthetic peptide
NSVKTPE

SEQ ID NO: 27852 - protein, 7 aa, synthetic construct
  REGION 1..7: note = Description of Artificial Sequence: Synthetic peptide
PTSFSGT

SEQ ID NO: 27853 - protein, 7 aa, synthetic construct
  REGION 1..7: note = Description of Artificial Sequence: Synthetic peptide
NTSSSHT

SEQ ID NO: 27854 - protein, 7 aa, synthetic construct
  REGION 1..7: note = Description of Artificial Sequence: Synthetic peptide
PILDRKS

SEQ ID NO: 27855 - protein, 7 aa, synthetic construct
  REGION 1..7: note = Description of Artificial Sequence: Synthetic peptide
RTSTSLL

SEQ ID NO: 27856 - protein, 7 aa, synthetic construct
  REGION 1..7: note = Description of Artificial Sequence: Synthetic peptide
TTSARPN

SEQ ID NO: 27857 - protein, 7 aa, synthetic construct
  REGION 1..7: note = Description of Artificial Sequence: Synthetic peptide
LSQGRMV

SEQ ID NO: 27858 - protein, 7 aa, synthetic construct
  REGION 1..7: note = Description of Artificial Sequence: Synthetic peptide
NQSRPGV

SEQ ID NO: 27859 - protein, 7 aa, synthetic construct
  REGION 1..7: note = Description of Artificial Sequence: Synthetic peptide
TEQARAM

SEQ ID NO: 27860 - protein, 7 aa, synthetic construct
  REGION 1..7: note = Description of Artificial Sequence: Synthetic peptide
GSSLTSR

SEQ ID NO: 27861 - protein, 7 aa, synthetic construct
  REGION 1..7: note = Description of Artificial Sequence: Synthetic peptide
RDRPQST

SEQ ID NO: 27862 - protein, 7 aa, synthetic construct
  REGION 1..7: note = Description of Artificial Sequence: Synthetic peptide
GSGSRLI

SEQ ID NO: 27863 - protein, 7 aa, synthetic construct
  REGION 1..7: note = Description of Artificial Sequence: Synthetic peptide
GDMGISK

SEQ ID NO: 27864 - protein, 7 aa, synthetic construct
  REGION 1..7: note = Description of Artificial Sequence: Synthetic peptide
VSGQGNS

SEQ ID NO: 27865 - protein, 7 aa, synthetic construct
  REGION 1..7: note = Description of Artificial Sequence: Synthetic peptide
ISTPKTA

SEQ ID NO: 27866 - protein, 7 aa, synthetic construct
  REGION 1..7: note = Description of Artificial Sequence: Synthetic peptide
GPGRNLI

SEQ ID NO: 27867 - protein, 7 aa, synthetic construct
  REGION 1..7: note = Description of Artificial Sequence: Synthetic peptide
IATKAVA

SEQ ID NO: 27868 - protein, 7 aa, synthetic construct
  REGION 1..7: note = Description of Artificial Sequence: Synthetic peptide
PPLGSTV

SEQ ID NO: 27869 - protein, 7 aa, synthetic construct
  REGION 1..7: note = Description of Artificial Sequence: Synthetic peptide
GASTPRL

SEQ ID NO: 27870 - protein, 7 aa, synthetic construct
  REGION 1..7: note = Description of Artificial Sequence: Synthetic peptide
TSSGGLT

SEQ ID NO: 27871 - protein, 7 aa, synthetic construct
  REGION 1..7: note = Description of Artificial Sequence: Synthetic peptide
QSDHRSL

SEQ ID NO: 27872 - protein, 7 aa, synthetic construct
  REGION 1..7: note = Description of Artificial Sequence: Synthetic peptide
YRNTTSA

SEQ ID NO: 27873 - protein, 7 aa, synthetic construct
  REGION 1..7: note = Description of Artificial Sequence: Synthetic peptide
AMTGSHT

SEQ ID NO: 27874 - protein, 7 aa, synthetic construct
  REGION 1..7: note = Description of Artificial Sequence: Synthetic peptide
NQSSSAR

SEQ ID NO: 27875 - protein, 7 aa, synthetic construct
  REGION 1..7: note = Description of Artificial Sequence: Synthetic peptide
VQQSKAY

SEQ ID NO: 27876 - protein, 7 aa, synthetic construct
  REGION 1..7: note = Description of Artificial Sequence: Synthetic peptide
TGTQGTR

SEQ ID NO: 27877 - protein, 7 aa, synthetic construct
  REGION 1..7: note = Description of Artificial Sequence: Synthetic peptide
GSRNTST

SEQ ID NO: 27878 - protein, 7 aa, synthetic construct
  REGION 1..7: note = Description of Artificial Sequence: Synthetic peptide
PGMKVSP

SEQ ID NO: 27879 - protein, 7 aa, synthetic construct
  REGION 1..7: note = Description of Artificial Sequence: Synthetic peptide
TLENSRR

SEQ ID NO: 27880 - protein, 7 aa, synthetic construct
  REGION 1..7: note = Description of Artificial Sequence: Synthetic peptide
QITPRSG

SEQ ID NO: 27881 - protein, 7 aa, synthetic construct
  REGION 1..7: note = Description of Artificial Sequence: Synthetic peptide
RSATSSV

SEQ ID NO: 27882 - protein, 7 aa, synthetic construct
  REGION 1..7: note = Description of Artificial Sequence: Synthetic peptide
YQKERVV

SEQ ID NO: 27883 - protein, 7 aa, synthetic construct
  REGION 1..7: note = Description of Artificial Sequence: Synthetic peptide
LRSAPSI

SEQ ID NO: 27884 - protein, 7 aa, synthetic construct
  REGION 1..7: note = Description of Artificial Sequence: Synthetic peptide
PPAVGSS

SEQ ID NO: 27885 - protein, 7 aa, synthetic construct
  REGION 1..7: note = Description of Artificial Sequence: Synthetic peptide
SSRGGNT

SEQ ID NO: 27886 - protein, 7 aa, synthetic construct
  REGION 1..7: note = Description of Artificial Sequence: Synthetic peptide
LQRAPQT

SEQ ID NO: 27887 - protein, 7 aa, synthetic construct
  REGION 1..7: note = Description of Artificial Sequence: Synthetic peptide
AGTGSSL

SEQ ID NO: 27888 - protein, 7 aa, synthetic construct
  REGION 1..7: note = Description of Artificial Sequence: Synthetic peptide
NHESSYR

SEQ ID NO: 27889 - protein, 7 aa, synthetic construct
  REGION 1..7: note = Description of Artificial Sequence: Synthetic peptide
LGTSHQQ

SEQ ID NO: 27890 - protein, 7 aa, synthetic construct
  REGION 1..7: note = Description of Artificial Sequence: Synthetic peptide
PITRSLL

SEQ ID NO: 27891 - protein, 7 aa, synthetic construct
  REGION 1..7: note = Description of Artificial Sequence: Synthetic peptide
VQHTHSG

SEQ ID NO: 27892 - protein, 7 aa, synthetic construct
  REGION 1..7: note = Description of Artificial Sequence: Synthetic peptide
PLPAHSP

SEQ ID NO: 27893 - protein, 7 aa, synthetic construct
  REGION 1..7: note = Description of Artificial Sequence: Synthetic peptide
IIQDTAR

SEQ ID NO: 27894 - protein, 7 aa, synthetic construct
  REGION 1..7: note = Description of Artificial Sequence: Synthetic peptide
PSLNKNY

SEQ ID NO: 27895 - protein, 7 aa, synthetic construct
  REGION 1..7: note = Description of Artificial Sequence: Synthetic peptide
PRLNVGG

SEQ ID NO: 27896 - protein, 7 aa, synthetic construct
  REGION 1..7: note = Description of Artificial Sequence: Synthetic peptide
TNPNPHR

SEQ ID NO: 27897 - protein, 7 aa, synthetic construct
  REGION 1..7: note = Description of Artificial Sequence: Synthetic peptide
NREQLRD

SEQ ID NO: 27898 - protein, 7 aa, synthetic construct
  REGION 1..7: note = Description of Artificial Sequence: Synthetic peptide
SMGHTLN

SEQ ID NO: 27899 - protein, 7 aa, synthetic construct
  REGION 1..7: note = Description of Artificial Sequence: Synthetic peptide
APTSGPS

SEQ ID NO: 27900 - protein, 7 aa, synthetic construct
  REGION 1..7: note = Description of Artificial Sequence: Synthetic peptide
QSSNARN

SEQ ID NO: 27901 - protein, 7 aa, synthetic construct
  REGION 1..7: note = Description of Artificial Sequence: Synthetic peptide
KQHNTLG

SEQ ID NO: 27902 - protein, 7 aa, synthetic construct
  REGION 1..7: note = Description of Artificial Sequence: Synthetic peptide
SPGTNTS

SEQ ID NO: 27903 - protein, 7 aa, synthetic construct
  REGION 1..7: note = Description of Artificial Sequence: Synthetic peptide
TQRSQAA

SEQ ID NO: 27904 - protein, 7 aa, synthetic construct
  REGION 1..7: note = Description of Artificial Sequence: Synthetic peptide
DITRGPS

SEQ ID NO: 27905 - protein, 7 aa, synthetic construct
  REGION 1..7: note = Description of Artificial Sequence: Synthetic peptide
VQPRTST

SEQ ID NO: 27906 - protein, 7 aa, synthetic construct
  REGION 1..7: note = Description of Artificial Sequence: Synthetic peptide
DTRGQMR

SEQ ID NO: 27907 - protein, 7 aa, synthetic construct
  REGION 1..7: note = Description of Artificial Sequence: Synthetic peptide
IRTKESA

SEQ ID NO: 27908 - protein, 7 aa, synthetic construct
  REGION 1..7: note = Description of Artificial Sequence: Synthetic peptide
VSVDKRP

SEQ ID NO: 27909 - protein, 7 aa, synthetic construct
  REGION 1..7: note = Description of Artificial Sequence: Synthetic peptide
PTHASSL

SEQ ID NO: 27910 - protein, 7 aa, synthetic construct
  REGION 1..7: note = Description of Artificial Sequence: Synthetic peptide
HATQSRN

SEQ ID NO: 27911 - protein, 7 aa, synthetic construct
  REGION 1..7: note = Description of Artificial Sequence: Synthetic peptide
GLARAGH

SEQ ID NO: 27912 - protein, 7 aa, synthetic construct
  REGION 1..7: note = Description of Artificial Sequence: Synthetic peptide
HASPSTR

SEQ ID NO: 27913 - protein, 7 aa, synthetic construct
  REGION 1..7: note = Description of Artificial Sequence: Synthetic peptide
GNRQGMG

SEQ ID NO: 27914 - protein, 7 aa, synthetic construct
  REGION 1..7: note = Description of Artificial Sequence: Synthetic peptide
MSTSSKS

SEQ ID NO: 27915 - protein, 7 aa, synthetic construct
  REGION 1..7: note = Description of Artificial Sequence: Synthetic peptide
SANNKSG

SEQ ID NO: 27916 - protein, 7 aa, synthetic construct
  REGION 1..7: note = Description of Artificial Sequence: Synthetic peptide
SQHRPSS

SEQ ID NO: 27917 - protein, 7 aa, synthetic construct
  REGION 1..7: note = Description of Artificial Sequence: Synthetic peptide
TPQNVRN

SEQ ID NO: 27918 - protein, 7 aa, synthetic construct
  REGION 1..7: note = Description of Artificial Sequence: Synthetic peptide
TPVNRTH

SEQ ID NO: 27919 - protein, 7 aa, synthetic construct
  REGION 1..7: note = Description of Artificial Sequence: Synthetic peptide
LTPSKIG

SEQ ID NO: 27920 - protein, 7 aa, synthetic construct
  REGION 1..7: note = Description of Artificial Sequence: Synthetic peptide
VPHGATS

SEQ ID NO: 27921 - protein, 7 aa, synthetic construct
  REGION 1..7: note = Description of Artificial Sequence: Synthetic peptide
SGRDKFS

SEQ ID NO: 27922 - protein, 7 aa, synthetic construct
  REGION 1..7: note = Description of Artificial Sequence: Synthetic peptide
RGDPHRA

SEQ ID NO: 27923 - protein, 7 aa, synthetic construct
  REGION 1..7: note = Description of Artificial Sequence: Synthetic peptide
PGNSHKI

SEQ ID NO: 27924 - protein, 7 aa, synthetic construct
  REGION 1..7: note = Description of Artificial Sequence: Synthetic peptide
NPAHGLN

SEQ ID NO: 27925 - protein, 7 aa, synthetic construct
  REGION 1..7: note = Description of Artificial Sequence: Synthetic peptide
RTASSLP

SEQ ID NO: 27926 - protein, 7 aa, synthetic construct
  REGION 1..7: note = Description of Artificial Sequence: Synthetic peptide
RRQDTQE

SEQ ID NO: 27927 - protein, 7 aa, synthetic construct
  REGION 1..7: note = Description of Artificial Sequence: Synthetic peptide
GSEHKKQ

SEQ ID NO: 27928 - protein, 7 aa, synthetic construct
  REGION 1..7: note = Description of Artificial Sequence: Synthetic peptide
VNEHNVR

SEQ ID NO: 27929 - protein, 7 aa, synthetic construct
  REGION 1..7: note = Description of Artificial Sequence: Synthetic peptide
PEPAARN

SEQ ID NO: 27930 - protein, 7 aa, synthetic construct
  REGION 1..7: note = Description of Artificial Sequence: Synthetic peptide
HYNQTGL

SEQ ID NO: 27931 - protein, 7 aa, synthetic construct
  REGION 1..7: note = Description of Artificial Sequence: Synthetic peptide
SHQTPGY

SEQ ID NO: 27932 - protein, 7 aa, synthetic construct
  REGION 1..7: note = Description of Artificial Sequence: Synthetic peptide
SLSSKQM

SEQ ID NO: 27933 - protein, 7 aa, synthetic construct
  REGION 1..7: note = Description of Artificial Sequence: Synthetic peptide
NAQGTAK

SEQ ID NO: 27934 - protein, 7 aa, synthetic construct
  REGION 1..7: note = Description of Artificial Sequence: Synthetic peptide
VTGSVSD

SEQ ID NO: 27935 - protein, 7 aa, synthetic construct
  REGION 1..7: note = Description of Artificial Sequence: Synthetic peptide
PGQSTSK

SEQ ID NO: 27936 - protein, 7 aa, synthetic construct
  REGION 1..7: note = Description of Artificial Sequence: Synthetic peptide
VLDTKDC

SEQ ID NO: 27937 - protein, 7 aa, synthetic construct
  REGION 1..7: note = Description of Artificial Sequence: Synthetic peptide
TGGNRVL

SEQ ID NO: 27938 - protein, 7 aa, synthetic construct
  REGION 1..7: note = Description of Artificial Sequence: Synthetic peptide
VSNKSVL

SEQ ID NO: 27939 - protein, 7 aa, synthetic construct
  REGION 1..7: note = Description of Artificial Sequence: Synthetic peptide
NHRANLI

SEQ ID NO: 27940 - protein, 7 aa, synthetic construct
  REGION 1..7: note = Description of Artificial Sequence: Synthetic peptide
HVNSGKL

SEQ ID NO: 27941 - protein, 7 aa, synthetic construct
  REGION 1..7: note = Description of Artificial Sequence: Synthetic peptide
QQFGTLK

SEQ ID NO: 27942 - protein, 7 aa, synthetic construct
  REGION 1..7: note = Description of Artificial Sequence: Synthetic peptide
WQEERGQ

SEQ ID NO: 27943 - protein, 7 aa, synthetic construct
  REGION 1..7: note = Description of Artificial Sequence: Synthetic peptide
FTIPRAA

SEQ ID NO: 27944 - protein, 7 aa, synthetic construct
  REGION 1..7: note = Description of Artificial Sequence: Synthetic peptide
QGKSGEQ

SEQ ID NO: 27945 - protein, 7 aa, synthetic construct
  REGION 1..7: note = Description of Artificial Sequence: Synthetic peptide
TGTSGSR

SEQ ID NO: 27946 - protein, 7 aa, synthetic construct
  REGION 1..7: note = Description of Artificial Sequence: Synthetic peptide
TTSKGGI

SEQ ID NO: 27947 - protein, 7 aa, synthetic construct
  REGION 1..7: note = Description of Artificial Sequence: Synthetic peptide
KPATPNG

SEQ ID NO: 27948 - protein, 7 aa, synthetic construct
  REGION 1..7: note = Description of Artificial Sequence: Synthetic peptide
QNTNAAI

SEQ ID NO: 27949 - protein, 7 aa, synthetic construct
  REGION 1..7: note = Description of Artificial Sequence: Synthetic peptide
NSHNGAS

SEQ ID NO: 27950 - protein, 7 aa, synthetic construct
  REGION 1..7: note = Description of Artificial Sequence: Synthetic peptide
PVSRGSG

SEQ ID NO: 27951 - protein, 7 aa, synthetic construct
  REGION 1..7: note = Description of Artificial Sequence: Synthetic peptide
SMGNSIS

SEQ ID NO: 27952 - protein, 7 aa, synthetic construct
  REGION 1..7: note = Description of Artificial Sequence: Synthetic peptide
SGSGQNQ

SEQ ID NO: 27953 - protein, 7 aa, synthetic construct
  REGION 1..7: note = Description of Artificial Sequence: Synthetic peptide
FRTQSTK

SEQ ID NO: 27954 - protein, 7 aa, synthetic construct
  REGION 1..7: note = Description of Artificial Sequence: Synthetic peptide
QVPASHG

SEQ ID NO: 27955 - protein, 7 aa, synthetic construct
  REGION 1..7: note = Description of Artificial Sequence: Synthetic peptide
PNLQSSN

SEQ ID NO: 27956 - protein, 7 aa, synthetic construct
  REGION 1..7: note = Description of Artificial Sequence: Synthetic peptide
GLGQQTN

SEQ ID NO: 27957 - protein, 7 aa, synthetic construct
  REGION 1..7: note = Description of Artificial Sequence: Synthetic peptide
KNAPQQA

SEQ ID NO: 27958 - protein, 7 aa, synthetic construct
  REGION 1..7: note = Description of Artificial Sequence: Synthetic peptide
DIPAKTA

SEQ ID NO: 27959 - protein, 7 aa, synthetic construct
  REGION 1..7: note = Description of Artificial Sequence: Synthetic peptide
VTPTKHP

SEQ ID NO: 27960 - protein, 7 aa, synthetic construct
  REGION 1..7: note = Description of Artificial Sequence: Synthetic peptide
RMSNLLG

SEQ ID NO: 27961 - protein, 7 aa, synthetic construct
  REGION 1..7: note = Description of Artificial Sequence: Synthetic peptide
PNTKPVL

SEQ ID NO: 27962 - protein, 7 aa, synthetic construct
  REGION 1..7: note = Description of Artificial Sequence: Synthetic peptide
VTGTTSE

SEQ ID NO: 27963 - protein, 7 aa, synthetic construct
  REGION 1..7: note = Description of Artificial Sequence: Synthetic peptide
VPRAPGM

SEQ ID NO: 27964 - protein, 7 aa, synthetic construct
  REGION 1..7: note = Description of Artificial Sequence: Synthetic peptide
SASRSAY

SEQ ID NO: 27965 - protein, 7 aa, synthetic construct
  REGION 1..7: note = Description of Artificial Sequence: Synthetic peptide
RGSGLLL

SEQ ID NO: 27966 - protein, 7 aa, synthetic construct
  REGION 1..7: note = Description of Artificial Sequence: Synthetic peptide
PTTASRQ

SEQ ID NO: 27967 - protein, 7 aa, synthetic construct
  REGION 1..7: note = Description of Artificial Sequence: Synthetic peptide
HSTTVAK

SEQ ID NO: 27968 - protein, 7 aa, synthetic construct
  REGION 1..7: note = Description of Artificial Sequence: Synthetic peptide
NSGKPNA

SEQ ID NO: 27969 - protein, 7 aa, synthetic construct
  REGION 1..7: note = Description of Artificial Sequence: Synthetic peptide
YGRDKFS

SEQ ID NO: 27970 - protein, 7 aa, synthetic construct
  REGION 1..7: note = Description of Artificial Sequence: Synthetic peptide
VGPSKIQ

SEQ ID NO: 27971 - protein, 7 aa, synthetic construct
  REGION 1..7: note = Description of Artificial Sequence: Synthetic peptide
NGSGQYQ

SEQ ID NO: 27972 - protein, 7 aa, synthetic construct
  REGION 1..7: note = Description of Artificial Sequence: Synthetic peptide
PGTKQSS

SEQ ID NO: 27973 - protein, 7 aa, synthetic construct
  REGION 1..7: note = Description of Artificial Sequence: Synthetic peptide
FGSSNAV

SEQ ID NO: 27974 - protein, 7 aa, synthetic construct
  REGION 1..7: note = Description of Artificial Sequence: Synthetic peptide
LSNQNNQ

SEQ ID NO: 27975 - protein, 7 aa, synthetic construct
  REGION 1..7: note = Description of Artificial Sequence: Synthetic peptide
RTGESYM

SEQ ID NO: 27976 - protein, 7 aa, synthetic construct
  REGION 1..7: note = Description of Artificial Sequence: Synthetic peptide
SIHSTKA

SEQ ID NO: 27977 - protein, 7 aa, synthetic construct
  REGION 1..7: note = Description of Artificial Sequence: Synthetic peptide
FSNNGSH

SEQ ID NO: 27978 - protein, 7 aa, synthetic construct
  REGION 1..7: note = Description of Artificial Sequence: Synthetic peptide
LVSVNQL

SEQ ID NO: 27979 - protein, 7 aa, synthetic construct
  REGION 1..7: note = Description of Artificial Sequence: Synthetic peptide
SGSTRRD

SEQ ID NO: 27980 - protein, 7 aa, synthetic construct
  REGION 1..7: note = Description of Artificial Sequence: Synthetic peptide
AGGINKL

SEQ ID NO: 27981 - protein, 7 aa, synthetic construct
  REGION 1..7: note = Description of Artificial Sequence: Synthetic peptide
TAIGDVS

SEQ ID NO: 27982 - protein, 7 aa, synthetic construct
  REGION 1..7: note = Description of Artificial Sequence: Synthetic peptide
PYVKSAG

SEQ ID NO: 27983 - protein, 7 aa, synthetic construct
  REGION 1..7: note = Description of Artificial Sequence: Synthetic peptide
RSPGSNT

SEQ ID NO: 27984 - protein, 7 aa, synthetic construct
  REGION 1..7: note = Description of Artificial Sequence: Synthetic peptide
MYQKPAS

SEQ ID NO: 27985 - protein, 7 aa, synthetic construct
  REGION 1..7: note = Description of Artificial Sequence: Synthetic peptide
NSREKGA

SEQ ID NO: 27986 - protein, 7 aa, synthetic construct
  REGION 1..7: note = Description of Artificial Sequence: Synthetic peptide
SSGNRTT

SEQ ID NO: 27987 - protein, 7 aa, synthetic construct
  REGION 1..7: note = Description of Artificial Sequence: Synthetic peptide
VASQPVR

SEQ ID NO: 27988 - protein, 7 aa, synthetic construct
  REGION 1..7: note = Description of Artificial Sequence: Synthetic peptide
MTQHKQA

SEQ ID NO: 27989 - protein, 7 aa, synthetic construct
  REGION 1..7: note = Description of Artificial Sequence: Synthetic peptide
SSYVGPS

SEQ ID NO: 27990 - protein, 7 aa, synthetic construct
  REGION 1..7: note = Description of Artificial Sequence: Synthetic peptide
RMRDNPG

SEQ ID NO: 27991 - protein, 7 aa, synthetic construct
  REGION 1..7: note = Description of Artificial Sequence: Synthetic peptide
MSHTNRP

SEQ ID NO: 27992 - protein, 7 aa, synthetic construct
  REGION 1..7: note = Description of Artificial Sequence: Synthetic peptide
LRDKTGA

SEQ ID NO: 27993 - protein, 7 aa, synthetic construct
  REGION 1..7: note = Description of Artificial Sequence: Synthetic peptide
SQQSAAL

SEQ ID NO: 27994 - protein, 7 aa, synthetic construct
  REGION 1..7: note = Description of Artificial Sequence: Synthetic peptide
QLPALQG

SEQ ID NO: 27995 - protein, 7 aa, synthetic construct
  REGION 1..7: note = Description of Artificial Sequence: Synthetic peptide
PSGETSK

SEQ ID NO: 27996 - protein, 7 aa, synthetic construct
  REGION 1..7: note = Description of Artificial Sequence: Synthetic peptide
ARGGVLS

SEQ ID NO: 27997 - protein, 7 aa, synthetic construct
  REGION 1..7: note = Description of Artificial Sequence: Synthetic peptide
TASGSNA

SEQ ID NO: 27998 - protein, 7 aa, synthetic construct
  REGION 1..7: note = Description of Artificial Sequence: Synthetic peptide
NSSTSAK

SEQ ID NO: 27999 - protein, 7 aa, synthetic construct
  REGION 1..7: note = Description of Artificial Sequence: Synthetic peptide
YGSESNK

SEQ ID NO: 28000 - protein, 7 aa, synthetic construct
  REGION 1..7: note = Description of Artificial Sequence: Synthetic peptide
PHISPKG

SEQ ID NO: 28001 - protein, 7 aa, synthetic construct
  REGION 1..7: note = Description of Artificial Sequence: Synthetic peptide
PVSDRRG

SEQ ID NO: 28002 - protein, 7 aa, synthetic construct
  REGION 1..7: note = Description of Artificial Sequence: Synthetic peptide
QSGPGVT

SEQ ID NO: 28003 - protein, 7 aa, synthetic construct
  REGION 1..7: note = Description of Artificial Sequence: Synthetic peptide
LLSAKGG

SEQ ID NO: 28004 - protein, 7 aa, synthetic construct
  REGION 1..7: note = Description of Artificial Sequence: Synthetic peptide
VGNRANC

SEQ ID NO: 28005 - protein, 7 aa, synthetic construct
  REGION 1..7: note = Description of Artificial Sequence: Synthetic peptide
TGSSGRI

SEQ ID NO: 28006 - protein, 7 aa, synthetic construct
  REGION 1..7: note = Description of Artificial Sequence: Synthetic peptide
EVFSSQK

SEQ ID NO: 28007 - protein, 7 aa, synthetic construct
  REGION 1..7: note = Description of Artificial Sequence: Synthetic peptide
NSHQKPS

SEQ ID NO: 28008 - protein, 7 aa, synthetic construct
  REGION 1..7: note = Description of Artificial Sequence: Synthetic peptide
PLSGSKA

SEQ ID NO: 28009 - protein, 7 aa, synthetic construct
  REGION 1..7: note = Description of Artificial Sequence: Synthetic peptide
TTMSKPS

SEQ ID NO: 28010 - protein, 7 aa, synthetic construct
  REGION 1..7: note = Description of Artificial Sequence: Synthetic peptide
ALAGTKG

SEQ ID NO: 28011 - protein, 7 aa, synthetic construct
  REGION 1..7: note = Description of Artificial Sequence: Synthetic peptide
RGDTKNL

SEQ ID NO: 28012 - protein, 7 aa, synthetic construct
  REGION 1..7: note = Description of Artificial Sequence: Synthetic peptide
SISDKLG

SEQ ID NO: 28013 - protein, 7 aa, synthetic construct
  REGION 1..7: note = Description of Artificial Sequence: Synthetic peptide
REYNTTS

SEQ ID NO: 28014 - protein, 7 aa, synthetic construct
  REGION 1..7: note = Description of Artificial Sequence: Synthetic peptide
LSRNGIN

SEQ ID NO: 28015 - protein, 7 aa, synthetic construct
  REGION 1..7: note = Description of Artificial Sequence: Synthetic peptide
RQNNGIK

SEQ ID NO: 28016 - protein, 7 aa, synthetic construct
  REGION 1..7: note = Description of Artificial Sequence: Synthetic peptide
SVVSEVR

SEQ ID NO: 28017 - protein, 7 aa, synthetic construct
  REGION 1..7: note = Description of Artificial Sequence: Synthetic peptide
IGPSGVL

SEQ ID NO: 28018 - protein, 7 aa, synthetic construct
  REGION 1..7: note = Description of Artificial Sequence: Synthetic peptide
SVTPREY

SEQ ID NO: 28019 - protein, 7 aa, synthetic construct
  REGION 1..7: note = Description of Artificial Sequence: Synthetic peptide
SGTQTWS

SEQ ID NO: 28020 - protein, 7 aa, synthetic construct
  REGION 1..7: note = Description of Artificial Sequence: Synthetic peptide
SSSAPRL

SEQ ID NO: 28021 - protein, 7 aa, synthetic construct
  REGION 1..7: note = Description of Artificial Sequence: Synthetic peptide
PMGRNAG

SEQ ID NO: 28022 - protein, 7 aa, synthetic construct
  REGION 1..7: note = Description of Artificial Sequence: Synthetic peptide
FRQGGAI

SEQ ID NO: 28023 - protein, 7 aa, synthetic construct
  REGION 1..7: note = Description of Artificial Sequence: Synthetic peptide
DQVSHKL

SEQ ID NO: 28024 - protein, 7 aa, synthetic construct
  REGION 1..7: note = Description of Artificial Sequence: Synthetic peptide
SSSPNVK

SEQ ID NO: 28025 - protein, 7 aa, synthetic construct
  REGION 1..7: note = Description of Artificial Sequence: Synthetic peptide
QPTQRMG

SEQ ID NO: 28026 - protein, 7 aa, synthetic construct
  REGION 1..7: note = Description of Artificial Sequence: Synthetic peptide
HNVVGRG

SEQ ID NO: 28027 - protein, 7 aa, synthetic construct
  REGION 1..7: note = Description of Artificial Sequence: Synthetic peptide
GFPNVAT

SEQ ID NO: 28028 - protein, 7 aa, synthetic construct
  REGION 1..7: note = Description of Artificial Sequence: Synthetic peptide
QPTRSTA

SEQ ID NO: 28029 - protein, 7 aa, synthetic construct
  REGION 1..7: note = Description of Artificial Sequence: Synthetic peptide
GTDSKRH

SEQ ID NO: 28030 - protein, 7 aa, synthetic construct
  REGION 1..7: note = Description of Artificial Sequence: Synthetic peptide
TGMSNNR

SEQ ID NO: 28031 - protein, 7 aa, synthetic construct
  REGION 1..7: note = Description of Artificial Sequence: Synthetic peptide
LGGRSSN

SEQ ID NO: 28032 - protein, 7 aa, synthetic construct
  REGION 1..7: note = Description of Artificial Sequence: Synthetic peptide
TRESRTN

SEQ ID NO: 28033 - protein, 7 aa, synthetic construct
  REGION 1..7: note = Description of Artificial Sequence: Synthetic peptide
HQERASM

SEQ ID NO: 28034 - protein, 7 aa, synthetic construct
  REGION 1..7: note = Description of Artificial Sequence: Synthetic peptide
PQASRGM

SEQ ID NO: 28035 - protein, 7 aa, synthetic construct
  REGION 1..7: note = Description of Artificial Sequence: Synthetic peptide
KDERKGM

SEQ ID NO: 28036 - protein, 7 aa, synthetic construct
  REGION 1..7: note = Description of Artificial Sequence: Synthetic peptide
SMGKLSS

SEQ ID NO: 28037 - protein, 7 aa, synthetic construct
  REGION 1..7: note = Description of Artificial Sequence: Synthetic peptide
KIASKSE

SEQ ID NO: 28038 - protein, 7 aa, synthetic construct
  REGION 1..7: note = Description of Artificial Sequence: Synthetic peptide
QLPVPSN

SEQ ID NO: 28039 - protein, 7 aa, synthetic construct
  REGION 1..7: note = Description of Artificial Sequence: Synthetic peptide
GTPNNRS

SEQ ID NO: 28040 - protein, 7 aa, synthetic construct
  REGION 1..7: note = Description of Artificial Sequence: Synthetic peptide
VMNRTGG

SEQ ID NO: 28041 - protein, 7 aa, synthetic construct
  REGION 1..7: note = Description of Artificial Sequence: Synthetic peptide
NTVSKSQ

SEQ ID NO: 28042 - protein, 7 aa, synthetic construct
  REGION 1..7: note = Description of Artificial Sequence: Synthetic peptide
VSSRASS

SEQ ID NO: 28043 - protein, 7 aa, synthetic construct
  REGION 1..7: note = Description of Artificial Sequence: Synthetic peptide
YVQNGGR

SEQ ID NO: 28044 - protein, 7 aa, synthetic construct
  REGION 1..7: note = Description of Artificial Sequence: Synthetic peptide
SPGNKLL

SEQ ID NO: 28045 - protein, 7 aa, synthetic construct
  REGION 1..7: note = Description of Artificial Sequence: Synthetic peptide
SIKSAAA

SEQ ID NO: 28046 - protein, 7 aa, synthetic construct
  REGION 1..7: note = Description of Artificial Sequence: Synthetic peptide
SRTAHEQ

SEQ ID NO: 28047 - protein, 7 aa, synthetic construct
  REGION 1..7: note = Description of Artificial Sequence: Synthetic peptide
PLGYKAT

SEQ ID NO: 28048 - protein, 7 aa, synthetic construct
  REGION 1..7: note = Description of Artificial Sequence: Synthetic peptide
NSGARLS

SEQ ID NO: 28049 - protein, 7 aa, synthetic construct
  REGION 1..7: note = Description of Artificial Sequence: Synthetic peptide
TATRQPD

SEQ ID NO: 28050 - protein, 7 aa, synthetic construct
  REGION 1..7: note = Description of Artificial Sequence: Synthetic peptide
QRTSDQT

SEQ ID NO: 28051 - protein, 7 aa, synthetic construct
  REGION 1..7: note = Description of Artificial Sequence: Synthetic peptide
SGSDKFS

SEQ ID NO: 28052 - protein, 7 aa, synthetic construct
  REGION 1..7: note = Description of Artificial Sequence: Synthetic peptide
KLATDSF

SEQ ID NO: 28053 - protein, 7 aa, synthetic construct
  REGION 1..7: note = Description of Artificial Sequence: Synthetic peptide
PQHMTHT

SEQ ID NO: 28054 - protein, 7 aa, synthetic construct
  REGION 1..7: note = Description of Artificial Sequence: Synthetic peptide
FQTRTVA

SEQ ID NO: 28055 - protein, 7 aa, synthetic construct
  REGION 1..7: note = Description of Artificial Sequence: Synthetic peptide
GQASHMK

SEQ ID NO: 28056 - protein, 7 aa, synthetic construct
  REGION 1..7: note = Description of Artificial Sequence: Synthetic peptide
KHLDNES

SEQ ID NO: 28057 - protein, 7 aa, synthetic construct
  REGION 1..7: note = Description of Artificial Sequence: Synthetic peptide
GSSQRSD

SEQ ID NO: 28058 - protein, 7 aa, synthetic construct
  REGION 1..7: note = Description of Artificial Sequence: Synthetic peptide
GQGSHMK

SEQ ID NO: 28059 - protein, 7 aa, synthetic construct
  REGION 1..7: note = Description of Artificial Sequence: Synthetic peptide
NTTAKSS

SEQ ID NO: 28060 - protein, 7 aa, synthetic construct
  REGION 1..7: note = Description of Artificial Sequence: Synthetic peptide
TSVRSLQ

SEQ ID NO: 28061 - protein, 7 aa, synthetic construct
  REGION 1..7: note = Description of Artificial Sequence: Synthetic peptide
GSPGVLR

SEQ ID NO: 28062 - protein, 7 aa, synthetic construct
  REGION 1..7: note = Description of Artificial Sequence: Synthetic peptide
HATSGTR

SEQ ID NO: 28063 - protein, 7 aa, synthetic construct
  REGION 1..7: note = Description of Artificial Sequence: Synthetic peptide
RTGNNHE

SEQ ID NO: 28064 - protein, 7 aa, synthetic construct
  REGION 1..7: note = Description of Artificial Sequence: Synthetic peptide
DNISRSR

SEQ ID NO: 28065 - protein, 7 aa, synthetic construct
  REGION 1..7: note = Description of Artificial Sequence: Synthetic peptide
REGGQMV

SEQ ID NO: 28066 - protein, 7 aa, synthetic construct
  REGION 1..7: note = Description of Artificial Sequence: Synthetic peptide
PSLQMTR

SEQ ID NO: 28067 - protein, 7 aa, synthetic construct
  REGION 1..7: note = Description of Artificial Sequence: Synthetic peptide
LPHHTSA

SEQ ID NO: 28068 - protein, 7 aa, synthetic construct
  REGION 1..7: note = Description of Artificial Sequence: Synthetic peptide
NPPVYTS

SEQ ID NO: 28069 - protein, 7 aa, synthetic construct
  REGION 1..7: note = Description of Artificial Sequence: Synthetic peptide
KTGAKMG

SEQ ID NO: 28070 - protein, 7 aa, synthetic construct
  REGION 1..7: note = Description of Artificial Sequence: Synthetic peptide
RDDKQNS

SEQ ID NO: 28071 - protein, 7 aa, synthetic construct
  REGION 1..7: note = Description of Artificial Sequence: Synthetic peptide
FNQHSSL

SEQ ID NO: 28072 - protein, 7 aa, synthetic construct
  REGION 1..7: note = Description of Artificial Sequence: Synthetic peptide
MTESSRT

SEQ ID NO: 28073 - protein, 7 aa, synthetic construct
  REGION 1..7: note = Description of Artificial Sequence: Synthetic peptide
NGTGQNQ

SEQ ID NO: 28074 - protein, 7 aa, synthetic construct
  REGION 1..7: note = Description of Artificial Sequence: Synthetic peptide
PLSAGKS

SEQ ID NO: 28075 - protein, 7 aa, synthetic construct
  REGION 1..7: note = Description of Artificial Sequence: Synthetic peptide
GSAQSPR

SEQ ID NO: 28076 - protein, 7 aa, synthetic construct
  REGION 1..7: note = Description of Artificial Sequence: Synthetic peptide
PASLGQG

SEQ ID NO: 28077 - protein, 7 aa, synthetic construct
  REGION 1..7: note = Description of Artificial Sequence: Synthetic peptide
SHASSTA

SEQ ID NO: 28078 - protein, 7 aa, synthetic construct
  REGION 1..7: note = Description of Artificial Sequence: Synthetic peptide
QNTPKST

SEQ ID NO: 28079 - protein, 7 aa, synthetic construct
  REGION 1..7: note = Description of Artificial Sequence: Synthetic peptide
LRSKESA

SEQ ID NO: 28080 - protein, 7 aa, synthetic construct
  REGION 1..7: note = Description of Artificial Sequence: Synthetic peptide
SRPGLSQ

SEQ ID NO: 28081 - protein, 7 aa, synthetic construct
  REGION 1..7: note = Description of Artificial Sequence: Synthetic peptide
EGTRGVG

SEQ ID NO: 28082 - protein, 7 aa, synthetic construct
  REGION 1..7: note = Description of Artificial Sequence: Synthetic peptide
NSMPTTL

SEQ ID NO: 28083 - protein, 7 aa, synthetic construct
  REGION 1..7: note = Description of Artificial Sequence: Synthetic peptide
GTTNSRN

SEQ ID NO: 28084 - protein, 7 aa, synthetic construct
  REGION 1..7: note = Description of Artificial Sequence: Synthetic peptide
STFSPSK

SEQ ID NO: 28085 - protein, 7 aa, synthetic construct
  REGION 1..7: note = Description of Artificial Sequence: Synthetic peptide
ARDDQRR

SEQ ID NO: 28086 - protein, 7 aa, synthetic construct
  REGION 1..7: note = Description of Artificial Sequence: Synthetic peptide
SSTSSPY

SEQ ID NO: 28087 - protein, 7 aa, synthetic construct
  REGION 1..7: note = Description of Artificial Sequence: Synthetic peptide
YRTTHTL

SEQ ID NO: 28088 - protein, 7 aa, synthetic construct
  REGION 1..7: note = Description of Artificial Sequence: Synthetic peptide
FGPSQLP

SEQ ID NO: 28089 - protein, 7 aa, synthetic construct
  REGION 1..7: note = Description of Artificial Sequence: Synthetic peptide
GGLSPKV

SEQ ID NO: 28090 - protein, 7 aa, synthetic construct
  REGION 1..7: note = Description of Artificial Sequence: Synthetic peptide
GKIQDIK

SEQ ID NO: 28091 - protein, 7 aa, synthetic construct
  REGION 1..7: note = Description of Artificial Sequence: Synthetic peptide
QNLRVGA

SEQ ID NO: 28092 - protein, 7 aa, synthetic construct
  REGION 1..7: note = Description of Artificial Sequence: Synthetic peptide
RVEKATL

SEQ ID NO: 28093 - protein, 7 aa, synthetic construct
  REGION 1..7: note = Description of Artificial Sequence: Synthetic peptide
STTGDSK

SEQ ID NO: 28094 - protein, 7 aa, synthetic construct
  REGION 1..7: note = Description of Artificial Sequence: Synthetic peptide
TVAHPSH

SEQ ID NO: 28095 - protein, 7 aa, synthetic construct
  REGION 1..7: note = Description of Artificial Sequence: Synthetic peptide
QSKGGSN

SEQ ID NO: 28096 - protein, 7 aa, synthetic construct
  REGION 1..7: note = Description of Artificial Sequence: Synthetic peptide
RQTTPLG

SEQ ID NO: 28097 - protein, 7 aa, synthetic construct
  REGION 1..7: note = Description of Artificial Sequence: Synthetic peptide
GCITNCS

SEQ ID NO: 28098 - protein, 7 aa, synthetic construct
  REGION 1..7: note = Description of Artificial Sequence: Synthetic peptide
SSSDKLR

SEQ ID NO: 28099 - protein, 7 aa, synthetic construct
  REGION 1..7: note = Description of Artificial Sequence: Synthetic peptide
GITAKLT

SEQ ID NO: 28100 - protein, 7 aa, synthetic construct
  REGION 1..7: note = Description of Artificial Sequence: Synthetic peptide
AYPSGSS

SEQ ID NO: 28101 - protein, 7 aa, synthetic construct
  REGION 1..7: note = Description of Artificial Sequence: Synthetic peptide
MGLGSTK

SEQ ID NO: 28102 - protein, 7 aa, synthetic construct
  REGION 1..7: note = Description of Artificial Sequence: Synthetic peptide
GGQTARI

SEQ ID NO: 28103 - protein, 7 aa, synthetic construct
  REGION 1..7: note = Description of Artificial Sequence: Synthetic peptide
PLQQNRS

SEQ ID NO: 28104 - protein, 7 aa, synthetic construct
  REGION 1..7: note = Description of Artificial Sequence: Synthetic peptide
SDRNMSR

SEQ ID NO: 28105 - protein, 7 aa, synthetic construct
  REGION 1..7: note = Description of Artificial Sequence: Synthetic peptide
VPRVPGM

SEQ ID NO: 28106 - protein, 7 aa, synthetic construct
  REGION 1..7: note = Description of Artificial Sequence: Synthetic peptide
SVLHSSQ

SEQ ID NO: 28107 - protein, 7 aa, synthetic construct
  REGION 1..7: note = Description of Artificial Sequence: Synthetic peptide
PTGVNKM

SEQ ID NO: 28108 - protein, 7 aa, synthetic construct
  REGION 1..7: note = Description of Artificial Sequence: Synthetic peptide
EPTHPRG

SEQ ID NO: 28109 - protein, 7 aa, synthetic construct
  REGION 1..7: note = Description of Artificial Sequence: Synthetic peptide
KNPSSVN

SEQ ID NO: 28110 - protein, 7 aa, synthetic construct
  REGION 1..7: note = Description of Artificial Sequence: Synthetic peptide
VHQLPIA

SEQ ID NO: 28111 - protein, 7 aa, synthetic construct
  REGION 1..7: note = Description of Artificial Sequence: Synthetic peptide
PYNVSQN

SEQ ID NO: 28112 - protein, 7 aa, synthetic construct
  REGION 1..7: note = Description of Artificial Sequence: Synthetic peptide
LLSSKGN

SEQ ID NO: 28113 - protein, 7 aa, synthetic construct
  REGION 1..7: note = Description of Artificial Sequence: Synthetic peptide
HSPTGPA

SEQ ID NO: 28114 - protein, 7 aa, synthetic construct
  REGION 1..7: note = Description of Artificial Sequence: Synthetic peptide
RMKSLDN

SEQ ID NO: 28115 - protein, 7 aa, synthetic construct
  REGION 1..7: note = Description of Artificial Sequence: Synthetic peptide
AVPAKGA

SEQ ID NO: 28116 - protein, 7 aa, synthetic construct
  REGION 1..7: note = Description of Artificial Sequence: Synthetic peptide
TPTLAHG

SEQ ID NO: 28117 - protein, 7 aa, synthetic construct
  REGION 1..7: note = Description of Artificial Sequence: Synthetic peptide
HDIGKQR

SEQ ID NO: 28118 - protein, 7 aa, synthetic construct
  REGION 1..7: note = Description of Artificial Sequence: Synthetic peptide
RGPTGMM

SEQ ID NO: 28119 - protein, 7 aa, synthetic construct
  REGION 1..7: note = Description of Artificial Sequence: Synthetic peptide
PTRNGNM

SEQ ID NO: 28120 - protein, 7 aa, synthetic construct
  REGION 1..7: note = Description of Artificial Sequence: Synthetic peptide
NTRSSSG

SEQ ID NO: 28121 - protein, 7 aa, synthetic construct
  REGION 1..7: note = Description of Artificial Sequence: Synthetic peptide
AGGPANR

SEQ ID NO: 28122 - protein, 7 aa, synthetic construct
  REGION 1..7: note = Description of Artificial Sequence: Synthetic peptide
PSHNPTN

SEQ ID NO: 28123 - protein, 7 aa, synthetic construct
  REGION 1..7: note = Description of Artificial Sequence: Synthetic peptide
SHATAAT

SEQ ID NO: 28124 - protein, 7 aa, synthetic construct
  REGION 1..7: note = Description of Artificial Sequence: Synthetic peptide
PGTPSSG

SEQ ID NO: 28125 - protein, 7 aa, synthetic construct
  REGION 1..7: note = Description of Artificial Sequence: Synthetic peptide
RPAGQHS

SEQ ID NO: 28126 - protein, 7 aa, synthetic construct
  REGION 1..7: note = Description of Artificial Sequence: Synthetic peptide
PRVGNRT

SEQ ID NO: 28127 - protein, 7 aa, synthetic construct
  REGION 1..7: note = Description of Artificial Sequence: Synthetic peptide
DRKTLSH

SEQ ID NO: 28128 - protein, 7 aa, synthetic construct
  REGION 1..7: note = Description of Artificial Sequence: Synthetic peptide
YQNVSSK

SEQ ID NO: 28129 - protein, 7 aa, synthetic construct
  REGION 1..7: note = Description of Artificial Sequence: Synthetic peptide
TGIERPM

SEQ ID NO: 28130 - protein, 7 aa, synthetic construct
  REGION 1..7: note = Description of Artificial Sequence: Synthetic peptide
AYPKNSN

SEQ ID NO: 28131 - protein, 7 aa, synthetic construct
  REGION 1..7: note = Description of Artificial Sequence: Synthetic peptide
SGVTTRG

SEQ ID NO: 28132 - protein, 7 aa, synthetic construct
  REGION 1..7: note = Description of Artificial Sequence: Synthetic peptide
QVPATNR

SEQ ID NO: 28133 - protein, 7 aa, synthetic construct
  REGION 1..7: note = Description of Artificial Sequence: Synthetic peptide
NQINAPR

SEQ ID NO: 28134 - protein, 7 aa, synthetic construct
  REGION 1..7: note = Description of Artificial Sequence: Synthetic peptide
FLKGTGS

SEQ ID NO: 28135 - protein, 7 aa, synthetic construct
  REGION 1..7: note = Description of Artificial Sequence: Synthetic peptide
REDTKMH

SEQ ID NO: 28136 - protein, 7 aa, synthetic construct
  REGION 1..7: note = Description of Artificial Sequence: Synthetic peptide
RITSSNQ

SEQ ID NO: 28137 - protein, 7 aa, synthetic construct
  REGION 1..7: note = Description of Artificial Sequence: Synthetic peptide
NTTGHAG

SEQ ID NO: 28138 - protein, 7 aa, synthetic construct
  REGION 1..7: note = Description of Artificial Sequence: Synthetic peptide
NNPKNVV

SEQ ID NO: 28139 - protein, 7 aa, synthetic construct
  REGION 1..7: note = Description of Artificial Sequence: Synthetic peptide
SVNSRSE

SEQ ID NO: 28140 - protein, 7 aa, synthetic construct
  REGION 1..7: note = Description of Artificial Sequence: Synthetic peptide
LLRERHG

SEQ ID NO: 28141 - protein, 7 aa, synthetic construct
  REGION 1..7: note = Description of Artificial Sequence: Synthetic peptide
HGESRQA

SEQ ID NO: 28142 - protein, 7 aa, synthetic construct
  REGION 1..7: note = Description of Artificial Sequence: Synthetic peptide
GTRSAVV

SEQ ID NO: 28143 - protein, 7 aa, synthetic construct
  REGION 1..7: note = Description of Artificial Sequence: Synthetic peptide
TSQVSHG

SEQ ID NO: 28144 - protein, 7 aa, synthetic construct
  REGION 1..7: note = Description of Artificial Sequence: Synthetic peptide
RDSTKLV

SEQ ID NO: 28145 - protein, 7 aa, synthetic construct
  REGION 1..7: note = Description of Artificial Sequence: Synthetic peptide
FNSTANR

SEQ ID NO: 28146 - protein, 7 aa, synthetic construct
  REGION 1..7: note = Description of Artificial Sequence: Synthetic peptide
KTGDQMG

SEQ ID NO: 28147 - protein, 7 aa, synthetic construct
  REGION 1..7: note = Description of Artificial Sequence: Synthetic peptide
AQSTYQS

SEQ ID NO: 28148 - protein, 7 aa, synthetic construct
  REGION 1..7: note = Description of Artificial Sequence: Synthetic peptide
GNRSSGL

SEQ ID NO: 28149 - protein, 7 aa, synthetic construct
  REGION 1..7: note = Description of Artificial Sequence: Synthetic peptide
ASTSRST

SEQ ID NO: 28150 - protein, 7 aa, synthetic construct
  REGION 1..7: note = Description of Artificial Sequence: Synthetic peptide
QSVKTPE

SEQ ID NO: 28151 - protein, 7 aa, synthetic construct
  REGION 1..7: note = Description of Artificial Sequence: Synthetic peptide
LKQHSSL

SEQ ID NO: 28152 - protein, 7 aa, synthetic construct
  REGION 1..7: note = Description of Artificial Sequence: Synthetic peptide
ATGRNTA

SEQ ID NO: 28153 - protein, 7 aa, synthetic construct
  REGION 1..7: note = Description of Artificial Sequence: Synthetic peptide
MESKANS

SEQ ID NO: 28154 - protein, 7 aa, synthetic construct
  REGION 1..7: note = Description of Artificial Sequence: Synthetic peptide
NYDSLKK

SEQ ID NO: 28155 - protein, 7 aa, synthetic construct
  REGION 1..7: note = Description of Artificial Sequence: Synthetic peptide
AHSNNSY

SEQ ID NO: 28156 - protein, 7 aa, synthetic construct
  REGION 1..7: note = Description of Artificial Sequence: Synthetic peptide
FRAQANV

SEQ ID NO: 28157 - protein, 7 aa, synthetic construct
  REGION 1..7: note = Description of Artificial Sequence: Synthetic peptide
YSQEVFR

SEQ ID NO: 28158 - protein, 7 aa, synthetic construct
  REGION 1..7: note = Description of Artificial Sequence: Synthetic peptide
PTSSPQR

SEQ ID NO: 28159 - protein, 7 aa, synthetic construct
  REGION 1..7: note = Description of Artificial Sequence: Synthetic peptide
ATHNSSQ

SEQ ID NO: 28160 - protein, 7 aa, synthetic construct
  REGION 1..7: note = Description of Artificial Sequence: Synthetic peptide
PNNATKN

SEQ ID NO: 28161 - protein, 7 aa, synthetic construct
  REGION 1..7: note = Description of Artificial Sequence: Synthetic peptide
NANSRPV

SEQ ID NO: 28162 - protein, 7 aa, synthetic construct
  REGION 1..7: note = Description of Artificial Sequence: Synthetic peptide
VSDGISK

SEQ ID NO: 28163 - protein, 7 aa, synthetic construct
  REGION 1..7: note = Description of Artificial Sequence: Synthetic peptide
STVGHMT

SEQ ID NO: 28164 - protein, 7 aa, synthetic construct
  REGION 1..7: note = Description of Artificial Sequence: Synthetic peptide
VAPVGMS

SEQ ID NO: 28165 - protein, 7 aa, synthetic construct
  REGION 1..7: note = Description of Artificial Sequence: Synthetic peptide
SPSFNQG

SEQ ID NO: 28166 - protein, 7 aa, synthetic construct
  REGION 1..7: note = Description of Artificial Sequence: Synthetic peptide
LLSSKTA

SEQ ID NO: 28167 - protein, 7 aa, synthetic construct
  REGION 1..7: note = Description of Artificial Sequence: Synthetic peptide
GSGHGTN

SEQ ID NO: 28168 - protein, 7 aa, synthetic construct
  REGION 1..7: note = Description of Artificial Sequence: Synthetic peptide
RLPSVSS

SEQ ID NO: 28169 - protein, 7 aa, synthetic construct
  REGION 1..7: note = Description of Artificial Sequence: Synthetic peptide
HDNANYN

SEQ ID NO: 28170 - protein, 7 aa, synthetic construct
  REGION 1..7: note = Description of Artificial Sequence: Synthetic peptide
QRFQSSQ

SEQ ID NO: 28171 - protein, 7 aa, synthetic construct
  REGION 1..7: note = Description of Artificial Sequence: Synthetic peptide
TGITKLS

SEQ ID NO: 28172 - protein, 7 aa, synthetic construct
  REGION 1..7: note = Description of Artificial Sequence: Synthetic peptide
GRTGPLV

SEQ ID NO: 28173 - protein, 7 aa, synthetic construct
  REGION 1..7: note = Description of Artificial Sequence: Synthetic peptide
HERGQNG

SEQ ID NO: 28174 - protein, 7 aa, synthetic construct
  REGION 1..7: note = Description of Artificial Sequence: Synthetic peptide
ITPSNIG

SEQ ID NO: 28175 - protein, 7 aa, synthetic construct
  REGION 1..7: note = Description of Artificial Sequence: Synthetic peptide
HTTGMLG

SEQ ID NO: 28176 - protein, 7 aa, synthetic construct
  REGION 1..7: note = Description of Artificial Sequence: Synthetic peptide
MPSASLG

SEQ ID NO: 28177 - protein, 7 aa, synthetic construct
  REGION 1..7: note = Description of Artificial Sequence: Synthetic peptide
TVKSPRS

SEQ ID NO: 28178 - protein, 7 aa, synthetic construct
  REGION 1..7: note = Description of Artificial Sequence: Synthetic peptide
QSSHEGR

SEQ ID NO: 28179 - protein, 7 aa, synthetic construct
  REGION 1..7: note = Description of Artificial Sequence: Synthetic peptide
GAERILR

SEQ ID NO: 28180 - protein, 7 aa, synthetic construct
  REGION 1..7: note = Description of Artificial Sequence: Synthetic peptide
STVVHMT

SEQ ID NO: 28181 - protein, 7 aa, synthetic construct
  REGION 1..7: note = Description of Artificial Sequence: Synthetic peptide
DYDATSR

SEQ ID NO: 28182 - protein, 7 aa, synthetic construct
  REGION 1..7: note = Description of Artificial Sequence: Synthetic peptide
RNDQTLK

SEQ ID NO: 28183 - protein, 7 aa, synthetic construct
  REGION 1..7: note = Description of Artificial Sequence: Synthetic peptide
NRLGQAG

SEQ ID NO: 28184 - protein, 7 aa, synthetic construct
  REGION 1..7: note = Description of Artificial Sequence: Synthetic peptide
ENWTNRK

SEQ ID NO: 28185 - protein, 7 aa, synthetic construct
  REGION 1..7: note = Description of Artificial Sequence: Synthetic peptide
SCTTRCL

SEQ ID NO: 28186 - protein, 7 aa, synthetic construct
  REGION 1..7: note = Description of Artificial Sequence: Synthetic peptide
YTSKSTA

SEQ ID NO: 28187 - protein, 7 aa, synthetic construct
  REGION 1..7: note = Description of Artificial Sequence: Synthetic peptide
SVHGNQL

SEQ ID NO: 28188 - protein, 7 aa, synthetic construct
  REGION 1..7: note = Description of Artificial Sequence: Synthetic peptide
GIQSSPT

SEQ ID NO: 28189 - protein, 7 aa, synthetic construct
  REGION 1..7: note = Description of Artificial Sequence: Synthetic peptide
SNMTSTR

SEQ ID NO: 28190 - protein, 7 aa, synthetic construct
  REGION 1..7: note = Description of Artificial Sequence: Synthetic peptide
MSTARSA

SEQ ID NO: 28191 - protein, 7 aa, synthetic construct
  REGION 1..7: note = Description of Artificial Sequence: Synthetic peptide
SYASTQQ

SEQ ID NO: 28192 - protein, 7 aa, synthetic construct
  REGION 1..7: note = Description of Artificial Sequence: Synthetic peptide
AGSNSQG

SEQ ID NO: 28193 - protein, 7 aa, synthetic construct
  REGION 1..7: note = Description of Artificial Sequence: Synthetic peptide
PYAGNQR

SEQ ID NO: 28194 - protein, 7 aa, synthetic construct
  REGION 1..7: note = Description of Artificial Sequence: Synthetic peptide
RRDTNMS

SEQ ID NO: 28195 - protein, 7 aa, synthetic construct
  REGION 1..7: note = Description of Artificial Sequence: Synthetic peptide
SFAKSAS

SEQ ID NO: 28196 - protein, 7 aa, synthetic construct
  REGION 1..7: note = Description of Artificial Sequence: Synthetic peptide
GVSATVK

SEQ ID NO: 28197 - protein, 7 aa, synthetic construct
  REGION 1..7: note = Description of Artificial Sequence: Synthetic peptide
GTSTSLR

SEQ ID NO: 28198 - protein, 7 aa, synthetic construct
  REGION 1..7: note = Description of Artificial Sequence: Synthetic peptide
RNDTKLF

SEQ ID NO: 28199 - protein, 7 aa, synthetic construct
  REGION 1..7: note = Description of Artificial Sequence: Synthetic peptide
TPAGPNK

SEQ ID NO: 28200 - protein, 7 aa, synthetic construct
  REGION 1..7: note = Description of Artificial Sequence: Synthetic peptide
NNPNRDQ

SEQ ID NO: 28201 - protein, 7 aa, synthetic construct
  REGION 1..7: note = Description of Artificial Sequence: Synthetic peptide
RAETNAI

SEQ ID NO: 28202 - protein, 7 aa, synthetic construct
  REGION 1..7: note = Description of Artificial Sequence: Synthetic peptide
HELSRTT

SEQ ID NO: 28203 - protein, 7 aa, synthetic construct
  REGION 1..7: note = Description of Artificial Sequence: Synthetic peptide
AGSQTGV

SEQ ID NO: 28204 - protein, 7 aa, synthetic construct
  REGION 1..7: note = Description of Artificial Sequence: Synthetic peptide
SYGGQSR

SEQ ID NO: 28205 - protein, 7 aa, synthetic construct
  REGION 1..7: note = Description of Artificial Sequence: Synthetic peptide
YQPERSS

SEQ ID NO: 28206 - protein, 7 aa, synthetic construct
  REGION 1..7: note = Description of Artificial Sequence: Synthetic peptide
TANNSIV

SEQ ID NO: 28207 - protein, 7 aa, synthetic construct
  REGION 1..7: note = Description of Artificial Sequence: Synthetic peptide
IVSGKLT

SEQ ID NO: 28208 - protein, 7 aa, synthetic construct
  REGION 1..7: note = Description of Artificial Sequence: Synthetic peptide
HITPATS

SEQ ID NO: 28209 - protein, 7 aa, synthetic construct
  REGION 1..7: note = Description of Artificial Sequence: Synthetic peptide
STSNIAS

SEQ ID NO: 28210 - protein, 7 aa, synthetic construct
  REGION 1..7: note = Description of Artificial Sequence: Synthetic peptide
QVTAIGA

SEQ ID NO: 28211 - protein, 7 aa, synthetic construct
  REGION 1..7: note = Description of Artificial Sequence: Synthetic peptide
NTQAGHS

SEQ ID NO: 28212 - protein, 7 aa, synthetic construct
  REGION 1..7: note = Description of Artificial Sequence: Synthetic peptide
DVHRSSG

SEQ ID NO: 28213 - protein, 7 aa, synthetic construct
  REGION 1..7: note = Description of Artificial Sequence: Synthetic peptide
QGSSPME

SEQ ID NO: 28214 - protein, 7 aa, synthetic construct
  REGION 1..7: note = Description of Artificial Sequence: Synthetic peptide
LDASAMR

SEQ ID NO: 28215 - protein, 7 aa, synthetic construct
  REGION 1..7: note = Description of Artificial Sequence: Synthetic peptide
PVANVSR

SEQ ID NO: 28216 - protein, 7 aa, synthetic construct
  REGION 1..7: note = Description of Artificial Sequence: Synthetic peptide
FPVTGLS

SEQ ID NO: 28217 - protein, 7 aa, synthetic construct
  REGION 1..7: note = Description of Artificial Sequence: Synthetic peptide
QMNHLQV

SEQ ID NO: 28218 - protein, 7 aa, synthetic construct
  REGION 1..7: note = Description of Artificial Sequence: Synthetic peptide
SYGKGSS

SEQ ID NO: 28219 - protein, 7 aa, synthetic construct
  REGION 1..7: note = Description of Artificial Sequence: Synthetic peptide
RDASGLR

SEQ ID NO: 28220 - protein, 7 aa, synthetic construct
  REGION 1..7: note = Description of Artificial Sequence: Synthetic peptide
SSSRNVA

SEQ ID NO: 28221 - protein, 7 aa, synthetic construct
  REGION 1..7: note = Description of Artificial Sequence: Synthetic peptide
ITATHAH

SEQ ID NO: 28222 - protein, 7 aa, synthetic construct
  REGION 1..7: note = Description of Artificial Sequence: Synthetic peptide
NQQNGSN

SEQ ID NO: 28223 - protein, 7 aa, synthetic construct
  REGION 1..7: note = Description of Artificial Sequence: Synthetic peptide
GSAGKEM

SEQ ID NO: 28224 - protein, 7 aa, synthetic construct
  REGION 1..7: note = Description of Artificial Sequence: Synthetic peptide
NVRQTEL

SEQ ID NO: 28225 - protein, 7 aa, synthetic construct
  REGION 1..7: note = Description of Artificial Sequence: Synthetic peptide
PIHPSSG

SEQ ID NO: 28226 - protein, 7 aa, synthetic construct
  REGION 1..7: note = Description of Artificial Sequence: Synthetic peptide
DRVGSIS

SEQ ID NO: 28227 - protein, 7 aa, synthetic construct
  REGION 1..7: note = Description of Artificial Sequence: Synthetic peptide
VGSGRAN

SEQ ID NO: 28228 - protein, 7 aa, synthetic construct
  REGION 1..7: note = Description of Artificial Sequence: Synthetic peptide
NSSGHYQ

SEQ ID NO: 28229 - protein, 7 aa, synthetic construct
  REGION 1..7: note = Description of Artificial Sequence: Synthetic peptide
HTSSNSL

SEQ ID NO: 28230 - protein, 7 aa, synthetic construct
  REGION 1..7: note = Description of Artificial Sequence: Synthetic peptide
LPSNSIH

SEQ ID NO: 28231 - protein, 7 aa, synthetic construct
  REGION 1..7: note = Description of Artificial Sequence: Synthetic peptide
SDRDRKT

SEQ ID NO: 28232 - protein, 7 aa, synthetic construct
  REGION 1..7: note = Description of Artificial Sequence: Synthetic peptide
TPGSTIR

SEQ ID NO: 28233 - protein, 7 aa, synthetic construct
  REGION 1..7: note = Description of Artificial Sequence: Synthetic peptide
SVAGTSR

SEQ ID NO: 28234 - protein, 7 aa, synthetic construct
  REGION 1..7: note = Description of Artificial Sequence: Synthetic peptide
MRSNPTS

SEQ ID NO: 28235 - protein, 7 aa, synthetic construct
  REGION 1..7: note = Description of Artificial Sequence: Synthetic peptide
GRPNMTV

SEQ ID NO: 28236 - protein, 7 aa, synthetic construct
  REGION 1..7: note = Description of Artificial Sequence: Synthetic peptide
DTHVSGR

SEQ ID NO: 28237 - protein, 7 aa, synthetic construct
  REGION 1..7: note = Description of Artificial Sequence: Synthetic peptide
MGSSVRS

SEQ ID NO: 28238 - protein, 7 aa, synthetic construct
  REGION 1..7: note = Description of Artificial Sequence: Synthetic peptide
LNVGSVR

SEQ ID NO: 28239 - protein, 7 aa, synthetic construct
  REGION 1..7: note = Description of Artificial Sequence: Synthetic peptide
PVQHSSN

SEQ ID NO: 28240 - protein, 7 aa, synthetic construct
  REGION 1..7: note = Description of Artificial Sequence: Synthetic peptide
GDQHKPL

SEQ ID NO: 28241 - protein, 7 aa, synthetic construct
  REGION 1..7: note = Description of Artificial Sequence: Synthetic peptide
SPARASL

SEQ ID NO: 28242 - protein, 7 aa, synthetic construct
  REGION 1..7: note = Description of Artificial Sequence: Synthetic peptide
IPLSSQR

SEQ ID NO: 28243 - protein, 7 aa, synthetic construct
  REGION 1..7: note = Description of Artificial Sequence: Synthetic peptide
CNRSGTL

SEQ ID NO: 28244 - protein, 7 aa, synthetic construct
  REGION 1..7: note = Description of Artificial Sequence: Synthetic peptide
LPSLPIR

SEQ ID NO: 28245 - protein, 7 aa, synthetic construct
  REGION 1..7: note = Description of Artificial Sequence: Synthetic peptide
HGSLHPQ

SEQ ID NO: 28246 - protein, 7 aa, synthetic construct
  REGION 1..7: note = Description of Artificial Sequence: Synthetic peptide
VIRPSSK

SEQ ID NO: 28247 - protein, 7 aa, synthetic construct
  REGION 1..7: note = Description of Artificial Sequence: Synthetic peptide
LPGVRVA

SEQ ID NO: 28248 - protein, 7 aa, synthetic construct
  REGION 1..7: note = Description of Artificial Sequence: Synthetic peptide
NINSRLA

SEQ ID NO: 28249 - protein, 7 aa, synthetic construct
  REGION 1..7: note = Description of Artificial Sequence: Synthetic peptide
QPINVHN

SEQ ID NO: 28250 - protein, 7 aa, synthetic construct
  REGION 1..7: note = Description of Artificial Sequence: Synthetic peptide
PLNARGS

SEQ ID NO: 28251 - protein, 7 aa, synthetic construct
  REGION 1..7: note = Description of Artificial Sequence: Synthetic peptide
KQPGSTH

SEQ ID NO: 28252 - protein, 7 aa, synthetic construct
  REGION 1..7: note = Description of Artificial Sequence: Synthetic peptide
EGTRMAA

SEQ ID NO: 28253 - protein, 7 aa, synthetic construct
  REGION 1..7: note = Description of Artificial Sequence: Synthetic peptide
RVESPTN

SEQ ID NO: 28254 - protein, 7 aa, synthetic construct
  REGION 1..7: note = Description of Artificial Sequence: Synthetic peptide
DSVAGFT

SEQ ID NO: 28255 - protein, 7 aa, synthetic construct
  REGION 1..7: note = Description of Artificial Sequence: Synthetic peptide
NTGSGSR

SEQ ID NO: 28256 - protein, 7 aa, synthetic construct
  REGION 1..7: note = Description of Artificial Sequence: Synthetic peptide
SKTNAKV

SEQ ID NO: 28257 - protein, 7 aa, synthetic construct
  REGION 1..7: note = Description of Artificial Sequence: Synthetic peptide
ESATPIR

SEQ ID NO: 28258 - protein, 7 aa, synthetic construct
  REGION 1..7: note = Description of Artificial Sequence: Synthetic peptide
REVDGIR

SEQ ID NO: 28259 - protein, 7 aa, synthetic construct
  REGION 1..7: note = Description of Artificial Sequence: Synthetic peptide
CSNHSTR

SEQ ID NO: 28260 - protein, 7 aa, synthetic construct
  REGION 1..7: note = Description of Artificial Sequence: Synthetic peptide
LKSPKQA

SEQ ID NO: 28261 - protein, 7 aa, synthetic construct
  REGION 1..7: note = Description of Artificial Sequence: Synthetic peptide
DLTRATS

SEQ ID NO: 28262 - protein, 7 aa, synthetic construct
  REGION 1..7: note = Description of Artificial Sequence: Synthetic peptide
DLRTNSS

SEQ ID NO: 28263 - protein, 7 aa, synthetic construct
  REGION 1..7: note = Description of Artificial Sequence: Synthetic peptide
VRSKEAH

SEQ ID NO: 28264 - protein, 7 aa, synthetic construct
  REGION 1..7: note = Description of Artificial Sequence: Synthetic peptide
VKCSGCS

SEQ ID NO: 28265 - protein, 7 aa, synthetic construct
  REGION 1..7: note = Description of Artificial Sequence: Synthetic peptide
QHTTTNQ

SEQ ID NO: 28266 - protein, 7 aa, synthetic construct
  REGION 1..7: note = Description of Artificial Sequence: Synthetic peptide
NGSGQTQ

SEQ ID NO: 28267 - protein, 7 aa, synthetic construct
  REGION 1..7: note = Description of Artificial Sequence: Synthetic peptide
GNTQTSR

SEQ ID NO: 28268 - protein, 7 aa, synthetic construct
  REGION 1..7: note = Description of Artificial Sequence: Synthetic peptide
ATNNGSK

SEQ ID NO: 28269 - protein, 7 aa, synthetic construct
  REGION 1..7: note = Description of Artificial Sequence: Synthetic peptide
DVKSTHA

SEQ ID NO: 28270 - protein, 7 aa, synthetic construct
  REGION 1..7: note = Description of Artificial Sequence: Synthetic peptide
PVGTKSG

SEQ ID NO: 28271 - protein, 7 aa, synthetic construct
  REGION 1..7: note = Description of Artificial Sequence: Synthetic peptide
STGSVSK

SEQ ID NO: 28272 - protein, 7 aa, synthetic construct
  REGION 1..7: note = Description of Artificial Sequence: Synthetic peptide
YRNVNAM

SEQ ID NO: 28273 - protein, 7 aa, synthetic construct
  REGION 1..7: note = Description of Artificial Sequence: Synthetic peptide
YGASPSL

SEQ ID NO: 28274 - protein, 7 aa, synthetic construct
  REGION 1..7: note = Description of Artificial Sequence: Synthetic peptide
KNHTAVQ

SEQ ID NO: 28275 - protein, 7 aa, synthetic construct
  REGION 1..7: note = Description of Artificial Sequence: Synthetic peptide
HLGVPLK

SEQ ID NO: 28276 - protein, 7 aa, synthetic construct
  REGION 1..7: note = Description of Artificial Sequence: Synthetic peptide
NFGSGPT

SEQ ID NO: 28277 - protein, 7 aa, synthetic construct
  REGION 1..7: note = Description of Artificial Sequence: Synthetic peptide
DPVTRKS

SEQ ID NO: 28278 - protein, 7 aa, synthetic construct
  REGION 1..7: note = Description of Artificial Sequence: Synthetic peptide
GTVLSDR

SEQ ID NO: 28279 - protein, 7 aa, synthetic construct
  REGION 1..7: note = Description of Artificial Sequence: Synthetic peptide
DGSSRVG

SEQ ID NO: 28280 - protein, 7 aa, synthetic construct
  REGION 1..7: note = Description of Artificial Sequence: Synthetic peptide
SSTSPGR

SEQ ID NO: 28281 - protein, 7 aa, synthetic construct
  REGION 1..7: note = Description of Artificial Sequence: Synthetic peptide
QPNSASH

SEQ ID NO: 28282 - protein, 7 aa, synthetic construct
  REGION 1..7: note = Description of Artificial Sequence: Synthetic peptide
VHASNVQ

SEQ ID NO: 28283 - protein, 7 aa, synthetic construct
  REGION 1..7: note = Description of Artificial Sequence: Synthetic peptide
YGSRENS

SEQ ID NO: 28284 - protein, 7 aa, synthetic construct
  REGION 1..7: note = Description of Artificial Sequence: Synthetic peptide
NNGHQGK

SEQ ID NO: 28285 - protein, 7 aa, synthetic construct
  REGION 1..7: note = Description of Artificial Sequence: Synthetic peptide
PSSRQSV

SEQ ID NO: 28286 - protein, 7 aa, synthetic construct
  REGION 1..7: note = Description of Artificial Sequence: Synthetic peptide
HLAMNRN

SEQ ID NO: 28287 - protein, 7 aa, synthetic construct
  REGION 1..7: note = Description of Artificial Sequence: Synthetic peptide
FMGRPNV

SEQ ID NO: 28288 - protein, 7 aa, synthetic construct
  REGION 1..7: note = Description of Artificial Sequence: Synthetic peptide
YNRTSIV

SEQ ID NO: 28289 - protein, 7 aa, synthetic construct
  REGION 1..7: note = Description of Artificial Sequence: Synthetic peptide
AGSSSPA

SEQ ID NO: 28290 - protein, 7 aa, synthetic construct
  REGION 1..7: note = Description of Artificial Sequence: Synthetic peptide
GIDTKML

SEQ ID NO: 28291 - protein, 7 aa, synthetic construct
  REGION 1..7: note = Description of Artificial Sequence: Synthetic peptide
LVYDNTR

SEQ ID NO: 28292 - protein, 7 aa, synthetic construct
  REGION 1..7: note = Description of Artificial Sequence: Synthetic peptide
LLESTGR

SEQ ID NO: 28293 - protein, 7 aa, synthetic construct
  REGION 1..7: note = Description of Artificial Sequence: Synthetic peptide
LTPSNIG

SEQ ID NO: 28294 - protein, 7 aa, synthetic construct
  REGION 1..7: note = Description of Artificial Sequence: Synthetic peptide
SGGTHIA

SEQ ID NO: 28295 - protein, 7 aa, synthetic construct
  REGION 1..7: note = Description of Artificial Sequence: Synthetic peptide
GLAGSLQ

SEQ ID NO: 28296 - protein, 7 aa, synthetic construct
  REGION 1..7: note = Description of Artificial Sequence: Synthetic peptide
YTAAPGR

SEQ ID NO: 28297 - protein, 7 aa, synthetic construct
  REGION 1..7: note = Description of Artificial Sequence: Synthetic peptide
DSVTSSG

SEQ ID NO: 28298 - protein, 7 aa, synthetic construct
  REGION 1..7: note = Description of Artificial Sequence: Synthetic peptide
RISENMR

SEQ ID NO: 28299 - protein, 7 aa, synthetic construct
  REGION 1..7: note = Description of Artificial Sequence: Synthetic peptide
GSYSNPT

SEQ ID NO: 28300 - protein, 7 aa, synthetic construct
  REGION 1..7: note = Description of Artificial Sequence: Synthetic peptide
LPGSRLS

SEQ ID NO: 28301 - protein, 7 aa, synthetic construct
  REGION 1..7: note = Description of Artificial Sequence: Synthetic peptide
TSNTKSV

SEQ ID NO: 28302 - protein, 7 aa, synthetic construct
  REGION 1..7: note = Description of Artificial Sequence: Synthetic peptide
SHVNSTR

SEQ ID NO: 28303 - protein, 7 aa, synthetic construct
  REGION 1..7: note = Description of Artificial Sequence: Synthetic peptide
RNGQRVG

SEQ ID NO: 28304 - protein, 7 aa, synthetic construct
  REGION 1..7: note = Description of Artificial Sequence: Synthetic peptide
DAGAAPK

SEQ ID NO: 28305 - protein, 7 aa, synthetic construct
  REGION 1..7: note = Description of Artificial Sequence: Synthetic peptide
TQQKGSN

SEQ ID NO: 28306 - protein, 7 aa, synthetic construct
  REGION 1..7: note = Description of Artificial Sequence: Synthetic peptide
YRNTHSE

SEQ ID NO: 28307 - protein, 7 aa, synthetic construct
  REGION 1..7: note = Description of Artificial Sequence: Synthetic peptide
TLHDPRT

SEQ ID NO: 28308 - protein, 7 aa, synthetic construct
  REGION 1..7: note = Description of Artificial Sequence: Synthetic peptide
TGRGSEV

SEQ ID NO: 28309 - protein, 7 aa, synthetic construct
  REGION 1..7: note = Description of Artificial Sequence: Synthetic peptide
YNTTRMT

SEQ ID NO: 28310 - protein, 7 aa, synthetic construct
  REGION 1..7: note = Description of Artificial Sequence: Synthetic peptide
GQNTHLT

SEQ ID NO: 28311 - protein, 7 aa, synthetic construct
  REGION 1..7: note = Description of Artificial Sequence: Synthetic peptide
PSNTGTI

SEQ ID NO: 28312 - protein, 7 aa, synthetic construct
  REGION 1..7: note = Description of Artificial Sequence: Synthetic peptide
AMGSSLS

SEQ ID NO: 28313 - protein, 7 aa, synthetic construct
  REGION 1..7: note = Description of Artificial Sequence: Synthetic peptide
GFERNRE

SEQ ID NO: 28314 - protein, 7 aa, synthetic construct
  REGION 1..7: note = Description of Artificial Sequence: Synthetic peptide
GSNRNHA

SEQ ID NO: 28315 - protein, 7 aa, synthetic construct
  REGION 1..7: note = Description of Artificial Sequence: Synthetic peptide
LNGTPQS

SEQ ID NO: 28316 - protein, 7 aa, synthetic construct
  REGION 1..7: note = Description of Artificial Sequence: Synthetic peptide
RQIGKQV

SEQ ID NO: 28317 - protein, 7 aa, synthetic construct
  REGION 1..7: note = Description of Artificial Sequence: Synthetic peptide
PTRTASN

SEQ ID NO: 28318 - protein, 7 aa, synthetic construct
  REGION 1..7: note = Description of Artificial Sequence: Synthetic peptide
SNTRSLS

SEQ ID NO: 28319 - protein, 7 aa, synthetic construct
  REGION 1..7: note = Description of Artificial Sequence: Synthetic peptide
SRSPPSG

SEQ ID NO: 28320 - protein, 7 aa, synthetic construct
  REGION 1..7: note = Description of Artificial Sequence: Synthetic peptide
VVSSKGY

SEQ ID NO: 28321 - protein, 7 aa, synthetic construct
  REGION 1..7: note = Description of Artificial Sequence: Synthetic peptide
VSGHRSV

SEQ ID NO: 28322 - protein, 7 aa, synthetic construct
  REGION 1..7: note = Description of Artificial Sequence: Synthetic peptide
GNTGSYQ

SEQ ID NO: 28323 - protein, 7 aa, synthetic construct
  REGION 1..7: note = Description of Artificial Sequence: Synthetic peptide
GHDNGIQ

SEQ ID NO: 28324 - protein, 7 aa, synthetic construct
  REGION 1..7: note = Description of Artificial Sequence: Synthetic peptide
PLINRTM

SEQ ID NO: 28325 - protein, 7 aa, synthetic construct
  REGION 1..7: note = Description of Artificial Sequence: Synthetic peptide
GNNRPAS

SEQ ID NO: 28326 - protein, 7 aa, synthetic construct
  REGION 1..7: note = Description of Artificial Sequence: Synthetic peptide
ERGKNAL

SEQ ID NO: 28327 - protein, 7 aa, synthetic construct
  REGION 1..7: note = Description of Artificial Sequence: Synthetic peptide
PHQRAGS

SEQ ID NO: 28328 - protein, 7 aa, synthetic construct
  REGION 1..7: note = Description of Artificial Sequence: Synthetic peptide
SPNKTSL

SEQ ID NO: 28329 - protein, 7 aa, synthetic construct
  REGION 1..7: note = Description of Artificial Sequence: Synthetic peptide
NNVTKAP

SEQ ID NO: 28330 - protein, 7 aa, synthetic construct
  REGION 1..7: note = Description of Artificial Sequence: Synthetic peptide
SIKSVTN

SEQ ID NO: 28331 - protein, 7 aa, synthetic construct
  REGION 1..7: note = Description of Artificial Sequence: Synthetic peptide
HPTMNYS

SEQ ID NO: 28332 - protein, 7 aa, synthetic construct
  REGION 1..7: note = Description of Artificial Sequence: Synthetic peptide
HMRANVT

SEQ ID NO: 28333 - protein, 7 aa, synthetic construct
  REGION 1..7: note = Description of Artificial Sequence: Synthetic peptide
LTAKSSQ

SEQ ID NO: 28334 - protein, 7 aa, synthetic construct
  REGION 1..7: note = Description of Artificial Sequence: Synthetic peptide
SNRTSIV

SEQ ID NO: 28335 - protein, 7 aa, synthetic construct
  REGION 1..7: note = Description of Artificial Sequence: Synthetic peptide
DTNVDYR

SEQ ID NO: 28336 - protein, 7 aa, synthetic construct
  REGION 1..7: note = Description of Artificial Sequence: Synthetic peptide
PRSTTGG

SEQ ID NO: 28337 - protein, 7 aa, synthetic construct
  REGION 1..7: note = Description of Artificial Sequence: Synthetic peptide
MPARNVS

SEQ ID NO: 28338 - protein, 7 aa, synthetic construct
  REGION 1..7: note = Description of Artificial Sequence: Synthetic peptide
PRMRAVS

SEQ ID NO: 28339 - protein, 7 aa, synthetic construct
  REGION 1..7: note = Description of Artificial Sequence: Synthetic peptide
FGESRGR

SEQ ID NO: 28340 - protein, 7 aa, synthetic construct
  REGION 1..7: note = Description of Artificial Sequence: Synthetic peptide
MATAHGG

SEQ ID NO: 28341 - protein, 7 aa, synthetic construct
  REGION 1..7: note = Description of Artificial Sequence: Synthetic peptide
ALIDRGD

SEQ ID NO: 28342 - protein, 7 aa, synthetic construct
  REGION 1..7: note = Description of Artificial Sequence: Synthetic peptide
LPQGSIS

SEQ ID NO: 28343 - protein, 7 aa, synthetic construct
  REGION 1..7: note = Description of Artificial Sequence: Synthetic peptide
KLVNSNG

SEQ ID NO: 28344 - protein, 7 aa, synthetic construct
  REGION 1..7: note = Description of Artificial Sequence: Synthetic peptide
MNASVNR

SEQ ID NO: 28345 - protein, 7 aa, synthetic construct
  REGION 1..7: note = Description of Artificial Sequence: Synthetic peptide
LATNRSN

SEQ ID NO: 28346 - protein, 7 aa, synthetic construct
  REGION 1..7: note = Description of Artificial Sequence: Synthetic peptide
GRQVTPT

SEQ ID NO: 28347 - protein, 7 aa, synthetic construct
  REGION 1..7: note = Description of Artificial Sequence: Synthetic peptide
LGTSTMK

SEQ ID NO: 28348 - protein, 7 aa, synthetic construct
  REGION 1..7: note = Description of Artificial Sequence: Synthetic peptide
NPNQSLG

SEQ ID NO: 28349 - protein, 7 aa, synthetic construct
  REGION 1..7: note = Description of Artificial Sequence: Synthetic peptide
DFSEKRL

SEQ ID NO: 28350 - protein, 7 aa, synthetic construct
  REGION 1..7: note = Description of Artificial Sequence: Synthetic peptide
TSRVGQV

SEQ ID NO: 28351 - protein, 7 aa, synthetic construct
  REGION 1..7: note = Description of Artificial Sequence: Synthetic peptide
HTQSATG

SEQ ID NO: 28352 - protein, 7 aa, synthetic construct
  REGION 1..7: note = Description of Artificial Sequence: Synthetic peptide
ATTKAGI

SEQ ID NO: 28353 - protein, 7 aa, synthetic construct
  REGION 1..7: note = Description of Artificial Sequence: Synthetic peptide
QQYAKQA

SEQ ID NO: 28354 - protein, 7 aa, synthetic construct
  REGION 1..7: note = Description of Artificial Sequence: Synthetic peptide
SRHPSTG

SEQ ID NO: 28355 - protein, 7 aa, synthetic construct
  REGION 1..7: note = Description of Artificial Sequence: Synthetic peptide
LRNPTSK

SEQ ID NO: 28356 - protein, 7 aa, synthetic construct
  REGION 1..7: note = Description of Artificial Sequence: Synthetic peptide
NSYDPKR

SEQ ID NO: 28357 - protein, 7 aa, synthetic construct
  REGION 1..7: note = Description of Artificial Sequence: Synthetic peptide
TGLKDQH

SEQ ID NO: 28358 - protein, 7 aa, synthetic construct
  REGION 1..7: note = Description of Artificial Sequence: Synthetic peptide
ARDTVVR

SEQ ID NO: 28359 - protein, 7 aa, synthetic construct
  REGION 1..7: note = Description of Artificial Sequence: Synthetic peptide
SHDTSYR

SEQ ID NO: 28360 - protein, 7 aa, synthetic construct
  REGION 1..7: note = Description of Artificial Sequence: Synthetic peptide
NPRMSMS

SEQ ID NO: 28361 - protein, 7 aa, synthetic construct
  REGION 1..7: note = Description of Artificial Sequence: Synthetic peptide
LNTGIVR

SEQ ID NO: 28362 - protein, 7 aa, synthetic construct
  REGION 1..7: note = Description of Artificial Sequence: Synthetic peptide
TSHMQLS

SEQ ID NO: 28363 - protein, 7 aa, synthetic construct
  REGION 1..7: note = Description of Artificial Sequence: Synthetic peptide
NPVALRD

SEQ ID NO: 28364 - protein, 7 aa, synthetic construct
  REGION 1..7: note = Description of Artificial Sequence: Synthetic peptide
GNQSPRV

SEQ ID NO: 28365 - protein, 7 aa, synthetic construct
  REGION 1..7: note = Description of Artificial Sequence: Synthetic peptide
ATNSTPR

SEQ ID NO: 28366 - protein, 7 aa, synthetic construct
  REGION 1..7: note = Description of Artificial Sequence: Synthetic peptide
HRVDRSC

SEQ ID NO: 28367 - protein, 7 aa, synthetic construct
  REGION 1..7: note = Description of Artificial Sequence: Synthetic peptide
DRSATVK

SEQ ID NO: 28368 - protein, 7 aa, synthetic construct
  REGION 1..7: note = Description of Artificial Sequence: Synthetic peptide
VTLPPNA

SEQ ID NO: 28369 - protein, 7 aa, synthetic construct
  REGION 1..7: note = Description of Artificial Sequence: Synthetic peptide
NIAQKEL

SEQ ID NO: 28370 - protein, 7 aa, synthetic construct
  REGION 1..7: note = Description of Artificial Sequence: Synthetic peptide
HTTGILG

SEQ ID NO: 28371 - protein, 7 aa, synthetic construct
  REGION 1..7: note = Description of Artificial Sequence: Synthetic peptide
GIMATRG

SEQ ID NO: 28372 - protein, 7 aa, synthetic construct
  REGION 1..7: note = Description of Artificial Sequence: Synthetic peptide
TTSRPNV

SEQ ID NO: 28373 - protein, 7 aa, synthetic construct
  REGION 1..7: note = Description of Artificial Sequence: Synthetic peptide
PMARSAG

SEQ ID NO: 28374 - protein, 7 aa, synthetic construct
  REGION 1..7: note = Description of Artificial Sequence: Synthetic peptide
QSNDRAK

SEQ ID NO: 28375 - protein, 7 aa, synthetic construct
  REGION 1..7: note = Description of Artificial Sequence: Synthetic peptide
NSAGTRV

SEQ ID NO: 28376 - protein, 7 aa, synthetic construct
  REGION 1..7: note = Description of Artificial Sequence: Synthetic peptide
GPNQSGR

SEQ ID NO: 28377 - protein, 7 aa, synthetic construct
  REGION 1..7: note = Description of Artificial Sequence: Synthetic peptide
PQTSPRT

SEQ ID NO: 28378 - protein, 7 aa, synthetic construct
  REGION 1..7: note = Description of Artificial Sequence: Synthetic peptide
ADSNRPG

SEQ ID NO: 28379 - protein, 7 aa, synthetic construct
  REGION 1..7: note = Description of Artificial Sequence: Synthetic peptide
WDSKTPR

SEQ ID NO: 28380 - protein, 7 aa, synthetic construct
  REGION 1..7: note = Description of Artificial Sequence: Synthetic peptide
PSTSGAM

SEQ ID NO: 28381 - protein, 7 aa, synthetic construct
  REGION 1..7: note = Description of Artificial Sequence: Synthetic peptide
ILGNKSS

SEQ ID NO: 28382 - protein, 7 aa, synthetic construct
  REGION 1..7: note = Description of Artificial Sequence: Synthetic peptide
FNSSSSK

SEQ ID NO: 28383 - protein, 7 aa, synthetic construct
  REGION 1..7: note = Description of Artificial Sequence: Synthetic peptide
VDVRGMS

SEQ ID NO: 28384 - protein, 7 aa, synthetic construct
  REGION 1..7: note = Description of Artificial Sequence: Synthetic peptide
SSDSGRL

SEQ ID NO: 28385 - protein, 7 aa, synthetic construct
  REGION 1..7: note = Description of Artificial Sequence: Synthetic peptide
DSPNRGR

SEQ ID NO: 28386 - protein, 7 aa, synthetic construct
  REGION 1..7: note = Description of Artificial Sequence: Synthetic peptide
VTQSSSK

SEQ ID NO: 28387 - protein, 7 aa, synthetic construct
  REGION 1..7: note = Description of Artificial Sequence: Synthetic peptide
PGIRPEL

SEQ ID NO: 28388 - protein, 7 aa, synthetic construct
  REGION 1..7: note = Description of Artificial Sequence: Synthetic peptide
RTDHGGV

SEQ ID NO: 28389 - protein, 7 aa, synthetic construct
  REGION 1..7: note = Description of Artificial Sequence: Synthetic peptide
NVNSQML

SEQ ID NO: 28390 - protein, 7 aa, synthetic construct
  REGION 1..7: note = Description of Artificial Sequence: Synthetic peptide
AVRAHQQ

SEQ ID NO: 28391 - protein, 7 aa, synthetic construct
  REGION 1..7: note = Description of Artificial Sequence: Synthetic peptide
VPGKSAQ

SEQ ID NO: 28392 - protein, 7 aa, synthetic construct
  REGION 1..7: note = Description of Artificial Sequence: Synthetic peptide
LTPSNMG

SEQ ID NO: 28393 - protein, 7 aa, synthetic construct
  REGION 1..7: note = Description of Artificial Sequence: Synthetic peptide
GNGTRQN

SEQ ID NO: 28394 - protein, 7 aa, synthetic construct
  REGION 1..7: note = Description of Artificial Sequence: Synthetic peptide
GDITRLG

SEQ ID NO: 28395 - protein, 7 aa, synthetic construct
  REGION 1..7: note = Description of Artificial Sequence: Synthetic peptide
NSRESQG

SEQ ID NO: 28396 - protein, 7 aa, synthetic construct
  REGION 1..7: note = Description of Artificial Sequence: Synthetic peptide
PATRQPD

SEQ ID NO: 28397 - protein, 7 aa, synthetic construct
  REGION 1..7: note = Description of Artificial Sequence: Synthetic peptide
VTTSRGV

SEQ ID NO: 28398 - protein, 7 aa, synthetic construct
  REGION 1..7: note = Description of Artificial Sequence: Synthetic peptide
AGAPKTD

SEQ ID NO: 28399 - protein, 7 aa, synthetic construct
  REGION 1..7: note = Description of Artificial Sequence: Synthetic peptide
NRVEHTQ

SEQ ID NO: 28400 - protein, 7 aa, synthetic construct
  REGION 1..7: note = Description of Artificial Sequence: Synthetic peptide
QISASTR

SEQ ID NO: 28401 - protein, 7 aa, synthetic construct
  REGION 1..7: note = Description of Artificial Sequence: Synthetic peptide
QNVSTMN

SEQ ID NO: 28402 - protein, 7 aa, synthetic construct
  REGION 1..7: note = Description of Artificial Sequence: Synthetic peptide
VPLQKPS

SEQ ID NO: 28403 - protein, 7 aa, synthetic construct
  REGION 1..7: note = Description of Artificial Sequence: Synthetic peptide
VTRSRLD

SEQ ID NO: 28404 - protein, 7 aa, synthetic construct
  REGION 1..7: note = Description of Artificial Sequence: Synthetic peptide
YRTATSH

SEQ ID NO: 28405 - protein, 7 aa, synthetic construct
  REGION 1..7: note = Description of Artificial Sequence: Synthetic peptide
DVMPSGR

SEQ ID NO: 28406 - protein, 7 aa, synthetic construct
  REGION 1..7: note = Description of Artificial Sequence: Synthetic peptide
LDGRQHS

SEQ ID NO: 28407 - protein, 7 aa, synthetic construct
  REGION 1..7: note = Description of Artificial Sequence: Synthetic peptide
LRPNGQL

SEQ ID NO: 28408 - protein, 7 aa, synthetic construct
  REGION 1..7: note = Description of Artificial Sequence: Synthetic peptide
RGVGKLT

SEQ ID NO: 28409 - protein, 7 aa, synthetic construct
  REGION 1..7: note = Description of Artificial Sequence: Synthetic peptide
TSTSRSS

SEQ ID NO: 28410 - protein, 7 aa, synthetic construct
  REGION 1..7: note = Description of Artificial Sequence: Synthetic peptide
EPLQGSR

SEQ ID NO: 28411 - protein, 7 aa, synthetic construct
  REGION 1..7: note = Description of Artificial Sequence: Synthetic peptide
SQTVKTG

SEQ ID NO: 28412 - protein, 7 aa, synthetic construct
  REGION 1..7: note = Description of Artificial Sequence: Synthetic peptide
STSKDYT

SEQ ID NO: 28413 - protein, 7 aa, synthetic construct
  REGION 1..7: note = Description of Artificial Sequence: Synthetic peptide
RDTNRFG

SEQ ID NO: 28414 - protein, 7 aa, synthetic construct
  REGION 1..7: note = Description of Artificial Sequence: Synthetic peptide
SQIPPST

SEQ ID NO: 28415 - protein, 7 aa, synthetic construct
  REGION 1..7: note = Description of Artificial Sequence: Synthetic peptide
ASTPNNT

SEQ ID NO: 28416 - protein, 7 aa, synthetic construct
  REGION 1..7: note = Description of Artificial Sequence: Synthetic peptide
IHQKVNV

SEQ ID NO: 28417 - protein, 7 aa, synthetic construct
  REGION 1..7: note = Description of Artificial Sequence: Synthetic peptide
NHGSGTA

SEQ ID NO: 28418 - protein, 7 aa, synthetic construct
  REGION 1..7: note = Description of Artificial Sequence: Synthetic peptide
KCNSACQ

SEQ ID NO: 28419 - protein, 7 aa, synthetic construct
  REGION 1..7: note = Description of Artificial Sequence: Synthetic peptide
ASLKTQM

SEQ ID NO: 28420 - protein, 7 aa, synthetic construct
  REGION 1..7: note = Description of Artificial Sequence: Synthetic peptide
KLGQDVR

SEQ ID NO: 28421 - protein, 7 aa, synthetic construct
  REGION 1..7: note = Description of Artificial Sequence: Synthetic peptide
TPSVSTK

SEQ ID NO: 28422 - protein, 7 aa, synthetic construct
  REGION 1..7: note = Description of Artificial Sequence: Synthetic peptide
HTPEVGK

SEQ ID NO: 28423 - protein, 7 aa, synthetic construct
  REGION 1..7: note = Description of Artificial Sequence: Synthetic peptide
GIGSAAV

SEQ ID NO: 28424 - protein, 7 aa, synthetic construct
  REGION 1..7: note = Description of Artificial Sequence: Synthetic peptide
GGQASGR

SEQ ID NO: 28425 - protein, 7 aa, synthetic construct
  REGION 1..7: note = Description of Artificial Sequence: Synthetic peptide
RNDSRPP

SEQ ID NO: 28426 - protein, 7 aa, synthetic construct
  REGION 1..7: note = Description of Artificial Sequence: Synthetic peptide
WGGSADR

SEQ ID NO: 28427 - protein, 7 aa, synthetic construct
  REGION 1..7: note = Description of Artificial Sequence: Synthetic peptide
SGGKGPT

SEQ ID NO: 28428 - protein, 7 aa, synthetic construct
  REGION 1..7: note = Description of Artificial Sequence: Synthetic peptide
SSPLEHS

SEQ ID NO: 28429 - protein, 7 aa, synthetic construct
  REGION 1..7: note = Description of Artificial Sequence: Synthetic peptide
PMDYSRS

SEQ ID NO: 28430 - protein, 7 aa, synthetic construct
  REGION 1..7: note = Description of Artificial Sequence: Synthetic peptide
LINPAGS

SEQ ID NO: 28431 - protein, 7 aa, synthetic construct
  REGION 1..7: note = Description of Artificial Sequence: Synthetic peptide
PWGTNLD

SEQ ID NO: 28432 - protein, 7 aa, synthetic construct
  REGION 1..7: note = Description of Artificial Sequence: Synthetic peptide
QQASLSS

SEQ ID NO: 28433 - protein, 7 aa, synthetic construct
  REGION 1..7: note = Description of Artificial Sequence: Synthetic peptide
GSNINNG

SEQ ID NO: 28434 - protein, 7 aa, synthetic construct
  REGION 1..7: note = Description of Artificial Sequence: Synthetic peptide
PISHTTG

SEQ ID NO: 28435 - protein, 7 aa, synthetic construct
  REGION 1..7: note = Description of Artificial Sequence: Synthetic peptide
FASRPVQ

SEQ ID NO: 28436 - protein, 7 aa, synthetic construct
  REGION 1..7: note = Description of Artificial Sequence: Synthetic peptide
LGVHHTN

SEQ ID NO: 28437 - protein, 7 aa, synthetic construct
  REGION 1..7: note = Description of Artificial Sequence: Synthetic peptide
GYNKSLA

SEQ ID NO: 28438 - protein, 7 aa, synthetic construct
  REGION 1..7: note = Description of Artificial Sequence: Synthetic peptide
CPIRMSN

SEQ ID NO: 28439 - protein, 7 aa, synthetic construct
  REGION 1..7: note = Description of Artificial Sequence: Synthetic peptide
WSPERTI

SEQ ID NO: 28440 - protein, 7 aa, synthetic construct
  REGION 1..7: note = Description of Artificial Sequence: Synthetic peptide
MYSDRCA

SEQ ID NO: 28441 - protein, 7 aa, synthetic construct
  REGION 1..7: note = Description of Artificial Sequence: Synthetic peptide
HQTRTAA

SEQ ID NO: 28442 - protein, 7 aa, synthetic construct
  REGION 1..7: note = Description of Artificial Sequence: Synthetic peptide
VGSQTNS

SEQ ID NO: 28443 - protein, 7 aa, synthetic construct
  REGION 1..7: note = Description of Artificial Sequence: Synthetic peptide
SQPNSAY

SEQ ID NO: 28444 - protein, 7 aa, synthetic construct
  REGION 1..7: note = Description of Artificial Sequence: Synthetic peptide
GGVPSRL

SEQ ID NO: 28445 - protein, 7 aa, synthetic construct
  REGION 1..7: note = Description of Artificial Sequence: Synthetic peptide
TTVGSGY

SEQ ID NO: 28446 - protein, 7 aa, synthetic construct
  REGION 1..7: note = Description of Artificial Sequence: Synthetic peptide
KGSGQNQ

SEQ ID NO: 28447 - protein, 7 aa, synthetic construct
  REGION 1..7: note = Description of Artificial Sequence: Synthetic peptide
LNSGNGS

SEQ ID NO: 28448 - protein, 7 aa, synthetic construct
  REGION 1..7: note = Description of Artificial Sequence: Synthetic peptide
HTANSQS

SEQ ID NO: 28449 - protein, 7 aa, synthetic construct
  REGION 1..7: note = Description of Artificial Sequence: Synthetic peptide
SYPSQLN

SEQ ID NO: 28450 - protein, 7 aa, synthetic construct
  REGION 1..7: note = Description of Artificial Sequence: Synthetic peptide
SGASSNS

SEQ ID NO: 28451 - protein, 7 aa, synthetic construct
  REGION 1..7: note = Description of Artificial Sequence: Synthetic peptide
RLDRQQG

SEQ ID NO: 28452 - protein, 7 aa, synthetic construct
  REGION 1..7: note = Description of Artificial Sequence: Synthetic peptide
LVAGSPQ

SEQ ID NO: 28453 - protein, 7 aa, synthetic construct
  REGION 1..7: note = Description of Artificial Sequence: Synthetic peptide
TVPGRST

SEQ ID NO: 28454 - protein, 7 aa, synthetic construct
  REGION 1..7: note = Description of Artificial Sequence: Synthetic peptide
PSHGQNR

SEQ ID NO: 28455 - protein, 7 aa, synthetic construct
  REGION 1..7: note = Description of Artificial Sequence: Synthetic peptide
ENNSRAT

SEQ ID NO: 28456 - protein, 7 aa, synthetic construct
  REGION 1..7: note = Description of Artificial Sequence: Synthetic peptide
NNAATHS

SEQ ID NO: 28457 - protein, 7 aa, synthetic construct
  REGION 1..7: note = Description of Artificial Sequence: Synthetic peptide
NGSTSSG

SEQ ID NO: 28458 - protein, 7 aa, synthetic construct
  REGION 1..7: note = Description of Artificial Sequence: Synthetic peptide
HGMEVAR

SEQ ID NO: 28459 - protein, 7 aa, synthetic construct
  REGION 1..7: note = Description of Artificial Sequence: Synthetic peptide
CISPSSR

SEQ ID NO: 28460 - protein, 7 aa, synthetic construct
  REGION 1..7: note = Description of Artificial Sequence: Synthetic peptide
NPSMAMK

SEQ ID NO: 28461 - protein, 7 aa, synthetic construct
  REGION 1..7: note = Description of Artificial Sequence: Synthetic peptide
SKSQPPK

SEQ ID NO: 28462 - protein, 7 aa, synthetic construct
  REGION 1..7: note = Description of Artificial Sequence: Synthetic peptide
LNSMSPR

SEQ ID NO: 28463 - protein, 7 aa, synthetic construct
  REGION 1..7: note = Description of Artificial Sequence: Synthetic peptide
TQQNGRN

SEQ ID NO: 28464 - protein, 7 aa, synthetic construct
  REGION 1..7: note = Description of Artificial Sequence: Synthetic peptide
VSTPRLS

SEQ ID NO: 28465 - protein, 7 aa, synthetic construct
  REGION 1..7: note = Description of Artificial Sequence: Synthetic peptide
VTANRST

SEQ ID NO: 28466 - protein, 7 aa, synthetic construct
  REGION 1..7: note = Description of Artificial Sequence: Synthetic peptide
TQGSRLS

SEQ ID NO: 28467 - protein, 7 aa, synthetic construct
  REGION 1..7: note = Description of Artificial Sequence: Synthetic peptide
SNGSRLA

SEQ ID NO: 28468 - protein, 7 aa, synthetic construct
  REGION 1..7: note = Description of Artificial Sequence: Synthetic peptide
FSSKTSP

SEQ ID NO: 28469 - protein, 7 aa, synthetic construct
  REGION 1..7: note = Description of Artificial Sequence: Synthetic peptide
VSDSNTK

SEQ ID NO: 28470 - protein, 7 aa, synthetic construct
  REGION 1..7: note = Description of Artificial Sequence: Synthetic peptide
GALATYR

SEQ ID NO: 28471 - protein, 7 aa, synthetic construct
  REGION 1..7: note = Description of Artificial Sequence: Synthetic peptide
HRTSRDG

SEQ ID NO: 28472 - protein, 7 aa, synthetic construct
  REGION 1..7: note = Description of Artificial Sequence: Synthetic peptide
MRQTASL

SEQ ID NO: 28473 - protein, 7 aa, synthetic construct
  REGION 1..7: note = Description of Artificial Sequence: Synthetic peptide
SVTGGRG

SEQ ID NO: 28474 - protein, 7 aa, synthetic construct
  REGION 1..7: note = Description of Artificial Sequence: Synthetic peptide
TTQSRSL

SEQ ID NO: 28475 - protein, 7 aa, synthetic construct
  REGION 1..7: note = Description of Artificial Sequence: Synthetic peptide
LNRGKPV

SEQ ID NO: 28476 - protein, 7 aa, synthetic construct
  REGION 1..7: note = Description of Artificial Sequence: Synthetic peptide
SRLEKSN

SEQ ID NO: 28477 - protein, 7 aa, synthetic construct
  REGION 1..7: note = Description of Artificial Sequence: Synthetic peptide
RVRADDD

SEQ ID NO: 28478 - protein, 7 aa, synthetic construct
  REGION 1..7: note = Description of Artificial Sequence: Synthetic peptide
VSTGSFT

SEQ ID NO: 28479 - protein, 7 aa, synthetic construct
  REGION 1..7: note = Description of Artificial Sequence: Synthetic peptide
SGVERVN

SEQ ID NO: 28480 - protein, 7 aa, synthetic construct
  REGION 1..7: note = Description of Artificial Sequence: Synthetic peptide
PSNSKCG

SEQ ID NO: 28481 - protein, 7 aa, synthetic construct
  REGION 1..7: note = Description of Artificial Sequence: Synthetic peptide
YHLNSQS

SEQ ID NO: 28482 - protein, 7 aa, synthetic construct
  REGION 1..7: note = Description of Artificial Sequence: Synthetic peptide
NTSTNGI

SEQ ID NO: 28483 - protein, 7 aa, synthetic construct
  REGION 1..7: note = Description of Artificial Sequence: Synthetic peptide
SHNRTND

SEQ ID NO: 28484 - protein, 7 aa, synthetic construct
  REGION 1..7: note = Description of Artificial Sequence: Synthetic peptide
GSQRAPG

SEQ ID NO: 28485 - protein, 7 aa, synthetic construct
  REGION 1..7: note = Description of Artificial Sequence: Synthetic peptide
LGTSTIL

SEQ ID NO: 28486 - protein, 7 aa, synthetic construct
  REGION 1..7: note = Description of Artificial Sequence: Synthetic peptide
MMNRSAS

SEQ ID NO: 28487 - protein, 7 aa, synthetic construct
  REGION 1..7: note = Description of Artificial Sequence: Synthetic peptide
FANTANR

SEQ ID NO: 28488 - protein, 7 aa, synthetic construct
  REGION 1..7: note = Description of Artificial Sequence: Synthetic peptide
TSNSNIA

SEQ ID NO: 28489 - protein, 7 aa, synthetic construct
  REGION 1..7: note = Description of Artificial Sequence: Synthetic peptide
LDKEPRG

SEQ ID NO: 28490 - protein, 7 aa, synthetic construct
  REGION 1..7: note = Description of Artificial Sequence: Synthetic peptide
YGNPRQA

SEQ ID NO: 28491 - protein, 7 aa, synthetic construct
  REGION 1..7: note = Description of Artificial Sequence: Synthetic peptide
IQSPGNM

SEQ ID NO: 28492 - protein, 7 aa, synthetic construct
  REGION 1..7: note = Description of Artificial Sequence: Synthetic peptide
DPVRKTS

SEQ ID NO: 28493 - protein, 7 aa, synthetic construct
  REGION 1..7: note = Description of Artificial Sequence: Synthetic peptide
CCTVPLV

SEQ ID NO: 28494 - protein, 7 aa, synthetic construct
  REGION 1..7: note = Description of Artificial Sequence: Synthetic peptide
KNIGSHG

SEQ ID NO: 28495 - protein, 7 aa, synthetic construct
  REGION 1..7: note = Description of Artificial Sequence: Synthetic peptide
AASMEYS

SEQ ID NO: 28496 - protein, 7 aa, synthetic construct
  REGION 1..7: note = Description of Artificial Sequence: Synthetic peptide
SNGTKRQ

SEQ ID NO: 28497 - protein, 7 aa, synthetic construct
  REGION 1..7: note = Description of Artificial Sequence: Synthetic peptide
NVESKSC

SEQ ID NO: 28498 - protein, 7 aa, synthetic construct
  REGION 1..7: note = Description of Artificial Sequence: Synthetic peptide
MLPQHGR

SEQ ID NO: 28499 - protein, 7 aa, synthetic construct
  REGION 1..7: note = Description of Artificial Sequence: Synthetic peptide
TGSGSNH

SEQ ID NO: 28500 - protein, 7 aa, synthetic construct
  REGION 1..7: note = Description of Artificial Sequence: Synthetic peptide
LRNGIAS

SEQ ID NO: 28501 - protein, 7 aa, synthetic construct
  REGION 1..7: note = Description of Artificial Sequence: Synthetic peptide
MRSGTHN

SEQ ID NO: 28502 - protein, 7 aa, synthetic construct
  REGION 1..7: note = Description of Artificial Sequence: Synthetic peptide
TSNTKQG

SEQ ID NO: 28503 - protein, 7 aa, synthetic construct
  REGION 1..7: note = Description of Artificial Sequence: Synthetic peptide
PGMAGRG

SEQ ID NO: 28504 - protein, 7 aa, synthetic construct
  REGION 1..7: note = Description of Artificial Sequence: Synthetic peptide
PSNRQIA

SEQ ID NO: 28505 - protein, 7 aa, synthetic construct
  REGION 1..7: note = Description of Artificial Sequence: Synthetic peptide
DGLRNSL

SEQ ID NO: 28506 - protein, 7 aa, synthetic construct
  REGION 1..7: note = Description of Artificial Sequence: Synthetic peptide
PSTPTIK

SEQ ID NO: 28507 - protein, 7 aa, synthetic construct
  REGION 1..7: note = Description of Artificial Sequence: Synthetic peptide
EVHAKNN

SEQ ID NO: 28508 - protein, 7 aa, synthetic construct
  REGION 1..7: note = Description of Artificial Sequence: Synthetic peptide
NNAHRVA

SEQ ID NO: 28509 - protein, 7 aa, synthetic construct
  REGION 1..7: note = Description of Artificial Sequence: Synthetic peptide
KDNTPGR

SEQ ID NO: 28510 - protein, 7 aa, synthetic construct
  REGION 1..7: note = Description of Artificial Sequence: Synthetic peptide
SLGRDHA

SEQ ID NO: 28511 - protein, 7 aa, synthetic construct
  REGION 1..7: note = Description of Artificial Sequence: Synthetic peptide
TNIQASK

SEQ ID NO: 28512 - protein, 7 aa, synthetic construct
  REGION 1..7: note = Description of Artificial Sequence: Synthetic peptide
QGTHTLR

SEQ ID NO: 28513 - protein, 7 aa, synthetic construct
  REGION 1..7: note = Description of Artificial Sequence: Synthetic peptide
TGSGTIL

SEQ ID NO: 28514 - protein, 7 aa, synthetic construct
  REGION 1..7: note = Description of Artificial Sequence: Synthetic peptide
AQHELRA

SEQ ID NO: 28515 - protein, 7 aa, synthetic construct
  REGION 1..7: note = Description of Artificial Sequence: Synthetic peptide
HVDTRHV

SEQ ID NO: 28516 - protein, 7 aa, synthetic construct
  REGION 1..7: note = Description of Artificial Sequence: Synthetic peptide
SGGKSAL

SEQ ID NO: 28517 - protein, 7 aa, synthetic construct
  REGION 1..7: note = Description of Artificial Sequence: Synthetic peptide
MAGNPHS

SEQ ID NO: 28518 - protein, 7 aa, synthetic construct
  REGION 1..7: note = Description of Artificial Sequence: Synthetic peptide
NRVQPAS

SEQ ID NO: 28519 - protein, 7 aa, synthetic construct
  REGION 1..7: note = Description of Artificial Sequence: Synthetic peptide
EAKANGK

SEQ ID NO: 28520 - protein, 7 aa, synthetic construct
  REGION 1..7: note = Description of Artificial Sequence: Synthetic peptide
GTVRTLH

SEQ ID NO: 28521 - protein, 7 aa, synthetic construct
  REGION 1..7: note = Description of Artificial Sequence: Synthetic peptide
QTSATQR

SEQ ID NO: 28522 - protein, 7 aa, synthetic construct
  REGION 1..7: note = Description of Artificial Sequence: Synthetic peptide
PGGKSQL

SEQ ID NO: 28523 - protein, 7 aa, synthetic construct
  REGION 1..7: note = Description of Artificial Sequence: Synthetic peptide
RTVPSSL

SEQ ID NO: 28524 - protein, 7 aa, synthetic construct
  REGION 1..7: note = Description of Artificial Sequence: Synthetic peptide
VLSSSPK

SEQ ID NO: 28525 - protein, 7 aa, synthetic construct
  REGION 1..7: note = Description of Artificial Sequence: Synthetic peptide
CGRSGGG

SEQ ID NO: 28526 - protein, 7 aa, synthetic construct
  REGION 1..7: note = Description of Artificial Sequence: Synthetic peptide
QNSKGYV

SEQ ID NO: 28527 - protein, 7 aa, synthetic construct
  REGION 1..7: note = Description of Artificial Sequence: Synthetic peptide
YQNKSLT

SEQ ID NO: 28528 - protein, 7 aa, synthetic construct
  REGION 1..7: note = Description of Artificial Sequence: Synthetic peptide
TSRTSYE

SEQ ID NO: 28529 - protein, 7 aa, synthetic construct
  REGION 1..7: note = Description of Artificial Sequence: Synthetic peptide
MQTSQST

SEQ ID NO: 28530 - protein, 7 aa, synthetic construct
  REGION 1..7: note = Description of Artificial Sequence: Synthetic peptide
NGCGQNQ

SEQ ID NO: 28531 - protein, 7 aa, synthetic construct
  REGION 1..7: note = Description of Artificial Sequence: Synthetic peptide
SFPPGNV

SEQ ID NO: 28532 - protein, 7 aa, synthetic construct
  REGION 1..7: note = Description of Artificial Sequence: Synthetic peptide
PTGAHVT

SEQ ID NO: 28533 - protein, 7 aa, synthetic construct
  REGION 1..7: note = Description of Artificial Sequence: Synthetic peptide
DSKQNLT

SEQ ID NO: 28534 - protein, 7 aa, synthetic construct
  REGION 1..7: note = Description of Artificial Sequence: Synthetic peptide
LIRGGNN

SEQ ID NO: 28535 - protein, 7 aa, synthetic construct
  REGION 1..7: note = Description of Artificial Sequence: Synthetic peptide
GLKNEPA

SEQ ID NO: 28536 - protein, 7 aa, synthetic construct
  REGION 1..7: note = Description of Artificial Sequence: Synthetic peptide
HASRVNI

SEQ ID NO: 28537 - protein, 7 aa, synthetic construct
  REGION 1..7: note = Description of Artificial Sequence: Synthetic peptide
LNLKPIN

SEQ ID NO: 28538 - protein, 7 aa, synthetic construct
  REGION 1..7: note = Description of Artificial Sequence: Synthetic peptide
TTQTPYK

SEQ ID NO: 28539 - protein, 7 aa, synthetic construct
  REGION 1..7: note = Description of Artificial Sequence: Synthetic peptide
IGLGNTP

SEQ ID NO: 28540 - protein, 7 aa, synthetic construct
  REGION 1..7: note = Description of Artificial Sequence: Synthetic peptide
NCSGQKQ

SEQ ID NO: 28541 - protein, 7 aa, synthetic construct
  REGION 1..7: note = Description of Artificial Sequence: Synthetic peptide
SQVSHSV

SEQ ID NO: 28542 - protein, 7 aa, synthetic construct
  REGION 1..7: note = Description of Artificial Sequence: Synthetic peptide
WNKTSPQ

SEQ ID NO: 28543 - protein, 7 aa, synthetic construct
  REGION 1..7: note = Description of Artificial Sequence: Synthetic peptide
QGSGSNH

SEQ ID NO: 28544 - protein, 7 aa, synthetic construct
  REGION 1..7: note = Description of Artificial Sequence: Synthetic peptide
ALRNQSQ

SEQ ID NO: 28545 - protein, 7 aa, synthetic construct
  REGION 1..7: note = Description of Artificial Sequence: Synthetic peptide
PADHGKL

SEQ ID NO: 28546 - protein, 7 aa, synthetic construct
  REGION 1..7: note = Description of Artificial Sequence: Synthetic peptide
DSIGSSK

SEQ ID NO: 28547 - protein, 7 aa, synthetic construct
  REGION 1..7: note = Description of Artificial Sequence: Synthetic peptide
NGITKSS

SEQ ID NO: 28548 - protein, 7 aa, synthetic construct
  REGION 1..7: note = Description of Artificial Sequence: Synthetic peptide
PLQATGK

SEQ ID NO: 28549 - protein, 7 aa, synthetic construct
  REGION 1..7: note = Description of Artificial Sequence: Synthetic peptide
SRVRDSH

SEQ ID NO: 28550 - protein, 7 aa, synthetic construct
  REGION 1..7: note = Description of Artificial Sequence: Synthetic peptide
SYGKESS

SEQ ID NO: 28551 - protein, 7 aa, synthetic construct
  REGION 1..7: note = Description of Artificial Sequence: Synthetic peptide
RLVDSHK

SEQ ID NO: 28552 - protein, 7 aa, synthetic construct
  REGION 1..7: note = Description of Artificial Sequence: Synthetic peptide
YVSSGKA

SEQ ID NO: 28553 - protein, 7 aa, synthetic construct
  REGION 1..7: note = Description of Artificial Sequence: Synthetic peptide
QSTVESR

SEQ ID NO: 28554 - protein, 7 aa, synthetic construct
  REGION 1..7: note = Description of Artificial Sequence: Synthetic peptide
SSSTSPR

SEQ ID NO: 28555 - protein, 7 aa, synthetic construct
  REGION 1..7: note = Description of Artificial Sequence: Synthetic peptide
RPGGKDG

SEQ ID NO: 28556 - protein, 7 aa, synthetic construct
  REGION 1..7: note = Description of Artificial Sequence: Synthetic peptide
SPTRPMN

SEQ ID NO: 28557 - protein, 7 aa, synthetic construct
  REGION 1..7: note = Description of Artificial Sequence: Synthetic peptide
SSQMHGS

SEQ ID NO: 28558 - protein, 7 aa, synthetic construct
  REGION 1..7: note = Description of Artificial Sequence: Synthetic peptide
TGRAPSS

SEQ ID NO: 28559 - protein, 7 aa, synthetic construct
  REGION 1..7: note = Description of Artificial Sequence: Synthetic peptide
QSNTSPT

SEQ ID NO: 28560 - protein, 7 aa, synthetic construct
  REGION 1..7: note = Description of Artificial Sequence: Synthetic peptide
GTISHMT

SEQ ID NO: 28561 - protein, 7 aa, synthetic construct
  REGION 1..7: note = Description of Artificial Sequence: Synthetic peptide
IPASSSG

SEQ ID NO: 28562 - protein, 7 aa, synthetic construct
  REGION 1..7: note = Description of Artificial Sequence: Synthetic peptide
LATANSR

SEQ ID NO: 28563 - protein, 7 aa, synthetic construct
  REGION 1..7: note = Description of Artificial Sequence: Synthetic peptide
GTADRHL

SEQ ID NO: 28564 - protein, 7 aa, synthetic construct
  REGION 1..7: note = Description of Artificial Sequence: Synthetic peptide
THQSSTS

SEQ ID NO: 28565 - protein, 7 aa, synthetic construct
  REGION 1..7: note = Description of Artificial Sequence: Synthetic peptide
SPNNRGM

SEQ ID NO: 28566 - protein, 7 aa, synthetic construct
  REGION 1..7: note = Description of Artificial Sequence: Synthetic peptide
GGGTSFG

SEQ ID NO: 28567 - protein, 7 aa, synthetic construct
  REGION 1..7: note = Description of Artificial Sequence: Synthetic peptide
RPHDNDN

SEQ ID NO: 28568 - protein, 7 aa, synthetic construct
  REGION 1..7: note = Description of Artificial Sequence: Synthetic peptide
YPNGKSS

SEQ ID NO: 28569 - protein, 7 aa, synthetic construct
  REGION 1..7: note = Description of Artificial Sequence: Synthetic peptide
IRSKESE

SEQ ID NO: 28570 - protein, 7 aa, synthetic construct
  REGION 1..7: note = Description of Artificial Sequence: Synthetic peptide
GQVKQAL

SEQ ID NO: 28571 - protein, 7 aa, synthetic construct
  REGION 1..7: note = Description of Artificial Sequence: Synthetic peptide
KQPVSTH

SEQ ID NO: 28572 - protein, 7 aa, synthetic construct
  REGION 1..7: note = Description of Artificial Sequence: Synthetic peptide
TQQNGSN

SEQ ID NO: 28573 - protein, 7 aa, synthetic construct
  REGION 1..7: note = Description of Artificial Sequence: Synthetic peptide
GGDNKLT

SEQ ID NO: 28574 - protein, 7 aa, synthetic construct
  REGION 1..7: note = Description of Artificial Sequence: Synthetic peptide
YSGGNMS

SEQ ID NO: 28575 - protein, 7 aa, synthetic construct
  REGION 1..7: note = Description of Artificial Sequence: Synthetic peptide
SHDSRVA

SEQ ID NO: 28576 - protein, 7 aa, synthetic construct
  REGION 1..7: note = Description of Artificial Sequence: Synthetic peptide
QYNQAGL

SEQ ID NO: 28577 - protein, 7 aa, synthetic construct
  REGION 1..7: note = Description of Artificial Sequence: Synthetic peptide
SNSASYG

SEQ ID NO: 28578 - protein, 7 aa, synthetic construct
  REGION 1..7: note = Description of Artificial Sequence: Synthetic peptide
FTVTGLS

SEQ ID NO: 28579 - protein, 7 aa, synthetic construct
  REGION 1..7: note = Description of Artificial Sequence: Synthetic peptide
HGRTSVL

SEQ ID NO: 28580 - protein, 7 aa, synthetic construct
  REGION 1..7: note = Description of Artificial Sequence: Synthetic peptide
MGNAGVR

SEQ ID NO: 28581 - protein, 7 aa, synthetic construct
  REGION 1..7: note = Description of Artificial Sequence: Synthetic peptide
DCVSRCK

SEQ ID NO: 28582 - protein, 7 aa, synthetic construct
  REGION 1..7: note = Description of Artificial Sequence: Synthetic peptide
GVNIHAS

SEQ ID NO: 28583 - protein, 7 aa, synthetic construct
  REGION 1..7: note = Description of Artificial Sequence: Synthetic peptide
RNSASIF

SEQ ID NO: 28584 - protein, 7 aa, synthetic construct
  REGION 1..7: note = Description of Artificial Sequence: Synthetic peptide
QANTSTD

SEQ ID NO: 28585 - protein, 7 aa, synthetic construct
  REGION 1..7: note = Description of Artificial Sequence: Synthetic peptide
IANAHYN

SEQ ID NO: 28586 - protein, 7 aa, synthetic construct
  REGION 1..7: note = Description of Artificial Sequence: Synthetic peptide
TTTTRPS

SEQ ID NO: 28587 - protein, 7 aa, synthetic construct
  REGION 1..7: note = Description of Artificial Sequence: Synthetic peptide
VLNAKSS

SEQ ID NO: 28588 - protein, 7 aa, synthetic construct
  REGION 1..7: note = Description of Artificial Sequence: Synthetic peptide
PGQSTSS

SEQ ID NO: 28589 - protein, 7 aa, synthetic construct
  REGION 1..7: note = Description of Artificial Sequence: Synthetic peptide
GDAGSFS

SEQ ID NO: 28590 - protein, 7 aa, synthetic construct
  REGION 1..7: note = Description of Artificial Sequence: Synthetic peptide
VQGSLPS

SEQ ID NO: 28591 - protein, 7 aa, synthetic construct
  REGION 1..7: note = Description of Artificial Sequence: Synthetic peptide
AHRNISS

SEQ ID NO: 28592 - protein, 7 aa, synthetic construct
  REGION 1..7: note = Description of Artificial Sequence: Synthetic peptide
VGNNNRL

SEQ ID NO: 28593 - protein, 7 aa, synthetic construct
  REGION 1..7: note = Description of Artificial Sequence: Synthetic peptide
PQSRKGE

SEQ ID NO: 28594 - protein, 7 aa, synthetic construct
  REGION 1..7: note = Description of Artificial Sequence: Synthetic peptide
IGSGQNQ

SEQ ID NO: 28595 - protein, 7 aa, synthetic construct
  REGION 1..7: note = Description of Artificial Sequence: Synthetic peptide
RIPNNPS

SEQ ID NO: 28596 - protein, 7 aa, synthetic construct
  REGION 1..7: note = Description of Artificial Sequence: Synthetic peptide
KNQAPLL

SEQ ID NO: 28597 - protein, 7 aa, synthetic construct
  REGION 1..7: note = Description of Artificial Sequence: Synthetic peptide
SSRASQD

SEQ ID NO: 28598 - protein, 7 aa, synthetic construct
  REGION 1..7: note = Description of Artificial Sequence: Synthetic peptide
RTGREVD

SEQ ID NO: 28599 - protein, 7 aa, synthetic construct
  REGION 1..7: note = Description of Artificial Sequence: Synthetic peptide
NNVPLIK

SEQ ID NO: 28600 - protein, 7 aa, synthetic construct
  REGION 1..7: note = Description of Artificial Sequence: Synthetic peptide
YGSNTPT

SEQ ID NO: 28601 - protein, 7 aa, synthetic construct
  REGION 1..7: note = Description of Artificial Sequence: Synthetic peptide
RPSSVKD

SEQ ID NO: 28602 - protein, 7 aa, synthetic construct
  REGION 1..7: note = Description of Artificial Sequence: Synthetic peptide
YSRTQQS

SEQ ID NO: 28603 - protein, 7 aa, synthetic construct
  REGION 1..7: note = Description of Artificial Sequence: Synthetic peptide
RDVGSAA

SEQ ID NO: 28604 - protein, 7 aa, synthetic construct
  REGION 1..7: note = Description of Artificial Sequence: Synthetic peptide
QGQNRTV

SEQ ID NO: 28605 - protein, 7 aa, synthetic construct
  REGION 1..7: note = Description of Artificial Sequence: Synthetic peptide
SQSSPVA

SEQ ID NO: 28606 - protein, 7 aa, synthetic construct
  REGION 1..7: note = Description of Artificial Sequence: Synthetic peptide
STHDHSR

SEQ ID NO: 28607 - protein, 7 aa, synthetic construct
  REGION 1..7: note = Description of Artificial Sequence: Synthetic peptide
RNVSGMN

SEQ ID NO: 28608 - protein, 7 aa, synthetic construct
  REGION 1..7: note = Description of Artificial Sequence: Synthetic peptide
IRAKESA

SEQ ID NO: 28609 - protein, 7 aa, synthetic construct
  REGION 1..7: note = Description of Artificial Sequence: Synthetic peptide
HANSPAT

SEQ ID NO: 28610 - protein, 7 aa, synthetic construct
  REGION 1..7: note = Description of Artificial Sequence: Synthetic peptide
RMTTMQA

SEQ ID NO: 28611 - protein, 7 aa, synthetic construct
  REGION 1..7: note = Description of Artificial Sequence: Synthetic peptide
SGTTRTL

SEQ ID NO: 28612 - protein, 7 aa, synthetic construct
  REGION 1..7: note = Description of Artificial Sequence: Synthetic peptide
GLDHLRT

SEQ ID NO: 28613 - protein, 7 aa, synthetic construct
  REGION 1..7: note = Description of Artificial Sequence: Synthetic peptide
LSLNKSQ

SEQ ID NO: 28614 - protein, 7 aa, synthetic construct
  REGION 1..7: note = Description of Artificial Sequence: Synthetic peptide
GAAVQAN

SEQ ID NO: 28615 - protein, 7 aa, synthetic construct
  REGION 1..7: note = Description of Artificial Sequence: Synthetic peptide
FNSNRDS

SEQ ID NO: 28616 - protein, 7 aa, synthetic construct
  REGION 1..7: note = Description of Artificial Sequence: Synthetic peptide
VHTGQNG

SEQ ID NO: 28617 - protein, 7 aa, synthetic construct
  REGION 1..7: note = Description of Artificial Sequence: Synthetic peptide
ESNRSQV

SEQ ID NO: 28618 - protein, 7 aa, synthetic construct
  REGION 1..7: note = Description of Artificial Sequence: Synthetic peptide
AGTNSRQ

SEQ ID NO: 28619 - protein, 7 aa, synthetic construct
  REGION 1..7: note = Description of Artificial Sequence: Synthetic peptide
SAVGKAS

SEQ ID NO: 28620 - protein, 7 aa, synthetic construct
  REGION 1..7: note = Description of Artificial Sequence: Synthetic peptide
TVLGARG

SEQ ID NO: 28621 - protein, 7 aa, synthetic construct
  REGION 1..7: note = Description of Artificial Sequence: Synthetic peptide
NRQSSPT

SEQ ID NO: 28622 - protein, 7 aa, synthetic construct
  REGION 1..7: note = Description of Artificial Sequence: Synthetic peptide
MNTSRSS

SEQ ID NO: 28623 - protein, 7 aa, synthetic construct
  REGION 1..7: note = Description of Artificial Sequence: Synthetic peptide
ANGTKSS

SEQ ID NO: 28624 - protein, 7 aa, synthetic construct
  REGION 1..7: note = Description of Artificial Sequence: Synthetic peptide
SPLQSIV

SEQ ID NO: 28625 - protein, 7 aa, synthetic construct
  REGION 1..7: note = Description of Artificial Sequence: Synthetic peptide
YRVGSIS

SEQ ID NO: 28626 - protein, 7 aa, synthetic construct
  REGION 1..7: note = Description of Artificial Sequence: Synthetic peptide
NSGHSHD

SEQ ID NO: 28627 - protein, 7 aa, synthetic construct
  REGION 1..7: note = Description of Artificial Sequence: Synthetic peptide
QNRNTVG

SEQ ID NO: 28628 - protein, 7 aa, synthetic construct
  REGION 1..7: note = Description of Artificial Sequence: Synthetic peptide
PTKANVT

SEQ ID NO: 28629 - protein, 7 aa, synthetic construct
  REGION 1..7: note = Description of Artificial Sequence: Synthetic peptide
FRVTGST

SEQ ID NO: 28630 - protein, 7 aa, synthetic construct
  REGION 1..7: note = Description of Artificial Sequence: Synthetic peptide
ITSGSTR

SEQ ID NO: 28631 - protein, 7 aa, synthetic construct
  REGION 1..7: note = Description of Artificial Sequence: Synthetic peptide
SPTSPMN

SEQ ID NO: 28632 - protein, 7 aa, synthetic construct
  REGION 1..7: note = Description of Artificial Sequence: Synthetic peptide
ELAAPSK

SEQ ID NO: 28633 - protein, 7 aa, synthetic construct
  REGION 1..7: note = Description of Artificial Sequence: Synthetic peptide
PPNLKLS

SEQ ID NO: 28634 - protein, 7 aa, synthetic construct
  REGION 1..7: note = Description of Artificial Sequence: Synthetic peptide
NSNSHGS

SEQ ID NO: 28635 - protein, 7 aa, synthetic construct
  REGION 1..7: note = Description of Artificial Sequence: Synthetic peptide
NLGQNLS

SEQ ID NO: 28636 - protein, 7 aa, synthetic construct
  REGION 1..7: note = Description of Artificial Sequence: Synthetic peptide
NLGATAS

SEQ ID NO: 28637 - protein, 7 aa, synthetic construct
  REGION 1..7: note = Description of Artificial Sequence: Synthetic peptide
NMPMRSG

SEQ ID NO: 28638 - protein, 7 aa, synthetic construct
  REGION 1..7: note = Description of Artificial Sequence: Synthetic peptide
SLPLAIN

SEQ ID NO: 28639 - protein, 7 aa, synthetic construct
  REGION 1..7: note = Description of Artificial Sequence: Synthetic peptide
PQNNQAH

SEQ ID NO: 28640 - protein, 7 aa, synthetic construct
  REGION 1..7: note = Description of Artificial Sequence: Synthetic peptide
SSEAATR

SEQ ID NO: 28641 - protein, 7 aa, synthetic construct
  REGION 1..7: note = Description of Artificial Sequence: Synthetic peptide
SVSSPRD

SEQ ID NO: 28642 - protein, 7 aa, synthetic construct
  REGION 1..7: note = Description of Artificial Sequence: Synthetic peptide
PGYGSNH

SEQ ID NO: 28643 - protein, 7 aa, synthetic construct
  REGION 1..7: note = Description of Artificial Sequence: Synthetic peptide
KIPNYDR

SEQ ID NO: 28644 - protein, 7 aa, synthetic construct
  REGION 1..7: note = Description of Artificial Sequence: Synthetic peptide
PLQTSRT

SEQ ID NO: 28645 - protein, 7 aa, synthetic construct
  REGION 1..7: note = Description of Artificial Sequence: Synthetic peptide
RDPKAGV

SEQ ID NO: 28646 - protein, 7 aa, synthetic construct
  REGION 1..7: note = Description of Artificial Sequence: Synthetic peptide
NATANGQ

SEQ ID NO: 28647 - protein, 7 aa, synthetic construct
  REGION 1..7: note = Description of Artificial Sequence: Synthetic peptide
TGSGRLL

SEQ ID NO: 28648 - protein, 7 aa, synthetic construct
  REGION 1..7: note = Description of Artificial Sequence: Synthetic peptide
ITGSLSK

SEQ ID NO: 28649 - protein, 7 aa, synthetic construct
  REGION 1..7: note = Description of Artificial Sequence: Synthetic peptide
WSLGSQS

SEQ ID NO: 28650 - protein, 7 aa, synthetic construct
  REGION 1..7: note = Description of Artificial Sequence: Synthetic peptide
TPTPVNQ

SEQ ID NO: 28651 - protein, 7 aa, synthetic construct
  REGION 1..7: note = Description of Artificial Sequence: Synthetic peptide
SDMSGQR

SEQ ID NO: 28652 - protein, 7 aa, synthetic construct
  REGION 1..7: note = Description of Artificial Sequence: Synthetic peptide
PGDSGKV

SEQ ID NO: 28653 - protein, 7 aa, synthetic construct
  REGION 1..7: note = Description of Artificial Sequence: Synthetic peptide
GVNRIPA

SEQ ID NO: 28654 - protein, 7 aa, synthetic construct
  REGION 1..7: note = Description of Artificial Sequence: Synthetic peptide
ERAKGSS

SEQ ID NO: 28655 - protein, 7 aa, synthetic construct
  REGION 1..7: note = Description of Artificial Sequence: Synthetic peptide
AVSKGGP

SEQ ID NO: 28656 - protein, 7 aa, synthetic construct
  REGION 1..7: note = Description of Artificial Sequence: Synthetic peptide
GTNPGTL

SEQ ID NO: 28657 - protein, 7 aa, synthetic construct
  REGION 1..7: note = Description of Artificial Sequence: Synthetic peptide
AYGKGSS

SEQ ID NO: 28658 - protein, 7 aa, synthetic construct
  REGION 1..7: note = Description of Artificial Sequence: Synthetic peptide
LSIKGAS

SEQ ID NO: 28659 - protein, 7 aa, synthetic construct
  REGION 1..7: note = Description of Artificial Sequence: Synthetic peptide
SQWQSSS

SEQ ID NO: 28660 - protein, 7 aa, synthetic construct
  REGION 1..7: note = Description of Artificial Sequence: Synthetic peptide
SNTRDIK

SEQ ID NO: 28661 - protein, 7 aa, synthetic construct
  REGION 1..7: note = Description of Artificial Sequence: Synthetic peptide
NSSHNSP

SEQ ID NO: 28662 - protein, 7 aa, synthetic construct
  REGION 1..7: note = Description of Artificial Sequence: Synthetic peptide
TTHSSIN

SEQ ID NO: 28663 - protein, 7 aa, synthetic construct
  REGION 1..7: note = Description of Artificial Sequence: Synthetic peptide
FARSASS

SEQ ID NO: 28664 - protein, 7 aa, synthetic construct
  REGION 1..7: note = Description of Artificial Sequence: Synthetic peptide
KQTMGTL

SEQ ID NO: 28665 - protein, 7 aa, synthetic construct
  REGION 1..7: note = Description of Artificial Sequence: Synthetic peptide
AMSDTYH

SEQ ID NO: 28666 - protein, 7 aa, synthetic construct
  REGION 1..7: note = Description of Artificial Sequence: Synthetic peptide
PSSNHVK

SEQ ID NO: 28667 - protein, 7 aa, synthetic construct
  REGION 1..7: note = Description of Artificial Sequence: Synthetic peptide
VSAGARS

SEQ ID NO: 28668 - protein, 7 aa, synthetic construct
  REGION 1..7: note = Description of Artificial Sequence: Synthetic peptide
QNGDAMG

SEQ ID NO: 28669 - protein, 7 aa, synthetic construct
  REGION 1..7: note = Description of Artificial Sequence: Synthetic peptide
FSRSPAV

SEQ ID NO: 28670 - protein, 7 aa, synthetic construct
  REGION 1..7: note = Description of Artificial Sequence: Synthetic peptide
SDVRARS

SEQ ID NO: 28671 - protein, 7 aa, synthetic construct
  REGION 1..7: note = Description of Artificial Sequence: Synthetic peptide
PLRIGTQ

SEQ ID NO: 28672 - protein, 7 aa, synthetic construct
  REGION 1..7: note = Description of Artificial Sequence: Synthetic peptide
LPARSDG

SEQ ID NO: 28673 - protein, 7 aa, synthetic construct
  REGION 1..7: note = Description of Artificial Sequence: Synthetic peptide
VLKSNGY

SEQ ID NO: 28674 - protein, 7 aa, synthetic construct
  REGION 1..7: note = Description of Artificial Sequence: Synthetic peptide
TTNRSDR

SEQ ID NO: 28675 - protein, 7 aa, synthetic construct
  REGION 1..7: note = Description of Artificial Sequence: Synthetic peptide
SHSSSHK

SEQ ID NO: 28676 - protein, 7 aa, synthetic construct
  REGION 1..7: note = Description of Artificial Sequence: Synthetic peptide
ACQPQSL

SEQ ID NO: 28677 - protein, 7 aa, synthetic construct
  REGION 1..7: note = Description of Artificial Sequence: Synthetic peptide
RNNNTPG

SEQ ID NO: 28678 - protein, 7 aa, synthetic construct
  REGION 1..7: note = Description of Artificial Sequence: Synthetic peptide
FVSSDLR

SEQ ID NO: 28679 - protein, 7 aa, synthetic construct
  REGION 1..7: note = Description of Artificial Sequence: Synthetic peptide
VPLAGRP

SEQ ID NO: 28680 - protein, 7 aa, synthetic construct
  REGION 1..7: note = Description of Artificial Sequence: Synthetic peptide
YFNSPSN

SEQ ID NO: 28681 - protein, 7 aa, synthetic construct
  REGION 1..7: note = Description of Artificial Sequence: Synthetic peptide
LGSINPV

SEQ ID NO: 28682 - protein, 7 aa, synthetic construct
  REGION 1..7: note = Description of Artificial Sequence: Synthetic peptide
TVVQPHA

SEQ ID NO: 28683 - protein, 7 aa, synthetic construct
  REGION 1..7: note = Description of Artificial Sequence: Synthetic peptide
VSTGKSV

SEQ ID NO: 28684 - protein, 7 aa, synthetic construct
  REGION 1..7: note = Description of Artificial Sequence: Synthetic peptide
GGSNSRL

SEQ ID NO: 28685 - protein, 7 aa, synthetic construct
  REGION 1..7: note = Description of Artificial Sequence: Synthetic peptide
SSPTNMA

SEQ ID NO: 28686 - protein, 7 aa, synthetic construct
  REGION 1..7: note = Description of Artificial Sequence: Synthetic peptide
HSTSLSK

SEQ ID NO: 28687 - protein, 7 aa, synthetic construct
  REGION 1..7: note = Description of Artificial Sequence: Synthetic peptide
PVLNKAT

SEQ ID NO: 28688 - protein, 7 aa, synthetic construct
  REGION 1..7: note = Description of Artificial Sequence: Synthetic peptide
AVNTKAL

SEQ ID NO: 28689 - protein, 7 aa, synthetic construct
  REGION 1..7: note = Description of Artificial Sequence: Synthetic peptide
GQPNSAR

SEQ ID NO: 28690 - protein, 7 aa, synthetic construct
  REGION 1..7: note = Description of Artificial Sequence: Synthetic peptide
QNRVSNG

SEQ ID NO: 28691 - protein, 7 aa, synthetic construct
  REGION 1..7: note = Description of Artificial Sequence: Synthetic peptide
RHSNSVL

SEQ ID NO: 28692 - protein, 7 aa, synthetic construct
  REGION 1..7: note = Description of Artificial Sequence: Synthetic peptide
DSSTRGQ

SEQ ID NO: 28693 - protein, 7 aa, synthetic construct
  REGION 1..7: note = Description of Artificial Sequence: Synthetic peptide
LSNRTQQ

SEQ ID NO: 28694 - protein, 7 aa, synthetic construct
  REGION 1..7: note = Description of Artificial Sequence: Synthetic peptide
PSSPNSI

SEQ ID NO: 28695 - protein, 7 aa, synthetic construct
  REGION 1..7: note = Description of Artificial Sequence: Synthetic peptide
SAGGAVS

SEQ ID NO: 28696 - protein, 7 aa, synthetic construct
  REGION 1..7: note = Description of Artificial Sequence: Synthetic peptide
GSPAAGR

SEQ ID NO: 28697 - protein, 7 aa, synthetic construct
  REGION 1..7: note = Description of Artificial Sequence: Synthetic peptide
SRPHTDG

SEQ ID NO: 28698 - protein, 7 aa, synthetic construct
  REGION 1..7: note = Description of Artificial Sequence: Synthetic peptide
TSRGNLS

SEQ ID NO: 28699 - protein, 7 aa, synthetic construct
  REGION 1..7: note = Description of Artificial Sequence: Synthetic peptide
PLVPRGT

SEQ ID NO: 28700 - protein, 7 aa, synthetic construct
  REGION 1..7: note = Description of Artificial Sequence: Synthetic peptide
GSSPKLT

SEQ ID NO: 28701 - protein, 7 aa, synthetic construct
  REGION 1..7: note = Description of Artificial Sequence: Synthetic peptide
SASGNRC

SEQ ID NO: 28702 - protein, 7 aa, synthetic construct
  REGION 1..7: note = Description of Artificial Sequence: Synthetic peptide
RQTDKLS

SEQ ID NO: 28703 - protein, 7 aa, synthetic construct
  REGION 1..7: note = Description of Artificial Sequence: Synthetic peptide
GPSSINR

SEQ ID NO: 28704 - protein, 7 aa, synthetic construct
  REGION 1..7: note = Description of Artificial Sequence: Synthetic peptide
EGNRSNM

SEQ ID NO: 28705 - protein, 7 aa, synthetic construct
  REGION 1..7: note = Description of Artificial Sequence: Synthetic peptide
TSQTKIV

SEQ ID NO: 28706 - protein, 7 aa, synthetic construct
  REGION 1..7: note = Description of Artificial Sequence: Synthetic peptide
PSSPTDR

SEQ ID NO: 28707 - protein, 7 aa, synthetic construct
  REGION 1..7: note = Description of Artificial Sequence: Synthetic peptide
TSRQSFV

SEQ ID NO: 28708 - protein, 7 aa, synthetic construct
  REGION 1..7: note = Description of Artificial Sequence: Synthetic peptide
RSPSTNP

SEQ ID NO: 28709 - protein, 7 aa, synthetic construct
  REGION 1..7: note = Description of Artificial Sequence: Synthetic peptide
CSSGRQS

SEQ ID NO: 28710 - protein, 7 aa, synthetic construct
  REGION 1..7: note = Description of Artificial Sequence: Synthetic peptide
RNRESIA

SEQ ID NO: 28711 - protein, 7 aa, synthetic construct
  REGION 1..7: note = Description of Artificial Sequence: Synthetic peptide
ARTNSAP

SEQ ID NO: 28712 - protein, 7 aa, synthetic construct
  REGION 1..7: note = Description of Artificial Sequence: Synthetic peptide
VSGMSGS

SEQ ID NO: 28713 - protein, 7 aa, synthetic construct
  REGION 1..7: note = Description of Artificial Sequence: Synthetic peptide
QLSGARS

SEQ ID NO: 28714 - protein, 7 aa, synthetic construct
  REGION 1..7: note = Description of Artificial Sequence: Synthetic peptide
NSASLNH

SEQ ID NO: 28715 - protein, 7 aa, synthetic construct
  REGION 1..7: note = Description of Artificial Sequence: Synthetic peptide
PSTNRTG

SEQ ID NO: 28716 - protein, 7 aa, synthetic construct
  REGION 1..7: note = Description of Artificial Sequence: Synthetic peptide
CLPGAAM

SEQ ID NO: 28717 - protein, 7 aa, synthetic construct
  REGION 1..7: note = Description of Artificial Sequence: Synthetic peptide
AGAGKVY

SEQ ID NO: 28718 - protein, 7 aa, synthetic construct
  REGION 1..7: note = Description of Artificial Sequence: Synthetic peptide
SLGSRPS

SEQ ID NO: 28719 - protein, 7 aa, synthetic construct
  REGION 1..7: note = Description of Artificial Sequence: Synthetic peptide
SIGKGYN

SEQ ID NO: 28720 - protein, 7 aa, synthetic construct
  REGION 1..7: note = Description of Artificial Sequence: Synthetic peptide
DKTNLSS

SEQ ID NO: 28721 - protein, 7 aa, synthetic construct
  REGION 1..7: note = Description of Artificial Sequence: Synthetic peptide
SLSKSQS

SEQ ID NO: 28722 - protein, 7 aa, synthetic construct
  REGION 1..7: note = Description of Artificial Sequence: Synthetic peptide
VRTAGSD

SEQ ID NO: 28723 - protein, 7 aa, synthetic construct
  REGION 1..7: note = Description of Artificial Sequence: Synthetic peptide
DQNRVPY

SEQ ID NO: 28724 - protein, 7 aa, synthetic construct
  REGION 1..7: note = Description of Artificial Sequence: Synthetic peptide
SGRQDVL

SEQ ID NO: 28725 - protein, 7 aa, synthetic construct
  REGION 1..7: note = Description of Artificial Sequence: Synthetic peptide
RQYTGDS

SEQ ID NO: 28726 - protein, 7 aa, synthetic construct
  REGION 1..7: note = Description of Artificial Sequence: Synthetic peptide
HRDTNGK

SEQ ID NO: 28727 - protein, 7 aa, synthetic construct
  REGION 1..7: note = Description of Artificial Sequence: Synthetic peptide
GLMAQRS

SEQ ID NO: 28728 - protein, 7 aa, synthetic construct
  REGION 1..7: note = Description of Artificial Sequence: Synthetic peptide
PGLSNSR

SEQ ID NO: 28729 - protein, 7 aa, synthetic construct
  REGION 1..7: note = Description of Artificial Sequence: Synthetic peptide
AIPGTMA

SEQ ID NO: 28730 - protein, 7 aa, synthetic construct
  REGION 1..7: note = Description of Artificial Sequence: Synthetic peptide
PGLRDTA

SEQ ID NO: 28731 - protein, 7 aa, synthetic construct
  REGION 1..7: note = Description of Artificial Sequence: Synthetic peptide
SGPQIIR

SEQ ID NO: 28732 - protein, 7 aa, synthetic construct
  REGION 1..7: note = Description of Artificial Sequence: Synthetic peptide
RLPQMTC

SEQ ID NO: 28733 - protein, 7 aa, synthetic construct
  REGION 1..7: note = Description of Artificial Sequence: Synthetic peptide
SSTPRSV

SEQ ID NO: 28734 - protein, 7 aa, synthetic construct
  REGION 1..7: note = Description of Artificial Sequence: Synthetic peptide
LNRGNGS

SEQ ID NO: 28735 - protein, 7 aa, synthetic construct
  REGION 1..7: note = Description of Artificial Sequence: Synthetic peptide
PSTRQSN

SEQ ID NO: 28736 - protein, 7 aa, synthetic construct
  REGION 1..7: note = Description of Artificial Sequence: Synthetic peptide
ARVGSIS

SEQ ID NO: 28737 - protein, 7 aa, synthetic construct
  REGION 1..7: note = Description of Artificial Sequence: Synthetic peptide
NRLTNVS

SEQ ID NO: 28738 - protein, 7 aa, synthetic construct
  REGION 1..7: note = Description of Artificial Sequence: Synthetic peptide
QTHAPTS

SEQ ID NO: 28739 - protein, 7 aa, synthetic construct
  REGION 1..7: note = Description of Artificial Sequence: Synthetic peptide
SGNLQHA

SEQ ID NO: 28740 - protein, 7 aa, synthetic construct
  REGION 1..7: note = Description of Artificial Sequence: Synthetic peptide
RTTNATY

SEQ ID NO: 28741 - protein, 7 aa, synthetic construct
  REGION 1..7: note = Description of Artificial Sequence: Synthetic peptide
AQARLMN

SEQ ID NO: 28742 - protein, 7 aa, synthetic construct
  REGION 1..7: note = Description of Artificial Sequence: Synthetic peptide
AGAGMYA

SEQ ID NO: 28743 - protein, 7 aa, synthetic construct
  REGION 1..7: note = Description of Artificial Sequence: Synthetic peptide
NRLPATK

SEQ ID NO: 28744 - protein, 7 aa, synthetic construct
  REGION 1..7: note = Description of Artificial Sequence: Synthetic peptide
YGDGKSY

SEQ ID NO: 28745 - protein, 7 aa, synthetic construct
  REGION 1..7: note = Description of Artificial Sequence: Synthetic peptide
STSNGTL

SEQ ID NO: 28746 - protein, 7 aa, synthetic construct
  REGION 1..7: note = Description of Artificial Sequence: Synthetic peptide
FGTNKVD

SEQ ID NO: 28747 - protein, 7 aa, synthetic construct
  REGION 1..7: note = Description of Artificial Sequence: Synthetic peptide
ISNRSSS

SEQ ID NO: 28748 - protein, 7 aa, synthetic construct
  REGION 1..7: note = Description of Artificial Sequence: Synthetic peptide
FVSGKVQ

SEQ ID NO: 28749 - protein, 7 aa, synthetic construct
  REGION 1..7: note = Description of Artificial Sequence: Synthetic peptide
IAGQSYR

SEQ ID NO: 28750 - protein, 7 aa, synthetic construct
  REGION 1..7: note = Description of Artificial Sequence: Synthetic peptide
RSYDKSS

SEQ ID NO: 28751 - protein, 7 aa, synthetic construct
  REGION 1..7: note = Description of Artificial Sequence: Synthetic peptide
AQVDKRS

SEQ ID NO: 28752 - protein, 7 aa, synthetic construct
  REGION 1..7: note = Description of Artificial Sequence: Synthetic peptide
RSYEGMQ

SEQ ID NO: 28753 - protein, 7 aa, synthetic construct
  REGION 1..7: note = Description of Artificial Sequence: Synthetic peptide
VPITSRQ

SEQ ID NO: 28754 - protein, 7 aa, synthetic construct
  REGION 1..7: note = Description of Artificial Sequence: Synthetic peptide
HNSGNGS

SEQ ID NO: 28755 - protein, 7 aa, synthetic construct
  REGION 1..7: note = Description of Artificial Sequence: Synthetic peptide
SSGVTGR

SEQ ID NO: 28756 - protein, 7 aa, synthetic construct
  REGION 1..7: note = Description of Artificial Sequence: Synthetic peptide
SSEQTTR

SEQ ID NO: 28757 - protein, 7 aa, synthetic construct
  REGION 1..7: note = Description of Artificial Sequence: Synthetic peptide
IPHAGTA

SEQ ID NO: 28758 - protein, 7 aa, synthetic construct
  REGION 1..7: note = Description of Artificial Sequence: Synthetic peptide
HVSGPRL

SEQ ID NO: 28759 - protein, 7 aa, synthetic construct
  REGION 1..7: note = Description of Artificial Sequence: Synthetic peptide
VSHQTVL

SEQ ID NO: 28760 - protein, 7 aa, synthetic construct
  REGION 1..7: note = Description of Artificial Sequence: Synthetic peptide
RIPPQQD

SEQ ID NO: 28761 - protein, 7 aa, synthetic construct
  REGION 1..7: note = Description of Artificial Sequence: Synthetic peptide
QEARVYS

SEQ ID NO: 28762 - protein, 7 aa, synthetic construct
  REGION 1..7: note = Description of Artificial Sequence: Synthetic peptide
QMKHLQV

SEQ ID NO: 28763 - protein, 7 aa, synthetic construct
  REGION 1..7: note = Description of Artificial Sequence: Synthetic peptide
AVQAQRT

SEQ ID NO: 28764 - protein, 7 aa, synthetic construct
  REGION 1..7: note = Description of Artificial Sequence: Synthetic peptide
RVMRESQ

SEQ ID NO: 28765 - protein, 7 aa, synthetic construct
  REGION 1..7: note = Description of Artificial Sequence: Synthetic peptide
SDPPPGQ

SEQ ID NO: 28766 - protein, 7 aa, synthetic construct
  REGION 1..7: note = Description of Artificial Sequence: Synthetic peptide
GAKESQS

SEQ ID NO: 28767 - protein, 7 aa, synthetic construct
  REGION 1..7: note = Description of Artificial Sequence: Synthetic peptide
RTNKSVT

SEQ ID NO: 28768 - protein, 7 aa, synthetic construct
  REGION 1..7: note = Description of Artificial Sequence: Synthetic peptide
LSTSRTA

SEQ ID NO: 28769 - protein, 7 aa, synthetic construct
  REGION 1..7: note = Description of Artificial Sequence: Synthetic peptide
STPIRSV

SEQ ID NO: 28770 - protein, 7 aa, synthetic construct
  REGION 1..7: note = Description of Artificial Sequence: Synthetic peptide
DRAGKQS

SEQ ID NO: 28771 - protein, 7 aa, synthetic construct
  REGION 1..7: note = Description of Artificial Sequence: Synthetic peptide
TRNQSVT

SEQ ID NO: 28772 - protein, 7 aa, synthetic construct
  REGION 1..7: note = Description of Artificial Sequence: Synthetic peptide
ERAGLNS

SEQ ID NO: 28773 - protein, 7 aa, synthetic construct
  REGION 1..7: note = Description of Artificial Sequence: Synthetic peptide
NFTTSGQ

SEQ ID NO: 28774 - protein, 7 aa, synthetic construct
  REGION 1..7: note = Description of Artificial Sequence: Synthetic peptide
SQQSPSM

SEQ ID NO: 28775 - protein, 7 aa, synthetic construct
  REGION 1..7: note = Description of Artificial Sequence: Synthetic peptide
RTSEHDR

SEQ ID NO: 28776 - protein, 7 aa, synthetic construct
  REGION 1..7: note = Description of Artificial Sequence: Synthetic peptide
FRQTSGN

SEQ ID NO: 28777 - protein, 7 aa, synthetic construct
  REGION 1..7: note = Description of Artificial Sequence: Synthetic peptide
FRNTHSE

SEQ ID NO: 28778 - protein, 7 aa, synthetic construct
  REGION 1..7: note = Description of Artificial Sequence: Synthetic peptide
GPNISLG

SEQ ID NO: 28779 - protein, 7 aa, synthetic construct
  REGION 1..7: note = Description of Artificial Sequence: Synthetic peptide
MGQVGVR

SEQ ID NO: 28780 - protein, 7 aa, synthetic construct
  REGION 1..7: note = Description of Artificial Sequence: Synthetic peptide
VNMRNTM

SEQ ID NO: 28781 - protein, 7 aa, synthetic construct
  REGION 1..7: note = Description of Artificial Sequence: Synthetic peptide
TNGGRVT

SEQ ID NO: 28782 - protein, 7 aa, synthetic construct
  REGION 1..7: note = Description of Artificial Sequence: Synthetic peptide
SRVDVRS

SEQ ID NO: 28783 - protein, 7 aa, synthetic construct
  REGION 1..7: note = Description of Artificial Sequence: Synthetic peptide
KVHRSDN

SEQ ID NO: 28784 - protein, 7 aa, synthetic construct
  REGION 1..7: note = Description of Artificial Sequence: Synthetic peptide
STPHHTT

SEQ ID NO: 28785 - protein, 7 aa, synthetic construct
  REGION 1..7: note = Description of Artificial Sequence: Synthetic peptide
PLPNRNQ

SEQ ID NO: 28786 - protein, 7 aa, synthetic construct
  REGION 1..7: note = Description of Artificial Sequence: Synthetic peptide
VSSPRMS

SEQ ID NO: 28787 - protein, 7 aa, synthetic construct
  REGION 1..7: note = Description of Artificial Sequence: Synthetic peptide
PKGAHVT

SEQ ID NO: 28788 - protein, 7 aa, synthetic construct
  REGION 1..7: note = Description of Artificial Sequence: Synthetic peptide
SYPQQSA

SEQ ID NO: 28789 - protein, 7 aa, synthetic construct
  REGION 1..7: note = Description of Artificial Sequence: Synthetic peptide
GTNTGIV

SEQ ID NO: 28790 - protein, 7 aa, synthetic construct
  REGION 1..7: note = Description of Artificial Sequence: Synthetic peptide
PITHPLR

SEQ ID NO: 28791 - protein, 7 aa, synthetic construct
  REGION 1..7: note = Description of Artificial Sequence: Synthetic peptide
GLHSVAK

SEQ ID NO: 28792 - protein, 7 aa, synthetic construct
  REGION 1..7: note = Description of Artificial Sequence: Synthetic peptide
PSARMSG

SEQ ID NO: 28793 - protein, 7 aa, synthetic construct
  REGION 1..7: note = Description of Artificial Sequence: Synthetic peptide
NRVTQSS

SEQ ID NO: 28794 - protein, 7 aa, synthetic construct
  REGION 1..7: note = Description of Artificial Sequence: Synthetic peptide
SLPNTNG

SEQ ID NO: 28795 - protein, 7 aa, synthetic construct
  REGION 1..7: note = Description of Artificial Sequence: Synthetic peptide
SGGGTRT

SEQ ID NO: 28796 - protein, 7 aa, synthetic construct
  REGION 1..7: note = Description of Artificial Sequence: Synthetic peptide
VNLSPNH

SEQ ID NO: 28797 - protein, 7 aa, synthetic construct
  REGION 1..7: note = Description of Artificial Sequence: Synthetic peptide
VTHGPSH

SEQ ID NO: 28798 - protein, 7 aa, synthetic construct
  REGION 1..7: note = Description of Artificial Sequence: Synthetic peptide
LLNSTGM

SEQ ID NO: 28799 - protein, 7 aa, synthetic construct
  REGION 1..7: note = Description of Artificial Sequence: Synthetic peptide
NSVVSVS

SEQ ID NO: 28800 - protein, 7 aa, synthetic construct
  REGION 1..7: note = Description of Artificial Sequence: Synthetic peptide
VRGSSNG

SEQ ID NO: 28801 - protein, 7 aa, synthetic construct
  REGION 1..7: note = Description of Artificial Sequence: Synthetic peptide
SVNTKAL

SEQ ID NO: 28802 - protein, 7 aa, synthetic construct
  REGION 1..7: note = Description of Artificial Sequence: Synthetic peptide
RLEGSMA

SEQ ID NO: 28803 - protein, 7 aa, synthetic construct
  REGION 1..7: note = Description of Artificial Sequence: Synthetic peptide
LGNAHQL

SEQ ID NO: 28804 - protein, 7 aa, synthetic construct
  REGION 1..7: note = Description of Artificial Sequence: Synthetic peptide
MSDTSTR

SEQ ID NO: 28805 - protein, 7 aa, synthetic construct
  REGION 1..7: note = Description of Artificial Sequence: Synthetic peptide
STSRVLN

SEQ ID NO: 28806 - protein, 7 aa, synthetic construct
  REGION 1..7: note = Description of Artificial Sequence: Synthetic peptide
DRLGNTM

SEQ ID NO: 28807 - protein, 7 aa, synthetic construct
  REGION 1..7: note = Description of Artificial Sequence: Synthetic peptide
QNLPRTC

SEQ ID NO: 28808 - protein, 7 aa, synthetic construct
  REGION 1..7: note = Description of Artificial Sequence: Synthetic peptide
EGSSGRR

SEQ ID NO: 28809 - protein, 7 aa, synthetic construct
  REGION 1..7: note = Description of Artificial Sequence: Synthetic peptide
RLSNAYA

SEQ ID NO: 28810 - protein, 7 aa, synthetic construct
  REGION 1..7: note = Description of Artificial Sequence: Synthetic peptide
TGLSHMG

SEQ ID NO: 28811 - protein, 7 aa, synthetic construct
  REGION 1..7: note = Description of Artificial Sequence: Synthetic peptide
STSGTSS

SEQ ID NO: 28812 - protein, 7 aa, synthetic construct
  REGION 1..7: note = Description of Artificial Sequence: Synthetic peptide
ERNGNFT

SEQ ID NO: 28813 - protein, 7 aa, synthetic construct
  REGION 1..7: note = Description of Artificial Sequence: Synthetic peptide
GRLNMLS

SEQ ID NO: 28814 - protein, 7 aa, synthetic construct
  REGION 1..7: note = Description of Artificial Sequence: Synthetic peptide
CSQRQCN

SEQ ID NO: 28815 - protein, 7 aa, synthetic construct
  REGION 1..7: note = Description of Artificial Sequence: Synthetic peptide
FNQAGVN

SEQ ID NO: 28816 - protein, 7 aa, synthetic construct
  REGION 1..7: note = Description of Artificial Sequence: Synthetic peptide
TGNASRV

SEQ ID NO: 28817 - protein, 7 aa, synthetic construct
  REGION 1..7: note = Description of Artificial Sequence: Synthetic peptide
GSTGQLM

SEQ ID NO: 28818 - protein, 7 aa, synthetic construct
  REGION 1..7: note = Description of Artificial Sequence: Synthetic peptide
YASGKHS

SEQ ID NO: 28819 - protein, 7 aa, synthetic construct
  REGION 1..7: note = Description of Artificial Sequence: Synthetic peptide
SRNTLGS

SEQ ID NO: 28820 - protein, 7 aa, synthetic construct
  REGION 1..7: note = Description of Artificial Sequence: Synthetic peptide
NGYGQNQ

SEQ ID NO: 28821 - protein, 7 aa, synthetic construct
  REGION 1..7: note = Description of Artificial Sequence: Synthetic peptide
SANLHGK

SEQ ID NO: 28822 - protein, 7 aa, synthetic construct
  REGION 1..7: note = Description of Artificial Sequence: Synthetic peptide
DVNPSAK

SEQ ID NO: 28823 - protein, 7 aa, synthetic construct
  REGION 1..7: note = Description of Artificial Sequence: Synthetic peptide
SLTTQNS

SEQ ID NO: 28824 - protein, 7 aa, synthetic construct
  REGION 1..7: note = Description of Artificial Sequence: Synthetic peptide
SKSVAQS

SEQ ID NO: 28825 - protein, 7 aa, synthetic construct
  REGION 1..7: note = Description of Artificial Sequence: Synthetic peptide
HASTPAR

SEQ ID NO: 28826 - protein, 7 aa, synthetic construct
  REGION 1..7: note = Description of Artificial Sequence: Synthetic peptide
YQMTTPQ

SEQ ID NO: 28827 - protein, 7 aa, synthetic construct
  REGION 1..7: note = Description of Artificial Sequence: Synthetic peptide
PSHGPPA

SEQ ID NO: 28828 - protein, 7 aa, synthetic construct
  REGION 1..7: note = Description of Artificial Sequence: Synthetic peptide
TYSSKAD

SEQ ID NO: 28829 - protein, 7 aa, synthetic construct
  REGION 1..7: note = Description of Artificial Sequence: Synthetic peptide
PVTRSKD

SEQ ID NO: 28830 - protein, 7 aa, synthetic construct
  REGION 1..7: note = Description of Artificial Sequence: Synthetic peptide
TQMGKSN

SEQ ID NO: 28831 - protein, 7 aa, synthetic construct
  REGION 1..7: note = Description of Artificial Sequence: Synthetic peptide
FGSRNEG

SEQ ID NO: 28832 - protein, 7 aa, synthetic construct
  REGION 1..7: note = Description of Artificial Sequence: Synthetic peptide
GSHTNTS

SEQ ID NO: 28833 - protein, 7 aa, synthetic construct
  REGION 1..7: note = Description of Artificial Sequence: Synthetic peptide
GAYNHVT

SEQ ID NO: 28834 - protein, 7 aa, synthetic construct
  REGION 1..7: note = Description of Artificial Sequence: Synthetic peptide
PYQSHSP

SEQ ID NO: 28835 - protein, 7 aa, synthetic construct
  REGION 1..7: note = Description of Artificial Sequence: Synthetic peptide
GSISTAH

SEQ ID NO: 28836 - protein, 7 aa, synthetic construct
  REGION 1..7: note = Description of Artificial Sequence: Synthetic peptide
GRDTRSS

SEQ ID NO: 28837 - protein, 7 aa, synthetic construct
  REGION 1..7: note = Description of Artificial Sequence: Synthetic peptide
YGQTKTQ

SEQ ID NO: 28838 - protein, 7 aa, synthetic construct
  REGION 1..7: note = Description of Artificial Sequence: Synthetic peptide
TTAPGLR

SEQ ID NO: 28839 - protein, 7 aa, synthetic construct
  REGION 1..7: note = Description of Artificial Sequence: Synthetic peptide
TKYEGYT

SEQ ID NO: 28840 - protein, 7 aa, synthetic construct
  REGION 1..7: note = Description of Artificial Sequence: Synthetic peptide
TNAARDS

SEQ ID NO: 28841 - protein, 7 aa, synthetic construct
  REGION 1..7: note = Description of Artificial Sequence: Synthetic peptide
IQQGSRT

SEQ ID NO: 28842 - protein, 7 aa, synthetic construct
  REGION 1..7: note = Description of Artificial Sequence: Synthetic peptide
HRSGNQG

SEQ ID NO: 28843 - protein, 7 aa, synthetic construct
  REGION 1..7: note = Description of Artificial Sequence: Synthetic peptide
SPMRSQV

SEQ ID NO: 28844 - protein, 7 aa, synthetic construct
  REGION 1..7: note = Description of Artificial Sequence: Synthetic peptide
ARSPPSG

SEQ ID NO: 28845 - protein, 7 aa, synthetic construct
  REGION 1..7: note = Description of Artificial Sequence: Synthetic peptide
EPSRSST

SEQ ID NO: 28846 - protein, 7 aa, synthetic construct
  REGION 1..7: note = Description of Artificial Sequence: Synthetic peptide
SSPQAHN

SEQ ID NO: 28847 - protein, 7 aa, synthetic construct
  REGION 1..7: note = Description of Artificial Sequence: Synthetic peptide
VSYARTE

SEQ ID NO: 28848 - protein, 7 aa, synthetic construct
  REGION 1..7: note = Description of Artificial Sequence: Synthetic peptide
SSGLGFS

SEQ ID NO: 28849 - protein, 7 aa, synthetic construct
  REGION 1..7: note = Description of Artificial Sequence: Synthetic peptide
RYTGQSS

SEQ ID NO: 28850 - protein, 7 aa, synthetic construct
  REGION 1..7: note = Description of Artificial Sequence: Synthetic peptide
PARSTLS

SEQ ID NO: 28851 - protein, 7 aa, synthetic construct
  REGION 1..7: note = Description of Artificial Sequence: Synthetic peptide
SGGSSVL

SEQ ID NO: 28852 - protein, 7 aa, synthetic construct
  REGION 1..7: note = Description of Artificial Sequence: Synthetic peptide
SSRSTAS

SEQ ID NO: 28853 - protein, 7 aa, synthetic construct
  REGION 1..7: note = Description of Artificial Sequence: Synthetic peptide
SAYERTS

SEQ ID NO: 28854 - protein, 7 aa, synthetic construct
  REGION 1..7: note = Description of Artificial Sequence: Synthetic peptide
TANSPAT

SEQ ID NO: 28855 - protein, 7 aa, synthetic construct
  REGION 1..7: note = Description of Artificial Sequence: Synthetic peptide
PVNLQNG

SEQ ID NO: 28856 - protein, 7 aa, synthetic construct
  REGION 1..7: note = Description of Artificial Sequence: Synthetic peptide
MTPGRVA

SEQ ID NO: 28857 - protein, 7 aa, synthetic construct
  REGION 1..7: note = Description of Artificial Sequence: Synthetic peptide
PYAPRKD

SEQ ID NO: 28858 - protein, 7 aa, synthetic construct
  REGION 1..7: note = Description of Artificial Sequence: Synthetic peptide
ISQSTTR

SEQ ID NO: 28859 - protein, 7 aa, synthetic construct
  REGION 1..7: note = Description of Artificial Sequence: Synthetic peptide
EKLRTSQ

SEQ ID NO: 28860 - protein, 7 aa, synthetic construct
  REGION 1..7: note = Description of Artificial Sequence: Synthetic peptide
VNKINGS

SEQ ID NO: 28861 - protein, 7 aa, synthetic construct
  REGION 1..7: note = Description of Artificial Sequence: Synthetic peptide
NRSNNSV

SEQ ID NO: 28862 - protein, 7 aa, synthetic construct
  REGION 1..7: note = Description of Artificial Sequence: Synthetic peptide
CQSSRVT

SEQ ID NO: 28863 - protein, 7 aa, synthetic construct
  REGION 1..7: note = Description of Artificial Sequence: Synthetic peptide
TQGASNL

SEQ ID NO: 28864 - protein, 7 aa, synthetic construct
  REGION 1..7: note = Description of Artificial Sequence: Synthetic peptide
NTTGSGL

SEQ ID NO: 28865 - protein, 7 aa, synthetic construct
  REGION 1..7: note = Description of Artificial Sequence: Synthetic peptide
EIRAHTT

SEQ ID NO: 28866 - protein, 7 aa, synthetic construct
  REGION 1..7: note = Description of Artificial Sequence: Synthetic peptide
SLPGESK

SEQ ID NO: 28867 - protein, 7 aa, synthetic construct
  REGION 1..7: note = Description of Artificial Sequence: Synthetic peptide
ITGNRHS

SEQ ID NO: 28868 - protein, 7 aa, synthetic construct
  REGION 1..7: note = Description of Artificial Sequence: Synthetic peptide
NSGPPKP

SEQ ID NO: 28869 - protein, 7 aa, synthetic construct
  REGION 1..7: note = Description of Artificial Sequence: Synthetic peptide
WSKGSGT

SEQ ID NO: 28870 - protein, 7 aa, synthetic construct
  REGION 1..7: note = Description of Artificial Sequence: Synthetic peptide
SGAPGSS

SEQ ID NO: 28871 - protein, 7 aa, synthetic construct
  REGION 1..7: note = Description of Artificial Sequence: Synthetic peptide
SISKTQA

SEQ ID NO: 28872 - protein, 7 aa, synthetic construct
  REGION 1..7: note = Description of Artificial Sequence: Synthetic peptide
ENTKTYS

SEQ ID NO: 28873 - protein, 7 aa, synthetic construct
  REGION 1..7: note = Description of Artificial Sequence: Synthetic peptide
KELGSPS

SEQ ID NO: 28874 - protein, 7 aa, synthetic construct
  REGION 1..7: note = Description of Artificial Sequence: Synthetic peptide
YRASGIS

SEQ ID NO: 28875 - protein, 7 aa, synthetic construct
  REGION 1..7: note = Description of Artificial Sequence: Synthetic peptide
VHGNPRN

SEQ ID NO: 28876 - protein, 7 aa, synthetic construct
  REGION 1..7: note = Description of Artificial Sequence: Synthetic peptide
HKHPNAY

SEQ ID NO: 28877 - protein, 7 aa, synthetic construct
  REGION 1..7: note = Description of Artificial Sequence: Synthetic peptide
QGHTRFT

SEQ ID NO: 28878 - protein, 7 aa, synthetic construct
  REGION 1..7: note = Description of Artificial Sequence: Synthetic peptide
TGRGPDV

SEQ ID NO: 28879 - protein, 7 aa, synthetic construct
  REGION 1..7: note = Description of Artificial Sequence: Synthetic peptide
PDSLHAN

SEQ ID NO: 28880 - protein, 7 aa, synthetic construct
  REGION 1..7: note = Description of Artificial Sequence: Synthetic peptide
TQNTKSI

SEQ ID NO: 28881 - protein, 7 aa, synthetic construct
  REGION 1..7: note = Description of Artificial Sequence: Synthetic peptide
SNLPRNL

SEQ ID NO: 28882 - protein, 7 aa, synthetic construct
  REGION 1..7: note = Description of Artificial Sequence: Synthetic peptide
NGPGQNQ

SEQ ID NO: 28883 - protein, 7 aa, synthetic construct
  REGION 1..7: note = Description of Artificial Sequence: Synthetic peptide
LGTTQPK

SEQ ID NO: 28884 - protein, 7 aa, synthetic construct
  REGION 1..7: note = Description of Artificial Sequence: Synthetic peptide
PLASPMV

SEQ ID NO: 28885 - protein, 7 aa, synthetic construct
  REGION 1..7: note = Description of Artificial Sequence: Synthetic peptide
LGPGKNT

SEQ ID NO: 28886 - protein, 7 aa, synthetic construct
  REGION 1..7: note = Description of Artificial Sequence: Synthetic peptide
GHGNKGA

SEQ ID NO: 28887 - protein, 7 aa, synthetic construct
  REGION 1..7: note = Description of Artificial Sequence: Synthetic peptide
PSIPRNV

SEQ ID NO: 28888 - protein, 7 aa, synthetic construct
  REGION 1..7: note = Description of Artificial Sequence: Synthetic peptide
NLHATPL

SEQ ID NO: 28889 - protein, 7 aa, synthetic construct
  REGION 1..7: note = Description of Artificial Sequence: Synthetic peptide
VLHNASS

SEQ ID NO: 28890 - protein, 7 aa, synthetic construct
  REGION 1..7: note = Description of Artificial Sequence: Synthetic peptide
QLGTNNS

SEQ ID NO: 28891 - protein, 7 aa, synthetic construct
  REGION 1..7: note = Description of Artificial Sequence: Synthetic peptide
NNRSGMG

SEQ ID NO: 28892 - protein, 7 aa, synthetic construct
  REGION 1..7: note = Description of Artificial Sequence: Synthetic peptide
GANTNPG

SEQ ID NO: 28893 - protein, 7 aa, synthetic construct
  REGION 1..7: note = Description of Artificial Sequence: Synthetic peptide
RPQTSIS

SEQ ID NO: 28894 - protein, 7 aa, synthetic construct
  REGION 1..7: note = Description of Artificial Sequence: Synthetic peptide
VPVTKSS

SEQ ID NO: 28895 - protein, 7 aa, synthetic construct
  REGION 1..7: note = Description of Artificial Sequence: Synthetic peptide
YRNVNSS

SEQ ID NO: 28896 - protein, 7 aa, synthetic construct
  REGION 1..7: note = Description of Artificial Sequence: Synthetic peptide
VQTHQVR

SEQ ID NO: 28897 - protein, 7 aa, synthetic construct
  REGION 1..7: note = Description of Artificial Sequence: Synthetic peptide
VATRGDH

SEQ ID NO: 28898 - protein, 7 aa, synthetic construct
  REGION 1..7: note = Description of Artificial Sequence: Synthetic peptide
TGMRNIG

SEQ ID NO: 28899 - protein, 7 aa, synthetic construct
  REGION 1..7: note = Description of Artificial Sequence: Synthetic peptide
REPARGD

SEQ ID NO: 28900 - protein, 7 aa, synthetic construct
  REGION 1..7: note = Description of Artificial Sequence: Synthetic peptide
GAERTVL

SEQ ID NO: 28901 - protein, 7 aa, synthetic construct
  REGION 1..7: note = Description of Artificial Sequence: Synthetic peptide
KADATRT

SEQ ID NO: 28902 - protein, 7 aa, synthetic construct
  REGION 1..7: note = Description of Artificial Sequence: Synthetic peptide
DNHSTLI

SEQ ID NO: 28903 - protein, 7 aa, synthetic construct
  REGION 1..7: note = Description of Artificial Sequence: Synthetic peptide
RNTSDLA

SEQ ID NO: 28904 - protein, 7 aa, synthetic construct
  REGION 1..7: note = Description of Artificial Sequence: Synthetic peptide
TKGGSQL

SEQ ID NO: 28905 - protein, 7 aa, synthetic construct
  REGION 1..7: note = Description of Artificial Sequence: Synthetic peptide
IHQGSSR

SEQ ID NO: 28906 - protein, 7 aa, synthetic construct
  REGION 1..7: note = Description of Artificial Sequence: Synthetic peptide
NGVPQPK

SEQ ID NO: 28907 - protein, 7 aa, synthetic construct
  REGION 1..7: note = Description of Artificial Sequence: Synthetic peptide
NNLAGSK

SEQ ID NO: 28908 - protein, 7 aa, synthetic construct
  REGION 1..7: note = Description of Artificial Sequence: Synthetic peptide
AISRQGM

SEQ ID NO: 28909 - protein, 7 aa, synthetic construct
  REGION 1..7: note = Description of Artificial Sequence: Synthetic peptide
PANSPAT

SEQ ID NO: 28910 - protein, 7 aa, synthetic construct
  REGION 1..7: note = Description of Artificial Sequence: Synthetic peptide
RERTGFN

SEQ ID NO: 28911 - protein, 7 aa, synthetic construct
  REGION 1..7: note = Description of Artificial Sequence: Synthetic peptide
PLSKSAL

SEQ ID NO: 28912 - protein, 7 aa, synthetic construct
  REGION 1..7: note = Description of Artificial Sequence: Synthetic peptide
GDKNHGS

SEQ ID NO: 28913 - protein, 7 aa, synthetic construct
  REGION 1..7: note = Description of Artificial Sequence: Synthetic peptide
NNSISNP

SEQ ID NO: 28914 - protein, 7 aa, synthetic construct
  REGION 1..7: note = Description of Artificial Sequence: Synthetic peptide
IHATSLA

SEQ ID NO: 28915 - protein, 7 aa, synthetic construct
  REGION 1..7: note = Description of Artificial Sequence: Synthetic peptide
CAGLSSS

SEQ ID NO: 28916 - protein, 7 aa, synthetic construct
  REGION 1..7: note = Description of Artificial Sequence: Synthetic peptide
DLPHHTR

SEQ ID NO: 28917 - protein, 7 aa, synthetic construct
  REGION 1..7: note = Description of Artificial Sequence: Synthetic peptide
VSRSATN

SEQ ID NO: 28918 - protein, 7 aa, synthetic construct
  REGION 1..7: note = Description of Artificial Sequence: Synthetic peptide
AKTAKNV

SEQ ID NO: 28919 - protein, 7 aa, synthetic construct
  REGION 1..7: note = Description of Artificial Sequence: Synthetic peptide
GSFKPDS

SEQ ID NO: 28920 - protein, 7 aa, synthetic construct
  REGION 1..7: note = Description of Artificial Sequence: Synthetic peptide
PLGNRPS

SEQ ID NO: 28921 - protein, 7 aa, synthetic construct
  REGION 1..7: note = Description of Artificial Sequence: Synthetic peptide
NLNSVSK

SEQ ID NO: 28922 - protein, 7 aa, synthetic construct
  REGION 1..7: note = Description of Artificial Sequence: Synthetic peptide
RPYETQL

SEQ ID NO: 28923 - protein, 7 aa, synthetic construct
  REGION 1..7: note = Description of Artificial Sequence: Synthetic peptide
NANQNQM

SEQ ID NO: 28924 - protein, 7 aa, synthetic construct
  REGION 1..7: note = Description of Artificial Sequence: Synthetic peptide
DGKSPRV

SEQ ID NO: 28925 - protein, 7 aa, synthetic construct
  REGION 1..7: note = Description of Artificial Sequence: Synthetic peptide
PVGSVRG

SEQ ID NO: 28926 - protein, 7 aa, synthetic construct
  REGION 1..7: note = Description of Artificial Sequence: Synthetic peptide
NGSGHNQ

SEQ ID NO: 28927 - protein, 7 aa, synthetic construct
  REGION 1..7: note = Description of Artificial Sequence: Synthetic peptide
TLPTSIR

SEQ ID NO: 28928 - protein, 7 aa, synthetic construct
  REGION 1..7: note = Description of Artificial Sequence: Synthetic peptide
RDRTNAA

SEQ ID NO: 28929 - protein, 7 aa, synthetic construct
  REGION 1..7: note = Description of Artificial Sequence: Synthetic peptide
NNGRPIA

SEQ ID NO: 28930 - protein, 7 aa, synthetic construct
  REGION 1..7: note = Description of Artificial Sequence: Synthetic peptide
SSPVRNT

SEQ ID NO: 28931 - protein, 7 aa, synthetic construct
  REGION 1..7: note = Description of Artificial Sequence: Synthetic peptide
GKTNVSS

SEQ ID NO: 28932 - protein, 7 aa, synthetic construct
  REGION 1..7: note = Description of Artificial Sequence: Synthetic peptide
EPVPKTR

SEQ ID NO: 28933 - protein, 7 aa, synthetic construct
  REGION 1..7: note = Description of Artificial Sequence: Synthetic peptide
QGRANGS

SEQ ID NO: 28934 - protein, 7 aa, synthetic construct
  REGION 1..7: note = Description of Artificial Sequence: Synthetic peptide
PGSGSNN

SEQ ID NO: 28935 - protein, 7 aa, synthetic construct
  REGION 1..7: note = Description of Artificial Sequence: Synthetic peptide
LGVRDNT

SEQ ID NO: 28936 - protein, 7 aa, synthetic construct
  REGION 1..7: note = Description of Artificial Sequence: Synthetic peptide
NSVAGMG

SEQ ID NO: 28937 - protein, 7 aa, synthetic construct
  REGION 1..7: note = Description of Artificial Sequence: Synthetic peptide
VNENRVS

SEQ ID NO: 28938 - protein, 7 aa, synthetic construct
  REGION 1..7: note = Description of Artificial Sequence: Synthetic peptide
GKTGPNS

SEQ ID NO: 28939 - protein, 7 aa, synthetic construct
  REGION 1..7: note = Description of Artificial Sequence: Synthetic peptide
GLESMRQ

SEQ ID NO: 28940 - protein, 7 aa, synthetic construct
  REGION 1..7: note = Description of Artificial Sequence: Synthetic peptide
GGHPPTS

SEQ ID NO: 28941 - protein, 7 aa, synthetic construct
  REGION 1..7: note = Description of Artificial Sequence: Synthetic peptide
ASVSQRS

SEQ ID NO: 28942 - protein, 7 aa, synthetic construct
  REGION 1..7: note = Description of Artificial Sequence: Synthetic peptide
SNTNAAM

SEQ ID NO: 28943 - protein, 7 aa, synthetic construct
  REGION 1..7: note = Description of Artificial Sequence: Synthetic peptide
RMGVSNT

SEQ ID NO: 28944 - protein, 7 aa, synthetic construct
  REGION 1..7: note = Description of Artificial Sequence: Synthetic peptide
ALAYNKG

SEQ ID NO: 28945 - protein, 7 aa, synthetic construct
  REGION 1..7: note = Description of Artificial Sequence: Synthetic peptide
KIGSMSG

SEQ ID NO: 28946 - protein, 7 aa, synthetic construct
  REGION 1..7: note = Description of Artificial Sequence: Synthetic peptide
GASSYMK

SEQ ID NO: 28947 - protein, 7 aa, synthetic construct
  REGION 1..7: note = Description of Artificial Sequence: Synthetic peptide
RVATNNP

SEQ ID NO: 28948 - protein, 7 aa, synthetic construct
  REGION 1..7: note = Description of Artificial Sequence: Synthetic peptide
RVTDAHL

SEQ ID NO: 28949 - protein, 7 aa, synthetic construct
  REGION 1..7: note = Description of Artificial Sequence: Synthetic peptide
YRSKPLT

SEQ ID NO: 28950 - protein, 7 aa, synthetic construct
  REGION 1..7: note = Description of Artificial Sequence: Synthetic peptide
PQSSHQT

SEQ ID NO: 28951 - protein, 7 aa, synthetic construct
  REGION 1..7: note = Description of Artificial Sequence: Synthetic peptide
NGSQGRQ

SEQ ID NO: 28952 - protein, 7 aa, synthetic construct
  REGION 1..7: note = Description of Artificial Sequence: Synthetic peptide
GSLGGLN

SEQ ID NO: 28953 - protein, 7 aa, synthetic construct
  REGION 1..7: note = Description of Artificial Sequence: Synthetic peptide
QSTPRMG

SEQ ID NO: 28954 - protein, 7 aa, synthetic construct
  REGION 1..7: note = Description of Artificial Sequence: Synthetic peptide
PHQGKHN

SEQ ID NO: 28955 - protein, 7 aa, synthetic construct
  REGION 1..7: note = Description of Artificial Sequence: Synthetic peptide
GSGNKVN

SEQ ID NO: 28956 - protein, 7 aa, synthetic construct
  REGION 1..7: note = Description of Artificial Sequence: Synthetic peptide
SLRGSTA

SEQ ID NO: 28957 - protein, 7 aa, synthetic construct
  REGION 1..7: note = Description of Artificial Sequence: Synthetic peptide
MLNSRTS

SEQ ID NO: 28958 - protein, 7 aa, synthetic construct
  REGION 1..7: note = Description of Artificial Sequence: Synthetic peptide
RLTQSSQ

SEQ ID NO: 28959 - protein, 7 aa, synthetic construct
  REGION 1..7: note = Description of Artificial Sequence: Synthetic peptide
VGTKAAT

SEQ ID NO: 28960 - protein, 7 aa, synthetic construct
  REGION 1..7: note = Description of Artificial Sequence: Synthetic peptide
VNTSHTN

SEQ ID NO: 28961 - protein, 7 aa, synthetic construct
  REGION 1..7: note = Description of Artificial Sequence: Synthetic peptide
SRVSLSS

SEQ ID NO: 28962 - protein, 7 aa, synthetic construct
  REGION 1..7: note = Description of Artificial Sequence: Synthetic peptide
HKTTSMA

SEQ ID NO: 28963 - protein, 7 aa, synthetic construct
  REGION 1..7: note = Description of Artificial Sequence: Synthetic peptide
PHTNNPD

SEQ ID NO: 28964 - protein, 7 aa, synthetic construct
  REGION 1..7: note = Description of Artificial Sequence: Synthetic peptide
AQRSTMV

SEQ ID NO: 28965 - protein, 7 aa, synthetic construct
  REGION 1..7: note = Description of Artificial Sequence: Synthetic peptide
PTMQGVH

SEQ ID NO: 28966 - protein, 7 aa, synthetic construct
  REGION 1..7: note = Description of Artificial Sequence: Synthetic peptide
SNLGQYG

SEQ ID NO: 28967 - protein, 7 aa, synthetic construct
  REGION 1..7: note = Description of Artificial Sequence: Synthetic peptide
PSGHDTV

SEQ ID NO: 28968 - protein, 7 aa, synthetic construct
  REGION 1..7: note = Description of Artificial Sequence: Synthetic peptide
VGRSSNP

SEQ ID NO: 28969 - protein, 7 aa, synthetic construct
  REGION 1..7: note = Description of Artificial Sequence: Synthetic peptide
GGNDRFR

SEQ ID NO: 28970 - protein, 7 aa, synthetic construct
  REGION 1..7: note = Description of Artificial Sequence: Synthetic peptide
RPKESGY

SEQ ID NO: 28971 - protein, 7 aa, synthetic construct
  REGION 1..7: note = Description of Artificial Sequence: Synthetic peptide
PGTTSAM

SEQ ID NO: 28972 - protein, 7 aa, synthetic construct
  REGION 1..7: note = Description of Artificial Sequence: Synthetic peptide
TSHVNIA

SEQ ID NO: 28973 - protein, 7 aa, synthetic construct
  REGION 1..7: note = Description of Artificial Sequence: Synthetic peptide
RTLNLNT

SEQ ID NO: 28974 - protein, 7 aa, synthetic construct
  REGION 1..7: note = Description of Artificial Sequence: Synthetic peptide
ALSSQKG

SEQ ID NO: 28975 - protein, 7 aa, synthetic construct
  REGION 1..7: note = Description of Artificial Sequence: Synthetic peptide
RSQGSYA

SEQ ID NO: 28976 - protein, 7 aa, synthetic construct
  REGION 1..7: note = Description of Artificial Sequence: Synthetic peptide
VHTSGVQ

SEQ ID NO: 28977 - protein, 7 aa, synthetic construct
  REGION 1..7: note = Description of Artificial Sequence: Synthetic peptide
EHETSSR

SEQ ID NO: 28978 - protein, 7 aa, synthetic construct
  REGION 1..7: note = Description of Artificial Sequence: Synthetic peptide
PKGVHSM

SEQ ID NO: 28979 - protein, 7 aa, synthetic construct
  REGION 1..7: note = Description of Artificial Sequence: Synthetic peptide
NGSEQNQ

SEQ ID NO: 28980 - protein, 7 aa, synthetic construct
  REGION 1..7: note = Description of Artificial Sequence: Synthetic peptide
DSRNNMT

SEQ ID NO: 28981 - protein, 7 aa, synthetic construct
  REGION 1..7: note = Description of Artificial Sequence: Synthetic peptide
ESSSSMG

SEQ ID NO: 28982 - protein, 7 aa, synthetic construct
  REGION 1..7: note = Description of Artificial Sequence: Synthetic peptide
GISTLSR

SEQ ID NO: 28983 - protein, 7 aa, synthetic construct
  REGION 1..7: note = Description of Artificial Sequence: Synthetic peptide
HKSGLVD

SEQ ID NO: 28984 - protein, 7 aa, synthetic construct
  REGION 1..7: note = Description of Artificial Sequence: Synthetic peptide
CGNAPRT

SEQ ID NO: 28985 - protein, 7 aa, synthetic construct
  REGION 1..7: note = Description of Artificial Sequence: Synthetic peptide
LTRPKII

SEQ ID NO: 28986 - protein, 7 aa, synthetic construct
  REGION 1..7: note = Description of Artificial Sequence: Synthetic peptide
HVSGKAV

SEQ ID NO: 28987 - protein, 7 aa, synthetic construct
  REGION 1..7: note = Description of Artificial Sequence: Synthetic peptide
RQVSTPL

SEQ ID NO: 28988 - protein, 7 aa, synthetic construct
  REGION 1..7: note = Description of Artificial Sequence: Synthetic peptide
HGTSPLR

SEQ ID NO: 28989 - protein, 7 aa, synthetic construct
  REGION 1..7: note = Description of Artificial Sequence: Synthetic peptide
GPLTRSG

SEQ ID NO: 28990 - protein, 7 aa, synthetic construct
  REGION 1..7: note = Description of Artificial Sequence: Synthetic peptide
QLGSTTR

SEQ ID NO: 28991 - protein, 7 aa, synthetic construct
  REGION 1..7: note = Description of Artificial Sequence: Synthetic peptide
ERTGRPG

SEQ ID NO: 28992 - protein, 7 aa, synthetic construct
  REGION 1..7: note = Description of Artificial Sequence: Synthetic peptide
GQVNHTT

SEQ ID NO: 28993 - protein, 7 aa, synthetic construct
  REGION 1..7: note = Description of Artificial Sequence: Synthetic peptide
RPDRTTL

SEQ ID NO: 28994 - protein, 7 aa, synthetic construct
  REGION 1..7: note = Description of Artificial Sequence: Synthetic peptide
PISSRAG

SEQ ID NO: 28995 - protein, 7 aa, synthetic construct
  REGION 1..7: note = Description of Artificial Sequence: Synthetic peptide
EATSSTK

SEQ ID NO: 28996 - protein, 7 aa, synthetic construct
  REGION 1..7: note = Description of Artificial Sequence: Synthetic peptide
RGAADSN

SEQ ID NO: 28997 - protein, 7 aa, synthetic construct
  REGION 1..7: note = Description of Artificial Sequence: Synthetic peptide
EPAYSVK

SEQ ID NO: 28998 - protein, 7 aa, synthetic construct
  REGION 1..7: note = Description of Artificial Sequence: Synthetic peptide
QSSQSGP

SEQ ID NO: 28999 - protein, 7 aa, synthetic construct
  REGION 1..7: note = Description of Artificial Sequence: Synthetic peptide
VPSQNRA

SEQ ID NO: 29000 - protein, 7 aa, synthetic construct
  REGION 1..7: note = Description of Artificial Sequence: Synthetic peptide
NQKTRTD

SEQ ID NO: 29001 - protein, 7 aa, synthetic construct
  REGION 1..7: note = Description of Artificial Sequence: Synthetic peptide
VNDHNVR

SEQ ID NO: 29002 - protein, 7 aa, synthetic construct
  REGION 1..7: note = Description of Artificial Sequence: Synthetic peptide
VAPPKIE

SEQ ID NO: 29003 - protein, 7 aa, synthetic construct
  REGION 1..7: note = Description of Artificial Sequence: Synthetic peptide
KVSKPAY

SEQ ID NO: 29004 - protein, 7 aa, synthetic construct
  REGION 1..7: note = Description of Artificial Sequence: Synthetic peptide
YRNIEAH

SEQ ID NO: 29005 - protein, 7 aa, synthetic construct
  REGION 1..7: note = Description of Artificial Sequence: Synthetic peptide
TTSRVSA

SEQ ID NO: 29006 - protein, 7 aa, synthetic construct
  REGION 1..7: note = Description of Artificial Sequence: Synthetic peptide
NSRVGQS

SEQ ID NO: 29007 - protein, 7 aa, synthetic construct
  REGION 1..7: note = Description of Artificial Sequence: Synthetic peptide
SSPSNMA

SEQ ID NO: 29008 - protein, 7 aa, synthetic construct
  REGION 1..7: note = Description of Artificial Sequence: Synthetic peptide
PLSKDRL

SEQ ID NO: 29009 - protein, 7 aa, synthetic construct
  REGION 1..7: note = Description of Artificial Sequence: Synthetic peptide
AGARSMQ

SEQ ID NO: 29010 - protein, 7 aa, synthetic construct
  REGION 1..7: note = Description of Artificial Sequence: Synthetic peptide
SGGDYAK

SEQ ID NO: 29011 - protein, 7 aa, synthetic construct
  REGION 1..7: note = Description of Artificial Sequence: Synthetic peptide
MGHKVEA

SEQ ID NO: 29012 - protein, 7 aa, synthetic construct
  REGION 1..7: note = Description of Artificial Sequence: Synthetic peptide
GQAMPFK

SEQ ID NO: 29013 - protein, 7 aa, synthetic construct
  REGION 1..7: note = Description of Artificial Sequence: Synthetic peptide
PVSGATI

SEQ ID NO: 29014 - protein, 7 aa, synthetic construct
  REGION 1..7: note = Description of Artificial Sequence: Synthetic peptide
GHSQSHQ

SEQ ID NO: 29015 - protein, 7 aa, synthetic construct
  REGION 1..7: note = Description of Artificial Sequence: Synthetic peptide
FGRATSG

SEQ ID NO: 29016 - protein, 7 aa, synthetic construct
  REGION 1..7: note = Description of Artificial Sequence: Synthetic peptide
SSANHPR

SEQ ID NO: 29017 - protein, 7 aa, synthetic construct
  REGION 1..7: note = Description of Artificial Sequence: Synthetic peptide
ISSGTHG

SEQ ID NO: 29018 - protein, 7 aa, synthetic construct
  REGION 1..7: note = Description of Artificial Sequence: Synthetic peptide
NIASKGP

SEQ ID NO: 29019 - protein, 7 aa, synthetic construct
  REGION 1..7: note = Description of Artificial Sequence: Synthetic peptide
PLDKSMM

SEQ ID NO: 29020 - protein, 7 aa, synthetic construct
  REGION 1..7: note = Description of Artificial Sequence: Synthetic peptide
AGSAPRV

SEQ ID NO: 29021 - protein, 7 aa, synthetic construct
  REGION 1..7: note = Description of Artificial Sequence: Synthetic peptide
RSTNDGR

SEQ ID NO: 29022 - protein, 7 aa, synthetic construct
  REGION 1..7: note = Description of Artificial Sequence: Synthetic peptide
SPSSPHD

SEQ ID NO: 29023 - protein, 7 aa, synthetic construct
  REGION 1..7: note = Description of Artificial Sequence: Synthetic peptide
STKSKPI

SEQ ID NO: 29024 - protein, 7 aa, synthetic construct
  REGION 1..7: note = Description of Artificial Sequence: Synthetic peptide
TERTKAT

SEQ ID NO: 29025 - protein, 7 aa, synthetic construct
  REGION 1..7: note = Description of Artificial Sequence: Synthetic peptide
KQTHSGS

SEQ ID NO: 29026 - protein, 7 aa, synthetic construct
  REGION 1..7: note = Description of Artificial Sequence: Synthetic peptide
ETRKQGV

SEQ ID NO: 29027 - protein, 7 aa, synthetic construct
  REGION 1..7: note = Description of Artificial Sequence: Synthetic peptide
PLPKNSS

SEQ ID NO: 29028 - protein, 7 aa, synthetic construct
  REGION 1..7: note = Description of Artificial Sequence: Synthetic peptide
RSSPASL

SEQ ID NO: 29029 - protein, 7 aa, synthetic construct
  REGION 1..7: note = Description of Artificial Sequence: Synthetic peptide
SQRALSS

SEQ ID NO: 29030 - protein, 7 aa, synthetic construct
  REGION 1..7: note = Description of Artificial Sequence: Synthetic peptide
PPQQSPL

SEQ ID NO: 29031 - protein, 7 aa, synthetic construct
  REGION 1..7: note = Description of Artificial Sequence: Synthetic peptide
KGNSGAP

SEQ ID NO: 29032 - protein, 7 aa, synthetic construct
  REGION 1..7: note = Description of Artificial Sequence: Synthetic peptide
IRLGSTN

SEQ ID NO: 29033 - protein, 7 aa, synthetic construct
  REGION 1..7: note = Description of Artificial Sequence: Synthetic peptide
PDVKVTR

SEQ ID NO: 29034 - protein, 7 aa, synthetic construct
  REGION 1..7: note = Description of Artificial Sequence: Synthetic peptide
SPGKLTT

SEQ ID NO: 29035 - protein, 7 aa, synthetic construct
  REGION 1..7: note = Description of Artificial Sequence: Synthetic peptide
GTNPSLA

SEQ ID NO: 29036 - protein, 7 aa, synthetic construct
  REGION 1..7: note = Description of Artificial Sequence: Synthetic peptide
SMVSTPM

SEQ ID NO: 29037 - protein, 7 aa, synthetic construct
  REGION 1..7: note = Description of Artificial Sequence: Synthetic peptide
PLRGGSS

SEQ ID NO: 29038 - protein, 7 aa, synthetic construct
  REGION 1..7: note = Description of Artificial Sequence: Synthetic peptide
RPRDRTD

SEQ ID NO: 29039 - protein, 7 aa, synthetic construct
  REGION 1..7: note = Description of Artificial Sequence: Synthetic peptide
PTLSGSR

SEQ ID NO: 29040 - protein, 7 aa, synthetic construct
  REGION 1..7: note = Description of Artificial Sequence: Synthetic peptide
LATSSVR

SEQ ID NO: 29041 - protein, 7 aa, synthetic construct
  REGION 1..7: note = Description of Artificial Sequence: Synthetic peptide
TTLPSSK

SEQ ID NO: 29042 - protein, 7 aa, synthetic construct
  REGION 1..7: note = Description of Artificial Sequence: Synthetic peptide
DLTNHTK

SEQ ID NO: 29043 - protein, 7 aa, synthetic construct
  REGION 1..7: note = Description of Artificial Sequence: Synthetic peptide
HTPAVGK

SEQ ID NO: 29044 - protein, 7 aa, synthetic construct
  REGION 1..7: note = Description of Artificial Sequence: Synthetic peptide
NRVKPMV

SEQ ID NO: 29045 - protein, 7 aa, synthetic construct
  REGION 1..7: note = Description of Artificial Sequence: Synthetic peptide
SGAGSAG

SEQ ID NO: 29046 - protein, 7 aa, synthetic construct
  REGION 1..7: note = Description of Artificial Sequence: Synthetic peptide
TLSSTGG

SEQ ID NO: 29047 - protein, 7 aa, synthetic construct
  REGION 1..7: note = Description of Artificial Sequence: Synthetic peptide
SLTTKAN

SEQ ID NO: 29048 - protein, 7 aa, synthetic construct
  REGION 1..7: note = Description of Artificial Sequence: Synthetic peptide
SRSNATA

SEQ ID NO: 29049 - protein, 7 aa, synthetic construct
  REGION 1..7: note = Description of Artificial Sequence: Synthetic peptide
PSSTPKL

SEQ ID NO: 29050 - protein, 7 aa, synthetic construct
  REGION 1..7: note = Description of Artificial Sequence: Synthetic peptide
RQTVSSH

SEQ ID NO: 29051 - protein, 7 aa, synthetic construct
  REGION 1..7: note = Description of Artificial Sequence: Synthetic peptide
RHESKAY

SEQ ID NO: 29052 - protein, 7 aa, synthetic construct
  REGION 1..7: note = Description of Artificial Sequence: Synthetic peptide
TTYGGNR

SEQ ID NO: 29053 - protein, 7 aa, synthetic construct
  REGION 1..7: note = Description of Artificial Sequence: Synthetic peptide
AFSHSSG

SEQ ID NO: 29054 - protein, 7 aa, synthetic construct
  REGION 1..7: note = Description of Artificial Sequence: Synthetic peptide
QETRGNS

SEQ ID NO: 29055 - protein, 7 aa, synthetic construct
  REGION 1..7: note = Description of Artificial Sequence: Synthetic peptide
DPRAQSH

SEQ ID NO: 29056 - protein, 7 aa, synthetic construct
  REGION 1..7: note = Description of Artificial Sequence: Synthetic peptide
SLGSNAN

SEQ ID NO: 29057 - protein, 7 aa, synthetic construct
  REGION 1..7: note = Description of Artificial Sequence: Synthetic peptide
GLSSGKT

SEQ ID NO: 29058 - protein, 7 aa, synthetic construct
  REGION 1..7: note = Description of Artificial Sequence: Synthetic peptide
YATDGLK

SEQ ID NO: 29059 - protein, 7 aa, synthetic construct
  REGION 1..7: note = Description of Artificial Sequence: Synthetic peptide
TQGLGHL

SEQ ID NO: 29060 - protein, 7 aa, synthetic construct
  REGION 1..7: note = Description of Artificial Sequence: Synthetic peptide
ACNTSRC

SEQ ID NO: 29061 - protein, 7 aa, synthetic construct
  REGION 1..7: note = Description of Artificial Sequence: Synthetic peptide
NNGASVV

SEQ ID NO: 29062 - protein, 7 aa, synthetic construct
  REGION 1..7: note = Description of Artificial Sequence: Synthetic peptide
KILNVGT

SEQ ID NO: 29063 - protein, 7 aa, synthetic construct
  REGION 1..7: note = Description of Artificial Sequence: Synthetic peptide
QSISHTR

SEQ ID NO: 29064 - protein, 7 aa, synthetic construct
  REGION 1..7: note = Description of Artificial Sequence: Synthetic peptide
SVQKSVN

SEQ ID NO: 29065 - protein, 7 aa, synthetic construct
  REGION 1..7: note = Description of Artificial Sequence: Synthetic peptide
RESSPSL

SEQ ID NO: 29066 - protein, 7 aa, synthetic construct
  REGION 1..7: note = Description of Artificial Sequence: Synthetic peptide
SGSGIMM

SEQ ID NO: 29067 - protein, 7 aa, synthetic construct
  REGION 1..7: note = Description of Artificial Sequence: Synthetic peptide
GSRDKST

SEQ ID NO: 29068 - protein, 7 aa, synthetic construct
  REGION 1..7: note = Description of Artificial Sequence: Synthetic peptide
SADRTSN

SEQ ID NO: 29069 - protein, 7 aa, synthetic construct
  REGION 1..7: note = Description of Artificial Sequence: Synthetic peptide
SIHSDRT

SEQ ID NO: 29070 - protein, 7 aa, synthetic construct
  REGION 1..7: note = Description of Artificial Sequence: Synthetic peptide
LRSGDVR

SEQ ID NO: 29071 - protein, 7 aa, synthetic construct
  REGION 1..7: note = Description of Artificial Sequence: Synthetic peptide
AQQRAQA

SEQ ID NO: 29072 - protein, 7 aa, synthetic construct
  REGION 1..7: note = Description of Artificial Sequence: Synthetic peptide
PAAMSSV

SEQ ID NO: 29073 - protein, 7 aa, synthetic construct
  REGION 1..7: note = Description of Artificial Sequence: Synthetic peptide
DAQRRGV

SEQ ID NO: 29074 - protein, 7 aa, synthetic construct
  REGION 1..7: note = Description of Artificial Sequence: Synthetic peptide
TMVHGNT

SEQ ID NO: 29075 - protein, 7 aa, synthetic construct
  REGION 1..7: note = Description of Artificial Sequence: Synthetic peptide
ERPGGTP

SEQ ID NO: 29076 - protein, 7 aa, synthetic construct
  REGION 1..7: note = Description of Artificial Sequence: Synthetic peptide
AGVTTVN

SEQ ID NO: 29077 - protein, 7 aa, synthetic construct
  REGION 1..7: note = Description of Artificial Sequence: Synthetic peptide
RNVDKSS

SEQ ID NO: 29078 - protein, 7 aa, synthetic construct
  REGION 1..7: note = Description of Artificial Sequence: Synthetic peptide
YIHNPTG

SEQ ID NO: 29079 - protein, 7 aa, synthetic construct
  REGION 1..7: note = Description of Artificial Sequence: Synthetic peptide
SMSEHLK

SEQ ID NO: 29080 - protein, 7 aa, synthetic construct
  REGION 1..7: note = Description of Artificial Sequence: Synthetic peptide
SRANSVP

SEQ ID NO: 29081 - protein, 7 aa, synthetic construct
  REGION 1..7: note = Description of Artificial Sequence: Synthetic peptide
TSAAPHA

SEQ ID NO: 29082 - protein, 7 aa, synthetic construct
  REGION 1..7: note = Description of Artificial Sequence: Synthetic peptide
GHLSPSS

SEQ ID NO: 29083 - protein, 7 aa, synthetic construct
  REGION 1..7: note = Description of Artificial Sequence: Synthetic peptide
PTQNGRS

SEQ ID NO: 29084 - protein, 7 aa, synthetic construct
  REGION 1..7: note = Description of Artificial Sequence: Synthetic peptide
KTPTHTM

SEQ ID NO: 29085 - protein, 7 aa, synthetic construct
  REGION 1..7: note = Description of Artificial Sequence: Synthetic peptide
NSVERTR

SEQ ID NO: 29086 - protein, 7 aa, synthetic construct
  REGION 1..7: note = Description of Artificial Sequence: Synthetic peptide
SITDRHS

SEQ ID NO: 29087 - protein, 7 aa, synthetic construct
  REGION 1..7: note = Description of Artificial Sequence: Synthetic peptide
PFGSSAR

SEQ ID NO: 29088 - protein, 7 aa, synthetic construct
  REGION 1..7: note = Description of Artificial Sequence: Synthetic peptide
ISGSGYH

SEQ ID NO: 29089 - protein, 7 aa, synthetic construct
  REGION 1..7: note = Description of Artificial Sequence: Synthetic peptide
NVDNRGF

SEQ ID NO: 29090 - protein, 7 aa, synthetic construct
  REGION 1..7: note = Description of Artificial Sequence: Synthetic peptide
SRAPNTL

SEQ ID NO: 29091 - protein, 7 aa, synthetic construct
  REGION 1..7: note = Description of Artificial Sequence: Synthetic peptide
NRNGFNN

SEQ ID NO: 29092 - protein, 7 aa, synthetic construct
  REGION 1..7: note = Description of Artificial Sequence: Synthetic peptide
NAEPTSS

SEQ ID NO: 29093 - protein, 7 aa, synthetic construct
  REGION 1..7: note = Description of Artificial Sequence: Synthetic peptide
MNRNGSL

SEQ ID NO: 29094 - protein, 7 aa, synthetic construct
  REGION 1..7: note = Description of Artificial Sequence: Synthetic peptide
HQPEKIA

SEQ ID NO: 29095 - protein, 7 aa, synthetic construct
  REGION 1..7: note = Description of Artificial Sequence: Synthetic peptide
SYSELVR

SEQ ID NO: 29096 - protein, 7 aa, synthetic construct
  REGION 1..7: note = Description of Artificial Sequence: Synthetic peptide
PVVTGVP

SEQ ID NO: 29097 - protein, 7 aa, synthetic construct
  REGION 1..7: note = Description of Artificial Sequence: Synthetic peptide
ADLTRSS

SEQ ID NO: 29098 - protein, 7 aa, synthetic construct
  REGION 1..7: note = Description of Artificial Sequence: Synthetic peptide
RYDKQNS

SEQ ID NO: 29099 - protein, 7 aa, synthetic construct
  REGION 1..7: note = Description of Artificial Sequence: Synthetic peptide
WGRSSMD

SEQ ID NO: 29100 - protein, 7 aa, synthetic construct
  REGION 1..7: note = Description of Artificial Sequence: Synthetic peptide
NVRSGTP

SEQ ID NO: 29101 - protein, 7 aa, synthetic construct
  REGION 1..7: note = Description of Artificial Sequence: Synthetic peptide
RAGSAVE

SEQ ID NO: 29102 - protein, 7 aa, synthetic construct
  REGION 1..7: note = Description of Artificial Sequence: Synthetic peptide
ANGHPQS

SEQ ID NO: 29103 - protein, 7 aa, synthetic construct
  REGION 1..7: note = Description of Artificial Sequence: Synthetic peptide
YTSTNRP

SEQ ID NO: 29104 - protein, 7 aa, synthetic construct
  REGION 1..7: note = Description of Artificial Sequence: Synthetic peptide
HNLNGFH

SEQ ID NO: 29105 - protein, 7 aa, synthetic construct
  REGION 1..7: note = Description of Artificial Sequence: Synthetic peptide
DMRATVM

SEQ ID NO: 29106 - protein, 7 aa, synthetic construct
  REGION 1..7: note = Description of Artificial Sequence: Synthetic peptide
YLGRVPP

SEQ ID NO: 29107 - protein, 7 aa, synthetic construct
  REGION 1..7: note = Description of Artificial Sequence: Synthetic peptide
LSGHASG

SEQ ID NO: 29108 - protein, 7 aa, synthetic construct
  REGION 1..7: note = Description of Artificial Sequence: Synthetic peptide
SIPTSAR

SEQ ID NO: 29109 - protein, 7 aa, synthetic construct
  REGION 1..7: note = Description of Artificial Sequence: Synthetic peptide
SRNAANA

SEQ ID NO: 29110 - protein, 7 aa, synthetic construct
  REGION 1..7: note = Description of Artificial Sequence: Synthetic peptide
QMPGHTG

SEQ ID NO: 29111 - protein, 7 aa, synthetic construct
  REGION 1..7: note = Description of Artificial Sequence: Synthetic peptide
WAGNKSV

SEQ ID NO: 29112 - protein, 7 aa, synthetic construct
  REGION 1..7: note = Description of Artificial Sequence: Synthetic peptide
TLPRTSG

SEQ ID NO: 29113 - protein, 7 aa, synthetic construct
  REGION 1..7: note = Description of Artificial Sequence: Synthetic peptide
VQRNSNT

SEQ ID NO: 29114 - protein, 7 aa, synthetic construct
  REGION 1..7: note = Description of Artificial Sequence: Synthetic peptide
HITSNHA

SEQ ID NO: 29115 - protein, 7 aa, synthetic construct
  REGION 1..7: note = Description of Artificial Sequence: Synthetic peptide
INVSRST

SEQ ID NO: 29116 - protein, 7 aa, synthetic construct
  REGION 1..7: note = Description of Artificial Sequence: Synthetic peptide
LTNRSSS

SEQ ID NO: 29117 - protein, 7 aa, synthetic construct
  REGION 1..7: note = Description of Artificial Sequence: Synthetic peptide
TRDSQVL

SEQ ID NO: 29118 - protein, 7 aa, synthetic construct
  REGION 1..7: note = Description of Artificial Sequence: Synthetic peptide
RTVNSAN

SEQ ID NO: 29119 - protein, 7 aa, synthetic construct
  REGION 1..7: note = Description of Artificial Sequence: Synthetic peptide
TTNNIQG

SEQ ID NO: 29120 - protein, 7 aa, synthetic construct
  REGION 1..7: note = Description of Artificial Sequence: Synthetic peptide
GINSRGS

SEQ ID NO: 29121 - protein, 7 aa, synthetic construct
  REGION 1..7: note = Description of Artificial Sequence: Synthetic peptide
LGSSGSR

SEQ ID NO: 29122 - protein, 7 aa, synthetic construct
  REGION 1..7: note = Description of Artificial Sequence: Synthetic peptide
TQRSQTA

SEQ ID NO: 29123 - protein, 7 aa, synthetic construct
  REGION 1..7: note = Description of Artificial Sequence: Synthetic peptide
GSAGNML

SEQ ID NO: 29124 - protein, 7 aa, synthetic construct
  REGION 1..7: note = Description of Artificial Sequence: Synthetic peptide
APSAGNS

SEQ ID NO: 29125 - protein, 7 aa, synthetic construct
  REGION 1..7: note = Description of Artificial Sequence: Synthetic peptide
GVSQGNR

SEQ ID NO: 29126 - protein, 7 aa, synthetic construct
  REGION 1..7: note = Description of Artificial Sequence: Synthetic peptide
LTTGNHI

SEQ ID NO: 29127 - protein, 7 aa, synthetic construct
  REGION 1..7: note = Description of Artificial Sequence: Synthetic peptide
TRSTSAT

SEQ ID NO: 29128 - protein, 7 aa, synthetic construct
  REGION 1..7: note = Description of Artificial Sequence: Synthetic peptide
LQKPSLV

SEQ ID NO: 29129 - protein, 7 aa, synthetic construct
  REGION 1..7: note = Description of Artificial Sequence: Synthetic peptide
GYASVPR

SEQ ID NO: 29130 - protein, 7 aa, synthetic construct
  REGION 1..7: note = Description of Artificial Sequence: Synthetic peptide
HYGPDSK

SEQ ID NO: 29131 - protein, 7 aa, synthetic construct
  REGION 1..7: note = Description of Artificial Sequence: Synthetic peptide
NRVNNEM

SEQ ID NO: 29132 - protein, 7 aa, synthetic construct
  REGION 1..7: note = Description of Artificial Sequence: Synthetic peptide
GLLGAST

SEQ ID NO: 29133 - protein, 7 aa, synthetic construct
  REGION 1..7: note = Description of Artificial Sequence: Synthetic peptide
SGSEHLR

SEQ ID NO: 29134 - protein, 7 aa, synthetic construct
  REGION 1..7: note = Description of Artificial Sequence: Synthetic peptide
APPNGSL

SEQ ID NO: 29135 - protein, 7 aa, synthetic construct
  REGION 1..7: note = Description of Artificial Sequence: Synthetic peptide
GRESNLS

SEQ ID NO: 29136 - protein, 7 aa, synthetic construct
  REGION 1..7: note = Description of Artificial Sequence: Synthetic peptide
LNQHSSL

SEQ ID NO: 29137 - protein, 7 aa, synthetic construct
  REGION 1..7: note = Description of Artificial Sequence: Synthetic peptide
MGGVTSS

SEQ ID NO: 29138 - protein, 7 aa, synthetic construct
  REGION 1..7: note = Description of Artificial Sequence: Synthetic peptide
NGSGQHQ

SEQ ID NO: 29139 - protein, 7 aa, synthetic construct
  REGION 1..7: note = Description of Artificial Sequence: Synthetic peptide
KSDAHTA

SEQ ID NO: 29140 - protein, 7 aa, synthetic construct
  REGION 1..7: note = Description of Artificial Sequence: Synthetic peptide
GPNPING

SEQ ID NO: 29141 - protein, 7 aa, synthetic construct
  REGION 1..7: note = Description of Artificial Sequence: Synthetic peptide
LMQTHGS

SEQ ID NO: 29142 - protein, 7 aa, synthetic construct
  REGION 1..7: note = Description of Artificial Sequence: Synthetic peptide
GSRDNSR

SEQ ID NO: 29143 - protein, 7 aa, synthetic construct
  REGION 1..7: note = Description of Artificial Sequence: Synthetic peptide
CRSNAKC

SEQ ID NO: 29144 - protein, 7 aa, synthetic construct
  REGION 1..7: note = Description of Artificial Sequence: Synthetic peptide
LDSRATE

SEQ ID NO: 29145 - protein, 7 aa, synthetic construct
  REGION 1..7: note = Description of Artificial Sequence: Synthetic peptide
ASSSKSV

SEQ ID NO: 29146 - protein, 7 aa, synthetic construct
  REGION 1..7: note = Description of Artificial Sequence: Synthetic peptide
SVHSNAI

SEQ ID NO: 29147 - protein, 7 aa, synthetic construct
  REGION 1..7: note = Description of Artificial Sequence: Synthetic peptide
RTQAHNV

SEQ ID NO: 29148 - protein, 7 aa, synthetic construct
  REGION 1..7: note = Description of Artificial Sequence: Synthetic peptide
TSSARVT

SEQ ID NO: 29149 - protein, 7 aa, synthetic construct
  REGION 1..7: note = Description of Artificial Sequence: Synthetic peptide
DGRTHSC

SEQ ID NO: 29150 - protein, 7 aa, synthetic construct
  REGION 1..7: note = Description of Artificial Sequence: Synthetic peptide
WAVSRPT

SEQ ID NO: 29151 - protein, 7 aa, synthetic construct
  REGION 1..7: note = Description of Artificial Sequence: Synthetic peptide
DPLRNSN

SEQ ID NO: 29152 - protein, 7 aa, synthetic construct
  REGION 1..7: note = Description of Artificial Sequence: Synthetic peptide
LSSSHTL

SEQ ID NO: 29153 - protein, 7 aa, synthetic construct
  REGION 1..7: note = Description of Artificial Sequence: Synthetic peptide
SHPSSFG

SEQ ID NO: 29154 - protein, 7 aa, synthetic construct
  REGION 1..7: note = Description of Artificial Sequence: Synthetic peptide
STMHKNV

SEQ ID NO: 29155 - protein, 7 aa, synthetic construct
  REGION 1..7: note = Description of Artificial Sequence: Synthetic peptide
STDLKSR

SEQ ID NO: 29156 - protein, 7 aa, synthetic construct
  REGION 1..7: note = Description of Artificial Sequence: Synthetic peptide
RPVVAST

SEQ ID NO: 29157 - protein, 7 aa, synthetic construct
  REGION 1..7: note = Description of Artificial Sequence: Synthetic peptide
QLRVGNG

SEQ ID NO: 29158 - protein, 7 aa, synthetic construct
  REGION 1..7: note = Description of Artificial Sequence: Synthetic peptide
GAISNEH

SEQ ID NO: 29159 - protein, 7 aa, synthetic construct
  REGION 1..7: note = Description of Artificial Sequence: Synthetic peptide
HKTGANV

SEQ ID NO: 29160 - protein, 7 aa, synthetic construct
  REGION 1..7: note = Description of Artificial Sequence: Synthetic peptide
SGPTQIR

SEQ ID NO: 29161 - protein, 7 aa, synthetic construct
  REGION 1..7: note = Description of Artificial Sequence: Synthetic peptide
MSSTRSI

SEQ ID NO: 29162 - protein, 7 aa, synthetic construct
  REGION 1..7: note = Description of Artificial Sequence: Synthetic peptide
NAVRSEN

SEQ ID NO: 29163 - protein, 7 aa, synthetic construct
  REGION 1..7: note = Description of Artificial Sequence: Synthetic peptide
YSMRPTE

SEQ ID NO: 29164 - protein, 7 aa, synthetic construct
  REGION 1..7: note = Description of Artificial Sequence: Synthetic peptide
EGPSSPH

SEQ ID NO: 29165 - protein, 7 aa, synthetic construct
  REGION 1..7: note = Description of Artificial Sequence: Synthetic peptide
GGVGGKS

SEQ ID NO: 29166 - protein, 7 aa, synthetic construct
  REGION 1..7: note = Description of Artificial Sequence: Synthetic peptide
DSTHRAT

SEQ ID NO: 29167 - protein, 7 aa, synthetic construct
  REGION 1..7: note = Description of Artificial Sequence: Synthetic peptide
MSANQHR

SEQ ID NO: 29168 - protein, 7 aa, synthetic construct
  REGION 1..7: note = Description of Artificial Sequence: Synthetic peptide
PASNVRG

SEQ ID NO: 29169 - protein, 7 aa, synthetic construct
  REGION 1..7: note = Description of Artificial Sequence: Synthetic peptide
PSVRTLG

SEQ ID NO: 29170 - protein, 7 aa, synthetic construct
  REGION 1..7: note = Description of Artificial Sequence: Synthetic peptide
QAQGSMQ

SEQ ID NO: 29171 - protein, 7 aa, synthetic construct
  REGION 1..7: note = Description of Artificial Sequence: Synthetic peptide
QRVHPSG

SEQ ID NO: 29172 - protein, 7 aa, synthetic construct
  REGION 1..7: note = Description of Artificial Sequence: Synthetic peptide
DPHSGGK

SEQ ID NO: 29173 - protein, 7 aa, synthetic construct
  REGION 1..7: note = Description of Artificial Sequence: Synthetic peptide
YLTSTSN

SEQ ID NO: 29174 - protein, 7 aa, synthetic construct
  REGION 1..7: note = Description of Artificial Sequence: Synthetic peptide
RVITGQH

SEQ ID NO: 29175 - protein, 7 aa, synthetic construct
  REGION 1..7: note = Description of Artificial Sequence: Synthetic peptide
SPHKQAN

SEQ ID NO: 29176 - protein, 7 aa, synthetic construct
  REGION 1..7: note = Description of Artificial Sequence: Synthetic peptide
KVSSATP

SEQ ID NO: 29177 - protein, 7 aa, synthetic construct
  REGION 1..7: note = Description of Artificial Sequence: Synthetic peptide
GTARGVA

SEQ ID NO: 29178 - protein, 7 aa, synthetic construct
  REGION 1..7: note = Description of Artificial Sequence: Synthetic peptide
PYARNAE

SEQ ID NO: 29179 - protein, 7 aa, synthetic construct
  REGION 1..7: note = Description of Artificial Sequence: Synthetic peptide
FVNTSAQ

SEQ ID NO: 29180 - protein, 7 aa, synthetic construct
  REGION 1..7: note = Description of Artificial Sequence: Synthetic peptide
GRNSHFV

SEQ ID NO: 29181 - protein, 7 aa, synthetic construct
  REGION 1..7: note = Description of Artificial Sequence: Synthetic peptide
DMSVHNV

SEQ ID NO: 29182 - protein, 7 aa, synthetic construct
  REGION 1..7: note = Description of Artificial Sequence: Synthetic peptide
PMLQHRA

SEQ ID NO: 29183 - protein, 7 aa, synthetic construct
  REGION 1..7: note = Description of Artificial Sequence: Synthetic peptide
LSQSNTH

SEQ ID NO: 29184 - protein, 7 aa, synthetic construct
  REGION 1..7: note = Description of Artificial Sequence: Synthetic peptide
RAPKSSS

SEQ ID NO: 29185 - protein, 7 aa, synthetic construct
  REGION 1..7: note = Description of Artificial Sequence: Synthetic peptide
QPGVSGR

SEQ ID NO: 29186 - protein, 7 aa, synthetic construct
  REGION 1..7: note = Description of Artificial Sequence: Synthetic peptide
PSEVRSS

SEQ ID NO: 29187 - protein, 7 aa, synthetic construct
  REGION 1..7: note = Description of Artificial Sequence: Synthetic peptide
GITHGSH

SEQ ID NO: 29188 - protein, 7 aa, synthetic construct
  REGION 1..7: note = Description of Artificial Sequence: Synthetic peptide
NNSSGAQ

SEQ ID NO: 29189 - protein, 7 aa, synthetic construct
  REGION 1..7: note = Description of Artificial Sequence: Synthetic peptide
FSVQGQC

SEQ ID NO: 29190 - protein, 7 aa, synthetic construct
  REGION 1..7: note = Description of Artificial Sequence: Synthetic peptide
PKVHPLK

SEQ ID NO: 29191 - protein, 7 aa, synthetic construct
  REGION 1..7: note = Description of Artificial Sequence: Synthetic peptide
TNSQVPR

SEQ ID NO: 29192 - protein, 7 aa, synthetic construct
  REGION 1..7: note = Description of Artificial Sequence: Synthetic peptide
YGSGQNQ

SEQ ID NO: 29193 - protein, 7 aa, synthetic construct
  REGION 1..7: note = Description of Artificial Sequence: Synthetic peptide
SQVSKPQ

SEQ ID NO: 29194 - protein, 7 aa, synthetic construct
  REGION 1..7: note = Description of Artificial Sequence: Synthetic peptide
SSPSHMA

SEQ ID NO: 29195 - protein, 7 aa, synthetic construct
  REGION 1..7: note = Description of Artificial Sequence: Synthetic peptide
DRQGLSG

SEQ ID NO: 29196 - protein, 7 aa, synthetic construct
  REGION 1..7: note = Description of Artificial Sequence: Synthetic peptide
TRQGMGS

SEQ ID NO: 29197 - protein, 7 aa, synthetic construct
  REGION 1..7: note = Description of Artificial Sequence: Synthetic peptide
KGFKTES

SEQ ID NO: 29198 - protein, 7 aa, synthetic construct
  REGION 1..7: note = Description of Artificial Sequence: Synthetic peptide
TGQQTAT

SEQ ID NO: 29199 - protein, 7 aa, synthetic construct
  REGION 1..7: note = Description of Artificial Sequence: Synthetic peptide
VHEAPLR

SEQ ID NO: 29200 - protein, 7 aa, synthetic construct
  REGION 1..7: note = Description of Artificial Sequence: Synthetic peptide
VTKSGNG

SEQ ID NO: 29201 - protein, 7 aa, synthetic construct
  REGION 1..7: note = Description of Artificial Sequence: Synthetic peptide
SGQHSLN

SEQ ID NO: 29202 - protein, 7 aa, synthetic construct
  REGION 1..7: note = Description of Artificial Sequence: Synthetic peptide
REVSSYK

SEQ ID NO: 29203 - protein, 7 aa, synthetic construct
  REGION 1..7: note = Description of Artificial Sequence: Synthetic peptide
HARSPPV

SEQ ID NO: 29204 - protein, 7 aa, synthetic construct
  REGION 1..7: note = Description of Artificial Sequence: Synthetic peptide
HNLPQHD

SEQ ID NO: 29205 - protein, 7 aa, synthetic construct
  REGION 1..7: note = Description of Artificial Sequence: Synthetic peptide
EFTKVGA

SEQ ID NO: 29206 - protein, 7 aa, synthetic construct
  REGION 1..7: note = Description of Artificial Sequence: Synthetic peptide
VSNSPSR

SEQ ID NO: 29207 - protein, 7 aa, synthetic construct
  REGION 1..7: note = Description of Artificial Sequence: Synthetic peptide
SISPNRT

SEQ ID NO: 29208 - protein, 7 aa, synthetic construct
  REGION 1..7: note = Description of Artificial Sequence: Synthetic peptide
VFNHASK

SEQ ID NO: 29209 - protein, 7 aa, synthetic construct
  REGION 1..7: note = Description of Artificial Sequence: Synthetic peptide
GLMTHSI

SEQ ID NO: 29210 - protein, 7 aa, synthetic construct
  REGION 1..7: note = Description of Artificial Sequence: Synthetic peptide
SFGTENR

SEQ ID NO: 29211 - protein, 7 aa, synthetic construct
  REGION 1..7: note = Description of Artificial Sequence: Synthetic peptide
KHGGSSV

SEQ ID NO: 29212 - protein, 7 aa, synthetic construct
  REGION 1..7: note = Description of Artificial Sequence: Synthetic peptide
EVRADPR

SEQ ID NO: 29213 - protein, 7 aa, synthetic construct
  REGION 1..7: note = Description of Artificial Sequence: Synthetic peptide
GHMGSIG

SEQ ID NO: 29214 - protein, 7 aa, synthetic construct
  REGION 1..7: note = Description of Artificial Sequence: Synthetic peptide
LHQLSAG

SEQ ID NO: 29215 - protein, 7 aa, synthetic construct
  REGION 1..7: note = Description of Artificial Sequence: Synthetic peptide
THTNRLG

SEQ ID NO: 29216 - protein, 7 aa, synthetic construct
  REGION 1..7: note = Description of Artificial Sequence: Synthetic peptide
RSERTHS

SEQ ID NO: 29217 - protein, 7 aa, synthetic construct
  REGION 1..7: note = Description of Artificial Sequence: Synthetic peptide
SRINTSP

SEQ ID NO: 29218 - protein, 7 aa, synthetic construct
  REGION 1..7: note = Description of Artificial Sequence: Synthetic peptide
RQLVDPP

SEQ ID NO: 29219 - protein, 7 aa, synthetic construct
  REGION 1..7: note = Description of Artificial Sequence: Synthetic peptide
ARSRSTD

SEQ ID NO: 29220 - protein, 7 aa, synthetic construct
  REGION 1..7: note = Description of Artificial Sequence: Synthetic peptide
RTGHYQD

SEQ ID NO: 29221 - protein, 7 aa, synthetic construct
  REGION 1..7: note = Description of Artificial Sequence: Synthetic peptide
PSLQLMG

SEQ ID NO: 29222 - protein, 7 aa, synthetic construct
  REGION 1..7: note = Description of Artificial Sequence: Synthetic peptide
ASSSRPS

SEQ ID NO: 29223 - protein, 7 aa, synthetic construct
  REGION 1..7: note = Description of Artificial Sequence: Synthetic peptide
GPSSPRL

SEQ ID NO: 29224 - protein, 7 aa, synthetic construct
  REGION 1..7: note = Description of Artificial Sequence: Synthetic peptide
GRETVSR

SEQ ID NO: 29225 - protein, 7 aa, synthetic construct
  REGION 1..7: note = Description of Artificial Sequence: Synthetic peptide
QSYDSHR

SEQ ID NO: 29226 - protein, 7 aa, synthetic construct
  REGION 1..7: note = Description of Artificial Sequence: Synthetic peptide
GGQNSSK

SEQ ID NO: 29227 - protein, 7 aa, synthetic construct
  REGION 1..7: note = Description of Artificial Sequence: Synthetic peptide
GVQTARI

SEQ ID NO: 29228 - protein, 7 aa, synthetic construct
  REGION 1..7: note = Description of Artificial Sequence: Synthetic peptide
TGIAPVG

SEQ ID NO: 29229 - protein, 7 aa, synthetic construct
  REGION 1..7: note = Description of Artificial Sequence: Synthetic peptide
RSGGSLS

SEQ ID NO: 29230 - protein, 7 aa, synthetic construct
  REGION 1..7: note = Description of Artificial Sequence: Synthetic peptide
MGVGMNG

SEQ ID NO: 29231 - protein, 7 aa, synthetic construct
  REGION 1..7: note = Description of Artificial Sequence: Synthetic peptide
VRSQAMS

SEQ ID NO: 29232 - protein, 7 aa, synthetic construct
  REGION 1..7: note = Description of Artificial Sequence: Synthetic peptide
STATNVY

SEQ ID NO: 29233 - protein, 7 aa, synthetic construct
  REGION 1..7: note = Description of Artificial Sequence: Synthetic peptide
GTRNAIV

SEQ ID NO: 29234 - protein, 7 aa, synthetic construct
  REGION 1..7: note = Description of Artificial Sequence: Synthetic peptide
ARSVKSV

SEQ ID NO: 29235 - protein, 7 aa, synthetic construct
  REGION 1..7: note = Description of Artificial Sequence: Synthetic peptide
SSQAKLV

SEQ ID NO: 29236 - protein, 7 aa, synthetic construct
  REGION 1..7: note = Description of Artificial Sequence: Synthetic peptide
GSVNRSS

SEQ ID NO: 29237 - protein, 7 aa, synthetic construct
  REGION 1..7: note = Description of Artificial Sequence: Synthetic peptide
HTSPPFT

SEQ ID NO: 29238 - protein, 7 aa, synthetic construct
  REGION 1..7: note = Description of Artificial Sequence: Synthetic peptide
PSTSSAG

SEQ ID NO: 29239 - protein, 7 aa, synthetic construct
  REGION 1..7: note = Description of Artificial Sequence: Synthetic peptide
TGTATLR

SEQ ID NO: 29240 - protein, 7 aa, synthetic construct
  REGION 1..7: note = Description of Artificial Sequence: Synthetic peptide
ISKASTH

SEQ ID NO: 29241 - protein, 7 aa, synthetic construct
  REGION 1..7: note = Description of Artificial Sequence: Synthetic peptide
ELRTNAL

SEQ ID NO: 29242 - protein, 7 aa, synthetic construct
  REGION 1..7: note = Description of Artificial Sequence: Synthetic peptide
GQTMSTM

SEQ ID NO: 29243 - protein, 7 aa, synthetic construct
  REGION 1..7: note = Description of Artificial Sequence: Synthetic peptide
GVNNNIN

SEQ ID NO: 29244 - protein, 7 aa, synthetic construct
  REGION 1..7: note = Description of Artificial Sequence: Synthetic peptide
SGSSTFR

SEQ ID NO: 29245 - protein, 7 aa, synthetic construct
  REGION 1..7: note = Description of Artificial Sequence: Synthetic peptide
RSANTNA

SEQ ID NO: 29246 - protein, 7 aa, synthetic construct
  REGION 1..7: note = Description of Artificial Sequence: Synthetic peptide
GVLGSPK

SEQ ID NO: 29247 - protein, 7 aa, synthetic construct
  REGION 1..7: note = Description of Artificial Sequence: Synthetic peptide
VMSANTH

SEQ ID NO: 29248 - protein, 7 aa, synthetic construct
  REGION 1..7: note = Description of Artificial Sequence: Synthetic peptide
SRIGMST

SEQ ID NO: 29249 - protein, 7 aa, synthetic construct
  REGION 1..7: note = Description of Artificial Sequence: Synthetic peptide
QHSPRNG

SEQ ID NO: 29250 - protein, 7 aa, synthetic construct
  REGION 1..7: note = Description of Artificial Sequence: Synthetic peptide
PHGDKTS

SEQ ID NO: 29251 - protein, 7 aa, synthetic construct
  REGION 1..7: note = Description of Artificial Sequence: Synthetic peptide
REPMKGS

SEQ ID NO: 29252 - protein, 7 aa, synthetic construct
  REGION 1..7: note = Description of Artificial Sequence: Synthetic peptide
MRSKESA

SEQ ID NO: 29253 - protein, 7 aa, synthetic construct
  REGION 1..7: note = Description of Artificial Sequence: Synthetic peptide
WGTRSTV

SEQ ID NO: 29254 - protein, 7 aa, synthetic construct
  REGION 1..7: note = Description of Artificial Sequence: Synthetic peptide
RNTSADR

SEQ ID NO: 29255 - protein, 7 aa, synthetic construct
  REGION 1..7: note = Description of Artificial Sequence: Synthetic peptide
SSSNKHV

SEQ ID NO: 29256 - protein, 7 aa, synthetic construct
  REGION 1..7: note = Description of Artificial Sequence: Synthetic peptide
CNGSRLA

SEQ ID NO: 29257 - protein, 7 aa, synthetic construct
  REGION 1..7: note = Description of Artificial Sequence: Synthetic peptide
QMGSMSG

SEQ ID NO: 29258 - protein, 7 aa, synthetic construct
  REGION 1..7: note = Description of Artificial Sequence: Synthetic peptide
PSGPVRG

SEQ ID NO: 29259 - protein, 7 aa, synthetic construct
  REGION 1..7: note = Description of Artificial Sequence: Synthetic peptide
DPLRHSV

SEQ ID NO: 29260 - protein, 7 aa, synthetic construct
  REGION 1..7: note = Description of Artificial Sequence: Synthetic peptide
PPVARSG

SEQ ID NO: 29261 - protein, 7 aa, synthetic construct
  REGION 1..7: note = Description of Artificial Sequence: Synthetic peptide
GRPQMPN

SEQ ID NO: 29262 - protein, 7 aa, synthetic construct
  REGION 1..7: note = Description of Artificial Sequence: Synthetic peptide
RSNPTLV

SEQ ID NO: 29263 - protein, 7 aa, synthetic construct
  REGION 1..7: note = Description of Artificial Sequence: Synthetic peptide
GLQSKQL

SEQ ID NO: 29264 - protein, 7 aa, synthetic construct
  REGION 1..7: note = Description of Artificial Sequence: Synthetic peptide
HRTTPVS

SEQ ID NO: 29265 - protein, 7 aa, synthetic construct
  REGION 1..7: note = Description of Artificial Sequence: Synthetic peptide
TPHSSKG

SEQ ID NO: 29266 - protein, 7 aa, synthetic construct
  REGION 1..7: note = Description of Artificial Sequence: Synthetic peptide
QGTTARS

SEQ ID NO: 29267 - protein, 7 aa, synthetic construct
  REGION 1..7: note = Description of Artificial Sequence: Synthetic peptide
SVSTNFS

SEQ ID NO: 29268 - protein, 7 aa, synthetic construct
  REGION 1..7: note = Description of Artificial Sequence: Synthetic peptide
PMVNTSL

SEQ ID NO: 29269 - protein, 7 aa, synthetic construct
  REGION 1..7: note = Description of Artificial Sequence: Synthetic peptide
FNSGSGR

SEQ ID NO: 29270 - protein, 7 aa, synthetic construct
  REGION 1..7: note = Description of Artificial Sequence: Synthetic peptide
LSAARSQ

SEQ ID NO: 29271 - protein, 7 aa, synthetic construct
  REGION 1..7: note = Description of Artificial Sequence: Synthetic peptide
AQINTPT

SEQ ID NO: 29272 - protein, 7 aa, synthetic construct
  REGION 1..7: note = Description of Artificial Sequence: Synthetic peptide
NDQAKLT

SEQ ID NO: 29273 - protein, 7 aa, synthetic construct
  REGION 1..7: note = Description of Artificial Sequence: Synthetic peptide
EASSSMG

SEQ ID NO: 29274 - protein, 7 aa, synthetic construct
  REGION 1..7: note = Description of Artificial Sequence: Synthetic peptide
QSHGITN

SEQ ID NO: 29275 - protein, 7 aa, synthetic construct
  REGION 1..7: note = Description of Artificial Sequence: Synthetic peptide
ATSNGTL

SEQ ID NO: 29276 - protein, 7 aa, synthetic construct
  REGION 1..7: note = Description of Artificial Sequence: Synthetic peptide
VQYSQMR

SEQ ID NO: 29277 - protein, 7 aa, synthetic construct
  REGION 1..7: note = Description of Artificial Sequence: Synthetic peptide
SNSRQAD

SEQ ID NO: 29278 - protein, 7 aa, synthetic construct
  REGION 1..7: note = Description of Artificial Sequence: Synthetic peptide
SISGERD

SEQ ID NO: 29279 - protein, 7 aa, synthetic construct
  REGION 1..7: note = Description of Artificial Sequence: Synthetic peptide
GRSSHMD

SEQ ID NO: 29280 - protein, 7 aa, synthetic construct
  REGION 1..7: note = Description of Artificial Sequence: Synthetic peptide
KDASSWL

SEQ ID NO: 29281 - protein, 7 aa, synthetic construct
  REGION 1..7: note = Description of Artificial Sequence: Synthetic peptide
DPVLKPA

SEQ ID NO: 29282 - protein, 7 aa, synthetic construct
  REGION 1..7: note = Description of Artificial Sequence: Synthetic peptide
FGQKPWK

SEQ ID NO: 29283 - protein, 7 aa, synthetic construct
  REGION 1..7: note = Description of Artificial Sequence: Synthetic peptide
QVTTIGA

SEQ ID NO: 29284 - protein, 7 aa, synthetic construct
  REGION 1..7: note = Description of Artificial Sequence: Synthetic peptide
PGSGRNH

SEQ ID NO: 29285 - protein, 7 aa, synthetic construct
  REGION 1..7: note = Description of Artificial Sequence: Synthetic peptide
GGQAGTI

SEQ ID NO: 29286 - protein, 7 aa, synthetic construct
  REGION 1..7: note = Description of Artificial Sequence: Synthetic peptide
MQRNGHV

SEQ ID NO: 29287 - protein, 7 aa, synthetic construct
  REGION 1..7: note = Description of Artificial Sequence: Synthetic peptide
GAREASR

SEQ ID NO: 29288 - protein, 7 aa, synthetic construct
  REGION 1..7: note = Description of Artificial Sequence: Synthetic peptide
DRADANS

SEQ ID NO: 29289 - protein, 7 aa, synthetic construct
  REGION 1..7: note = Description of Artificial Sequence: Synthetic peptide
PTVRSST

SEQ ID NO: 29290 - protein, 7 aa, synthetic construct
  REGION 1..7: note = Description of Artificial Sequence: Synthetic peptide
DSPNRGS

SEQ ID NO: 29291 - protein, 7 aa, synthetic construct
  REGION 1..7: note = Description of Artificial Sequence: Synthetic peptide
EISRPAS

SEQ ID NO: 29292 - protein, 7 aa, synthetic construct
  REGION 1..7: note = Description of Artificial Sequence: Synthetic peptide
GIAGVTR

SEQ ID NO: 29293 - protein, 7 aa, synthetic construct
  REGION 1..7: note = Description of Artificial Sequence: Synthetic peptide
LARNTTY

SEQ ID NO: 29294 - protein, 7 aa, synthetic construct
  REGION 1..7: note = Description of Artificial Sequence: Synthetic peptide
SDVRLSG

SEQ ID NO: 29295 - protein, 7 aa, synthetic construct
  REGION 1..7: note = Description of Artificial Sequence: Synthetic peptide
PANHKTM

SEQ ID NO: 29296 - protein, 7 aa, synthetic construct
  REGION 1..7: note = Description of Artificial Sequence: Synthetic peptide
MGAGALT

SEQ ID NO: 29297 - protein, 7 aa, synthetic construct
  REGION 1..7: note = Description of Artificial Sequence: Synthetic peptide
TASPNNR

SEQ ID NO: 29298 - protein, 7 aa, synthetic construct
  REGION 1..7: note = Description of Artificial Sequence: Synthetic peptide
NGSAQNQ

SEQ ID NO: 29299 - protein, 7 aa, synthetic construct
  REGION 1..7: note = Description of Artificial Sequence: Synthetic peptide
GITQSGG

SEQ ID NO: 29300 - protein, 7 aa, synthetic construct
  REGION 1..7: note = Description of Artificial Sequence: Synthetic peptide
RDPKSST

SEQ ID NO: 29301 - protein, 7 aa, synthetic construct
  REGION 1..7: note = Description of Artificial Sequence: Synthetic peptide
VRLGSVK

SEQ ID NO: 29302 - protein, 7 aa, synthetic construct
  REGION 1..7: note = Description of Artificial Sequence: Synthetic peptide
NSHTPVR

SEQ ID NO: 29303 - protein, 7 aa, synthetic construct
  REGION 1..7: note = Description of Artificial Sequence: Synthetic peptide
SANTRVQ

SEQ ID NO: 29304 - protein, 7 aa, synthetic construct
  REGION 1..7: note = Description of Artificial Sequence: Synthetic peptide
SGRDKIS

SEQ ID NO: 29305 - protein, 7 aa, synthetic construct
  REGION 1..7: note = Description of Artificial Sequence: Synthetic peptide
VSGTPRV

SEQ ID NO: 29306 - protein, 7 aa, synthetic construct
  REGION 1..7: note = Description of Artificial Sequence: Synthetic peptide
VPVNNER

SEQ ID NO: 29307 - protein, 7 aa, synthetic construct
  REGION 1..7: note = Description of Artificial Sequence: Synthetic peptide
GNEHLRV

SEQ ID NO: 29308 - protein, 7 aa, synthetic construct
  REGION 1..7: note = Description of Artificial Sequence: Synthetic peptide
SGSSKPT

SEQ ID NO: 29309 - protein, 7 aa, synthetic construct
  REGION 1..7: note = Description of Artificial Sequence: Synthetic peptide
ADRTKMS

SEQ ID NO: 29310 - protein, 7 aa, synthetic construct
  REGION 1..7: note = Description of Artificial Sequence: Synthetic peptide
SGATTPR

SEQ ID NO: 29311 - protein, 7 aa, synthetic construct
  REGION 1..7: note = Description of Artificial Sequence: Synthetic peptide
HAHSNVG

SEQ ID NO: 29312 - protein, 7 aa, synthetic construct
  REGION 1..7: note = Description of Artificial Sequence: Synthetic peptide
HPTRSTA

SEQ ID NO: 29313 - protein, 7 aa, synthetic construct
  REGION 1..7: note = Description of Artificial Sequence: Synthetic peptide
MSTSSSR

SEQ ID NO: 29314 - protein, 7 aa, synthetic construct
  REGION 1..7: note = Description of Artificial Sequence: Synthetic peptide
SAIRNVT

SEQ ID NO: 29315 - protein, 7 aa, synthetic construct
  REGION 1..7: note = Description of Artificial Sequence: Synthetic peptide
TNDRNAR

SEQ ID NO: 29316 - protein, 7 aa, synthetic construct
  REGION 1..7: note = Description of Artificial Sequence: Synthetic peptide
SDINRST

SEQ ID NO: 29317 - protein, 7 aa, synthetic construct
  REGION 1..7: note = Description of Artificial Sequence: Synthetic peptide
RSTRISE

SEQ ID NO: 29318 - protein, 7 aa, synthetic construct
  REGION 1..7: note = Description of Artificial Sequence: Synthetic peptide
SRGQLSQ

SEQ ID NO: 29319 - protein, 7 aa, synthetic construct
  REGION 1..7: note = Description of Artificial Sequence: Synthetic peptide
ARSTHLE

SEQ ID NO: 29320 - protein, 7 aa, synthetic construct
  REGION 1..7: note = Description of Artificial Sequence: Synthetic peptide
DYHNSKL

SEQ ID NO: 29321 - protein, 7 aa, synthetic construct
  REGION 1..7: note = Description of Artificial Sequence: Synthetic peptide
QPNTTYR

SEQ ID NO: 29322 - protein, 7 aa, synthetic construct
  REGION 1..7: note = Description of Artificial Sequence: Synthetic peptide
QSGTKQG

SEQ ID NO: 29323 - protein, 7 aa, synthetic construct
  REGION 1..7: note = Description of Artificial Sequence: Synthetic peptide
GYGSKVS

SEQ ID NO: 29324 - protein, 7 aa, synthetic construct
  REGION 1..7: note = Description of Artificial Sequence: Synthetic peptide
DRVLSQG

SEQ ID NO: 29325 - protein, 7 aa, synthetic construct
  REGION 1..7: note = Description of Artificial Sequence: Synthetic peptide
GQNTVSR

SEQ ID NO: 29326 - protein, 7 aa, synthetic construct
  REGION 1..7: note = Description of Artificial Sequence: Synthetic peptide
AMGHPLA

SEQ ID NO: 29327 - protein, 7 aa, synthetic construct
  REGION 1..7: note = Description of Artificial Sequence: Synthetic peptide
AHQRPIQ

SEQ ID NO: 29328 - protein, 7 aa, synthetic construct
  REGION 1..7: note = Description of Artificial Sequence: Synthetic peptide
SSSTHAV

SEQ ID NO: 29329 - protein, 7 aa, synthetic construct
  REGION 1..7: note = Description of Artificial Sequence: Synthetic peptide
GGTNNLN

SEQ ID NO: 29330 - protein, 7 aa, synthetic construct
  REGION 1..7: note = Description of Artificial Sequence: Synthetic peptide
RSRAESD

SEQ ID NO: 29331 - protein, 7 aa, synthetic construct
  REGION 1..7: note = Description of Artificial Sequence: Synthetic peptide
MNRTGIK

SEQ ID NO: 29332 - protein, 7 aa, synthetic construct
  REGION 1..7: note = Description of Artificial Sequence: Synthetic peptide
MSRSDPP

SEQ ID NO: 29333 - protein, 7 aa, synthetic construct
  REGION 1..7: note = Description of Artificial Sequence: Synthetic peptide
SSSVMVR

SEQ ID NO: 29334 - protein, 7 aa, synthetic construct
  REGION 1..7: note = Description of Artificial Sequence: Synthetic peptide
TRVVPRL

SEQ ID NO: 29335 - protein, 7 aa, synthetic construct
  REGION 1..7: note = Description of Artificial Sequence: Synthetic peptide
HGQKLFD

SEQ ID NO: 29336 - protein, 7 aa, synthetic construct
  REGION 1..7: note = Description of Artificial Sequence: Synthetic peptide
SASRTMG

SEQ ID NO: 29337 - protein, 7 aa, synthetic construct
  REGION 1..7: note = Description of Artificial Sequence: Synthetic peptide
RAPGSNT

SEQ ID NO: 29338 - protein, 7 aa, synthetic construct
  REGION 1..7: note = Description of Artificial Sequence: Synthetic peptide
SRVTSVS

SEQ ID NO: 29339 - protein, 7 aa, synthetic construct
  REGION 1..7: note = Description of Artificial Sequence: Synthetic peptide
ANSRDAK

SEQ ID NO: 29340 - protein, 7 aa, synthetic construct
  REGION 1..7: note = Description of Artificial Sequence: Synthetic peptide
SDHSRSL

SEQ ID NO: 29341 - protein, 7 aa, synthetic construct
  REGION 1..7: note = Description of Artificial Sequence: Synthetic peptide
GTSNRYT

SEQ ID NO: 29342 - protein, 7 aa, synthetic construct
  REGION 1..7: note = Description of Artificial Sequence: Synthetic peptide
GIPRTSS

SEQ ID NO: 29343 - protein, 7 aa, synthetic construct
  REGION 1..7: note = Description of Artificial Sequence: Synthetic peptide
RGKSNID

SEQ ID NO: 29344 - protein, 7 aa, synthetic construct
  REGION 1..7: note = Description of Artificial Sequence: Synthetic peptide
HAETNLR

SEQ ID NO: 29345 - protein, 7 aa, synthetic construct
  REGION 1..7: note = Description of Artificial Sequence: Synthetic peptide
AGENKLS

SEQ ID NO: 29346 - protein, 7 aa, synthetic construct
  REGION 1..7: note = Description of Artificial Sequence: Synthetic peptide
GVNTGTQ

SEQ ID NO: 29347 - protein, 7 aa, synthetic construct
  REGION 1..7: note = Description of Artificial Sequence: Synthetic peptide
PVGSRGG

SEQ ID NO: 29348 - protein, 7 aa, synthetic construct
  REGION 1..7: note = Description of Artificial Sequence: Synthetic peptide
STMKSAA

SEQ ID NO: 29349 - protein, 7 aa, synthetic construct
  REGION 1..7: note = Description of Artificial Sequence: Synthetic peptide
LNKSTLP

SEQ ID NO: 29350 - protein, 7 aa, synthetic construct
  REGION 1..7: note = Description of Artificial Sequence: Synthetic peptide
HDSRSNA

SEQ ID NO: 29351 - protein, 7 aa, synthetic construct
  REGION 1..7: note = Description of Artificial Sequence: Synthetic peptide
GPKSPGT

SEQ ID NO: 29352 - protein, 7 aa, synthetic construct
  REGION 1..7: note = Description of Artificial Sequence: Synthetic peptide
GENSAKR

SEQ ID NO: 29353 - protein, 7 aa, synthetic construct
  REGION 1..7: note = Description of Artificial Sequence: Synthetic peptide
VPGSQIG

SEQ ID NO: 29354 - protein, 7 aa, synthetic construct
  REGION 1..7: note = Description of Artificial Sequence: Synthetic peptide
GFPSGTR

SEQ ID NO: 29355 - protein, 7 aa, synthetic construct
  REGION 1..7: note = Description of Artificial Sequence: Synthetic peptide
LDFKTLP

SEQ ID NO: 29356 - protein, 7 aa, synthetic construct
  REGION 1..7: note = Description of Artificial Sequence: Synthetic peptide
HQGNVIS

SEQ ID NO: 29357 - protein, 7 aa, synthetic construct
  REGION 1..7: note = Description of Artificial Sequence: Synthetic peptide
PMAQQRA

SEQ ID NO: 29358 - protein, 7 aa, synthetic construct
  REGION 1..7: note = Description of Artificial Sequence: Synthetic peptide
VEQLGGR

SEQ ID NO: 29359 - protein, 7 aa, synthetic construct
  REGION 1..7: note = Description of Artificial Sequence: Synthetic peptide
GRSDHTK

SEQ ID NO: 29360 - protein, 7 aa, synthetic construct
  REGION 1..7: note = Description of Artificial Sequence: Synthetic peptide
HANSRPV

SEQ ID NO: 29361 - protein, 7 aa, synthetic construct
  REGION 1..7: note = Description of Artificial Sequence: Synthetic peptide
NIHKQSA

SEQ ID NO: 29362 - protein, 7 aa, synthetic construct
  REGION 1..7: note = Description of Artificial Sequence: Synthetic peptide
EHMTPRS

SEQ ID NO: 29363 - protein, 7 aa, synthetic construct
  REGION 1..7: note = Description of Artificial Sequence: Synthetic peptide
GVTGTHV

SEQ ID NO: 29364 - protein, 7 aa, synthetic construct
  REGION 1..7: note = Description of Artificial Sequence: Synthetic peptide
PRTNNPS

SEQ ID NO: 29365 - protein, 7 aa, synthetic construct
  REGION 1..7: note = Description of Artificial Sequence: Synthetic peptide
SASNVSR

SEQ ID NO: 29366 - protein, 7 aa, synthetic construct
  REGION 1..7: note = Description of Artificial Sequence: Synthetic peptide
SGTSRFS

SEQ ID NO: 29367 - protein, 7 aa, synthetic construct
  REGION 1..7: note = Description of Artificial Sequence: Synthetic peptide
HRTNGLT

SEQ ID NO: 29368 - protein, 7 aa, synthetic construct
  REGION 1..7: note = Description of Artificial Sequence: Synthetic peptide
RTSNKDL

SEQ ID NO: 29369 - protein, 7 aa, synthetic construct
  REGION 1..7: note = Description of Artificial Sequence: Synthetic peptide
NGSGKNQ

SEQ ID NO: 29370 - protein, 7 aa, synthetic construct
  REGION 1..7: note = Description of Artificial Sequence: Synthetic peptide
ARTTKIQ

SEQ ID NO: 29371 - protein, 7 aa, synthetic construct
  REGION 1..7: note = Description of Artificial Sequence: Synthetic peptide
LGSSTIL

SEQ ID NO: 29372 - protein, 7 aa, synthetic construct
  REGION 1..7: note = Description of Artificial Sequence: Synthetic peptide
SDSRSGM

SEQ ID NO: 29373 - protein, 7 aa, synthetic construct
  REGION 1..7: note = Description of Artificial Sequence: Synthetic peptide
GVGTPRS

SEQ ID NO: 29374 - protein, 7 aa, synthetic construct
  REGION 1..7: note = Description of Artificial Sequence: Synthetic peptide
SPMGVTR

SEQ ID NO: 29375 - protein, 7 aa, synthetic construct
  REGION 1..7: note = Description of Artificial Sequence: Synthetic peptide
HGSKPYI

SEQ ID NO: 29376 - protein, 7 aa, synthetic construct
  REGION 1..7: note = Description of Artificial Sequence: Synthetic peptide
DSRPRLA

SEQ ID NO: 29377 - protein, 7 aa, synthetic construct
  REGION 1..7: note = Description of Artificial Sequence: Synthetic peptide
QSSIHTK

SEQ ID NO: 29378 - protein, 7 aa, synthetic construct
  REGION 1..7: note = Description of Artificial Sequence: Synthetic peptide
MSSSMTL

SEQ ID NO: 29379 - protein, 7 aa, synthetic construct
  REGION 1..7: note = Description of Artificial Sequence: Synthetic peptide
PGIGTPF

SEQ ID NO: 29380 - protein, 7 aa, synthetic construct
  REGION 1..7: note = Description of Artificial Sequence: Synthetic peptide
SVAGMQR

SEQ ID NO: 29381 - protein, 7 aa, synthetic construct
  REGION 1..7: note = Description of Artificial Sequence: Synthetic peptide
HGSSVHS

SEQ ID NO: 29382 - protein, 7 aa, synthetic construct
  REGION 1..7: note = Description of Artificial Sequence: Synthetic peptide
HVNQAAR

SEQ ID NO: 29383 - protein, 7 aa, synthetic construct
  REGION 1..7: note = Description of Artificial Sequence: Synthetic peptide
PGRPQTD

SEQ ID NO: 29384 - protein, 7 aa, synthetic construct
  REGION 1..7: note = Description of Artificial Sequence: Synthetic peptide
MALQPNR

SEQ ID NO: 29385 - protein, 7 aa, synthetic construct
  REGION 1..7: note = Description of Artificial Sequence: Synthetic peptide
STMTTSR

SEQ ID NO: 29386 - protein, 7 aa, synthetic construct
  REGION 1..7: note = Description of Artificial Sequence: Synthetic peptide
SHGESQR

SEQ ID NO: 29387 - protein, 7 aa, synthetic construct
  REGION 1..7: note = Description of Artificial Sequence: Synthetic peptide
QDATPRS

SEQ ID NO: 29388 - protein, 7 aa, synthetic construct
  REGION 1..7: note = Description of Artificial Sequence: Synthetic peptide
CGNTGRS

SEQ ID NO: 29389 - protein, 7 aa, synthetic construct
  REGION 1..7: note = Description of Artificial Sequence: Synthetic peptide
PNGSPLS

SEQ ID NO: 29390 - protein, 7 aa, synthetic construct
  REGION 1..7: note = Description of Artificial Sequence: Synthetic peptide
ELHSKNA

SEQ ID NO: 29391 - protein, 7 aa, synthetic construct
  REGION 1..7: note = Description of Artificial Sequence: Synthetic peptide
PMSGTRL

SEQ ID NO: 29392 - protein, 7 aa, synthetic construct
  REGION 1..7: note = Description of Artificial Sequence: Synthetic peptide
IGITNHS

SEQ ID NO: 29393 - protein, 7 aa, synthetic construct
  REGION 1..7: note = Description of Artificial Sequence: Synthetic peptide
SRVGTAC

SEQ ID NO: 29394 - protein, 7 aa, synthetic construct
  REGION 1..7: note = Description of Artificial Sequence: Synthetic peptide
NRVERAV

SEQ ID NO: 29395 - protein, 7 aa, synthetic construct
  REGION 1..7: note = Description of Artificial Sequence: Synthetic peptide
SMSPRNG

SEQ ID NO: 29396 - protein, 7 aa, synthetic construct
  REGION 1..7: note = Description of Artificial Sequence: Synthetic peptide
ANLTQSR

SEQ ID NO: 29397 - protein, 7 aa, synthetic construct
  REGION 1..7: note = Description of Artificial Sequence: Synthetic peptide
GPSTHSG

SEQ ID NO: 29398 - protein, 7 aa, synthetic construct
  REGION 1..7: note = Description of Artificial Sequence: Synthetic peptide
LRNASSA

SEQ ID NO: 29399 - protein, 7 aa, synthetic construct
  REGION 1..7: note = Description of Artificial Sequence: Synthetic peptide
DPHNTSR

SEQ ID NO: 29400 - protein, 7 aa, synthetic construct
  REGION 1..7: note = Description of Artificial Sequence: Synthetic peptide
TPTGHRS

SEQ ID NO: 29401 - protein, 7 aa, synthetic construct
  REGION 1..7: note = Description of Artificial Sequence: Synthetic peptide
NGSGQKQ

SEQ ID NO: 29402 - protein, 7 aa, synthetic construct
  REGION 1..7: note = Description of Artificial Sequence: Synthetic peptide
RMPSGNS

SEQ ID NO: 29403 - protein, 7 aa, synthetic construct
  REGION 1..7: note = Description of Artificial Sequence: Synthetic peptide
RVSSPSN

SEQ ID NO: 29404 - protein, 7 aa, synthetic construct
  REGION 1..7: note = Description of Artificial Sequence: Synthetic peptide
RSTQSSP

SEQ ID NO: 29405 - protein, 7 aa, synthetic construct
  REGION 1..7: note = Description of Artificial Sequence: Synthetic peptide
YQTPAYR

SEQ ID NO: 29406 - protein, 7 aa, synthetic construct
  REGION 1..7: note = Description of Artificial Sequence: Synthetic peptide
HLHASPA

SEQ ID NO: 29407 - protein, 7 aa, synthetic construct
  REGION 1..7: note = Description of Artificial Sequence: Synthetic peptide
RTSSTYS

SEQ ID NO: 29408 - protein, 7 aa, synthetic construct
  REGION 1..7: note = Description of Artificial Sequence: Synthetic peptide
RHYKGDS

SEQ ID NO: 29409 - protein, 7 aa, synthetic construct
  REGION 1..7: note = Description of Artificial Sequence: Synthetic peptide
HTATPLL

SEQ ID NO: 29410 - protein, 7 aa, synthetic construct
  REGION 1..7: note = Description of Artificial Sequence: Synthetic peptide
ATRDSHS

SEQ ID NO: 29411 - protein, 7 aa, synthetic construct
  REGION 1..7: note = Description of Artificial Sequence: Synthetic peptide
SRVTGGT

SEQ ID NO: 29412 - protein, 7 aa, synthetic construct
  REGION 1..7: note = Description of Artificial Sequence: Synthetic peptide
NTYQSKN

SEQ ID NO: 29413 - protein, 7 aa, synthetic construct
  REGION 1..7: note = Description of Artificial Sequence: Synthetic peptide
VVHQPST

SEQ ID NO: 29414 - protein, 7 aa, synthetic construct
  REGION 1..7: note = Description of Artificial Sequence: Synthetic peptide
HRYQQET

SEQ ID NO: 29415 - protein, 7 aa, synthetic construct
  REGION 1..7: note = Description of Artificial Sequence: Synthetic peptide
ANGSGVG

SEQ ID NO: 29416 - protein, 7 aa, synthetic construct
  REGION 1..7: note = Description of Artificial Sequence: Synthetic peptide
DINRQRT

SEQ ID NO: 29417 - protein, 7 aa, synthetic construct
  REGION 1..7: note = Description of Artificial Sequence: Synthetic peptide
LASSSFN

SEQ ID NO: 29418 - protein, 7 aa, synthetic construct
  REGION 1..7: note = Description of Artificial Sequence: Synthetic peptide
RSISSAV

SEQ ID NO: 29419 - protein, 7 aa, synthetic construct
  REGION 1..7: note = Description of Artificial Sequence: Synthetic peptide
GQTRESS

SEQ ID NO: 29420 - protein, 7 aa, synthetic construct
  REGION 1..7: note = Description of Artificial Sequence: Synthetic peptide
PRHAPLL

SEQ ID NO: 29421 - protein, 7 aa, synthetic construct
  REGION 1..7: note = Description of Artificial Sequence: Synthetic peptide
NTLPPCK

SEQ ID NO: 29422 - protein, 7 aa, synthetic construct
  REGION 1..7: note = Description of Artificial Sequence: Synthetic peptide
GLVETSR

SEQ ID NO: 29423 - protein, 7 aa, synthetic construct
  REGION 1..7: note = Description of Artificial Sequence: Synthetic peptide
TSSPQPS

SEQ ID NO: 29424 - protein, 7 aa, synthetic construct
  REGION 1..7: note = Description of Artificial Sequence: Synthetic peptide
QPSEKSL

SEQ ID NO: 29425 - protein, 7 aa, synthetic construct
  REGION 1..7: note = Description of Artificial Sequence: Synthetic peptide
FPNVNSA

SEQ ID NO: 29426 - protein, 7 aa, synthetic construct
  REGION 1..7: note = Description of Artificial Sequence: Synthetic peptide
GGNPSGS

SEQ ID NO: 29427 - protein, 7 aa, synthetic construct
  REGION 1..7: note = Description of Artificial Sequence: Synthetic peptide
QLRSDQT

SEQ ID NO: 29428 - protein, 7 aa, synthetic construct
  REGION 1..7: note = Description of Artificial Sequence: Synthetic peptide
ATHSKAS

SEQ ID NO: 29429 - protein, 7 aa, synthetic construct
  REGION 1..7: note = Description of Artificial Sequence: Synthetic peptide
DANSTHA

SEQ ID NO: 29430 - protein, 7 aa, synthetic construct
  REGION 1..7: note = Description of Artificial Sequence: Synthetic peptide
LGVKTPT

SEQ ID NO: 29431 - protein, 7 aa, synthetic construct
  REGION 1..7: note = Description of Artificial Sequence: Synthetic peptide
LTTSVYK

SEQ ID NO: 29432 - protein, 7 aa, synthetic construct
  REGION 1..7: note = Description of Artificial Sequence: Synthetic peptide
IISQHGM

SEQ ID NO: 29433 - protein, 7 aa, synthetic construct
  REGION 1..7: note = Description of Artificial Sequence: Synthetic peptide
NSGTRAN

SEQ ID NO: 29434 - protein, 7 aa, synthetic construct
  REGION 1..7: note = Description of Artificial Sequence: Synthetic peptide
TNAASHT

SEQ ID NO: 29435 - protein, 7 aa, synthetic construct
  REGION 1..7: note = Description of Artificial Sequence: Synthetic peptide
ELRNGHK

SEQ ID NO: 29436 - protein, 7 aa, synthetic construct
  REGION 1..7: note = Description of Artificial Sequence: Synthetic peptide
CPQRAST

SEQ ID NO: 29437 - protein, 7 aa, synthetic construct
  REGION 1..7: note = Description of Artificial Sequence: Synthetic peptide
FLTGRQS

SEQ ID NO: 29438 - protein, 7 aa, synthetic construct
  REGION 1..7: note = Description of Artificial Sequence: Synthetic peptide
VSDSNSL

SEQ ID NO: 29439 - protein, 7 aa, synthetic construct
  REGION 1..7: note = Description of Artificial Sequence: Synthetic peptide
WAAGSHK

SEQ ID NO: 29440 - protein, 7 aa, synthetic construct
  REGION 1..7: note = Description of Artificial Sequence: Synthetic peptide
GPGSPWK

SEQ ID NO: 29441 - protein, 7 aa, synthetic construct
  REGION 1..7: note = Description of Artificial Sequence: Synthetic peptide
PFSPTVS

SEQ ID NO: 29442 - protein, 7 aa, synthetic construct
  REGION 1..7: note = Description of Artificial Sequence: Synthetic peptide
HSTPSTM

SEQ ID NO: 29443 - protein, 7 aa, synthetic construct
  REGION 1..7: note = Description of Artificial Sequence: Synthetic peptide
VRAASNP

SEQ ID NO: 29444 - protein, 7 aa, synthetic construct
  REGION 1..7: note = Description of Artificial Sequence: Synthetic peptide
HLVRSSC

SEQ ID NO: 29445 - protein, 7 aa, synthetic construct
  REGION 1..7: note = Description of Artificial Sequence: Synthetic peptide
PMSHTLG

SEQ ID NO: 29446 - protein, 7 aa, synthetic construct
  REGION 1..7: note = Description of Artificial Sequence: Synthetic peptide
SSAGHSK

SEQ ID NO: 29447 - protein, 7 aa, synthetic construct
  REGION 1..7: note = Description of Artificial Sequence: Synthetic peptide
HTTGIIG

SEQ ID NO: 29448 - protein, 7 aa, synthetic construct
  REGION 1..7: note = Description of Artificial Sequence: Synthetic peptide
CTNDRGV

SEQ ID NO: 29449 - protein, 7 aa, synthetic construct
  REGION 1..7: note = Description of Artificial Sequence: Synthetic peptide
TGLRHMG

SEQ ID NO: 29450 - protein, 7 aa, synthetic construct
  REGION 1..7: note = Description of Artificial Sequence: Synthetic peptide
RNQGALQ

SEQ ID NO: 29451 - protein, 7 aa, synthetic construct
  REGION 1..7: note = Description of Artificial Sequence: Synthetic peptide
YNGGNRS

SEQ ID NO: 29452 - protein, 7 aa, synthetic construct
  REGION 1..7: note = Description of Artificial Sequence: Synthetic peptide
SRNTQSM

SEQ ID NO: 29453 - protein, 7 aa, synthetic construct
  REGION 1..7: note = Description of Artificial Sequence: Synthetic peptide
LVSSKSS

SEQ ID NO: 29454 - protein, 7 aa, synthetic construct
  REGION 1..7: note = Description of Artificial Sequence: Synthetic peptide
RASQSVG

SEQ ID NO: 29455 - protein, 7 aa, synthetic construct
  REGION 1..7: note = Description of Artificial Sequence: Synthetic peptide
RIGQGSS

SEQ ID NO: 29456 - protein, 7 aa, synthetic construct
  REGION 1..7: note = Description of Artificial Sequence: Synthetic peptide
VTTSTGR

SEQ ID NO: 29457 - protein, 7 aa, synthetic construct
  REGION 1..7: note = Description of Artificial Sequence: Synthetic peptide
SQSPNRG

SEQ ID NO: 29458 - protein, 7 aa, synthetic construct
  REGION 1..7: note = Description of Artificial Sequence: Synthetic peptide
RTTNHQS

SEQ ID NO: 29459 - protein, 7 aa, synthetic construct
  REGION 1..7: note = Description of Artificial Sequence: Synthetic peptide
VRTNAKG

SEQ ID NO: 29460 - protein, 7 aa, synthetic construct
  REGION 1..7: note = Description of Artificial Sequence: Synthetic peptide
ANIRSTG

SEQ ID NO: 29461 - protein, 7 aa, synthetic construct
  REGION 1..7: note = Description of Artificial Sequence: Synthetic peptide
PNLNSRG

SEQ ID NO: 29462 - protein, 7 aa, synthetic construct
  REGION 1..7: note = Description of Artificial Sequence: Synthetic peptide
RFSDSNT

SEQ ID NO: 29463 - protein, 7 aa, synthetic construct
  REGION 1..7: note = Description of Artificial Sequence: Synthetic peptide
QHTNNPD

SEQ ID NO: 29464 - protein, 7 aa, synthetic construct
  REGION 1..7: note = Description of Artificial Sequence: Synthetic peptide
AHKSAMN

SEQ ID NO: 29465 - protein, 7 aa, synthetic construct
  REGION 1..7: note = Description of Artificial Sequence: Synthetic peptide
RDTRESQ

SEQ ID NO: 29466 - protein, 7 aa, synthetic construct
  REGION 1..7: note = Description of Artificial Sequence: Synthetic peptide
GSNRMSS

SEQ ID NO: 29467 - protein, 7 aa, synthetic construct
  REGION 1..7: note = Description of Artificial Sequence: Synthetic peptide
PGLTPKQ

SEQ ID NO: 29468 - protein, 7 aa, synthetic construct
  REGION 1..7: note = Description of Artificial Sequence: Synthetic peptide
TNGQAAR

SEQ ID NO: 29469 - protein, 7 aa, synthetic construct
  REGION 1..7: note = Description of Artificial Sequence: Synthetic peptide
ASSRESL

SEQ ID NO: 29470 - protein, 7 aa, synthetic construct
  REGION 1..7: note = Description of Artificial Sequence: Synthetic peptide
ALRTSNY

SEQ ID NO: 29471 - protein, 7 aa, synthetic construct
  REGION 1..7: note = Description of Artificial Sequence: Synthetic peptide
GRPGISK

SEQ ID NO: 29472 - protein, 7 aa, synthetic construct
  REGION 1..7: note = Description of Artificial Sequence: Synthetic peptide
PQHRSIP

SEQ ID NO: 29473 - protein, 7 aa, synthetic construct
  REGION 1..7: note = Description of Artificial Sequence: Synthetic peptide
APHSAAN

SEQ ID NO: 29474 - protein, 7 aa, synthetic construct
  REGION 1..7: note = Description of Artificial Sequence: Synthetic peptide
NGASPKR

SEQ ID NO: 29475 - protein, 7 aa, synthetic construct
  REGION 1..7: note = Description of Artificial Sequence: Synthetic peptide
VSMNTTR

SEQ ID NO: 29476 - protein, 7 aa, synthetic construct
  REGION 1..7: note = Description of Artificial Sequence: Synthetic peptide
IPSGVHS

SEQ ID NO: 29477 - protein, 7 aa, synthetic construct
  REGION 1..7: note = Description of Artificial Sequence: Synthetic peptide
PVTRLSE

SEQ ID NO: 29478 - protein, 7 aa, synthetic construct
  REGION 1..7: note = Description of Artificial Sequence: Synthetic peptide
NATSPRK

SEQ ID NO: 29479 - protein, 7 aa, synthetic construct
  REGION 1..7: note = Description of Artificial Sequence: Synthetic peptide
GNRGSVI

SEQ ID NO: 29480 - protein, 7 aa, synthetic construct
  REGION 1..7: note = Description of Artificial Sequence: Synthetic peptide
YPKTNVT

SEQ ID NO: 29481 - protein, 7 aa, synthetic construct
  REGION 1..7: note = Description of Artificial Sequence: Synthetic peptide
QRVNTAS

SEQ ID NO: 29482 - protein, 7 aa, synthetic construct
  REGION 1..7: note = Description of Artificial Sequence: Synthetic peptide
SNDNSLR

SEQ ID NO: 29483 - protein, 7 aa, synthetic construct
  REGION 1..7: note = Description of Artificial Sequence: Synthetic peptide
NGSGQIQ

SEQ ID NO: 29484 - protein, 7 aa, synthetic construct
  REGION 1..7: note = Description of Artificial Sequence: Synthetic peptide
HTMTART

SEQ ID NO: 29485 - protein, 7 aa, synthetic construct
  REGION 1..7: note = Description of Artificial Sequence: Synthetic peptide
MRSKASM

SEQ ID NO: 29486 - protein, 7 aa, synthetic construct
  REGION 1..7: note = Description of Artificial Sequence: Synthetic peptide
VPQVSSA

SEQ ID NO: 29487 - protein, 7 aa, synthetic construct
  REGION 1..7: note = Description of Artificial Sequence: Synthetic peptide
ASTAINQ

SEQ ID NO: 29488 - protein, 7 aa, synthetic construct
  REGION 1..7: note = Description of Artificial Sequence: Synthetic peptide
SSTTSTS

SEQ ID NO: 29489 - protein, 7 aa, synthetic construct
  REGION 1..7: note = Description of Artificial Sequence: Synthetic peptide
TTYGSLG

SEQ ID NO: 29490 - protein, 7 aa, synthetic construct
  REGION 1..7: note = Description of Artificial Sequence: Synthetic peptide
LPNSRAS

SEQ ID NO: 29491 - protein, 7 aa, synthetic construct
  REGION 1..7: note = Description of Artificial Sequence: Synthetic peptide
MFQKQGN

SEQ ID NO: 29492 - protein, 7 aa, synthetic construct
  REGION 1..7: note = Description of Artificial Sequence: Synthetic peptide
GERLSRS

SEQ ID NO: 29493 - protein, 7 aa, synthetic construct
  REGION 1..7: note = Description of Artificial Sequence: Synthetic peptide
SISHTPV

SEQ ID NO: 29494 - protein, 7 aa, synthetic construct
  REGION 1..7: note = Description of Artificial Sequence: Synthetic peptide
VQRRSNE

SEQ ID NO: 29495 - protein, 7 aa, synthetic construct
  REGION 1..7: note = Description of Artificial Sequence: Synthetic peptide
MLSSSRS

SEQ ID NO: 29496 - protein, 7 aa, synthetic construct
  REGION 1..7: note = Description of Artificial Sequence: Synthetic peptide
VNTTRAE

SEQ ID NO: 29497 - protein, 7 aa, synthetic construct
  REGION 1..7: note = Description of Artificial Sequence: Synthetic peptide
YAMERVG

SEQ ID NO: 29498 - protein, 7 aa, synthetic construct
  REGION 1..7: note = Description of Artificial Sequence: Synthetic peptide
DISRSHG

SEQ ID NO: 29499 - protein, 7 aa, synthetic construct
  REGION 1..7: note = Description of Artificial Sequence: Synthetic peptide
MGREMKG

SEQ ID NO: 29500 - protein, 7 aa, synthetic construct
  REGION 1..7: note = Description of Artificial Sequence: Synthetic peptide
HASDRKM

SEQ ID NO: 29501 - protein, 7 aa, synthetic construct
  REGION 1..7: note = Description of Artificial Sequence: Synthetic peptide
LINATHR

SEQ ID NO: 29502 - protein, 7 aa, synthetic construct
  REGION 1..7: note = Description of Artificial Sequence: Synthetic peptide
WNPMSSG

SEQ ID NO: 29503 - protein, 7 aa, synthetic construct
  REGION 1..7: note = Description of Artificial Sequence: Synthetic peptide
SDTKPFT

SEQ ID NO: 29504 - protein, 7 aa, synthetic construct
  REGION 1..7: note = Description of Artificial Sequence: Synthetic peptide
GPIRPFQ

SEQ ID NO: 29505 - protein, 7 aa, synthetic construct
  REGION 1..7: note = Description of Artificial Sequence: Synthetic peptide
SGTTTFG

SEQ ID NO: 29506 - protein, 7 aa, synthetic construct
  REGION 1..7: note = Description of Artificial Sequence: Synthetic peptide
PQESRGM

SEQ ID NO: 29507 - protein, 7 aa, synthetic construct
  REGION 1..7: note = Description of Artificial Sequence: Synthetic peptide
SGSTKGQ

SEQ ID NO: 29508 - protein, 7 aa, synthetic construct
  REGION 1..7: note = Description of Artificial Sequence: Synthetic peptide
GASENMR

SEQ ID NO: 29509 - protein, 7 aa, synthetic construct
  REGION 1..7: note = Description of Artificial Sequence: Synthetic peptide
PLTTRPS

SEQ ID NO: 29510 - protein, 7 aa, synthetic construct
  REGION 1..7: note = Description of Artificial Sequence: Synthetic peptide
ERFTSSS

SEQ ID NO: 29511 - protein, 7 aa, synthetic construct
  REGION 1..7: note = Description of Artificial Sequence: Synthetic peptide
SFSPASN

SEQ ID NO: 29512 - protein, 7 aa, synthetic construct
  REGION 1..7: note = Description of Artificial Sequence: Synthetic peptide
DRSATAT

SEQ ID NO: 29513 - protein, 7 aa, synthetic construct
  REGION 1..7: note = Description of Artificial Sequence: Synthetic peptide
YGSRPPS

SEQ ID NO: 29514 - protein, 7 aa, synthetic construct
  REGION 1..7: note = Description of Artificial Sequence: Synthetic peptide
QVTVRPV

SEQ ID NO: 29515 - protein, 7 aa, synthetic construct
  REGION 1..7: note = Description of Artificial Sequence: Synthetic peptide
IASSGMH

SEQ ID NO: 29516 - protein, 7 aa, synthetic construct
  REGION 1..7: note = Description of Artificial Sequence: Synthetic peptide
MLSGSRN

SEQ ID NO: 29517 - protein, 7 aa, synthetic construct
  REGION 1..7: note = Description of Artificial Sequence: Synthetic peptide
TSSGNLS

SEQ ID NO: 29518 - protein, 7 aa, synthetic construct
  REGION 1..7: note = Description of Artificial Sequence: Synthetic peptide
QRVSSTL

SEQ ID NO: 29519 - protein, 7 aa, synthetic construct
  REGION 1..7: note = Description of Artificial Sequence: Synthetic peptide
SSSHATR

SEQ ID NO: 29520 - protein, 7 aa, synthetic construct
  REGION 1..7: note = Description of Artificial Sequence: Synthetic peptide
PTGKLRQ

SEQ ID NO: 29521 - protein, 7 aa, synthetic construct
  REGION 1..7: note = Description of Artificial Sequence: Synthetic peptide
QAQHTRS

SEQ ID NO: 29522 - protein, 7 aa, synthetic construct
  REGION 1..7: note = Description of Artificial Sequence: Synthetic peptide
LPRGAHS

SEQ ID NO: 29523 - protein, 7 aa, synthetic construct
  REGION 1..7: note = Description of Artificial Sequence: Synthetic peptide
QGGTSRP

SEQ ID NO: 29524 - protein, 7 aa, synthetic construct
  REGION 1..7: note = Description of Artificial Sequence: Synthetic peptide
GHGNNGA

SEQ ID NO: 29525 - protein, 7 aa, synthetic construct
  REGION 1..7: note = Description of Artificial Sequence: Synthetic peptide
SSSRGQN

SEQ ID NO: 29526 - protein, 7 aa, synthetic construct
  REGION 1..7: note = Description of Artificial Sequence: Synthetic peptide
PHTMERT

SEQ ID NO: 29527 - protein, 7 aa, synthetic construct
  REGION 1..7: note = Description of Artificial Sequence: Synthetic peptide
AIRSDYV

SEQ ID NO: 29528 - protein, 7 aa, synthetic construct
  REGION 1..7: note = Description of Artificial Sequence: Synthetic peptide
GDTRLNA

SEQ ID NO: 29529 - protein, 7 aa, synthetic construct
  REGION 1..7: note = Description of Artificial Sequence: Synthetic peptide
TPTTSAN

SEQ ID NO: 29530 - protein, 7 aa, synthetic construct
  REGION 1..7: note = Description of Artificial Sequence: Synthetic peptide
PHVARQM

SEQ ID NO: 29531 - protein, 7 aa, synthetic construct
  REGION 1..7: note = Description of Artificial Sequence: Synthetic peptide
VGGGRDN

SEQ ID NO: 29532 - protein, 7 aa, synthetic construct
  REGION 1..7: note = Description of Artificial Sequence: Synthetic peptide
HNTAHAS

SEQ ID NO: 29533 - protein, 7 aa, synthetic construct
  REGION 1..7: note = Description of Artificial Sequence: Synthetic peptide
QNIGRPS

SEQ ID NO: 29534 - protein, 7 aa, synthetic construct
  REGION 1..7: note = Description of Artificial Sequence: Synthetic peptide
LKPDRNA

SEQ ID NO: 29535 - protein, 7 aa, synthetic construct
  REGION 1..7: note = Description of Artificial Sequence: Synthetic peptide
FHANSTV

SEQ ID NO: 29536 - protein, 7 aa, synthetic construct
  REGION 1..7: note = Description of Artificial Sequence: Synthetic peptide
FGRTNQG

SEQ ID NO: 29537 - protein, 7 aa, synthetic construct
  REGION 1..7: note = Description of Artificial Sequence: Synthetic peptide
MRSEPIA

SEQ ID NO: 29538 - protein, 7 aa, synthetic construct
  REGION 1..7: note = Description of Artificial Sequence: Synthetic peptide
PLVSVGR

SEQ ID NO: 29539 - protein, 7 aa, synthetic construct
  REGION 1..7: note = Description of Artificial Sequence: Synthetic peptide
PLRDSMP

SEQ ID NO: 29540 - protein, 7 aa, synthetic construct
  REGION 1..7: note = Description of Artificial Sequence: Synthetic peptide
NLNSLKM

SEQ ID NO: 29541 - protein, 7 aa, synthetic construct
  REGION 1..7: note = Description of Artificial Sequence: Synthetic peptide
PVLGSRY

SEQ ID NO: 29542 - protein, 7 aa, synthetic construct
  REGION 1..7: note = Description of Artificial Sequence: Synthetic peptide
AQARQTA

SEQ ID NO: 29543 - protein, 7 aa, synthetic construct
  REGION 1..7: note = Description of Artificial Sequence: Synthetic peptide
PRSSGGF

SEQ ID NO: 29544 - protein, 7 aa, synthetic construct
  REGION 1..7: note = Description of Artificial Sequence: Synthetic peptide
GKSQMQL

SEQ ID NO: 29545 - protein, 7 aa, synthetic construct
  REGION 1..7: note = Description of Artificial Sequence: Synthetic peptide
SNTNSAN

SEQ ID NO: 29546 - protein, 7 aa, synthetic construct
  REGION 1..7: note = Description of Artificial Sequence: Synthetic peptide
YRATSGQ

SEQ ID NO: 29547 - protein, 7 aa, synthetic construct
  REGION 1..7: note = Description of Artificial Sequence: Synthetic peptide
SSLKPTL

SEQ ID NO: 29548 - protein, 7 aa, synthetic construct
  REGION 1..7: note = Description of Artificial Sequence: Synthetic peptide
RSTVSPN

SEQ ID NO: 29549 - protein, 7 aa, synthetic construct
  REGION 1..7: note = Description of Artificial Sequence: Synthetic peptide
CSGSPCR

SEQ ID NO: 29550 - protein, 7 aa, synthetic construct
  REGION 1..7: note = Description of Artificial Sequence: Synthetic peptide
SSRTQSL

SEQ ID NO: 29551 - protein, 7 aa, synthetic construct
  REGION 1..7: note = Description of Artificial Sequence: Synthetic peptide
STNPANR

SEQ ID NO: 29552 - protein, 7 aa, synthetic construct
  REGION 1..7: note = Description of Artificial Sequence: Synthetic peptide
APPATAP

SEQ ID NO: 29553 - protein, 7 aa, synthetic construct
  REGION 1..7: note = Description of Artificial Sequence: Synthetic peptide
YSDNKTT

SEQ ID NO: 29554 - protein, 7 aa, synthetic construct
  REGION 1..7: note = Description of Artificial Sequence: Synthetic peptide
MPLKPHL

SEQ ID NO: 29555 - protein, 7 aa, synthetic construct
  REGION 1..7: note = Description of Artificial Sequence: Synthetic peptide
SDSRNPV

SEQ ID NO: 29556 - protein, 7 aa, synthetic construct
  REGION 1..7: note = Description of Artificial Sequence: Synthetic peptide
FLSSRAS

SEQ ID NO: 29557 - protein, 7 aa, synthetic construct
  REGION 1..7: note = Description of Artificial Sequence: Synthetic peptide
HRVEGSL

SEQ ID NO: 29558 - protein, 7 aa, synthetic construct
  REGION 1..7: note = Description of Artificial Sequence: Synthetic peptide
SSVRPYA

SEQ ID NO: 29559 - protein, 7 aa, synthetic construct
  REGION 1..7: note = Description of Artificial Sequence: Synthetic peptide
TVLTKQH

SEQ ID NO: 29560 - protein, 7 aa, synthetic construct
  REGION 1..7: note = Description of Artificial Sequence: Synthetic peptide
NRQVPGL

SEQ ID NO: 29561 - protein, 7 aa, synthetic construct
  REGION 1..7: note = Description of Artificial Sequence: Synthetic peptide
SHMTGVT

SEQ ID NO: 29562 - protein, 7 aa, synthetic construct
  REGION 1..7: note = Description of Artificial Sequence: Synthetic peptide
RVLTSNA

SEQ ID NO: 29563 - protein, 7 aa, synthetic construct
  REGION 1..7: note = Description of Artificial Sequence: Synthetic peptide
LIRSSSI

SEQ ID NO: 29564 - protein, 7 aa, synthetic construct
  REGION 1..7: note = Description of Artificial Sequence: Synthetic peptide
NIKGAST

SEQ ID NO: 29565 - protein, 7 aa, synthetic construct
  REGION 1..7: note = Description of Artificial Sequence: Synthetic peptide
SDRSVDG

SEQ ID NO: 29566 - protein, 7 aa, synthetic construct
  REGION 1..7: note = Description of Artificial Sequence: Synthetic peptide
RNVSQPI

SEQ ID NO: 29567 - protein, 7 aa, synthetic construct
  REGION 1..7: note = Description of Artificial Sequence: Synthetic peptide
HGVGSMV

SEQ ID NO: 29568 - protein, 7 aa, synthetic construct
  REGION 1..7: note = Description of Artificial Sequence: Synthetic peptide
AYSNIQN

SEQ ID NO: 29569 - protein, 7 aa, synthetic construct
  REGION 1..7: note = Description of Artificial Sequence: Synthetic peptide
TLPTKYP

SEQ ID NO: 29570 - protein, 7 aa, synthetic construct
  REGION 1..7: note = Description of Artificial Sequence: Synthetic peptide
AEYTGMA

SEQ ID NO: 29571 - protein, 7 aa, synthetic construct
  REGION 1..7: note = Description of Artificial Sequence: Synthetic peptide
YGFSSVN

SEQ ID NO: 29572 - protein, 7 aa, synthetic construct
  REGION 1..7: note = Description of Artificial Sequence: Synthetic peptide
FRYKETL

SEQ ID NO: 29573 - protein, 7 aa, synthetic construct
  REGION 1..7: note = Description of Artificial Sequence: Synthetic peptide
PRTGTLM

SEQ ID NO: 29574 - protein, 7 aa, synthetic construct
  REGION 1..7: note = Description of Artificial Sequence: Synthetic peptide
CITKNLA

SEQ ID NO: 29575 - protein, 7 aa, synthetic construct
  REGION 1..7: note = Description of Artificial Sequence: Synthetic peptide
SSSFTNK

SEQ ID NO: 29576 - protein, 7 aa, synthetic construct
  REGION 1..7: note = Description of Artificial Sequence: Synthetic peptide
HTDINHQ

SEQ ID NO: 29577 - protein, 7 aa, synthetic construct
  REGION 1..7: note = Description of Artificial Sequence: Synthetic peptide
AGRASNT

SEQ ID NO: 29578 - protein, 7 aa, synthetic construct
  REGION 1..7: note = Description of Artificial Sequence: Synthetic peptide
SISHARE

SEQ ID NO: 29579 - protein, 7 aa, synthetic construct
  REGION 1..7: note = Description of Artificial Sequence: Synthetic peptide
PVNSVSK

SEQ ID NO: 29580 - protein, 7 aa, synthetic construct
  REGION 1..7: note = Description of Artificial Sequence: Synthetic peptide
DKTTRVY

SEQ ID NO: 29581 - protein, 7 aa, synthetic construct
  REGION 1..7: note = Description of Artificial Sequence: Synthetic peptide
ITPGGHS

SEQ ID NO: 29582 - protein, 7 aa, synthetic construct
  REGION 1..7: note = Description of Artificial Sequence: Synthetic peptide
VHSSSTK

SEQ ID NO: 29583 - protein, 7 aa, synthetic construct
  REGION 1..7: note = Description of Artificial Sequence: Synthetic peptide
LPQRGVS

SEQ ID NO: 29584 - protein, 7 aa, synthetic construct
  REGION 1..7: note = Description of Artificial Sequence: Synthetic peptide
GPMRPFQ

SEQ ID NO: 29585 - protein, 7 aa, synthetic construct
  REGION 1..7: note = Description of Artificial Sequence: Synthetic peptide
DTTISKG

SEQ ID NO: 29586 - protein, 7 aa, synthetic construct
  REGION 1..7: note = Description of Artificial Sequence: Synthetic peptide
HVPSKLA

SEQ ID NO: 29587 - protein, 7 aa, synthetic construct
  REGION 1..7: note = Description of Artificial Sequence: Synthetic peptide
PNHQSLT

SEQ ID NO: 29588 - protein, 7 aa, synthetic construct
  REGION 1..7: note = Description of Artificial Sequence: Synthetic peptide
GQVSQMK

SEQ ID NO: 29589 - protein, 7 aa, synthetic construct
  REGION 1..7: note = Description of Artificial Sequence: Synthetic peptide
TSTRTAP

SEQ ID NO: 29590 - protein, 7 aa, synthetic construct
  REGION 1..7: note = Description of Artificial Sequence: Synthetic peptide
LSSDKNV

SEQ ID NO: 29591 - protein, 7 aa, synthetic construct
  REGION 1..7: note = Description of Artificial Sequence: Synthetic peptide
HQRNVNS

SEQ ID NO: 29592 - protein, 7 aa, synthetic construct
  REGION 1..7: note = Description of Artificial Sequence: Synthetic peptide
SKPANNV

SEQ ID NO: 29593 - protein, 7 aa, synthetic construct
  REGION 1..7: note = Description of Artificial Sequence: Synthetic peptide
QKTTIDG

SEQ ID NO: 29594 - protein, 7 aa, synthetic construct
  REGION 1..7: note = Description of Artificial Sequence: Synthetic peptide
MMVSSRS

SEQ ID NO: 29595 - protein, 7 aa, synthetic construct
  REGION 1..7: note = Description of Artificial Sequence: Synthetic peptide
PQTNNPD

SEQ ID NO: 29596 - protein, 7 aa, synthetic construct
  REGION 1..7: note = Description of Artificial Sequence: Synthetic peptide
RADHLGR

SEQ ID NO: 29597 - protein, 7 aa, synthetic construct
  REGION 1..7: note = Description of Artificial Sequence: Synthetic peptide
PSKISNA

SEQ ID NO: 29598 - protein, 7 aa, synthetic construct
  REGION 1..7: note = Description of Artificial Sequence: Synthetic peptide
PQPFGKY

SEQ ID NO: 29599 - protein, 7 aa, synthetic construct
  REGION 1..7: note = Description of Artificial Sequence: Synthetic peptide
RSTLGSG

SEQ ID NO: 29600 - protein, 7 aa, synthetic construct
  REGION 1..7: note = Description of Artificial Sequence: Synthetic peptide
ARTKGNV

SEQ ID NO: 29601 - protein, 7 aa, synthetic construct
  REGION 1..7: note = Description of Artificial Sequence: Synthetic peptide
EPPHKIL

SEQ ID NO: 29602 - protein, 7 aa, synthetic construct
  REGION 1..7: note = Description of Artificial Sequence: Synthetic peptide
ATGNGRG

SEQ ID NO: 29603 - protein, 7 aa, synthetic construct
  REGION 1..7: note = Description of Artificial Sequence: Synthetic peptide
FLGKSGA

SEQ ID NO: 29604 - protein, 7 aa, synthetic construct
  REGION 1..7: note = Description of Artificial Sequence: Synthetic peptide
GSTSGLD

SEQ ID NO: 29605 - protein, 7 aa, synthetic construct
  REGION 1..7: note = Description of Artificial Sequence: Synthetic peptide
RGSSSPS

SEQ ID NO: 29606 - protein, 7 aa, synthetic construct
  REGION 1..7: note = Description of Artificial Sequence: Synthetic peptide
RPIASSG

SEQ ID NO: 29607 - protein, 7 aa, synthetic construct
  REGION 1..7: note = Description of Artificial Sequence: Synthetic peptide
HVTKSTA

SEQ ID NO: 29608 - protein, 7 aa, synthetic construct
  REGION 1..7: note = Description of Artificial Sequence: Synthetic peptide
ATSPRLS

SEQ ID NO: 29609 - protein, 7 aa, synthetic construct
  REGION 1..7: note = Description of Artificial Sequence: Synthetic peptide
RSGTSHS

SEQ ID NO: 29610 - protein, 7 aa, synthetic construct
  REGION 1..7: note = Description of Artificial Sequence: Synthetic peptide
NGSGLNQ

SEQ ID NO: 29611 - protein, 7 aa, synthetic construct
  REGION 1..7: note = Description of Artificial Sequence: Synthetic peptide
MMGGVKN

SEQ ID NO: 29612 - protein, 7 aa, synthetic construct
  REGION 1..7: note = Description of Artificial Sequence: Synthetic peptide
KRPSPDI

SEQ ID NO: 29613 - protein, 7 aa, synthetic construct
  REGION 1..7: note = Description of Artificial Sequence: Synthetic peptide
SYAKLTA

SEQ ID NO: 29614 - protein, 7 aa, synthetic construct
  REGION 1..7: note = Description of Artificial Sequence: Synthetic peptide
RITLNSA

SEQ ID NO: 29615 - protein, 7 aa, synthetic construct
  REGION 1..7: note = Description of Artificial Sequence: Synthetic peptide
YSGLTGS

SEQ ID NO: 29616 - protein, 7 aa, synthetic construct
  REGION 1..7: note = Description of Artificial Sequence: Synthetic peptide
GAGTSLH

SEQ ID NO: 29617 - protein, 7 aa, synthetic construct
  REGION 1..7: note = Description of Artificial Sequence: Synthetic peptide
NLGRQVG

SEQ ID NO: 29618 - protein, 7 aa, synthetic construct
  REGION 1..7: note = Description of Artificial Sequence: Synthetic peptide
IRSKESA

SEQ ID NO: 29619 - protein, 7 aa, synthetic construct
  REGION 1..7: note = Description of Artificial Sequence: Synthetic peptide
LHDGQTR

SEQ ID NO: 29620 - protein, 7 aa, synthetic construct
  REGION 1..7: note = Description of Artificial Sequence: Synthetic peptide
KENPVRS

SEQ ID NO: 29621 - protein, 7 aa, synthetic construct
  REGION 1..7: note = Description of Artificial Sequence: Synthetic peptide
SSKGILA

SEQ ID NO: 29622 - protein, 7 aa, synthetic construct
  REGION 1..7: note = Description of Artificial Sequence: Synthetic peptide
RTLRSVD

SEQ ID NO: 29623 - protein, 7 aa, synthetic construct
  REGION 1..7: note = Description of Artificial Sequence: Synthetic peptide
GYTDKHV

SEQ ID NO: 29624 - protein, 7 aa, synthetic construct
  REGION 1..7: note = Description of Artificial Sequence: Synthetic peptide
GQGVTAK

SEQ ID NO: 29625 - protein, 7 aa, synthetic construct
  REGION 1..7: note = Description of Artificial Sequence: Synthetic peptide
IRAEVSG

SEQ ID NO: 29626 - protein, 7 aa, synthetic construct
  REGION 1..7: note = Description of Artificial Sequence: Synthetic peptide
GLRTSSH

SEQ ID NO: 29627 - protein, 7 aa, synthetic construct
  REGION 1..7: note = Description of Artificial Sequence: Synthetic peptide
GVRGLNV

SEQ ID NO: 29628 - protein, 7 aa, synthetic construct
  REGION 1..7: note = Description of Artificial Sequence: Synthetic peptide
KVGSPTA

SEQ ID NO: 29629 - protein, 7 aa, synthetic construct
  REGION 1..7: note = Description of Artificial Sequence: Synthetic peptide
RGSPQSQ

SEQ ID NO: 29630 - protein, 7 aa, synthetic construct
  REGION 1..7: note = Description of Artificial Sequence: Synthetic peptide
DRKHTST

SEQ ID NO: 29631 - protein, 7 aa, synthetic construct
  REGION 1..7: note = Description of Artificial Sequence: Synthetic peptide
APSARPS

SEQ ID NO: 29632 - protein, 7 aa, synthetic construct
  REGION 1..7: note = Description of Artificial Sequence: Synthetic peptide
GFTGSHV

SEQ ID NO: 29633 - protein, 7 aa, synthetic construct
  REGION 1..7: note = Description of Artificial Sequence: Synthetic peptide
QSGNTIQ

SEQ ID NO: 29634 - protein, 7 aa, synthetic construct
  REGION 1..7: note = Description of Artificial Sequence: Synthetic peptide
STLRNST

SEQ ID NO: 29635 - protein, 7 aa, synthetic construct
  REGION 1..7: note = Description of Artificial Sequence: Synthetic peptide
RVVNRGD

SEQ ID NO: 29636 - protein, 7 aa, synthetic construct
  REGION 1..7: note = Description of Artificial Sequence: Synthetic peptide
WQTGSTM

SEQ ID NO: 29637 - protein, 7 aa, synthetic construct
  REGION 1..7: note = Description of Artificial Sequence: Synthetic peptide
ENRTSVQ

SEQ ID NO: 29638 - protein, 7 aa, synthetic construct
  REGION 1..7: note = Description of Artificial Sequence: Synthetic peptide
HLPQTQS

SEQ ID NO: 29639 - protein, 7 aa, synthetic construct
  REGION 1..7: note = Description of Artificial Sequence: Synthetic peptide
TAPSHTN

SEQ ID NO: 29640 - protein, 7 aa, synthetic construct
  REGION 1..7: note = Description of Artificial Sequence: Synthetic peptide
ANMGLVK

SEQ ID NO: 29641 - protein, 7 aa, synthetic construct
  REGION 1..7: note = Description of Artificial Sequence: Synthetic peptide
THGPNVR

SEQ ID NO: 29642 - protein, 7 aa, synthetic construct
  REGION 1..7: note = Description of Artificial Sequence: Synthetic peptide
DRRSAPS

SEQ ID NO: 29643 - protein, 7 aa, synthetic construct
  REGION 1..7: note = Description of Artificial Sequence: Synthetic peptide
AKTQSVN

SEQ ID NO: 29644 - protein, 7 aa, synthetic construct
  REGION 1..7: note = Description of Artificial Sequence: Synthetic peptide
AQPTGTA

SEQ ID NO: 29645 - protein, 7 aa, synthetic construct
  REGION 1..7: note = Description of Artificial Sequence: Synthetic peptide
SRNSKPV

SEQ ID NO: 29646 - protein, 7 aa, synthetic construct
  REGION 1..7: note = Description of Artificial Sequence: Synthetic peptide
QRGTKLA

SEQ ID NO: 29647 - protein, 7 aa, synthetic construct
  REGION 1..7: note = Description of Artificial Sequence: Synthetic peptide
GVLGSKN

SEQ ID NO: 29648 - protein, 7 aa, synthetic construct
  REGION 1..7: note = Description of Artificial Sequence: Synthetic peptide
TPGASLS

SEQ ID NO: 29649 - protein, 7 aa, synthetic construct
  REGION 1..7: note = Description of Artificial Sequence: Synthetic peptide
KPQGSLV

SEQ ID NO: 29650 - protein, 7 aa, synthetic construct
  REGION 1..7: note = Description of Artificial Sequence: Synthetic peptide
PGSIGQH

SEQ ID NO: 29651 - protein, 7 aa, synthetic construct
  REGION 1..7: note = Description of Artificial Sequence: Synthetic peptide
FSLKGGN

SEQ ID NO: 29652 - protein, 7 aa, synthetic construct
  REGION 1..7: note = Description of Artificial Sequence: Synthetic peptide
LAQERGT

SEQ ID NO: 29653 - protein, 7 aa, synthetic construct
  REGION 1..7: note = Description of Artificial Sequence: Synthetic peptide
VPSQSLH

SEQ ID NO: 29654 - protein, 7 aa, synthetic construct
  REGION 1..7: note = Description of Artificial Sequence: Synthetic peptide
AFPASNC

SEQ ID NO: 29655 - protein, 7 aa, synthetic construct
  REGION 1..7: note = Description of Artificial Sequence: Synthetic peptide
CRSAPTR

SEQ ID NO: 29656 - protein, 7 aa, synthetic construct
  REGION 1..7: note = Description of Artificial Sequence: Synthetic peptide
GGSATAV

SEQ ID NO: 29657 - protein, 7 aa, synthetic construct
  REGION 1..7: note = Description of Artificial Sequence: Synthetic peptide
KIPKGTS

SEQ ID NO: 29658 - protein, 7 aa, synthetic construct
  REGION 1..7: note = Description of Artificial Sequence: Synthetic peptide
QKQIKVG

SEQ ID NO: 29659 - protein, 7 aa, synthetic construct
  REGION 1..7: note = Description of Artificial Sequence: Synthetic peptide
NGSARMT

SEQ ID NO: 29660 - protein, 7 aa, synthetic construct
  REGION 1..7: note = Description of Artificial Sequence: Synthetic peptide
VAARASM

SEQ ID NO: 29661 - protein, 7 aa, synthetic construct
  REGION 1..7: note = Description of Artificial Sequence: Synthetic peptide
QVSPASR

SEQ ID NO: 29662 - protein, 7 aa, synthetic construct
  REGION 1..7: note = Description of Artificial Sequence: Synthetic peptide
GIQSGLG

SEQ ID NO: 29663 - protein, 7 aa, synthetic construct
  REGION 1..7: note = Description of Artificial Sequence: Synthetic peptide
YKPGLQS

SEQ ID NO: 29664 - protein, 7 aa, synthetic construct
  REGION 1..7: note = Description of Artificial Sequence: Synthetic peptide
RSVGNSM

SEQ ID NO: 29665 - protein, 7 aa, synthetic construct
  REGION 1..7: note = Description of Artificial Sequence: Synthetic peptide
CLSSSAK

SEQ ID NO: 29666 - protein, 7 aa, synthetic construct
  REGION 1..7: note = Description of Artificial Sequence: Synthetic peptide
DNPRQAY

SEQ ID NO: 29667 - protein, 7 aa, synthetic construct
  REGION 1..7: note = Description of Artificial Sequence: Synthetic peptide
FNGLSTQ

SEQ ID NO: 29668 - protein, 7 aa, synthetic construct
  REGION 1..7: note = Description of Artificial Sequence: Synthetic peptide
SVSTKSA

SEQ ID NO: 29669 - protein, 7 aa, synthetic construct
  REGION 1..7: note = Description of Artificial Sequence: Synthetic peptide
TSTSPMK

SEQ ID NO: 29670 - protein, 7 aa, synthetic construct
  REGION 1..7: note = Description of Artificial Sequence: Synthetic peptide
ARNPQVS

SEQ ID NO: 29671 - protein, 7 aa, synthetic construct
  REGION 1..7: note = Description of Artificial Sequence: Synthetic peptide
LPTVTRS

SEQ ID NO: 29672 - protein, 7 aa, synthetic construct
  REGION 1..7: note = Description of Artificial Sequence: Synthetic peptide
RSHESMH

SEQ ID NO: 29673 - protein, 7 aa, synthetic construct
  REGION 1..7: note = Description of Artificial Sequence: Synthetic peptide
MSTHSSG

SEQ ID NO: 29674 - protein, 7 aa, synthetic construct
  REGION 1..7: note = Description of Artificial Sequence: Synthetic peptide
HRTSPVS

SEQ ID NO: 29675 - protein, 7 aa, synthetic construct
  REGION 1..7: note = Description of Artificial Sequence: Synthetic peptide
ITSASPC

SEQ ID NO: 29676 - protein, 7 aa, synthetic construct
  REGION 1..7: note = Description of Artificial Sequence: Synthetic peptide
SSMRESS

SEQ ID NO: 29677 - protein, 7 aa, synthetic construct
  REGION 1..7: note = Description of Artificial Sequence: Synthetic peptide
SGFQHTK

SEQ ID NO: 29678 - protein, 7 aa, synthetic construct
  REGION 1..7: note = Description of Artificial Sequence: Synthetic peptide
SGMSRHV

SEQ ID NO: 29679 - protein, 7 aa, synthetic construct
  REGION 1..7: note = Description of Artificial Sequence: Synthetic peptide
SRNGGPL

SEQ ID NO: 29680 - protein, 7 aa, synthetic construct
  REGION 1..7: note = Description of Artificial Sequence: Synthetic peptide
GSNSAYT

SEQ ID NO: 29681 - protein, 7 aa, synthetic construct
  REGION 1..7: note = Description of Artificial Sequence: Synthetic peptide
VQGTGNT

SEQ ID NO: 29682 - protein, 7 aa, synthetic construct
  REGION 1..7: note = Description of Artificial Sequence: Synthetic peptide
MVSSKSS

SEQ ID NO: 29683 - protein, 7 aa, synthetic construct
  REGION 1..7: note = Description of Artificial Sequence: Synthetic peptide
RSNTPPK

SEQ ID NO: 29684 - protein, 7 aa, synthetic construct
  REGION 1..7: note = Description of Artificial Sequence: Synthetic peptide
AMSSNNG

SEQ ID NO: 29685 - protein, 7 aa, synthetic construct
  REGION 1..7: note = Description of Artificial Sequence: Synthetic peptide
DKASSVS

SEQ ID NO: 29686 - protein, 7 aa, synthetic construct
  REGION 1..7: note = Description of Artificial Sequence: Synthetic peptide
CSPPTRG

SEQ ID NO: 29687 - protein, 7 aa, synthetic construct
  REGION 1..7: note = Description of Artificial Sequence: Synthetic peptide
MNGKDVV

SEQ ID NO: 29688 - protein, 7 aa, synthetic construct
  REGION 1..7: note = Description of Artificial Sequence: Synthetic peptide
RTQSLTA

SEQ ID NO: 29689 - protein, 7 aa, synthetic construct
  REGION 1..7: note = Description of Artificial Sequence: Synthetic peptide
RSTDTHG

SEQ ID NO: 29690 - protein, 7 aa, synthetic construct
  REGION 1..7: note = Description of Artificial Sequence: Synthetic peptide
GSDQRRM

SEQ ID NO: 29691 - protein, 7 aa, synthetic construct
  REGION 1..7: note = Description of Artificial Sequence: Synthetic peptide
DHRSKVL

SEQ ID NO: 29692 - protein, 7 aa, synthetic construct
  REGION 1..7: note = Description of Artificial Sequence: Synthetic peptide
SSLTTPH

SEQ ID NO: 29693 - protein, 7 aa, synthetic construct
  REGION 1..7: note = Description of Artificial Sequence: Synthetic peptide
LASGTPS

SEQ ID NO: 29694 - protein, 7 aa, synthetic construct
  REGION 1..7: note = Description of Artificial Sequence: Synthetic peptide
LVRQSSA

SEQ ID NO: 29695 - protein, 7 aa, synthetic construct
  REGION 1..7: note = Description of Artificial Sequence: Synthetic peptide
ASPNRGS

SEQ ID NO: 29696 - protein, 7 aa, synthetic construct
  REGION 1..7: note = Description of Artificial Sequence: Synthetic peptide
SPHTHQK

SEQ ID NO: 29697 - protein, 7 aa, synthetic construct
  REGION 1..7: note = Description of Artificial Sequence: Synthetic peptide
VRTGTSN

SEQ ID NO: 29698 - protein, 7 aa, synthetic construct
  REGION 1..7: note = Description of Artificial Sequence: Synthetic peptide
PLNTHQS

SEQ ID NO: 29699 - protein, 7 aa, synthetic construct
  REGION 1..7: note = Description of Artificial Sequence: Synthetic peptide
GNHTTGK

SEQ ID NO: 29700 - protein, 7 aa, synthetic construct
  REGION 1..7: note = Description of Artificial Sequence: Synthetic peptide
SQPAGRS

SEQ ID NO: 29701 - protein, 7 aa, synthetic construct
  REGION 1..7: note = Description of Artificial Sequence: Synthetic peptide
SLQGNRM

SEQ ID NO: 29702 - protein, 7 aa, synthetic construct
  REGION 1..7: note = Description of Artificial Sequence: Synthetic peptide
TPHGTRV

SEQ ID NO: 29703 - protein, 7 aa, synthetic construct
  REGION 1..7: note = Description of Artificial Sequence: Synthetic peptide
SQPIGAR

SEQ ID NO: 29704 - protein, 7 aa, synthetic construct
  REGION 1..7: note = Description of Artificial Sequence: Synthetic peptide
VGLRSNT

SEQ ID NO: 29705 - protein, 7 aa, synthetic construct
  REGION 1..7: note = Description of Artificial Sequence: Synthetic peptide
ARNPTST

SEQ ID NO: 29706 - protein, 7 aa, synthetic construct
  REGION 1..7: note = Description of Artificial Sequence: Synthetic peptide
ITATAES

SEQ ID NO: 29707 - protein, 7 aa, synthetic construct
  REGION 1..7: note = Description of Artificial Sequence: Synthetic peptide
ASTNSMQ

SEQ ID NO: 29708 - protein, 7 aa, synthetic construct
  REGION 1..7: note = Description of Artificial Sequence: Synthetic peptide
NEARSAN

SEQ ID NO: 29709 - protein, 7 aa, synthetic construct
  REGION 1..7: note = Description of Artificial Sequence: Synthetic peptide
RSSDRSA

SEQ ID NO: 29710 - protein, 7 aa, synthetic construct
  REGION 1..7: note = Description of Artificial Sequence: Synthetic peptide
RGSANFL

SEQ ID NO: 29711 - protein, 7 aa, synthetic construct
  REGION 1..7: note = Description of Artificial Sequence: Synthetic peptide
LTPRGQM

SEQ ID NO: 29712 - protein, 7 aa, synthetic construct
  REGION 1..7: note = Description of Artificial Sequence: Synthetic peptide
NGNSLTR

SEQ ID NO: 29713 - protein, 7 aa, synthetic construct
  REGION 1..7: note = Description of Artificial Sequence: Synthetic peptide
AYSETRG

SEQ ID NO: 29714 - protein, 7 aa, synthetic construct
  REGION 1..7: note = Description of Artificial Sequence: Synthetic peptide
NIAQKDL

SEQ ID NO: 29715 - protein, 7 aa, synthetic construct
  REGION 1..7: note = Description of Artificial Sequence: Synthetic peptide
YSTSESK

SEQ ID NO: 29716 - protein, 7 aa, synthetic construct
  REGION 1..7: note = Description of Artificial Sequence: Synthetic peptide
MGNPRHV

SEQ ID NO: 29717 - protein, 7 aa, synthetic construct
  REGION 1..7: note = Description of Artificial Sequence: Synthetic peptide
SRSKESA

SEQ ID NO: 29718 - protein, 7 aa, synthetic construct
  REGION 1..7: note = Description of Artificial Sequence: Synthetic peptide
QANTIGK

SEQ ID NO: 29719 - protein, 7 aa, synthetic construct
  REGION 1..7: note = Description of Artificial Sequence: Synthetic peptide
TSAPRSC

SEQ ID NO: 29720 - protein, 7 aa, synthetic construct
  REGION 1..7: note = Description of Artificial Sequence: Synthetic peptide
YINSPSN

SEQ ID NO: 29721 - protein, 7 aa, synthetic construct
  REGION 1..7: note = Description of Artificial Sequence: Synthetic peptide
NKSNTFL

SEQ ID NO: 29722 - protein, 7 aa, synthetic construct
  REGION 1..7: note = Description of Artificial Sequence: Synthetic peptide
ARDERAF

SEQ ID NO: 29723 - protein, 7 aa, synthetic construct
  REGION 1..7: note = Description of Artificial Sequence: Synthetic peptide
NPGESHR

SEQ ID NO: 29724 - protein, 7 aa, synthetic construct
  REGION 1..7: note = Description of Artificial Sequence: Synthetic peptide
SHSSPYK

SEQ ID NO: 29725 - protein, 7 aa, synthetic construct
  REGION 1..7: note = Description of Artificial Sequence: Synthetic peptide
STSSSAS

SEQ ID NO: 29726 - protein, 7 aa, synthetic construct
  REGION 1..7: note = Description of Artificial Sequence: Synthetic peptide
IGQSTNG

SEQ ID NO: 29727 - protein, 7 aa, synthetic construct
  REGION 1..7: note = Description of Artificial Sequence: Synthetic peptide
TMPAQRS

SEQ ID NO: 29728 - protein, 7 aa, synthetic construct
  REGION 1..7: note = Description of Artificial Sequence: Synthetic peptide
CIGNKTN

SEQ ID NO: 29729 - protein, 7 aa, synthetic construct
  REGION 1..7: note = Description of Artificial Sequence: Synthetic peptide
PADNHRP

SEQ ID NO: 29730 - protein, 7 aa, synthetic construct
  REGION 1..7: note = Description of Artificial Sequence: Synthetic peptide
NSNLSTQ

SEQ ID NO: 29731 - protein, 7 aa, synthetic construct
  REGION 1..7: note = Description of Artificial Sequence: Synthetic peptide
DGVGMYA

SEQ ID NO: 29732 - protein, 7 aa, synthetic construct
  REGION 1..7: note = Description of Artificial Sequence: Synthetic peptide
HMKHLQV

SEQ ID NO: 29733 - protein, 7 aa, synthetic construct
  REGION 1..7: note = Description of Artificial Sequence: Synthetic peptide
ATVGHMT

SEQ ID NO: 29734 - protein, 7 aa, synthetic construct
  REGION 1..7: note = Description of Artificial Sequence: Synthetic peptide
DQGNGYG

SEQ ID NO: 29735 - protein, 7 aa, synthetic construct
  REGION 1..7: note = Description of Artificial Sequence: Synthetic peptide
DVAQDRS

SEQ ID NO: 29736 - protein, 7 aa, synthetic construct
  REGION 1..7: note = Description of Artificial Sequence: Synthetic peptide
RLTGIST

SEQ ID NO: 29737 - protein, 7 aa, synthetic construct
  REGION 1..7: note = Description of Artificial Sequence: Synthetic peptide
GRLTSSI

SEQ ID NO: 29738 - protein, 7 aa, synthetic construct
  REGION 1..7: note = Description of Artificial Sequence: Synthetic peptide
RFQNNTG

SEQ ID NO: 29739 - protein, 7 aa, synthetic construct
  REGION 1..7: note = Description of Artificial Sequence: Synthetic peptide
GPSQQVI

SEQ ID NO: 29740 - protein, 7 aa, synthetic construct
  REGION 1..7: note = Description of Artificial Sequence: Synthetic peptide
GRSPTAS

SEQ ID NO: 29741 - protein, 7 aa, synthetic construct
  REGION 1..7: note = Description of Artificial Sequence: Synthetic peptide
ENDHNVR

SEQ ID NO: 29742 - protein, 7 aa, synthetic construct
  REGION 1..7: note = Description of Artificial Sequence: Synthetic peptide
LGPHPTH

SEQ ID NO: 29743 - protein, 7 aa, synthetic construct
  REGION 1..7: note = Description of Artificial Sequence: Synthetic peptide
DDRSARG

SEQ ID NO: 29744 - protein, 7 aa, synthetic construct
  REGION 1..7: note = Description of Artificial Sequence: Synthetic peptide
TGMSHMG

SEQ ID NO: 29745 - protein, 7 aa, synthetic construct
  REGION 1..7: note = Description of Artificial Sequence: Synthetic peptide
TGASPLA

SEQ ID NO: 29746 - protein, 7 aa, synthetic construct
  REGION 1..7: note = Description of Artificial Sequence: Synthetic peptide
TSTRSSC

SEQ ID NO: 29747 - protein, 7 aa, synthetic construct
  REGION 1..7: note = Description of Artificial Sequence: Synthetic peptide
CLVRPMA

SEQ ID NO: 29748 - protein, 7 aa, synthetic construct
  REGION 1..7: note = Description of Artificial Sequence: Synthetic peptide
KLNMKGP

SEQ ID NO: 29749 - protein, 7 aa, synthetic construct
  REGION 1..7: note = Description of Artificial Sequence: Synthetic peptide
CLPNHCN

SEQ ID NO: 29750 - protein, 7 aa, synthetic construct
  REGION 1..7: note = Description of Artificial Sequence: Synthetic peptide
GWNHENV

SEQ ID NO: 29751 - protein, 7 aa, synthetic construct
  REGION 1..7: note = Description of Artificial Sequence: Synthetic peptide
FAMPREN

SEQ ID NO: 29752 - protein, 7 aa, synthetic construct
  REGION 1..7: note = Description of Artificial Sequence: Synthetic peptide
GLRNDTV

SEQ ID NO: 29753 - protein, 7 aa, synthetic construct
  REGION 1..7: note = Description of Artificial Sequence: Synthetic peptide
QQGRTAG

SEQ ID NO: 29754 - protein, 7 aa, synthetic construct
  REGION 1..7: note = Description of Artificial Sequence: Synthetic peptide
GQGVRAM

SEQ ID NO: 29755 - protein, 7 aa, synthetic construct
  REGION 1..7: note = Description of Artificial Sequence: Synthetic peptide
SISTRTG

SEQ ID NO: 29756 - protein, 7 aa, synthetic construct
  REGION 1..7: note = Description of Artificial Sequence: Synthetic peptide
QSSRTVT

SEQ ID NO: 29757 - protein, 7 aa, synthetic construct
  REGION 1..7: note = Description of Artificial Sequence: Synthetic peptide
PSTHKAQ

SEQ ID NO: 29758 - protein, 7 aa, synthetic construct
  REGION 1..7: note = Description of Artificial Sequence: Synthetic peptide
ANTSGQA

SEQ ID NO: 29759 - protein, 7 aa, synthetic construct
  REGION 1..7: note = Description of Artificial Sequence: Synthetic peptide
DKTQKQL

SEQ ID NO: 29760 - protein, 7 aa, synthetic construct
  REGION 1..7: note = Description of Artificial Sequence: Synthetic peptide
SGASPAR

SEQ ID NO: 29761 - protein, 7 aa, synthetic construct
  REGION 1..7: note = Description of Artificial Sequence: Synthetic peptide
GKPTQQG

SEQ ID NO: 29762 - protein, 7 aa, synthetic construct
  REGION 1..7: note = Description of Artificial Sequence: Synthetic peptide
RGVSTPT

SEQ ID NO: 29763 - protein, 7 aa, synthetic construct
  REGION 1..7: note = Description of Artificial Sequence: Synthetic peptide
YASSRDG

SEQ ID NO: 29764 - protein, 7 aa, synthetic construct
  REGION 1..7: note = Description of Artificial Sequence: Synthetic peptide
APSAGMS

SEQ ID NO: 29765 - protein, 7 aa, synthetic construct
  REGION 1..7: note = Description of Artificial Sequence: Synthetic peptide
IGSNARQ

SEQ ID NO: 29766 - protein, 7 aa, synthetic construct
  REGION 1..7: note = Description of Artificial Sequence: Synthetic peptide
GGSNLRT

SEQ ID NO: 29767 - protein, 7 aa, synthetic construct
  REGION 1..7: note = Description of Artificial Sequence: Synthetic peptide
TQSSSRT

SEQ ID NO: 29768 - protein, 7 aa, synthetic construct
  REGION 1..7: note = Description of Artificial Sequence: Synthetic peptide
GLPLRSV

SEQ ID NO: 29769 - protein, 7 aa, synthetic construct
  REGION 1..7: note = Description of Artificial Sequence: Synthetic peptide
SSVGRLN

SEQ ID NO: 29770 - protein, 7 aa, synthetic construct
  REGION 1..7: note = Description of Artificial Sequence: Synthetic peptide
DMGSSLS

SEQ ID NO: 29771 - protein, 7 aa, synthetic construct
  REGION 1..7: note = Description of Artificial Sequence: Synthetic peptide
VTNSAPT

SEQ ID NO: 29772 - protein, 7 aa, synthetic construct
  REGION 1..7: note = Description of Artificial Sequence: Synthetic peptide
AMGSRLS

SEQ ID NO: 29773 - protein, 7 aa, synthetic construct
  REGION 1..7: note = Description of Artificial Sequence: Synthetic peptide
TPALKNA

SEQ ID NO: 29774 - protein, 7 aa, synthetic construct
  REGION 1..7: note = Description of Artificial Sequence: Synthetic peptide
SGGQAMG

SEQ ID NO: 29775 - protein, 7 aa, synthetic construct
  REGION 1..7: note = Description of Artificial Sequence: Synthetic peptide
SRETVPT

SEQ ID NO: 29776 - protein, 7 aa, synthetic construct
  REGION 1..7: note = Description of Artificial Sequence: Synthetic peptide
INQSTYK

SEQ ID NO: 29777 - protein, 7 aa, synthetic construct
  REGION 1..7: note = Description of Artificial Sequence: Synthetic peptide
HASSPCI

SEQ ID NO: 29778 - protein, 7 aa, synthetic construct
  REGION 1..7: note = Description of Artificial Sequence: Synthetic peptide
SKNVSSK

SEQ ID NO: 29779 - protein, 7 aa, synthetic construct
  REGION 1..7: note = Description of Artificial Sequence: Synthetic peptide
HGSLESA

SEQ ID NO: 29780 - protein, 7 aa, synthetic construct
  REGION 1..7: note = Description of Artificial Sequence: Synthetic peptide
HRTAPVS

SEQ ID NO: 29781 - protein, 7 aa, synthetic construct
  REGION 1..7: note = Description of Artificial Sequence: Synthetic peptide
NISTMSK

SEQ ID NO: 29782 - protein, 7 aa, synthetic construct
  REGION 1..7: note = Description of Artificial Sequence: Synthetic peptide
LGMRDNT

SEQ ID NO: 29783 - protein, 7 aa, synthetic construct
  REGION 1..7: note = Description of Artificial Sequence: Synthetic peptide
DLQTSAK

SEQ ID NO: 29784 - protein, 7 aa, synthetic construct
  REGION 1..7: note = Description of Artificial Sequence: Synthetic peptide
QSNPRPG

SEQ ID NO: 29785 - protein, 7 aa, synthetic construct
  REGION 1..7: note = Description of Artificial Sequence: Synthetic peptide
HSSKSHD

SEQ ID NO: 29786 - protein, 7 aa, synthetic construct
  REGION 1..7: note = Description of Artificial Sequence: Synthetic peptide
SSTSLGS

SEQ ID NO: 29787 - protein, 7 aa, synthetic construct
  REGION 1..7: note = Description of Artificial Sequence: Synthetic peptide
PRHTVSP

SEQ ID NO: 29788 - protein, 7 aa, synthetic construct
  REGION 1..7: note = Description of Artificial Sequence: Synthetic peptide
VNGATAV

SEQ ID NO: 29789 - protein, 7 aa, synthetic construct
  REGION 1..7: note = Description of Artificial Sequence: Synthetic peptide
PVMTRTP

SEQ ID NO: 29790 - protein, 7 aa, synthetic construct
  REGION 1..7: note = Description of Artificial Sequence: Synthetic peptide
CTTRQGN

SEQ ID NO: 29791 - protein, 7 aa, synthetic construct
  REGION 1..7: note = Description of Artificial Sequence: Synthetic peptide
VMGAGAS

SEQ ID NO: 29792 - protein, 7 aa, synthetic construct
  REGION 1..7: note = Description of Artificial Sequence: Synthetic peptide
PAAHNAV

SEQ ID NO: 29793 - protein, 7 aa, synthetic construct
  REGION 1..7: note = Description of Artificial Sequence: Synthetic peptide
LGKPAQP

SEQ ID NO: 29794 - protein, 7 aa, synthetic construct
  REGION 1..7: note = Description of Artificial Sequence: Synthetic peptide
FRTTAST

SEQ ID NO: 29795 - protein, 7 aa, synthetic construct
  REGION 1..7: note = Description of Artificial Sequence: Synthetic peptide
IRTKDSR

SEQ ID NO: 29796 - protein, 7 aa, synthetic construct
  REGION 1..7: note = Description of Artificial Sequence: Synthetic peptide
SHTPKLV

SEQ ID NO: 29797 - protein, 7 aa, synthetic construct
  REGION 1..7: note = Description of Artificial Sequence: Synthetic peptide
PAGRSSN

SEQ ID NO: 29798 - protein, 7 aa, synthetic construct
  REGION 1..7: note = Description of Artificial Sequence: Synthetic peptide
RSLPNVA

SEQ ID NO: 29799 - protein, 7 aa, synthetic construct
  REGION 1..7: note = Description of Artificial Sequence: Synthetic peptide
VRSNVSG

SEQ ID NO: 29800 - protein, 7 aa, synthetic construct
  REGION 1..7: note = Description of Artificial Sequence: Synthetic peptide
SDKGNTR

SEQ ID NO: 29801 - protein, 7 aa, synthetic construct
  REGION 1..7: note = Description of Artificial Sequence: Synthetic peptide
MNTQGPI

SEQ ID NO: 29802 - protein, 7 aa, synthetic construct
  REGION 1..7: note = Description of Artificial Sequence: Synthetic peptide
SSQTRGL

SEQ ID NO: 29803 - protein, 7 aa, synthetic construct
  REGION 1..7: note = Description of Artificial Sequence: Synthetic peptide
PDNRVRA

SEQ ID NO: 29804 - protein, 7 aa, synthetic construct
  REGION 1..7: note = Description of Artificial Sequence: Synthetic peptide
YPRQRTE

SEQ ID NO: 29805 - protein, 7 aa, synthetic construct
  REGION 1..7: note = Description of Artificial Sequence: Synthetic peptide
LKPQMHT

SEQ ID NO: 29806 - protein, 7 aa, synthetic construct
  REGION 1..7: note = Description of Artificial Sequence: Synthetic peptide
ALTGKLS

SEQ ID NO: 29807 - protein, 7 aa, synthetic construct
  REGION 1..7: note = Description of Artificial Sequence: Synthetic peptide
PTQHQRG

SEQ ID NO: 29808 - protein, 7 aa, synthetic construct
  REGION 1..7: note = Description of Artificial Sequence: Synthetic peptide
SRVDQYK

SEQ ID NO: 29809 - protein, 7 aa, synthetic construct
  REGION 1..7: note = Description of Artificial Sequence: Synthetic peptide
IGTTPPK

SEQ ID NO: 29810 - protein, 7 aa, synthetic construct
  REGION 1..7: note = Description of Artificial Sequence: Synthetic peptide
GSTKPSP

SEQ ID NO: 29811 - protein, 7 aa, synthetic construct
  REGION 1..7: note = Description of Artificial Sequence: Synthetic peptide
SIPSTVR

SEQ ID NO: 29812 - protein, 7 aa, synthetic construct
  REGION 1..7: note = Description of Artificial Sequence: Synthetic peptide
SSSVTAR

SEQ ID NO: 29813 - protein, 7 aa, synthetic construct
  REGION 1..7: note = Description of Artificial Sequence: Synthetic peptide
SSGGNMS

SEQ ID NO: 29814 - protein, 7 aa, synthetic construct
  REGION 1..7: note = Description of Artificial Sequence: Synthetic peptide
SVGAPTL

SEQ ID NO: 29815 - protein, 7 aa, synthetic construct
  REGION 1..7: note = Description of Artificial Sequence: Synthetic peptide
ITSVKTA

SEQ ID NO: 29816 - protein, 7 aa, synthetic construct
  REGION 1..7: note = Description of Artificial Sequence: Synthetic peptide
RSYDPNR

SEQ ID NO: 29817 - protein, 7 aa, synthetic construct
  REGION 1..7: note = Description of Artificial Sequence: Synthetic peptide
NKMTSVS

SEQ ID NO: 29818 - protein, 7 aa, synthetic construct
  REGION 1..7: note = Description of Artificial Sequence: Synthetic peptide
LAMERQR

SEQ ID NO: 29819 - protein, 7 aa, synthetic construct
  REGION 1..7: note = Description of Artificial Sequence: Synthetic peptide
GKGVGQR

SEQ ID NO: 29820 - protein, 7 aa, synthetic construct
  REGION 1..7: note = Description of Artificial Sequence: Synthetic peptide
PVDTSHK

SEQ ID NO: 29821 - protein, 7 aa, synthetic construct
  REGION 1..7: note = Description of Artificial Sequence: Synthetic peptide
RTTSSLV

SEQ ID NO: 29822 - protein, 7 aa, synthetic construct
  REGION 1..7: note = Description of Artificial Sequence: Synthetic peptide
VPSRAAT

SEQ ID NO: 29823 - protein, 7 aa, synthetic construct
  REGION 1..7: note = Description of Artificial Sequence: Synthetic peptide
AATNSLT

SEQ ID NO: 29824 - protein, 7 aa, synthetic construct
  REGION 1..7: note = Description of Artificial Sequence: Synthetic peptide
SATGSRL

SEQ ID NO: 29825 - protein, 7 aa, synthetic construct
  REGION 1..7: note = Description of Artificial Sequence: Synthetic peptide
SVVSHKS

SEQ ID NO: 29826 - protein, 7 aa, synthetic construct
  REGION 1..7: note = Description of Artificial Sequence: Synthetic peptide
SRTAGVQ

SEQ ID NO: 29827 - protein, 7 aa, synthetic construct
  REGION 1..7: note = Description of Artificial Sequence: Synthetic peptide
TVNTRSA

SEQ ID NO: 29828 - protein, 7 aa, synthetic construct
  REGION 1..7: note = Description of Artificial Sequence: Synthetic peptide
WTVSRSG

SEQ ID NO: 29829 - protein, 7 aa, synthetic construct
  REGION 1..7: note = Description of Artificial Sequence: Synthetic peptide
NLTSSSS

SEQ ID NO: 29830 - protein, 7 aa, synthetic construct
  REGION 1..7: note = Description of Artificial Sequence: Synthetic peptide
RAHPTLG

SEQ ID NO: 29831 - protein, 7 aa, synthetic construct
  REGION 1..7: note = Description of Artificial Sequence: Synthetic peptide
PMINSSD

SEQ ID NO: 29832 - protein, 7 aa, synthetic construct
  REGION 1..7: note = Description of Artificial Sequence: Synthetic peptide
STVATSF

SEQ ID NO: 29833 - protein, 7 aa, synthetic construct
  REGION 1..7: note = Description of Artificial Sequence: Synthetic peptide
TSGSARG

SEQ ID NO: 29834 - protein, 7 aa, synthetic construct
  REGION 1..7: note = Description of Artificial Sequence: Synthetic peptide
STTNKAH

SEQ ID NO: 29835 - protein, 7 aa, synthetic construct
  REGION 1..7: note = Description of Artificial Sequence: Synthetic peptide
NLHLAGT

SEQ ID NO: 29836 - protein, 7 aa, synthetic construct
  REGION 1..7: note = Description of Artificial Sequence: Synthetic peptide
RNVSHPG

SEQ ID NO: 29837 - protein, 7 aa, synthetic construct
  REGION 1..7: note = Description of Artificial Sequence: Synthetic peptide
STGKATC

SEQ ID NO: 29838 - protein, 7 aa, synthetic construct
  REGION 1..7: note = Description of Artificial Sequence: Synthetic peptide
KNYDNAV

SEQ ID NO: 29839 - protein, 7 aa, synthetic construct
  REGION 1..7: note = Description of Artificial Sequence: Synthetic peptide
TEARSAN

SEQ ID NO: 29840 - protein, 7 aa, synthetic construct
  REGION 1..7: note = Description of Artificial Sequence: Synthetic peptide
RTLSNHG

SEQ ID NO: 29841 - protein, 7 aa, synthetic construct
  REGION 1..7: note = Description of Artificial Sequence: Synthetic peptide
SSAPSLS

SEQ ID NO: 29842 - protein, 7 aa, synthetic construct
  REGION 1..7: note = Description of Artificial Sequence: Synthetic peptide
GNMRNLA

SEQ ID NO: 29843 - protein, 7 aa, synthetic construct
  REGION 1..7: note = Description of Artificial Sequence: Synthetic peptide
NVVGTGA

SEQ ID NO: 29844 - protein, 7 aa, synthetic construct
  REGION 1..7: note = Description of Artificial Sequence: Synthetic peptide
ETTVRAS

SEQ ID NO: 29845 - protein, 7 aa, synthetic construct
  REGION 1..7: note = Description of Artificial Sequence: Synthetic peptide
TSSTTSL

SEQ ID NO: 29846 - protein, 7 aa, synthetic construct
  REGION 1..7: note = Description of Artificial Sequence: Synthetic peptide
RPSNASG

SEQ ID NO: 29847 - protein, 7 aa, synthetic construct
  REGION 1..7: note = Description of Artificial Sequence: Synthetic peptide
GDHNRMN

SEQ ID NO: 29848 - protein, 7 aa, synthetic construct
  REGION 1..7: note = Description of Artificial Sequence: Synthetic peptide
DRMGTAH

SEQ ID NO: 29849 - protein, 7 aa, synthetic construct
  REGION 1..7: note = Description of Artificial Sequence: Synthetic peptide
VASSPLR

SEQ ID NO: 29850 - protein, 7 aa, synthetic construct
  REGION 1..7: note = Description of Artificial Sequence: Synthetic peptide
MATSTVK

SEQ ID NO: 29851 - protein, 7 aa, synthetic construct
  REGION 1..7: note = Description of Artificial Sequence: Synthetic peptide
RTLSNNG

SEQ ID NO: 29852 - protein, 7 aa, synthetic construct
  REGION 1..7: note = Description of Artificial Sequence: Synthetic peptide
GMIPSSR

SEQ ID NO: 29853 - protein, 7 aa, synthetic construct
  REGION 1..7: note = Description of Artificial Sequence: Synthetic peptide
PSHMASA

SEQ ID NO: 29854 - protein, 7 aa, synthetic construct
  REGION 1..7: note = Description of Artificial Sequence: Synthetic peptide
HSHGKSI

SEQ ID NO: 29855 - protein, 7 aa, synthetic construct
  REGION 1..7: note = Description of Artificial Sequence: Synthetic peptide
GNSMAGT

SEQ ID NO: 29856 - protein, 7 aa, synthetic construct
  REGION 1..7: note = Description of Artificial Sequence: Synthetic peptide
VSTKSAP

SEQ ID NO: 29857 - protein, 7 aa, synthetic construct
  REGION 1..7: note = Description of Artificial Sequence: Synthetic peptide
GVNIHAT

SEQ ID NO: 29858 - protein, 7 aa, synthetic construct
  REGION 1..7: note = Description of Artificial Sequence: Synthetic peptide
DVLSKRQ

SEQ ID NO: 29859 - protein, 7 aa, synthetic construct
  REGION 1..7: note = Description of Artificial Sequence: Synthetic peptide
TDTNRMY

SEQ ID NO: 29860 - protein, 7 aa, synthetic construct
  REGION 1..7: note = Description of Artificial Sequence: Synthetic peptide
ANHSIRS

SEQ ID NO: 29861 - protein, 7 aa, synthetic construct
  REGION 1..7: note = Description of Artificial Sequence: Synthetic peptide
HGDSGKV

SEQ ID NO: 29862 - protein, 7 aa, synthetic construct
  REGION 1..7: note = Description of Artificial Sequence: Synthetic peptide
RMQVSPF

SEQ ID NO: 29863 - protein, 7 aa, synthetic construct
  REGION 1..7: note = Description of Artificial Sequence: Synthetic peptide
MLNTSHY

SEQ ID NO: 29864 - protein, 7 aa, synthetic construct
  REGION 1..7: note = Description of Artificial Sequence: Synthetic peptide
SLSTGSG

SEQ ID NO: 29865 - protein, 7 aa, synthetic construct
  REGION 1..7: note = Description of Artificial Sequence: Synthetic peptide
KSSSHAT

SEQ ID NO: 29866 - protein, 7 aa, synthetic construct
  REGION 1..7: note = Description of Artificial Sequence: Synthetic peptide
MVPNGRA

SEQ ID NO: 29867 - protein, 7 aa, synthetic construct
  REGION 1..7: note = Description of Artificial Sequence: Synthetic peptide
LNQHSSI

SEQ ID NO: 29868 - protein, 7 aa, synthetic construct
  REGION 1..7: note = Description of Artificial Sequence: Synthetic peptide
YNKNAQL

SEQ ID NO: 29869 - protein, 7 aa, synthetic construct
  REGION 1..7: note = Description of Artificial Sequence: Synthetic peptide
HPETAFK

SEQ ID NO: 29870 - protein, 7 aa, synthetic construct
  REGION 1..7: note = Description of Artificial Sequence: Synthetic peptide
SQQTTEA

SEQ ID NO: 29871 - protein, 7 aa, synthetic construct
  REGION 1..7: note = Description of Artificial Sequence: Synthetic peptide
TLGQEVR

SEQ ID NO: 29872 - protein, 7 aa, synthetic construct
  REGION 1..7: note = Description of Artificial Sequence: Synthetic peptide
RGATSTS

SEQ ID NO: 29873 - protein, 7 aa, synthetic construct
  REGION 1..7: note = Description of Artificial Sequence: Synthetic peptide
RHTIDSP

SEQ ID NO: 29874 - protein, 7 aa, synthetic construct
  REGION 1..7: note = Description of Artificial Sequence: Synthetic peptide
RSSNGYL

SEQ ID NO: 29875 - protein, 7 aa, synthetic construct
  REGION 1..7: note = Description of Artificial Sequence: Synthetic peptide
ILPRGVD

SEQ ID NO: 29876 - protein, 7 aa, synthetic construct
  REGION 1..7: note = Description of Artificial Sequence: Synthetic peptide
TNMQSVL

SEQ ID NO: 29877 - protein, 7 aa, synthetic construct
  REGION 1..7: note = Description of Artificial Sequence: Synthetic peptide
GVYGQSL

SEQ ID NO: 29878 - protein, 7 aa, synthetic construct
  REGION 1..7: note = Description of Artificial Sequence: Synthetic peptide
GSNRILG

SEQ ID NO: 29879 - protein, 7 aa, synthetic construct
  REGION 1..7: note = Description of Artificial Sequence: Synthetic peptide
SCSRDST

SEQ ID NO: 29880 - protein, 7 aa, synthetic construct
  REGION 1..7: note = Description of Artificial Sequence: Synthetic peptide
NSRQGTN

SEQ ID NO: 29881 - protein, 7 aa, synthetic construct
  REGION 1..7: note = Description of Artificial Sequence: Synthetic peptide
QSTERLA

SEQ ID NO: 29882 - protein, 7 aa, synthetic construct
  REGION 1..7: note = Description of Artificial Sequence: Synthetic peptide
PFTRNAL

SEQ ID NO: 29883 - protein, 7 aa, synthetic construct
  REGION 1..7: note = Description of Artificial Sequence: Synthetic peptide
GRSMERS

SEQ ID NO: 29884 - protein, 7 aa, synthetic construct
  REGION 1..7: note = Description of Artificial Sequence: Synthetic peptide
GDKTQAM

SEQ ID NO: 29885 - protein, 7 aa, synthetic construct
  REGION 1..7: note = Description of Artificial Sequence: Synthetic peptide
HGSSSFT

SEQ ID NO: 29886 - protein, 7 aa, synthetic construct
  REGION 1..7: note = Description of Artificial Sequence: Synthetic peptide
NRGKASS

SEQ ID NO: 29887 - protein, 7 aa, synthetic construct
  REGION 1..7: note = Description of Artificial Sequence: Synthetic peptide
SSPTRSL

SEQ ID NO: 29888 - protein, 7 aa, synthetic construct
  REGION 1..7: note = Description of Artificial Sequence: Synthetic peptide
ADGRNSS

SEQ ID NO: 29889 - protein, 7 aa, synthetic construct
  REGION 1..7: note = Description of Artificial Sequence: Synthetic peptide
STHHPAS

SEQ ID NO: 29890 - protein, 7 aa, synthetic construct
  REGION 1..7: note = Description of Artificial Sequence: Synthetic peptide
NGSGQDQ

SEQ ID NO: 29891 - protein, 7 aa, synthetic construct
  REGION 1..7: note = Description of Artificial Sequence: Synthetic peptide
NPSHTSV

SEQ ID NO: 29892 - protein, 7 aa, synthetic construct
  REGION 1..7: note = Description of Artificial Sequence: Synthetic peptide
TRSNSAV

SEQ ID NO: 29893 - protein, 7 aa, synthetic construct
  REGION 1..7: note = Description of Artificial Sequence: Synthetic peptide
MSTGVSP

SEQ ID NO: 29894 - protein, 7 aa, synthetic construct
  REGION 1..7: note = Description of Artificial Sequence: Synthetic peptide
PMDVRSD

SEQ ID NO: 29895 - protein, 7 aa, synthetic construct
  REGION 1..7: note = Description of Artificial Sequence: Synthetic peptide
PQNLAHV

SEQ ID NO: 29896 - protein, 7 aa, synthetic construct
  REGION 1..7: note = Description of Artificial Sequence: Synthetic peptide
KNPSSAP

SEQ ID NO: 29897 - protein, 7 aa, synthetic construct
  REGION 1..7: note = Description of Artificial Sequence: Synthetic peptide
PVPYRAD

SEQ ID NO: 29898 - protein, 7 aa, synthetic construct
  REGION 1..7: note = Description of Artificial Sequence: Synthetic peptide
AQRNISS

SEQ ID NO: 29899 - protein, 7 aa, synthetic construct
  REGION 1..7: note = Description of Artificial Sequence: Synthetic peptide
SQNVSSK

SEQ ID NO: 29900 - protein, 7 aa, synthetic construct
  REGION 1..7: note = Description of Artificial Sequence: Synthetic peptide
YPSSVQQ

SEQ ID NO: 29901 - protein, 7 aa, synthetic construct
  REGION 1..7: note = Description of Artificial Sequence: Synthetic peptide
STAYNTN

SEQ ID NO: 29902 - protein, 7 aa, synthetic construct
  REGION 1..7: note = Description of Artificial Sequence: Synthetic peptide
RMREKPY

SEQ ID NO: 29903 - protein, 7 aa, synthetic construct
  REGION 1..7: note = Description of Artificial Sequence: Synthetic peptide
TLRGGSS

SEQ ID NO: 29904 - protein, 7 aa, synthetic construct
  REGION 1..7: note = Description of Artificial Sequence: Synthetic peptide
VSSMKSG

SEQ ID NO: 29905 - protein, 7 aa, synthetic construct
  REGION 1..7: note = Description of Artificial Sequence: Synthetic peptide
LTQRDFS

SEQ ID NO: 29906 - protein, 7 aa, synthetic construct
  REGION 1..7: note = Description of Artificial Sequence: Synthetic peptide
DVLSKSQ

SEQ ID NO: 29907 - protein, 7 aa, synthetic construct
  REGION 1..7: note = Description of Artificial Sequence: Synthetic peptide
CVTGGLT

SEQ ID NO: 29908 - protein, 7 aa, synthetic construct
  REGION 1..7: note = Description of Artificial Sequence: Synthetic peptide
KQPASTH

SEQ ID NO: 29909 - protein, 7 aa, synthetic construct
  REGION 1..7: note = Description of Artificial Sequence: Synthetic peptide
HLRGGSS

SEQ ID NO: 29910 - protein, 7 aa, synthetic construct
  REGION 1..7: note = Description of Artificial Sequence: Synthetic peptide
DDRSNLS

SEQ ID NO: 29911 - protein, 7 aa, synthetic construct
  REGION 1..7: note = Description of Artificial Sequence: Synthetic peptide
SGSPLCG

SEQ ID NO: 29912 - protein, 7 aa, synthetic construct
  REGION 1..7: note = Description of Artificial Sequence: Synthetic peptide
HIGTGAR

SEQ ID NO: 29913 - protein, 7 aa, synthetic construct
  REGION 1..7: note = Description of Artificial Sequence: Synthetic peptide
PRTNVMP

SEQ ID NO: 29914 - protein, 7 aa, synthetic construct
  REGION 1..7: note = Description of Artificial Sequence: Synthetic peptide
PGGGRAI

SEQ ID NO: 29915 - protein, 7 aa, synthetic construct
  REGION 1..7: note = Description of Artificial Sequence: Synthetic peptide
YQVPLAK

SEQ ID NO: 29916 - protein, 7 aa, synthetic construct
  REGION 1..7: note = Description of Artificial Sequence: Synthetic peptide
MTGHSSV

SEQ ID NO: 29917 - protein, 7 aa, synthetic construct
  REGION 1..7: note = Description of Artificial Sequence: Synthetic peptide
LQVNMAR

SEQ ID NO: 29918 - protein, 7 aa, synthetic construct
  REGION 1..7: note = Description of Artificial Sequence: Synthetic peptide
HTAHSSL

SEQ ID NO: 29919 - protein, 7 aa, synthetic construct
  REGION 1..7: note = Description of Artificial Sequence: Synthetic peptide
GSSPSLR

SEQ ID NO: 29920 - protein, 7 aa, synthetic construct
  REGION 1..7: note = Description of Artificial Sequence: Synthetic peptide
SGTSIRT

SEQ ID NO: 29921 - protein, 7 aa, synthetic construct
  REGION 1..7: note = Description of Artificial Sequence: Synthetic peptide
HRSNSTT

SEQ ID NO: 29922 - protein, 7 aa, synthetic construct
  REGION 1..7: note = Description of Artificial Sequence: Synthetic peptide
TTNTVSR

SEQ ID NO: 29923 - protein, 7 aa, synthetic construct
  REGION 1..7: note = Description of Artificial Sequence: Synthetic peptide
GYSNQMT

SEQ ID NO: 29924 - protein, 7 aa, synthetic construct
  REGION 1..7: note = Description of Artificial Sequence: Synthetic peptide
KQPDSTH

SEQ ID NO: 29925 - protein, 7 aa, synthetic construct
  REGION 1..7: note = Description of Artificial Sequence: Synthetic peptide
RSNGSAA

SEQ ID NO: 29926 - protein, 7 aa, synthetic construct
  REGION 1..7: note = Description of Artificial Sequence: Synthetic peptide
TTSNKDS

SEQ ID NO: 29927 - protein, 7 aa, synthetic construct
  REGION 1..7: note = Description of Artificial Sequence: Synthetic peptide
NGLPGAM

SEQ ID NO: 29928 - protein, 7 aa, synthetic construct
  REGION 1..7: note = Description of Artificial Sequence: Synthetic peptide
RAGGNAV

SEQ ID NO: 29929 - protein, 7 aa, synthetic construct
  REGION 1..7: note = Description of Artificial Sequence: Synthetic peptide
MGPNHLP

SEQ ID NO: 29930 - protein, 7 aa, synthetic construct
  REGION 1..7: note = Description of Artificial Sequence: Synthetic peptide
SLSKQAA

SEQ ID NO: 29931 - protein, 7 aa, synthetic construct
  REGION 1..7: note = Description of Artificial Sequence: Synthetic peptide
IGNLPSR

SEQ ID NO: 29932 - protein, 7 aa, synthetic construct
  REGION 1..7: note = Description of Artificial Sequence: Synthetic peptide
NQMAHLK

SEQ ID NO: 29933 - protein, 7 aa, synthetic construct
  REGION 1..7: note = Description of Artificial Sequence: Synthetic peptide
SVEKAQS

SEQ ID NO: 29934 - protein, 7 aa, synthetic construct
  REGION 1..7: note = Description of Artificial Sequence: Synthetic peptide
AMSASRN

SEQ ID NO: 29935 - protein, 7 aa, synthetic construct
  REGION 1..7: note = Description of Artificial Sequence: Synthetic peptide
RTNHVEA

SEQ ID NO: 29936 - protein, 7 aa, synthetic construct
  REGION 1..7: note = Description of Artificial Sequence: Synthetic peptide
SFSSTMG

SEQ ID NO: 29937 - protein, 7 aa, synthetic construct
  REGION 1..7: note = Description of Artificial Sequence: Synthetic peptide
GRVNSGI

SEQ ID NO: 29938 - protein, 7 aa, synthetic construct
  REGION 1..7: note = Description of Artificial Sequence: Synthetic peptide
SLVSRST

SEQ ID NO: 29939 - protein, 7 aa, synthetic construct
  REGION 1..7: note = Description of Artificial Sequence: Synthetic peptide
LGLRDNT

SEQ ID NO: 29940 - protein, 7 aa, synthetic construct
  REGION 1..7: note = Description of Artificial Sequence: Synthetic peptide
HTMRSSV

SEQ ID NO: 29941 - protein, 7 aa, synthetic construct
  REGION 1..7: note = Description of Artificial Sequence: Synthetic peptide
WGTGIGS

SEQ ID NO: 29942 - protein, 7 aa, synthetic construct
  REGION 1..7: note = Description of Artificial Sequence: Synthetic peptide
QTRSNGN

SEQ ID NO: 29943 - protein, 7 aa, synthetic construct
  REGION 1..7: note = Description of Artificial Sequence: Synthetic peptide
RMARPAV

SEQ ID NO: 29944 - protein, 7 aa, synthetic construct
  REGION 1..7: note = Description of Artificial Sequence: Synthetic peptide
GNTNSFL

SEQ ID NO: 29945 - protein, 7 aa, synthetic construct
  REGION 1..7: note = Description of Artificial Sequence: Synthetic peptide
APVQPFR

SEQ ID NO: 29946 - protein, 7 aa, synthetic construct
  REGION 1..7: note = Description of Artificial Sequence: Synthetic peptide
ISVGNTS

SEQ ID NO: 29947 - protein, 7 aa, synthetic construct
  REGION 1..7: note = Description of Artificial Sequence: Synthetic peptide
RDVRMSD

SEQ ID NO: 29948 - protein, 7 aa, synthetic construct
  REGION 1..7: note = Description of Artificial Sequence: Synthetic peptide
SRESSPL

SEQ ID NO: 29949 - protein, 7 aa, synthetic construct
  REGION 1..7: note = Description of Artificial Sequence: Synthetic peptide
GSLTPKA

SEQ ID NO: 29950 - protein, 7 aa, synthetic construct
  REGION 1..7: note = Description of Artificial Sequence: Synthetic peptide
NGSGQNP

SEQ ID NO: 29951 - protein, 7 aa, synthetic construct
  REGION 1..7: note = Description of Artificial Sequence: Synthetic peptide
KSTHGMT

SEQ ID NO: 29952 - protein, 7 aa, synthetic construct
  REGION 1..7: note = Description of Artificial Sequence: Synthetic peptide
EQVPKHR

SEQ ID NO: 29953 - protein, 7 aa, synthetic construct
  REGION 1..7: note = Description of Artificial Sequence: Synthetic peptide
TQNSSLS

SEQ ID NO: 29954 - protein, 7 aa, synthetic construct
  REGION 1..7: note = Description of Artificial Sequence: Synthetic peptide
TSNTPSI

SEQ ID NO: 29955 - protein, 7 aa, synthetic construct
  REGION 1..7: note = Description of Artificial Sequence: Synthetic peptide
PVSTHSS

SEQ ID NO: 29956 - protein, 7 aa, synthetic construct
  REGION 1..7: note = Description of Artificial Sequence: Synthetic peptide
TRPNLQT

SEQ ID NO: 29957 - protein, 7 aa, synthetic construct
  REGION 1..7: note = Description of Artificial Sequence: Synthetic peptide
LASSRSG

SEQ ID NO: 29958 - protein, 7 aa, synthetic construct
  REGION 1..7: note = Description of Artificial Sequence: Synthetic peptide
QGQTAMR

SEQ ID NO: 29959 - protein, 7 aa, synthetic construct
  REGION 1..7: note = Description of Artificial Sequence: Synthetic peptide
VRNASSD

SEQ ID NO: 29960 - protein, 7 aa, synthetic construct
  REGION 1..7: note = Description of Artificial Sequence: Synthetic peptide
TMSTRQS

SEQ ID NO: 29961 - protein, 7 aa, synthetic construct
  REGION 1..7: note = Description of Artificial Sequence: Synthetic peptide
GSSRSLG

SEQ ID NO: 29962 - protein, 7 aa, synthetic construct
  REGION 1..7: note = Description of Artificial Sequence: Synthetic peptide
PAHQKLS

SEQ ID NO: 29963 - protein, 7 aa, synthetic construct
  REGION 1..7: note = Description of Artificial Sequence: Synthetic peptide
GTVNAKG

SEQ ID NO: 29964 - protein, 7 aa, synthetic construct
  REGION 1..7: note = Description of Artificial Sequence: Synthetic peptide
GQVKALG

SEQ ID NO: 29965 - protein, 7 aa, synthetic construct
  REGION 1..7: note = Description of Artificial Sequence: Synthetic peptide
GDRPSAK

SEQ ID NO: 29966 - protein, 7 aa, synthetic construct
  REGION 1..7: note = Description of Artificial Sequence: Synthetic peptide
STYPKSS

SEQ ID NO: 29967 - protein, 7 aa, synthetic construct
  REGION 1..7: note = Description of Artificial Sequence: Synthetic peptide
GQAGGSK

SEQ ID NO: 29968 - protein, 7 aa, synthetic construct
  REGION 1..7: note = Description of Artificial Sequence: Synthetic peptide
TGTKSDN

SEQ ID NO: 29969 - protein, 7 aa, synthetic construct
  REGION 1..7: note = Description of Artificial Sequence: Synthetic peptide
MLGSSNK

SEQ ID NO: 29970 - protein, 7 aa, synthetic construct
  REGION 1..7: note = Description of Artificial Sequence: Synthetic peptide
LQQHNTK

SEQ ID NO: 29971 - protein, 7 aa, synthetic construct
  REGION 1..7: note = Description of Artificial Sequence: Synthetic peptide
DSKHTST

SEQ ID NO: 29972 - protein, 7 aa, synthetic construct
  REGION 1..7: note = Description of Artificial Sequence: Synthetic peptide
SAHGRTN

SEQ ID NO: 29973 - protein, 7 aa, synthetic construct
  REGION 1..7: note = Description of Artificial Sequence: Synthetic peptide
TPQMTPV

SEQ ID NO: 29974 - protein, 7 aa, synthetic construct
  REGION 1..7: note = Description of Artificial Sequence: Synthetic peptide
MTGRLTT

SEQ ID NO: 29975 - protein, 7 aa, synthetic construct
  REGION 1..7: note = Description of Artificial Sequence: Synthetic peptide
MSMKQVT

SEQ ID NO: 29976 - protein, 7 aa, synthetic construct
  REGION 1..7: note = Description of Artificial Sequence: Synthetic peptide
VHVTSQT

SEQ ID NO: 29977 - protein, 7 aa, synthetic construct
  REGION 1..7: note = Description of Artificial Sequence: Synthetic peptide
LMSAATT

SEQ ID NO: 29978 - protein, 7 aa, synthetic construct
  REGION 1..7: note = Description of Artificial Sequence: Synthetic peptide
KVINPAQ

SEQ ID NO: 29979 - protein, 7 aa, synthetic construct
  REGION 1..7: note = Description of Artificial Sequence: Synthetic peptide
IKLDKQI

SEQ ID NO: 29980 - protein, 7 aa, synthetic construct
  REGION 1..7: note = Description of Artificial Sequence: Synthetic peptide
FGESTMR

SEQ ID NO: 29981 - protein, 7 aa, synthetic construct
  REGION 1..7: note = Description of Artificial Sequence: Synthetic peptide
DPLRSMH

SEQ ID NO: 29982 - protein, 7 aa, synthetic construct
  REGION 1..7: note = Description of Artificial Sequence: Synthetic peptide
CVSNVTN

SEQ ID NO: 29983 - protein, 7 aa, synthetic construct
  REGION 1..7: note = Description of Artificial Sequence: Synthetic peptide
NGSGTNQ

SEQ ID NO: 29984 - protein, 7 aa, synthetic construct
  REGION 1..7: note = Description of Artificial Sequence: Synthetic peptide
LLSQHSD

SEQ ID NO: 29985 - protein, 7 aa, synthetic construct
  REGION 1..7: note = Description of Artificial Sequence: Synthetic peptide
GGLHGSG

SEQ ID NO: 29986 - protein, 7 aa, synthetic construct
  REGION 1..7: note = Description of Artificial Sequence: Synthetic peptide
PVNNVGL

SEQ ID NO: 29987 - protein, 7 aa, synthetic construct
  REGION 1..7: note = Description of Artificial Sequence: Synthetic peptide
AVTTKAL

SEQ ID NO: 29988 - protein, 7 aa, synthetic construct
  REGION 1..7: note = Description of Artificial Sequence: Synthetic peptide
SSYTPSG

SEQ ID NO: 29989 - protein, 7 aa, synthetic construct
  REGION 1..7: note = Description of Artificial Sequence: Synthetic peptide
SSTKSSL

SEQ ID NO: 29990 - protein, 7 aa, synthetic construct
  REGION 1..7: note = Description of Artificial Sequence: Synthetic peptide
RNSEYTG

SEQ ID NO: 29991 - protein, 7 aa, synthetic construct
  REGION 1..7: note = Description of Artificial Sequence: Synthetic peptide
EVRRQST

SEQ ID NO: 29992 - protein, 7 aa, synthetic construct
  REGION 1..7: note = Description of Artificial Sequence: Synthetic peptide
MNSNHRN

SEQ ID NO: 29993 - protein, 7 aa, synthetic construct
  REGION 1..7: note = Description of Artificial Sequence: Synthetic peptide
PHSGNRH

SEQ ID NO: 29994 - protein, 7 aa, synthetic construct
  REGION 1..7: note = Description of Artificial Sequence: Synthetic peptide
SLASHTR

SEQ ID NO: 29995 - protein, 7 aa, synthetic construct
  REGION 1..7: note = Description of Artificial Sequence: Synthetic peptide
AEHQSGK

SEQ ID NO: 29996 - protein, 7 aa, synthetic construct
  REGION 1..7: note = Description of Artificial Sequence: Synthetic peptide
SSKAAIT

SEQ ID NO: 29997 - protein, 7 aa, synthetic construct
  REGION 1..7: note = Description of Artificial Sequence: Synthetic peptide
PQYGDKE

SEQ ID NO: 29998 - protein, 7 aa, synthetic construct
  REGION 1..7: note = Description of Artificial Sequence: Synthetic peptide
FGNPGIR

SEQ ID NO: 29999 - protein, 7 aa, synthetic construct
  REGION 1..7: note = Description of Artificial Sequence: Synthetic peptide
DSGFKSP

SEQ ID NO: 30000 - protein, 7 aa, synthetic construct
  REGION 1..7: note = Description of Artificial Sequence: Synthetic peptide
RALSKGG

SEQ ID NO: 30001 - protein, 7 aa, synthetic construct
  REGION 1..7: note = Description of Artificial Sequence: Synthetic peptide
SIRGGKD

SEQ ID NO: 30002 - protein, 7 aa, synthetic construct
  REGION 1..7: note = Description of Artificial Sequence: Synthetic peptide
VNANKAC

SEQ ID NO: 30003 - protein, 7 aa, synthetic construct
  REGION 1..7: note = Description of Artificial Sequence: Synthetic peptide
PDIGKQR

SEQ ID NO: 30004 - protein, 7 aa, synthetic construct
  REGION 1..7: note = Description of Artificial Sequence: Synthetic peptide
PRENKFS

SEQ ID NO: 30005 - protein, 7 aa, synthetic construct
  REGION 1..7: note = Description of Artificial Sequence: Synthetic peptide
GRAHNVI

SEQ ID NO: 30006 - protein, 7 aa, synthetic construct
  REGION 1..7: note = Description of Artificial Sequence: Synthetic peptide
SSWQNSL

SEQ ID NO: 30007 - protein, 7 aa, synthetic construct
  REGION 1..7: note = Description of Artificial Sequence: Synthetic peptide
HAKHVVG

SEQ ID NO: 30008 - protein, 7 aa, synthetic construct
  REGION 1..7: note = Description of Artificial Sequence: Synthetic peptide
PPRQKLG

SEQ ID NO: 30009 - protein, 7 aa, synthetic construct
  REGION 1..7: note = Description of Artificial Sequence: Synthetic peptide
CAGPENV

SEQ ID NO: 30010 - protein, 7 aa, synthetic construct
  REGION 1..7: note = Description of Artificial Sequence: Synthetic peptide
YKHSVVL

SEQ ID NO: 30011 - protein, 7 aa, synthetic construct
  REGION 1..7: note = Description of Artificial Sequence: Synthetic peptide
PGSEGRC

SEQ ID NO: 30012 - protein, 7 aa, synthetic construct
  REGION 1..7: note = Description of Artificial Sequence: Synthetic peptide
VTPARII

SEQ ID NO: 30013 - protein, 7 aa, synthetic construct
  REGION 1..7: note = Description of Artificial Sequence: Synthetic peptide
PWVQIDG

SEQ ID NO: 30014 - protein, 7 aa, synthetic construct
  REGION 1..7: note = Description of Artificial Sequence: Synthetic peptide
RGTKPAA

SEQ ID NO: 30015 - protein, 7 aa, synthetic construct
  REGION 1..7: note = Description of Artificial Sequence: Synthetic peptide
GRHGAPT

SEQ ID NO: 30016 - protein, 7 aa, synthetic construct
  REGION 1..7: note = Description of Artificial Sequence: Synthetic peptide
TPSMRNT

SEQ ID NO: 30017 - protein, 7 aa, synthetic construct
  REGION 1..7: note = Description of Artificial Sequence: Synthetic peptide
LGLGGRG

SEQ ID NO: 30018 - protein, 7 aa, synthetic construct
  REGION 1..7: note = Description of Artificial Sequence: Synthetic peptide
GALERHS

SEQ ID NO: 30019 - protein, 7 aa, synthetic construct
  REGION 1..7: note = Description of Artificial Sequence: Synthetic peptide
RSVGAKA

SEQ ID NO: 30020 - protein, 7 aa, synthetic construct
  REGION 1..7: note = Description of Artificial Sequence: Synthetic peptide
NSTSTSQ

SEQ ID NO: 30021 - protein, 7 aa, synthetic construct
  REGION 1..7: note = Description of Artificial Sequence: Synthetic peptide
TTHNIKG

SEQ ID NO: 30022 - protein, 7 aa, synthetic construct
  REGION 1..7: note = Description of Artificial Sequence: Synthetic peptide
PTASNRS

SEQ ID NO: 30023 - protein, 7 aa, synthetic construct
  REGION 1..7: note = Description of Artificial Sequence: Synthetic peptide
RTSTAPQ

SEQ ID NO: 30024 - protein, 7 aa, synthetic construct
  REGION 1..7: note = Description of Artificial Sequence: Synthetic peptide
HANNRSV

SEQ ID NO: 30025 - protein, 7 aa, synthetic construct
  REGION 1..7: note = Description of Artificial Sequence: Synthetic peptide
ERYTTSK

SEQ ID NO: 30026 - protein, 7 aa, synthetic construct
  REGION 1..7: note = Description of Artificial Sequence: Synthetic peptide
SGSLSSA

SEQ ID NO: 30027 - protein, 7 aa, synthetic construct
  REGION 1..7: note = Description of Artificial Sequence: Synthetic peptide
SSSTSHK

SEQ ID NO: 30028 - protein, 7 aa, synthetic construct
  REGION 1..7: note = Description of Artificial Sequence: Synthetic peptide
GGLDHHA

SEQ ID NO: 30029 - protein, 7 aa, synthetic construct
  REGION 1..7: note = Description of Artificial Sequence: Synthetic peptide
MNTSINN

SEQ ID NO: 30030 - protein, 7 aa, synthetic construct
  REGION 1..7: note = Description of Artificial Sequence: Synthetic peptide
TEFSRTN

SEQ ID NO: 30031 - protein, 7 aa, synthetic construct
  REGION 1..7: note = Description of Artificial Sequence: Synthetic peptide
SPNANRV

SEQ ID NO: 30032 - protein, 7 aa, synthetic construct
  REGION 1..7: note = Description of Artificial Sequence: Synthetic peptide
TPHQRSS

SEQ ID NO: 30033 - protein, 7 aa, synthetic construct
  REGION 1..7: note = Description of Artificial Sequence: Synthetic peptide
RTNPGYA

SEQ ID NO: 30034 - protein, 7 aa, synthetic construct
  REGION 1..7: note = Description of Artificial Sequence: Synthetic peptide
RSGNGSL

SEQ ID NO: 30035 - protein, 7 aa, synthetic construct
  REGION 1..7: note = Description of Artificial Sequence: Synthetic peptide
YDPTPRG

SEQ ID NO: 30036 - protein, 7 aa, synthetic construct
  REGION 1..7: note = Description of Artificial Sequence: Synthetic peptide
SYGHPGA

SEQ ID NO: 30037 - protein, 7 aa, synthetic construct
  REGION 1..7: note = Description of Artificial Sequence: Synthetic peptide
DTVSRHV

SEQ ID NO: 30038 - protein, 7 aa, synthetic construct
  REGION 1..7: note = Description of Artificial Sequence: Synthetic peptide
TRDSSLH

SEQ ID NO: 30039 - protein, 7 aa, synthetic construct
  REGION 1..7: note = Description of Artificial Sequence: Synthetic peptide
PGSGSKH

SEQ ID NO: 30040 - protein, 7 aa, synthetic construct
  REGION 1..7: note = Description of Artificial Sequence: Synthetic peptide
KMTPQST

SEQ ID NO: 30041 - protein, 7 aa, synthetic construct
  REGION 1..7: note = Description of Artificial Sequence: Synthetic peptide
RHQGTLQ

SEQ ID NO: 30042 - protein, 7 aa, synthetic construct
  REGION 1..7: note = Description of Artificial Sequence: Synthetic peptide
DARTMAA

SEQ ID NO: 30043 - protein, 7 aa, synthetic construct
  REGION 1..7: note = Description of Artificial Sequence: Synthetic peptide
KSPSSIL

SEQ ID NO: 30044 - protein, 7 aa, synthetic construct
  REGION 1..7: note = Description of Artificial Sequence: Synthetic peptide
HLSHASS

SEQ ID NO: 30045 - protein, 7 aa, synthetic construct
  REGION 1..7: note = Description of Artificial Sequence: Synthetic peptide
CPPLPVN

SEQ ID NO: 30046 - protein, 7 aa, synthetic construct
  REGION 1..7: note = Description of Artificial Sequence: Synthetic peptide
STPVTMN

SEQ ID NO: 30047 - protein, 7 aa, synthetic construct
  REGION 1..7: note = Description of Artificial Sequence: Synthetic peptide
SGPNSRV

SEQ ID NO: 30048 - protein, 7 aa, synthetic construct
  REGION 1..7: note = Description of Artificial Sequence: Synthetic peptide
SRGVSSA

SEQ ID NO: 30049 - protein, 7 aa, synthetic construct
  REGION 1..7: note = Description of Artificial Sequence: Synthetic peptide
GNPSPLV

SEQ ID NO: 30050 - protein, 7 aa, synthetic construct
  REGION 1..7: note = Description of Artificial Sequence: Synthetic peptide
STRPPAN

SEQ ID NO: 30051 - protein, 7 aa, synthetic construct
  REGION 1..7: note = Description of Artificial Sequence: Synthetic peptide
THRTQNS

SEQ ID NO: 30052 - protein, 7 aa, synthetic construct
  REGION 1..7: note = Description of Artificial Sequence: Synthetic peptide
MSHTKSN

SEQ ID NO: 30053 - protein, 7 aa, synthetic construct
  REGION 1..7: note = Description of Artificial Sequence: Synthetic peptide
GRANGQT

SEQ ID NO: 30054 - protein, 7 aa, synthetic construct
  REGION 1..7: note = Description of Artificial Sequence: Synthetic peptide
HSSRSTV

SEQ ID NO: 30055 - protein, 7 aa, synthetic construct
  REGION 1..7: note = Description of Artificial Sequence: Synthetic peptide
SAHNASR

SEQ ID NO: 30056 - protein, 7 aa, synthetic construct
  REGION 1..7: note = Description of Artificial Sequence: Synthetic peptide
GQAVNTA

SEQ ID NO: 30057 - protein, 7 aa, synthetic construct
  REGION 1..7: note = Description of Artificial Sequence: Synthetic peptide
RDATSIG

SEQ ID NO: 30058 - protein, 7 aa, synthetic construct
  REGION 1..7: note = Description of Artificial Sequence: Synthetic peptide
YNIKQGS

SEQ ID NO: 30059 - protein, 7 aa, synthetic construct
  REGION 1..7: note = Description of Artificial Sequence: Synthetic peptide
GAVSGKL

SEQ ID NO: 30060 - protein, 7 aa, synthetic construct
  REGION 1..7: note = Description of Artificial Sequence: Synthetic peptide
PNPLQKD

SEQ ID NO: 30061 - protein, 7 aa, synthetic construct
  REGION 1..7: note = Description of Artificial Sequence: Synthetic peptide
GNDVRIS

SEQ ID NO: 30062 - protein, 7 aa, synthetic construct
  REGION 1..7: note = Description of Artificial Sequence: Synthetic peptide
SIPHGVR

SEQ ID NO: 30063 - protein, 7 aa, synthetic construct
  REGION 1..7: note = Description of Artificial Sequence: Synthetic peptide
TAMGDVS

SEQ ID NO: 30064 - protein, 7 aa, synthetic construct
  REGION 1..7: note = Description of Artificial Sequence: Synthetic peptide
GSTTSGR

SEQ ID NO: 30065 - protein, 7 aa, synthetic construct
  REGION 1..7: note = Description of Artificial Sequence: Synthetic peptide
AVSSKVG

SEQ ID NO: 30066 - protein, 7 aa, synthetic construct
  REGION 1..7: note = Description of Artificial Sequence: Synthetic peptide
TPSVTNM

SEQ ID NO: 30067 - protein, 7 aa, synthetic construct
  REGION 1..7: note = Description of Artificial Sequence: Synthetic peptide
APQLKGY

SEQ ID NO: 30068 - protein, 7 aa, synthetic construct
  REGION 1..7: note = Description of Artificial Sequence: Synthetic peptide
TDTSRRQ

SEQ ID NO: 30069 - protein, 7 aa, synthetic construct
  REGION 1..7: note = Description of Artificial Sequence: Synthetic peptide
PGSGSNH

SEQ ID NO: 30070 - protein, 7 aa, synthetic construct
  REGION 1..7: note = Description of Artificial Sequence: Synthetic peptide
NTGMSVN

SEQ ID NO: 30071 - protein, 7 aa, synthetic construct
  REGION 1..7: note = Description of Artificial Sequence: Synthetic peptide
MAHDGYR

SEQ ID NO: 30072 - protein, 7 aa, synthetic construct
  REGION 1..7: note = Description of Artificial Sequence: Synthetic peptide
SPGNKST

SEQ ID NO: 30073 - protein, 7 aa, synthetic construct
  REGION 1..7: note = Description of Artificial Sequence: Synthetic peptide
MGVHSIA

SEQ ID NO: 30074 - protein, 7 aa, synthetic construct
  REGION 1..7: note = Description of Artificial Sequence: Synthetic peptide
QKGNNLP

SEQ ID NO: 30075 - protein, 7 aa, synthetic construct
  REGION 1..7: note = Description of Artificial Sequence: Synthetic peptide
GLHRSNG

SEQ ID NO: 30076 - protein, 7 aa, synthetic construct
  REGION 1..7: note = Description of Artificial Sequence: Synthetic peptide
SLYPSKG

SEQ ID NO: 30077 - protein, 7 aa, synthetic construct
  REGION 1..7: note = Description of Artificial Sequence: Synthetic peptide
APNGMQA

SEQ ID NO: 30078 - protein, 7 aa, synthetic construct
  REGION 1..7: note = Description of Artificial Sequence: Synthetic peptide
VGHGSDM

SEQ ID NO: 30079 - protein, 7 aa, synthetic construct
  REGION 1..7: note = Description of Artificial Sequence: Synthetic peptide
NGFNSNN

SEQ ID NO: 30080 - protein, 7 aa, synthetic construct
  REGION 1..7: note = Description of Artificial Sequence: Synthetic peptide
QGLSTKS

SEQ ID NO: 30081 - protein, 7 aa, synthetic construct
  REGION 1..7: note = Description of Artificial Sequence: Synthetic peptide
PGIATGR

SEQ ID NO: 30082 - protein, 7 aa, synthetic construct
  REGION 1..7: note = Description of Artificial Sequence: Synthetic peptide
ATMRSNE

SEQ ID NO: 30083 - protein, 7 aa, synthetic construct
  REGION 1..7: note = Description of Artificial Sequence: Synthetic peptide
PTHERAK

SEQ ID NO: 30084 - protein, 7 aa, synthetic construct
  REGION 1..7: note = Description of Artificial Sequence: Synthetic peptide
GTGVPGK

SEQ ID NO: 30085 - protein, 7 aa, synthetic construct
  REGION 1..7: note = Description of Artificial Sequence: Synthetic peptide
PDSTFSS

SEQ ID NO: 30086 - protein, 7 aa, synthetic construct
  REGION 1..7: note = Description of Artificial Sequence: Synthetic peptide
LGTKMCA

SEQ ID NO: 30087 - protein, 7 aa, synthetic construct
  REGION 1..7: note = Description of Artificial Sequence: Synthetic peptide
VRISTQA

SEQ ID NO: 30088 - protein, 7 aa, synthetic construct
  REGION 1..7: note = Description of Artificial Sequence: Synthetic peptide
TNPTGYR

SEQ ID NO: 30089 - protein, 7 aa, synthetic construct
  REGION 1..7: note = Description of Artificial Sequence: Synthetic peptide
LGDRSFI

SEQ ID NO: 30090 - protein, 7 aa, synthetic construct
  REGION 1..7: note = Description of Artificial Sequence: Synthetic peptide
ILDSHNR

SEQ ID NO: 30091 - protein, 7 aa, synthetic construct
  REGION 1..7: note = Description of Artificial Sequence: Synthetic peptide
GHAAGVS

SEQ ID NO: 30092 - protein, 7 aa, synthetic construct
  REGION 1..7: note = Description of Artificial Sequence: Synthetic peptide
NSSGQNP

SEQ ID NO: 30093 - protein, 7 aa, synthetic construct
  REGION 1..7: note = Description of Artificial Sequence: Synthetic peptide
SVHQNRA

SEQ ID NO: 30094 - protein, 7 aa, synthetic construct
  REGION 1..7: note = Description of Artificial Sequence: Synthetic peptide
VSTTPAL

SEQ ID NO: 30095 - protein, 7 aa, synthetic construct
  REGION 1..7: note = Description of Artificial Sequence: Synthetic peptide
ITTRSSM

SEQ ID NO: 30096 - protein, 7 aa, synthetic construct
  REGION 1..7: note = Description of Artificial Sequence: Synthetic peptide
GVERMRG

SEQ ID NO: 30097 - protein, 7 aa, synthetic construct
  REGION 1..7: note = Description of Artificial Sequence: Synthetic peptide
PSNKAGT

SEQ ID NO: 30098 - protein, 7 aa, synthetic construct
  REGION 1..7: note = Description of Artificial Sequence: Synthetic peptide
HYGETRN

SEQ ID NO: 30099 - protein, 7 aa, synthetic construct
  REGION 1..7: note = Description of Artificial Sequence: Synthetic peptide
VGHKGGP

SEQ ID NO: 30100 - protein, 7 aa, synthetic construct
  REGION 1..7: note = Description of Artificial Sequence: Synthetic peptide
HVAQLGS

SEQ ID NO: 30101 - protein, 7 aa, synthetic construct
  REGION 1..7: note = Description of Artificial Sequence: Synthetic peptide
FTIPRAD

SEQ ID NO: 30102 - protein, 7 aa, synthetic construct
  REGION 1..7: note = Description of Artificial Sequence: Synthetic peptide
GQTHAVR

SEQ ID NO: 30103 - protein, 7 aa, synthetic construct
  REGION 1..7: note = Description of Artificial Sequence: Synthetic peptide
EISQQGT

SEQ ID NO: 30104 - protein, 7 aa, synthetic construct
  REGION 1..7: note = Description of Artificial Sequence: Synthetic peptide
IQSSDRL

SEQ ID NO: 30105 - protein, 7 aa, synthetic construct
  REGION 1..7: note = Description of Artificial Sequence: Synthetic peptide
SLSSNPS

SEQ ID NO: 30106 - protein, 7 aa, synthetic construct
  REGION 1..7: note = Description of Artificial Sequence: Synthetic peptide
ASRDRAG

SEQ ID NO: 30107 - protein, 7 aa, synthetic construct
  REGION 1..7: note = Description of Artificial Sequence: Synthetic peptide
PISPRMS

SEQ ID NO: 30108 - protein, 7 aa, synthetic construct
  REGION 1..7: note = Description of Artificial Sequence: Synthetic peptide
GPAVTNR

SEQ ID NO: 30109 - protein, 7 aa, synthetic construct
  REGION 1..7: note = Description of Artificial Sequence: Synthetic peptide
ATHTSVS

SEQ ID NO: 30110 - protein, 7 aa, synthetic construct
  REGION 1..7: note = Description of Artificial Sequence: Synthetic peptide
THSKSFV

SEQ ID NO: 30111 - protein, 7 aa, synthetic construct
  REGION 1..7: note = Description of Artificial Sequence: Synthetic peptide
RVSHAQD

SEQ ID NO: 30112 - protein, 7 aa, synthetic construct
  REGION 1..7: note = Description of Artificial Sequence: Synthetic peptide
VSNSQSL

SEQ ID NO: 30113 - protein, 7 aa, synthetic construct
  REGION 1..7: note = Description of Artificial Sequence: Synthetic peptide
GTMSNGH

SEQ ID NO: 30114 - protein, 7 aa, synthetic construct
  REGION 1..7: note = Description of Artificial Sequence: Synthetic peptide
FTIPRAV

SEQ ID NO: 30115 - protein, 7 aa, synthetic construct
  REGION 1..7: note = Description of Artificial Sequence: Synthetic peptide
STTLRNS

SEQ ID NO: 30116 - protein, 7 aa, synthetic construct
  REGION 1..7: note = Description of Artificial Sequence: Synthetic peptide
MISGATR

SEQ ID NO: 30117 - protein, 7 aa, synthetic construct
  REGION 1..7: note = Description of Artificial Sequence: Synthetic peptide
TGPHIKA

SEQ ID NO: 30118 - protein, 7 aa, synthetic construct
  REGION 1..7: note = Description of Artificial Sequence: Synthetic peptide
HVHDGRT

SEQ ID NO: 30119 - protein, 7 aa, synthetic construct
  REGION 1..7: note = Description of Artificial Sequence: Synthetic peptide
SNNSGSC

SEQ ID NO: 30120 - protein, 7 aa, synthetic construct
  REGION 1..7: note = Description of Artificial Sequence: Synthetic peptide
QTMPKLA

SEQ ID NO: 30121 - protein, 7 aa, synthetic construct
  REGION 1..7: note = Description of Artificial Sequence: Synthetic peptide
LGRSPPA

SEQ ID NO: 30122 - protein, 7 aa, synthetic construct
  REGION 1..7: note = Description of Artificial Sequence: Synthetic peptide
HRASTDA

SEQ ID NO: 30123 - protein, 7 aa, synthetic construct
  REGION 1..7: note = Description of Artificial Sequence: Synthetic peptide
SRSVNFG

SEQ ID NO: 30124 - protein, 7 aa, synthetic construct
  REGION 1..7: note = Description of Artificial Sequence: Synthetic peptide
ASGNGRP

SEQ ID NO: 30125 - protein, 7 aa, synthetic construct
  REGION 1..7: note = Description of Artificial Sequence: Synthetic peptide
GHSTVGS

SEQ ID NO: 30126 - protein, 7 aa, synthetic construct
  REGION 1..7: note = Description of Artificial Sequence: Synthetic peptide
ERHVPSS

SEQ ID NO: 30127 - protein, 7 aa, synthetic construct
  REGION 1..7: note = Description of Artificial Sequence: Synthetic peptide
RPATSTP

SEQ ID NO: 30128 - protein, 7 aa, synthetic construct
  REGION 1..7: note = Description of Artificial Sequence: Synthetic peptide
VKVDGQI

SEQ ID NO: 30129 - protein, 7 aa, synthetic construct
  REGION 1..7: note = Description of Artificial Sequence: Synthetic peptide
QGKTAPY

SEQ ID NO: 30130 - protein, 7 aa, synthetic construct
  REGION 1..7: note = Description of Artificial Sequence: Synthetic peptide
ARNRVGI

SEQ ID NO: 30131 - protein, 7 aa, synthetic construct
  REGION 1..7: note = Description of Artificial Sequence: Synthetic peptide
LPTSSVA

SEQ ID NO: 30132 - protein, 7 aa, synthetic construct
  REGION 1..7: note = Description of Artificial Sequence: Synthetic peptide
SGKDRLH

SEQ ID NO: 30133 - protein, 7 aa, synthetic construct
  REGION 1..7: note = Description of Artificial Sequence: Synthetic peptide
RLHNMSA

SEQ ID NO: 30134 - protein, 7 aa, synthetic construct
  REGION 1..7: note = Description of Artificial Sequence: Synthetic peptide
SDNKGSV

SEQ ID NO: 30135 - protein, 7 aa, synthetic construct
  REGION 1..7: note = Description of Artificial Sequence: Synthetic peptide
TNTAGWS

SEQ ID NO: 30136 - protein, 7 aa, synthetic construct
  REGION 1..7: note = Description of Artificial Sequence: Synthetic peptide
RTGHSAG

SEQ ID NO: 30137 - protein, 7 aa, synthetic construct
  REGION 1..7: note = Description of Artificial Sequence: Synthetic peptide
ALKQTAA

SEQ ID NO: 30138 - protein, 7 aa, synthetic construct
  REGION 1..7: note = Description of Artificial Sequence: Synthetic peptide
MNGSPRI

SEQ ID NO: 30139 - protein, 7 aa, synthetic construct
  REGION 1..7: note = Description of Artificial Sequence: Synthetic peptide
AYSTTNR

SEQ ID NO: 30140 - protein, 7 aa, synthetic construct
  REGION 1..7: note = Description of Artificial Sequence: Synthetic peptide
IRTNSTL

SEQ ID NO: 30141 - protein, 7 aa, synthetic construct
  REGION 1..7: note = Description of Artificial Sequence: Synthetic peptide
GNGTRHV

SEQ ID NO: 30142 - protein, 7 aa, synthetic construct
  REGION 1..7: note = Description of Artificial Sequence: Synthetic peptide
SYADKQG

SEQ ID NO: 30143 - protein, 7 aa, synthetic construct
  REGION 1..7: note = Description of Artificial Sequence: Synthetic peptide
GTQAAHV

SEQ ID NO: 30144 - protein, 7 aa, synthetic construct
  REGION 1..7: note = Description of Artificial Sequence: Synthetic peptide
LNGSATA

SEQ ID NO: 30145 - protein, 7 aa, synthetic construct
  REGION 1..7: note = Description of Artificial Sequence: Synthetic peptide
LVRATHE

SEQ ID NO: 30146 - protein, 7 aa, synthetic construct
  REGION 1..7: note = Description of Artificial Sequence: Synthetic peptide
RLGNSHA

SEQ ID NO: 30147 - protein, 7 aa, synthetic construct
  REGION 1..7: note = Description of Artificial Sequence: Synthetic peptide
PMRGTLA

SEQ ID NO: 30148 - protein, 7 aa, synthetic construct
  REGION 1..7: note = Description of Artificial Sequence: Synthetic peptide
VGSRNVG

SEQ ID NO: 30149 - protein, 7 aa, synthetic construct
  REGION 1..7: note = Description of Artificial Sequence: Synthetic peptide
PRHVPLL

SEQ ID NO: 30150 - protein, 7 aa, synthetic construct
  REGION 1..7: note = Description of Artificial Sequence: Synthetic peptide
SSHSNSE

SEQ ID NO: 30151 - protein, 7 aa, synthetic construct
  REGION 1..7: note = Description of Artificial Sequence: Synthetic peptide
SLRTPSG

SEQ ID NO: 30152 - protein, 7 aa, synthetic construct
  REGION 1..7: note = Description of Artificial Sequence: Synthetic peptide
LPTTASS

SEQ ID NO: 30153 - protein, 7 aa, synthetic construct
  REGION 1..7: note = Description of Artificial Sequence: Synthetic peptide
GAGTSYH

SEQ ID NO: 30154 - protein, 7 aa, synthetic construct
  REGION 1..7: note = Description of Artificial Sequence: Synthetic peptide
STSGIRS

SEQ ID NO: 30155 - protein, 7 aa, synthetic construct
  REGION 1..7: note = Description of Artificial Sequence: Synthetic peptide
IGLNRTG

SEQ ID NO: 30156 - protein, 7 aa, synthetic construct
  REGION 1..7: note = Description of Artificial Sequence: Synthetic peptide
ANRTRQD

SEQ ID NO: 30157 - protein, 7 aa, synthetic construct
  REGION 1..7: note = Description of Artificial Sequence: Synthetic peptide
PVREGSI

SEQ ID NO: 30158 - protein, 7 aa, synthetic construct
  REGION 1..7: note = Description of Artificial Sequence: Synthetic peptide
PGNEIGR

SEQ ID NO: 30159 - protein, 7 aa, synthetic construct
  REGION 1..7: note = Description of Artificial Sequence: Synthetic peptide
SPFQSSH

SEQ ID NO: 30160 - protein, 7 aa, synthetic construct
  REGION 1..7: note = Description of Artificial Sequence: Synthetic peptide
AMSEHLK

SEQ ID NO: 30161 - protein, 7 aa, synthetic construct
  REGION 1..7: note = Description of Artificial Sequence: Synthetic peptide
HLDRLSK

SEQ ID NO: 30162 - protein, 7 aa, synthetic construct
  REGION 1..7: note = Description of Artificial Sequence: Synthetic peptide
EVTNAPK

SEQ ID NO: 30163 - protein, 7 aa, synthetic construct
  REGION 1..7: note = Description of Artificial Sequence: Synthetic peptide
SSNEKDR

SEQ ID NO: 30164 - protein, 7 aa, synthetic construct
  REGION 1..7: note = Description of Artificial Sequence: Synthetic peptide
SLSRLSG

SEQ ID NO: 30165 - protein, 7 aa, synthetic construct
  REGION 1..7: note = Description of Artificial Sequence: Synthetic peptide
GLPLRPN

SEQ ID NO: 30166 - protein, 7 aa, synthetic construct
  REGION 1..7: note = Description of Artificial Sequence: Synthetic peptide
ETRPAIC

SEQ ID NO: 30167 - protein, 7 aa, synthetic construct
  REGION 1..7: note = Description of Artificial Sequence: Synthetic peptide
NSSGQNQ

SEQ ID NO: 30168 - protein, 7 aa, synthetic construct
  REGION 1..7: note = Description of Artificial Sequence: Synthetic peptide
SRSAPRL

SEQ ID NO: 30169 - protein, 7 aa, synthetic construct
  REGION 1..7: note = Description of Artificial Sequence: Synthetic peptide
ATGRSPN

SEQ ID NO: 30170 - protein, 7 aa, synthetic construct
  REGION 1..7: note = Description of Artificial Sequence: Synthetic peptide
CQPRSAN

SEQ ID NO: 30171 - protein, 7 aa, synthetic construct
  REGION 1..7: note = Description of Artificial Sequence: Synthetic peptide
ATSATRM

SEQ ID NO: 30172 - protein, 7 aa, synthetic construct
  REGION 1..7: note = Description of Artificial Sequence: Synthetic peptide
LTVRSQS

SEQ ID NO: 30173 - protein, 7 aa, synthetic construct
  REGION 1..7: note = Description of Artificial Sequence: Synthetic peptide
SNTHSPS

SEQ ID NO: 30174 - protein, 7 aa, synthetic construct
  REGION 1..7: note = Description of Artificial Sequence: Synthetic peptide
IRSTSGG

SEQ ID NO: 30175 - protein, 7 aa, synthetic construct
  REGION 1..7: note = Description of Artificial Sequence: Synthetic peptide
TATKADR

SEQ ID NO: 30176 - protein, 7 aa, synthetic construct
  REGION 1..7: note = Description of Artificial Sequence: Synthetic peptide
SQSTQFG

SEQ ID NO: 30177 - protein, 7 aa, synthetic construct
  REGION 1..7: note = Description of Artificial Sequence: Synthetic peptide
AQASRTT

SEQ ID NO: 30178 - protein, 7 aa, synthetic construct
  REGION 1..7: note = Description of Artificial Sequence: Synthetic peptide
GGRSVGL

SEQ ID NO: 30179 - protein, 7 aa, synthetic construct
  REGION 1..7: note = Description of Artificial Sequence: Synthetic peptide
THAAHSS

SEQ ID NO: 30180 - protein, 7 aa, synthetic construct
  REGION 1..7: note = Description of Artificial Sequence: Synthetic peptide
MGHAKTA

SEQ ID NO: 30181 - protein, 7 aa, synthetic construct
  REGION 1..7: note = Description of Artificial Sequence: Synthetic peptide
GMHSVAK

SEQ ID NO: 30182 - protein, 7 aa, synthetic construct
  REGION 1..7: note = Description of Artificial Sequence: Synthetic peptide
PYSRPAQ

SEQ ID NO: 30183 - protein, 7 aa, synthetic construct
  REGION 1..7: note = Description of Artificial Sequence: Synthetic peptide
QVSPLIL

SEQ ID NO: 30184 - protein, 7 aa, synthetic construct
  REGION 1..7: note = Description of Artificial Sequence: Synthetic peptide
RYPPATH

SEQ ID NO: 30185 - protein, 7 aa, synthetic construct
  REGION 1..7: note = Description of Artificial Sequence: Synthetic peptide
NLGTNVL

SEQ ID NO: 30186 - protein, 7 aa, synthetic construct
  REGION 1..7: note = Description of Artificial Sequence: Synthetic peptide
NGAGQNQ

SEQ ID NO: 30187 - protein, 7 aa, synthetic construct
  REGION 1..7: note = Description of Artificial Sequence: Synthetic peptide
NISTRQS

SEQ ID NO: 30188 - protein, 7 aa, synthetic construct
  REGION 1..7: note = Description of Artificial Sequence: Synthetic peptide
GTVDKAS

SEQ ID NO: 30189 - protein, 7 aa, synthetic construct
  REGION 1..7: note = Description of Artificial Sequence: Synthetic peptide
NAMNTRG

SEQ ID NO: 30190 - protein, 7 aa, synthetic construct
  REGION 1..7: note = Description of Artificial Sequence: Synthetic peptide
HLRGSNT

SEQ ID NO: 30191 - protein, 7 aa, synthetic construct
  REGION 1..7: note = Description of Artificial Sequence: Synthetic peptide
SHQRPIQ

SEQ ID NO: 30192 - protein, 7 aa, synthetic construct
  REGION 1..7: note = Description of Artificial Sequence: Synthetic peptide
RPSGSEP

SEQ ID NO: 30193 - protein, 7 aa, synthetic construct
  REGION 1..7: note = Description of Artificial Sequence: Synthetic peptide
SASPSLS

SEQ ID NO: 30194 - protein, 7 aa, synthetic construct
  REGION 1..7: note = Description of Artificial Sequence: Synthetic peptide
HQSGSTC

SEQ ID NO: 30195 - protein, 7 aa, synthetic construct
  REGION 1..7: note = Description of Artificial Sequence: Synthetic peptide
SSVSRSH

SEQ ID NO: 30196 - protein, 7 aa, synthetic construct
  REGION 1..7: note = Description of Artificial Sequence: Synthetic peptide
RAGNAPT

SEQ ID NO: 30197 - protein, 7 aa, synthetic construct
  REGION 1..7: note = Description of Artificial Sequence: Synthetic peptide
WLSQQSS

SEQ ID NO: 30198 - protein, 7 aa, synthetic construct
  REGION 1..7: note = Description of Artificial Sequence: Synthetic peptide
KANMSNQ

SEQ ID NO: 30199 - protein, 7 aa, synthetic construct
  REGION 1..7: note = Description of Artificial Sequence: Synthetic peptide
LENRALS

SEQ ID NO: 30200 - protein, 7 aa, synthetic construct
  REGION 1..7: note = Description of Artificial Sequence: Synthetic peptide
STTGDRL

SEQ ID NO: 30201 - protein, 7 aa, synthetic construct
  REGION 1..7: note = Description of Artificial Sequence: Synthetic peptide
FIGTRSA

SEQ ID NO: 30202 - protein, 7 aa, synthetic construct
  REGION 1..7: note = Description of Artificial Sequence: Synthetic peptide
DVRARTA

SEQ ID NO: 30203 - protein, 7 aa, synthetic construct
  REGION 1..7: note = Description of Artificial Sequence: Synthetic peptide
QSRVSVN

SEQ ID NO: 30204 - protein, 7 aa, synthetic construct
  REGION 1..7: note = Description of Artificial Sequence: Synthetic peptide
RARLGDS

SEQ ID NO: 30205 - protein, 7 aa, synthetic construct
  REGION 1..7: note = Description of Artificial Sequence: Synthetic peptide
TLYSNKG

SEQ ID NO: 30206 - protein, 7 aa, synthetic construct
  REGION 1..7: note = Description of Artificial Sequence: Synthetic peptide
ALVTRPT

SEQ ID NO: 30207 - protein, 7 aa, synthetic construct
  REGION 1..7: note = Description of Artificial Sequence: Synthetic peptide
HTDTRAV

SEQ ID NO: 30208 - protein, 7 aa, synthetic construct
  REGION 1..7: note = Description of Artificial Sequence: Synthetic peptide
GGSRPFL

SEQ ID NO: 30209 - protein, 7 aa, synthetic construct
  REGION 1..7: note = Description of Artificial Sequence: Synthetic peptide
CNSHNAA

SEQ ID NO: 30210 - protein, 7 aa, synthetic construct
  REGION 1..7: note = Description of Artificial Sequence: Synthetic peptide
LGSNRYS

SEQ ID NO: 30211 - protein, 7 aa, synthetic construct
  REGION 1..7: note = Description of Artificial Sequence: Synthetic peptide
FGSSTIL

SEQ ID NO: 30212 - protein, 7 aa, synthetic construct
  REGION 1..7: note = Description of Artificial Sequence: Synthetic peptide
GTSPSTM

SEQ ID NO: 30213 - protein, 7 aa, synthetic construct
  REGION 1..7: note = Description of Artificial Sequence: Synthetic peptide
SVQGERM

SEQ ID NO: 30214 - protein, 7 aa, synthetic construct
  REGION 1..7: note = Description of Artificial Sequence: Synthetic peptide
GALHTRD

SEQ ID NO: 30215 - protein, 7 aa, synthetic construct
  REGION 1..7: note = Description of Artificial Sequence: Synthetic peptide
GMGNDPR

SEQ ID NO: 30216 - protein, 7 aa, synthetic construct
  REGION 1..7: note = Description of Artificial Sequence: Synthetic peptide
GTALIAA

SEQ ID NO: 30217 - protein, 7 aa, synthetic construct
  REGION 1..7: note = Description of Artificial Sequence: Synthetic peptide
LQNKLVV

SEQ ID NO: 30218 - protein, 7 aa, synthetic construct
  REGION 1..7: note = Description of Artificial Sequence: Synthetic peptide
QAKNIHS

SEQ ID NO: 30219 - protein, 7 aa, synthetic construct
  REGION 1..7: note = Description of Artificial Sequence: Synthetic peptide
VTPSRGF

SEQ ID NO: 30220 - protein, 7 aa, synthetic construct
  REGION 1..7: note = Description of Artificial Sequence: Synthetic peptide
MQAKSGH

SEQ ID NO: 30221 - protein, 7 aa, synthetic construct
  REGION 1..7: note = Description of Artificial Sequence: Synthetic peptide
SLSGVMT

SEQ ID NO: 30222 - protein, 7 aa, synthetic construct
  REGION 1..7: note = Description of Artificial Sequence: Synthetic peptide
CMSTRLT

SEQ ID NO: 30223 - protein, 7 aa, synthetic construct
  REGION 1..7: note = Description of Artificial Sequence: Synthetic peptide
VPRGPGM

SEQ ID NO: 30224 - protein, 7 aa, synthetic construct
  REGION 1..7: note = Description of Artificial Sequence: Synthetic peptide
SIQRTSS

SEQ ID NO: 30225 - protein, 7 aa, synthetic construct
  REGION 1..7: note = Description of Artificial Sequence: Synthetic peptide
AATNSFG

SEQ ID NO: 30226 - protein, 7 aa, synthetic construct
  REGION 1..7: note = Description of Artificial Sequence: Synthetic peptide
HIQGPHN

SEQ ID NO: 30227 - protein, 7 aa, synthetic construct
  REGION 1..7: note = Description of Artificial Sequence: Synthetic peptide
INTSSDS

SEQ ID NO: 30228 - protein, 7 aa, synthetic construct
  REGION 1..7: note = Description of Artificial Sequence: Synthetic peptide
ERARPVL

SEQ ID NO: 30229 - protein, 7 aa, synthetic construct
  REGION 1..7: note = Description of Artificial Sequence: Synthetic peptide
HPSRPVL

SEQ ID NO: 30230 - protein, 7 aa, synthetic construct
  REGION 1..7: note = Description of Artificial Sequence: Synthetic peptide
RTSPTLV

SEQ ID NO: 30231 - protein, 7 aa, synthetic construct
  REGION 1..7: note = Description of Artificial Sequence: Synthetic peptide
SRSTGTL

SEQ ID NO: 30232 - protein, 7 aa, synthetic construct
  REGION 1..7: note = Description of Artificial Sequence: Synthetic peptide
TRGSPLM

SEQ ID NO: 30233 - protein, 7 aa, synthetic construct
  REGION 1..7: note = Description of Artificial Sequence: Synthetic peptide
STSTVHS

SEQ ID NO: 30234 - protein, 7 aa, synthetic construct
  REGION 1..7: note = Description of Artificial Sequence: Synthetic peptide
PSKGTYP

SEQ ID NO: 30235 - protein, 7 aa, synthetic construct
  REGION 1..7: note = Description of Artificial Sequence: Synthetic peptide
HLSHSPT

SEQ ID NO: 30236 - protein, 7 aa, synthetic construct
  REGION 1..7: note = Description of Artificial Sequence: Synthetic peptide
PPSKPNT

SEQ ID NO: 30237 - protein, 7 aa, synthetic construct
  REGION 1..7: note = Description of Artificial Sequence: Synthetic peptide
SVVPKTN

SEQ ID NO: 30238 - protein, 7 aa, synthetic construct
  REGION 1..7: note = Description of Artificial Sequence: Synthetic peptide
IASQPLR

SEQ ID NO: 30239 - protein, 7 aa, synthetic construct
  REGION 1..7: note = Description of Artificial Sequence: Synthetic peptide
DRARNVH

SEQ ID NO: 30240 - protein, 7 aa, synthetic construct
  REGION 1..7: note = Description of Artificial Sequence: Synthetic peptide
YSNSRVG

SEQ ID NO: 30241 - protein, 7 aa, synthetic construct
  REGION 1..7: note = Description of Artificial Sequence: Synthetic peptide
DPLRQSV

SEQ ID NO: 30242 - protein, 7 aa, synthetic construct
  REGION 1..7: note = Description of Artificial Sequence: Synthetic peptide
GSHHPSG

SEQ ID NO: 30243 - protein, 7 aa, synthetic construct
  REGION 1..7: note = Description of Artificial Sequence: Synthetic peptide
TGIGSHL

SEQ ID NO: 30244 - protein, 7 aa, synthetic construct
  REGION 1..7: note = Description of Artificial Sequence: Synthetic peptide
NTNGSQR

SEQ ID NO: 30245 - protein, 7 aa, synthetic construct
  REGION 1..7: note = Description of Artificial Sequence: Synthetic peptide
SSNTRIV

SEQ ID NO: 30246 - protein, 7 aa, synthetic construct
  REGION 1..7: note = Description of Artificial Sequence: Synthetic peptide
GPQVSRT

SEQ ID NO: 30247 - protein, 7 aa, synthetic construct
  REGION 1..7: note = Description of Artificial Sequence: Synthetic peptide
NNTSTHL

SEQ ID NO: 30248 - protein, 7 aa, synthetic construct
  REGION 1..7: note = Description of Artificial Sequence: Synthetic peptide
GTGTPRT

SEQ ID NO: 30249 - protein, 7 aa, synthetic construct
  REGION 1..7: note = Description of Artificial Sequence: Synthetic peptide
QVPVRPV

SEQ ID NO: 30250 - protein, 7 aa, synthetic construct
  REGION 1..7: note = Description of Artificial Sequence: Synthetic peptide
INGTQTL

SEQ ID NO: 30251 - protein, 7 aa, synthetic construct
  REGION 1..7: note = Description of Artificial Sequence: Synthetic peptide
ESPNLHS

SEQ ID NO: 30252 - protein, 7 aa, synthetic construct
  REGION 1..7: note = Description of Artificial Sequence: Synthetic peptide
VPHNHSL

SEQ ID NO: 30253 - protein, 7 aa, synthetic construct
  REGION 1..7: note = Description of Artificial Sequence: Synthetic peptide
PKLAADL

SEQ ID NO: 30254 - protein, 7 aa, synthetic construct
  REGION 1..7: note = Description of Artificial Sequence: Synthetic peptide
KGKSGEQ

SEQ ID NO: 30255 - protein, 7 aa, synthetic construct
  REGION 1..7: note = Description of Artificial Sequence: Synthetic peptide
SKVTAQS

SEQ ID NO: 30256 - protein, 7 aa, synthetic construct
  REGION 1..7: note = Description of Artificial Sequence: Synthetic peptide
ETNSRLG

SEQ ID NO: 30257 - protein, 7 aa, synthetic construct
  REGION 1..7: note = Description of Artificial Sequence: Synthetic peptide
GRTNSYS

SEQ ID NO: 30258 - protein, 7 aa, synthetic construct
  REGION 1..7: note = Description of Artificial Sequence: Synthetic peptide
RTPTASG

SEQ ID NO: 30259 - protein, 7 aa, synthetic construct
  REGION 1..7: note = Description of Artificial Sequence: Synthetic peptide
FPLTKPA

SEQ ID NO: 30260 - protein, 7 aa, synthetic construct
  REGION 1..7: note = Description of Artificial Sequence: Synthetic peptide
CGSTKTS

SEQ ID NO: 30261 - protein, 7 aa, synthetic construct
  REGION 1..7: note = Description of Artificial Sequence: Synthetic peptide
PATVTGV

SEQ ID NO: 30262 - protein, 7 aa, synthetic construct
  REGION 1..7: note = Description of Artificial Sequence: Synthetic peptide
GFPVSSM

SEQ ID NO: 30263 - protein, 7 aa, synthetic construct
  REGION 1..7: note = Description of Artificial Sequence: Synthetic peptide
LGIANIG

SEQ ID NO: 30264 - protein, 7 aa, synthetic construct
  REGION 1..7: note = Description of Artificial Sequence: Synthetic peptide
HVRLSGS

SEQ ID NO: 30265 - protein, 7 aa, synthetic construct
  REGION 1..7: note = Description of Artificial Sequence: Synthetic peptide
DIMSPLK

SEQ ID NO: 30266 - protein, 7 aa, synthetic construct
  REGION 1..7: note = Description of Artificial Sequence: Synthetic peptide
AVRVERP

SEQ ID NO: 30267 - protein, 7 aa, synthetic construct
  REGION 1..7: note = Description of Artificial Sequence: Synthetic peptide
SKGRPTI

SEQ ID NO: 30268 - protein, 7 aa, synthetic construct
  REGION 1..7: note = Description of Artificial Sequence: Synthetic peptide
LNAGRST

SEQ ID NO: 30269 - protein, 7 aa, synthetic construct
  REGION 1..7: note = Description of Artificial Sequence: Synthetic peptide
TTHNMQG

SEQ ID NO: 30270 - protein, 7 aa, synthetic construct
  REGION 1..7: note = Description of Artificial Sequence: Synthetic peptide
SIPSTSQ

SEQ ID NO: 30271 - protein, 7 aa, synthetic construct
  REGION 1..7: note = Description of Artificial Sequence: Synthetic peptide
TSNMVGK

SEQ ID NO: 30272 - protein, 7 aa, synthetic construct
  REGION 1..7: note = Description of Artificial Sequence: Synthetic peptide
TGNKGGV

SEQ ID NO: 30273 - protein, 7 aa, synthetic construct
  REGION 1..7: note = Description of Artificial Sequence: Synthetic peptide
VSGSNSL

SEQ ID NO: 30274 - protein, 7 aa, synthetic construct
  REGION 1..7: note = Description of Artificial Sequence: Synthetic peptide
RMLDGHS

SEQ ID NO: 30275 - protein, 7 aa, synthetic construct
  REGION 1..7: note = Description of Artificial Sequence: Synthetic peptide
NDRGQNG

SEQ ID NO: 30276 - protein, 7 aa, synthetic construct
  REGION 1..7: note = Description of Artificial Sequence: Synthetic peptide
SQSNSFL

SEQ ID NO: 30277 - protein, 7 aa, synthetic construct
  REGION 1..7: note = Description of Artificial Sequence: Synthetic peptide
SDGGGRM

SEQ ID NO: 30278 - protein, 7 aa, synthetic construct
  REGION 1..7: note = Description of Artificial Sequence: Synthetic peptide
RVATSVS

SEQ ID NO: 30279 - protein, 7 aa, synthetic construct
  REGION 1..7: note = Description of Artificial Sequence: Synthetic peptide
RLAQSGL

SEQ ID NO: 30280 - protein, 7 aa, synthetic construct
  REGION 1..7: note = Description of Artificial Sequence: Synthetic peptide
SVADTRL

SEQ ID NO: 30281 - protein, 7 aa, synthetic construct
  REGION 1..7: note = Description of Artificial Sequence: Synthetic peptide
NANVQTR

SEQ ID NO: 30282 - protein, 7 aa, synthetic construct
  REGION 1..7: note = Description of Artificial Sequence: Synthetic peptide
YSGASGR

SEQ ID NO: 30283 - protein, 7 aa, synthetic construct
  REGION 1..7: note = Description of Artificial Sequence: Synthetic peptide
SRQPLMT

SEQ ID NO: 30284 - protein, 7 aa, synthetic construct
  REGION 1..7: note = Description of Artificial Sequence: Synthetic peptide
HHSTLQT

SEQ ID NO: 30285 - protein, 7 aa, synthetic construct
  REGION 1..7: note = Description of Artificial Sequence: Synthetic peptide
TVTNAAR

SEQ ID NO: 30286 - protein, 7 aa, synthetic construct
  REGION 1..7: note = Description of Artificial Sequence: Synthetic peptide
SVNSHHG

SEQ ID NO: 30287 - protein, 7 aa, synthetic construct
  REGION 1..7: note = Description of Artificial Sequence: Synthetic peptide
GDLNPPS

SEQ ID NO: 30288 - protein, 7 aa, synthetic construct
  REGION 1..7: note = Description of Artificial Sequence: Synthetic peptide
NSHSGHR

SEQ ID NO: 30289 - protein, 7 aa, synthetic construct
  REGION 1..7: note = Description of Artificial Sequence: Synthetic peptide
PGADPNL

SEQ ID NO: 30290 - protein, 7 aa, synthetic construct
  REGION 1..7: note = Description of Artificial Sequence: Synthetic peptide
HANNKLM

SEQ ID NO: 30291 - protein, 7 aa, synthetic construct
  REGION 1..7: note = Description of Artificial Sequence: Synthetic peptide
YGSPVHQ

SEQ ID NO: 30292 - protein, 7 aa, synthetic construct
  REGION 1..7: note = Description of Artificial Sequence: Synthetic peptide
VSSNASM

SEQ ID NO: 30293 - protein, 7 aa, synthetic construct
  REGION 1..7: note = Description of Artificial Sequence: Synthetic peptide
GFHGQGS

SEQ ID NO: 30294 - protein, 7 aa, synthetic construct
  REGION 1..7: note = Description of Artificial Sequence: Synthetic peptide
SLTRTLG

SEQ ID NO: 30295 - protein, 7 aa, synthetic construct
  REGION 1..7: note = Description of Artificial Sequence: Synthetic peptide
LRSDRWD

SEQ ID NO: 30296 - protein, 7 aa, synthetic construct
  REGION 1..7: note = Description of Artificial Sequence: Synthetic peptide
TQRPAQM

SEQ ID NO: 30297 - protein, 7 aa, synthetic construct
  REGION 1..7: note = Description of Artificial Sequence: Synthetic peptide
LASTYSG

SEQ ID NO: 30298 - protein, 7 aa, synthetic construct
  REGION 1..7: note = Description of Artificial Sequence: Synthetic peptide
FALSNST

SEQ ID NO: 30299 - protein, 7 aa, synthetic construct
  REGION 1..7: note = Description of Artificial Sequence: Synthetic peptide
DYSSDSS

SEQ ID NO: 30300 - protein, 7 aa, synthetic construct
  REGION 1..7: note = Description of Artificial Sequence: Synthetic peptide
AYPTTGS

SEQ ID NO: 30301 - protein, 7 aa, synthetic construct
  REGION 1..7: note = Description of Artificial Sequence: Synthetic peptide
RNVSHLE

SEQ ID NO: 30302 - protein, 7 aa, synthetic construct
  REGION 1..7: note = Description of Artificial Sequence: Synthetic peptide
STVGHMN

SEQ ID NO: 30303 - protein, 7 aa, synthetic construct
  REGION 1..7: note = Description of Artificial Sequence: Synthetic peptide
VEARPTC

SEQ ID NO: 30304 - protein, 7 aa, synthetic construct
  REGION 1..7: note = Description of Artificial Sequence: Synthetic peptide
EVQSSRR

SEQ ID NO: 30305 - protein, 7 aa, synthetic construct
  REGION 1..7: note = Description of Artificial Sequence: Synthetic peptide
HSRDSPH

SEQ ID NO: 30306 - protein, 7 aa, synthetic construct
  REGION 1..7: note = Description of Artificial Sequence: Synthetic peptide
PVVGKMS

SEQ ID NO: 30307 - protein, 7 aa, synthetic construct
  REGION 1..7: note = Description of Artificial Sequence: Synthetic peptide
SAASNGR

SEQ ID NO: 30308 - protein, 7 aa, synthetic construct
  REGION 1..7: note = Description of Artificial Sequence: Synthetic peptide
RTNASLS

SEQ ID NO: 30309 - protein, 7 aa, synthetic construct
  REGION 1..7: note = Description of Artificial Sequence: Synthetic peptide
GEPTRYG

SEQ ID NO: 30310 - protein, 7 aa, synthetic construct
  REGION 1..7: note = Description of Artificial Sequence: Synthetic peptide
DISVRPG

SEQ ID NO: 30311 - protein, 7 aa, synthetic construct
  REGION 1..7: note = Description of Artificial Sequence: Synthetic peptide
QAHTPPT

SEQ ID NO: 30312 - protein, 7 aa, synthetic construct
  REGION 1..7: note = Description of Artificial Sequence: Synthetic peptide
PTLGTTK

SEQ ID NO: 30313 - protein, 7 aa, synthetic construct
  REGION 1..7: note = Description of Artificial Sequence: Synthetic peptide
NLSGSRY

SEQ ID NO: 30314 - protein, 7 aa, synthetic construct
  REGION 1..7: note = Description of Artificial Sequence: Synthetic peptide
QAYTNAD

SEQ ID NO: 30315 - protein, 7 aa, synthetic construct
  REGION 1..7: note = Description of Artificial Sequence: Synthetic peptide
HTPDVGK

SEQ ID NO: 30316 - protein, 7 aa, synthetic construct
  REGION 1..7: note = Description of Artificial Sequence: Synthetic peptide
VTRVAGN

SEQ ID NO: 30317 - protein, 7 aa, synthetic construct
  REGION 1..7: note = Description of Artificial Sequence: Synthetic peptide
TTSHMLK

SEQ ID NO: 30318 - protein, 7 aa, synthetic construct
  REGION 1..7: note = Description of Artificial Sequence: Synthetic peptide
GAPDWSN

SEQ ID NO: 30319 - protein, 7 aa, synthetic construct
  REGION 1..7: note = Description of Artificial Sequence: Synthetic peptide
NSRTHYT

SEQ ID NO: 30320 - protein, 7 aa, synthetic construct
  REGION 1..7: note = Description of Artificial Sequence: Synthetic peptide
ESARIGS

SEQ ID NO: 30321 - protein, 7 aa, synthetic construct
  REGION 1..7: note = Description of Artificial Sequence: Synthetic peptide
FPSVSTT

SEQ ID NO: 30322 - protein, 7 aa, synthetic construct
  REGION 1..7: note = Description of Artificial Sequence: Synthetic peptide
SYKGALS

SEQ ID NO: 30323 - protein, 7 aa, synthetic construct
  REGION 1..7: note = Description of Artificial Sequence: Synthetic peptide
GSGGDRN

SEQ ID NO: 30324 - protein, 7 aa, synthetic construct
  REGION 1..7: note = Description of Artificial Sequence: Synthetic peptide
NSRISPS

SEQ ID NO: 30325 - protein, 7 aa, synthetic construct
  REGION 1..7: note = Description of Artificial Sequence: Synthetic peptide
AFGTTLR

SEQ ID NO: 30326 - protein, 7 aa, synthetic construct
  REGION 1..7: note = Description of Artificial Sequence: Synthetic peptide
PRNTGNT

SEQ ID NO: 30327 - protein, 7 aa, synthetic construct
  REGION 1..7: note = Description of Artificial Sequence: Synthetic peptide
FNRDRIG

SEQ ID NO: 30328 - protein, 7 aa, synthetic construct
  REGION 1..7: note = Description of Artificial Sequence: Synthetic peptide
SRSHAMT

SEQ ID NO: 30329 - protein, 7 aa, synthetic construct
  REGION 1..7: note = Description of Artificial Sequence: Synthetic peptide
CSLGKVQ

SEQ ID NO: 30330 - protein, 7 aa, synthetic construct
  REGION 1..7: note = Description of Artificial Sequence: Synthetic peptide
RNLHMHE

SEQ ID NO: 30331 - protein, 7 aa, synthetic construct
  REGION 1..7: note = Description of Artificial Sequence: Synthetic peptide
HQSAVQG

SEQ ID NO: 30332 - protein, 7 aa, synthetic construct
  REGION 1..7: note = Description of Artificial Sequence: Synthetic peptide
PISESTR

SEQ ID NO: 30333 - protein, 7 aa, synthetic construct
  REGION 1..7: note = Description of Artificial Sequence: Synthetic peptide
VSGHGVR

SEQ ID NO: 30334 - protein, 7 aa, synthetic construct
  REGION 1..7: note = Description of Artificial Sequence: Synthetic peptide
RLDNHPS

SEQ ID NO: 30335 - protein, 7 aa, synthetic construct
  REGION 1..7: note = Description of Artificial Sequence: Synthetic peptide
FPTSPTR

SEQ ID NO: 30336 - protein, 7 aa, synthetic construct
  REGION 1..7: note = Description of Artificial Sequence: Synthetic peptide
YTNSSTC

SEQ ID NO: 30337 - protein, 7 aa, synthetic construct
  REGION 1..7: note = Description of Artificial Sequence: Synthetic peptide
GEGTKRH

SEQ ID NO: 30338 - protein, 7 aa, synthetic construct
  REGION 1..7: note = Description of Artificial Sequence: Synthetic peptide
VRTNLDK

SEQ ID NO: 30339 - protein, 7 aa, synthetic construct
  REGION 1..7: note = Description of Artificial Sequence: Synthetic peptide
VRDGVRS

SEQ ID NO: 30340 - protein, 7 aa, synthetic construct
  REGION 1..7: note = Description of Artificial Sequence: Synthetic peptide
NSGTHFK

SEQ ID NO: 30341 - protein, 7 aa, synthetic construct
  REGION 1..7: note = Description of Artificial Sequence: Synthetic peptide
GNSTANR

SEQ ID NO: 30342 - protein, 7 aa, synthetic construct
  REGION 1..7: note = Description of Artificial Sequence: Synthetic peptide
YTAASHR

SEQ ID NO: 30343 - protein, 7 aa, synthetic construct
  REGION 1..7: note = Description of Artificial Sequence: Synthetic peptide
SMNSKPT

SEQ ID NO: 30344 - protein, 7 aa, synthetic construct
  REGION 1..7: note = Description of Artificial Sequence: Synthetic peptide
PRSPSKL

SEQ ID NO: 30345 - protein, 7 aa, synthetic construct
  REGION 1..7: note = Description of Artificial Sequence: Synthetic peptide
GRVVSMQ

SEQ ID NO: 30346 - protein, 7 aa, synthetic construct
  REGION 1..7: note = Description of Artificial Sequence: Synthetic peptide
YPSPTVT

SEQ ID NO: 30347 - protein, 7 aa, synthetic construct
  REGION 1..7: note = Description of Artificial Sequence: Synthetic peptide
SGVGHRG

SEQ ID NO: 30348 - protein, 7 aa, synthetic construct
  REGION 1..7: note = Description of Artificial Sequence: Synthetic peptide
STSNHRV

SEQ ID NO: 30349 - protein, 7 aa, synthetic construct
  REGION 1..7: note = Description of Artificial Sequence: Synthetic peptide
GRTAEGR

SEQ ID NO: 30350 - protein, 7 aa, synthetic construct
  REGION 1..7: note = Description of Artificial Sequence: Synthetic peptide
DNVPHLA

SEQ ID NO: 30351 - protein, 7 aa, synthetic construct
  REGION 1..7: note = Description of Artificial Sequence: Synthetic peptide
NNSTGVA

SEQ ID NO: 30352 - protein, 7 aa, synthetic construct
  REGION 1..7: note = Description of Artificial Sequence: Synthetic peptide
CGFKNPS

SEQ ID NO: 30353 - protein, 7 aa, synthetic construct
  REGION 1..7: note = Description of Artificial Sequence: Synthetic peptide
LTSRSMA

SEQ ID NO: 30354 - protein, 7 aa, synthetic construct
  REGION 1..7: note = Description of Artificial Sequence: Synthetic peptide
SREKNNA

SEQ ID NO: 30355 - protein, 7 aa, synthetic construct
  REGION 1..7: note = Description of Artificial Sequence: Synthetic peptide
SNNKANV

SEQ ID NO: 30356 - protein, 7 aa, synthetic construct
  REGION 1..7: note = Description of Artificial Sequence: Synthetic peptide
PMTNLGT

SEQ ID NO: 30357 - protein, 7 aa, synthetic construct
  REGION 1..7: note = Description of Artificial Sequence: Synthetic peptide
IIAPQTQ

SEQ ID NO: 30358 - protein, 7 aa, synthetic construct
  REGION 1..7: note = Description of Artificial Sequence: Synthetic peptide
VSQNGSM

SEQ ID NO: 30359 - protein, 7 aa, synthetic construct
  REGION 1..7: note = Description of Artificial Sequence: Synthetic peptide
SNQRGEG

SEQ ID NO: 30360 - protein, 7 aa, synthetic construct
  REGION 1..7: note = Description of Artificial Sequence: Synthetic peptide
PHNTSKG

SEQ ID NO: 30361 - protein, 7 aa, synthetic construct
  REGION 1..7: note = Description of Artificial Sequence: Synthetic peptide
AFGEIRQ

SEQ ID NO: 30362 - protein, 7 aa, synthetic construct
  REGION 1..7: note = Description of Artificial Sequence: Synthetic peptide
YHVSKPQ

SEQ ID NO: 30363 - protein, 7 aa, synthetic construct
  REGION 1..7: note = Description of Artificial Sequence: Synthetic peptide
KNMGSSR

SEQ ID NO: 30364 - protein, 7 aa, synthetic construct
  REGION 1..7: note = Description of Artificial Sequence: Synthetic peptide
EGMGVHG

SEQ ID NO: 30365 - protein, 7 aa, synthetic construct
  REGION 1..7: note = Description of Artificial Sequence: Synthetic peptide
SKFSETK

SEQ ID NO: 30366 - protein, 7 aa, synthetic construct
  REGION 1..7: note = Description of Artificial Sequence: Synthetic peptide
YVPRSSL

SEQ ID NO: 30367 - protein, 7 aa, synthetic construct
  REGION 1..7: note = Description of Artificial Sequence: Synthetic peptide
NSKSVLS

SEQ ID NO: 30368 - protein, 7 aa, synthetic construct
  REGION 1..7: note = Description of Artificial Sequence: Synthetic peptide
CLGSNNL

SEQ ID NO: 30369 - protein, 7 aa, synthetic construct
  REGION 1..7: note = Description of Artificial Sequence: Synthetic peptide
SNYKSSN

SEQ ID NO: 30370 - protein, 7 aa, synthetic construct
  REGION 1..7: note = Description of Artificial Sequence: Synthetic peptide
GLVPNLI

SEQ ID NO: 30371 - protein, 7 aa, synthetic construct
  REGION 1..7: note = Description of Artificial Sequence: Synthetic peptide
CSFGNQL

SEQ ID NO: 30372 - protein, 7 aa, synthetic construct
  REGION 1..7: note = Description of Artificial Sequence: Synthetic peptide
GRAQLAS

SEQ ID NO: 30373 - protein, 7 aa, synthetic construct
  REGION 1..7: note = Description of Artificial Sequence: Synthetic peptide
SSRTGSI

SEQ ID NO: 30374 - protein, 7 aa, synthetic construct
  REGION 1..7: note = Description of Artificial Sequence: Synthetic peptide
QPTTSAL

SEQ ID NO: 30375 - protein, 7 aa, synthetic construct
  REGION 1..7: note = Description of Artificial Sequence: Synthetic peptide
LGGGTLR

SEQ ID NO: 30376 - protein, 7 aa, synthetic construct
  REGION 1..7: note = Description of Artificial Sequence: Synthetic peptide
SGTSSYK

SEQ ID NO: 30377 - protein, 7 aa, synthetic construct
  REGION 1..7: note = Description of Artificial Sequence: Synthetic peptide
TLGGRNL

SEQ ID NO: 30378 - protein, 7 aa, synthetic construct
  REGION 1..7: note = Description of Artificial Sequence: Synthetic peptide
TGVTGPL

SEQ ID NO: 30379 - protein, 7 aa, synthetic construct
  REGION 1..7: note = Description of Artificial Sequence: Synthetic peptide
LTAVSPK

SEQ ID NO: 30380 - protein, 7 aa, synthetic construct
  REGION 1..7: note = Description of Artificial Sequence: Synthetic peptide
YDASARA

SEQ ID NO: 30381 - protein, 7 aa, synthetic construct
  REGION 1..7: note = Description of Artificial Sequence: Synthetic peptide
GVSASLA

SEQ ID NO: 30382 - protein, 7 aa, synthetic construct
  REGION 1..7: note = Description of Artificial Sequence: Synthetic peptide
SASNTSV

SEQ ID NO: 30383 - protein, 7 aa, synthetic construct
  REGION 1..7: note = Description of Artificial Sequence: Synthetic peptide
PVTLRGI

SEQ ID NO: 30384 - protein, 7 aa, synthetic construct
  REGION 1..7: note = Description of Artificial Sequence: Synthetic peptide
HQLKNSV

SEQ ID NO: 30385 - protein, 7 aa, synthetic construct
  REGION 1..7: note = Description of Artificial Sequence: Synthetic peptide
TSNSIQG

SEQ ID NO: 30386 - protein, 7 aa, synthetic construct
  REGION 1..7: note = Description of Artificial Sequence: Synthetic peptide
PIPKYHD

SEQ ID NO: 30387 - protein, 7 aa, synthetic construct
  REGION 1..7: note = Description of Artificial Sequence: Synthetic peptide
KGQNTIS

SEQ ID NO: 30388 - protein, 7 aa, synthetic construct
  REGION 1..7: note = Description of Artificial Sequence: Synthetic peptide
HPTLVSK

SEQ ID NO: 30389 - protein, 7 aa, synthetic construct
  REGION 1..7: note = Description of Artificial Sequence: Synthetic peptide
SRQATSS

SEQ ID NO: 30390 - protein, 7 aa, synthetic construct
  REGION 1..7: note = Description of Artificial Sequence: Synthetic peptide
GASTVGR

SEQ ID NO: 30391 - protein, 7 aa, synthetic construct
  REGION 1..7: note = Description of Artificial Sequence: Synthetic peptide
VPSSRSN

SEQ ID NO: 30392 - protein, 7 aa, synthetic construct
  REGION 1..7: note = Description of Artificial Sequence: Synthetic peptide
SKSTHQA

SEQ ID NO: 30393 - protein, 7 aa, synthetic construct
  REGION 1..7: note = Description of Artificial Sequence: Synthetic peptide
NGSGQNR

SEQ ID NO: 30394 - protein, 7 aa, synthetic construct
  REGION 1..7: note = Description of Artificial Sequence: Synthetic peptide
SIARPFT

SEQ ID NO: 30395 - protein, 7 aa, synthetic construct
  REGION 1..7: note = Description of Artificial Sequence: Synthetic peptide
TRTAGVD

SEQ ID NO: 30396 - protein, 7 aa, synthetic construct
  REGION 1..7: note = Description of Artificial Sequence: Synthetic peptide
PSDFKHG

SEQ ID NO: 30397 - protein, 7 aa, synthetic construct
  REGION 1..7: note = Description of Artificial Sequence: Synthetic peptide
PISTRSA

SEQ ID NO: 30398 - protein, 7 aa, synthetic construct
  REGION 1..7: note = Description of Artificial Sequence: Synthetic peptide
TGMQSLS

SEQ ID NO: 30399 - protein, 7 aa, synthetic construct
  REGION 1..7: note = Description of Artificial Sequence: Synthetic peptide
SSPANMA

SEQ ID NO: 30400 - protein, 7 aa, synthetic construct
  REGION 1..7: note = Description of Artificial Sequence: Synthetic peptide
LNHHSSL

SEQ ID NO: 30401 - protein, 7 aa, synthetic construct
  REGION 1..7: note = Description of Artificial Sequence: Synthetic peptide
DRVTGKM

SEQ ID NO: 30402 - protein, 7 aa, synthetic construct
  REGION 1..7: note = Description of Artificial Sequence: Synthetic peptide
STPMSNR

SEQ ID NO: 30403 - protein, 7 aa, synthetic construct
  REGION 1..7: note = Description of Artificial Sequence: Synthetic peptide
YTASALR

SEQ ID NO: 30404 - protein, 7 aa, synthetic construct
  REGION 1..7: note = Description of Artificial Sequence: Synthetic peptide
INLSHST

SEQ ID NO: 30405 - protein, 7 aa, synthetic construct
  REGION 1..7: note = Description of Artificial Sequence: Synthetic peptide
VNLRSNT

SEQ ID NO: 30406 - protein, 7 aa, synthetic construct
  REGION 1..7: note = Description of Artificial Sequence: Synthetic peptide
LHRAGDA

SEQ ID NO: 30407 - protein, 7 aa, synthetic construct
  REGION 1..7: note = Description of Artificial Sequence: Synthetic peptide
QHSSARV

SEQ ID NO: 30408 - protein, 7 aa, synthetic construct
  REGION 1..7: note = Description of Artificial Sequence: Synthetic peptide
RVSDQLS

SEQ ID NO: 30409 - protein, 7 aa, synthetic construct
  REGION 1..7: note = Description of Artificial Sequence: Synthetic peptide
RDLGHDN

SEQ ID NO: 30410 - protein, 7 aa, synthetic construct
  REGION 1..7: note = Description of Artificial Sequence: Synthetic peptide
PPVTTRP

SEQ ID NO: 30411 - protein, 7 aa, synthetic construct
  REGION 1..7: note = Description of Artificial Sequence: Synthetic peptide
GTKSAFS

SEQ ID NO: 30412 - protein, 7 aa, synthetic construct
  REGION 1..7: note = Description of Artificial Sequence: Synthetic peptide
DRNHAAE

SEQ ID NO: 30413 - protein, 7 aa, synthetic construct
  REGION 1..7: note = Description of Artificial Sequence: Synthetic peptide
HRTSTVS

SEQ ID NO: 30414 - protein, 7 aa, synthetic construct
  REGION 1..7: note = Description of Artificial Sequence: Synthetic peptide
NRMTPVM

SEQ ID NO: 30415 - protein, 7 aa, synthetic construct
  REGION 1..7: note = Description of Artificial Sequence: Synthetic peptide
SGPQPVA

SEQ ID NO: 30416 - protein, 7 aa, synthetic construct
  REGION 1..7: note = Description of Artificial Sequence: Synthetic peptide
CRPTPSL

SEQ ID NO: 30417 - protein, 7 aa, synthetic construct
  REGION 1..7: note = Description of Artificial Sequence: Synthetic peptide
SRESTSA

SEQ ID NO: 30418 - protein, 7 aa, synthetic construct
  REGION 1..7: note = Description of Artificial Sequence: Synthetic peptide
HIRPSMS

SEQ ID NO: 30419 - protein, 7 aa, synthetic construct
  REGION 1..7: note = Description of Artificial Sequence: Synthetic peptide
AGSHKGV

SEQ ID NO: 30420 - protein, 7 aa, synthetic construct
  REGION 1..7: note = Description of Artificial Sequence: Synthetic peptide
DSHPRSI

SEQ ID NO: 30421 - protein, 7 aa, synthetic construct
  REGION 1..7: note = Description of Artificial Sequence: Synthetic peptide
SGSNTIG

SEQ ID NO: 30422 - protein, 7 aa, synthetic construct
  REGION 1..7: note = Description of Artificial Sequence: Synthetic peptide
GVEAMRN

SEQ ID NO: 30423 - protein, 7 aa, synthetic construct
  REGION 1..7: note = Description of Artificial Sequence: Synthetic peptide
TNRVGYG

SEQ ID NO: 30424 - protein, 7 aa, synthetic construct
  REGION 1..7: note = Description of Artificial Sequence: Synthetic peptide
HKNGGRD

SEQ ID NO: 30425 - protein, 7 aa, synthetic construct
  REGION 1..7: note = Description of Artificial Sequence: Synthetic peptide
YLKTGDN

SEQ ID NO: 30426 - protein, 7 aa, synthetic construct
  REGION 1..7: note = Description of Artificial Sequence: Synthetic peptide
TGTDSRS

SEQ ID NO: 30427 - protein, 7 aa, synthetic construct
  REGION 1..7: note = Description of Artificial Sequence: Synthetic peptide
PPSAVMG

SEQ ID NO: 30428 - protein, 7 aa, synthetic construct
  REGION 1..7: note = Description of Artificial Sequence: Synthetic peptide
CMTRDTS

SEQ ID NO: 30429 - protein, 7 aa, synthetic construct
  REGION 1..7: note = Description of Artificial Sequence: Synthetic peptide
PTASPST

SEQ ID NO: 30430 - protein, 7 aa, synthetic construct
  REGION 1..7: note = Description of Artificial Sequence: Synthetic peptide
QDSSIRN

SEQ ID NO: 30431 - protein, 7 aa, synthetic construct
  REGION 1..7: note = Description of Artificial Sequence: Synthetic peptide
VPVTGLS

SEQ ID NO: 30432 - protein, 7 aa, synthetic construct
  REGION 1..7: note = Description of Artificial Sequence: Synthetic peptide
YPGALQK

SEQ ID NO: 30433 - protein, 7 aa, synthetic construct
  REGION 1..7: note = Description of Artificial Sequence: Synthetic peptide
HASREPL

SEQ ID NO: 30434 - protein, 7 aa, synthetic construct
  REGION 1..7: note = Description of Artificial Sequence: Synthetic peptide
GRHTPTA

SEQ ID NO: 30435 - protein, 7 aa, synthetic construct
  REGION 1..7: note = Description of Artificial Sequence: Synthetic peptide
PRSQPVP

SEQ ID NO: 30436 - protein, 7 aa, synthetic construct
  REGION 1..7: note = Description of Artificial Sequence: Synthetic peptide
YQPSLSK

SEQ ID NO: 30437 - protein, 7 aa, synthetic construct
  REGION 1..7: note = Description of Artificial Sequence: Synthetic peptide
RQTHQPS

SEQ ID NO: 30438 - protein, 7 aa, synthetic construct
  REGION 1..7: note = Description of Artificial Sequence: Synthetic peptide
QHNTLGQ

SEQ ID NO: 30439 - protein, 7 aa, synthetic construct
  REGION 1..7: note = Description of Artificial Sequence: Synthetic peptide
WGNELRR

SEQ ID NO: 30440 - protein, 7 aa, synthetic construct
  REGION 1..7: note = Description of Artificial Sequence: Synthetic peptide
VHSTVHS

SEQ ID NO: 30441 - protein, 7 aa, synthetic construct
  REGION 1..7: note = Description of Artificial Sequence: Synthetic peptide
KLTGQRS

SEQ ID NO: 30442 - protein, 7 aa, synthetic construct
  REGION 1..7: note = Description of Artificial Sequence: Synthetic peptide
ESVRSSS

SEQ ID NO: 30443 - protein, 7 aa, synthetic construct
  REGION 1..7: note = Description of Artificial Sequence: Synthetic peptide
SPHGAGY

SEQ ID NO: 30444 - protein, 7 aa, synthetic construct
  REGION 1..7: note = Description of Artificial Sequence: Synthetic peptide
SAAKPGP

SEQ ID NO: 30445 - protein, 7 aa, synthetic construct
  REGION 1..7: note = Description of Artificial Sequence: Synthetic peptide
DNMHRSN

SEQ ID NO: 30446 - protein, 7 aa, synthetic construct
  REGION 1..7: note = Description of Artificial Sequence: Synthetic peptide
SGGRGTS

SEQ ID NO: 30447 - protein, 7 aa, synthetic construct
  REGION 1..7: note = Description of Artificial Sequence: Synthetic peptide
KTSTPYS

SEQ ID NO: 30448 - protein, 7 aa, synthetic construct
  REGION 1..7: note = Description of Artificial Sequence: Synthetic peptide
NTHNIQG

SEQ ID NO: 30449 - protein, 7 aa, synthetic construct
  REGION 1..7: note = Description of Artificial Sequence: Synthetic peptide
TGSEQNQ

SEQ ID NO: 30450 - protein, 7 aa, synthetic construct
  REGION 1..7: note = Description of Artificial Sequence: Synthetic peptide
AATMRNS

SEQ ID NO: 30451 - protein, 7 aa, synthetic construct
  REGION 1..7: note = Description of Artificial Sequence: Synthetic peptide
GINLSPG

SEQ ID NO: 30452 - protein, 7 aa, synthetic construct
  REGION 1..7: note = Description of Artificial Sequence: Synthetic peptide
HTHDVGK

SEQ ID NO: 30453 - protein, 7 aa, synthetic construct
  REGION 1..7: note = Description of Artificial Sequence: Synthetic peptide
SGSHRTQ

SEQ ID NO: 30454 - protein, 7 aa, synthetic construct
  REGION 1..7: note = Description of Artificial Sequence: Synthetic peptide
VSSHRNM

SEQ ID NO: 30455 - protein, 7 aa, synthetic construct
  REGION 1..7: note = Description of Artificial Sequence: Synthetic peptide
GRTTKAF

SEQ ID NO: 30456 - protein, 7 aa, synthetic construct
  REGION 1..7: note = Description of Artificial Sequence: Synthetic peptide
QMLGRGG

SEQ ID NO: 30457 - protein, 7 aa, synthetic construct
  REGION 1..7: note = Description of Artificial Sequence: Synthetic peptide
ATLSSGE

SEQ ID NO: 30458 - protein, 7 aa, synthetic construct
  REGION 1..7: note = Description of Artificial Sequence: Synthetic peptide
NGRQGHT

SEQ ID NO: 30459 - protein, 7 aa, synthetic construct
  REGION 1..7: note = Description of Artificial Sequence: Synthetic peptide
SSLQPFT

SEQ ID NO: 30460 - protein, 7 aa, synthetic construct
  REGION 1..7: note = Description of Artificial Sequence: Synthetic peptide
ASRSTNP

SEQ ID NO: 30461 - protein, 7 aa, synthetic construct
  REGION 1..7: note = Description of Artificial Sequence: Synthetic peptide
MPNSSSL

SEQ ID NO: 30462 - protein, 7 aa, synthetic construct
  REGION 1..7: note = Description of Artificial Sequence: Synthetic peptide
RNNNRLE

SEQ ID NO: 30463 - protein, 7 aa, synthetic construct
  REGION 1..7: note = Description of Artificial Sequence: Synthetic peptide
NSAALNS

SEQ ID NO: 30464 - protein, 7 aa, synthetic construct
  REGION 1..7: note = Description of Artificial Sequence: Synthetic peptide
SSLPRYN

SEQ ID NO: 30465 - protein, 7 aa, synthetic construct
  REGION 1..7: note = Description of Artificial Sequence: Synthetic peptide
PLQDSLR

SEQ ID NO: 30466 - protein, 7 aa, synthetic construct
  REGION 1..7: note = Description of Artificial Sequence: Synthetic peptide
DRLDHSR

SEQ ID NO: 30467 - protein, 7 aa, synthetic construct
  REGION 1..7: note = Description of Artificial Sequence: Synthetic peptide
SIQRAAA

SEQ ID NO: 30468 - protein, 7 aa, synthetic construct
  REGION 1..7: note = Description of Artificial Sequence: Synthetic peptide
RGNGTHG

SEQ ID NO: 30469 - protein, 7 aa, synthetic construct
  REGION 1..7: note = Description of Artificial Sequence: Synthetic peptide
RVNLNEL

SEQ ID NO: 30470 - protein, 7 aa, synthetic construct
  REGION 1..7: note = Description of Artificial Sequence: Synthetic peptide
SQPGSNH

SEQ ID NO: 30471 - protein, 7 aa, synthetic construct
  REGION 1..7: note = Description of Artificial Sequence: Synthetic peptide
DSRQTSL

SEQ ID NO: 30472 - protein, 7 aa, synthetic construct
  REGION 1..7: note = Description of Artificial Sequence: Synthetic peptide
RMTRGAD

SEQ ID NO: 30473 - protein, 7 aa, synthetic construct
  REGION 1..7: note = Description of Artificial Sequence: Synthetic peptide
SSISRTS

SEQ ID NO: 30474 - protein, 7 aa, synthetic construct
  REGION 1..7: note = Description of Artificial Sequence: Synthetic peptide
ASLRESR

SEQ ID NO: 30475 - protein, 7 aa, synthetic construct
  REGION 1..7: note = Description of Artificial Sequence: Synthetic peptide
PRDLRAS

SEQ ID NO: 30476 - protein, 7 aa, synthetic construct
  REGION 1..7: note = Description of Artificial Sequence: Synthetic peptide
QGSSLRT

SEQ ID NO: 30477 - protein, 7 aa, synthetic construct
  REGION 1..7: note = Description of Artificial Sequence: Synthetic peptide
SLYTNAV

SEQ ID NO: 30478 - protein, 7 aa, synthetic construct
  REGION 1..7: note = Description of Artificial Sequence: Synthetic peptide
GSNLGQM

SEQ ID NO: 30479 - protein, 7 aa, synthetic construct
  REGION 1..7: note = Description of Artificial Sequence: Synthetic peptide
LTTSNIG

SEQ ID NO: 30480 - protein, 7 aa, synthetic construct
  REGION 1..7: note = Description of Artificial Sequence: Synthetic peptide
SAGTSVG

SEQ ID NO: 30481 - protein, 7 aa, synthetic construct
  REGION 1..7: note = Description of Artificial Sequence: Synthetic peptide
LSSGRGG

SEQ ID NO: 30482 - protein, 7 aa, synthetic construct
  REGION 1..7: note = Description of Artificial Sequence: Synthetic peptide
LSPTSTN

SEQ ID NO: 30483 - protein, 7 aa, synthetic construct
  REGION 1..7: note = Description of Artificial Sequence: Synthetic peptide
IGTSPMK

SEQ ID NO: 30484 - protein, 7 aa, synthetic construct
  REGION 1..7: note = Description of Artificial Sequence: Synthetic peptide
GDSKSTW

SEQ ID NO: 30485 - protein, 7 aa, synthetic construct
  REGION 1..7: note = Description of Artificial Sequence: Synthetic peptide
QVTGASH

SEQ ID NO: 30486 - protein, 7 aa, synthetic construct
  REGION 1..7: note = Description of Artificial Sequence: Synthetic peptide
SLERLKT

SEQ ID NO: 30487 - protein, 7 aa, synthetic construct
  REGION 1..7: note = Description of Artificial Sequence: Synthetic peptide
TLPRVPA

SEQ ID NO: 30488 - protein, 7 aa, synthetic construct
  REGION 1..7: note = Description of Artificial Sequence: Synthetic peptide
PSVANVM

SEQ ID NO: 30489 - protein, 7 aa, synthetic construct
  REGION 1..7: note = Description of Artificial Sequence: Synthetic peptide
GTARTLH

SEQ ID NO: 30490 - protein, 7 aa, synthetic construct
  REGION 1..7: note = Description of Artificial Sequence: Synthetic peptide
TSVSNRT

SEQ ID NO: 30491 - protein, 7 aa, synthetic construct
  REGION 1..7: note = Description of Artificial Sequence: Synthetic peptide
HIGSPHT

SEQ ID NO: 30492 - protein, 7 aa, synthetic construct
  REGION 1..7: note = Description of Artificial Sequence: Synthetic peptide
LMHSAVS

SEQ ID NO: 30493 - protein, 7 aa, synthetic construct
  REGION 1..7: note = Description of Artificial Sequence: Synthetic peptide
SRSGGQV

SEQ ID NO: 30494 - protein, 7 aa, synthetic construct
  REGION 1..7: note = Description of Artificial Sequence: Synthetic peptide
FNIQGIG

SEQ ID NO: 30495 - protein, 7 aa, synthetic construct
  REGION 1..7: note = Description of Artificial Sequence: Synthetic peptide
PLAAGGT

SEQ ID NO: 30496 - protein, 7 aa, synthetic construct
  REGION 1..7: note = Description of Artificial Sequence: Synthetic peptide
TSLSPSV

SEQ ID NO: 30497 - protein, 7 aa, synthetic construct
  REGION 1..7: note = Description of Artificial Sequence: Synthetic peptide
VSTQAIS

SEQ ID NO: 30498 - protein, 7 aa, synthetic construct
  REGION 1..7: note = Description of Artificial Sequence: Synthetic peptide
TRPNGGG

SEQ ID NO: 30499 - protein, 7 aa, synthetic construct
  REGION 1..7: note = Description of Artificial Sequence: Synthetic peptide
VGSSKGC

SEQ ID NO: 30500 - protein, 7 aa, synthetic construct
  REGION 1..7: note = Description of Artificial Sequence: Synthetic peptide
VTYPPAG

SEQ ID NO: 30501 - protein, 7 aa, synthetic construct
  REGION 1..7: note = Description of Artificial Sequence: Synthetic peptide
YSSRSGP

SEQ ID NO: 30502 - protein, 7 aa, synthetic construct
  REGION 1..7: note = Description of Artificial Sequence: Synthetic peptide
RIQAPGR

SEQ ID NO: 30503 - protein, 7 aa, synthetic construct
  REGION 1..7: note = Description of Artificial Sequence: Synthetic peptide
MSYKAHD

SEQ ID NO: 30504 - protein, 7 aa, synthetic construct
  REGION 1..7: note = Description of Artificial Sequence: Synthetic peptide
WSLGHND

SEQ ID NO: 30505 - protein, 7 aa, synthetic construct
  REGION 1..7: note = Description of Artificial Sequence: Synthetic peptide
VPTSRLN

SEQ ID NO: 30506 - protein, 7 aa, synthetic construct
  REGION 1..7: note = Description of Artificial Sequence: Synthetic peptide
RCEATTA

SEQ ID NO: 30507 - protein, 7 aa, synthetic construct
  REGION 1..7: note = Description of Artificial Sequence: Synthetic peptide
TQSSTRS

SEQ ID NO: 30508 - protein, 7 aa, synthetic construct
  REGION 1..7: note = Description of Artificial Sequence: Synthetic peptide
LTGTAHQ

SEQ ID NO: 30509 - protein, 7 aa, synthetic construct
  REGION 1..7: note = Description of Artificial Sequence: Synthetic peptide
TSSANTV

SEQ ID NO: 30510 - protein, 7 aa, synthetic construct
  REGION 1..7: note = Description of Artificial Sequence: Synthetic peptide
SASGKPC

SEQ ID NO: 30511 - protein, 7 aa, synthetic construct
  REGION 1..7: note = Description of Artificial Sequence: Synthetic peptide
RSDPTRG

SEQ ID NO: 30512 - protein, 7 aa, synthetic construct
  REGION 1..7: note = Description of Artificial Sequence: Synthetic peptide
KTPQLSQ

SEQ ID NO: 30513 - protein, 7 aa, synthetic construct
  REGION 1..7: note = Description of Artificial Sequence: Synthetic peptide
SATSVPI

SEQ ID NO: 30514 - protein, 7 aa, synthetic construct
  REGION 1..7: note = Description of Artificial Sequence: Synthetic peptide
MKSKERP

SEQ ID NO: 30515 - protein, 7 aa, synthetic construct
  REGION 1..7: note = Description of Artificial Sequence: Synthetic peptide
FSASGAR

SEQ ID NO: 30516 - protein, 7 aa, synthetic construct
  REGION 1..7: note = Description of Artificial Sequence: Synthetic peptide
YNTLPAR

SEQ ID NO: 30517 - protein, 7 aa, synthetic construct
  REGION 1..7: note = Description of Artificial Sequence: Synthetic peptide
YSGSAGQ

SEQ ID NO: 30518 - protein, 7 aa, synthetic construct
  REGION 1..7: note = Description of Artificial Sequence: Synthetic peptide
SFTADRS

SEQ ID NO: 30519 - protein, 7 aa, synthetic construct
  REGION 1..7: note = Description of Artificial Sequence: Synthetic peptide
APSHASL

SEQ ID NO: 30520 - protein, 7 aa, synthetic construct
  REGION 1..7: note = Description of Artificial Sequence: Synthetic peptide
AKTNLSS

SEQ ID NO: 30521 - protein, 7 aa, synthetic construct
  REGION 1..7: note = Description of Artificial Sequence: Synthetic peptide
SSHSDTR

SEQ ID NO: 30522 - protein, 7 aa, synthetic construct
  REGION 1..7: note = Description of Artificial Sequence: Synthetic peptide
TRAQHSG

SEQ ID NO: 30523 - protein, 7 aa, synthetic construct
  REGION 1..7: note = Description of Artificial Sequence: Synthetic peptide
GVPAGHT

SEQ ID NO: 30524 - protein, 7 aa, synthetic construct
  REGION 1..7: note = Description of Artificial Sequence: Synthetic peptide
DTSRAPG

SEQ ID NO: 30525 - protein, 7 aa, synthetic construct
  REGION 1..7: note = Description of Artificial Sequence: Synthetic peptide
HVKANGS

SEQ ID NO: 30526 - protein, 7 aa, synthetic construct
  REGION 1..7: note = Description of Artificial Sequence: Synthetic peptide
SRDSGGA

SEQ ID NO: 30527 - protein, 7 aa, synthetic construct
  REGION 1..7: note = Description of Artificial Sequence: Synthetic peptide
GVTSSGP

SEQ ID NO: 30528 - protein, 7 aa, synthetic construct
  REGION 1..7: note = Description of Artificial Sequence: Synthetic peptide
SSINTAA

SEQ ID NO: 30529 - protein, 7 aa, synthetic construct
  REGION 1..7: note = Description of Artificial Sequence: Synthetic peptide
SGMASVT

SEQ ID NO: 30530 - protein, 7 aa, synthetic construct
  REGION 1..7: note = Description of Artificial Sequence: Synthetic peptide
GGTPTHR

SEQ ID NO: 30531 - protein, 7 aa, synthetic construct
  REGION 1..7: note = Description of Artificial Sequence: Synthetic peptide
HREARLL

SEQ ID NO: 30532 - protein, 7 aa, synthetic construct
  REGION 1..7: note = Description of Artificial Sequence: Synthetic peptide
NSRSHHE

SEQ ID NO: 30533 - protein, 7 aa, synthetic construct
  REGION 1..7: note = Description of Artificial Sequence: Synthetic peptide
GPRNSLN

SEQ ID NO: 30534 - protein, 7 aa, synthetic construct
  REGION 1..7: note = Description of Artificial Sequence: Synthetic peptide
TRSQDYQ

SEQ ID NO: 30535 - protein, 7 aa, synthetic construct
  REGION 1..7: note = Description of Artificial Sequence: Synthetic peptide
RGLDSIN

SEQ ID NO: 30536 - protein, 7 aa, synthetic construct
  REGION 1..7: note = Description of Artificial Sequence: Synthetic peptide
SDHQSVR

SEQ ID NO: 30537 - protein, 7 aa, synthetic construct
  REGION 1..7: note = Description of Artificial Sequence: Synthetic peptide
PYAQGSF

SEQ ID NO: 30538 - protein, 7 aa, synthetic construct
  REGION 1..7: note = Description of Artificial Sequence: Synthetic peptide
PTSIGRD

SEQ ID NO: 30539 - protein, 7 aa, synthetic construct
  REGION 1..7: note = Description of Artificial Sequence: Synthetic peptide
SLSLVKG

SEQ ID NO: 30540 - protein, 7 aa, synthetic construct
  REGION 1..7: note = Description of Artificial Sequence: Synthetic peptide
LERNGLK

SEQ ID NO: 30541 - protein, 7 aa, synthetic construct
  REGION 1..7: note = Description of Artificial Sequence: Synthetic peptide
TAFSTNR

SEQ ID NO: 30542 - protein, 7 aa, synthetic construct
  REGION 1..7: note = Description of Artificial Sequence: Synthetic peptide
DHRNISS

SEQ ID NO: 30543 - protein, 7 aa, synthetic construct
  REGION 1..7: note = Description of Artificial Sequence: Synthetic peptide
VRQSQVM

SEQ ID NO: 30544 - protein, 7 aa, synthetic construct
  REGION 1..7: note = Description of Artificial Sequence: Synthetic peptide
RDRGAEH

SEQ ID NO: 30545 - protein, 7 aa, synthetic construct
  REGION 1..7: note = Description of Artificial Sequence: Synthetic peptide
SRGDGVT

SEQ ID NO: 30546 - protein, 7 aa, synthetic construct
  REGION 1..7: note = Description of Artificial Sequence: Synthetic peptide
DTITSRG

SEQ ID NO: 30547 - protein, 7 aa, synthetic construct
  REGION 1..7: note = Description of Artificial Sequence: Synthetic peptide
PNGHEVL

SEQ ID NO: 30548 - protein, 7 aa, synthetic construct
  REGION 1..7: note = Description of Artificial Sequence: Synthetic peptide
SGNSHNG

SEQ ID NO: 30549 - protein, 7 aa, synthetic construct
  REGION 1..7: note = Description of Artificial Sequence: Synthetic peptide
NTDTSAV

SEQ ID NO: 30550 - protein, 7 aa, synthetic construct
  REGION 1..7: note = Description of Artificial Sequence: Synthetic peptide
PRDRDYH

SEQ ID NO: 30551 - protein, 7 aa, synthetic construct
  REGION 1..7: note = Description of Artificial Sequence: Synthetic peptide
PANQLRS

SEQ ID NO: 30552 - protein, 7 aa, synthetic construct
  REGION 1..7: note = Description of Artificial Sequence: Synthetic peptide
NIHLAGT

SEQ ID NO: 30553 - protein, 7 aa, synthetic construct
  REGION 1..7: note = Description of Artificial Sequence: Synthetic peptide
MSGSGTE

SEQ ID NO: 30554 - protein, 7 aa, synthetic construct
  REGION 1..7: note = Description of Artificial Sequence: Synthetic peptide
LRGTVPK

SEQ ID NO: 30555 - protein, 7 aa, synthetic construct
  REGION 1..7: note = Description of Artificial Sequence: Synthetic peptide
TGSSSSQ

SEQ ID NO: 30556 - protein, 7 aa, synthetic construct
  REGION 1..7: note = Description of Artificial Sequence: Synthetic peptide
SARDRAS

SEQ ID NO: 30557 - protein, 7 aa, synthetic construct
  REGION 1..7: note = Description of Artificial Sequence: Synthetic peptide
SNSRMGT

SEQ ID NO: 30558 - protein, 7 aa, synthetic construct
  REGION 1..7: note = Description of Artificial Sequence: Synthetic peptide
YGSDKSI

SEQ ID NO: 30559 - protein, 7 aa, synthetic construct
  REGION 1..7: note = Description of Artificial Sequence: Synthetic peptide
GLSKTYH

SEQ ID NO: 30560 - protein, 7 aa, synthetic construct
  REGION 1..7: note = Description of Artificial Sequence: Synthetic peptide
VARRDAL

SEQ ID NO: 30561 - protein, 7 aa, synthetic construct
  REGION 1..7: note = Description of Artificial Sequence: Synthetic peptide
TGPHTSR

SEQ ID NO: 30562 - protein, 7 aa, synthetic construct
  REGION 1..7: note = Description of Artificial Sequence: Synthetic peptide
LMPSSSS

SEQ ID NO: 30563 - protein, 7 aa, synthetic construct
  REGION 1..7: note = Description of Artificial Sequence: Synthetic peptide
LPPASPR

SEQ ID NO: 30564 - protein, 7 aa, synthetic construct
  REGION 1..7: note = Description of Artificial Sequence: Synthetic peptide
MVSHTHG

SEQ ID NO: 30565 - protein, 7 aa, synthetic construct
  REGION 1..7: note = Description of Artificial Sequence: Synthetic peptide
SYGPTPQ

SEQ ID NO: 30566 - protein, 7 aa, synthetic construct
  REGION 1..7: note = Description of Artificial Sequence: Synthetic peptide
TGPGAHA

SEQ ID NO: 30567 - protein, 7 aa, synthetic construct
  REGION 1..7: note = Description of Artificial Sequence: Synthetic peptide
DSRQAMS

SEQ ID NO: 30568 - protein, 7 aa, synthetic construct
  REGION 1..7: note = Description of Artificial Sequence: Synthetic peptide
SSMSHQK

SEQ ID NO: 30569 - protein, 7 aa, synthetic construct
  REGION 1..7: note = Description of Artificial Sequence: Synthetic peptide
PSLRSMT

SEQ ID NO: 30570 - protein, 7 aa, synthetic construct
  REGION 1..7: note = Description of Artificial Sequence: Synthetic peptide
TKFKTTL

SEQ ID NO: 30571 - protein, 7 aa, synthetic construct
  REGION 1..7: note = Description of Artificial Sequence: Synthetic peptide
VSASNSL

SEQ ID NO: 30572 - protein, 7 aa, synthetic construct
  REGION 1..7: note = Description of Artificial Sequence: Synthetic peptide
ASTGPNA

SEQ ID NO: 30573 - protein, 7 aa, synthetic construct
  REGION 1..7: note = Description of Artificial Sequence: Synthetic peptide
GSRSSTT

SEQ ID NO: 30574 - protein, 7 aa, synthetic construct
  REGION 1..7: note = Description of Artificial Sequence: Synthetic peptide
SGGTPGR

SEQ ID NO: 30575 - protein, 7 aa, synthetic construct
  REGION 1..7: note = Description of Artificial Sequence: Synthetic peptide
VHQAGAN

SEQ ID NO: 30576 - protein, 7 aa, synthetic construct
  REGION 1..7: note = Description of Artificial Sequence: Synthetic peptide
PEISASR

SEQ ID NO: 30577 - protein, 7 aa, synthetic construct
  REGION 1..7: note = Description of Artificial Sequence: Synthetic peptide
HRHVKSE

SEQ ID NO: 30578 - protein, 7 aa, synthetic construct
  REGION 1..7: note = Description of Artificial Sequence: Synthetic peptide
LGAGQRE

SEQ ID NO: 30579 - protein, 7 aa, synthetic construct
  REGION 1..7: note = Description of Artificial Sequence: Synthetic peptide
HMAASTG

SEQ ID NO: 30580 - protein, 7 aa, synthetic construct
  REGION 1..7: note = Description of Artificial Sequence: Synthetic peptide
GKAGAGG

SEQ ID NO: 30581 - protein, 7 aa, synthetic construct
  REGION 1..7: note = Description of Artificial Sequence: Synthetic peptide
SSRVSHS

SEQ ID NO: 30582 - protein, 7 aa, synthetic construct
  REGION 1..7: note = Description of Artificial Sequence: Synthetic peptide
TGAGGYC

SEQ ID NO: 30583 - protein, 7 aa, synthetic construct
  REGION 1..7: note = Description of Artificial Sequence: Synthetic peptide
AVLNPRV

SEQ ID NO: 30584 - protein, 7 aa, synthetic construct
  REGION 1..7: note = Description of Artificial Sequence: Synthetic peptide
VASSAHV

SEQ ID NO: 30585 - protein, 7 aa, synthetic construct
  REGION 1..7: note = Description of Artificial Sequence: Synthetic peptide
SYKNTGV

SEQ ID NO: 30586 - protein, 7 aa, synthetic construct
  REGION 1..7: note = Description of Artificial Sequence: Synthetic peptide
GNSNTLA

SEQ ID NO: 30587 - protein, 7 aa, synthetic construct
  REGION 1..7: note = Description of Artificial Sequence: Synthetic peptide
TQGHKAL

SEQ ID NO: 30588 - protein, 7 aa, synthetic construct
  REGION 1..7: note = Description of Artificial Sequence: Synthetic peptide
TIGPPST

SEQ ID NO: 30589 - protein, 7 aa, synthetic construct
  REGION 1..7: note = Description of Artificial Sequence: Synthetic peptide
CYGDRHN

SEQ ID NO: 30590 - protein, 7 aa, synthetic construct
  REGION 1..7: note = Description of Artificial Sequence: Synthetic peptide
PASRIPS

SEQ ID NO: 30591 - protein, 7 aa, synthetic construct
  REGION 1..7: note = Description of Artificial Sequence: Synthetic peptide
SAHRSGV

SEQ ID NO: 30592 - protein, 7 aa, synthetic construct
  REGION 1..7: note = Description of Artificial Sequence: Synthetic peptide
QPNRADN

SEQ ID NO: 30593 - protein, 7 aa, synthetic construct
  REGION 1..7: note = Description of Artificial Sequence: Synthetic peptide
RPASTHT

SEQ ID NO: 30594 - protein, 7 aa, synthetic construct
  REGION 1..7: note = Description of Artificial Sequence: Synthetic peptide
RGTGIGS

SEQ ID NO: 30595 - protein, 7 aa, synthetic construct
  REGION 1..7: note = Description of Artificial Sequence: Synthetic peptide
QTSSREM

SEQ ID NO: 30596 - protein, 7 aa, synthetic construct
  REGION 1..7: note = Description of Artificial Sequence: Synthetic peptide
GKAGEGG

SEQ ID NO: 30597 - protein, 7 aa, synthetic construct
  REGION 1..7: note = Description of Artificial Sequence: Synthetic peptide
SSPVSAV

SEQ ID NO: 30598 - protein, 7 aa, synthetic construct
  REGION 1..7: note = Description of Artificial Sequence: Synthetic peptide
PTTTAKP

SEQ ID NO: 30599 - protein, 7 aa, synthetic construct
  REGION 1..7: note = Description of Artificial Sequence: Synthetic peptide
SSTNRPT

SEQ ID NO: 30600 - protein, 7 aa, synthetic construct
  REGION 1..7: note = Description of Artificial Sequence: Synthetic peptide
QIGSLSG

SEQ ID NO: 30601 - protein, 7 aa, synthetic construct
  REGION 1..7: note = Description of Artificial Sequence: Synthetic peptide
GMHVSNP

SEQ ID NO: 30602 - protein, 7 aa, synthetic construct
  REGION 1..7: note = Description of Artificial Sequence: Synthetic peptide
NFGPQAD

SEQ ID NO: 30603 - protein, 7 aa, synthetic construct
  REGION 1..7: note = Description of Artificial Sequence: Synthetic peptide
NRTSPVS

SEQ ID NO: 30604 - protein, 7 aa, synthetic construct
  REGION 1..7: note = Description of Artificial Sequence: Synthetic peptide
HTHVSNR

SEQ ID NO: 30605 - protein, 7 aa, synthetic construct
  REGION 1..7: note = Description of Artificial Sequence: Synthetic peptide
SPAYDTR

SEQ ID NO: 30606 - protein, 7 aa, synthetic construct
  REGION 1..7: note = Description of Artificial Sequence: Synthetic peptide
KLSNDNL

SEQ ID NO: 30607 - protein, 7 aa, synthetic construct
  REGION 1..7: note = Description of Artificial Sequence: Synthetic peptide
GELPDRR

SEQ ID NO: 30608 - protein, 7 aa, synthetic construct
  REGION 1..7: note = Description of Artificial Sequence: Synthetic peptide
YSRPTTT

SEQ ID NO: 30609 - protein, 7 aa, synthetic construct
  REGION 1..7: note = Description of Artificial Sequence: Synthetic peptide
SVVAHGP

SEQ ID NO: 30610 - protein, 7 aa, synthetic construct
  REGION 1..7: note = Description of Artificial Sequence: Synthetic peptide
ASSLLNV

SEQ ID NO: 30611 - protein, 7 aa, synthetic construct
  REGION 1..7: note = Description of Artificial Sequence: Synthetic peptide
TQGARNL

SEQ ID NO: 30612 - protein, 7 aa, synthetic construct
  REGION 1..7: note = Description of Artificial Sequence: Synthetic peptide
VYSSPSA

SEQ ID NO: 30613 - protein, 7 aa, synthetic construct
  REGION 1..7: note = Description of Artificial Sequence: Synthetic peptide
GVSNLAS

SEQ ID NO: 30614 - protein, 7 aa, synthetic construct
  REGION 1..7: note = Description of Artificial Sequence: Synthetic peptide
MRPNSGM

SEQ ID NO: 30615 - protein, 7 aa, synthetic construct
  REGION 1..7: note = Description of Artificial Sequence: Synthetic peptide
CAGTSRV

SEQ ID NO: 30616 - protein, 7 aa, synthetic construct
  REGION 1..7: note = Description of Artificial Sequence: Synthetic peptide
CRAGTIM

SEQ ID NO: 30617 - protein, 7 aa, synthetic construct
  REGION 1..7: note = Description of Artificial Sequence: Synthetic peptide
SRAQSIP

SEQ ID NO: 30618 - protein, 7 aa, synthetic construct
  REGION 1..7: note = Description of Artificial Sequence: Synthetic peptide
CHLHATT

SEQ ID NO: 30619 - protein, 7 aa, synthetic construct
  REGION 1..7: note = Description of Artificial Sequence: Synthetic peptide
ISPVPLT

SEQ ID NO: 30620 - protein, 7 aa, synthetic construct
  REGION 1..7: note = Description of Artificial Sequence: Synthetic peptide
KSNSSLG

SEQ ID NO: 30621 - protein, 7 aa, synthetic construct
  REGION 1..7: note = Description of Artificial Sequence: Synthetic peptide
SPKANRV

SEQ ID NO: 30622 - protein, 7 aa, synthetic construct
  REGION 1..7: note = Description of Artificial Sequence: Synthetic peptide
TQSSRAG

SEQ ID NO: 30623 - protein, 7 aa, synthetic construct
  REGION 1..7: note = Description of Artificial Sequence: Synthetic peptide
KHQEFVG

SEQ ID NO: 30624 - protein, 7 aa, synthetic construct
  REGION 1..7: note = Description of Artificial Sequence: Synthetic peptide
SSISSAV

SEQ ID NO: 30625 - protein, 7 aa, synthetic construct
  REGION 1..7: note = Description of Artificial Sequence: Synthetic peptide
AVASRTN

SEQ ID NO: 30626 - protein, 7 aa, synthetic construct
  REGION 1..7: note = Description of Artificial Sequence: Synthetic peptide
AHSVTPG

SEQ ID NO: 30627 - protein, 7 aa, synthetic construct
  REGION 1..7: note = Description of Artificial Sequence: Synthetic peptide
PISTHLK

SEQ ID NO: 30628 - protein, 7 aa, synthetic construct
  REGION 1..7: note = Description of Artificial Sequence: Synthetic peptide
QGLSKSG

SEQ ID NO: 30629 - protein, 7 aa, synthetic construct
  REGION 1..7: note = Description of Artificial Sequence: Synthetic peptide
PNQAHRS

SEQ ID NO: 30630 - protein, 7 aa, synthetic construct
  REGION 1..7: note = Description of Artificial Sequence: Synthetic peptide
ARGKPAL

SEQ ID NO: 30631 - protein, 7 aa, synthetic construct
  REGION 1..7: note = Description of Artificial Sequence: Synthetic peptide
PRANAPR

SEQ ID NO: 30632 - protein, 7 aa, synthetic construct
  REGION 1..7: note = Description of Artificial Sequence: Synthetic peptide
CPPITKG

SEQ ID NO: 30633 - protein, 7 aa, synthetic construct
  REGION 1..7: note = Description of Artificial Sequence: Synthetic peptide
ATTKEGI

SEQ ID NO: 30634 - protein, 7 aa, synthetic construct
  REGION 1..7: note = Description of Artificial Sequence: Synthetic peptide
SSDNRGL

SEQ ID NO: 30635 - protein, 7 aa, synthetic construct
  REGION 1..7: note = Description of Artificial Sequence: Synthetic peptide
AGDGVVR

SEQ ID NO: 30636 - protein, 7 aa, synthetic construct
  REGION 1..7: note = Description of Artificial Sequence: Synthetic peptide
NAHTRPA

SEQ ID NO: 30637 - protein, 7 aa, synthetic construct
  REGION 1..7: note = Description of Artificial Sequence: Synthetic peptide
AHTSAGG

SEQ ID NO: 30638 - protein, 7 aa, synthetic construct
  REGION 1..7: note = Description of Artificial Sequence: Synthetic peptide
HTSTNTI

SEQ ID NO: 30639 - protein, 7 aa, synthetic construct
  REGION 1..7: note = Description of Artificial Sequence: Synthetic peptide
LNRPSLG

SEQ ID NO: 30640 - protein, 7 aa, synthetic construct
  REGION 1..7: note = Description of Artificial Sequence: Synthetic peptide
TSGRTTY

SEQ ID NO: 30641 - protein, 7 aa, synthetic construct
  REGION 1..7: note = Description of Artificial Sequence: Synthetic peptide
RKTSLND

SEQ ID NO: 30642 - protein, 7 aa, synthetic construct
  REGION 1..7: note = Description of Artificial Sequence: Synthetic peptide
TNSHVPR

SEQ ID NO: 30643 - protein, 7 aa, synthetic construct
  REGION 1..7: note = Description of Artificial Sequence: Synthetic peptide
ASSLPKR

SEQ ID NO: 30644 - protein, 7 aa, synthetic construct
  REGION 1..7: note = Description of Artificial Sequence: Synthetic peptide
TETRSAN

SEQ ID NO: 30645 - protein, 7 aa, synthetic construct
  REGION 1..7: note = Description of Artificial Sequence: Synthetic peptide
SRAQSQI

SEQ ID NO: 30646 - protein, 7 aa, synthetic construct
  REGION 1..7: note = Description of Artificial Sequence: Synthetic peptide
VRHTTDS

SEQ ID NO: 30647 - protein, 7 aa, synthetic construct
  REGION 1..7: note = Description of Artificial Sequence: Synthetic peptide
PRMNGIK

SEQ ID NO: 30648 - protein, 7 aa, synthetic construct
  REGION 1..7: note = Description of Artificial Sequence: Synthetic peptide
AIPAVSM

SEQ ID NO: 30649 - protein, 7 aa, synthetic construct
  REGION 1..7: note = Description of Artificial Sequence: Synthetic peptide
GSTGSSI

SEQ ID NO: 30650 - protein, 7 aa, synthetic construct
  REGION 1..7: note = Description of Artificial Sequence: Synthetic peptide
ENNALSR

SEQ ID NO: 30651 - protein, 7 aa, synthetic construct
  REGION 1..7: note = Description of Artificial Sequence: Synthetic peptide
YPNSVPS

SEQ ID NO: 30652 - protein, 7 aa, synthetic construct
  REGION 1..7: note = Description of Artificial Sequence: Synthetic peptide
VNGKICS

SEQ ID NO: 30653 - protein, 7 aa, synthetic construct
  REGION 1..7: note = Description of Artificial Sequence: Synthetic peptide
HPSSRNS

SEQ ID NO: 30654 - protein, 7 aa, synthetic construct
  REGION 1..7: note = Description of Artificial Sequence: Synthetic peptide
SRVTVSQ

SEQ ID NO: 30655 - protein, 7 aa, synthetic construct
  REGION 1..7: note = Description of Artificial Sequence: Synthetic peptide
MGAGELT

SEQ ID NO: 30656 - protein, 7 aa, synthetic construct
  REGION 1..7: note = Description of Artificial Sequence: Synthetic peptide
GLADPRT

SEQ ID NO: 30657 - protein, 7 aa, synthetic construct
  REGION 1..7: note = Description of Artificial Sequence: Synthetic peptide
TLDNHRS

SEQ ID NO: 30658 - protein, 7 aa, synthetic construct
  REGION 1..7: note = Description of Artificial Sequence: Synthetic peptide
LDGRGFS

SEQ ID NO: 30659 - protein, 7 aa, synthetic construct
  REGION 1..7: note = Description of Artificial Sequence: Synthetic peptide
AGTLGQI

SEQ ID NO: 30660 - protein, 7 aa, synthetic construct
  REGION 1..7: note = Description of Artificial Sequence: Synthetic peptide
GVCKPYA

SEQ ID NO: 30661 - protein, 7 aa, synthetic construct
  REGION 1..7: note = Description of Artificial Sequence: Synthetic peptide
MRANHTS

SEQ ID NO: 30662 - protein, 7 aa, synthetic construct
  REGION 1..7: note = Description of Artificial Sequence: Synthetic peptide
GLKGSFP

SEQ ID NO: 30663 - protein, 7 aa, synthetic construct
  REGION 1..7: note = Description of Artificial Sequence: Synthetic peptide
VRHTDVS

SEQ ID NO: 30664 - protein, 7 aa, synthetic construct
  REGION 1..7: note = Description of Artificial Sequence: Synthetic peptide
RVQDTPR

SEQ ID NO: 30665 - protein, 7 aa, synthetic construct
  REGION 1..7: note = Description of Artificial Sequence: Synthetic peptide
GMQKMSS

SEQ ID NO: 30666 - protein, 7 aa, synthetic construct
  REGION 1..7: note = Description of Artificial Sequence: Synthetic peptide
HSRAQAG

SEQ ID NO: 30667 - protein, 7 aa, synthetic construct
  REGION 1..7: note = Description of Artificial Sequence: Synthetic peptide
GNGISAR

SEQ ID NO: 30668 - protein, 7 aa, synthetic construct
  REGION 1..7: note = Description of Artificial Sequence: Synthetic peptide
IPASHNP

SEQ ID NO: 30669 - protein, 7 aa, synthetic construct
  REGION 1..7: note = Description of Artificial Sequence: Synthetic peptide
GPTDHKL

SEQ ID NO: 30670 - protein, 7 aa, synthetic construct
  REGION 1..7: note = Description of Artificial Sequence: Synthetic peptide
SMTSRNS

SEQ ID NO: 30671 - protein, 7 aa, synthetic construct
  REGION 1..7: note = Description of Artificial Sequence: Synthetic peptide
DVNTRSR

SEQ ID NO: 30672 - protein, 7 aa, synthetic construct
  REGION 1..7: note = Description of Artificial Sequence: Synthetic peptide
HHDASPN

SEQ ID NO: 30673 - protein, 7 aa, synthetic construct
  REGION 1..7: note = Description of Artificial Sequence: Synthetic peptide
YAQVGSS

SEQ ID NO: 30674 - protein, 7 aa, synthetic construct
  REGION 1..7: note = Description of Artificial Sequence: Synthetic peptide
VGSDSST

SEQ ID NO: 30675 - protein, 7 aa, synthetic construct
  REGION 1..7: note = Description of Artificial Sequence: Synthetic peptide
RATSREA

SEQ ID NO: 30676 - protein, 7 aa, synthetic construct
  REGION 1..7: note = Description of Artificial Sequence: Synthetic peptide
LAPTNVK

SEQ ID NO: 30677 - protein, 7 aa, synthetic construct
  REGION 1..7: note = Description of Artificial Sequence: Synthetic peptide
YNHGSVD

SEQ ID NO: 30678 - protein, 7 aa, synthetic construct
  REGION 1..7: note = Description of Artificial Sequence: Synthetic peptide
CSTTAIR

SEQ ID NO: 30679 - protein, 7 aa, synthetic construct
  REGION 1..7: note = Description of Artificial Sequence: Synthetic peptide
ALPGSTS

SEQ ID NO: 30680 - protein, 7 aa, synthetic construct
  REGION 1..7: note = Description of Artificial Sequence: Synthetic peptide
TQPSHDS

SEQ ID NO: 30681 - protein, 7 aa, synthetic construct
  REGION 1..7: note = Description of Artificial Sequence: Synthetic peptide
SSPDRPV

SEQ ID NO: 30682 - protein, 7 aa, synthetic construct
  REGION 1..7: note = Description of Artificial Sequence: Synthetic peptide
AHGTTGT

SEQ ID NO: 30683 - protein, 7 aa, synthetic construct
  REGION 1..7: note = Description of Artificial Sequence: Synthetic peptide
SSVQHTG

SEQ ID NO: 30684 - protein, 7 aa, synthetic construct
  REGION 1..7: note = Description of Artificial Sequence: Synthetic peptide
STSSRPS

SEQ ID NO: 30685 - protein, 7 aa, synthetic construct
  REGION 1..7: note = Description of Artificial Sequence: Synthetic peptide
GHVNAHV

SEQ ID NO: 30686 - protein, 7 aa, synthetic construct
  REGION 1..7: note = Description of Artificial Sequence: Synthetic peptide
PNQRVIG

SEQ ID NO: 30687 - protein, 7 aa, synthetic construct
  REGION 1..7: note = Description of Artificial Sequence: Synthetic peptide
SLGRSQL

SEQ ID NO: 30688 - protein, 7 aa, synthetic construct
  REGION 1..7: note = Description of Artificial Sequence: Synthetic peptide
SNANNVC

SEQ ID NO: 30689 - protein, 7 aa, synthetic construct
  REGION 1..7: note = Description of Artificial Sequence: Synthetic peptide
CTSKSSS

SEQ ID NO: 30690 - protein, 7 aa, synthetic construct
  REGION 1..7: note = Description of Artificial Sequence: Synthetic peptide
RTLSASS

SEQ ID NO: 30691 - protein, 7 aa, synthetic construct
  REGION 1..7: note = Description of Artificial Sequence: Synthetic peptide
LRAEHVR

SEQ ID NO: 30692 - protein, 7 aa, synthetic construct
  REGION 1..7: note = Description of Artificial Sequence: Synthetic peptide
SNRQHGL

SEQ ID NO: 30693 - protein, 7 aa, synthetic construct
  REGION 1..7: note = Description of Artificial Sequence: Synthetic peptide
SIQSAAA

SEQ ID NO: 30694 - protein, 7 aa, synthetic construct
  REGION 1..7: note = Description of Artificial Sequence: Synthetic peptide
HTSNTRV

SEQ ID NO: 30695 - protein, 7 aa, synthetic construct
  REGION 1..7: note = Description of Artificial Sequence: Synthetic peptide
SRVEINR

SEQ ID NO: 30696 - protein, 7 aa, synthetic construct
  REGION 1..7: note = Description of Artificial Sequence: Synthetic peptide
ATSTNGI

SEQ ID NO: 30697 - protein, 7 aa, synthetic construct
  REGION 1..7: note = Description of Artificial Sequence: Synthetic peptide
PLLSSRV

SEQ ID NO: 30698 - protein, 7 aa, synthetic construct
  REGION 1..7: note = Description of Artificial Sequence: Synthetic peptide
GSLTSQK

SEQ ID NO: 30699 - protein, 7 aa, synthetic construct
  REGION 1..7: note = Description of Artificial Sequence: Synthetic peptide
LVNSAVQ

SEQ ID NO: 30700 - protein, 7 aa, synthetic construct
  REGION 1..7: note = Description of Artificial Sequence: Synthetic peptide
SATNGSL

SEQ ID NO: 30701 - protein, 7 aa, synthetic construct
  REGION 1..7: note = Description of Artificial Sequence: Synthetic peptide
HANNGTS

SEQ ID NO: 30702 - protein, 7 aa, synthetic construct
  REGION 1..7: note = Description of Artificial Sequence: Synthetic peptide
QNLNSFS

SEQ ID NO: 30703 - protein, 7 aa, synthetic construct
  REGION 1..7: note = Description of Artificial Sequence: Synthetic peptide
TNLPRSH

SEQ ID NO: 30704 - protein, 7 aa, synthetic construct
  REGION 1..7: note = Description of Artificial Sequence: Synthetic peptide
GVGHDDR

SEQ ID NO: 30705 - protein, 7 aa, synthetic construct
  REGION 1..7: note = Description of Artificial Sequence: Synthetic peptide
SVHQKRA

SEQ ID NO: 30706 - protein, 7 aa, synthetic construct
  REGION 1..7: note = Description of Artificial Sequence: Synthetic peptide
TRLANMH

SEQ ID NO: 30707 - protein, 7 aa, synthetic construct
  REGION 1..7: note = Description of Artificial Sequence: Synthetic peptide
LAFGSST

SEQ ID NO: 30708 - protein, 7 aa, synthetic construct
  REGION 1..7: note = Description of Artificial Sequence: Synthetic peptide
PSLERGS

SEQ ID NO: 30709 - protein, 7 aa, synthetic construct
  REGION 1..7: note = Description of Artificial Sequence: Synthetic peptide
LNSGSFS

SEQ ID NO: 30710 - protein, 7 aa, synthetic construct
  REGION 1..7: note = Description of Artificial Sequence: Synthetic peptide
LIRSGER

SEQ ID NO: 30711 - protein, 7 aa, synthetic construct
  REGION 1..7: note = Description of Artificial Sequence: Synthetic peptide
SLTSTGK

SEQ ID NO: 30712 - protein, 7 aa, synthetic construct
  REGION 1..7: note = Description of Artificial Sequence: Synthetic peptide
GRLNTNG

SEQ ID NO: 30713 - protein, 7 aa, synthetic construct
  REGION 1..7: note = Description of Artificial Sequence: Synthetic peptide
RSMSSAV

SEQ ID NO: 30714 - protein, 7 aa, synthetic construct
  REGION 1..7: note = Description of Artificial Sequence: Synthetic peptide
SRPGISQ

SEQ ID NO: 30715 - protein, 7 aa, synthetic construct
  REGION 1..7: note = Description of Artificial Sequence: Synthetic peptide
PTTLKHD

SEQ ID NO: 30716 - protein, 7 aa, synthetic construct
  REGION 1..7: note = Description of Artificial Sequence: Synthetic peptide
RSNMATA

SEQ ID NO: 30717 - protein, 7 aa, synthetic construct
  REGION 1..7: note = Description of Artificial Sequence: Synthetic peptide
GRAQLSQ

SEQ ID NO: 30718 - protein, 7 aa, synthetic construct
  REGION 1..7: note = Description of Artificial Sequence: Synthetic peptide
ALHASYN

SEQ ID NO: 30719 - protein, 7 aa, synthetic construct
  REGION 1..7: note = Description of Artificial Sequence: Synthetic peptide
NSNGLNN

SEQ ID NO: 30720 - protein, 7 aa, synthetic construct
  REGION 1..7: note = Description of Artificial Sequence: Synthetic peptide
LGTRPMK

SEQ ID NO: 30721 - protein, 7 aa, synthetic construct
  REGION 1..7: note = Description of Artificial Sequence: Synthetic peptide
ERTPPRI

SEQ ID NO: 30722 - protein, 7 aa, synthetic construct
  REGION 1..7: note = Description of Artificial Sequence: Synthetic peptide
NSHQKPS

SEQ ID NO: 30723 - protein, 7 aa, synthetic construct
  REGION 1..7: note = Description of Artificial Sequence: Synthetic peptide
QSGSKPG

SEQ ID NO: 30724 - protein, 7 aa, synthetic construct
  REGION 1..7: note = Description of Artificial Sequence: Synthetic peptide
GTARTTG

SEQ ID NO: 30725 - protein, 7 aa, synthetic construct
  REGION 1..7: note = Description of Artificial Sequence: Synthetic peptide
FLSSRAS

SEQ ID NO: 30726 - protein, 7 aa, synthetic construct
  REGION 1..7: note = Description of Artificial Sequence: Synthetic peptide
NNTQKNS

SEQ ID NO: 30727 - protein, 7 aa, synthetic construct
  REGION 1..7: note = Description of Artificial Sequence: Synthetic peptide
NDSGQNQ

SEQ ID NO: 30728 - protein, 7 aa, synthetic construct
  REGION 1..7: note = Description of Artificial Sequence: Synthetic peptide
DRSSRGV

SEQ ID NO: 30729 - protein, 7 aa, synthetic construct
  REGION 1..7: note = Description of Artificial Sequence: Synthetic peptide
NIPSPRL

SEQ ID NO: 30730 - protein, 7 aa, synthetic construct
  REGION 1..7: note = Description of Artificial Sequence: Synthetic peptide
PGLSNSR

SEQ ID NO: 30731 - protein, 7 aa, synthetic construct
  REGION 1..7: note = Description of Artificial Sequence: Synthetic peptide
MVSGKSY

SEQ ID NO: 30732 - protein, 7 aa, synthetic construct
  REGION 1..7: note = Description of Artificial Sequence: Synthetic peptide
NSGRNSV

SEQ ID NO: 30733 - protein, 7 aa, synthetic construct
  REGION 1..7: note = Description of Artificial Sequence: Synthetic peptide
WMSGKNS

SEQ ID NO: 30734 - protein, 7 aa, synthetic construct
  REGION 1..7: note = Description of Artificial Sequence: Synthetic peptide
IRSTKAQ

SEQ ID NO: 30735 - protein, 7 aa, synthetic construct
  REGION 1..7: note = Description of Artificial Sequence: Synthetic peptide
EVFSSQK

SEQ ID NO: 30736 - protein, 7 aa, synthetic construct
  REGION 1..7: note = Description of Artificial Sequence: Synthetic peptide
SFTKGAG

SEQ ID NO: 30737 - protein, 7 aa, synthetic construct
  REGION 1..7: note = Description of Artificial Sequence: Synthetic peptide
TGMRPPG

SEQ ID NO: 30738 - protein, 7 aa, synthetic construct
  REGION 1..7: note = Description of Artificial Sequence: Synthetic peptide
NNSKSQI

SEQ ID NO: 30739 - protein, 7 aa, synthetic construct
  REGION 1..7: note = Description of Artificial Sequence: Synthetic peptide
PKLSHTG

SEQ ID NO: 30740 - protein, 7 aa, synthetic construct
  REGION 1..7: note = Description of Artificial Sequence: Synthetic peptide
QGHTRFT

SEQ ID NO: 30741 - protein, 7 aa, synthetic construct
  REGION 1..7: note = Description of Artificial Sequence: Synthetic peptide
QPSQGHS

SEQ ID NO: 30742 - protein, 7 aa, synthetic construct
  REGION 1..7: note = Description of Artificial Sequence: Synthetic peptide
DRIRTGH

SEQ ID NO: 30743 - protein, 7 aa, synthetic construct
  REGION 1..7: note = Description of Artificial Sequence: Synthetic peptide
AYSNIQN

SEQ ID NO: 30744 - protein, 7 aa, synthetic construct
  REGION 1..7: note = Description of Artificial Sequence: Synthetic peptide
IGLNRTG

SEQ ID NO: 30745 - protein, 7 aa, synthetic construct
  REGION 1..7: note = Description of Artificial Sequence: Synthetic peptide
VSGRPTG

SEQ ID NO: 30746 - protein, 7 aa, synthetic construct
  REGION 1..7: note = Description of Artificial Sequence: Synthetic peptide
YTITPQK

SEQ ID NO: 30747 - protein, 7 aa, synthetic construct
  REGION 1..7: note = Description of Artificial Sequence: Synthetic peptide
ETTTPRK

SEQ ID NO: 30748 - protein, 7 aa, synthetic construct
  REGION 1..7: note = Description of Artificial Sequence: Synthetic peptide
SQSSRSG

SEQ ID NO: 30749 - protein, 7 aa, synthetic construct
  REGION 1..7: note = Description of Artificial Sequence: Synthetic peptide
YGLHNAR

SEQ ID NO: 30750 - protein, 7 aa, synthetic construct
  REGION 1..7: note = Description of Artificial Sequence: Synthetic peptide
KNAPQQA

SEQ ID NO: 30751 - protein, 7 aa, synthetic construct
  REGION 1..7: note = Description of Artificial Sequence: Synthetic peptide
NGSGQNK

SEQ ID NO: 30752 - protein, 7 aa, synthetic construct
  REGION 1..7: note = Description of Artificial Sequence: Synthetic peptide
STDRSFN

SEQ ID NO: 30753 - protein, 7 aa, synthetic construct
  REGION 1..7: note = Description of Artificial Sequence: Synthetic peptide
FSASGAR

SEQ ID NO: 30754 - protein, 7 aa, synthetic construct
  REGION 1..7: note = Description of Artificial Sequence: Synthetic peptide
LYSGSQE

SEQ ID NO: 30755 - protein, 7 aa, synthetic construct
  REGION 1..7: note = Description of Artificial Sequence: Synthetic peptide
NSHTPVR

SEQ ID NO: 30756 - protein, 7 aa, synthetic construct
  REGION 1..7: note = Description of Artificial Sequence: Synthetic peptide
KRDAHTA

SEQ ID NO: 30757 - protein, 7 aa, synthetic construct
  REGION 1..7: note = Description of Artificial Sequence: Synthetic peptide
HGSKPYI

SEQ ID NO: 30758 - protein, 7 aa, synthetic construct
  REGION 1..7: note = Description of Artificial Sequence: Synthetic peptide
NPGKGSS

SEQ ID NO: 30759 - protein, 7 aa, synthetic construct
  REGION 1..7: note = Description of Artificial Sequence: Synthetic peptide
SFSKGSS

SEQ ID NO: 30760 - protein, 7 aa, synthetic construct
  REGION 1..7: note = Description of Artificial Sequence: Synthetic peptide
NSGTHFK

SEQ ID NO: 30761 - protein, 7 aa, synthetic construct
  REGION 1..7: note = Description of Artificial Sequence: Synthetic peptide
SSMSHQK

SEQ ID NO: 30762 - protein, 7 aa, synthetic construct
  REGION 1..7: note = Description of Artificial Sequence: Synthetic peptide
SIGKGYN

SEQ ID NO: 30763 - protein, 7 aa, synthetic construct
  REGION 1..7: note = Description of Artificial Sequence: Synthetic peptide
QSSIHTK

SEQ ID NO: 30764 - protein, 7 aa, synthetic construct
  REGION 1..7: note = Description of Artificial Sequence: Synthetic peptide
SFSGANK

SEQ ID NO: 30765 - protein, 7 aa, synthetic construct
  REGION 1..7: note = Description of Artificial Sequence: Synthetic peptide
GQTLPIC

SEQ ID NO: 30766 - protein, 7 aa, synthetic construct
  REGION 1..7: note = Description of Artificial Sequence: Synthetic peptide
ALLNINT

SEQ ID NO: 30767 - protein, 7 aa, synthetic construct
  REGION 1..7: note = Description of Artificial Sequence: Synthetic peptide
MLQRAPG

SEQ ID NO: 30768 - protein, 7 aa, synthetic construct
  REGION 1..7: note = Description of Artificial Sequence: Synthetic peptide
GTGHQRS

SEQ ID NO: 30769 - protein, 7 aa, synthetic construct
  REGION 1..7: note = Description of Artificial Sequence: Synthetic peptide
SLTPMGR

SEQ ID NO: 30770 - protein, 7 aa, synthetic construct
  REGION 1..7: note = Description of Artificial Sequence: Synthetic peptide
LVASGQK

SEQ ID NO: 30771 - protein, 7 aa, synthetic construct
  REGION 1..7: note = Description of Artificial Sequence: Synthetic peptide
PRTRENQ

SEQ ID NO: 30772 - protein, 7 aa, synthetic construct
  REGION 1..7: note = Description of Artificial Sequence: Synthetic peptide
NISSKVA

SEQ ID NO: 30773 - protein, 7 aa, synthetic construct
  REGION 1..7: note = Description of Artificial Sequence: Synthetic peptide
LQRAPQT

SEQ ID NO: 30774 - protein, 7 aa, synthetic construct
  REGION 1..7: note = Description of Artificial Sequence: Synthetic peptide
SISKTQA

SEQ ID NO: 30775 - protein, 7 aa, synthetic construct
  REGION 1..7: note = Description of Artificial Sequence: Synthetic peptide
VTGQNQT

SEQ ID NO: 30776 - protein, 7 aa, synthetic construct
  REGION 1..7: note = Description of Artificial Sequence: Synthetic peptide
FLTGRQS

SEQ ID NO: 30777 - protein, 7 aa, synthetic construct
  REGION 1..7: note = Description of Artificial Sequence: Synthetic peptide
TMRATPP

SEQ ID NO: 30778 - protein, 7 aa, synthetic construct
  REGION 1..7: note = Description of Artificial Sequence: Synthetic peptide
NNLPRNL

SEQ ID NO: 30779 - protein, 7 aa, synthetic construct
  REGION 1..7: note = Description of Artificial Sequence: Synthetic peptide
TSERPTC

SEQ ID NO: 30780 - protein, 7 aa, synthetic construct
  REGION 1..7: note = Description of Artificial Sequence: Synthetic peptide
LPTGKML

SEQ ID NO: 30781 - protein, 7 aa, synthetic construct
  REGION 1..7: note = Description of Artificial Sequence: Synthetic peptide
YKPGLQS

SEQ ID NO: 30782 - protein, 7 aa, synthetic construct
  REGION 1..7: note = Description of Artificial Sequence: Synthetic peptide
GRLEAQK

SEQ ID NO: 30783 - protein, 7 aa, synthetic construct
  REGION 1..7: note = Description of Artificial Sequence: Synthetic peptide
VHVTSQT

SEQ ID NO: 30784 - protein, 7 aa, synthetic construct
  REGION 1..7: note = Description of Artificial Sequence: Synthetic peptide
RSPSTNP

SEQ ID NO: 30785 - protein, 7 aa, synthetic construct
  REGION 1..7: note = Description of Artificial Sequence: Synthetic peptide
FMGRPNV

SEQ ID NO: 30786 - protein, 7 aa, synthetic construct
  REGION 1..7: note = Description of Artificial Sequence: Synthetic peptide
QGPKNAD

SEQ ID NO: 30787 - protein, 7 aa, synthetic construct
  REGION 1..7: note = Description of Artificial Sequence: Synthetic peptide
SPVKGSV

SEQ ID NO: 30788 - protein, 7 aa, synthetic construct
  REGION 1..7: note = Description of Artificial Sequence: Synthetic peptide
HPSNKPL

SEQ ID NO: 30789 - protein, 7 aa, synthetic construct
  REGION 1..7: note = Description of Artificial Sequence: Synthetic peptide
EPVPKTR

SEQ ID NO: 30790 - protein, 7 aa, synthetic construct
  REGION 1..7: note = Description of Artificial Sequence: Synthetic peptide
HNSKSQI

SEQ ID NO: 30791 - protein, 7 aa, synthetic construct
  REGION 1..7: note = Description of Artificial Sequence: Synthetic peptide
FSSKTSP

SEQ ID NO: 30792 - protein, 7 aa, synthetic construct
  REGION 1..7: note = Description of Artificial Sequence: Synthetic peptide
PNRVPNH

SEQ ID NO: 30793 - protein, 7 aa, synthetic construct
  REGION 1..7: note = Description of Artificial Sequence: Synthetic peptide
YSDNKTT

SEQ ID NO: 30794 - protein, 7 aa, synthetic construct
  REGION 1..7: note = Description of Artificial Sequence: Synthetic peptide
SPTRPMN

SEQ ID NO: 30795 - protein, 7 aa, synthetic construct
  REGION 1..7: note = Description of Artificial Sequence: Synthetic peptide
FSGKPSR

SEQ ID NO: 30796 - protein, 7 aa, synthetic construct
  REGION 1..7: note = Description of Artificial Sequence: Synthetic peptide
PSAGREK

SEQ ID NO: 30797 - protein, 7 aa, synthetic construct
  REGION 1..7: note = Description of Artificial Sequence: Synthetic peptide
PGREKTV

SEQ ID NO: 30798 - protein, 7 aa, synthetic construct
  REGION 1..7: note = Description of Artificial Sequence: Synthetic peptide
LQQHNTK

SEQ ID NO: 30799 - protein, 7 aa, synthetic construct
  REGION 1..7: note = Description of Artificial Sequence: Synthetic peptide
MTQHKQA

SEQ ID NO: 30800 - protein, 7 aa, synthetic construct
  REGION 1..7: note = Description of Artificial Sequence: Synthetic peptide
YSMRPTE

SEQ ID NO: 30801 - protein, 7 aa, synthetic construct
  REGION 1..7: note = Description of Artificial Sequence: Synthetic peptide
KGFKTES

SEQ ID NO: 30802 - protein, 7 aa, synthetic construct
  REGION 1..7: note = Description of Artificial Sequence: Synthetic peptide
NRESPQR

SEQ ID NO: 30803 - protein, 7 aa, synthetic construct
  REGION 1..7: note = Description of Artificial Sequence: Synthetic peptide
NLGNSLK

SEQ ID NO: 30804 - protein, 7 aa, synthetic construct
  REGION 1..7: note = Description of Artificial Sequence: Synthetic peptide
QNLPKAS

SEQ ID NO: 30805 - protein, 7 aa, synthetic construct
  REGION 1..7: note = Description of Artificial Sequence: Synthetic peptide
TQNTKSI

SEQ ID NO: 30806 - protein, 7 aa, synthetic construct
  REGION 1..7: note = Description of Artificial Sequence: Synthetic peptide
LGPGKNT

SEQ ID NO: 30807 - protein, 7 aa, synthetic construct
  REGION 1..7: note = Description of Artificial Sequence: Synthetic peptide
QVSAKSA

SEQ ID NO: 30808 - protein, 7 aa, synthetic construct
  REGION 1..7: note = Description of Artificial Sequence: Synthetic peptide
LNGTPQS

SEQ ID NO: 30809 - protein, 7 aa, synthetic construct
  REGION 1..7: note = Description of Artificial Sequence: Synthetic peptide
LGTSPMK

SEQ ID NO: 30810 - protein, 7 aa, synthetic construct
  REGION 1..7: note = Description of Artificial Sequence: Synthetic peptide
TRGSPLM

SEQ ID NO: 30811 - protein, 7 aa, synthetic construct
  REGION 1..7: note = Description of Artificial Sequence: Synthetic peptide
SSGGNMS

SEQ ID NO: 30812 - protein, 7 aa, synthetic construct
  REGION 1..7: note = Description of Artificial Sequence: Synthetic peptide
PGTGSNH

SEQ ID NO: 30813 - protein, 7 aa, synthetic construct
  REGION 1..7: note = Description of Artificial Sequence: Synthetic peptide
QNTPKST

SEQ ID NO: 30814 - protein, 7 aa, synthetic construct
  REGION 1..7: note = Description of Artificial Sequence: Synthetic peptide
FNMQRSQ

SEQ ID NO: 30815 - protein, 7 aa, synthetic construct
  REGION 1..7: note = Description of Artificial Sequence: Synthetic peptide
SNLPRNL

SEQ ID NO: 30816 - protein, 7 aa, synthetic construct
  REGION 1..7: note = Description of Artificial Sequence: Synthetic peptide
SSGKSFS

SEQ ID NO: 30817 - protein, 7 aa, synthetic construct
  REGION 1..7: note = Description of Artificial Sequence: Synthetic peptide
NGSRQNQ

SEQ ID NO: 30818 - protein, 7 aa, synthetic construct
  REGION 1..7: note = Description of Artificial Sequence: Synthetic peptide
PTSSPQR

SEQ ID NO: 30819 - protein, 7 aa, synthetic construct
  REGION 1..7: note = Description of Artificial Sequence: Synthetic peptide
SFDSKPP

SEQ ID NO: 30820 - protein, 7 aa, synthetic construct
  REGION 1..7: note = Description of Artificial Sequence: Synthetic peptide
QTSATQR

SEQ ID NO: 30821 - protein, 7 aa, synthetic construct
  REGION 1..7: note = Description of Artificial Sequence: Synthetic peptide
PSNKTNS

SEQ ID NO: 30822 - protein, 7 aa, synthetic construct
  REGION 1..7: note = Description of Artificial Sequence: Synthetic peptide
TPQNSVK

SEQ ID NO: 30823 - protein, 7 aa, synthetic construct
  REGION 1..7: note = Description of Artificial Sequence: Synthetic peptide
SHTGNMV

SEQ ID NO: 30824 - protein, 7 aa, synthetic construct
  REGION 1..7: note = Description of Artificial Sequence: Synthetic peptide
NPSEKML

SEQ ID NO: 30825 - protein, 7 aa, synthetic construct
  REGION 1..7: note = Description of Artificial Sequence: Synthetic peptide
LGTSQMK

SEQ ID NO: 30826 - protein, 7 aa, synthetic construct
  REGION 1..7: note = Description of Artificial Sequence: Synthetic peptide
GLQTPPR

SEQ ID NO: 30827 - protein, 7 aa, synthetic construct
  REGION 1..7: note = Description of Artificial Sequence: Synthetic peptide
QTGSNNK

SEQ ID NO: 30828 - protein, 7 aa, synthetic construct
  REGION 1..7: note = Description of Artificial Sequence: Synthetic peptide
TPITPMT

SEQ ID NO: 30829 - protein, 7 aa, synthetic construct
  REGION 1..7: note = Description of Artificial Sequence: Synthetic peptide
TFSKGTN

SEQ ID NO: 30830 - protein, 7 aa, synthetic construct
  REGION 1..7: note = Description of Artificial Sequence: Synthetic peptide
SHSSPYK

SEQ ID NO: 30831 - protein, 7 aa, synthetic construct
  REGION 1..7: note = Description of Artificial Sequence: Synthetic peptide
RSASGQL

SEQ ID NO: 30832 - protein, 7 aa, synthetic construct
  REGION 1..7: note = Description of Artificial Sequence: Synthetic peptide
YPRQRTE

SEQ ID NO: 30833 - protein, 7 aa, synthetic construct
  REGION 1..7: note = Description of Artificial Sequence: Synthetic peptide
YGQTKTQ

SEQ ID NO: 30834 - protein, 7 aa, synthetic construct
  REGION 1..7: note = Description of Artificial Sequence: Synthetic peptide
QISASTR

SEQ ID NO: 30835 - protein, 7 aa, synthetic construct
  REGION 1..7: note = Description of Artificial Sequence: Synthetic peptide
SYASTQQ

SEQ ID NO: 30836 - protein, 7 aa, synthetic construct
  REGION 1..7: note = Description of Artificial Sequence: Synthetic peptide
KGQNTIS

SEQ ID NO: 30837 - protein, 7 aa, synthetic construct
  REGION 1..7: note = Description of Artificial Sequence: Synthetic peptide
PTTGPQR

SEQ ID NO: 30838 - protein, 7 aa, synthetic construct
  REGION 1..7: note = Description of Artificial Sequence: Synthetic peptide
SNNGTQK

SEQ ID NO: 30839 - protein, 7 aa, synthetic construct
  REGION 1..7: note = Description of Artificial Sequence: Synthetic peptide
SRSGGQV

SEQ ID NO: 30840 - protein, 7 aa, synthetic construct
  REGION 1..7: note = Description of Artificial Sequence: Synthetic peptide
GNNRPAS

SEQ ID NO: 30841 - protein, 7 aa, synthetic construct
  REGION 1..7: note = Description of Artificial Sequence: Synthetic peptide
KNQAPLL

SEQ ID NO: 30842 - protein, 7 aa, synthetic construct
  REGION 1..7: note = Description of Artificial Sequence: Synthetic peptide
NGATKNS

SEQ ID NO: 30843 - protein, 7 aa, synthetic construct
  REGION 1..7: note = Description of Artificial Sequence: Synthetic peptide
GTQKQTS

SEQ ID NO: 30844 - protein, 7 aa, synthetic construct
  REGION 1..7: note = Description of Artificial Sequence: Synthetic peptide
KVDKRTD

SEQ ID NO: 30845 - protein, 7 aa, synthetic construct
  REGION 1..7: note = Description of Artificial Sequence: Synthetic peptide
SGVKAFS

SEQ ID NO: 30846 - protein, 7 aa, synthetic construct
  REGION 1..7: note = Description of Artificial Sequence: Synthetic peptide
YNKNAQL

SEQ ID NO: 30847 - protein, 7 aa, synthetic construct
  REGION 1..7: note = Description of Artificial Sequence: Synthetic peptide
TQRPAQM

SEQ ID NO: 30848 - protein, 7 aa, synthetic construct
  REGION 1..7: note = Description of Artificial Sequence: Synthetic peptide
QTQGQLK

SEQ ID NO: 30849 - protein, 7 aa, synthetic construct
  REGION 1..7: note = Description of Artificial Sequence: Synthetic peptide
SNSHKIY

SEQ ID NO: 30850 - protein, 7 aa, synthetic construct
  REGION 1..7: note = Description of Artificial Sequence: Synthetic peptide
ANGHPQS

SEQ ID NO: 30851 - protein, 7 aa, synthetic construct
  REGION 1..7: note = Description of Artificial Sequence: Synthetic peptide
RPVGGLA

SEQ ID NO: 30852 - protein, 7 aa, synthetic construct
  REGION 1..7: note = Description of Artificial Sequence: Synthetic peptide
PQSSHQT

SEQ ID NO: 30853 - protein, 7 aa, synthetic construct
  REGION 1..7: note = Description of Artificial Sequence: Synthetic peptide
TYNSSQA

SEQ ID NO: 30854 - protein, 7 aa, synthetic construct
  REGION 1..7: note = Description of Artificial Sequence: Synthetic peptide
SNQVRQI

SEQ ID NO: 30855 - protein, 7 aa, synthetic construct
  REGION 1..7: note = Description of Artificial Sequence: Synthetic peptide
SLTTKAN

SEQ ID NO: 30856 - protein, 7 aa, synthetic construct
  REGION 1..7: note = Description of Artificial Sequence: Synthetic peptide
SPGNKST

SEQ ID NO: 30857 - protein, 7 aa, synthetic construct
  REGION 1..7: note = Description of Artificial Sequence: Synthetic peptide
YGNPRQA

SEQ ID NO: 30858 - protein, 7 aa, synthetic construct
  REGION 1..7: note = Description of Artificial Sequence: Synthetic peptide
RRQDTQE

SEQ ID NO: 30859 - protein, 7 aa, synthetic construct
  REGION 1..7: note = Description of Artificial Sequence: Synthetic peptide
NNRSGMG

SEQ ID NO: 30860 - protein, 7 aa, synthetic construct
  REGION 1..7: note = Description of Artificial Sequence: Synthetic peptide
SFAKSAS

SEQ ID NO: 30861 - protein, 7 aa, synthetic construct
  REGION 1..7: note = Description of Artificial Sequence: Synthetic peptide
GQNRNNT

SEQ ID NO: 30862 - protein, 7 aa, synthetic construct
  REGION 1..7: note = Description of Artificial Sequence: Synthetic peptide
TPAGPNK

SEQ ID NO: 30863 - protein, 7 aa, synthetic construct
  REGION 1..7: note = Description of Artificial Sequence: Synthetic peptide
NISTRQS

SEQ ID NO: 30864 - protein, 7 aa, synthetic construct
  REGION 1..7: note = Description of Artificial Sequence: Synthetic peptide
YHLNSQS

SEQ ID NO: 30865 - protein, 7 aa, synthetic construct
  REGION 1..7: note = Description of Artificial Sequence: Synthetic peptide
SLSSKQM

SEQ ID NO: 30866 - protein, 7 aa, synthetic construct
  REGION 1..7: note = Description of Artificial Sequence: Synthetic peptide
NNGRPIA

SEQ ID NO: 30867 - protein, 7 aa, synthetic construct
  REGION 1..7: note = Description of Artificial Sequence: Synthetic peptide
NQKTRTD

SEQ ID NO: 30868 - protein, 7 aa, synthetic construct
  REGION 1..7: note = Description of Artificial Sequence: Synthetic peptide
TSQTKIV

SEQ ID NO: 30869 - protein, 7 aa, synthetic construct
  REGION 1..7: note = Description of Artificial Sequence: Synthetic peptide
VTPTKHP

SEQ ID NO: 30870 - protein, 7 aa, synthetic construct
  REGION 1..7: note = Description of Artificial Sequence: Synthetic peptide
PGQSTSK

SEQ ID NO: 30871 - protein, 7 aa, synthetic construct
  REGION 1..7: note = Description of Artificial Sequence: Synthetic peptide
KTSTPYS

SEQ ID NO: 30872 - protein, 7 aa, synthetic construct
  REGION 1..7: note = Description of Artificial Sequence: Synthetic peptide
SGGKSAL

SEQ ID NO: 30873 - protein, 7 aa, synthetic construct
  REGION 1..7: note = Description of Artificial Sequence: Synthetic peptide
NGTRQNQ

SEQ ID NO: 30874 - protein, 7 aa, synthetic construct
  REGION 1..7: note = Description of Artificial Sequence: Synthetic peptide
NGPGQNQ

SEQ ID NO: 30875 - protein, 7 aa, synthetic construct
  REGION 1..7: note = Description of Artificial Sequence: Synthetic peptide
ATNKTTN

SEQ ID NO: 30876 - protein, 7 aa, synthetic construct
  REGION 1..7: note = Description of Artificial Sequence: Synthetic peptide
TGMRNIG

SEQ ID NO: 30877 - protein, 7 aa, synthetic construct
  REGION 1..7: note = Description of Artificial Sequence: Synthetic peptide
PTTTAKP

SEQ ID NO: 30878 - protein, 7 aa, synthetic construct
  REGION 1..7: note = Description of Artificial Sequence: Synthetic peptide
FPTSPTR

SEQ ID NO: 30879 - protein, 7 aa, synthetic construct
  REGION 1..7: note = Description of Artificial Sequence: Synthetic peptide
PYNSKAS

SEQ ID NO: 30880 - protein, 7 aa, synthetic construct
  REGION 1..7: note = Description of Artificial Sequence: Synthetic peptide
GLQSKQL

SEQ ID NO: 30881 - protein, 7 aa, synthetic construct
  REGION 1..7: note = Description of Artificial Sequence: Synthetic peptide
ASLKTQM

SEQ ID NO: 30882 - protein, 7 aa, synthetic construct
  REGION 1..7: note = Description of Artificial Sequence: Synthetic peptide
SPGRTQS

SEQ ID NO: 30883 - protein, 7 aa, synthetic construct
  REGION 1..7: note = Description of Artificial Sequence: Synthetic peptide
ELMNKSK

SEQ ID NO: 30884 - protein, 7 aa, synthetic construct
  REGION 1..7: note = Description of Artificial Sequence: Synthetic peptide
IGNKQSQ

SEQ ID NO: 30885 - protein, 7 aa, synthetic construct
  REGION 1..7: note = Description of Artificial Sequence: Synthetic peptide
PGQKQGI

SEQ ID NO: 30886 - protein, 7 aa, synthetic construct
  REGION 1..7: note = Description of Artificial Sequence: Synthetic peptide
EPTHPRG

SEQ ID NO: 30887 - protein, 7 aa, synthetic construct
  REGION 1..7: note = Description of Artificial Sequence: Synthetic peptide
FRAQANV

SEQ ID NO: 30888 - protein, 7 aa, synthetic construct
  REGION 1..7: note = Description of Artificial Sequence: Synthetic peptide
PTHERAK

SEQ ID NO: 30889 - protein, 7 aa, synthetic construct
  REGION 1..7: note = Description of Artificial Sequence: Synthetic peptide
PGSSNRN

SEQ ID NO: 30890 - protein, 7 aa, synthetic construct
  REGION 1..7: note = Description of Artificial Sequence: Synthetic peptide
VPLQKPS

SEQ ID NO: 30891 - protein, 7 aa, synthetic construct
  REGION 1..7: note = Description of Artificial Sequence: Synthetic peptide
FTSNKAS

SEQ ID NO: 30892 - protein, 7 aa, synthetic construct
  REGION 1..7: note = Description of Artificial Sequence: Synthetic peptide
ENSSKAK

SEQ ID NO: 30893 - protein, 7 aa, synthetic construct
  REGION 1..7: note = Description of Artificial Sequence: Synthetic peptide
SGAGSAG

SEQ ID NO: 30894 - protein, 7 aa, synthetic construct
  REGION 1..7: note = Description of Artificial Sequence: Synthetic peptide
GLAKDQR

SEQ ID NO: 30895 - protein, 7 aa, synthetic construct
  REGION 1..7: note = Description of Artificial Sequence: Synthetic peptide
TPHDGQR

SEQ ID NO: 30896 - protein, 7 aa, synthetic construct
  REGION 1..7: note = Description of Artificial Sequence: Synthetic peptide
CIGNKTN

SEQ ID NO: 30897 - protein, 7 aa, synthetic construct
  REGION 1..7: note = Description of Artificial Sequence: Synthetic peptide
YIKSVTN

SEQ ID NO: 30898 - protein, 7 aa, synthetic construct
  REGION 1..7: note = Description of Artificial Sequence: Synthetic peptide
TSSGHSV

SEQ ID NO: 30899 - protein, 7 aa, synthetic construct
  REGION 1..7: note = Description of Artificial Sequence: Synthetic peptide
NSFSRNS

SEQ ID NO: 30900 - protein, 7 aa, synthetic construct
  REGION 1..7: note = Description of Artificial Sequence: Synthetic peptide
SDSRNTN

SEQ ID NO: 30901 - protein, 7 aa, synthetic construct
  REGION 1..7: note = Description of Artificial Sequence: Synthetic peptide
NTQSYTR

SEQ ID NO: 30902 - protein, 7 aa, synthetic construct
  REGION 1..7: note = Description of Artificial Sequence: Synthetic peptide
SRNSPPQ

SEQ ID NO: 30903 - protein, 7 aa, synthetic construct
  REGION 1..7: note = Description of Artificial Sequence: Synthetic peptide
TISTSQS

SEQ ID NO: 30904 - protein, 7 aa, synthetic construct
  REGION 1..7: note = Description of Artificial Sequence: Synthetic peptide
NGFNSNN

SEQ ID NO: 30905 - protein, 7 aa, synthetic construct
  REGION 1..7: note = Description of Artificial Sequence: Synthetic peptide
FTKLASP

SEQ ID NO: 30906 - protein, 7 aa, synthetic construct
  REGION 1..7: note = Description of Artificial Sequence: Synthetic peptide
WRLSRQQ

SEQ ID NO: 30907 - protein, 7 aa, synthetic construct
  REGION 1..7: note = Description of Artificial Sequence: Synthetic peptide
QTSHSAK

SEQ ID NO: 30908 - protein, 7 aa, synthetic construct
  REGION 1..7: note = Description of Artificial Sequence: Synthetic peptide
PYAGNQR

SEQ ID NO: 30909 - protein, 7 aa, synthetic construct
  REGION 1..7: note = Description of Artificial Sequence: Synthetic peptide
GSGNKVN

SEQ ID NO: 30910 - protein, 7 aa, synthetic construct
  REGION 1..7: note = Description of Artificial Sequence: Synthetic peptide
NSGKPNA

SEQ ID NO: 30911 - protein, 7 aa, synthetic construct
  REGION 1..7: note = Description of Artificial Sequence: Synthetic peptide
PGSVTGS

SEQ ID NO: 30912 - protein, 7 aa, synthetic construct
  REGION 1..7: note = Description of Artificial Sequence: Synthetic peptide
NGITKSS

SEQ ID NO: 30913 - protein, 7 aa, synthetic construct
  REGION 1..7: note = Description of Artificial Sequence: Synthetic peptide
QGSGSNH

SEQ ID NO: 30914 - protein, 7 aa, synthetic construct
  REGION 1..7: note = Description of Artificial Sequence: Synthetic peptide
GPIRPIQ

SEQ ID NO: 30915 - protein, 7 aa, synthetic construct
  REGION 1..7: note = Description of Artificial Sequence: Synthetic peptide
FASRPVQ

SEQ ID NO: 30916 - protein, 7 aa, synthetic construct
  REGION 1..7: note = Description of Artificial Sequence: Synthetic peptide
SNETKSS

SEQ ID NO: 30917 - protein, 7 aa, synthetic construct
  REGION 1..7: note = Description of Artificial Sequence: Synthetic peptide
IPANSFK

SEQ ID NO: 30918 - protein, 7 aa, synthetic construct
  REGION 1..7: note = Description of Artificial Sequence: Synthetic peptide
AQTKGTQ

SEQ ID NO: 30919 - protein, 7 aa, synthetic construct
  REGION 1..7: note = Description of Artificial Sequence: Synthetic peptide
TSMNGNK

SEQ ID NO: 30920 - protein, 7 aa, synthetic construct
  REGION 1..7: note = Description of Artificial Sequence: Synthetic peptide
SQVSKPQ

SEQ ID NO: 30921 - protein, 7 aa, synthetic construct
  REGION 1..7: note = Description of Artificial Sequence: Synthetic peptide
PNTKPVL

SEQ ID NO: 30922 - protein, 7 aa, synthetic construct
  REGION 1..7: note = Description of Artificial Sequence: Synthetic peptide
TPHQRSS

SEQ ID NO: 30923 - protein, 7 aa, synthetic construct
  REGION 1..7: note = Description of Artificial Sequence: Synthetic peptide
NQSRPGV

SEQ ID NO: 30924 - protein, 7 aa, synthetic construct
  REGION 1..7: note = Description of Artificial Sequence: Synthetic peptide
NNSKSQI

SEQ ID NO: 30925 - protein, 7 aa, synthetic construct
  REGION 1..7: note = Description of Artificial Sequence: Synthetic peptide
AMSEHLK

SEQ ID NO: 30926 - protein, 7 aa, synthetic construct
  REGION 1..7: note = Description of Artificial Sequence: Synthetic peptide
LILPGNN

SEQ ID NO: 30927 - protein, 7 aa, synthetic construct
  REGION 1..7: note = Description of Artificial Sequence: Synthetic peptide
GVSEHRK

SEQ ID NO: 30928 - protein, 7 aa, synthetic construct
  REGION 1..7: note = Description of Artificial Sequence: Synthetic peptide
HSENGNR

SEQ ID NO: 30929 - protein, 7 aa, synthetic construct
  REGION 1..7: note = Description of Artificial Sequence: Synthetic peptide
DLQTSAK

SEQ ID NO: 30930 - protein, 7 aa, synthetic construct
  REGION 1..7: note = Description of Artificial Sequence: Synthetic peptide
RSLPNVA

SEQ ID NO: 30931 - protein, 7 aa, synthetic construct
  REGION 1..7: note = Description of Artificial Sequence: Synthetic peptide
YSDNKTT

SEQ ID NO: 30932 - protein, 7 aa, synthetic construct
  REGION 1..7: note = Description of Artificial Sequence: Synthetic peptide
SHNRTND

SEQ ID NO: 30933 - protein, 7 aa, synthetic construct
  REGION 1..7: note = Description of Artificial Sequence: Synthetic peptide
VSNKSVL

SEQ ID NO: 30934 - protein, 7 aa, synthetic construct
  REGION 1..7: note = Description of Artificial Sequence: Synthetic peptide
RDHSGSR

SEQ ID NO: 30935 - protein, 7 aa, synthetic construct
  REGION 1..7: note = Description of Artificial Sequence: Synthetic peptide
NANQNQM

SEQ ID NO: 30936 - protein, 7 aa, synthetic construct
  REGION 1..7: note = Description of Artificial Sequence: Synthetic peptide
THQSSTS

SEQ ID NO: 30937 - protein, 7 aa, synthetic construct
  REGION 1..7: note = Description of Artificial Sequence: Synthetic peptide
TLPRVPA

SEQ ID NO: 30938 - protein, 7 aa, synthetic construct
  REGION 1..7: note = Description of Artificial Sequence: Synthetic peptide
SYSSSQL

SEQ ID NO: 30939 - protein, 7 aa, synthetic construct
  REGION 1..7: note = Description of Artificial Sequence: Synthetic peptide
PKVRDGY

SEQ ID NO: 30940 - protein, 7 aa, synthetic construct
  REGION 1..7: note = Description of Artificial Sequence: Synthetic peptide
YGQTKTQ

SEQ ID NO: 30941 - protein, 7 aa, synthetic construct
  REGION 1..7: note = Description of Artificial Sequence: Synthetic peptide
SASPSIK

SEQ ID NO: 30942 - protein, 7 aa, synthetic construct
  REGION 1..7: note = Description of Artificial Sequence: Synthetic peptide
RSTVSPN

SEQ ID NO: 30943 - protein, 7 aa, synthetic construct
  REGION 1..7: note = Description of Artificial Sequence: Synthetic peptide
VQRSSNQ

SEQ ID NO: 30944 - protein, 7 aa, synthetic construct
  REGION 1..7: note = Description of Artificial Sequence: Synthetic peptide
NGCGQNQ

SEQ ID NO: 30945 - protein, 7 aa, synthetic construct
  REGION 1..7: note = Description of Artificial Sequence: Synthetic peptide
SNMTSTR

SEQ ID NO: 30946 - protein, 7 aa, synthetic construct
  REGION 1..7: note = Description of Artificial Sequence: Synthetic peptide
PPNLKLS

SEQ ID NO: 30947 - protein, 7 aa, synthetic construct
  REGION 1..7: note = Description of Artificial Sequence: Synthetic peptide
DSIGSSK

SEQ ID NO: 30948 - protein, 7 aa, synthetic construct
  REGION 1..7: note = Description of Artificial Sequence: Synthetic peptide
MLGSSNK

SEQ ID NO: 30949 - protein, 7 aa, synthetic construct
  REGION 1..7: note = Description of Artificial Sequence: Synthetic peptide
DNMSTPK

SEQ ID NO: 30950 - protein, 7 aa, synthetic construct
  REGION 1..7: note = Description of Artificial Sequence: Synthetic peptide
LGSSTIL

SEQ ID NO: 30951 - protein, 7 aa, synthetic construct
  REGION 1..7: note = Description of Artificial Sequence: Synthetic peptide
SSMSHQK

SEQ ID NO: 30952 - protein, 7 aa, synthetic construct
  REGION 1..7: note = Description of Artificial Sequence: Synthetic peptide
KQPASTH

SEQ ID NO: 30953 - protein, 7 aa, synthetic construct
  REGION 1..7: note = Description of Artificial Sequence: Synthetic peptide
ALTGKLS

SEQ ID NO: 30954 - protein, 7 aa, synthetic construct
  REGION 1..7: note = Description of Artificial Sequence: Synthetic peptide
GSGHGTN

SEQ ID NO: 30955 - protein, 7 aa, synthetic construct
  REGION 1..7: note = Description of Artificial Sequence: Synthetic peptide
PTGVNKM

SEQ ID NO: 30956 - protein, 7 aa, synthetic construct
  REGION 1..7: note = Description of Artificial Sequence: Synthetic peptide
TSSGGLT

SEQ ID NO: 30957 - protein, 7 aa, synthetic construct
  REGION 1..7: note = Description of Artificial Sequence: Synthetic peptide
NSRSHHE

SEQ ID NO: 30958 - protein, 7 aa, synthetic construct
  REGION 1..7: note = Description of Artificial Sequence: Synthetic peptide
MGGVTSS

SEQ ID NO: 30959 - protein, 7 aa, synthetic construct
  REGION 1..7: note = Description of Artificial Sequence: Synthetic peptide
GYRGNGN

SEQ ID NO: 30960 - protein, 7 aa, synthetic construct
  REGION 1..7: note = Description of Artificial Sequence: Synthetic peptide
TGTGSFH

SEQ ID NO: 30961 - protein, 7 aa, synthetic construct
  REGION 1..7: note = Description of Artificial Sequence: Synthetic peptide
TGLSHMG

SEQ ID NO: 30962 - protein, 7 aa, synthetic construct
  REGION 1..7: note = Description of Artificial Sequence: Synthetic peptide
LRSKESA

SEQ ID NO: 30963 - protein, 7 aa, synthetic construct
  REGION 1..7: note = Description of Artificial Sequence: Synthetic peptide
PTHASSL

SEQ ID NO: 30964 - protein, 7 aa, synthetic construct
  REGION 1..7: note = Description of Artificial Sequence: Synthetic peptide
KIASKSE

SEQ ID NO: 30965 - protein, 7 aa, synthetic construct
  REGION 1..7: note = Description of Artificial Sequence: Synthetic peptide
NVSTGAT

SEQ ID NO: 30966 - protein, 7 aa, synthetic construct
  REGION 1..7: note = Description of Artificial Sequence: Synthetic peptide
NRSGQNQ

SEQ ID NO: 30967 - protein, 7 aa, synthetic construct
  REGION 1..7: note = Description of Artificial Sequence: Synthetic peptide
SPTSPMN

SEQ ID NO: 30968 - protein, 7 aa, synthetic construct
  REGION 1..7: note = Description of Artificial Sequence: Synthetic peptide
YNQPVGK

SEQ ID NO: 30969 - protein, 7 aa, synthetic construct
  REGION 1..7: note = Description of Artificial Sequence: Synthetic peptide
ATMRSNE

SEQ ID NO: 30970 - protein, 7 aa, synthetic construct
  REGION 1..7: note = Description of Artificial Sequence: Synthetic peptide
KNPSSAP

SEQ ID NO: 30971 - protein, 7 aa, synthetic construct
  REGION 1..7: note = Description of Artificial Sequence: Synthetic peptide
NNLAGSK

SEQ ID NO: 30972 - protein, 7 aa, synthetic construct
  REGION 1..7: note = Description of Artificial Sequence: Synthetic peptide
SDSRSGM

SEQ ID NO: 30973 - protein, 7 aa, synthetic construct
  REGION 1..7: note = Description of Artificial Sequence: Synthetic peptide
PSNKTNS

SEQ ID NO: 30974 - protein, 7 aa, synthetic construct
  REGION 1..7: note = Description of Artificial Sequence: Synthetic peptide
AQARMMN

SEQ ID NO: 30975 - protein, 7 aa, synthetic construct
  REGION 1..7: note = Description of Artificial Sequence: Synthetic peptide
QKTNKLY

SEQ ID NO: 30976 - protein, 7 aa, synthetic construct
  REGION 1..7: note = Description of Artificial Sequence: Synthetic peptide
VTRGLNV

SEQ ID NO: 30977 - protein, 7 aa, synthetic construct
  REGION 1..7: note = Description of Artificial Sequence: Synthetic peptide
GRLTSSI

SEQ ID NO: 30978 - protein, 7 aa, synthetic construct
  REGION 1..7: note = Description of Artificial Sequence: Synthetic peptide
YNVNRNT

SEQ ID NO: 30979 - protein, 7 aa, synthetic construct
  REGION 1..7: note = Description of Artificial Sequence: Synthetic peptide
PAAHNAV

SEQ ID NO: 30980 - protein, 7 aa, synthetic construct
  REGION 1..7: note = Description of Artificial Sequence: Synthetic peptide
VSTKSAP

SEQ ID NO: 30981 - protein, 7 aa, synthetic construct
  REGION 1..7: note = Description of Artificial Sequence: Synthetic peptide
TAGQASV

SEQ ID NO: 30982 - protein, 7 aa, synthetic construct
  REGION 1..7: note = Description of Artificial Sequence: Synthetic peptide
NISTRQS

SEQ ID NO: 30983 - protein, 7 aa, synthetic construct
  REGION 1..7: note = Description of Artificial Sequence: Synthetic peptide
SSSGGVK

SEQ ID NO: 30984 - protein, 7 aa, synthetic construct
  REGION 1..7: note = Description of Artificial Sequence: Synthetic peptide
NSYDPKR

SEQ ID NO: 30985 - protein, 7 aa, synthetic construct
  REGION 1..7: note = Description of Artificial Sequence: Synthetic peptide
LVRQSSA

SEQ ID NO: 30986 - protein, 7 aa, synthetic construct
  REGION 1..7: note = Description of Artificial Sequence: Synthetic peptide
NVNSQML

SEQ ID NO: 30987 - protein, 7 aa, synthetic construct
  REGION 1..7: note = Description of Artificial Sequence: Synthetic peptide
PGDRGKV

SEQ ID NO: 30988 - protein, 7 aa, synthetic construct
  REGION 1..7: note = Description of Artificial Sequence: Synthetic peptide
PSTSGAM

SEQ ID NO: 30989 - protein, 7 aa, synthetic construct
  REGION 1..7: note = Description of Artificial Sequence: Synthetic peptide
SRLEKSN

SEQ ID NO: 30990 - protein, 7 aa, synthetic construct
  REGION 1..7: note = Description of Artificial Sequence: Synthetic peptide
DTNNRAN

SEQ ID NO: 30991 - protein, 7 aa, synthetic construct
  REGION 1..7: note = Description of Artificial Sequence: Synthetic peptide
ASTPNNT

SEQ ID NO: 30992 - protein, 7 aa, synthetic construct
  REGION 1..7: note = Description of Artificial Sequence: Synthetic peptide
IGTSINS

SEQ ID NO: 30993 - protein, 7 aa, synthetic construct
  REGION 1..7: note = Description of Artificial Sequence: Synthetic peptide
VSTRSIS

SEQ ID NO: 30994 - protein, 7 aa, synthetic construct
  REGION 1..7: note = Description of Artificial Sequence: Synthetic peptide
PLPKNSS

SEQ ID NO: 30995 - protein, 7 aa, synthetic construct
  REGION 1..7: note = Description of Artificial Sequence: Synthetic peptide
VSGQGNS

SEQ ID NO: 30996 - protein, 7 aa, synthetic construct
  REGION 1..7: note = Description of Artificial Sequence: Synthetic peptide
QVSAKSA

SEQ ID NO: 30997 - protein, 7 aa, synthetic construct
  REGION 1..7: note = Description of Artificial Sequence: Synthetic peptide
PTLGTTK

SEQ ID NO: 30998 - protein, 7 aa, synthetic construct
  REGION 1..7: note = Description of Artificial Sequence: Synthetic peptide
LHDGQTR

SEQ ID NO: 30999 - protein, 7 aa, synthetic construct
  REGION 1..7: note = Description of Artificial Sequence: Synthetic peptide
GIAGVTR

SEQ ID NO: 31000 - protein, 7 aa, synthetic construct
  REGION 1..7: note = Description of Artificial Sequence: Synthetic peptide
QRTSDQT

SEQ ID NO: 31001 - protein, 7 aa, synthetic construct
  REGION 1..7: note = Description of Artificial Sequence: Synthetic peptide
SQVSKPQ

SEQ ID NO: 31002 - protein, 7 aa, synthetic construct
  REGION 1..7: note = Description of Artificial Sequence: Synthetic peptide
PILDRKS

SEQ ID NO: 31003 - protein, 7 aa, synthetic construct
  REGION 1..7: note = Description of Artificial Sequence: Synthetic peptide
HPSNKPL

SEQ ID NO: 31004 - protein, 7 aa, synthetic construct
  REGION 1..7: note = Description of Artificial Sequence: Synthetic peptide
SSSAKSI

SEQ ID NO: 31005 - protein, 7 aa, synthetic construct
  REGION 1..7: note = Description of Artificial Sequence: Synthetic peptide
TGIGSHL

SEQ ID NO: 31006 - protein, 7 aa, synthetic construct
  REGION 1..7: note = Description of Artificial Sequence: Synthetic peptide
DPVRKTS

SEQ ID NO: 31007 - protein, 7 aa, synthetic construct
  REGION 1..7: note = Description of Artificial Sequence: Synthetic peptide
DPQVRAL

SEQ ID NO: 31008 - protein, 7 aa, synthetic construct
  REGION 1..7: note = Description of Artificial Sequence: Synthetic peptide
SGSLSSA

SEQ ID NO: 31009 - protein, 7 aa, synthetic construct
  REGION 1..7: note = Description of Artificial Sequence: Synthetic peptide
GHLSPSS

SEQ ID NO: 31010 - protein, 7 aa, synthetic construct
  REGION 1..7: note = Description of Artificial Sequence: Synthetic peptide
RNDTKLF

SEQ ID NO: 31011 - protein, 7 aa, synthetic construct
  REGION 1..7: note = Description of Artificial Sequence: Synthetic peptide
YQNKSLT

SEQ ID NO: 31012 - protein, 7 aa, synthetic construct
  REGION 1..7: note = Description of Artificial Sequence: Synthetic peptide
GYTDKHV

SEQ ID NO: 31013 - protein, 7 aa, synthetic construct
  REGION 1..7: note = Description of Artificial Sequence: Synthetic peptide
PGGKSQL

SEQ ID NO: 31014 - protein, 7 aa, synthetic construct
  REGION 1..7: note = Description of Artificial Sequence: Synthetic peptide
RSASGQL

SEQ ID NO: 31015 - protein, 7 aa, synthetic construct
  REGION 1..7: note = Description of Artificial Sequence: Synthetic peptide
GSHNDSR

SEQ ID NO: 31016 - protein, 7 aa, synthetic construct
  REGION 1..7: note = Description of Artificial Sequence: Synthetic peptide
NGSGQKQ

SEQ ID NO: 31017 - protein, 7 aa, synthetic construct
  REGION 1..7: note = Description of Artificial Sequence: Synthetic peptide
YAMERVG

SEQ ID NO: 31018 - protein, 7 aa, synthetic construct
  REGION 1..7: note = Description of Artificial Sequence: Synthetic peptide
GLHSVAK

SEQ ID NO: 31019 - protein, 7 aa, synthetic construct
  REGION 1..7: note = Description of Artificial Sequence: Synthetic peptide
SVHQNRA

SEQ ID NO: 31020 - protein, 7 aa, synthetic construct
  REGION 1..7: note = Description of Artificial Sequence: Synthetic peptide
LGPGKNT

SEQ ID NO: 31021 - protein, 7 aa, synthetic construct
  REGION 1..7: note = Description of Artificial Sequence: Synthetic peptide
ERKVQNC

SEQ ID NO: 31022 - protein, 7 aa, synthetic construct
  REGION 1..7: note = Description of Artificial Sequence: Synthetic peptide
PTKGANA

SEQ ID NO: 31023 - protein, 7 aa, synthetic construct
  REGION 1..7: note = Description of Artificial Sequence: Synthetic peptide
GNRSSGL

SEQ ID NO: 31024 - protein, 7 aa, synthetic construct
  REGION 1..7: note = Description of Artificial Sequence: Synthetic peptide
VQQSKAY

SEQ ID NO: 31025 - protein, 7 aa, synthetic construct
  REGION 1..7: note = Description of Artificial Sequence: Synthetic peptide
GQERTNM

SEQ ID NO: 31026 - protein, 7 aa, synthetic construct
  REGION 1..7: note = Description of Artificial Sequence: Synthetic peptide
ATANTHM

SEQ ID NO: 31027 - protein, 7 aa, synthetic construct
  REGION 1..7: note = Description of Artificial Sequence: Synthetic peptide
VNTTRAE

SEQ ID NO: 31028 - protein, 7 aa, synthetic construct
  REGION 1..7: note = Description of Artificial Sequence: Synthetic peptide
TQQHGSN

SEQ ID NO: 31029 - protein, 7 aa, synthetic construct
  REGION 1..7: note = Description of Artificial Sequence: Synthetic peptide
LNLKPIN

SEQ ID NO: 31030 - protein, 7 aa, synthetic construct
  REGION 1..7: note = Description of Artificial Sequence: Synthetic peptide
GVSATVK

SEQ ID NO: 31031 - protein, 7 aa, synthetic construct
  REGION 1..7: note = Description of Artificial Sequence: Synthetic peptide
TPTPVNQ

SEQ ID NO: 31032 - protein, 7 aa, synthetic construct
  REGION 1..7: note = Description of Artificial Sequence: Synthetic peptide
TTHNMQG

SEQ ID NO: 31033 - protein, 7 aa, synthetic construct
  REGION 1..7: note = Description of Artificial Sequence: Synthetic peptide
NAQQAQR

SEQ ID NO: 31034 - protein, 7 aa, synthetic construct
  REGION 1..7: note = Description of Artificial Sequence: Synthetic peptide
VSKSPST

SEQ ID NO: 31035 - protein, 7 aa, synthetic construct
  REGION 1..7: note = Description of Artificial Sequence: Synthetic peptide
VGDRSWS

SEQ ID NO: 31036 - protein, 7 aa, synthetic construct
  REGION 1..7: note = Description of Artificial Sequence: Synthetic peptide
HRDQVSL

SEQ ID NO: 31037 - protein, 7 aa, synthetic construct
  REGION 1..7: note = Description of Artificial Sequence: Synthetic peptide
PNGAHVT

SEQ ID NO: 31038 - protein, 7 aa, synthetic construct
  REGION 1..7: note = Description of Artificial Sequence: Synthetic peptide
TVPGRST

SEQ ID NO: 31039 - protein, 7 aa, synthetic construct
  REGION 1..7: note = Description of Artificial Sequence: Synthetic peptide
YVSNSNA

SEQ ID NO: 31040 - protein, 7 aa, synthetic construct
  REGION 1..7: note = Description of Artificial Sequence: Synthetic peptide
ALSSQKG

SEQ ID NO: 31041 - protein, 7 aa, synthetic construct
  REGION 1..7: note = Description of Artificial Sequence: Synthetic peptide
NGSGQNK

SEQ ID NO: 31042 - protein, 7 aa, synthetic construct
  REGION 1..7: note = Description of Artificial Sequence: Synthetic peptide
GTVNAKG

SEQ ID NO: 31043 - protein, 7 aa, synthetic construct
  REGION 1..7: note = Description of Artificial Sequence: Synthetic peptide
RDGGQDR

SEQ ID NO: 31044 - protein, 7 aa, synthetic construct
  REGION 1..7: note = Description of Artificial Sequence: Synthetic peptide
HSSRPLE

SEQ ID NO: 31045 - protein, 7 aa, synthetic construct
  REGION 1..7: note = Description of Artificial Sequence: Synthetic peptide
SSSDKLR

SEQ ID NO: 31046 - protein, 7 aa, synthetic construct
  REGION 1..7: note = Description of Artificial Sequence: Synthetic peptide
DPLRQSV

SEQ ID NO: 31047 - protein, 7 aa, synthetic construct
  REGION 1..7: note = Description of Artificial Sequence: Synthetic peptide
PLQATGK

SEQ ID NO: 31048 - protein, 7 aa, synthetic construct
  REGION 1..7: note = Description of Artificial Sequence: Synthetic peptide
QANTIGK

SEQ ID NO: 31049 - protein, 7 aa, synthetic construct
  REGION 1..7: note = Description of Artificial Sequence: Synthetic peptide
RTTSSLV

SEQ ID NO: 31050 - protein, 7 aa, synthetic construct
  REGION 1..7: note = Description of Artificial Sequence: Synthetic peptide
RPSMPHS

SEQ ID NO: 31051 - protein, 7 aa, synthetic construct
  REGION 1..7: note = Description of Artificial Sequence: Synthetic peptide
LNRGNGS

SEQ ID NO: 31052 - protein, 7 aa, synthetic construct
  REGION 1..7: note = Description of Artificial Sequence: Synthetic peptide
NSHNGAS

SEQ ID NO: 31053 - protein, 7 aa, synthetic construct
  REGION 1..7: note = Description of Artificial Sequence: Synthetic peptide
PYAGNQR

SEQ ID NO: 31054 - protein, 7 aa, synthetic construct
  REGION 1..7: note = Description of Artificial Sequence: Synthetic peptide
SESGQQR

SEQ ID NO: 31055 - protein, 7 aa, synthetic construct
  REGION 1..7: note = Description of Artificial Sequence: Synthetic peptide
QSSEKRQ

SEQ ID NO: 31056 - protein, 7 aa, synthetic construct
  REGION 1..7: note = Description of Artificial Sequence: Synthetic peptide
RSTNTDN

SEQ ID NO: 31057 - protein, 7 aa, synthetic construct
  REGION 1..7: note = Description of Artificial Sequence: Synthetic peptide
NNKSASQ

SEQ ID NO: 31058 - protein, 7 aa, synthetic construct
  REGION 1..7: note = Description of Artificial Sequence: Synthetic peptide
SISHTPV

SEQ ID NO: 31059 - protein, 7 aa, synthetic construct
  REGION 1..7: note = Description of Artificial Sequence: Synthetic peptide
SVSNTNT

SEQ ID NO: 31060 - protein, 7 aa, synthetic construct
  REGION 1..7: note = Description of Artificial Sequence: Synthetic peptide
SGQQGPC

SEQ ID NO: 31061 - protein, 7 aa, synthetic construct
  REGION 1..7: note = Description of Artificial Sequence: Synthetic peptide
GIATTNR

SEQ ID NO: 31062 - protein, 7 aa, synthetic construct
  REGION 1..7: note = Description of Artificial Sequence: Synthetic peptide
PAGRSSN

SEQ ID NO: 31063 - protein, 7 aa, synthetic construct
  REGION 1..7: note = Description of Artificial Sequence: Synthetic peptide
PNLNSRG

SEQ ID NO: 31064 - protein, 7 aa, synthetic construct
  REGION 1..7: note = Description of Artificial Sequence: Synthetic peptide
PMAQQRA

SEQ ID NO: 31065 - protein, 7 aa, synthetic construct
  REGION 1..7: note = Description of Artificial Sequence: Synthetic peptide
KSDAHTA

SEQ ID NO: 31066 - protein, 7 aa, synthetic construct
  REGION 1..7: note = Description of Artificial Sequence: Synthetic peptide
SSISRTS

SEQ ID NO: 31067 - protein, 7 aa, synthetic construct
  REGION 1..7: note = Description of Artificial Sequence: Synthetic peptide
STLPPRT

SEQ ID NO: 31068 - protein, 7 aa, synthetic construct
  REGION 1..7: note = Description of Artificial Sequence: Synthetic peptide
NNRSGMG

SEQ ID NO: 31069 - protein, 7 aa, synthetic construct
  REGION 1..7: note = Description of Artificial Sequence: Synthetic peptide
VSTGKSV

SEQ ID NO: 31070 - protein, 7 aa, synthetic construct
  REGION 1..7: note = Description of Artificial Sequence: Synthetic peptide
RLPSVSS

SEQ ID NO: 31071 - protein, 7 aa, synthetic construct
  REGION 1..7: note = Description of Artificial Sequence: Synthetic peptide
GSTTSGR

SEQ ID NO: 31072 - protein, 7 aa, synthetic construct
  REGION 1..7: note = Description of Artificial Sequence: Synthetic peptide
TSGTKAH

SEQ ID NO: 31073 - protein, 7 aa, synthetic construct
  REGION 1..7: note = Description of Artificial Sequence: Synthetic peptide
DPHNTSR

SEQ ID NO: 31074 - protein, 7 aa, synthetic construct
  REGION 1..7: note = Description of Artificial Sequence: Synthetic peptide
FVNTSAQ

SEQ ID NO: 31075 - protein, 7 aa, synthetic construct
  REGION 1..7: note = Description of Artificial Sequence: Synthetic peptide
SFSGANK

SEQ ID NO: 31076 - protein, 7 aa, synthetic construct
  REGION 1..7: note = Description of Artificial Sequence: Synthetic peptide
QGSSPME

SEQ ID NO: 31077 - protein, 7 aa, synthetic construct
  REGION 1..7: note = Description of Artificial Sequence: Synthetic peptide
TPMTKNP

SEQ ID NO: 31078 - protein, 7 aa, synthetic construct
  REGION 1..7: note = Description of Artificial Sequence: Synthetic peptide
SSDLGKR

SEQ ID NO: 31079 - protein, 7 aa, synthetic construct
  REGION 1..7: note = Description of Artificial Sequence: Synthetic peptide
MATSTRN

SEQ ID NO: 31080 - protein, 7 aa, synthetic construct
  REGION 1..7: note = Description of Artificial Sequence: Synthetic peptide
LGTSTMK

SEQ ID NO: 31081 - protein, 7 aa, synthetic construct
  REGION 1..7: note = Description of Artificial Sequence: Synthetic peptide
YTITPQK

SEQ ID NO: 31082 - protein, 7 aa, synthetic construct
  REGION 1..7: note = Description of Artificial Sequence: Synthetic peptide
IGGNKPL

SEQ ID NO: 31083 - protein, 7 aa, synthetic construct
  REGION 1..7: note = Description of Artificial Sequence: Synthetic peptide
HSSSKIH

SEQ ID NO: 31084 - protein, 7 aa, synthetic construct
  REGION 1..7: note = Description of Artificial Sequence: Synthetic peptide
SNTNSAN

SEQ ID NO: 31085 - protein, 7 aa, synthetic construct
  REGION 1..7: note = Description of Artificial Sequence: Synthetic peptide
QSSNARN

SEQ ID NO: 31086 - protein, 7 aa, synthetic construct
  REGION 1..7: note = Description of Artificial Sequence: Synthetic peptide
ELMNKSK

SEQ ID NO: 31087 - protein, 7 aa, synthetic construct
  REGION 1..7: note = Description of Artificial Sequence: Synthetic peptide
RSTKTEN

SEQ ID NO: 31088 - protein, 7 aa, synthetic construct
  REGION 1..7: note = Description of Artificial Sequence: Synthetic peptide
PMSHVSG

SEQ ID NO: 31089 - protein, 7 aa, synthetic construct
  REGION 1..7: note = Description of Artificial Sequence: Synthetic peptide
PSSPNSI

SEQ ID NO: 31090 - protein, 7 aa, synthetic construct
  REGION 1..7: note = Description of Artificial Sequence: Synthetic peptide
ETPNRSQ

SEQ ID NO: 31091 - protein, 7 aa, synthetic construct
  REGION 1..7: note = Description of Artificial Sequence: Synthetic peptide
GAERTVL

SEQ ID NO: 31092 - protein, 7 aa, synthetic construct
  REGION 1..7: note = Description of Artificial Sequence: Synthetic peptide
LVSSKSS

SEQ ID NO: 31093 - protein, 7 aa, synthetic construct
  REGION 1..7: note = Description of Artificial Sequence: Synthetic peptide
INGTQTL

SEQ ID NO: 31094 - protein, 7 aa, synthetic construct
  REGION 1..7: note = Description of Artificial Sequence: Synthetic peptide
PGQSTSS

SEQ ID NO: 31095 - protein, 7 aa, synthetic construct
  REGION 1..7: note = Description of Artificial Sequence: Synthetic peptide
AVSSKVG

SEQ ID NO: 31096 - protein, 7 aa, synthetic construct
  REGION 1..7: note = Description of Artificial Sequence: Synthetic peptide
LISSKSS

SEQ ID NO: 31097 - protein, 7 aa, synthetic construct
  REGION 1..7: note = Description of Artificial Sequence: Synthetic peptide
FHANSTV

SEQ ID NO: 31098 - protein, 7 aa, synthetic construct
  REGION 1..7: note = Description of Artificial Sequence: Synthetic peptide
GQNTHLT

SEQ ID NO: 31099 - protein, 7 aa, synthetic construct
  REGION 1..7: note = Description of Artificial Sequence: Synthetic peptide
RNVSGMN

SEQ ID NO: 31100 - protein, 7 aa, synthetic construct
  REGION 1..7: note = Description of Artificial Sequence: Synthetic peptide
SRPHTDG

SEQ ID NO: 31101 - protein, 7 aa, synthetic construct
  REGION 1..7: note = Description of Artificial Sequence: Synthetic peptide
LNKSTLP

SEQ ID NO: 31102 - protein, 7 aa, synthetic construct
  REGION 1..7: note = Description of Artificial Sequence: Synthetic peptide
GYEANRG

SEQ ID NO: 31103 - protein, 7 aa, synthetic construct
  REGION 1..7: note = Description of Artificial Sequence: Synthetic peptide
RPTQVGA

SEQ ID NO: 31104 - protein, 7 aa, synthetic construct
  REGION 1..7: note = Description of Artificial Sequence: Synthetic peptide
HTSPGKN

SEQ ID NO: 31105 - protein, 7 aa, synthetic construct
  REGION 1..7: note = Description of Artificial Sequence: Synthetic peptide
VPSQSLH

SEQ ID NO: 31106 - protein, 7 aa, synthetic construct
  REGION 1..7: note = Description of Artificial Sequence: Synthetic peptide
SLSKQAA

SEQ ID NO: 31107 - protein, 7 aa, synthetic construct
  REGION 1..7: note = Description of Artificial Sequence: Synthetic peptide
NTGIPTL

SEQ ID NO: 31108 - protein, 7 aa, synthetic construct
  REGION 1..7: note = Description of Artificial Sequence: Synthetic peptide
SIPTSAR

SEQ ID NO: 31109 - protein, 7 aa, synthetic construct
  REGION 1..7: note = Description of Artificial Sequence: Synthetic peptide
ERFTSSS

SEQ ID NO: 31110 - protein, 7 aa, synthetic construct
  REGION 1..7: note = Description of Artificial Sequence: Synthetic peptide
QQVNTTR

SEQ ID NO: 31111 - protein, 7 aa, synthetic construct
  REGION 1..7: note = Description of Artificial Sequence: Synthetic peptide
YTSKSTA

SEQ ID NO: 31112 - protein, 7 aa, synthetic construct
  REGION 1..7: note = Description of Artificial Sequence: Synthetic peptide
GHGNNGA

SEQ ID NO: 31113 - protein, 7 aa, synthetic construct
  REGION 1..7: note = Description of Artificial Sequence: Synthetic peptide
GRSPTAS

SEQ ID NO: 31114 - protein, 7 aa, synthetic construct
  REGION 1..7: note = Description of Artificial Sequence: Synthetic peptide
STTNSKN

SEQ ID NO: 31115 - protein, 7 aa, synthetic construct
  REGION 1..7: note = Description of Artificial Sequence: Synthetic peptide
PGQSTSK

SEQ ID NO: 31116 - protein, 7 aa, synthetic construct
  REGION 1..7: note = Description of Artificial Sequence: Synthetic peptide
IPGHPTA

SEQ ID NO: 31117 - protein, 7 aa, synthetic construct
  REGION 1..7: note = Description of Artificial Sequence: Synthetic peptide
NTSNNIQ

SEQ ID NO: 31118 - protein, 7 aa, synthetic construct
  REGION 1..7: note = Description of Artificial Sequence: Synthetic peptide
STDRSFN

SEQ ID NO: 31119 - protein, 7 aa, synthetic construct
  REGION 1..7: note = Description of Artificial Sequence: Synthetic peptide
SFSKGSS

SEQ ID NO: 31120 - protein, 7 aa, synthetic construct
  REGION 1..7: note = Description of Artificial Sequence: Synthetic peptide
NSAALNS

SEQ ID NO: 31121 - protein, 7 aa, synthetic construct
  REGION 1..7: note = Description of Artificial Sequence: Synthetic peptide
PLPNRNQ

SEQ ID NO: 31122 - protein, 7 aa, synthetic construct
  REGION 1..7: note = Description of Artificial Sequence: Synthetic peptide
EHMTPRS

SEQ ID NO: 31123 - protein, 7 aa, synthetic construct
  REGION 1..7: note = Description of Artificial Sequence: Synthetic peptide
TTHNIKG

SEQ ID NO: 31124 - protein, 7 aa, synthetic construct
  REGION 1..7: note = Description of Artificial Sequence: Synthetic peptide
AVSKGGP

SEQ ID NO: 31125 - protein, 7 aa, synthetic construct
  REGION 1..7: note = Description of Artificial Sequence: Synthetic peptide
SPASLPK

SEQ ID NO: 31126 - protein, 7 aa, synthetic construct
  REGION 1..7: note = Description of Artificial Sequence: Synthetic peptide
LIRGGNN

SEQ ID NO: 31127 - protein, 7 aa, synthetic construct
  REGION 1..7: note = Description of Artificial Sequence: Synthetic peptide
SSQQKAS

SEQ ID NO: 31128 - protein, 7 aa, synthetic construct
  REGION 1..7: note = Description of Artificial Sequence: Synthetic peptide
PYNSKAS

SEQ ID NO: 31129 - protein, 7 aa, synthetic construct
  REGION 1..7: note = Description of Artificial Sequence: Synthetic peptide
MNRNGSL

SEQ ID NO: 31130 - protein, 7 aa, synthetic construct
  REGION 1..7: note = Description of Artificial Sequence: Synthetic peptide
TRNQSVT

SEQ ID NO: 31131 - protein, 7 aa, synthetic construct
  REGION 1..7: note = Description of Artificial Sequence: Synthetic peptide
LGGGTLR

SEQ ID NO: 31132 - protein, 7 aa, synthetic construct
  REGION 1..7: note = Description of Artificial Sequence: Synthetic peptide
RTGESYM

SEQ ID NO: 31133 - protein, 7 aa, synthetic construct
  REGION 1..7: note = Description of Artificial Sequence: Synthetic peptide
ADSNRPG

SEQ ID NO: 31134 - protein, 7 aa, synthetic construct
  REGION 1..7: note = Description of Artificial Sequence: Synthetic peptide
VMGAGAS

SEQ ID NO: 31135 - protein, 7 aa, synthetic construct
  REGION 1..7: note = Description of Artificial Sequence: Synthetic peptide
NGSGQTQ

SEQ ID NO: 31136 - protein, 7 aa, synthetic construct
  REGION 1..7: note = Description of Artificial Sequence: Synthetic peptide
STLPGNS

SEQ ID NO: 31137 - protein, 7 aa, synthetic construct
  REGION 1..7: note = Description of Artificial Sequence: Synthetic peptide
YGNPRQA

SEQ ID NO: 31138 - protein, 7 aa, synthetic construct
  REGION 1..7: note = Description of Artificial Sequence: Synthetic peptide
RSQGSYA

SEQ ID NO: 31139 - protein, 7 aa, synthetic construct
  REGION 1..7: note = Description of Artificial Sequence: Synthetic peptide
SLPNTNG

SEQ ID NO: 31140 - protein, 7 aa, synthetic construct
  REGION 1..7: note = Description of Artificial Sequence: Synthetic peptide
RSGGSLS

SEQ ID NO: 31141 - protein, 7 aa, synthetic construct
  REGION 1..7: note = Description of Artificial Sequence: Synthetic peptide
SPVKGSV

SEQ ID NO: 31142 - protein, 7 aa, synthetic construct
  REGION 1..7: note = Description of Artificial Sequence: Synthetic peptide
SVSTKSA

SEQ ID NO: 31143 - protein, 7 aa, synthetic construct
  REGION 1..7: note = Description of Artificial Sequence: Synthetic peptide
DPRNSTS

SEQ ID NO: 31144 - protein, 7 aa, synthetic construct
  REGION 1..7: note = Description of Artificial Sequence: Synthetic peptide
WSASRSA

SEQ ID NO: 31145 - protein, 7 aa, synthetic construct
  REGION 1..7: note = Description of Artificial Sequence: Synthetic peptide
YSGGTQQ

SEQ ID NO: 31146 - protein, 7 aa, synthetic construct
  REGION 1..7: note = Description of Artificial Sequence: Synthetic peptide
PSHNPTN

SEQ ID NO: 31147 - protein, 7 aa, synthetic construct
  REGION 1..7: note = Description of Artificial Sequence: Synthetic peptide
GSGIKRE

SEQ ID NO: 31148 - protein, 7 aa, synthetic construct
  REGION 1..7: note = Description of Artificial Sequence: Synthetic peptide
NGISKSN

SEQ ID NO: 31149 - protein, 7 aa, synthetic construct
  REGION 1..7: note = Description of Artificial Sequence: Synthetic peptide
MTQHKQA

SEQ ID NO: 31150 - protein, 7 aa, synthetic construct
  REGION 1..7: note = Description of Artificial Sequence: Synthetic peptide
QSHGITN

SEQ ID NO: 31151 - protein, 7 aa, synthetic construct
  REGION 1..7: note = Description of Artificial Sequence: Synthetic peptide
SSAGTYT

SEQ ID NO: 31152 - protein, 7 aa, synthetic construct
  REGION 1..7: note = Description of Artificial Sequence: Synthetic peptide
GSSPSLR

SEQ ID NO: 31153 - protein, 7 aa, synthetic construct
  REGION 1..7: note = Description of Artificial Sequence: Synthetic peptide
GITKNLA

SEQ ID NO: 31154 - protein, 7 aa, synthetic construct
  REGION 1..7: note = Description of Artificial Sequence: Synthetic peptide
SGAGSAG

SEQ ID NO: 31155 - protein, 7 aa, synthetic construct
  REGION 1..7: note = Description of Artificial Sequence: Synthetic peptide
AQSTYQS

SEQ ID NO: 31156 - protein, 7 aa, synthetic construct
  REGION 1..7: note = Description of Artificial Sequence: Synthetic peptide
GSNRNPL

SEQ ID NO: 31157 - protein, 7 aa, synthetic construct
  REGION 1..7: note = Description of Artificial Sequence: Synthetic peptide
SSRSTAS

SEQ ID NO: 31158 - protein, 7 aa, synthetic construct
  REGION 1..7: note = Description of Artificial Sequence: Synthetic peptide
SHDTSYR

SEQ ID NO: 31159 - protein, 7 aa, synthetic construct
  REGION 1..7: note = Description of Artificial Sequence: Synthetic peptide
SSASTYK

SEQ ID NO: 31160 - protein, 7 aa, synthetic construct
  REGION 1..7: note = Description of Artificial Sequence: Synthetic peptide
NPNQSLG

SEQ ID NO: 31161 - protein, 7 aa, synthetic construct
  REGION 1..7: note = Description of Artificial Sequence: Synthetic peptide
VGSRNVG

SEQ ID NO: 31162 - protein, 7 aa, synthetic construct
  REGION 1..7: note = Description of Artificial Sequence: Synthetic peptide
HASTPAR

SEQ ID NO: 31163 - protein, 7 aa, synthetic construct
  REGION 1..7: note = Description of Artificial Sequence: Synthetic peptide
ASSSKSV

SEQ ID NO: 31164 - protein, 7 aa, synthetic construct
  REGION 1..7: note = Description of Artificial Sequence: Synthetic peptide
NLSHSAG

SEQ ID NO: 31165 - protein, 7 aa, synthetic construct
  REGION 1..7: note = Description of Artificial Sequence: Synthetic peptide
SITGNRT

SEQ ID NO: 31166 - protein, 7 aa, synthetic construct
  REGION 1..7: note = Description of Artificial Sequence: Synthetic peptide
STNPANR

SEQ ID NO: 31167 - protein, 7 aa, synthetic construct
  REGION 1..7: note = Description of Artificial Sequence: Synthetic peptide
IRTKESA

SEQ ID NO: 31168 - protein, 7 aa, synthetic construct
  REGION 1..7: note = Description of Artificial Sequence: Synthetic peptide
GINPTSV

SEQ ID NO: 31169 - protein, 7 aa, synthetic construct
  REGION 1..7: note = Description of Artificial Sequence: Synthetic peptide
DQRNRSI

SEQ ID NO: 31170 - protein, 7 aa, synthetic construct
  REGION 1..7: note = Description of Artificial Sequence: Synthetic peptide
TGRAPSS

SEQ ID NO: 31171 - protein, 7 aa, synthetic construct
  REGION 1..7: note = Description of Artificial Sequence: Synthetic peptide
NTHNIQG

SEQ ID NO: 31172 - protein, 7 aa, synthetic construct
  REGION 1..7: note = Description of Artificial Sequence: Synthetic peptide
NQSSSAR

SEQ ID NO: 31173 - protein, 7 aa, synthetic construct
  REGION 1..7: note = Description of Artificial Sequence: Synthetic peptide
FNSNRDS

SEQ ID NO: 31174 - protein, 7 aa, synthetic construct
  REGION 1..7: note = Description of Artificial Sequence: Synthetic peptide
NDSGQNQ

SEQ ID NO: 31175 - protein, 7 aa, synthetic construct
  REGION 1..7: note = Description of Artificial Sequence: Synthetic peptide
HGTSPLR

SEQ ID NO: 31176 - protein, 7 aa, synthetic construct
  REGION 1..7: note = Description of Artificial Sequence: Synthetic peptide
ITSGSTR

SEQ ID NO: 31177 - protein, 7 aa, synthetic construct
  REGION 1..7: note = Description of Artificial Sequence: Synthetic peptide
RMNGGGP

SEQ ID NO: 31178 - protein, 7 aa, synthetic construct
  REGION 1..7: note = Description of Artificial Sequence: Synthetic peptide
VGTNHTS

SEQ ID NO: 31179 - protein, 7 aa, synthetic construct
  REGION 1..7: note = Description of Artificial Sequence: Synthetic peptide
SYADKQG

SEQ ID NO: 31180 - protein, 7 aa, synthetic construct
  REGION 1..7: note = Description of Artificial Sequence: Synthetic peptide
LRAEHVR

SEQ ID NO: 31181 - protein, 7 aa, synthetic construct
  REGION 1..7: note = Description of Artificial Sequence: Synthetic peptide
VTTSRGV

SEQ ID NO: 31182 - protein, 7 aa, synthetic construct
  REGION 1..7: note = Description of Artificial Sequence: Synthetic peptide
NANPSLR

SEQ ID NO: 31183 - protein, 7 aa, synthetic construct
  REGION 1..7: note = Description of Artificial Sequence: Synthetic peptide
SSAPSLS

SEQ ID NO: 31184 - protein, 7 aa, synthetic construct
  REGION 1..7: note = Description of Artificial Sequence: Synthetic peptide
NSGRNSV

SEQ ID NO: 31185 - protein, 7 aa, synthetic construct
  REGION 1..7: note = Description of Artificial Sequence: Synthetic peptide
SFTKGAG

SEQ ID NO: 31186 - protein, 7 aa, synthetic construct
  REGION 1..7: note = Description of Artificial Sequence: Synthetic peptide
TTQSRSL

SEQ ID NO: 31187 - protein, 7 aa, synthetic construct
  REGION 1..7: note = Description of Artificial Sequence: Synthetic peptide
YRATSGQ

SEQ ID NO: 31188 - protein, 7 aa, synthetic construct
  REGION 1..7: note = Description of Artificial Sequence: Synthetic peptide
GKHGTNS

SEQ ID NO: 31189 - protein, 7 aa, synthetic construct
  REGION 1..7: note = Description of Artificial Sequence: Synthetic peptide
TGGNRVL

SEQ ID NO: 31190 - protein, 7 aa, synthetic construct
  REGION 1..7: note = Description of Artificial Sequence: Synthetic peptide
QRTVGTA

SEQ ID NO: 31191 - protein, 7 aa, synthetic construct
  REGION 1..7: note = Description of Artificial Sequence: Synthetic peptide
TSGSQVR

SEQ ID NO: 31192 - protein, 7 aa, synthetic construct
  REGION 1..7: note = Description of Artificial Sequence: Synthetic peptide
GAGNLTG

SEQ ID NO: 31193 - protein, 7 aa, synthetic construct
  REGION 1..7: note = Description of Artificial Sequence: Synthetic peptide
GGSNLRT

SEQ ID NO: 31194 - protein, 7 aa, synthetic construct
  REGION 1..7: note = Description of Artificial Sequence: Synthetic peptide
ARSPPSG

SEQ ID NO: 31195 - protein, 7 aa, synthetic construct
  REGION 1..7: note = Description of Artificial Sequence: Synthetic peptide
SSVQHTG

SEQ ID NO: 31196 - protein, 7 aa, synthetic construct
  REGION 1..7: note = Description of Artificial Sequence: Synthetic peptide
ATVSKTA

SEQ ID NO: 31197 - protein, 7 aa, synthetic construct
  REGION 1..7: note = Description of Artificial Sequence: Synthetic peptide
NGSGQHQ

SEQ ID NO: 31198 - protein, 7 aa, synthetic construct
  REGION 1..7: note = Description of Artificial Sequence: Synthetic peptide
AGHSGRD

SEQ ID NO: 31199 - protein, 7 aa, synthetic construct
  REGION 1..7: note = Description of Artificial Sequence: Synthetic peptide
EGTRGVG

SEQ ID NO: 31200 - protein, 7 aa, synthetic construct
  REGION 1..7: note = Description of Artificial Sequence: Synthetic peptide
GNTQTSR

SEQ ID NO: 31201 - protein, 7 aa, synthetic construct
  REGION 1..7: note = Description of Artificial Sequence: Synthetic peptide
MNTSRSS

SEQ ID NO: 31202 - protein, 7 aa, synthetic construct
  REGION 1..7: note = Description of Artificial Sequence: Synthetic peptide
GTNSTRG

SEQ ID NO: 31203 - protein, 7 aa, synthetic construct
  REGION 1..7: note = Description of Artificial Sequence: Synthetic peptide
PRVHPLV

SEQ ID NO: 31204 - protein, 7 aa, synthetic construct
  REGION 1..7: note = Description of Artificial Sequence: Synthetic peptide
MSGGNMR

SEQ ID NO: 31205 - protein, 7 aa, synthetic construct
  REGION 1..7: note = Description of Artificial Sequence: Synthetic peptide
ATNNGSK

SEQ ID NO: 31206 - protein, 7 aa, synthetic construct
  REGION 1..7: note = Description of Artificial Sequence: Synthetic peptide
ANSRDAK

SEQ ID NO: 31207 - protein, 7 aa, synthetic construct
  REGION 1..7: note = Description of Artificial Sequence: Synthetic peptide
PVARAAQ

SEQ ID NO: 31208 - protein, 7 aa, synthetic construct
  REGION 1..7: note = Description of Artificial Sequence: Synthetic peptide
QSGNTIQ

SEQ ID NO: 31209 - protein, 7 aa, synthetic construct
  REGION 1..7: note = Description of Artificial Sequence: Synthetic peptide
RASQSVG

SEQ ID NO: 31210 - protein, 7 aa, synthetic construct
  REGION 1..7: note = Description of Artificial Sequence: Synthetic peptide
PTLSGSR

SEQ ID NO: 31211 - protein, 7 aa, synthetic construct
  REGION 1..7: note = Description of Artificial Sequence: Synthetic peptide
MRQTASL

SEQ ID NO: 31212 - protein, 7 aa, synthetic construct
  REGION 1..7: note = Description of Artificial Sequence: Synthetic peptide
RSTDTHG

SEQ ID NO: 31213 - protein, 7 aa, synthetic construct
  REGION 1..7: note = Description of Artificial Sequence: Synthetic peptide
EFTKVGA

SEQ ID NO: 31214 - protein, 7 aa, synthetic construct
  REGION 1..7: note = Description of Artificial Sequence: Synthetic peptide
PMGHSLL

SEQ ID NO: 31215 - protein, 7 aa, synthetic construct
  REGION 1..7: note = Description of Artificial Sequence: Synthetic peptide
ARNPQVS

SEQ ID NO: 31216 - protein, 7 aa, synthetic construct
  REGION 1..7: note = Description of Artificial Sequence: Synthetic peptide
GTGTPRT

SEQ ID NO: 31217 - protein, 7 aa, synthetic construct
  REGION 1..7: note = Description of Artificial Sequence: Synthetic peptide
TAPSHTN

SEQ ID NO: 31218 - protein, 7 aa, synthetic construct
  REGION 1..7: note = Description of Artificial Sequence: Synthetic peptide
SATNGSL

SEQ ID NO: 31219 - protein, 7 aa, synthetic construct
  REGION 1..7: note = Description of Artificial Sequence: Synthetic peptide
ATHNSSQ

SEQ ID NO: 31220 - protein, 7 aa, synthetic construct
  REGION 1..7: note = Description of Artificial Sequence: Synthetic peptide
LLTSPNS

SEQ ID NO: 31221 - protein, 7 aa, synthetic construct
  REGION 1..7: note = Description of Artificial Sequence: Synthetic peptide
QSGSKPG

SEQ ID NO: 31222 - protein, 7 aa, synthetic construct
  REGION 1..7: note = Description of Artificial Sequence: Synthetic peptide
WRSQHNS

SEQ ID NO: 31223 - protein, 7 aa, synthetic construct
  REGION 1..7: note = Description of Artificial Sequence: Synthetic peptide
QPTQRMG

SEQ ID NO: 31224 - protein, 7 aa, synthetic construct
  REGION 1..7: note = Description of Artificial Sequence: Synthetic peptide
GMTQGGK

SEQ ID NO: 31225 - protein, 7 aa, synthetic construct
  REGION 1..7: note = Description of Artificial Sequence: Synthetic peptide
VSMNTTR

SEQ ID NO: 31226 - protein, 7 aa, synthetic construct
  REGION 1..7: note = Description of Artificial Sequence: Synthetic peptide
SPGNKLL

SEQ ID NO: 31227 - protein, 7 aa, synthetic construct
  REGION 1..7: note = Description of Artificial Sequence: Synthetic peptide
ATHSKAS

SEQ ID NO: 31228 - protein, 7 aa, synthetic construct
  REGION 1..7: note = Description of Artificial Sequence: Synthetic peptide
NSSHNVS

SEQ ID NO: 31229 - protein, 7 aa, synthetic construct
  REGION 1..7: note = Description of Artificial Sequence: Synthetic peptide
VNTNRAA

SEQ ID NO: 31230 - protein, 7 aa, synthetic construct
  REGION 1..7: note = Description of Artificial Sequence: Synthetic peptide
RSNPTLV

SEQ ID NO: 31231 - protein, 7 aa, synthetic construct
  REGION 1..7: note = Description of Artificial Sequence: Synthetic peptide
LPTSSVA

SEQ ID NO: 31232 - protein, 7 aa, synthetic construct
  REGION 1..7: note = Description of Artificial Sequence: Synthetic peptide
SGTSRFS

SEQ ID NO: 31233 - protein, 7 aa, synthetic construct
  REGION 1..7: note = Description of Artificial Sequence: Synthetic peptide
ASPNRGS

SEQ ID NO: 31234 - protein, 7 aa, synthetic construct
  REGION 1..7: note = Description of Artificial Sequence: Synthetic peptide
FVSGKVQ

SEQ ID NO: 31235 - protein, 7 aa, synthetic construct
  REGION 1..7: note = Description of Artificial Sequence: Synthetic peptide
SSSTSPR

SEQ ID NO: 31236 - protein, 7 aa, synthetic construct
  REGION 1..7: note = Description of Artificial Sequence: Synthetic peptide
QGLSKSG

SEQ ID NO: 31237 - protein, 7 aa, synthetic construct
  REGION 1..7: note = Description of Artificial Sequence: Synthetic peptide
SSEQTTR

SEQ ID NO: 31238 - protein, 7 aa, synthetic construct
  REGION 1..7: note = Description of Artificial Sequence: Synthetic peptide
IGTTPPK

SEQ ID NO: 31239 - protein, 7 aa, synthetic construct
  REGION 1..7: note = Description of Artificial Sequence: Synthetic peptide
PLSKDRL

SEQ ID NO: 31240 - protein, 7 aa, synthetic construct
  REGION 1..7: note = Description of Artificial Sequence: Synthetic peptide
TPQNVRN

SEQ ID NO: 31241 - protein, 7 aa, synthetic construct
  REGION 1..7: note = Description of Artificial Sequence: Synthetic peptide
PYAPRKD

SEQ ID NO: 31242 - protein, 7 aa, synthetic construct
  REGION 1..7: note = Description of Artificial Sequence: Synthetic peptide
SSTSPGR

SEQ ID NO: 31243 - protein, 7 aa, synthetic construct
  REGION 1..7: note = Description of Artificial Sequence: Synthetic peptide
GSLTPKA

SEQ ID NO: 31244 - protein, 7 aa, synthetic construct
  REGION 1..7: note = Description of Artificial Sequence: Synthetic peptide
MATSTVK

SEQ ID NO: 31245 - protein, 7 aa, synthetic construct
  REGION 1..7: note = Description of Artificial Sequence: Synthetic peptide
SAVGKAS

SEQ ID NO: 31246 - protein, 7 aa, synthetic construct
  REGION 1..7: note = Description of Artificial Sequence: Synthetic peptide
RPVGGLA

SEQ ID NO: 31247 - protein, 7 aa, synthetic construct
  REGION 1..7: note = Description of Artificial Sequence: Synthetic peptide
SNTHSPS

SEQ ID NO: 31248 - protein, 7 aa, synthetic construct
  REGION 1..7: note = Description of Artificial Sequence: Synthetic peptide
GDHNRMN

SEQ ID NO: 31249 - protein, 7 aa, synthetic construct
  REGION 1..7: note = Description of Artificial Sequence: Synthetic peptide
SSPVSAV

SEQ ID NO: 31250 - protein, 7 aa, synthetic construct
  REGION 1..7: note = Description of Artificial Sequence: Synthetic peptide
QNLPKAS

SEQ ID NO: 31251 - protein, 7 aa, synthetic construct
  REGION 1..7: note = Description of Artificial Sequence: Synthetic peptide
TNAARDS

SEQ ID NO: 31252 - protein, 7 aa, synthetic construct
  REGION 1..7: note = Description of Artificial Sequence: Synthetic peptide
ETNSRLG

SEQ ID NO: 31253 - protein, 7 aa, synthetic construct
  REGION 1..7: note = Description of Artificial Sequence: Synthetic peptide
TRDSSLH

SEQ ID NO: 31254 - protein, 7 aa, synthetic construct
  REGION 1..7: note = Description of Artificial Sequence: Synthetic peptide
VTQSSSK

SEQ ID NO: 31255 - protein, 7 aa, synthetic construct
  REGION 1..7: note = Description of Artificial Sequence: Synthetic peptide
AQTKGTQ

SEQ ID NO: 31256 - protein, 7 aa, synthetic construct
  REGION 1..7: note = Description of Artificial Sequence: Synthetic peptide
LLSSKTA

SEQ ID NO: 31257 - protein, 7 aa, synthetic construct
  REGION 1..7: note = Description of Artificial Sequence: Synthetic peptide
SPHTHQK

SEQ ID NO: 31258 - protein, 7 aa, synthetic construct
  REGION 1..7: note = Description of Artificial Sequence: Synthetic peptide
PSNTGTI

SEQ ID NO: 31259 - protein, 7 aa, synthetic construct
  REGION 1..7: note = Description of Artificial Sequence: Synthetic peptide
QNQNSGR

SEQ ID NO: 31260 - protein, 7 aa, synthetic construct
  REGION 1..7: note = Description of Artificial Sequence: Synthetic peptide
PTSQQRP

SEQ ID NO: 31261 - protein, 7 aa, synthetic construct
  REGION 1..7: note = Description of Artificial Sequence: Synthetic peptide
RGATSTS

SEQ ID NO: 31262 - protein, 7 aa, synthetic construct
  REGION 1..7: note = Description of Artificial Sequence: Synthetic peptide
SSVGRLN

SEQ ID NO: 31263 - protein, 7 aa, synthetic construct
  REGION 1..7: note = Description of Artificial Sequence: Synthetic peptide
QPNSGTT

SEQ ID NO: 31264 - protein, 7 aa, synthetic construct
  REGION 1..7: note = Description of Artificial Sequence: Synthetic peptide
AYPKNSN

SEQ ID NO: 31265 - protein, 7 aa, synthetic construct
  REGION 1..7: note = Description of Artificial Sequence: Synthetic peptide
SLTSTGK

SEQ ID NO: 31266 - protein, 7 aa, synthetic construct
  REGION 1..7: note = Description of Artificial Sequence: Synthetic peptide
TSGSARG

SEQ ID NO: 31267 - protein, 7 aa, synthetic construct
  REGION 1..7: note = Description of Artificial Sequence: Synthetic peptide
LNRPSLG

SEQ ID NO: 31268 - protein, 7 aa, synthetic construct
  REGION 1..7: note = Description of Artificial Sequence: Synthetic peptide
NCSGQNQ

SEQ ID NO: 31269 - protein, 7 aa, synthetic construct
  REGION 1..7: note = Description of Artificial Sequence: Synthetic peptide
MLPQNGR

SEQ ID NO: 31270 - protein, 7 aa, synthetic construct
  REGION 1..7: note = Description of Artificial Sequence: Synthetic peptide
GYGSKVS

SEQ ID NO: 31271 - protein, 7 aa, synthetic construct
  REGION 1..7: note = Description of Artificial Sequence: Synthetic peptide
SLSSKQM

SEQ ID NO: 31272 - protein, 7 aa, synthetic construct
  REGION 1..7: note = Description of Artificial Sequence: Synthetic peptide
NGATKNS

SEQ ID NO: 31273 - protein, 7 aa, synthetic construct
  REGION 1..7: note = Description of Artificial Sequence: Synthetic peptide
GPRSMSN

SEQ ID NO: 31274 - protein, 7 aa, synthetic construct
  REGION 1..7: note = Description of Artificial Sequence: Synthetic peptide
TSAAPHA

SEQ ID NO: 31275 - protein, 7 aa, synthetic construct
  REGION 1..7: note = Description of Artificial Sequence: Synthetic peptide
RSSPASL

SEQ ID NO: 31276 - protein, 7 aa, synthetic construct
  REGION 1..7: note = Description of Artificial Sequence: Synthetic peptide
GQVKALG

SEQ ID NO: 31277 - protein, 7 aa, synthetic construct
  REGION 1..7: note = Description of Artificial Sequence: Synthetic peptide
SDNTARS

SEQ ID NO: 31278 - protein, 7 aa, synthetic construct
  REGION 1..7: note = Description of Artificial Sequence: Synthetic peptide
RSNGSAA

SEQ ID NO: 31279 - protein, 7 aa, synthetic construct
  REGION 1..7: note = Description of Artificial Sequence: Synthetic peptide
YLTSTSN

SEQ ID NO: 31280 - protein, 7 aa, synthetic construct
  REGION 1..7: note = Description of Artificial Sequence: Synthetic peptide
SYKNTGV

SEQ ID NO: 31281 - protein, 7 aa, synthetic construct
  REGION 1..7: note = Description of Artificial Sequence: Synthetic peptide
TRSQGIL

SEQ ID NO: 31282 - protein, 7 aa, synthetic construct
  REGION 1..7: note = Description of Artificial Sequence: Synthetic peptide
SQSPNRG

SEQ ID NO: 31283 - protein, 7 aa, synthetic construct
  REGION 1..7: note = Description of Artificial Sequence: Synthetic peptide
FSRSPAV

SEQ ID NO: 31284 - protein, 7 aa, synthetic construct
  REGION 1..7: note = Description of Artificial Sequence: Synthetic peptide
YGKSVTP

SEQ ID NO: 31285 - protein, 7 aa, synthetic construct
  REGION 1..7: note = Description of Artificial Sequence: Synthetic peptide
TQMGKSN

SEQ ID NO: 31286 - protein, 7 aa, synthetic construct
  REGION 1..7: note = Description of Artificial Sequence: Synthetic peptide
LATANSR

SEQ ID NO: 31287 - protein, 7 aa, synthetic construct
  REGION 1..7: note = Description of Artificial Sequence: Synthetic peptide
VPSRAAT

SEQ ID NO: 31288 - protein, 7 aa, synthetic construct
  REGION 1..7: note = Description of Artificial Sequence: Synthetic peptide
DSHPRSI

SEQ ID NO: 31289 - protein, 7 aa, synthetic construct
  REGION 1..7: note = Description of Artificial Sequence: Synthetic peptide
SGSGQNQ

SEQ ID NO: 31290 - protein, 7 aa, synthetic construct
  REGION 1..7: note = Description of Artificial Sequence: Synthetic peptide
MSHTKSN

SEQ ID NO: 31291 - protein, 7 aa, synthetic construct
  REGION 1..7: note = Description of Artificial Sequence: Synthetic peptide
GRETVSR

SEQ ID NO: 31292 - protein, 7 aa, synthetic construct
  REGION 1..7: note = Description of Artificial Sequence: Synthetic peptide
GVLGSPK

SEQ ID NO: 31293 - protein, 7 aa, synthetic construct
  REGION 1..7: note = Description of Artificial Sequence: Synthetic peptide
PGMKVSP

SEQ ID NO: 31294 - protein, 7 aa, synthetic construct
  REGION 1..7: note = Description of Artificial Sequence: Synthetic peptide
QDKGNAG

SEQ ID NO: 31295 - protein, 7 aa, synthetic construct
  REGION 1..7: note = Description of Artificial Sequence: Synthetic peptide
GGSSRTL

SEQ ID NO: 31296 - protein, 7 aa, synthetic construct
  REGION 1..7: note = Description of Artificial Sequence: Synthetic peptide
PSNRQIA

SEQ ID NO: 31297 - protein, 7 aa, synthetic construct
  REGION 1..7: note = Description of Artificial Sequence: Synthetic peptide
GTTNSRN

SEQ ID NO: 31298 - protein, 7 aa, synthetic construct
  REGION 1..7: note = Description of Artificial Sequence: Synthetic peptide
PLRGGSS

SEQ ID NO: 31299 - protein, 7 aa, synthetic construct
  REGION 1..7: note = Description of Artificial Sequence: Synthetic peptide
SPNSHPS

SEQ ID NO: 31300 - protein, 7 aa, synthetic construct
  REGION 1..7: note = Description of Artificial Sequence: Synthetic peptide
PSKGTYP

SEQ ID NO: 31301 - protein, 7 aa, synthetic construct
  REGION 1..7: note = Description of Artificial Sequence: Synthetic peptide
GNGISAR

SEQ ID NO: 31302 - protein, 7 aa, synthetic construct
  REGION 1..7: note = Description of Artificial Sequence: Synthetic peptide
SSGNRTT

SEQ ID NO: 31303 - protein, 7 aa, synthetic construct
  REGION 1..7: note = Description of Artificial Sequence: Synthetic peptide
GTINGIT

SEQ ID NO: 31304 - protein, 7 aa, synthetic construct
  REGION 1..7: note = Description of Artificial Sequence: Synthetic peptide
HTVPRSV

SEQ ID NO: 31305 - protein, 7 aa, synthetic construct
  REGION 1..7: note = Description of Artificial Sequence: Synthetic peptide
QSKAGNS

SEQ ID NO: 31306 - protein, 7 aa, synthetic construct
  REGION 1..7: note = Description of Artificial Sequence: Synthetic peptide
GLPLRSV

SEQ ID NO: 31307 - protein, 7 aa, synthetic construct
  REGION 1..7: note = Description of Artificial Sequence: Synthetic peptide
MPSQRDG

SEQ ID NO: 31308 - protein, 7 aa, synthetic construct
  REGION 1..7: note = Description of Artificial Sequence: Synthetic peptide
GRANGQT

SEQ ID NO: 31309 - protein, 7 aa, synthetic construct
  REGION 1..7: note = Description of Artificial Sequence: Synthetic peptide
FRAQANV

SEQ ID NO: 31310 - protein, 7 aa, synthetic construct
  REGION 1..7: note = Description of Artificial Sequence: Synthetic peptide
TASPNNR

SEQ ID NO: 31311 - protein, 7 aa, synthetic construct
  REGION 1..7: note = Description of Artificial Sequence: Synthetic peptide
SSTNRPT

SEQ ID NO: 31312 - protein, 7 aa, synthetic construct
  REGION 1..7: note = Description of Artificial Sequence: Synthetic peptide
GSVNRSS

SEQ ID NO: 31313 - protein, 7 aa, synthetic construct
  REGION 1..7: note = Description of Artificial Sequence: Synthetic peptide
TMPAQRS

SEQ ID NO: 31314 - protein, 7 aa, synthetic construct
  REGION 1..7: note = Description of Artificial Sequence: Synthetic peptide
GVTGSRG

SEQ ID NO: 31315 - protein, 7 aa, synthetic construct
  REGION 1..7: note = Description of Artificial Sequence: Synthetic peptide
STTLRNS

SEQ ID NO: 31316 - protein, 7 aa, synthetic construct
  REGION 1..7: note = Description of Artificial Sequence: Synthetic peptide
PRTNNPS

SEQ ID NO: 31317 - protein, 7 aa, synthetic construct
  REGION 1..7: note = Description of Artificial Sequence: Synthetic peptide
EGSGRLT

SEQ ID NO: 31318 - protein, 7 aa, synthetic construct
  REGION 1..7: note = Description of Artificial Sequence: Synthetic peptide
MRSNPTS

SEQ ID NO: 31319 - protein, 7 aa, synthetic construct
  REGION 1..7: note = Description of Artificial Sequence: Synthetic peptide
FLGKSGA

SEQ ID NO: 31320 - protein, 7 aa, synthetic construct
  REGION 1..7: note = Description of Artificial Sequence: Synthetic peptide
VPHNHSL

SEQ ID NO: 31321 - protein, 7 aa, synthetic construct
  REGION 1..7: note = Description of Artificial Sequence: Synthetic peptide
QVSPASR

SEQ ID NO: 31322 - protein, 7 aa, synthetic construct
  REGION 1..7: note = Description of Artificial Sequence: Synthetic peptide
SPNANRV

SEQ ID NO: 31323 - protein, 7 aa, synthetic construct
  REGION 1..7: note = Description of Artificial Sequence: Synthetic peptide
SSPSRSS

SEQ ID NO: 31324 - protein, 7 aa, synthetic construct
  REGION 1..7: note = Description of Artificial Sequence: Synthetic peptide
EPTHPRG

SEQ ID NO: 31325 - protein, 7 aa, synthetic construct
  REGION 1..7: note = Description of Artificial Sequence: Synthetic peptide
MQAKSGH

SEQ ID NO: 31326 - protein, 7 aa, synthetic construct
  REGION 1..7: note = Description of Artificial Sequence: Synthetic peptide
NAARNNA

SEQ ID NO: 31327 - protein, 7 aa, synthetic construct
  REGION 1..7: note = Description of Artificial Sequence: Synthetic peptide
SANRPSA

SEQ ID NO: 31328 - protein, 7 aa, synthetic construct
  REGION 1..7: note = Description of Artificial Sequence: Synthetic peptide
RSPTSQS

SEQ ID NO: 31329 - protein, 7 aa, synthetic construct
  REGION 1..7: note = Description of Artificial Sequence: Synthetic peptide
ALPAKSA

SEQ ID NO: 31330 - protein, 7 aa, synthetic construct
  REGION 1..7: note = Description of Artificial Sequence: Synthetic peptide
PVMTRTP

SEQ ID NO: 31331 - protein, 7 aa, synthetic construct
  REGION 1..7: note = Description of Artificial Sequence: Synthetic peptide
GNPSPLV

SEQ ID NO: 31332 - protein, 7 aa, synthetic construct
  REGION 1..7: note = Description of Artificial Sequence: Synthetic peptide
ANGTKSS

SEQ ID NO: 31333 - protein, 7 aa, synthetic construct
  REGION 1..7: note = Description of Artificial Sequence: Synthetic peptide
PRDLRAS

SEQ ID NO: 31334 - protein, 7 aa, synthetic construct
  REGION 1..7: note = Description of Artificial Sequence: Synthetic peptide
QPGVSGR

SEQ ID NO: 31335 - protein, 7 aa, synthetic construct
  REGION 1..7: note = Description of Artificial Sequence: Synthetic peptide
PLTTRPS

SEQ ID NO: 31336 - protein, 7 aa, synthetic construct
  REGION 1..7: note = Description of Artificial Sequence: Synthetic peptide
PHSTGSI

SEQ ID NO: 31337 - protein, 7 aa, synthetic construct
  REGION 1..7: note = Description of Artificial Sequence: Synthetic peptide
GGQNSSK

SEQ ID NO: 31338 - protein, 7 aa, synthetic construct
  REGION 1..7: note = Description of Artificial Sequence: Synthetic peptide
EPSRSST

SEQ ID NO: 31339 - protein, 7 aa, synthetic construct
  REGION 1..7: note = Description of Artificial Sequence: Synthetic peptide
AYPSGSS

SEQ ID NO: 31340 - protein, 7 aa, synthetic construct
  REGION 1..7: note = Description of Artificial Sequence: Synthetic peptide
QLGSTTR

SEQ ID NO: 31341 - protein, 7 aa, synthetic construct
  REGION 1..7: note = Description of Artificial Sequence: Synthetic peptide
ARSESTA

SEQ ID NO: 31342 - protein, 7 aa, synthetic construct
  REGION 1..7: note = Description of Artificial Sequence: Synthetic peptide
APSARPS

SEQ ID NO: 31343 - protein, 7 aa, synthetic construct
  REGION 1..7: note = Description of Artificial Sequence: Synthetic peptide
TSNTKSV

SEQ ID NO: 31344 - protein, 7 aa, synthetic construct
  REGION 1..7: note = Description of Artificial Sequence: Synthetic peptide
PGIATGR

SEQ ID NO: 31345 - protein, 7 aa, synthetic construct
  REGION 1..7: note = Description of Artificial Sequence: Synthetic peptide
TSTQKGQ

SEQ ID NO: 31346 - protein, 7 aa, synthetic construct
  REGION 1..7: note = Description of Artificial Sequence: Synthetic peptide
DRMGTAH

SEQ ID NO: 31347 - protein, 7 aa, synthetic construct
  REGION 1..7: note = Description of Artificial Sequence: Synthetic peptide
SHTPKLV

SEQ ID NO: 31348 - protein, 7 aa, synthetic construct
  REGION 1..7: note = Description of Artificial Sequence: Synthetic peptide
RGNGTHG

SEQ ID NO: 31349 - protein, 7 aa, synthetic construct
  REGION 1..7: note = Description of Artificial Sequence: Synthetic peptide
PSHGQNR

SEQ ID NO: 31350 - protein, 7 aa, synthetic construct
  REGION 1..7: note = Description of Artificial Sequence: Synthetic peptide
SSPTRGL

SEQ ID NO: 31351 - protein, 7 aa, synthetic construct
  REGION 1..7: note = Description of Artificial Sequence: Synthetic peptide
TRFTSSA

SEQ ID NO: 31352 - protein, 7 aa, synthetic construct
  REGION 1..7: note = Description of Artificial Sequence: Synthetic peptide
SPFQSSH

SEQ ID NO: 31353 - protein, 7 aa, synthetic construct
  REGION 1..7: note = Description of Artificial Sequence: Synthetic peptide
GHSTVGS

SEQ ID NO: 31354 - protein, 7 aa, synthetic construct
  REGION 1..7: note = Description of Artificial Sequence: Synthetic peptide
SMNSKPT

SEQ ID NO: 31355 - protein, 7 aa, synthetic construct
  REGION 1..7: note = Description of Artificial Sequence: Synthetic peptide
PHISPKG

SEQ ID NO: 31356 - protein, 7 aa, synthetic construct
  REGION 1..7: note = Description of Artificial Sequence: Synthetic peptide
AGSSRNL

SEQ ID NO: 31357 - protein, 7 aa, synthetic construct
  REGION 1..7: note = Description of Artificial Sequence: Synthetic peptide
NRQSSPT

SEQ ID NO: 31358 - protein, 7 aa, synthetic construct
  REGION 1..7: note = Description of Artificial Sequence: Synthetic peptide
MRPNSGM

SEQ ID NO: 31359 - protein, 7 aa, synthetic construct
  REGION 1..7: note = Description of Artificial Sequence: Synthetic peptide
GGQASGR

SEQ ID NO: 31360 - protein, 7 aa, synthetic construct
  REGION 1..7: note = Description of Artificial Sequence: Synthetic peptide
MSTARSA

SEQ ID NO: 31361 - protein, 7 aa, synthetic construct
  REGION 1..7: note = Description of Artificial Sequence: Synthetic peptide
NLGTNVL

SEQ ID NO: 31362 - protein, 7 aa, synthetic construct
  REGION 1..7: note = Description of Artificial Sequence: Synthetic peptide
GTPNNRS

SEQ ID NO: 31363 - protein, 7 aa, synthetic construct
  REGION 1..7: note = Description of Artificial Sequence: Synthetic peptide
PVGSRGG

SEQ ID NO: 31364 - protein, 7 aa, synthetic construct
  REGION 1..7: note = Description of Artificial Sequence: Synthetic peptide
QVGRPNA

SEQ ID NO: 31365 - protein, 7 aa, synthetic construct
  REGION 1..7: note = Description of Artificial Sequence: Synthetic peptide
SVNTKAL

SEQ ID NO: 31366 - protein, 7 aa, synthetic construct
  REGION 1..7: note = Description of Artificial Sequence: Synthetic peptide
SPMRSQV

SEQ ID NO: 31367 - protein, 7 aa, synthetic construct
  REGION 1..7: note = Description of Artificial Sequence: Synthetic peptide
SSPSKMA

SEQ ID NO: 31368 - protein, 7 aa, synthetic construct
  REGION 1..7: note = Description of Artificial Sequence: Synthetic peptide
SQPIGAR

SEQ ID NO: 31369 - protein, 7 aa, synthetic construct
  REGION 1..7: note = Description of Artificial Sequence: Synthetic peptide
SHVNSTR

SEQ ID NO: 31370 - protein, 7 aa, synthetic construct
  REGION 1..7: note = Description of Artificial Sequence: Synthetic peptide
TTTTRPS

SEQ ID NO: 31371 - protein, 7 aa, synthetic construct
  REGION 1..7: note = Description of Artificial Sequence: Synthetic peptide
DGSGQNQ

SEQ ID NO: 31372 - protein, 7 aa, synthetic construct
  REGION 1..7: note = Description of Artificial Sequence: Synthetic peptide
NGSGENQ

SEQ ID NO: 31373 - protein, 7 aa, synthetic construct
  REGION 1..7: note = Description of Artificial Sequence: Synthetic peptide
HAETNLR

SEQ ID NO: 31374 - protein, 7 aa, synthetic construct
  REGION 1..7: note = Description of Artificial Sequence: Synthetic peptide
NGSGQDQ

SEQ ID NO: 31375 - protein, 7 aa, synthetic construct
  REGION 1..7: note = Description of Artificial Sequence: Synthetic peptide
NGPGQNQ

SEQ ID NO: 31376 - protein, 7 aa, synthetic construct
  REGION 1..7: note = Description of Artificial Sequence: Synthetic peptide
QGTTARS

SEQ ID NO: 31377 - protein, 7 aa, synthetic construct
  REGION 1..7: note = Description of Artificial Sequence: Synthetic peptide
QPNSASH

SEQ ID NO: 31378 - protein, 7 aa, synthetic construct
  REGION 1..7: note = Description of Artificial Sequence: Synthetic peptide
NGSEQNQ

SEQ ID NO: 31379 - protein, 7 aa, synthetic construct
  REGION 1..7: note = Description of Artificial Sequence: Synthetic peptide
HGSGQNQ

SEQ ID NO: 31380 - protein, 7 aa, synthetic construct
  REGION 1..7: note = Description of Artificial Sequence: Synthetic peptide
VGPSKIQ

SEQ ID NO: 31381 - protein, 7 aa, synthetic construct
  REGION 1..7: note = Description of Artificial Sequence: Synthetic peptide
MKGNNLS

SEQ ID NO: 31382 - protein, 7 aa, synthetic construct
  REGION 1..7: note = Description of Artificial Sequence: Synthetic peptide
NGSGQNP

SEQ ID NO: 31383 - protein, 7 aa, synthetic construct
  REGION 1..7: note = Description of Artificial Sequence: Synthetic peptide
HNTAHAS

SEQ ID NO: 31384 - protein, 7 aa, synthetic construct
  REGION 1..7: note = Description of Artificial Sequence: Synthetic peptide
SKTGTSL

SEQ ID NO: 31385 - protein, 7 aa, synthetic construct
  REGION 1..7: note = Description of Artificial Sequence: Synthetic peptide
RPNSLID

SEQ ID NO: 31386 - protein, 7 aa, synthetic construct
  REGION 1..7: note = Description of Artificial Sequence: Synthetic peptide
NGYGQNQ

SEQ ID NO: 31387 - protein, 7 aa, synthetic construct
  REGION 1..7: note = Description of Artificial Sequence: Synthetic peptide
DAGSRSS

SEQ ID NO: 31388 - protein, 7 aa, synthetic construct
  REGION 1..7: note = Description of Artificial Sequence: Synthetic peptide
NGTGQNQ

SEQ ID NO: 31389 - protein, 7 aa, synthetic construct
  REGION 1..7: note = Description of Artificial Sequence: Synthetic peptide
GTDSKRH

SEQ ID NO: 31390 - protein, 7 aa, synthetic construct
  REGION 1..7: note = Description of Artificial Sequence: Synthetic peptide
TGQQTAT

SEQ ID NO: 31391 - protein, 7 aa, synthetic construct
  REGION 1..7: note = Description of Artificial Sequence: Synthetic peptide
NYSGAHT

SEQ ID NO: 31392 - protein, 7 aa, synthetic construct
  REGION 1..7: note = Description of Artificial Sequence: Synthetic peptide
NGSRQNQ

SEQ ID NO: 31393 - protein, 7 aa, synthetic construct
  REGION 1..7: note = Description of Artificial Sequence: Synthetic peptide
RSSDRSA

SEQ ID NO: 31394 - protein, 7 aa, synthetic construct
  REGION 1..7: note = Description of Artificial Sequence: Synthetic peptide
VGSGRAN

SEQ ID NO: 31395 - protein, 7 aa, synthetic construct
  REGION 1..7: note = Description of Artificial Sequence: Synthetic peptide
TSNMVGK

SEQ ID NO: 31396 - protein, 7 aa, synthetic construct
  REGION 1..7: note = Description of Artificial Sequence: Synthetic peptide
NGAGQNQ

SEQ ID NO: 31397 - protein, 7 aa, synthetic construct
  REGION 1..7: note = Description of Artificial Sequence: Synthetic peptide
NGSGQSQ

SEQ ID NO: 31398 - protein, 7 aa, synthetic construct
  REGION 1..7: note = Description of Artificial Sequence: Synthetic peptide
LATSGSA

SEQ ID NO: 31399 - protein, 7 aa, synthetic construct
  REGION 1..7: note = Description of Artificial Sequence: Synthetic peptide
ERHSGSK

SEQ ID NO: 31400 - protein, 7 aa, synthetic construct
  REGION 1..7: note = Description of Artificial Sequence: Synthetic peptide
SAHNRSV

SEQ ID NO: 31401 - protein, 7 aa, synthetic construct
  REGION 1..7: note = Description of Artificial Sequence: Synthetic peptide
GRLNTNG

SEQ ID NO: 31402 - protein, 7 aa, synthetic construct
  REGION 1..7: note = Description of Artificial Sequence: Synthetic peptide
PPSKPNT

SEQ ID NO: 31403 - protein, 7 aa, synthetic construct
  REGION 1..7: note = Description of Artificial Sequence: Synthetic peptide
HQSSSSS

SEQ ID NO: 31404 - protein, 7 aa, synthetic construct
  REGION 1..7: note = Description of Artificial Sequence: Synthetic peptide
PARDSKS

SEQ ID NO: 31405 - protein, 7 aa, synthetic construct
  REGION 1..7: note = Description of Artificial Sequence: Synthetic peptide
SVSGRHI

SEQ ID NO: 31406 - protein, 7 aa, synthetic construct
  REGION 1..7: note = Description of Artificial Sequence: Synthetic peptide
LAPGHGN

SEQ ID NO: 31407 - protein, 7 aa, synthetic construct
  REGION 1..7: note = Description of Artificial Sequence: Synthetic peptide
HGSKPYI

SEQ ID NO: 31408 - protein, 7 aa, synthetic construct
  REGION 1..7: note = Description of Artificial Sequence: Synthetic peptide
EVHAKNN

SEQ ID NO: 31409 - protein, 7 aa, synthetic construct
  REGION 1..7: note = Description of Artificial Sequence: Synthetic peptide
SRTNATA

SEQ ID NO: 31410 - protein, 7 aa, synthetic construct
  REGION 1..7: note = Description of Artificial Sequence: Synthetic peptide
VQPVKMS

SEQ ID NO: 31411 - protein, 7 aa, synthetic construct
  REGION 1..7: note = Description of Artificial Sequence: Synthetic peptide
STPMSNR

SEQ ID NO: 31412 - protein, 7 aa, synthetic construct
  REGION 1..7: note = Description of Artificial Sequence: Synthetic peptide
GSPGVLR

SEQ ID NO: 31413 - protein, 7 aa, synthetic construct
  REGION 1..7: note = Description of Artificial Sequence: Synthetic peptide
TGIERPM

SEQ ID NO: 31414 - protein, 7 aa, synthetic construct
  REGION 1..7: note = Description of Artificial Sequence: Synthetic peptide
ISKASTH

SEQ ID NO: 31415 - protein, 7 aa, synthetic construct
  REGION 1..7: note = Description of Artificial Sequence: Synthetic peptide
RTSTAPQ

SEQ ID NO: 31416 - protein, 7 aa, synthetic construct
  REGION 1..7: note = Description of Artificial Sequence: Synthetic peptide
REDTKMH

SEQ ID NO: 31417 - protein, 7 aa, synthetic construct
  REGION 1..7: note = Description of Artificial Sequence: Synthetic peptide
PAHLKHS

SEQ ID NO: 31418 - protein, 7 aa, synthetic construct
  REGION 1..7: note = Description of Artificial Sequence: Synthetic peptide
HTDTRAV

SEQ ID NO: 31419 - protein, 7 aa, synthetic construct
  REGION 1..7: note = Description of Artificial Sequence: Synthetic peptide
NNTQKNS

SEQ ID NO: 31420 - protein, 7 aa, synthetic construct
  REGION 1..7: note = Description of Artificial Sequence: Synthetic peptide
PLERTTK

SEQ ID NO: 31421 - protein, 7 aa, synthetic construct
  REGION 1..7: note = Description of Artificial Sequence: Synthetic peptide
GTAIPRS

SEQ ID NO: 31422 - protein, 7 aa, synthetic construct
  REGION 1..7: note = Description of Artificial Sequence: Synthetic peptide
NRVERAV

SEQ ID NO: 31423 - protein, 7 aa, synthetic construct
  REGION 1..7: note = Description of Artificial Sequence: Synthetic peptide
HHSTLQT

SEQ ID NO: 31424 - protein, 7 aa, synthetic construct
  REGION 1..7: note = Description of Artificial Sequence: Synthetic peptide
AGAGMYA

SEQ ID NO: 31425 - protein, 7 aa, synthetic construct
  REGION 1..7: note = Description of Artificial Sequence: Synthetic peptide
GTFQSGT

SEQ ID NO: 31426 - protein, 7 aa, synthetic construct
  REGION 1..7: note = Description of Artificial Sequence: Synthetic peptide
QGQNRTV

SEQ ID NO: 31427 - protein, 7 aa, synthetic construct
  REGION 1..7: note = Description of Artificial Sequence: Synthetic peptide
INLSHST

SEQ ID NO: 31428 - protein, 7 aa, synthetic construct
  REGION 1..7: note = Description of Artificial Sequence: Synthetic peptide
GHVSAMR

SEQ ID NO: 31429 - protein, 7 aa, synthetic construct
  REGION 1..7: note = Description of Artificial Sequence: Synthetic peptide
SLTTKAN

SEQ ID NO: 31430 - protein, 7 aa, synthetic construct
  REGION 1..7: note = Description of Artificial Sequence: Synthetic peptide
VNLSPNH

SEQ ID NO: 31431 - protein, 7 aa, synthetic construct
  REGION 1..7: note = Description of Artificial Sequence: Synthetic peptide
AVTSHAR

SEQ ID NO: 31432 - protein, 7 aa, synthetic construct
  REGION 1..7: note = Description of Artificial Sequence: Synthetic peptide
NMPMRSG

SEQ ID NO: 31433 - protein, 7 aa, synthetic construct
  REGION 1..7: note = Description of Artificial Sequence: Synthetic peptide
IRTNSTL

SEQ ID NO: 31434 - protein, 7 aa, synthetic construct
  REGION 1..7: note = Description of Artificial Sequence: Synthetic peptide
PSTERNR

SEQ ID NO: 31435 - protein, 7 aa, synthetic construct
  REGION 1..7: note = Description of Artificial Sequence: Synthetic peptide
RPVVAST

SEQ ID NO: 31436 - protein, 7 aa, synthetic construct
  REGION 1..7: note = Description of Artificial Sequence: Synthetic peptide
YGLPSSR

SEQ ID NO: 31437 - protein, 7 aa, synthetic construct
  REGION 1..7: note = Description of Artificial Sequence: Synthetic peptide
GSSPKLT

SEQ ID NO: 31438 - protein, 7 aa, synthetic construct
  REGION 1..7: note = Description of Artificial Sequence: Synthetic peptide
RDSTAAR

SEQ ID NO: 31439 - protein, 7 aa, synthetic construct
  REGION 1..7: note = Description of Artificial Sequence: Synthetic peptide
NCRPNTT

SEQ ID NO: 31440 - protein, 7 aa, synthetic construct
  REGION 1..7: note = Description of Artificial Sequence: Synthetic peptide
HPGKPAG

SEQ ID NO: 31441 - protein, 7 aa, synthetic construct
  REGION 1..7: note = Description of Artificial Sequence: Synthetic peptide
ESPNLHS

SEQ ID NO: 31442 - protein, 7 aa, synthetic construct
  REGION 1..7: note = Description of Artificial Sequence: Synthetic peptide
SIPSTVR

SEQ ID NO: 31443 - protein, 7 aa, synthetic construct
  REGION 1..7: note = Description of Artificial Sequence: Synthetic peptide
VRAASNP

SEQ ID NO: 31444 - protein, 7 aa, synthetic construct
  REGION 1..7: note = Description of Artificial Sequence: Synthetic peptide
MGSSVRS

SEQ ID NO: 31445 - protein, 7 aa, synthetic construct
  REGION 1..7: note = Description of Artificial Sequence: Synthetic peptide
SVLNRNG

SEQ ID NO: 31446 - protein, 7 aa, synthetic construct
  REGION 1..7: note = Description of Artificial Sequence: Synthetic peptide
DSRPRLA

SEQ ID NO: 31447 - protein, 7 aa, synthetic construct
  REGION 1..7: note = Description of Artificial Sequence: Synthetic peptide
GAGTSLH

SEQ ID NO: 31448 - protein, 7 aa, synthetic construct
  REGION 1..7: note = Description of Artificial Sequence: Synthetic peptide
QPSQGHS

SEQ ID NO: 31449 - protein, 7 aa, synthetic construct
  REGION 1..7: note = Description of Artificial Sequence: Synthetic peptide
ASTAINQ

SEQ ID NO: 31450 - protein, 7 aa, synthetic construct
  REGION 1..7: note = Description of Artificial Sequence: Synthetic peptide
NLASSSY

SEQ ID NO: 31451 - protein, 7 aa, synthetic construct
  REGION 1..7: note = Description of Artificial Sequence: Synthetic peptide
SKVTAQS

SEQ ID NO: 31452 - protein, 7 aa, synthetic construct
  REGION 1..7: note = Description of Artificial Sequence: Synthetic peptide
HMNRKLE

SEQ ID NO: 31453 - protein, 7 aa, synthetic construct
  REGION 1..7: note = Description of Artificial Sequence: Synthetic peptide
GARPVLQ

SEQ ID NO: 31454 - protein, 7 aa, synthetic construct
  REGION 1..7: note = Description of Artificial Sequence: Synthetic peptide
AAQPSLK

SEQ ID NO: 31455 - protein, 7 aa, synthetic construct
  REGION 1..7: note = Description of Artificial Sequence: Synthetic peptide
DYSETRR

SEQ ID NO: 31456 - protein, 7 aa, synthetic construct
  REGION 1..7: note = Description of Artificial Sequence: Synthetic peptide
NNSKSQI

SEQ ID NO: 31457 - protein, 7 aa, synthetic construct
  REGION 1..7: note = Description of Artificial Sequence: Synthetic peptide
PLPAHSP

SEQ ID NO: 31458 - protein, 7 aa, synthetic construct
  REGION 1..7: note = Description of Artificial Sequence: Synthetic peptide
SPVKGSV

SEQ ID NO: 31459 - protein, 7 aa, synthetic construct
  REGION 1..7: note = Description of Artificial Sequence: Synthetic peptide
FGSTKAS

SEQ ID NO: 31460 - protein, 7 aa, synthetic construct
  REGION 1..7: note = Description of Artificial Sequence: Synthetic peptide
PGSGSNN

SEQ ID NO: 31461 - protein, 7 aa, synthetic construct
  REGION 1..7: note = Description of Artificial Sequence: Synthetic peptide
CLGSNNL

SEQ ID NO: 31462 - protein, 7 aa, synthetic construct
  REGION 1..7: note = Description of Artificial Sequence: Synthetic peptide
NGSGHNQ

SEQ ID NO: 31463 - protein, 7 aa, synthetic construct
  REGION 1..7: note = Description of Artificial Sequence: Synthetic peptide
LNKSTLP

SEQ ID NO: 31464 - protein, 7 aa, synthetic construct
  REGION 1..7: note = Description of Artificial Sequence: Synthetic peptide
GAERILR

SEQ ID NO: 31465 - protein, 7 aa, synthetic construct
  REGION 1..7: note = Description of Artificial Sequence: Synthetic peptide
SPEKNMR

SEQ ID NO: 31466 - protein, 7 aa, synthetic construct
  REGION 1..7: note = Description of Artificial Sequence: Synthetic peptide
ESARIGS

SEQ ID NO: 31467 - protein, 7 aa, synthetic construct
  REGION 1..7: note = Description of Artificial Sequence: Synthetic peptide
AATNSFG

SEQ ID NO: 31468 - protein, 7 aa, synthetic construct
  REGION 1..7: note = Description of Artificial Sequence: Synthetic peptide
HMNRKLE

SEQ ID NO: 31469 - protein, 7 aa, synthetic construct
  REGION 1..7: note = Description of Artificial Sequence: Synthetic peptide
AAQPSLK

SEQ ID NO: 31470 - protein, 7 aa, synthetic construct
  REGION 1..7: note = Description of Artificial Sequence: Synthetic peptide
GARPVLQ

SEQ ID NO: 31471 - protein, 7 aa, synthetic construct
  REGION 1..7: note = Description of Artificial Sequence: Synthetic peptide
QVLSVAG

SEQ ID NO: 31472 - protein, 7 aa, synthetic construct
  REGION 1..7: note = Description of Artificial Sequence: Synthetic peptide
KLNKSQA

SEQ ID NO: 31473 - protein, 7 aa, synthetic construct
  REGION 1..7: note = Description of Artificial Sequence: Synthetic peptide
NNTQKNS

SEQ ID NO: 31474 - protein, 7 aa, synthetic construct
  REGION 1..7: note = Description of Artificial Sequence: Synthetic peptide
GGTNNLN

SEQ ID NO: 31475 - protein, 7 aa, synthetic construct
  REGION 1..7: note = Description of Artificial Sequence: Synthetic peptide
GLSPVLK

SEQ ID NO: 31476 - protein, 7 aa, synthetic construct
  REGION 1..7: note = Description of Artificial Sequence: Synthetic peptide
STTGGAS

SEQ ID NO: 31477 - protein, 7 aa, synthetic construct
  REGION 1..7: note = Description of Artificial Sequence: Synthetic peptide
NTQSYTS

SEQ ID NO: 31478 - protein, 7 aa, synthetic construct
  REGION 1..7: note = Description of Artificial Sequence: Synthetic peptide
ETTTPRK

SEQ ID NO: 31479 - protein, 7 aa, synthetic construct
  REGION 1..7: note = Description of Artificial Sequence: Synthetic peptide
YSQEVFR

SEQ ID NO: 31480 - protein, 7 aa, synthetic construct
  REGION 1..7: note = Description of Artificial Sequence: Synthetic peptide
IIQDTAR

SEQ ID NO: 31481 - protein, 7 aa, synthetic construct
  REGION 1..7: note = Description of Artificial Sequence: Synthetic peptide
YINSPSN

SEQ ID NO: 31482 - protein, 7 aa, synthetic construct
  REGION 1..7: note = Description of Artificial Sequence: Synthetic peptide
HITPATS

SEQ ID NO: 31483 - protein, 7 aa, synthetic construct
  REGION 1..7: note = Description of Artificial Sequence: Synthetic peptide
VKVDGQI

SEQ ID NO: 31484 - protein, 7 aa, synthetic construct
  REGION 1..7: note = Description of Artificial Sequence: Synthetic peptide
NSNGINN

SEQ ID NO: 31485 - protein, 7 aa, synthetic construct
  REGION 1..7: note = Description of Artificial Sequence: Synthetic peptide
SGAGSAG

SEQ ID NO: 31486 - protein, 7 aa, synthetic construct
  REGION 1..7: note = Description of Artificial Sequence: Synthetic peptide
PRQYQSD

SEQ ID NO: 31487 - protein, 7 aa, synthetic construct
  REGION 1..7: note = Description of Artificial Sequence: Synthetic peptide
STTNSKN

SEQ ID NO: 31488 - protein, 7 aa, synthetic construct
  REGION 1..7: note = Description of Artificial Sequence: Synthetic peptide
YSGGNMS

SEQ ID NO: 31489 - protein, 7 aa, synthetic construct
  REGION 1..7: note = Description of Artificial Sequence: Synthetic peptide
SIKSVTN

SEQ ID NO: 31490 - protein, 7 aa, synthetic construct
  REGION 1..7: note = Description of Artificial Sequence: Synthetic peptide
LSSTHMT

SEQ ID NO: 31491 - protein, 7 aa, synthetic construct
  REGION 1..7: note = Description of Artificial Sequence: Synthetic peptide
NSITRSS

SEQ ID NO: 31492 - protein, 7 aa, synthetic construct
  REGION 1..7: note = Description of Artificial Sequence: Synthetic peptide
DRVGSIY

SEQ ID NO: 31493 - protein, 7 aa, synthetic construct
  REGION 1..7: note = Description of Artificial Sequence: Synthetic peptide
PYNVSQN

SEQ ID NO: 31494 - protein, 7 aa, synthetic construct
  REGION 1..7: note = Description of Artificial Sequence: Synthetic peptide
NREKLSY

SEQ ID NO: 31495 - protein, 7 aa, synthetic construct
  REGION 1..7: note = Description of Artificial Sequence: Synthetic peptide
PGSVTGS

SEQ ID NO: 31496 - protein, 7 aa, synthetic construct
  REGION 1..7: note = Description of Artificial Sequence: Synthetic peptide
DRVLSQG

SEQ ID NO: 31497 - protein, 7 aa, synthetic construct
  REGION 1..7: note = Description of Artificial Sequence: Synthetic peptide
RTLNLNT

SEQ ID NO: 31498 - protein, 7 aa, synthetic construct
  REGION 1..7: note = Description of Artificial Sequence: Synthetic peptide
ARDDQRR

SEQ ID NO: 31499 - protein, 7 aa, synthetic construct
  REGION 1..7: note = Description of Artificial Sequence: Synthetic peptide
NYDSLKK

SEQ ID NO: 31500 - protein, 7 aa, synthetic construct
  REGION 1..7: note = Description of Artificial Sequence: Synthetic peptide
LSNQNNQ

SEQ ID NO: 31501 - protein, 7 aa, synthetic construct
  REGION 1..7: note = Description of Artificial Sequence: Synthetic peptide
SSGGNMS

SEQ ID NO: 31502 - protein, 7 aa, synthetic construct
  REGION 1..7: note = Description of Artificial Sequence: Synthetic peptide
YEKNSLM

SEQ ID NO: 31503 - protein, 7 aa, synthetic construct
  REGION 1..7: note = Description of Artificial Sequence: Synthetic peptide
STGSVSK

SEQ ID NO: 31504 - protein, 7 aa, synthetic construct
  REGION 1..7: note = Description of Artificial Sequence: Synthetic peptide
VSKSPST

SEQ ID NO: 31505 - protein, 7 aa, synthetic construct
  REGION 1..7: note = Description of Artificial Sequence: Synthetic peptide
IKLDKQI

SEQ ID NO: 31506 - protein, 7 aa, synthetic construct
  REGION 1..7: note = Description of Artificial Sequence: Synthetic peptide
YSDNKTT

SEQ ID NO: 31507 - protein, 7 aa, synthetic construct
  REGION 1..7: note = Description of Artificial Sequence: Synthetic peptide
PQNNQAH

SEQ ID NO: 31508 - protein, 7 aa, synthetic construct
  REGION 1..7: note = Description of Artificial Sequence: Synthetic peptide
TTYGGNR

SEQ ID NO: 31509 - protein, 7 aa, synthetic construct
  REGION 1..7: note = Description of Artificial Sequence: Synthetic peptide
SPAYDTR

SEQ ID NO: 31510 - protein, 7 aa, synthetic construct
  REGION 1..7: note = Description of Artificial Sequence: Synthetic peptide
NGAGQNQ

SEQ ID NO: 31511 - protein, 7 aa, synthetic construct
  REGION 1..7: note = Description of Artificial Sequence: Synthetic peptide
DLTNHTK

SEQ ID NO: 31512 - protein, 7 aa, synthetic construct
  REGION 1..7: note = Description of Artificial Sequence: Synthetic peptide
IRAKESA

SEQ ID NO: 31513 - protein, 7 aa, synthetic construct
  REGION 1..7: note = Description of Artificial Sequence: Synthetic peptide
GQIKNLG

SEQ ID NO: 31514 - protein, 7 aa, synthetic construct
  REGION 1..7: note = Description of Artificial Sequence: Synthetic peptide
IGSGQNQ

SEQ ID NO: 31515 - protein, 7 aa, synthetic construct
  REGION 1..7: note = Description of Artificial Sequence: Synthetic peptide
GTGNSNL

SEQ ID NO: 31516 - protein, 7 aa, synthetic construct
  REGION 1..7: note = Description of Artificial Sequence: Synthetic peptide
ASTPNNT

SEQ ID NO: 31517 - protein, 7 aa, synthetic construct
  REGION 1..7: note = Description of Artificial Sequence: Synthetic peptide
GIQPGSN

SEQ ID NO: 31518 - protein, 7 aa, synthetic construct
  REGION 1..7: note = Description of Artificial Sequence: Synthetic peptide
DSGSSTK

SEQ ID NO: 31519 - protein, 7 aa, synthetic construct
  REGION 1..7: note = Description of Artificial Sequence: Synthetic peptide
KTSLNTS

SEQ ID NO: 31520 - protein, 7 aa, synthetic construct
  REGION 1..7: note = Description of Artificial Sequence: Synthetic peptide
KQPDSTH

SEQ ID NO: 31521 - protein, 7 aa, synthetic construct
  REGION 1..7: note = Description of Artificial Sequence: Synthetic peptide
NMDGATR

SEQ ID NO: 31522 - protein, 7 aa, synthetic construct
  REGION 1..7: note = Description of Artificial Sequence: Synthetic peptide
KLSNDNL

SEQ ID NO: 31523 - protein, 7 aa, synthetic construct
  REGION 1..7: note = Description of Artificial Sequence: Synthetic peptide
MFQKQGN

SEQ ID NO: 31524 - protein, 7 aa, synthetic construct
  REGION 1..7: note = Description of Artificial Sequence: Synthetic peptide
RVDTITK

SEQ ID NO: 31525 - protein, 7 aa, synthetic construct
  REGION 1..7: note = Description of Artificial Sequence: Synthetic peptide
STSIPGM

SEQ ID NO: 31526 - protein, 7 aa, synthetic construct
  REGION 1..7: note = Description of Artificial Sequence: Synthetic peptide
KTDKTVD

SEQ ID NO: 31527 - protein, 7 aa, synthetic construct
  REGION 1..7: note = Description of Artificial Sequence: Synthetic peptide
SLYTNAV

SEQ ID NO: 31528 - protein, 7 aa, synthetic construct
  REGION 1..7: note = Description of Artificial Sequence: Synthetic peptide
MSHTNRP

SEQ ID NO: 31529 - protein, 7 aa, synthetic construct
  REGION 1..7: note = Description of Artificial Sequence: Synthetic peptide
SNSDRAN

SEQ ID NO: 31530 - protein, 7 aa, synthetic construct
  REGION 1..7: note = Description of Artificial Sequence: Synthetic peptide
HTSPGKN

SEQ ID NO: 31531 - protein, 7 aa, synthetic construct
  REGION 1..7: note = Description of Artificial Sequence: Synthetic peptide
EPLQGSR

SEQ ID NO: 31532 - protein, 7 aa, synthetic construct
  REGION 1..7: note = Description of Artificial Sequence: Synthetic peptide
PGNSHKI

SEQ ID NO: 31533 - protein, 7 aa, synthetic construct
  REGION 1..7: note = Description of Artificial Sequence: Synthetic peptide
SSPQAHN

SEQ ID NO: 31534 - protein, 7 aa, synthetic construct
  REGION 1..7: note = Description of Artificial Sequence: Synthetic peptide
TTDKKTE

SEQ ID NO: 31535 - protein, 7 aa, synthetic construct
  REGION 1..7: note = Description of Artificial Sequence: Synthetic peptide
AMSSNNG

SEQ ID NO: 31536 - protein, 7 aa, synthetic construct
  REGION 1..7: note = Description of Artificial Sequence: Synthetic peptide
SDSRNTN

SEQ ID NO: 31537 - protein, 7 aa, synthetic construct
  REGION 1..7: note = Description of Artificial Sequence: Synthetic peptide
FNMQRSQ

SEQ ID NO: 31538 - protein, 7 aa, synthetic construct
  REGION 1..7: note = Description of Artificial Sequence: Synthetic peptide
MALQPNR

SEQ ID NO: 31539 - protein, 7 aa, synthetic construct
  REGION 1..7: note = Description of Artificial Sequence: Synthetic peptide
NSEARLS

SEQ ID NO: 31540 - protein, 7 aa, synthetic construct
  REGION 1..7: note = Description of Artificial Sequence: Synthetic peptide
PSSPNSI

SEQ ID NO: 31541 - protein, 7 aa, synthetic construct
  REGION 1..7: note = Description of Artificial Sequence: Synthetic peptide
LINPAGS

SEQ ID NO: 31542 - protein, 7 aa, synthetic construct
  REGION 1..7: note = Description of Artificial Sequence: Synthetic peptide
EISRPAS

SEQ ID NO: 31543 - protein, 7 aa, synthetic construct
  REGION 1..7: note = Description of Artificial Sequence: Synthetic peptide
EVFSSQK

SEQ ID NO: 31544 - protein, 7 aa, synthetic construct
  REGION 1..7: note = Description of Artificial Sequence: Synthetic peptide
ESNSSRG

SEQ ID NO: 31545 - protein, 7 aa, synthetic construct
  REGION 1..7: note = Description of Artificial Sequence: Synthetic peptide
QLQPRVA

SEQ ID NO: 31546 - protein, 7 aa, synthetic construct
  REGION 1..7: note = Description of Artificial Sequence: Synthetic peptide
QSGPGVT

SEQ ID NO: 31547 - protein, 7 aa, synthetic construct
  REGION 1..7: note = Description of Artificial Sequence: Synthetic peptide
NSAAAMK

SEQ ID NO: 31548 - protein, 7 aa, synthetic construct
  REGION 1..7: note = Description of Artificial Sequence: Synthetic peptide
FPSVSTT

SEQ ID NO: 31549 - protein, 7 aa, synthetic construct
  REGION 1..7: note = Description of Artificial Sequence: Synthetic peptide
ENNSRAT

SEQ ID NO: 31550 - protein, 7 aa, synthetic construct
  REGION 1..7: note = Description of Artificial Sequence: Synthetic peptide
LPSGNTS

SEQ ID NO: 31551 - protein, 7 aa, synthetic construct
  REGION 1..7: note = Description of Artificial Sequence: Synthetic peptide
NKSNTFL

SEQ ID NO: 31552 - protein, 7 aa, synthetic construct
  REGION 1..7: note = Description of Artificial Sequence: Synthetic peptide
PGQSTSS

SEQ ID NO: 31553 - protein, 7 aa, synthetic construct
  REGION 1..7: note = Description of Artificial Sequence: Synthetic peptide
LSGHSPQ

SEQ ID NO: 31554 - protein, 7 aa, synthetic construct
  REGION 1..7: note = Description of Artificial Sequence: Synthetic peptide
SPLQSIV

SEQ ID NO: 31555 - protein, 7 aa, synthetic construct
  REGION 1..7: note = Description of Artificial Sequence: Synthetic peptide
RIAGPTV

SEQ ID NO: 31556 - protein, 7 aa, synthetic construct
  REGION 1..7: note = Description of Artificial Sequence: Synthetic peptide
GVEAMRN

SEQ ID NO: 31557 - protein, 7 aa, synthetic construct
  REGION 1..7: note = Description of Artificial Sequence: Synthetic peptide
QETRGNS

SEQ ID NO: 31558 - protein, 7 aa, synthetic construct
  REGION 1..7: note = Description of Artificial Sequence: Synthetic peptide
ARDERAF

SEQ ID NO: 31559 - protein, 7 aa, synthetic construct
  REGION 1..7: note = Description of Artificial Sequence: Synthetic peptide
YIDASAR

SEQ ID NO: 31560 - protein, 7 aa, synthetic construct
  REGION 1..7: note = Description of Artificial Sequence: Synthetic peptide
PSTGNSV

SEQ ID NO: 31561 - protein, 7 aa, synthetic construct
  REGION 1..7: note = Description of Artificial Sequence: Synthetic peptide
RITSSNQ

SEQ ID NO: 31562 - protein, 7 aa, synthetic construct
  REGION 1..7: note = Description of Artificial Sequence: Synthetic peptide
GRSMERS

SEQ ID NO: 31563 - protein, 7 aa, synthetic construct
  REGION 1..7: note = Description of Artificial Sequence: Synthetic peptide
VTRGLNV

SEQ ID NO: 31564 - protein, 7 aa, synthetic construct
  REGION 1..7: note = Description of Artificial Sequence: Synthetic peptide
FHANSTV

SEQ ID NO: 31565 - protein, 7 aa, synthetic construct
  REGION 1..7: note = Description of Artificial Sequence: Synthetic peptide
MPLKPHL

SEQ ID NO: 31566 - protein, 7 aa, synthetic construct
  REGION 1..7: note = Description of Artificial Sequence: Synthetic peptide
EATSSTK

SEQ ID NO: 31567 - protein, 7 aa, synthetic construct
  REGION 1..7: note = Description of Artificial Sequence: Synthetic peptide
INFSGTR

SEQ ID NO: 31568 - protein, 7 aa, synthetic construct
  REGION 1..7: note = Description of Artificial Sequence: Synthetic peptide
NPAHGLN

SEQ ID NO: 31569 - protein, 7 aa, synthetic construct
  REGION 1..7: note = Description of Artificial Sequence: Synthetic peptide
MGSSVRS

SEQ ID NO: 31570 - protein, 7 aa, synthetic construct
  REGION 1..7: note = Description of Artificial Sequence: Synthetic peptide
VSYARTE

SEQ ID NO: 31571 - protein, 7 aa, synthetic construct
  REGION 1..7: note = Description of Artificial Sequence: Synthetic peptide
QSEIVNK

SEQ ID NO: 31572 - protein, 7 aa, synthetic construct
  REGION 1..7: note = Description of Artificial Sequence: Synthetic peptide
YSNSRVG

SEQ ID NO: 31573 - protein, 7 aa, synthetic construct
  REGION 1..7: note = Description of Artificial Sequence: Synthetic peptide
VQRSSNQ

SEQ ID NO: 31574 - protein, 7 aa, synthetic construct
  REGION 1..7: note = Description of Artificial Sequence: Synthetic peptide
SYVGTTA

SEQ ID NO: 31575 - protein, 7 aa, synthetic construct
  REGION 1..7: note = Description of Artificial Sequence: Synthetic peptide
TSQTKIV

SEQ ID NO: 31576 - protein, 7 aa, synthetic construct
  REGION 1..7: note = Description of Artificial Sequence: Synthetic peptide
NREQLRD

SEQ ID NO: 31577 - protein, 7 aa, synthetic construct
  REGION 1..7: note = Description of Artificial Sequence: Synthetic peptide
QFPGTLR

SEQ ID NO: 31578 - protein, 7 aa, synthetic construct
  REGION 1..7: note = Description of Artificial Sequence: Synthetic peptide
ELMNKSK

SEQ ID NO: 31579 - protein, 7 aa, synthetic construct
  REGION 1..7: note = Description of Artificial Sequence: Synthetic peptide
IRTNSTL

SEQ ID NO: 31580 - protein, 7 aa, synthetic construct
  REGION 1..7: note = Description of Artificial Sequence: Synthetic peptide
EVTNAPK

SEQ ID NO: 31581 - protein, 7 aa, synthetic construct
  REGION 1..7: note = Description of Artificial Sequence: Synthetic peptide
QQSPRNG

SEQ ID NO: 31582 - protein, 7 aa, synthetic construct
  REGION 1..7: note = Description of Artificial Sequence: Synthetic peptide
HTSPPFT

SEQ ID NO: 31583 - protein, 7 aa, synthetic construct
  REGION 1..7: note = Description of Artificial Sequence: Synthetic peptide
GLGQQTN

SEQ ID NO: 31584 - protein, 7 aa, synthetic construct
  REGION 1..7: note = Description of Artificial Sequence: Synthetic peptide
NSYDPKR

SEQ ID NO: 31585 - protein, 7 aa, synthetic construct
  REGION 1..7: note = Description of Artificial Sequence: Synthetic peptide
DPRAQSH

SEQ ID NO: 31586 - protein, 7 aa, synthetic construct
  REGION 1..7: note = Description of Artificial Sequence: Synthetic peptide
HRDTNGK

SEQ ID NO: 31587 - protein, 7 aa, synthetic construct
  REGION 1..7: note = Description of Artificial Sequence: Synthetic peptide
NNLAGSK

SEQ ID NO: 31588 - protein, 7 aa, synthetic construct
  REGION 1..7: note = Description of Artificial Sequence: Synthetic peptide
RVSSPSN

SEQ ID NO: 31589 - protein, 7 aa, synthetic construct
  REGION 1..7: note = Description of Artificial Sequence: Synthetic peptide
IASSGMH

SEQ ID NO: 31590 - protein, 7 aa, synthetic construct
  REGION 1..7: note = Description of Artificial Sequence: Synthetic peptide
RATPLSG

SEQ ID NO: 31591 - protein, 7 aa, synthetic construct
  REGION 1..7: note = Description of Artificial Sequence: Synthetic peptide
NRVEHTQ

SEQ ID NO: 31592 - protein, 7 aa, synthetic construct
  REGION 1..7: note = Description of Artificial Sequence: Synthetic peptide
MLGSSNK

SEQ ID NO: 31593 - protein, 7 aa, synthetic construct
  REGION 1..7: note = Description of Artificial Sequence: Synthetic peptide
HGISNQS

SEQ ID NO: 31594 - protein, 7 aa, synthetic construct
  REGION 1..7: note = Description of Artificial Sequence: Synthetic peptide
ALSSQKG

SEQ ID NO: 31595 - protein, 7 aa, synthetic construct
  REGION 1..7: note = Description of Artificial Sequence: Synthetic peptide
TTASSPT

SEQ ID NO: 31596 - protein, 7 aa, synthetic construct
  REGION 1..7: note = Description of Artificial Sequence: Synthetic peptide
SLSTGSG

SEQ ID NO: 31597 - protein, 7 aa, synthetic construct
  REGION 1..7: note = Description of Artificial Sequence: Synthetic peptide
KPQGSLV

SEQ ID NO: 31598 - protein, 7 aa, synthetic construct
  REGION 1..7: note = Description of Artificial Sequence: Synthetic peptide
PHLPQSA

SEQ ID NO: 31599 - protein, 7 aa, synthetic construct
  REGION 1..7: note = Description of Artificial Sequence: Synthetic peptide
GELPDRR

SEQ ID NO: 31600 - protein, 7 aa, synthetic construct
  REGION 1..7: note = Description of Artificial Sequence: Synthetic peptide
SLGSGFQ

SEQ ID NO: 31601 - protein, 7 aa, synthetic construct
  REGION 1..7: note = Description of Artificial Sequence: Synthetic peptide
PNGAHVT

SEQ ID NO: 31602 - protein, 7 aa, synthetic construct
  REGION 1..7: note = Description of Artificial Sequence: Synthetic peptide
ATTSRIS

SEQ ID NO: 31603 - protein, 7 aa, synthetic construct
  REGION 1..7: note = Description of Artificial Sequence: Synthetic peptide
SKVTAQS

SEQ ID NO: 31604 - protein, 7 aa, synthetic construct
  REGION 1..7: note = Description of Artificial Sequence: Synthetic peptide
SNYKSSN

SEQ ID NO: 31605 - protein, 7 aa, synthetic construct
  REGION 1..7: note = Description of Artificial Sequence: Synthetic peptide
NFSNPTV

SEQ ID NO: 31606 - protein, 7 aa, synthetic construct
  REGION 1..7: note = Description of Artificial Sequence: Synthetic peptide
PGYGSNH

SEQ ID NO: 31607 - protein, 7 aa, synthetic construct
  REGION 1..7: note = Description of Artificial Sequence: Synthetic peptide
FQPRSST

SEQ ID NO: 31608 - protein, 7 aa, synthetic construct
  REGION 1..7: note = Description of Artificial Sequence: Synthetic peptide
GIREYNK

SEQ ID NO: 31609 - protein, 7 aa, synthetic construct
  REGION 1..7: note = Description of Artificial Sequence: Synthetic peptide
NNPKNAV

SEQ ID NO: 31610 - protein, 7 aa, synthetic construct
  REGION 1..7: note = Description of Artificial Sequence: Synthetic peptide
LPSNSIH

SEQ ID NO: 31611 - protein, 7 aa, synthetic construct
  REGION 1..7: note = Description of Artificial Sequence: Synthetic peptide
RPESSYS

SEQ ID NO: 31612 - protein, 7 aa, synthetic construct
  REGION 1..7: note = Description of Artificial Sequence: Synthetic peptide
NPSEKML

SEQ ID NO: 31613 - protein, 7 aa, synthetic construct
  REGION 1..7: note = Description of Artificial Sequence: Synthetic peptide
NGSRQNQ

SEQ ID NO: 31614 - protein, 7 aa, synthetic construct
  REGION 1..7: note = Description of Artificial Sequence: Synthetic peptide
YVTSSGG

SEQ ID NO: 31615 - protein, 7 aa, synthetic construct
  REGION 1..7: note = Description of Artificial Sequence: Synthetic peptide
YTASRME

SEQ ID NO: 31616 - protein, 7 aa, synthetic construct
  REGION 1..7: note = Description of Artificial Sequence: Synthetic peptide
LCASKCD

SEQ ID NO: 31617 - protein, 7 aa, synthetic construct
  REGION 1..7: note = Description of Artificial Sequence: Synthetic peptide
FSSASFT

SEQ ID NO: 31618 - protein, 7 aa, synthetic construct
  REGION 1..7: note = Description of Artificial Sequence: Synthetic peptide
LMSAATT

SEQ ID NO: 31619 - protein, 7 aa, synthetic construct
  REGION 1..7: note = Description of Artificial Sequence: Synthetic peptide
GLPTEKM

SEQ ID NO: 31620 - protein, 7 aa, synthetic construct
  REGION 1..7: note = Description of Artificial Sequence: Synthetic peptide
FVKTHSA

SEQ ID NO: 31621 - protein, 7 aa, synthetic construct
  REGION 1..7: note = Description of Artificial Sequence: Synthetic peptide
GSLDNRK

SEQ ID NO: 31622 - protein, 7 aa, synthetic construct
  REGION 1..7: note = Description of Artificial Sequence: Synthetic peptide
TGSSSSQ

SEQ ID NO: 31623 - protein, 7 aa, synthetic construct
  REGION 1..7: note = Description of Artificial Sequence: Synthetic peptide
NGATKNS

SEQ ID NO: 31624 - protein, 7 aa, synthetic construct
  REGION 1..7: note = Description of Artificial Sequence: Synthetic peptide
REDTKMH

SEQ ID NO: 31625 - protein, 7 aa, synthetic construct
  REGION 1..7: note = Description of Artificial Sequence: Synthetic peptide
RTASSLP

SEQ ID NO: 31626 - protein, 7 aa, synthetic construct
  REGION 1..7: note = Description of Artificial Sequence: Synthetic peptide
LRDTNMN

SEQ ID NO: 31627 - protein, 7 aa, synthetic construct
  REGION 1..7: note = Description of Artificial Sequence: Synthetic peptide
TQSHNLA

SEQ ID NO: 31628 - protein, 7 aa, synthetic construct
  REGION 1..7: note = Description of Artificial Sequence: Synthetic peptide
PFSEMQK

SEQ ID NO: 31629 - protein, 7 aa, synthetic construct
  REGION 1..7: note = Description of Artificial Sequence: Synthetic peptide
GKTGPNS

SEQ ID NO: 31630 - protein, 7 aa, synthetic construct
  REGION 1..7: note = Description of Artificial Sequence: Synthetic peptide
QEARVYS

SEQ ID NO: 31631 - protein, 7 aa, synthetic construct
  REGION 1..7: note = Description of Artificial Sequence: Synthetic peptide
VTTGGSK

SEQ ID NO: 31632 - protein, 7 aa, synthetic construct
  REGION 1..7: note = Description of Artificial Sequence: Synthetic peptide
TARGGPT

SEQ ID NO: 31633 - protein, 7 aa, synthetic construct
  REGION 1..7: note = Description of Artificial Sequence: Synthetic peptide
NLGNSLK

SEQ ID NO: 31634 - protein, 7 aa, synthetic construct
  REGION 1..7: note = Description of Artificial Sequence: Synthetic peptide
SVSSPRD

SEQ ID NO: 31635 - protein, 7 aa, synthetic construct
  REGION 1..7: note = Description of Artificial Sequence: Synthetic peptide
AMGSSLS

SEQ ID NO: 31636 - protein, 7 aa, synthetic construct
  REGION 1..7: note = Description of Artificial Sequence: Synthetic peptide
PGSGSKH

SEQ ID NO: 31637 - protein, 7 aa, synthetic construct
  REGION 1..7: note = Description of Artificial Sequence: Synthetic peptide
QPNASPT

SEQ ID NO: 31638 - protein, 7 aa, synthetic construct
  REGION 1..7: note = Description of Artificial Sequence: Synthetic peptide
VTQSSSK

SEQ ID NO: 31639 - protein, 7 aa, synthetic construct
  REGION 1..7: note = Description of Artificial Sequence: Synthetic peptide
AYPSGSS

SEQ ID NO: 31640 - protein, 7 aa, synthetic construct
  REGION 1..7: note = Description of Artificial Sequence: Synthetic peptide
FSSKTSP

SEQ ID NO: 31641 - protein, 7 aa, synthetic construct
  REGION 1..7: note = Description of Artificial Sequence: Synthetic peptide
PSHNPTN

SEQ ID NO: 31642 - protein, 7 aa, synthetic construct
  REGION 1..7: note = Description of Artificial Sequence: Synthetic peptide
TGSSKVG

SEQ ID NO: 31643 - protein, 7 aa, synthetic construct
  REGION 1..7: note = Description of Artificial Sequence: Synthetic peptide
VSGTKIE

SEQ ID NO: 31644 - protein, 7 aa, synthetic construct
  REGION 1..7: note = Description of Artificial Sequence: Synthetic peptide
SHSSPYK

SEQ ID NO: 31645 - protein, 7 aa, synthetic construct
  REGION 1..7: note = Description of Artificial Sequence: Synthetic peptide
QNQNSGR

SEQ ID NO: 31646 - protein, 7 aa, synthetic construct
  REGION 1..7: note = Description of Artificial Sequence: Synthetic peptide
GLHSVAK

SEQ ID NO: 31647 - protein, 7 aa, synthetic construct
  REGION 1..7: note = Description of Artificial Sequence: Synthetic peptide
SPTSPMN

SEQ ID NO: 31648 - protein, 7 aa, synthetic construct
  REGION 1..7: note = Description of Artificial Sequence: Synthetic peptide
SISDKLG

SEQ ID NO: 31649 - protein, 7 aa, synthetic construct
  REGION 1..7: note = Description of Artificial Sequence: Synthetic peptide
GPNPGNH

SEQ ID NO: 31650 - protein, 7 aa, synthetic construct
  REGION 1..7: note = Description of Artificial Sequence: Synthetic peptide
PSGSPVR

SEQ ID NO: 31651 - protein, 7 aa, synthetic construct
  REGION 1..7: note = Description of Artificial Sequence: Synthetic peptide
GITKNLA

SEQ ID NO: 31652 - protein, 7 aa, synthetic construct
  REGION 1..7: note = Description of Artificial Sequence: Synthetic peptide
AGSNSQG

SEQ ID NO: 31653 - protein, 7 aa, synthetic construct
  REGION 1..7: note = Description of Artificial Sequence: Synthetic peptide
PARSTLS

SEQ ID NO: 31654 - protein, 7 aa, synthetic construct
  REGION 1..7: note = Description of Artificial Sequence: Synthetic peptide
ESVRSSS

SEQ ID NO: 31655 - protein, 7 aa, synthetic construct
  REGION 1..7: note = Description of Artificial Sequence: Synthetic peptide
VNTSHTN

SEQ ID NO: 31656 - protein, 7 aa, synthetic construct
  REGION 1..7: note = Description of Artificial Sequence: Synthetic peptide
YNGGNRS

SEQ ID NO: 31657 - protein, 7 aa, synthetic construct
  REGION 1..7: note = Description of Artificial Sequence: Synthetic peptide
GDHNRLN

SEQ ID NO: 31658 - protein, 7 aa, synthetic construct
  REGION 1..7: note = Description of Artificial Sequence: Synthetic peptide
ARVGSIS

SEQ ID NO: 31659 - protein, 7 aa, synthetic construct
  REGION 1..7: note = Description of Artificial Sequence: Synthetic peptide
NNVGVRG

SEQ ID NO: 31660 - protein, 7 aa, synthetic construct
  REGION 1..7: note = Description of Artificial Sequence: Synthetic peptide
TGSGSNH

SEQ ID NO: 31661 - protein, 7 aa, synthetic construct
  REGION 1..7: note = Description of Artificial Sequence: Synthetic peptide
NGSTSSG

SEQ ID NO: 31662 - protein, 7 aa, synthetic construct
  REGION 1..7: note = Description of Artificial Sequence: Synthetic peptide
GVLGSKN

SEQ ID NO: 31663 - protein, 7 aa, synthetic construct
  REGION 1..7: note = Description of Artificial Sequence: Synthetic peptide
IVSGKLT

SEQ ID NO: 31664 - protein, 7 aa, synthetic construct
  REGION 1..7: note = Description of Artificial Sequence: Synthetic peptide
PSARMSG

SEQ ID NO: 31665 - protein, 7 aa, synthetic construct
  REGION 1..7: note = Description of Artificial Sequence: Synthetic peptide
FPVNGLS

SEQ ID NO: 31666 - protein, 7 aa, synthetic construct
  REGION 1..7: note = Description of Artificial Sequence: Synthetic peptide
QGPKNAD

SEQ ID NO: 31667 - protein, 7 aa, synthetic construct
  REGION 1..7: note = Description of Artificial Sequence: Synthetic peptide
QSNTSPT

SEQ ID NO: 31668 - protein, 7 aa, synthetic construct
  REGION 1..7: note = Description of Artificial Sequence: Synthetic peptide
AISPTYM

SEQ ID NO: 31669 - protein, 7 aa, synthetic construct
  REGION 1..7: note = Description of Artificial Sequence: Synthetic peptide
NPVAAAT

SEQ ID NO: 31670 - protein, 7 aa, synthetic construct
  REGION 1..7: note = Description of Artificial Sequence: Synthetic peptide
NSANKTP

SEQ ID NO: 31671 - protein, 7 aa, synthetic construct
  REGION 1..7: note = Description of Artificial Sequence: Synthetic peptide
HSVNGHS

SEQ ID NO: 31672 - protein, 7 aa, synthetic construct
  REGION 1..7: note = Description of Artificial Sequence: Synthetic peptide
AGVTTVN

SEQ ID NO: 31673 - protein, 7 aa, synthetic construct
  REGION 1..7: note = Description of Artificial Sequence: Synthetic peptide
NASGQNQ

SEQ ID NO: 31674 - protein, 7 aa, synthetic construct
  REGION 1..7: note = Description of Artificial Sequence: Synthetic peptide
NLSHSAG

SEQ ID NO: 31675 - protein, 7 aa, synthetic construct
  REGION 1..7: note = Description of Artificial Sequence: Synthetic peptide
HGQTGMI

SEQ ID NO: 31676 - protein, 7 aa, synthetic construct
  REGION 1..7: note = Description of Artificial Sequence: Synthetic peptide
WTVSRSG

SEQ ID NO: 31677 - protein, 7 aa, synthetic construct
  REGION 1..7: note = Description of Artificial Sequence: Synthetic peptide
SVSNTNT

SEQ ID NO: 31678 - protein, 7 aa, synthetic construct
  REGION 1..7: note = Description of Artificial Sequence: Synthetic peptide
QREQLLK

SEQ ID NO: 31679 - protein, 7 aa, synthetic construct
  REGION 1..7: note = Description of Artificial Sequence: Synthetic peptide
NAEPTSS

SEQ ID NO: 31680 - protein, 7 aa, synthetic construct
  REGION 1..7: note = Description of Artificial Sequence: Synthetic peptide
PRDTTGS

SEQ ID NO: 31681 - protein, 7 aa, synthetic construct
  REGION 1..7: note = Description of Artificial Sequence: Synthetic peptide
MSSRSSV

SEQ ID NO: 31682 - protein, 7 aa, synthetic construct
  REGION 1..7: note = Description of Artificial Sequence: Synthetic peptide
TQQNGRN

SEQ ID NO: 31683 - protein, 7 aa, synthetic construct
  REGION 1..7: note = Description of Artificial Sequence: Synthetic peptide
TTNNIQG

SEQ ID NO: 31684 - protein, 7 aa, synthetic construct
  REGION 1..7: note = Description of Artificial Sequence: Synthetic peptide
SQSNSFL

SEQ ID NO: 31685 - protein, 7 aa, synthetic construct
  REGION 1..7: note = Description of Artificial Sequence: Synthetic peptide
GPKSPGT

SEQ ID NO: 31686 - protein, 7 aa, synthetic construct
  REGION 1..7: note = Description of Artificial Sequence: Synthetic peptide
AGENKLS

SEQ ID NO: 31687 - protein, 7 aa, synthetic construct
  REGION 1..7: note = Description of Artificial Sequence: Synthetic peptide
TGERQSS

SEQ ID NO: 31688 - protein, 7 aa, synthetic construct
  REGION 1..7: note = Description of Artificial Sequence: Synthetic peptide
LHDGQTR

SEQ ID NO: 31689 - protein, 7 aa, synthetic construct
  REGION 1..7: note = Description of Artificial Sequence: Synthetic peptide
MLSGSRN

SEQ ID NO: 31690 - protein, 7 aa, synthetic construct
  REGION 1..7: note = Description of Artificial Sequence: Synthetic peptide
SFSPASN

SEQ ID NO: 31691 - protein, 7 aa, synthetic construct
  REGION 1..7: note = Description of Artificial Sequence: Synthetic peptide
TPITPMT

SEQ ID NO: 31692 - protein, 7 aa, synthetic construct
  REGION 1..7: note = Description of Artificial Sequence: Synthetic peptide
HQPHQNQ

SEQ ID NO: 31693 - protein, 7 aa, synthetic construct
  REGION 1..7: note = Description of Artificial Sequence: Synthetic peptide
ATNNGSK

SEQ ID NO: 31694 - protein, 7 aa, synthetic construct
  REGION 1..7: note = Description of Artificial Sequence: Synthetic peptide
NSISRVT

SEQ ID NO: 31695 - protein, 7 aa, synthetic construct
  REGION 1..7: note = Description of Artificial Sequence: Synthetic peptide
SNDSNKK

SEQ ID NO: 31696 - protein, 7 aa, synthetic construct
  REGION 1..7: note = Description of Artificial Sequence: Synthetic peptide
SPVKGSV

SEQ ID NO: 31697 - protein, 7 aa, synthetic construct
  REGION 1..7: note = Description of Artificial Sequence: Synthetic peptide
RSSNSDH

SEQ ID NO: 31698 - protein, 7 aa, synthetic construct
  REGION 1..7: note = Description of Artificial Sequence: Synthetic peptide
LQVNMAR

SEQ ID NO: 31699 - protein, 7 aa, synthetic construct
  REGION 1..7: note = Description of Artificial Sequence: Synthetic peptide
AGTGSSL

SEQ ID NO: 31700 - protein, 7 aa, synthetic construct
  REGION 1..7: note = Description of Artificial Sequence: Synthetic peptide
GSNLNST

SEQ ID NO: 31701 - protein, 7 aa, synthetic construct
  REGION 1..7: note = Description of Artificial Sequence: Synthetic peptide
PNHQSLT

SEQ ID NO: 31702 - protein, 7 aa, synthetic construct
  REGION 1..7: note = Description of Artificial Sequence: Synthetic peptide
TGSGQNQ

SEQ ID NO: 31703 - protein, 7 aa, synthetic construct
  REGION 1..7: note = Description of Artificial Sequence: Synthetic peptide
ETPNRSQ

SEQ ID NO: 31704 - protein, 7 aa, synthetic construct
  REGION 1..7: note = Description of Artificial Sequence: Synthetic peptide
NNSSGAQ

SEQ ID NO: 31705 - protein, 7 aa, synthetic construct
  REGION 1..7: note = Description of Artificial Sequence: Synthetic peptide
SSSGGVK

SEQ ID NO: 31706 - protein, 7 aa, synthetic construct
  REGION 1..7: note = Description of Artificial Sequence: Synthetic peptide
CTSKSSS

SEQ ID NO: 31707 - protein, 7 aa, synthetic construct
  REGION 1..7: note = Description of Artificial Sequence: Synthetic peptide
ISPVPLT

SEQ ID NO: 31708 - protein, 7 aa, synthetic construct
  REGION 1..7: note = Description of Artificial Sequence: Synthetic peptide
QRNVSVV

SEQ ID NO: 31709 - protein, 7 aa, synthetic construct
  REGION 1..7: note = Description of Artificial Sequence: Synthetic peptide
DFSEKRL

SEQ ID NO: 31710 - protein, 7 aa, synthetic construct
  REGION 1..7: note = Description of Artificial Sequence: Synthetic peptide
SRPGLSQ

SEQ ID NO: 31711 - protein, 7 aa, synthetic construct
  REGION 1..7: note = Description of Artificial Sequence: Synthetic peptide
YGSNTPT

SEQ ID NO: 31712 - protein, 7 aa, synthetic construct
  REGION 1..7: note = Description of Artificial Sequence: Synthetic peptide
RITLNSA

SEQ ID NO: 31713 - protein, 7 aa, synthetic construct
  REGION 1..7: note = Description of Artificial Sequence: Synthetic peptide
PLNTHQS

SEQ ID NO: 31714 - protein, 7 aa, synthetic construct
  REGION 1..7: note = Description of Artificial Sequence: Synthetic peptide
FRNTHSE

SEQ ID NO: 31715 - protein, 7 aa, synthetic construct
  REGION 1..7: note = Description of Artificial Sequence: Synthetic peptide
SSDQPRL

SEQ ID NO: 31716 - protein, 7 aa, synthetic construct
  REGION 1..7: note = Description of Artificial Sequence: Synthetic peptide
ELAAPSK

SEQ ID NO: 31717 - protein, 7 aa, synthetic construct
  REGION 1..7: note = Description of Artificial Sequence: Synthetic peptide
ATTKAGI

SEQ ID NO: 31718 - protein, 7 aa, synthetic construct
  REGION 1..7: note = Description of Artificial Sequence: Synthetic peptide
AEQRPGQ

SEQ ID NO: 31719 - protein, 7 aa, synthetic construct
  REGION 1..7: note = Description of Artificial Sequence: Synthetic peptide
GIDTKML

SEQ ID NO: 31720 - protein, 7 aa, synthetic construct
  REGION 1..7: note = Description of Artificial Sequence: Synthetic peptide
SPNKTSL

SEQ ID NO: 31721 - protein, 7 aa, synthetic construct
  REGION 1..7: note = Description of Artificial Sequence: Synthetic peptide
HTSSNSL

SEQ ID NO: 31722 - protein, 7 aa, synthetic construct
  REGION 1..7: note = Description of Artificial Sequence: Synthetic peptide
SQTVKTG

SEQ ID NO: 31723 - protein, 7 aa, synthetic construct
  REGION 1..7: note = Description of Artificial Sequence: Synthetic peptide
PNNQSTR

SEQ ID NO: 31724 - protein, 7 aa, synthetic construct
  REGION 1..7: note = Description of Artificial Sequence: Synthetic peptide
VNQSGFS

SEQ ID NO: 31725 - protein, 7 aa, synthetic construct
  REGION 1..7: note = Description of Artificial Sequence: Synthetic peptide
DGKSPRV

SEQ ID NO: 31726 - protein, 7 aa, synthetic construct
  REGION 1..7: note = Description of Artificial Sequence: Synthetic peptide
YVSNSNA

SEQ ID NO: 31727 - protein, 7 aa, synthetic construct
  REGION 1..7: note = Description of Artificial Sequence: Synthetic peptide
EYPQQAK

SEQ ID NO: 31728 - protein, 7 aa, synthetic construct
  REGION 1..7: note = Description of Artificial Sequence: Synthetic peptide
GVQTKLL

SEQ ID NO: 31729 - protein, 7 aa, synthetic construct
  REGION 1..7: note = Description of Artificial Sequence: Synthetic peptide
GQTGDMR

SEQ ID NO: 31730 - protein, 7 aa, synthetic construct
  REGION 1..7: note = Description of Artificial Sequence: Synthetic peptide
NGSGTNQ

SEQ ID NO: 31731 - protein, 7 aa, synthetic construct
  REGION 1..7: note = Description of Artificial Sequence: Synthetic peptide
RNVDKSS

SEQ ID NO: 31732 - protein, 7 aa, synthetic construct
  REGION 1..7: note = Description of Artificial Sequence: Synthetic peptide
RPYETQL

SEQ ID NO: 31733 - protein, 7 aa, synthetic construct
  REGION 1..7: note = Description of Artificial Sequence: Synthetic peptide
PARDSKS

SEQ ID NO: 31734 - protein, 7 aa, synthetic construct
  REGION 1..7: note = Description of Artificial Sequence: Synthetic peptide
YNRSERP

SEQ ID NO: 31735 - protein, 7 aa, synthetic construct
  REGION 1..7: note = Description of Artificial Sequence: Synthetic peptide
DQVSHKL

SEQ ID NO: 31736 - protein, 7 aa, synthetic construct
  REGION 1..7: note = Description of Artificial Sequence: Synthetic peptide
YIKSVTN

SEQ ID NO: 31737 - protein, 7 aa, synthetic construct
  REGION 1..7: note = Description of Artificial Sequence: Synthetic peptide
RSPGSNT

SEQ ID NO: 31738 - protein, 7 aa, synthetic construct
  REGION 1..7: note = Description of Artificial Sequence: Synthetic peptide
SFDSKPP

SEQ ID NO: 31739 - protein, 7 aa, synthetic construct
  REGION 1..7: note = Description of Artificial Sequence: Synthetic peptide
VNTTRAE

SEQ ID NO: 31740 - protein, 7 aa, synthetic construct
  REGION 1..7: note = Description of Artificial Sequence: Synthetic peptide
SMGNSIS

SEQ ID NO: 31741 - protein, 7 aa, synthetic construct
  REGION 1..7: note = Description of Artificial Sequence: Synthetic peptide
NGSGQNK

SEQ ID NO: 31742 - protein, 7 aa, synthetic construct
  REGION 1..7: note = Description of Artificial Sequence: Synthetic peptide
TGQQTAT

SEQ ID NO: 31743 - protein, 7 aa, synthetic construct
  REGION 1..7: note = Description of Artificial Sequence: Synthetic peptide
PSQTKPS

SEQ ID NO: 31744 - protein, 7 aa, synthetic construct
  REGION 1..7: note = Description of Artificial Sequence: Synthetic peptide
RLEGSMA

SEQ ID NO: 31745 - protein, 7 aa, synthetic construct
  REGION 1..7: note = Description of Artificial Sequence: Synthetic peptide
PTKANVT

SEQ ID NO: 31746 - protein, 7 aa, synthetic construct
  REGION 1..7: note = Description of Artificial Sequence: Synthetic peptide
GGSNLRT

SEQ ID NO: 31747 - protein, 7 aa, synthetic construct
  REGION 1..7: note = Description of Artificial Sequence: Synthetic peptide
GPSSINR

SEQ ID NO: 31748 - protein, 7 aa, synthetic construct
  REGION 1..7: note = Description of Artificial Sequence: Synthetic peptide
YSGSAGQ

SEQ ID NO: 31749 - protein, 7 aa, synthetic construct
  REGION 1..7: note = Description of Artificial Sequence: Synthetic peptide
GVPAGHT

SEQ ID NO: 31750 - protein, 7 aa, synthetic construct
  REGION 1..7: note = Description of Artificial Sequence: Synthetic peptide
PTSSPQR

SEQ ID NO: 31751 - protein, 7 aa, synthetic construct
  REGION 1..7: note = Description of Artificial Sequence: Synthetic peptide
CNNARVS

SEQ ID NO: 31752 - protein, 7 aa, synthetic construct
  REGION 1..7: note = Description of Artificial Sequence: Synthetic peptide
VFNRNAS

SEQ ID NO: 31753 - protein, 7 aa, synthetic construct
  REGION 1..7: note = Description of Artificial Sequence: Synthetic peptide
PTISVDR

SEQ ID NO: 31754 - protein, 7 aa, synthetic construct
  REGION 1..7: note = Description of Artificial Sequence: Synthetic peptide
PGSGSNH

SEQ ID NO: 31755 - protein, 7 aa, synthetic construct
  REGION 1..7: note = Description of Artificial Sequence: Synthetic peptide
GPAVTNR

SEQ ID NO: 31756 - protein, 7 aa, synthetic construct
  REGION 1..7: note = Description of Artificial Sequence: Synthetic peptide
MRQDTSK

SEQ ID NO: 31757 - protein, 7 aa, synthetic construct
  REGION 1..7: note = Description of Artificial Sequence: Synthetic peptide
YTSKSTA

SEQ ID NO: 31758 - protein, 7 aa, synthetic construct
  REGION 1..7: note = Description of Artificial Sequence: Synthetic peptide
NVNSQML

SEQ ID NO: 31759 - protein, 7 aa, synthetic construct
  REGION 1..7: note = Description of Artificial Sequence: Synthetic peptide
NPRGTTL

SEQ ID NO: 31760 - protein, 7 aa, synthetic construct
  REGION 1..7: note = Description of Artificial Sequence: Synthetic peptide
MSSTRSI

SEQ ID NO: 31761 - protein, 7 aa, synthetic construct
  REGION 1..7: note = Description of Artificial Sequence: Synthetic peptide
PSTSSAG

SEQ ID NO: 31762 - protein, 7 aa, synthetic construct
  REGION 1..7: note = Description of Artificial Sequence: Synthetic peptide
VPVTKSS

SEQ ID NO: 31763 - protein, 7 aa, synthetic construct
  REGION 1..7: note = Description of Artificial Sequence: Synthetic peptide
PGINTNS

SEQ ID NO: 31764 - protein, 7 aa, synthetic construct
  REGION 1..7: note = Description of Artificial Sequence: Synthetic peptide
RSNGSAA

SEQ ID NO: 31765 - protein, 7 aa, synthetic construct
  REGION 1..7: note = Description of Artificial Sequence: Synthetic peptide
ERAGLNS

SEQ ID NO: 31766 - protein, 7 aa, synthetic construct
  REGION 1..7: note = Description of Artificial Sequence: Synthetic peptide
ERYTTSK

SEQ ID NO: 31767 - protein, 7 aa, synthetic construct
  REGION 1..7: note = Description of Artificial Sequence: Synthetic peptide
LRNSTSV

SEQ ID NO: 31768 - protein, 7 aa, synthetic construct
  REGION 1..7: note = Description of Artificial Sequence: Synthetic peptide
GDMGISK

SEQ ID NO: 31769 - protein, 7 aa, synthetic construct
  REGION 1..7: note = Description of Artificial Sequence: Synthetic peptide
NLNSVSK

SEQ ID NO: 31770 - protein, 7 aa, synthetic construct
  REGION 1..7: note = Description of Artificial Sequence: Synthetic peptide
PPTLEQS

SEQ ID NO: 31771 - protein, 7 aa, synthetic construct
  REGION 1..7: note = Description of Artificial Sequence: Synthetic peptide
YRLDHSR

SEQ ID NO: 31772 - protein, 7 aa, synthetic construct
  REGION 1..7: note = Description of Artificial Sequence: Synthetic peptide
RNNPTTV

SEQ ID NO: 31773 - protein, 7 aa, synthetic construct
  REGION 1..7: note = Description of Artificial Sequence: Synthetic peptide
SFSGANK

SEQ ID NO: 31774 - protein, 7 aa, synthetic construct
  REGION 1..7: note = Description of Artificial Sequence: Synthetic peptide
HVSHGPG

SEQ ID NO: 31775 - protein, 7 aa, synthetic construct
  REGION 1..7: note = Description of Artificial Sequence: Synthetic peptide
PYKGNGL

SEQ ID NO: 31776 - protein, 7 aa, synthetic construct
  REGION 1..7: note = Description of Artificial Sequence: Synthetic peptide
LVSSKSS

SEQ ID NO: 31777 - protein, 7 aa, synthetic construct
  REGION 1..7: note = Description of Artificial Sequence: Synthetic peptide
GSAGNML

SEQ ID NO: 31778 - protein, 7 aa, synthetic construct
  REGION 1..7: note = Description of Artificial Sequence: Synthetic peptide
NTTGHAG

SEQ ID NO: 31779 - protein, 7 aa, synthetic construct
  REGION 1..7: note = Description of Artificial Sequence: Synthetic peptide
NPVALRD

SEQ ID NO: 31780 - protein, 7 aa, synthetic construct
  REGION 1..7: note = Description of Artificial Sequence: Synthetic peptide
SVSTKSA

SEQ ID NO: 31781 - protein, 7 aa, synthetic construct
  REGION 1..7: note = Description of Artificial Sequence: Synthetic peptide
RTLSASS

SEQ ID NO: 31782 - protein, 7 aa, synthetic construct
  REGION 1..7: note = Description of Artificial Sequence: Synthetic peptide
TGSGRLL

SEQ ID NO: 31783 - protein, 7 aa, synthetic construct
  REGION 1..7: note = Description of Artificial Sequence: Synthetic peptide
VGGGRDN

SEQ ID NO: 31784 - protein, 7 aa, synthetic construct
  REGION 1..7: note = Description of Artificial Sequence: Synthetic peptide
STSTVHS

SEQ ID NO: 31785 - protein, 7 aa, synthetic construct
  REGION 1..7: note = Description of Artificial Sequence: Synthetic peptide
PLINRTM

SEQ ID NO: 31786 - protein, 7 aa, synthetic construct
  REGION 1..7: note = Description of Artificial Sequence: Synthetic peptide
HQGNVIS

SEQ ID NO: 31787 - protein, 7 aa, synthetic construct
  REGION 1..7: note = Description of Artificial Sequence: Synthetic peptide
SQVSHSV

SEQ ID NO: 31788 - protein, 7 aa, synthetic construct
  REGION 1..7: note = Description of Artificial Sequence: Synthetic peptide
SVTSPNK

SEQ ID NO: 31789 - protein, 7 aa, synthetic construct
  REGION 1..7: note = Description of Artificial Sequence: Synthetic peptide
PSRASIT

SEQ ID NO: 31790 - protein, 7 aa, synthetic construct
  REGION 1..7: note = Description of Artificial Sequence: Synthetic peptide
SKDRSTV

SEQ ID NO: 31791 - protein, 7 aa, synthetic construct
  REGION 1..7: note = Description of Artificial Sequence: Synthetic peptide
QTSATQR

SEQ ID NO: 31792 - protein, 7 aa, synthetic construct
  REGION 1..7: note = Description of Artificial Sequence: Synthetic peptide
SSSPNVK

SEQ ID NO: 31793 - protein, 7 aa, synthetic construct
  REGION 1..7: note = Description of Artificial Sequence: Synthetic peptide
YSGLTGS

SEQ ID NO: 31794 - protein, 7 aa, synthetic construct
  REGION 1..7: note = Description of Artificial Sequence: Synthetic peptide
LGPGKNT

SEQ ID NO: 31795 - protein, 7 aa, synthetic construct
  REGION 1..7: note = Description of Artificial Sequence: Synthetic peptide
QTGTSST

SEQ ID NO: 31796 - protein, 7 aa, synthetic construct
  REGION 1..7: note = Description of Artificial Sequence: Synthetic peptide
PISHTTG

SEQ ID NO: 31797 - protein, 7 aa, synthetic construct
  REGION 1..7: note = Description of Artificial Sequence: Synthetic peptide
AQTKGTQ

SEQ ID NO: 31798 - protein, 7 aa, synthetic construct
  REGION 1..7: note = Description of Artificial Sequence: Synthetic peptide
VLAGSNT

SEQ ID NO: 31799 - protein, 7 aa, synthetic construct
  REGION 1..7: note = Description of Artificial Sequence: Synthetic peptide
QLSGARS

SEQ ID NO: 31800 - protein, 7 aa, synthetic construct
  REGION 1..7: note = Description of Artificial Sequence: Synthetic peptide
PGDRGKV

SEQ ID NO: 31801 - protein, 7 aa, synthetic construct
  REGION 1..7: note = Description of Artificial Sequence: Synthetic peptide
SFTKGAG

SEQ ID NO: 31802 - protein, 7 aa, synthetic construct
  REGION 1..7: note = Description of Artificial Sequence: Synthetic peptide
PSGETSK

SEQ ID NO: 31803 - protein, 7 aa, synthetic construct
  REGION 1..7: note = Description of Artificial Sequence: Synthetic peptide
PRNMEEM

SEQ ID NO: 31804 - protein, 7 aa, synthetic construct
  REGION 1..7: note = Description of Artificial Sequence: Synthetic peptide
GPSQHVI

SEQ ID NO: 31805 - protein, 7 aa, synthetic construct
  REGION 1..7: note = Description of Artificial Sequence: Synthetic peptide
SKTGTSL

SEQ ID NO: 31806 - protein, 7 aa, synthetic construct
  REGION 1..7: note = Description of Artificial Sequence: Synthetic peptide
MLNTSHY

SEQ ID NO: 31807 - protein, 7 aa, synthetic construct
  REGION 1..7: note = Description of Artificial Sequence: Synthetic peptide
RSGTSHS

SEQ ID NO: 31808 - protein, 7 aa, synthetic construct
  REGION 1..7: note = Description of Artificial Sequence: Synthetic peptide
RAEINTR

SEQ ID NO: 31809 - protein, 7 aa, synthetic construct
  REGION 1..7: note = Description of Artificial Sequence: Synthetic peptide
SASNVSR

SEQ ID NO: 31810 - protein, 7 aa, synthetic construct
  REGION 1..7: note = Description of Artificial Sequence: Synthetic peptide
MEIKPNR

SEQ ID NO: 31811 - protein, 7 aa, synthetic construct
  REGION 1..7: note = Description of Artificial Sequence: Synthetic peptide
LSMNTSK

SEQ ID NO: 31812 - protein, 7 aa, synthetic construct
  REGION 1..7: note = Description of Artificial Sequence: Synthetic peptide
YQNKSLT

SEQ ID NO: 31813 - protein, 7 aa, synthetic construct
  REGION 1..7: note = Description of Artificial Sequence: Synthetic peptide
RSTQSSP

SEQ ID NO: 31814 - protein, 7 aa, synthetic construct
  REGION 1..7: note = Description of Artificial Sequence: Synthetic peptide
QVGRPNA

SEQ ID NO: 31815 - protein, 7 aa, synthetic construct
  REGION 1..7: note = Description of Artificial Sequence: Synthetic peptide
STNMAVV

SEQ ID NO: 31816 - protein, 7 aa, synthetic construct
  REGION 1..7: note = Description of Artificial Sequence: Synthetic peptide
STPMSNR

SEQ ID NO: 31817 - protein, 7 aa, synthetic construct
  REGION 1..7: note = Description of Artificial Sequence: Synthetic peptide
SRVTSGG

SEQ ID NO: 31818 - protein, 7 aa, synthetic construct
  REGION 1..7: note = Description of Artificial Sequence: Synthetic peptide
ATVSKTA

SEQ ID NO: 31819 - protein, 7 aa, synthetic construct
  REGION 1..7: note = Description of Artificial Sequence: Synthetic peptide
TTSNKDS

SEQ ID NO: 31820 - protein, 7 aa, synthetic construct
  REGION 1..7: note = Description of Artificial Sequence: Synthetic peptide
NVTTPLI

SEQ ID NO: 31821 - protein, 7 aa, synthetic construct
  REGION 1..7: note = Description of Artificial Sequence: Synthetic peptide
HNTAHAS

SEQ ID NO: 31822 - protein, 7 aa, synthetic construct
  REGION 1..7: note = Description of Artificial Sequence: Synthetic peptide
NSNTRGP

SEQ ID NO: 31823 - protein, 7 aa, synthetic construct
  REGION 1..7: note = Description of Artificial Sequence: Synthetic peptide
QVSPASR

SEQ ID NO: 31824 - protein, 7 aa, synthetic construct
  REGION 1..7: note = Description of Artificial Sequence: Synthetic peptide
YSGGTQQ

SEQ ID NO: 31825 - protein, 7 aa, synthetic construct
  REGION 1..7: note = Description of Artificial Sequence: Synthetic peptide
ATNHSPQ

SEQ ID NO: 31826 - protein, 7 aa, synthetic construct
  REGION 1..7: note = Description of Artificial Sequence: Synthetic peptide
PNNATKN

SEQ ID NO: 31827 - protein, 7 aa, synthetic construct
  REGION 1..7: note = Description of Artificial Sequence: Synthetic peptide
SSASTYK

SEQ ID NO: 31828 - protein, 7 aa, synthetic construct
  REGION 1..7: note = Description of Artificial Sequence: Synthetic peptide
PVGSVRG

SEQ ID NO: 31829 - protein, 7 aa, synthetic construct
  REGION 1..7: note = Description of Artificial Sequence: Synthetic peptide
SPARASL

SEQ ID NO: 31830 - protein, 7 aa, synthetic construct
  REGION 1..7: note = Description of Artificial Sequence: Synthetic peptide
STPHHTT

SEQ ID NO: 31831 - protein, 7 aa, synthetic construct
  REGION 1..7: note = Description of Artificial Sequence: Synthetic peptide
PVTRSKD

SEQ ID NO: 31832 - protein, 7 aa, synthetic construct
  REGION 1..7: note = Description of Artificial Sequence: Synthetic peptide
PTRTASN

SEQ ID NO: 31833 - protein, 7 aa, synthetic construct
  REGION 1..7: note = Description of Artificial Sequence: Synthetic peptide
SPNSHPS

SEQ ID NO: 31834 - protein, 7 aa, synthetic construct
  REGION 1..7: note = Description of Artificial Sequence: Synthetic peptide
QRTSDQT

SEQ ID NO: 31835 - protein, 7 aa, synthetic construct
  REGION 1..7: note = Description of Artificial Sequence: Synthetic peptide
NTRSSSG

SEQ ID NO: 31836 - protein, 7 aa, synthetic construct
  REGION 1..7: note = Description of Artificial Sequence: Synthetic peptide
DRHNTTS

SEQ ID NO: 31837 - protein, 7 aa, synthetic construct
  REGION 1..7: note = Description of Artificial Sequence: Synthetic peptide
NGFNSNN

SEQ ID NO: 31838 - protein, 7 aa, synthetic construct
  REGION 1..7: note = Description of Artificial Sequence: Synthetic peptide
NPVNTKS

SEQ ID NO: 31839 - protein, 7 aa, synthetic construct
  REGION 1..7: note = Description of Artificial Sequence: Synthetic peptide
MMNRSAS

SEQ ID NO: 31840 - protein, 7 aa, synthetic construct
  REGION 1..7: note = Description of Artificial Sequence: Synthetic peptide
TSRQSFV

SEQ ID NO: 31841 - protein, 7 aa, synthetic construct
  REGION 1..7: note = Description of Artificial Sequence: Synthetic peptide
TQDHHVK

SEQ ID NO: 31842 - protein, 7 aa, synthetic construct
  REGION 1..7: note = Description of Artificial Sequence: Synthetic peptide
ATHNSSQ

SEQ ID NO: 31843 - protein, 7 aa, synthetic construct
  REGION 1..7: note = Description of Artificial Sequence: Synthetic peptide
LPQGSIS

SEQ ID NO: 31844 - protein, 7 aa, synthetic construct
  REGION 1..7: note = Description of Artificial Sequence: Synthetic peptide
LLTSPNS

SEQ ID NO: 31845 - protein, 7 aa, synthetic construct
  REGION 1..7: note = Description of Artificial Sequence: Synthetic peptide
NSSHNVS

SEQ ID NO: 31846 - protein, 7 aa, synthetic construct
  REGION 1..7: note = Description of Artificial Sequence: Synthetic peptide
CLTDARA

SEQ ID NO: 31847 - protein, 7 aa, synthetic construct
  REGION 1..7: note = Description of Artificial Sequence: Synthetic peptide
PQSSHQT

SEQ ID NO: 31848 - protein, 7 aa, synthetic construct
  REGION 1..7: note = Description of Artificial Sequence: Synthetic peptide
LHADQHS

SEQ ID NO: 31849 - protein, 7 aa, synthetic construct
  REGION 1..7: note = Description of Artificial Sequence: Synthetic peptide
RQLPSGL

SEQ ID NO: 31850 - protein, 7 aa, synthetic construct
  REGION 1..7: note = Description of Artificial Sequence: Synthetic peptide
SSEQTTR

SEQ ID NO: 31851 - protein, 7 aa, synthetic construct
  REGION 1..7: note = Description of Artificial Sequence: Synthetic peptide
TVGTTTI

SEQ ID NO: 31852 - protein, 7 aa, synthetic construct
  REGION 1..7: note = Description of Artificial Sequence: Synthetic peptide
LVQGGVN

SEQ ID NO: 31853 - protein, 7 aa, synthetic construct
  REGION 1..7: note = Description of Artificial Sequence: Synthetic peptide
GQSGSRL

SEQ ID NO: 31854 - protein, 7 aa, synthetic construct
  REGION 1..7: note = Description of Artificial Sequence: Synthetic peptide
DTITSRG

SEQ ID NO: 31855 - protein, 7 aa, synthetic construct
  REGION 1..7: note = Description of Artificial Sequence: Synthetic peptide
SSGSNRS

SEQ ID NO: 31856 - protein, 7 aa, synthetic construct
  REGION 1..7: note = Description of Artificial Sequence: Synthetic peptide
NSGKPNA

SEQ ID NO: 31857 - protein, 7 aa, synthetic construct
  REGION 1..7: note = Description of Artificial Sequence: Synthetic peptide
GNTKNGI

SEQ ID NO: 31858 - protein, 7 aa, synthetic construct
  REGION 1..7: note = Description of Artificial Sequence: Synthetic peptide
ITGSLSK

SEQ ID NO: 31859 - protein, 7 aa, synthetic construct
  REGION 1..7: note = Description of Artificial Sequence: Synthetic peptide
SANTRIA

SEQ ID NO: 31860 - protein, 7 aa, synthetic construct
  REGION 1..7: note = Description of Artificial Sequence: Synthetic peptide
SNETKSS

SEQ ID NO: 31861 - protein, 7 aa, synthetic construct
  REGION 1..7: note = Description of Artificial Sequence: Synthetic peptide
YSMRPTE

SEQ ID NO: 31862 - protein, 7 aa, synthetic construct
  REGION 1..7: note = Description of Artificial Sequence: Synthetic peptide
GHDGQSR

SEQ ID NO: 31863 - protein, 7 aa, synthetic construct
  REGION 1..7: note = Description of Artificial Sequence: Synthetic peptide
NANSRPV

SEQ ID NO: 31864 - protein, 7 aa, synthetic construct
  REGION 1..7: note = Description of Artificial Sequence: Synthetic peptide
STVGHMT

SEQ ID NO: 31865 - protein, 7 aa, synthetic construct
  REGION 1..7: note = Description of Artificial Sequence: Synthetic peptide
HANSPAT

SEQ ID NO: 31866 - protein, 7 aa, synthetic construct
  REGION 1..7: note = Description of Artificial Sequence: Synthetic peptide
HDSRSNA

SEQ ID NO: 31867 - protein, 7 aa, synthetic construct
  REGION 1..7: note = Description of Artificial Sequence: Synthetic peptide
GTPNTKV

SEQ ID NO: 31868 - protein, 7 aa, synthetic construct
  REGION 1..7: note = Description of Artificial Sequence: Synthetic peptide
AGSKTTS

SEQ ID NO: 31869 - protein, 7 aa, synthetic construct
  REGION 1..7: note = Description of Artificial Sequence: Synthetic peptide
LSSGRGG

SEQ ID NO: 31870 - protein, 7 aa, synthetic construct
  REGION 1..7: note = Description of Artificial Sequence: Synthetic peptide
TNPNPHR

SEQ ID NO: 31871 - protein, 7 aa, synthetic construct
  REGION 1..7: note = Description of Artificial Sequence: Synthetic peptide
VVPERSK

SEQ ID NO: 31872 - protein, 7 aa, synthetic construct
  REGION 1..7: note = Description of Artificial Sequence: Synthetic peptide
QVTGASH

SEQ ID NO: 31873 - protein, 7 aa, synthetic construct
  REGION 1..7: note = Description of Artificial Sequence: Synthetic peptide
AAQPSLK

SEQ ID NO: 31874 - protein, 7 aa, synthetic construct
  REGION 1..7: note = Description of Artificial Sequence: Synthetic peptide
HMNRKLE

SEQ ID NO: 31875 - protein, 7 aa, synthetic construct
  REGION 1..7: note = Description of Artificial Sequence: Synthetic peptide
LSSDKNV

SEQ ID NO: 31876 - protein, 7 aa, synthetic construct
  REGION 1..7: note = Description of Artificial Sequence: Synthetic peptide
PGTGSNH

SEQ ID NO: 31877 - protein, 7 aa, synthetic construct
  REGION 1..7: note = Description of Artificial Sequence: Synthetic peptide
NSNGLNN

SEQ ID NO: 31878 - protein, 7 aa, synthetic construct
  REGION 1..7: note = Description of Artificial Sequence: Synthetic peptide
GARPVLQ

SEQ ID NO: 31879 - protein, 7 aa, synthetic construct
  REGION 1..7: note = Description of Artificial Sequence: Synthetic peptide
FPVNAGA

SEQ ID NO: 31880 - protein, 7 aa, synthetic construct
  REGION 1..7: note = Description of Artificial Sequence: Synthetic peptide
DNMSTPK

SEQ ID NO: 31881 - protein, 7 aa, synthetic construct
  REGION 1..7: note = Description of Artificial Sequence: Synthetic peptide
LLDQPRN

SEQ ID NO: 31882 - protein, 7 aa, synthetic construct
  REGION 1..7: note = Description of Artificial Sequence: Synthetic peptide
GLSPVLK

SEQ ID NO: 31883 - protein, 7 aa, synthetic construct
  REGION 1..7: note = Description of Artificial Sequence: Synthetic peptide
PSSPNSI

SEQ ID NO: 31884 - protein, 7 aa, synthetic construct
  REGION 1..7: note = Description of Artificial Sequence: Synthetic peptide
VLAGSNT

SEQ ID NO: 31885 - protein, 7 aa, synthetic construct
  REGION 1..7: note = Description of Artificial Sequence: Synthetic peptide
YSRVQSE

SEQ ID NO: 31886 - protein, 7 aa, synthetic construct
  REGION 1..7: note = Description of Artificial Sequence: Synthetic peptide
RPYETQL

SEQ ID NO: 31887 - protein, 7 aa, synthetic construct
  REGION 1..7: note = Description of Artificial Sequence: Synthetic peptide
YGQTKTQ

SEQ ID NO: 31888 - protein, 7 aa, synthetic construct
  REGION 1..7: note = Description of Artificial Sequence: Synthetic peptide
SITGNRT

SEQ ID NO: 31889 - protein, 7 aa, synthetic construct
  REGION 1..7: note = Description of Artificial Sequence: Synthetic peptide
SKFSETK

SEQ ID NO: 31890 - protein, 7 aa, synthetic construct
  REGION 1..7: note = Description of Artificial Sequence: Synthetic peptide
HRVDNQG

SEQ ID NO: 31891 - protein, 7 aa, synthetic construct
  REGION 1..7: note = Description of Artificial Sequence: Synthetic peptide
KPQGSLV

SEQ ID NO: 31892 - protein, 7 aa, synthetic construct
  REGION 1..7: note = Description of Artificial Sequence: Synthetic peptide
SGRQDVL

SEQ ID NO: 31893 - protein, 7 aa, synthetic construct
  REGION 1..7: note = Description of Artificial Sequence: Synthetic peptide
PSTQSSS

SEQ ID NO: 31894 - protein, 7 aa, synthetic construct
  REGION 1..7: note = Description of Artificial Sequence: Synthetic peptide
SGSNTIG

SEQ ID NO: 31895 - protein, 7 aa, synthetic construct
  REGION 1..7: note = Description of Artificial Sequence: Synthetic peptide
GTNTGIV

SEQ ID NO: 31896 - protein, 7 aa, synthetic construct
  REGION 1..7: note = Description of Artificial Sequence: Synthetic peptide
GPHTAVG

SEQ ID NO: 31897 - protein, 7 aa, synthetic construct
  REGION 1..7: note = Description of Artificial Sequence: Synthetic peptide
FSNNGSH

SEQ ID NO: 31898 - protein, 7 aa, synthetic construct
  REGION 1..7: note = Description of Artificial Sequence: Synthetic peptide
NSSHNVS

SEQ ID NO: 31899 - protein, 7 aa, synthetic construct
  REGION 1..7: note = Description of Artificial Sequence: Synthetic peptide
RITSSNQ

SEQ ID NO: 31900 - protein, 7 aa, synthetic construct
  REGION 1..7: note = Description of Artificial Sequence: Synthetic peptide
MGGHTHT

SEQ ID NO: 31901 - protein, 7 aa, synthetic construct
  REGION 1..7: note = Description of Artificial Sequence: Synthetic peptide
LPQGSIS

SEQ ID NO: 31902 - protein, 7 aa, synthetic construct
  REGION 1..7: note = Description of Artificial Sequence: Synthetic peptide
GDTRLNA

SEQ ID NO: 31903 - protein, 7 aa, synthetic construct
  REGION 1..7: note = Description of Artificial Sequence: Synthetic peptide
LRNSTSV

SEQ ID NO: 31904 - protein, 7 aa, synthetic construct
  REGION 1..7: note = Description of Artificial Sequence: Synthetic peptide
RESSPSL

SEQ ID NO: 31905 - protein, 7 aa, synthetic construct
  REGION 1..7: note = Description of Artificial Sequence: Synthetic peptide
IGQSTNG

SEQ ID NO: 31906 - protein, 7 aa, synthetic construct
  REGION 1..7: note = Description of Artificial Sequence: Synthetic peptide
VVPERSK

SEQ ID NO: 31907 - protein, 7 aa, synthetic construct
  REGION 1..7: note = Description of Artificial Sequence: Synthetic peptide
NFSNPTV

SEQ ID NO: 31908 - protein, 7 aa, synthetic construct
  REGION 1..7: note = Description of Artificial Sequence: Synthetic peptide
ITPSNIG

SEQ ID NO: 31909 - protein, 7 aa, synthetic construct
  REGION 1..7: note = Description of Artificial Sequence: Synthetic peptide
PNNQSTR

SEQ ID NO: 31910 - protein, 7 aa, synthetic construct
  REGION 1..7: note = Description of Artificial Sequence: Synthetic peptide
GRAQLAS

SEQ ID NO: 31911 - protein, 7 aa, synthetic construct
  REGION 1..7: note = Description of Artificial Sequence: Synthetic peptide
SSTPRSV

SEQ ID NO: 31912 - protein, 7 aa, synthetic construct
  REGION 1..7: note = Description of Artificial Sequence: Synthetic peptide
ERPGGTP

SEQ ID NO: 31913 - protein, 7 aa, synthetic construct
  REGION 1..7: note = Description of Artificial Sequence: Synthetic peptide
AGENKLS

SEQ ID NO: 31914 - protein, 7 aa, synthetic construct
  REGION 1..7: note = Description of Artificial Sequence: Synthetic peptide
CQPRSAN

SEQ ID NO: 31915 - protein, 7 aa, synthetic construct
  REGION 1..7: note = Description of Artificial Sequence: Synthetic peptide
QVPTRSD

SEQ ID NO: 31916 - protein, 7 aa, synthetic construct
  REGION 1..7: note = Description of Artificial Sequence: Synthetic peptide
DHRNTVR

SEQ ID NO: 31917 - protein, 7 aa, synthetic construct
  REGION 1..7: note = Description of Artificial Sequence: Synthetic peptide
ESNRSQV

SEQ ID NO: 31918 - protein, 7 aa, synthetic construct
  REGION 1..7: note = Description of Artificial Sequence: Synthetic peptide
LMQTHGS

SEQ ID NO: 31919 - protein, 7 aa, synthetic construct
  REGION 1..7: note = Description of Artificial Sequence: Synthetic peptide
STTGDSK

SEQ ID NO: 31920 - protein, 7 aa, synthetic construct
  REGION 1..7: note = Description of Artificial Sequence: Synthetic peptide
PVSTHSS

SEQ ID NO: 31921 - protein, 7 aa, synthetic construct
  REGION 1..7: note = Description of Artificial Sequence: Synthetic peptide
NEARSAN

SEQ ID NO: 31922 - protein, 7 aa, synthetic construct
  REGION 1..7: note = Description of Artificial Sequence: Synthetic peptide
AYPKNSN

SEQ ID NO: 31923 - protein, 7 aa, synthetic construct
  REGION 1..7: note = Description of Artificial Sequence: Synthetic peptide
GQVNHTT

SEQ ID NO: 31924 - protein, 7 aa, synthetic construct
  REGION 1..7: note = Description of Artificial Sequence: Synthetic peptide
QAQGSMQ

SEQ ID NO: 31925 - protein, 7 aa, synthetic construct
  REGION 1..7: note = Description of Artificial Sequence: Synthetic peptide
SVTPHVT

SEQ ID NO: 31926 - protein, 7 aa, synthetic construct
  REGION 1..7: note = Description of Artificial Sequence: Synthetic peptide
NSSSSNH

SEQ ID NO: 31927 - protein, 7 aa, synthetic construct
  REGION 1..7: note = Description of Artificial Sequence: Synthetic peptide
FSASGAR

SEQ ID NO: 31928 - protein, 7 aa, synthetic construct
  REGION 1..7: note = Description of Artificial Sequence: Synthetic peptide
PVGTKSG

SEQ ID NO: 31929 - protein, 7 aa, synthetic construct
  REGION 1..7: note = Description of Artificial Sequence: Synthetic peptide
PLNARGS

SEQ ID NO: 31930 - protein, 7 aa, synthetic construct
  REGION 1..7: note = Description of Artificial Sequence: Synthetic peptide
RPVVAST

SEQ ID NO: 31931 - protein, 7 aa, synthetic construct
  REGION 1..7: note = Description of Artificial Sequence: Synthetic peptide
PNLQSSK

SEQ ID NO: 31932 - protein, 7 aa, synthetic construct
  REGION 1..7: note = Description of Artificial Sequence: Synthetic peptide
GGLDHHA

SEQ ID NO: 31933 - protein, 7 aa, synthetic construct
  REGION 1..7: note = Description of Artificial Sequence: Synthetic peptide
GHGNNGA

SEQ ID NO: 31934 - protein, 7 aa, synthetic construct
  REGION 1..7: note = Description of Artificial Sequence: Synthetic peptide
RTLSASS

SEQ ID NO: 31935 - protein, 7 aa, synthetic construct
  REGION 1..7: note = Description of Artificial Sequence: Synthetic peptide
ATGNGRG

SEQ ID NO: 31936 - protein, 7 aa, synthetic construct
  REGION 1..7: note = Description of Artificial Sequence: Synthetic peptide
GSGHGTN

SEQ ID NO: 31937 - protein, 7 aa, synthetic construct
  REGION 1..7: note = Description of Artificial Sequence: Synthetic peptide
SPGNKLL

SEQ ID NO: 31938 - protein, 7 aa, synthetic construct
  REGION 1..7: note = Description of Artificial Sequence: Synthetic peptide
SHNSKDS

SEQ ID NO: 31939 - protein, 7 aa, synthetic construct
  REGION 1..7: note = Description of Artificial Sequence: Synthetic peptide
YVSNSNA

SEQ ID NO: 31940 - protein, 7 aa, synthetic construct
  REGION 1..7: note = Description of Artificial Sequence: Synthetic peptide
SSGSNRS

SEQ ID NO: 31941 - protein, 7 aa, synthetic construct
  REGION 1..7: note = Description of Artificial Sequence: Synthetic peptide
NGSGQNK

SEQ ID NO: 31942 - protein, 7 aa, synthetic construct
  REGION 1..7: note = Description of Artificial Sequence: Synthetic peptide
PSQTKPS

SEQ ID NO: 31943 - protein, 7 aa, synthetic construct
  REGION 1..7: note = Description of Artificial Sequence: Synthetic peptide
GTSTSLR

SEQ ID NO: 31944 - protein, 7 aa, synthetic construct
  REGION 1..7: note = Description of Artificial Sequence: Synthetic peptide
NGSGLNQ

SEQ ID NO: 31945 - protein, 7 aa, synthetic construct
  REGION 1..7: note = Description of Artificial Sequence: Synthetic peptide
NRVTQSS

SEQ ID NO: 31946 - protein, 7 aa, synthetic construct
  REGION 1..7: note = Description of Artificial Sequence: Synthetic peptide
QTRSNGN

SEQ ID NO: 31947 - protein, 7 aa, synthetic construct
  REGION 1..7: note = Description of Artificial Sequence: Synthetic peptide
SGSTKGQ

SEQ ID NO: 31948 - protein, 7 aa, synthetic construct
  REGION 1..7: note = Description of Artificial Sequence: Synthetic peptide
TPSVSTK

SEQ ID NO: 31949 - protein, 7 aa, synthetic construct
  REGION 1..7: note = Description of Artificial Sequence: Synthetic peptide
AQINTPT

SEQ ID NO: 31950 - protein, 7 aa, synthetic construct
  REGION 1..7: note = Description of Artificial Sequence: Synthetic peptide
GHVSPAF

SEQ ID NO: 31951 - protein, 7 aa, synthetic construct
  REGION 1..7: note = Description of Artificial Sequence: Synthetic peptide
APSARPS

SEQ ID NO: 31952 - protein, 7 aa, synthetic construct
  REGION 1..7: note = Description of Artificial Sequence: Synthetic peptide
PTSFSGT

SEQ ID NO: 31953 - protein, 7 aa, synthetic construct
  REGION 1..7: note = Description of Artificial Sequence: Synthetic peptide
PRLNVGG

SEQ ID NO: 31954 - protein, 7 aa, synthetic construct
  REGION 1..7: note = Description of Artificial Sequence: Synthetic peptide
RHNTIAG

SEQ ID NO: 31955 - protein, 7 aa, synthetic construct
  REGION 1..7: note = Description of Artificial Sequence: Synthetic peptide
RGVSTPT

SEQ ID NO: 31956 - protein, 7 aa, synthetic construct
  REGION 1..7: note = Description of Artificial Sequence: Synthetic peptide
PRVHPLV

SEQ ID NO: 31957 - protein, 7 aa, synthetic construct
  REGION 1..7: note = Description of Artificial Sequence: Synthetic peptide
QDKHNPG

SEQ ID NO: 31958 - protein, 7 aa, synthetic construct
  REGION 1..7: note = Description of Artificial Sequence: Synthetic peptide
NNAHSSS

SEQ ID NO: 31959 - protein, 7 aa, synthetic construct
  REGION 1..7: note = Description of Artificial Sequence: Synthetic peptide
ESPNLHS

SEQ ID NO: 31960 - protein, 7 aa, synthetic construct
  REGION 1..7: note = Description of Artificial Sequence: Synthetic peptide
SREQGVG

SEQ ID NO: 31961 - protein, 7 aa, synthetic construct
  REGION 1..7: note = Description of Artificial Sequence: Synthetic peptide
NDSGQNQ

SEQ ID NO: 31962 - protein, 7 aa, synthetic construct
  REGION 1..7: note = Description of Artificial Sequence: Synthetic peptide
SLTNSAL

SEQ ID NO: 31963 - protein, 7 aa, synthetic construct
  REGION 1..7: note = Description of Artificial Sequence: Synthetic peptide
QTRTDVT

SEQ ID NO: 31964 - protein, 7 aa, synthetic construct
  REGION 1..7: note = Description of Artificial Sequence: Synthetic peptide
MAHDGYR

SEQ ID NO: 31965 - protein, 7 aa, synthetic construct
  REGION 1..7: note = Description of Artificial Sequence: Synthetic peptide
NCSGQNQ

SEQ ID NO: 31966 - protein, 7 aa, synthetic construct
  REGION 1..7: note = Description of Artificial Sequence: Synthetic peptide
SMGNSIS

SEQ ID NO: 31967 - protein, 7 aa, synthetic construct
  REGION 1..7: note = Description of Artificial Sequence: Synthetic peptide
FPVTGLS

SEQ ID NO: 31968 - protein, 7 aa, synthetic construct
  REGION 1..7: note = Description of Artificial Sequence: Synthetic peptide
AIPAVSM

SEQ ID NO: 31969 - protein, 7 aa, synthetic construct
  REGION 1..7: note = Description of Artificial Sequence: Synthetic peptide
GVTSSGP

SEQ ID NO: 31970 - protein, 7 aa, synthetic construct
  REGION 1..7: note = Description of Artificial Sequence: Synthetic peptide
SISHARE

SEQ ID NO: 31971 - protein, 7 aa, synthetic construct
  REGION 1..7: note = Description of Artificial Sequence: Synthetic peptide
LSPTSTN

SEQ ID NO: 31972 - protein, 7 aa, synthetic construct
  REGION 1..7: note = Description of Artificial Sequence: Synthetic peptide
KSNSSLG

SEQ ID NO: 31973 - protein, 7 aa, synthetic construct
  REGION 1..7: note = Description of Artificial Sequence: Synthetic peptide
GIDTKML

SEQ ID NO: 31974 - protein, 7 aa, synthetic construct
  REGION 1..7: note = Description of Artificial Sequence: Synthetic peptide
NGSGQTQ

SEQ ID NO: 31975 - protein, 7 aa, synthetic construct
  REGION 1..7: note = Description of Artificial Sequence: Synthetic peptide
DGSGQNQ

SEQ ID NO: 31976 - protein, 7 aa, synthetic construct
  REGION 1..7: note = Description of Artificial Sequence: Synthetic peptide
DIMSPLK

SEQ ID NO: 31977 - protein, 7 aa, synthetic construct
  REGION 1..7: note = Description of Artificial Sequence: Synthetic peptide
NGSGRNQ

SEQ ID NO: 31978 - protein, 7 aa, synthetic construct
  REGION 1..7: note = Description of Artificial Sequence: Synthetic peptide
NGSGQNP

SEQ ID NO: 31979 - protein, 7 aa, synthetic construct
  REGION 1..7: note = Description of Artificial Sequence: Synthetic peptide
SPARASL

SEQ ID NO: 31980 - protein, 7 aa, synthetic construct
  REGION 1..7: note = Description of Artificial Sequence: Synthetic peptide
SITSVTN

SEQ ID NO: 31981 - protein, 7 aa, synthetic construct
  REGION 1..7: note = Description of Artificial Sequence: Synthetic peptide
HTSPGKN

SEQ ID NO: 31982 - protein, 7 aa, synthetic construct
  REGION 1..7: note = Description of Artificial Sequence: Synthetic peptide
LASGTPS

SEQ ID NO: 31983 - protein, 7 aa, synthetic construct
  REGION 1..7: note = Description of Artificial Sequence: Synthetic peptide
NGSEQNQ

SEQ ID NO: 31984 - protein, 7 aa, synthetic construct
  REGION 1..7: note = Description of Artificial Sequence: Synthetic peptide
NGTGQNQ

SEQ ID NO: 31985 - protein, 7 aa, synthetic construct
  REGION 1..7: note = Description of Artificial Sequence: Synthetic peptide
NGSGQKQ

SEQ ID NO: 31986 - protein, 7 aa, synthetic construct
  REGION 1..7: note = Description of Artificial Sequence: Synthetic peptide
NGSGENQ

SEQ ID NO: 31987 - protein, 7 aa, synthetic construct
  REGION 1..7: note = Description of Artificial Sequence: Synthetic peptide
RVTDAHL

SEQ ID NO: 31988 - protein, 7 aa, synthetic construct
  REGION 1..7: note = Description of Artificial Sequence: Synthetic peptide
NGCGQNQ

SEQ ID NO: 31989 - protein, 7 aa, synthetic construct
  REGION 1..7: note = Description of Artificial Sequence: Synthetic peptide
NGSGQNE

SEQ ID NO: 31990 - protein, 7 aa, synthetic construct
  REGION 1..7: note = Description of Artificial Sequence: Synthetic peptide
RLDISNK

SEQ ID NO: 31991 - protein, 7 aa, synthetic construct
  REGION 1..7: note = Description of Artificial Sequence: Synthetic peptide
HMPSCGG

SEQ ID NO: 31992 - protein, 7 aa, synthetic construct
  REGION 1..7: note = Description of Artificial Sequence: Synthetic peptide
NGSGHNQ

SEQ ID NO: 31993 - protein, 7 aa, synthetic construct
  REGION 1..7: note = Description of Artificial Sequence: Synthetic peptide
NGAGQNQ

SEQ ID NO: 31994 - protein, 7 aa, synthetic construct
  REGION 1..7: note = Description of Artificial Sequence: Synthetic peptide
HLGSDSR

SEQ ID NO: 31995 - protein, 7 aa, synthetic construct
  REGION 1..7: note = Description of Artificial Sequence: Synthetic peptide
NGSGQDQ

SEQ ID NO: 31996 - protein, 7 aa, synthetic construct
  REGION 1..7: note = Description of Artificial Sequence: Synthetic peptide
NGSGQHQ

SEQ ID NO: 31997 - protein, 7 aa, synthetic construct
  REGION 1..7: note = Description of Artificial Sequence: Synthetic peptide
TIKSVTN

SEQ ID NO: 31998 - protein, 7 aa, synthetic construct
  REGION 1..7: note = Description of Artificial Sequence: Synthetic peptide
NGSGQNR

SEQ ID NO: 31999 - protein, 7 aa, synthetic construct
  REGION 1..7: note = Description of Artificial Sequence: Synthetic peptide
NGSGQSQ

SEQ ID NO: 32000 - protein, 7 aa, synthetic construct
  REGION 1..7: note = Description of Artificial Sequence: Synthetic peptide
NVSGQNQ

SEQ ID NO: 32001 - protein, 7 aa, synthetic construct
  REGION 1..7: note = Description of Artificial Sequence: Synthetic peptide
TGSGQNQ

SEQ ID NO: 32002 - protein, 7 aa, synthetic construct
  REGION 1..7: note = Description of Artificial Sequence: Synthetic peptide
NGSGQIQ

SEQ ID NO: 32003 - protein, 7 aa, synthetic construct
  REGION 1..7: note = Description of Artificial Sequence: Synthetic peptide
NWSGQNQ

SEQ ID NO: 32004 - protein, 7 aa, synthetic construct
  REGION 1..7: note = Description of Artificial Sequence: Synthetic peptide
SAVGKAS

SEQ ID NO: 32005 - protein, 7 aa, synthetic construct
  REGION 1..7: note = Description of Artificial Sequence: Synthetic peptide
AIYSEYK

SEQ ID NO: 32006 - protein, 7 aa, synthetic construct
  REGION 1..7: note = Description of Artificial Sequence: Synthetic peptide
NGYGQNQ

SEQ ID NO: 32007 - protein, 7 aa, synthetic construct
  REGION 1..7: note = Description of Artificial Sequence: Synthetic peptide
NGSGPNQ

SEQ ID NO: 32008 - protein, 7 aa, synthetic construct
  REGION 1..7: note = Description of Artificial Sequence: Synthetic peptide
NGFGQNQ

SEQ ID NO: 32009 - protein, 7 aa, synthetic construct
  REGION 1..7: note = Description of Artificial Sequence: Synthetic peptide
PGSGSNN

SEQ ID NO: 32010 - protein, 7 aa, synthetic construct
  REGION 1..7: note = Description of Artificial Sequence: Synthetic peptide
NGSAQNQ

SEQ ID NO: 32011 - protein, 7 aa, synthetic construct
  REGION 1..7: note = Description of Artificial Sequence: Synthetic peptide
SGATTPR

SEQ ID NO: 32012 - protein, 7 aa, synthetic construct
  REGION 1..7: note = Description of Artificial Sequence: Synthetic peptide
TTYGSLG

SEQ ID NO: 32013 - protein, 7 aa, synthetic construct
  REGION 1..7: note = Description of Artificial Sequence: Synthetic peptide
MPSQRDG

SEQ ID NO: 32014 - protein, 7 aa, synthetic construct
  REGION 1..7: note = Description of Artificial Sequence: Synthetic peptide
SGSGQNQ

SEQ ID NO: 32015 - protein, 7 aa, synthetic construct
  REGION 1..7: note = Description of Artificial Sequence: Synthetic peptide
NASGQNQ

SEQ ID NO: 32016 - protein, 7 aa, synthetic construct
  REGION 1..7: note = Description of Artificial Sequence: Synthetic peptide
NSSGQNQ

SEQ ID NO: 32017 - protein, 7 aa, synthetic construct
  REGION 1..7: note = Description of Artificial Sequence: Synthetic peptide
NGPGQNQ

SEQ ID NO: 32018 - protein, 7 aa, synthetic construct
  REGION 1..7: note = Description of Artificial Sequence: Synthetic peptide
NGSRQNQ

SEQ ID NO: 32019 - protein, 7 aa, synthetic construct
  REGION 1..7: note = Description of Artificial Sequence: Synthetic peptide
TPGASLS

SEQ ID NO: 32020 - protein, 7 aa, synthetic construct
  REGION 1..7: note = Description of Artificial Sequence: Synthetic peptide
SPTSPMN

SEQ ID NO: 32021 - protein, 7 aa, synthetic construct
  REGION 1..7: note = Description of Artificial Sequence: Synthetic peptide
KGSGQNQ

SEQ ID NO: 32022 - protein, 7 aa, synthetic construct
  REGION 1..7: note = Description of Artificial Sequence: Synthetic peptide
SGVERVN

SEQ ID NO: 32023 - protein, 7 aa, synthetic construct
  REGION 1..7: note = Description of Artificial Sequence: Synthetic peptide
RDTRESQ

SEQ ID NO: 32024 - protein, 7 aa, synthetic construct
  REGION 1..7: note = Description of Artificial Sequence: Synthetic peptide
AGEGMYA

SEQ ID NO: 32025 - protein, 7 aa, synthetic construct
  REGION 1..7: note = Description of Artificial Sequence: Synthetic peptide
IGSGQNQ

SEQ ID NO: 32026 - protein, 7 aa, synthetic construct
  REGION 1..7: note = Description of Artificial Sequence: Synthetic peptide
INSGNGS

SEQ ID NO: 32027 - protein, 7 aa, synthetic construct
  REGION 1..7: note = Description of Artificial Sequence: Synthetic peptide
SVSTNFS

SEQ ID NO: 32028 - protein, 7 aa, synthetic construct
  REGION 1..7: note = Description of Artificial Sequence: Synthetic peptide
HGSGQNQ

SEQ ID NO: 32029 - protein, 7 aa, synthetic construct
  REGION 1..7: note = Description of Artificial Sequence: Synthetic peptide
PGSGSNH

SEQ ID NO: 32030 - protein, 7 aa, synthetic construct
  REGION 1..7: note = Description of Artificial Sequence: Synthetic peptide
NGSVQNQ

SEQ ID NO: 32031 - protein, 7 aa, synthetic construct
  REGION 1..7: note = Description of Artificial Sequence: Synthetic peptide
FRSKESA

SEQ ID NO: 32032 - protein, 7 aa, synthetic construct
  REGION 1..7: note = Description of Artificial Sequence: Synthetic peptide
QYMGANS

SEQ ID NO: 32033 - protein, 7 aa, synthetic construct
  REGION 1..7: note = Description of Artificial Sequence: Synthetic peptide
PFGSSAR

SEQ ID NO: 32034 - protein, 7 aa, synthetic construct
  REGION 1..7: note = Description of Artificial Sequence: Synthetic peptide
SNETKSS

SEQ ID NO: 32035 - protein, 7 aa, synthetic construct
  REGION 1..7: note = Description of Artificial Sequence: Synthetic peptide
PGINTNS

SEQ ID NO: 32036 - protein, 7 aa, synthetic construct
  REGION 1..7: note = Description of Artificial Sequence: Synthetic peptide
SRNSPPQ

SEQ ID NO: 32037 - protein, 7 aa, synthetic construct
  REGION 1..7: note = Description of Artificial Sequence: Synthetic peptide
RLDGLSR

SEQ ID NO: 32038 - protein, 7 aa, synthetic construct
  REGION 1..7: note = Description of Artificial Sequence: Synthetic peptide
SSQAQPT

SEQ ID NO: 32039 - protein, 7 aa, synthetic construct
  REGION 1..7: note = Description of Artificial Sequence: Synthetic peptide
HLSHSPT

SEQ ID NO: 32040 - protein, 7 aa, synthetic construct
  REGION 1..7: note = Description of Artificial Sequence: Synthetic peptide
RATPLSG

SEQ ID NO: 32041 - protein, 7 aa, synthetic construct
  REGION 1..7: note = Description of Artificial Sequence: Synthetic peptide
MGAVSVS

SEQ ID NO: 32042 - protein, 7 aa, synthetic construct
  REGION 1..7: note = Description of Artificial Sequence: Synthetic peptide
DYHNSKL

SEQ ID NO: 32043 - protein, 7 aa, synthetic construct
  REGION 1..7: note = Description of Artificial Sequence: Synthetic peptide
KNATGIL

SEQ ID NO: 32044 - protein, 7 aa, synthetic construct
  REGION 1..7: note = Description of Artificial Sequence: Synthetic peptide
CNNARVS

SEQ ID NO: 32045 - protein, 7 aa, synthetic construct
  REGION 1..7: note = Description of Artificial Sequence: Synthetic peptide
GTASGVA

SEQ ID NO: 32046 - protein, 7 aa, synthetic construct
  REGION 1..7: note = Description of Artificial Sequence: Synthetic peptide
GQSGSRL

SEQ ID NO: 32047 - protein, 7 aa, synthetic construct
  REGION 1..7: note = Description of Artificial Sequence: Synthetic peptide
NNAATHS

SEQ ID NO: 32048 - protein, 7 aa, synthetic construct
  REGION 1..7: note = Description of Artificial Sequence: Synthetic peptide
PGSGSKH

SEQ ID NO: 32049 - protein, 7 aa, synthetic construct
  REGION 1..7: note = Description of Artificial Sequence: Synthetic peptide
ARASSNS

SEQ ID NO: 32050 - protein, 7 aa, synthetic construct
  REGION 1..7: note = Description of Artificial Sequence: Synthetic peptide
EPLSKQS

SEQ ID NO: 32051 - protein, 7 aa, synthetic construct
  REGION 1..7: note = Description of Artificial Sequence: Synthetic peptide
YSRPTTT

SEQ ID NO: 32052 - protein, 7 aa, synthetic construct
  REGION 1..7: note = Description of Artificial Sequence: Synthetic peptide
NRSGQNQ

SEQ ID NO: 32053 - protein, 7 aa, synthetic construct
  REGION 1..7: note = Description of Artificial Sequence: Synthetic peptide
EYPQQAK

SEQ ID NO: 32054 - protein, 7 aa, synthetic construct
  REGION 1..7: note = Description of Artificial Sequence: Synthetic peptide
MGGVTSS

SEQ ID NO: 32055 - protein, 7 aa, synthetic construct
  REGION 1..7: note = Description of Artificial Sequence: Synthetic peptide
HTDINHQ

SEQ ID NO: 32056 - protein, 7 aa, synthetic construct
  REGION 1..7: note = Description of Artificial Sequence: Synthetic peptide
HVHDGRT

SEQ ID NO: 32057 - protein, 7 aa, synthetic construct
  REGION 1..7: note = Description of Artificial Sequence: Synthetic peptide
ESATPIR

SEQ ID NO: 32058 - protein, 7 aa, synthetic construct
  REGION 1..7: note = Description of Artificial Sequence: Synthetic peptide
YGSGQNQ

SEQ ID NO: 32059 - protein, 7 aa, synthetic construct
  REGION 1..7: note = Description of Artificial Sequence: Synthetic peptide
VPSQSLH

SEQ ID NO: 32060 - protein, 7 aa, synthetic construct
  REGION 1..7: note = Description of Artificial Sequence: Synthetic peptide
SNTHSPS

SEQ ID NO: 32061 - protein, 7 aa, synthetic construct
  REGION 1..7: note = Description of Artificial Sequence: Synthetic peptide
GQTLPIC

SEQ ID NO: 32062 - protein, 7 aa, synthetic construct
  REGION 1..7: note = Description of Artificial Sequence: Synthetic peptide
KVDKRTD

SEQ ID NO: 32063 - protein, 7 aa, synthetic construct
  REGION 1..7: note = Description of Artificial Sequence: Synthetic peptide
RTGSYTQ

SEQ ID NO: 32064 - protein, 7 aa, synthetic construct
  REGION 1..7: note = Description of Artificial Sequence: Synthetic peptide
NGRPQFR

SEQ ID NO: 32065 - protein, 7 aa, synthetic construct
  REGION 1..7: note = Description of Artificial Sequence: Synthetic peptide
DPVTRKR

SEQ ID NO: 32066 - protein, 7 aa, synthetic construct
  REGION 1..7: note = Description of Artificial Sequence: Synthetic peptide
ADSNRPG

SEQ ID NO: 32067 - protein, 7 aa, synthetic construct
  REGION 1..7: note = Description of Artificial Sequence: Synthetic peptide
ITPGGHS

SEQ ID NO: 32068 - protein, 7 aa, synthetic construct
  REGION 1..7: note = Description of Artificial Sequence: Synthetic peptide
KHEGYNV

SEQ ID NO: 32069 - protein, 7 aa, synthetic construct
  REGION 1..7: note = Description of Artificial Sequence: Synthetic peptide
IKLDKQI

SEQ ID NO: 32070 - protein, 7 aa, synthetic construct
  REGION 1..7: note = Description of Artificial Sequence: Synthetic peptide
PRSNKYP

SEQ ID NO: 32071 - protein, 7 aa, synthetic construct
  REGION 1..7: note = Description of Artificial Sequence: Synthetic peptide
KINTRNM

SEQ ID NO: 32072 - protein, 7 aa, synthetic construct
  REGION 1..7: note = Description of Artificial Sequence: Synthetic peptide
FHSRDSS

SEQ ID NO: 32073 - protein, 7 aa, synthetic construct
  REGION 1..7: note = Description of Artificial Sequence: Synthetic peptide
YIKSVTN

SEQ ID NO: 32074 - protein, 7 aa, synthetic construct
  REGION 1..7: note = Description of Artificial Sequence: Synthetic peptide
NPGRQQF

SEQ ID NO: 32075 - protein, 7 aa, synthetic construct
  REGION 1..7: note = Description of Artificial Sequence: Synthetic peptide
IIQNQSK

SEQ ID NO: 32076 - protein, 7 aa, synthetic construct
  REGION 1..7: note = Description of Artificial Sequence: Synthetic peptide
TSSGHSV

SEQ ID NO: 32077 - protein, 7 aa, synthetic construct
  REGION 1..7: note = Description of Artificial Sequence: Synthetic peptide
YRKHTST

SEQ ID NO: 32078 - protein, 7 aa, synthetic construct
  REGION 1..7: note = Description of Artificial Sequence: Synthetic peptide
SMTSRNS

SEQ ID NO: 32079 - protein, 7 aa, synthetic construct
  REGION 1..7: note = Description of Artificial Sequence: Synthetic peptide
DQKTVNR

SEQ ID NO: 32080 - protein, 7 aa, synthetic construct
  REGION 1..7: note = Description of Artificial Sequence: Synthetic peptide
NSGRNSV

SEQ ID NO: 32081 - protein, 7 aa, synthetic construct
  REGION 1..7: note = Description of Artificial Sequence: Synthetic peptide
PEIGKQR

SEQ ID NO: 32082 - protein, 7 aa, synthetic construct
  REGION 1..7: note = Description of Artificial Sequence: Synthetic peptide
PISSRAG

SEQ ID NO: 32083 - protein, 7 aa, synthetic construct
  REGION 1..7: note = Description of Artificial Sequence: Synthetic peptide
NGFNSNN

SEQ ID NO: 32084 - protein, 7 aa, synthetic construct
  REGION 1..7: note = Description of Artificial Sequence: Synthetic peptide
FPGGNHT

SEQ ID NO: 32085 - protein, 7 aa, synthetic construct
  REGION 1..7: note = Description of Artificial Sequence: Synthetic peptide
SSGGNMS

SEQ ID NO: 32086 - protein, 7 aa, synthetic construct
  REGION 1..7: note = Description of Artificial Sequence: Synthetic peptide
YNRTSIV

SEQ ID NO: 32087 - protein, 7 aa, synthetic construct
  REGION 1..7: note = Description of Artificial Sequence: Synthetic peptide
MSRSDPP

SEQ ID NO: 32088 - protein, 7 aa, synthetic construct
  REGION 1..7: note = Description of Artificial Sequence: Synthetic peptide
SPNAKRV

SEQ ID NO: 32089 - protein, 7 aa, synthetic construct
  REGION 1..7: note = Description of Artificial Sequence: Synthetic peptide
RQLPSGL

SEQ ID NO: 32090 - protein, 7 aa, synthetic construct
  REGION 1..7: note = Description of Artificial Sequence: Synthetic peptide
GSYSNPT

SEQ ID NO: 32091 - protein, 7 aa, synthetic construct
  REGION 1..7: note = Description of Artificial Sequence: Synthetic peptide
GQNRNNT

SEQ ID NO: 32092 - protein, 7 aa, synthetic construct
  REGION 1..7: note = Description of Artificial Sequence: Synthetic peptide
SNYKSSN

SEQ ID NO: 32093 - protein, 7 aa, synthetic construct
  REGION 1..7: note = Description of Artificial Sequence: Synthetic peptide
MPHPSSK

SEQ ID NO: 32094 - protein, 7 aa, synthetic construct
  REGION 1..7: note = Description of Artificial Sequence: Synthetic peptide
KIPNYDR

SEQ ID NO: 32095 - protein, 7 aa, synthetic construct
  REGION 1..7: note = Description of Artificial Sequence: Synthetic peptide
SREKNNA

SEQ ID NO: 32096 - protein, 7 aa, synthetic construct
  REGION 1..7: note = Description of Artificial Sequence: Synthetic peptide
MSLSKNH

SEQ ID NO: 32097 - protein, 7 aa, synthetic construct
  REGION 1..7: note = Description of Artificial Sequence: Synthetic peptide
KISSPFI

SEQ ID NO: 32098 - protein, 7 aa, synthetic construct
  REGION 1..7: note = Description of Artificial Sequence: Synthetic peptide
NPSMAMK

SEQ ID NO: 32099 - protein, 7 aa, synthetic construct
  REGION 1..7: note = Description of Artificial Sequence: Synthetic peptide
RVSSPSN

SEQ ID NO: 32100 - protein, 7 aa, synthetic construct
  REGION 1..7: note = Description of Artificial Sequence: Synthetic peptide
RTYSPQI

SEQ ID NO: 32101 - protein, 7 aa, synthetic construct
  REGION 1..7: note = Description of Artificial Sequence: Synthetic peptide
RNDKQNS

SEQ ID NO: 32102 - protein, 7 aa, synthetic construct
  REGION 1..7: note = Description of Artificial Sequence: Synthetic peptide
EQGSGNH

SEQ ID NO: 32103 - protein, 7 aa, synthetic construct
  REGION 1..7: note = Description of Artificial Sequence: Synthetic peptide
DPPKGSR

SEQ ID NO: 32104 - protein, 7 aa, synthetic construct
  REGION 1..7: note = Description of Artificial Sequence: Synthetic peptide
TIKSVTN

SEQ ID NO: 32105 - protein, 7 aa, synthetic construct
  REGION 1..7: note = Description of Artificial Sequence: Synthetic peptide
SIKEKTR

SEQ ID NO: 32106 - protein, 7 aa, synthetic construct
  REGION 1..7: note = Description of Artificial Sequence: Synthetic peptide
QSSIHTK

SEQ ID NO: 32107 - protein, 7 aa, synthetic construct
  REGION 1..7: note = Description of Artificial Sequence: Synthetic peptide
FGRTNQG

SEQ ID NO: 32108 - protein, 7 aa, synthetic construct
  REGION 1..7: note = Description of Artificial Sequence: Synthetic peptide
TKNSTHG

SEQ ID NO: 32109 - protein, 7 aa, synthetic construct
  REGION 1..7: note = Description of Artificial Sequence: Synthetic peptide
AHQSLDR

SEQ ID NO: 32110 - protein, 7 aa, synthetic construct
  REGION 1..7: note = Description of Artificial Sequence: Synthetic peptide
NRHERVI

SEQ ID NO: 32111 - protein, 7 aa, synthetic construct
  REGION 1..7: note = Description of Artificial Sequence: Synthetic peptide
YSSRSGP

SEQ ID NO: 32112 - protein, 7 aa, synthetic construct
  REGION 1..7: note = Description of Artificial Sequence: Synthetic peptide
PSSGHSR

SEQ ID NO: 32113 - protein, 7 aa, synthetic construct
  REGION 1..7: note = Description of Artificial Sequence: Synthetic peptide
TGSGRLL

SEQ ID NO: 32114 - protein, 7 aa, synthetic construct
  REGION 1..7: note = Description of Artificial Sequence: Synthetic peptide
TKSTSHV

SEQ ID NO: 32115 - protein, 7 aa, synthetic construct
  REGION 1..7: note = Description of Artificial Sequence: Synthetic peptide
IRSTSGG

SEQ ID NO: 32116 - protein, 7 aa, synthetic construct
  REGION 1..7: note = Description of Artificial Sequence: Synthetic peptide
YVRPGTG

SEQ ID NO: 32117 - protein, 7 aa, synthetic construct
  REGION 1..7: note = Description of Artificial Sequence: Synthetic peptide
VHVTSQT

SEQ ID NO: 32118 - protein, 7 aa, synthetic construct
  REGION 1..7: note = Description of Artificial Sequence: Synthetic peptide
CAAKGIR

SEQ ID NO: 32119 - protein, 7 aa, synthetic construct
  REGION 1..7: note = Description of Artificial Sequence: Synthetic peptide
RAPKSSS

SEQ ID NO: 32120 - protein, 7 aa, synthetic construct
  REGION 1..7: note = Description of Artificial Sequence: Synthetic peptide
NLGRQVG

SEQ ID NO: 32121 - protein, 7 aa, synthetic construct
  REGION 1..7: note = Description of Artificial Sequence: Synthetic peptide
PLERTTK

SEQ ID NO: 32122 - protein, 7 aa, synthetic construct
  REGION 1..7: note = Description of Artificial Sequence: Synthetic peptide
DSTLGQS

SEQ ID NO: 32123 - protein, 7 aa, synthetic construct
  REGION 1..7: note = Description of Artificial Sequence: Synthetic peptide
NNRSGMG

SEQ ID NO: 32124 - protein, 7 aa, synthetic construct
  REGION 1..7: note = Description of Artificial Sequence: Synthetic peptide
PGREKTV

SEQ ID NO: 32125 - protein, 7 aa, synthetic construct
  REGION 1..7: note = Description of Artificial Sequence: Synthetic peptide
YNKNAQL

SEQ ID NO: 32126 - protein, 7 aa, synthetic construct
  REGION 1..7: note = Description of Artificial Sequence: Synthetic peptide
FPLKLGR

SEQ ID NO: 32127 - protein, 7 aa, synthetic construct
  REGION 1..7: note = Description of Artificial Sequence: Synthetic peptide
KIASKSE

SEQ ID NO: 32128 - protein, 7 aa, synthetic construct
  REGION 1..7: note = Description of Artificial Sequence: Synthetic peptide
SYGKGSS

SEQ ID NO: 32129 - protein, 7 aa, synthetic construct
  REGION 1..7: note = Description of Artificial Sequence: Synthetic peptide
FRQTSGN

SEQ ID NO: 32130 - protein, 7 aa, synthetic construct
  REGION 1..7: note = Description of Artificial Sequence: Synthetic peptide
MNRTGIK

SEQ ID NO: 32131 - protein, 7 aa, synthetic construct
  REGION 1..7: note = Description of Artificial Sequence: Synthetic peptide
GPNQSGR

SEQ ID NO: 32132 - protein, 7 aa, synthetic construct
  REGION 1..7: note = Description of Artificial Sequence: Synthetic peptide
IRSKASA

SEQ ID NO: 32133 - protein, 7 aa, synthetic construct
  REGION 1..7: note = Description of Artificial Sequence: Synthetic peptide
ASRSTNP

SEQ ID NO: 32134 - protein, 7 aa, synthetic construct
  REGION 1..7: note = Description of Artificial Sequence: Synthetic peptide
DRYNRQL

SEQ ID NO: 32135 - protein, 7 aa, synthetic construct
  REGION 1..7: note = Description of Artificial Sequence: Synthetic peptide
HITGRQL

SEQ ID NO: 32136 - protein, 7 aa, synthetic construct
  REGION 1..7: note = Description of Artificial Sequence: Synthetic peptide
RVESPTN

SEQ ID NO: 32137 - protein, 7 aa, synthetic construct
  REGION 1..7: note = Description of Artificial Sequence: Synthetic peptide
NAQGTAK

SEQ ID NO: 32138 - protein, 7 aa, synthetic construct
  REGION 1..7: note = Description of Artificial Sequence: Synthetic peptide
AKTNLRS

SEQ ID NO: 32139 - protein, 7 aa, synthetic construct
  REGION 1..7: note = Description of Artificial Sequence: Synthetic peptide
LINATHR

SEQ ID NO: 32140 - protein, 7 aa, synthetic construct
  REGION 1..7: note = Description of Artificial Sequence: Synthetic peptide
HASRVNI

SEQ ID NO: 32141 - protein, 7 aa, synthetic construct
  REGION 1..7: note = Description of Artificial Sequence: Synthetic peptide
FNGLSTQ

SEQ ID NO: 32142 - protein, 7 aa, synthetic construct
  REGION 1..7: note = Description of Artificial Sequence: Synthetic peptide
IQNSSNT

SEQ ID NO: 32143 - protein, 7 aa, synthetic construct
  REGION 1..7: note = Description of Artificial Sequence: Synthetic peptide
HYNQTGL

SEQ ID NO: 32144 - protein, 7 aa, synthetic construct
  REGION 1..7: note = Description of Artificial Sequence: Synthetic peptide
NATSPRK

SEQ ID NO: 32145 - protein, 7 aa, synthetic construct
  REGION 1..7: note = Description of Artificial Sequence: Synthetic peptide
HLRDKYS

SEQ ID NO: 32146 - protein, 7 aa, synthetic construct
  REGION 1..7: note = Description of Artificial Sequence: Synthetic peptide
EVTNSPR

SEQ ID NO: 32147 - protein, 7 aa, synthetic construct
  REGION 1..7: note = Description of Artificial Sequence: Synthetic peptide
GSNRNHA

SEQ ID NO: 32148 - protein, 7 aa, synthetic construct
  REGION 1..7: note = Description of Artificial Sequence: Synthetic peptide
FNMQRSQ

SEQ ID NO: 32149 - protein, 7 aa, synthetic construct
  REGION 1..7: note = Description of Artificial Sequence: Synthetic peptide
SVYTHSL

SEQ ID NO: 32150 - protein, 7 aa, synthetic construct
  REGION 1..7: note = Description of Artificial Sequence: Synthetic peptide
HAARPLV

SEQ ID NO: 32151 - protein, 7 aa, synthetic construct
  REGION 1..7: note = Description of Artificial Sequence: Synthetic peptide
RATEGVF

SEQ ID NO: 32152 - protein, 7 aa, synthetic construct
  REGION 1..7: note = Description of Artificial Sequence: Synthetic peptide
AHRNISS

SEQ ID NO: 32153 - protein, 7 aa, synthetic construct
  REGION 1..7: note = Description of Artificial Sequence: Synthetic peptide
NRSTDFK

SEQ ID NO: 32154 - protein, 7 aa, synthetic construct
  REGION 1..7: note = Description of Artificial Sequence: Synthetic peptide
RASGPFV

SEQ ID NO: 32155 - protein, 7 aa, synthetic construct
  REGION 1..7: note = Description of Artificial Sequence: Synthetic peptide
CIRAGSC

SEQ ID NO: 32156 - protein, 7 aa, synthetic construct
  REGION 1..7: note = Description of Artificial Sequence: Synthetic peptide
MPLKPHL

SEQ ID NO: 32157 - protein, 7 aa, synthetic construct
  REGION 1..7: note = Description of Artificial Sequence: Synthetic peptide
FTFNAAT

SEQ ID NO: 32158 - protein, 7 aa, synthetic construct
  REGION 1..7: note = Description of Artificial Sequence: Synthetic peptide
MVSGKSY

SEQ ID NO: 32159 - protein, 7 aa, synthetic construct
  REGION 1..7: note = Description of Artificial Sequence: Synthetic peptide
SSAGHSK

SEQ ID NO: 32160 - protein, 7 aa, synthetic construct
  REGION 1..7: note = Description of Artificial Sequence: Synthetic peptide
FNSSSSK

SEQ ID NO: 32161 - protein, 7 aa, synthetic construct
  REGION 1..7: note = Description of Artificial Sequence: Synthetic peptide
QITPRSG

SEQ ID NO: 32162 - protein, 7 aa, synthetic construct
  REGION 1..7: note = Description of Artificial Sequence: Synthetic peptide
NSGTHFK

SEQ ID NO: 32163 - protein, 7 aa, synthetic construct
  REGION 1..7: note = Description of Artificial Sequence: Synthetic peptide
LGNAHQL

SEQ ID NO: 32164 - protein, 7 aa, synthetic construct
  REGION 1..7: note = Description of Artificial Sequence: Synthetic peptide
HDSKVIS

SEQ ID NO: 32165 - protein, 7 aa, synthetic construct
  REGION 1..7: note = Description of Artificial Sequence: Synthetic peptide
HQLKNSV

SEQ ID NO: 32166 - protein, 7 aa, synthetic construct
  REGION 1..7: note = Description of Artificial Sequence: Synthetic peptide
SAHNRSV

SEQ ID NO: 32167 - protein, 7 aa, synthetic construct
  REGION 1..7: note = Description of Artificial Sequence: Synthetic peptide
YGNPRQA

SEQ ID NO: 32168 - protein, 7 aa, synthetic construct
  REGION 1..7: note = Description of Artificial Sequence: Synthetic peptide
CLGRPMA

SEQ ID NO: 32169 - protein, 7 aa, synthetic construct
  REGION 1..7: note = Description of Artificial Sequence: Synthetic peptide
SVQKSVN

SEQ ID NO: 32170 - protein, 7 aa, synthetic construct
  REGION 1..7: note = Description of Artificial Sequence: Synthetic peptide
PVGSGVP

SEQ ID NO: 32171 - protein, 7 aa, synthetic construct
  REGION 1..7: note = Description of Artificial Sequence: Synthetic peptide
HGSKPYI

SEQ ID NO: 32172 - protein, 7 aa, synthetic construct
  REGION 1..7: note = Description of Artificial Sequence: Synthetic peptide
SPGNKST

SEQ ID NO: 32173 - protein, 7 aa, synthetic construct
  REGION 1..7: note = Description of Artificial Sequence: Synthetic peptide
SLGSGFQ

SEQ ID NO: 32174 - protein, 7 aa, synthetic construct
  REGION 1..7: note = Description of Artificial Sequence: Synthetic peptide
PDIGKQR

SEQ ID NO: 32175 - protein, 7 aa, synthetic construct
  REGION 1..7: note = Description of Artificial Sequence: Synthetic peptide
RVTNARN

SEQ ID NO: 32176 - protein, 7 aa, synthetic construct
  REGION 1..7: note = Description of Artificial Sequence: Synthetic peptide
SFSKGSS

SEQ ID NO: 32177 - protein, 7 aa, synthetic construct
  REGION 1..7: note = Description of Artificial Sequence: Synthetic peptide
VPGKSAQ

SEQ ID NO: 32178 - protein, 7 aa, synthetic construct
  REGION 1..7: note = Description of Artificial Sequence: Synthetic peptide
TSKPNSP

SEQ ID NO: 32179 - protein, 7 aa, synthetic construct
  REGION 1..7: note = Description of Artificial Sequence: Synthetic peptide
SPEKNMR

SEQ ID NO: 32180 - protein, 7 aa, synthetic construct
  REGION 1..7: note = Description of Artificial Sequence: Synthetic peptide
QGSGSNH

SEQ ID NO: 32181 - protein, 7 aa, synthetic construct
  REGION 1..7: note = Description of Artificial Sequence: Synthetic peptide
CQSRSGA

SEQ ID NO: 32182 - protein, 7 aa, synthetic construct
  REGION 1..7: note = Description of Artificial Sequence: Synthetic peptide
PSTERNR

SEQ ID NO: 32183 - protein, 7 aa, synthetic construct
  REGION 1..7: note = Description of Artificial Sequence: Synthetic peptide
ALGHNHN

SEQ ID NO: 32184 - protein, 7 aa, synthetic construct
  REGION 1..7: note = Description of Artificial Sequence: Synthetic peptide
QPIISPT

SEQ ID NO: 32185 - protein, 7 aa, synthetic construct
  REGION 1..7: note = Description of Artificial Sequence: Synthetic peptide
VSGQGNS

SEQ ID NO: 32186 - protein, 7 aa, synthetic construct
  REGION 1..7: note = Description of Artificial Sequence: Synthetic peptide
AVNTKAL

SEQ ID NO: 32187 - protein, 7 aa, synthetic construct
  REGION 1..7: note = Description of Artificial Sequence: Synthetic peptide
LNVGSVR

SEQ ID NO: 32188 - protein, 7 aa, synthetic construct
  REGION 1..7: note = Description of Artificial Sequence: Synthetic peptide
LHDGQTR

SEQ ID NO: 32189 - protein, 7 aa, synthetic construct
  REGION 1..7: note = Description of Artificial Sequence: Synthetic peptide
IRTGSLH

SEQ ID NO: 32190 - protein, 7 aa, synthetic construct
  REGION 1..7: note = Description of Artificial Sequence: Synthetic peptide
GTKSAFS

SEQ ID NO: 32191 - protein, 7 aa, synthetic construct
  REGION 1..7: note = Description of Artificial Sequence: Synthetic peptide
LSSSRMG

SEQ ID NO: 32192 - protein, 7 aa, synthetic construct
  REGION 1..7: note = Description of Artificial Sequence: Synthetic peptide
ARVVPRL

SEQ ID NO: 32193 - protein, 7 aa, synthetic construct
  REGION 1..7: note = Description of Artificial Sequence: Synthetic peptide
ESKAASK

SEQ ID NO: 32194 - protein, 7 aa, synthetic construct
  REGION 1..7: note = Description of Artificial Sequence: Synthetic peptide
PSKGTYP

SEQ ID NO: 32195 - protein, 7 aa, synthetic construct
  REGION 1..7: note = Description of Artificial Sequence: Synthetic peptide
HVSSTSV

SEQ ID NO: 32196 - protein, 7 aa, synthetic construct
  REGION 1..7: note = Description of Artificial Sequence: Synthetic peptide
REKQHNG

SEQ ID NO: 32197 - protein, 7 aa, synthetic construct
  REGION 1..7: note = Description of Artificial Sequence: Synthetic peptide
RNDTKLF

SEQ ID NO: 32198 - protein, 7 aa, synthetic construct
  REGION 1..7: note = Description of Artificial Sequence: Synthetic peptide
LSANPHN

SEQ ID NO: 32199 - protein, 7 aa, synthetic construct
  REGION 1..7: note = Description of Artificial Sequence: Synthetic peptide
NRSKESA

SEQ ID NO: 32200 - protein, 7 aa, synthetic construct
  REGION 1..7: note = Description of Artificial Sequence: Synthetic peptide
MKSQKYA

SEQ ID NO: 32201 - protein, 7 aa, synthetic construct
  REGION 1..7: note = Description of Artificial Sequence: Synthetic peptide
VLRDGHR

SEQ ID NO: 32202 - protein, 7 aa, synthetic construct
  REGION 1..7: note = Description of Artificial Sequence: Synthetic peptide
TKGGSQL

SEQ ID NO: 32203 - protein, 7 aa, synthetic construct
  REGION 1..7: note = Description of Artificial Sequence: Synthetic peptide
ISLTQSR

SEQ ID NO: 32204 - protein, 7 aa, synthetic construct
  REGION 1..7: note = Description of Artificial Sequence: Synthetic peptide
RELKNSS

SEQ ID NO: 32205 - protein, 7 aa, synthetic construct
  REGION 1..7: note = Description of Artificial Sequence: Synthetic peptide
RTQAHNV

SEQ ID NO: 32206 - protein, 7 aa, synthetic construct
  REGION 1..7: note = Description of Artificial Sequence: Synthetic peptide
SPGRTQS

SEQ ID NO: 32207 - protein, 7 aa, synthetic construct
  REGION 1..7: note = Description of Artificial Sequence: Synthetic peptide
CKTHVSV

SEQ ID NO: 32208 - protein, 7 aa, synthetic construct
  REGION 1..7: note = Description of Artificial Sequence: Synthetic peptide
SHDNGQS

SEQ ID NO: 32209 - protein, 7 aa, synthetic construct
  REGION 1..7: note = Description of Artificial Sequence: Synthetic peptide
SSTPRSV

SEQ ID NO: 32210 - protein, 7 aa, synthetic construct
  REGION 1..7: note = Description of Artificial Sequence: Synthetic peptide
PSARMSG

SEQ ID NO: 32211 - protein, 7 aa, synthetic construct
  REGION 1..7: note = Description of Artificial Sequence: Synthetic peptide
DIGNPTN

SEQ ID NO: 32212 - protein, 7 aa, synthetic construct
  REGION 1..7: note = Description of Artificial Sequence: Synthetic peptide
IGPSGVL

SEQ ID NO: 32213 - protein, 7 aa, synthetic construct
  REGION 1..7: note = Description of Artificial Sequence: Synthetic peptide
SPVKGSV

SEQ ID NO: 32214 - protein, 7 aa, synthetic construct
  REGION 1..7: note = Description of Artificial Sequence: Synthetic peptide
LRVNATG

SEQ ID NO: 32215 - protein, 7 aa, synthetic construct
  REGION 1..7: note = Description of Artificial Sequence: Synthetic peptide
GNGTRQN

SEQ ID NO: 32216 - protein, 7 aa, synthetic construct
  REGION 1..7: note = Description of Artificial Sequence: Synthetic peptide
VRVGQHL

SEQ ID NO: 32217 - protein, 7 aa, synthetic construct
  REGION 1..7: note = Description of Artificial Sequence: Synthetic peptide
FETHSRP

SEQ ID NO: 32218 - protein, 7 aa, synthetic construct
  REGION 1..7: note = Description of Artificial Sequence: Synthetic peptide
RMGVSNT

SEQ ID NO: 32219 - protein, 7 aa, synthetic construct
  REGION 1..7: note = Description of Artificial Sequence: Synthetic peptide
SSRNLVT

SEQ ID NO: 32220 - protein, 7 aa, synthetic construct
  REGION 1..7: note = Description of Artificial Sequence: Synthetic peptide
SPSFNQG

SEQ ID NO: 32221 - protein, 7 aa, synthetic construct
  REGION 1..7: note = Description of Artificial Sequence: Synthetic peptide
HSHGKSI

SEQ ID NO: 32222 - protein, 7 aa, synthetic construct
  REGION 1..7: note = Description of Artificial Sequence: Synthetic peptide
GPDTHSQ

SEQ ID NO: 32223 - protein, 7 aa, synthetic construct
  REGION 1..7: note = Description of Artificial Sequence: Synthetic peptide
GVINNER

SEQ ID NO: 32224 - protein, 7 aa, synthetic construct
  REGION 1..7: note = Description of Artificial Sequence: Synthetic peptide
SSMSHQK

SEQ ID NO: 32225 - protein, 7 aa, synthetic construct
  REGION 1..7: note = Description of Artificial Sequence: Synthetic peptide
SGASSNS

SEQ ID NO: 32226 - protein, 7 aa, synthetic construct
  REGION 1..7: note = Description of Artificial Sequence: Synthetic peptide
NNSKSQI

SEQ ID NO: 32227 - protein, 7 aa, synthetic construct
  REGION 1..7: note = Description of Artificial Sequence: Synthetic peptide
AIRPHSG

SEQ ID NO: 32228 - protein, 7 aa, synthetic construct
  REGION 1..7: note = Description of Artificial Sequence: Synthetic peptide
KLTGQRS

SEQ ID NO: 32229 - protein, 7 aa, synthetic construct
  REGION 1..7: note = Description of Artificial Sequence: Synthetic peptide
RVQKSSF

SEQ ID NO: 32230 - protein, 7 aa, synthetic construct
  REGION 1..7: note = Description of Artificial Sequence: Synthetic peptide
RSNPTLV

SEQ ID NO: 32231 - protein, 7 aa, synthetic construct
  REGION 1..7: note = Description of Artificial Sequence: Synthetic peptide
PTGKLRQ

SEQ ID NO: 32232 - protein, 7 aa, synthetic construct
  REGION 1..7: note = Description of Artificial Sequence: Synthetic peptide
GAGTSYH

SEQ ID NO: 32233 - protein, 7 aa, synthetic construct
  REGION 1..7: note = Description of Artificial Sequence: Synthetic peptide
SSQAVFR

SEQ ID NO: 32234 - protein, 7 aa, synthetic construct
  REGION 1..7: note = Description of Artificial Sequence: Synthetic peptide
GQAVNTA

SEQ ID NO: 32235 - protein, 7 aa, synthetic construct
  REGION 1..7: note = Description of Artificial Sequence: Synthetic peptide
FIGTRSA

SEQ ID NO: 32236 - protein, 7 aa, synthetic construct
  REGION 1..7: note = Description of Artificial Sequence: Synthetic peptide
TGRGPDV

SEQ ID NO: 32237 - protein, 7 aa, synthetic construct
  REGION 1..7: note = Description of Artificial Sequence: Synthetic peptide
LNNQRIA

SEQ ID NO: 32238 - protein, 7 aa, synthetic construct
  REGION 1..7: note = Description of Artificial Sequence: Synthetic peptide
TPQNSVK

SEQ ID NO: 32239 - protein, 7 aa, synthetic construct
  REGION 1..7: note = Description of Artificial Sequence: Synthetic peptide
NPSEKML

SEQ ID NO: 32240 - protein, 7 aa, synthetic construct
  REGION 1..7: note = Description of Artificial Sequence: Synthetic peptide
VFNRNAS

SEQ ID NO: 32241 - protein, 7 aa, synthetic construct
  REGION 1..7: note = Description of Artificial Sequence: Synthetic peptide
TPTPVNQ

SEQ ID NO: 32242 - protein, 7 aa, synthetic construct
  REGION 1..7: note = Description of Artificial Sequence: Synthetic peptide
FNSGSGR

SEQ ID NO: 32243 - protein, 7 aa, synthetic construct
  REGION 1..7: note = Description of Artificial Sequence: Synthetic peptide
HVTKSTA

SEQ ID NO: 32244 - protein, 7 aa, synthetic construct
  REGION 1..7: note = Description of Artificial Sequence: Synthetic peptide
FVSARSG

SEQ ID NO: 32245 - protein, 7 aa, synthetic construct
  REGION 1..7: note = Description of Artificial Sequence: Synthetic peptide
TPAGPNK

SEQ ID NO: 32246 - protein, 7 aa, synthetic construct
  REGION 1..7: note = Description of Artificial Sequence: Synthetic peptide
MSSKQVS

SEQ ID NO: 32247 - protein, 7 aa, synthetic construct
  REGION 1..7: note = Description of Artificial Sequence: Synthetic peptide
WMSGKNS

SEQ ID NO: 32248 - protein, 7 aa, synthetic construct
  REGION 1..7: note = Description of Artificial Sequence: Synthetic peptide
ISTPKTA

SEQ ID NO: 32249 - protein, 7 aa, synthetic construct
  REGION 1..7: note = Description of Artificial Sequence: Synthetic peptide
TRNNKSE

SEQ ID NO: 32250 - protein, 7 aa, synthetic construct
  REGION 1..7: note = Description of Artificial Sequence: Synthetic peptide
DPVLKPA

SEQ ID NO: 32251 - protein, 7 aa, synthetic construct
  REGION 1..7: note = Description of Artificial Sequence: Synthetic peptide
PGASGKV

SEQ ID NO: 32252 - protein, 7 aa, synthetic construct
  REGION 1..7: note = Description of Artificial Sequence: Synthetic peptide
NNVTKAP

SEQ ID NO: 32253 - protein, 7 aa, synthetic construct
  REGION 1..7: note = Description of Artificial Sequence: Synthetic peptide
NAMNTRG

SEQ ID NO: 32254 - protein, 7 aa, synthetic construct
  REGION 1..7: note = Description of Artificial Sequence: Synthetic peptide
HGVNKTE

SEQ ID NO: 32255 - protein, 7 aa, synthetic construct
  REGION 1..7: note = Description of Artificial Sequence: Synthetic peptide
YNRKPAQ

SEQ ID NO: 32256 - protein, 7 aa, synthetic construct
  REGION 1..7: note = Description of Artificial Sequence: Synthetic peptide
PGGKSQL

SEQ ID NO: 32257 - protein, 7 aa, synthetic construct
  REGION 1..7: note = Description of Artificial Sequence: Synthetic peptide
YGQTKTQ

SEQ ID NO: 32258 - protein, 7 aa, synthetic construct
  REGION 1..7: note = Description of Artificial Sequence: Synthetic peptide
GQTHAVR

SEQ ID NO: 32259 - protein, 7 aa, synthetic construct
  REGION 1..7: note = Description of Artificial Sequence: Synthetic peptide
LTTSVYK

SEQ ID NO: 32260 - protein, 7 aa, synthetic construct
  REGION 1..7: note = Description of Artificial Sequence: Synthetic peptide
FGNPGIR

SEQ ID NO: 32261 - protein, 7 aa, synthetic construct
  REGION 1..7: note = Description of Artificial Sequence: Synthetic peptide
RPDRTTL

SEQ ID NO: 32262 - protein, 7 aa, synthetic construct
  REGION 1..7: note = Description of Artificial Sequence: Synthetic peptide
SFTKGAG

SEQ ID NO: 32263 - protein, 7 aa, synthetic construct
  REGION 1..7: note = Description of Artificial Sequence: Synthetic peptide
TNRGGTP

SEQ ID NO: 32264 - protein, 7 aa, synthetic construct
  REGION 1..7: note = Description of Artificial Sequence: Synthetic peptide
LTATNPR

SEQ ID NO: 32265 - protein, 7 aa, synthetic construct
  REGION 1..7: note = Description of Artificial Sequence: Synthetic peptide
PVSRGSG

SEQ ID NO: 32266 - protein, 7 aa, synthetic construct
  REGION 1..7: note = Description of Artificial Sequence: Synthetic peptide
GLHPPRT

SEQ ID NO: 32267 - protein, 7 aa, synthetic construct
  REGION 1..7: note = Description of Artificial Sequence: Synthetic peptide
RVATSVS

SEQ ID NO: 32268 - protein, 7 aa, synthetic construct
  REGION 1..7: note = Description of Artificial Sequence: Synthetic peptide
THAAHSS

SEQ ID NO: 32269 - protein, 7 aa, synthetic construct
  REGION 1..7: note = Description of Artificial Sequence: Synthetic peptide
GTNPGTL

SEQ ID NO: 32270 - protein, 7 aa, synthetic construct
  REGION 1..7: note = Description of Artificial Sequence: Synthetic peptide
TQNTKSI

SEQ ID NO: 32271 - protein, 7 aa, synthetic construct
  REGION 1..7: note = Description of Artificial Sequence: Synthetic peptide
SHGESQR

SEQ ID NO: 32272 - protein, 7 aa, synthetic construct
  REGION 1..7: note = Description of Artificial Sequence: Synthetic peptide
LHRAGDA

SEQ ID NO: 32273 - protein, 7 aa, synthetic construct
  REGION 1..7: note = Description of Artificial Sequence: Synthetic peptide
SIGKGYN

SEQ ID NO: 32274 - protein, 7 aa, synthetic construct
  REGION 1..7: note = Description of Artificial Sequence: Synthetic peptide
PYKNKPS

SEQ ID NO: 32275 - protein, 7 aa, synthetic construct
  REGION 1..7: note = Description of Artificial Sequence: Synthetic peptide
LNSMSPR

SEQ ID NO: 32276 - protein, 7 aa, synthetic construct
  REGION 1..7: note = Description of Artificial Sequence: Synthetic peptide
RYDKQNS

SEQ ID NO: 32277 - protein, 7 aa, synthetic construct
  REGION 1..7: note = Description of Artificial Sequence: Synthetic peptide
HVNSGKL

SEQ ID NO: 32278 - protein, 7 aa, synthetic construct
  REGION 1..7: note = Description of Artificial Sequence: Synthetic peptide
VHSSSTK

SEQ ID NO: 32279 - protein, 7 aa, synthetic construct
  REGION 1..7: note = Description of Artificial Sequence: Synthetic peptide
STGSVSK

SEQ ID NO: 32280 - protein, 7 aa, synthetic construct
  REGION 1..7: note = Description of Artificial Sequence: Synthetic peptide
TTTTRPS

SEQ ID NO: 32281 - protein, 7 aa, synthetic construct
  REGION 1..7: note = Description of Artificial Sequence: Synthetic peptide
SVVSEVR

SEQ ID NO: 32282 - protein, 7 aa, synthetic construct
  REGION 1..7: note = Description of Artificial Sequence: Synthetic peptide
ASLKTQM

SEQ ID NO: 32283 - protein, 7 aa, synthetic construct
  REGION 1..7: note = Description of Artificial Sequence: Synthetic peptide
FTTGNYC

SEQ ID NO: 32284 - protein, 7 aa, synthetic construct
  REGION 1..7: note = Description of Artificial Sequence: Synthetic peptide
FSRSPAV

SEQ ID NO: 32285 - protein, 7 aa, synthetic construct
  REGION 1..7: note = Description of Artificial Sequence: Synthetic peptide
YNIKQGS

SEQ ID NO: 32286 - protein, 7 aa, synthetic construct
  REGION 1..7: note = Description of Artificial Sequence: Synthetic peptide
DCVSRCK

SEQ ID NO: 32287 - protein, 7 aa, synthetic construct
  REGION 1..7: note = Description of Artificial Sequence: Synthetic peptide
SIRGGKD

SEQ ID NO: 32288 - protein, 7 aa, synthetic construct
  REGION 1..7: note = Description of Artificial Sequence: Synthetic peptide
AKTAKNV

SEQ ID NO: 32289 - protein, 7 aa, synthetic construct
  REGION 1..7: note = Description of Artificial Sequence: Synthetic peptide
FRTQSTK

SEQ ID NO: 32290 - protein, 7 aa, synthetic construct
  REGION 1..7: note = Description of Artificial Sequence: Synthetic peptide
DSGSSTK

SEQ ID NO: 32291 - protein, 7 aa, synthetic construct
  REGION 1..7: note = Description of Artificial Sequence: Synthetic peptide
GTARGVA

SEQ ID NO: 32292 - protein, 7 aa, synthetic construct
  REGION 1..7: note = Description of Artificial Sequence: Synthetic peptide
RATPLSG

SEQ ID NO: 32293 - protein, 7 aa, synthetic construct
  REGION 1..7: note = Description of Artificial Sequence: Synthetic peptide
SSSGGVK

SEQ ID NO: 32294 - protein, 7 aa, synthetic construct
  REGION 1..7: note = Description of Artificial Sequence: Synthetic peptide
SGSTKGQ

SEQ ID NO: 32295 - protein, 7 aa, synthetic construct
  REGION 1..7: note = Description of Artificial Sequence: Synthetic peptide
AKTNLSS

SEQ ID NO: 32296 - protein, 7 aa, synthetic construct
  REGION 1..7: note = Description of Artificial Sequence: Synthetic peptide
KNPSSVN

SEQ ID NO: 32297 - protein, 7 aa, synthetic construct
  REGION 1..7: note = Description of Artificial Sequence: Synthetic peptide
MAPRPVP

SEQ ID NO: 32298 - protein, 7 aa, synthetic construct
  REGION 1..7: note = Description of Artificial Sequence: Synthetic peptide
THRTQNS

SEQ ID NO: 32299 - protein, 7 aa, synthetic construct
  REGION 1..7: note = Description of Artificial Sequence: Synthetic peptide
LSRNGIN

SEQ ID NO: 32300 - protein, 7 aa, synthetic construct
  REGION 1..7: note = Description of Artificial Sequence: Synthetic peptide
ARNPTST

SEQ ID NO: 32301 - protein, 7 aa, synthetic construct
  REGION 1..7: note = Description of Artificial Sequence: Synthetic peptide
GSRSSYV

SEQ ID NO: 32302 - protein, 7 aa, synthetic construct
  REGION 1..7: note = Description of Artificial Sequence: Synthetic peptide
NAQSRLT

SEQ ID NO: 32303 - protein, 7 aa, synthetic construct
  REGION 1..7: note = Description of Artificial Sequence: Synthetic peptide
LGDRSFI

SEQ ID NO: 32304 - protein, 7 aa, synthetic construct
  REGION 1..7: note = Description of Artificial Sequence: Synthetic peptide
LCASKCD

SEQ ID NO: 32305 - protein, 7 aa, synthetic construct
  REGION 1..7: note = Description of Artificial Sequence: Synthetic peptide
GFERNRE

SEQ ID NO: 32306 - protein, 7 aa, synthetic construct
  REGION 1..7: note = Description of Artificial Sequence: Synthetic peptide
LSIKGAS

SEQ ID NO: 32307 - protein, 7 aa, synthetic construct
  REGION 1..7: note = Description of Artificial Sequence: Synthetic peptide
VLKSNGY

SEQ ID NO: 32308 - protein, 7 aa, synthetic construct
  REGION 1..7: note = Description of Artificial Sequence: Synthetic peptide
FRPSTVV

SEQ ID NO: 32309 - protein, 7 aa, synthetic construct
  REGION 1..7: note = Description of Artificial Sequence: Synthetic peptide
YPRSGVQ

SEQ ID NO: 32310 - protein, 7 aa, synthetic construct
  REGION 1..7: note = Description of Artificial Sequence: Synthetic peptide
RANNSQM

SEQ ID NO: 32311 - protein, 7 aa, synthetic construct
  REGION 1..7: note = Description of Artificial Sequence: Synthetic peptide
MESKANS

SEQ ID NO: 32312 - protein, 7 aa, synthetic construct
  REGION 1..7: note = Description of Artificial Sequence: Synthetic peptide
VPLAGRP

SEQ ID NO: 32313 - protein, 7 aa, synthetic construct
  REGION 1..7: note = Description of Artificial Sequence: Synthetic peptide
DPATRKS

SEQ ID NO: 32314 - protein, 7 aa, synthetic construct
  REGION 1..7: note = Description of Artificial Sequence: Synthetic peptide
NVDNRGF

SEQ ID NO: 32315 - protein, 7 aa, synthetic construct
  REGION 1..7: note = Description of Artificial Sequence: Synthetic peptide
PSVNRTP

SEQ ID NO: 32316 - protein, 7 aa, synthetic construct
  REGION 1..7: note = Description of Artificial Sequence: Synthetic peptide
NSHQKPS

SEQ ID NO: 32317 - protein, 7 aa, synthetic construct
  REGION 1..7: note = Description of Artificial Sequence: Synthetic peptide
RMSNEGK

SEQ ID NO: 32318 - protein, 7 aa, synthetic construct
  REGION 1..7: note = Description of Artificial Sequence: Synthetic peptide
SRHGSAT

SEQ ID NO: 32319 - protein, 7 aa, synthetic construct
  REGION 1..7: note = Description of Artificial Sequence: Synthetic peptide
PGTGSNH

SEQ ID NO: 32320 - protein, 7 aa, synthetic construct
  REGION 1..7: note = Description of Artificial Sequence: Synthetic peptide
AGPLAGP

SEQ ID NO: 32321 - protein, 7 aa, synthetic construct
  REGION 1..7: note = Description of Artificial Sequence: Synthetic peptide
NVSGQNQ

SEQ ID NO: 32322 - protein, 7 aa, synthetic construct
  REGION 1..7: note = Description of Artificial Sequence: Synthetic peptide
YHVSKPQ

SEQ ID NO: 32323 - protein, 7 aa, synthetic construct
  REGION 1..7: note = Description of Artificial Sequence: Synthetic peptide
SGGDYAK

SEQ ID NO: 32324 - protein, 7 aa, synthetic construct
  REGION 1..7: note = Description of Artificial Sequence: Synthetic peptide
MRSKASM

SEQ ID NO: 32325 - protein, 7 aa, synthetic construct
  REGION 1..7: note = Description of Artificial Sequence: Synthetic peptide
LGTSQMK

SEQ ID NO: 32326 - protein, 7 aa, synthetic construct
  REGION 1..7: note = Description of Artificial Sequence: Synthetic peptide
LATNRSN

SEQ ID NO: 32327 - protein, 7 aa, synthetic construct
  REGION 1..7: note = Description of Artificial Sequence: Synthetic peptide
CIGNKTN

SEQ ID NO: 32328 - protein, 7 aa, synthetic construct
  REGION 1..7: note = Description of Artificial Sequence: Synthetic peptide
AVSSKVG

SEQ ID NO: 32329 - protein, 7 aa, synthetic construct
  REGION 1..7: note = Description of Artificial Sequence: Synthetic peptide
NSRISPS

SEQ ID NO: 32330 - protein, 7 aa, synthetic construct
  REGION 1..7: note = Description of Artificial Sequence: Synthetic peptide
VSGSKVG

SEQ ID NO: 32331 - protein, 7 aa, synthetic construct
  REGION 1..7: note = Description of Artificial Sequence: Synthetic peptide
RASQSVG

SEQ ID NO: 32332 - protein, 7 aa, synthetic construct
  REGION 1..7: note = Description of Artificial Sequence: Synthetic peptide
PSTRQSN

SEQ ID NO: 32333 - protein, 7 aa, synthetic construct
  REGION 1..7: note = Description of Artificial Sequence: Synthetic peptide
TRYNSSL

SEQ ID NO: 32334 - protein, 7 aa, synthetic construct
  REGION 1..7: note = Description of Artificial Sequence: Synthetic peptide
KTSTPYS

SEQ ID NO: 32335 - protein, 7 aa, synthetic construct
  REGION 1..7: note = Description of Artificial Sequence: Synthetic peptide
NANSRPV

SEQ ID NO: 32336 - protein, 7 aa, synthetic construct
  REGION 1..7: note = Description of Artificial Sequence: Synthetic peptide
RSTDPHG

SEQ ID NO: 32337 - protein, 7 aa, synthetic construct
  REGION 1..7: note = Description of Artificial Sequence: Synthetic peptide
QLGDRNR

SEQ ID NO: 32338 - protein, 7 aa, synthetic construct
  REGION 1..7: note = Description of Artificial Sequence: Synthetic peptide
SGGKGPT

SEQ ID NO: 32339 - protein, 7 aa, synthetic construct
  REGION 1..7: note = Description of Artificial Sequence: Synthetic peptide
IQTHTSN

SEQ ID NO: 32340 - protein, 7 aa, synthetic construct
  REGION 1..7: note = Description of Artificial Sequence: Synthetic peptide
AFGGETK

SEQ ID NO: 32341 - protein, 7 aa, synthetic construct
  REGION 1..7: note = Description of Artificial Sequence: Synthetic peptide
RGPTGMM

SEQ ID NO: 32342 - protein, 7 aa, synthetic construct
  REGION 1..7: note = Description of Artificial Sequence: Synthetic peptide
NIASKGP

SEQ ID NO: 32343 - protein, 7 aa, synthetic construct
  REGION 1..7: note = Description of Artificial Sequence: Synthetic peptide
AVDSTRA

SEQ ID NO: 32344 - protein, 7 aa, synthetic construct
  REGION 1..7: note = Description of Artificial Sequence: Synthetic peptide
QMKHLQG

SEQ ID NO: 32345 - protein, 7 aa, synthetic construct
  REGION 1..7: note = Description of Artificial Sequence: Synthetic peptide
GKSQMQL

SEQ ID NO: 32346 - protein, 7 aa, synthetic construct
  REGION 1..7: note = Description of Artificial Sequence: Synthetic peptide
VNKINGS

SEQ ID NO: 32347 - protein, 7 aa, synthetic construct
  REGION 1..7: note = Description of Artificial Sequence: Synthetic peptide
ASHLPVN

SEQ ID NO: 32348 - protein, 7 aa, synthetic construct
  REGION 1..7: note = Description of Artificial Sequence: Synthetic peptide
TGRAPSS

SEQ ID NO: 32349 - protein, 7 aa, synthetic construct
  REGION 1..7: note = Description of Artificial Sequence: Synthetic peptide
TSGRTTY

SEQ ID NO: 32350 - protein, 7 aa, synthetic construct
  REGION 1..7: note = Description of Artificial Sequence: Synthetic peptide
PNLNSRG

SEQ ID NO: 32351 - protein, 7 aa, synthetic construct
  REGION 1..7: note = Description of Artificial Sequence: Synthetic peptide
ETTTPRK

SEQ ID NO: 32352 - protein, 7 aa, synthetic construct
  REGION 1..7: note = Description of Artificial Sequence: Synthetic peptide
SATKSSC

SEQ ID NO: 32353 - protein, 7 aa, synthetic construct
  REGION 1..7: note = Description of Artificial Sequence: Synthetic peptide
SKTDHSL

SEQ ID NO: 32354 - protein, 7 aa, synthetic construct
  REGION 1..7: note = Description of Artificial Sequence: Synthetic peptide
RSTNDGR

SEQ ID NO: 32355 - protein, 7 aa, synthetic construct
  REGION 1..7: note = Description of Artificial Sequence: Synthetic peptide
QSISHTR

SEQ ID NO: 32356 - protein, 7 aa, synthetic construct
  REGION 1..7: note = Description of Artificial Sequence: Synthetic peptide
RTNKSVT

SEQ ID NO: 32357 - protein, 7 aa, synthetic construct
  REGION 1..7: note = Description of Artificial Sequence: Synthetic peptide
NTSTNGI

SEQ ID NO: 32358 - protein, 7 aa, synthetic construct
  REGION 1..7: note = Description of Artificial Sequence: Synthetic peptide
PMQSMNR

SEQ ID NO: 32359 - protein, 7 aa, synthetic construct
  REGION 1..7: note = Description of Artificial Sequence: Synthetic peptide
TTAPGLR

SEQ ID NO: 32360 - protein, 7 aa, synthetic construct
  REGION 1..7: note = Description of Artificial Sequence: Synthetic peptide
SRNVNAM

SEQ ID NO: 32361 - protein, 7 aa, synthetic construct
  REGION 1..7: note = Description of Artificial Sequence: Synthetic peptide
MSSRSSV

SEQ ID NO: 32362 - protein, 7 aa, synthetic construct
  REGION 1..7: note = Description of Artificial Sequence: Synthetic peptide
SGGTPGR

SEQ ID NO: 32363 - protein, 7 aa, synthetic construct
  REGION 1..7: note = Description of Artificial Sequence: Synthetic peptide
PKLSHTG

SEQ ID NO: 32364 - protein, 7 aa, synthetic construct
  REGION 1..7: note = Description of Artificial Sequence: Synthetic peptide
GNSANRT

SEQ ID NO: 32365 - protein, 7 aa, synthetic construct
  REGION 1..7: note = Description of Artificial Sequence: Synthetic peptide
HRHEKSV

SEQ ID NO: 32366 - protein, 7 aa, synthetic construct
  REGION 1..7: note = Description of Artificial Sequence: Synthetic peptide
QSSSQQR

SEQ ID NO: 32367 - protein, 7 aa, synthetic construct
  REGION 1..7: note = Description of Artificial Sequence: Synthetic peptide
PTTGPQR

SEQ ID NO: 32368 - protein, 7 aa, synthetic construct
  REGION 1..7: note = Description of Artificial Sequence: Synthetic peptide
NSFSRNS

SEQ ID NO: 32369 - protein, 7 aa, synthetic construct
  REGION 1..7: note = Description of Artificial Sequence: Synthetic peptide
LTSRSMA

SEQ ID NO: 32370 - protein, 7 aa, synthetic construct
  REGION 1..7: note = Description of Artificial Sequence: Synthetic peptide
GVNRIPA

SEQ ID NO: 32371 - protein, 7 aa, synthetic construct
  REGION 1..7: note = Description of Artificial Sequence: Synthetic peptide
KPATPNG

SEQ ID NO: 32372 - protein, 7 aa, synthetic construct
  REGION 1..7: note = Description of Artificial Sequence: Synthetic peptide
RPASTHT

SEQ ID NO: 32373 - protein, 7 aa, synthetic construct
  REGION 1..7: note = Description of Artificial Sequence: Synthetic peptide
NLNSVSK

SEQ ID NO: 32374 - protein, 7 aa, synthetic construct
  REGION 1..7: note = Description of Artificial Sequence: Synthetic peptide
HRTSPVS

SEQ ID NO: 32375 - protein, 7 aa, synthetic construct
  REGION 1..7: note = Description of Artificial Sequence: Synthetic peptide
PRTDRNT

SEQ ID NO: 32376 - protein, 7 aa, synthetic construct
  REGION 1..7: note = Description of Artificial Sequence: Synthetic peptide
RTNPGYA

SEQ ID NO: 32377 - protein, 7 aa, synthetic construct
  REGION 1..7: note = Description of Artificial Sequence: Synthetic peptide
HSTRSSL

SEQ ID NO: 32378 - protein, 7 aa, synthetic construct
  REGION 1..7: note = Description of Artificial Sequence: Synthetic peptide
PLSKDRL

SEQ ID NO: 32379 - protein, 7 aa, synthetic construct
  REGION 1..7: note = Description of Artificial Sequence: Synthetic peptide
KNQSLMS

SEQ ID NO: 32380 - protein, 7 aa, synthetic construct
  REGION 1..7: note = Description of Artificial Sequence: Synthetic peptide
NAQQAQR

SEQ ID NO: 32381 - protein, 7 aa, synthetic construct
  REGION 1..7: note = Description of Artificial Sequence: Synthetic peptide
PPSNGRL

SEQ ID NO: 32382 - protein, 7 aa, synthetic construct
  REGION 1..7: note = Description of Artificial Sequence: Synthetic peptide
DHRSKVL

SEQ ID NO: 32383 - protein, 7 aa, synthetic construct
  REGION 1..7: note = Description of Artificial Sequence: Synthetic peptide
GRLTSSI

SEQ ID NO: 32384 - protein, 7 aa, synthetic construct
  REGION 1..7: note = Description of Artificial Sequence: Synthetic peptide
GSDQRRM

SEQ ID NO: 32385 - protein, 7 aa, synthetic construct
  REGION 1..7: note = Description of Artificial Sequence: Synthetic peptide
NANQNQM

SEQ ID NO: 32386 - protein, 7 aa, synthetic construct
  REGION 1..7: note = Description of Artificial Sequence: Synthetic peptide
FSTRSVV

SEQ ID NO: 32387 - protein, 7 aa, synthetic construct
  REGION 1..7: note = Description of Artificial Sequence: Synthetic peptide
EYPQQAK

SEQ ID NO: 32388 - protein, 7 aa, synthetic construct
  REGION 1..7: note = Description of Artificial Sequence: Synthetic peptide
QPSQGHS

SEQ ID NO: 32389 - protein, 7 aa, synthetic construct
  REGION 1..7: note = Description of Artificial Sequence: Synthetic peptide
PTLASGR

SEQ ID NO: 32390 - protein, 7 aa, synthetic construct
  REGION 1..7: note = Description of Artificial Sequence: Synthetic peptide
TRGHPLV

SEQ ID NO: 32391 - protein, 7 aa, synthetic construct
  REGION 1..7: note = Description of Artificial Sequence: Synthetic peptide
PTTLKHD

SEQ ID NO: 32392 - protein, 7 aa, synthetic construct
  REGION 1..7: note = Description of Artificial Sequence: Synthetic peptide
AYPKNSN

SEQ ID NO: 32393 - protein, 7 aa, synthetic construct
  REGION 1..7: note = Description of Artificial Sequence: Synthetic peptide
ITSGSTR

SEQ ID NO: 32394 - protein, 7 aa, synthetic construct
  REGION 1..7: note = Description of Artificial Sequence: Synthetic peptide
PRTNVMP

SEQ ID NO: 32395 - protein, 7 aa, synthetic construct
  REGION 1..7: note = Description of Artificial Sequence: Synthetic peptide
QLNHSAK

SEQ ID NO: 32396 - protein, 7 aa, synthetic construct
  REGION 1..7: note = Description of Artificial Sequence: Synthetic peptide
TGSSGRI

SEQ ID NO: 32397 - protein, 7 aa, synthetic construct
  REGION 1..7: note = Description of Artificial Sequence: Synthetic peptide
NINSRLA

SEQ ID NO: 32398 - protein, 7 aa, synthetic construct
  REGION 1..7: note = Description of Artificial Sequence: Synthetic peptide
NGPGQNQ

SEQ ID NO: 32399 - protein, 7 aa, synthetic construct
  REGION 1..7: note = Description of Artificial Sequence: Synthetic peptide
PAAHNAV

SEQ ID NO: 32400 - protein, 7 aa, synthetic construct
  REGION 1..7: note = Description of Artificial Sequence: Synthetic peptide
QRKSGTS

SEQ ID NO: 32401 - protein, 7 aa, synthetic construct
  REGION 1..7: note = Description of Artificial Sequence: Synthetic peptide
GGRRVGL

SEQ ID NO: 32402 - protein, 7 aa, synthetic construct
  REGION 1..7: note = Description of Artificial Sequence: Synthetic peptide
TLSQTVR

SEQ ID NO: 32403 - protein, 7 aa, synthetic construct
  REGION 1..7: note = Description of Artificial Sequence: Synthetic peptide
WGSGLNH

SEQ ID NO: 32404 - protein, 7 aa, synthetic construct
  REGION 1..7: note = Description of Artificial Sequence: Synthetic peptide
NSVERTR

SEQ ID NO: 32405 - protein, 7 aa, synthetic construct
  REGION 1..7: note = Description of Artificial Sequence: Synthetic peptide
ASALRSH

SEQ ID NO: 32406 - protein, 7 aa, synthetic construct
  REGION 1..7: note = Description of Artificial Sequence: Synthetic peptide
SGRDKIS

SEQ ID NO: 32407 - protein, 7 aa, synthetic construct
  REGION 1..7: note = Description of Artificial Sequence: Synthetic peptide
DRVLSQG

SEQ ID NO: 32408 - protein, 7 aa, synthetic construct
  REGION 1..7: note = Description of Artificial Sequence: Synthetic peptide
VHTSGVQ

SEQ ID NO: 32409 - protein, 7 aa, synthetic construct
  REGION 1..7: note = Description of Artificial Sequence: Synthetic peptide
RYPPATH

SEQ ID NO: 32410 - protein, 7 aa, synthetic construct
  REGION 1..7: note = Description of Artificial Sequence: Synthetic peptide
VSDNTYK

SEQ ID NO: 32411 - protein, 7 aa, synthetic construct
  REGION 1..7: note = Description of Artificial Sequence: Synthetic peptide
NVESKSC

SEQ ID NO: 32412 - protein, 7 aa, synthetic construct
  REGION 1..7: note = Description of Artificial Sequence: Synthetic peptide
PRTNNPS

SEQ ID NO: 32413 - protein, 7 aa, synthetic construct
  REGION 1..7: note = Description of Artificial Sequence: Synthetic peptide
GTDSKRH

SEQ ID NO: 32414 - protein, 7 aa, synthetic construct
  REGION 1..7: note = Description of Artificial Sequence: Synthetic peptide
VNTNRAA

SEQ ID NO: 32415 - protein, 7 aa, synthetic construct
  REGION 1..7: note = Description of Artificial Sequence: Synthetic peptide
VTQSSSK

SEQ ID NO: 32416 - protein, 7 aa, synthetic construct
  REGION 1..7: note = Description of Artificial Sequence: Synthetic peptide
GITKNLA

SEQ ID NO: 32417 - protein, 7 aa, synthetic construct
  REGION 1..7: note = Description of Artificial Sequence: Synthetic peptide
SNTNSAN

SEQ ID NO: 32418 - protein, 7 aa, synthetic construct
  REGION 1..7: note = Description of Artificial Sequence: Synthetic peptide
SSQTRGL

SEQ ID NO: 32419 - protein, 7 aa, synthetic construct
  REGION 1..7: note = Description of Artificial Sequence: Synthetic peptide
GRVVSMQ

SEQ ID NO: 32420 - protein, 7 aa, synthetic construct
  REGION 1..7: note = Description of Artificial Sequence: Synthetic peptide
NGSQGRQ

SEQ ID NO: 32421 - protein, 7 aa, synthetic construct
  REGION 1..7: note = Description of Artificial Sequence: Synthetic peptide
RMSSTHG

SEQ ID NO: 32422 - protein, 7 aa, synthetic construct
  REGION 1..7: note = Description of Artificial Sequence: Synthetic peptide
SAVGKAS

SEQ ID NO: 32423 - protein, 7 aa, synthetic construct
  REGION 1..7: note = Description of Artificial Sequence: Synthetic peptide
DRTNTQR

SEQ ID NO: 32424 - protein, 7 aa, synthetic construct
  REGION 1..7: note = Description of Artificial Sequence: Synthetic peptide
HNSKSQI

SEQ ID NO: 32425 - protein, 7 aa, synthetic construct
  REGION 1..7: note = Description of Artificial Sequence: Synthetic peptide
PYAGNQR

SEQ ID NO: 32426 - protein, 7 aa, synthetic construct
  REGION 1..7: note = Description of Artificial Sequence: Synthetic peptide
GGSSRTL

SEQ ID NO: 32427 - protein, 7 aa, synthetic construct
  REGION 1..7: note = Description of Artificial Sequence: Synthetic peptide
VAGAAQR

SEQ ID NO: 32428 - protein, 7 aa, synthetic construct
  REGION 1..7: note = Description of Artificial Sequence: Synthetic peptide
RDSTKLV

SEQ ID NO: 32429 - protein, 7 aa, synthetic construct
  REGION 1..7: note = Description of Artificial Sequence: Synthetic peptide
NSHTPVR

SEQ ID NO: 32430 - protein, 7 aa, synthetic construct
  REGION 1..7: note = Description of Artificial Sequence: Synthetic peptide
PRVKPAS

SEQ ID NO: 32431 - protein, 7 aa, synthetic construct
  REGION 1..7: note = Description of Artificial Sequence: Synthetic peptide
PPSKPNT

SEQ ID NO: 32432 - protein, 7 aa, synthetic construct
  REGION 1..7: note = Description of Artificial Sequence: Synthetic peptide
GSNRILG

SEQ ID NO: 32433 - protein, 7 aa, synthetic construct
  REGION 1..7: note = Description of Artificial Sequence: Synthetic peptide
GGHSPNR

SEQ ID NO: 32434 - protein, 7 aa, synthetic construct
  REGION 1..7: note = Description of Artificial Sequence: Synthetic peptide
FVSRERS

SEQ ID NO: 32435 - protein, 7 aa, synthetic construct
  REGION 1..7: note = Description of Artificial Sequence: Synthetic peptide
YTAAPGR

SEQ ID NO: 32436 - protein, 7 aa, synthetic construct
  REGION 1..7: note = Description of Artificial Sequence: Synthetic peptide
YNVNRNT

SEQ ID NO: 32437 - protein, 7 aa, synthetic construct
  REGION 1..7: note = Description of Artificial Sequence: Synthetic peptide
ERKVQNC

SEQ ID NO: 32438 - protein, 7 aa, synthetic construct
  REGION 1..7: note = Description of Artificial Sequence: Synthetic peptide
GRLNMLS

SEQ ID NO: 32439 - protein, 7 aa, synthetic construct
  REGION 1..7: note = Description of Artificial Sequence: Synthetic peptide
LQKPSLV

SEQ ID NO: 32440 - protein, 7 aa, synthetic construct
  REGION 1..7: note = Description of Artificial Sequence: Synthetic peptide
GRTAEGR

SEQ ID NO: 32441 - protein, 7 aa, synthetic construct
  REGION 1..7: note = Description of Artificial Sequence: Synthetic peptide
HVIAPQQ

SEQ ID NO: 32442 - protein, 7 aa, synthetic construct
  REGION 1..7: note = Description of Artificial Sequence: Synthetic peptide
HQTTGLK

SEQ ID NO: 32443 - protein, 7 aa, synthetic construct
  REGION 1..7: note = Description of Artificial Sequence: Synthetic peptide
GQSGSRL

SEQ ID NO: 32444 - protein, 7 aa, synthetic construct
  REGION 1..7: note = Description of Artificial Sequence: Synthetic peptide
QGSSPQR

SEQ ID NO: 32445 - protein, 7 aa, synthetic construct
  REGION 1..7: note = Description of Artificial Sequence: Synthetic peptide
AATNRFG

SEQ ID NO: 32446 - protein, 7 aa, synthetic construct
  REGION 1..7: note = Description of Artificial Sequence: Synthetic peptide
RFPAKEF

SEQ ID NO: 32447 - protein, 7 aa, synthetic construct
  REGION 1..7: note = Description of Artificial Sequence: Synthetic peptide
TGSGSNH

SEQ ID NO: 32448 - protein, 7 aa, synthetic construct
  REGION 1..7: note = Description of Artificial Sequence: Synthetic peptide
QVPVRPV

SEQ ID NO: 32449 - protein, 7 aa, synthetic construct
  REGION 1..7: note = Description of Artificial Sequence: Synthetic peptide
TLAYDNN

SEQ ID NO: 32450 - protein, 7 aa, synthetic construct
  REGION 1..7: note = Description of Artificial Sequence: Synthetic peptide
PRSSGGF

SEQ ID NO: 32451 - protein, 7 aa, synthetic construct
  REGION 1..7: note = Description of Artificial Sequence: Synthetic peptide
PSRNTSL

SEQ ID NO: 32452 - protein, 7 aa, synthetic construct
  REGION 1..7: note = Description of Artificial Sequence: Synthetic peptide
TGMRNIG

SEQ ID NO: 32453 - protein, 7 aa, synthetic construct
  REGION 1..7: note = Description of Artificial Sequence: Synthetic peptide
GLQTPPR

SEQ ID NO: 32454 - protein, 7 aa, synthetic construct
  REGION 1..7: note = Description of Artificial Sequence: Synthetic peptide
FQPRSST

SEQ ID NO: 32455 - protein, 7 aa, synthetic construct
  REGION 1..7: note = Description of Artificial Sequence: Synthetic peptide
PMSHVSG

SEQ ID NO: 32456 - protein, 7 aa, synthetic construct
  REGION 1..7: note = Description of Artificial Sequence: Synthetic peptide
VRGSDPT

SEQ ID NO: 32457 - protein, 7 aa, synthetic construct
  REGION 1..7: note = Description of Artificial Sequence: Synthetic peptide
MKGNNLS

SEQ ID NO: 32458 - protein, 7 aa, synthetic construct
  REGION 1..7: note = Description of Artificial Sequence: Synthetic peptide
RISENMR

SEQ ID NO: 32459 - protein, 7 aa, synthetic construct
  REGION 1..7: note = Description of Artificial Sequence: Synthetic peptide
YGKSVTP

SEQ ID NO: 32460 - protein, 7 aa, synthetic construct
  REGION 1..7: note = Description of Artificial Sequence: Synthetic peptide
NANVQTR

SEQ ID NO: 32461 - protein, 7 aa, synthetic construct
  REGION 1..7: note = Description of Artificial Sequence: Synthetic peptide
KSADQGR

SEQ ID NO: 32462 - protein, 7 aa, synthetic construct
  REGION 1..7: note = Description of Artificial Sequence: Synthetic peptide
AGSSSRS

SEQ ID NO: 32463 - protein, 7 aa, synthetic construct
  REGION 1..7: note = Description of Artificial Sequence: Synthetic peptide
HHDASPN

SEQ ID NO: 32464 - protein, 7 aa, synthetic construct
  REGION 1..7: note = Description of Artificial Sequence: Synthetic peptide
AMGSRLS

SEQ ID NO: 32465 - protein, 7 aa, synthetic construct
  REGION 1..7: note = Description of Artificial Sequence: Synthetic peptide
YSNSRVG

SEQ ID NO: 32466 - protein, 7 aa, synthetic construct
  REGION 1..7: note = Description of Artificial Sequence: Synthetic peptide
VRSLPAM

SEQ ID NO: 32467 - protein, 7 aa, synthetic construct
  REGION 1..7: note = Description of Artificial Sequence: Synthetic peptide
YFNSHSN

SEQ ID NO: 32468 - protein, 7 aa, synthetic construct
  REGION 1..7: note = Description of Artificial Sequence: Synthetic peptide
PTASNRS

SEQ ID NO: 32469 - protein, 7 aa, synthetic construct
  REGION 1..7: note = Description of Artificial Sequence: Synthetic peptide
TQQNGSN

SEQ ID NO: 32470 - protein, 7 aa, synthetic construct
  REGION 1..7: note = Description of Artificial Sequence: Synthetic peptide
STSKDYT

SEQ ID NO: 32471 - protein, 7 aa, synthetic construct
  REGION 1..7: note = Description of Artificial Sequence: Synthetic peptide
NPAEQYT

SEQ ID NO: 32472 - protein, 7 aa, synthetic construct
  REGION 1..7: note = Description of Artificial Sequence: Synthetic peptide
SRSHAMT

SEQ ID NO: 32473 - protein, 7 aa, synthetic construct
  REGION 1..7: note = Description of Artificial Sequence: Synthetic peptide
RSGNGSL

SEQ ID NO: 32474 - protein, 7 aa, synthetic construct
  REGION 1..7: note = Description of Artificial Sequence: Synthetic peptide
HPTRSTA

SEQ ID NO: 32475 - protein, 7 aa, synthetic construct
  REGION 1..7: note = Description of Artificial Sequence: Synthetic peptide
TPVNRTH

SEQ ID NO: 32476 - protein, 7 aa, synthetic construct
  REGION 1..7: note = Description of Artificial Sequence: Synthetic peptide
SSASTYK

SEQ ID NO: 32477 - protein, 7 aa, synthetic construct
  REGION 1..7: note = Description of Artificial Sequence: Synthetic peptide
STVGHMN

SEQ ID NO: 32478 - protein, 7 aa, synthetic construct
  REGION 1..7: note = Description of Artificial Sequence: Synthetic peptide
QGPKNAD

SEQ ID NO: 32479 - protein, 7 aa, synthetic construct
  REGION 1..7: note = Description of Artificial Sequence: Synthetic peptide
SSHSPHR

SEQ ID NO: 32480 - protein, 7 aa, synthetic construct
  REGION 1..7: note = Description of Artificial Sequence: Synthetic peptide
ENISRSH

SEQ ID NO: 32481 - protein, 7 aa, synthetic construct
  REGION 1..7: note = Description of Artificial Sequence: Synthetic peptide
TRMNKQT

SEQ ID NO: 32482 - protein, 7 aa, synthetic construct
  REGION 1..7: note = Description of Artificial Sequence: Synthetic peptide
FSSASFT

SEQ ID NO: 32483 - protein, 7 aa, synthetic construct
  REGION 1..7: note = Description of Artificial Sequence: Synthetic peptide
CGTLSSC

SEQ ID NO: 32484 - protein, 7 aa, synthetic construct
  REGION 1..7: note = Description of Artificial Sequence: Synthetic peptide
HGSSVHS

SEQ ID NO: 32485 - protein, 7 aa, synthetic construct
  REGION 1..7: note = Description of Artificial Sequence: Synthetic peptide
SGSSTFR

SEQ ID NO: 32486 - protein, 7 aa, synthetic construct
  REGION 1..7: note = Description of Artificial Sequence: Synthetic peptide
SISNQRS

SEQ ID NO: 32487 - protein, 7 aa, synthetic construct
  REGION 1..7: note = Description of Artificial Sequence: Synthetic peptide
NGSGQNR

SEQ ID NO: 32488 - protein, 7 aa, synthetic construct
  REGION 1..7: note = Description of Artificial Sequence: Synthetic peptide
RDHSGSR

SEQ ID NO: 32489 - protein, 7 aa, synthetic construct
  REGION 1..7: note = Description of Artificial Sequence: Synthetic peptide
SSKTNVS

SEQ ID NO: 32490 - protein, 7 aa, synthetic construct
  REGION 1..7: note = Description of Artificial Sequence: Synthetic peptide
SRAQSIP

SEQ ID NO: 32491 - protein, 7 aa, synthetic construct
  REGION 1..7: note = Description of Artificial Sequence: Synthetic peptide
LNRGKPV

SEQ ID NO: 32492 - protein, 7 aa, synthetic construct
  REGION 1..7: note = Description of Artificial Sequence: Synthetic peptide
HSGTRTS

SEQ ID NO: 32493 - protein, 7 aa, synthetic construct
  REGION 1..7: note = Description of Artificial Sequence: Synthetic peptide
NDQAQLT

SEQ ID NO: 32494 - protein, 7 aa, synthetic construct
  REGION 1..7: note = Description of Artificial Sequence: Synthetic peptide
NTTAKSS

SEQ ID NO: 32495 - protein, 7 aa, synthetic construct
  REGION 1..7: note = Description of Artificial Sequence: Synthetic peptide
NGSGKNQ

SEQ ID NO: 32496 - protein, 7 aa, synthetic construct
  REGION 1..7: note = Description of Artificial Sequence: Synthetic peptide
QTQGQLK

SEQ ID NO: 32497 - protein, 7 aa, synthetic construct
  REGION 1..7: note = Description of Artificial Sequence: Synthetic peptide
NSAGTRV

SEQ ID NO: 32498 - protein, 7 aa, synthetic construct
  REGION 1..7: note = Description of Artificial Sequence: Synthetic peptide
PVGSRGG

SEQ ID NO: 32499 - protein, 7 aa, synthetic construct
  REGION 1..7: note = Description of Artificial Sequence: Synthetic peptide
DTNNRAN

SEQ ID NO: 32500 - protein, 7 aa, synthetic construct
  REGION 1..7: note = Description of Artificial Sequence: Synthetic peptide
SHPSSFG

SEQ ID NO: 32501 - protein, 7 aa, synthetic construct
  REGION 1..7: note = Description of Artificial Sequence: Synthetic peptide
KVHRSDN

SEQ ID NO: 32502 - protein, 7 aa, synthetic construct
  REGION 1..7: note = Description of Artificial Sequence: Synthetic peptide
GSPGVLR

SEQ ID NO: 32503 - protein, 7 aa, synthetic construct
  REGION 1..7: note = Description of Artificial Sequence: Synthetic peptide
RQTTPLG

SEQ ID NO: 32504 - protein, 7 aa, synthetic construct
  REGION 1..7: note = Description of Artificial Sequence: Synthetic peptide
DMVSPRN

SEQ ID NO: 32505 - protein, 7 aa, synthetic construct
  REGION 1..7: note = Description of Artificial Sequence: Synthetic peptide
SNDSRIR

SEQ ID NO: 32506 - protein, 7 aa, synthetic construct
  REGION 1..7: note = Description of Artificial Sequence: Synthetic peptide
QTMPKLA

SEQ ID NO: 32507 - protein, 7 aa, synthetic construct
  REGION 1..7: note = Description of Artificial Sequence: Synthetic peptide
GPRSMSN

SEQ ID NO: 32508 - protein, 7 aa, synthetic construct
  REGION 1..7: note = Description of Artificial Sequence: Synthetic peptide
FRAQANV

SEQ ID NO: 32509 - protein, 7 aa, synthetic construct
  REGION 1..7: note = Description of Artificial Sequence: Synthetic peptide
STKSKPI

SEQ ID NO: 32510 - protein, 7 aa, synthetic construct
  REGION 1..7: note = Description of Artificial Sequence: Synthetic peptide
PGNMTSR

SEQ ID NO: 32511 - protein, 7 aa, synthetic construct
  REGION 1..7: note = Description of Artificial Sequence: Synthetic peptide
SKAGRVT

SEQ ID NO: 32512 - protein, 7 aa, synthetic construct
  REGION 1..7: note = Description of Artificial Sequence: Synthetic peptide
MGSSVRS

SEQ ID NO: 32513 - protein, 7 aa, synthetic construct
  REGION 1..7: note = Description of Artificial Sequence: Synthetic peptide
AHSNNSY

SEQ ID NO: 32514 - protein, 7 aa, synthetic construct
  REGION 1..7: note = Description of Artificial Sequence: Synthetic peptide
QTKPAFR

SEQ ID NO: 32515 - protein, 7 aa, synthetic construct
  REGION 1..7: note = Description of Artificial Sequence: Synthetic peptide
IATKAVA

SEQ ID NO: 32516 - protein, 7 aa, synthetic construct
  REGION 1..7: note = Description of Artificial Sequence: Synthetic peptide
TQQKGSN

SEQ ID NO: 32517 - protein, 7 aa, synthetic construct
  REGION 1..7: note = Description of Artificial Sequence: Synthetic peptide
SDSRNTN

SEQ ID NO: 32518 - protein, 7 aa, synthetic construct
  REGION 1..7: note = Description of Artificial Sequence: Synthetic peptide
PATVTGV

SEQ ID NO: 32519 - protein, 7 aa, synthetic construct
  REGION 1..7: note = Description of Artificial Sequence: Synthetic peptide
GITAKLT

SEQ ID NO: 32520 - protein, 7 aa, synthetic construct
  REGION 1..7: note = Description of Artificial Sequence: Synthetic peptide
PVSDRRG

SEQ ID NO: 32521 - protein, 7 aa, synthetic construct
  REGION 1..7: note = Description of Artificial Sequence: Synthetic peptide
SKASGFA

SEQ ID NO: 32522 - protein, 7 aa, synthetic construct
  REGION 1..7: note = Description of Artificial Sequence: Synthetic peptide
PLNARGS

SEQ ID NO: 32523 - protein, 7 aa, synthetic construct
  REGION 1..7: note = Description of Artificial Sequence: Synthetic peptide
GQTRESS

SEQ ID NO: 32524 - protein, 7 aa, synthetic construct
  REGION 1..7: note = Description of Artificial Sequence: Synthetic peptide
SPASLPK

SEQ ID NO: 32525 - protein, 7 aa, synthetic construct
  REGION 1..7: note = Description of Artificial Sequence: Synthetic peptide
NGSGQNK

SEQ ID NO: 32526 - protein, 7 aa, synthetic construct
  REGION 1..7: note = Description of Artificial Sequence: Synthetic peptide
KGPGSPS

SEQ ID NO: 32527 - protein, 7 aa, synthetic construct
  REGION 1..7: note = Description of Artificial Sequence: Synthetic peptide
GREIGNY

SEQ ID NO: 32528 - protein, 7 aa, synthetic construct
  REGION 1..7: note = Description of Artificial Sequence: Synthetic peptide
RSVGAKA

SEQ ID NO: 32529 - protein, 7 aa, synthetic construct
  REGION 1..7: note = Description of Artificial Sequence: Synthetic peptide
RRLNIED

SEQ ID NO: 32530 - protein, 7 aa, synthetic construct
  REGION 1..7: note = Description of Artificial Sequence: Synthetic peptide
PSNSNML

SEQ ID NO: 32531 - protein, 7 aa, synthetic construct
  REGION 1..7: note = Description of Artificial Sequence: Synthetic peptide
DPRNSTS

SEQ ID NO: 32532 - protein, 7 aa, synthetic construct
  REGION 1..7: note = Description of Artificial Sequence: Synthetic peptide
ETRKQGV

SEQ ID NO: 32533 - protein, 7 aa, synthetic construct
  REGION 1..7: note = Description of Artificial Sequence: Synthetic peptide
VSYARTE

SEQ ID NO: 32534 - protein, 7 aa, synthetic construct
  REGION 1..7: note = Description of Artificial Sequence: Synthetic peptide
QPTRSTA

SEQ ID NO: 32535 - protein, 7 aa, synthetic construct
  REGION 1..7: note = Description of Artificial Sequence: Synthetic peptide
PRTRDTS

SEQ ID NO: 32536 - protein, 7 aa, synthetic construct
  REGION 1..7: note = Description of Artificial Sequence: Synthetic peptide
ALHASYN

SEQ ID NO: 32537 - protein, 7 aa, synthetic construct
  REGION 1..7: note = Description of Artificial Sequence: Synthetic peptide
KSKIQHP

SEQ ID NO: 32538 - protein, 7 aa, synthetic construct
  REGION 1..7: note = Description of Artificial Sequence: Synthetic peptide
KDNTPGR

SEQ ID NO: 32539 - protein, 7 aa, synthetic construct
  REGION 1..7: note = Description of Artificial Sequence: Synthetic peptide
KPTRSTA

SEQ ID NO: 32540 - protein, 7 aa, synthetic construct
  REGION 1..7: note = Description of Artificial Sequence: Synthetic peptide
QPNTTYR

SEQ ID NO: 32541 - protein, 7 aa, synthetic construct
  REGION 1..7: note = Description of Artificial Sequence: Synthetic peptide
YIHNQTG

SEQ ID NO: 32542 - protein, 7 aa, synthetic construct
  REGION 1..7: note = Description of Artificial Sequence: Synthetic peptide
FNIQGLG

SEQ ID NO: 32543 - protein, 7 aa, synthetic construct
  REGION 1..7: note = Description of Artificial Sequence: Synthetic peptide
AYSNIQN

SEQ ID NO: 32544 - protein, 7 aa, synthetic construct
  REGION 1..7: note = Description of Artificial Sequence: Synthetic peptide
KNESMVL

SEQ ID NO: 32545 - protein, 7 aa, synthetic construct
  REGION 1..7: note = Description of Artificial Sequence: Synthetic peptide
SGSNNFL

SEQ ID NO: 32546 - protein, 7 aa, synthetic construct
  REGION 1..7: note = Description of Artificial Sequence: Synthetic peptide
AIRSGYV

SEQ ID NO: 32547 - protein, 7 aa, synthetic construct
  REGION 1..7: note = Description of Artificial Sequence: Synthetic peptide
FSVQGQC

SEQ ID NO: 32548 - protein, 7 aa, synthetic construct
  REGION 1..7: note = Description of Artificial Sequence: Synthetic peptide
NSTQITP

SEQ ID NO: 32549 - protein, 7 aa, synthetic construct
  REGION 1..7: note = Description of Artificial Sequence: Synthetic peptide
TNITPPL

SEQ ID NO: 32550 - protein, 7 aa, synthetic construct
  REGION 1..7: note = Description of Artificial Sequence: Synthetic peptide
FPSNGRT

SEQ ID NO: 32551 - protein, 7 aa, synthetic construct
  REGION 1..7: note = Description of Artificial Sequence: Synthetic peptide
GNSTRLL

SEQ ID NO: 32552 - protein, 7 aa, synthetic construct
  REGION 1..7: note = Description of Artificial Sequence: Synthetic peptide
YRHTSTG

SEQ ID NO: 32553 - protein, 7 aa, synthetic construct
  REGION 1..7: note = Description of Artificial Sequence: Synthetic peptide
NNTQKNS

SEQ ID NO: 32554 - protein, 7 aa, synthetic construct
  REGION 1..7: note = Description of Artificial Sequence: Synthetic peptide
PLGQSYR

SEQ ID NO: 32555 - protein, 7 aa, synthetic construct
  REGION 1..7: note = Description of Artificial Sequence: Synthetic peptide
RNSEYTG

SEQ ID NO: 32556 - protein, 7 aa, synthetic construct
  REGION 1..7: note = Description of Artificial Sequence: Synthetic peptide
SQTVKTG

SEQ ID NO: 32557 - protein, 7 aa, synthetic construct
  REGION 1..7: note = Description of Artificial Sequence: Synthetic peptide
ALLNINT

SEQ ID NO: 32558 - protein, 7 aa, synthetic construct
  REGION 1..7: note = Description of Artificial Sequence: Synthetic peptide
MLQRAPG

SEQ ID NO: 32559 - protein, 7 aa, synthetic construct
  REGION 1..7: note = Description of Artificial Sequence: Synthetic peptide
ENMGRPG

SEQ ID NO: 32560 - protein, 7 aa, synthetic construct
  REGION 1..7: note = Description of Artificial Sequence: Synthetic peptide
YVRPGTG

SEQ ID NO: 32561 - protein, 7 aa, synthetic construct
  REGION 1..7: note = Description of Artificial Sequence: Synthetic peptide
PGSGSNN

SEQ ID NO: 32562 - protein, 7 aa, synthetic construct
  REGION 1..7: note = Description of Artificial Sequence: Synthetic peptide
NSNGINN

SEQ ID NO: 32563 - protein, 7 aa, synthetic construct
  REGION 1..7: note = Description of Artificial Sequence: Synthetic peptide
NFNSPSN

SEQ ID NO: 32564 - protein, 7 aa, synthetic construct
  REGION 1..7: note = Description of Artificial Sequence: Synthetic peptide
STYCKDP

SEQ ID NO: 32565 - protein, 7 aa, synthetic construct
  REGION 1..7: note = Description of Artificial Sequence: Synthetic peptide
NSNGLNN

SEQ ID NO: 32566 - protein, 7 aa, synthetic construct
  REGION 1..7: note = Description of Artificial Sequence: Synthetic peptide
SIGKGYN

SEQ ID NO: 32567 - protein, 7 aa, synthetic construct
  REGION 1..7: note = Description of Artificial Sequence: Synthetic peptide
YQKERVV

SEQ ID NO: 32568 - protein, 7 aa, synthetic construct
  REGION 1..7: note = Description of Artificial Sequence: Synthetic peptide
NSGRNSV

SEQ ID NO: 32569 - protein, 7 aa, synthetic construct
  REGION 1..7: note = Description of Artificial Sequence: Synthetic peptide
CHKRPGE

SEQ ID NO: 32570 - protein, 7 aa, synthetic construct
  REGION 1..7: note = Description of Artificial Sequence: Synthetic peptide
NSNLSTQ

SEQ ID NO: 32571 - protein, 7 aa, synthetic construct
  REGION 1..7: note = Description of Artificial Sequence: Synthetic peptide
SSGGNMS

SEQ ID NO: 32572 - protein, 7 aa, synthetic construct
  REGION 1..7: note = Description of Artificial Sequence: Synthetic peptide
KDFGQMR

SEQ ID NO: 32573 - protein, 7 aa, synthetic construct
  REGION 1..7: note = Description of Artificial Sequence: Synthetic peptide
SIKTVTN

SEQ ID NO: 32574 - protein, 7 aa, synthetic construct
  REGION 1..7: note = Description of Artificial Sequence: Synthetic peptide
EVFSSQK

SEQ ID NO: 32575 - protein, 7 aa, synthetic construct
  REGION 1..7: note = Description of Artificial Sequence: Synthetic peptide
NGFNSNN

SEQ ID NO: 32576 - protein, 7 aa, synthetic construct
  REGION 1..7: note = Description of Artificial Sequence: Synthetic peptide
ASRAPPG

SEQ ID NO: 32577 - protein, 7 aa, synthetic construct
  REGION 1..7: note = Description of Artificial Sequence: Synthetic peptide
HLYSPRG

SEQ ID NO: 32578 - protein, 7 aa, synthetic construct
  REGION 1..7: note = Description of Artificial Sequence: Synthetic peptide
SQIPPST

SEQ ID NO: 32579 - protein, 7 aa, synthetic construct
  REGION 1..7: note = Description of Artificial Sequence: Synthetic peptide
NNKGNPG

SEQ ID NO: 32580 - protein, 7 aa, synthetic construct
  REGION 1..7: note = Description of Artificial Sequence: Synthetic peptide
PKARQHN

SEQ ID NO: 32581 - protein, 7 aa, synthetic construct
  REGION 1..7: note = Description of Artificial Sequence: Synthetic peptide
KATVPAG

SEQ ID NO: 32582 - protein, 7 aa, synthetic construct
  REGION 1..7: note = Description of Artificial Sequence: Synthetic peptide
PVREGSI

SEQ ID NO: 32583 - protein, 7 aa, synthetic construct
  REGION 1..7: note = Description of Artificial Sequence: Synthetic peptide
NPSEKML

SEQ ID NO: 32584 - protein, 7 aa, synthetic construct
  REGION 1..7: note = Description of Artificial Sequence: Synthetic peptide
KINTRNM

SEQ ID NO: 32585 - protein, 7 aa, synthetic construct
  REGION 1..7: note = Description of Artificial Sequence: Synthetic peptide
GVNNNIN

SEQ ID NO: 32586 - protein, 7 aa, synthetic construct
  REGION 1..7: note = Description of Artificial Sequence: Synthetic peptide
SFTKGAG

SEQ ID NO: 32587 - protein, 7 aa, synthetic construct
  REGION 1..7: note = Description of Artificial Sequence: Synthetic peptide
IQNSSNT

SEQ ID NO: 32588 - protein, 7 aa, synthetic construct
  REGION 1..7: note = Description of Artificial Sequence: Synthetic peptide
LAQERGT

SEQ ID NO: 32589 - protein, 7 aa, synthetic construct
  REGION 1..7: note = Description of Artificial Sequence: Synthetic peptide
EVRRQST

SEQ ID NO: 32590 - protein, 7 aa, synthetic construct
  REGION 1..7: note = Description of Artificial Sequence: Synthetic peptide
LSSTHMT

SEQ ID NO: 32591 - protein, 7 aa, synthetic construct
  REGION 1..7: note = Description of Artificial Sequence: Synthetic peptide
IQSPGNM

SEQ ID NO: 32592 - protein, 7 aa, synthetic construct
  REGION 1..7: note = Description of Artificial Sequence: Synthetic peptide
FNSTANR

SEQ ID NO: 32593 - protein, 7 aa, synthetic construct
  REGION 1..7: note = Description of Artificial Sequence: Synthetic peptide
KNQAPLL

SEQ ID NO: 32594 - protein, 7 aa, synthetic construct
  REGION 1..7: note = Description of Artificial Sequence: Synthetic peptide
SVDTRTG

SEQ ID NO: 32595 - protein, 7 aa, synthetic construct
  REGION 1..7: note = Description of Artificial Sequence: Synthetic peptide
KAGQERT

SEQ ID NO: 32596 - protein, 7 aa, synthetic construct
  REGION 1..7: note = Description of Artificial Sequence: Synthetic peptide
FLTGNTA

SEQ ID NO: 32597 - protein, 7 aa, synthetic construct
  REGION 1..7: note = Description of Artificial Sequence: Synthetic peptide
DNGDGYP

SEQ ID NO: 32598 - protein, 7 aa, synthetic construct
  REGION 1..7: note = Description of Artificial Sequence: Synthetic peptide
YSGGNMS

SEQ ID NO: 32599 - protein, 7 aa, synthetic construct
  REGION 1..7: note = Description of Artificial Sequence: Synthetic peptide
LISTAQR

SEQ ID NO: 32600 - protein, 7 aa, synthetic construct
  REGION 1..7: note = Description of Artificial Sequence: Synthetic peptide
IPANSFK

SEQ ID NO: 32601 - protein, 7 aa, synthetic construct
  REGION 1..7: note = Description of Artificial Sequence: Synthetic peptide
SMSEHLK

SEQ ID NO: 32602 - protein, 7 aa, synthetic construct
  REGION 1..7: note = Description of Artificial Sequence: Synthetic peptide
DYSSDSS

SEQ ID NO: 32603 - protein, 7 aa, synthetic construct
  REGION 1..7: note = Description of Artificial Sequence: Synthetic peptide
ETTTPRK

SEQ ID NO: 32604 - protein, 7 aa, synthetic construct
  REGION 1..7: note = Description of Artificial Sequence: Synthetic peptide
NPGESHR

SEQ ID NO: 32605 - protein, 7 aa, synthetic construct
  REGION 1..7: note = Description of Artificial Sequence: Synthetic peptide
SLGSGFQ

SEQ ID NO: 32606 - protein, 7 aa, synthetic construct
  REGION 1..7: note = Description of Artificial Sequence: Synthetic peptide
YIHNPTG

SEQ ID NO: 32607 - protein, 7 aa, synthetic construct
  REGION 1..7: note = Description of Artificial Sequence: Synthetic peptide
HTSSNSL

SEQ ID NO: 32608 - protein, 7 aa, synthetic construct
  REGION 1..7: note = Description of Artificial Sequence: Synthetic peptide
NNSKSQI

SEQ ID NO: 32609 - protein, 7 aa, synthetic construct
  REGION 1..7: note = Description of Artificial Sequence: Synthetic peptide
EVNTRSR

SEQ ID NO: 32610 - protein, 7 aa, synthetic construct
  REGION 1..7: note = Description of Artificial Sequence: Synthetic peptide
HTANSQS

SEQ ID NO: 32611 - protein, 7 aa, synthetic construct
  REGION 1..7: note = Description of Artificial Sequence: Synthetic peptide
GPANTSG

SEQ ID NO: 32612 - protein, 7 aa, synthetic construct
  REGION 1..7: note = Description of Artificial Sequence: Synthetic peptide
PAKSPAT

SEQ ID NO: 32613 - protein, 7 aa, synthetic construct
  REGION 1..7: note = Description of Artificial Sequence: Synthetic peptide
FSASGAR

SEQ ID NO: 32614 - protein, 7 aa, synthetic construct
  REGION 1..7: note = Description of Artificial Sequence: Synthetic peptide
QQGRTAG

SEQ ID NO: 32615 - protein, 7 aa, synthetic construct
  REGION 1..7: note = Description of Artificial Sequence: Synthetic peptide
SRAAHYG

SEQ ID NO: 32616 - protein, 7 aa, synthetic construct
  REGION 1..7: note = Description of Artificial Sequence: Synthetic peptide
GLARAGH

SEQ ID NO: 32617 - protein, 7 aa, synthetic construct
  REGION 1..7: note = Description of Artificial Sequence: Synthetic peptide
STTGGAS

SEQ ID NO: 32618 - protein, 7 aa, synthetic construct
  REGION 1..7: note = Description of Artificial Sequence: Synthetic peptide
GSNINNG

SEQ ID NO: 32619 - protein, 7 aa, synthetic construct
  REGION 1..7: note = Description of Artificial Sequence: Synthetic peptide
IQTHTSN

SEQ ID NO: 32620 - protein, 7 aa, synthetic construct
  REGION 1..7: note = Description of Artificial Sequence: Synthetic peptide
SYSELVR

SEQ ID NO: 32621 - protein, 7 aa, synthetic construct
  REGION 1..7: note = Description of Artificial Sequence: Synthetic peptide
LGSSTIF

SEQ ID NO: 32622 - protein, 7 aa, synthetic construct
  REGION 1..7: note = Description of Artificial Sequence: Synthetic peptide
MAGNSVP

SEQ ID NO: 32623 - protein, 7 aa, synthetic construct
  REGION 1..7: note = Description of Artificial Sequence: Synthetic peptide
HDSKVIS

SEQ ID NO: 32624 - protein, 7 aa, synthetic construct
  REGION 1..7: note = Description of Artificial Sequence: Synthetic peptide
FIGTSTP

SEQ ID NO: 32625 - protein, 7 aa, synthetic construct
  REGION 1..7: note = Description of Artificial Sequence: Synthetic peptide
VLRDGHR

SEQ ID NO: 32626 - protein, 7 aa, synthetic construct
  REGION 1..7: note = Description of Artificial Sequence: Synthetic peptide
TGDSPLA

SEQ ID NO: 32627 - protein, 7 aa, synthetic construct
  REGION 1..7: note = Description of Artificial Sequence: Synthetic peptide
PVLGYSY

SEQ ID NO: 32628 - protein, 7 aa, synthetic construct
  REGION 1..7: note = Description of Artificial Sequence: Synthetic peptide
DFSEKRL

SEQ ID NO: 32629 - protein, 7 aa, synthetic construct
  REGION 1..7: note = Description of Artificial Sequence: Synthetic peptide
GNQSPRV

SEQ ID NO: 32630 - protein, 7 aa, synthetic construct
  REGION 1..7: note = Description of Artificial Sequence: Synthetic peptide
PRDTTGS

SEQ ID NO: 32631 - protein, 7 aa, synthetic construct
  REGION 1..7: note = Description of Artificial Sequence: Synthetic peptide
LRDTNMN

SEQ ID NO: 32632 - protein, 7 aa, synthetic construct
  REGION 1..7: note = Description of Artificial Sequence: Synthetic peptide
SVTSPNK

SEQ ID NO: 32633 - protein, 7 aa, synthetic construct
  REGION 1..7: note = Description of Artificial Sequence: Synthetic peptide
DSKHTST

SEQ ID NO: 32634 - protein, 7 aa, synthetic construct
  REGION 1..7: note = Description of Artificial Sequence: Synthetic peptide
TGQQTAT

SEQ ID NO: 32635 - protein, 7 aa, synthetic construct
  REGION 1..7: note = Description of Artificial Sequence: Synthetic peptide
FMGRPNV

SEQ ID NO: 32636 - protein, 7 aa, synthetic construct
  REGION 1..7: note = Description of Artificial Sequence: Synthetic peptide
VQHTHSG

SEQ ID NO: 32637 - protein, 7 aa, synthetic construct
  REGION 1..7: note = Description of Artificial Sequence: Synthetic peptide
RNDKQNS

SEQ ID NO: 32638 - protein, 7 aa, synthetic construct
  REGION 1..7: note = Description of Artificial Sequence: Synthetic peptide
NDVKQGH

SEQ ID NO: 32639 - protein, 7 aa, synthetic construct
  REGION 1..7: note = Description of Artificial Sequence: Synthetic peptide
YNNGGTR

SEQ ID NO: 32640 - protein, 7 aa, synthetic construct
  REGION 1..7: note = Description of Artificial Sequence: Synthetic peptide
SFSKGSS

SEQ ID NO: 32641 - protein, 7 aa, synthetic construct
  REGION 1..7: note = Description of Artificial Sequence: Synthetic peptide
LGPGKNT

SEQ ID NO: 32642 - protein, 7 aa, synthetic construct
  REGION 1..7: note = Description of Artificial Sequence: Synthetic peptide
PSNKTNS

SEQ ID NO: 32643 - protein, 7 aa, synthetic construct
  REGION 1..7: note = Description of Artificial Sequence: Synthetic peptide
GLQTPPR

SEQ ID NO: 32644 - protein, 7 aa, synthetic construct
  REGION 1..7: note = Description of Artificial Sequence: Synthetic peptide
THLTGVQ

SEQ ID NO: 32645 - protein, 7 aa, synthetic construct
  REGION 1..7: note = Description of Artificial Sequence: Synthetic peptide
TGTGSFH

SEQ ID NO: 32646 - protein, 7 aa, synthetic construct
  REGION 1..7: note = Description of Artificial Sequence: Synthetic peptide
LVRATHE

SEQ ID NO: 32647 - protein, 7 aa, synthetic construct
  REGION 1..7: note = Description of Artificial Sequence: Synthetic peptide
ALANPQT

SEQ ID NO: 32648 - protein, 7 aa, synthetic construct
  REGION 1..7: note = Description of Artificial Sequence: Synthetic peptide
FVKTHSA

SEQ ID NO: 32649 - protein, 7 aa, synthetic construct
  REGION 1..7: note = Description of Artificial Sequence: Synthetic peptide
RVESPTN

SEQ ID NO: 32650 - protein, 7 aa, synthetic construct
  REGION 1..7: note = Description of Artificial Sequence: Synthetic peptide
TANSPAT

SEQ ID NO: 32651 - protein, 7 aa, synthetic construct
  REGION 1..7: note = Description of Artificial Sequence: Synthetic peptide
QIKTISA

SEQ ID NO: 32652 - protein, 7 aa, synthetic construct
  REGION 1..7: note = Description of Artificial Sequence: Synthetic peptide
HYTGKQN

SEQ ID NO: 32653 - protein, 7 aa, synthetic construct
  REGION 1..7: note = Description of Artificial Sequence: Synthetic peptide
LVQGGVN

SEQ ID NO: 32654 - protein, 7 aa, synthetic construct
  REGION 1..7: note = Description of Artificial Sequence: Synthetic peptide
SSQAVFR

SEQ ID NO: 32655 - protein, 7 aa, synthetic construct
  REGION 1..7: note = Description of Artificial Sequence: Synthetic peptide
HGQTGMI

SEQ ID NO: 32656 - protein, 7 aa, synthetic construct
  REGION 1..7: note = Description of Artificial Sequence: Synthetic peptide
GSVSPMT

SEQ ID NO: 32657 - protein, 7 aa, synthetic construct
  REGION 1..7: note = Description of Artificial Sequence: Synthetic peptide
SSFQANK

SEQ ID NO: 32658 - protein, 7 aa, synthetic construct
  REGION 1..7: note = Description of Artificial Sequence: Synthetic peptide
GTDNGIQ

SEQ ID NO: 32659 - protein, 7 aa, synthetic construct
  REGION 1..7: note = Description of Artificial Sequence: Synthetic peptide
RVMRESQ

SEQ ID NO: 32660 - protein, 7 aa, synthetic construct
  REGION 1..7: note = Description of Artificial Sequence: Synthetic peptide
QANTSTE

SEQ ID NO: 32661 - protein, 7 aa, synthetic construct
  REGION 1..7: note = Description of Artificial Sequence: Synthetic peptide
RIPNNPS

SEQ ID NO: 32662 - protein, 7 aa, synthetic construct
  REGION 1..7: note = Description of Artificial Sequence: Synthetic peptide
NNRSGMG

SEQ ID NO: 32663 - protein, 7 aa, synthetic construct
  REGION 1..7: note = Description of Artificial Sequence: Synthetic peptide
PTVQVTK

SEQ ID NO: 32664 - protein, 7 aa, synthetic construct
  REGION 1..7: note = Description of Artificial Sequence: Synthetic peptide
LYSGSQE

SEQ ID NO: 32665 - protein, 7 aa, synthetic construct
  REGION 1..7: note = Description of Artificial Sequence: Synthetic peptide
KILNVGT

SEQ ID NO: 32666 - protein, 7 aa, synthetic construct
  REGION 1..7: note = Description of Artificial Sequence: Synthetic peptide
CPQSREK

SEQ ID NO: 32667 - protein, 7 aa, synthetic construct
  REGION 1..7: note = Description of Artificial Sequence: Synthetic peptide
TSNSNIA

SEQ ID NO: 32668 - protein, 7 aa, synthetic construct
  REGION 1..7: note = Description of Artificial Sequence: Synthetic peptide
PSVNRTP

SEQ ID NO: 32669 - protein, 7 aa, synthetic construct
  REGION 1..7: note = Description of Artificial Sequence: Synthetic peptide
KLNKSQA

SEQ ID NO: 32670 - protein, 7 aa, synthetic construct
  REGION 1..7: note = Description of Artificial Sequence: Synthetic peptide
HNSKSQI

SEQ ID NO: 32671 - protein, 7 aa, synthetic construct
  REGION 1..7: note = Description of Artificial Sequence: Synthetic peptide
DSKQNLT

SEQ ID NO: 32672 - protein, 7 aa, synthetic construct
  REGION 1..7: note = Description of Artificial Sequence: Synthetic peptide
ENRTSVQ

SEQ ID NO: 32673 - protein, 7 aa, synthetic construct
  REGION 1..7: note = Description of Artificial Sequence: Synthetic peptide
GPENGIQ

SEQ ID NO: 32674 - protein, 7 aa, synthetic construct
  REGION 1..7: note = Description of Artificial Sequence: Synthetic peptide
TRYNSSL

SEQ ID NO: 32675 - protein, 7 aa, synthetic construct
  REGION 1..7: note = Description of Artificial Sequence: Synthetic peptide
FGSSNAV

SEQ ID NO: 32676 - protein, 7 aa, synthetic construct
  REGION 1..7: note = Description of Artificial Sequence: Synthetic peptide
SADHIRN

SEQ ID NO: 32677 - protein, 7 aa, synthetic construct
  REGION 1..7: note = Description of Artificial Sequence: Synthetic peptide
FQKERYQ

SEQ ID NO: 32678 - protein, 7 aa, synthetic construct
  REGION 1..7: note = Description of Artificial Sequence: Synthetic peptide
LAPGHGN

SEQ ID NO: 32679 - protein, 7 aa, synthetic construct
  REGION 1..7: note = Description of Artificial Sequence: Synthetic peptide
NTTAKSS

SEQ ID NO: 32680 - protein, 7 aa, synthetic construct
  REGION 1..7: note = Description of Artificial Sequence: Synthetic peptide
TPVNRTH

SEQ ID NO: 32681 - protein, 7 aa, synthetic construct
  REGION 1..7: note = Description of Artificial Sequence: Synthetic peptide
PSTGNSV

SEQ ID NO: 32682 - protein, 7 aa, synthetic construct
  REGION 1..7: note = Description of Artificial Sequence: Synthetic peptide
FSQHSSN

SEQ ID NO: 32683 - protein, 7 aa, synthetic construct
  REGION 1..7: note = Description of Artificial Sequence: Synthetic peptide
VNDHNVR

SEQ ID NO: 32684 - protein, 7 aa, synthetic construct
  REGION 1..7: note = Description of Artificial Sequence: Synthetic peptide
GSYSNPT

SEQ ID NO: 32685 - protein, 7 aa, synthetic construct
  REGION 1..7: note = Description of Artificial Sequence: Synthetic peptide
QDLQARV

SEQ ID NO: 32686 - protein, 7 aa, synthetic construct
  REGION 1..7: note = Description of Artificial Sequence: Synthetic peptide
LNAGNTR

SEQ ID NO: 32687 - protein, 7 aa, synthetic construct
  REGION 1..7: note = Description of Artificial Sequence: Synthetic peptide
EVTNAPK

SEQ ID NO: 32688 - protein, 7 aa, synthetic construct
  REGION 1..7: note = Description of Artificial Sequence: Synthetic peptide
HPSNKPL

SEQ ID NO: 32689 - protein, 7 aa, synthetic construct
  REGION 1..7: note = Description of Artificial Sequence: Synthetic peptide
NDSGQNQ

SEQ ID NO: 32690 - protein, 7 aa, synthetic construct
  REGION 1..7: note = Description of Artificial Sequence: Synthetic peptide
LGKPAQP

SEQ ID NO: 32691 - protein, 7 aa, synthetic construct
  REGION 1..7: note = Description of Artificial Sequence: Synthetic peptide
NIKGAST

SEQ ID NO: 32692 - protein, 7 aa, synthetic construct
  REGION 1..7: note = Description of Artificial Sequence: Synthetic peptide
NTSTNGI

SEQ ID NO: 32693 - protein, 7 aa, synthetic construct
  REGION 1..7: note = Description of Artificial Sequence: Synthetic peptide
NLGNSLK

SEQ ID NO: 32694 - protein, 7 aa, synthetic construct
  REGION 1..7: note = Description of Artificial Sequence: Synthetic peptide
NPGRQQF

SEQ ID NO: 32695 - protein, 7 aa, synthetic construct
  REGION 1..7: note = Description of Artificial Sequence: Synthetic peptide
TNPKSSS

SEQ ID NO: 32696 - protein, 7 aa, synthetic construct
  REGION 1..7: note = Description of Artificial Sequence: Synthetic peptide
FPSVSTT

SEQ ID NO: 32697 - protein, 7 aa, synthetic construct
  REGION 1..7: note = Description of Artificial Sequence: Synthetic peptide
SSDQPRL

SEQ ID NO: 32698 - protein, 7 aa, synthetic construct
  REGION 1..7: note = Description of Artificial Sequence: Synthetic peptide
AEQRPGQ

SEQ ID NO: 32699 - protein, 7 aa, synthetic construct
  REGION 1..7: note = Description of Artificial Sequence: Synthetic peptide
HDNANYN

SEQ ID NO: 32700 - protein, 7 aa, synthetic construct
  REGION 1..7: note = Description of Artificial Sequence: Synthetic peptide
SSVQHTG

SEQ ID NO: 32701 - protein, 7 aa, synthetic construct
  REGION 1..7: note = Description of Artificial Sequence: Synthetic peptide
MKNTTVV

SEQ ID NO: 32702 - protein, 7 aa, synthetic construct
  REGION 1..7: note = Description of Artificial Sequence: Synthetic peptide
YPLSRST

SEQ ID NO: 32703 - protein, 7 aa, synthetic construct
  REGION 1..7: note = Description of Artificial Sequence: Synthetic peptide
NANSRPV

SEQ ID NO: 32704 - protein, 7 aa, synthetic construct
  REGION 1..7: note = Description of Artificial Sequence: Synthetic peptide
VSGQGNS

SEQ ID NO: 32705 - protein, 7 aa, synthetic construct
  REGION 1..7: note = Description of Artificial Sequence: Synthetic peptide
RHYTGDS

SEQ ID NO: 32706 - protein, 7 aa, synthetic construct
  REGION 1..7: note = Description of Artificial Sequence: Synthetic peptide
QQYAKQA

SEQ ID NO: 32707 - protein, 7 aa, synthetic construct
  REGION 1..7: note = Description of Artificial Sequence: Synthetic peptide
LPQGSIS

SEQ ID NO: 32708 - protein, 7 aa, synthetic construct
  REGION 1..7: note = Description of Artificial Sequence: Synthetic peptide
PGDRGKV

SEQ ID NO: 32709 - protein, 7 aa, synthetic construct
  REGION 1..7: note = Description of Artificial Sequence: Synthetic peptide
HNNSKSA

SEQ ID NO: 32710 - protein, 7 aa, synthetic construct
  REGION 1..7: note = Description of Artificial Sequence: Synthetic peptide
SSTSSPY

SEQ ID NO: 32711 - protein, 7 aa, synthetic construct
  REGION 1..7: note = Description of Artificial Sequence: Synthetic peptide
ILGNKSS

SEQ ID NO: 32712 - protein, 7 aa, synthetic construct
  REGION 1..7: note = Description of Artificial Sequence: Synthetic peptide
ASTPNNT

SEQ ID NO: 32713 - protein, 7 aa, synthetic construct
  REGION 1..7: note = Description of Artificial Sequence: Synthetic peptide
GNTGSYQ

SEQ ID NO: 32714 - protein, 7 aa, synthetic construct
  REGION 1..7: note = Description of Artificial Sequence: Synthetic peptide
TGQQPAT

SEQ ID NO: 32715 - protein, 7 aa, synthetic construct
  REGION 1..7: note = Description of Artificial Sequence: Synthetic peptide
SISDKLG

SEQ ID NO: 32716 - protein, 7 aa, synthetic construct
  REGION 1..7: note = Description of Artificial Sequence: Synthetic peptide
IANAHYN

SEQ ID NO: 32717 - protein, 7 aa, synthetic construct
  REGION 1..7: note = Description of Artificial Sequence: Synthetic peptide
LGVKTPT

SEQ ID NO: 32718 - protein, 7 aa, synthetic construct
  REGION 1..7: note = Description of Artificial Sequence: Synthetic peptide
LGGGTLR

SEQ ID NO: 32719 - protein, 7 aa, synthetic construct
  REGION 1..7: note = Description of Artificial Sequence: Synthetic peptide
RRQDTQE

SEQ ID NO: 32720 - protein, 7 aa, synthetic construct
  REGION 1..7: note = Description of Artificial Sequence: Synthetic peptide
GTDRTLH

SEQ ID NO: 32721 - protein, 7 aa, synthetic construct
  REGION 1..7: note = Description of Artificial Sequence: Synthetic peptide
TQQNGRN

SEQ ID NO: 32722 - protein, 7 aa, synthetic construct
  REGION 1..7: note = Description of Artificial Sequence: Synthetic peptide
SDHQSVR

SEQ ID NO: 32723 - protein, 7 aa, synthetic construct
  REGION 1..7: note = Description of Artificial Sequence: Synthetic peptide
LLSSKTA

SEQ ID NO: 32724 - protein, 7 aa, synthetic construct
  REGION 1..7: note = Description of Artificial Sequence: Synthetic peptide
PVQHSSN

SEQ ID NO: 32725 - protein, 7 aa, synthetic construct
  REGION 1..7: note = Description of Artificial Sequence: Synthetic peptide
NGISKSN

SEQ ID NO: 32726 - protein, 7 aa, synthetic construct
  REGION 1..7: note = Description of Artificial Sequence: Synthetic peptide
ESATPIR

SEQ ID NO: 32727 - protein, 7 aa, synthetic construct
  REGION 1..7: note = Description of Artificial Sequence: Synthetic peptide
NTTGSGL

SEQ ID NO: 32728 - protein, 7 aa, synthetic construct
  REGION 1..7: note = Description of Artificial Sequence: Synthetic peptide
SSSPNVK

SEQ ID NO: 32729 - protein, 7 aa, synthetic construct
  REGION 1..7: note = Description of Artificial Sequence: Synthetic peptide
ATNSTPR

SEQ ID NO: 32730 - protein, 7 aa, synthetic construct
  REGION 1..7: note = Description of Artificial Sequence: Synthetic peptide
YRNTHSE

SEQ ID NO: 32731 - protein, 7 aa, synthetic construct
  REGION 1..7: note = Description of Artificial Sequence: Synthetic peptide
LDKEPRG

SEQ ID NO: 32732 - protein, 7 aa, synthetic construct
  REGION 1..7: note = Description of Artificial Sequence: Synthetic peptide
VGHKGGP

SEQ ID NO: 32733 - protein, 7 aa, synthetic construct
  REGION 1..7: note = Description of Artificial Sequence: Synthetic peptide
IVSPVSK

SEQ ID NO: 32734 - protein, 7 aa, synthetic construct
  REGION 1..7: note = Description of Artificial Sequence: Synthetic peptide
PRMRAVS

SEQ ID NO: 32735 - protein, 7 aa, synthetic construct
  REGION 1..7: note = Description of Artificial Sequence: Synthetic peptide
YRTTHTL

SEQ ID NO: 32736 - protein, 7 aa, synthetic construct
  REGION 1..7: note = Description of Artificial Sequence: Synthetic peptide
KNATGIL

SEQ ID NO: 32737 - protein, 7 aa, synthetic construct
  REGION 1..7: note = Description of Artificial Sequence: Synthetic peptide
NGSGQNK

SEQ ID NO: 32738 - protein, 7 aa, synthetic construct
  REGION 1..7: note = Description of Artificial Sequence: Synthetic peptide
NQKTRTD

SEQ ID NO: 32739 - protein, 7 aa, synthetic construct
  REGION 1..7: note = Description of Artificial Sequence: Synthetic peptide
KVGSPTA

SEQ ID NO: 32740 - protein, 7 aa, synthetic construct
  REGION 1..7: note = Description of Artificial Sequence: Synthetic peptide
TTDKKTE

SEQ ID NO: 32741 - protein, 7 aa, synthetic construct
  REGION 1..7: note = Description of Artificial Sequence: Synthetic peptide
DSGSSTK

SEQ ID NO: 32742 - protein, 7 aa, synthetic construct
  REGION 1..7: note = Description of Artificial Sequence: Synthetic peptide
NTQSYTS

SEQ ID NO: 32743 - protein, 7 aa, synthetic construct
  REGION 1..7: note = Description of Artificial Sequence: Synthetic peptide
FPGGNHT

SEQ ID NO: 32744 - protein, 7 aa, synthetic construct
  REGION 1..7: note = Description of Artificial Sequence: Synthetic peptide
HTATPLL

SEQ ID NO: 32745 - protein, 7 aa, synthetic construct
  REGION 1..7: note = Description of Artificial Sequence: Synthetic peptide
NNSTGVA

SEQ ID NO: 32746 - protein, 7 aa, synthetic construct
  REGION 1..7: note = Description of Artificial Sequence: Synthetic peptide
TPSVTNM

SEQ ID NO: 32747 - protein, 7 aa, synthetic construct
  REGION 1..7: note = Description of Artificial Sequence: Synthetic peptide
LTFNSSG

SEQ ID NO: 32748 - protein, 7 aa, synthetic construct
  REGION 1..7: note = Description of Artificial Sequence: Synthetic peptide
RDGTPPT

SEQ ID NO: 32749 - protein, 7 aa, synthetic construct
  REGION 1..7: note = Description of Artificial Sequence: Synthetic peptide
NRKHTST

SEQ ID NO: 32750 - protein, 7 aa, synthetic construct
  REGION 1..7: note = Description of Artificial Sequence: Synthetic peptide
HLQSTDP

SEQ ID NO: 32751 - protein, 7 aa, synthetic construct
  REGION 1..7: note = Description of Artificial Sequence: Synthetic peptide
DPDTRKS

SEQ ID NO: 32752 - protein, 7 aa, synthetic construct
  REGION 1..7: note = Description of Artificial Sequence: Synthetic peptide
QRFQSSQ

SEQ ID NO: 32753 - protein, 7 aa, synthetic construct
  REGION 1..7: note = Description of Artificial Sequence: Synthetic peptide
NSNTRGP

SEQ ID NO: 32754 - protein, 7 aa, synthetic construct
  REGION 1..7: note = Description of Artificial Sequence: Synthetic peptide
GSGGDRN

SEQ ID NO: 32755 - protein, 7 aa, synthetic construct
  REGION 1..7: note = Description of Artificial Sequence: Synthetic peptide
PSTQSSS

SEQ ID NO: 32756 - protein, 7 aa, synthetic construct
  REGION 1..7: note = Description of Artificial Sequence: Synthetic peptide
LTTSVYK

SEQ ID NO: 32757 - protein, 7 aa, synthetic construct
  REGION 1..7: note = Description of Artificial Sequence: Synthetic peptide
GSTGSSI

SEQ ID NO: 32758 - protein, 7 aa, synthetic construct
  REGION 1..7: note = Description of Artificial Sequence: Synthetic peptide
ASLKTQM

SEQ ID NO: 32759 - protein, 7 aa, synthetic construct
  REGION 1..7: note = Description of Artificial Sequence: Synthetic peptide
DCVSRCK

SEQ ID NO: 32760 - protein, 7 aa, synthetic construct
  REGION 1..7: note = Description of Artificial Sequence: Synthetic peptide
SFSPASN

SEQ ID NO: 32761 - protein, 7 aa, synthetic construct
  REGION 1..7: note = Description of Artificial Sequence: Synthetic peptide
NSTPSTR

SEQ ID NO: 32762 - protein, 7 aa, synthetic construct
  REGION 1..7: note = Description of Artificial Sequence: Synthetic peptide
HELSRTT

SEQ ID NO: 32763 - protein, 7 aa, synthetic construct
  REGION 1..7: note = Description of Artificial Sequence: Synthetic peptide
NDRGQNG

SEQ ID NO: 32764 - protein, 7 aa, synthetic construct
  REGION 1..7: note = Description of Artificial Sequence: Synthetic peptide
PSHEGQQ

SEQ ID NO: 32765 - protein, 7 aa, synthetic construct
  REGION 1..7: note = Description of Artificial Sequence: Synthetic peptide
QGAGVSS

SEQ ID NO: 32766 - protein, 7 aa, synthetic construct
  REGION 1..7: note = Description of Artificial Sequence: Synthetic peptide
KTGDQMG

SEQ ID NO: 32767 - protein, 7 aa, synthetic construct
  REGION 1..7: note = Description of Artificial Sequence: Synthetic peptide
IRSKESA

SEQ ID NO: 32768 - protein, 7 aa, synthetic construct
  REGION 1..7: note = Description of Artificial Sequence: Synthetic peptide
GLGQQTN

SEQ ID NO: 32769 - protein, 7 aa, synthetic construct
  REGION 1..7: note = Description of Artificial Sequence: Synthetic peptide
PGYGSNH

SEQ ID NO: 32770 - protein, 7 aa, synthetic construct
  REGION 1..7: note = Description of Artificial Sequence: Synthetic peptide
QSEIVNK

SEQ ID NO: 32771 - protein, 7 aa, synthetic construct
  REGION 1..7: note = Description of Artificial Sequence: Synthetic peptide
GIQSGLG

SEQ ID NO: 32772 - protein, 7 aa, synthetic construct
  REGION 1..7: note = Description of Artificial Sequence: Synthetic peptide
EVYSGSN

SEQ ID NO: 32773 - protein, 7 aa, synthetic construct
  REGION 1..7: note = Description of Artificial Sequence: Synthetic peptide
KNHTAVQ

SEQ ID NO: 32774 - protein, 7 aa, synthetic construct
  REGION 1..7: note = Description of Artificial Sequence: Synthetic peptide
NSAALNS

SEQ ID NO: 32775 - protein, 7 aa, synthetic construct
  REGION 1..7: note = Description of Artificial Sequence: Synthetic peptide
NGSQGRQ

SEQ ID NO: 32776 - protein, 7 aa, synthetic construct
  REGION 1..7: note = Description of Artificial Sequence: Synthetic peptide
SYSSSQL

SEQ ID NO: 32777 - protein, 7 aa, synthetic construct
  REGION 1..7: note = Description of Artificial Sequence: Synthetic peptide
TQGLGHL

SEQ ID NO: 32778 - protein, 7 aa, synthetic construct
  REGION 1..7: note = Description of Artificial Sequence: Synthetic peptide
TMRATPP

SEQ ID NO: 32779 - protein, 7 aa, synthetic construct
  REGION 1..7: note = Description of Artificial Sequence: Synthetic peptide
SRVSRNL

SEQ ID NO: 32780 - protein, 7 aa, synthetic construct
  REGION 1..7: note = Description of Artificial Sequence: Synthetic peptide
ISGSGYH

SEQ ID NO: 32781 - protein, 7 aa, synthetic construct
  REGION 1..7: note = Description of Artificial Sequence: Synthetic peptide
NVDNRGF

SEQ ID NO: 32782 - protein, 7 aa, synthetic construct
  REGION 1..7: note = Description of Artificial Sequence: Synthetic peptide
LGMRDNT

SEQ ID NO: 32783 - protein, 7 aa, synthetic construct
  REGION 1..7: note = Description of Artificial Sequence: Synthetic peptide
EQGSGNH

SEQ ID NO: 32784 - protein, 7 aa, synthetic construct
  REGION 1..7: note = Description of Artificial Sequence: Synthetic peptide
GDMGISK

SEQ ID NO: 32785 - protein, 7 aa, synthetic construct
  REGION 1..7: note = Description of Artificial Sequence: Synthetic peptide
QNLPKAS

SEQ ID NO: 32786 - protein, 7 aa, synthetic construct
  REGION 1..7: note = Description of Artificial Sequence: Synthetic peptide
HGGPGAV

SEQ ID NO: 32787 - protein, 7 aa, synthetic construct
  REGION 1..7: note = Description of Artificial Sequence: Synthetic peptide
GSTGQLM

SEQ ID NO: 32788 - protein, 7 aa, synthetic construct
  REGION 1..7: note = Description of Artificial Sequence: Synthetic peptide
RDLGHDN

SEQ ID NO: 32789 - protein, 7 aa, synthetic construct
  REGION 1..7: note = Description of Artificial Sequence: Synthetic peptide
HGISNQS

SEQ ID NO: 32790 - protein, 7 aa, synthetic construct
  REGION 1..7: note = Description of Artificial Sequence: Synthetic peptide
QNTNAAI

SEQ ID NO: 32791 - protein, 7 aa, synthetic construct
  REGION 1..7: note = Description of Artificial Sequence: Synthetic peptide
WGSGLNH

SEQ ID NO: 32792 - protein, 7 aa, synthetic construct
  REGION 1..7: note = Description of Artificial Sequence: Synthetic peptide
PPSKPNT

SEQ ID NO: 32793 - protein, 7 aa, synthetic construct
  REGION 1..7: note = Description of Artificial Sequence: Synthetic peptide
KFPPNSG

SEQ ID NO: 32794 - protein, 7 aa, synthetic construct
  REGION 1..7: note = Description of Artificial Sequence: Synthetic peptide
QVVPATN

SEQ ID NO: 32795 - protein, 7 aa, synthetic construct
  REGION 1..7: note = Description of Artificial Sequence: Synthetic peptide
KDAGEYG

SEQ ID NO: 32796 - protein, 7 aa, synthetic construct
  REGION 1..7: note = Description of Artificial Sequence: Synthetic peptide
SSSAKSI

SEQ ID NO: 32797 - protein, 7 aa, synthetic construct
  REGION 1..7: note = Description of Artificial Sequence: Synthetic peptide
FNSSSSK

SEQ ID NO: 32798 - protein, 7 aa, synthetic construct
  REGION 1..7: note = Description of Artificial Sequence: Synthetic peptide
SNSGRGM

SEQ ID NO: 32799 - protein, 7 aa, synthetic construct
  REGION 1..7: note = Description of Artificial Sequence: Synthetic peptide
DESGKSK

SEQ ID NO: 32800 - protein, 7 aa, synthetic construct
  REGION 1..7: note = Description of Artificial Sequence: Synthetic peptide
GERSDVR

SEQ ID NO: 32801 - protein, 7 aa, synthetic construct
  REGION 1..7: note = Description of Artificial Sequence: Synthetic peptide
INQSTYK

SEQ ID NO: 32802 - protein, 7 aa, synthetic construct
  REGION 1..7: note = Description of Artificial Sequence: Synthetic peptide
LTQRDFS

SEQ ID NO: 32803 - protein, 7 aa, synthetic construct
  REGION 1..7: note = Description of Artificial Sequence: Synthetic peptide
SINSQQC

SEQ ID NO: 32804 - protein, 7 aa, synthetic construct
  REGION 1..7: note = Description of Artificial Sequence: Synthetic peptide
TATQKGQ

SEQ ID NO: 32805 - protein, 7 aa, synthetic construct
  REGION 1..7: note = Description of Artificial Sequence: Synthetic peptide
SSNEKDR

SEQ ID NO: 32806 - protein, 7 aa, synthetic construct
  REGION 1..7: note = Description of Artificial Sequence: Synthetic peptide
YVSNSNA

SEQ ID NO: 32807 - protein, 7 aa, synthetic construct
  REGION 1..7: note = Description of Artificial Sequence: Synthetic peptide
NPGEMRL

SEQ ID NO: 32808 - protein, 7 aa, synthetic construct
  REGION 1..7: note = Description of Artificial Sequence: Synthetic peptide
HSENGNR

SEQ ID NO: 32809 - protein, 7 aa, synthetic construct
  REGION 1..7: note = Description of Artificial Sequence: Synthetic peptide
LTPSKIG

SEQ ID NO: 32810 - protein, 7 aa, synthetic construct
  REGION 1..7: note = Description of Artificial Sequence: Synthetic peptide
PRSNTQR

SEQ ID NO: 32811 - protein, 7 aa, synthetic construct
  REGION 1..7: note = Description of Artificial Sequence: Synthetic peptide
QMKHLQV

SEQ ID NO: 32812 - protein, 7 aa, synthetic construct
  REGION 1..7: note = Description of Artificial Sequence: Synthetic peptide
QSTERLA

SEQ ID NO: 32813 - protein, 7 aa, synthetic construct
  REGION 1..7: note = Description of Artificial Sequence: Synthetic peptide
NFTTSGQ

SEQ ID NO: 32814 - protein, 7 aa, synthetic construct
  REGION 1..7: note = Description of Artificial Sequence: Synthetic peptide
REYNTTS

SEQ ID NO: 32815 - protein, 7 aa, synthetic construct
  REGION 1..7: note = Description of Artificial Sequence: Synthetic peptide
LGTSHQQ

SEQ ID NO: 32816 - protein, 7 aa, synthetic construct
  REGION 1..7: note = Description of Artificial Sequence: Synthetic peptide
NASGQNQ

SEQ ID NO: 32817 - protein, 7 aa, synthetic construct
  REGION 1..7: note = Description of Artificial Sequence: Synthetic peptide
PGINTNS

SEQ ID NO: 32818 - protein, 7 aa, synthetic construct
  REGION 1..7: note = Description of Artificial Sequence: Synthetic peptide
ATTKEGI

SEQ ID NO: 32819 - protein, 7 aa, synthetic construct
  REGION 1..7: note = Description of Artificial Sequence: Synthetic peptide
QTGSNNK

SEQ ID NO: 32820 - protein, 7 aa, synthetic construct
  REGION 1..7: note = Description of Artificial Sequence: Synthetic peptide
TRESRTN

SEQ ID NO: 32821 - protein, 7 aa, synthetic construct
  REGION 1..7: note = Description of Artificial Sequence: Synthetic peptide
QRTSDQT

SEQ ID NO: 32822 - protein, 7 aa, synthetic construct
  REGION 1..7: note = Description of Artificial Sequence: Synthetic peptide
VSGRPTG

SEQ ID NO: 32823 - protein, 7 aa, synthetic construct
  REGION 1..7: note = Description of Artificial Sequence: Synthetic peptide
PLRELKP

SEQ ID NO: 32824 - protein, 7 aa, synthetic construct
  REGION 1..7: note = Description of Artificial Sequence: Synthetic peptide
LSIKGAS

SEQ ID NO: 32825 - protein, 7 aa, synthetic construct
  REGION 1..7: note = Description of Artificial Sequence: Synthetic peptide
NYVGQRS

SEQ ID NO: 32826 - protein, 7 aa, synthetic construct
  REGION 1..7: note = Description of Artificial Sequence: Synthetic peptide
PNRTSSY

SEQ ID NO: 32827 - protein, 7 aa, synthetic construct
  REGION 1..7: note = Description of Artificial Sequence: Synthetic peptide
SREKNNA

SEQ ID NO: 32828 - protein, 7 aa, synthetic construct
  REGION 1..7: note = Description of Artificial Sequence: Synthetic peptide
HSTSLSK

SEQ ID NO: 32829 - protein, 7 aa, synthetic construct
  REGION 1..7: note = Description of Artificial Sequence: Synthetic peptide
ISGQQTT

SEQ ID NO: 32830 - protein, 7 aa, synthetic construct
  REGION 1..7: note = Description of Artificial Sequence: Synthetic peptide
CSVAGKR

SEQ ID NO: 32831 - protein, 7 aa, synthetic construct
  REGION 1..7: note = Description of Artificial Sequence: Synthetic peptide
SKTGTSL

SEQ ID NO: 32832 - protein, 7 aa, synthetic construct
  REGION 1..7: note = Description of Artificial Sequence: Synthetic peptide
ISVGNTS

SEQ ID NO: 32833 - protein, 7 aa, synthetic construct
  REGION 1..7: note = Description of Artificial Sequence: Synthetic peptide
RTLSKHG

SEQ ID NO: 32834 - protein, 7 aa, synthetic construct
  REGION 1..7: note = Description of Artificial Sequence: Synthetic peptide
PGSVTGS

SEQ ID NO: 32835 - protein, 7 aa, synthetic construct
  REGION 1..7: note = Description of Artificial Sequence: Synthetic peptide
STSKDYT

SEQ ID NO: 32836 - protein, 7 aa, synthetic construct
  REGION 1..7: note = Description of Artificial Sequence: Synthetic peptide
VRISTQA

SEQ ID NO: 32837 - protein, 7 aa, synthetic construct
  REGION 1..7: note = Description of Artificial Sequence: Synthetic peptide
YINSPSN

SEQ ID NO: 32838 - protein, 7 aa, synthetic construct
  REGION 1..7: note = Description of Artificial Sequence: Synthetic peptide
NNKSASQ

SEQ ID NO: 32839 - protein, 7 aa, synthetic construct
  REGION 1..7: note = Description of Artificial Sequence: Synthetic peptide
FNQAGVN

SEQ ID NO: 32840 - protein, 7 aa, synthetic construct
  REGION 1..7: note = Description of Artificial Sequence: Synthetic peptide
QQEMSKK

SEQ ID NO: 32841 - protein, 7 aa, synthetic construct
  REGION 1..7: note = Description of Artificial Sequence: Synthetic peptide
PSHNPTN

SEQ ID NO: 32842 - protein, 7 aa, synthetic construct
  REGION 1..7: note = Description of Artificial Sequence: Synthetic peptide
SGSNTIG

SEQ ID NO: 32843 - protein, 7 aa, synthetic construct
  REGION 1..7: note = Description of Artificial Sequence: Synthetic peptide
NSANKTP

SEQ ID NO: 32844 - protein, 7 aa, synthetic construct
  REGION 1..7: note = Description of Artificial Sequence: Synthetic peptide
GNRGSVI

SEQ ID NO: 32845 - protein, 7 aa, synthetic construct
  REGION 1..7: note = Description of Artificial Sequence: Synthetic peptide
PNGAHVT

SEQ ID NO: 32846 - protein, 7 aa, synthetic construct
  REGION 1..7: note = Description of Artificial Sequence: Synthetic peptide
MGVHSIA

SEQ ID NO: 32847 - protein, 7 aa, synthetic construct
  REGION 1..7: note = Description of Artificial Sequence: Synthetic peptide
LHDGQTR

SEQ ID NO: 32848 - protein, 7 aa, synthetic construct
  REGION 1..7: note = Description of Artificial Sequence: Synthetic peptide
SFDSKPP

SEQ ID NO: 32849 - protein, 7 aa, synthetic construct
  REGION 1..7: note = Description of Artificial Sequence: Synthetic peptide
YVTSSGG

SEQ ID NO: 32850 - protein, 7 aa, synthetic construct
  REGION 1..7: note = Description of Artificial Sequence: Synthetic peptide
PADHGKL

SEQ ID NO: 32851 - protein, 7 aa, synthetic construct
  REGION 1..7: note = Description of Artificial Sequence: Synthetic peptide
DATKNHS

SEQ ID NO: 32852 - protein, 7 aa, synthetic construct
  REGION 1..7: note = Description of Artificial Sequence: Synthetic peptide
QREQLLK

SEQ ID NO: 32853 - protein, 7 aa, synthetic construct
  REGION 1..7: note = Description of Artificial Sequence: Synthetic peptide
HSTSGGH

SEQ ID NO: 32854 - protein, 7 aa, synthetic construct
  REGION 1..7: note = Description of Artificial Sequence: Synthetic peptide
HNSAVQG

SEQ ID NO: 32855 - protein, 7 aa, synthetic construct
  REGION 1..7: note = Description of Artificial Sequence: Synthetic peptide
PQSSHQT

SEQ ID NO: 32856 - protein, 7 aa, synthetic construct
  REGION 1..7: note = Description of Artificial Sequence: Synthetic peptide
LPGVRVA

SEQ ID NO: 32857 - protein, 7 aa, synthetic construct
  REGION 1..7: note = Description of Artificial Sequence: Synthetic peptide
NSYDPKR

SEQ ID NO: 32858 - protein, 7 aa, synthetic construct
  REGION 1..7: note = Description of Artificial Sequence: Synthetic peptide
GSNYEVG

SEQ ID NO: 32859 - protein, 7 aa, synthetic construct
  REGION 1..7: note = Description of Artificial Sequence: Synthetic peptide
GLMTHSI

SEQ ID NO: 32860 - protein, 7 aa, synthetic construct
  REGION 1..7: note = Description of Artificial Sequence: Synthetic peptide
LSNQNNQ

SEQ ID NO: 32861 - protein, 7 aa, synthetic construct
  REGION 1..7: note = Description of Artificial Sequence: Synthetic peptide
GLPTEKM

SEQ ID NO: 32862 - protein, 7 aa, synthetic construct
  REGION 1..7: note = Description of Artificial Sequence: Synthetic peptide
NVTTPLI

SEQ ID NO: 32863 - protein, 7 aa, synthetic construct
  REGION 1..7: note = Description of Artificial Sequence: Synthetic peptide
TSYPNHR

SEQ ID NO: 32864 - protein, 7 aa, synthetic construct
  REGION 1..7: note = Description of Artificial Sequence: Synthetic peptide
ATRDSHS

SEQ ID NO: 32865 - protein, 7 aa, synthetic construct
  REGION 1..7: note = Description of Artificial Sequence: Synthetic peptide
QGSGSNH

SEQ ID NO: 32866 - protein, 7 aa, synthetic construct
  REGION 1..7: note = Description of Artificial Sequence: Synthetic peptide
SSSTHAV

SEQ ID NO: 32867 - protein, 7 aa, synthetic construct
  REGION 1..7: note = Description of Artificial Sequence: Synthetic peptide
NNLPRNL

SEQ ID NO: 32868 - protein, 7 aa, synthetic construct
  REGION 1..7: note = Description of Artificial Sequence: Synthetic peptide
SSEQTTR

SEQ ID NO: 32869 - protein, 7 aa, synthetic construct
  REGION 1..7: note = Description of Artificial Sequence: Synthetic peptide
DTARPTK

SEQ ID NO: 32870 - protein, 7 aa, synthetic construct
  REGION 1..7: note = Description of Artificial Sequence: Synthetic peptide
NISTRQS

SEQ ID NO: 32871 - protein, 7 aa, synthetic construct
  REGION 1..7: note = Description of Artificial Sequence: Synthetic peptide
YTITPQK

SEQ ID NO: 32872 - protein, 7 aa, synthetic construct
  REGION 1..7: note = Description of Artificial Sequence: Synthetic peptide
ENISRSH

SEQ ID NO: 32873 - protein, 7 aa, synthetic construct
  REGION 1..7: note = Description of Artificial Sequence: Synthetic peptide
PSKISNA

SEQ ID NO: 32874 - protein, 7 aa, synthetic construct
  REGION 1..7: note = Description of Artificial Sequence: Synthetic peptide
CNSHNAA

SEQ ID NO: 32875 - protein, 7 aa, synthetic construct
  REGION 1..7: note = Description of Artificial Sequence: Synthetic peptide
VSFKPNE

SEQ ID NO: 32876 - protein, 7 aa, synthetic construct
  REGION 1..7: note = Description of Artificial Sequence: Synthetic peptide
DKTQKQL

SEQ ID NO: 32877 - protein, 7 aa, synthetic construct
  REGION 1..7: note = Description of Artificial Sequence: Synthetic peptide
NNVTKAP

SEQ ID NO: 32878 - protein, 7 aa, synthetic construct
  REGION 1..7: note = Description of Artificial Sequence: Synthetic peptide
QNVGGIR

SEQ ID NO: 32879 - protein, 7 aa, synthetic construct
  REGION 1..7: note = Description of Artificial Sequence: Synthetic peptide
SSAKSSL

SEQ ID NO: 32880 - protein, 7 aa, synthetic construct
  REGION 1..7: note = Description of Artificial Sequence: Synthetic peptide
HHDASPN

SEQ ID NO: 32881 - protein, 7 aa, synthetic construct
  REGION 1..7: note = Description of Artificial Sequence: Synthetic peptide
TGIGSHL

SEQ ID NO: 32882 - protein, 7 aa, synthetic construct
  REGION 1..7: note = Description of Artificial Sequence: Synthetic peptide
QVPTRSD

SEQ ID NO: 32883 - protein, 7 aa, synthetic construct
  REGION 1..7: note = Description of Artificial Sequence: Synthetic peptide
PEPAARN

SEQ ID NO: 32884 - protein, 7 aa, synthetic construct
  REGION 1..7: note = Description of Artificial Sequence: Synthetic peptide
PSSTPKL

SEQ ID NO: 32885 - protein, 7 aa, synthetic construct
  REGION 1..7: note = Description of Artificial Sequence: Synthetic peptide
HDSRSNA

SEQ ID NO: 32886 - protein, 7 aa, synthetic construct
  REGION 1..7: note = Description of Artificial Sequence: Synthetic peptide
DGVGMYA

SEQ ID NO: 32887 - protein, 7 aa, synthetic construct
  REGION 1..7: note = Description of Artificial Sequence: Synthetic peptide
TRKTPTT

SEQ ID NO: 32888 - protein, 7 aa, synthetic construct
  REGION 1..7: note = Description of Artificial Sequence: Synthetic peptide
VNTNLVG

SEQ ID NO: 32889 - protein, 7 aa, synthetic construct
  REGION 1..7: note = Description of Artificial Sequence: Synthetic peptide
YTASRME

SEQ ID NO: 32890 - protein, 7 aa, synthetic construct
  REGION 1..7: note = Description of Artificial Sequence: Synthetic peptide
GYTVGTN

SEQ ID NO: 32891 - protein, 7 aa, synthetic construct
  REGION 1..7: note = Description of Artificial Sequence: Synthetic peptide
SNATRAI

SEQ ID NO: 32892 - protein, 7 aa, synthetic construct
  REGION 1..7: note = Description of Artificial Sequence: Synthetic peptide
RPATSTP

SEQ ID NO: 32893 - protein, 7 aa, synthetic construct
  REGION 1..7: note = Description of Artificial Sequence: Synthetic peptide
YFNSHSN

SEQ ID NO: 32894 - protein, 7 aa, synthetic construct
  REGION 1..7: note = Description of Artificial Sequence: Synthetic peptide
KIGSMSG

SEQ ID NO: 32895 - protein, 7 aa, synthetic construct
  REGION 1..7: note = Description of Artificial Sequence: Synthetic peptide
IRNDLSN

SEQ ID NO: 32896 - protein, 7 aa, synthetic construct
  REGION 1..7: note = Description of Artificial Sequence: Synthetic peptide
PSNKAGT

SEQ ID NO: 32897 - protein, 7 aa, synthetic construct
  REGION 1..7: note = Description of Artificial Sequence: Synthetic peptide
GSLTPKA

SEQ ID NO: 32898 - protein, 7 aa, synthetic construct
  REGION 1..7: note = Description of Artificial Sequence: Synthetic peptide
PVTLRGI

SEQ ID NO: 32899 - protein, 7 aa, synthetic construct
  REGION 1..7: note = Description of Artificial Sequence: Synthetic peptide
MSTHSSG

SEQ ID NO: 32900 - protein, 7 aa, synthetic construct
  REGION 1..7: note = Description of Artificial Sequence: Synthetic peptide
VPHGATS

SEQ ID NO: 32901 - protein, 7 aa, synthetic construct
  REGION 1..7: note = Description of Artificial Sequence: Synthetic peptide
QVPVRPV

SEQ ID NO: 32902 - protein, 7 aa, synthetic construct
  REGION 1..7: note = Description of Artificial Sequence: Synthetic peptide
SARDRAS

SEQ ID NO: 32903 - protein, 7 aa, synthetic construct
  REGION 1..7: note = Description of Artificial Sequence: Synthetic peptide
SNMPGMV

SEQ ID NO: 32904 - protein, 7 aa, synthetic construct
  REGION 1..7: note = Description of Artificial Sequence: Synthetic peptide
NGATKNS

SEQ ID NO: 32905 - protein, 7 aa, synthetic construct
  REGION 1..7: note = Description of Artificial Sequence: Synthetic peptide
MNTSINN

SEQ ID NO: 32906 - protein, 7 aa, synthetic construct
  REGION 1..7: note = Description of Artificial Sequence: Synthetic peptide
ILDSHNR

SEQ ID NO: 32907 - protein, 7 aa, synthetic construct
  REGION 1..7: note = Description of Artificial Sequence: Synthetic peptide
DLQTSAK

SEQ ID NO: 32908 - protein, 7 aa, synthetic construct
  REGION 1..7: note = Description of Artificial Sequence: Synthetic peptide
DQVSHKL

SEQ ID NO: 32909 - protein, 7 aa, synthetic construct
  REGION 1..7: note = Description of Artificial Sequence: Synthetic peptide
TASGNLS

SEQ ID NO: 32910 - protein, 7 aa, synthetic construct
  REGION 1..7: note = Description of Artificial Sequence: Synthetic peptide
ERFTSSS

SEQ ID NO: 32911 - protein, 7 aa, synthetic construct
  REGION 1..7: note = Description of Artificial Sequence: Synthetic peptide
TLPRVPA

SEQ ID NO: 32912 - protein, 7 aa, synthetic construct
  REGION 1..7: note = Description of Artificial Sequence: Synthetic peptide
EPLKNNP

SEQ ID NO: 32913 - protein, 7 aa, synthetic construct
  REGION 1..7: note = Description of Artificial Sequence: Synthetic peptide
HTDTSAV

SEQ ID NO: 32914 - protein, 7 aa, synthetic construct
  REGION 1..7: note = Description of Artificial Sequence: Synthetic peptide
VVPERSK

SEQ ID NO: 32915 - protein, 7 aa, synthetic construct
  REGION 1..7: note = Description of Artificial Sequence: Synthetic peptide
THMRTQS

SEQ ID NO: 32916 - protein, 7 aa, synthetic construct
  REGION 1..7: note = Description of Artificial Sequence: Synthetic peptide
TRGSPLM

SEQ ID NO: 32917 - protein, 7 aa, synthetic construct
  REGION 1..7: note = Description of Artificial Sequence: Synthetic peptide
TGTKSDN

SEQ ID NO: 32918 - protein, 7 aa, synthetic construct
  REGION 1..7: note = Description of Artificial Sequence: Synthetic peptide
GPDTHSQ

SEQ ID NO: 32919 - protein, 7 aa, synthetic construct
  REGION 1..7: note = Description of Artificial Sequence: Synthetic peptide
NGPGQNQ

SEQ ID NO: 32920 - protein, 7 aa, synthetic construct
  REGION 1..7: note = Description of Artificial Sequence: Synthetic peptide
HYNQTGL

SEQ ID NO: 32921 - protein, 7 aa, synthetic construct
  REGION 1..7: note = Description of Artificial Sequence: Synthetic peptide
SHQTPGY

SEQ ID NO: 32922 - protein, 7 aa, synthetic construct
  REGION 1..7: note = Description of Artificial Sequence: Synthetic peptide
NGTRQNQ

SEQ ID NO: 32923 - protein, 7 aa, synthetic construct
  REGION 1..7: note = Description of Artificial Sequence: Synthetic peptide
FSSKTSP

SEQ ID NO: 32924 - protein, 7 aa, synthetic construct
  REGION 1..7: note = Description of Artificial Sequence: Synthetic peptide
SMGNSIS

SEQ ID NO: 32925 - protein, 7 aa, synthetic construct
  REGION 1..7: note = Description of Artificial Sequence: Synthetic peptide
FNEQRVS

SEQ ID NO: 32926 - protein, 7 aa, synthetic construct
  REGION 1..7: note = Description of Artificial Sequence: Synthetic peptide
DIPAKTA

SEQ ID NO: 32927 - protein, 7 aa, synthetic construct
  REGION 1..7: note = Description of Artificial Sequence: Synthetic peptide
SHTGNMV

SEQ ID NO: 32928 - protein, 7 aa, synthetic construct
  REGION 1..7: note = Description of Artificial Sequence: Synthetic peptide
SNVAKRT

SEQ ID NO: 32929 - protein, 7 aa, synthetic construct
  REGION 1..7: note = Description of Artificial Sequence: Synthetic peptide
SNATRSS

SEQ ID NO: 32930 - protein, 7 aa, synthetic construct
  REGION 1..7: note = Description of Artificial Sequence: Synthetic peptide
LGETSMR

SEQ ID NO: 32931 - protein, 7 aa, synthetic construct
  REGION 1..7: note = Description of Artificial Sequence: Synthetic peptide
EGNRSNM

SEQ ID NO: 32932 - protein, 7 aa, synthetic construct
  REGION 1..7: note = Description of Artificial Sequence: Synthetic peptide
PADRTHI

SEQ ID NO: 32933 - protein, 7 aa, synthetic construct
  REGION 1..7: note = Description of Artificial Sequence: Synthetic peptide
TPAGPNK

SEQ ID NO: 32934 - protein, 7 aa, synthetic construct
  REGION 1..7: note = Description of Artificial Sequence: Synthetic peptide
QVSPLIL

SEQ ID NO: 32935 - protein, 7 aa, synthetic construct
  REGION 1..7: note = Description of Artificial Sequence: Synthetic peptide
SLSTGSG

SEQ ID NO: 32936 - protein, 7 aa, synthetic construct
  REGION 1..7: note = Description of Artificial Sequence: Synthetic peptide
SASNTSV

SEQ ID NO: 32937 - protein, 7 aa, synthetic construct
  REGION 1..7: note = Description of Artificial Sequence: Synthetic peptide
RDTTSTD

SEQ ID NO: 32938 - protein, 7 aa, synthetic construct
  REGION 1..7: note = Description of Artificial Sequence: Synthetic peptide
PSNSGNN

SEQ ID NO: 32939 - protein, 7 aa, synthetic construct
  REGION 1..7: note = Description of Artificial Sequence: Synthetic peptide
PVGSVRG

SEQ ID NO: 32940 - protein, 7 aa, synthetic construct
  REGION 1..7: note = Description of Artificial Sequence: Synthetic peptide
ARADSNF

SEQ ID NO: 32941 - protein, 7 aa, synthetic construct
  REGION 1..7: note = Description of Artificial Sequence: Synthetic peptide
DGKNNNV

SEQ ID NO: 32942 - protein, 7 aa, synthetic construct
  REGION 1..7: note = Description of Artificial Sequence: Synthetic peptide
KPATPNG

SEQ ID NO: 32943 - protein, 7 aa, synthetic construct
  REGION 1..7: note = Description of Artificial Sequence: Synthetic peptide
ESNSSRG

SEQ ID NO: 32944 - protein, 7 aa, synthetic construct
  REGION 1..7: note = Description of Artificial Sequence: Synthetic peptide
EMNHSPC

SEQ ID NO: 32945 - protein, 7 aa, synthetic construct
  REGION 1..7: note = Description of Artificial Sequence: Synthetic peptide
TAEANSS

SEQ ID NO: 32946 - protein, 7 aa, synthetic construct
  REGION 1..7: note = Description of Artificial Sequence: Synthetic peptide
PGTGSNH

SEQ ID NO: 32947 - protein, 7 aa, synthetic construct
  REGION 1..7: note = Description of Artificial Sequence: Synthetic peptide
ELMNKSK

SEQ ID NO: 32948 - protein, 7 aa, synthetic construct
  REGION 1..7: note = Description of Artificial Sequence: Synthetic peptide
KSAQGGN

SEQ ID NO: 32949 - protein, 7 aa, synthetic construct
  REGION 1..7: note = Description of Artificial Sequence: Synthetic peptide
TPGASLS

SEQ ID NO: 32950 - protein, 7 aa, synthetic construct
  REGION 1..7: note = Description of Artificial Sequence: Synthetic peptide
VIEPGST

SEQ ID NO: 32951 - protein, 7 aa, synthetic construct
  REGION 1..7: note = Description of Artificial Sequence: Synthetic peptide
GVKTNPL

SEQ ID NO: 32952 - protein, 7 aa, synthetic construct
  REGION 1..7: note = Description of Artificial Sequence: Synthetic peptide
LMGSPRG

SEQ ID NO: 32953 - protein, 7 aa, synthetic construct
  REGION 1..7: note = Description of Artificial Sequence: Synthetic peptide
ASSKGLT

SEQ ID NO: 32954 - protein, 7 aa, synthetic construct
  REGION 1..7: note = Description of Artificial Sequence: Synthetic peptide
GHAAGVS

SEQ ID NO: 32955 - protein, 7 aa, synthetic construct
  REGION 1..7: note = Description of Artificial Sequence: Synthetic peptide
VSMNTTR

SEQ ID NO: 32956 - protein, 7 aa, synthetic construct
  REGION 1..7: note = Description of Artificial Sequence: Synthetic peptide
SSPANMA

SEQ ID NO: 32957 - protein, 7 aa, synthetic construct
  REGION 1..7: note = Description of Artificial Sequence: Synthetic peptide
SVEKAQS

SEQ ID NO: 32958 - protein, 7 aa, synthetic construct
  REGION 1..7: note = Description of Artificial Sequence: Synthetic peptide
VTLPPNA

SEQ ID NO: 32959 - protein, 7 aa, synthetic construct
  REGION 1..7: note = Description of Artificial Sequence: Synthetic peptide
PNGHEVL

SEQ ID NO: 32960 - protein, 7 aa, synthetic construct
  REGION 1..7: note = Description of Artificial Sequence: Synthetic peptide
TTDKSRL

SEQ ID NO: 32961 - protein, 7 aa, synthetic construct
  REGION 1..7: note = Description of Artificial Sequence: Synthetic peptide
PLNTHQS

SEQ ID NO: 32962 - protein, 7 aa, synthetic construct
  REGION 1..7: note = Description of Artificial Sequence: Synthetic peptide
FRQTSGN

SEQ ID NO: 32963 - protein, 7 aa, synthetic construct
  REGION 1..7: note = Description of Artificial Sequence: Synthetic peptide
VGEAGKA

SEQ ID NO: 32964 - protein, 7 aa, synthetic construct
  REGION 1..7: note = Description of Artificial Sequence: Synthetic peptide
GIDTKML

SEQ ID NO: 32965 - protein, 7 aa, synthetic construct
  REGION 1..7: note = Description of Artificial Sequence: Synthetic peptide
HGMEVAR

SEQ ID NO: 32966 - protein, 7 aa, synthetic construct
  REGION 1..7: note = Description of Artificial Sequence: Synthetic peptide
ALKSSNE

SEQ ID NO: 32967 - protein, 7 aa, synthetic construct
  REGION 1..7: note = Description of Artificial Sequence: Synthetic peptide
GPSTHSG

SEQ ID NO: 32968 - protein, 7 aa, synthetic construct
  REGION 1..7: note = Description of Artificial Sequence: Synthetic peptide
DAGAAPK

SEQ ID NO: 32969 - protein, 7 aa, synthetic construct
  REGION 1..7: note = Description of Artificial Sequence: Synthetic peptide
SRAPNTL

SEQ ID NO: 32970 - protein, 7 aa, synthetic construct
  REGION 1..7: note = Description of Artificial Sequence: Synthetic peptide
SDRSVDG

SEQ ID NO: 32971 - protein, 7 aa, synthetic construct
  REGION 1..7: note = Description of Artificial Sequence: Synthetic peptide
QEARVYS

SEQ ID NO: 32972 - protein, 7 aa, synthetic construct
  REGION 1..7: note = Description of Artificial Sequence: Synthetic peptide
TTTTRPS

SEQ ID NO: 32973 - protein, 7 aa, synthetic construct
  REGION 1..7: note = Description of Artificial Sequence: Synthetic peptide
KVSSATP

SEQ ID NO: 32974 - protein, 7 aa, synthetic construct
  REGION 1..7: note = Description of Artificial Sequence: Synthetic peptide
SGGDYAK

SEQ ID NO: 32975 - protein, 7 aa, synthetic construct
  REGION 1..7: note = Description of Artificial Sequence: Synthetic peptide
NSEARLS

SEQ ID NO: 32976 - protein, 7 aa, synthetic construct
  REGION 1..7: note = Description of Artificial Sequence: Synthetic peptide
AAHSTMN

SEQ ID NO: 32977 - protein, 7 aa, synthetic construct
  REGION 1..7: note = Description of Artificial Sequence: Synthetic peptide
PQTSPRT

SEQ ID NO: 32978 - protein, 7 aa, synthetic construct
  REGION 1..7: note = Description of Artificial Sequence: Synthetic peptide
DTNNRAN

SEQ ID NO: 32979 - protein, 7 aa, synthetic construct
  REGION 1..7: note = Description of Artificial Sequence: Synthetic peptide
STMHKNV

SEQ ID NO: 32980 - protein, 7 aa, synthetic construct
  REGION 1..7: note = Description of Artificial Sequence: Synthetic peptide
PGASGKV

SEQ ID NO: 32981 - protein, 7 aa, synthetic construct
  REGION 1..7: note = Description of Artificial Sequence: Synthetic peptide
SIQSAAA

SEQ ID NO: 32982 - protein, 7 aa, synthetic construct
  REGION 1..7: note = Description of Artificial Sequence: Synthetic peptide
HSSHSPS

SEQ ID NO: 32983 - protein, 7 aa, synthetic construct
  REGION 1..7: note = Description of Artificial Sequence: Synthetic peptide
EYPQQAK

SEQ ID NO: 32984 - protein, 7 aa, synthetic construct
  REGION 1..7: note = Description of Artificial Sequence: Synthetic peptide
SKPANNV

SEQ ID NO: 32985 - protein, 7 aa, synthetic construct
  REGION 1..7: note = Description of Artificial Sequence: Synthetic peptide
QKTTIDG

SEQ ID NO: 32986 - protein, 7 aa, synthetic construct
  REGION 1..7: note = Description of Artificial Sequence: Synthetic peptide
PITRSLL

SEQ ID NO: 32987 - protein, 7 aa, synthetic construct
  REGION 1..7: note = Description of Artificial Sequence: Synthetic peptide
PTGEKRL

SEQ ID NO: 32988 - protein, 7 aa, synthetic construct
  REGION 1..7: note = Description of Artificial Sequence: Synthetic peptide
APLQSNL

SEQ ID NO: 32989 - protein, 7 aa, synthetic construct
  REGION 1..7: note = Description of Artificial Sequence: Synthetic peptide
MNRTGIK

SEQ ID NO: 32990 - protein, 7 aa, synthetic construct
  REGION 1..7: note = Description of Artificial Sequence: Synthetic peptide
HYGPDSK

SEQ ID NO: 32991 - protein, 7 aa, synthetic construct
  REGION 1..7: note = Description of Artificial Sequence: Synthetic peptide
HANSPAT

SEQ ID NO: 32992 - protein, 7 aa, synthetic construct
  REGION 1..7: note = Description of Artificial Sequence: Synthetic peptide
NPSMAMK

SEQ ID NO: 32993 - protein, 7 aa, synthetic construct
  REGION 1..7: note = Description of Artificial Sequence: Synthetic peptide
EIRAHTT

SEQ ID NO: 32994 - protein, 7 aa, synthetic construct
  REGION 1..7: note = Description of Artificial Sequence: Synthetic peptide
SPGNKLL

SEQ ID NO: 32995 - protein, 7 aa, synthetic construct
  REGION 1..7: note = Description of Artificial Sequence: Synthetic peptide
RERTGFN

SEQ ID NO: 32996 - protein, 7 aa, synthetic construct
  REGION 1..7: note = Description of Artificial Sequence: Synthetic peptide
NPAHGLN

SEQ ID NO: 32997 - protein, 7 aa, synthetic construct
  REGION 1..7: note = Description of Artificial Sequence: Synthetic peptide
MLPSVSG

SEQ ID NO: 32998 - protein, 7 aa, synthetic construct
  REGION 1..7: note = Description of Artificial Sequence: Synthetic peptide
KSVSSSG

SEQ ID NO: 32999 - protein, 7 aa, synthetic construct
  REGION 1..7: note = Description of Artificial Sequence: Synthetic peptide
ACNTSRC

SEQ ID NO: 33000 - protein, 7 aa, synthetic construct
  REGION 1..7: note = Description of Artificial Sequence: Synthetic peptide
EPLSKQS

SEQ ID NO: 33001 - protein, 7 aa, synthetic construct
  REGION 1..7: note = Description of Artificial Sequence: Synthetic peptide
NSNNAMA

SEQ ID NO: 33002 - protein, 7 aa, synthetic construct
  REGION 1..7: note = Description of Artificial Sequence: Synthetic peptide
SNSHKIY

SEQ ID NO: 33003 - protein, 7 aa, synthetic construct
  REGION 1..7: note = Description of Artificial Sequence: Synthetic peptide
TNPTGYR

SEQ ID NO: 33004 - protein, 7 aa, synthetic construct
  REGION 1..7: note = Description of Artificial Sequence: Synthetic peptide
GLVPNLI

SEQ ID NO: 33005 - protein, 7 aa, synthetic construct
  REGION 1..7: note = Description of Artificial Sequence: Synthetic peptide
GTAGRFN

SEQ ID NO: 33006 - protein, 7 aa, synthetic construct
  REGION 1..7: note = Description of Artificial Sequence: Synthetic peptide
NRNGFNN

SEQ ID NO: 33007 - protein, 7 aa, synthetic construct
  REGION 1..7: note = Description of Artificial Sequence: Synthetic peptide
AAAVKGG

SEQ ID NO: 33008 - protein, 7 aa, synthetic construct
  REGION 1..7: note = Description of Artificial Sequence: Synthetic peptide
LMDHRTR

SEQ ID NO: 33009 - protein, 7 aa, synthetic construct
  REGION 1..7: note = Description of Artificial Sequence: Synthetic peptide
VNANKAC

SEQ ID NO: 33010 - protein, 7 aa, synthetic construct
  REGION 1..7: note = Description of Artificial Sequence: Synthetic peptide
SHSVTPG

SEQ ID NO: 33011 - protein, 7 aa, synthetic construct
  REGION 1..7: note = Description of Artificial Sequence: Synthetic peptide
SLLGGLG

SEQ ID NO: 33012 - protein, 7 aa, synthetic construct
  REGION 1..7: note = Description of Artificial Sequence: Synthetic peptide
GSHTNTS

SEQ ID NO: 33013 - protein, 7 aa, synthetic construct
  REGION 1..7: note = Description of Artificial Sequence: Synthetic peptide
GPNPING

SEQ ID NO: 33014 - protein, 7 aa, synthetic construct
  REGION 1..7: note = Description of Artificial Sequence: Synthetic peptide
TGRGSDV

SEQ ID NO: 33015 - protein, 7 aa, synthetic construct
  REGION 1..7: note = Description of Artificial Sequence: Synthetic peptide
GLQSKQL

SEQ ID NO: 33016 - protein, 7 aa, synthetic construct
  REGION 1..7: note = Description of Artificial Sequence: Synthetic peptide
SPVKGSV

SEQ ID NO: 33017 - protein, 7 aa, synthetic construct
  REGION 1..7: note = Description of Artificial Sequence: Synthetic peptide
DPLGKQG

SEQ ID NO: 33018 - protein, 7 aa, synthetic construct
  REGION 1..7: note = Description of Artificial Sequence: Synthetic peptide
LSSDKNV

SEQ ID NO: 33019 - protein, 7 aa, synthetic construct
  REGION 1..7: note = Description of Artificial Sequence: Synthetic peptide
HDTHKFL

SEQ ID NO: 33020 - protein, 7 aa, synthetic construct
  REGION 1..7: note = Description of Artificial Sequence: Synthetic peptide
NLSHSAG

SEQ ID NO: 33021 - protein, 7 aa, synthetic construct
  REGION 1..7: note = Description of Artificial Sequence: Synthetic peptide
YSGGTQQ

SEQ ID NO: 33022 - protein, 7 aa, synthetic construct
  REGION 1..7: note = Description of Artificial Sequence: Synthetic peptide
SLPGESK

SEQ ID NO: 33023 - protein, 7 aa, synthetic construct
  REGION 1..7: note = Description of Artificial Sequence: Synthetic peptide
SRNPNMI

SEQ ID NO: 33024 - protein, 7 aa, synthetic construct
  REGION 1..7: note = Description of Artificial Sequence: Synthetic peptide
NISSKVA

SEQ ID NO: 33025 - protein, 7 aa, synthetic construct
  REGION 1..7: note = Description of Artificial Sequence: Synthetic peptide
SNPSGFS

SEQ ID NO: 33026 - protein, 7 aa, synthetic construct
  REGION 1..7: note = Description of Artificial Sequence: Synthetic peptide
RRIDTIP

SEQ ID NO: 33027 - protein, 7 aa, synthetic construct
  REGION 1..7: note = Description of Artificial Sequence: Synthetic peptide
HVSHGPG

SEQ ID NO: 33028 - protein, 7 aa, synthetic construct
  REGION 1..7: note = Description of Artificial Sequence: Synthetic peptide
ASSPQEK

SEQ ID NO: 33029 - protein, 7 aa, synthetic construct
  REGION 1..7: note = Description of Artificial Sequence: Synthetic peptide
QLNEEHG

SEQ ID NO: 33030 - protein, 7 aa, synthetic construct
  REGION 1..7: note = Description of Artificial Sequence: Synthetic peptide
ETPNRSQ

SEQ ID NO: 33031 - protein, 7 aa, synthetic construct
  REGION 1..7: note = Description of Artificial Sequence: Synthetic peptide
KMTPQST

SEQ ID NO: 33032 - protein, 7 aa, synthetic construct
  REGION 1..7: note = Description of Artificial Sequence: Synthetic peptide
QTSSHAY

SEQ ID NO: 33033 - protein, 7 aa, synthetic construct
  REGION 1..7: note = Description of Artificial Sequence: Synthetic peptide
RMQPSGN

SEQ ID NO: 33034 - protein, 7 aa, synthetic construct
  REGION 1..7: note = Description of Artificial Sequence: Synthetic peptide
PRTNVMP

SEQ ID NO: 33035 - protein, 7 aa, synthetic construct
  REGION 1..7: note = Description of Artificial Sequence: Synthetic peptide
ATTKAGI

SEQ ID NO: 33036 - protein, 7 aa, synthetic construct
  REGION 1..7: note = Description of Artificial Sequence: Synthetic peptide
KNSSGST

SEQ ID NO: 33037 - protein, 7 aa, synthetic construct
  REGION 1..7: note = Description of Artificial Sequence: Synthetic peptide
SASPSIK

SEQ ID NO: 33038 - protein, 7 aa, synthetic construct
  REGION 1..7: note = Description of Artificial Sequence: Synthetic peptide
MPLKPHL

SEQ ID NO: 33039 - protein, 7 aa, synthetic construct
  REGION 1..7: note = Description of Artificial Sequence: Synthetic peptide
QSKGGSN

SEQ ID NO: 33040 - protein, 7 aa, synthetic construct
  REGION 1..7: note = Description of Artificial Sequence: Synthetic peptide
NNLAGSK

SEQ ID NO: 33041 - protein, 7 aa, synthetic construct
  REGION 1..7: note = Description of Artificial Sequence: Synthetic peptide
QSSQSGP

SEQ ID NO: 33042 - protein, 7 aa, synthetic construct
  REGION 1..7: note = Description of Artificial Sequence: Synthetic peptide
GMGGLKN

SEQ ID NO: 33043 - protein, 7 aa, synthetic construct
  REGION 1..7: note = Description of Artificial Sequence: Synthetic peptide
RSYEGMQ

SEQ ID NO: 33044 - protein, 7 aa, synthetic construct
  REGION 1..7: note = Description of Artificial Sequence: Synthetic peptide
NPYTANN

SEQ ID NO: 33045 - protein, 7 aa, synthetic construct
  REGION 1..7: note = Description of Artificial Sequence: Synthetic peptide
HSTPSTR

SEQ ID NO: 33046 - protein, 7 aa, synthetic construct
  REGION 1..7: note = Description of Artificial Sequence: Synthetic peptide
CIGNKTN

SEQ ID NO: 33047 - protein, 7 aa, synthetic construct
  REGION 1..7: note = Description of Artificial Sequence: Synthetic peptide
GVTGSRG

SEQ ID NO: 33048 - protein, 7 aa, synthetic construct
  REGION 1..7: note = Description of Artificial Sequence: Synthetic peptide
SPTRPMN

SEQ ID NO: 33049 - protein, 7 aa, synthetic construct
  REGION 1..7: note = Description of Artificial Sequence: Synthetic peptide
CPQRAST

SEQ ID NO: 33050 - protein, 7 aa, synthetic construct
  REGION 1..7: note = Description of Artificial Sequence: Synthetic peptide
PLQTSRT

SEQ ID NO: 33051 - protein, 7 aa, synthetic construct
  REGION 1..7: note = Description of Artificial Sequence: Synthetic peptide
DSRNNMT

SEQ ID NO: 33052 - protein, 7 aa, synthetic construct
  REGION 1..7: note = Description of Artificial Sequence: Synthetic peptide
RYDKQNS

SEQ ID NO: 33053 - protein, 7 aa, synthetic construct
  REGION 1..7: note = Description of Artificial Sequence: Synthetic peptide
NAGPNYD

SEQ ID NO: 33054 - protein, 7 aa, synthetic construct
  REGION 1..7: note = Description of Artificial Sequence: Synthetic peptide
IRSKGSA

SEQ ID NO: 33055 - protein, 7 aa, synthetic construct
  REGION 1..7: note = Description of Artificial Sequence: Synthetic peptide
DYDATSR

SEQ ID NO: 33056 - protein, 7 aa, synthetic construct
  REGION 1..7: note = Description of Artificial Sequence: Synthetic peptide
LSANPHN

SEQ ID NO: 33057 - protein, 7 aa, synthetic construct
  REGION 1..7: note = Description of Artificial Sequence: Synthetic peptide
VRIPKSN

SEQ ID NO: 33058 - protein, 7 aa, synthetic construct
  REGION 1..7: note = Description of Artificial Sequence: Synthetic peptide
IVSGKLT

SEQ ID NO: 33059 - protein, 7 aa, synthetic construct
  REGION 1..7: note = Description of Artificial Sequence: Synthetic peptide
IGNKQSQ

SEQ ID NO: 33060 - protein, 7 aa, synthetic construct
  REGION 1..7: note = Description of Artificial Sequence: Synthetic peptide
PYQSHSP

SEQ ID NO: 33061 - protein, 7 aa, synthetic construct
  REGION 1..7: note = Description of Artificial Sequence: Synthetic peptide
GSISTAH

SEQ ID NO: 33062 - protein, 7 aa, synthetic construct
  REGION 1..7: note = Description of Artificial Sequence: Synthetic peptide
ENNALSR

SEQ ID NO: 33063 - protein, 7 aa, synthetic construct
  REGION 1..7: note = Description of Artificial Sequence: Synthetic peptide
SQVSHSV

SEQ ID NO: 33064 - protein, 7 aa, synthetic construct
  REGION 1..7: note = Description of Artificial Sequence: Synthetic peptide
NYSGAHT

SEQ ID NO: 33065 - protein, 7 aa, synthetic construct
  REGION 1..7: note = Description of Artificial Sequence: Synthetic peptide
PVSTHSS

SEQ ID NO: 33066 - protein, 7 aa, synthetic construct
  REGION 1..7: note = Description of Artificial Sequence: Synthetic peptide
VHVTSQT

SEQ ID NO: 33067 - protein, 7 aa, synthetic construct
  REGION 1..7: note = Description of Artificial Sequence: Synthetic peptide
IRTNSTL

SEQ ID NO: 33068 - protein, 7 aa, synthetic construct
  REGION 1..7: note = Description of Artificial Sequence: Synthetic peptide
EARKVTS

SEQ ID NO: 33069 - protein, 7 aa, synthetic construct
  REGION 1..7: note = Description of Artificial Sequence: Synthetic peptide
NSVAGMG

SEQ ID NO: 33070 - protein, 7 aa, synthetic construct
  REGION 1..7: note = Description of Artificial Sequence: Synthetic peptide
RGNENIN

SEQ ID NO: 33071 - protein, 7 aa, synthetic construct
  REGION 1..7: note = Description of Artificial Sequence: Synthetic peptide
DPQVRAL

SEQ ID NO: 33072 - protein, 7 aa, synthetic construct
  REGION 1..7: note = Description of Artificial Sequence: Synthetic peptide
GITHGSH

SEQ ID NO: 33073 - protein, 7 aa, synthetic construct
  REGION 1..7: note = Description of Artificial Sequence: Synthetic peptide
GQAVNTA

SEQ ID NO: 33074 - protein, 7 aa, synthetic construct
  REGION 1..7: note = Description of Artificial Sequence: Synthetic peptide
TTYGGNR

SEQ ID NO: 33075 - protein, 7 aa, synthetic construct
  REGION 1..7: note = Description of Artificial Sequence: Synthetic peptide
NNGASVV

SEQ ID NO: 33076 - protein, 7 aa, synthetic construct
  REGION 1..7: note = Description of Artificial Sequence: Synthetic peptide
PIGSQHI

SEQ ID NO: 33077 - protein, 7 aa, synthetic construct
  REGION 1..7: note = Description of Artificial Sequence: Synthetic peptide
SVQKSVN

SEQ ID NO: 33078 - protein, 7 aa, synthetic construct
  REGION 1..7: note = Description of Artificial Sequence: Synthetic peptide
EPVPKTR

SEQ ID NO: 33079 - protein, 7 aa, synthetic construct
  REGION 1..7: note = Description of Artificial Sequence: Synthetic peptide
GTSNRYT

SEQ ID NO: 33080 - protein, 7 aa, synthetic construct
  REGION 1..7: note = Description of Artificial Sequence: Synthetic peptide
RNNPTTV

SEQ ID NO: 33081 - protein, 7 aa, synthetic construct
  REGION 1..7: note = Description of Artificial Sequence: Synthetic peptide
DPATRKS

SEQ ID NO: 33082 - protein, 7 aa, synthetic construct
  REGION 1..7: note = Description of Artificial Sequence: Synthetic peptide
PMSHVSG

SEQ ID NO: 33083 - protein, 7 aa, synthetic construct
  REGION 1..7: note = Description of Artificial Sequence: Synthetic peptide
TNIQASK

SEQ ID NO: 33084 - protein, 7 aa, synthetic construct
  REGION 1..7: note = Description of Artificial Sequence: Synthetic peptide
KLVNSNG

SEQ ID NO: 33085 - protein, 7 aa, synthetic construct
  REGION 1..7: note = Description of Artificial Sequence: Synthetic peptide
FTYAEGN

SEQ ID NO: 33086 - protein, 7 aa, synthetic construct
  REGION 1..7: note = Description of Artificial Sequence: Synthetic peptide
WQEERGQ

SEQ ID NO: 33087 - protein, 7 aa, synthetic construct
  REGION 1..7: note = Description of Artificial Sequence: Synthetic peptide
YGNPRQA

SEQ ID NO: 33088 - protein, 7 aa, synthetic construct
  REGION 1..7: note = Description of Artificial Sequence: Synthetic peptide
QSTGRER

SEQ ID NO: 33089 - protein, 7 aa, synthetic construct
  REGION 1..7: note = Description of Artificial Sequence: Synthetic peptide
NGVQQPK

SEQ ID NO: 33090 - protein, 7 aa, synthetic construct
  REGION 1..7: note = Description of Artificial Sequence: Synthetic peptide
QYNQAGL

SEQ ID NO: 33091 - protein, 7 aa, synthetic construct
  REGION 1..7: note = Description of Artificial Sequence: Synthetic peptide
PLNARGS

SEQ ID NO: 33092 - protein, 7 aa, synthetic construct
  REGION 1..7: note = Description of Artificial Sequence: Synthetic peptide
HAKSSSM

SEQ ID NO: 33093 - protein, 7 aa, synthetic construct
  REGION 1..7: note = Description of Artificial Sequence: Synthetic peptide
EHETSSR

SEQ ID NO: 33094 - protein, 7 aa, synthetic construct
  REGION 1..7: note = Description of Artificial Sequence: Synthetic peptide
QKTQTTS

SEQ ID NO: 33095 - protein, 7 aa, synthetic construct
  REGION 1..7: note = Description of Artificial Sequence: Synthetic peptide
QGAADHS

SEQ ID NO: 33096 - protein, 7 aa, synthetic construct
  REGION 1..7: note = Description of Artificial Sequence: Synthetic peptide
IASSGMH

SEQ ID NO: 33097 - protein, 7 aa, synthetic construct
  REGION 1..7: note = Description of Artificial Sequence: Synthetic peptide
SYPSQLN

SEQ ID NO: 33098 - protein, 7 aa, synthetic construct
  REGION 1..7: note = Description of Artificial Sequence: Synthetic peptide
VRSNVSG

SEQ ID NO: 33099 - protein, 7 aa, synthetic construct
  REGION 1..7: note = Description of Artificial Sequence: Synthetic peptide
PGTKQSS

SEQ ID NO: 33100 - protein, 7 aa, synthetic construct
  REGION 1..7: note = Description of Artificial Sequence: Synthetic peptide
THSKSFV

SEQ ID NO: 33101 - protein, 7 aa, synthetic construct
  REGION 1..7: note = Description of Artificial Sequence: Synthetic peptide
RGTGIGS

SEQ ID NO: 33102 - protein, 7 aa, synthetic construct
  REGION 1..7: note = Description of Artificial Sequence: Synthetic peptide
PSSPNSI

SEQ ID NO: 33103 - protein, 7 aa, synthetic construct
  REGION 1..7: note = Description of Artificial Sequence: Synthetic peptide
RATEGVF

SEQ ID NO: 33104 - protein, 7 aa, synthetic construct
  REGION 1..7: note = Description of Artificial Sequence: Synthetic peptide
PILDRKS

SEQ ID NO: 33105 - protein, 7 aa, synthetic construct
  REGION 1..7: note = Description of Artificial Sequence: Synthetic peptide
DSIGSSK

SEQ ID NO: 33106 - protein, 7 aa, synthetic construct
  REGION 1..7: note = Description of Artificial Sequence: Synthetic peptide
MSSERPG

SEQ ID NO: 33107 - protein, 7 aa, synthetic construct
  REGION 1..7: note = Description of Artificial Sequence: Synthetic peptide
KENPVRS

SEQ ID NO: 33108 - protein, 7 aa, synthetic construct
  REGION 1..7: note = Description of Artificial Sequence: Synthetic peptide
YSGPDLR

SEQ ID NO: 33109 - protein, 7 aa, synthetic construct
  REGION 1..7: note = Description of Artificial Sequence: Synthetic peptide
YRVTQSS

SEQ ID NO: 33110 - protein, 7 aa, synthetic construct
  REGION 1..7: note = Description of Artificial Sequence: Synthetic peptide
STSSSAS

SEQ ID NO: 33111 - protein, 7 aa, synthetic construct
  REGION 1..7: note = Description of Artificial Sequence: Synthetic peptide
RQYTGDS

SEQ ID NO: 33112 - protein, 7 aa, synthetic construct
  REGION 1..7: note = Description of Artificial Sequence: Synthetic peptide
RELKNSS

SEQ ID NO: 33113 - protein, 7 aa, synthetic construct
  REGION 1..7: note = Description of Artificial Sequence: Synthetic peptide
GTGTTFR

SEQ ID NO: 33114 - protein, 7 aa, synthetic construct
  REGION 1..7: note = Description of Artificial Sequence: Synthetic peptide
LMPSSSS

SEQ ID NO: 33115 - protein, 7 aa, synthetic construct
  REGION 1..7: note = Description of Artificial Sequence: Synthetic peptide
PDVKVTR

SEQ ID NO: 33116 - protein, 7 aa, synthetic construct
  REGION 1..7: note = Description of Artificial Sequence: Synthetic peptide
VASSAHV

SEQ ID NO: 33117 - protein, 7 aa, synthetic construct
  REGION 1..7: note = Description of Artificial Sequence: Synthetic peptide
GKTNVSS

SEQ ID NO: 33118 - protein, 7 aa, synthetic construct
  REGION 1..7: note = Description of Artificial Sequence: Synthetic peptide
FVSGKVQ

SEQ ID NO: 33119 - protein, 7 aa, synthetic construct
  REGION 1..7: note = Description of Artificial Sequence: Synthetic peptide
NSRISPS

SEQ ID NO: 33120 - protein, 7 aa, synthetic construct
  REGION 1..7: note = Description of Artificial Sequence: Synthetic peptide
TSSPQPS

SEQ ID NO: 33121 - protein, 7 aa, synthetic construct
  REGION 1..7: note = Description of Artificial Sequence: Synthetic peptide
GTNTGIV

SEQ ID NO: 33122 - protein, 7 aa, synthetic construct
  REGION 1..7: note = Description of Artificial Sequence: Synthetic peptide
STTNSKN

SEQ ID NO: 33123 - protein, 7 aa, synthetic construct
  REGION 1..7: note = Description of Artificial Sequence: Synthetic peptide
RSLSTEN

SEQ ID NO: 33124 - protein, 7 aa, synthetic construct
  REGION 1..7: note = Description of Artificial Sequence: Synthetic peptide
LRPANTI

SEQ ID NO: 33125 - protein, 7 aa, synthetic construct
  REGION 1..7: note = Description of Artificial Sequence: Synthetic peptide
PQESRGM

SEQ ID NO: 33126 - protein, 7 aa, synthetic construct
  REGION 1..7: note = Description of Artificial Sequence: Synthetic peptide
GDKGLQR

SEQ ID NO: 33127 - protein, 7 aa, synthetic construct
  REGION 1..7: note = Description of Artificial Sequence: Synthetic peptide
SNSRQAD

SEQ ID NO: 33128 - protein, 7 aa, synthetic construct
  REGION 1..7: note = Description of Artificial Sequence: Synthetic peptide
DVNPSAK

SEQ ID NO: 33129 - protein, 7 aa, synthetic construct
  REGION 1..7: note = Description of Artificial Sequence: Synthetic peptide
RSPAYQD

SEQ ID NO: 33130 - protein, 7 aa, synthetic construct
  REGION 1..7: note = Description of Artificial Sequence: Synthetic peptide
WTVSRSG

SEQ ID NO: 33131 - protein, 7 aa, synthetic construct
  REGION 1..7: note = Description of Artificial Sequence: Synthetic peptide
VSDNTYK

SEQ ID NO: 33132 - protein, 7 aa, synthetic construct
  REGION 1..7: note = Description of Artificial Sequence: Synthetic peptide
DRKHTST

SEQ ID NO: 33133 - protein, 7 aa, synthetic construct
  REGION 1..7: note = Description of Artificial Sequence: Synthetic peptide
GTTNSRN

SEQ ID NO: 33134 - protein, 7 aa, synthetic construct
  REGION 1..7: note = Description of Artificial Sequence: Synthetic peptide
GTSTSLR

SEQ ID NO: 33135 - protein, 7 aa, synthetic construct
  REGION 1..7: note = Description of Artificial Sequence: Synthetic peptide
IIQNGQG

SEQ ID NO: 33136 - protein, 7 aa, synthetic construct
  REGION 1..7: note = Description of Artificial Sequence: Synthetic peptide
SDSRNPV

SEQ ID NO: 33137 - protein, 7 aa, synthetic construct
  REGION 1..7: note = Description of Artificial Sequence: Synthetic peptide
TGSGSNH

SEQ ID NO: 33138 - protein, 7 aa, synthetic construct
  REGION 1..7: note = Description of Artificial Sequence: Synthetic peptide
SNETKSS

SEQ ID NO: 33139 - protein, 7 aa, synthetic construct
  REGION 1..7: note = Description of Artificial Sequence: Synthetic peptide
ATMRSNE

SEQ ID NO: 33140 - protein, 7 aa, synthetic construct
  REGION 1..7: note = Description of Artificial Sequence: Synthetic peptide
QNTPKST

SEQ ID NO: 33141 - protein, 7 aa, synthetic construct
  REGION 1..7: note = Description of Artificial Sequence: Synthetic peptide
RSSGGLT

SEQ ID NO: 33142 - protein, 7 aa, synthetic construct
  REGION 1..7: note = Description of Artificial Sequence: Synthetic peptide
ATVQSAT

SEQ ID NO: 33143 - protein, 7 aa, synthetic construct
  REGION 1..7: note = Description of Artificial Sequence: Synthetic peptide
TPTPVNQ

SEQ ID NO: 33144 - protein, 7 aa, synthetic construct
  REGION 1..7: note = Description of Artificial Sequence: Synthetic peptide
SSDLGKR

SEQ ID NO: 33145 - protein, 7 aa, synthetic construct
  REGION 1..7: note = Description of Artificial Sequence: Synthetic peptide
YGRDKFS

SEQ ID NO: 33146 - protein, 7 aa, synthetic construct
  REGION 1..7: note = Description of Artificial Sequence: Synthetic peptide
TEQVGTR

SEQ ID NO: 33147 - protein, 7 aa, synthetic construct
  REGION 1..7: note = Description of Artificial Sequence: Synthetic peptide
STTPGLK

SEQ ID NO: 33148 - protein, 7 aa, synthetic construct
  REGION 1..7: note = Description of Artificial Sequence: Synthetic peptide
SFTGNTV

SEQ ID NO: 33149 - protein, 7 aa, synthetic construct
  REGION 1..7: note = Description of Artificial Sequence: Synthetic peptide
CAGTSSV

SEQ ID NO: 33150 - protein, 7 aa, synthetic construct
  REGION 1..7: note = Description of Artificial Sequence: Synthetic peptide
HLAYDNN

SEQ ID NO: 33151 - protein, 7 aa, synthetic construct
  REGION 1..7: note = Description of Artificial Sequence: Synthetic peptide
NGSEQNQ

SEQ ID NO: 33152 - protein, 7 aa, synthetic construct
  REGION 1..7: note = Description of Artificial Sequence: Synthetic peptide
TSRVGQV

SEQ ID NO: 33153 - protein, 7 aa, synthetic construct
  REGION 1..7: note = Description of Artificial Sequence: Synthetic peptide
NYDSLKK

SEQ ID NO: 33154 - protein, 7 aa, synthetic construct
  REGION 1..7: note = Description of Artificial Sequence: Synthetic peptide
GVPAGHT

SEQ ID NO: 33155 - protein, 7 aa, synthetic construct
  REGION 1..7: note = Description of Artificial Sequence: Synthetic peptide
HYGETRN

SEQ ID NO: 33156 - protein, 7 aa, synthetic construct
  REGION 1..7: note = Description of Artificial Sequence: Synthetic peptide
IGGNKPL

SEQ ID NO: 33157 - protein, 7 aa, synthetic construct
  REGION 1..7: note = Description of Artificial Sequence: Synthetic peptide
PFGAGRP

SEQ ID NO: 33158 - protein, 7 aa, synthetic construct
  REGION 1..7: note = Description of Artificial Sequence: Synthetic peptide
MEIKPNR

SEQ ID NO: 33159 - protein, 7 aa, synthetic construct
  REGION 1..7: note = Description of Artificial Sequence: Synthetic peptide
TLENSRR

SEQ ID NO: 33160 - protein, 7 aa, synthetic construct
  REGION 1..7: note = Description of Artificial Sequence: Synthetic peptide
SGVKAFS

SEQ ID NO: 33161 - protein, 7 aa, synthetic construct
  REGION 1..7: note = Description of Artificial Sequence: Synthetic peptide
SRQATSS

SEQ ID NO: 33162 - protein, 7 aa, synthetic construct
  REGION 1..7: note = Description of Artificial Sequence: Synthetic peptide
TPQNSVK

SEQ ID NO: 33163 - protein, 7 aa, synthetic construct
  REGION 1..7: note = Description of Artificial Sequence: Synthetic peptide
RVDTITK

SEQ ID NO: 33164 - protein, 7 aa, synthetic construct
  REGION 1..7: note = Description of Artificial Sequence: Synthetic peptide
LASHKGQ

SEQ ID NO: 33165 - protein, 7 aa, synthetic construct
  REGION 1..7: note = Description of Artificial Sequence: Synthetic peptide
FSNNGSH

SEQ ID NO: 33166 - protein, 7 aa, synthetic construct
  REGION 1..7: note = Description of Artificial Sequence: Synthetic peptide
IKQSSSA

SEQ ID NO: 33167 - protein, 7 aa, synthetic construct
  REGION 1..7: note = Description of Artificial Sequence: Synthetic peptide
HGVNKTE

SEQ ID NO: 33168 - protein, 7 aa, synthetic construct
  REGION 1..7: note = Description of Artificial Sequence: Synthetic peptide
YDQTRTR

SEQ ID NO: 33169 - protein, 7 aa, synthetic construct
  REGION 1..7: note = Description of Artificial Sequence: Synthetic peptide
NTTGHAG

SEQ ID NO: 33170 - protein, 7 aa, synthetic construct
  REGION 1..7: note = Description of Artificial Sequence: Synthetic peptide
PNLSKSL

SEQ ID NO: 33171 - protein, 7 aa, synthetic construct
  REGION 1..7: note = Description of Artificial Sequence: Synthetic peptide
LPSGNTS

SEQ ID NO: 33172 - protein, 7 aa, synthetic construct
  REGION 1..7: note = Description of Artificial Sequence: Synthetic peptide
ALSSQKG

SEQ ID NO: 33173 - protein, 7 aa, synthetic construct
  REGION 1..7: note = Description of Artificial Sequence: Synthetic peptide
AMSEHLK

SEQ ID NO: 33174 - protein, 7 aa, synthetic construct
  REGION 1..7: note = Description of Artificial Sequence: Synthetic peptide
QDSSIRN

SEQ ID NO: 33175 - protein, 7 aa, synthetic construct
  REGION 1..7: note = Description of Artificial Sequence: Synthetic peptide
SLSLVKG

SEQ ID NO: 33176 - protein, 7 aa, synthetic construct
  REGION 1..7: note = Description of Artificial Sequence: Synthetic peptide
YPNSVPS

SEQ ID NO: 33177 - protein, 7 aa, synthetic construct
  REGION 1..7: note = Description of Artificial Sequence: Synthetic peptide
PRLLDDG

SEQ ID NO: 33178 - protein, 7 aa, synthetic construct
  REGION 1..7: note = Description of Artificial Sequence: Synthetic peptide
GPNPGNH

SEQ ID NO: 33179 - protein, 7 aa, synthetic construct
  REGION 1..7: note = Description of Artificial Sequence: Synthetic peptide
HSTTVAK

SEQ ID NO: 33180 - protein, 7 aa, synthetic construct
  REGION 1..7: note = Description of Artificial Sequence: Synthetic peptide
STDRSFN

SEQ ID NO: 33181 - protein, 7 aa, synthetic construct
  REGION 1..7: note = Description of Artificial Sequence: Synthetic peptide
PLPAHSP

SEQ ID NO: 33182 - protein, 7 aa, synthetic construct
  REGION 1..7: note = Description of Artificial Sequence: Synthetic peptide
MVSHTHG

SEQ ID NO: 33183 - protein, 7 aa, synthetic construct
  REGION 1..7: note = Description of Artificial Sequence: Synthetic peptide
PVSRLTG

SEQ ID NO: 33184 - protein, 7 aa, synthetic construct
  REGION 1..7: note = Description of Artificial Sequence: Synthetic peptide
IGTSINS

SEQ ID NO: 33185 - protein, 7 aa, synthetic construct
  REGION 1..7: note = Description of Artificial Sequence: Synthetic peptide
SPNKTSL

SEQ ID NO: 33186 - protein, 7 aa, synthetic construct
  REGION 1..7: note = Description of Artificial Sequence: Synthetic peptide
QTQGQLK

SEQ ID NO: 33187 - protein, 7 aa, synthetic construct
  REGION 1..7: note = Description of Artificial Sequence: Synthetic peptide
NLGTNVL

SEQ ID NO: 33188 - protein, 7 aa, synthetic construct
  REGION 1..7: note = Description of Artificial Sequence: Synthetic peptide
NREKLSY

SEQ ID NO: 33189 - protein, 7 aa, synthetic construct
  REGION 1..7: note = Description of Artificial Sequence: Synthetic peptide
AQSTYQS

SEQ ID NO: 33190 - protein, 7 aa, synthetic construct
  REGION 1..7: note = Description of Artificial Sequence: Synthetic peptide
NSSHNVS

SEQ ID NO: 33191 - protein, 7 aa, synthetic construct
  REGION 1..7: note = Description of Artificial Sequence: Synthetic peptide
SDKGNTR

SEQ ID NO: 33192 - protein, 7 aa, synthetic construct
  REGION 1..7: note = Description of Artificial Sequence: Synthetic peptide
MNTQGPI

SEQ ID NO: 33193 - protein, 7 aa, synthetic construct
  REGION 1..7: note = Description of Artificial Sequence: Synthetic peptide
GGQTARI

SEQ ID NO: 33194 - protein, 7 aa, synthetic construct
  REGION 1..7: note = Description of Artificial Sequence: Synthetic peptide
LHPKGQT

SEQ ID NO: 33195 - protein, 7 aa, synthetic construct
  REGION 1..7: note = Description of Artificial Sequence: Synthetic peptide
SYGKGSS

SEQ ID NO: 33196 - protein, 7 aa, synthetic construct
  REGION 1..7: note = Description of Artificial Sequence: Synthetic peptide
YGQTKTQ

SEQ ID NO: 33197 - protein, 7 aa, synthetic construct
  REGION 1..7: note = Description of Artificial Sequence: Synthetic peptide
MMVSSRS

SEQ ID NO: 33198 - protein, 7 aa, synthetic construct
  REGION 1..7: note = Description of Artificial Sequence: Synthetic peptide
LGTSQMK

SEQ ID NO: 33199 - protein, 7 aa, synthetic construct
  REGION 1..7: note = Description of Artificial Sequence: Synthetic peptide
AGHSGRD

SEQ ID NO: 33200 - protein, 7 aa, synthetic construct
  REGION 1..7: note = Description of Artificial Sequence: Synthetic peptide
HGSRSMS

SEQ ID NO: 33201 - protein, 7 aa, synthetic construct
  REGION 1..7: note = Description of Artificial Sequence: Synthetic peptide
SQPGSNH

SEQ ID NO: 33202 - protein, 7 aa, synthetic construct
  REGION 1..7: note = Description of Artificial Sequence: Synthetic peptide
AMGSSLS

SEQ ID NO: 33203 - protein, 7 aa, synthetic construct
  REGION 1..7: note = Description of Artificial Sequence: Synthetic peptide
DNPRQAY

SEQ ID NO: 33204 - protein, 7 aa, synthetic construct
  REGION 1..7: note = Description of Artificial Sequence: Synthetic peptide
SSAGTYT

SEQ ID NO: 33205 - protein, 7 aa, synthetic construct
  REGION 1..7: note = Description of Artificial Sequence: Synthetic peptide
DNMSTPK

SEQ ID NO: 33206 - protein, 7 aa, synthetic construct
  REGION 1..7: note = Description of Artificial Sequence: Synthetic peptide
NAVRSEN

SEQ ID NO: 33207 - protein, 7 aa, synthetic construct
  REGION 1..7: note = Description of Artificial Sequence: Synthetic peptide
PLSGSKA

SEQ ID NO: 33208 - protein, 7 aa, synthetic construct
  REGION 1..7: note = Description of Artificial Sequence: Synthetic peptide
DPLRNSN

SEQ ID NO: 33209 - protein, 7 aa, synthetic construct
  REGION 1..7: note = Description of Artificial Sequence: Synthetic peptide
FNSNRDS

SEQ ID NO: 33210 - protein, 7 aa, synthetic construct
  REGION 1..7: note = Description of Artificial Sequence: Synthetic peptide
PLGSRVN

SEQ ID NO: 33211 - protein, 7 aa, synthetic construct
  REGION 1..7: note = Description of Artificial Sequence: Synthetic peptide
TTHNMQG

SEQ ID NO: 33212 - protein, 7 aa, synthetic construct
  REGION 1..7: note = Description of Artificial Sequence: Synthetic peptide
QISASTR

SEQ ID NO: 33213 - protein, 7 aa, synthetic construct
  REGION 1..7: note = Description of Artificial Sequence: Synthetic peptide
RFQNNTG

SEQ ID NO: 33214 - protein, 7 aa, synthetic construct
  REGION 1..7: note = Description of Artificial Sequence: Synthetic peptide
DPHNTSR

SEQ ID NO: 33215 - protein, 7 aa, synthetic construct
  REGION 1..7: note = Description of Artificial Sequence: Synthetic peptide
RNDTKLF

SEQ ID NO: 33216 - protein, 7 aa, synthetic construct
  REGION 1..7: note = Description of Artificial Sequence: Synthetic peptide
ATHSKAS

SEQ ID NO: 33217 - protein, 7 aa, synthetic construct
  REGION 1..7: note = Description of Artificial Sequence: Synthetic peptide
ERTPPRI

SEQ ID NO: 33218 - protein, 7 aa, synthetic construct
  REGION 1..7: note = Description of Artificial Sequence: Synthetic peptide
SLTPMGR

SEQ ID NO: 33219 - protein, 7 aa, synthetic construct
  REGION 1..7: note = Description of Artificial Sequence: Synthetic peptide
TPITPMT

SEQ ID NO: 33220 - protein, 7 aa, synthetic construct
  REGION 1..7: note = Description of Artificial Sequence: Synthetic peptide
YHLNSQS

SEQ ID NO: 33221 - protein, 7 aa, synthetic construct
  REGION 1..7: note = Description of Artificial Sequence: Synthetic peptide
FTSNKAS

SEQ ID NO: 33222 - protein, 7 aa, synthetic construct
  REGION 1..7: note = Description of Artificial Sequence: Synthetic peptide
NSFSRNS

SEQ ID NO: 33223 - protein, 7 aa, synthetic construct
  REGION 1..7: note = Description of Artificial Sequence: Synthetic peptide
KVDKRTD

SEQ ID NO: 33224 - protein, 7 aa, synthetic construct
  REGION 1..7: note = Description of Artificial Sequence: Synthetic peptide
KLTGQRS

SEQ ID NO: 33225 - protein, 7 aa, synthetic construct
  REGION 1..7: note = Description of Artificial Sequence: Synthetic peptide
YSGASGR

SEQ ID NO: 33226 - protein, 7 aa, synthetic construct
  REGION 1..7: note = Description of Artificial Sequence: Synthetic peptide
SLGNRSL

SEQ ID NO: 33227 - protein, 7 aa, synthetic construct
  REGION 1..7: note = Description of Artificial Sequence: Synthetic peptide
MLNSRTS

SEQ ID NO: 33228 - protein, 7 aa, synthetic construct
  REGION 1..7: note = Description of Artificial Sequence: Synthetic peptide
QITPRSG

SEQ ID NO: 33229 - protein, 7 aa, synthetic construct
  REGION 1..7: note = Description of Artificial Sequence: Synthetic peptide
TNRNTYV

SEQ ID NO: 33230 - protein, 7 aa, synthetic construct
  REGION 1..7: note = Description of Artificial Sequence: Synthetic peptide
MAGNPHS

SEQ ID NO: 33231 - protein, 7 aa, synthetic construct
  REGION 1..7: note = Description of Artificial Sequence: Synthetic peptide
MLSGSRN

SEQ ID NO: 33232 - protein, 7 aa, synthetic construct
  REGION 1..7: note = Description of Artificial Sequence: Synthetic peptide
SNTRDIK

SEQ ID NO: 33233 - protein, 7 aa, synthetic construct
  REGION 1..7: note = Description of Artificial Sequence: Synthetic peptide
NGSGLNQ

SEQ ID NO: 33234 - protein, 7 aa, synthetic construct
  REGION 1..7: note = Description of Artificial Sequence: Synthetic peptide
SIKSVTN

SEQ ID NO: 33235 - protein, 7 aa, synthetic construct
  REGION 1..7: note = Description of Artificial Sequence: Synthetic peptide
SHDNGQS

SEQ ID NO: 33236 - protein, 7 aa, synthetic construct
  REGION 1..7: note = Description of Artificial Sequence: Synthetic peptide
DYGKGSS

SEQ ID NO: 33237 - protein, 7 aa, synthetic construct
  REGION 1..7: note = Description of Artificial Sequence: Synthetic peptide
STVGHMN

SEQ ID NO: 33238 - protein, 7 aa, synthetic construct
  REGION 1..7: note = Description of Artificial Sequence: Synthetic peptide
RMLDGHS

SEQ ID NO: 33239 - protein, 7 aa, synthetic construct
  REGION 1..7: note = Description of Artificial Sequence: Synthetic peptide
PMDYSRS

SEQ ID NO: 33240 - protein, 7 aa, synthetic construct
  REGION 1..7: note = Description of Artificial Sequence: Synthetic peptide
KGSNHSG

SEQ ID NO: 33241 - protein, 7 aa, synthetic construct
  REGION 1..7: note = Description of Artificial Sequence: Synthetic peptide
SSKGILA

SEQ ID NO: 33242 - protein, 7 aa, synthetic construct
  REGION 1..7: note = Description of Artificial Sequence: Synthetic peptide
SVGSGAL

SEQ ID NO: 33243 - protein, 7 aa, synthetic construct
  REGION 1..7: note = Description of Artificial Sequence: Synthetic peptide
PISSRAG

SEQ ID NO: 33244 - protein, 7 aa, synthetic construct
  REGION 1..7: note = Description of Artificial Sequence: Synthetic peptide
NPVAAAT

SEQ ID NO: 33245 - protein, 7 aa, synthetic construct
  REGION 1..7: note = Description of Artificial Sequence: Synthetic peptide
ARLGVTR

SEQ ID NO: 33246 - protein, 7 aa, synthetic construct
  REGION 1..7: note = Description of Artificial Sequence: Synthetic peptide
SRVTGGT

SEQ ID NO: 33247 - protein, 7 aa, synthetic construct
  REGION 1..7: note = Description of Artificial Sequence: Synthetic peptide
SCTTRCL

SEQ ID NO: 33248 - protein, 7 aa, synthetic construct
  REGION 1..7: note = Description of Artificial Sequence: Synthetic peptide
KNIGSHG

SEQ ID NO: 33249 - protein, 7 aa, synthetic construct
  REGION 1..7: note = Description of Artificial Sequence: Synthetic peptide
AVVTGHR

SEQ ID NO: 33250 - protein, 7 aa, synthetic construct
  REGION 1..7: note = Description of Artificial Sequence: Synthetic peptide
NGSGTNQ

SEQ ID NO: 33251 - protein, 7 aa, synthetic construct
  REGION 1..7: note = Description of Artificial Sequence: Synthetic peptide
RNVSHPG

SEQ ID NO: 33252 - protein, 7 aa, synthetic construct
  REGION 1..7: note = Description of Artificial Sequence: Synthetic peptide
VYSSPSA

SEQ ID NO: 33253 - protein, 7 aa, synthetic construct
  REGION 1..7: note = Description of Artificial Sequence: Synthetic peptide
KYNSLAC

SEQ ID NO: 33254 - protein, 7 aa, synthetic construct
  REGION 1..7: note = Description of Artificial Sequence: Synthetic peptide
AKTQSVN

SEQ ID NO: 33255 - protein, 7 aa, synthetic construct
  REGION 1..7: note = Description of Artificial Sequence: Synthetic peptide
GSNLNST

SEQ ID NO: 33256 - protein, 7 aa, synthetic construct
  REGION 1..7: note = Description of Artificial Sequence: Synthetic peptide
KISSPFI

SEQ ID NO: 33257 - protein, 7 aa, synthetic construct
  REGION 1..7: note = Description of Artificial Sequence: Synthetic peptide
KTSLNTS

SEQ ID NO: 33258 - protein, 7 aa, synthetic construct
  REGION 1..7: note = Description of Artificial Sequence: Synthetic peptide
KHEGYNV

SEQ ID NO: 33259 - protein, 7 aa, synthetic construct
  REGION 1..7: note = Description of Artificial Sequence: Synthetic peptide
RTSHTPG

SEQ ID NO: 33260 - protein, 7 aa, synthetic construct
  REGION 1..7: note = Description of Artificial Sequence: Synthetic peptide
NGLSQTH

SEQ ID NO: 33261 - protein, 7 aa, synthetic construct
  REGION 1..7: note = Description of Artificial Sequence: Synthetic peptide
DRGRPAG

SEQ ID NO: 33262 - protein, 7 aa, synthetic construct
  REGION 1..7: note = Description of Artificial Sequence: Synthetic peptide
SNTNAAM

SEQ ID NO: 33263 - protein, 7 aa, synthetic construct
  REGION 1..7: note = Description of Artificial Sequence: Synthetic peptide
QKGNNLP

SEQ ID NO: 33264 - protein, 7 aa, synthetic construct
  REGION 1..7: note = Description of Artificial Sequence: Synthetic peptide
KDAGDYG

SEQ ID NO: 33265 - protein, 7 aa, synthetic construct
  REGION 1..7: note = Description of Artificial Sequence: Synthetic peptide
TLDNHRS

SEQ ID NO: 33266 - protein, 7 aa, synthetic construct
  REGION 1..7: note = Description of Artificial Sequence: Synthetic peptide
STTKDGI

SEQ ID NO: 33267 - protein, 7 aa, synthetic construct
  REGION 1..7: note = Description of Artificial Sequence: Synthetic peptide
NSGNIVT

SEQ ID NO: 33268 - protein, 7 aa, synthetic construct
  REGION 1..7: note = Description of Artificial Sequence: Synthetic peptide
SDGQSSV

SEQ ID NO: 33269 - protein, 7 aa, synthetic construct
  REGION 1..7: note = Description of Artificial Sequence: Synthetic peptide
AFGEIRQ

SEQ ID NO: 33270 - protein, 7 aa, synthetic construct
  REGION 1..7: note = Description of Artificial Sequence: Synthetic peptide
KSQLVMH

SEQ ID NO: 33271 - protein, 7 aa, synthetic construct
  REGION 1..7: note = Description of Artificial Sequence: Synthetic peptide
NAEPTSS

SEQ ID NO: 33272 - protein, 7 aa, synthetic construct
  REGION 1..7: note = Description of Artificial Sequence: Synthetic peptide
PQYGDKE

SEQ ID NO: 33273 - protein, 7 aa, synthetic construct
  REGION 1..7: note = Description of Artificial Sequence: Synthetic peptide
SIMHLSS

SEQ ID NO: 33274 - protein, 7 aa, synthetic construct
  REGION 1..7: note = Description of Artificial Sequence: Synthetic peptide
LNKSTLP

SEQ ID NO: 33275 - protein, 7 aa, synthetic construct
  REGION 1..7: note = Description of Artificial Sequence: Synthetic peptide
MSTSSSR

SEQ ID NO: 33276 - protein, 7 aa, synthetic construct
  REGION 1..7: note = Description of Artificial Sequence: Synthetic peptide
TVGARNG

SEQ ID NO: 33277 - protein, 7 aa, synthetic construct
  REGION 1..7: note = Description of Artificial Sequence: Synthetic peptide
GSTKPSP

SEQ ID NO: 33278 - protein, 7 aa, synthetic construct
  REGION 1..7: note = Description of Artificial Sequence: Synthetic peptide
NGSGQSQ

SEQ ID NO: 33279 - protein, 7 aa, synthetic construct
  REGION 1..7: note = Description of Artificial Sequence: Synthetic peptide
SSSAPRL

SEQ ID NO: 33280 - protein, 7 aa, synthetic construct
  REGION 1..7: note = Description of Artificial Sequence: Synthetic peptide
PSTRQSN

SEQ ID NO: 33281 - protein, 7 aa, synthetic construct
  REGION 1..7: note = Description of Artificial Sequence: Synthetic peptide
PSEVRSS

SEQ ID NO: 33282 - protein, 7 aa, synthetic construct
  REGION 1..7: note = Description of Artificial Sequence: Synthetic peptide
VSGSKVG

SEQ ID NO: 33283 - protein, 7 aa, synthetic construct
  REGION 1..7: note = Description of Artificial Sequence: Synthetic peptide
LISSKSS

SEQ ID NO: 33284 - protein, 7 aa, synthetic construct
  REGION 1..7: note = Description of Artificial Sequence: Synthetic peptide
PIHPSSG

SEQ ID NO: 33285 - protein, 7 aa, synthetic construct
  REGION 1..7: note = Description of Artificial Sequence: Synthetic peptide
MISGATR

SEQ ID NO: 33286 - protein, 7 aa, synthetic construct
  REGION 1..7: note = Description of Artificial Sequence: Synthetic peptide
DRGRNTG

SEQ ID NO: 33287 - protein, 7 aa, synthetic construct
  REGION 1..7: note = Description of Artificial Sequence: Synthetic peptide
GRLEAQK

SEQ ID NO: 33288 - protein, 7 aa, synthetic construct
  REGION 1..7: note = Description of Artificial Sequence: Synthetic peptide
AGNMPHS

SEQ ID NO: 33289 - protein, 7 aa, synthetic construct
  REGION 1..7: note = Description of Artificial Sequence: Synthetic peptide
GPIRPIQ

SEQ ID NO: 33290 - protein, 7 aa, synthetic construct
  REGION 1..7: note = Description of Artificial Sequence: Synthetic peptide
HLGVPLK

SEQ ID NO: 33291 - protein, 7 aa, synthetic construct
  REGION 1..7: note = Description of Artificial Sequence: Synthetic peptide
VTRGLNV

SEQ ID NO: 33292 - protein, 7 aa, synthetic construct
  REGION 1..7: note = Description of Artificial Sequence: Synthetic peptide
EILGTHR

SEQ ID NO: 33293 - protein, 7 aa, synthetic construct
  REGION 1..7: note = Description of Artificial Sequence: Synthetic peptide
RTDHGGV

SEQ ID NO: 33294 - protein, 7 aa, synthetic construct
  REGION 1..7: note = Description of Artificial Sequence: Synthetic peptide
SISKTQA

SEQ ID NO: 33295 - protein, 7 aa, synthetic construct
  REGION 1..7: note = Description of Artificial Sequence: Synthetic peptide
DGIKSYA

SEQ ID NO: 33296 - protein, 7 aa, synthetic construct
  REGION 1..7: note = Description of Artificial Sequence: Synthetic peptide
QVPATNR

SEQ ID NO: 33297 - protein, 7 aa, synthetic construct
  REGION 1..7: note = Description of Artificial Sequence: Synthetic peptide
AGAGKVY

SEQ ID NO: 33298 - protein, 7 aa, synthetic construct
  REGION 1..7: note = Description of Artificial Sequence: Synthetic peptide
VSGMSGS

SEQ ID NO: 33299 - protein, 7 aa, synthetic construct
  REGION 1..7: note = Description of Artificial Sequence: Synthetic peptide
AGSSPPT

SEQ ID NO: 33300 - protein, 7 aa, synthetic construct
  REGION 1..7: note = Description of Artificial Sequence: Synthetic peptide
PVSGATI

SEQ ID NO: 33301 - protein, 7 aa, synthetic construct
  REGION 1..7: note = Description of Artificial Sequence: Synthetic peptide
DQNRVPY

SEQ ID NO: 33302 - protein, 7 aa, synthetic construct
  REGION 1..7: note = Description of Artificial Sequence: Synthetic peptide
TPTGHRS

SEQ ID NO: 33303 - protein, 7 aa, synthetic construct
  REGION 1..7: note = Description of Artificial Sequence: Synthetic peptide
MGPNHLP

SEQ ID NO: 33304 - protein, 7 aa, synthetic construct
  REGION 1..7: note = Description of Artificial Sequence: Synthetic peptide
RVITPST

SEQ ID NO: 33305 - protein, 7 aa, synthetic construct
  REGION 1..7: note = Description of Artificial Sequence: Synthetic peptide
VPSTAGK

SEQ ID NO: 33306 - protein, 7 aa, synthetic construct
  REGION 1..7: note = Description of Artificial Sequence: Synthetic peptide
LLHHNTG

SEQ ID NO: 33307 - protein, 7 aa, synthetic construct
  REGION 1..7: note = Description of Artificial Sequence: Synthetic peptide
SIHSDRT

SEQ ID NO: 33308 - protein, 7 aa, synthetic construct
  REGION 1..7: note = Description of Artificial Sequence: Synthetic peptide
QNVSTMN

SEQ ID NO: 33309 - protein, 7 aa, synthetic construct
  REGION 1..7: note = Description of Artificial Sequence: Synthetic peptide
NNPKNVV

SEQ ID NO: 33310 - protein, 7 aa, synthetic construct
  REGION 1..7: note = Description of Artificial Sequence: Synthetic peptide
MTTQLNS

SEQ ID NO: 33311 - protein, 7 aa, synthetic construct
  REGION 1..7: note = Description of Artificial Sequence: Synthetic peptide
TQQNGSN

SEQ ID NO: 33312 - protein, 7 aa, synthetic construct
  REGION 1..7: note = Description of Artificial Sequence: Synthetic peptide
GVINNER

SEQ ID NO: 33313 - protein, 7 aa, synthetic construct
  REGION 1..7: note = Description of Artificial Sequence: Synthetic peptide
FSQGNRS

SEQ ID NO: 33314 - protein, 7 aa, synthetic construct
  REGION 1..7: note = Description of Artificial Sequence: Synthetic peptide
PGTTSAM

SEQ ID NO: 33315 - protein, 7 aa, synthetic construct
  REGION 1..7: note = Description of Artificial Sequence: Synthetic peptide
SHVNSTR

SEQ ID NO: 33316 - protein, 7 aa, synthetic construct
  REGION 1..7: note = Description of Artificial Sequence: Synthetic peptide
PNLQSSK

SEQ ID NO: 33317 - protein, 7 aa, synthetic construct
  REGION 1..7: note = Description of Artificial Sequence: Synthetic peptide
AGINSQV

SEQ ID NO: 33318 - protein, 7 aa, synthetic construct
  REGION 1..7: note = Description of Artificial Sequence: Synthetic peptide
YLGKVQV

SEQ ID NO: 33319 - protein, 7 aa, synthetic construct
  REGION 1..7: note = Description of Artificial Sequence: Synthetic peptide
ATSNGTL

SEQ ID NO: 33320 - protein, 7 aa, synthetic construct
  REGION 1..7: note = Description of Artificial Sequence: Synthetic peptide
THQSSTS

SEQ ID NO: 33321 - protein, 7 aa, synthetic construct
  REGION 1..7: note = Description of Artificial Sequence: Synthetic peptide
LGDRSFI

SEQ ID NO: 33322 - protein, 7 aa, synthetic construct
  REGION 1..7: note = Description of Artificial Sequence: Synthetic peptide
WSLGSQS

SEQ ID NO: 33323 - protein, 7 aa, synthetic construct
  REGION 1..7: note = Description of Artificial Sequence: Synthetic peptide
SGTTTFG

SEQ ID NO: 33324 - protein, 7 aa, synthetic construct
  REGION 1..7: note = Description of Artificial Sequence: Synthetic peptide
CTGSSSM

SEQ ID NO: 33325 - protein, 7 aa, synthetic construct
  REGION 1..7: note = Description of Artificial Sequence: Synthetic peptide
SRDSSIH

SEQ ID NO: 33326 - protein, 7 aa, synthetic construct
  REGION 1..7: note = Description of Artificial Sequence: Synthetic peptide
TSSTTSL

SEQ ID NO: 33327 - protein, 7 aa, synthetic construct
  REGION 1..7: note = Description of Artificial Sequence: Synthetic peptide
FPVNAGA

SEQ ID NO: 33328 - protein, 7 aa, synthetic construct
  REGION 1..7: note = Description of Artificial Sequence: Synthetic peptide
NGITKSS

SEQ ID NO: 33329 - protein, 7 aa, synthetic construct
  REGION 1..7: note = Description of Artificial Sequence: Synthetic peptide
TPHQRSS

SEQ ID NO: 33330 - protein, 7 aa, synthetic construct
  REGION 1..7: note = Description of Artificial Sequence: Synthetic peptide
SGASSNS

SEQ ID NO: 33331 - protein, 7 aa, synthetic construct
  REGION 1..7: note = Description of Artificial Sequence: Synthetic peptide
TTHSSIN

SEQ ID NO: 33332 - protein, 7 aa, synthetic construct
  REGION 1..7: note = Description of Artificial Sequence: Synthetic peptide
DTAVNYG

SEQ ID NO: 33333 - protein, 7 aa, synthetic construct
  REGION 1..7: note = Description of Artificial Sequence: Synthetic peptide
SQWQSSS

SEQ ID NO: 33334 - protein, 7 aa, synthetic construct
  REGION 1..7: note = Description of Artificial Sequence: Synthetic peptide
NGSGQNE

SEQ ID NO: 33335 - protein, 7 aa, synthetic construct
  REGION 1..7: note = Description of Artificial Sequence: Synthetic peptide
ISSGTHG

SEQ ID NO: 33336 - protein, 7 aa, synthetic construct
  REGION 1..7: note = Description of Artificial Sequence: Synthetic peptide
PTDRINR

SEQ ID NO: 33337 - protein, 7 aa, synthetic construct
  REGION 1..7: note = Description of Artificial Sequence: Synthetic peptide
QQVNTTR

SEQ ID NO: 33338 - protein, 7 aa, synthetic construct
  REGION 1..7: note = Description of Artificial Sequence: Synthetic peptide
SSHKDYL

SEQ ID NO: 33339 - protein, 7 aa, synthetic construct
  REGION 1..7: note = Description of Artificial Sequence: Synthetic peptide
VNQSGFS

SEQ ID NO: 33340 - protein, 7 aa, synthetic construct
  REGION 1..7: note = Description of Artificial Sequence: Synthetic peptide
SVAGTSR

SEQ ID NO: 33341 - protein, 7 aa, synthetic construct
  REGION 1..7: note = Description of Artificial Sequence: Synthetic peptide
VPHNHSL

SEQ ID NO: 33342 - protein, 7 aa, synthetic construct
  REGION 1..7: note = Description of Artificial Sequence: Synthetic peptide
FQPRSST

SEQ ID NO: 33343 - protein, 7 aa, synthetic construct
  REGION 1..7: note = Description of Artificial Sequence: Synthetic peptide
VHEAPLR

SEQ ID NO: 33344 - protein, 7 aa, synthetic construct
  REGION 1..7: note = Description of Artificial Sequence: Synthetic peptide
LISETSR

SEQ ID NO: 33345 - protein, 7 aa, synthetic construct
  REGION 1..7: note = Description of Artificial Sequence: Synthetic peptide
GFSSQQR

SEQ ID NO: 33346 - protein, 7 aa, synthetic construct
  REGION 1..7: note = Description of Artificial Sequence: Synthetic peptide
ATNHSPQ

SEQ ID NO: 33347 - protein, 7 aa, synthetic construct
  REGION 1..7: note = Description of Artificial Sequence: Synthetic peptide
RGDTKNL

SEQ ID NO: 33348 - protein, 7 aa, synthetic construct
  REGION 1..7: note = Description of Artificial Sequence: Synthetic peptide
RITSSNQ

SEQ ID NO: 33349 - protein, 7 aa, synthetic construct
  REGION 1..7: note = Description of Artificial Sequence: Synthetic peptide
MESKANS

SEQ ID NO: 33350 - protein, 7 aa, synthetic construct
  REGION 1..7: note = Description of Artificial Sequence: Synthetic peptide
YNRTSIV

SEQ ID NO: 33351 - protein, 7 aa, synthetic construct
  REGION 1..7: note = Description of Artificial Sequence: Synthetic peptide
RTNDTTH

SEQ ID NO: 33352 - protein, 7 aa, synthetic construct
  REGION 1..7: note = Description of Artificial Sequence: Synthetic peptide
GELPDRR

SEQ ID NO: 33353 - protein, 7 aa, synthetic construct
  REGION 1..7: note = Description of Artificial Sequence: Synthetic peptide
HLMQPVC

SEQ ID NO: 33354 - protein, 7 aa, synthetic construct
  REGION 1..7: note = Description of Artificial Sequence: Synthetic peptide
CGTPVAL

SEQ ID NO: 33355 - protein, 7 aa, synthetic construct
  REGION 1..7: note = Description of Artificial Sequence: Synthetic peptide
NSSGQNP

SEQ ID NO: 33356 - protein, 7 aa, synthetic construct
  REGION 1..7: note = Description of Artificial Sequence: Synthetic peptide
SQNVSSK

SEQ ID NO: 33357 - protein, 7 aa, synthetic construct
  REGION 1..7: note = Description of Artificial Sequence: Synthetic peptide
GSIKAPP

SEQ ID NO: 33358 - protein, 7 aa, synthetic construct
  REGION 1..7: note = Description of Artificial Sequence: Synthetic peptide
MSGGNMR

SEQ ID NO: 33359 - protein, 7 aa, synthetic construct
  REGION 1..7: note = Description of Artificial Sequence: Synthetic peptide
QTSATQR

SEQ ID NO: 33360 - protein, 7 aa, synthetic construct
  REGION 1..7: note = Description of Artificial Sequence: Synthetic peptide
SGGSSVL

SEQ ID NO: 33361 - protein, 7 aa, synthetic construct
  REGION 1..7: note = Description of Artificial Sequence: Synthetic peptide
TTSARPN

SEQ ID NO: 33362 - protein, 7 aa, synthetic construct
  REGION 1..7: note = Description of Artificial Sequence: Synthetic peptide
VQGTGNT

SEQ ID NO: 33363 - protein, 7 aa, synthetic construct
  REGION 1..7: note = Description of Artificial Sequence: Synthetic peptide
PSTSGAM

SEQ ID NO: 33364 - protein, 7 aa, synthetic construct
  REGION 1..7: note = Description of Artificial Sequence: Synthetic peptide
YIDASAR

SEQ ID NO: 33365 - protein, 7 aa, synthetic construct
  REGION 1..7: note = Description of Artificial Sequence: Synthetic peptide
PISHTTG

SEQ ID NO: 33366 - protein, 7 aa, synthetic construct
  REGION 1..7: note = Description of Artificial Sequence: Synthetic peptide
GSGIKRE

SEQ ID NO: 33367 - protein, 7 aa, synthetic construct
  REGION 1..7: note = Description of Artificial Sequence: Synthetic peptide
LPGQGVG

SEQ ID NO: 33368 - protein, 7 aa, synthetic construct
  REGION 1..7: note = Description of Artificial Sequence: Synthetic peptide
VQRSSNQ

SEQ ID NO: 33369 - protein, 7 aa, synthetic construct
  REGION 1..7: note = Description of Artificial Sequence: Synthetic peptide
SLSSKQM

SEQ ID NO: 33370 - protein, 7 aa, synthetic construct
  REGION 1..7: note = Description of Artificial Sequence: Synthetic peptide
PQNNQAH

SEQ ID NO: 33371 - protein, 7 aa, synthetic construct
  REGION 1..7: note = Description of Artificial Sequence: Synthetic peptide
QLRSDQT

SEQ ID NO: 33372 - protein, 7 aa, synthetic construct
  REGION 1..7: note = Description of Artificial Sequence: Synthetic peptide
SRETVPT

SEQ ID NO: 33373 - protein, 7 aa, synthetic construct
  REGION 1..7: note = Description of Artificial Sequence: Synthetic peptide
IKPSSSA

SEQ ID NO: 33374 - protein, 7 aa, synthetic construct
  REGION 1..7: note = Description of Artificial Sequence: Synthetic peptide
PTSQQRP

SEQ ID NO: 33375 - protein, 7 aa, synthetic construct
  REGION 1..7: note = Description of Artificial Sequence: Synthetic peptide
QNSKGYV

SEQ ID NO: 33376 - protein, 7 aa, synthetic construct
  REGION 1..7: note = Description of Artificial Sequence: Synthetic peptide
LATANSR

SEQ ID NO: 33377 - protein, 7 aa, synthetic construct
  REGION 1..7: note = Description of Artificial Sequence: Synthetic peptide
YSDNKTT

SEQ ID NO: 33378 - protein, 7 aa, synthetic construct
  REGION 1..7: note = Description of Artificial Sequence: Synthetic peptide
VKVTHQQ

SEQ ID NO: 33379 - protein, 7 aa, synthetic construct
  REGION 1..7: note = Description of Artificial Sequence: Synthetic peptide
LGTSTIL

SEQ ID NO: 33380 - protein, 7 aa, synthetic construct
  REGION 1..7: note = Description of Artificial Sequence: Synthetic peptide
NTRSSSG

SEQ ID NO: 33381 - protein, 7 aa, synthetic construct
  REGION 1..7: note = Description of Artificial Sequence: Synthetic peptide
VVLDTNR

SEQ ID NO: 33382 - protein, 7 aa, synthetic construct
  REGION 1..7: note = Description of Artificial Sequence: Synthetic peptide
GQVKAIG

SEQ ID NO: 33383 - protein, 7 aa, synthetic construct
  REGION 1..7: note = Description of Artificial Sequence: Synthetic peptide
PVSRATF

SEQ ID NO: 33384 - protein, 7 aa, synthetic construct
  REGION 1..7: note = Description of Artificial Sequence: Synthetic peptide
QSGNTIQ

SEQ ID NO: 33385 - protein, 7 aa, synthetic construct
  REGION 1..7: note = Description of Artificial Sequence: Synthetic peptide
APDVRRC

SEQ ID NO: 33386 - protein, 7 aa, synthetic construct
  REGION 1..7: note = Description of Artificial Sequence: Synthetic peptide
AARPDVT

SEQ ID NO: 33387 - protein, 7 aa, synthetic construct
  REGION 1..7: note = Description of Artificial Sequence: Synthetic peptide
CPSQHVI

SEQ ID NO: 33388 - protein, 7 aa, synthetic construct
  REGION 1..7: note = Description of Artificial Sequence: Synthetic peptide
MSDTSTR

SEQ ID NO: 33389 - protein, 7 aa, synthetic construct
  REGION 1..7: note = Description of Artificial Sequence: Synthetic peptide
GFHGQGS

SEQ ID NO: 33390 - protein, 7 aa, synthetic construct
  REGION 1..7: note = Description of Artificial Sequence: Synthetic peptide
HQLEAHK

SEQ ID NO: 33391 - protein, 7 aa, synthetic construct
  REGION 1..7: note = Description of Artificial Sequence: Synthetic peptide
QGQNRTV

SEQ ID NO: 33392 - protein, 7 aa, synthetic construct
  REGION 1..7: note = Description of Artificial Sequence: Synthetic peptide
SLPNTNG

SEQ ID NO: 33393 - protein, 7 aa, synthetic construct
  REGION 1..7: note = Description of Artificial Sequence: Synthetic peptide
SANNKSG

SEQ ID NO: 33394 - protein, 7 aa, synthetic construct
  REGION 1..7: note = Description of Artificial Sequence: Synthetic peptide
VSKSPST

SEQ ID NO: 33395 - protein, 7 aa, synthetic construct
  REGION 1..7: note = Description of Artificial Sequence: Synthetic peptide
PYNSKAS

SEQ ID NO: 33396 - protein, 7 aa, synthetic construct
  REGION 1..7: note = Description of Artificial Sequence: Synthetic peptide
SSSGGVK

SEQ ID NO: 33397 - protein, 7 aa, synthetic construct
  REGION 1..7: note = Description of Artificial Sequence: Synthetic peptide
IGSGQNQ

SEQ ID NO: 33398 - protein, 7 aa, synthetic construct
  REGION 1..7: note = Description of Artificial Sequence: Synthetic peptide
NGSRQNQ

SEQ ID NO: 33399 - protein, 7 aa, synthetic construct
  REGION 1..7: note = Description of Artificial Sequence: Synthetic peptide
GMTQGGK

SEQ ID NO: 33400 - protein, 7 aa, synthetic construct
  REGION 1..7: note = Description of Artificial Sequence: Synthetic peptide
GSPGVLR

SEQ ID NO: 33401 - protein, 7 aa, synthetic construct
  REGION 1..7: note = Description of Artificial Sequence: Synthetic peptide
GDQHKPL

SEQ ID NO: 33402 - protein, 7 aa, synthetic construct
  REGION 1..7: note = Description of Artificial Sequence: Synthetic peptide
AGTGSSL

SEQ ID NO: 33403 - protein, 7 aa, synthetic construct
  REGION 1..7: note = Description of Artificial Sequence: Synthetic peptide
HGSGQNQ

SEQ ID NO: 33404 - protein, 7 aa, synthetic construct
  REGION 1..7: note = Description of Artificial Sequence: Synthetic peptide
QSDHRSL

SEQ ID NO: 33405 - protein, 7 aa, synthetic construct
  REGION 1..7: note = Description of Artificial Sequence: Synthetic peptide
NGSGQIQ

SEQ ID NO: 33406 - protein, 7 aa, synthetic construct
  REGION 1..7: note = Description of Artificial Sequence: Synthetic peptide
PLDKSMM

SEQ ID NO: 33407 - protein, 7 aa, synthetic construct
  REGION 1..7: note = Description of Artificial Sequence: Synthetic peptide
KRDAHTA

SEQ ID NO: 33408 - protein, 7 aa, synthetic construct
  REGION 1..7: note = Description of Artificial Sequence: Synthetic peptide
AGRTHSC

SEQ ID NO: 33409 - protein, 7 aa, synthetic construct
  REGION 1..7: note = Description of Artificial Sequence: Synthetic peptide
CIRAGSC

SEQ ID NO: 33410 - protein, 7 aa, synthetic construct
  REGION 1..7: note = Description of Artificial Sequence: Synthetic peptide
GTARGVA

SEQ ID NO: 33411 - protein, 7 aa, synthetic construct
  REGION 1..7: note = Description of Artificial Sequence: Synthetic peptide
NRSGQNQ

SEQ ID NO: 33412 - protein, 7 aa, synthetic construct
  REGION 1..7: note = Description of Artificial Sequence: Synthetic peptide
RTGNNHE

SEQ ID NO: 33413 - protein, 7 aa, synthetic construct
  REGION 1..7: note = Description of Artificial Sequence: Synthetic peptide
HTDINHQ

SEQ ID NO: 33414 - protein, 7 aa, synthetic construct
  REGION 1..7: note = Description of Artificial Sequence: Synthetic peptide
RTVNSAN

SEQ ID NO: 33415 - protein, 7 aa, synthetic construct
  REGION 1..7: note = Description of Artificial Sequence: Synthetic peptide
RTTNATY

SEQ ID NO: 33416 - protein, 7 aa, synthetic construct
  REGION 1..7: note = Description of Artificial Sequence: Synthetic peptide
NPVNTKS

SEQ ID NO: 33417 - protein, 7 aa, synthetic construct
  REGION 1..7: note = Description of Artificial Sequence: Synthetic peptide
ALAGTKG

SEQ ID NO: 33418 - protein, 7 aa, synthetic construct
  REGION 1..7: note = Description of Artificial Sequence: Synthetic peptide
PVLNKAT

SEQ ID NO: 33419 - protein, 7 aa, synthetic construct
  REGION 1..7: note = Description of Artificial Sequence: Synthetic peptide
HQERASM

SEQ ID NO: 33420 - protein, 7 aa, synthetic construct
  REGION 1..7: note = Description of Artificial Sequence: Synthetic peptide
SQQSPSM

SEQ ID NO: 33421 - protein, 7 aa, synthetic construct
  REGION 1..7: note = Description of Artificial Sequence: Synthetic peptide
PHGDKTS

SEQ ID NO: 33422 - protein, 7 aa, synthetic construct
  REGION 1..7: note = Description of Artificial Sequence: Synthetic peptide
LSLNKSQ

SEQ ID NO: 33423 - protein, 7 aa, synthetic construct
  REGION 1..7: note = Description of Artificial Sequence: Synthetic peptide
PSNRQIA

SEQ ID NO: 33424 - protein, 7 aa, synthetic construct
  REGION 1..7: note = Description of Artificial Sequence: Synthetic peptide
VHTSGVQ

SEQ ID NO: 33425 - protein, 7 aa, synthetic construct
  REGION 1..7: note = Description of Artificial Sequence: Synthetic peptide
HKTAGSA

SEQ ID NO: 33426 - protein, 7 aa, synthetic construct
  REGION 1..7: note = Description of Artificial Sequence: Synthetic peptide
PRLNVGG

SEQ ID NO: 33427 - protein, 7 aa, synthetic construct
  REGION 1..7: note = Description of Artificial Sequence: Synthetic peptide
TGMRNIG

SEQ ID NO: 33428 - protein, 7 aa, synthetic construct
  REGION 1..7: note = Description of Artificial Sequence: Synthetic peptide
CPSTKSC

SEQ ID NO: 33429 - protein, 7 aa, synthetic construct
  REGION 1..7: note = Description of Artificial Sequence: Synthetic peptide
YSGSAGQ

SEQ ID NO: 33430 - protein, 7 aa, synthetic construct
  REGION 1..7: note = Description of Artificial Sequence: Synthetic peptide
RTLRSVD

SEQ ID NO: 33431 - protein, 7 aa, synthetic construct
  REGION 1..7: note = Description of Artificial Sequence: Synthetic peptide
RGYGTSV

SEQ ID NO: 33432 - protein, 7 aa, synthetic construct
  REGION 1..7: note = Description of Artificial Sequence: Synthetic peptide
FSSASFT

SEQ ID NO: 33433 - protein, 7 aa, synthetic construct
  REGION 1..7: note = Description of Artificial Sequence: Synthetic peptide
MDHSTRS

SEQ ID NO: 33434 - protein, 7 aa, synthetic construct
  REGION 1..7: note = Description of Artificial Sequence: Synthetic peptide
GYTDKHV

SEQ ID NO: 33435 - protein, 7 aa, synthetic construct
  REGION 1..7: note = Description of Artificial Sequence: Synthetic peptide
PHLPQSA

SEQ ID NO: 33436 - protein, 7 aa, synthetic construct
  REGION 1..7: note = Description of Artificial Sequence: Synthetic peptide
CPGSSAY

SEQ ID NO: 33437 - protein, 7 aa, synthetic construct
  REGION 1..7: note = Description of Artificial Sequence: Synthetic peptide
EPPHKIL

SEQ ID NO: 33438 - protein, 7 aa, synthetic construct
  REGION 1..7: note = Description of Artificial Sequence: Synthetic peptide
SSQEVLR

SEQ ID NO: 33439 - protein, 7 aa, synthetic construct
  REGION 1..7: note = Description of Artificial Sequence: Synthetic peptide
NTDTSAV

SEQ ID NO: 33440 - protein, 7 aa, synthetic construct
  REGION 1..7: note = Description of Artificial Sequence: Synthetic peptide
DSTHRAT

SEQ ID NO: 33441 - protein, 7 aa, synthetic construct
  REGION 1..7: note = Description of Artificial Sequence: Synthetic peptide
PLERTTK

SEQ ID NO: 33442 - protein, 7 aa, synthetic construct
  REGION 1..7: note = Description of Artificial Sequence: Synthetic peptide
RQSTNIG

SEQ ID NO: 33443 - protein, 7 aa, synthetic construct
  REGION 1..7: note = Description of Artificial Sequence: Synthetic peptide
GDSKSTW

SEQ ID NO: 33444 - protein, 7 aa, synthetic construct
  REGION 1..7: note = Description of Artificial Sequence: Synthetic peptide
GSQIPRI

SEQ ID NO: 33445 - protein, 7 aa, synthetic construct
  REGION 1..7: note = Description of Artificial Sequence: Synthetic peptide
HERGQNG

SEQ ID NO: 33446 - protein, 7 aa, synthetic construct
  REGION 1..7: note = Description of Artificial Sequence: Synthetic peptide
REPARGD

SEQ ID NO: 33447 - protein, 7 aa, synthetic construct
  REGION 1..7: note = Description of Artificial Sequence: Synthetic peptide
VSTQAIS

SEQ ID NO: 33448 - protein, 7 aa, synthetic construct
  REGION 1..7: note = Description of Artificial Sequence: Synthetic peptide
NNAHSSS

SEQ ID NO: 33449 - protein, 7 aa, synthetic construct
  REGION 1..7: note = Description of Artificial Sequence: Synthetic peptide
YNQPVGK

SEQ ID NO: 33450 - protein, 7 aa, synthetic construct
  REGION 1..7: note = Description of Artificial Sequence: Synthetic peptide
APHSAAN

SEQ ID NO: 33451 - protein, 7 aa, synthetic construct
  REGION 1..7: note = Description of Artificial Sequence: Synthetic peptide
SRTHPVM

SEQ ID NO: 33452 - protein, 7 aa, synthetic construct
  REGION 1..7: note = Description of Artificial Sequence: Synthetic peptide
DMVSPRN

SEQ ID NO: 33453 - protein, 7 aa, synthetic construct
  REGION 1..7: note = Description of Artificial Sequence: Synthetic peptide
DPRAQSH

SEQ ID NO: 33454 - protein, 7 aa, synthetic construct
  REGION 1..7: note = Description of Artificial Sequence: Synthetic peptide
NAQGTAK

SEQ ID NO: 33455 - protein, 7 aa, synthetic construct
  REGION 1..7: note = Description of Artificial Sequence: Synthetic peptide
TTNNIQG

SEQ ID NO: 33456 - protein, 7 aa, synthetic construct
  REGION 1..7: note = Description of Artificial Sequence: Synthetic peptide
IRTKESA

SEQ ID NO: 33457 - protein, 7 aa, synthetic construct
  REGION 1..7: note = Description of Artificial Sequence: Synthetic peptide
NVSTGAT

SEQ ID NO: 33458 - protein, 7 aa, synthetic construct
  REGION 1..7: note = Description of Artificial Sequence: Synthetic peptide
RIDSAKG

SEQ ID NO: 33459 - protein, 7 aa, synthetic construct
  REGION 1..7: note = Description of Artificial Sequence: Synthetic peptide
AYPTTGS

SEQ ID NO: 33460 - protein, 7 aa, synthetic construct
  REGION 1..7: note = Description of Artificial Sequence: Synthetic peptide
RHESKAY

SEQ ID NO: 33461 - protein, 7 aa, synthetic construct
  REGION 1..7: note = Description of Artificial Sequence: Synthetic peptide
AQVDKRS

SEQ ID NO: 33462 - protein, 7 aa, synthetic construct
  REGION 1..7: note = Description of Artificial Sequence: Synthetic peptide
GIQSSPT

SEQ ID NO: 33463 - protein, 7 aa, synthetic construct
  REGION 1..7: note = Description of Artificial Sequence: Synthetic peptide
YQNKSLT

SEQ ID NO: 33464 - protein, 7 aa, synthetic construct
  REGION 1..7: note = Description of Artificial Sequence: Synthetic peptide
RVLTSNA

SEQ ID NO: 33465 - protein, 7 aa, synthetic construct
  REGION 1..7: note = Description of Artificial Sequence: Synthetic peptide
TPHDGQR

SEQ ID NO: 33466 - protein, 7 aa, synthetic construct
  REGION 1..7: note = Description of Artificial Sequence: Synthetic peptide
PVVGKMS

SEQ ID NO: 33467 - protein, 7 aa, synthetic construct
  REGION 1..7: note = Description of Artificial Sequence: Synthetic peptide
LGSNRYS

SEQ ID NO: 33468 - protein, 7 aa, synthetic construct
  REGION 1..7: note = Description of Artificial Sequence: Synthetic peptide
EMKGHTA

SEQ ID NO: 33469 - protein, 7 aa, synthetic construct
  REGION 1..7: note = Description of Artificial Sequence: Synthetic peptide
FGSSTIL

SEQ ID NO: 33470 - protein, 7 aa, synthetic construct
  REGION 1..7: note = Description of Artificial Sequence: Synthetic peptide
LTTGQSV

SEQ ID NO: 33471 - protein, 7 aa, synthetic construct
  REGION 1..7: note = Description of Artificial Sequence: Synthetic peptide
ASRDRAG

SEQ ID NO: 33472 - protein, 7 aa, synthetic construct
  REGION 1..7: note = Description of Artificial Sequence: Synthetic peptide
ASDQAHC

SEQ ID NO: 33473 - protein, 7 aa, synthetic construct
  REGION 1..7: note = Description of Artificial Sequence: Synthetic peptide
PGNMTSR

SEQ ID NO: 33474 - protein, 7 aa, synthetic construct
  REGION 1..7: note = Description of Artificial Sequence: Synthetic peptide
PANSPAT

SEQ ID NO: 33475 - protein, 7 aa, synthetic construct
  REGION 1..7: note = Description of Artificial Sequence: Synthetic peptide
FHANSTV

SEQ ID NO: 33476 - protein, 7 aa, synthetic construct
  REGION 1..7: note = Description of Artificial Sequence: Synthetic peptide
SVSTNFS

SEQ ID NO: 33477 - protein, 7 aa, synthetic construct
  REGION 1..7: note = Description of Artificial Sequence: Synthetic peptide
PVSRGSG

SEQ ID NO: 33478 - protein, 7 aa, synthetic construct
  REGION 1..7: note = Description of Artificial Sequence: Synthetic peptide
NCSGQNQ

SEQ ID NO: 33479 - protein, 7 aa, synthetic construct
  REGION 1..7: note = Description of Artificial Sequence: Synthetic peptide
YSMRPTE

SEQ ID NO: 33480 - protein, 7 aa, synthetic construct
  REGION 1..7: note = Description of Artificial Sequence: Synthetic peptide
HGSSVHS

SEQ ID NO: 33481 - protein, 7 aa, synthetic construct
  REGION 1..7: note = Description of Artificial Sequence: Synthetic peptide
SQSNSFL

SEQ ID NO: 33482 - protein, 7 aa, synthetic construct
  REGION 1..7: note = Description of Artificial Sequence: Synthetic peptide
AGSQTGV

SEQ ID NO: 33483 - protein, 7 aa, synthetic construct
  REGION 1..7: note = Description of Artificial Sequence: Synthetic peptide
PTLGTTK

SEQ ID NO: 33484 - protein, 7 aa, synthetic construct
  REGION 1..7: note = Description of Artificial Sequence: Synthetic peptide
RTSTSLL

SEQ ID NO: 33485 - protein, 7 aa, synthetic construct
  REGION 1..7: note = Description of Artificial Sequence: Synthetic peptide
NLGIPKG

SEQ ID NO: 33486 - protein, 7 aa, synthetic construct
  REGION 1..7: note = Description of Artificial Sequence: Synthetic peptide
RMGVSNT

SEQ ID NO: 33487 - protein, 7 aa, synthetic construct
  REGION 1..7: note = Description of Artificial Sequence: Synthetic peptide
MGIANIG

SEQ ID NO: 33488 - protein, 7 aa, synthetic construct
  REGION 1..7: note = Description of Artificial Sequence: Synthetic peptide
ALAYNKG

SEQ ID NO: 33489 - protein, 7 aa, synthetic construct
  REGION 1..7: note = Description of Artificial Sequence: Synthetic peptide
SEHQPLS

SEQ ID NO: 33490 - protein, 7 aa, synthetic construct
  REGION 1..7: note = Description of Artificial Sequence: Synthetic peptide
VNENRVS

SEQ ID NO: 33491 - protein, 7 aa, synthetic construct
  REGION 1..7: note = Description of Artificial Sequence: Synthetic peptide
FSTHEVS

SEQ ID NO: 33492 - protein, 7 aa, synthetic construct
  REGION 1..7: note = Description of Artificial Sequence: Synthetic peptide
DTHVSGR

SEQ ID NO: 33493 - protein, 7 aa, synthetic construct
  REGION 1..7: note = Description of Artificial Sequence: Synthetic peptide
TSNTPSI

SEQ ID NO: 33494 - protein, 7 aa, synthetic construct
  REGION 1..7: note = Description of Artificial Sequence: Synthetic peptide
PARDSKS

SEQ ID NO: 33495 - protein, 7 aa, synthetic construct
  REGION 1..7: note = Description of Artificial Sequence: Synthetic peptide
GLHPPRT

SEQ ID NO: 33496 - protein, 7 aa, synthetic construct
  REGION 1..7: note = Description of Artificial Sequence: Synthetic peptide
DTNKTSY

SEQ ID NO: 33497 - protein, 7 aa, synthetic construct
  REGION 1..7: note = Description of Artificial Sequence: Synthetic peptide
SNTHSPS

SEQ ID NO: 33498 - protein, 7 aa, synthetic construct
  REGION 1..7: note = Description of Artificial Sequence: Synthetic peptide
YLTSTSN

SEQ ID NO: 33499 - protein, 7 aa, synthetic construct
  REGION 1..7: note = Description of Artificial Sequence: Synthetic peptide
YKPGLQS

SEQ ID NO: 33500 - protein, 7 aa, synthetic construct
  REGION 1..7: note = Description of Artificial Sequence: Synthetic peptide
FPNVNSA

SEQ ID NO: 33501 - protein, 7 aa, synthetic construct
  REGION 1..7: note = Description of Artificial Sequence: Synthetic peptide
PGIGTPF

SEQ ID NO: 33502 - protein, 7 aa, synthetic construct
  REGION 1..7: note = Description of Artificial Sequence: Synthetic peptide
MIRDGSS

SEQ ID NO: 33503 - protein, 7 aa, synthetic construct
  REGION 1..7: note = Description of Artificial Sequence: Synthetic peptide
WGRSSMD

SEQ ID NO: 33504 - protein, 7 aa, synthetic construct
  REGION 1..7: note = Description of Artificial Sequence: Synthetic peptide
INTGSVK

SEQ ID NO: 33505 - protein, 7 aa, synthetic construct
  REGION 1..7: note = Description of Artificial Sequence: Synthetic peptide
PGQKQGI

SEQ ID NO: 33506 - protein, 7 aa, synthetic construct
  REGION 1..7: note = Description of Artificial Sequence: Synthetic peptide
ITSGSTR

SEQ ID NO: 33507 - protein, 7 aa, synthetic construct
  REGION 1..7: note = Description of Artificial Sequence: Synthetic peptide
TPVIGQG

SEQ ID NO: 33508 - protein, 7 aa, synthetic construct
  REGION 1..7: note = Description of Artificial Sequence: Synthetic peptide
PTHSSRD

SEQ ID NO: 33509 - protein, 7 aa, synthetic construct
  REGION 1..7: note = Description of Artificial Sequence: Synthetic peptide
PFSEMQK

SEQ ID NO: 33510 - protein, 7 aa, synthetic construct
  REGION 1..7: note = Description of Artificial Sequence: Synthetic peptide
LKSVSGQ

SEQ ID NO: 33511 - protein, 7 aa, synthetic construct
  REGION 1..7: note = Description of Artificial Sequence: Synthetic peptide
SPEKNMR

SEQ ID NO: 33512 - protein, 7 aa, synthetic construct
  REGION 1..7: note = Description of Artificial Sequence: Synthetic peptide
SNFRSLG

SEQ ID NO: 33513 - protein, 7 aa, synthetic construct
  REGION 1..7: note = Description of Artificial Sequence: Synthetic peptide
PLSHSNM

SEQ ID NO: 33514 - protein, 7 aa, synthetic construct
  REGION 1..7: note = Description of Artificial Sequence: Synthetic peptide
NGNISIG

SEQ ID NO: 33515 - protein, 7 aa, synthetic construct
  REGION 1..7: note = Description of Artificial Sequence: Synthetic peptide
WSGVSIN

SEQ ID NO: 33516 - protein, 7 aa, synthetic construct
  REGION 1..7: note = Description of Artificial Sequence: Synthetic peptide
NAPNSSG

SEQ ID NO: 33517 - protein, 7 aa, synthetic construct
  REGION 1..7: note = Description of Artificial Sequence: Synthetic peptide
TLPRTSG

SEQ ID NO: 33518 - protein, 7 aa, synthetic construct
  REGION 1..7: note = Description of Artificial Sequence: Synthetic peptide
DLTNHTK

SEQ ID NO: 33519 - protein, 7 aa, synthetic construct
  REGION 1..7: note = Description of Artificial Sequence: Synthetic peptide
TSNTKSV

SEQ ID NO: 33520 - protein, 7 aa, synthetic construct
  REGION 1..7: note = Description of Artificial Sequence: Synthetic peptide
SLYPSKG

SEQ ID NO: 33521 - protein, 7 aa, synthetic construct
  REGION 1..7: note = Description of Artificial Sequence: Synthetic peptide
TSQTKIV

SEQ ID NO: 33522 - protein, 7 aa, synthetic construct
  REGION 1..7: note = Description of Artificial Sequence: Synthetic peptide
TTHNIKG

SEQ ID NO: 33523 - protein, 7 aa, synthetic construct
  REGION 1..7: note = Description of Artificial Sequence: Synthetic peptide
PLQATGK

SEQ ID NO: 33524 - protein, 7 aa, synthetic construct
  REGION 1..7: note = Description of Artificial Sequence: Synthetic peptide
GASENMR

SEQ ID NO: 33525 - protein, 7 aa, synthetic construct
  REGION 1..7: note = Description of Artificial Sequence: Synthetic peptide
NSTSTSQ

SEQ ID NO: 33526 - protein, 7 aa, synthetic construct
  REGION 1..7: note = Description of Artificial Sequence: Synthetic peptide
VQPRTST

SEQ ID NO: 33527 - protein, 7 aa, synthetic construct
  REGION 1..7: note = Description of Artificial Sequence: Synthetic peptide
TTQTPYK

SEQ ID NO: 33528 - protein, 7 aa, synthetic construct
  REGION 1..7: note = Description of Artificial Sequence: Synthetic peptide
PQTNNPD

SEQ ID NO: 33529 - protein, 7 aa, synthetic construct
  REGION 1..7: note = Description of Artificial Sequence: Synthetic peptide
HGESRQA

SEQ ID NO: 33530 - protein, 7 aa, synthetic construct
  REGION 1..7: note = Description of Artificial Sequence: Synthetic peptide
NAMNTRG

SEQ ID NO: 33531 - protein, 7 aa, synthetic construct
  REGION 1..7: note = Description of Artificial Sequence: Synthetic peptide
SQSSPVA

SEQ ID NO: 33532 - protein, 7 aa, synthetic construct
  REGION 1..7: note = Description of Artificial Sequence: Synthetic peptide
NGYGQNQ

SEQ ID NO: 33533 - protein, 7 aa, synthetic construct
  REGION 1..7: note = Description of Artificial Sequence: Synthetic peptide
GNRSSGL

SEQ ID NO: 33534 - protein, 7 aa, synthetic construct
  REGION 1..7: note = Description of Artificial Sequence: Synthetic peptide
DKTNLSS

SEQ ID NO: 33535 - protein, 7 aa, synthetic construct
  REGION 1..7: note = Description of Artificial Sequence: Synthetic peptide
SSQEVFR

SEQ ID NO: 33536 - protein, 7 aa, synthetic construct
  REGION 1..7: note = Description of Artificial Sequence: Synthetic peptide
DREATSR

SEQ ID NO: 33537 - protein, 7 aa, synthetic construct
  REGION 1..7: note = Description of Artificial Sequence: Synthetic peptide
LPTDSLR

SEQ ID NO: 33538 - protein, 7 aa, synthetic construct
  REGION 1..7: note = Description of Artificial Sequence: Synthetic peptide
TRDSSLH

SEQ ID NO: 33539 - protein, 7 aa, synthetic construct
  REGION 1..7: note = Description of Artificial Sequence: Synthetic peptide
NQSSSAR

SEQ ID NO: 33540 - protein, 7 aa, synthetic construct
  REGION 1..7: note = Description of Artificial Sequence: Synthetic peptide
SNDNSLR

SEQ ID NO: 33541 - protein, 7 aa, synthetic construct
  REGION 1..7: note = Description of Artificial Sequence: Synthetic peptide
APSAGNS

SEQ ID NO: 33542 - protein, 7 aa, synthetic construct
  REGION 1..7: note = Description of Artificial Sequence: Synthetic peptide
NSHLALK

SEQ ID NO: 33543 - protein, 7 aa, synthetic construct
  REGION 1..7: note = Description of Artificial Sequence: Synthetic peptide
LVSSKSS

SEQ ID NO: 33544 - protein, 7 aa, synthetic construct
  REGION 1..7: note = Description of Artificial Sequence: Synthetic peptide
DQKTVNR

SEQ ID NO: 33545 - protein, 7 aa, synthetic construct
  REGION 1..7: note = Description of Artificial Sequence: Synthetic peptide
QAVARQA

SEQ ID NO: 33546 - protein, 7 aa, synthetic construct
  REGION 1..7: note = Description of Artificial Sequence: Synthetic peptide
PRETHKQ

SEQ ID NO: 33547 - protein, 7 aa, synthetic construct
  REGION 1..7: note = Description of Artificial Sequence: Synthetic peptide
SDQVRSA

SEQ ID NO: 33548 - protein, 7 aa, synthetic construct
  REGION 1..7: note = Description of Artificial Sequence: Synthetic peptide
SNNKANV

SEQ ID NO: 33549 - protein, 7 aa, synthetic construct
  REGION 1..7: note = Description of Artificial Sequence: Synthetic peptide
SSTKSSL

SEQ ID NO: 33550 - protein, 7 aa, synthetic construct
  REGION 1..7: note = Description of Artificial Sequence: Synthetic peptide
VNTSHTN

SEQ ID NO: 33551 - protein, 7 aa, synthetic construct
  REGION 1..7: note = Description of Artificial Sequence: Synthetic peptide
TTIPKRQ

SEQ ID NO: 33552 - protein, 7 aa, synthetic construct
  REGION 1..7: note = Description of Artificial Sequence: Synthetic peptide
HVQDGRT

SEQ ID NO: 33553 - protein, 7 aa, synthetic construct
  REGION 1..7: note = Description of Artificial Sequence: Synthetic peptide
LDFKTLP

SEQ ID NO: 33554 - protein, 7 aa, synthetic construct
  REGION 1..7: note = Description of Artificial Sequence: Synthetic peptide
SSLGHND

SEQ ID NO: 33555 - protein, 7 aa, synthetic construct
  REGION 1..7: note = Description of Artificial Sequence: Synthetic peptide
FNTSKLS

SEQ ID NO: 33556 - protein, 7 aa, synthetic construct
  REGION 1..7: note = Description of Artificial Sequence: Synthetic peptide
GSAQSPR

SEQ ID NO: 33557 - protein, 7 aa, synthetic construct
  REGION 1..7: note = Description of Artificial Sequence: Synthetic peptide
VQPSGRP

SEQ ID NO: 33558 - protein, 7 aa, synthetic construct
  REGION 1..7: note = Description of Artificial Sequence: Synthetic peptide
NGSGQYQ

SEQ ID NO: 33559 - protein, 7 aa, synthetic construct
  REGION 1..7: note = Description of Artificial Sequence: Synthetic peptide
GYSNQMT

SEQ ID NO: 33560 - protein, 7 aa, synthetic construct
  REGION 1..7: note = Description of Artificial Sequence: Synthetic peptide
KTSETRS

SEQ ID NO: 33561 - protein, 7 aa, synthetic construct
  REGION 1..7: note = Description of Artificial Sequence: Synthetic peptide
PTTRMVN

SEQ ID NO: 33562 - protein, 7 aa, synthetic construct
  REGION 1..7: note = Description of Artificial Sequence: Synthetic peptide
SPARASL

SEQ ID NO: 33563 - protein, 7 aa, synthetic construct
  REGION 1..7: note = Description of Artificial Sequence: Synthetic peptide
TSRTSYE

SEQ ID NO: 33564 - protein, 7 aa, synthetic construct
  REGION 1..7: note = Description of Artificial Sequence: Synthetic peptide
SSPSRSS

SEQ ID NO: 33565 - protein, 7 aa, synthetic construct
  REGION 1..7: note = Description of Artificial Sequence: Synthetic peptide
SVNSHHG

SEQ ID NO: 33566 - protein, 7 aa, synthetic construct
  REGION 1..7: note = Description of Artificial Sequence: Synthetic peptide
LDKRSVE

SEQ ID NO: 33567 - protein, 7 aa, synthetic construct
  REGION 1..7: note = Description of Artificial Sequence: Synthetic peptide
HITSNHA

SEQ ID NO: 33568 - protein, 7 aa, synthetic construct
  REGION 1..7: note = Description of Artificial Sequence: Synthetic peptide
SITDRHS

SEQ ID NO: 33569 - protein, 7 aa, synthetic construct
  REGION 1..7: note = Description of Artificial Sequence: Synthetic peptide
SGVTTRG

SEQ ID NO: 33570 - protein, 7 aa, synthetic construct
  REGION 1..7: note = Description of Artificial Sequence: Synthetic peptide
HARASTA

SEQ ID NO: 33571 - protein, 7 aa, synthetic construct
  REGION 1..7: note = Description of Artificial Sequence: Synthetic peptide
LNGTPQS

SEQ ID NO: 33572 - protein, 7 aa, synthetic construct
  REGION 1..7: note = Description of Artificial Sequence: Synthetic peptide
GMSSPHI

SEQ ID NO: 33573 - protein, 7 aa, synthetic construct
  REGION 1..7: note = Description of Artificial Sequence: Synthetic peptide
TSMNGNK

SEQ ID NO: 33574 - protein, 7 aa, synthetic construct
  REGION 1..7: note = Description of Artificial Sequence: Synthetic peptide
SRVEINR

SEQ ID NO: 33575 - protein, 7 aa, synthetic construct
  REGION 1..7: note = Description of Artificial Sequence: Synthetic peptide
LQKPSLV

SEQ ID NO: 33576 - protein, 7 aa, synthetic construct
  REGION 1..7: note = Description of Artificial Sequence: Synthetic peptide
GGHKSLN

SEQ ID NO: 33577 - protein, 7 aa, synthetic construct
  REGION 1..7: note = Description of Artificial Sequence: Synthetic peptide
AESGGSR

SEQ ID NO: 33578 - protein, 7 aa, synthetic construct
  REGION 1..7: note = Description of Artificial Sequence: Synthetic peptide
DGGNQRS

SEQ ID NO: 33579 - protein, 7 aa, synthetic construct
  REGION 1..7: note = Description of Artificial Sequence: Synthetic peptide
YGSGQNQ

SEQ ID NO: 33580 - protein, 7 aa, synthetic construct
  REGION 1..7: note = Description of Artificial Sequence: Synthetic peptide
VGSDSST

SEQ ID NO: 33581 - protein, 7 aa, synthetic construct
  REGION 1..7: note = Description of Artificial Sequence: Synthetic peptide
HMTHTTA

SEQ ID NO: 33582 - protein, 7 aa, synthetic construct
  REGION 1..7: note = Description of Artificial Sequence: Synthetic peptide
DNISRSR

SEQ ID NO: 33583 - protein, 7 aa, synthetic construct
  REGION 1..7: note = Description of Artificial Sequence: Synthetic peptide
MGTHSIG

SEQ ID NO: 33584 - protein, 7 aa, synthetic construct
  REGION 1..7: note = Description of Artificial Sequence: Synthetic peptide
GQIKNLG

SEQ ID NO: 33585 - protein, 7 aa, synthetic construct
  REGION 1..7: note = Description of Artificial Sequence: Synthetic peptide
NLASSSY

SEQ ID NO: 33586 - protein, 7 aa, synthetic construct
  REGION 1..7: note = Description of Artificial Sequence: Synthetic peptide
GSAGNML

SEQ ID NO: 33587 - protein, 7 aa, synthetic construct
  REGION 1..7: note = Description of Artificial Sequence: Synthetic peptide
LLTSPNS

SEQ ID NO: 33588 - protein, 7 aa, synthetic construct
  REGION 1..7: note = Description of Artificial Sequence: Synthetic peptide
RPASTHT

SEQ ID NO: 33589 - protein, 7 aa, synthetic construct
  REGION 1..7: note = Description of Artificial Sequence: Synthetic peptide
SSSDKLR

SEQ ID NO: 33590 - protein, 7 aa, synthetic construct
  REGION 1..7: note = Description of Artificial Sequence: Synthetic peptide
DGLRNSL

SEQ ID NO: 33591 - protein, 7 aa, synthetic construct
  REGION 1..7: note = Description of Artificial Sequence: Synthetic peptide
DVLSKSQ

SEQ ID NO: 33592 - protein, 7 aa, synthetic construct
  REGION 1..7: note = Description of Artificial Sequence: Synthetic peptide
VPSQNRA

SEQ ID NO: 33593 - protein, 7 aa, synthetic construct
  REGION 1..7: note = Description of Artificial Sequence: Synthetic peptide
VGSQTNS

SEQ ID NO: 33594 - protein, 7 aa, synthetic construct
  REGION 1..7: note = Description of Artificial Sequence: Synthetic peptide
SPHKQAN

SEQ ID NO: 33595 - protein, 7 aa, synthetic construct
  REGION 1..7: note = Description of Artificial Sequence: Synthetic peptide
VSVDKRP

SEQ ID NO: 33596 - protein, 7 aa, synthetic construct
  REGION 1..7: note = Description of Artificial Sequence: Synthetic peptide
SRVTVSQ

SEQ ID NO: 33597 - protein, 7 aa, synthetic construct
  REGION 1..7: note = Description of Artificial Sequence: Synthetic peptide
ARGASTN

SEQ ID NO: 33598 - protein, 7 aa, synthetic construct
  REGION 1..7: note = Description of Artificial Sequence: Synthetic peptide
HVTKSTA

SEQ ID NO: 33599 - protein, 7 aa, synthetic construct
  REGION 1..7: note = Description of Artificial Sequence: Synthetic peptide
VQQSKAY

SEQ ID NO: 33600 - protein, 7 aa, synthetic construct
  REGION 1..7: note = Description of Artificial Sequence: Synthetic peptide
ANATPHH

SEQ ID NO: 33601 - protein, 7 aa, synthetic construct
  REGION 1..7: note = Description of Artificial Sequence: Synthetic peptide
NGSGQKQ

SEQ ID NO: 33602 - protein, 7 aa, synthetic construct
  REGION 1..7: note = Description of Artificial Sequence: Synthetic peptide
YNSTTAT

SEQ ID NO: 33603 - protein, 7 aa, synthetic construct
  REGION 1..7: note = Description of Artificial Sequence: Synthetic peptide
NRHERVI

SEQ ID NO: 33604 - protein, 7 aa, synthetic construct
  REGION 1..7: note = Description of Artificial Sequence: Synthetic peptide
RPAGQHS

SEQ ID NO: 33605 - protein, 7 aa, synthetic construct
  REGION 1..7: note = Description of Artificial Sequence: Synthetic peptide
SAQKNLI

SEQ ID NO: 33606 - protein, 7 aa, synthetic construct
  REGION 1..7: note = Description of Artificial Sequence: Synthetic peptide
VMDVQHR

SEQ ID NO: 33607 - protein, 7 aa, synthetic construct
  REGION 1..7: note = Description of Artificial Sequence: Synthetic peptide
NRSNNSV

SEQ ID NO: 33608 - protein, 7 aa, synthetic construct
  REGION 1..7: note = Description of Artificial Sequence: Synthetic peptide
REVDGIR

SEQ ID NO: 33609 - protein, 7 aa, synthetic construct
  REGION 1..7: note = Description of Artificial Sequence: Synthetic peptide
GTTSSRD

SEQ ID NO: 33610 - protein, 7 aa, synthetic construct
  REGION 1..7: note = Description of Artificial Sequence: Synthetic peptide
RYSRDNV

SEQ ID NO: 33611 - protein, 7 aa, synthetic construct
  REGION 1..7: note = Description of Artificial Sequence: Synthetic peptide
PKLAADL

SEQ ID NO: 33612 - protein, 7 aa, synthetic construct
  REGION 1..7: note = Description of Artificial Sequence: Synthetic peptide
TTASSPT

SEQ ID NO: 33613 - protein, 7 aa, synthetic construct
  REGION 1..7: note = Description of Artificial Sequence: Synthetic peptide
GGTNNLN

SEQ ID NO: 33614 - protein, 7 aa, synthetic construct
  REGION 1..7: note = Description of Artificial Sequence: Synthetic peptide
TNVDKPF

SEQ ID NO: 33615 - protein, 7 aa, synthetic construct
  REGION 1..7: note = Description of Artificial Sequence: Synthetic peptide
PPLDQVY

SEQ ID NO: 33616 - protein, 7 aa, synthetic construct
  REGION 1..7: note = Description of Artificial Sequence: Synthetic peptide
VVNALRG

SEQ ID NO: 33617 - protein, 7 aa, synthetic construct
  REGION 1..7: note = Description of Artificial Sequence: Synthetic peptide
YFTDDTR

SEQ ID NO: 33618 - protein, 7 aa, synthetic construct
  REGION 1..7: note = Description of Artificial Sequence: Synthetic peptide
RQTDKLS

SEQ ID NO: 33619 - protein, 7 aa, synthetic construct
  REGION 1..7: note = Description of Artificial Sequence: Synthetic peptide
WNKTSPQ

SEQ ID NO: 33620 - protein, 7 aa, synthetic construct
  REGION 1..7: note = Description of Artificial Sequence: Synthetic peptide
SADTRPV

SEQ ID NO: 33621 - protein, 7 aa, synthetic construct
  REGION 1..7: note = Description of Artificial Sequence: Synthetic peptide
PSSGHSR

SEQ ID NO: 33622 - protein, 7 aa, synthetic construct
  REGION 1..7: note = Description of Artificial Sequence: Synthetic peptide
NRESPQR

SEQ ID NO: 33623 - protein, 7 aa, synthetic construct
  REGION 1..7: note = Description of Artificial Sequence: Synthetic peptide
STGSVSK

SEQ ID NO: 33624 - protein, 7 aa, synthetic construct
  REGION 1..7: note = Description of Artificial Sequence: Synthetic peptide
SPASLPK

SEQ ID NO: 33625 - protein, 7 aa, synthetic construct
  REGION 1..7: note = Description of Artificial Sequence: Synthetic peptide
KLGQDVR

SEQ ID NO: 33626 - protein, 7 aa, synthetic construct
  REGION 1..7: note = Description of Artificial Sequence: Synthetic peptide
FGESTMR

SEQ ID NO: 33627 - protein, 7 aa, synthetic construct
  REGION 1..7: note = Description of Artificial Sequence: Synthetic peptide
RDTRESQ

SEQ ID NO: 33628 - protein, 7 aa, synthetic construct
  REGION 1..7: note = Description of Artificial Sequence: Synthetic peptide
NNPNRDQ

SEQ ID NO: 33629 - protein, 7 aa, synthetic construct
  REGION 1..7: note = Description of Artificial Sequence: Synthetic peptide
QSSSQQR

SEQ ID NO: 33630 - protein, 7 aa, synthetic construct
  REGION 1..7: note = Description of Artificial Sequence: Synthetic peptide
GSLDNRK

SEQ ID NO: 33631 - protein, 7 aa, synthetic construct
  REGION 1..7: note = Description of Artificial Sequence: Synthetic peptide
PGSGSNH

SEQ ID NO: 33632 - protein, 7 aa, synthetic construct
  REGION 1..7: note = Description of Artificial Sequence: Synthetic peptide
DLDTKAL

SEQ ID NO: 33633 - protein, 7 aa, synthetic construct
  REGION 1..7: note = Description of Artificial Sequence: Synthetic peptide
QPTRSTA

SEQ ID NO: 33634 - protein, 7 aa, synthetic construct
  REGION 1..7: note = Description of Artificial Sequence: Synthetic peptide
PSNTGTI

SEQ ID NO: 33635 - protein, 7 aa, synthetic construct
  REGION 1..7: note = Description of Artificial Sequence: Synthetic peptide
ATSTNGI

SEQ ID NO: 33636 - protein, 7 aa, synthetic construct
  REGION 1..7: note = Description of Artificial Sequence: Synthetic peptide
EGSGRLT

SEQ ID NO: 33637 - protein, 7 aa, synthetic construct
  REGION 1..7: note = Description of Artificial Sequence: Synthetic peptide
TQMGKSN

SEQ ID NO: 33638 - protein, 7 aa, synthetic construct
  REGION 1..7: note = Description of Artificial Sequence: Synthetic peptide
YNKNAQL

SEQ ID NO: 33639 - protein, 7 aa, synthetic construct
  REGION 1..7: note = Description of Artificial Sequence: Synthetic peptide
TGNKGGV

SEQ ID NO: 33640 - protein, 7 aa, synthetic construct
  REGION 1..7: note = Description of Artificial Sequence: Synthetic peptide
PPHDGQR

SEQ ID NO: 33641 - protein, 7 aa, synthetic construct
  REGION 1..7: note = Description of Artificial Sequence: Synthetic peptide
NNVGVRG

SEQ ID NO: 33642 - protein, 7 aa, synthetic construct
  REGION 1..7: note = Description of Artificial Sequence: Synthetic peptide
REKQHNG

SEQ ID NO: 33643 - protein, 7 aa, synthetic construct
  REGION 1..7: note = Description of Artificial Sequence: Synthetic peptide
QVPASHG

SEQ ID NO: 33644 - protein, 7 aa, synthetic construct
  REGION 1..7: note = Description of Artificial Sequence: Synthetic peptide
HPETAFK

SEQ ID NO: 33645 - protein, 7 aa, synthetic construct
  REGION 1..7: note = Description of Artificial Sequence: Synthetic peptide
LNQHSSI

SEQ ID NO: 33646 - protein, 7 aa, synthetic construct
  REGION 1..7: note = Description of Artificial Sequence: Synthetic peptide
RTVDSSD

SEQ ID NO: 33647 - protein, 7 aa, synthetic construct
  REGION 1..7: note = Description of Artificial Sequence: Synthetic peptide
RTRNTPT

SEQ ID NO: 33648 - protein, 7 aa, synthetic construct
  REGION 1..7: note = Description of Artificial Sequence: Synthetic peptide
FRTQSVG

SEQ ID NO: 33649 - protein, 7 aa, synthetic construct
  REGION 1..7: note = Description of Artificial Sequence: Synthetic peptide
PTGAHVT

SEQ ID NO: 33650 - protein, 7 aa, synthetic construct
  REGION 1..7: note = Description of Artificial Sequence: Synthetic peptide
PHSTGSI

SEQ ID NO: 33651 - protein, 7 aa, synthetic construct
  REGION 1..7: note = Description of Artificial Sequence: Synthetic peptide
AQARLMN

SEQ ID NO: 33652 - protein, 7 aa, synthetic construct
  REGION 1..7: note = Description of Artificial Sequence: Synthetic peptide
HSSKSHD

SEQ ID NO: 33653 - protein, 7 aa, synthetic construct
  REGION 1..7: note = Description of Artificial Sequence: Synthetic peptide
GCITNCS

SEQ ID NO: 33654 - protein, 7 aa, synthetic construct
  REGION 1..7: note = Description of Artificial Sequence: Synthetic peptide
ERMGKNQ

SEQ ID NO: 33655 - protein, 7 aa, synthetic construct
  REGION 1..7: note = Description of Artificial Sequence: Synthetic peptide
MTQHKQA

SEQ ID NO: 33656 - protein, 7 aa, synthetic construct
  REGION 1..7: note = Description of Artificial Sequence: Synthetic peptide
KSDAHTA

SEQ ID NO: 33657 - protein, 7 aa, synthetic construct
  REGION 1..7: note = Description of Artificial Sequence: Synthetic peptide
TVTNAAR

SEQ ID NO: 33658 - protein, 7 aa, synthetic construct
  REGION 1..7: note = Description of Artificial Sequence: Synthetic peptide
VSGTPRV

SEQ ID NO: 33659 - protein, 7 aa, synthetic construct
  REGION 1..7: note = Description of Artificial Sequence: Synthetic peptide
YPNGKSS

SEQ ID NO: 33660 - protein, 7 aa, synthetic construct
  REGION 1..7: note = Description of Artificial Sequence: Synthetic peptide
AVSKGGP

SEQ ID NO: 33661 - protein, 7 aa, synthetic construct
  REGION 1..7: note = Description of Artificial Sequence: Synthetic peptide
PEISASR

SEQ ID NO: 33662 - protein, 7 aa, synthetic construct
  REGION 1..7: note = Description of Artificial Sequence: Synthetic peptide
QNRNTVG

SEQ ID NO: 33663 - protein, 7 aa, synthetic construct
  REGION 1..7: note = Description of Artificial Sequence: Synthetic peptide
SVSGRHI

SEQ ID NO: 33664 - protein, 7 aa, synthetic construct
  REGION 1..7: note = Description of Artificial Sequence: Synthetic peptide
MPARNVS

SEQ ID NO: 33665 - protein, 7 aa, synthetic construct
  REGION 1..7: note = Description of Artificial Sequence: Synthetic peptide
NPRMSMS

SEQ ID NO: 33666 - protein, 7 aa, synthetic construct
  REGION 1..7: note = Description of Artificial Sequence: Synthetic peptide
SRAQSIP

SEQ ID NO: 33667 - protein, 7 aa, synthetic construct
  REGION 1..7: note = Description of Artificial Sequence: Synthetic peptide
PLINRTM

SEQ ID NO: 33668 - protein, 7 aa, synthetic construct
  REGION 1..7: note = Description of Artificial Sequence: Synthetic peptide
SAELRVA

SEQ ID NO: 33669 - protein, 7 aa, synthetic construct
  REGION 1..7: note = Description of Artificial Sequence: Synthetic peptide
AISPTYM

SEQ ID NO: 33670 - protein, 7 aa, synthetic construct
  REGION 1..7: note = Description of Artificial Sequence: Synthetic peptide
RDDKQNS

SEQ ID NO: 33671 - protein, 7 aa, synthetic construct
  REGION 1..7: note = Description of Artificial Sequence: Synthetic peptide
PSQEGQQ

SEQ ID NO: 33672 - protein, 7 aa, synthetic construct
  REGION 1..7: note = Description of Artificial Sequence: Synthetic peptide
PTRTASN

SEQ ID NO: 33673 - protein, 7 aa, synthetic construct
  REGION 1..7: note = Description of Artificial Sequence: Synthetic peptide
GRLTSSI

SEQ ID NO: 33674 - protein, 7 aa, synthetic construct
  REGION 1..7: note = Description of Artificial Sequence: Synthetic peptide
MLGSSNK

SEQ ID NO: 33675 - protein, 7 aa, synthetic construct
  REGION 1..7: note = Description of Artificial Sequence: Synthetic peptide
EVTNSPR

SEQ ID NO: 33676 - protein, 7 aa, synthetic construct
  REGION 1..7: note = Description of Artificial Sequence: Synthetic peptide
GGVGGKS

SEQ ID NO: 33677 - protein, 7 aa, synthetic construct
  REGION 1..7: note = Description of Artificial Sequence: Synthetic peptide
NATSPRK

SEQ ID NO: 33678 - protein, 7 aa, synthetic construct
  REGION 1..7: note = Description of Artificial Sequence: Synthetic peptide
SLSKQAA

SEQ ID NO: 33679 - protein, 7 aa, synthetic construct
  REGION 1..7: note = Description of Artificial Sequence: Synthetic peptide
GQAMPFK

SEQ ID NO: 33680 - protein, 7 aa, synthetic construct
  REGION 1..7: note = Description of Artificial Sequence: Synthetic peptide
YRSKEIG

SEQ ID NO: 33681 - protein, 7 aa, synthetic construct
  REGION 1..7: note = Description of Artificial Sequence: Synthetic peptide
NSHQKPS

SEQ ID NO: 33682 - protein, 7 aa, synthetic construct
  REGION 1..7: note = Description of Artificial Sequence: Synthetic peptide
ATANTHM

SEQ ID NO: 33683 - protein, 7 aa, synthetic construct
  REGION 1..7: note = Description of Artificial Sequence: Synthetic peptide
PRHAPLL

SEQ ID NO: 33684 - protein, 7 aa, synthetic construct
  REGION 1..7: note = Description of Artificial Sequence: Synthetic peptide
GRDTRSS

SEQ ID NO: 33685 - protein, 7 aa, synthetic construct
  REGION 1..7: note = Description of Artificial Sequence: Synthetic peptide
DSVAGFT

SEQ ID NO: 33686 - protein, 7 aa, synthetic construct
  REGION 1..7: note = Description of Artificial Sequence: Synthetic peptide
QRVHPSG

SEQ ID NO: 33687 - protein, 7 aa, synthetic construct
  REGION 1..7: note = Description of Artificial Sequence: Synthetic peptide
YQHRAPS

SEQ ID NO: 33688 - protein, 7 aa, synthetic construct
  REGION 1..7: note = Description of Artificial Sequence: Synthetic peptide
NGQAGNR

SEQ ID NO: 33689 - protein, 7 aa, synthetic construct
  REGION 1..7: note = Description of Artificial Sequence: Synthetic peptide
GRETVSR

SEQ ID NO: 33690 - protein, 7 aa, synthetic construct
  REGION 1..7: note = Description of Artificial Sequence: Synthetic peptide
PQDSRGM

SEQ ID NO: 33691 - protein, 7 aa, synthetic construct
  REGION 1..7: note = Description of Artificial Sequence: Synthetic peptide
FPLTKPA

SEQ ID NO: 33692 - protein, 7 aa, synthetic construct
  REGION 1..7: note = Description of Artificial Sequence: Synthetic peptide
GIAGVTR

SEQ ID NO: 33693 - protein, 7 aa, synthetic construct
  REGION 1..7: note = Description of Artificial Sequence: Synthetic peptide
YNRSERP

SEQ ID NO: 33694 - protein, 7 aa, synthetic construct
  REGION 1..7: note = Description of Artificial Sequence: Synthetic peptide
VTGRAYL

SEQ ID NO: 33695 - protein, 7 aa, synthetic construct
  REGION 1..7: note = Description of Artificial Sequence: Synthetic peptide
QNRVSNG

SEQ ID NO: 33696 - protein, 7 aa, synthetic construct
  REGION 1..7: note = Description of Artificial Sequence: Synthetic peptide
TRSQGIL

SEQ ID NO: 33697 - protein, 7 aa, synthetic construct
  REGION 1..7: note = Description of Artificial Sequence: Synthetic peptide
YGRGRDL

SEQ ID NO: 33698 - protein, 7 aa, synthetic construct
  REGION 1..7: note = Description of Artificial Sequence: Synthetic peptide
GSSPSLR

SEQ ID NO: 33699 - protein, 7 aa, synthetic construct
  REGION 1..7: note = Description of Artificial Sequence: Synthetic peptide
VNTNRAA

SEQ ID NO: 33700 - protein, 7 aa, synthetic construct
  REGION 1..7: note = Description of Artificial Sequence: Synthetic peptide
RPIASSG

SEQ ID NO: 33701 - protein, 7 aa, synthetic construct
  REGION 1..7: note = Description of Artificial Sequence: Synthetic peptide
AGSSSPA

SEQ ID NO: 33702 - protein, 7 aa, synthetic construct
  REGION 1..7: note = Description of Artificial Sequence: Synthetic peptide
PTTGPQR

SEQ ID NO: 33703 - protein, 7 aa, synthetic construct
  REGION 1..7: note = Description of Artificial Sequence: Synthetic peptide
ISQSTTR

SEQ ID NO: 33704 - protein, 7 aa, synthetic construct
  REGION 1..7: note = Description of Artificial Sequence: Synthetic peptide
TNLPRSH

SEQ ID NO: 33705 - protein, 7 aa, synthetic construct
  REGION 1..7: note = Description of Artificial Sequence: Synthetic peptide
GNTNSFL

SEQ ID NO: 33706 - protein, 7 aa, synthetic construct
  REGION 1..7: note = Description of Artificial Sequence: Synthetic peptide
TLSQTVR

SEQ ID NO: 33707 - protein, 7 aa, synthetic construct
  REGION 1..7: note = Description of Artificial Sequence: Synthetic peptide
SSKAAIT

SEQ ID NO: 33708 - protein, 7 aa, synthetic construct
  REGION 1..7: note = Description of Artificial Sequence: Synthetic peptide
SSGPSSG

SEQ ID NO: 33709 - protein, 7 aa, synthetic construct
  REGION 1..7: note = Description of Artificial Sequence: Synthetic peptide
AEKTRSL

SEQ ID NO: 33710 - protein, 7 aa, synthetic construct
  REGION 1..7: note = Description of Artificial Sequence: Synthetic peptide
STPIRSV

SEQ ID NO: 33711 - protein, 7 aa, synthetic construct
  REGION 1..7: note = Description of Artificial Sequence: Synthetic peptide
SFSGANK

SEQ ID NO: 33712 - protein, 7 aa, synthetic construct
  REGION 1..7: note = Description of Artificial Sequence: Synthetic peptide
VNTTRAE

SEQ ID NO: 33713 - protein, 7 aa, synthetic construct
  REGION 1..7: note = Description of Artificial Sequence: Synthetic peptide
LINPAGS

SEQ ID NO: 33714 - protein, 7 aa, synthetic construct
  REGION 1..7: note = Description of Artificial Sequence: Synthetic peptide
MSSTRSI

SEQ ID NO: 33715 - protein, 7 aa, synthetic construct
  REGION 1..7: note = Description of Artificial Sequence: Synthetic peptide
SPHGAGY

SEQ ID NO: 33716 - protein, 7 aa, synthetic construct
  REGION 1..7: note = Description of Artificial Sequence: Synthetic peptide
HGTSPLR

SEQ ID NO: 33717 - protein, 7 aa, synthetic construct
  REGION 1..7: note = Description of Artificial Sequence: Synthetic peptide
SNYKSSN

SEQ ID NO: 33718 - protein, 7 aa, synthetic construct
  REGION 1..7: note = Description of Artificial Sequence: Synthetic peptide
GNGTRQN

SEQ ID NO: 33719 - protein, 7 aa, synthetic construct
  REGION 1..7: note = Description of Artificial Sequence: Synthetic peptide
GTDNNTR

SEQ ID NO: 33720 - protein, 7 aa, synthetic construct
  REGION 1..7: note = Description of Artificial Sequence: Synthetic peptide
TRTAGVD

SEQ ID NO: 33721 - protein, 7 aa, synthetic construct
  REGION 1..7: note = Description of Artificial Sequence: Synthetic peptide
TGAQSTM

SEQ ID NO: 33722 - protein, 7 aa, synthetic construct
  REGION 1..7: note = Description of Artificial Sequence: Synthetic peptide
RSASGQL

SEQ ID NO: 33723 - protein, 7 aa, synthetic construct
  REGION 1..7: note = Description of Artificial Sequence: Synthetic peptide
PRKISNA

SEQ ID NO: 33724 - protein, 7 aa, synthetic construct
  REGION 1..7: note = Description of Artificial Sequence: Synthetic peptide
ATTSRIS

SEQ ID NO: 33725 - protein, 7 aa, synthetic construct
  REGION 1..7: note = Description of Artificial Sequence: Synthetic peptide
TTPTYTG

SEQ ID NO: 33726 - protein, 7 aa, synthetic construct
  REGION 1..7: note = Description of Artificial Sequence: Synthetic peptide
GGQNSSK

SEQ ID NO: 33727 - protein, 7 aa, synthetic construct
  REGION 1..7: note = Description of Artificial Sequence: Synthetic peptide
SNTNSAN

SEQ ID NO: 33728 - protein, 7 aa, synthetic construct
  REGION 1..7: note = Description of Artificial Sequence: Synthetic peptide
PTQNGRS

SEQ ID NO: 33729 - protein, 7 aa, synthetic construct
  REGION 1..7: note = Description of Artificial Sequence: Synthetic peptide
SQHRPSS

SEQ ID NO: 33730 - protein, 7 aa, synthetic construct
  REGION 1..7: note = Description of Artificial Sequence: Synthetic peptide
SESGQQR

SEQ ID NO: 33731 - protein, 7 aa, synthetic construct
  REGION 1..7: note = Description of Artificial Sequence: Synthetic peptide
GTGHQRS

SEQ ID NO: 33732 - protein, 7 aa, synthetic construct
  REGION 1..7: note = Description of Artificial Sequence: Synthetic peptide
PSTSSAG

SEQ ID NO: 33733 - protein, 7 aa, synthetic construct
  REGION 1..7: note = Description of Artificial Sequence: Synthetic peptide
YTASALR

SEQ ID NO: 33734 - protein, 7 aa, synthetic construct
  REGION 1..7: note = Description of Artificial Sequence: Synthetic peptide
TGDSGKV

SEQ ID NO: 33735 - protein, 7 aa, synthetic construct
  REGION 1..7: note = Description of Artificial Sequence: Synthetic peptide
SKVTAQS

SEQ ID NO: 33736 - protein, 7 aa, synthetic construct
  REGION 1..7: note = Description of Artificial Sequence: Synthetic peptide
MSLSKNH

SEQ ID NO: 33737 - protein, 7 aa, synthetic construct
  REGION 1..7: note = Description of Artificial Sequence: Synthetic peptide
NRSTDFK

SEQ ID NO: 33738 - protein, 7 aa, synthetic construct
  REGION 1..7: note = Description of Artificial Sequence: Synthetic peptide
LGLRDNT

SEQ ID NO: 33739 - protein, 7 aa, synthetic construct
  REGION 1..7: note = Description of Artificial Sequence: Synthetic peptide
SRNAANA

SEQ ID NO: 33740 - protein, 7 aa, synthetic construct
  REGION 1..7: note = Description of Artificial Sequence: Synthetic peptide
QNQNSGR

SEQ ID NO: 33741 - protein, 7 aa, synthetic construct
  REGION 1..7: note = Description of Artificial Sequence: Synthetic peptide
SVSNTNT

SEQ ID NO: 33742 - protein, 7 aa, synthetic construct
  REGION 1..7: note = Description of Artificial Sequence: Synthetic peptide
ASSRESL

SEQ ID NO: 33743 - protein, 7 aa, synthetic construct
  REGION 1..7: note = Description of Artificial Sequence: Synthetic peptide
KLSQTSQ

SEQ ID NO: 33744 - protein, 7 aa, synthetic construct
  REGION 1..7: note = Description of Artificial Sequence: Synthetic peptide
RDVGSAA

SEQ ID NO: 33745 - protein, 7 aa, synthetic construct
  REGION 1..7: note = Description of Artificial Sequence: Synthetic peptide
NSRSHHE

SEQ ID NO: 33746 - protein, 7 aa, synthetic construct
  REGION 1..7: note = Description of Artificial Sequence: Synthetic peptide
SGSDKFS

SEQ ID NO: 33747 - protein, 7 aa, synthetic construct
  REGION 1..7: note = Description of Artificial Sequence: Synthetic peptide
SHPSSFG

SEQ ID NO: 33748 - protein, 7 aa, synthetic construct
  REGION 1..7: note = Description of Artificial Sequence: Synthetic peptide
SGMSRHV

SEQ ID NO: 33749 - protein, 7 aa, synthetic construct
  REGION 1..7: note = Description of Artificial Sequence: Synthetic peptide
GPTDHKL

SEQ ID NO: 33750 - protein, 7 aa, synthetic construct
  REGION 1..7: note = Description of Artificial Sequence: Synthetic peptide
INVSRST

SEQ ID NO: 33751 - protein, 7 aa, synthetic construct
  REGION 1..7: note = Description of Artificial Sequence: Synthetic peptide
PKLSHTG

SEQ ID NO: 33752 - protein, 7 aa, synthetic construct
  REGION 1..7: note = Description of Artificial Sequence: Synthetic peptide
FNMQRSQ

SEQ ID NO: 33753 - protein, 7 aa, synthetic construct
  REGION 1..7: note = Description of Artificial Sequence: Synthetic peptide
VPVTKSS

SEQ ID NO: 33754 - protein, 7 aa, synthetic construct
  REGION 1..7: note = Description of Artificial Sequence: Synthetic peptide
NSAAAMK

SEQ ID NO: 33755 - protein, 7 aa, synthetic construct
  REGION 1..7: note = Description of Artificial Sequence: Synthetic peptide
LVSPGHV

SEQ ID NO: 33756 - protein, 7 aa, synthetic construct
  REGION 1..7: note = Description of Artificial Sequence: Synthetic peptide
QVTVRPV

SEQ ID NO: 33757 - protein, 7 aa, synthetic construct
  REGION 1..7: note = Description of Artificial Sequence: Synthetic peptide
YGSRENS

SEQ ID NO: 33758 - protein, 7 aa, synthetic construct
  REGION 1..7: note = Description of Artificial Sequence: Synthetic peptide
QSSNARN

SEQ ID NO: 33759 - protein, 7 aa, synthetic construct
  REGION 1..7: note = Description of Artificial Sequence: Synthetic peptide
RAPGSNT

SEQ ID NO: 33760 - protein, 7 aa, synthetic construct
  REGION 1..7: note = Description of Artificial Sequence: Synthetic peptide
FNSGSGR

SEQ ID NO: 33761 - protein, 7 aa, synthetic construct
  REGION 1..7: note = Description of Artificial Sequence: Synthetic peptide
MNSNHRN

SEQ ID NO: 33762 - protein, 7 aa, synthetic construct
  REGION 1..7: note = Description of Artificial Sequence: Synthetic peptide
MGREMKG

SEQ ID NO: 33763 - protein, 7 aa, synthetic construct
  REGION 1..7: note = Description of Artificial Sequence: Synthetic peptide
AGPLNSL

SEQ ID NO: 33764 - protein, 7 aa, synthetic construct
  REGION 1..7: note = Description of Artificial Sequence: Synthetic peptide
NNVPLIK

SEQ ID NO: 33765 - protein, 7 aa, synthetic construct
  REGION 1..7: note = Description of Artificial Sequence: Synthetic peptide
QAQHTRS

SEQ ID NO: 33766 - protein, 7 aa, synthetic construct
  REGION 1..7: note = Description of Artificial Sequence: Synthetic peptide
GTASGVA

SEQ ID NO: 33767 - protein, 7 aa, synthetic construct
  REGION 1..7: note = Description of Artificial Sequence: Synthetic peptide
TSTLDYL

SEQ ID NO: 33768 - protein, 7 aa, synthetic construct
  REGION 1..7: note = Description of Artificial Sequence: Synthetic peptide
PGPEVGR

SEQ ID NO: 33769 - protein, 7 aa, synthetic construct
  REGION 1..7: note = Description of Artificial Sequence: Synthetic peptide
VNVSTFT

SEQ ID NO: 33770 - protein, 7 aa, synthetic construct
  REGION 1..7: note = Description of Artificial Sequence: Synthetic peptide
TAFPGYL

SEQ ID NO: 33771 - protein, 7 aa, synthetic construct
  REGION 1..7: note = Description of Artificial Sequence: Synthetic peptide
QVSAKSA

SEQ ID NO: 33772 - protein, 7 aa, synthetic construct
  REGION 1..7: note = Description of Artificial Sequence: Synthetic peptide
LAMERQR

SEQ ID NO: 33773 - protein, 7 aa, synthetic construct
  REGION 1..7: note = Description of Artificial Sequence: Synthetic peptide
LPQRGVS

SEQ ID NO: 33774 - protein, 7 aa, synthetic construct
  REGION 1..7: note = Description of Artificial Sequence: Synthetic peptide
RSSPASL

SEQ ID NO: 33775 - protein, 7 aa, synthetic construct
  REGION 1..7: note = Description of Artificial Sequence: Synthetic peptide
WSNGRTS

SEQ ID NO: 33776 - protein, 7 aa, synthetic construct
  REGION 1..7: note = Description of Artificial Sequence: Synthetic peptide
SNSASYG

SEQ ID NO: 33777 - protein, 7 aa, synthetic construct
  REGION 1..7: note = Description of Artificial Sequence: Synthetic peptide
PSQTKPS

SEQ ID NO: 33778 - protein, 7 aa, synthetic construct
  REGION 1..7: note = Description of Artificial Sequence: Synthetic peptide
YGSESNK

SEQ ID NO: 33779 - protein, 7 aa, synthetic construct
  REGION 1..7: note = Description of Artificial Sequence: Synthetic peptide
GLSPVLK

SEQ ID NO: 33780 - protein, 7 aa, synthetic construct
  REGION 1..7: note = Description of Artificial Sequence: Synthetic peptide
REDTKMH

SEQ ID NO: 33781 - protein, 7 aa, synthetic construct
  REGION 1..7: note = Description of Artificial Sequence: Synthetic peptide
NVLSNKH

SEQ ID NO: 33782 - protein, 7 aa, synthetic construct
  REGION 1..7: note = Description of Artificial Sequence: Synthetic peptide
SQSQTPE

SEQ ID NO: 33783 - protein, 7 aa, synthetic construct
  REGION 1..7: note = Description of Artificial Sequence: Synthetic peptide
SSNGNIV

SEQ ID NO: 33784 - protein, 7 aa, synthetic construct
  REGION 1..7: note = Description of Artificial Sequence: Synthetic peptide
SISGERD

SEQ ID NO: 33785 - protein, 7 aa, synthetic construct
  REGION 1..7: note = Description of Artificial Sequence: Synthetic peptide
KDASSWL

SEQ ID NO: 33786 - protein, 7 aa, synthetic construct
  REGION 1..7: note = Description of Artificial Sequence: Synthetic peptide
SPNSHPS

SEQ ID NO: 33787 - protein, 7 aa, synthetic construct
  REGION 1..7: note = Description of Artificial Sequence: Synthetic peptide
SSGSNRS

SEQ ID NO: 33788 - protein, 7 aa, synthetic construct
  REGION 1..7: note = Description of Artificial Sequence: Synthetic peptide
TTQSRSL

SEQ ID NO: 33789 - protein, 7 aa, synthetic construct
  REGION 1..7: note = Description of Artificial Sequence: Synthetic peptide
PGRPQTD

SEQ ID NO: 33790 - protein, 7 aa, synthetic construct
  REGION 1..7: note = Description of Artificial Sequence: Synthetic peptide
SVHQNRA

SEQ ID NO: 33791 - protein, 7 aa, synthetic construct
  REGION 1..7: note = Description of Artificial Sequence: Synthetic peptide
VGARTGG

SEQ ID NO: 33792 - protein, 7 aa, synthetic construct
  REGION 1..7: note = Description of Artificial Sequence: Synthetic peptide
GPGRNLI

SEQ ID NO: 33793 - protein, 7 aa, synthetic construct
  REGION 1..7: note = Description of Artificial Sequence: Synthetic peptide
NGSVQNQ

SEQ ID NO: 33794 - protein, 7 aa, synthetic construct
  REGION 1..7: note = Description of Artificial Sequence: Synthetic peptide
GFERNRE

SEQ ID NO: 33795 - protein, 7 aa, synthetic construct
  REGION 1..7: note = Description of Artificial Sequence: Synthetic peptide
ATHTSVS

SEQ ID NO: 33796 - protein, 7 aa, synthetic construct
  REGION 1..7: note = Description of Artificial Sequence: Synthetic peptide
IGKNSMA

SEQ ID NO: 33797 - protein, 7 aa, synthetic construct
  REGION 1..7: note = Description of Artificial Sequence: Synthetic peptide
NRVTQSS

SEQ ID NO: 33798 - protein, 7 aa, synthetic construct
  REGION 1..7: note = Description of Artificial Sequence: Synthetic peptide
GVNRIPA

SEQ ID NO: 33799 - protein, 7 aa, synthetic construct
  REGION 1..7: note = Description of Artificial Sequence: Synthetic peptide
VTANRST

SEQ ID NO: 33800 - protein, 7 aa, synthetic construct
  REGION 1..7: note = Description of Artificial Sequence: Synthetic peptide
SYADKQG

SEQ ID NO: 33801 - protein, 7 aa, synthetic construct
  REGION 1..7: note = Description of Artificial Sequence: Synthetic peptide
PLGATFA

SEQ ID NO: 33802 - protein, 7 aa, synthetic construct
  REGION 1..7: note = Description of Artificial Sequence: Synthetic peptide
LTATNPR

SEQ ID NO: 33803 - protein, 7 aa, synthetic construct
  REGION 1..7: note = Description of Artificial Sequence: Synthetic peptide
WDSKTPR

SEQ ID NO: 33804 - protein, 7 aa, synthetic construct
  REGION 1..7: note = Description of Artificial Sequence: Synthetic peptide
HTSTNTI

SEQ ID NO: 33805 - protein, 7 aa, synthetic construct
  REGION 1..7: note = Description of Artificial Sequence: Synthetic peptide
SGRDKIS

SEQ ID NO: 33806 - protein, 7 aa, synthetic construct
  REGION 1..7: note = Description of Artificial Sequence: Synthetic peptide
VDVRGMS

SEQ ID NO: 33807 - protein, 7 aa, synthetic construct
  REGION 1..7: note = Description of Artificial Sequence: Synthetic peptide
MVSSKSS

SEQ ID NO: 33808 - protein, 7 aa, synthetic construct
  REGION 1..7: note = Description of Artificial Sequence: Synthetic peptide
NALPNRG

SEQ ID NO: 33809 - protein, 7 aa, synthetic construct
  REGION 1..7: note = Description of Artificial Sequence: Synthetic peptide
INSLSSK

SEQ ID NO: 33810 - protein, 7 aa, synthetic construct
  REGION 1..7: note = Description of Artificial Sequence: Synthetic peptide
SGQHSLN

SEQ ID NO: 33811 - protein, 7 aa, synthetic construct
  REGION 1..7: note = Description of Artificial Sequence: Synthetic peptide
YAMERVG

SEQ ID NO: 33812 - protein, 7 aa, synthetic construct
  REGION 1..7: note = Description of Artificial Sequence: Synthetic peptide
NGSGQDQ

SEQ ID NO: 33813 - protein, 7 aa, synthetic construct
  REGION 1..7: note = Description of Artificial Sequence: Synthetic peptide
DRAGKQS

SEQ ID NO: 33814 - protein, 7 aa, synthetic construct
  REGION 1..7: note = Description of Artificial Sequence: Synthetic peptide
GGVPSRL

SEQ ID NO: 33815 - protein, 7 aa, synthetic construct
  REGION 1..7: note = Description of Artificial Sequence: Synthetic peptide
GVSATVK

SEQ ID NO: 33816 - protein, 7 aa, synthetic construct
  REGION 1..7: note = Description of Artificial Sequence: Synthetic peptide
DYSETRR

SEQ ID NO: 33817 - protein, 7 aa, synthetic construct
  REGION 1..7: note = Description of Artificial Sequence: Synthetic peptide
ITPSNIG

SEQ ID NO: 33818 - protein, 7 aa, synthetic construct
  REGION 1..7: note = Description of Artificial Sequence: Synthetic peptide
MATSTRN

SEQ ID NO: 33819 - protein, 7 aa, synthetic construct
  REGION 1..7: note = Description of Artificial Sequence: Synthetic peptide
MSHTKSN

SEQ ID NO: 33820 - protein, 7 aa, synthetic construct
  REGION 1..7: note = Description of Artificial Sequence: Synthetic peptide
MNRNGSL

SEQ ID NO: 33821 - protein, 7 aa, synthetic construct
  REGION 1..7: note = Description of Artificial Sequence: Synthetic peptide
DIMSPLK

SEQ ID NO: 33822 - protein, 7 aa, synthetic construct
  REGION 1..7: note = Description of Artificial Sequence: Synthetic peptide
NKSNGQS

SEQ ID NO: 33823 - protein, 7 aa, synthetic construct
  REGION 1..7: note = Description of Artificial Sequence: Synthetic peptide
PGTPSSG

SEQ ID NO: 33824 - protein, 7 aa, synthetic construct
  REGION 1..7: note = Description of Artificial Sequence: Synthetic peptide
SSVRPYA

SEQ ID NO: 33825 - protein, 7 aa, synthetic construct
  REGION 1..7: note = Description of Artificial Sequence: Synthetic peptide
MRSGTHN

SEQ ID NO: 33826 - protein, 7 aa, synthetic construct
  REGION 1..7: note = Description of Artificial Sequence: Synthetic peptide
GTPNTKV

SEQ ID NO: 33827 - protein, 7 aa, synthetic construct
  REGION 1..7: note = Description of Artificial Sequence: Synthetic peptide
PGLRDTA

SEQ ID NO: 33828 - protein, 7 aa, synthetic construct
  REGION 1..7: note = Description of Artificial Sequence: Synthetic peptide
STTGDSK

SEQ ID NO: 33829 - protein, 7 aa, synthetic construct
  REGION 1..7: note = Description of Artificial Sequence: Synthetic peptide
TSKPNSP

SEQ ID NO: 33830 - protein, 7 aa, synthetic construct
  REGION 1..7: note = Description of Artificial Sequence: Synthetic peptide
NSGTHFK

SEQ ID NO: 33831 - protein, 7 aa, synthetic construct
  REGION 1..7: note = Description of Artificial Sequence: Synthetic peptide
YGSPVHQ

SEQ ID NO: 33832 - protein, 7 aa, synthetic construct
  REGION 1..7: note = Description of Artificial Sequence: Synthetic peptide
FTFNAAT

SEQ ID NO: 33833 - protein, 7 aa, synthetic construct
  REGION 1..7: note = Description of Artificial Sequence: Synthetic peptide
AGENKLS

SEQ ID NO: 33834 - protein, 7 aa, synthetic construct
  REGION 1..7: note = Description of Artificial Sequence: Synthetic peptide
LIRGGNN

SEQ ID NO: 33835 - protein, 7 aa, synthetic construct
  REGION 1..7: note = Description of Artificial Sequence: Synthetic peptide
GSNRNPL

SEQ ID NO: 33836 - protein, 7 aa, synthetic construct
  REGION 1..7: note = Description of Artificial Sequence: Synthetic peptide
ITATHAH

SEQ ID NO: 33837 - protein, 7 aa, synthetic construct
  REGION 1..7: note = Description of Artificial Sequence: Synthetic peptide
DDYQHKG

SEQ ID NO: 33838 - protein, 7 aa, synthetic construct
  REGION 1..7: note = Description of Artificial Sequence: Synthetic peptide
QVTAIGA

SEQ ID NO: 33839 - protein, 7 aa, synthetic construct
  REGION 1..7: note = Description of Artificial Sequence: Synthetic peptide
SNRPSIV

SEQ ID NO: 33840 - protein, 7 aa, synthetic construct
  REGION 1..7: note = Description of Artificial Sequence: Synthetic peptide
FPTSPTR

SEQ ID NO: 33841 - protein, 7 aa, synthetic construct
  REGION 1..7: note = Description of Artificial Sequence: Synthetic peptide
PTRNGNM

SEQ ID NO: 33842 - protein, 7 aa, synthetic construct
  REGION 1..7: note = Description of Artificial Sequence: Synthetic peptide
VLHNASS

SEQ ID NO: 33843 - protein, 7 aa, synthetic construct
  REGION 1..7: note = Description of Artificial Sequence: Synthetic peptide
VLSSSPK

SEQ ID NO: 33844 - protein, 7 aa, synthetic construct
  REGION 1..7: note = Description of Artificial Sequence: Synthetic peptide
QSKAGNS

SEQ ID NO: 33845 - protein, 7 aa, synthetic construct
  REGION 1..7: note = Description of Artificial Sequence: Synthetic peptide
QTSHSAK

SEQ ID NO: 33846 - protein, 7 aa, synthetic construct
  REGION 1..7: note = Description of Artificial Sequence: Synthetic peptide
DIRNLQR

SEQ ID NO: 33847 - protein, 7 aa, synthetic construct
  REGION 1..7: note = Description of Artificial Sequence: Synthetic peptide
ATSPRLS

SEQ ID NO: 33848 - protein, 7 aa, synthetic construct
  REGION 1..7: note = Description of Artificial Sequence: Synthetic peptide
AFGGETK

SEQ ID NO: 33849 - protein, 7 aa, synthetic construct
  REGION 1..7: note = Description of Artificial Sequence: Synthetic peptide
SSQAQPT

SEQ ID NO: 33850 - protein, 7 aa, synthetic construct
  REGION 1..7: note = Description of Artificial Sequence: Synthetic peptide
TVLGSSY

SEQ ID NO: 33851 - protein, 7 aa, synthetic construct
  REGION 1..7: note = Description of Artificial Sequence: Synthetic peptide
FRPSTVV

SEQ ID NO: 33852 - protein, 7 aa, synthetic construct
  REGION 1..7: note = Description of Artificial Sequence: Synthetic peptide
SAHSLGI

SEQ ID NO: 33853 - protein, 7 aa, synthetic construct
  REGION 1..7: note = Description of Artificial Sequence: Synthetic peptide
SRSVTAR

SEQ ID NO: 33854 - protein, 7 aa, synthetic construct
  REGION 1..7: note = Description of Artificial Sequence: Synthetic peptide
AGTSKDI

SEQ ID NO: 33855 - protein, 7 aa, synthetic construct
  REGION 1..7: note = Description of Artificial Sequence: Synthetic peptide
VTGSVSD

SEQ ID NO: 33856 - protein, 7 aa, synthetic construct
  REGION 1..7: note = Description of Artificial Sequence: Synthetic peptide
SGNSHNG

SEQ ID NO: 33857 - protein, 7 aa, synthetic construct
  REGION 1..7: note = Description of Artificial Sequence: Synthetic peptide
GPHTAVG

SEQ ID NO: 33858 - protein, 7 aa, synthetic construct
  REGION 1..7: note = Description of Artificial Sequence: Synthetic peptide
GRQSQPR

SEQ ID NO: 33859 - protein, 7 aa, synthetic construct
  REGION 1..7: note = Description of Artificial Sequence: Synthetic peptide
LRPNGQL

SEQ ID NO: 33860 - protein, 7 aa, synthetic construct
  REGION 1..7: note = Description of Artificial Sequence: Synthetic peptide
RMKSLDN

SEQ ID NO: 33861 - protein, 7 aa, synthetic construct
  REGION 1..7: note = Description of Artificial Sequence: Synthetic peptide
NVNSQML

SEQ ID NO: 33862 - protein, 7 aa, synthetic construct
  REGION 1..7: note = Description of Artificial Sequence: Synthetic peptide
SFSSTMG

SEQ ID NO: 33863 - protein, 7 aa, synthetic construct
  REGION 1..7: note = Description of Artificial Sequence: Synthetic peptide
GNNRPAS

SEQ ID NO: 33864 - protein, 7 aa, synthetic construct
  REGION 1..7: note = Description of Artificial Sequence: Synthetic peptide
GQTGDMR

SEQ ID NO: 33865 - protein, 7 aa, synthetic construct
  REGION 1..7: note = Description of Artificial Sequence: Synthetic peptide
TNPNPHR

SEQ ID NO: 33866 - protein, 7 aa, synthetic construct
  REGION 1..7: note = Description of Artificial Sequence: Synthetic peptide
IPLSSQR

SEQ ID NO: 33867 - protein, 7 aa, synthetic construct
  REGION 1..7: note = Description of Artificial Sequence: Synthetic peptide
SGVERVN

SEQ ID NO: 33868 - protein, 7 aa, synthetic construct
  REGION 1..7: note = Description of Artificial Sequence: Synthetic peptide
FNSSSGS

SEQ ID NO: 33869 - protein, 7 aa, synthetic construct
  REGION 1..7: note = Description of Artificial Sequence: Synthetic peptide
HIGSPHT

SEQ ID NO: 33870 - protein, 7 aa, synthetic construct
  REGION 1..7: note = Description of Artificial Sequence: Synthetic peptide
GSGHGTN

SEQ ID NO: 33871 - protein, 7 aa, synthetic construct
  REGION 1..7: note = Description of Artificial Sequence: Synthetic peptide
STHDHSR

SEQ ID NO: 33872 - protein, 7 aa, synthetic construct
  REGION 1..7: note = Description of Artificial Sequence: Synthetic peptide
PLQQNRS

SEQ ID NO: 33873 - protein, 7 aa, synthetic construct
  REGION 1..7: note = Description of Artificial Sequence: Synthetic peptide
MMGGVKN

SEQ ID NO: 33874 - protein, 7 aa, synthetic construct
  REGION 1..7: note = Description of Artificial Sequence: Synthetic peptide
NPVALRD

SEQ ID NO: 33875 - protein, 7 aa, synthetic construct
  REGION 1..7: note = Description of Artificial Sequence: Synthetic peptide
LLDRRAA

SEQ ID NO: 33876 - protein, 7 aa, synthetic construct
  REGION 1..7: note = Description of Artificial Sequence: Synthetic peptide
RSMGNSS

SEQ ID NO: 33877 - protein, 7 aa, synthetic construct
  REGION 1..7: note = Description of Artificial Sequence: Synthetic peptide
KQPDSTH

SEQ ID NO: 33878 - protein, 7 aa, synthetic construct
  REGION 1..7: note = Description of Artificial Sequence: Synthetic peptide
TQGASNL

SEQ ID NO: 33879 - protein, 7 aa, synthetic construct
  REGION 1..7: note = Description of Artificial Sequence: Synthetic peptide
RNYTGDS

SEQ ID NO: 33880 - protein, 7 aa, synthetic construct
  REGION 1..7: note = Description of Artificial Sequence: Synthetic peptide
GTINGIT

SEQ ID NO: 33881 - protein, 7 aa, synthetic construct
  REGION 1..7: note = Description of Artificial Sequence: Synthetic peptide
VPGNLPS

SEQ ID NO: 33882 - protein, 7 aa, synthetic construct
  REGION 1..7: note = Description of Artificial Sequence: Synthetic peptide
DRSRVLG

SEQ ID NO: 33883 - protein, 7 aa, synthetic construct
  REGION 1..7: note = Description of Artificial Sequence: Synthetic peptide
SDINRST

SEQ ID NO: 33884 - protein, 7 aa, synthetic construct
  REGION 1..7: note = Description of Artificial Sequence: Synthetic peptide
PSVANVM

SEQ ID NO: 33885 - protein, 7 aa, synthetic construct
  REGION 1..7: note = Description of Artificial Sequence: Synthetic peptide
QFPDETL

SEQ ID NO: 33886 - protein, 7 aa, synthetic construct
  REGION 1..7: note = Description of Artificial Sequence: Synthetic peptide
SSLEKSN

SEQ ID NO: 33887 - protein, 7 aa, synthetic construct
  REGION 1..7: note = Description of Artificial Sequence: Synthetic peptide
IGTSPMK

SEQ ID NO: 33888 - protein, 7 aa, synthetic construct
  REGION 1..7: note = Description of Artificial Sequence: Synthetic peptide
PVTRLSE

SEQ ID NO: 33889 - protein, 7 aa, synthetic construct
  REGION 1..7: note = Description of Artificial Sequence: Synthetic peptide
DRQGLSG

SEQ ID NO: 33890 - protein, 7 aa, synthetic construct
  REGION 1..7: note = Description of Artificial Sequence: Synthetic peptide
TQGSRLS

SEQ ID NO: 33891 - protein, 7 aa, synthetic construct
  REGION 1..7: note = Description of Artificial Sequence: Synthetic peptide
RDRTNAA

SEQ ID NO: 33892 - protein, 7 aa, synthetic construct
  REGION 1..7: note = Description of Artificial Sequence: Synthetic peptide
VSRSATN

SEQ ID NO: 33893 - protein, 7 aa, synthetic construct
  REGION 1..7: note = Description of Artificial Sequence: Synthetic peptide
NVSSAIK

SEQ ID NO: 33894 - protein, 7 aa, synthetic construct
  REGION 1..7: note = Description of Artificial Sequence: Synthetic peptide
PHSGNRH

SEQ ID NO: 33895 - protein, 7 aa, synthetic construct
  REGION 1..7: note = Description of Artificial Sequence: Synthetic peptide
YPSTPHR

SEQ ID NO: 33896 - protein, 7 aa, synthetic construct
  REGION 1..7: note = Description of Artificial Sequence: Synthetic peptide
SKATHNI

SEQ ID NO: 33897 - protein, 7 aa, synthetic construct
  REGION 1..7: note = Description of Artificial Sequence: Synthetic peptide
ELAAPSK

SEQ ID NO: 33898 - protein, 7 aa, synthetic construct
  REGION 1..7: note = Description of Artificial Sequence: Synthetic peptide
PVGTKSG

SEQ ID NO: 33899 - protein, 7 aa, synthetic construct
  REGION 1..7: note = Description of Artificial Sequence: Synthetic peptide
SSSRGQN

SEQ ID NO: 33900 - protein, 7 aa, synthetic construct
  REGION 1..7: note = Description of Artificial Sequence: Synthetic peptide
QVSPLNA

SEQ ID NO: 33901 - protein, 7 aa, synthetic construct
  REGION 1..7: note = Description of Artificial Sequence: Synthetic peptide
YGASPSL

SEQ ID NO: 33902 - protein, 7 aa, synthetic construct
  REGION 1..7: note = Description of Artificial Sequence: Synthetic peptide
YNASTNV

SEQ ID NO: 33903 - protein, 7 aa, synthetic construct
  REGION 1..7: note = Description of Artificial Sequence: Synthetic peptide
SSRASQD

SEQ ID NO: 33904 - protein, 7 aa, synthetic construct
  REGION 1..7: note = Description of Artificial Sequence: Synthetic peptide
LTPSNMG

SEQ ID NO: 33905 - protein, 7 aa, synthetic construct
  REGION 1..7: note = Description of Artificial Sequence: Synthetic peptide
VLAGSNT

SEQ ID NO: 33906 - protein, 7 aa, synthetic construct
  REGION 1..7: note = Description of Artificial Sequence: Synthetic peptide
PSGETSK

SEQ ID NO: 33907 - protein, 7 aa, synthetic construct
  REGION 1..7: note = Description of Artificial Sequence: Synthetic peptide
GVNTGTQ

SEQ ID NO: 33908 - protein, 7 aa, synthetic construct
  REGION 1..7: note = Description of Artificial Sequence: Synthetic peptide
SHMTGVT

SEQ ID NO: 33909 - protein, 7 aa, synthetic construct
  REGION 1..7: note = Description of Artificial Sequence: Synthetic peptide
VAHRPQL

SEQ ID NO: 33910 - protein, 7 aa, synthetic construct
  REGION 1..7: note = Description of Artificial Sequence: Synthetic peptide
GTDSKRH

SEQ ID NO: 33911 - protein, 7 aa, synthetic construct
  REGION 1..7: note = Description of Artificial Sequence: Synthetic peptide
GTYGEMR

SEQ ID NO: 33912 - protein, 7 aa, synthetic construct
  REGION 1..7: note = Description of Artificial Sequence: Synthetic peptide
PQNLAHV

SEQ ID NO: 33913 - protein, 7 aa, synthetic construct
  REGION 1..7: note = Description of Artificial Sequence: Synthetic peptide
PSARMSG

SEQ ID NO: 33914 - protein, 7 aa, synthetic construct
  REGION 1..7: note = Description of Artificial Sequence: Synthetic peptide
SHNSKDS

SEQ ID NO: 33915 - protein, 7 aa, synthetic construct
  REGION 1..7: note = Description of Artificial Sequence: Synthetic peptide
FVSARSG

SEQ ID NO: 33916 - protein, 7 aa, synthetic construct
  REGION 1..7: note = Description of Artificial Sequence: Synthetic peptide
LNSTAGK

SEQ ID NO: 33917 - protein, 7 aa, synthetic construct
  REGION 1..7: note = Description of Artificial Sequence: Synthetic peptide
RDPKAGV

SEQ ID NO: 33918 - protein, 7 aa, synthetic construct
  REGION 1..7: note = Description of Artificial Sequence: Synthetic peptide
HQSSSSS

SEQ ID NO: 33919 - protein, 7 aa, synthetic construct
  REGION 1..7: note = Description of Artificial Sequence: Synthetic peptide
DIGNPTN

SEQ ID NO: 33920 - protein, 7 aa, synthetic construct
  REGION 1..7: note = Description of Artificial Sequence: Synthetic peptide
SSPVSAV

SEQ ID NO: 33921 - protein, 7 aa, synthetic construct
  REGION 1..7: note = Description of Artificial Sequence: Synthetic peptide
AHQRPIQ

SEQ ID NO: 33922 - protein, 7 aa, synthetic construct
  REGION 1..7: note = Description of Artificial Sequence: Synthetic peptide
GNGISTK

SEQ ID NO: 33923 - protein, 7 aa, synthetic construct
  REGION 1..7: note = Description of Artificial Sequence: Synthetic peptide
NGSTSSG

SEQ ID NO: 33924 - protein, 7 aa, synthetic construct
  REGION 1..7: note = Description of Artificial Sequence: Synthetic peptide
QPSQGHS

SEQ ID NO: 33925 - protein, 7 aa, synthetic construct
  REGION 1..7: note = Description of Artificial Sequence: Synthetic peptide
SMASAYK

SEQ ID NO: 33926 - protein, 7 aa, synthetic construct
  REGION 1..7: note = Description of Artificial Sequence: Synthetic peptide
TNGGRVT

SEQ ID NO: 33927 - protein, 7 aa, synthetic construct
  REGION 1..7: note = Description of Artificial Sequence: Synthetic peptide
KRVTYTD

SEQ ID NO: 33928 - protein, 7 aa, synthetic construct
  REGION 1..7: note = Description of Artificial Sequence: Synthetic peptide
ARDDQRR

SEQ ID NO: 33929 - protein, 7 aa, synthetic construct
  REGION 1..7: note = Description of Artificial Sequence: Synthetic peptide
IPASSSG

SEQ ID NO: 33930 - protein, 7 aa, synthetic construct
  REGION 1..7: note = Description of Artificial Sequence: Synthetic peptide
CVTGGLT

SEQ ID NO: 33931 - protein, 7 aa, synthetic construct
  REGION 1..7: note = Description of Artificial Sequence: Synthetic peptide
VNGKICS

SEQ ID NO: 33932 - protein, 7 aa, synthetic construct
  REGION 1..7: note = Description of Artificial Sequence: Synthetic peptide
ATGSPSK

SEQ ID NO: 33933 - protein, 7 aa, synthetic construct
  REGION 1..7: note = Description of Artificial Sequence: Synthetic peptide
VPGKSAQ

SEQ ID NO: 33934 - protein, 7 aa, synthetic construct
  REGION 1..7: note = Description of Artificial Sequence: Synthetic peptide
TPSVSTK

SEQ ID NO: 33935 - protein, 7 aa, synthetic construct
  REGION 1..7: note = Description of Artificial Sequence: Synthetic peptide
RTLNLNT

SEQ ID NO: 33936 - protein, 7 aa, synthetic construct
  REGION 1..7: note = Description of Artificial Sequence: Synthetic peptide
SDMSGQR

SEQ ID NO: 33937 - protein, 7 aa, synthetic construct
  REGION 1..7: note = Description of Artificial Sequence: Synthetic peptide
STGKATC

SEQ ID NO: 33938 - protein, 7 aa, synthetic construct
  REGION 1..7: note = Description of Artificial Sequence: Synthetic peptide
GPSSPRL

SEQ ID NO: 33939 - protein, 7 aa, synthetic construct
  REGION 1..7: note = Description of Artificial Sequence: Synthetic peptide
PRTNNPS

SEQ ID NO: 33940 - protein, 7 aa, synthetic construct
  REGION 1..7: note = Description of Artificial Sequence: Synthetic peptide
GGNDRFR

SEQ ID NO: 33941 - protein, 7 aa, synthetic construct
  REGION 1..7: note = Description of Artificial Sequence: Synthetic peptide
TISTRQS

SEQ ID NO: 33942 - protein, 7 aa, synthetic construct
  REGION 1..7: note = Description of Artificial Sequence: Synthetic peptide
QGTTARS

SEQ ID NO: 33943 - protein, 7 aa, synthetic construct
  REGION 1..7: note = Description of Artificial Sequence: Synthetic peptide
ELRTNAL

SEQ ID NO: 33944 - protein, 7 aa, synthetic construct
  REGION 1..7: note = Description of Artificial Sequence: Synthetic peptide
TGVSPLA

SEQ ID NO: 33945 - protein, 7 aa, synthetic construct
  REGION 1..7: note = Description of Artificial Sequence: Synthetic peptide
SHATAAT

SEQ ID NO: 33946 - protein, 7 aa, synthetic construct
  REGION 1..7: note = Description of Artificial Sequence: Synthetic peptide
SSSRNVA

SEQ ID NO: 33947 - protein, 7 aa, synthetic construct
  REGION 1..7: note = Description of Artificial Sequence: Synthetic peptide
GINSRGS

SEQ ID NO: 33948 - protein, 7 aa, synthetic construct
  REGION 1..7: note = Description of Artificial Sequence: Synthetic peptide
MDGRSTT

SEQ ID NO: 33949 - protein, 7 aa, synthetic construct
  REGION 1..7: note = Description of Artificial Sequence: Synthetic peptide
ERPGGTP

SEQ ID NO: 33950 - protein, 7 aa, synthetic construct
  REGION 1..7: note = Description of Artificial Sequence: Synthetic peptide
IPSGVHS

SEQ ID NO: 33951 - protein, 7 aa, synthetic construct
  REGION 1..7: note = Description of Artificial Sequence: Synthetic peptide
PVGSGVP

SEQ ID NO: 33952 - protein, 7 aa, synthetic construct
  REGION 1..7: note = Description of Artificial Sequence: Synthetic peptide
DARTMAA

SEQ ID NO: 33953 - protein, 7 aa, synthetic construct
  REGION 1..7: note = Description of Artificial Sequence: Synthetic peptide
YGSNTPT

SEQ ID NO: 33954 - protein, 7 aa, synthetic construct
  REGION 1..7: note = Description of Artificial Sequence: Synthetic peptide
RVLSNET

SEQ ID NO: 33955 - protein, 7 aa, synthetic construct
  REGION 1..7: note = Description of Artificial Sequence: Synthetic peptide
SAIRNVT

SEQ ID NO: 33956 - protein, 7 aa, synthetic construct
  REGION 1..7: note = Description of Artificial Sequence: Synthetic peptide
SGSLSSA

SEQ ID NO: 33957 - protein, 7 aa, synthetic construct
  REGION 1..7: note = Description of Artificial Sequence: Synthetic peptide
VQPVKMS

SEQ ID NO: 33958 - protein, 7 aa, synthetic construct
  REGION 1..7: note = Description of Artificial Sequence: Synthetic peptide
TRSKESP

SEQ ID NO: 33959 - protein, 7 aa, synthetic construct
  REGION 1..7: note = Description of Artificial Sequence: Synthetic peptide
SPGKLTT

SEQ ID NO: 33960 - protein, 7 aa, synthetic construct
  REGION 1..7: note = Description of Artificial Sequence: Synthetic peptide
VSSNASM

SEQ ID NO: 33961 - protein, 7 aa, synthetic construct
  REGION 1..7: note = Description of Artificial Sequence: Synthetic peptide
AMGHPLA

SEQ ID NO: 33962 - protein, 7 aa, synthetic construct
  REGION 1..7: note = Description of Artificial Sequence: Synthetic peptide
MSSKQVS

SEQ ID NO: 33963 - protein, 7 aa, synthetic construct
  REGION 1..7: note = Description of Artificial Sequence: Synthetic peptide
SISTRTG

SEQ ID NO: 33964 - protein, 7 aa, synthetic construct
  REGION 1..7: note = Description of Artificial Sequence: Synthetic peptide
GNPSPLV

SEQ ID NO: 33965 - protein, 7 aa, synthetic construct
  REGION 1..7: note = Description of Artificial Sequence: Synthetic peptide
GVTGTHV

SEQ ID NO: 33966 - protein, 7 aa, synthetic construct
  REGION 1..7: note = Description of Artificial Sequence: Synthetic peptide
LGTSPMK

SEQ ID NO: 33967 - protein, 7 aa, synthetic construct
  REGION 1..7: note = Description of Artificial Sequence: Synthetic peptide
STHHPAS

SEQ ID NO: 33968 - protein, 7 aa, synthetic construct
  REGION 1..7: note = Description of Artificial Sequence: Synthetic peptide
VAGAAQR

SEQ ID NO: 33969 - protein, 7 aa, synthetic construct
  REGION 1..7: note = Description of Artificial Sequence: Synthetic peptide
GPRSMSN

SEQ ID NO: 33970 - protein, 7 aa, synthetic construct
  REGION 1..7: note = Description of Artificial Sequence: Synthetic peptide
SPRASLN

SEQ ID NO: 33971 - protein, 7 aa, synthetic construct
  REGION 1..7: note = Description of Artificial Sequence: Synthetic peptide
SITSVTN

SEQ ID NO: 33972 - protein, 7 aa, synthetic construct
  REGION 1..7: note = Description of Artificial Sequence: Synthetic peptide
MGAGALT

SEQ ID NO: 33973 - protein, 7 aa, synthetic construct
  REGION 1..7: note = Description of Artificial Sequence: Synthetic peptide
YAIERVG

SEQ ID NO: 33974 - protein, 7 aa, synthetic construct
  REGION 1..7: note = Description of Artificial Sequence: Synthetic peptide
PTSNGSL

SEQ ID NO: 33975 - protein, 7 aa, synthetic construct
  REGION 1..7: note = Description of Artificial Sequence: Synthetic peptide
LTPPGVG

SEQ ID NO: 33976 - protein, 7 aa, synthetic construct
  REGION 1..7: note = Description of Artificial Sequence: Synthetic peptide
SPHRDTV

SEQ ID NO: 33977 - protein, 7 aa, synthetic construct
  REGION 1..7: note = Description of Artificial Sequence: Synthetic peptide
AVESSSS

SEQ ID NO: 33978 - protein, 7 aa, synthetic construct
  REGION 1..7: note = Description of Artificial Sequence: Synthetic peptide
GTSPSTM

SEQ ID NO: 33979 - protein, 7 aa, synthetic construct
  REGION 1..7: note = Description of Artificial Sequence: Synthetic peptide
DPGTRKS

SEQ ID NO: 33980 - protein, 7 aa, synthetic construct
  REGION 1..7: note = Description of Artificial Sequence: Synthetic peptide
VVRNSVS

SEQ ID NO: 33981 - protein, 7 aa, synthetic construct
  REGION 1..7: note = Description of Artificial Sequence: Synthetic peptide
RKMVPYS

SEQ ID NO: 33982 - protein, 7 aa, synthetic construct
  REGION 1..7: note = Description of Artificial Sequence: Synthetic peptide
CQGQGVS

SEQ ID NO: 33983 - protein, 7 aa, synthetic construct
  REGION 1..7: note = Description of Artificial Sequence: Synthetic peptide
RIAGPTV

SEQ ID NO: 33984 - protein, 7 aa, synthetic construct
  REGION 1..7: note = Description of Artificial Sequence: Synthetic peptide
IISQHGM

SEQ ID NO: 33985 - protein, 7 aa, synthetic construct
  REGION 1..7: note = Description of Artificial Sequence: Synthetic peptide
GNSTANR

SEQ ID NO: 33986 - protein, 7 aa, synthetic construct
  REGION 1..7: note = Description of Artificial Sequence: Synthetic peptide
SPGRTQS

SEQ ID NO: 33987 - protein, 7 aa, synthetic construct
  REGION 1..7: note = Description of Artificial Sequence: Synthetic peptide
PISESTR

SEQ ID NO: 33988 - protein, 7 aa, synthetic construct
  REGION 1..7: note = Description of Artificial Sequence: Synthetic peptide
SSGLSSS

SEQ ID NO: 33989 - protein, 7 aa, synthetic construct
  REGION 1..7: note = Description of Artificial Sequence: Synthetic peptide
ERNGNFT

SEQ ID NO: 33990 - protein, 7 aa, synthetic construct
  REGION 1..7: note = Description of Artificial Sequence: Synthetic peptide
GHSQSHQ

SEQ ID NO: 33991 - protein, 7 aa, synthetic construct
  REGION 1..7: note = Description of Artificial Sequence: Synthetic peptide
GSLGALT

SEQ ID NO: 33992 - protein, 7 aa, synthetic construct
  REGION 1..7: note = Description of Artificial Sequence: Synthetic peptide
MRQTASL

SEQ ID NO: 33993 - protein, 7 aa, synthetic construct
  REGION 1..7: note = Description of Artificial Sequence: Synthetic peptide
GQNRNNT

SEQ ID NO: 33994 - protein, 7 aa, synthetic construct
  REGION 1..7: note = Description of Artificial Sequence: Synthetic peptide
LQSGGHR

SEQ ID NO: 33995 - protein, 7 aa, synthetic construct
  REGION 1..7: note = Description of Artificial Sequence: Synthetic peptide
AVNTKAL

SEQ ID NO: 33996 - protein, 7 aa, synthetic construct
  REGION 1..7: note = Description of Artificial Sequence: Synthetic peptide
MGGVTSS

SEQ ID NO: 33997 - protein, 7 aa, synthetic construct
  REGION 1..7: note = Description of Artificial Sequence: Synthetic peptide
ENNSRAT

SEQ ID NO: 33998 - protein, 7 aa, synthetic construct
  REGION 1..7: note = Description of Artificial Sequence: Synthetic peptide
QMPGHTG

SEQ ID NO: 33999 - protein, 7 aa, synthetic construct
  REGION 1..7: note = Description of Artificial Sequence: Synthetic peptide
KPQGSLV

SEQ ID NO: 34000 - protein, 7 aa, synthetic construct
  REGION 1..7: note = Description of Artificial Sequence: Synthetic peptide
GTGVPGK

SEQ ID NO: 34001 - protein, 7 aa, synthetic construct
  REGION 1..7: note = Description of Artificial Sequence: Synthetic peptide
GRDNSRQ

SEQ ID NO: 34002 - protein, 7 aa, synthetic construct
  REGION 1..7: note = Description of Artificial Sequence: Synthetic peptide
SGNDKNN

SEQ ID NO: 34003 - protein, 7 aa, synthetic construct
  REGION 1..7: note = Description of Artificial Sequence: Synthetic peptide
SVNSRSE

SEQ ID NO: 34004 - protein, 7 aa, synthetic construct
  REGION 1..7: note = Description of Artificial Sequence: Synthetic peptide
VTHGRPG

SEQ ID NO: 34005 - protein, 7 aa, synthetic construct
  REGION 1..7: note = Description of Artificial Sequence: Synthetic peptide
SNSDRAN

SEQ ID NO: 34006 - protein, 7 aa, synthetic construct
  REGION 1..7: note = Description of Artificial Sequence: Synthetic peptide
HTTGILG

SEQ ID NO: 34007 - protein, 7 aa, synthetic construct
  REGION 1..7: note = Description of Artificial Sequence: Synthetic peptide
GRVVSMQ

SEQ ID NO: 34008 - protein, 7 aa, synthetic construct
  REGION 1..7: note = Description of Artificial Sequence: Synthetic peptide
SGPQPVA

SEQ ID NO: 34009 - protein, 7 aa, synthetic construct
  REGION 1..7: note = Description of Artificial Sequence: Synthetic peptide
TPTTSAN

SEQ ID NO: 34010 - protein, 7 aa, synthetic construct
  REGION 1..7: note = Description of Artificial Sequence: Synthetic peptide
RQDSTPG

SEQ ID NO: 34011 - protein, 7 aa, synthetic construct
  REGION 1..7: note = Description of Artificial Sequence: Synthetic peptide
HQPHQNQ

SEQ ID NO: 34012 - protein, 7 aa, synthetic construct
  REGION 1..7: note = Description of Artificial Sequence: Synthetic peptide
GMIPSSR

SEQ ID NO: 34013 - protein, 7 aa, synthetic construct
  REGION 1..7: note = Description of Artificial Sequence: Synthetic peptide
RTASSLP

SEQ ID NO: 34014 - protein, 7 aa, synthetic construct
  REGION 1..7: note = Description of Artificial Sequence: Synthetic peptide
LERNGLK

SEQ ID NO: 34015 - protein, 7 aa, synthetic construct
  REGION 1..7: note = Description of Artificial Sequence: Synthetic peptide
HMKHLQV

SEQ ID NO: 34016 - protein, 7 aa, synthetic construct
  REGION 1..7: note = Description of Artificial Sequence: Synthetic peptide
ATIGHNR

SEQ ID NO: 34017 - protein, 7 aa, synthetic construct
  REGION 1..7: note = Description of Artificial Sequence: Synthetic peptide
HAHSNVG

SEQ ID NO: 34018 - protein, 7 aa, synthetic construct
  REGION 1..7: note = Description of Artificial Sequence: Synthetic peptide
SNRQHGL

SEQ ID NO: 34019 - protein, 7 aa, synthetic construct
  REGION 1..7: note = Description of Artificial Sequence: Synthetic peptide
SSMSHQK

SEQ ID NO: 34020 - protein, 7 aa, synthetic construct
  REGION 1..7: note = Description of Artificial Sequence: Synthetic peptide
YHSKGTT

SEQ ID NO: 34021 - protein, 7 aa, synthetic construct
  REGION 1..7: note = Description of Artificial Sequence: Synthetic peptide
YQVPLAK

SEQ ID NO: 34022 - protein, 7 aa, synthetic construct
  REGION 1..7: note = Description of Artificial Sequence: Synthetic peptide
LSRQHNS

SEQ ID NO: 34023 - protein, 7 aa, synthetic construct
  REGION 1..7: note = Description of Artificial Sequence: Synthetic peptide
NSSGQNQ

SEQ ID NO: 34024 - protein, 7 aa, synthetic construct
  REGION 1..7: note = Description of Artificial Sequence: Synthetic peptide
PHQRAGS

SEQ ID NO: 34025 - protein, 7 aa, synthetic construct
  REGION 1..7: note = Description of Artificial Sequence: Synthetic peptide
ALRTSNY

SEQ ID NO: 34026 - protein, 7 aa, synthetic construct
  REGION 1..7: note = Description of Artificial Sequence: Synthetic peptide
DNTGRNA

SEQ ID NO: 34027 - protein, 7 aa, synthetic construct
  REGION 1..7: note = Description of Artificial Sequence: Synthetic peptide
HSHGKSI

SEQ ID NO: 34028 - protein, 7 aa, synthetic construct
  REGION 1..7: note = Description of Artificial Sequence: Synthetic peptide
KTSTPYS

SEQ ID NO: 34029 - protein, 7 aa, synthetic construct
  REGION 1..7: note = Description of Artificial Sequence: Synthetic peptide
MSLPGQR

SEQ ID NO: 34030 - protein, 7 aa, synthetic construct
  REGION 1..7: note = Description of Artificial Sequence: Synthetic peptide
HMNRKLE

SEQ ID NO: 34031 - protein, 7 aa, synthetic construct
  REGION 1..7: note = Description of Artificial Sequence: Synthetic peptide
GGSNSRL

SEQ ID NO: 34032 - protein, 7 aa, synthetic construct
  REGION 1..7: note = Description of Artificial Sequence: Synthetic peptide
RSDPTRG

SEQ ID NO: 34033 - protein, 7 aa, synthetic construct
  REGION 1..7: note = Description of Artificial Sequence: Synthetic peptide
RDSTKLV

SEQ ID NO: 34034 - protein, 7 aa, synthetic construct
  REGION 1..7: note = Description of Artificial Sequence: Synthetic peptide
HVVEQFK

SEQ ID NO: 34035 - protein, 7 aa, synthetic construct
  REGION 1..7: note = Description of Artificial Sequence: Synthetic peptide
KTNSESM

SEQ ID NO: 34036 - protein, 7 aa, synthetic construct
  REGION 1..7: note = Description of Artificial Sequence: Synthetic peptide
SRKNNTL

SEQ ID NO: 34037 - protein, 7 aa, synthetic construct
  REGION 1..7: note = Description of Artificial Sequence: Synthetic peptide
SHNRTND

SEQ ID NO: 34038 - protein, 7 aa, synthetic construct
  REGION 1..7: note = Description of Artificial Sequence: Synthetic peptide
QSISHTR

SEQ ID NO: 34039 - protein, 7 aa, synthetic construct
  REGION 1..7: note = Description of Artificial Sequence: Synthetic peptide
TNNSHHS

SEQ ID NO: 34040 - protein, 7 aa, synthetic construct
  REGION 1..7: note = Description of Artificial Sequence: Synthetic peptide
SLNSREG

SEQ ID NO: 34041 - protein, 7 aa, synthetic construct
  REGION 1..7: note = Description of Artificial Sequence: Synthetic peptide
SNVSKPQ

SEQ ID NO: 34042 - protein, 7 aa, synthetic construct
  REGION 1..7: note = Description of Artificial Sequence: Synthetic peptide
TETRSAN

SEQ ID NO: 34043 - protein, 7 aa, synthetic construct
  REGION 1..7: note = Description of Artificial Sequence: Synthetic peptide
YNGGNRS

SEQ ID NO: 34044 - protein, 7 aa, synthetic construct
  REGION 1..7: note = Description of Artificial Sequence: Synthetic peptide
LNHSKYS

SEQ ID NO: 34045 - protein, 7 aa, synthetic construct
  REGION 1..7: note = Description of Artificial Sequence: Synthetic peptide
DPLRSMH

SEQ ID NO: 34046 - protein, 7 aa, synthetic construct
  REGION 1..7: note = Description of Artificial Sequence: Synthetic peptide
ITSTGSS

SEQ ID NO: 34047 - protein, 7 aa, synthetic construct
  REGION 1..7: note = Description of Artificial Sequence: Synthetic peptide
YASSRDG

SEQ ID NO: 34048 - protein, 7 aa, synthetic construct
  REGION 1..7: note = Description of Artificial Sequence: Synthetic peptide
FARSASS

SEQ ID NO: 34049 - protein, 7 aa, synthetic construct
  REGION 1..7: note = Description of Artificial Sequence: Synthetic peptide
MGHKVEA

SEQ ID NO: 34050 - protein, 7 aa, synthetic construct
  REGION 1..7: note = Description of Artificial Sequence: Synthetic peptide
DTATRNR

SEQ ID NO: 34051 - protein, 7 aa, synthetic construct
  REGION 1..7: note = Description of Artificial Sequence: Synthetic peptide
TFSKGTN

SEQ ID NO: 34052 - protein, 7 aa, synthetic construct
  REGION 1..7: note = Description of Artificial Sequence: Synthetic peptide
MRANHTS

SEQ ID NO: 34053 - protein, 7 aa, synthetic construct
  REGION 1..7: note = Description of Artificial Sequence: Synthetic peptide
TSTSPMK

SEQ ID NO: 34054 - protein, 7 aa, synthetic construct
  REGION 1..7: note = Description of Artificial Sequence: Synthetic peptide
STPHHTT

SEQ ID NO: 34055 - protein, 7 aa, synthetic construct
  REGION 1..7: note = Description of Artificial Sequence: Synthetic peptide
LGHQGHL

SEQ ID NO: 34056 - protein, 7 aa, synthetic construct
  REGION 1..7: note = Description of Artificial Sequence: Synthetic peptide
AATRQPD

SEQ ID NO: 34057 - protein, 7 aa, synthetic construct
  REGION 1..7: note = Description of Artificial Sequence: Synthetic peptide
ITGNRHS

SEQ ID NO: 34058 - protein, 7 aa, synthetic construct
  REGION 1..7: note = Description of Artificial Sequence: Synthetic peptide
NSGPPKP

SEQ ID NO: 34059 - protein, 7 aa, synthetic construct
  REGION 1..7: note = Description of Artificial Sequence: Synthetic peptide
CQSSRVT

SEQ ID NO: 34060 - protein, 7 aa, synthetic construct
  REGION 1..7: note = Description of Artificial Sequence: Synthetic peptide
SAGTSVG

SEQ ID NO: 34061 - protein, 7 aa, synthetic construct
  REGION 1..7: note = Description of Artificial Sequence: Synthetic peptide
SPSSPHD

SEQ ID NO: 34062 - protein, 7 aa, synthetic construct
  REGION 1..7: note = Description of Artificial Sequence: Synthetic peptide
LRAEHVR

SEQ ID NO: 34063 - protein, 7 aa, synthetic construct
  REGION 1..7: note = Description of Artificial Sequence: Synthetic peptide
FANTANR

SEQ ID NO: 34064 - protein, 7 aa, synthetic construct
  REGION 1..7: note = Description of Artificial Sequence: Synthetic peptide
NALPVTQ

SEQ ID NO: 34065 - protein, 7 aa, synthetic construct
  REGION 1..7: note = Description of Artificial Sequence: Synthetic peptide
RASGVTN

SEQ ID NO: 34066 - protein, 7 aa, synthetic construct
  REGION 1..7: note = Description of Artificial Sequence: Synthetic peptide
PPSNGRL

SEQ ID NO: 34067 - protein, 7 aa, synthetic construct
  REGION 1..7: note = Description of Artificial Sequence: Synthetic peptide
GVRSVAG

SEQ ID NO: 34068 - protein, 7 aa, synthetic construct
  REGION 1..7: note = Description of Artificial Sequence: Synthetic peptide
LGSSTIL

SEQ ID NO: 34069 - protein, 7 aa, synthetic construct
  REGION 1..7: note = Description of Artificial Sequence: Synthetic peptide
HSVNGHS

SEQ ID NO: 34070 - protein, 7 aa, synthetic construct
  REGION 1..7: note = Description of Artificial Sequence: Synthetic peptide
LGASTIL

SEQ ID NO: 34071 - protein, 7 aa, synthetic construct
  REGION 1..7: note = Description of Artificial Sequence: Synthetic peptide
CLSSSAK

SEQ ID NO: 34072 - protein, 7 aa, synthetic construct
  REGION 1..7: note = Description of Artificial Sequence: Synthetic peptide
EPVTSKS

SEQ ID NO: 34073 - protein, 7 aa, synthetic construct
  REGION 1..7: note = Description of Artificial Sequence: Synthetic peptide
EMRVERP

SEQ ID NO: 34074 - protein, 7 aa, synthetic construct
  REGION 1..7: note = Description of Artificial Sequence: Synthetic peptide
YSKQNLT

SEQ ID NO: 34075 - protein, 7 aa, synthetic construct
  REGION 1..7: note = Description of Artificial Sequence: Synthetic peptide
DGQERSS

SEQ ID NO: 34076 - protein, 7 aa, synthetic construct
  REGION 1..7: note = Description of Artificial Sequence: Synthetic peptide
LSKQAYC

SEQ ID NO: 34077 - protein, 7 aa, synthetic construct
  REGION 1..7: note = Description of Artificial Sequence: Synthetic peptide
TGITKLS

SEQ ID NO: 34078 - protein, 7 aa, synthetic construct
  REGION 1..7: note = Description of Artificial Sequence: Synthetic peptide
NRVGSIS

SEQ ID NO: 34079 - protein, 7 aa, synthetic construct
  REGION 1..7: note = Description of Artificial Sequence: Synthetic peptide
APSAGMS

SEQ ID NO: 34080 - protein, 7 aa, synthetic construct
  REGION 1..7: note = Description of Artificial Sequence: Synthetic peptide
HSGTRTS

SEQ ID NO: 34081 - protein, 7 aa, synthetic construct
  REGION 1..7: note = Description of Artificial Sequence: Synthetic peptide
SPNNRGM

SEQ ID NO: 34082 - protein, 7 aa, synthetic construct
  REGION 1..7: note = Description of Artificial Sequence: Synthetic peptide
PSVRTLG

SEQ ID NO: 34083 - protein, 7 aa, synthetic construct
  REGION 1..7: note = Description of Artificial Sequence: Synthetic peptide
RENNTSS

SEQ ID NO: 34084 - protein, 7 aa, synthetic construct
  REGION 1..7: note = Description of Artificial Sequence: Synthetic peptide
QPTQRMG

SEQ ID NO: 34085 - protein, 7 aa, synthetic construct
  REGION 1..7: note = Description of Artificial Sequence: Synthetic peptide
QEGVRSS

SEQ ID NO: 34086 - protein, 7 aa, synthetic construct
  REGION 1..7: note = Description of Artificial Sequence: Synthetic peptide
WTGVPPS

SEQ ID NO: 34087 - protein, 7 aa, synthetic construct
  REGION 1..7: note = Description of Artificial Sequence: Synthetic peptide
QPTTSAL

SEQ ID NO: 34088 - protein, 7 aa, synthetic construct
  REGION 1..7: note = Description of Artificial Sequence: Synthetic peptide
HATSGTR

SEQ ID NO: 34089 - protein, 7 aa, synthetic construct
  REGION 1..7: note = Description of Artificial Sequence: Synthetic peptide
DRVTGKM

SEQ ID NO: 34090 - protein, 7 aa, synthetic construct
  REGION 1..7: note = Description of Artificial Sequence: Synthetic peptide
STFSPSK

SEQ ID NO: 34091 - protein, 7 aa, synthetic construct
  REGION 1..7: note = Description of Artificial Sequence: Synthetic peptide
QRNVSVV

SEQ ID NO: 34092 - protein, 7 aa, synthetic construct
  REGION 1..7: note = Description of Artificial Sequence: Synthetic peptide
DSPNRGR

SEQ ID NO: 34093 - protein, 7 aa, synthetic construct
  REGION 1..7: note = Description of Artificial Sequence: Synthetic peptide
IPHAGTA

SEQ ID NO: 34094 - protein, 7 aa, synthetic construct
  REGION 1..7: note = Description of Artificial Sequence: Synthetic peptide
SHTPKLV

SEQ ID NO: 34095 - protein, 7 aa, synthetic construct
  REGION 1..7: note = Description of Artificial Sequence: Synthetic peptide
FLKGTGS

SEQ ID NO: 34096 - protein, 7 aa, synthetic construct
  REGION 1..7: note = Description of Artificial Sequence: Synthetic peptide
SRSTGTL

SEQ ID NO: 34097 - protein, 7 aa, synthetic construct
  REGION 1..7: note = Description of Artificial Sequence: Synthetic peptide
SPLLDYK

SEQ ID NO: 34098 - protein, 7 aa, synthetic construct
  REGION 1..7: note = Description of Artificial Sequence: Synthetic peptide
GDTRLNA

SEQ ID NO: 34099 - protein, 7 aa, synthetic construct
  REGION 1..7: note = Description of Artificial Sequence: Synthetic peptide
TQRSQAA

SEQ ID NO: 34100 - protein, 7 aa, synthetic construct
  REGION 1..7: note = Description of Artificial Sequence: Synthetic peptide
EISRPAS

SEQ ID NO: 34101 - protein, 7 aa, synthetic construct
  REGION 1..7: note = Description of Artificial Sequence: Synthetic peptide
RSNGSAA

SEQ ID NO: 34102 - protein, 7 aa, synthetic construct
  REGION 1..7: note = Description of Artificial Sequence: Synthetic peptide
SDRNMSR

SEQ ID NO: 34103 - protein, 7 aa, synthetic construct
  REGION 1..7: note = Description of Artificial Sequence: Synthetic peptide
YRHERLS

SEQ ID NO: 34104 - protein, 7 aa, synthetic construct
  REGION 1..7: note = Description of Artificial Sequence: Synthetic peptide
SQQTTEA

SEQ ID NO: 34105 - protein, 7 aa, synthetic construct
  REGION 1..7: note = Description of Artificial Sequence: Synthetic peptide
RSGNGSL

SEQ ID NO: 34106 - protein, 7 aa, synthetic construct
  REGION 1..7: note = Description of Artificial Sequence: Synthetic peptide
FSTIKGV

SEQ ID NO: 34107 - protein, 7 aa, synthetic construct
  REGION 1..7: note = Description of Artificial Sequence: Synthetic peptide
VGSSIKT

SEQ ID NO: 34108 - protein, 7 aa, synthetic construct
  REGION 1..7: note = Description of Artificial Sequence: Synthetic peptide
PSGPVRG

SEQ ID NO: 34109 - protein, 7 aa, synthetic construct
  REGION 1..7: note = Description of Artificial Sequence: Synthetic peptide
ARDPGGV

SEQ ID NO: 34110 - protein, 7 aa, synthetic construct
  REGION 1..7: note = Description of Artificial Sequence: Synthetic peptide
QVTGASH

SEQ ID NO: 34111 - protein, 7 aa, synthetic construct
  REGION 1..7: note = Description of Artificial Sequence: Synthetic peptide
LRNGIAS

SEQ ID NO: 34112 - protein, 7 aa, synthetic construct
  REGION 1..7: note = Description of Artificial Sequence: Synthetic peptide
TGSSSSQ

SEQ ID NO: 34113 - protein, 7 aa, synthetic construct
  REGION 1..7: note = Description of Artificial Sequence: Synthetic peptide
STSRDAT

SEQ ID NO: 34114 - protein, 7 aa, synthetic construct
  REGION 1..7: note = Description of Artificial Sequence: Synthetic peptide
NTLQGHR

SEQ ID NO: 34115 - protein, 7 aa, synthetic construct
  REGION 1..7: note = Description of Artificial Sequence: Synthetic peptide
MSGVTAR

SEQ ID NO: 34116 - protein, 7 aa, synthetic construct
  REGION 1..7: note = Description of Artificial Sequence: Synthetic peptide
PHTNNPD

SEQ ID NO: 34117 - protein, 7 aa, synthetic construct
  REGION 1..7: note = Description of Artificial Sequence: Synthetic peptide
HQPEKIA

SEQ ID NO: 34118 - protein, 7 aa, synthetic construct
  REGION 1..7: note = Description of Artificial Sequence: Synthetic peptide
GASTPRL

SEQ ID NO: 34119 - protein, 7 aa, synthetic construct
  REGION 1..7: note = Description of Artificial Sequence: Synthetic peptide
PTMQGVH

SEQ ID NO: 34120 - protein, 7 aa, synthetic construct
  REGION 1..7: note = Description of Artificial Sequence: Synthetic peptide
STMTTRR

SEQ ID NO: 34121 - protein, 7 aa, synthetic construct
  REGION 1..7: note = Description of Artificial Sequence: Synthetic peptide
DSTLGQS

SEQ ID NO: 34122 - protein, 7 aa, synthetic construct
  REGION 1..7: note = Description of Artificial Sequence: Synthetic peptide
VATRGDH

SEQ ID NO: 34123 - protein, 7 aa, synthetic construct
  REGION 1..7: note = Description of Artificial Sequence: Synthetic peptide
CLTDARA

SEQ ID NO: 34124 - protein, 7 aa, synthetic construct
  REGION 1..7: note = Description of Artificial Sequence: Synthetic peptide
STNGNGL

SEQ ID NO: 34125 - protein, 7 aa, synthetic construct
  REGION 1..7: note = Description of Artificial Sequence: Synthetic peptide
YNHGSVD

SEQ ID NO: 34126 - protein, 7 aa, synthetic construct
  REGION 1..7: note = Description of Artificial Sequence: Synthetic peptide
HDSSART

SEQ ID NO: 34127 - protein, 7 aa, synthetic construct
  REGION 1..7: note = Description of Artificial Sequence: Synthetic peptide
VSDSNTK

SEQ ID NO: 34128 - protein, 7 aa, synthetic construct
  REGION 1..7: note = Description of Artificial Sequence: Synthetic peptide
HTTGIIG

SEQ ID NO: 34129 - protein, 7 aa, synthetic construct
  REGION 1..7: note = Description of Artificial Sequence: Synthetic peptide
ASSLLNV

SEQ ID NO: 34130 - protein, 7 aa, synthetic construct
  REGION 1..7: note = Description of Artificial Sequence: Synthetic peptide
PYAPRKD

SEQ ID NO: 34131 - protein, 7 aa, synthetic construct
  REGION 1..7: note = Description of Artificial Sequence: Synthetic peptide
SVTGGRG

SEQ ID NO: 34132 - protein, 7 aa, synthetic construct
  REGION 1..7: note = Description of Artificial Sequence: Synthetic peptide
TLPTSIR

SEQ ID NO: 34133 - protein, 7 aa, synthetic construct
  REGION 1..7: note = Description of Artificial Sequence: Synthetic peptide
GRHGAPT

SEQ ID NO: 34134 - protein, 7 aa, synthetic construct
  REGION 1..7: note = Description of Artificial Sequence: Synthetic peptide
KSTHGMT

SEQ ID NO: 34135 - protein, 7 aa, synthetic construct
  REGION 1..7: note = Description of Artificial Sequence: Synthetic peptide
NLHATPL

SEQ ID NO: 34136 - protein, 7 aa, synthetic construct
  REGION 1..7: note = Description of Artificial Sequence: Synthetic peptide
VSGQTSG

SEQ ID NO: 34137 - protein, 7 aa, synthetic construct
  REGION 1..7: note = Description of Artificial Sequence: Synthetic peptide
PGREKTV

SEQ ID NO: 34138 - protein, 7 aa, synthetic construct
  REGION 1..7: note = Description of Artificial Sequence: Synthetic peptide
PTSSPQR

SEQ ID NO: 34139 - protein, 7 aa, synthetic construct
  REGION 1..7: note = Description of Artificial Sequence: Synthetic peptide
TTMSKVG

SEQ ID NO: 34140 - protein, 7 aa, synthetic construct
  REGION 1..7: note = Description of Artificial Sequence: Synthetic peptide
TYNSSQA

SEQ ID NO: 34141 - protein, 7 aa, synthetic construct
  REGION 1..7: note = Description of Artificial Sequence: Synthetic peptide
LNVGSVR

SEQ ID NO: 34142 - protein, 7 aa, synthetic construct
  REGION 1..7: note = Description of Artificial Sequence: Synthetic peptide
RDATSIG

SEQ ID NO: 34143 - protein, 7 aa, synthetic construct
  REGION 1..7: note = Description of Artificial Sequence: Synthetic peptide
VSTGSFT

SEQ ID NO: 34144 - protein, 7 aa, synthetic construct
  REGION 1..7: note = Description of Artificial Sequence: Synthetic peptide
RFDSVKD

SEQ ID NO: 34145 - protein, 7 aa, synthetic construct
  REGION 1..7: note = Description of Artificial Sequence: Synthetic peptide
LLGDTKP

SEQ ID NO: 34146 - protein, 7 aa, synthetic construct
  REGION 1..7: note = Description of Artificial Sequence: Synthetic peptide
GSKNADY

SEQ ID NO: 34147 - protein, 7 aa, synthetic construct
  REGION 1..7: note = Description of Artificial Sequence: Synthetic peptide
NNGRPIA

SEQ ID NO: 34148 - protein, 7 aa, synthetic construct
  REGION 1..7: note = Description of Artificial Sequence: Synthetic peptide
EVPKPGR

SEQ ID NO: 34149 - protein, 7 aa, synthetic construct
  REGION 1..7: note = Description of Artificial Sequence: Synthetic peptide
NTHNIQG

SEQ ID NO: 34150 - protein, 7 aa, synthetic construct
  REGION 1..7: note = Description of Artificial Sequence: Synthetic peptide
SGRDKFS

SEQ ID NO: 34151 - protein, 7 aa, synthetic construct
  REGION 1..7: note = Description of Artificial Sequence: Synthetic peptide
PRTDRNT

SEQ ID NO: 34152 - protein, 7 aa, synthetic construct
  REGION 1..7: note = Description of Artificial Sequence: Synthetic peptide
VSSPRMS

SEQ ID NO: 34153 - protein, 7 aa, synthetic construct
  REGION 1..7: note = Description of Artificial Sequence: Synthetic peptide
QTHAPTS

SEQ ID NO: 34154 - protein, 7 aa, synthetic construct
  REGION 1..7: note = Description of Artificial Sequence: Synthetic peptide
SDSRNTN

SEQ ID NO: 34155 - protein, 7 aa, synthetic construct
  REGION 1..7: note = Description of Artificial Sequence: Synthetic peptide
RQTTPLG

SEQ ID NO: 34156 - protein, 7 aa, synthetic construct
  REGION 1..7: note = Description of Artificial Sequence: Synthetic peptide
EATSSTK

SEQ ID NO: 34157 - protein, 7 aa, synthetic construct
  REGION 1..7: note = Description of Artificial Sequence: Synthetic peptide
GSRNSSA

SEQ ID NO: 34158 - protein, 7 aa, synthetic construct
  REGION 1..7: note = Description of Artificial Sequence: Synthetic peptide
LNIANSK

SEQ ID NO: 34159 - protein, 7 aa, synthetic construct
  REGION 1..7: note = Description of Artificial Sequence: Synthetic peptide
LMSNNQP

SEQ ID NO: 34160 - protein, 7 aa, synthetic construct
  REGION 1..7: note = Description of Artificial Sequence: Synthetic peptide
HLAMNRN

SEQ ID NO: 34161 - protein, 7 aa, synthetic construct
  REGION 1..7: note = Description of Artificial Sequence: Synthetic peptide
SVSSPRD

SEQ ID NO: 34162 - protein, 7 aa, synthetic construct
  REGION 1..7: note = Description of Artificial Sequence: Synthetic peptide
IMDKHLN

SEQ ID NO: 34163 - protein, 7 aa, synthetic construct
  REGION 1..7: note = Description of Artificial Sequence: Synthetic peptide
RGLDSIN

SEQ ID NO: 34164 - protein, 7 aa, synthetic construct
  REGION 1..7: note = Description of Artificial Sequence: Synthetic peptide
GAKPGLA

SEQ ID NO: 34165 - protein, 7 aa, synthetic construct
  REGION 1..7: note = Description of Artificial Sequence: Synthetic peptide
VRSRESP

SEQ ID NO: 34166 - protein, 7 aa, synthetic construct
  REGION 1..7: note = Description of Artificial Sequence: Synthetic peptide
TVNTRSA

SEQ ID NO: 34167 - protein, 7 aa, synthetic construct
  REGION 1..7: note = Description of Artificial Sequence: Synthetic peptide
GTPNNRS

SEQ ID NO: 34168 - protein, 7 aa, synthetic construct
  REGION 1..7: note = Description of Artificial Sequence: Synthetic peptide
EGLNTSR

SEQ ID NO: 34169 - protein, 7 aa, synthetic construct
  REGION 1..7: note = Description of Artificial Sequence: Synthetic peptide
PGLSNSR

SEQ ID NO: 34170 - protein, 7 aa, synthetic construct
  REGION 1..7: note = Description of Artificial Sequence: Synthetic peptide
VGNNNRL

SEQ ID NO: 34171 - protein, 7 aa, synthetic construct
  REGION 1..7: note = Description of Artificial Sequence: Synthetic peptide
PMEVRSD

SEQ ID NO: 34172 - protein, 7 aa, synthetic construct
  REGION 1..7: note = Description of Artificial Sequence: Synthetic peptide
LPITARN

SEQ ID NO: 34173 - protein, 7 aa, synthetic construct
  REGION 1..7: note = Description of Artificial Sequence: Synthetic peptide
AQRSTMV

SEQ ID NO: 34174 - protein, 7 aa, synthetic construct
  REGION 1..7: note = Description of Artificial Sequence: Synthetic peptide
GNSMAGT

SEQ ID NO: 34175 - protein, 7 aa, synthetic construct
  REGION 1..7: note = Description of Artificial Sequence: Synthetic peptide
PLPKNSS

SEQ ID NO: 34176 - protein, 7 aa, synthetic construct
  REGION 1..7: note = Description of Artificial Sequence: Synthetic peptide
SGSSKPT

SEQ ID NO: 34177 - protein, 7 aa, synthetic construct
  REGION 1..7: note = Description of Artificial Sequence: Synthetic peptide
INFSGTR

SEQ ID NO: 34178 - protein, 7 aa, synthetic construct
  REGION 1..7: note = Description of Artificial Sequence: Synthetic peptide
SPMGVTR

SEQ ID NO: 34179 - protein, 7 aa, synthetic construct
  REGION 1..7: note = Description of Artificial Sequence: Synthetic peptide
MYQKPAS

SEQ ID NO: 34180 - protein, 7 aa, synthetic construct
  REGION 1..7: note = Description of Artificial Sequence: Synthetic peptide
GTFSTQS

SEQ ID NO: 34181 - protein, 7 aa, synthetic construct
  REGION 1..7: note = Description of Artificial Sequence: Synthetic peptide
ANTSGQA

SEQ ID NO: 34182 - protein, 7 aa, synthetic construct
  REGION 1..7: note = Description of Artificial Sequence: Synthetic peptide
FGSRNEG

SEQ ID NO: 34183 - protein, 7 aa, synthetic construct
  REGION 1..7: note = Description of Artificial Sequence: Synthetic peptide
PGDSGKV

SEQ ID NO: 34184 - protein, 7 aa, synthetic construct
  REGION 1..7: note = Description of Artificial Sequence: Synthetic peptide
NASTANM

SEQ ID NO: 34185 - protein, 7 aa, synthetic construct
  REGION 1..7: note = Description of Artificial Sequence: Synthetic peptide
NSRESQG

SEQ ID NO: 34186 - protein, 7 aa, synthetic construct
  REGION 1..7: note = Description of Artificial Sequence: Synthetic peptide
SGAGSAG

SEQ ID NO: 34187 - protein, 7 aa, synthetic construct
  REGION 1..7: note = Description of Artificial Sequence: Synthetic peptide
ATGNGRG

SEQ ID NO: 34188 - protein, 7 aa, synthetic construct
  REGION 1..7: note = Description of Artificial Sequence: Synthetic peptide
LTAKSSQ

SEQ ID NO: 34189 - protein, 7 aa, synthetic construct
  REGION 1..7: note = Description of Artificial Sequence: Synthetic peptide
SSYTGQR

SEQ ID NO: 34190 - protein, 7 aa, synthetic construct
  REGION 1..7: note = Description of Artificial Sequence: Synthetic peptide
QSLTRTH

SEQ ID NO: 34191 - protein, 7 aa, synthetic construct
  REGION 1..7: note = Description of Artificial Sequence: Synthetic peptide
NSASLNH

SEQ ID NO: 34192 - protein, 7 aa, synthetic construct
  REGION 1..7: note = Description of Artificial Sequence: Synthetic peptide
LNQHSSL

SEQ ID NO: 34193 - protein, 7 aa, synthetic construct
  REGION 1..7: note = Description of Artificial Sequence: Synthetic peptide
PTLGGPM

SEQ ID NO: 34194 - protein, 7 aa, synthetic construct
  REGION 1..7: note = Description of Artificial Sequence: Synthetic peptide
PNVGVVR

SEQ ID NO: 34195 - protein, 7 aa, synthetic construct
  REGION 1..7: note = Description of Artificial Sequence: Synthetic peptide
SSAPSLS

SEQ ID NO: 34196 - protein, 7 aa, synthetic construct
  REGION 1..7: note = Description of Artificial Sequence: Synthetic peptide
PLSKSAL

SEQ ID NO: 34197 - protein, 7 aa, synthetic construct
  REGION 1..7: note = Description of Artificial Sequence: Synthetic peptide
YATDGLK

SEQ ID NO: 34198 - protein, 7 aa, synthetic construct
  REGION 1..7: note = Description of Artificial Sequence: Synthetic peptide
DISRSHG

SEQ ID NO: 34199 - protein, 7 aa, synthetic construct
  REGION 1..7: note = Description of Artificial Sequence: Synthetic peptide
GTARTTG

SEQ ID NO: 34200 - protein, 7 aa, synthetic construct
  REGION 1..7: note = Description of Artificial Sequence: Synthetic peptide
CRHTPGN

SEQ ID NO: 34201 - protein, 7 aa, synthetic construct
  REGION 1..7: note = Description of Artificial Sequence: Synthetic peptide
CPQSREK

SEQ ID NO: 34202 - protein, 7 aa, synthetic construct
  REGION 1..7: note = Description of Artificial Sequence: Synthetic peptide
HTTGIIG

SEQ ID NO: 34203 - protein, 7 aa, synthetic construct
  REGION 1..7: note = Description of Artificial Sequence: Synthetic peptide
GLVPNLI

SEQ ID NO: 34204 - protein, 7 aa, synthetic construct
  REGION 1..7: note = Description of Artificial Sequence: Synthetic peptide
FTASGGN

SEQ ID NO: 34205 - protein, 7 aa, synthetic construct
  REGION 1..7: note = Description of Artificial Sequence: Synthetic peptide
SIKSVTN

SEQ ID NO: 34206 - protein, 7 aa, synthetic construct
  REGION 1..7: note = Description of Artificial Sequence: Synthetic peptide
SYSSSQL

SEQ ID NO: 34207 - protein, 7 aa, synthetic construct
  REGION 1..7: note = Description of Artificial Sequence: Synthetic peptide
LSSDKNV

SEQ ID NO: 34208 - protein, 7 aa, synthetic construct
  REGION 1..7: note = Description of Artificial Sequence: Synthetic peptide
DRYNRQL

SEQ ID NO: 34209 - protein, 7 aa, synthetic construct
  REGION 1..7: note = Description of Artificial Sequence: Synthetic peptide
SSDQPRL

SEQ ID NO: 34210 - protein, 7 aa, synthetic construct
  REGION 1..7: note = Description of Artificial Sequence: Synthetic peptide
HYNQTGL

SEQ ID NO: 34211 - protein, 7 aa, synthetic construct
  REGION 1..7: note = Description of Artificial Sequence: Synthetic peptide
GGTNNLN

SEQ ID NO: 34212 - protein, 7 aa, synthetic construct
  REGION 1..7: note = Description of Artificial Sequence: Synthetic peptide
QVPVRPV

SEQ ID NO: 34213 - protein, 7 aa, synthetic construct
  REGION 1..7: note = Description of Artificial Sequence: Synthetic peptide
IQTHTSN

SEQ ID NO: 34214 - protein, 7 aa, synthetic construct
  REGION 1..7: note = Description of Artificial Sequence: Synthetic peptide
QYNQAGL

SEQ ID NO: 34215 - protein, 7 aa, synthetic construct
  REGION 1..7: note = Description of Artificial Sequence: Synthetic peptide
YEKNSLM

SEQ ID NO: 34216 - protein, 7 aa, synthetic construct
  REGION 1..7: note = Description of Artificial Sequence: Synthetic peptide
NDVKQGH

SEQ ID NO: 34217 - protein, 7 aa, synthetic construct
  REGION 1..7: note = Description of Artificial Sequence: Synthetic peptide
NSITRSS

SEQ ID NO: 34218 - protein, 7 aa, synthetic construct
  REGION 1..7: note = Description of Artificial Sequence: Synthetic peptide
PQHSVYS

SEQ ID NO: 34219 - protein, 7 aa, synthetic construct
  REGION 1..7: note = Description of Artificial Sequence: Synthetic peptide
DKTESLG

SEQ ID NO: 34220 - protein, 7 aa, synthetic construct
  REGION 1..7: note = Description of Artificial Sequence: Synthetic peptide
STSGTSS

SEQ ID NO: 34221 - protein, 7 aa, synthetic construct
  REGION 1..7: note = Description of Artificial Sequence: Synthetic peptide
ITATAES

SEQ ID NO: 34222 - protein, 7 aa, synthetic construct
  REGION 1..7: note = Description of Artificial Sequence: Synthetic peptide
MSSERPG

SEQ ID NO: 34223 - protein, 7 aa, synthetic construct
  REGION 1..7: note = Description of Artificial Sequence: Synthetic peptide
HQLEAHK

SEQ ID NO: 34224 - protein, 7 aa, synthetic construct
  REGION 1..7: note = Description of Artificial Sequence: Synthetic peptide
TTHSSIN

SEQ ID NO: 34225 - protein, 7 aa, synthetic construct
  REGION 1..7: note = Description of Artificial Sequence: Synthetic peptide
YRVGSIS

SEQ ID NO: 34226 - protein, 7 aa, synthetic construct
  REGION 1..7: note = Description of Artificial Sequence: Synthetic peptide
RFDSVKD

SEQ ID NO: 34227 - protein, 7 aa, synthetic construct
  REGION 1..7: note = Description of Artificial Sequence: Synthetic peptide
LGSSTIL

SEQ ID NO: 34228 - protein, 7 aa, synthetic construct
  REGION 1..7: note = Description of Artificial Sequence: Synthetic peptide
RLSNAYA

SEQ ID NO: 34229 - protein, 7 aa, synthetic construct
  REGION 1..7: note = Description of Artificial Sequence: Synthetic peptide
ASLKTQM

SEQ ID NO: 34230 - protein, 7 aa, synthetic construct
  REGION 1..7: note = Description of Artificial Sequence: Synthetic peptide
AGGINKL

SEQ ID NO: 34231 - protein, 7 aa, synthetic construct
  REGION 1..7: note = Description of Artificial Sequence: Synthetic peptide
NTYQSKN

SEQ ID NO: 34232 - protein, 7 aa, synthetic construct
  REGION 1..7: note = Description of Artificial Sequence: Synthetic peptide
STMKSAA

SEQ ID NO: 34233 - protein, 7 aa, synthetic construct
  REGION 1..7: note = Description of Artificial Sequence: Synthetic peptide
RDLGHDN

SEQ ID NO: 34234 - protein, 7 aa, synthetic construct
  REGION 1..7: note = Description of Artificial Sequence: Synthetic peptide
MTASLGM

SEQ ID NO: 34235 - protein, 7 aa, synthetic construct
  REGION 1..7: note = Description of Artificial Sequence: Synthetic peptide
RQIGKQV

SEQ ID NO: 34236 - protein, 7 aa, synthetic construct
  REGION 1..7: note = Description of Artificial Sequence: Synthetic peptide
VLATKDC

SEQ ID NO: 34237 - protein, 7 aa, synthetic construct
  REGION 1..7: note = Description of Artificial Sequence: Synthetic peptide
GVNNNIN

SEQ ID NO: 34238 - protein, 7 aa, synthetic construct
  REGION 1..7: note = Description of Artificial Sequence: Synthetic peptide
KTGDQMG

SEQ ID NO: 34239 - protein, 7 aa, synthetic construct
  REGION 1..7: note = Description of Artificial Sequence: Synthetic peptide
VSGMSGS

SEQ ID NO: 34240 - protein, 7 aa, synthetic construct
  REGION 1..7: note = Description of Artificial Sequence: Synthetic peptide
PDSTFSS

SEQ ID NO: 34241 - protein, 7 aa, synthetic construct
  REGION 1..7: note = Description of Artificial Sequence: Synthetic peptide
LILPGNN

SEQ ID NO: 34242 - protein, 7 aa, synthetic construct
  REGION 1..7: note = Description of Artificial Sequence: Synthetic peptide
GSNINNG

SEQ ID NO: 34243 - protein, 7 aa, synthetic construct
  REGION 1..7: note = Description of Artificial Sequence: Synthetic peptide
KNGSVAL

SEQ ID NO: 34244 - protein, 7 aa, synthetic construct
  REGION 1..7: note = Description of Artificial Sequence: Synthetic peptide
KFPPNSG

SEQ ID NO: 34245 - protein, 7 aa, synthetic construct
  REGION 1..7: note = Description of Artificial Sequence: Synthetic peptide
INTGSVK

SEQ ID NO: 34246 - protein, 7 aa, synthetic construct
  REGION 1..7: note = Description of Artificial Sequence: Synthetic peptide
ENNALSR

SEQ ID NO: 34247 - protein, 7 aa, synthetic construct
  REGION 1..7: note = Description of Artificial Sequence: Synthetic peptide
SPRDRTS

SEQ ID NO: 34248 - protein, 7 aa, synthetic construct
  REGION 1..7: note = Description of Artificial Sequence: Synthetic peptide
HSENGNR

SEQ ID NO: 34249 - protein, 7 aa, synthetic construct
  REGION 1..7: note = Description of Artificial Sequence: Synthetic peptide
YRSKEIG

SEQ ID NO: 34250 - protein, 7 aa, synthetic construct
  REGION 1..7: note = Description of Artificial Sequence: Synthetic peptide
GSAGNML

SEQ ID NO: 34251 - protein, 7 aa, synthetic construct
  REGION 1..7: note = Description of Artificial Sequence: Synthetic peptide
NIAQKEL

SEQ ID NO: 34252 - protein, 7 aa, synthetic construct
  REGION 1..7: note = Description of Artificial Sequence: Synthetic peptide
PQNNQAH

SEQ ID NO: 34253 - protein, 7 aa, synthetic construct
  REGION 1..7: note = Description of Artificial Sequence: Synthetic peptide
LSNQNNQ

SEQ ID NO: 34254 - protein, 7 aa, synthetic construct
  REGION 1..7: note = Description of Artificial Sequence: Synthetic peptide
ESNSSRG

SEQ ID NO: 34255 - protein, 7 aa, synthetic construct
  REGION 1..7: note = Description of Artificial Sequence: Synthetic peptide
NSSGQNP

SEQ ID NO: 34256 - protein, 7 aa, synthetic construct
  REGION 1..7: note = Description of Artificial Sequence: Synthetic peptide
SNVAKRT

SEQ ID NO: 34257 - protein, 7 aa, synthetic construct
  REGION 1..7: note = Description of Artificial Sequence: Synthetic peptide
VSKSPST

SEQ ID NO: 34258 - protein, 7 aa, synthetic construct
  REGION 1..7: note = Description of Artificial Sequence: Synthetic peptide
SREKNNA

SEQ ID NO: 34259 - protein, 7 aa, synthetic construct
  REGION 1..7: note = Description of Artificial Sequence: Synthetic peptide
GVSNLAS

SEQ ID NO: 34260 - protein, 7 aa, synthetic construct
  REGION 1..7: note = Description of Artificial Sequence: Synthetic peptide
ERNGNFT

SEQ ID NO: 34261 - protein, 7 aa, synthetic construct
  REGION 1..7: note = Description of Artificial Sequence: Synthetic peptide
DQGNGYG

SEQ ID NO: 34262 - protein, 7 aa, synthetic construct
  REGION 1..7: note = Description of Artificial Sequence: Synthetic peptide
CRSAPTR

SEQ ID NO: 34263 - protein, 7 aa, synthetic construct
  REGION 1..7: note = Description of Artificial Sequence: Synthetic peptide
DSKQNLT

SEQ ID NO: 34264 - protein, 7 aa, synthetic construct
  REGION 1..7: note = Description of Artificial Sequence: Synthetic peptide
NGSAQNQ

SEQ ID NO: 34265 - protein, 7 aa, synthetic construct
  REGION 1..7: note = Description of Artificial Sequence: Synthetic peptide
LREGERT

SEQ ID NO: 34266 - protein, 7 aa, synthetic construct
  REGION 1..7: note = Description of Artificial Sequence: Synthetic peptide
STSRLPS

SEQ ID NO: 34267 - protein, 7 aa, synthetic construct
  REGION 1..7: note = Description of Artificial Sequence: Synthetic peptide
SSSAKSI

SEQ ID NO: 34268 - protein, 7 aa, synthetic construct
  REGION 1..7: note = Description of Artificial Sequence: Synthetic peptide
GHVSSYM

SEQ ID NO: 34269 - protein, 7 aa, synthetic construct
  REGION 1..7: note = Description of Artificial Sequence: Synthetic peptide
QAKNIHS

SEQ ID NO: 34270 - protein, 7 aa, synthetic construct
  REGION 1..7: note = Description of Artificial Sequence: Synthetic peptide
LNSMSPR

SEQ ID NO: 34271 - protein, 7 aa, synthetic construct
  REGION 1..7: note = Description of Artificial Sequence: Synthetic peptide
MSHTNRP

SEQ ID NO: 34272 - protein, 7 aa, synthetic construct
  REGION 1..7: note = Description of Artificial Sequence: Synthetic peptide
GSNRMSS

SEQ ID NO: 34273 - protein, 7 aa, synthetic construct
  REGION 1..7: note = Description of Artificial Sequence: Synthetic peptide
HMNRKLE

SEQ ID NO: 34274 - protein, 7 aa, synthetic construct
  REGION 1..7: note = Description of Artificial Sequence: Synthetic peptide
SDRSVDG

SEQ ID NO: 34275 - protein, 7 aa, synthetic construct
  REGION 1..7: note = Description of Artificial Sequence: Synthetic peptide
HTANSQS

SEQ ID NO: 34276 - protein, 7 aa, synthetic construct
  REGION 1..7: note = Description of Artificial Sequence: Synthetic peptide
PSTGNSV

SEQ ID NO: 34277 - protein, 7 aa, synthetic construct
  REGION 1..7: note = Description of Artificial Sequence: Synthetic peptide
TSHMQLS

SEQ ID NO: 34278 - protein, 7 aa, synthetic construct
  REGION 1..7: note = Description of Artificial Sequence: Synthetic peptide
VSDNTYK

SEQ ID NO: 34279 - protein, 7 aa, synthetic construct
  REGION 1..7: note = Description of Artificial Sequence: Synthetic peptide
FRQTSGN

SEQ ID NO: 34280 - protein, 7 aa, synthetic construct
  REGION 1..7: note = Description of Artificial Sequence: Synthetic peptide
VHTSGVQ

SEQ ID NO: 34281 - protein, 7 aa, synthetic construct
  REGION 1..7: note = Description of Artificial Sequence: Synthetic peptide
PQSSHQT

SEQ ID NO: 34282 - protein, 7 aa, synthetic construct
  REGION 1..7: note = Description of Artificial Sequence: Synthetic peptide
HGMEVAR

SEQ ID NO: 34283 - protein, 7 aa, synthetic construct
  REGION 1..7: note = Description of Artificial Sequence: Synthetic peptide
TEARSAN

SEQ ID NO: 34284 - protein, 7 aa, synthetic construct
  REGION 1..7: note = Description of Artificial Sequence: Synthetic peptide
SNTNAAM

SEQ ID NO: 34285 - protein, 7 aa, synthetic construct
  REGION 1..7: note = Description of Artificial Sequence: Synthetic peptide
QLGDRNR

SEQ ID NO: 34286 - protein, 7 aa, synthetic construct
  REGION 1..7: note = Description of Artificial Sequence: Synthetic peptide
TPSVTNM

SEQ ID NO: 34287 - protein, 7 aa, synthetic construct
  REGION 1..7: note = Description of Artificial Sequence: Synthetic peptide
NLGNSLK

SEQ ID NO: 34288 - protein, 7 aa, synthetic construct
  REGION 1..7: note = Description of Artificial Sequence: Synthetic peptide
SLITMKD

SEQ ID NO: 34289 - protein, 7 aa, synthetic construct
  REGION 1..7: note = Description of Artificial Sequence: Synthetic peptide
SSPSNMA

SEQ ID NO: 34290 - protein, 7 aa, synthetic construct
  REGION 1..7: note = Description of Artificial Sequence: Synthetic peptide
PSLERGS

SEQ ID NO: 34291 - protein, 7 aa, synthetic construct
  REGION 1..7: note = Description of Artificial Sequence: Synthetic peptide
QTSSHAY

SEQ ID NO: 34292 - protein, 7 aa, synthetic construct
  REGION 1..7: note = Description of Artificial Sequence: Synthetic peptide
GVERMRG

SEQ ID NO: 34293 - protein, 7 aa, synthetic construct
  REGION 1..7: note = Description of Artificial Sequence: Synthetic peptide
DYSETRR

SEQ ID NO: 34294 - protein, 7 aa, synthetic construct
  REGION 1..7: note = Description of Artificial Sequence: Synthetic peptide
FPNVNSA

SEQ ID NO: 34295 - protein, 7 aa, synthetic construct
  REGION 1..7: note = Description of Artificial Sequence: Synthetic peptide
HGSKPYI

SEQ ID NO: 34296 - protein, 7 aa, synthetic construct
  REGION 1..7: note = Description of Artificial Sequence: Synthetic peptide
RYPPATH

SEQ ID NO: 34297 - protein, 7 aa, synthetic construct
  REGION 1..7: note = Description of Artificial Sequence: Synthetic peptide
ATVSKTA

SEQ ID NO: 34298 - protein, 7 aa, synthetic construct
  REGION 1..7: note = Description of Artificial Sequence: Synthetic peptide
GPDTHSQ

SEQ ID NO: 34299 - protein, 7 aa, synthetic construct
  REGION 1..7: note = Description of Artificial Sequence: Synthetic peptide
GDLNPPS

SEQ ID NO: 34300 - protein, 7 aa, synthetic construct
  REGION 1..7: note = Description of Artificial Sequence: Synthetic peptide
AQRNISS

SEQ ID NO: 34301 - protein, 7 aa, synthetic construct
  REGION 1..7: note = Description of Artificial Sequence: Synthetic peptide
RTNVMAG

SEQ ID NO: 34302 - protein, 7 aa, synthetic construct
  REGION 1..7: note = Description of Artificial Sequence: Synthetic peptide
TPTPVNQ

SEQ ID NO: 34303 - protein, 7 aa, synthetic construct
  REGION 1..7: note = Description of Artificial Sequence: Synthetic peptide
IHATSLA

SEQ ID NO: 34304 - protein, 7 aa, synthetic construct
  REGION 1..7: note = Description of Artificial Sequence: Synthetic peptide
QSEIVNK

SEQ ID NO: 34305 - protein, 7 aa, synthetic construct
  REGION 1..7: note = Description of Artificial Sequence: Synthetic peptide
FNSSSSK

SEQ ID NO: 34306 - protein, 7 aa, synthetic construct
  REGION 1..7: note = Description of Artificial Sequence: Synthetic peptide
WQTGSTM

SEQ ID NO: 34307 - protein, 7 aa, synthetic construct
  REGION 1..7: note = Description of Artificial Sequence: Synthetic peptide
TSLSPSV

SEQ ID NO: 34308 - protein, 7 aa, synthetic construct
  REGION 1..7: note = Description of Artificial Sequence: Synthetic peptide
YSTHLNN

SEQ ID NO: 34309 - protein, 7 aa, synthetic construct
  REGION 1..7: note = Description of Artificial Sequence: Synthetic peptide
VTNSAPT

SEQ ID NO: 34310 - protein, 7 aa, synthetic construct
  REGION 1..7: note = Description of Artificial Sequence: Synthetic peptide
QDKHNPG

SEQ ID NO: 34311 - protein, 7 aa, synthetic construct
  REGION 1..7: note = Description of Artificial Sequence: Synthetic peptide
DGGNQRS

SEQ ID NO: 34312 - protein, 7 aa, synthetic construct
  REGION 1..7: note = Description of Artificial Sequence: Synthetic peptide
HQPEKIA

SEQ ID NO: 34313 - protein, 7 aa, synthetic construct
  REGION 1..7: note = Description of Artificial Sequence: Synthetic peptide
YIDASAR

SEQ ID NO: 34314 - protein, 7 aa, synthetic construct
  REGION 1..7: note = Description of Artificial Sequence: Synthetic peptide
NISSKVA

SEQ ID NO: 34315 - protein, 7 aa, synthetic construct
  REGION 1..7: note = Description of Artificial Sequence: Synthetic peptide
MATAHGG

SEQ ID NO: 34316 - protein, 7 aa, synthetic construct
  REGION 1..7: note = Description of Artificial Sequence: Synthetic peptide
CSTGTRK

SEQ ID NO: 34317 - protein, 7 aa, synthetic construct
  REGION 1..7: note = Description of Artificial Sequence: Synthetic peptide
SGSLSSA

SEQ ID NO: 34318 - protein, 7 aa, synthetic construct
  REGION 1..7: note = Description of Artificial Sequence: Synthetic peptide
NLKNQVA

SEQ ID NO: 34319 - protein, 7 aa, synthetic construct
  REGION 1..7: note = Description of Artificial Sequence: Synthetic peptide
PRENKFS

SEQ ID NO: 34320 - protein, 7 aa, synthetic construct
  REGION 1..7: note = Description of Artificial Sequence: Synthetic peptide
GARPVLQ

SEQ ID NO: 34321 - protein, 7 aa, synthetic construct
  REGION 1..7: note = Description of Artificial Sequence: Synthetic peptide
NFSNPTV

SEQ ID NO: 34322 - protein, 7 aa, synthetic construct
  REGION 1..7: note = Description of Artificial Sequence: Synthetic peptide
LGNAHQL

SEQ ID NO: 34323 - protein, 7 aa, synthetic construct
  REGION 1..7: note = Description of Artificial Sequence: Synthetic peptide
HTPDVGK

SEQ ID NO: 34324 - protein, 7 aa, synthetic construct
  REGION 1..7: note = Description of Artificial Sequence: Synthetic peptide
VKSNNLP

SEQ ID NO: 34325 - protein, 7 aa, synthetic construct
  REGION 1..7: note = Description of Artificial Sequence: Synthetic peptide
PRKDDSM

SEQ ID NO: 34326 - protein, 7 aa, synthetic construct
  REGION 1..7: note = Description of Artificial Sequence: Synthetic peptide
GVPAGHT

SEQ ID NO: 34327 - protein, 7 aa, synthetic construct
  REGION 1..7: note = Description of Artificial Sequence: Synthetic peptide
DREATSR

SEQ ID NO: 34328 - protein, 7 aa, synthetic construct
  REGION 1..7: note = Description of Artificial Sequence: Synthetic peptide
ARADSNF

SEQ ID NO: 34329 - protein, 7 aa, synthetic construct
  REGION 1..7: note = Description of Artificial Sequence: Synthetic peptide
GTVDKAS

SEQ ID NO: 34330 - protein, 7 aa, synthetic construct
  REGION 1..7: note = Description of Artificial Sequence: Synthetic peptide
RSTNTDN

SEQ ID NO: 34331 - protein, 7 aa, synthetic construct
  REGION 1..7: note = Description of Artificial Sequence: Synthetic peptide
TGAGGYC

SEQ ID NO: 34332 - protein, 7 aa, synthetic construct
  REGION 1..7: note = Description of Artificial Sequence: Synthetic peptide
YIHNQTG

SEQ ID NO: 34333 - protein, 7 aa, synthetic construct
  REGION 1..7: note = Description of Artificial Sequence: Synthetic peptide
RTVPSSL

SEQ ID NO: 34334 - protein, 7 aa, synthetic construct
  REGION 1..7: note = Description of Artificial Sequence: Synthetic peptide
AMSSNNG

SEQ ID NO: 34335 - protein, 7 aa, synthetic construct
  REGION 1..7: note = Description of Artificial Sequence: Synthetic peptide
GGHKSLN

SEQ ID NO: 34336 - protein, 7 aa, synthetic construct
  REGION 1..7: note = Description of Artificial Sequence: Synthetic peptide
AFGGETK

SEQ ID NO: 34337 - protein, 7 aa, synthetic construct
  REGION 1..7: note = Description of Artificial Sequence: Synthetic peptide
QGSGSNH

SEQ ID NO: 34338 - protein, 7 aa, synthetic construct
  REGION 1..7: note = Description of Artificial Sequence: Synthetic peptide
CLRSSSN

SEQ ID NO: 34339 - protein, 7 aa, synthetic construct
  REGION 1..7: note = Description of Artificial Sequence: Synthetic peptide
ENRTSVQ

SEQ ID NO: 34340 - protein, 7 aa, synthetic construct
  REGION 1..7: note = Description of Artificial Sequence: Synthetic peptide
NSVAGMG

SEQ ID NO: 34341 - protein, 7 aa, synthetic construct
  REGION 1..7: note = Description of Artificial Sequence: Synthetic peptide
SRHDGKG

SEQ ID NO: 34342 - protein, 7 aa, synthetic construct
  REGION 1..7: note = Description of Artificial Sequence: Synthetic peptide
QKTQTTS

SEQ ID NO: 34343 - protein, 7 aa, synthetic construct
  REGION 1..7: note = Description of Artificial Sequence: Synthetic peptide
HRLPSHS

SEQ ID NO: 34344 - protein, 7 aa, synthetic construct
  REGION 1..7: note = Description of Artificial Sequence: Synthetic peptide
NNRSGMG

SEQ ID NO: 34345 - protein, 7 aa, synthetic construct
  REGION 1..7: note = Description of Artificial Sequence: Synthetic peptide
GAKESQS

SEQ ID NO: 34346 - protein, 7 aa, synthetic construct
  REGION 1..7: note = Description of Artificial Sequence: Synthetic peptide
MTESSRT

SEQ ID NO: 34347 - protein, 7 aa, synthetic construct
  REGION 1..7: note = Description of Artificial Sequence: Synthetic peptide
TEQVGTR

SEQ ID NO: 34348 - protein, 7 aa, synthetic construct
  REGION 1..7: note = Description of Artificial Sequence: Synthetic peptide
DVLSKSQ

SEQ ID NO: 34349 - protein, 7 aa, synthetic construct
  REGION 1..7: note = Description of Artificial Sequence: Synthetic peptide
QGSSLRT

SEQ ID NO: 34350 - protein, 7 aa, synthetic construct
  REGION 1..7: note = Description of Artificial Sequence: Synthetic peptide
LGIMDKG

SEQ ID NO: 34351 - protein, 7 aa, synthetic construct
  REGION 1..7: note = Description of Artificial Sequence: Synthetic peptide
PMINSSD

SEQ ID NO: 34352 - protein, 7 aa, synthetic construct
  REGION 1..7: note = Description of Artificial Sequence: Synthetic peptide
GAYNHVT

SEQ ID NO: 34353 - protein, 7 aa, synthetic construct
  REGION 1..7: note = Description of Artificial Sequence: Synthetic peptide
ITSASPC

SEQ ID NO: 34354 - protein, 7 aa, synthetic construct
  REGION 1..7: note = Description of Artificial Sequence: Synthetic peptide
TSRGNLS

SEQ ID NO: 34355 - protein, 7 aa, synthetic construct
  REGION 1..7: note = Description of Artificial Sequence: Synthetic peptide
TPGSTIR

SEQ ID NO: 34356 - protein, 7 aa, synthetic construct
  REGION 1..7: note = Description of Artificial Sequence: Synthetic peptide
GPDNGIQ

SEQ ID NO: 34357 - protein, 7 aa, synthetic construct
  REGION 1..7: note = Description of Artificial Sequence: Synthetic peptide
YSMRPTE

SEQ ID NO: 34358 - protein, 7 aa, synthetic construct
  REGION 1..7: note = Description of Artificial Sequence: Synthetic peptide
DMVSPRN

SEQ ID NO: 34359 - protein, 7 aa, synthetic construct
  REGION 1..7: note = Description of Artificial Sequence: Synthetic peptide
KNQAPLL

SEQ ID NO: 34360 - protein, 7 aa, synthetic construct
  REGION 1..7: note = Description of Artificial Sequence: Synthetic peptide
LDAGVAR

SEQ ID NO: 34361 - protein, 7 aa, synthetic construct
  REGION 1..7: note = Description of Artificial Sequence: Synthetic peptide
PRTRENQ

SEQ ID NO: 34362 - protein, 7 aa, synthetic construct
  REGION 1..7: note = Description of Artificial Sequence: Synthetic peptide
RTSSTYS

SEQ ID NO: 34363 - protein, 7 aa, synthetic construct
  REGION 1..7: note = Description of Artificial Sequence: Synthetic peptide
SVVAHGP

SEQ ID NO: 34364 - protein, 7 aa, synthetic construct
  REGION 1..7: note = Description of Artificial Sequence: Synthetic peptide
NPVAAAT

SEQ ID NO: 34365 - protein, 7 aa, synthetic construct
  REGION 1..7: note = Description of Artificial Sequence: Synthetic peptide
LAQERGT

SEQ ID NO: 34366 - protein, 7 aa, synthetic construct
  REGION 1..7: note = Description of Artificial Sequence: Synthetic peptide
AHKSAMN

SEQ ID NO: 34367 - protein, 7 aa, synthetic construct
  REGION 1..7: note = Description of Artificial Sequence: Synthetic peptide
LTQRDFS

SEQ ID NO: 34368 - protein, 7 aa, synthetic construct
  REGION 1..7: note = Description of Artificial Sequence: Synthetic peptide
QSGNTIQ

SEQ ID NO: 34369 - protein, 7 aa, synthetic construct
  REGION 1..7: note = Description of Artificial Sequence: Synthetic peptide
NLNSVSK

SEQ ID NO: 34370 - protein, 7 aa, synthetic construct
  REGION 1..7: note = Description of Artificial Sequence: Synthetic peptide
YGSNTPT

SEQ ID NO: 34371 - protein, 7 aa, synthetic construct
  REGION 1..7: note = Description of Artificial Sequence: Synthetic peptide
REGGQMV

SEQ ID NO: 34372 - protein, 7 aa, synthetic construct
  REGION 1..7: note = Description of Artificial Sequence: Synthetic peptide
NDQAKLT

SEQ ID NO: 34373 - protein, 7 aa, synthetic construct
  REGION 1..7: note = Description of Artificial Sequence: Synthetic peptide
VSGTKIE

SEQ ID NO: 34374 - protein, 7 aa, synthetic construct
  REGION 1..7: note = Description of Artificial Sequence: Synthetic peptide
QSHGITN

SEQ ID NO: 34375 - protein, 7 aa, synthetic construct
  REGION 1..7: note = Description of Artificial Sequence: Synthetic peptide
HRVDNQG

SEQ ID NO: 34376 - protein, 7 aa, synthetic construct
  REGION 1..7: note = Description of Artificial Sequence: Synthetic peptide
HSTSGGH

SEQ ID NO: 34377 - protein, 7 aa, synthetic construct
  REGION 1..7: note = Description of Artificial Sequence: Synthetic peptide
SDSRNPV

SEQ ID NO: 34378 - protein, 7 aa, synthetic construct
  REGION 1..7: note = Description of Artificial Sequence: Synthetic peptide
DINRQRT

SEQ ID NO: 34379 - protein, 7 aa, synthetic construct
  REGION 1..7: note = Description of Artificial Sequence: Synthetic peptide
PGTGSNH

SEQ ID NO: 34380 - protein, 7 aa, synthetic construct
  REGION 1..7: note = Description of Artificial Sequence: Synthetic peptide
SHDNGQS

SEQ ID NO: 34381 - protein, 7 aa, synthetic construct
  REGION 1..7: note = Description of Artificial Sequence: Synthetic peptide
VLHNASS

SEQ ID NO: 34382 - protein, 7 aa, synthetic construct
  REGION 1..7: note = Description of Artificial Sequence: Synthetic peptide
YSGASGR

SEQ ID NO: 34383 - protein, 7 aa, synthetic construct
  REGION 1..7: note = Description of Artificial Sequence: Synthetic peptide
RDHSGSR

SEQ ID NO: 34384 - protein, 7 aa, synthetic construct
  REGION 1..7: note = Description of Artificial Sequence: Synthetic peptide
GVNLHAD

SEQ ID NO: 34385 - protein, 7 aa, synthetic construct
  REGION 1..7: note = Description of Artificial Sequence: Synthetic peptide
VNGHGVS

SEQ ID NO: 34386 - protein, 7 aa, synthetic construct
  REGION 1..7: note = Description of Artificial Sequence: Synthetic peptide
DPLGKQG

SEQ ID NO: 34387 - protein, 7 aa, synthetic construct
  REGION 1..7: note = Description of Artificial Sequence: Synthetic peptide
FVSREHT

SEQ ID NO: 34388 - protein, 7 aa, synthetic construct
  REGION 1..7: note = Description of Artificial Sequence: Synthetic peptide
NSAAAPA

SEQ ID NO: 34389 - protein, 7 aa, synthetic construct
  REGION 1..7: note = Description of Artificial Sequence: Synthetic peptide
HTTGILG

SEQ ID NO: 34390 - protein, 7 aa, synthetic construct
  REGION 1..7: note = Description of Artificial Sequence: Synthetic peptide
NAQVTTG

SEQ ID NO: 34391 - protein, 7 aa, synthetic construct
  REGION 1..7: note = Description of Artificial Sequence: Synthetic peptide
YAQSPSS

SEQ ID NO: 34392 - protein, 7 aa, synthetic construct
  REGION 1..7: note = Description of Artificial Sequence: Synthetic peptide
NIAQKDL

SEQ ID NO: 34393 - protein, 7 aa, synthetic construct
  REGION 1..7: note = Description of Artificial Sequence: Synthetic peptide
MIRDGSS

SEQ ID NO: 34394 - protein, 7 aa, synthetic construct
  REGION 1..7: note = Description of Artificial Sequence: Synthetic peptide
PNGHEVL

SEQ ID NO: 34395 - protein, 7 aa, synthetic construct
  REGION 1..7: note = Description of Artificial Sequence: Synthetic peptide
SVSSPRD

SEQ ID NO: 34396 - protein, 7 aa, synthetic construct
  REGION 1..7: note = Description of Artificial Sequence: Synthetic peptide
RTLRSVD

SEQ ID NO: 34397 - protein, 7 aa, synthetic construct
  REGION 1..7: note = Description of Artificial Sequence: Synthetic peptide
NSHNGAS

SEQ ID NO: 34398 - protein, 7 aa, synthetic construct
  REGION 1..7: note = Description of Artificial Sequence: Synthetic peptide
TLPTKYP

SEQ ID NO: 34399 - protein, 7 aa, synthetic construct
  REGION 1..7: note = Description of Artificial Sequence: Synthetic peptide
LSTANKS

SEQ ID NO: 34400 - protein, 7 aa, synthetic construct
  REGION 1..7: note = Description of Artificial Sequence: Synthetic peptide
YPNSVPS

SEQ ID NO: 34401 - protein, 7 aa, synthetic construct
  REGION 1..7: note = Description of Artificial Sequence: Synthetic peptide
IISQHGM

SEQ ID NO: 34402 - protein, 7 aa, synthetic construct
  REGION 1..7: note = Description of Artificial Sequence: Synthetic peptide
PGPEVGR

SEQ ID NO: 34403 - protein, 7 aa, synthetic construct
  REGION 1..7: note = Description of Artificial Sequence: Synthetic peptide
ATNKTTN

SEQ ID NO: 34404 - protein, 7 aa, synthetic construct
  REGION 1..7: note = Description of Artificial Sequence: Synthetic peptide
LPHHTSA

SEQ ID NO: 34405 - protein, 7 aa, synthetic construct
  REGION 1..7: note = Description of Artificial Sequence: Synthetic peptide
SYGGQSR

SEQ ID NO: 34406 - protein, 7 aa, synthetic construct
  REGION 1..7: note = Description of Artificial Sequence: Synthetic peptide
HMAASTG

SEQ ID NO: 34407 - protein, 7 aa, synthetic construct
  REGION 1..7: note = Description of Artificial Sequence: Synthetic peptide
PIHTRID

SEQ ID NO: 34408 - protein, 7 aa, synthetic construct
  REGION 1..7: note = Description of Artificial Sequence: Synthetic peptide
PRSLSTS

SEQ ID NO: 34409 - protein, 7 aa, synthetic construct
  REGION 1..7: note = Description of Artificial Sequence: Synthetic peptide
RAGNAPT

SEQ ID NO: 34410 - protein, 7 aa, synthetic construct
  REGION 1..7: note = Description of Artificial Sequence: Synthetic peptide
PYAGNQR

SEQ ID NO: 34411 - protein, 7 aa, synthetic construct
  REGION 1..7: note = Description of Artificial Sequence: Synthetic peptide
SRDSSIH

SEQ ID NO: 34412 - protein, 7 aa, synthetic construct
  REGION 1..7: note = Description of Artificial Sequence: Synthetic peptide
NVTTPLI

SEQ ID NO: 34413 - protein, 7 aa, synthetic construct
  REGION 1..7: note = Description of Artificial Sequence: Synthetic peptide
SNQVRQI

SEQ ID NO: 34414 - protein, 7 aa, synthetic construct
  REGION 1..7: note = Description of Artificial Sequence: Synthetic peptide
TLDNHRS

SEQ ID NO: 34415 - protein, 7 aa, synthetic construct
  REGION 1..7: note = Description of Artificial Sequence: Synthetic peptide
ELHSKNA

SEQ ID NO: 34416 - protein, 7 aa, synthetic construct
  REGION 1..7: note = Description of Artificial Sequence: Synthetic peptide
RSYDPNR

SEQ ID NO: 34417 - protein, 7 aa, synthetic construct
  REGION 1..7: note = Description of Artificial Sequence: Synthetic peptide
LPTDSLR

SEQ ID NO: 34418 - protein, 7 aa, synthetic construct
  REGION 1..7: note = Description of Artificial Sequence: Synthetic peptide
EVTNSPR

SEQ ID NO: 34419 - protein, 7 aa, synthetic construct
  REGION 1..7: note = Description of Artificial Sequence: Synthetic peptide
GGQTARI

SEQ ID NO: 34420 - protein, 7 aa, synthetic construct
  REGION 1..7: note = Description of Artificial Sequence: Synthetic peptide
SAGGAVS

SEQ ID NO: 34421 - protein, 7 aa, synthetic construct
  REGION 1..7: note = Description of Artificial Sequence: Synthetic peptide
PSHGPPA

SEQ ID NO: 34422 - protein, 7 aa, synthetic construct
  REGION 1..7: note = Description of Artificial Sequence: Synthetic peptide
YTAASHR

SEQ ID NO: 34423 - protein, 7 aa, synthetic construct
  REGION 1..7: note = Description of Artificial Sequence: Synthetic peptide
MRANHTS

SEQ ID NO: 34424 - protein, 7 aa, synthetic construct
  REGION 1..7: note = Description of Artificial Sequence: Synthetic peptide
DVAIQPR

SEQ ID NO: 34425 - protein, 7 aa, synthetic construct
  REGION 1..7: note = Description of Artificial Sequence: Synthetic peptide
FPSNGRT

SEQ ID NO: 34426 - protein, 7 aa, synthetic construct
  REGION 1..7: note = Description of Artificial Sequence: Synthetic peptide
SDSRSRS

SEQ ID NO: 34427 - protein, 7 aa, synthetic construct
  REGION 1..7: note = Description of Artificial Sequence: Synthetic peptide
LMQTHGS

SEQ ID NO: 34428 - protein, 7 aa, synthetic construct
  REGION 1..7: note = Description of Artificial Sequence: Synthetic peptide
IQSSDRL

SEQ ID NO: 34429 - protein, 7 aa, synthetic construct
  REGION 1..7: note = Description of Artificial Sequence: Synthetic peptide
IPANSFK

SEQ ID NO: 34430 - protein, 7 aa, synthetic construct
  REGION 1..7: note = Description of Artificial Sequence: Synthetic peptide
SMSPRNG

SEQ ID NO: 34431 - protein, 7 aa, synthetic construct
  REGION 1..7: note = Description of Artificial Sequence: Synthetic peptide
GTFSTQS

SEQ ID NO: 34432 - protein, 7 aa, synthetic construct
  REGION 1..7: note = Description of Artificial Sequence: Synthetic peptide
SASPSIK

SEQ ID NO: 34433 - protein, 7 aa, synthetic construct
  REGION 1..7: note = Description of Artificial Sequence: Synthetic peptide
YASSRDG

SEQ ID NO: 34434 - protein, 7 aa, synthetic construct
  REGION 1..7: note = Description of Artificial Sequence: Synthetic peptide
RMKSLDN

SEQ ID NO: 34435 - protein, 7 aa, synthetic construct
  REGION 1..7: note = Description of Artificial Sequence: Synthetic peptide
PADHGKL

SEQ ID NO: 34436 - protein, 7 aa, synthetic construct
  REGION 1..7: note = Description of Artificial Sequence: Synthetic peptide
VSDSNTK

SEQ ID NO: 34437 - protein, 7 aa, synthetic construct
  REGION 1..7: note = Description of Artificial Sequence: Synthetic peptide
KLGQDVR

SEQ ID NO: 34438 - protein, 7 aa, synthetic construct
  REGION 1..7: note = Description of Artificial Sequence: Synthetic peptide
VGDRSWS

SEQ ID NO: 34439 - protein, 7 aa, synthetic construct
  REGION 1..7: note = Description of Artificial Sequence: Synthetic peptide
RNGAMSN

SEQ ID NO: 34440 - protein, 7 aa, synthetic construct
  REGION 1..7: note = Description of Artificial Sequence: Synthetic peptide
SKPANNV

SEQ ID NO: 34441 - protein, 7 aa, synthetic construct
  REGION 1..7: note = Description of Artificial Sequence: Synthetic peptide
RGAADSN

SEQ ID NO: 34442 - protein, 7 aa, synthetic construct
  REGION 1..7: note = Description of Artificial Sequence: Synthetic peptide
ALPGSTS

SEQ ID NO: 34443 - protein, 7 aa, synthetic construct
  REGION 1..7: note = Description of Artificial Sequence: Synthetic peptide
HVQDGRT

SEQ ID NO: 34444 - protein, 7 aa, synthetic construct
  REGION 1..7: note = Description of Artificial Sequence: Synthetic peptide
NGSGQDQ

SEQ ID NO: 34445 - protein, 7 aa, synthetic construct
  REGION 1..7: note = Description of Artificial Sequence: Synthetic peptide
NIHLAGT

SEQ ID NO: 34446 - protein, 7 aa, synthetic construct
  REGION 1..7: note = Description of Artificial Sequence: Synthetic peptide
HGESRQA

SEQ ID NO: 34447 - protein, 7 aa, synthetic construct
  REGION 1..7: note = Description of Artificial Sequence: Synthetic peptide
ERGKNAL

SEQ ID NO: 34448 - protein, 7 aa, synthetic construct
  REGION 1..7: note = Description of Artificial Sequence: Synthetic peptide
GIQSSPT

SEQ ID NO: 34449 - protein, 7 aa, synthetic construct
  REGION 1..7: note = Description of Artificial Sequence: Synthetic peptide
VGSQTNS

SEQ ID NO: 34450 - protein, 7 aa, synthetic construct
  REGION 1..7: note = Description of Artificial Sequence: Synthetic peptide
DTHVSGR

SEQ ID NO: 34451 - protein, 7 aa, synthetic construct
  REGION 1..7: note = Description of Artificial Sequence: Synthetic peptide
SSTKSSL

SEQ ID NO: 34452 - protein, 7 aa, synthetic construct
  REGION 1..7: note = Description of Artificial Sequence: Synthetic peptide
GQIKNLG

SEQ ID NO: 34453 - protein, 7 aa, synthetic construct
  REGION 1..7: note = Description of Artificial Sequence: Synthetic peptide
KSDAHTA

SEQ ID NO: 34454 - protein, 7 aa, synthetic construct
  REGION 1..7: note = Description of Artificial Sequence: Synthetic peptide
GQVKAIG

SEQ ID NO: 34455 - protein, 7 aa, synthetic construct
  REGION 1..7: note = Description of Artificial Sequence: Synthetic peptide
ESATPIR

SEQ ID NO: 34456 - protein, 7 aa, synthetic construct
  REGION 1..7: note = Description of Artificial Sequence: Synthetic peptide
NNTQKNS

SEQ ID NO: 34457 - protein, 7 aa, synthetic construct
  REGION 1..7: note = Description of Artificial Sequence: Synthetic peptide
SPGKLTT

SEQ ID NO: 34458 - protein, 7 aa, synthetic construct
  REGION 1..7: note = Description of Artificial Sequence: Synthetic peptide
LTTGNHI

SEQ ID NO: 34459 - protein, 7 aa, synthetic construct
  REGION 1..7: note = Description of Artificial Sequence: Synthetic peptide
DDRSARG

SEQ ID NO: 34460 - protein, 7 aa, synthetic construct
  REGION 1..7: note = Description of Artificial Sequence: Synthetic peptide
FRTQSVG

SEQ ID NO: 34461 - protein, 7 aa, synthetic construct
  REGION 1..7: note = Description of Artificial Sequence: Synthetic peptide
SAGNHDI

SEQ ID NO: 34462 - protein, 7 aa, synthetic construct
  REGION 1..7: note = Description of Artificial Sequence: Synthetic peptide
NPGESHR

SEQ ID NO: 34463 - protein, 7 aa, synthetic construct
  REGION 1..7: note = Description of Artificial Sequence: Synthetic peptide
GTSNRYT

SEQ ID NO: 34464 - protein, 7 aa, synthetic construct
  REGION 1..7: note = Description of Artificial Sequence: Synthetic peptide
QDATPRS

SEQ ID NO: 34465 - protein, 7 aa, synthetic construct
  REGION 1..7: note = Description of Artificial Sequence: Synthetic peptide
QMPGHTG

SEQ ID NO: 34466 - protein, 7 aa, synthetic construct
  REGION 1..7: note = Description of Artificial Sequence: Synthetic peptide
TNRVGYG

SEQ ID NO: 34467 - protein, 7 aa, synthetic construct
  REGION 1..7: note = Description of Artificial Sequence: Synthetic peptide
QVTAIGA

SEQ ID NO: 34468 - protein, 7 aa, synthetic construct
  REGION 1..7: note = Description of Artificial Sequence: Synthetic peptide
NGLSQTH

SEQ ID NO: 34469 - protein, 7 aa, synthetic construct
  REGION 1..7: note = Description of Artificial Sequence: Synthetic peptide
NVATLSA

SEQ ID NO: 34470 - protein, 7 aa, synthetic construct
  REGION 1..7: note = Description of Artificial Sequence: Synthetic peptide
PSTRQSN

SEQ ID NO: 34471 - protein, 7 aa, synthetic construct
  REGION 1..7: note = Description of Artificial Sequence: Synthetic peptide
YSGGNMS

SEQ ID NO: 34472 - protein, 7 aa, synthetic construct
  REGION 1..7: note = Description of Artificial Sequence: Synthetic peptide
TPITPMT

SEQ ID NO: 34473 - protein, 7 aa, synthetic construct
  REGION 1..7: note = Description of Artificial Sequence: Synthetic peptide
SYASTQQ

SEQ ID NO: 34474 - protein, 7 aa, synthetic construct
  REGION 1..7: note = Description of Artificial Sequence: Synthetic peptide
TSRTSYE

SEQ ID NO: 34475 - protein, 7 aa, synthetic construct
  REGION 1..7: note = Description of Artificial Sequence: Synthetic peptide
QGSSPME

SEQ ID NO: 34476 - protein, 7 aa, synthetic construct
  REGION 1..7: note = Description of Artificial Sequence: Synthetic peptide
LNQIGKS

SEQ ID NO: 34477 - protein, 7 aa, synthetic construct
  REGION 1..7: note = Description of Artificial Sequence: Synthetic peptide
TSERPTC

SEQ ID NO: 34478 - protein, 7 aa, synthetic construct
  REGION 1..7: note = Description of Artificial Sequence: Synthetic peptide
DISRSHG

SEQ ID NO: 34479 - protein, 7 aa, synthetic construct
  REGION 1..7: note = Description of Artificial Sequence: Synthetic peptide
RNNNTPG

SEQ ID NO: 34480 - protein, 7 aa, synthetic construct
  REGION 1..7: note = Description of Artificial Sequence: Synthetic peptide
RQYTGDS

SEQ ID NO: 34481 - protein, 7 aa, synthetic construct
  REGION 1..7: note = Description of Artificial Sequence: Synthetic peptide
APTSDHH

SEQ ID NO: 34482 - protein, 7 aa, synthetic construct
  REGION 1..7: note = Description of Artificial Sequence: Synthetic peptide
CLAQPRV

SEQ ID NO: 34483 - protein, 7 aa, synthetic construct
  REGION 1..7: note = Description of Artificial Sequence: Synthetic peptide
SSTSLGS

SEQ ID NO: 34484 - protein, 7 aa, synthetic construct
  REGION 1..7: note = Description of Artificial Sequence: Synthetic peptide
KTPQLSQ

SEQ ID NO: 34485 - protein, 7 aa, synthetic construct
  REGION 1..7: note = Description of Artificial Sequence: Synthetic peptide
MGVGMNG

SEQ ID NO: 34486 - protein, 7 aa, synthetic construct
  REGION 1..7: note = Description of Artificial Sequence: Synthetic peptide
SVSNTNT

SEQ ID NO: 34487 - protein, 7 aa, synthetic construct
  REGION 1..7: note = Description of Artificial Sequence: Synthetic peptide
HVIAPQQ

SEQ ID NO: 34488 - protein, 7 aa, synthetic construct
  REGION 1..7: note = Description of Artificial Sequence: Synthetic peptide
GNTNSFL

SEQ ID NO: 34489 - protein, 7 aa, synthetic construct
  REGION 1..7: note = Description of Artificial Sequence: Synthetic peptide
GAKPGLA

SEQ ID NO: 34490 - protein, 7 aa, synthetic construct
  REGION 1..7: note = Description of Artificial Sequence: Synthetic peptide
VSGTPRV

SEQ ID NO: 34491 - protein, 7 aa, synthetic construct
  REGION 1..7: note = Description of Artificial Sequence: Synthetic peptide
SSYVGPS

SEQ ID NO: 34492 - protein, 7 aa, synthetic construct
  REGION 1..7: note = Description of Artificial Sequence: Synthetic peptide
LIRGGNN

SEQ ID NO: 34493 - protein, 7 aa, synthetic construct
  REGION 1..7: note = Description of Artificial Sequence: Synthetic peptide
DSIGSSK

SEQ ID NO: 34494 - protein, 7 aa, synthetic construct
  REGION 1..7: note = Description of Artificial Sequence: Synthetic peptide
RFQNNTG

SEQ ID NO: 34495 - protein, 7 aa, synthetic construct
  REGION 1..7: note = Description of Artificial Sequence: Synthetic peptide
TSNSNIA

SEQ ID NO: 34496 - protein, 7 aa, synthetic construct
  REGION 1..7: note = Description of Artificial Sequence: Synthetic peptide
GMHVSNP

SEQ ID NO: 34497 - protein, 7 aa, synthetic construct
  REGION 1..7: note = Description of Artificial Sequence: Synthetic peptide
SLPNTNG

SEQ ID NO: 34498 - protein, 7 aa, synthetic construct
  REGION 1..7: note = Description of Artificial Sequence: Synthetic peptide
DPRNSTS

SEQ ID NO: 34499 - protein, 7 aa, synthetic construct
  REGION 1..7: note = Description of Artificial Sequence: Synthetic peptide
SGSGQNQ

SEQ ID NO: 34500 - protein, 7 aa, synthetic construct
  REGION 1..7: note = Description of Artificial Sequence: Synthetic peptide
STDRSFN

SEQ ID NO: 34501 - protein, 7 aa, synthetic construct
  REGION 1..7: note = Description of Artificial Sequence: Synthetic peptide
ETNSRLG

SEQ ID NO: 34502 - protein, 7 aa, synthetic construct
  REGION 1..7: note = Description of Artificial Sequence: Synthetic peptide
VRHTTDS

SEQ ID NO: 34503 - protein, 7 aa, synthetic construct
  REGION 1..7: note = Description of Artificial Sequence: Synthetic peptide
TAVTANQ

SEQ ID NO: 34504 - protein, 7 aa, synthetic construct
  REGION 1..7: note = Description of Artificial Sequence: Synthetic peptide
NNPKNAV

SEQ ID NO: 34505 - protein, 7 aa, synthetic construct
  REGION 1..7: note = Description of Artificial Sequence: Synthetic peptide
PLRIGTQ

SEQ ID NO: 34506 - protein, 7 aa, synthetic construct
  REGION 1..7: note = Description of Artificial Sequence: Synthetic peptide
PASLGQG

SEQ ID NO: 34507 - protein, 7 aa, synthetic construct
  REGION 1..7: note = Description of Artificial Sequence: Synthetic peptide
HNSGNGS

SEQ ID NO: 34508 - protein, 7 aa, synthetic construct
  REGION 1..7: note = Description of Artificial Sequence: Synthetic peptide
ATHNSSQ

SEQ ID NO: 34509 - protein, 7 aa, synthetic construct
  REGION 1..7: note = Description of Artificial Sequence: Synthetic peptide
GSHNDSR

SEQ ID NO: 34510 - protein, 7 aa, synthetic construct
  REGION 1..7: note = Description of Artificial Sequence: Synthetic peptide
AFSHSSG

SEQ ID NO: 34511 - protein, 7 aa, synthetic construct
  REGION 1..7: note = Description of Artificial Sequence: Synthetic peptide
INSGNGS

SEQ ID NO: 34512 - protein, 7 aa, synthetic construct
  REGION 1..7: note = Description of Artificial Sequence: Synthetic peptide
SSSHATR

SEQ ID NO: 34513 - protein, 7 aa, synthetic construct
  REGION 1..7: note = Description of Artificial Sequence: Synthetic peptide
ATGNGRG

SEQ ID NO: 34514 - protein, 7 aa, synthetic construct
  REGION 1..7: note = Description of Artificial Sequence: Synthetic peptide
LRAGTVR

SEQ ID NO: 34515 - protein, 7 aa, synthetic construct
  REGION 1..7: note = Description of Artificial Sequence: Synthetic peptide
SNGQRKE

SEQ ID NO: 34516 - protein, 7 aa, synthetic construct
  REGION 1..7: note = Description of Artificial Sequence: Synthetic peptide
APSAGMS

SEQ ID NO: 34517 - protein, 7 aa, synthetic construct
  REGION 1..7: note = Description of Artificial Sequence: Synthetic peptide
DRKHTST

SEQ ID NO: 34518 - protein, 7 aa, synthetic construct
  REGION 1..7: note = Description of Artificial Sequence: Synthetic peptide
GFPVSSM

SEQ ID NO: 34519 - protein, 7 aa, synthetic construct
  REGION 1..7: note = Description of Artificial Sequence: Synthetic peptide
TVAHPSH

SEQ ID NO: 34520 - protein, 7 aa, synthetic construct
  REGION 1..7: note = Description of Artificial Sequence: Synthetic peptide
PHTSGRP

SEQ ID NO: 34521 - protein, 7 aa, synthetic construct
  REGION 1..7: note = Description of Artificial Sequence: Synthetic peptide
NVSSAIK

SEQ ID NO: 34522 - protein, 7 aa, synthetic construct
  REGION 1..7: note = Description of Artificial Sequence: Synthetic peptide
HYTGKQN

SEQ ID NO: 34523 - protein, 7 aa, synthetic construct
  REGION 1..7: note = Description of Artificial Sequence: Synthetic peptide
HSSHSPS

SEQ ID NO: 34524 - protein, 7 aa, synthetic construct
  REGION 1..7: note = Description of Artificial Sequence: Synthetic peptide
TLENSRR

SEQ ID NO: 34525 - protein, 7 aa, synthetic construct
  REGION 1..7: note = Description of Artificial Sequence: Synthetic peptide
RGNENIN

SEQ ID NO: 34526 - protein, 7 aa, synthetic construct
  REGION 1..7: note = Description of Artificial Sequence: Synthetic peptide
GQTRESS

SEQ ID NO: 34527 - protein, 7 aa, synthetic construct
  REGION 1..7: note = Description of Artificial Sequence: Synthetic peptide
NGNISIG

SEQ ID NO: 34528 - protein, 7 aa, synthetic construct
  REGION 1..7: note = Description of Artificial Sequence: Synthetic peptide
PSSNHVK

SEQ ID NO: 34529 - protein, 7 aa, synthetic construct
  REGION 1..7: note = Description of Artificial Sequence: Synthetic peptide
GRLNTNG

SEQ ID NO: 34530 - protein, 7 aa, synthetic construct
  REGION 1..7: note = Description of Artificial Sequence: Synthetic peptide
PTASNRS

SEQ ID NO: 34531 - protein, 7 aa, synthetic construct
  REGION 1..7: note = Description of Artificial Sequence: Synthetic peptide
CTGSRSM

SEQ ID NO: 34532 - protein, 7 aa, synthetic construct
  REGION 1..7: note = Description of Artificial Sequence: Synthetic peptide
TSSSQHD

SEQ ID NO: 34533 - protein, 7 aa, synthetic construct
  REGION 1..7: note = Description of Artificial Sequence: Synthetic peptide
RLPSVSS

SEQ ID NO: 34534 - protein, 7 aa, synthetic construct
  REGION 1..7: note = Description of Artificial Sequence: Synthetic peptide
YADGARN

SEQ ID NO: 34535 - protein, 7 aa, synthetic construct
  REGION 1..7: note = Description of Artificial Sequence: Synthetic peptide
PFSEMQK

SEQ ID NO: 34536 - protein, 7 aa, synthetic construct
  REGION 1..7: note = Description of Artificial Sequence: Synthetic peptide
PDVKVTR

SEQ ID NO: 34537 - protein, 7 aa, synthetic construct
  REGION 1..7: note = Description of Artificial Sequence: Synthetic peptide
NSSDSLT

SEQ ID NO: 34538 - protein, 7 aa, synthetic construct
  REGION 1..7: note = Description of Artificial Sequence: Synthetic peptide
MAAKPND

SEQ ID NO: 34539 - protein, 7 aa, synthetic construct
  REGION 1..7: note = Description of Artificial Sequence: Synthetic peptide
HGDSGKV

SEQ ID NO: 34540 - protein, 7 aa, synthetic construct
  REGION 1..7: note = Description of Artificial Sequence: Synthetic peptide
GPNISLG

SEQ ID NO: 34541 - protein, 7 aa, synthetic construct
  REGION 1..7: note = Description of Artificial Sequence: Synthetic peptide
ESARIGS

SEQ ID NO: 34542 - protein, 7 aa, synthetic construct
  REGION 1..7: note = Description of Artificial Sequence: Synthetic peptide
GGTPTHR

SEQ ID NO: 34543 - protein, 7 aa, synthetic construct
  REGION 1..7: note = Description of Artificial Sequence: Synthetic peptide
ARNPTST

SEQ ID NO: 34544 - protein, 7 aa, synthetic construct
  REGION 1..7: note = Description of Artificial Sequence: Synthetic peptide
NTSSSHT

SEQ ID NO: 34545 - protein, 7 aa, synthetic construct
  REGION 1..7: note = Description of Artificial Sequence: Synthetic peptide
SSGKSFS

SEQ ID NO: 34546 - protein, 7 aa, synthetic construct
  REGION 1..7: note = Description of Artificial Sequence: Synthetic peptide
SISKTQA

SEQ ID NO: 34547 - protein, 7 aa, synthetic construct
  REGION 1..7: note = Description of Artificial Sequence: Synthetic peptide
TQSSSRT

SEQ ID NO: 34548 - protein, 7 aa, synthetic construct
  REGION 1..7: note = Description of Artificial Sequence: Synthetic peptide
HKSSAVG

SEQ ID NO: 34549 - protein, 7 aa, synthetic construct
  REGION 1..7: note = Description of Artificial Sequence: Synthetic peptide
QEGVRSS

SEQ ID NO: 34550 - protein, 7 aa, synthetic construct
  REGION 1..7: note = Description of Artificial Sequence: Synthetic peptide
PVRPANL

SEQ ID NO: 34551 - protein, 7 aa, synthetic construct
  REGION 1..7: note = Description of Artificial Sequence: Synthetic peptide
SVGAPTL

SEQ ID NO: 34552 - protein, 7 aa, synthetic construct
  REGION 1..7: note = Description of Artificial Sequence: Synthetic peptide
AGSQTGV

SEQ ID NO: 34553 - protein, 7 aa, synthetic construct
  REGION 1..7: note = Description of Artificial Sequence: Synthetic peptide
FGTNKVD

SEQ ID NO: 34554 - protein, 7 aa, synthetic construct
  REGION 1..7: note = Description of Artificial Sequence: Synthetic peptide
RGDPHRA

SEQ ID NO: 34555 - protein, 7 aa, synthetic construct
  REGION 1..7: note = Description of Artificial Sequence: Synthetic peptide
GNRPTTL

SEQ ID NO: 34556 - protein, 7 aa, synthetic construct
  REGION 1..7: note = Description of Artificial Sequence: Synthetic peptide
TMRPSSD

SEQ ID NO: 34557 - protein, 7 aa, synthetic construct
  REGION 1..7: note = Description of Artificial Sequence: Synthetic peptide
YGRDKFS

SEQ ID NO: 34558 - protein, 7 aa, synthetic construct
  REGION 1..7: note = Description of Artificial Sequence: Synthetic peptide
QTRSNGN

SEQ ID NO: 34559 - protein, 7 aa, synthetic construct
  REGION 1..7: note = Description of Artificial Sequence: Synthetic peptide
SPASLPK

SEQ ID NO: 34560 - protein, 7 aa, synthetic construct
  REGION 1..7: note = Description of Artificial Sequence: Synthetic peptide
SEVNRGT

SEQ ID NO: 34561 - protein, 7 aa, synthetic construct
  REGION 1..7: note = Description of Artificial Sequence: Synthetic peptide
GRANGQT

SEQ ID NO: 34562 - protein, 7 aa, synthetic construct
  REGION 1..7: note = Description of Artificial Sequence: Synthetic peptide
NSYDPKR

SEQ ID NO: 34563 - protein, 7 aa, synthetic construct
  REGION 1..7: note = Description of Artificial Sequence: Synthetic peptide
FTVTGLS

SEQ ID NO: 34564 - protein, 7 aa, synthetic construct
  REGION 1..7: note = Description of Artificial Sequence: Synthetic peptide
KADATRT

SEQ ID NO: 34565 - protein, 7 aa, synthetic construct
  REGION 1..7: note = Description of Artificial Sequence: Synthetic peptide
QMNHLQV

SEQ ID NO: 34566 - protein, 7 aa, synthetic construct
  REGION 1..7: note = Description of Artificial Sequence: Synthetic peptide
TSGSARG

SEQ ID NO: 34567 - protein, 7 aa, synthetic construct
  REGION 1..7: note = Description of Artificial Sequence: Synthetic peptide
TGTQGTR

SEQ ID NO: 34568 - protein, 7 aa, synthetic construct
  REGION 1..7: note = Description of Artificial Sequence: Synthetic peptide
GLESMRQ

SEQ ID NO: 34569 - protein, 7 aa, synthetic construct
  REGION 1..7: note = Description of Artificial Sequence: Synthetic peptide
PGTTSAM

SEQ ID NO: 34570 - protein, 7 aa, synthetic construct
  REGION 1..7: note = Description of Artificial Sequence: Synthetic peptide
RTDHGGV

SEQ ID NO: 34571 - protein, 7 aa, synthetic construct
  REGION 1..7: note = Description of Artificial Sequence: Synthetic peptide
DRVGSIS

SEQ ID NO: 34572 - protein, 7 aa, synthetic construct
  REGION 1..7: note = Description of Artificial Sequence: Synthetic peptide
DYHNSKL

SEQ ID NO: 34573 - protein, 7 aa, synthetic construct
  REGION 1..7: note = Description of Artificial Sequence: Synthetic peptide
TPTTSAN

SEQ ID NO: 34574 - protein, 7 aa, synthetic construct
  REGION 1..7: note = Description of Artificial Sequence: Synthetic peptide
QPINVHN

SEQ ID NO: 34575 - protein, 7 aa, synthetic construct
  REGION 1..7: note = Description of Artificial Sequence: Synthetic peptide
HGIGNSA

SEQ ID NO: 34576 - protein, 7 aa, synthetic construct
  REGION 1..7: note = Description of Artificial Sequence: Synthetic peptide
GRTNSYS

SEQ ID NO: 34577 - protein, 7 aa, synthetic construct
  REGION 1..7: note = Description of Artificial Sequence: Synthetic peptide
TDTSRRQ

SEQ ID NO: 34578 - protein, 7 aa, synthetic construct
  REGION 1..7: note = Description of Artificial Sequence: Synthetic peptide
LRNSTSV

SEQ ID NO: 34579 - protein, 7 aa, synthetic construct
  REGION 1..7: note = Description of Artificial Sequence: Synthetic peptide
TRESRTN

SEQ ID NO: 34580 - protein, 7 aa, synthetic construct
  REGION 1..7: note = Description of Artificial Sequence: Synthetic peptide
GNGISTK

SEQ ID NO: 34581 - protein, 7 aa, synthetic construct
  REGION 1..7: note = Description of Artificial Sequence: Synthetic peptide
ERHVPSS

SEQ ID NO: 34582 - protein, 7 aa, synthetic construct
  REGION 1..7: note = Description of Artificial Sequence: Synthetic peptide
FARSASS

SEQ ID NO: 34583 - protein, 7 aa, synthetic construct
  REGION 1..7: note = Description of Artificial Sequence: Synthetic peptide
PMAQQRA

SEQ ID NO: 34584 - protein, 7 aa, synthetic construct
  REGION 1..7: note = Description of Artificial Sequence: Synthetic peptide
DRVLSQG

SEQ ID NO: 34585 - protein, 7 aa, synthetic construct
  REGION 1..7: note = Description of Artificial Sequence: Synthetic peptide
NSASLNH

SEQ ID NO: 34586 - protein, 7 aa, synthetic construct
  REGION 1..7: note = Description of Artificial Sequence: Synthetic peptide
HRVEGSL

SEQ ID NO: 34587 - protein, 7 aa, synthetic construct
  REGION 1..7: note = Description of Artificial Sequence: Synthetic peptide
SKATHNI

SEQ ID NO: 34588 - protein, 7 aa, synthetic construct
  REGION 1..7: note = Description of Artificial Sequence: Synthetic peptide
LSLNKSQ

SEQ ID NO: 34589 - protein, 7 aa, synthetic construct
  REGION 1..7: note = Description of Artificial Sequence: Synthetic peptide
RDPKSST

SEQ ID NO: 34590 - protein, 7 aa, synthetic construct
  REGION 1..7: note = Description of Artificial Sequence: Synthetic peptide
TSAAPHA

SEQ ID NO: 34591 - protein, 7 aa, synthetic construct
  REGION 1..7: note = Description of Artificial Sequence: Synthetic peptide
PTISVDR

SEQ ID NO: 34592 - protein, 7 aa, synthetic construct
  REGION 1..7: note = Description of Artificial Sequence: Synthetic peptide
HSSKSHD

SEQ ID NO: 34593 - protein, 7 aa, synthetic construct
  REGION 1..7: note = Description of Artificial Sequence: Synthetic peptide
MGIRDNT

SEQ ID NO: 34594 - protein, 7 aa, synthetic construct
  REGION 1..7: note = Description of Artificial Sequence: Synthetic peptide
RSSNSDH

SEQ ID NO: 34595 - protein, 7 aa, synthetic construct
  REGION 1..7: note = Description of Artificial Sequence: Synthetic peptide
DVHRSSG

SEQ ID NO: 34596 - protein, 7 aa, synthetic construct
  REGION 1..7: note = Description of Artificial Sequence: Synthetic peptide
LSAARSQ

SEQ ID NO: 34597 - protein, 7 aa, synthetic construct
  REGION 1..7: note = Description of Artificial Sequence: Synthetic peptide
PSKSSSA

SEQ ID NO: 34598 - protein, 7 aa, synthetic construct
  REGION 1..7: note = Description of Artificial Sequence: Synthetic peptide
QSSQSGP

SEQ ID NO: 34599 - protein, 7 aa, synthetic construct
  REGION 1..7: note = Description of Artificial Sequence: Synthetic peptide
GGNKQGC

SEQ ID NO: 34600 - protein, 7 aa, synthetic construct
  REGION 1..7: note = Description of Artificial Sequence: Synthetic peptide
TQRPAQM

SEQ ID NO: 34601 - protein, 7 aa, synthetic construct
  REGION 1..7: note = Description of Artificial Sequence: Synthetic peptide
AGTRQSC

SEQ ID NO: 34602 - protein, 7 aa, synthetic construct
  REGION 1..7: note = Description of Artificial Sequence: Synthetic peptide
ANTSGQA

SEQ ID NO: 34603 - protein, 7 aa, synthetic construct
  REGION 1..7: note = Description of Artificial Sequence: Synthetic peptide
SVGSGAL

SEQ ID NO: 34604 - protein, 7 aa, synthetic construct
  REGION 1..7: note = Description of Artificial Sequence: Synthetic peptide
DVNTKAL

SEQ ID NO: 34605 - protein, 7 aa, synthetic construct
  REGION 1..7: note = Description of Artificial Sequence: Synthetic peptide
QGKTAPY

SEQ ID NO: 34606 - protein, 7 aa, synthetic construct
  REGION 1..7: note = Description of Artificial Sequence: Synthetic peptide
IASSGMH

SEQ ID NO: 34607 - protein, 7 aa, synthetic construct
  REGION 1..7: note = Description of Artificial Sequence: Synthetic peptide
PSRGVAM

SEQ ID NO: 34608 - protein, 7 aa, synthetic construct
  REGION 1..7: note = Description of Artificial Sequence: Synthetic peptide
RPATSTP

SEQ ID NO: 34609 - protein, 7 aa, synthetic construct
  REGION 1..7: note = Description of Artificial Sequence: Synthetic peptide
PIGSQHI

SEQ ID NO: 34610 - protein, 7 aa, synthetic construct
  REGION 1..7: note = Description of Artificial Sequence: Synthetic peptide
ASSKGLT

SEQ ID NO: 34611 - protein, 7 aa, synthetic construct
  REGION 1..7: note = Description of Artificial Sequence: Synthetic peptide
YQPERSS

SEQ ID NO: 34612 - protein, 7 aa, synthetic construct
  REGION 1..7: note = Description of Artificial Sequence: Synthetic peptide
HYGPDSK

SEQ ID NO: 34613 - protein, 7 aa, synthetic construct
  REGION 1..7: note = Description of Artificial Sequence: Synthetic peptide
PSNKAGT

SEQ ID NO: 34614 - protein, 7 aa, synthetic construct
  REGION 1..7: note = Description of Artificial Sequence: Synthetic peptide
RVATSVS

SEQ ID NO: 34615 - protein, 7 aa, synthetic construct
  REGION 1..7: note = Description of Artificial Sequence: Synthetic peptide
QSSNARN

SEQ ID NO: 34616 - protein, 7 aa, synthetic construct
  REGION 1..7: note = Description of Artificial Sequence: Synthetic peptide
GDMGISK

SEQ ID NO: 34617 - protein, 7 aa, synthetic construct
  REGION 1..7: note = Description of Artificial Sequence: Synthetic peptide
SSISRTS

SEQ ID NO: 34618 - protein, 7 aa, synthetic construct
  REGION 1..7: note = Description of Artificial Sequence: Synthetic peptide
HLGVPLK

SEQ ID NO: 34619 - protein, 7 aa, synthetic construct
  REGION 1..7: note = Description of Artificial Sequence: Synthetic peptide
PNGGIPP

SEQ ID NO: 34620 - protein, 7 aa, synthetic construct
  REGION 1..7: note = Description of Artificial Sequence: Synthetic peptide
ANPVRPE

SEQ ID NO: 34621 - protein, 7 aa, synthetic construct
  REGION 1..7: note = Description of Artificial Sequence: Synthetic peptide
SVQGERM

SEQ ID NO: 34622 - protein, 7 aa, synthetic construct
  REGION 1..7: note = Description of Artificial Sequence: Synthetic peptide
YQHPKMA

SEQ ID NO: 34623 - protein, 7 aa, synthetic construct
  REGION 1..7: note = Description of Artificial Sequence: Synthetic peptide
TPTLAHG

SEQ ID NO: 34624 - protein, 7 aa, synthetic construct
  REGION 1..7: note = Description of Artificial Sequence: Synthetic peptide
QPNTTYR

SEQ ID NO: 34625 - protein, 7 aa, synthetic construct
  REGION 1..7: note = Description of Artificial Sequence: Synthetic peptide
NNAHSSS

SEQ ID NO: 34626 - protein, 7 aa, synthetic construct
  REGION 1..7: note = Description of Artificial Sequence: Synthetic peptide
HANNGTS

SEQ ID NO: 34627 - protein, 7 aa, synthetic construct
  REGION 1..7: note = Description of Artificial Sequence: Synthetic peptide
PTGAHVT

SEQ ID NO: 34628 - protein, 7 aa, synthetic construct
  REGION 1..7: note = Description of Artificial Sequence: Synthetic peptide
GMKGSVN

SEQ ID NO: 34629 - protein, 7 aa, synthetic construct
  REGION 1..7: note = Description of Artificial Sequence: Synthetic peptide
ISSGTHG

SEQ ID NO: 34630 - protein, 7 aa, synthetic construct
  REGION 1..7: note = Description of Artificial Sequence: Synthetic peptide
SQSQTPE

SEQ ID NO: 34631 - protein, 7 aa, synthetic construct
  REGION 1..7: note = Description of Artificial Sequence: Synthetic peptide
RSMSSAV

SEQ ID NO: 34632 - protein, 7 aa, synthetic construct
  REGION 1..7: note = Description of Artificial Sequence: Synthetic peptide
LRNGIAS

SEQ ID NO: 34633 - protein, 7 aa, synthetic construct
  REGION 1..7: note = Description of Artificial Sequence: Synthetic peptide
LPSNSIH

SEQ ID NO: 34634 - protein, 7 aa, synthetic construct
  REGION 1..7: note = Description of Artificial Sequence: Synthetic peptide
PHVMGKH

SEQ ID NO: 34635 - protein, 7 aa, synthetic construct
  REGION 1..7: note = Description of Artificial Sequence: Synthetic peptide
NRVTQSS

SEQ ID NO: 34636 - protein, 7 aa, synthetic construct
  REGION 1..7: note = Description of Artificial Sequence: Synthetic peptide
SKSTHQA

SEQ ID NO: 34637 - protein, 7 aa, synthetic construct
  REGION 1..7: note = Description of Artificial Sequence: Synthetic peptide
LRPANTI

SEQ ID NO: 34638 - protein, 7 aa, synthetic construct
  REGION 1..7: note = Description of Artificial Sequence: Synthetic peptide
GVEAMRN

SEQ ID NO: 34639 - protein, 7 aa, synthetic construct
  REGION 1..7: note = Description of Artificial Sequence: Synthetic peptide
QSSHEGR

SEQ ID NO: 34640 - protein, 7 aa, synthetic construct
  REGION 1..7: note = Description of Artificial Sequence: Synthetic peptide
PKVRDGY

SEQ ID NO: 34641 - protein, 7 aa, synthetic construct
  REGION 1..7: note = Description of Artificial Sequence: Synthetic peptide
TPAGPNK

SEQ ID NO: 34642 - protein, 7 aa, synthetic construct
  REGION 1..7: note = Description of Artificial Sequence: Synthetic peptide
NNVGVRG

SEQ ID NO: 34643 - protein, 7 aa, synthetic construct
  REGION 1..7: note = Description of Artificial Sequence: Synthetic peptide
SKTGTSL

SEQ ID NO: 34644 - protein, 7 aa, synthetic construct
  REGION 1..7: note = Description of Artificial Sequence: Synthetic peptide
PTVRSST

SEQ ID NO: 34645 - protein, 7 aa, synthetic construct
  REGION 1..7: note = Description of Artificial Sequence: Synthetic peptide
SVLNRNG

SEQ ID NO: 34646 - protein, 7 aa, synthetic construct
  REGION 1..7: note = Description of Artificial Sequence: Synthetic peptide
SGSDKFS

SEQ ID NO: 34647 - protein, 7 aa, synthetic construct
  REGION 1..7: note = Description of Artificial Sequence: Synthetic peptide
IRDSTLG

SEQ ID NO: 34648 - protein, 7 aa, synthetic construct
  REGION 1..7: note = Description of Artificial Sequence: Synthetic peptide
PSSPTDR

SEQ ID NO: 34649 - protein, 7 aa, synthetic construct
  REGION 1..7: note = Description of Artificial Sequence: Synthetic peptide
TGHHPPS

SEQ ID NO: 34650 - protein, 7 aa, synthetic construct
  REGION 1..7: note = Description of Artificial Sequence: Synthetic peptide
NNAATHS

SEQ ID NO: 34651 - protein, 7 aa, synthetic construct
  REGION 1..7: note = Description of Artificial Sequence: Synthetic peptide
RSGNGSL

SEQ ID NO: 34652 - protein, 7 aa, synthetic construct
  REGION 1..7: note = Description of Artificial Sequence: Synthetic peptide
LGTSHQQ

SEQ ID NO: 34653 - protein, 7 aa, synthetic construct
  REGION 1..7: note = Description of Artificial Sequence: Synthetic peptide
TTASSPT

SEQ ID NO: 34654 - protein, 7 aa, synthetic construct
  REGION 1..7: note = Description of Artificial Sequence: Synthetic peptide
FPLTKPA

SEQ ID NO: 34655 - protein, 7 aa, synthetic construct
  REGION 1..7: note = Description of Artificial Sequence: Synthetic peptide
PSGETSK

SEQ ID NO: 34656 - protein, 7 aa, synthetic construct
  REGION 1..7: note = Description of Artificial Sequence: Synthetic peptide
PGLSNSR

SEQ ID NO: 34657 - protein, 7 aa, synthetic construct
  REGION 1..7: note = Description of Artificial Sequence: Synthetic peptide
DLQTSAK

SEQ ID NO: 34658 - protein, 7 aa, synthetic construct
  REGION 1..7: note = Description of Artificial Sequence: Synthetic peptide
SSTRALS

SEQ ID NO: 34659 - protein, 7 aa, synthetic construct
  REGION 1..7: note = Description of Artificial Sequence: Synthetic peptide
GITAKLT

SEQ ID NO: 34660 - protein, 7 aa, synthetic construct
  REGION 1..7: note = Description of Artificial Sequence: Synthetic peptide
TTSNKDS

SEQ ID NO: 34661 - protein, 7 aa, synthetic construct
  REGION 1..7: note = Description of Artificial Sequence: Synthetic peptide
PSSPNSI

SEQ ID NO: 34662 - protein, 7 aa, synthetic construct
  REGION 1..7: note = Description of Artificial Sequence: Synthetic peptide
GRHGAPT

SEQ ID NO: 34663 - protein, 7 aa, synthetic construct
  REGION 1..7: note = Description of Artificial Sequence: Synthetic peptide
PGMKVSP

SEQ ID NO: 34664 - protein, 7 aa, synthetic construct
  REGION 1..7: note = Description of Artificial Sequence: Synthetic peptide
NAVRSEN

SEQ ID NO: 34665 - protein, 7 aa, synthetic construct
  REGION 1..7: note = Description of Artificial Sequence: Synthetic peptide
VVPERSK

SEQ ID NO: 34666 - protein, 7 aa, synthetic construct
  REGION 1..7: note = Description of Artificial Sequence: Synthetic peptide
DSRSIKG

SEQ ID NO: 34667 - protein, 7 aa, synthetic construct
  REGION 1..7: note = Description of Artificial Sequence: Synthetic peptide
QRTSDQT

SEQ ID NO: 34668 - protein, 7 aa, synthetic construct
  REGION 1..7: note = Description of Artificial Sequence: Synthetic peptide
NNSRVLG

SEQ ID NO: 34669 - protein, 7 aa, synthetic construct
  REGION 1..7: note = Description of Artificial Sequence: Synthetic peptide
LRPNGQL

SEQ ID NO: 34670 - protein, 7 aa, synthetic construct
  REGION 1..7: note = Description of Artificial Sequence: Synthetic peptide
ENNSRAT

SEQ ID NO: 34671 - protein, 7 aa, synthetic construct
  REGION 1..7: note = Description of Artificial Sequence: Synthetic peptide
CVTGGLT

SEQ ID NO: 34672 - protein, 7 aa, synthetic construct
  REGION 1..7: note = Description of Artificial Sequence: Synthetic peptide
PANSPAT

SEQ ID NO: 34673 - protein, 7 aa, synthetic construct
  REGION 1..7: note = Description of Artificial Sequence: Synthetic peptide
VSFKPNE

SEQ ID NO: 34674 - protein, 7 aa, synthetic construct
  REGION 1..7: note = Description of Artificial Sequence: Synthetic peptide
MRSKESA

SEQ ID NO: 34675 - protein, 7 aa, synthetic construct
  REGION 1..7: note = Description of Artificial Sequence: Synthetic peptide
AHSNNSY

SEQ ID NO: 34676 - protein, 7 aa, synthetic construct
  REGION 1..7: note = Description of Artificial Sequence: Synthetic peptide
KSNSSLG

SEQ ID NO: 34677 - protein, 7 aa, synthetic construct
  REGION 1..7: note = Description of Artificial Sequence: Synthetic peptide
GSNLNST

SEQ ID NO: 34678 - protein, 7 aa, synthetic construct
  REGION 1..7: note = Description of Artificial Sequence: Synthetic peptide
SAHSLGI

SEQ ID NO: 34679 - protein, 7 aa, synthetic construct
  REGION 1..7: note = Description of Artificial Sequence: Synthetic peptide
GTRSAVV

SEQ ID NO: 34680 - protein, 7 aa, synthetic construct
  REGION 1..7: note = Description of Artificial Sequence: Synthetic peptide
NPGEMRL

SEQ ID NO: 34681 - protein, 7 aa, synthetic construct
  REGION 1..7: note = Description of Artificial Sequence: Synthetic peptide
RSANTNA

SEQ ID NO: 34682 - protein, 7 aa, synthetic construct
  REGION 1..7: note = Description of Artificial Sequence: Synthetic peptide
GVNIHAT

SEQ ID NO: 34683 - protein, 7 aa, synthetic construct
  REGION 1..7: note = Description of Artificial Sequence: Synthetic peptide
ITATHAH

SEQ ID NO: 34684 - protein, 7 aa, synthetic construct
  REGION 1..7: note = Description of Artificial Sequence: Synthetic peptide
RITSSNQ

SEQ ID NO: 34685 - protein, 7 aa, synthetic construct
  REGION 1..7: note = Description of Artificial Sequence: Synthetic peptide
LGGGTLR

SEQ ID NO: 34686 - protein, 7 aa, synthetic construct
  REGION 1..7: note = Description of Artificial Sequence: Synthetic peptide
TASGSNA

SEQ ID NO: 34687 - protein, 7 aa, synthetic construct
  REGION 1..7: note = Description of Artificial Sequence: Synthetic peptide
GAAVQAN

SEQ ID NO: 34688 - protein, 7 aa, synthetic construct
  REGION 1..7: note = Description of Artificial Sequence: Synthetic peptide
NSSHNVS

SEQ ID NO: 34689 - protein, 7 aa, synthetic construct
  REGION 1..7: note = Description of Artificial Sequence: Synthetic peptide
GKSQMQL

SEQ ID NO: 34690 - protein, 7 aa, synthetic construct
  REGION 1..7: note = Description of Artificial Sequence: Synthetic peptide
GVSATVK

SEQ ID NO: 34691 - protein, 7 aa, synthetic construct
  REGION 1..7: note = Description of Artificial Sequence: Synthetic peptide
GAGRALQ

SEQ ID NO: 34692 - protein, 7 aa, synthetic construct
  REGION 1..7: note = Description of Artificial Sequence: Synthetic peptide
LPGVRVA

SEQ ID NO: 34693 - protein, 7 aa, synthetic construct
  REGION 1..7: note = Description of Artificial Sequence: Synthetic peptide
ARDPGGV

SEQ ID NO: 34694 - protein, 7 aa, synthetic construct
  REGION 1..7: note = Description of Artificial Sequence: Synthetic peptide
QNIGRPS

SEQ ID NO: 34695 - protein, 7 aa, synthetic construct
  REGION 1..7: note = Description of Artificial Sequence: Synthetic peptide
ARDDQRR

SEQ ID NO: 34696 - protein, 7 aa, synthetic construct
  REGION 1..7: note = Description of Artificial Sequence: Synthetic peptide
MYQKPAS

SEQ ID NO: 34697 - protein, 7 aa, synthetic construct
  REGION 1..7: note = Description of Artificial Sequence: Synthetic peptide
GNSMAGT

SEQ ID NO: 34698 - protein, 7 aa, synthetic construct
  REGION 1..7: note = Description of Artificial Sequence: Synthetic peptide
GLSAINN

SEQ ID NO: 34699 - protein, 7 aa, synthetic construct
  REGION 1..7: note = Description of Artificial Sequence: Synthetic peptide
TSTRSSC

SEQ ID NO: 34700 - protein, 7 aa, synthetic construct
  REGION 1..7: note = Description of Artificial Sequence: Synthetic peptide
VTMPPSA

SEQ ID NO: 34701 - protein, 7 aa, synthetic construct
  REGION 1..7: note = Description of Artificial Sequence: Synthetic peptide
MSHTKSN

SEQ ID NO: 34702 - protein, 7 aa, synthetic construct
  REGION 1..7: note = Description of Artificial Sequence: Synthetic peptide
KQPASTH

SEQ ID NO: 34703 - protein, 7 aa, synthetic construct
  REGION 1..7: note = Description of Artificial Sequence: Synthetic peptide
HDSSART

SEQ ID NO: 34704 - protein, 7 aa, synthetic construct
  REGION 1..7: note = Description of Artificial Sequence: Synthetic peptide
QRNVSVV

SEQ ID NO: 34705 - protein, 7 aa, synthetic construct
  REGION 1..7: note = Description of Artificial Sequence: Synthetic peptide
RIGQGSS

SEQ ID NO: 34706 - protein, 7 aa, synthetic construct
  REGION 1..7: note = Description of Artificial Sequence: Synthetic peptide
RSTRISE

SEQ ID NO: 34707 - protein, 7 aa, synthetic construct
  REGION 1..7: note = Description of Artificial Sequence: Synthetic peptide
QVNSIPA

SEQ ID NO: 34708 - protein, 7 aa, synthetic construct
  REGION 1..7: note = Description of Artificial Sequence: Synthetic peptide
QRPSTGN

SEQ ID NO: 34709 - protein, 7 aa, synthetic construct
  REGION 1..7: note = Description of Artificial Sequence: Synthetic peptide
SFRAQEG

SEQ ID NO: 34710 - protein, 7 aa, synthetic construct
  REGION 1..7: note = Description of Artificial Sequence: Synthetic peptide
DSTHRAT

SEQ ID NO: 34711 - protein, 7 aa, synthetic construct
  REGION 1..7: note = Description of Artificial Sequence: Synthetic peptide
LMHSAVS

SEQ ID NO: 34712 - protein, 7 aa, synthetic construct
  REGION 1..7: note = Description of Artificial Sequence: Synthetic peptide
THQSSTS

SEQ ID NO: 34713 - protein, 7 aa, synthetic construct
  REGION 1..7: note = Description of Artificial Sequence: Synthetic peptide
PNGAHVT

SEQ ID NO: 34714 - protein, 7 aa, synthetic construct
  REGION 1..7: note = Description of Artificial Sequence: Synthetic peptide
QTSSREM

SEQ ID NO: 34715 - protein, 7 aa, synthetic construct
  REGION 1..7: note = Description of Artificial Sequence: Synthetic peptide
ARGASTN

SEQ ID NO: 34716 - protein, 7 aa, synthetic construct
  REGION 1..7: note = Description of Artificial Sequence: Synthetic peptide
NGFSPRV

SEQ ID NO: 34717 - protein, 7 aa, synthetic construct
  REGION 1..7: note = Description of Artificial Sequence: Synthetic peptide
RSLPNVA

SEQ ID NO: 34718 - protein, 7 aa, synthetic construct
  REGION 1..7: note = Description of Artificial Sequence: Synthetic peptide
GTTSSRD

SEQ ID NO: 34719 - protein, 7 aa, synthetic construct
  REGION 1..7: note = Description of Artificial Sequence: Synthetic peptide
AQRSTMV

SEQ ID NO: 34720 - protein, 7 aa, synthetic construct
  REGION 1..7: note = Description of Artificial Sequence: Synthetic peptide
SGGGTRT

SEQ ID NO: 34721 - protein, 7 aa, synthetic construct
  REGION 1..7: note = Description of Artificial Sequence: Synthetic peptide
QPAGKVV

SEQ ID NO: 34722 - protein, 7 aa, synthetic construct
  REGION 1..7: note = Description of Artificial Sequence: Synthetic peptide
HQSGSTC

SEQ ID NO: 34723 - protein, 7 aa, synthetic construct
  REGION 1..7: note = Description of Artificial Sequence: Synthetic peptide
QLGTNNS

SEQ ID NO: 34724 - protein, 7 aa, synthetic construct
  REGION 1..7: note = Description of Artificial Sequence: Synthetic peptide
FRAQANV

SEQ ID NO: 34725 - protein, 7 aa, synthetic construct
  REGION 1..7: note = Description of Artificial Sequence: Synthetic peptide
SRAQSQI

SEQ ID NO: 34726 - protein, 7 aa, synthetic construct
  REGION 1..7: note = Description of Artificial Sequence: Synthetic peptide
PRTDRNT

SEQ ID NO: 34727 - protein, 7 aa, synthetic construct
  REGION 1..7: note = Description of Artificial Sequence: Synthetic peptide
RTLSASS

SEQ ID NO: 34728 - protein, 7 aa, synthetic construct
  REGION 1..7: note = Description of Artificial Sequence: Synthetic peptide
SFSPASN

SEQ ID NO: 34729 - protein, 7 aa, synthetic construct
  REGION 1..7: note = Description of Artificial Sequence: Synthetic peptide
DRALHMS

SEQ ID NO: 34730 - protein, 7 aa, synthetic construct
  REGION 1..7: note = Description of Artificial Sequence: Synthetic peptide
KIASKSE

SEQ ID NO: 34731 - protein, 7 aa, synthetic construct
  REGION 1..7: note = Description of Artificial Sequence: Synthetic peptide
SGGDYAK

SEQ ID NO: 34732 - protein, 7 aa, synthetic construct
  REGION 1..7: note = Description of Artificial Sequence: Synthetic peptide
PLRDSMP

SEQ ID NO: 34733 - protein, 7 aa, synthetic construct
  REGION 1..7: note = Description of Artificial Sequence: Synthetic peptide
TQPSHDS

SEQ ID NO: 34734 - protein, 7 aa, synthetic construct
  REGION 1..7: note = Description of Artificial Sequence: Synthetic peptide
VQTHQVR

SEQ ID NO: 34735 - protein, 7 aa, synthetic construct
  REGION 1..7: note = Description of Artificial Sequence: Synthetic peptide
GINSRGS

SEQ ID NO: 34736 - protein, 7 aa, synthetic construct
  REGION 1..7: note = Description of Artificial Sequence: Synthetic peptide
LISETSR

SEQ ID NO: 34737 - protein, 7 aa, synthetic construct
  REGION 1..7: note = Description of Artificial Sequence: Synthetic peptide
SSVGRLN

SEQ ID NO: 34738 - protein, 7 aa, synthetic construct
  REGION 1..7: note = Description of Artificial Sequence: Synthetic peptide
NYSGAHT

SEQ ID NO: 34739 - protein, 7 aa, synthetic construct
  REGION 1..7: note = Description of Artificial Sequence: Synthetic peptide
GTNSTRG

SEQ ID NO: 34740 - protein, 7 aa, synthetic construct
  REGION 1..7: note = Description of Artificial Sequence: Synthetic peptide
NQSRPGV

SEQ ID NO: 34741 - protein, 7 aa, synthetic construct
  REGION 1..7: note = Description of Artificial Sequence: Synthetic peptide
YVSNSNA

SEQ ID NO: 34742 - protein, 7 aa, synthetic construct
  REGION 1..7: note = Description of Artificial Sequence: Synthetic peptide
DNISRSR

SEQ ID NO: 34743 - protein, 7 aa, synthetic construct
  REGION 1..7: note = Description of Artificial Sequence: Synthetic peptide
TYSSKAD

SEQ ID NO: 34744 - protein, 7 aa, synthetic construct
  REGION 1..7: note = Description of Artificial Sequence: Synthetic peptide
RVESPTN

SEQ ID NO: 34745 - protein, 7 aa, synthetic construct
  REGION 1..7: note = Description of Artificial Sequence: Synthetic peptide
NSAALNS

SEQ ID NO: 34746 - protein, 7 aa, synthetic construct
  REGION 1..7: note = Description of Artificial Sequence: Synthetic peptide
AQINTPT

SEQ ID NO: 34747 - protein, 7 aa, synthetic construct
  REGION 1..7: note = Description of Artificial Sequence: Synthetic peptide
PLGATFA

SEQ ID NO: 34748 - protein, 7 aa, synthetic construct
  REGION 1..7: note = Description of Artificial Sequence: Synthetic peptide
SYSGTLG

SEQ ID NO: 34749 - protein, 7 aa, synthetic construct
  REGION 1..7: note = Description of Artificial Sequence: Synthetic peptide
FVSGKVQ

SEQ ID NO: 34750 - protein, 7 aa, synthetic construct
  REGION 1..7: note = Description of Artificial Sequence: Synthetic peptide
MNGKDVV

SEQ ID NO: 34751 - protein, 7 aa, synthetic construct
  REGION 1..7: note = Description of Artificial Sequence: Synthetic peptide
PTSNGSL

SEQ ID NO: 34752 - protein, 7 aa, synthetic construct
  REGION 1..7: note = Description of Artificial Sequence: Synthetic peptide
YSGLTGS

SEQ ID NO: 34753 - protein, 7 aa, synthetic construct
  REGION 1..7: note = Description of Artificial Sequence: Synthetic peptide
NIGSQGR

SEQ ID NO: 34754 - protein, 7 aa, synthetic construct
  REGION 1..7: note = Description of Artificial Sequence: Synthetic peptide
MGHAKTA

SEQ ID NO: 34755 - protein, 7 aa, synthetic construct
  REGION 1..7: note = Description of Artificial Sequence: Synthetic peptide
PLQPRVA

SEQ ID NO: 34756 - protein, 7 aa, synthetic construct
  REGION 1..7: note = Description of Artificial Sequence: Synthetic peptide
RDGGQDR

SEQ ID NO: 34757 - protein, 7 aa, synthetic construct
  REGION 1..7: note = Description of Artificial Sequence: Synthetic peptide
QCNSACQ

SEQ ID NO: 34758 - protein, 7 aa, synthetic construct
  REGION 1..7: note = Description of Artificial Sequence: Synthetic peptide
TGLKDQH

SEQ ID NO: 34759 - protein, 7 aa, synthetic construct
  REGION 1..7: note = Description of Artificial Sequence: Synthetic peptide
HELSRTT

SEQ ID NO: 34760 - protein, 7 aa, synthetic construct
  REGION 1..7: note = Description of Artificial Sequence: Synthetic peptide
GRSSHMD

SEQ ID NO: 34761 - protein, 7 aa, synthetic construct
  REGION 1..7: note = Description of Artificial Sequence: Synthetic peptide
SAAKPGP

SEQ ID NO: 34762 - protein, 7 aa, synthetic construct
  REGION 1..7: note = Description of Artificial Sequence: Synthetic peptide
IGSNARQ

SEQ ID NO: 34763 - protein, 7 aa, synthetic construct
  REGION 1..7: note = Description of Artificial Sequence: Synthetic peptide
LSGHSPQ

SEQ ID NO: 34764 - protein, 7 aa, synthetic construct
  REGION 1..7: note = Description of Artificial Sequence: Synthetic peptide
TSNSIQG

SEQ ID NO: 34765 - protein, 7 aa, synthetic construct
  REGION 1..7: note = Description of Artificial Sequence: Synthetic peptide
PLQTSRT

SEQ ID NO: 34766 - protein, 7 aa, synthetic construct
  REGION 1..7: note = Description of Artificial Sequence: Synthetic peptide
PNTKPVL

SEQ ID NO: 34767 - protein, 7 aa, synthetic construct
  REGION 1..7: note = Description of Artificial Sequence: Synthetic peptide
SLNSREG

SEQ ID NO: 34768 - protein, 7 aa, synthetic construct
  REGION 1..7: note = Description of Artificial Sequence: Synthetic peptide
HRDTNGK

SEQ ID NO: 34769 - protein, 7 aa, synthetic construct
  REGION 1..7: note = Description of Artificial Sequence: Synthetic peptide
AEQRPGQ

SEQ ID NO: 34770 - protein, 7 aa, synthetic construct
  REGION 1..7: note = Description of Artificial Sequence: Synthetic peptide
PVLNKAT

SEQ ID NO: 34771 - protein, 7 aa, synthetic construct
  REGION 1..7: note = Description of Artificial Sequence: Synthetic peptide
PRTNNPS

SEQ ID NO: 34772 - protein, 7 aa, synthetic construct
  REGION 1..7: note = Description of Artificial Sequence: Synthetic peptide
PLDKSMM

SEQ ID NO: 34773 - protein, 7 aa, synthetic construct
  REGION 1..7: note = Description of Artificial Sequence: Synthetic peptide
MSTGVSP

SEQ ID NO: 34774 - protein, 7 aa, synthetic construct
  REGION 1..7: note = Description of Artificial Sequence: Synthetic peptide
KQPVSTH

SEQ ID NO: 34775 - protein, 7 aa, synthetic construct
  REGION 1..7: note = Description of Artificial Sequence: Synthetic peptide
VRSKEAH

SEQ ID NO: 34776 - protein, 7 aa, synthetic construct
  REGION 1..7: note = Description of Artificial Sequence: Synthetic peptide
TQQNGSN

SEQ ID NO: 34777 - protein, 7 aa, synthetic construct
  REGION 1..7: note = Description of Artificial Sequence: Synthetic peptide
CQSSRVT

SEQ ID NO: 34778 - protein, 7 aa, synthetic construct
  REGION 1..7: note = Description of Artificial Sequence: Synthetic peptide
TQMGKSN

SEQ ID NO: 34779 - protein, 7 aa, synthetic construct
  REGION 1..7: note = Description of Artificial Sequence: Synthetic peptide
EYPQQAK

SEQ ID NO: 34780 - protein, 7 aa, synthetic construct
  REGION 1..7: note = Description of Artificial Sequence: Synthetic peptide
PNNATKN

SEQ ID NO: 34781 - protein, 7 aa, synthetic construct
  REGION 1..7: note = Description of Artificial Sequence: Synthetic peptide
GSLPSCR

SEQ ID NO: 34782 - protein, 7 aa, synthetic construct
  REGION 1..7: note = Description of Artificial Sequence: Synthetic peptide
TQRSQAA

SEQ ID NO: 34783 - protein, 7 aa, synthetic construct
  REGION 1..7: note = Description of Artificial Sequence: Synthetic peptide
EGNRSNM

SEQ ID NO: 34784 - protein, 7 aa, synthetic construct
  REGION 1..7: note = Description of Artificial Sequence: Synthetic peptide
MGVRPSA

SEQ ID NO: 34785 - protein, 7 aa, synthetic construct
  REGION 1..7: note = Description of Artificial Sequence: Synthetic peptide
HGVGSMV

SEQ ID NO: 34786 - protein, 7 aa, synthetic construct
  REGION 1..7: note = Description of Artificial Sequence: Synthetic peptide
STTAQVK

SEQ ID NO: 34787 - protein, 7 aa, synthetic construct
  REGION 1..7: note = Description of Artificial Sequence: Synthetic peptide
SHNRTND

SEQ ID NO: 34788 - protein, 7 aa, synthetic construct
  REGION 1..7: note = Description of Artificial Sequence: Synthetic peptide
NNSISNP

SEQ ID NO: 34789 - protein, 7 aa, synthetic construct
  REGION 1..7: note = Description of Artificial Sequence: Synthetic peptide
GGLSPKV

SEQ ID NO: 34790 - protein, 7 aa, synthetic construct
  REGION 1..7: note = Description of Artificial Sequence: Synthetic peptide
SIPSTSQ

SEQ ID NO: 34791 - protein, 7 aa, synthetic construct
  REGION 1..7: note = Description of Artificial Sequence: Synthetic peptide
TGSGTIL

SEQ ID NO: 34792 - protein, 7 aa, synthetic construct
  REGION 1..7: note = Description of Artificial Sequence: Synthetic peptide
TATTLSS

SEQ ID NO: 34793 - protein, 7 aa, synthetic construct
  REGION 1..7: note = Description of Artificial Sequence: Synthetic peptide
PPSNGRL

SEQ ID NO: 34794 - protein, 7 aa, synthetic construct
  REGION 1..7: note = Description of Artificial Sequence: Synthetic peptide
HQSSPPC

SEQ ID NO: 34795 - protein, 7 aa, synthetic construct
  REGION 1..7: note = Description of Artificial Sequence: Synthetic peptide
SFSSTMG

SEQ ID NO: 34796 - protein, 7 aa, synthetic construct
  REGION 1..7: note = Description of Artificial Sequence: Synthetic peptide
MRSERAA

SEQ ID NO: 34797 - protein, 7 aa, synthetic construct
  REGION 1..7: note = Description of Artificial Sequence: Synthetic peptide
GSTGSSI

SEQ ID NO: 34798 - protein, 7 aa, synthetic construct
  REGION 1..7: note = Description of Artificial Sequence: Synthetic peptide
GITHGSH

SEQ ID NO: 34799 - protein, 7 aa, synthetic construct
  REGION 1..7: note = Description of Artificial Sequence: Synthetic peptide
GTPNTKV

SEQ ID NO: 34800 - protein, 7 aa, synthetic construct
  REGION 1..7: note = Description of Artificial Sequence: Synthetic peptide
GFPNVAT

SEQ ID NO: 34801 - protein, 7 aa, synthetic construct
  REGION 1..7: note = Description of Artificial Sequence: Synthetic peptide
PLSGSKA

SEQ ID NO: 34802 - protein, 7 aa, synthetic construct
  REGION 1..7: note = Description of Artificial Sequence: Synthetic peptide
VTKSGNG

SEQ ID NO: 34803 - protein, 7 aa, synthetic construct
  REGION 1..7: note = Description of Artificial Sequence: Synthetic peptide
ARSESTA

SEQ ID NO: 34804 - protein, 7 aa, synthetic construct
  REGION 1..7: note = Description of Artificial Sequence: Synthetic peptide
YVSSGKA

SEQ ID NO: 34805 - protein, 7 aa, synthetic construct
  REGION 1..7: note = Description of Artificial Sequence: Synthetic peptide
QKGNNLP

SEQ ID NO: 34806 - protein, 7 aa, synthetic construct
  REGION 1..7: note = Description of Artificial Sequence: Synthetic peptide
QPIISPT

SEQ ID NO: 34807 - protein, 7 aa, synthetic construct
  REGION 1..7: note = Description of Artificial Sequence: Synthetic peptide
GRDNSRQ

SEQ ID NO: 34808 - protein, 7 aa, synthetic construct
  REGION 1..7: note = Description of Artificial Sequence: Synthetic peptide
VPSQSLH

SEQ ID NO: 34809 - protein, 7 aa, synthetic construct
  REGION 1..7: note = Description of Artificial Sequence: Synthetic peptide
PTVQVTK

SEQ ID NO: 34810 - protein, 7 aa, synthetic construct
  REGION 1..7: note = Description of Artificial Sequence: Synthetic peptide
LTAIHPA

SEQ ID NO: 34811 - protein, 7 aa, synthetic construct
  REGION 1..7: note = Description of Artificial Sequence: Synthetic peptide
LSQSNTH

SEQ ID NO: 34812 - protein, 7 aa, synthetic construct
  REGION 1..7: note = Description of Artificial Sequence: Synthetic peptide
RDRTNAA

SEQ ID NO: 34813 - protein, 7 aa, synthetic construct
  REGION 1..7: note = Description of Artificial Sequence: Synthetic peptide
VGSSKGC

SEQ ID NO: 34814 - protein, 7 aa, synthetic construct
  REGION 1..7: note = Description of Artificial Sequence: Synthetic peptide
LPTSSVA

SEQ ID NO: 34815 - protein, 7 aa, synthetic construct
  REGION 1..7: note = Description of Artificial Sequence: Synthetic peptide
NGISKSN

SEQ ID NO: 34816 - protein, 7 aa, synthetic construct
  REGION 1..7: note = Description of Artificial Sequence: Synthetic peptide
SGVERVN

SEQ ID NO: 34817 - protein, 7 aa, synthetic construct
  REGION 1..7: note = Description of Artificial Sequence: Synthetic peptide
LVRTTTA

SEQ ID NO: 34818 - protein, 7 aa, synthetic construct
  REGION 1..7: note = Description of Artificial Sequence: Synthetic peptide
SQSNSFL

SEQ ID NO: 34819 - protein, 7 aa, synthetic construct
  REGION 1..7: note = Description of Artificial Sequence: Synthetic peptide
PSGPVRG

SEQ ID NO: 34820 - protein, 7 aa, synthetic construct
  REGION 1..7: note = Description of Artificial Sequence: Synthetic peptide
HRSNSTT

SEQ ID NO: 34821 - protein, 7 aa, synthetic construct
  REGION 1..7: note = Description of Artificial Sequence: Synthetic peptide
RDSTAAR

SEQ ID NO: 34822 - protein, 7 aa, synthetic construct
  REGION 1..7: note = Description of Artificial Sequence: Synthetic peptide
QSISHTR

SEQ ID NO: 34823 - protein, 7 aa, synthetic construct
  REGION 1..7: note = Description of Artificial Sequence: Synthetic peptide
HNTAHAS

SEQ ID NO: 34824 - protein, 7 aa, synthetic construct
  REGION 1..7: note = Description of Artificial Sequence: Synthetic peptide
SPHRDTV

SEQ ID NO: 34825 - protein, 7 aa, synthetic construct
  REGION 1..7: note = Description of Artificial Sequence: Synthetic peptide
SPMGVTR

SEQ ID NO: 34826 - protein, 7 aa, synthetic construct
  REGION 1..7: note = Description of Artificial Sequence: Synthetic peptide
RGPTGMM

SEQ ID NO: 34827 - protein, 7 aa, synthetic construct
  REGION 1..7: note = Description of Artificial Sequence: Synthetic peptide
TTYGSLG

SEQ ID NO: 34828 - protein, 7 aa, synthetic construct
  REGION 1..7: note = Description of Artificial Sequence: Synthetic peptide
SLHQVGG

SEQ ID NO: 34829 - protein, 7 aa, synthetic construct
  REGION 1..7: note = Description of Artificial Sequence: Synthetic peptide
SGQHSLN

SEQ ID NO: 34830 - protein, 7 aa, synthetic construct
  REGION 1..7: note = Description of Artificial Sequence: Synthetic peptide
GNSNTLA

SEQ ID NO: 34831 - protein, 7 aa, synthetic construct
  REGION 1..7: note = Description of Artificial Sequence: Synthetic peptide
NTHNIQG

SEQ ID NO: 34832 - protein, 7 aa, synthetic construct
  REGION 1..7: note = Description of Artificial Sequence: Synthetic peptide
VQPVKMS

SEQ ID NO: 34833 - protein, 7 aa, synthetic construct
  REGION 1..7: note = Description of Artificial Sequence: Synthetic peptide
NASGQNQ

SEQ ID NO: 34834 - protein, 7 aa, synthetic construct
  REGION 1..7: note = Description of Artificial Sequence: Synthetic peptide
GPNPGNH

SEQ ID NO: 34835 - protein, 7 aa, synthetic construct
  REGION 1..7: note = Description of Artificial Sequence: Synthetic peptide
SRNAANA

SEQ ID NO: 34836 - protein, 7 aa, synthetic construct
  REGION 1..7: note = Description of Artificial Sequence: Synthetic peptide
MSRSDPP

SEQ ID NO: 34837 - protein, 7 aa, synthetic construct
  REGION 1..7: note = Description of Artificial Sequence: Synthetic peptide
TGTKSDN

SEQ ID NO: 34838 - protein, 7 aa, synthetic construct
  REGION 1..7: note = Description of Artificial Sequence: Synthetic peptide
NGSGQTQ

SEQ ID NO: 34839 - protein, 7 aa, synthetic construct
  REGION 1..7: note = Description of Artificial Sequence: Synthetic peptide
NSGARLS

SEQ ID NO: 34840 - protein, 7 aa, synthetic construct
  REGION 1..7: note = Description of Artificial Sequence: Synthetic peptide
TNSQKLA

SEQ ID NO: 34841 - protein, 7 aa, synthetic construct
  REGION 1..7: note = Description of Artificial Sequence: Synthetic peptide
LGAGQRE

SEQ ID NO: 34842 - protein, 7 aa, synthetic construct
  REGION 1..7: note = Description of Artificial Sequence: Synthetic peptide
SMSEHLK

SEQ ID NO: 34843 - protein, 7 aa, synthetic construct
  REGION 1..7: note = Description of Artificial Sequence: Synthetic peptide
GTGHQRS

SEQ ID NO: 34844 - protein, 7 aa, synthetic construct
  REGION 1..7: note = Description of Artificial Sequence: Synthetic peptide
HHSTLQT

SEQ ID NO: 34845 - protein, 7 aa, synthetic construct
  REGION 1..7: note = Description of Artificial Sequence: Synthetic peptide
SGGKSAL

SEQ ID NO: 34846 - protein, 7 aa, synthetic construct
  REGION 1..7: note = Description of Artificial Sequence: Synthetic peptide
APNGMQA

SEQ ID NO: 34847 - protein, 7 aa, synthetic construct
  REGION 1..7: note = Description of Artificial Sequence: Synthetic peptide
YQANALG

SEQ ID NO: 34848 - protein, 7 aa, synthetic construct
  REGION 1..7: note = Description of Artificial Sequence: Synthetic peptide
RTGNNHE

SEQ ID NO: 34849 - protein, 7 aa, synthetic construct
  REGION 1..7: note = Description of Artificial Sequence: Synthetic peptide
SQSSPVA

SEQ ID NO: 34850 - protein, 7 aa, synthetic construct
  REGION 1..7: note = Description of Artificial Sequence: Synthetic peptide
DGLRNSL

SEQ ID NO: 34851 - protein, 7 aa, synthetic construct
  REGION 1..7: note = Description of Artificial Sequence: Synthetic peptide
DHRNISS

SEQ ID NO: 34852 - protein, 7 aa, synthetic construct
  REGION 1..7: note = Description of Artificial Sequence: Synthetic peptide
SGGTHIA

SEQ ID NO: 34853 - protein, 7 aa, synthetic construct
  REGION 1..7: note = Description of Artificial Sequence: Synthetic peptide
SNTRSLS

SEQ ID NO: 34854 - protein, 7 aa, synthetic construct
  REGION 1..7: note = Description of Artificial Sequence: Synthetic peptide
ERPGGTP

SEQ ID NO: 34855 - protein, 7 aa, synthetic construct
  REGION 1..7: note = Description of Artificial Sequence: Synthetic peptide
SVADTRL

SEQ ID NO: 34856 - protein, 7 aa, synthetic construct
  REGION 1..7: note = Description of Artificial Sequence: Synthetic peptide
PMSHVSG

SEQ ID NO: 34857 - protein, 7 aa, synthetic construct
  REGION 1..7: note = Description of Artificial Sequence: Synthetic peptide
DRSATAT

SEQ ID NO: 34858 - protein, 7 aa, synthetic construct
  REGION 1..7: note = Description of Artificial Sequence: Synthetic peptide
CLPNHCN

SEQ ID NO: 34859 - protein, 7 aa, synthetic construct
  REGION 1..7: note = Description of Artificial Sequence: Synthetic peptide
PTSQQRP

SEQ ID NO: 34860 - protein, 7 aa, synthetic construct
  REGION 1..7: note = Description of Artificial Sequence: Synthetic peptide
PNLNSRG

SEQ ID NO: 34861 - protein, 7 aa, synthetic construct
  REGION 1..7: note = Description of Artificial Sequence: Synthetic peptide
MNSGRHV

SEQ ID NO: 34862 - protein, 7 aa, synthetic construct
  REGION 1..7: note = Description of Artificial Sequence: Synthetic peptide
RNQGALQ

SEQ ID NO: 34863 - protein, 7 aa, synthetic construct
  REGION 1..7: note = Description of Artificial Sequence: Synthetic peptide
SASHGAL

SEQ ID NO: 34864 - protein, 7 aa, synthetic construct
  REGION 1..7: note = Description of Artificial Sequence: Synthetic peptide
GKTNVSS

SEQ ID NO: 34865 - protein, 7 aa, synthetic construct
  REGION 1..7: note = Description of Artificial Sequence: Synthetic peptide
GFTGSHV

SEQ ID NO: 34866 - protein, 7 aa, synthetic construct
  REGION 1..7: note = Description of Artificial Sequence: Synthetic peptide
SLGSRPS

SEQ ID NO: 34867 - protein, 7 aa, synthetic construct
  REGION 1..7: note = Description of Artificial Sequence: Synthetic peptide
NRNGFNN

SEQ ID NO: 34868 - protein, 7 aa, synthetic construct
  REGION 1..7: note = Description of Artificial Sequence: Synthetic peptide
SYVGTTA

SEQ ID NO: 34869 - protein, 7 aa, synthetic construct
  REGION 1..7: note = Description of Artificial Sequence: Synthetic peptide
VNQSGFS

SEQ ID NO: 34870 - protein, 7 aa, synthetic construct
  REGION 1..7: note = Description of Artificial Sequence: Synthetic peptide
QPSQGHS

SEQ ID NO: 34871 - protein, 7 aa, synthetic construct
  REGION 1..7: note = Description of Artificial Sequence: Synthetic peptide
NGSGKNQ

SEQ ID NO: 34872 - protein, 7 aa, synthetic construct
  REGION 1..7: note = Description of Artificial Sequence: Synthetic peptide
SRNGGPL

SEQ ID NO: 34873 - protein, 7 aa, synthetic construct
  REGION 1..7: note = Description of Artificial Sequence: Synthetic peptide
EGISSIS

SEQ ID NO: 34874 - protein, 7 aa, synthetic construct
  REGION 1..7: note = Description of Artificial Sequence: Synthetic peptide
PYNSKAS

SEQ ID NO: 34875 - protein, 7 aa, synthetic construct
  REGION 1..7: note = Description of Artificial Sequence: Synthetic peptide
AVTGASG

SEQ ID NO: 34876 - protein, 7 aa, synthetic construct
  REGION 1..7: note = Description of Artificial Sequence: Synthetic peptide
SVTPHVT

SEQ ID NO: 34877 - protein, 7 aa, synthetic construct
  REGION 1..7: note = Description of Artificial Sequence: Synthetic peptide
PVSGATI

SEQ ID NO: 34878 - protein, 7 aa, synthetic construct
  REGION 1..7: note = Description of Artificial Sequence: Synthetic peptide
GSRDNSR

SEQ ID NO: 34879 - protein, 7 aa, synthetic construct
  REGION 1..7: note = Description of Artificial Sequence: Synthetic peptide
REPARGD

SEQ ID NO: 34880 - protein, 7 aa, synthetic construct
  REGION 1..7: note = Description of Artificial Sequence: Synthetic peptide
PRSQPVP

SEQ ID NO: 34881 - protein, 7 aa, synthetic construct
  REGION 1..7: note = Description of Artificial Sequence: Synthetic peptide
TSSGHSV

SEQ ID NO: 34882 - protein, 7 aa, synthetic construct
  REGION 1..7: note = Description of Artificial Sequence: Synthetic peptide
ADLTRSS

SEQ ID NO: 34883 - protein, 7 aa, synthetic construct
  REGION 1..7: note = Description of Artificial Sequence: Synthetic peptide
LGPGKNT

SEQ ID NO: 34884 - protein, 7 aa, synthetic construct
  REGION 1..7: note = Description of Artificial Sequence: Synthetic peptide
STFSPSK

SEQ ID NO: 34885 - protein, 7 aa, synthetic construct
  REGION 1..7: note = Description of Artificial Sequence: Synthetic peptide
SPGNKST

SEQ ID NO: 34886 - protein, 7 aa, synthetic construct
  REGION 1..7: note = Description of Artificial Sequence: Synthetic peptide
DRQGLSG

SEQ ID NO: 34887 - protein, 7 aa, synthetic construct
  REGION 1..7: note = Description of Artificial Sequence: Synthetic peptide
FNEQRVS

SEQ ID NO: 34888 - protein, 7 aa, synthetic construct
  REGION 1..7: note = Description of Artificial Sequence: Synthetic peptide
RSYEGMQ

SEQ ID NO: 34889 - protein, 7 aa, synthetic construct
  REGION 1..7: note = Description of Artificial Sequence: Synthetic peptide
IPSGVHS

SEQ ID NO: 34890 - protein, 7 aa, synthetic construct
  REGION 1..7: note = Description of Artificial Sequence: Synthetic peptide
DTITSRG

SEQ ID NO: 34891 - protein, 7 aa, synthetic construct
  REGION 1..7: note = Description of Artificial Sequence: Synthetic peptide
PSVNRTP

SEQ ID NO: 34892 - protein, 7 aa, synthetic construct
  REGION 1..7: note = Description of Artificial Sequence: Synthetic peptide
PVSTHSS

SEQ ID NO: 34893 - protein, 7 aa, synthetic construct
  REGION 1..7: note = Description of Artificial Sequence: Synthetic peptide
SRVTSVS

SEQ ID NO: 34894 - protein, 7 aa, synthetic construct
  REGION 1..7: note = Description of Artificial Sequence: Synthetic peptide
RSSGGLT

SEQ ID NO: 34895 - protein, 7 aa, synthetic construct
  REGION 1..7: note = Description of Artificial Sequence: Synthetic peptide
SKGLSMV

SEQ ID NO: 34896 - protein, 7 aa, synthetic construct
  REGION 1..7: note = Description of Artificial Sequence: Synthetic peptide
DNPRQAY

SEQ ID NO: 34897 - protein, 7 aa, synthetic construct
  REGION 1..7: note = Description of Artificial Sequence: Synthetic peptide
GTTNSRN

SEQ ID NO: 34898 - protein, 7 aa, synthetic construct
  REGION 1..7: note = Description of Artificial Sequence: Synthetic peptide
GSSRSLG

SEQ ID NO: 34899 - protein, 7 aa, synthetic construct
  REGION 1..7: note = Description of Artificial Sequence: Synthetic peptide
MLPQNGR

SEQ ID NO: 34900 - protein, 7 aa, synthetic construct
  REGION 1..7: note = Description of Artificial Sequence: Synthetic peptide
GSNRNPL

SEQ ID NO: 34901 - protein, 7 aa, synthetic construct
  REGION 1..7: note = Description of Artificial Sequence: Synthetic peptide
STSRDAT

SEQ ID NO: 34902 - protein, 7 aa, synthetic construct
  REGION 1..7: note = Description of Artificial Sequence: Synthetic peptide
HGSSSFT

SEQ ID NO: 34903 - protein, 7 aa, synthetic construct
  REGION 1..7: note = Description of Artificial Sequence: Synthetic peptide
SDMSGQR

SEQ ID NO: 34904 - protein, 7 aa, synthetic construct
  REGION 1..7: note = Description of Artificial Sequence: Synthetic peptide
RSGSVNP

SEQ ID NO: 34905 - protein, 7 aa, synthetic construct
  REGION 1..7: note = Description of Artificial Sequence: Synthetic peptide
GTADRHL

SEQ ID NO: 34906 - protein, 7 aa, synthetic construct
  REGION 1..7: note = Description of Artificial Sequence: Synthetic peptide
CTSKSSS

SEQ ID NO: 34907 - protein, 7 aa, synthetic construct
  REGION 1..7: note = Description of Artificial Sequence: Synthetic peptide
EGTRGVG

SEQ ID NO: 34908 - protein, 7 aa, synthetic construct
  REGION 1..7: note = Description of Artificial Sequence: Synthetic peptide
RVTNQNA

SEQ ID NO: 34909 - protein, 7 aa, synthetic construct
  REGION 1..7: note = Description of Artificial Sequence: Synthetic peptide
SRNVNAM

SEQ ID NO: 34910 - protein, 7 aa, synthetic construct
  REGION 1..7: note = Description of Artificial Sequence: Synthetic peptide
AGGPANR

SEQ ID NO: 34911 - protein, 7 aa, synthetic construct
  REGION 1..7: note = Description of Artificial Sequence: Synthetic peptide
TGSGSNH

SEQ ID NO: 34912 - protein, 7 aa, synthetic construct
  REGION 1..7: note = Description of Artificial Sequence: Synthetic peptide
GLQSKQL

SEQ ID NO: 34913 - protein, 7 aa, synthetic construct
  REGION 1..7: note = Description of Artificial Sequence: Synthetic peptide
AMTGSHT

SEQ ID NO: 34914 - protein, 7 aa, synthetic construct
  REGION 1..7: note = Description of Artificial Sequence: Synthetic peptide
PSTSGAM

SEQ ID NO: 34915 - protein, 7 aa, synthetic construct
  REGION 1..7: note = Description of Artificial Sequence: Synthetic peptide
SSANHPR

SEQ ID NO: 34916 - protein, 7 aa, synthetic construct
  REGION 1..7: note = Description of Artificial Sequence: Synthetic peptide
GHVSPAF

SEQ ID NO: 34917 - protein, 7 aa, synthetic construct
  REGION 1..7: note = Description of Artificial Sequence: Synthetic peptide
RNVDKSS

SEQ ID NO: 34918 - protein, 7 aa, synthetic construct
  REGION 1..7: note = Description of Artificial Sequence: Synthetic peptide
YPKTNVT

SEQ ID NO: 34919 - protein, 7 aa, synthetic construct
  REGION 1..7: note = Description of Artificial Sequence: Synthetic peptide
NPNQSLG

SEQ ID NO: 34920 - protein, 7 aa, synthetic construct
  REGION 1..7: note = Description of Artificial Sequence: Synthetic peptide
AVDSTRA

SEQ ID NO: 34921 - protein, 7 aa, synthetic construct
  REGION 1..7: note = Description of Artificial Sequence: Synthetic peptide
DTSRAPG

SEQ ID NO: 34922 - protein, 7 aa, synthetic construct
  REGION 1..7: note = Description of Artificial Sequence: Synthetic peptide
ANTTRLT

SEQ ID NO: 34923 - protein, 7 aa, synthetic construct
  REGION 1..7: note = Description of Artificial Sequence: Synthetic peptide
VPHGATS

SEQ ID NO: 34924 - protein, 7 aa, synthetic construct
  REGION 1..7: note = Description of Artificial Sequence: Synthetic peptide
TSTSPMK

SEQ ID NO: 34925 - protein, 7 aa, synthetic construct
  REGION 1..7: note = Description of Artificial Sequence: Synthetic peptide
ETPNRSQ

SEQ ID NO: 34926 - protein, 7 aa, synthetic construct
  REGION 1..7: note = Description of Artificial Sequence: Synthetic peptide
RSNPTLV

SEQ ID NO: 34927 - protein, 7 aa, synthetic construct
  REGION 1..7: note = Description of Artificial Sequence: Synthetic peptide
TATQKGQ

SEQ ID NO: 34928 - protein, 7 aa, synthetic construct
  REGION 1..7: note = Description of Artificial Sequence: Synthetic peptide
GHSSNNA

SEQ ID NO: 34929 - protein, 7 aa, synthetic construct
  REGION 1..7: note = Description of Artificial Sequence: Synthetic peptide
GGLHGSG

SEQ ID NO: 34930 - protein, 7 aa, synthetic construct
  REGION 1..7: note = Description of Artificial Sequence: Synthetic peptide
PRSTTGG

SEQ ID NO: 34931 - protein, 7 aa, synthetic construct
  REGION 1..7: note = Description of Artificial Sequence: Synthetic peptide
NSGKPNA

SEQ ID NO: 34932 - protein, 7 aa, synthetic construct
  REGION 1..7: note = Description of Artificial Sequence: Synthetic peptide
NTVSKSQ

SEQ ID NO: 34933 - protein, 7 aa, synthetic construct
  REGION 1..7: note = Description of Artificial Sequence: Synthetic peptide
DVKSTHA

SEQ ID NO: 34934 - protein, 7 aa, synthetic construct
  REGION 1..7: note = Description of Artificial Sequence: Synthetic peptide
AGTGSSL

SEQ ID NO: 34935 - protein, 7 aa, synthetic construct
  REGION 1..7: note = Description of Artificial Sequence: Synthetic peptide
TTHNMQG

SEQ ID NO: 34936 - protein, 7 aa, synthetic construct
  REGION 1..7: note = Description of Artificial Sequence: Synthetic peptide
SRETVPT

SEQ ID NO: 34937 - protein, 7 aa, synthetic construct
  REGION 1..7: note = Description of Artificial Sequence: Synthetic peptide
QSHSGIS

SEQ ID NO: 34938 - protein, 7 aa, synthetic construct
  REGION 1..7: note = Description of Artificial Sequence: Synthetic peptide
PPNLKLS

SEQ ID NO: 34939 - protein, 7 aa, synthetic construct
  REGION 1..7: note = Description of Artificial Sequence: Synthetic peptide
QHTTTNQ

SEQ ID NO: 34940 - protein, 7 aa, synthetic construct
  REGION 1..7: note = Description of Artificial Sequence: Synthetic peptide
SNETKSS

SEQ ID NO: 34941 - protein, 7 aa, synthetic construct
  REGION 1..7: note = Description of Artificial Sequence: Synthetic peptide
EQGSGNH

SEQ ID NO: 34942 - protein, 7 aa, synthetic construct
  REGION 1..7: note = Description of Artificial Sequence: Synthetic peptide
GTDNNTR

SEQ ID NO: 34943 - protein, 7 aa, synthetic construct
  REGION 1..7: note = Description of Artificial Sequence: Synthetic peptide
HGTSPLR

SEQ ID NO: 34944 - protein, 7 aa, synthetic construct
  REGION 1..7: note = Description of Artificial Sequence: Synthetic peptide
ATNSTPR

SEQ ID NO: 34945 - protein, 7 aa, synthetic construct
  REGION 1..7: note = Description of Artificial Sequence: Synthetic peptide
QSNPRPG

SEQ ID NO: 34946 - protein, 7 aa, synthetic construct
  REGION 1..7: note = Description of Artificial Sequence: Synthetic peptide
SSLQPFT

SEQ ID NO: 34947 - protein, 7 aa, synthetic construct
  REGION 1..7: note = Description of Artificial Sequence: Synthetic peptide
GTARGVA

SEQ ID NO: 34948 - protein, 7 aa, synthetic construct
  REGION 1..7: note = Description of Artificial Sequence: Synthetic peptide
AASTVPR

SEQ ID NO: 34949 - protein, 7 aa, synthetic construct
  REGION 1..7: note = Description of Artificial Sequence: Synthetic peptide
TGMQSLS

SEQ ID NO: 34950 - protein, 7 aa, synthetic construct
  REGION 1..7: note = Description of Artificial Sequence: Synthetic peptide
ASSRESL

SEQ ID NO: 34951 - protein, 7 aa, synthetic construct
  REGION 1..7: note = Description of Artificial Sequence: Synthetic peptide
HGSGQNQ

SEQ ID NO: 34952 - protein, 7 aa, synthetic construct
  REGION 1..7: note = Description of Artificial Sequence: Synthetic peptide
RAGSAVE

SEQ ID NO: 34953 - protein, 7 aa, synthetic construct
  REGION 1..7: note = Description of Artificial Sequence: Synthetic peptide
GSTTSGR

SEQ ID NO: 34954 - protein, 7 aa, synthetic construct
  REGION 1..7: note = Description of Artificial Sequence: Synthetic peptide
VHTGQNG

SEQ ID NO: 34955 - protein, 7 aa, synthetic construct
  REGION 1..7: note = Description of Artificial Sequence: Synthetic peptide
RGPGHNT

SEQ ID NO: 34956 - protein, 7 aa, synthetic construct
  REGION 1..7: note = Description of Artificial Sequence: Synthetic peptide
TRDSQVL

SEQ ID NO: 34957 - protein, 7 aa, synthetic construct
  REGION 1..7: note = Description of Artificial Sequence: Synthetic peptide
PGGVPGS

SEQ ID NO: 34958 - protein, 7 aa, synthetic construct
  REGION 1..7: note = Description of Artificial Sequence: Synthetic peptide
HYGETRN

SEQ ID NO: 34959 - protein, 7 aa, synthetic construct
  REGION 1..7: note = Description of Artificial Sequence: Synthetic peptide
HKSGLVD

SEQ ID NO: 34960 - protein, 7 aa, synthetic construct
  REGION 1..7: note = Description of Artificial Sequence: Synthetic peptide
AGVTTVN

SEQ ID NO: 34961 - protein, 7 aa, synthetic construct
  REGION 1..7: note = Description of Artificial Sequence: Synthetic peptide
YINSPSN

SEQ ID NO: 34962 - protein, 7 aa, synthetic construct
  REGION 1..7: note = Description of Artificial Sequence: Synthetic peptide
SRSTGTL

SEQ ID NO: 34963 - protein, 7 aa, synthetic construct
  REGION 1..7: note = Description of Artificial Sequence: Synthetic peptide
ALRNQSQ

SEQ ID NO: 34964 - protein, 7 aa, synthetic construct
  REGION 1..7: note = Description of Artificial Sequence: Synthetic peptide
GDSKSTW

SEQ ID NO: 34965 - protein, 7 aa, synthetic construct
  REGION 1..7: note = Description of Artificial Sequence: Synthetic peptide
EPLQGSR

SEQ ID NO: 34966 - protein, 7 aa, synthetic construct
  REGION 1..7: note = Description of Artificial Sequence: Synthetic peptide
AHFSTER

SEQ ID NO: 34967 - protein, 7 aa, synthetic construct
  REGION 1..7: note = Description of Artificial Sequence: Synthetic peptide
LVSKSGT

SEQ ID NO: 34968 - protein, 7 aa, synthetic construct
  REGION 1..7: note = Description of Artificial Sequence: Synthetic peptide
SATSVPI

SEQ ID NO: 34969 - protein, 7 aa, synthetic construct
  REGION 1..7: note = Description of Artificial Sequence: Synthetic peptide
SSPTNMA

SEQ ID NO: 34970 - protein, 7 aa, synthetic construct
  REGION 1..7: note = Description of Artificial Sequence: Synthetic peptide
QISASTR

SEQ ID NO: 34971 - protein, 7 aa, synthetic construct
  REGION 1..7: note = Description of Artificial Sequence: Synthetic peptide
RDPKAGV

SEQ ID NO: 34972 - protein, 7 aa, synthetic construct
  REGION 1..7: note = Description of Artificial Sequence: Synthetic peptide
ERAKGSS

SEQ ID NO: 34973 - protein, 7 aa, synthetic construct
  REGION 1..7: note = Description of Artificial Sequence: Synthetic peptide
QANTIGK

SEQ ID NO: 34974 - protein, 7 aa, synthetic construct
  REGION 1..7: note = Description of Artificial Sequence: Synthetic peptide
MALQPNR

SEQ ID NO: 34975 - protein, 7 aa, synthetic construct
  REGION 1..7: note = Description of Artificial Sequence: Synthetic peptide
PSSTPKL

SEQ ID NO: 34976 - protein, 7 aa, synthetic construct
  REGION 1..7: note = Description of Artificial Sequence: Synthetic peptide
SGSSPPT

SEQ ID NO: 34977 - protein, 7 aa, synthetic construct
  REGION 1..7: note = Description of Artificial Sequence: Synthetic peptide
QVTGASH

SEQ ID NO: 34978 - protein, 7 aa, synthetic construct
  REGION 1..7: note = Description of Artificial Sequence: Synthetic peptide
SLGSGFQ

SEQ ID NO: 34979 - protein, 7 aa, synthetic construct
  REGION 1..7: note = Description of Artificial Sequence: Synthetic peptide
VNTSHTN

SEQ ID NO: 34980 - protein, 7 aa, synthetic construct
  REGION 1..7: note = Description of Artificial Sequence: Synthetic peptide
YLTSTSN

SEQ ID NO: 34981 - protein, 7 aa, synthetic construct
  REGION 1..7: note = Description of Artificial Sequence: Synthetic peptide
MLNSRTS

SEQ ID NO: 34982 - protein, 7 aa, synthetic construct
  REGION 1..7: note = Description of Artificial Sequence: Synthetic peptide
PFGAGRP

SEQ ID NO: 34983 - protein, 7 aa, synthetic construct
  REGION 1..7: note = Description of Artificial Sequence: Synthetic peptide
PLPKNSS

SEQ ID NO: 34984 - protein, 7 aa, synthetic construct
  REGION 1..7: note = Description of Artificial Sequence: Synthetic peptide
HAKSSSM

SEQ ID NO: 34985 - protein, 7 aa, synthetic construct
  REGION 1..7: note = Description of Artificial Sequence: Synthetic peptide
TNAARDS

SEQ ID NO: 34986 - protein, 7 aa, synthetic construct
  REGION 1..7: note = Description of Artificial Sequence: Synthetic peptide
GLQTPPR

SEQ ID NO: 34987 - protein, 7 aa, synthetic construct
  REGION 1..7: note = Description of Artificial Sequence: Synthetic peptide
GHDGQSR

SEQ ID NO: 34988 - protein, 7 aa, synthetic construct
  REGION 1..7: note = Description of Artificial Sequence: Synthetic peptide
ATSQLPR

SEQ ID NO: 34989 - protein, 7 aa, synthetic construct
  REGION 1..7: note = Description of Artificial Sequence: Synthetic peptide
STTPGLK

SEQ ID NO: 34990 - protein, 7 aa, synthetic construct
  REGION 1..7: note = Description of Artificial Sequence: Synthetic peptide
RATSREA

SEQ ID NO: 34991 - protein, 7 aa, synthetic construct
  REGION 1..7: note = Description of Artificial Sequence: Synthetic peptide
GPVNAHS

SEQ ID NO: 34992 - protein, 7 aa, synthetic construct
  REGION 1..7: note = Description of Artificial Sequence: Synthetic peptide
SANNKSG

SEQ ID NO: 34993 - protein, 7 aa, synthetic construct
  REGION 1..7: note = Description of Artificial Sequence: Synthetic peptide
SQPGSNH

SEQ ID NO: 34994 - protein, 7 aa, synthetic construct
  REGION 1..7: note = Description of Artificial Sequence: Synthetic peptide
GSISTAH

SEQ ID NO: 34995 - protein, 7 aa, synthetic construct
  REGION 1..7: note = Description of Artificial Sequence: Synthetic peptide
AGTNSRQ

SEQ ID NO: 34996 - protein, 7 aa, synthetic construct
  REGION 1..7: note = Description of Artificial Sequence: Synthetic peptide
NAQGTAK

SEQ ID NO: 34997 - protein, 7 aa, synthetic construct
  REGION 1..7: note = Description of Artificial Sequence: Synthetic peptide
MSTSSSR

SEQ ID NO: 34998 - protein, 7 aa, synthetic construct
  REGION 1..7: note = Description of Artificial Sequence: Synthetic peptide
TRTAGVD

SEQ ID NO: 34999 - protein, 7 aa, synthetic construct
  REGION 1..7: note = Description of Artificial Sequence: Synthetic peptide
FGQQAGM

SEQ ID NO: 35000 - protein, 7 aa, synthetic construct
  REGION 1..7: note = Description of Artificial Sequence: Synthetic peptide
DSRNNMT

SEQ ID NO: 35001 - protein, 7 aa, synthetic construct
  REGION 1..7: note = Description of Artificial Sequence: Synthetic peptide
QNLPKAS

SEQ ID NO: 35002 - protein, 7 aa, synthetic construct
  REGION 1..7: note = Description of Artificial Sequence: Synthetic peptide
AAHSTMN

SEQ ID NO: 35003 - protein, 7 aa, synthetic construct
  REGION 1..7: note = Description of Artificial Sequence: Synthetic peptide
VPHNHSL

SEQ ID NO: 35004 - protein, 7 aa, synthetic construct
  REGION 1..7: note = Description of Artificial Sequence: Synthetic peptide
GMGNDPR

SEQ ID NO: 35005 - protein, 7 aa, synthetic construct
  REGION 1..7: note = Description of Artificial Sequence: Synthetic peptide
SSPSRSS

SEQ ID NO: 35006 - protein, 7 aa, synthetic construct
  REGION 1..7: note = Description of Artificial Sequence: Synthetic peptide
PGSGSNN

SEQ ID NO: 35007 - protein, 7 aa, synthetic construct
  REGION 1..7: note = Description of Artificial Sequence: Synthetic peptide
TTLPSSK

SEQ ID NO: 35008 - protein, 7 aa, synthetic construct
  REGION 1..7: note = Description of Artificial Sequence: Synthetic peptide
VRESRSS

SEQ ID NO: 35009 - protein, 7 aa, synthetic construct
  REGION 1..7: note = Description of Artificial Sequence: Synthetic peptide
SSTVKSG

SEQ ID NO: 35010 - protein, 7 aa, synthetic construct
  REGION 1..7: note = Description of Artificial Sequence: Synthetic peptide
TSSGNLS

SEQ ID NO: 35011 - protein, 7 aa, synthetic construct
  REGION 1..7: note = Description of Artificial Sequence: Synthetic peptide
TMSTRQS

SEQ ID NO: 35012 - protein, 7 aa, synthetic construct
  REGION 1..7: note = Description of Artificial Sequence: Synthetic peptide
STLNAGA

SEQ ID NO: 35013 - protein, 7 aa, synthetic construct
  REGION 1..7: note = Description of Artificial Sequence: Synthetic peptide
HLHASPA

SEQ ID NO: 35014 - protein, 7 aa, synthetic construct
  REGION 1..7: note = Description of Artificial Sequence: Synthetic peptide
GPAVTNR

SEQ ID NO: 35015 - protein, 7 aa, synthetic construct
  REGION 1..7: note = Description of Artificial Sequence: Synthetic peptide
ANGSGVG

SEQ ID NO: 35016 - protein, 7 aa, synthetic construct
  REGION 1..7: note = Description of Artificial Sequence: Synthetic peptide
SALMNNG

SEQ ID NO: 35017 - protein, 7 aa, synthetic construct
  REGION 1..7: note = Description of Artificial Sequence: Synthetic peptide
SQVSKPQ

SEQ ID NO: 35018 - protein, 7 aa, synthetic construct
  REGION 1..7: note = Description of Artificial Sequence: Synthetic peptide
PSTQSSS

SEQ ID NO: 35019 - protein, 7 aa, synthetic construct
  REGION 1..7: note = Description of Artificial Sequence: Synthetic peptide
NGFNSNN

SEQ ID NO: 35020 - protein, 7 aa, synthetic construct
  REGION 1..7: note = Description of Artificial Sequence: Synthetic peptide
SLSKSQS

SEQ ID NO: 35021 - protein, 7 aa, synthetic construct
  REGION 1..7: note = Description of Artificial Sequence: Synthetic peptide
SQQSPSM

SEQ ID NO: 35022 - protein, 7 aa, synthetic construct
  REGION 1..7: note = Description of Artificial Sequence: Synthetic peptide
QVHGKTQ

SEQ ID NO: 35023 - protein, 7 aa, synthetic construct
  REGION 1..7: note = Description of Artificial Sequence: Synthetic peptide
GQASHMK

SEQ ID NO: 35024 - protein, 7 aa, synthetic construct
  REGION 1..7: note = Description of Artificial Sequence: Synthetic peptide
APHSAAN

SEQ ID NO: 35025 - protein, 7 aa, synthetic construct
  REGION 1..7: note = Description of Artificial Sequence: Synthetic peptide
HANNKLM

SEQ ID NO: 35026 - protein, 7 aa, synthetic construct
  REGION 1..7: note = Description of Artificial Sequence: Synthetic peptide
SDINRST

SEQ ID NO: 35027 - protein, 7 aa, synthetic construct
  REGION 1..7: note = Description of Artificial Sequence: Synthetic peptide
GQNTHLT

SEQ ID NO: 35028 - protein, 7 aa, synthetic construct
  REGION 1..7: note = Description of Artificial Sequence: Synthetic peptide
SVSTKSA

SEQ ID NO: 35029 - protein, 7 aa, synthetic construct
  REGION 1..7: note = Description of Artificial Sequence: Synthetic peptide
SKVTAQS

SEQ ID NO: 35030 - protein, 7 aa, synthetic construct
  REGION 1..7: note = Description of Artificial Sequence: Synthetic peptide
SHNSKDS

SEQ ID NO: 35031 - protein, 7 aa, synthetic construct
  REGION 1..7: note = Description of Artificial Sequence: Synthetic peptide
VSSNASM

SEQ ID NO: 35032 - protein, 7 aa, synthetic construct
  REGION 1..7: note = Description of Artificial Sequence: Synthetic peptide
IKPSSSA

SEQ ID NO: 35033 - protein, 7 aa, synthetic construct
  REGION 1..7: note = Description of Artificial Sequence: Synthetic peptide
LVHKGPV

SEQ ID NO: 35034 - protein, 7 aa, synthetic construct
  REGION 1..7: note = Description of Artificial Sequence: Synthetic peptide
PPVTTRP

SEQ ID NO: 35035 - protein, 7 aa, synthetic construct
  REGION 1..7: note = Description of Artificial Sequence: Synthetic peptide
STHHPAS

SEQ ID NO: 35036 - protein, 7 aa, synthetic construct
  REGION 1..7: note = Description of Artificial Sequence: Synthetic peptide
SSSPNVK

SEQ ID NO: 35037 - protein, 7 aa, synthetic construct
  REGION 1..7: note = Description of Artificial Sequence: Synthetic peptide
AQTKGTQ

SEQ ID NO: 35038 - protein, 7 aa, synthetic construct
  REGION 1..7: note = Description of Artificial Sequence: Synthetic peptide
STTGGAS

SEQ ID NO: 35039 - protein, 7 aa, synthetic construct
  REGION 1..7: note = Description of Artificial Sequence: Synthetic peptide
VNMRNTM

SEQ ID NO: 35040 - protein, 7 aa, synthetic construct
  REGION 1..7: note = Description of Artificial Sequence: Synthetic peptide
CGRPLPA

SEQ ID NO: 35041 - protein, 7 aa, synthetic construct
  REGION 1..7: note = Description of Artificial Sequence: Synthetic peptide
GTGTTFR

SEQ ID NO: 35042 - protein, 7 aa, synthetic construct
  REGION 1..7: note = Description of Artificial Sequence: Synthetic peptide
NTTPSRG

SEQ ID NO: 35043 - protein, 7 aa, synthetic construct
  REGION 1..7: note = Description of Artificial Sequence: Synthetic peptide
GHVNAHV

SEQ ID NO: 35044 - protein, 7 aa, synthetic construct
  REGION 1..7: note = Description of Artificial Sequence: Synthetic peptide
NTNGSQR

SEQ ID NO: 35045 - protein, 7 aa, synthetic construct
  REGION 1..7: note = Description of Artificial Sequence: Synthetic peptide
ASLRESR

SEQ ID NO: 35046 - protein, 7 aa, synthetic construct
  REGION 1..7: note = Description of Artificial Sequence: Synthetic peptide
GSGNKVN

SEQ ID NO: 35047 - protein, 7 aa, synthetic construct
  REGION 1..7: note = Description of Artificial Sequence: Synthetic peptide
MQTSQST

SEQ ID NO: 35048 - protein, 7 aa, synthetic construct
  REGION 1..7: note = Description of Artificial Sequence: Synthetic peptide
SSSAPRL

SEQ ID NO: 35049 - protein, 7 aa, synthetic construct
  REGION 1..7: note = Description of Artificial Sequence: Synthetic peptide
IPHAGTA

SEQ ID NO: 35050 - protein, 7 aa, synthetic construct
  REGION 1..7: note = Description of Artificial Sequence: Synthetic peptide
RASQSVG

SEQ ID NO: 35051 - protein, 7 aa, synthetic construct
  REGION 1..7: note = Description of Artificial Sequence: Synthetic peptide
ATNNGSK

SEQ ID NO: 35052 - protein, 7 aa, synthetic construct
  REGION 1..7: note = Description of Artificial Sequence: Synthetic peptide
TVTNAAR

SEQ ID NO: 35053 - protein, 7 aa, synthetic construct
  REGION 1..7: note = Description of Artificial Sequence: Synthetic peptide
SSGLSSS

SEQ ID NO: 35054 - protein, 7 aa, synthetic construct
  REGION 1..7: note = Description of Artificial Sequence: Synthetic peptide
DPLRHSV

SEQ ID NO: 35055 - protein, 7 aa, synthetic construct
  REGION 1..7: note = Description of Artificial Sequence: Synthetic peptide
GAISNEH

SEQ ID NO: 35056 - protein, 7 aa, synthetic construct
  REGION 1..7: note = Description of Artificial Sequence: Synthetic peptide
NRVEHTQ

SEQ ID NO: 35057 - protein, 7 aa, synthetic construct
  REGION 1..7: note = Description of Artificial Sequence: Synthetic peptide
ERTPPRI

SEQ ID NO: 35058 - protein, 7 aa, synthetic construct
  REGION 1..7: note = Description of Artificial Sequence: Synthetic peptide
MPLKPHL

SEQ ID NO: 35059 - protein, 7 aa, synthetic construct
  REGION 1..7: note = Description of Artificial Sequence: Synthetic peptide
GDKTQAM

SEQ ID NO: 35060 - protein, 7 aa, synthetic construct
  REGION 1..7: note = Description of Artificial Sequence: Synthetic peptide
STNPANR

SEQ ID NO: 35061 - protein, 7 aa, synthetic construct
  REGION 1..7: note = Description of Artificial Sequence: Synthetic peptide
TPHQRSS

SEQ ID NO: 35062 - protein, 7 aa, synthetic construct
  REGION 1..7: note = Description of Artificial Sequence: Synthetic peptide
AQVDKRS

SEQ ID NO: 35063 - protein, 7 aa, synthetic construct
  REGION 1..7: note = Description of Artificial Sequence: Synthetic peptide
RSSDRSA

SEQ ID NO: 35064 - protein, 7 aa, synthetic construct
  REGION 1..7: note = Description of Artificial Sequence: Synthetic peptide
MSRLPST

SEQ ID NO: 35065 - protein, 7 aa, synthetic construct
  REGION 1..7: note = Description of Artificial Sequence: Synthetic peptide
TKYEGYT

SEQ ID NO: 35066 - protein, 7 aa, synthetic construct
  REGION 1..7: note = Description of Artificial Sequence: Synthetic peptide
RDGAHLR

SEQ ID NO: 35067 - protein, 7 aa, synthetic construct
  REGION 1..7: note = Description of Artificial Sequence: Synthetic peptide
YGSRPPS

SEQ ID NO: 35068 - protein, 7 aa, synthetic construct
  REGION 1..7: note = Description of Artificial Sequence: Synthetic peptide
RNDSRPP

SEQ ID NO: 35069 - protein, 7 aa, synthetic construct
  REGION 1..7: note = Description of Artificial Sequence: Synthetic peptide
GGNPSGS

SEQ ID NO: 35070 - protein, 7 aa, synthetic construct
  REGION 1..7: note = Description of Artificial Sequence: Synthetic peptide
SLSKQAA

SEQ ID NO: 35071 - protein, 7 aa, synthetic construct
  REGION 1..7: note = Description of Artificial Sequence: Synthetic peptide
ATGRSPN

SEQ ID NO: 35072 - protein, 7 aa, synthetic construct
  REGION 1..7: note = Description of Artificial Sequence: Synthetic peptide
VGGGRDN

SEQ ID NO: 35073 - protein, 7 aa, synthetic construct
  REGION 1..7: note = Description of Artificial Sequence: Synthetic peptide
SSQQKAS

SEQ ID NO: 35074 - protein, 7 aa, synthetic construct
  REGION 1..7: note = Description of Artificial Sequence: Synthetic peptide
NRSNNSV

SEQ ID NO: 35075 - protein, 7 aa, synthetic construct
  REGION 1..7: note = Description of Artificial Sequence: Synthetic peptide
SRGDGVT

SEQ ID NO: 35076 - protein, 7 aa, synthetic construct
  REGION 1..7: note = Description of Artificial Sequence: Synthetic peptide
ALANPQT

SEQ ID NO: 35077 - protein, 7 aa, synthetic construct
  REGION 1..7: note = Description of Artificial Sequence: Synthetic peptide
IPGHPTA

SEQ ID NO: 35078 - protein, 7 aa, synthetic construct
  REGION 1..7: note = Description of Artificial Sequence: Synthetic peptide
GFPSGTR

SEQ ID NO: 35079 - protein, 7 aa, synthetic construct
  REGION 1..7: note = Description of Artificial Sequence: Synthetic peptide
PTTLKHD

SEQ ID NO: 35080 - protein, 7 aa, synthetic construct
  REGION 1..7: note = Description of Artificial Sequence: Synthetic peptide
SIPSTVR

SEQ ID NO: 35081 - protein, 7 aa, synthetic construct
  REGION 1..7: note = Description of Artificial Sequence: Synthetic peptide
NRLPATK

SEQ ID NO: 35082 - protein, 7 aa, synthetic construct
  REGION 1..7: note = Description of Artificial Sequence: Synthetic peptide
SDNKGSV

SEQ ID NO: 35083 - protein, 7 aa, synthetic construct
  REGION 1..7: note = Description of Artificial Sequence: Synthetic peptide
MATSTVK

SEQ ID NO: 35084 - protein, 7 aa, synthetic construct
  REGION 1..7: note = Description of Artificial Sequence: Synthetic peptide
YNGGNRS

SEQ ID NO: 35085 - protein, 7 aa, synthetic construct
  REGION 1..7: note = Description of Artificial Sequence: Synthetic peptide
GTSLKMS

SEQ ID NO: 35086 - protein, 7 aa, synthetic construct
  REGION 1..7: note = Description of Artificial Sequence: Synthetic peptide
LLNSTGM

SEQ ID NO: 35087 - protein, 7 aa, synthetic construct
  REGION 1..7: note = Description of Artificial Sequence: Synthetic peptide
FMGSPTT

SEQ ID NO: 35088 - protein, 7 aa, synthetic construct
  REGION 1..7: note = Description of Artificial Sequence: Synthetic peptide
SGSEHLR

SEQ ID NO: 35089 - protein, 7 aa, synthetic construct
  REGION 1..7: note = Description of Artificial Sequence: Synthetic peptide
GNTKNGI

SEQ ID NO: 35090 - protein, 7 aa, synthetic construct
  REGION 1..7: note = Description of Artificial Sequence: Synthetic peptide
IRSTSGG

SEQ ID NO: 35091 - protein, 7 aa, synthetic construct
  REGION 1..7: note = Description of Artificial Sequence: Synthetic peptide
SGVVKSS

SEQ ID NO: 35092 - protein, 7 aa, synthetic construct
  REGION 1..7: note = Description of Artificial Sequence: Synthetic peptide
SSAGTYT

SEQ ID NO: 35093 - protein, 7 aa, synthetic construct
  REGION 1..7: note = Description of Artificial Sequence: Synthetic peptide
AQQRAQA

SEQ ID NO: 35094 - protein, 7 aa, synthetic construct
  REGION 1..7: note = Description of Artificial Sequence: Synthetic peptide
SSPTRSL

SEQ ID NO: 35095 - protein, 7 aa, synthetic construct
  REGION 1..7: note = Description of Artificial Sequence: Synthetic peptide
WGNELRR

SEQ ID NO: 35096 - protein, 7 aa, synthetic construct
  REGION 1..7: note = Description of Artificial Sequence: Synthetic peptide
PLSKSAL

SEQ ID NO: 35097 - protein, 7 aa, synthetic construct
  REGION 1..7: note = Description of Artificial Sequence: Synthetic peptide
PISSKIH

SEQ ID NO: 35098 - protein, 7 aa, synthetic construct
  REGION 1..7: note = Description of Artificial Sequence: Synthetic peptide
TGNKGGV

SEQ ID NO: 35099 - protein, 7 aa, synthetic construct
  REGION 1..7: note = Description of Artificial Sequence: Synthetic peptide
RTVNSAN

SEQ ID NO: 35100 - protein, 7 aa, synthetic construct
  REGION 1..7: note = Description of Artificial Sequence: Synthetic peptide
TGIERPM

SEQ ID NO: 35101 - protein, 7 aa, synthetic construct
  REGION 1..7: note = Description of Artificial Sequence: Synthetic peptide
QLSGARS

SEQ ID NO: 35102 - protein, 7 aa, synthetic construct
  REGION 1..7: note = Description of Artificial Sequence: Synthetic peptide
RSPSTNP

SEQ ID NO: 35103 - protein, 7 aa, synthetic construct
  REGION 1..7: note = Description of Artificial Sequence: Synthetic peptide
HDRGQNG

SEQ ID NO: 35104 - protein, 7 aa, synthetic construct
  REGION 1..7: note = Description of Artificial Sequence: Synthetic peptide
VSNSPSR

SEQ ID NO: 35105 - protein, 7 aa, synthetic construct
  REGION 1..7: note = Description of Artificial Sequence: Synthetic peptide
HSSRPLE

SEQ ID NO: 35106 - protein, 7 aa, synthetic construct
  REGION 1..7: note = Description of Artificial Sequence: Synthetic peptide
RKPGSMM

SEQ ID NO: 35107 - protein, 7 aa, synthetic construct
  REGION 1..7: note = Description of Artificial Sequence: Synthetic peptide
NSVGHSR

SEQ ID NO: 35108 - protein, 7 aa, synthetic construct
  REGION 1..7: note = Description of Artificial Sequence: Synthetic peptide
RQTDKLS

SEQ ID NO: 35109 - protein, 7 aa, synthetic construct
  REGION 1..7: note = Description of Artificial Sequence: Synthetic peptide
APLQSNL

SEQ ID NO: 35110 - protein, 7 aa, synthetic construct
  REGION 1..7: note = Description of Artificial Sequence: Synthetic peptide
ARGKPAL

SEQ ID NO: 35111 - protein, 7 aa, synthetic construct
  REGION 1..7: note = Description of Artificial Sequence: Synthetic peptide
PGRPQTD

SEQ ID NO: 35112 - protein, 7 aa, synthetic construct
  REGION 1..7: note = Description of Artificial Sequence: Synthetic peptide
TRQGMGS

SEQ ID NO: 35113 - protein, 7 aa, synthetic construct
  REGION 1..7: note = Description of Artificial Sequence: Synthetic peptide
GAERTVL

SEQ ID NO: 35114 - protein, 7 aa, synthetic construct
  REGION 1..7: note = Description of Artificial Sequence: Synthetic peptide
MGQVGVR

SEQ ID NO: 35115 - protein, 7 aa, synthetic construct
  REGION 1..7: note = Description of Artificial Sequence: Synthetic peptide
NNGRPIA

SEQ ID NO: 35116 - protein, 7 aa, synthetic construct
  REGION 1..7: note = Description of Artificial Sequence: Synthetic peptide
YRNVNSS

SEQ ID NO: 35117 - protein, 7 aa, synthetic construct
  REGION 1..7: note = Description of Artificial Sequence: Synthetic peptide
NGSGQHQ

SEQ ID NO: 35118 - protein, 7 aa, synthetic construct
  REGION 1..7: note = Description of Artificial Sequence: Synthetic peptide
SIPISHV

SEQ ID NO: 35119 - protein, 7 aa, synthetic construct
  REGION 1..7: note = Description of Artificial Sequence: Synthetic peptide
SNGQGPA

SEQ ID NO: 35120 - protein, 7 aa, synthetic construct
  REGION 1..7: note = Description of Artificial Sequence: Synthetic peptide
GMHSVAK

SEQ ID NO: 35121 - protein, 7 aa, synthetic construct
  REGION 1..7: note = Description of Artificial Sequence: Synthetic peptide
GASTPRL

SEQ ID NO: 35122 - protein, 7 aa, synthetic construct
  REGION 1..7: note = Description of Artificial Sequence: Synthetic peptide
GLKGSFP

SEQ ID NO: 35123 - protein, 7 aa, synthetic construct
  REGION 1..7: note = Description of Artificial Sequence: Synthetic peptide
SNPSGFS

SEQ ID NO: 35124 - protein, 7 aa, synthetic construct
  REGION 1..7: note = Description of Artificial Sequence: Synthetic peptide
STVGHMT

SEQ ID NO: 35125 - protein, 7 aa, synthetic construct
  REGION 1..7: note = Description of Artificial Sequence: Synthetic peptide
GPSSPRL

SEQ ID NO: 35126 - protein, 7 aa, synthetic construct
  REGION 1..7: note = Description of Artificial Sequence: Synthetic peptide
GQAVNTA

SEQ ID NO: 35127 - protein, 7 aa, synthetic construct
  REGION 1..7: note = Description of Artificial Sequence: Synthetic peptide
GASVNQG

SEQ ID NO: 35128 - protein, 7 aa, synthetic construct
  REGION 1..7: note = Description of Artificial Sequence: Synthetic peptide
TTMSKPS

SEQ ID NO: 35129 - protein, 7 aa, synthetic construct
  REGION 1..7: note = Description of Artificial Sequence: Synthetic peptide
TSSARVT

SEQ ID NO: 35130 - protein, 7 aa, synthetic construct
  REGION 1..7: note = Description of Artificial Sequence: Synthetic peptide
GDKNHGS

SEQ ID NO: 35131 - protein, 7 aa, synthetic construct
  REGION 1..7: note = Description of Artificial Sequence: Synthetic peptide
PTLGTTK

SEQ ID NO: 35132 - protein, 7 aa, synthetic construct
  REGION 1..7: note = Description of Artificial Sequence: Synthetic peptide
HMTHTTA

SEQ ID NO: 35133 - protein, 7 aa, synthetic construct
  REGION 1..7: note = Description of Artificial Sequence: Synthetic peptide
VASSAHV

SEQ ID NO: 35134 - protein, 7 aa, synthetic construct
  REGION 1..7: note = Description of Artificial Sequence: Synthetic peptide
SYPSQLN

SEQ ID NO: 35135 - protein, 7 aa, synthetic construct
  REGION 1..7: note = Description of Artificial Sequence: Synthetic peptide
PTKANVT

SEQ ID NO: 35136 - protein, 7 aa, synthetic construct
  REGION 1..7: note = Description of Artificial Sequence: Synthetic peptide
GRSPTAS

SEQ ID NO: 35137 - protein, 7 aa, synthetic construct
  REGION 1..7: note = Description of Artificial Sequence: Synthetic peptide
ATGRNTA

SEQ ID NO: 35138 - protein, 7 aa, synthetic construct
  REGION 1..7: note = Description of Artificial Sequence: Synthetic peptide
SSGSNRS

SEQ ID NO: 35139 - protein, 7 aa, synthetic construct
  REGION 1..7: note = Description of Artificial Sequence: Synthetic peptide
APTSGPS

SEQ ID NO: 35140 - protein, 7 aa, synthetic construct
  REGION 1..7: note = Description of Artificial Sequence: Synthetic peptide
SPTSASL

SEQ ID NO: 35141 - protein, 7 aa, synthetic construct
  REGION 1..7: note = Description of Artificial Sequence: Synthetic peptide
VPSSRSN

SEQ ID NO: 35142 - protein, 7 aa, synthetic construct
  REGION 1..7: note = Description of Artificial Sequence: Synthetic peptide
TSTQKGQ

SEQ ID NO: 35143 - protein, 7 aa, synthetic construct
  REGION 1..7: note = Description of Artificial Sequence: Synthetic peptide
NQINAPR

SEQ ID NO: 35144 - protein, 7 aa, synthetic construct
  REGION 1..7: note = Description of Artificial Sequence: Synthetic peptide
SATGSRL

SEQ ID NO: 35145 - protein, 7 aa, synthetic construct
  REGION 1..7: note = Description of Artificial Sequence: Synthetic peptide
VSYARTE

SEQ ID NO: 35146 - protein, 7 aa, synthetic construct
  REGION 1..7: note = Description of Artificial Sequence: Synthetic peptide
GLDHLRT

SEQ ID NO: 35147 - protein, 7 aa, synthetic construct
  REGION 1..7: note = Description of Artificial Sequence: Synthetic peptide
LPHTSQS

SEQ ID NO: 35148 - protein, 7 aa, synthetic construct
  REGION 1..7: note = Description of Artificial Sequence: Synthetic peptide
SPNKTSL

SEQ ID NO: 35149 - protein, 7 aa, synthetic construct
  REGION 1..7: note = Description of Artificial Sequence: Synthetic peptide
GLATLSG

SEQ ID NO: 35150 - protein, 7 aa, synthetic construct
  REGION 1..7: note = Description of Artificial Sequence: Synthetic peptide
SYGKESS

SEQ ID NO: 35151 - protein, 7 aa, synthetic construct
  REGION 1..7: note = Description of Artificial Sequence: Synthetic peptide
QGRANGS

SEQ ID NO: 35152 - protein, 7 aa, synthetic construct
  REGION 1..7: note = Description of Artificial Sequence: Synthetic peptide
PGGTTKG

SEQ ID NO: 35153 - protein, 7 aa, synthetic construct
  REGION 1..7: note = Description of Artificial Sequence: Synthetic peptide
SPMRSQV

SEQ ID NO: 35154 - protein, 7 aa, synthetic construct
  REGION 1..7: note = Description of Artificial Sequence: Synthetic peptide
ALGGKHV

SEQ ID NO: 35155 - protein, 7 aa, synthetic construct
  REGION 1..7: note = Description of Artificial Sequence: Synthetic peptide
FANTANR

SEQ ID NO: 35156 - protein, 7 aa, synthetic construct
  REGION 1..7: note = Description of Artificial Sequence: Synthetic peptide
FGDHTRT

SEQ ID NO: 35157 - protein, 7 aa, synthetic construct
  REGION 1..7: note = Description of Artificial Sequence: Synthetic peptide
NVVGTGA

SEQ ID NO: 35158 - protein, 7 aa, synthetic construct
  REGION 1..7: note = Description of Artificial Sequence: Synthetic peptide
SRSPGTS

SEQ ID NO: 35159 - protein, 7 aa, synthetic construct
  REGION 1..7: note = Description of Artificial Sequence: Synthetic peptide
PVPYRAD

SEQ ID NO: 35160 - protein, 7 aa, synthetic construct
  REGION 1..7: note = Description of Artificial Sequence: Synthetic peptide
PTKGANA

SEQ ID NO: 35161 - protein, 7 aa, synthetic construct
  REGION 1..7: note = Description of Artificial Sequence: Synthetic peptide
TTNTVSR

SEQ ID NO: 35162 - protein, 7 aa, synthetic construct
  REGION 1..7: note = Description of Artificial Sequence: Synthetic peptide
NGSARMT

SEQ ID NO: 35163 - protein, 7 aa, synthetic construct
  REGION 1..7: note = Description of Artificial Sequence: Synthetic peptide
QNSKGYV

SEQ ID NO: 35164 - protein, 7 aa, synthetic construct
  REGION 1..7: note = Description of Artificial Sequence: Synthetic peptide
SGGTPGR

SEQ ID NO: 35165 - protein, 7 aa, synthetic construct
  REGION 1..7: note = Description of Artificial Sequence: Synthetic peptide
NSSGHYQ

SEQ ID NO: 35166 - protein, 7 aa, synthetic construct
  REGION 1..7: note = Description of Artificial Sequence: Synthetic peptide
NVPSISR

SEQ ID NO: 35167 - protein, 7 aa, synthetic construct
  REGION 1..7: note = Description of Artificial Sequence: Synthetic peptide
GLAGSLQ

SEQ ID NO: 35168 - protein, 7 aa, synthetic construct
  REGION 1..7: note = Description of Artificial Sequence: Synthetic peptide
HQSSSSS

SEQ ID NO: 35169 - protein, 7 aa, synthetic construct
  REGION 1..7: note = Description of Artificial Sequence: Synthetic peptide
DRAGKQS

SEQ ID NO: 35170 - protein, 7 aa, synthetic construct
  REGION 1..7: note = Description of Artificial Sequence: Synthetic peptide
NALPVTQ

SEQ ID NO: 35171 - protein, 7 aa, synthetic construct
  REGION 1..7: note = Description of Artificial Sequence: Synthetic peptide
EVHAKNN

SEQ ID NO: 35172 - protein, 7 aa, synthetic construct
  REGION 1..7: note = Description of Artificial Sequence: Synthetic peptide
GTSGGIV

SEQ ID NO: 35173 - protein, 7 aa, synthetic construct
  REGION 1..7: note = Description of Artificial Sequence: Synthetic peptide
WGGSADR

SEQ ID NO: 35174 - protein, 7 aa, synthetic construct
  REGION 1..7: note = Description of Artificial Sequence: Synthetic peptide
NQSAKST

SEQ ID NO: 35175 - protein, 7 aa, synthetic construct
  REGION 1..7: note = Description of Artificial Sequence: Synthetic peptide
ASSSRPS

SEQ ID NO: 35176 - protein, 7 aa, synthetic construct
  REGION 1..7: note = Description of Artificial Sequence: Synthetic peptide
DRLDHSR

SEQ ID NO: 35177 - protein, 7 aa, synthetic construct
  REGION 1..7: note = Description of Artificial Sequence: Synthetic peptide
SIPTSAR

SEQ ID NO: 35178 - protein, 7 aa, synthetic construct
  REGION 1..7: note = Description of Artificial Sequence: Synthetic peptide
TRNGQGD

SEQ ID NO: 35179 - protein, 7 aa, synthetic construct
  REGION 1..7: note = Description of Artificial Sequence: Synthetic peptide
PYSRPAQ

SEQ ID NO: 35180 - protein, 7 aa, synthetic construct
  REGION 1..7: note = Description of Artificial Sequence: Synthetic peptide
VGSGRAN

SEQ ID NO: 35181 - protein, 7 aa, synthetic construct
  REGION 1..7: note = Description of Artificial Sequence: Synthetic peptide
NRVGSIS

SEQ ID NO: 35182 - protein, 7 aa, synthetic construct
  REGION 1..7: note = Description of Artificial Sequence: Synthetic peptide
GTNPGTL

SEQ ID NO: 35183 - protein, 7 aa, synthetic construct
  REGION 1..7: note = Description of Artificial Sequence: Synthetic peptide
NGNHGLI

SEQ ID NO: 35184 - protein, 7 aa, synthetic construct
  REGION 1..7: note = Description of Artificial Sequence: Synthetic peptide
PGINTNS

SEQ ID NO: 35185 - protein, 7 aa, synthetic construct
  REGION 1..7: note = Description of Artificial Sequence: Synthetic peptide
RPSSVKD

SEQ ID NO: 35186 - protein, 7 aa, synthetic construct
  REGION 1..7: note = Description of Artificial Sequence: Synthetic peptide
CLGSNNL

SEQ ID NO: 35187 - protein, 7 aa, synthetic construct
  REGION 1..7: note = Description of Artificial Sequence: Synthetic peptide
DPDTRKS

SEQ ID NO: 35188 - protein, 7 aa, synthetic construct
  REGION 1..7: note = Description of Artificial Sequence: Synthetic peptide
QLQPRVA

SEQ ID NO: 35189 - protein, 7 aa, synthetic construct
  REGION 1..7: note = Description of Artificial Sequence: Synthetic peptide
RPASTHT

SEQ ID NO: 35190 - protein, 7 aa, synthetic construct
  REGION 1..7: note = Description of Artificial Sequence: Synthetic peptide
ASSSKSV

SEQ ID NO: 35191 - protein, 7 aa, synthetic construct
  REGION 1..7: note = Description of Artificial Sequence: Synthetic peptide
HTRPNSM

SEQ ID NO: 35192 - protein, 7 aa, synthetic construct
  REGION 1..7: note = Description of Artificial Sequence: Synthetic peptide
NGVPQPK

SEQ ID NO: 35193 - protein, 7 aa, synthetic construct
  REGION 1..7: note = Description of Artificial Sequence: Synthetic peptide
SHASSTA

SEQ ID NO: 35194 - protein, 7 aa, synthetic construct
  REGION 1..7: note = Description of Artificial Sequence: Synthetic peptide
TGERQSS

SEQ ID NO: 35195 - protein, 7 aa, synthetic construct
  REGION 1..7: note = Description of Artificial Sequence: Synthetic peptide
PTHASSL

SEQ ID NO: 35196 - protein, 7 aa, synthetic construct
  REGION 1..7: note = Description of Artificial Sequence: Synthetic peptide
VASSPLR

SEQ ID NO: 35197 - protein, 7 aa, synthetic construct
  REGION 1..7: note = Description of Artificial Sequence: Synthetic peptide
RPGGKDG

SEQ ID NO: 35198 - protein, 7 aa, synthetic construct
  REGION 1..7: note = Description of Artificial Sequence: Synthetic peptide
RDTNRFG

SEQ ID NO: 35199 - protein, 7 aa, synthetic construct
  REGION 1..7: note = Description of Artificial Sequence: Synthetic peptide
APSSQLL

SEQ ID NO: 35200 - protein, 7 aa, synthetic construct
  REGION 1..7: note = Description of Artificial Sequence: Synthetic peptide
VNTNLVG

SEQ ID NO: 35201 - protein, 7 aa, synthetic construct
  REGION 1..7: note = Description of Artificial Sequence: Synthetic peptide
SSPSHMA

SEQ ID NO: 35202 - protein, 7 aa, synthetic construct
  REGION 1..7: note = Description of Artificial Sequence: Synthetic peptide
SHATAAT

SEQ ID NO: 35203 - protein, 7 aa, synthetic construct
  REGION 1..7: note = Description of Artificial Sequence: Synthetic peptide
DAGSRSS

SEQ ID NO: 35204 - protein, 7 aa, synthetic construct
  REGION 1..7: note = Description of Artificial Sequence: Synthetic peptide
HGTTPAR

SEQ ID NO: 35205 - protein, 7 aa, synthetic construct
  REGION 1..7: note = Description of Artificial Sequence: Synthetic peptide
EPLSKQS

SEQ ID NO: 35206 - protein, 7 aa, synthetic construct
  REGION 1..7: note = Description of Artificial Sequence: Synthetic peptide
RHQGTLQ

SEQ ID NO: 35207 - protein, 7 aa, synthetic construct
  REGION 1..7: note = Description of Artificial Sequence: Synthetic peptide
PLTTRPS

SEQ ID NO: 35208 - protein, 7 aa, synthetic construct
  REGION 1..7: note = Description of Artificial Sequence: Synthetic peptide
SSSTHAV

SEQ ID NO: 35209 - protein, 7 aa, synthetic construct
  REGION 1..7: note = Description of Artificial Sequence: Synthetic peptide
QTHAPTS

SEQ ID NO: 35210 - protein, 7 aa, synthetic construct
  REGION 1..7: note = Description of Artificial Sequence: Synthetic peptide
NGTGQNQ

SEQ ID NO: 35211 - protein, 7 aa, synthetic construct
  REGION 1..7: note = Description of Artificial Sequence: Synthetic peptide
SYGHPGA

SEQ ID NO: 35212 - protein, 7 aa, synthetic construct
  REGION 1..7: note = Description of Artificial Sequence: Synthetic peptide
QSGSKPG

SEQ ID NO: 35213 - protein, 7 aa, synthetic construct
  REGION 1..7: note = Description of Artificial Sequence: Synthetic peptide
SFAKSAS

SEQ ID NO: 35214 - protein, 7 aa, synthetic construct
  REGION 1..7: note = Description of Artificial Sequence: Synthetic peptide
RPVGGLA

SEQ ID NO: 35215 - protein, 7 aa, synthetic construct
  REGION 1..7: note = Description of Artificial Sequence: Synthetic peptide
LVSHTHG

SEQ ID NO: 35216 - protein, 7 aa, synthetic construct
  REGION 1..7: note = Description of Artificial Sequence: Synthetic peptide
LTPSSTV

SEQ ID NO: 35217 - protein, 7 aa, synthetic construct
  REGION 1..7: note = Description of Artificial Sequence: Synthetic peptide
SIHSTKA

SEQ ID NO: 35218 - protein, 7 aa, synthetic construct
  REGION 1..7: note = Description of Artificial Sequence: Synthetic peptide
GVINNER

SEQ ID NO: 35219 - protein, 7 aa, synthetic construct
  REGION 1..7: note = Description of Artificial Sequence: Synthetic peptide
DPLRNSN

SEQ ID NO: 35220 - protein, 7 aa, synthetic construct
  REGION 1..7: note = Description of Artificial Sequence: Synthetic peptide
NANQNQM

SEQ ID NO: 35221 - protein, 7 aa, synthetic construct
  REGION 1..7: note = Description of Artificial Sequence: Synthetic peptide
SQVSHSV

SEQ ID NO: 35222 - protein, 7 aa, synthetic construct
  REGION 1..7: note = Description of Artificial Sequence: Synthetic peptide
GHSTVGS

SEQ ID NO: 35223 - protein, 7 aa, synthetic construct
  REGION 1..7: note = Description of Artificial Sequence: Synthetic peptide
RFSDSNT

SEQ ID NO: 35224 - protein, 7 aa, synthetic construct
  REGION 1..7: note = Description of Artificial Sequence: Synthetic peptide
TGTATLR

SEQ ID NO: 35225 - protein, 7 aa, synthetic construct
  REGION 1..7: note = Description of Artificial Sequence: Synthetic peptide
GQGVRAM

SEQ ID NO: 35226 - protein, 7 aa, synthetic construct
  REGION 1..7: note = Description of Artificial Sequence: Synthetic peptide
AGSHKGV

SEQ ID NO: 35227 - protein, 7 aa, synthetic construct
  REGION 1..7: note = Description of Artificial Sequence: Synthetic peptide
SGNSHNG

SEQ ID NO: 35228 - protein, 7 aa, synthetic construct
  REGION 1..7: note = Description of Artificial Sequence: Synthetic peptide
SGATTPR

SEQ ID NO: 35229 - protein, 7 aa, synthetic construct
  REGION 1..7: note = Description of Artificial Sequence: Synthetic peptide
TGMRPPG

SEQ ID NO: 35230 - protein, 7 aa, synthetic construct
  REGION 1..7: note = Description of Artificial Sequence: Synthetic peptide
KQTHSGS

SEQ ID NO: 35231 - protein, 7 aa, synthetic construct
  REGION 1..7: note = Description of Artificial Sequence: Synthetic peptide
QGQTAMR

SEQ ID NO: 35232 - protein, 7 aa, synthetic construct
  REGION 1..7: note = Description of Artificial Sequence: Synthetic peptide
GQVNHTT

SEQ ID NO: 35233 - protein, 7 aa, synthetic construct
  REGION 1..7: note = Description of Artificial Sequence: Synthetic peptide
GNSTRLL

SEQ ID NO: 35234 - protein, 7 aa, synthetic construct
  REGION 1..7: note = Description of Artificial Sequence: Synthetic peptide
HVHDGRT

SEQ ID NO: 35235 - protein, 7 aa, synthetic construct
  REGION 1..7: note = Description of Artificial Sequence: Synthetic peptide
PLGNRPS

SEQ ID NO: 35236 - protein, 7 aa, synthetic construct
  REGION 1..7: note = Description of Artificial Sequence: Synthetic peptide
EPVTSKS

SEQ ID NO: 35237 - protein, 7 aa, synthetic construct
  REGION 1..7: note = Description of Artificial Sequence: Synthetic peptide
HKTTSMA

SEQ ID NO: 35238 - protein, 7 aa, synthetic construct
  REGION 1..7: note = Description of Artificial Sequence: Synthetic peptide
TTAGSRC

SEQ ID NO: 35239 - protein, 7 aa, synthetic construct
  REGION 1..7: note = Description of Artificial Sequence: Synthetic peptide
DIPSRAA

SEQ ID NO: 35240 - protein, 7 aa, synthetic construct
  REGION 1..7: note = Description of Artificial Sequence: Synthetic peptide
REDTKMH

SEQ ID NO: 35241 - protein, 7 aa, synthetic construct
  REGION 1..7: note = Description of Artificial Sequence: Synthetic peptide
RLNDRPG

SEQ ID NO: 35242 - protein, 7 aa, synthetic construct
  REGION 1..7: note = Description of Artificial Sequence: Synthetic peptide
RTGHYQD

SEQ ID NO: 35243 - protein, 7 aa, synthetic construct
  REGION 1..7: note = Description of Artificial Sequence: Synthetic peptide
NCSGQNQ

SEQ ID NO: 35244 - protein, 7 aa, synthetic construct
  REGION 1..7: note = Description of Artificial Sequence: Synthetic peptide
NVSGQNQ

SEQ ID NO: 35245 - protein, 7 aa, synthetic construct
  REGION 1..7: note = Description of Artificial Sequence: Synthetic peptide
SRTNATA

SEQ ID NO: 35246 - protein, 7 aa, synthetic construct
  REGION 1..7: note = Description of Artificial Sequence: Synthetic peptide
SSTNRPT

SEQ ID NO: 35247 - protein, 7 aa, synthetic construct
  REGION 1..7: note = Description of Artificial Sequence: Synthetic peptide
VGLQSPE

SEQ ID NO: 35248 - protein, 7 aa, synthetic construct
  REGION 1..7: note = Description of Artificial Sequence: Synthetic peptide
GIGSAAV

SEQ ID NO: 35249 - protein, 7 aa, synthetic construct
  REGION 1..7: note = Description of Artificial Sequence: Synthetic peptide
SSPSKMA

SEQ ID NO: 35250 - protein, 7 aa, synthetic construct
  REGION 1..7: note = Description of Artificial Sequence: Synthetic peptide
RAETNAI

SEQ ID NO: 35251 - protein, 7 aa, synthetic construct
  REGION 1..7: note = Description of Artificial Sequence: Synthetic peptide
CPGSSAY

SEQ ID NO: 35252 - protein, 7 aa, synthetic construct
  REGION 1..7: note = Description of Artificial Sequence: Synthetic peptide
ENISRSH

SEQ ID NO: 35253 - protein, 7 aa, synthetic construct
  REGION 1..7: note = Description of Artificial Sequence: Synthetic peptide
SSSSHPL

SEQ ID NO: 35254 - protein, 7 aa, synthetic construct
  REGION 1..7: note = Description of Artificial Sequence: Synthetic peptide
EPTHPRG

SEQ ID NO: 35255 - protein, 7 aa, synthetic construct
  REGION 1..7: note = Description of Artificial Sequence: Synthetic peptide
HAHSNVG

SEQ ID NO: 35256 - protein, 7 aa, synthetic construct
  REGION 1..7: note = Description of Artificial Sequence: Synthetic peptide
GNPSPLV

SEQ ID NO: 35257 - protein, 7 aa, synthetic construct
  REGION 1..7: note = Description of Artificial Sequence: Synthetic peptide
QSNTSPT

SEQ ID NO: 35258 - protein, 7 aa, synthetic construct
  REGION 1..7: note = Description of Artificial Sequence: Synthetic peptide
GIQNPTC

SEQ ID NO: 35259 - protein, 7 aa, synthetic construct
  REGION 1..7: note = Description of Artificial Sequence: Synthetic peptide
QSDHRSL

SEQ ID NO: 35260 - protein, 7 aa, synthetic construct
  REGION 1..7: note = Description of Artificial Sequence: Synthetic peptide
QETRGNS

SEQ ID NO: 35261 - protein, 7 aa, synthetic construct
  REGION 1..7: note = Description of Artificial Sequence: Synthetic peptide
SMAPAGL

SEQ ID NO: 35262 - protein, 7 aa, synthetic construct
  REGION 1..7: note = Description of Artificial Sequence: Synthetic peptide
TGTGSFH

SEQ ID NO: 35263 - protein, 7 aa, synthetic construct
  REGION 1..7: note = Description of Artificial Sequence: Synthetic peptide
KSCKGMV

SEQ ID NO: 35264 - protein, 7 aa, synthetic construct
  REGION 1..7: note = Description of Artificial Sequence: Synthetic peptide
GGDNKLT

SEQ ID NO: 35265 - protein, 7 aa, synthetic construct
  REGION 1..7: note = Description of Artificial Sequence: Synthetic peptide
DRADANS

SEQ ID NO: 35266 - protein, 7 aa, synthetic construct
  REGION 1..7: note = Description of Artificial Sequence: Synthetic peptide
APSARPS

SEQ ID NO: 35267 - protein, 7 aa, synthetic construct
  REGION 1..7: note = Description of Artificial Sequence: Synthetic peptide
GYGSKVS

SEQ ID NO: 35268 - protein, 7 aa, synthetic construct
  REGION 1..7: note = Description of Artificial Sequence: Synthetic peptide
SSAKSSL

SEQ ID NO: 35269 - protein, 7 aa, synthetic construct
  REGION 1..7: note = Description of Artificial Sequence: Synthetic peptide
FVSARSG

SEQ ID NO: 35270 - protein, 7 aa, synthetic construct
  REGION 1..7: note = Description of Artificial Sequence: Synthetic peptide
PNGSPLS

SEQ ID NO: 35271 - protein, 7 aa, synthetic construct
  REGION 1..7: note = Description of Artificial Sequence: Synthetic peptide
KNSSGST

SEQ ID NO: 35272 - protein, 7 aa, synthetic construct
  REGION 1..7: note = Description of Artificial Sequence: Synthetic peptide
NMRASTE

SEQ ID NO: 35273 - protein, 7 aa, synthetic construct
  REGION 1..7: note = Description of Artificial Sequence: Synthetic peptide
DGSGQNQ

SEQ ID NO: 35274 - protein, 7 aa, synthetic construct
  REGION 1..7: note = Description of Artificial Sequence: Synthetic peptide
CITKNLA

SEQ ID NO: 35275 - protein, 7 aa, synthetic construct
  REGION 1..7: note = Description of Artificial Sequence: Synthetic peptide
GALNSRG

SEQ ID NO: 35276 - protein, 7 aa, synthetic construct
  REGION 1..7: note = Description of Artificial Sequence: Synthetic peptide
YQVPLAK

SEQ ID NO: 35277 - protein, 7 aa, synthetic construct
  REGION 1..7: note = Description of Artificial Sequence: Synthetic peptide
TPTLSHT

SEQ ID NO: 35278 - protein, 7 aa, synthetic construct
  REGION 1..7: note = Description of Artificial Sequence: Synthetic peptide
NGCGQNQ

SEQ ID NO: 35279 - protein, 7 aa, synthetic construct
  REGION 1..7: note = Description of Artificial Sequence: Synthetic peptide
HITSNHA

SEQ ID NO: 35280 - protein, 7 aa, synthetic construct
  REGION 1..7: note = Description of Artificial Sequence: Synthetic peptide
RGKEERD

SEQ ID NO: 35281 - protein, 7 aa, synthetic construct
  REGION 1..7: note = Description of Artificial Sequence: Synthetic peptide
NGSGENQ

SEQ ID NO: 35282 - protein, 7 aa, synthetic construct
  REGION 1..7: note = Description of Artificial Sequence: Synthetic peptide
PAAMSSV

SEQ ID NO: 35283 - protein, 7 aa, synthetic construct
  REGION 1..7: note = Description of Artificial Sequence: Synthetic peptide
SVGTSGL

SEQ ID NO: 35284 - protein, 7 aa, synthetic construct
  REGION 1..7: note = Description of Artificial Sequence: Synthetic peptide
TQRSQTA

SEQ ID NO: 35285 - protein, 7 aa, synthetic construct
  REGION 1..7: note = Description of Artificial Sequence: Synthetic peptide
NLGQNLS

SEQ ID NO: 35286 - protein, 7 aa, synthetic construct
  REGION 1..7: note = Description of Artificial Sequence: Synthetic peptide
CPSTKSC

SEQ ID NO: 35287 - protein, 7 aa, synthetic construct
  REGION 1..7: note = Description of Artificial Sequence: Synthetic peptide
SPTSPMN

SEQ ID NO: 35288 - protein, 7 aa, synthetic construct
  REGION 1..7: note = Description of Artificial Sequence: Synthetic peptide
NKTMSST

SEQ ID NO: 35289 - protein, 7 aa, synthetic construct
  REGION 1..7: note = Description of Artificial Sequence: Synthetic peptide
SYSSKET

SEQ ID NO: 35290 - protein, 7 aa, synthetic construct
  REGION 1..7: note = Description of Artificial Sequence: Synthetic peptide
PVQHSSN

SEQ ID NO: 35291 - protein, 7 aa, synthetic construct
  REGION 1..7: note = Description of Artificial Sequence: Synthetic peptide
LGIAKIG

SEQ ID NO: 35292 - protein, 7 aa, synthetic construct
  REGION 1..7: note = Description of Artificial Sequence: Synthetic peptide
NRSKESA

SEQ ID NO: 35293 - protein, 7 aa, synthetic construct
  REGION 1..7: note = Description of Artificial Sequence: Synthetic peptide
PPHDGQR

SEQ ID NO: 35294 - protein, 7 aa, synthetic construct
  REGION 1..7: note = Description of Artificial Sequence: Synthetic peptide
HGVNKTE

SEQ ID NO: 35295 - protein, 7 aa, synthetic construct
  REGION 1..7: note = Description of Artificial Sequence: Synthetic peptide
DQVSHKL

SEQ ID NO: 35296 - protein, 7 aa, synthetic construct
  REGION 1..7: note = Description of Artificial Sequence: Synthetic peptide
NSANKTP

SEQ ID NO: 35297 - protein, 7 aa, synthetic construct
  REGION 1..7: note = Description of Artificial Sequence: Synthetic peptide
MPHPSSK

SEQ ID NO: 35298 - protein, 7 aa, synthetic construct
  REGION 1..7: note = Description of Artificial Sequence: Synthetic peptide
SHGPQIT

SEQ ID NO: 35299 - protein, 7 aa, synthetic construct
  REGION 1..7: note = Description of Artificial Sequence: Synthetic peptide
EGGTRNC

SEQ ID NO: 35300 - protein, 7 aa, synthetic construct
  REGION 1..7: note = Description of Artificial Sequence: Synthetic peptide
ETRPAIC

SEQ ID NO: 35301 - protein, 7 aa, synthetic construct
  REGION 1..7: note = Description of Artificial Sequence: Synthetic peptide
RPHDNDN

SEQ ID NO: 35302 - protein, 7 aa, synthetic construct
  REGION 1..7: note = Description of Artificial Sequence: Synthetic peptide
RTSEHDR

SEQ ID NO: 35303 - protein, 7 aa, synthetic construct
  REGION 1..7: note = Description of Artificial Sequence: Synthetic peptide
TGSSSSQ

SEQ ID NO: 35304 - protein, 7 aa, synthetic construct
  REGION 1..7: note = Description of Artificial Sequence: Synthetic peptide
FASRPVQ

SEQ ID NO: 35305 - protein, 7 aa, synthetic construct
  REGION 1..7: note = Description of Artificial Sequence: Synthetic peptide
GALHTRD

SEQ ID NO: 35306 - protein, 7 aa, synthetic construct
  REGION 1..7: note = Description of Artificial Sequence: Synthetic peptide
MPSQRDG

SEQ ID NO: 35307 - protein, 7 aa, synthetic construct
  REGION 1..7: note = Description of Artificial Sequence: Synthetic peptide
AMGSSLS

SEQ ID NO: 35308 - protein, 7 aa, synthetic construct
  REGION 1..7: note = Description of Artificial Sequence: Synthetic peptide
AMSASRN

SEQ ID NO: 35309 - protein, 7 aa, synthetic construct
  REGION 1..7: note = Description of Artificial Sequence: Synthetic peptide
VSTTPAL

SEQ ID NO: 35310 - protein, 7 aa, synthetic construct
  REGION 1..7: note = Description of Artificial Sequence: Synthetic peptide
GNTGSYQ

SEQ ID NO: 35311 - protein, 7 aa, synthetic construct
  REGION 1..7: note = Description of Artificial Sequence: Synthetic peptide
NRKHTST

SEQ ID NO: 35312 - protein, 7 aa, synthetic construct
  REGION 1..7: note = Description of Artificial Sequence: Synthetic peptide
GNISTSS

SEQ ID NO: 35313 - protein, 7 aa, synthetic construct
  REGION 1..7: note = Description of Artificial Sequence: Synthetic peptide
SIQSAAA

SEQ ID NO: 35314 - protein, 7 aa, synthetic construct
  REGION 1..7: note = Description of Artificial Sequence: Synthetic peptide
NDSGQNQ

SEQ ID NO: 35315 - protein, 7 aa, synthetic construct
  REGION 1..7: note = Description of Artificial Sequence: Synthetic peptide
NTSTNGI

SEQ ID NO: 35316 - protein, 7 aa, synthetic construct
  REGION 1..7: note = Description of Artificial Sequence: Synthetic peptide
MSTHSSG

SEQ ID NO: 35317 - protein, 7 aa, synthetic construct
  REGION 1..7: note = Description of Artificial Sequence: Synthetic peptide
NGSGQKQ

SEQ ID NO: 35318 - protein, 7 aa, synthetic construct
  REGION 1..7: note = Description of Artificial Sequence: Synthetic peptide
SFTGNTV

SEQ ID NO: 35319 - protein, 7 aa, synthetic construct
  REGION 1..7: note = Description of Artificial Sequence: Synthetic peptide
ELAAPSK

SEQ ID NO: 35320 - protein, 7 aa, synthetic construct
  REGION 1..7: note = Description of Artificial Sequence: Synthetic peptide
FSNNGSH

SEQ ID NO: 35321 - protein, 7 aa, synthetic construct
  REGION 1..7: note = Description of Artificial Sequence: Synthetic peptide
LTAVSPK

SEQ ID NO: 35322 - protein, 7 aa, synthetic construct
  REGION 1..7: note = Description of Artificial Sequence: Synthetic peptide
NASTANM

SEQ ID NO: 35323 - protein, 7 aa, synthetic construct
  REGION 1..7: note = Description of Artificial Sequence: Synthetic peptide
HTDTSAV

SEQ ID NO: 35324 - protein, 7 aa, synthetic construct
  REGION 1..7: note = Description of Artificial Sequence: Synthetic peptide
SGTQTWS

SEQ ID NO: 35325 - protein, 7 aa, synthetic construct
  REGION 1..7: note = Description of Artificial Sequence: Synthetic peptide
NGSGQNE

SEQ ID NO: 35326 - protein, 7 aa, synthetic construct
  REGION 1..7: note = Description of Artificial Sequence: Synthetic peptide
SYPQQSA

SEQ ID NO: 35327 - protein, 7 aa, synthetic construct
  REGION 1..7: note = Description of Artificial Sequence: Synthetic peptide
PMGTGRG

SEQ ID NO: 35328 - protein, 7 aa, synthetic construct
  REGION 1..7: note = Description of Artificial Sequence: Synthetic peptide
GGVPSRL

SEQ ID NO: 35329 - protein, 7 aa, synthetic construct
  REGION 1..7: note = Description of Artificial Sequence: Synthetic peptide
GVNTGTQ

SEQ ID NO: 35330 - protein, 7 aa, synthetic construct
  REGION 1..7: note = Description of Artificial Sequence: Synthetic peptide
LNQHSSL

SEQ ID NO: 35331 - protein, 7 aa, synthetic construct
  REGION 1..7: note = Description of Artificial Sequence: Synthetic peptide
SRESSPL

SEQ ID NO: 35332 - protein, 7 aa, synthetic construct
  REGION 1..7: note = Description of Artificial Sequence: Synthetic peptide
NGSGQNP

SEQ ID NO: 35333 - protein, 7 aa, synthetic construct
  REGION 1..7: note = Description of Artificial Sequence: Synthetic peptide
SDVRLSG

SEQ ID NO: 35334 - protein, 7 aa, synthetic construct
  REGION 1..7: note = Description of Artificial Sequence: Synthetic peptide
QGSSKTT

SEQ ID NO: 35335 - protein, 7 aa, synthetic construct
  REGION 1..7: note = Description of Artificial Sequence: Synthetic peptide
NGSGQNK

SEQ ID NO: 35336 - protein, 7 aa, synthetic construct
  REGION 1..7: note = Description of Artificial Sequence: Synthetic peptide
TSSTTSL

SEQ ID NO: 35337 - protein, 7 aa, synthetic construct
  REGION 1..7: note = Description of Artificial Sequence: Synthetic peptide
GTQKQTS

SEQ ID NO: 35338 - protein, 7 aa, synthetic construct
  REGION 1..7: note = Description of Artificial Sequence: Synthetic peptide
NGSVQNQ

SEQ ID NO: 35339 - protein, 7 aa, synthetic construct
  REGION 1..7: note = Description of Artificial Sequence: Synthetic peptide
TSRQSFV

SEQ ID NO: 35340 - protein, 7 aa, synthetic construct
  REGION 1..7: note = Description of Artificial Sequence: Synthetic peptide
NWSGQNQ

SEQ ID NO: 35341 - protein, 7 aa, synthetic construct
  REGION 1..7: note = Description of Artificial Sequence: Synthetic peptide
NGSGQSQ

SEQ ID NO: 35342 - protein, 7 aa, synthetic construct
  REGION 1..7: note = Description of Artificial Sequence: Synthetic peptide
MTTQLNS

SEQ ID NO: 35343 - protein, 7 aa, synthetic construct
  REGION 1..7: note = Description of Artificial Sequence: Synthetic peptide
PIHPSSG

SEQ ID NO: 35344 - protein, 7 aa, synthetic construct
  REGION 1..7: note = Description of Artificial Sequence: Synthetic peptide
ESPNLHS

SEQ ID NO: 35345 - protein, 7 aa, synthetic construct
  REGION 1..7: note = Description of Artificial Sequence: Synthetic peptide
FSQHSSN

SEQ ID NO: 35346 - protein, 7 aa, synthetic construct
  REGION 1..7: note = Description of Artificial Sequence: Synthetic peptide
VHYSTTN

SEQ ID NO: 35347 - protein, 7 aa, synthetic construct
  REGION 1..7: note = Description of Artificial Sequence: Synthetic peptide
CATSSRK

SEQ ID NO: 35348 - protein, 7 aa, synthetic construct
  REGION 1..7: note = Description of Artificial Sequence: Synthetic peptide
PVREGSI

SEQ ID NO: 35349 - protein, 7 aa, synthetic construct
  REGION 1..7: note = Description of Artificial Sequence: Synthetic peptide
NGSGPNQ

SEQ ID NO: 35350 - protein, 7 aa, synthetic construct
  REGION 1..7: note = Description of Artificial Sequence: Synthetic peptide
SSPANMA

SEQ ID NO: 35351 - protein, 7 aa, synthetic construct
  REGION 1..7: note = Description of Artificial Sequence: Synthetic peptide
EGLNTSR

SEQ ID NO: 35352 - protein, 7 aa, synthetic construct
  REGION 1..7: note = Description of Artificial Sequence: Synthetic peptide
QVTVRPV

SEQ ID NO: 35353 - protein, 7 aa, synthetic construct
  REGION 1..7: note = Description of Artificial Sequence: Synthetic peptide
YGSESNK

SEQ ID NO: 35354 - protein, 7 aa, synthetic construct
  REGION 1..7: note = Description of Artificial Sequence: Synthetic peptide
NSEARLS

SEQ ID NO: 35355 - protein, 7 aa, synthetic construct
  REGION 1..7: note = Description of Artificial Sequence: Synthetic peptide
GPSQHVI

SEQ ID NO: 35356 - protein, 7 aa, synthetic construct
  REGION 1..7: note = Description of Artificial Sequence: Synthetic peptide
YGSGQNQ

SEQ ID NO: 35357 - protein, 7 aa, synthetic construct
  REGION 1..7: note = Description of Artificial Sequence: Synthetic peptide
TQGASNL

SEQ ID NO: 35358 - protein, 7 aa, synthetic construct
  REGION 1..7: note = Description of Artificial Sequence: Synthetic peptide
MTLSGQT

SEQ ID NO: 35359 - protein, 7 aa, synthetic construct
  REGION 1..7: note = Description of Artificial Sequence: Synthetic peptide
DRHNTTS

SEQ ID NO: 35360 - protein, 7 aa, synthetic construct
  REGION 1..7: note = Description of Artificial Sequence: Synthetic peptide
IIGSRHT

SEQ ID NO: 35361 - protein, 7 aa, synthetic construct
  REGION 1..7: note = Description of Artificial Sequence: Synthetic peptide
RDRSVAS

SEQ ID NO: 35362 - protein, 7 aa, synthetic construct
  REGION 1..7: note = Description of Artificial Sequence: Synthetic peptide
AGNMPHS

SEQ ID NO: 35363 - protein, 7 aa, synthetic construct
  REGION 1..7: note = Description of Artificial Sequence: Synthetic peptide
GGSATAV

SEQ ID NO: 35364 - protein, 7 aa, synthetic construct
  REGION 1..7: note = Description of Artificial Sequence: Synthetic peptide
TSSGGLT

SEQ ID NO: 35365 - protein, 7 aa, synthetic construct
  REGION 1..7: note = Description of Artificial Sequence: Synthetic peptide
GTSPSTM

SEQ ID NO: 35366 - protein, 7 aa, synthetic construct
  REGION 1..7: note = Description of Artificial Sequence: Synthetic peptide
ANGTKSS

SEQ ID NO: 35367 - protein, 7 aa, synthetic construct
  REGION 1..7: note = Description of Artificial Sequence: Synthetic peptide
SSLKPTL

SEQ ID NO: 35368 - protein, 7 aa, synthetic construct
  REGION 1..7: note = Description of Artificial Sequence: Synthetic peptide
VGSDSST

SEQ ID NO: 35369 - protein, 7 aa, synthetic construct
  REGION 1..7: note = Description of Artificial Sequence: Synthetic peptide
NGYGQNQ

SEQ ID NO: 35370 - protein, 7 aa, synthetic construct
  REGION 1..7: note = Description of Artificial Sequence: Synthetic peptide
RDATSIG

SEQ ID NO: 35371 - protein, 7 aa, synthetic construct
  REGION 1..7: note = Description of Artificial Sequence: Synthetic peptide
TGSGQNQ

SEQ ID NO: 35372 - protein, 7 aa, synthetic construct
  REGION 1..7: note = Description of Artificial Sequence: Synthetic peptide
NGFGQNQ

SEQ ID NO: 35373 - protein, 7 aa, synthetic construct
  REGION 1..7: note = Description of Artificial Sequence: Synthetic peptide
TQSSTRS

SEQ ID NO: 35374 - protein, 7 aa, synthetic construct
  REGION 1..7: note = Description of Artificial Sequence: Synthetic peptide
NTTGHAG

SEQ ID NO: 35375 - protein, 7 aa, synthetic construct
  REGION 1..7: note = Description of Artificial Sequence: Synthetic peptide
LGTSTIL

SEQ ID NO: 35376 - protein, 7 aa, synthetic construct
  REGION 1..7: note = Description of Artificial Sequence: Synthetic peptide
PSTPTIK

SEQ ID NO: 35377 - protein, 7 aa, synthetic construct
  REGION 1..7: note = Description of Artificial Sequence: Synthetic peptide
HLAYDNN

SEQ ID NO: 35378 - protein, 7 aa, synthetic construct
  REGION 1..7: note = Description of Artificial Sequence: Synthetic peptide
ENDHNVR

SEQ ID NO: 35379 - protein, 7 aa, synthetic construct
  REGION 1..7: note = Description of Artificial Sequence: Synthetic peptide
ATGSPSK

SEQ ID NO: 35380 - protein, 7 aa, synthetic construct
  REGION 1..7: note = Description of Artificial Sequence: Synthetic peptide
NSSHNSP

SEQ ID NO: 35381 - protein, 7 aa, synthetic construct
  REGION 1..7: note = Description of Artificial Sequence: Synthetic peptide
GWNHENV

SEQ ID NO: 35382 - protein, 7 aa, synthetic construct
  REGION 1..7: note = Description of Artificial Sequence: Synthetic peptide
VSSPRMS

SEQ ID NO: 35383 - protein, 7 aa, synthetic construct
  REGION 1..7: note = Description of Artificial Sequence: Synthetic peptide
NGAGQNQ

SEQ ID NO: 35384 - protein, 7 aa, synthetic construct
  REGION 1..7: note = Description of Artificial Sequence: Synthetic peptide
PSHNPTN

SEQ ID NO: 35385 - protein, 7 aa, synthetic construct
  REGION 1..7: note = Description of Artificial Sequence: Synthetic peptide
GSHHPSG

SEQ ID NO: 35386 - protein, 7 aa, synthetic construct
  REGION 1..7: note = Description of Artificial Sequence: Synthetic peptide
NGRGSDV

SEQ ID NO: 35387 - protein, 7 aa, synthetic construct
  REGION 1..7: note = Description of Artificial Sequence: Synthetic peptide
AGSNSQG

SEQ ID NO: 35388 - protein, 7 aa, synthetic construct
  REGION 1..7: note = Description of Artificial Sequence: Synthetic peptide
NGSGQIQ

SEQ ID NO: 35389 - protein, 7 aa, synthetic construct
  REGION 1..7: note = Description of Artificial Sequence: Synthetic peptide
GGLDHHA

SEQ ID NO: 35390 - protein, 7 aa, synthetic construct
  REGION 1..7: note = Description of Artificial Sequence: Synthetic peptide
FSSKTSP

SEQ ID NO: 35391 - protein, 7 aa, synthetic construct
  REGION 1..7: note = Description of Artificial Sequence: Synthetic peptide
NGSRQNQ

SEQ ID NO: 35392 - protein, 7 aa, synthetic construct
  REGION 1..7: note = Description of Artificial Sequence: Synthetic peptide
TIKSVTN

SEQ ID NO: 35393 - protein, 7 aa, synthetic construct
  REGION 1..7: note = Description of Artificial Sequence: Synthetic peptide
HSTPSTM

SEQ ID NO: 35394 - protein, 7 aa, synthetic construct
  REGION 1..7: note = Description of Artificial Sequence: Synthetic peptide
NSSGQNQ

SEQ ID NO: 35395 - protein, 7 aa, synthetic construct
  REGION 1..7: note = Description of Artificial Sequence: Synthetic peptide
NGSGTNQ

SEQ ID NO: 35396 - protein, 7 aa, synthetic construct
  REGION 1..7: note = Description of Artificial Sequence: Synthetic peptide
KNHTAVQ

SEQ ID NO: 35397 - protein, 7 aa, synthetic construct
  REGION 1..7: note = Description of Artificial Sequence: Synthetic peptide
HHDASPN

SEQ ID NO: 35398 - protein, 7 aa, synthetic construct
  REGION 1..7: note = Description of Artificial Sequence: Synthetic peptide
GGSNSRL

SEQ ID NO: 35399 - protein, 7 aa, synthetic construct
  REGION 1..7: note = Description of Artificial Sequence: Synthetic peptide
HREARLL

SEQ ID NO: 35400 - protein, 7 aa, synthetic construct
  REGION 1..7: note = Description of Artificial Sequence: Synthetic peptide
SASGNRC

SEQ ID NO: 35401 - protein, 7 aa, synthetic construct
  REGION 1..7: note = Description of Artificial Sequence: Synthetic peptide
GPNQSGR

SEQ ID NO: 35402 - protein, 7 aa, synthetic construct
  REGION 1..7: note = Description of Artificial Sequence: Synthetic peptide
DATKNHS

SEQ ID NO: 35403 - protein, 7 aa, synthetic construct
  REGION 1..7: note = Description of Artificial Sequence: Synthetic peptide
DSTLGQS

SEQ ID NO: 35404 - protein, 7 aa, synthetic construct
  REGION 1..7: note = Description of Artificial Sequence: Synthetic peptide
GTGTPRT

SEQ ID NO: 35405 - protein, 7 aa, synthetic construct
  REGION 1..7: note = Description of Artificial Sequence: Synthetic peptide
NGSGHNQ

SEQ ID NO: 35406 - protein, 7 aa, synthetic construct
  REGION 1..7: note = Description of Artificial Sequence: Synthetic peptide
NGSGQNR

SEQ ID NO: 35407 - protein, 7 aa, synthetic construct
  REGION 1..7: note = Description of Artificial Sequence: Synthetic peptide
NSSSSNH

SEQ ID NO: 35408 - protein, 7 aa, synthetic construct
  REGION 1..7: note = Description of Artificial Sequence: Synthetic peptide
NGSGQYQ

SEQ ID NO: 35409 - protein, 7 aa, synthetic construct
  REGION 1..7: note = Description of Artificial Sequence: Synthetic peptide
ERSTRMQ

SEQ ID NO: 35410 - protein, 7 aa, synthetic construct
  REGION 1..7: note = Description of Artificial Sequence: Synthetic peptide
QLPALQG

SEQ ID NO: 35411 - protein, 7 aa, synthetic construct
  REGION 1..7: note = Description of Artificial Sequence: Synthetic peptide
MAHDGYR

SEQ ID NO: 35412 - protein, 7 aa, synthetic construct
  REGION 1..7: note = Description of Artificial Sequence: Synthetic peptide
YSKQNLT

SEQ ID NO: 35413 - protein, 7 aa, synthetic construct
  REGION 1..7: note = Description of Artificial Sequence: Synthetic peptide
SASNVSR

SEQ ID NO: 35414 - protein, 7 aa, synthetic construct
  REGION 1..7: note = Description of Artificial Sequence: Synthetic peptide
NGSEQNQ

SEQ ID NO: 35415 - protein, 7 aa, synthetic construct
  REGION 1..7: note = Description of Artificial Sequence: Synthetic peptide
ATVGHMT

SEQ ID NO: 35416 - protein, 7 aa, synthetic construct
  REGION 1..7: note = Description of Artificial Sequence: Synthetic peptide
STSSSAS

SEQ ID NO: 35417 - protein, 7 aa, synthetic construct
  REGION 1..7: note = Description of Artificial Sequence: Synthetic peptide
ASRDSSV

SEQ ID NO: 35418 - protein, 7 aa, synthetic construct
  REGION 1..7: note = Description of Artificial Sequence: Synthetic peptide
SEHQPLS

SEQ ID NO: 35419 - protein, 7 aa, synthetic construct
  REGION 1..7: note = Description of Artificial Sequence: Synthetic peptide
IQQGSRT

SEQ ID NO: 35420 - protein, 7 aa, synthetic construct
  REGION 1..7: note = Description of Artificial Sequence: Synthetic peptide
MLPSVSG

SEQ ID NO: 35421 - protein, 7 aa, synthetic construct
  REGION 1..7: note = Description of Artificial Sequence: Synthetic peptide
SSTSSPY

SEQ ID NO: 35422 - protein, 7 aa, synthetic construct
  REGION 1..7: note = Description of Artificial Sequence: Synthetic peptide
MRQDTSK

SEQ ID NO: 35423 - protein, 7 aa, synthetic construct
  REGION 1..7: note = Description of Artificial Sequence: Synthetic peptide
SNVSKPQ

SEQ ID NO: 35424 - protein, 7 aa, synthetic construct
  REGION 1..7: note = Description of Artificial Sequence: Synthetic peptide
TRGSPLM

SEQ ID NO: 35425 - protein, 7 aa, synthetic construct
  REGION 1..7: note = Description of Artificial Sequence: Synthetic peptide
HPTSPAM

SEQ ID NO: 35426 - protein, 7 aa, synthetic construct
  REGION 1..7: note = Description of Artificial Sequence: Synthetic peptide
NGSGLNQ

SEQ ID NO: 35427 - protein, 7 aa, synthetic construct
  REGION 1..7: note = Description of Artificial Sequence: Synthetic peptide
KRDAHTA

SEQ ID NO: 35428 - protein, 7 aa, synthetic construct
  REGION 1..7: note = Description of Artificial Sequence: Synthetic peptide
LLGDTKP

SEQ ID NO: 35429 - protein, 7 aa, synthetic construct
  REGION 1..7: note = Description of Artificial Sequence: Synthetic peptide
YSRVQSE

SEQ ID NO: 35430 - protein, 7 aa, synthetic construct
  REGION 1..7: note = Description of Artificial Sequence: Synthetic peptide
DVLSKRQ

SEQ ID NO: 35431 - protein, 7 aa, synthetic construct
  REGION 1..7: note = Description of Artificial Sequence: Synthetic peptide
RDGTPPT

SEQ ID NO: 35432 - protein, 7 aa, synthetic construct
  REGION 1..7: note = Description of Artificial Sequence: Synthetic peptide
SHPSSFG

SEQ ID NO: 35433 - protein, 7 aa, synthetic construct
  REGION 1..7: note = Description of Artificial Sequence: Synthetic peptide
SGASSNS

SEQ ID NO: 35434 - protein, 7 aa, synthetic construct
  REGION 1..7: note = Description of Artificial Sequence: Synthetic peptide
SASRSAY

SEQ ID NO: 35435 - protein, 7 aa, synthetic construct
  REGION 1..7: note = Description of Artificial Sequence: Synthetic peptide
STSNGTL

SEQ ID NO: 35436 - protein, 7 aa, synthetic construct
  REGION 1..7: note = Description of Artificial Sequence: Synthetic peptide
SHTPKLV

SEQ ID NO: 35437 - protein, 7 aa, synthetic construct
  REGION 1..7: note = Description of Artificial Sequence: Synthetic peptide
GQVSQMK

SEQ ID NO: 35438 - protein, 7 aa, synthetic construct
  REGION 1..7: note = Description of Artificial Sequence: Synthetic peptide
SSHSDTR

SEQ ID NO: 35439 - protein, 7 aa, synthetic construct
  REGION 1..7: note = Description of Artificial Sequence: Synthetic peptide
QSVKTPE

SEQ ID NO: 35440 - protein, 7 aa, synthetic construct
  REGION 1..7: note = Description of Artificial Sequence: Synthetic peptide
DRNHAAE

SEQ ID NO: 35441 - protein, 7 aa, synthetic construct
  REGION 1..7: note = Description of Artificial Sequence: Synthetic peptide
PLNTHQS

SEQ ID NO: 35442 - protein, 7 aa, synthetic construct
  REGION 1..7: note = Description of Artificial Sequence: Synthetic peptide
SSSAHRL

SEQ ID NO: 35443 - protein, 7 aa, synthetic construct
  REGION 1..7: note = Description of Artificial Sequence: Synthetic peptide
NDRGQNG

SEQ ID NO: 35444 - protein, 7 aa, synthetic construct
  REGION 1..7: note = Description of Artificial Sequence: Synthetic peptide
GQTMSTM

SEQ ID NO: 35445 - protein, 7 aa, synthetic construct
  REGION 1..7: note = Description of Artificial Sequence: Synthetic peptide
TRHMQLS

SEQ ID NO: 35446 - protein, 7 aa, synthetic construct
  REGION 1..7: note = Description of Artificial Sequence: Synthetic peptide
TGSEQNQ

SEQ ID NO: 35447 - protein, 7 aa, synthetic construct
  REGION 1..7: note = Description of Artificial Sequence: Synthetic peptide
NGSGHKQ

SEQ ID NO: 35448 - protein, 7 aa, synthetic construct
  REGION 1..7: note = Description of Artificial Sequence: Synthetic peptide
ILGNKSS

SEQ ID NO: 35449 - protein, 7 aa, synthetic construct
  REGION 1..7: note = Description of Artificial Sequence: Synthetic peptide
TGAQSTM

SEQ ID NO: 35450 - protein, 7 aa, synthetic construct
  REGION 1..7: note = Description of Artificial Sequence: Synthetic peptide
VPVTGLS

SEQ ID NO: 35451 - protein, 7 aa, synthetic construct
  REGION 1..7: note = Description of Artificial Sequence: Synthetic peptide
VQGSLPS

SEQ ID NO: 35452 - protein, 7 aa, synthetic construct
  REGION 1..7: note = Description of Artificial Sequence: Synthetic peptide
SDSRSGM

SEQ ID NO: 35453 - protein, 7 aa, synthetic construct
  REGION 1..7: note = Description of Artificial Sequence: Synthetic peptide
HERGQNG

SEQ ID NO: 35454 - protein, 7 aa, synthetic construct
  REGION 1..7: note = Description of Artificial Sequence: Synthetic peptide
LNGSATA

SEQ ID NO: 35455 - protein, 7 aa, synthetic construct
  REGION 1..7: note = Description of Artificial Sequence: Synthetic peptide
RMARPAV

SEQ ID NO: 35456 - protein, 7 aa, synthetic construct
  REGION 1..7: note = Description of Artificial Sequence: Synthetic peptide
RSISSAV

SEQ ID NO: 35457 - protein, 7 aa, synthetic construct
  REGION 1..7: note = Description of Artificial Sequence: Synthetic peptide
NEQAKLT

SEQ ID NO: 35458 - protein, 7 aa, synthetic construct
  REGION 1..7: note = Description of Artificial Sequence: Synthetic peptide
SSGGNMS

SEQ ID NO: 35459 - protein, 7 aa, synthetic construct
  REGION 1..7: note = Description of Artificial Sequence: Synthetic peptide
NATSPRK

SEQ ID NO: 35460 - protein, 7 aa, synthetic construct
  REGION 1..7: note = Description of Artificial Sequence: Synthetic peptide
SGAGSAG

SEQ ID NO: 35461 - protein, 7 aa, synthetic construct
  REGION 1..7: note = Description of Artificial Sequence: Synthetic peptide
IGSGQNQ

SEQ ID NO: 35462 - protein, 7 aa, synthetic construct
  REGION 1..7: note = Description of Artificial Sequence: Synthetic peptide
NNGASVV

SEQ ID NO: 35463 - protein, 7 aa, synthetic construct
  REGION 1..7: note = Description of Artificial Sequence: Synthetic peptide
SGSGIMM

SEQ ID NO: 35464 - protein, 7 aa, synthetic construct
  REGION 1..7: note = Description of Artificial Sequence: Synthetic peptide
PTHSSRD

SEQ ID NO: 35465 - protein, 7 aa, synthetic construct
  REGION 1..7: note = Description of Artificial Sequence: Synthetic peptide
NRSGQNQ

SEQ ID NO: 35466 - protein, 7 aa, synthetic construct
  REGION 1..7: note = Description of Artificial Sequence: Synthetic peptide
SNSDRAN

SEQ ID NO: 35467 - protein, 7 aa, synthetic construct
  REGION 1..7: note = Description of Artificial Sequence: Synthetic peptide
VNENRVS

SEQ ID NO: 35468 - protein, 7 aa, synthetic construct
  REGION 1..7: note = Description of Artificial Sequence: Synthetic peptide
GRESNLS

SEQ ID NO: 35469 - protein, 7 aa, synthetic construct
  REGION 1..7: note = Description of Artificial Sequence: Synthetic peptide
QGPKNAD

SEQ ID NO: 35470 - protein, 7 aa, synthetic construct
  REGION 1..7: note = Description of Artificial Sequence: Synthetic peptide
SNNGTQK

SEQ ID NO: 35471 - protein, 7 aa, synthetic construct
  REGION 1..7: note = Description of Artificial Sequence: Synthetic peptide
DARTMAA

SEQ ID NO: 35472 - DNA, 21 bp, synthetic construct
  misc_feature 1..21: note = Description of Artificial Sequence: Synthetic oligonucleotide
  source 1..21: mol_type = other DNA
gctgctcagccttcgttgaag

SEQ ID NO: 35473 - DNA, 21 bp, synthetic construct
  misc_feature 1..21: note = Description of Artificial Sequence: Synthetic oligonucleotide
  source 1..21: mol_type = other DNA
ggtgcgcgtccggtgcttcag

SEQ ID NO: 35474 - DNA, 21 bp, synthetic construct
  misc_feature 1..21: note = Description of Artificial Sequence: Synthetic oligonucleotide
  source 1..21: mol_type = other DNA
cacatgaacagaaaactcgaa

SEQ ID NO: 35475 - DNA, 21 bp, synthetic construct
  misc_feature 1..21: note = Description of Artificial Sequence: Synthetic oligonucleotide
  source 1..21: mol_type = other DNA
ggcctcagccccgtcctcaaa

SEQ ID NO: 35476 - DNA, 21 bp, synthetic construct
  misc_feature 1..21: note = Description of Artificial Sequence: Synthetic oligonucleotide
  source 1..21: mol_type = other DNA
agcggcgccggcagcgccggc

SEQ ID NO: 35477 - DNA, 21 bp, synthetic construct
  misc_feature 1..21: note = Description of Artificial Sequence: Synthetic oligonucleotide
  source 1..21: mol_type = other DNA
aataatactcagaagaattct

SEQ ID NO: 35478 - DNA, 21 bp, synthetic construct
  misc_feature 1..21: note = Description of Artificial Sequence: Synthetic oligonucleotide
  source 1..21: mol_type = other DNA
atcagaaccagcaaaatgaac

SEQ ID NO: 35479 - DNA, 21 bp, synthetic construct
  misc_feature 1..21: note = Description of Artificial Sequence: Synthetic oligonucleotide
  source 1..21: mol_type = other DNA
cccagcggcgaaaccagcaaa

SEQ ID NO: 35480 - DNA, 21 bp, synthetic construct
  misc_feature 1..21: note = Description of Artificial Sequence: Synthetic oligonucleotide
  source 1..21: mol_type = other DNA
atgaagaatacgactgtggtt

SEQ ID NO: 35481 - DNA, 21 bp, synthetic construct
  misc_feature 1..21: note = Description of Artificial Sequence: Synthetic oligonucleotide
  source 1..21: mol_type = other DNA
tcttctacgagtagtccgtat

SEQ ID NO: 35482 - DNA, 21 bp, synthetic construct
  misc_feature 1..21: note = Description of Artificial Sequence: Synthetic oligonucleotide
  source 1..21: mol_type = other DNA
accggccacagcctcgtcagc

SEQ ID NO: 35483 - DNA, 21 bp, synthetic construct
  misc_feature 1..21: note = Description of Artificial Sequence: Synthetic oligonucleotide
  source 1..21: mol_type = other DNA
tattcggataataagactact

SEQ ID NO: 35484 - DNA, 21 bp, synthetic construct
  misc_feature 1..21: note = Description of Artificial Sequence: Synthetic oligonucleotide
  source 1..21: mol_type = other DNA
gtttcggatggtattagtaag

SEQ ID NO: 35485 - DNA, 21 bp, synthetic construct
  misc_feature 1..21: note = Description of Artificial Sequence: Synthetic oligonucleotide
  source 1..21: mol_type = other DNA
ccggggtctgggagtaataat

SEQ ID NO: 35486 - DNA, 21 bp, synthetic construct
  misc_feature 1..21: note = Description of Artificial Sequence: Synthetic oligonucleotide
  source 1..21: mol_type = other DNA
aataatagtaagagtcagatt

SEQ ID NO: 35487 - DNA, 21 bp, synthetic construct
  misc_feature 1..21: note = Description of Artificial Sequence: Synthetic oligonucleotide
  source 1..21: mol_type = other DNA
caattccccggcaccctcaga

SEQ ID NO: 35488 - DNA, 21 bp, synthetic construct
  misc_feature 1..21: note = Description of Artificial Sequence: Synthetic oligonucleotide
  source 1..21: mol_type = other DNA
ttccccagcaacggcagaacc

SEQ ID NO: 35489 - DNA, 21 bp, synthetic construct
  misc_feature 1..21: note = Description of Artificial Sequence: Synthetic oligonucleotide
  source 1..21: mol_type = other DNA
ggcgccaaagaaagccaaagc

SEQ ID NO: 35490 - DNA, 21 bp, synthetic construct
  misc_feature 1..21: note = Description of Artificial Sequence: Synthetic oligonucleotide
  source 1..21: mol_type = other DNA
agactcagcaacgcctacgcc

SEQ ID NO: 35491 - DNA, 21 bp, synthetic construct
  misc_feature 1..21: note = Description of Artificial Sequence: Synthetic oligonucleotide
  source 1..21: mol_type = other DNA
tctggttcgaataattttttg

SEQ ID NO: 35492 - DNA, 21 bp, synthetic construct
  misc_feature 1..21: note = Description of Artificial Sequence: Synthetic oligonucleotide
  source 1..21: mol_type = other DNA
cacggcggccccggcgccgtc

SEQ ID NO: 35493 - DNA, 21 bp, synthetic construct
  misc_feature 1..21: note = Description of Artificial Sequence: Synthetic oligonucleotide
  source 1..21: mol_type = other DNA
agcaacagcagccaacaaaaa

SEQ ID NO: 35494 - DNA, 21 bp, synthetic construct
  misc_feature 1..21: note = Description of Artificial Sequence: Synthetic oligonucleotide
  source 1..21: mol_type = other DNA
ctcatcagcaccgcccaaaga

SEQ ID NO: 35495 - DNA, 21 bp, synthetic construct
  misc_feature 1..21: note = Description of Artificial Sequence: Synthetic oligonucleotide
  source 1..21: mol_type = other DNA
atggatgggaggtcgactact

SEQ ID NO: 35496 - DNA, 21 bp, synthetic construct
  misc_feature 1..21: note = Description of Artificial Sequence: Synthetic oligonucleotide
  source 1..21: mol_type = other DNA
accaccaacaccgtcagcaga

SEQ ID NO: 35497 - DNA, 21 bp, synthetic construct
  misc_feature 1..21: note = Description of Artificial Sequence: Synthetic oligonucleotide
  source 1..21: mol_type = other DNA
gtgccgcatggggctacttct

SEQ ID NO: 35498 - DNA, 21 bp, synthetic construct
  misc_feature 1..21: note = Description of Artificial Sequence: Synthetic oligonucleotide
  source 1..21: mol_type = other DNA
cctttttctgagatgcagaag

SEQ ID NO: 35499 - DNA, 21 bp, synthetic construct
  misc_feature 1..21: note = Description of Artificial Sequence: Synthetic oligonucleotide
  source 1..21: mol_type = other DNA
ggcggcgacaacaaactcacc

SEQ ID NO: 35500 - DNA, 21 bp, synthetic construct
  misc_feature 1..21: note = Description of Artificial Sequence: Synthetic oligonucleotide
  source 1..21: mol_type = other DNA
aacagccaccaaaaacccagc

SEQ ID NO: 35501 - DNA, 21 bp, synthetic construct
  misc_feature 1..21: note = Description of Artificial Sequence: Synthetic oligonucleotide
  source 1..21: mol_type = other DNA
atgcttagtgggagtcggaat

SEQ ID NO: 35502 - DNA, 21 bp, synthetic construct
  misc_feature 1..21: note = Description of Artificial Sequence: Synthetic oligonucleotide
  source 1..21: mol_type = other DNA
tcttctgggggtaatatgagt

SEQ ID NO: 35503 - DNA, 21 bp, synthetic construct
  misc_feature 1..21: note = Description of Artificial Sequence: Synthetic oligonucleotide
  source 1..21: mol_type = other DNA
aagattgcttcgaagtcggag

SEQ ID NO: 35504 - DNA, 21 bp, synthetic construct
  misc_feature 1..21: note = Description of Artificial Sequence: Synthetic oligonucleotide
  source 1..21: mol_type = other DNA
accgccagcggcaacctcagc

SEQ ID NO: 35505 - DNA, 21 bp, synthetic construct
  misc_feature 1..21: note = Description of Artificial Sequence: Synthetic oligonucleotide
  source 1..21: mol_type = other DNA
accggccaacaacccgccacc

SEQ ID NO: 35506 - DNA, 21 bp, synthetic construct
  misc_feature 1..21: note = Description of Artificial Sequence: Synthetic oligonucleotide
  source 1..21: mol_type = other DNA
acggcttcggggtctaatgct

SEQ ID NO: 35507 - DNA, 21 bp, synthetic construct
  misc_feature 1..21: note = Description of Artificial Sequence: Synthetic oligonucleotide
  source 1..21: mol_type = other DNA
catgggcagacggggatgatt

SEQ ID NO: 35508 - DNA, 21 bp, synthetic construct
  misc_feature 1..21: note = Description of Artificial Sequence: Synthetic oligonucleotide
  source 1..21: mol_type = other DNA
tctgcgagtccgagtattaag

SEQ ID NO: 35509 - DNA, 21 bp, synthetic construct
  misc_feature 1..21: note = Description of Artificial Sequence: Synthetic oligonucleotide
  source 1..21: mol_type = other DNA
gtgtcgactgggtcgtttact

SEQ ID NO: 35510 - DNA, 21 bp, synthetic construct
  misc_feature 1..21: note = Description of Artificial Sequence: Synthetic oligonucleotide
  source 1..21: mol_type = other DNA
ggcagctacagcaaccccacc

SEQ ID NO: 35511 - DNA, 21 bp, synthetic construct
  misc_feature 1..21: note = Description of Artificial Sequence: Synthetic oligonucleotide
  source 1..21: mol_type = other DNA
actacttatggtgggaatcgg

SEQ ID NO: 35512 - DNA, 21 bp, synthetic construct
  misc_feature 1..21: note = Description of Artificial Sequence: Synthetic oligonucleotide
  source 1..21: mol_type = other DNA
cttaatggtactcctcagtct

SEQ ID NO: 35513 - DNA, 21 bp, synthetic construct
  misc_feature 1..21: note = Description of Artificial Sequence: Synthetic oligonucleotide
  source 1..21: mol_type = other DNA
accaacgtcgacaaacccttc

SEQ ID NO: 35514 - DNA, 21 bp, synthetic construct
  misc_feature 1..21: note = Description of Artificial Sequence: Synthetic oligonucleotide
  source 1..21: mol_type = other DNA
atgagttctgagcgtccgggt

SEQ ID NO: 35515 - DNA, 21 bp, synthetic construct
  misc_feature 1..21: note = Description of Artificial Sequence: Synthetic oligonucleotide
  source 1..21: mol_type = other DNA
aacggcatcaccaaaagcagc

SEQ ID NO: 35516 - DNA, 21 bp, synthetic construct
  misc_feature 1..21: note = Description of Artificial Sequence: Synthetic oligonucleotide
  source 1..21: mol_type = other DNA
aacggcagcggccaaaacaaa

SEQ ID NO: 35517 - DNA, 21 bp, synthetic construct
  misc_feature 1..21: note = Description of Artificial Sequence: Synthetic oligonucleotide
  source 1..21: mol_type = other DNA
agagaagacaccaaaatgcac

SEQ ID NO: 35518 - DNA, 21 bp, synthetic construct
  misc_feature 1..21: note = Description of Artificial Sequence: Synthetic oligonucleotide
  source 1..21: mol_type = other DNA
gtgagggatgagcggccttcg

SEQ ID NO: 35519 - DNA, 21 bp, synthetic construct
  misc_feature 1..21: note = Description of Artificial Sequence: Synthetic oligonucleotide
  source 1..21: mol_type = other DNA
gccaaaacccaaagcgtcaac

SEQ ID NO: 35520 - DNA, 21 bp, synthetic construct
  misc_feature 1..21: note = Description of Artificial Sequence: Synthetic oligonucleotide
  source 1..21: mol_type = other DNA
ttgaatctgaagcctattaat

SEQ ID NO: 35521 - DNA, 21 bp, synthetic construct
  misc_feature 1..21: note = Description of Artificial Sequence: Synthetic oligonucleotide
  source 1..21: mol_type = other DNA
gatcctcgtaattctacgtct

SEQ ID NO: 35522 - DNA, 21 bp, synthetic construct
  misc_feature 1..21: note = Description of Artificial Sequence: Synthetic oligonucleotide
  source 1..21: mol_type = other DNA
actactggtggtcatgctctt

SEQ ID NO: 35523 - DNA, 21 bp, synthetic construct
  misc_feature 1..21: note = Description of Artificial Sequence: Synthetic oligonucleotide
  source 1..21: mol_type = other DNA
aataatcctaagaatgttgtt

SEQ ID NO: 35524 - DNA, 21 bp, synthetic construct
  misc_feature 1..21: note = Description of Artificial Sequence: Synthetic oligonucleotide
  source 1..21: mol_type = other DNA
gaacccctcagcaaacaaagc

SEQ ID NO: 35525 - DNA, 21 bp, synthetic construct
  misc_feature 1..21: note = Description of Artificial Sequence: Synthetic oligonucleotide
  source 1..21: mol_type = other DNA
aattataatcaggctggtttg

SEQ ID NO: 35526 - DNA, 21 bp, synthetic construct
  misc_feature 1..21: note = Description of Artificial Sequence: Synthetic oligonucleotide
  source 1..21: mol_type = other DNA
tctccggcttatgatacgagg

SEQ ID NO: 35527 - DNA, 21 bp, synthetic construct
  misc_feature 1..21: note = Description of Artificial Sequence: Synthetic oligonucleotide
  source 1..21: mol_type = other DNA
agccccaccagccccatgaac

SEQ ID NO: 35528 - DNA, 21 bp, synthetic construct
  misc_feature 1..21: note = Description of Artificial Sequence: Synthetic oligonucleotide
  source 1..21: mol_type = other DNA
aacaacagaagcggcatgggc

SEQ ID NO: 35529 - DNA, 21 bp, synthetic construct
  misc_feature 1..21: note = Description of Artificial Sequence: Synthetic oligonucleotide
  source 1..21: mol_type = other DNA
ggtgttaagacgaatcctctt

SEQ ID NO: 35530 - DNA, 21 bp, synthetic construct
  misc_feature 1..21: note = Description of Artificial Sequence: Synthetic oligonucleotide
  source 1..21: mol_type = other DNA
agcggcaccaccaccttcggc

SEQ ID NO: 35531 - DNA, 21 bp, synthetic construct
  misc_feature 1..21: note = Description of Artificial Sequence: Synthetic oligonucleotide
  source 1..21: mol_type = other DNA
aacggttctagacagaatcaa

SEQ ID NO: 35532 - DNA, 21 bp, synthetic construct
  misc_feature 1..21: note = Description of Artificial Sequence: Synthetic oligonucleotide
  source 1..21: mol_type = other DNA
accccccacgacggccaaaga

SEQ ID NO: 35533 - DNA, 21 bp, synthetic construct
  misc_feature 1..21: note = Description of Artificial Sequence: Synthetic oligonucleotide
  source 1..21: mol_type = other DNA
tctattactgggaataggact

SEQ ID NO: 35534 - DNA, 21 bp, synthetic construct
  misc_feature 1..21: note = Description of Artificial Sequence: Synthetic oligonucleotide
  source 1..21: mol_type = other DNA
aattcggcgagtctgaatcat

SEQ ID NO: 35535 - DNA, 21 bp, synthetic construct
  misc_feature 1..21: note = Description of Artificial Sequence: Synthetic oligonucleotide
  source 1..21: mol_type = other DNA
gatattcctgcgaagactgcg

SEQ ID NO: 35536 - DNA, 21 bp, synthetic construct
  misc_feature 1..21: note = Description of Artificial Sequence: Synthetic oligonucleotide
  source 1..21: mol_type = other DNA
cgtacgggtcattatcaggat

SEQ ID NO: 35537 - DNA, 21 bp, synthetic construct
  misc_feature 1..21: note = Description of Artificial Sequence: Synthetic oligonucleotide
  source 1..21: mol_type = other DNA
aatgctaatcagaatcagatg

SEQ ID NO: 35538 - DNA, 21 bp, synthetic construct
  misc_feature 1..21: note = Description of Artificial Sequence: Synthetic oligonucleotide
  source 1..21: mol_type = other DNA
gaaagcgccacccccatcaga

SEQ ID NO: 35539 - DNA, 21 bp, synthetic construct
  misc_feature 1..21: note = Description of Artificial Sequence: Synthetic oligonucleotide
  source 1..21: mol_type = other DNA
atgcctgcgaggaatgtttct

SEQ ID NO: 35540 - DNA, 21 bp, synthetic construct
  misc_feature 1..21: note = Description of Artificial Sequence: Synthetic oligonucleotide
  source 1..21: mol_type = other DNA
cccagcaacaaaaccaacagc

SEQ ID NO: 35541 - DNA, 21 bp, synthetic construct
  misc_feature 1..21: note = Description of Artificial Sequence: Synthetic oligonucleotide
  source 1..21: mol_type = other DNA
agtgcttctaatactagtgtt

SEQ ID NO: 35542 - DNA, 21 bp, synthetic construct
  misc_feature 1..21: note = Description of Artificial Sequence: Synthetic oligonucleotide
  source 1..21: mol_type = other DNA
aacagcagccacaacagcccc

SEQ ID NO: 35543 - DNA, 21 bp, synthetic construct
  misc_feature 1..21: note = Description of Artificial Sequence: Synthetic oligonucleotide
  source 1..21: mol_type = other DNA
agtacggctacgaatgtttat

SEQ ID NO: 35544 - DNA, 21 bp, synthetic construct
  misc_feature 1..21: note = Description of Artificial Sequence: Synthetic oligonucleotide
  source 1..21: mol_type = other DNA
ctcaacatcgccaacagcaaa

SEQ ID NO: 35545 - DNA, 21 bp, synthetic construct
  misc_feature 1..21: note = Description of Artificial Sequence: Synthetic oligonucleotide
  source 1..21: mol_type = other DNA
catggttctaagccgtatatt

SEQ ID NO: 35546 - DNA, 21 bp, synthetic construct
  misc_feature 1..21: note = Description of Artificial Sequence: Synthetic oligonucleotide
  source 1..21: mol_type = other DNA
gacaaaacccaaaaacaactc

SEQ ID NO: 35547 - DNA, 21 bp, synthetic construct
  misc_feature 1..21: note = Description of Artificial Sequence: Synthetic oligonucleotide
  source 1..21: mol_type = other DNA
cagaagactcagacgacttcg

SEQ ID NO: 35548 - DNA, 21 bp, synthetic construct
  misc_feature 1..21: note = Description of Artificial Sequence: Synthetic oligonucleotide
  source 1..21: mol_type = other DNA
acgaatgctaagcaggcgatt

SEQ ID NO: 35549 - DNA, 21 bp, synthetic construct
  misc_feature 1..21: note = Description of Artificial Sequence: Synthetic oligonucleotide
  source 1..21: mol_type = other DNA
ttgcatgatggtcagactcgt

SEQ ID NO: 35550 - DNA, 21 bp, synthetic construct
  misc_feature 1..21: note = Description of Artificial Sequence: Synthetic oligonucleotide
  source 1..21: mol_type = other DNA
aacacccaaagctacaccagc

SEQ ID NO: 35551 - DNA, 21 bp, synthetic construct
  misc_feature 1..21: note = Description of Artificial Sequence: Synthetic oligonucleotide
  source 1..21: mol_type = other DNA
cagtcgcattcggggatttct

SEQ ID NO: 35552 - DNA, 21 bp, synthetic construct
  misc_feature 1..21: note = Description of Artificial Sequence: Synthetic oligonucleotide
  source 1..21: mol_type = other DNA
ggtttggggcatagtgctttt

SEQ ID NO: 35553 - DNA, 21 bp, synthetic construct
  misc_feature 1..21: note = Description of Artificial Sequence: Synthetic oligonucleotide
  source 1..21: mol_type = other DNA
tctttttcgaagggttctagt

SEQ ID NO: 35554 - DNA, 21 bp, synthetic construct
  misc_feature 1..21: note = Description of Artificial Sequence: Synthetic oligonucleotide
  source 1..21: mol_type = other DNA
gggacttttagtactcagagt

SEQ ID NO: 35555 - DNA, 21 bp, synthetic construct
  misc_feature 1..21: note = Description of Artificial Sequence: Synthetic oligonucleotide
  source 1..21: mol_type = other DNA
tctgattctcgtaatacgaat

SEQ ID NO: 35556 - DNA, 21 bp, synthetic construct
  misc_feature 1..21: note = Description of Artificial Sequence: Synthetic oligonucleotide
  source 1..21: mol_type = other DNA
acttctaatagtaatattgcg

SEQ ID NO: 35557 - DNA, 21 bp, synthetic construct
  misc_feature 1..21: note = Description of Artificial Sequence: Synthetic oligonucleotide
  source 1..21: mol_type = other DNA
atgggcatcgccaacatcggc

SEQ ID NO: 35558 - DNA, 21 bp, synthetic construct
  misc_feature 1..21: note = Description of Artificial Sequence: Synthetic oligonucleotide
  source 1..21: mol_type = other DNA
agcagcctcggccacaacgac

SEQ ID NO: 35559 - DNA, 21 bp, synthetic construct
  misc_feature 1..21: note = Description of Artificial Sequence: Synthetic oligonucleotide
  source 1..21: mol_type = other DNA
agagccctcagcaaaggcggc

SEQ ID NO: 35560 - DNA, 21 bp, synthetic construct
  misc_feature 1..21: note = Description of Artificial Sequence: Synthetic oligonucleotide
  source 1..21: mol_type = other DNA
aaaaccggcgaccaaatgggc

SEQ ID NO: 35561 - DNA, 21 bp, synthetic construct
  misc_feature 1..21: note = Description of Artificial Sequence: Synthetic oligonucleotide
  source 1..21: mol_type = other DNA
aacatggacggcgccaccaga

SEQ ID NO: 35562 - DNA, 21 bp, synthetic construct
  misc_feature 1..21: note = Description of Artificial Sequence: Synthetic oligonucleotide
  source 1..21: mol_type = other DNA
gcgaatggtactaagtctagt

SEQ ID NO: 35563 - DNA, 21 bp, synthetic construct
  misc_feature 1..21: note = Description of Artificial Sequence: Synthetic oligonucleotide
  source 1..21: mol_type = other DNA
ctcatcctccccggcaacaac

SEQ ID NO: 35564 - DNA, 21 bp, synthetic construct
  misc_feature 1..21: note = Description of Artificial Sequence: Synthetic oligonucleotide
  source 1..21: mol_type = other DNA
catgttattgctcctcagcag

SEQ ID NO: 35565 - DNA, 21 bp, synthetic construct
  misc_feature 1..21: note = Description of Artificial Sequence: Synthetic oligonucleotide
  source 1..21: mol_type = other DNA
aacggttctggacagaatcta

SEQ ID NO: 35566 - DNA, 21 bp, synthetic construct
  misc_feature 1..21: note = Description of Artificial Sequence: Synthetic oligonucleotide
  source 1..21: mol_type = other DNA
attaggtcgaaggagtctgcg

SEQ ID NO: 35567 - DNA, 21 bp, synthetic construct
  misc_feature 1..21: note = Description of Artificial Sequence: Synthetic oligonucleotide
  source 1..21: mol_type = other DNA
caacaatacgccaaacaagcc

SEQ ID NO: 35568 - DNA, 21 bp, synthetic construct
  misc_feature 1..21: note = Description of Artificial Sequence: Synthetic oligonucleotide
  source 1..21: mol_type = other DNA
cttggtactagtccgatgaag

SEQ ID NO: 35569 - DNA, 21 bp, synthetic construct
  misc_feature 1..21: note = Description of Artificial Sequence: Synthetic oligonucleotide
  source 1..21: mol_type = other DNA
aatttgtcggggtcgaggtat

SEQ ID NO: 35570 - DNA, 21 bp, synthetic construct
  misc_feature 1..21: note = Description of Artificial Sequence: Synthetic oligonucleotide
  source 1..21: mol_type = other DNA
aatagtgaggcgaggcttagt

SEQ ID NO: 35571 - DNA, 21 bp, synthetic construct
  misc_feature 1..21: note = Description of Artificial Sequence: Synthetic oligonucleotide
  source 1..21: mol_type = other DNA
cccaccggcgaaaaaagactc

SEQ ID NO: 35572 - DNA, 21 bp, synthetic construct
  misc_feature 1..21: note = Description of Artificial Sequence: Synthetic oligonucleotide
  source 1..21: mol_type = other DNA
gatatgacgcatctgagtaat

SEQ ID NO: 35573 - DNA, 21 bp, synthetic construct
  misc_feature 1..21: note = Description of Artificial Sequence: Synthetic oligonucleotide
  source 1..21: mol_type = other DNA
ccgagtactagtggtgcgatg

SEQ ID NO: 35574 - DNA, 21 bp, synthetic construct
  misc_feature 1..21: note = Description of Artificial Sequence: Synthetic oligonucleotide
  source 1..21: mol_type = other DNA
caaaacgtcggcggcatcaga

SEQ ID NO: 35575 - DNA, 21 bp, synthetic construct
  misc_feature 1..21: note = Description of Artificial Sequence: Synthetic oligonucleotide
  source 1..21: mol_type = other DNA
tctatttctaagactcaggct

SEQ ID NO: 35576 - DNA, 21 bp, synthetic construct
  misc_feature 1..21: note = Description of Artificial Sequence: Synthetic oligonucleotide
  source 1..21: mol_type = other DNA
agcagcagccccaacgtcaaa

SEQ ID NO: 35577 - DNA, 21 bp, synthetic construct
  misc_feature 1..21: note = Description of Artificial Sequence: Synthetic oligonucleotide
  source 1..21: mol_type = other DNA
cttgctaagaatcctgtgatt

SEQ ID NO: 35578 - DNA, 21 bp, synthetic construct
  misc_feature 1..21: note = Description of Artificial Sequence: Synthetic oligonucleotide
  source 1..21: mol_type = other DNA
ggccaaggcgtcaccgccaaa

SEQ ID NO: 35579 - DNA, 21 bp, synthetic construct
  misc_feature 1..21: note = Description of Artificial Sequence: Synthetic oligonucleotide
  source 1..21: mol_type = other DNA
agcgccagcagaagcgcctac

SEQ ID NO: 35580 - DNA, 21 bp, synthetic construct
  misc_feature 1..21: note = Description of Artificial Sequence: Synthetic oligonucleotide
  source 1..21: mol_type = other DNA
agctacggcggccaaagcaga

SEQ ID NO: 35581 - DNA, 21 bp, synthetic construct
  misc_feature 1..21: note = Description of Artificial Sequence: Synthetic oligonucleotide
  source 1..21: mol_type = other DNA
ggtcagtcgaatgttactttg

SEQ ID NO: 35582 - DNA, 21 bp, synthetic construct
  misc_feature 1..21: note = Description of Artificial Sequence: Synthetic oligonucleotide
  source 1..21: mol_type = other DNA
accaccagccacatgctcaaa

SEQ ID NO: 35583 - DNA, 21 bp, synthetic construct
  misc_feature 1..21: note = Description of Artificial Sequence: Synthetic oligonucleotide
  source 1..21: mol_type = other DNA
gtgcaggggacgggtaatacg

SEQ ID NO: 35584 - DNA, 21 bp, synthetic construct
  misc_feature 1..21: note = Description of Artificial Sequence: Synthetic oligonucleotide
  source 1..21: mol_type = other DNA
tgggatagtaagactccgcgt

SEQ ID NO: 35585 - DNA, 21 bp, synthetic construct
  misc_feature 1..21: note = Description of Artificial Sequence: Synthetic oligonucleotide
  source 1..21: mol_type = other DNA
ttgaatcagcattcgagtatt

SEQ ID NO: 35586 - DNA, 21 bp, synthetic construct
  misc_feature 1..21: note = Description of Artificial Sequence: Synthetic oligonucleotide
  source 1..21: mol_type = other DNA
ggtgtgctgggttctaagaat

SEQ ID NO: 35587 - DNA, 21 bp, synthetic construct
  misc_feature 1..21: note = Description of Artificial Sequence: Synthetic oligonucleotide
  source 1..21: mol_type = other DNA
gagcagggttcgggtaatcat

SEQ ID NO: 35588 - DNA, 21 bp, synthetic construct
  misc_feature 1..21: note = Description of Artificial Sequence: Synthetic oligonucleotide
  source 1..21: mol_type = other DNA
tgcgtcagcaacgtcaccaac

SEQ ID NO: 35589 - DNA, 21 bp, synthetic construct
  misc_feature 1..21: note = Description of Artificial Sequence: Synthetic oligonucleotide
  source 1..21: mol_type = other DNA
tctaagccggctaataatgtt

SEQ ID NO: 35590 - DNA, 21 bp, synthetic construct
  misc_feature 1..21: note = Description of Artificial Sequence: Synthetic oligonucleotide
  source 1..21: mol_type = other DNA
ggtcatgggaataatggggcg

SEQ ID NO: 35591 - DNA, 21 bp, synthetic construct
  misc_feature 1..21: note = Description of Artificial Sequence: Synthetic oligonucleotide
  source 1..21: mol_type = other DNA
ccggctcatcagaagcttagt

SEQ ID NO: 35592 - DNA, 21 bp, synthetic construct
  misc_feature 1..21: note = Description of Artificial Sequence: Synthetic oligonucleotide
  source 1..21: mol_type = other DNA
aatgctaatagtcgtcctgtt

SEQ ID NO: 35593 - DNA, 21 bp, synthetic construct
  misc_feature 1..21: note = Description of Artificial Sequence: Synthetic oligonucleotide
  source 1..21: mol_type = other DNA
accgccacccaaaaaggccaa

SEQ ID NO: 35594 - DNA, 21 bp, synthetic construct
  misc_feature 1..21: note = Description of Artificial Sequence: Synthetic oligonucleotide
  source 1..21: mol_type = other DNA
gacatcatgagccccctcaaa

SEQ ID NO: 35595 - DNA, 21 bp, synthetic construct
  misc_feature 1..21: note = Description of Artificial Sequence: Synthetic oligonucleotide
  source 1..21: mol_type = other DNA
tttcttaagggtactggttcg

SEQ ID NO: 35596 - DNA, 21 bp, synthetic construct
  misc_feature 1..21: note = Description of Artificial Sequence: Synthetic oligonucleotide
  source 1..21: mol_type = other DNA
cacgccaacagccccgccacc

SEQ ID NO: 35597 - DNA, 21 bp, synthetic construct
  misc_feature 1..21: note = Description of Artificial Sequence: Synthetic oligonucleotide
  source 1..21: mol_type = other DNA
ggggattctaagtctacgtgg

SEQ ID NO: 35598 - DNA, 21 bp, synthetic construct
  misc_feature 1..21: note = Description of Artificial Sequence: Synthetic oligonucleotide
  source 1..21: mol_type = other DNA
cgtgttgtgacgaataatctg

SEQ ID NO: 35599 - DNA, 21 bp, synthetic construct
  misc_feature 1..21: note = Description of Artificial Sequence: Synthetic oligonucleotide
  source 1..21: mol_type = other DNA
gctacgaataatggttcgaag

SEQ ID NO: 35600 - DNA, 21 bp, synthetic construct
  misc_feature 1..21: note = Description of Artificial Sequence: Synthetic oligonucleotide
  source 1..21: mol_type = other DNA
cataataattctaagagtgcg

SEQ ID NO: 35601 - DNA, 21 bp, synthetic construct
  misc_feature 1..21: note = Description of Artificial Sequence: Synthetic oligonucleotide
  source 1..21: mol_type = other DNA
actcagcagaatgggaggaat

SEQ ID NO: 35602 - DNA, 21 bp, synthetic construct
  misc_feature 1..21: note = Description of Artificial Sequence: Synthetic oligonucleotide
  source 1..21: mol_type = other DNA
gaaaccaccacccccagaaaa

SEQ ID NO: 35603 - DNA, 21 bp, synthetic construct
  misc_feature 1..21: note = Description of Artificial Sequence: Synthetic oligonucleotide
  source 1..21: mol_type = other DNA
aatgctggtcctaattatgat

SEQ ID NO: 35604 - DNA, 21 bp, synthetic construct
  misc_feature 1..21: note = Description of Artificial Sequence: Synthetic oligonucleotide
  source 1..21: mol_type = other DNA
gaccccctcagaaacagcaac

SEQ ID NO: 35605 - DNA, 21 bp, synthetic construct
  misc_feature 1..21: note = Description of Artificial Sequence: Synthetic oligonucleotide
  source 1..21: mol_type = other DNA
gatcagaatcgtgttccttat

SEQ ID NO: 35606 - DNA, 21 bp, synthetic construct
  misc_feature 1..21: note = Description of Artificial Sequence: Synthetic oligonucleotide
  source 1..21: mol_type = other DNA
tcttatgggaaggagagtagt

SEQ ID NO: 35607 - DNA, 21 bp, synthetic construct
  misc_feature 1..21: note = Description of Artificial Sequence: Synthetic oligonucleotide
  source 1..21: mol_type = other DNA
ctcgacagaagcacctacggc

SEQ ID NO: 35608 - DNA, 21 bp, synthetic construct
  misc_feature 1..21: note = Description of Artificial Sequence: Synthetic oligonucleotide
  source 1..21: mol_type = other DNA
agtcgtaagaataatacgttg

SEQ ID NO: 35609 - DNA, 21 bp, synthetic construct
  misc_feature 1..21: note = Description of Artificial Sequence: Synthetic oligonucleotide
  source 1..21: mol_type = other DNA
gccatcagccccacctacatg

SEQ ID NO: 35610 - DNA, 21 bp, synthetic construct
  misc_feature 1..21: note = Description of Artificial Sequence: Synthetic oligonucleotide
  source 1..21: mol_type = other DNA
tacgccatggaaagagtcggc

SEQ ID NO: 35611 - DNA, 21 bp, synthetic construct
  misc_feature 1..21: note = Description of Artificial Sequence: Synthetic oligonucleotide
  source 1..21: mol_type = other DNA
gaactcatgaacaaaagcaaa

SEQ ID NO: 35612 - DNA, 21 bp, synthetic construct
  misc_feature 1..21: note = Description of Artificial Sequence: Synthetic oligonucleotide
  source 1..21: mol_type = other DNA
cacgacagcaaagtcatcagc

SEQ ID NO: 35613 - DNA, 21 bp, synthetic construct
  misc_feature 1..21: note = Description of Artificial Sequence: Synthetic oligonucleotide
  source 1..21: mol_type = other DNA
gcgcgggctagttctaattcg

SEQ ID NO: 35614 - DNA, 21 bp, synthetic construct
  misc_feature 1..21: note = Description of Artificial Sequence: Synthetic oligonucleotide
  source 1..21: mol_type = other DNA
gccagcagaagcaccaacccc

SEQ ID NO: 35615 - DNA, 21 bp, synthetic construct
  misc_feature 1..21: note = Description of Artificial Sequence: Synthetic oligonucleotide
  source 1..21: mol_type = other DNA
agcagcctcgaaaaaagcaac

SEQ ID NO: 35616 - DNA, 21 bp, synthetic construct
  misc_feature 1..21: note = Description of Artificial Sequence: Synthetic oligonucleotide
  source 1..21: mol_type = other DNA
agcgaccaagtcagaagcgcc

SEQ ID NO: 35617 - DNA, 21 bp, synthetic construct
  misc_feature 1..21: note = Description of Artificial Sequence: Synthetic oligonucleotide
  source 1..21: mol_type = other DNA
ttgattaatcctgctggttct

SEQ ID NO: 35618 - DNA, 21 bp, synthetic construct
  misc_feature 1..21: note = Description of Artificial Sequence: Synthetic oligonucleotide
  source 1..21: mol_type = other DNA
tatgggaatcctaggcaggct

SEQ ID NO: 35619 - DNA, 21 bp, synthetic construct
  misc_feature 1..21: note = Description of Artificial Sequence: Synthetic oligonucleotide
  source 1..21: mol_type = other DNA
gatattaatcgtcagaggact

SEQ ID NO: 35620 - DNA, 21 bp, synthetic construct
  misc_feature 1..21: note = Description of Artificial Sequence: Synthetic oligonucleotide
  source 1..21: mol_type = other DNA
ctggcgagtacttattctggt

SEQ ID NO: 35621 - DNA, 21 bp, synthetic construct
  misc_feature 1..21: note = Description of Artificial Sequence: Synthetic oligonucleotide
  source 1..21: mol_type = other DNA
gtccccagccaaaacagagcc

SEQ ID NO: 35622 - DNA, 21 bp, synthetic construct
  misc_feature 1..21: note = Description of Artificial Sequence: Synthetic oligonucleotide
  source 1..21: mol_type = other DNA
cccagagaaacccacaaacaa

SEQ ID NO: 35623 - DNA, 21 bp, synthetic construct
  misc_feature 1..21: note = Description of Artificial Sequence: Synthetic oligonucleotide
  source 1..21: mol_type = other DNA
gatgggggtaatcagaggagt

SEQ ID NO: 35624 - DNA, 21 bp, synthetic construct
  misc_feature 1..21: note = Description of Artificial Sequence: Synthetic oligonucleotide
  source 1..21: mol_type = other DNA
atggggggtgttacgtcttct

SEQ ID NO: 35625 - DNA, 21 bp, synthetic construct
  misc_feature 1..21: note = Description of Artificial Sequence: Synthetic oligonucleotide
  source 1..21: mol_type = other DNA
aacaacctcgccggcagcaaa

SEQ ID NO: 35626 - DNA, 21 bp, synthetic construct
  misc_feature 1..21: note = Description of Artificial Sequence: Synthetic oligonucleotide
  source 1..21: mol_type = other DNA
cagccgaattctgctagtcat

SEQ ID NO: 35627 - DNA, 21 bp, synthetic construct
  misc_feature 1..21: note = Description of Artificial Sequence: Synthetic oligonucleotide
  source 1..21: mol_type = other DNA
ccgaatggggcgcatgttacg

SEQ ID NO: 35628 - DNA, 21 bp, synthetic construct
  misc_feature 1..21: note = Description of Artificial Sequence: Synthetic oligonucleotide
  source 1..21: mol_type = other DNA
agtagtgataatcgtgggttg

SEQ ID NO: 35629 - DNA, 21 bp, synthetic construct
  misc_feature 1..21: note = Description of Artificial Sequence: Synthetic oligonucleotide
  source 1..21: mol_type = other DNA
gagaatacgaagacttatagt

SEQ ID NO: 35630 - DNA, 21 bp, synthetic construct
  misc_feature 1..21: note = Description of Artificial Sequence: Synthetic oligonucleotide
  source 1..21: mol_type = other DNA
aacggttctggacagtatcaa

SEQ ID NO: 35631 - DNA, 21 bp, synthetic construct
  misc_feature 1..21: note = Description of Artificial Sequence: Synthetic oligonucleotide
  source 1..21: mol_type = other DNA
gaccccggcaccagaaaaagc

SEQ ID NO: 35632 - DNA, 21 bp, synthetic construct
  misc_feature 1..21: note = Description of Artificial Sequence: Synthetic oligonucleotide
  source 1..21: mol_type = other DNA
tttcgtacgcagtctacgaag

SEQ ID NO: 35633 - DNA, 21 bp, synthetic construct
  misc_feature 1..21: note = Description of Artificial Sequence: Synthetic oligonucleotide
  source 1..21: mol_type = other DNA
ggtgtgattaataatgagcgg

SEQ ID NO: 35634 - DNA, 21 bp, synthetic construct
  misc_feature 1..21: note = Description of Artificial Sequence: Synthetic oligonucleotide
  source 1..21: mol_type = other DNA
gccgccgccgtcaaaggcggc

SEQ ID NO: 35635 - DNA, 21 bp, synthetic construct
  misc_feature 1..21: note = Description of Artificial Sequence: Synthetic oligonucleotide
  source 1..21: mol_type = other DNA
agcggcaacgacaaaaacaac

SEQ ID NO: 35636 - DNA, 21 bp, synthetic construct
  misc_feature 1..21: note = Description of Artificial Sequence: Synthetic oligonucleotide
  source 1..21: mol_type = other DNA
aaagacaacacccccggcaga

SEQ ID NO: 35637 - DNA, 21 bp, synthetic construct
  misc_feature 1..21: note = Description of Artificial Sequence: Synthetic oligonucleotide
  source 1..21: mol_type = other DNA
ctcatgcaaacccacggcagc

SEQ ID NO: 35638 - DNA, 21 bp, synthetic construct
  misc_feature 1..21: note = Description of Artificial Sequence: Synthetic oligonucleotide
  source 1..21: mol_type = other DNA
caagtccccgccaccaacaga

SEQ ID NO: 35639 - DNA, 21 bp, synthetic construct
  misc_feature 1..21: note = Description of Artificial Sequence: Synthetic oligonucleotide
  source 1..21: mol_type = other DNA
gctacgagggattctcattct

SEQ ID NO: 35640 - DNA, 21 bp, synthetic construct
  misc_feature 1..21: note = Description of Artificial Sequence: Synthetic oligonucleotide
  source 1..21: mol_type = other DNA
atgggtgttggtatgaatggt

SEQ ID NO: 35641 - DNA, 21 bp, synthetic construct
  misc_feature 1..21: note = Description of Artificial Sequence: Synthetic oligonucleotide
  source 1..21: mol_type = other DNA
ggtttgtcttcgggtaagacg

SEQ ID NO: 35642 - DNA, 21 bp, synthetic construct
  misc_feature 1..21: note = Description of Artificial Sequence: Synthetic oligonucleotide
  source 1..21: mol_type = other DNA
agacccagcggcagcgaaccc

SEQ ID NO: 35643 - DNA, 21 bp, synthetic construct
  misc_feature 1..21: note = Description of Artificial Sequence: Synthetic oligonucleotide
  source 1..21: mol_type = other DNA
ggcgacaccagactcaacgcc

SEQ ID NO: 35644 - DNA, 21 bp, synthetic construct
  misc_feature 1..21: note = Description of Artificial Sequence: Synthetic oligonucleotide
  source 1..21: mol_type = other DNA
gattctggttcttcgacgaag

SEQ ID NO: 35645 - DNA, 21 bp, synthetic construct
  misc_feature 1..21: note = Description of Artificial Sequence: Synthetic oligonucleotide
  source 1..21: mol_type = other DNA
cctacgttgggtacgactaag

SEQ ID NO: 35646 - DNA, 21 bp, synthetic construct
  misc_feature 1..21: note = Description of Artificial Sequence: Synthetic oligonucleotide
  source 1..21: mol_type = other DNA
gacggcaaaaacaacaacgtc

SEQ ID NO: 35647 - DNA, 21 bp, synthetic construct
  misc_feature 1..21: note = Description of Artificial Sequence: Synthetic oligonucleotide
  source 1..21: mol_type = other DNA
cccagcgtcgccaacgtcatg

SEQ ID NO: 35648 - DNA, 21 bp, synthetic construct
  misc_feature 1..21: note = Description of Artificial Sequence: Synthetic oligonucleotide
  source 1..21: mol_type = other DNA
ctcggccccggcaaaaacacc

SEQ ID NO: 35649 - DNA, 21 bp, synthetic construct
  misc_feature 1..21: note = Description of Artificial Sequence: Synthetic oligonucleotide
  source 1..21: mol_type = other DNA
cgtaatcagttggtttctggt

SEQ ID NO: 35650 - DNA, 21 bp, synthetic construct
  misc_feature 1..21: note = Description of Artificial Sequence: Synthetic oligonucleotide
  source 1..21: mol_type = other DNA
agggatgtggatgtgcgtaat

SEQ ID NO: 35651 - DNA, 21 bp, synthetic construct
  misc_feature 1..21: note = Description of Artificial Sequence: Synthetic oligonucleotide
  source 1..21: mol_type = other DNA
gacagaaccaacacccaaaga

SEQ ID NO: 35652 - DNA, 21 bp, synthetic construct
  misc_feature 1..21: note = Description of Artificial Sequence: Synthetic oligonucleotide
  source 1..21: mol_type = other DNA
cctcagaataatcaggcgcat

SEQ ID NO: 35653 - DNA, 21 bp, synthetic construct
  misc_feature 1..21: note = Description of Artificial Sequence: Synthetic oligonucleotide
  source 1..21: mol_type = other DNA
ttgccttcgggtaatactagt

SEQ ID NO: 35654 - DNA, 21 bp, synthetic construct
  misc_feature 1..21: note = Description of Artificial Sequence: Synthetic oligonucleotide
  source 1..21: mol_type = other DNA
tctcgtgcgaattcggttccg

SEQ ID NO: 35655 - DNA, 21 bp, synthetic construct
  misc_feature 1..21: note = Description of Artificial Sequence: Synthetic oligonucleotide
  source 1..21: mol_type = other DNA
gccagcagcagagaaagcctc

SEQ ID NO: 35656 - DNA, 21 bp, synthetic construct
  misc_feature 1..21: note = Description of Artificial Sequence: Synthetic oligonucleotide
  source 1..21: mol_type = other DNA
cgtgttacggatgatcatctt

SEQ ID NO: 35657 - DNA, 21 bp, synthetic construct
  misc_feature 1..21: note = Description of Artificial Sequence: Synthetic oligonucleotide
  source 1..21: mol_type = other DNA
gccgtcaacgaactccacgac

SEQ ID NO: 35658 - DNA, 21 bp, synthetic construct
  misc_feature 1..21: note = Description of Artificial Sequence: Synthetic oligonucleotide
  source 1..21: mol_type = other DNA
agtgggtctctttcttctgct

SEQ ID NO: 35659 - DNA, 21 bp, synthetic construct
  misc_feature 1..21: note = Description of Artificial Sequence: Synthetic oligonucleotide
  source 1..21: mol_type = other DNA
aacggcaccagacaaaaccaa

SEQ ID NO: 35660 - DNA, 21 bp, synthetic construct
  misc_feature 1..21: note = Description of Artificial Sequence: Synthetic oligonucleotide
  source 1..21: mol_type = other DNA
gctgctactaattcgcttact

SEQ ID NO: 35661 - DNA, 21 bp, synthetic construct
  misc_feature 1..21: note = Description of Artificial Sequence: Synthetic oligonucleotide
  source 1..21: mol_type = other DNA
agcacccaccaccccgccagc

SEQ ID NO: 35662 - DNA, 21 bp, synthetic construct
  misc_feature 1..21: note = Description of Artificial Sequence: Synthetic oligonucleotide
  source 1..21: mol_type = other DNA
gcccccctccaaagcaacctc

SEQ ID NO: 35663 - DNA, 21 bp, synthetic construct
  misc_feature 1..21: note = Description of Artificial Sequence: Synthetic oligonucleotide
  source 1..21: mol_type = other DNA
agcggcggcaaaagcgccctc

SEQ ID NO: 35664 - DNA, 21 bp, synthetic construct
  misc_feature 1..21: note = Description of Artificial Sequence: Synthetic oligonucleotide
  source 1..21: mol_type = other DNA
aaactcgtcaacagcaacggc

SEQ ID NO: 35665 - DNA, 21 bp, synthetic construct
  misc_feature 1..21: note = Description of Artificial Sequence: Synthetic oligonucleotide
  source 1..21: mol_type = other DNA
agcatcaccgacagacacagc

SEQ ID NO: 35666 - DNA, 21 bp, synthetic construct
  misc_feature 1..21: note = Description of Artificial Sequence: Synthetic oligonucleotide
  source 1..21: mol_type = other DNA
gggtgtattactaattgtagt

SEQ ID NO: 35667 - DNA, 21 bp, synthetic construct
  misc_feature 1..21: note = Description of Artificial Sequence: Synthetic oligonucleotide
  source 1..21: mol_type = other DNA
actcctggggcttctttgtcg

SEQ ID NO: 35668 - DNA, 21 bp, synthetic construct
  misc_feature 1..21: note = Description of Artificial Sequence: Synthetic oligonucleotide
  source 1..21: mol_type = other DNA
agtagtatttctcgtacttcg

SEQ ID NO: 35669 - DNA, 21 bp, synthetic construct
  misc_feature 1..21: note = Description of Artificial Sequence: Synthetic oligonucleotide
  source 1..21: mol_type = other DNA
aacagcgtcgtcagcgtcagc

SEQ ID NO: 35670 - DNA, 21 bp, synthetic construct
  misc_feature 1..21: note = Description of Artificial Sequence: Synthetic oligonucleotide
  source 1..21: mol_type = other DNA
aacggcagcaccagcagcggc

SEQ ID NO: 35671 - DNA, 21 bp, synthetic construct
  misc_feature 1..21: note = Description of Artificial Sequence: Synthetic oligonucleotide
  source 1..21: mol_type = other DNA
gacatggtcagccccagaaac

SEQ ID NO: 35672 - DNA, 21 bp, synthetic construct
  misc_feature 1..21: note = Description of Artificial Sequence: Synthetic oligonucleotide
  source 1..21: mol_type = other DNA
agagtcagagccgacgacgac

SEQ ID NO: 35673 - DNA, 21 bp, synthetic construct
  misc_feature 1..21: note = Description of Artificial Sequence: Synthetic oligonucleotide
  source 1..21: mol_type = other DNA
gctcagattaatacgcctact

SEQ ID NO: 35674 - DNA, 21 bp, synthetic construct
  misc_feature 1..21: note = Description of Artificial Sequence: Synthetic oligonucleotide
  source 1..21: mol_type = other DNA
gccggcagcaacagccaaggc

SEQ ID NO: 35675 - DNA, 21 bp, synthetic construct
  misc_feature 1..21: note = Description of Artificial Sequence: Synthetic oligonucleotide
  source 1..21: mol_type = other DNA
gattctattggtagttctaag

SEQ ID NO: 35676 - DNA, 21 bp, synthetic construct
  misc_feature 1..21: note = Description of Artificial Sequence: Synthetic oligonucleotide
  source 1..21: mol_type = other DNA
aatccggctcatggtcttaat

SEQ ID NO: 35677 - DNA, 21 bp, synthetic construct
  misc_feature 1..21: note = Description of Artificial Sequence: Synthetic oligonucleotide
  source 1..21: mol_type = other DNA
aacggcgtccaacaacccaaa

SEQ ID NO: 35678 - DNA, 21 bp, synthetic construct
  misc_feature 1..21: note = Description of Artificial Sequence: Synthetic oligonucleotide
  source 1..21: mol_type = other DNA
agaatcaccagcagcaaccaa

SEQ ID NO: 35679 - DNA, 21 bp, synthetic construct
  misc_feature 1..21: note = Description of Artificial Sequence: Synthetic oligonucleotide
  source 1..21: mol_type = other DNA
atcggcaacaaacaaagccaa

SEQ ID NO: 35680 - DNA, 21 bp, synthetic construct
  misc_feature 1..21: note = Description of Artificial Sequence: Synthetic oligonucleotide
  source 1..21: mol_type = other DNA
cctactactcttaagcatgat

SEQ ID NO: 35681 - DNA, 21 bp, synthetic construct
  misc_feature 1..21: note = Description of Artificial Sequence: Synthetic oligonucleotide
  source 1..21: mol_type = other DNA
catactactggtatgcttggg

SEQ ID NO: 35682 - DNA, 21 bp, synthetic construct
  misc_feature 1..21: note = Description of Artificial Sequence: Synthetic oligonucleotide
  source 1..21: mol_type = other DNA
gggtcggggcatggtacgaat

SEQ ID NO: 35683 - DNA, 21 bp, synthetic construct
  misc_feature 1..21: note = Description of Artificial Sequence: Synthetic oligonucleotide
  source 1..21: mol_type = other DNA
gttacgaatagttcgctggtg

SEQ ID NO: 35684 - DNA, 21 bp, synthetic construct
  misc_feature 1..21: note = Description of Artificial Sequence: Synthetic oligonucleotide
  source 1..21: mol_type = other DNA
ggcaccagcaacagatacacc

SEQ ID NO: 35685 - DNA, 21 bp, synthetic construct
  misc_feature 1..21: note = Description of Artificial Sequence: Synthetic oligonucleotide
  source 1..21: mol_type = other DNA
actccgattactcctatgact

SEQ ID NO: 35686 - DNA, 21 bp, synthetic construct
  misc_feature 1..21: note = Description of Artificial Sequence: Synthetic oligonucleotide
  source 1..21: mol_type = other DNA
agtgctaatacgagggttcag

SEQ ID NO: 35687 - DNA, 21 bp, synthetic construct
  misc_feature 1..21: note = Description of Artificial Sequence: Synthetic oligonucleotide
  source 1..21: mol_type = other DNA
cccatgaccaacctcggcacc

SEQ ID NO: 35688 - DNA, 21 bp, synthetic construct
  misc_feature 1..21: note = Description of Artificial Sequence: Synthetic oligonucleotide
  source 1..21: mol_type = other DNA
aatgcgcagggtactgctaag

SEQ ID NO: 35689 - DNA, 21 bp, synthetic construct
  misc_feature 1..21: note = Description of Artificial Sequence: Synthetic oligonucleotide
  source 1..21: mol_type = other DNA
gctactactaaggagggtatt

SEQ ID NO: 35690 - DNA, 21 bp, synthetic construct
  misc_feature 1..21: note = Description of Artificial Sequence: Synthetic oligonucleotide
  source 1..21: mol_type = other DNA
aatgggattagtaagtctaat

SEQ ID NO: 35691 - DNA, 21 bp, synthetic construct
  misc_feature 1..21: note = Description of Artificial Sequence: Synthetic oligonucleotide
  source 1..21: mol_type = other DNA
agtactcataagaatagtcct

SEQ ID NO: 35692 - DNA, 21 bp, synthetic construct
  misc_feature 1..21: note = Description of Artificial Sequence: Synthetic oligonucleotide
  source 1..21: mol_type = other DNA
aacgccttcaccaccaccgtc

SEQ ID NO: 35693 - DNA, 21 bp, synthetic construct
  misc_feature 1..21: note = Description of Artificial Sequence: Synthetic oligonucleotide
  source 1..21: mol_type = other DNA
tatctttcggagcggaattgt

SEQ ID NO: 35694 - DNA, 21 bp, synthetic construct
  misc_feature 1..21: note = Description of Artificial Sequence: Synthetic oligonucleotide
  source 1..21: mol_type = other DNA
ccggttaatcttcagaatggg

SEQ ID NO: 35695 - DNA, 21 bp, synthetic construct
  misc_feature 1..21: note = Description of Artificial Sequence: Synthetic oligonucleotide
  source 1..21: mol_type = other DNA
gcctacggcaaaggcagcagc

SEQ ID NO: 35696 - DNA, 21 bp, synthetic construct
  misc_feature 1..21: note = Description of Artificial Sequence: Synthetic oligonucleotide
  source 1..21: mol_type = other DNA
agactcacccaaagcagccaa

SEQ ID NO: 35697 - DNA, 21 bp, synthetic construct
  misc_feature 1..21: note = Description of Artificial Sequence: Synthetic oligonucleotide
  source 1..21: mol_type = other DNA
gccaccggcagaagccccaac

SEQ ID NO: 35698 - DNA, 21 bp, synthetic construct
  misc_feature 1..21: note = Description of Artificial Sequence: Synthetic oligonucleotide
  source 1..21: mol_type = other DNA
ggcagacaagtcacccccacc

SEQ ID NO: 35699 - DNA, 21 bp, synthetic construct
  misc_feature 1..21: note = Description of Artificial Sequence: Synthetic oligonucleotide
  source 1..21: mol_type = other DNA
agccccggcagaacccaaagc

SEQ ID NO: 35700 - DNA, 21 bp, synthetic construct
  misc_feature 1..21: note = Description of Artificial Sequence: Synthetic oligonucleotide
  source 1..21: mol_type = other DNA
gacggcagcagcagagtcggc

SEQ ID NO: 35701 - DNA, 21 bp, synthetic construct
  misc_feature 1..21: note = Description of Artificial Sequence: Synthetic oligonucleotide
  source 1..21: mol_type = other DNA
atgagtactggtgtttctcct

SEQ ID NO: 35702 - DNA, 21 bp, synthetic construct
  misc_feature 1..21: note = Description of Artificial Sequence: Synthetic oligonucleotide
  source 1..21: mol_type = other DNA
cgtcaggtgtcgactcctctt

SEQ ID NO: 35703 - DNA, 21 bp, synthetic construct
  misc_feature 1..21: note = Description of Artificial Sequence: Synthetic oligonucleotide
  source 1..21: mol_type = other DNA
agaaccaacaaaagcgtcacc

SEQ ID NO: 35704 - DNA, 21 bp, synthetic construct
  misc_feature 1..21: note = Description of Artificial Sequence: Synthetic oligonucleotide
  source 1..21: mol_type = other DNA
tatgggtcggataagtcgatt

SEQ ID NO: 35705 - DNA, 21 bp, synthetic construct
  misc_feature 1..21: note = Description of Artificial Sequence: Synthetic oligonucleotide
  source 1..21: mol_type = other DNA
atcaccaccagaagcagcatg

SEQ ID NO: 35706 - DNA, 21 bp, synthetic construct
  misc_feature 1..21: note = Description of Artificial Sequence: Synthetic oligonucleotide
  source 1..21: mol_type = other DNA
gatacgattacttcgaggggt

SEQ ID NO: 35707 - DNA, 21 bp, synthetic construct
  misc_feature 1..21: note = Description of Artificial Sequence: Synthetic oligonucleotide
  source 1..21: mol_type = other DNA
gattctaggaataatatgacg

SEQ ID NO: 35708 - DNA, 21 bp, synthetic construct
  misc_feature 1..21: note = Description of Artificial Sequence: Synthetic oligonucleotide
  source 1..21: mol_type = other DNA
tatccgaggcagaggacggag

SEQ ID NO: 35709 - DNA, 21 bp, synthetic construct
  misc_feature 1..21: note = Description of Artificial Sequence: Synthetic oligonucleotide
  source 1..21: mol_type = other DNA
tatgtgcctcgttcgagtctg

SEQ ID NO: 35710 - DNA, 21 bp, synthetic construct
  misc_feature 1..21: note = Description of Artificial Sequence: Synthetic oligonucleotide
  source 1..21: mol_type = other DNA
cctttgaatactcatcagtcg

SEQ ID NO: 35711 - DNA, 21 bp, synthetic construct
  misc_feature 1..21: note = Description of Artificial Sequence: Synthetic oligonucleotide
  source 1..21: mol_type = other DNA
gtccccggcaacctccccagc

SEQ ID NO: 35712 - DNA, 21 bp, synthetic construct
  misc_feature 1..21: note = Description of Artificial Sequence: Synthetic oligonucleotide
  source 1..21: mol_type = other DNA
gctcttactggtaagctgtcg

SEQ ID NO: 35713 - DNA, 21 bp, synthetic construct
  misc_feature 1..21: note = Description of Artificial Sequence: Synthetic oligonucleotide
  source 1..21: mol_type = other DNA
cccgtcctcaacaaagccacc

SEQ ID NO: 35714 - DNA, 21 bp, synthetic construct
  misc_feature 1..21: note = Description of Artificial Sequence: Synthetic oligonucleotide
  source 1..21: mol_type = other DNA
catcttgcttatgataataac

SEQ ID NO: 35715 - DNA, 21 bp, synthetic construct
  misc_feature 1..21: note = Description of Artificial Sequence: Synthetic oligonucleotide
  source 1..21: mol_type = other DNA
gacagcagcgaaagaatcaga

SEQ ID NO: 35716 - DNA, 21 bp, synthetic construct
  misc_feature 1..21: note = Description of Artificial Sequence: Synthetic oligonucleotide
  source 1..21: mol_type = other DNA
tcttttagtggggctaataag

SEQ ID NO: 35717 - DNA, 21 bp, synthetic construct
  misc_feature 1..21: note = Description of Artificial Sequence: Synthetic oligonucleotide
  source 1..21: mol_type = other DNA
ttgaaggctaatgctacgggt

SEQ ID NO: 35718 - DNA, 21 bp, synthetic construct
  misc_feature 1..21: note = Description of Artificial Sequence: Synthetic oligonucleotide
  source 1..21: mol_type = other DNA
atgccccaccccagcagcaaa

SEQ ID NO: 35719 - DNA, 21 bp, synthetic construct
  misc_feature 1..21: note = Description of Artificial Sequence: Synthetic oligonucleotide
  source 1..21: mol_type = other DNA
caggataagggtaatgcgggt

SEQ ID NO: 35720 - DNA, 21 bp, synthetic construct
  misc_feature 1..21: note = Description of Artificial Sequence: Synthetic oligonucleotide
  source 1..21: mol_type = other DNA
attaattttagtggtactagg

SEQ ID NO: 35721 - DNA, 21 bp, synthetic construct
  misc_feature 1..21: note = Description of Artificial Sequence: Synthetic oligonucleotide
  source 1..21: mol_type = other DNA
cagacttcgtctcatgcgtat

SEQ ID NO: 35722 - DNA, 21 bp, synthetic construct
  misc_feature 1..21: note = Description of Artificial Sequence: Synthetic oligonucleotide
  source 1..21: mol_type = other DNA
tctcattctgttactcctggg

SEQ ID NO: 35723 - DNA, 21 bp, synthetic construct
  misc_feature 1..21: note = Description of Artificial Sequence: Synthetic oligonucleotide
  source 1..21: mol_type = other DNA
attggtattactaatcatagt

SEQ ID NO: 35724 - DNA, 21 bp, synthetic construct
  misc_feature 1..21: note = Description of Artificial Sequence: Synthetic oligonucleotide
  source 1..21: mol_type = other DNA
cattatacggggaagcagaat

SEQ ID NO: 35725 - DNA, 21 bp, synthetic construct
  misc_feature 1..21: note = Description of Artificial Sequence: Synthetic oligonucleotide
  source 1..21: mol_type = other DNA
cagcgggtgtcgagtactttg

SEQ ID NO: 35726 - DNA, 21 bp, synthetic construct
  misc_feature 1..21: note = Description of Artificial Sequence: Synthetic oligonucleotide
  source 1..21: mol_type = other DNA
gggcttgctggtagtttgcag

SEQ ID NO: 35727 - DNA, 21 bp, synthetic construct
  misc_feature 1..21: note = Description of Artificial Sequence: Synthetic oligonucleotide
  source 1..21: mol_type = other DNA
gatttgtcgatgcagacgcgg

SEQ ID NO: 35728 - DNA, 21 bp, synthetic construct
  misc_feature 1..21: note = Description of Artificial Sequence: Synthetic oligonucleotide
  source 1..21: mol_type = other DNA
actcctgcggggccgaataag

SEQ ID NO: 35729 - DNA, 21 bp, synthetic construct
  misc_feature 1..21: note = Description of Artificial Sequence: Synthetic oligonucleotide
  source 1..21: mol_type = other DNA
gttaggatttcgactcaggcg

SEQ ID NO: 35730 - DNA, 21 bp, synthetic construct
  misc_feature 1..21: note = Description of Artificial Sequence: Synthetic oligonucleotide
  source 1..21: mol_type = other DNA
gtcctcgccggcagcaacacc

SEQ ID NO: 35731 - DNA, 21 bp, synthetic construct
  misc_feature 1..21: note = Description of Artificial Sequence: Synthetic oligonucleotide
  source 1..21: mol_type = other DNA
gctagttctaagggtttgact

SEQ ID NO: 35732 - DNA, 21 bp, synthetic construct
  misc_feature 1..21: note = Description of Artificial Sequence: Synthetic oligonucleotide
  source 1..21: mol_type = other DNA
aggactcttaatcttaatact

SEQ ID NO: 35733 - DNA, 21 bp, synthetic construct
  misc_feature 1..21: note = Description of Artificial Sequence: Synthetic oligonucleotide
  source 1..21: mol_type = other DNA
aacagagaacaactcagagac

SEQ ID NO: 35734 - DNA, 21 bp, synthetic construct
  misc_feature 1..21: note = Description of Artificial Sequence: Synthetic oligonucleotide
  source 1..21: mol_type = other DNA
ccgggtgaggttcatcggtct

SEQ ID NO: 35735 - DNA, 21 bp, synthetic construct
  misc_feature 1..21: note = Description of Artificial Sequence: Synthetic oligonucleotide
  source 1..21: mol_type = other DNA
tctattcattcggatcggacg

SEQ ID NO: 35736 - DNA, 21 bp, synthetic construct
  misc_feature 1..21: note = Description of Artificial Sequence: Synthetic oligonucleotide
  source 1..21: mol_type = other DNA
tatgcgacggatggtcttaag

SEQ ID NO: 35737 - DNA, 21 bp, synthetic construct
  misc_feature 1..21: note = Description of Artificial Sequence: Synthetic oligonucleotide
  source 1..21: mol_type = other DNA
gacaccaacaaaaccagctac

SEQ ID NO: 35738 - DNA, 21 bp, synthetic construct
  misc_feature 1..21: note = Description of Artificial Sequence: Synthetic oligonucleotide
  source 1..21: mol_type = other DNA
tatggttcgcgtccgccttct

SEQ ID NO: 35739 - DNA, 21 bp, synthetic construct
  misc_feature 1..21: note = Description of Artificial Sequence: Synthetic oligonucleotide
  source 1..21: mol_type = other DNA
ccgttgattaatcgtactatg

SEQ ID NO: 35740 - DNA, 21 bp, synthetic construct
  misc_feature 1..21: note = Description of Artificial Sequence: Synthetic oligonucleotide
  source 1..21: mol_type = other DNA
agtaagagtgtggctcagtct

SEQ ID NO: 35741 - DNA, 21 bp, synthetic construct
  misc_feature 1..21: note = Description of Artificial Sequence: Synthetic oligonucleotide
  source 1..21: mol_type = other DNA
agagaccccacccccgtcaga

SEQ ID NO: 35742 - DNA, 21 bp, synthetic construct
  misc_feature 1..21: note = Description of Artificial Sequence: Synthetic oligonucleotide
  source 1..21: mol_type = other DNA
tatgggagtgagtcgaataag

SEQ ID NO: 35743 - DNA, 21 bp, synthetic construct
  misc_feature 1..21: note = Description of Artificial Sequence: Synthetic oligonucleotide
  source 1..21: mol_type = other DNA
gacagagtcctcagccaaggc

SEQ ID NO: 35744 - DNA, 21 bp, synthetic construct
  misc_feature 1..21: note = Description of Artificial Sequence: Synthetic oligonucleotide
  source 1..21: mol_type = other DNA
ttggttgcgtcggggcagaag

SEQ ID NO: 35745 - DNA, 21 bp, synthetic construct
  misc_feature 1..21: note = Description of Artificial Sequence: Synthetic oligonucleotide
  source 1..21: mol_type = other DNA
aattcgagtgattcgttgact

SEQ ID NO: 35746 - DNA, 21 bp, synthetic construct
  misc_feature 1..21: note = Description of Artificial Sequence: Synthetic oligonucleotide
  source 1..21: mol_type = other DNA
ggtgcttcgggtaagattggg

SEQ ID NO: 35747 - DNA, 21 bp, synthetic construct
  misc_feature 1..21: note = Description of Artificial Sequence: Synthetic oligonucleotide
  source 1..21: mol_type = other DNA
aatacgacgggtcatgctggg

SEQ ID NO: 35748 - DNA, 21 bp, synthetic construct
  misc_feature 1..21: note = Description of Artificial Sequence: Synthetic oligonucleotide
  source 1..21: mol_type = other DNA
tacagagtcggcagcatcagc

SEQ ID NO: 35749 - DNA, 21 bp, synthetic construct
  misc_feature 1..21: note = Description of Artificial Sequence: Synthetic oligonucleotide
  source 1..21: mol_type = other DNA
gtcaccctcccccccaacgcc

SEQ ID NO: 35750 - DNA, 21 bp, synthetic construct
  misc_feature 1..21: note = Description of Artificial Sequence: Synthetic oligonucleotide
  source 1..21: mol_type = other DNA
tgcgccaccagagccagctac

SEQ ID NO: 35751 - DNA, 21 bp, synthetic construct
  misc_feature 1..21: note = Description of Artificial Sequence: Synthetic oligonucleotide
  source 1..21: mol_type = other DNA
agcatcagccacagcagcagc

SEQ ID NO: 35752 - DNA, 21 bp, synthetic construct
  misc_feature 1..21: note = Description of Artificial Sequence: Synthetic oligonucleotide
  source 1..21: mol_type = other DNA
tgtaataatgctcgtgtttcg

SEQ ID NO: 35753 - DNA, 21 bp, synthetic construct
  misc_feature 1..21: note = Description of Artificial Sequence: Synthetic oligonucleotide
  source 1..21: mol_type = other DNA
actgtgcctggtcgttcgacg

SEQ ID NO: 35754 - DNA, 21 bp, synthetic construct
  misc_feature 1..21: note = Description of Artificial Sequence: Synthetic oligonucleotide
  source 1..21: mol_type = other DNA
aacgccctccccaacagaggc

SEQ ID NO: 35755 - DNA, 21 bp, synthetic construct
  misc_feature 1..21: note = Description of Artificial Sequence: Synthetic oligonucleotide
  source 1..21: mol_type = other DNA
aaccccagcgaaaaaatgctc

SEQ ID NO: 35756 - DNA, 21 bp, synthetic construct
  misc_feature 1..21: note = Description of Artificial Sequence: Synthetic oligonucleotide
  source 1..21: mol_type = other DNA
cccggcaccggcagcaaccac

SEQ ID NO: 35757 - DNA, 21 bp, synthetic construct
  misc_feature 1..21: note = Description of Artificial Sequence: Synthetic oligonucleotide
  source 1..21: mol_type = other DNA
cacatcacccccgccaccagc

SEQ ID NO: 35758 - DNA, 21 bp, synthetic construct
  misc_feature 1..21: note = Description of Artificial Sequence: Synthetic oligonucleotide
  source 1..21: mol_type = other DNA
agcagaaaccccaacatgatc

SEQ ID NO: 35759 - DNA, 21 bp, synthetic construct
  misc_feature 1..21: note = Description of Artificial Sequence: Synthetic oligonucleotide
  source 1..21: mol_type = other DNA
ggcgaaaacagcgccaaaaga

SEQ ID NO: 35760 - DNA, 21 bp, synthetic construct
  misc_feature 1..21: note = Description of Artificial Sequence: Synthetic oligonucleotide
  source 1..21: mol_type = other DNA
agtcttagttcgaagcagatg

SEQ ID NO: 35761 - DNA, 21 bp, synthetic construct
  misc_feature 1..21: note = Description of Artificial Sequence: Synthetic oligonucleotide
  source 1..21: mol_type = other DNA
tgcaacagcgtcaacgacaga

SEQ ID NO: 35762 - DNA, 21 bp, synthetic construct
  misc_feature 1..21: note = Description of Artificial Sequence: Synthetic oligonucleotide
  source 1..21: mol_type = other DNA
gagtctaagaattcggttgtg

SEQ ID NO: 35763 - DNA, 21 bp, synthetic construct
  misc_feature 1..21: note = Description of Artificial Sequence: Synthetic oligonucleotide
  source 1..21: mol_type = other DNA
gactaccacaacagcaaactc

SEQ ID NO: 35764 - DNA, 21 bp, synthetic construct
  misc_feature 1..21: note = Description of Artificial Sequence: Synthetic oligonucleotide
  source 1..21: mol_type = other DNA
gggcagaatactgtttctcgt

SEQ ID NO: 35765 - DNA, 21 bp, synthetic construct
  misc_feature 1..21: note = Description of Artificial Sequence: Synthetic oligonucleotide
  source 1..21: mol_type = other DNA
gatagtgttgctggttttacg

SEQ ID NO: 35766 - DNA, 21 bp, synthetic construct
  misc_feature 1..21: note = Description of Artificial Sequence: Synthetic oligonucleotide
  source 1..21: mol_type = other DNA
ccctacaaaaacaaacccagc

SEQ ID NO: 35767 - DNA, 21 bp, synthetic construct
  misc_feature 1..21: note = Description of Artificial Sequence: Synthetic oligonucleotide
  source 1..21: mol_type = other DNA
gttgcggataagggttctatg

SEQ ID NO: 35768 - DNA, 21 bp, synthetic construct
  misc_feature 1..21: note = Description of Artificial Sequence: Synthetic oligonucleotide
  source 1..21: mol_type = other DNA
ggccaaaacagaaacaacacc

SEQ ID NO: 35769 - DNA, 21 bp, synthetic construct
  misc_feature 1..21: note = Description of Artificial Sequence: Synthetic oligonucleotide
  source 1..21: mol_type = other DNA
agaagctacgaaggcatgcaa

SEQ ID NO: 35770 - DNA, 21 bp, synthetic construct
  misc_feature 1..21: note = Description of Artificial Sequence: Synthetic oligonucleotide
  source 1..21: mol_type = other DNA
aaacaaagaagcgcccccaac

SEQ ID NO: 35771 - DNA, 21 bp, synthetic construct
  misc_feature 1..21: note = Description of Artificial Sequence: Synthetic oligonucleotide
  source 1..21: mol_type = other DNA
actgcgcgtgggggtcctact

SEQ ID NO: 35772 - DNA, 21 bp, synthetic construct
  misc_feature 1..21: note = Description of Artificial Sequence: Synthetic oligonucleotide
  source 1..21: mol_type = other DNA
tcgatggggaagttgtctagt

SEQ ID NO: 35773 - DNA, 21 bp, synthetic construct
  misc_feature 1..21: note = Description of Artificial Sequence: Synthetic oligonucleotide
  source 1..21: mol_type = other DNA
gtcgtcctcgacaccaacaga

SEQ ID NO: 35774 - DNA, 21 bp, synthetic construct
  misc_feature 1..21: note = Description of Artificial Sequence: Synthetic oligonucleotide
  source 1..21: mol_type = other DNA
aatggggctacgaagaatagt

SEQ ID NO: 35775 - DNA, 21 bp, synthetic construct
  misc_feature 1..21: note = Description of Artificial Sequence: Synthetic oligonucleotide
  source 1..21: mol_type = other DNA
agcagccccctcgaacacagc

SEQ ID NO: 35776 - DNA, 21 bp, synthetic construct
  misc_feature 1..21: note = Description of Artificial Sequence: Synthetic oligonucleotide
  source 1..21: mol_type = other DNA
gctaagactaatttgagttct

SEQ ID NO: 35777 - DNA, 21 bp, synthetic construct
  misc_feature 1..21: note = Description of Artificial Sequence: Synthetic oligonucleotide
  source 1..21: mol_type = other DNA
agtcttcctaatactaatggg

SEQ ID NO: 35778 - DNA, 21 bp, synthetic construct
  misc_feature 1..21: note = Description of Artificial Sequence: Synthetic oligonucleotide
  source 1..21: mol_type = other DNA
ctcggcctcagagacaacacc

SEQ ID NO: 35779 - DNA, 21 bp, synthetic construct
  misc_feature 1..21: note = Description of Artificial Sequence: Synthetic oligonucleotide
  source 1..21: mol_type = other DNA
tcgaatgagactaagtcttcg

SEQ ID NO: 35780 - DNA, 21 bp, synthetic construct
  misc_feature 1..21: note = Description of Artificial Sequence: Synthetic oligonucleotide
  source 1..21: mol_type = other DNA
agcgtcaacagccaccacggc

SEQ ID NO: 35781 - DNA, 21 bp, synthetic construct
  misc_feature 1..21: note = Description of Artificial Sequence: Synthetic oligonucleotide
  source 1..21: mol_type = other DNA
accaaaggcggcagccaactc

SEQ ID NO: 35782 - DNA, 21 bp, synthetic construct
  misc_feature 1..21: note = Description of Artificial Sequence: Synthetic oligonucleotide
  source 1..21: mol_type = other DNA
cgtaatggtgctatgtctaat

SEQ ID NO: 35783 - DNA, 21 bp, synthetic construct
  misc_feature 1..21: note = Description of Artificial Sequence: Synthetic oligonucleotide
  source 1..21: mol_type = other DNA
actggggtttcgcctctggct

SEQ ID NO: 35784 - DNA, 21 bp, synthetic construct
  misc_feature 1..21: note = Description of Artificial Sequence: Synthetic oligonucleotide
  source 1..21: mol_type = other DNA
gccatgaccggcagccacacc

SEQ ID NO: 35785 - DNA, 21 bp, synthetic construct
  misc_feature 1..21: note = Description of Artificial Sequence: Synthetic oligonucleotide
  source 1..21: mol_type = other DNA
ggcacccccaacaccaaagtc

SEQ ID NO: 35786 - DNA, 21 bp, synthetic construct
  misc_feature 1..21: note = Description of Artificial Sequence: Synthetic oligonucleotide
  source 1..21: mol_type = other DNA
catggtattggtaattcggcg

SEQ ID NO: 35787 - DNA, 21 bp, synthetic construct
  misc_feature 1..21: note = Description of Artificial Sequence: Synthetic oligonucleotide
  source 1..21: mol_type = other DNA
gagggttctgggaggcttact

SEQ ID NO: 35788 - DNA, 21 bp, synthetic construct
  misc_feature 1..21: note = Description of Artificial Sequence: Synthetic oligonucleotide
  source 1..21: mol_type = other DNA
tcgggggcttcgagtaattct

SEQ ID NO: 35789 - DNA, 21 bp, synthetic construct
  misc_feature 1..21: note = Description of Artificial Sequence: Synthetic oligonucleotide
  source 1..21: mol_type = other DNA
cagaatcgtaatactgttggt

SEQ ID NO: 35790 - DNA, 21 bp, synthetic construct
  misc_feature 1..21: note = Description of Artificial Sequence: Synthetic oligonucleotide
  source 1..21: mol_type = other DNA
ggcacccaaaaacaaaccagc

SEQ ID NO: 35791 - DNA, 21 bp, synthetic construct
  misc_feature 1..21: note = Description of Artificial Sequence: Synthetic oligonucleotide
  source 1..21: mol_type = other DNA
tataatagtactactgcgact

SEQ ID NO: 35792 - DNA, 21 bp, synthetic construct
  misc_feature 1..21: note = Description of Artificial Sequence: Synthetic oligonucleotide
  source 1..21: mol_type = other DNA
atgggtaatgcgggtgtgcgg

SEQ ID NO: 35793 - DNA, 21 bp, synthetic construct
  misc_feature 1..21: note = Description of Artificial Sequence: Synthetic oligonucleotide
  source 1..21: mol_type = other DNA
ttttcgcttaagggtgggaat

SEQ ID NO: 35794 - DNA, 21 bp, synthetic construct
  misc_feature 1..21: note = Description of Artificial Sequence: Synthetic oligonucleotide
  source 1..21: mol_type = other DNA
aacggcagcggccaaacccaa

SEQ ID NO: 35795 - DNA, 21 bp, synthetic construct
  misc_feature 1..21: note = Description of Artificial Sequence: Synthetic oligonucleotide
  source 1..21: mol_type = other DNA
cttaataagtctacgcttccg

SEQ ID NO: 35796 - DNA, 21 bp, synthetic construct
  misc_feature 1..21: note = Description of Artificial Sequence: Synthetic oligonucleotide
  source 1..21: mol_type = other DNA
cctagtaattcgggtaataat

SEQ ID NO: 35797 - DNA, 21 bp, synthetic construct
  misc_feature 1..21: note = Description of Artificial Sequence: Synthetic oligonucleotide
  source 1..21: mol_type = other DNA
cagcctacgacgagtgctctg

SEQ ID NO: 35798 - DNA, 21 bp, synthetic construct
  misc_feature 1..21: note = Description of Artificial Sequence: Synthetic oligonucleotide
  source 1..21: mol_type = other DNA
gtcgccagcagcgcccacgtc

SEQ ID NO: 35799 - DNA, 21 bp, synthetic construct
  misc_feature 1..21: note = Description of Artificial Sequence: Synthetic oligonucleotide
  source 1..21: mol_type = other DNA
gggattgctactactaatagg

SEQ ID NO: 35800 - DNA, 21 bp, synthetic construct
  misc_feature 1..21: note = Description of Artificial Sequence: Synthetic oligonucleotide
  source 1..21: mol_type = other DNA
cgtctgcataatatgtcggct

SEQ ID NO: 35801 - DNA, 21 bp, synthetic construct
  misc_feature 1..21: note = Description of Artificial Sequence: Synthetic oligonucleotide
  source 1..21: mol_type = other DNA
tctcagcagtctgctgcgctt

SEQ ID NO: 35802 - DNA, 21 bp, synthetic construct
  misc_feature 1..21: note = Description of Artificial Sequence: Synthetic oligonucleotide
  source 1..21: mol_type = other DNA
atgctgaatacttctcattat

SEQ ID NO: 35803 - DNA, 21 bp, synthetic construct
  misc_feature 1..21: note = Description of Artificial Sequence: Synthetic oligonucleotide
  source 1..21: mol_type = other DNA
cagggtctgtctaagagtggg

SEQ ID NO: 35804 - DNA, 21 bp, synthetic construct
  misc_feature 1..21: note = Description of Artificial Sequence: Synthetic oligonucleotide
  source 1..21: mol_type = other DNA
agacccatcgccagcagcggc

SEQ ID NO: 35805 - DNA, 21 bp, synthetic construct
  misc_feature 1..21: note = Description of Artificial Sequence: Synthetic oligonucleotide
  source 1..21: mol_type = other DNA
gatgtgcataggagtagtggg

SEQ ID NO: 35806 - DNA, 21 bp, synthetic construct
  misc_feature 1..21: note = Description of Artificial Sequence: Synthetic oligonucleotide
  source 1..21: mol_type = other DNA
tttaatagtgggagtggtcgt

SEQ ID NO: 35807 - DNA, 21 bp, synthetic construct
  misc_feature 1..21: note = Description of Artificial Sequence: Synthetic oligonucleotide
  source 1..21: mol_type = other DNA
attggtagtaatgcgcggcag

SEQ ID NO: 35808 - DNA, 21 bp, synthetic construct
  misc_feature 1..21: note = Description of Artificial Sequence: Synthetic oligonucleotide
  source 1..21: mol_type = other DNA
ccccacgtcgccagacaaatg

SEQ ID NO: 35809 - DNA, 21 bp, synthetic construct
  misc_feature 1..21: note = Description of Artificial Sequence: Synthetic oligonucleotide
  source 1..21: mol_type = other DNA
ttgactgcggttagtccgaag

SEQ ID NO: 35810 - DNA, 21 bp, synthetic construct
  misc_feature 1..21: note = Description of Artificial Sequence: Synthetic oligonucleotide
  source 1..21: mol_type = other DNA
tatcctagtccgacggttact

SEQ ID NO: 35811 - DNA, 21 bp, synthetic construct
  misc_feature 1..21: note = Description of Artificial Sequence: Synthetic oligonucleotide
  source 1..21: mol_type = other DNA
atccaacaaggcagcagaacc

SEQ ID NO: 35812 - DNA, 21 bp, synthetic construct
  misc_feature 1..21: note = Description of Artificial Sequence: Synthetic oligonucleotide
  source 1..21: mol_type = other DNA
aacgtcagcggccaaaaccaa

SEQ ID NO: 35813 - DNA, 21 bp, synthetic construct
  misc_feature 1..21: note = Description of Artificial Sequence: Synthetic oligonucleotide
  source 1..21: mol_type = other DNA
gggtctgggtctcggttgatt

SEQ ID NO: 35814 - DNA, 21 bp, synthetic construct
  misc_feature 1..21: note = Description of Artificial Sequence: Synthetic oligonucleotide
  source 1..21: mol_type = other DNA
aatcagcagaatgggagtaat

SEQ ID NO: 35815 - DNA, 21 bp, synthetic construct
  misc_feature 1..21: note = Description of Artificial Sequence: Synthetic oligonucleotide
  source 1..21: mol_type = other DNA
atggtttcgggtaagagttat

SEQ ID NO: 35816 - DNA, 21 bp, synthetic construct
  misc_feature 1..21: note = Description of Artificial Sequence: Synthetic oligonucleotide
  source 1..21: mol_type = other DNA
ctgggtggtcggagtagtaat

SEQ ID NO: 35817 - DNA, 21 bp, synthetic construct
  misc_feature 1..21: note = Description of Artificial Sequence: Synthetic oligonucleotide
  source 1..21: mol_type = other DNA
aacggttctgcacagaatcaa

SEQ ID NO: 35818 - DNA, 21 bp, synthetic construct
  misc_feature 1..21: note = Description of Artificial Sequence: Synthetic oligonucleotide
  source 1..21: mol_type = other DNA
accggccaacaaaccgccacc

SEQ ID NO: 35819 - DNA, 21 bp, synthetic construct
  misc_feature 1..21: note = Description of Artificial Sequence: Synthetic oligonucleotide
  source 1..21: mol_type = other DNA
gccagcaccgccatcaaccaa

SEQ ID NO: 35820 - DNA, 21 bp, synthetic construct
  misc_feature 1..21: note = Description of Artificial Sequence: Synthetic oligonucleotide
  source 1..21: mol_type = other DNA
ggtcagcctaattctgcgcgg

SEQ ID NO: 35821 - DNA, 21 bp, synthetic construct
  misc_feature 1..21: note = Description of Artificial Sequence: Synthetic oligonucleotide
  source 1..21: mol_type = other DNA
aacagcatcagcagagtcacc

SEQ ID NO: 35822 - DNA, 21 bp, synthetic construct
  misc_feature 1..21: note = Description of Artificial Sequence: Synthetic oligonucleotide
  source 1..21: mol_type = other DNA
gtgaatacgtctcatacgaat

SEQ ID NO: 35823 - DNA, 21 bp, synthetic construct
  misc_feature 1..21: note = Description of Artificial Sequence: Synthetic oligonucleotide
  source 1..21: mol_type = other DNA
tctactaatggtaatggtttg

SEQ ID NO: 35824 - DNA, 21 bp, synthetic construct
  misc_feature 1..21: note = Description of Artificial Sequence: Synthetic oligonucleotide
  source 1..21: mol_type = other DNA
aatagtggggcgaggcttagt

SEQ ID NO: 35825 - DNA, 21 bp, synthetic construct
  misc_feature 1..21: note = Description of Artificial Sequence: Synthetic oligonucleotide
  source 1..21: mol_type = other DNA
tcttcgacgtctcctgggagg

SEQ ID NO: 35826 - DNA, 21 bp, synthetic construct
  misc_feature 1..21: note = Description of Artificial Sequence: Synthetic oligonucleotide
  source 1..21: mol_type = other DNA
aaaagcgacgcccacaccgcc

SEQ ID NO: 35827 - DNA, 21 bp, synthetic construct
  misc_feature 1..21: note = Description of Artificial Sequence: Synthetic oligonucleotide
  source 1..21: mol_type = other DNA
gtgcatcaggctggggctaat

SEQ ID NO: 35828 - DNA, 21 bp, synthetic construct
  misc_feature 1..21: note = Description of Artificial Sequence: Synthetic oligonucleotide
  source 1..21: mol_type = other DNA
tccgatactaagccttttacg

SEQ ID NO: 35829 - DNA, 21 bp, synthetic construct
  misc_feature 1..21: note = Description of Artificial Sequence: Synthetic oligonucleotide
  source 1..21: mol_type = other DNA
actgctttttctactaatcgg

SEQ ID NO: 35830 - DNA, 21 bp, synthetic construct
  misc_feature 1..21: note = Description of Artificial Sequence: Synthetic oligonucleotide
  source 1..21: mol_type = other DNA
cttagtatgaatacttcgaag

SEQ ID NO: 35831 - DNA, 21 bp, synthetic construct
  misc_feature 1..21: note = Description of Artificial Sequence: Synthetic oligonucleotide
  source 1..21: mol_type = other DNA
atgaccgaaagcagcagaacc

SEQ ID NO: 35832 - DNA, 21 bp, synthetic construct
  misc_feature 1..21: note = Description of Artificial Sequence: Synthetic oligonucleotide
  source 1..21: mol_type = other DNA
gagcgtgctaaggggtctagt

SEQ ID NO: 35833 - DNA, 21 bp, synthetic construct
  misc_feature 1..21: note = Description of Artificial Sequence: Synthetic oligonucleotide
  source 1..21: mol_type = other DNA
agactcaccggcatcagcacc

SEQ ID NO: 35834 - DNA, 21 bp, synthetic construct
  misc_feature 1..21: note = Description of Artificial Sequence: Synthetic oligonucleotide
  source 1..21: mol_type = other DNA
atgaagtcgcagaagtatgct

SEQ ID NO: 35835 - DNA, 21 bp, synthetic construct
  misc_feature 1..21: note = Description of Artificial Sequence: Synthetic oligonucleotide
  source 1..21: mol_type = other DNA
tctcctggtaataagagtact

SEQ ID NO: 35836 - DNA, 21 bp, synthetic construct
  misc_feature 1..21: note = Description of Artificial Sequence: Synthetic oligonucleotide
  source 1..21: mol_type = other DNA
tttagtagtgcttcttttacg

SEQ ID NO: 35837 - DNA, 21 bp, synthetic construct
  misc_feature 1..21: note = Description of Artificial Sequence: Synthetic oligonucleotide
  source 1..21: mol_type = other DNA
agaggcatcgacaacaaaggc

SEQ ID NO: 35838 - DNA, 21 bp, synthetic construct
  misc_feature 1..21: note = Description of Artificial Sequence: Synthetic oligonucleotide
  source 1..21: mol_type = other DNA
atcgtcagccccgtcagcaaa

SEQ ID NO: 35839 - DNA, 21 bp, synthetic construct
  misc_feature 1..21: note = Description of Artificial Sequence: Synthetic oligonucleotide
  source 1..21: mol_type = other DNA
actactcataatattcagggg

SEQ ID NO: 35840 - DNA, 21 bp, synthetic construct
  misc_feature 1..21: note = Description of Artificial Sequence: Synthetic oligonucleotide
  source 1..21: mol_type = other DNA
ggtgatgctggtagttttagt

SEQ ID NO: 35841 - DNA, 21 bp, synthetic construct
  misc_feature 1..21: note = Description of Artificial Sequence: Synthetic oligonucleotide
  source 1..21: mol_type = other DNA
ctcggcgtcaaaacccccacc

SEQ ID NO: 35842 - DNA, 21 bp, synthetic construct
  misc_feature 1..21: note = Description of Artificial Sequence: Synthetic oligonucleotide
  source 1..21: mol_type = other DNA
actaatcgtgtgggttatggt

SEQ ID NO: 35843 - DNA, 21 bp, synthetic construct
  misc_feature 1..21: note = Description of Artificial Sequence: Synthetic oligonucleotide
  source 1..21: mol_type = other DNA
tcggcgcgggatagggcgtcg

SEQ ID NO: 35844 - DNA, 21 bp, synthetic construct
  misc_feature 1..21: note = Description of Artificial Sequence: Synthetic oligonucleotide
  source 1..21: mol_type = other DNA
aaagacttcggccaaatgaga

SEQ ID NO: 35845 - DNA, 21 bp, synthetic construct
  misc_feature 1..21: note = Description of Artificial Sequence: Synthetic oligonucleotide
  source 1..21: mol_type = other DNA
gatattagtgttcggccgggt

SEQ ID NO: 35846 - DNA, 21 bp, synthetic construct
  misc_feature 1..21: note = Description of Artificial Sequence: Synthetic oligonucleotide
  source 1..21: mol_type = other DNA
cccagccaagaaggccaacaa

SEQ ID NO: 35847 - DNA, 21 bp, synthetic construct
  misc_feature 1..21: note = Description of Artificial Sequence: Synthetic oligonucleotide
  source 1..21: mol_type = other DNA
ccgattactcatcctttgcgt

SEQ ID NO: 35848 - DNA, 21 bp, synthetic construct
  misc_feature 1..21: note = Description of Artificial Sequence: Synthetic oligonucleotide
  source 1..21: mol_type = other DNA
ccgggtcatgctacgcagagt

SEQ ID NO: 35849 - DNA, 21 bp, synthetic construct
  misc_feature 1..21: note = Description of Artificial Sequence: Synthetic oligonucleotide
  source 1..21: mol_type = other DNA
aggccggtggggggtctggcg

SEQ ID NO: 35850 - DNA, 21 bp, synthetic construct
  misc_feature 1..21: note = Description of Artificial Sequence: Synthetic oligonucleotide
  source 1..21: mol_type = other DNA
atgtctacggctcgttctgct

SEQ ID NO: 35851 - DNA, 21 bp, synthetic construct
  misc_feature 1..21: note = Description of Artificial Sequence: Synthetic oligonucleotide
  source 1..21: mol_type = other DNA
agcaaccccagcggcttcagc

SEQ ID NO: 35852 - DNA, 21 bp, synthetic construct
  misc_feature 1..21: note = Description of Artificial Sequence: Synthetic oligonucleotide
  source 1..21: mol_type = other DNA
ggcatgcaaaaaatgagcagc

SEQ ID NO: 35853 - DNA, 21 bp, synthetic construct
  misc_feature 1..21: note = Description of Artificial Sequence: Synthetic oligonucleotide
  source 1..21: mol_type = other DNA
ccgcttgataagtctatgatg

SEQ ID NO: 35854 - DNA, 21 bp, synthetic construct
  misc_feature 1..21: note = Description of Artificial Sequence: Synthetic oligonucleotide
  source 1..21: mol_type = other DNA
gtccaaagaagcagcaaccaa

SEQ ID NO: 35855 - DNA, 21 bp, synthetic construct
  misc_feature 1..21: note = Description of Artificial Sequence: Synthetic oligonucleotide
  source 1..21: mol_type = other DNA
agcggcggcaaaggccccacc

SEQ ID NO: 35856 - DNA, 21 bp, synthetic construct
  misc_feature 1..21: note = Description of Artificial Sequence: Synthetic oligonucleotide
  source 1..21: mol_type = other DNA
gaccaagtcagccacaaactc

SEQ ID NO: 35857 - DNA, 21 bp, synthetic construct
  misc_feature 1..21: note = Description of Artificial Sequence: Synthetic oligonucleotide
  source 1..21: mol_type = other DNA
tcgcatgatagtcgtgtggct

SEQ ID NO: 35858 - DNA, 21 bp, synthetic construct
  misc_feature 1..21: note = Description of Artificial Sequence: Synthetic oligonucleotide
  source 1..21: mol_type = other DNA
ggcaccgccggcagattcaac

SEQ ID NO: 35859 - DNA, 21 bp, synthetic construct
  misc_feature 1..21: note = Description of Artificial Sequence: Synthetic oligonucleotide
  source 1..21: mol_type = other DNA
cgtgatcggactaatgctgct

SEQ ID NO: 35860 - DNA, 21 bp, synthetic construct
  misc_feature 1..21: note = Description of Artificial Sequence: Synthetic oligonucleotide
  source 1..21: mol_type = other DNA
cccgtcagcggcgccaccatc

SEQ ID NO: 35861 - DNA, 21 bp, synthetic construct
  misc_feature 1..21: note = Description of Artificial Sequence: Synthetic oligonucleotide
  source 1..21: mol_type = other DNA
gtcctcaacgccaaaagcagc

SEQ ID NO: 35862 - DNA, 21 bp, synthetic construct
  misc_feature 1..21: note = Description of Artificial Sequence: Synthetic oligonucleotide
  source 1..21: mol_type = other DNA
cacgtcaccaaaagcaccgcc

SEQ ID NO: 35863 - DNA, 21 bp, synthetic construct
  misc_feature 1..21: note = Description of Artificial Sequence: Synthetic oligonucleotide
  source 1..21: mol_type = other DNA
agcatcaaaagcgtcaccaac

SEQ ID NO: 35864 - DNA, 21 bp, synthetic construct
  misc_feature 1..21: note = Description of Artificial Sequence: Synthetic oligonucleotide
  source 1..21: mol_type = other DNA
agtgcgggtggtgcggtgtct

SEQ ID NO: 35865 - DNA, 21 bp, synthetic construct
  misc_feature 1..21: note = Description of Artificial Sequence: Synthetic oligonucleotide
  source 1..21: mol_type = other DNA
atgggtcagggtactcttcgt

SEQ ID NO: 35866 - DNA, 21 bp, synthetic construct
  misc_feature 1..21: note = Description of Artificial Sequence: Synthetic oligonucleotide
  source 1..21: mol_type = other DNA
ggcagactcaccagcagcatc

SEQ ID NO: 35867 - DNA, 21 bp, synthetic construct
  misc_feature 1..21: note = Description of Artificial Sequence: Synthetic oligonucleotide
  source 1..21: mol_type = other DNA
acccaaagccacaacctcgcc

SEQ ID NO: 35868 - DNA, 21 bp, synthetic construct
  misc_feature 1..21: note = Description of Artificial Sequence: Synthetic oligonucleotide
  source 1..21: mol_type = other DNA
catatttctactcggtctgct

SEQ ID NO: 35869 - DNA, 21 bp, synthetic construct
  misc_feature 1..21: note = Description of Artificial Sequence: Synthetic oligonucleotide
  source 1..21: mol_type = other DNA
gatcagggtaatggttatggg

SEQ ID NO: 35870 - DNA, 21 bp, synthetic construct
  misc_feature 1..21: note = Description of Artificial Sequence: Synthetic oligonucleotide
  source 1..21: mol_type = other DNA
accccccaaaacagcgtcaaa

SEQ ID NO: 35871 - DNA, 21 bp, synthetic construct
  misc_feature 1..21: note = Description of Artificial Sequence: Synthetic oligonucleotide
  source 1..21: mol_type = other DNA
aaaagcgcccaaggcggcaac

SEQ ID NO: 35872 - DNA, 21 bp, synthetic construct
  misc_feature 1..21: note = Description of Artificial Sequence: Synthetic oligonucleotide
  source 1..21: mol_type = other DNA
gagtcttcttcttctatgggt

SEQ ID NO: 35873 - DNA, 21 bp, synthetic construct
  misc_feature 1..21: note = Description of Artificial Sequence: Synthetic oligonucleotide
  source 1..21: mol_type = other DNA
cggaataataatacgcctggg

SEQ ID NO: 35874 - DNA, 21 bp, synthetic construct
  misc_feature 1..21: note = Description of Artificial Sequence: Synthetic oligonucleotide
  source 1..21: mol_type = other DNA
taccaaaacgtcagcagcaaa

SEQ ID NO: 35875 - DNA, 21 bp, synthetic construct
  misc_feature 1..21: note = Description of Artificial Sequence: Synthetic oligonucleotide
  source 1..21: mol_type = other DNA
tataataatggtggtactcgt

SEQ ID NO: 35876 - DNA, 21 bp, synthetic construct
  misc_feature 1..21: note = Description of Artificial Sequence: Synthetic oligonucleotide
  source 1..21: mol_type = other DNA
aacggcagcggcaccaaccaa

SEQ ID NO: 35877 - DNA, 21 bp, synthetic construct
  misc_feature 1..21: note = Description of Artificial Sequence: Synthetic oligonucleotide
  source 1..21: mol_type = other DNA
atccccctcagcagccaaaga

SEQ ID NO: 35878 - DNA, 21 bp, synthetic construct
  misc_feature 1..21: note = Description of Artificial Sequence: Synthetic oligonucleotide
  source 1..21: mol_type = other DNA
ggtttgcatcctacgtattct

SEQ ID NO: 35879 - DNA, 21 bp, synthetic construct
  misc_feature 1..21: note = Description of Artificial Sequence: Synthetic oligonucleotide
  source 1..21: mol_type = other DNA
gatgctcagcgtaggggtgtg

SEQ ID NO: 35880 - DNA, 21 bp, synthetic construct
  misc_feature 1..21: note = Description of Artificial Sequence: Synthetic oligonucleotide
  source 1..21: mol_type = other DNA
aatgttagtactggggctact

SEQ ID NO: 35881 - DNA, 21 bp, synthetic construct
  misc_feature 1..21: note = Description of Artificial Sequence: Synthetic oligonucleotide
  source 1..21: mol_type = other DNA
cccacccaaaacggcagaagc

SEQ ID NO: 35882 - DNA, 21 bp, synthetic construct
  misc_feature 1..21: note = Description of Artificial Sequence: Synthetic oligonucleotide
  source 1..21: mol_type = other DNA
agcagcgtcagcagaagccac

SEQ ID NO: 35883 - DNA, 21 bp, synthetic construct
  misc_feature 1..21: note = Description of Artificial Sequence: Synthetic oligonucleotide
  source 1..21: mol_type = other DNA
ccggatgttaaggtgactagg

SEQ ID NO: 35884 - DNA, 21 bp, synthetic construct
  misc_feature 1..21: note = Description of Artificial Sequence: Synthetic oligonucleotide
  source 1..21: mol_type = other DNA
aatgtttcgagtgcgattaag

SEQ ID NO: 35885 - DNA, 21 bp, synthetic construct
  misc_feature 1..21: note = Description of Artificial Sequence: Synthetic oligonucleotide
  source 1..21: mol_type = other DNA
atgagtagtaggtcgagtgtg

SEQ ID NO: 35886 - DNA, 21 bp, synthetic construct
  misc_feature 1..21: note = Description of Artificial Sequence: Synthetic oligonucleotide
  source 1..21: mol_type = other DNA
ggcagactcaacaccaacggc

SEQ ID NO: 35887 - DNA, 21 bp, synthetic construct
  misc_feature 1..21: note = Description of Artificial Sequence: Synthetic oligonucleotide
  source 1..21: mol_type = other DNA
gatatttcgaggtctcatggt

SEQ ID NO: 35888 - DNA, 21 bp, synthetic construct
  misc_feature 1..21: note = Description of Artificial Sequence: Synthetic oligonucleotide
  source 1..21: mol_type = other DNA
gaagccaccagcagcaccaaa

SEQ ID NO: 35889 - DNA, 21 bp, synthetic construct
  misc_feature 1..21: note = Description of Artificial Sequence: Synthetic oligonucleotide
  source 1..21: mol_type = other DNA
ggtatttcgccggggacggct

SEQ ID NO: 35890 - DNA, 21 bp, synthetic construct
  misc_feature 1..21: note = Description of Artificial Sequence: Synthetic oligonucleotide
  source 1..21: mol_type = other DNA
cccctcaccaccagacccagc

SEQ ID NO: 35891 - DNA, 21 bp, synthetic construct
  misc_feature 1..21: note = Description of Artificial Sequence: Synthetic oligonucleotide
  source 1..21: mol_type = other DNA
gctatgaatcgggaggtgtct

SEQ ID NO: 35892 - DNA, 21 bp, synthetic construct
  misc_feature 1..21: note = Description of Artificial Sequence: Synthetic oligonucleotide
  source 1..21: mol_type = other DNA
cccagccaaaccaaacccagc

SEQ ID NO: 35893 - DNA, 21 bp, synthetic construct
  misc_feature 1..21: note = Description of Artificial Sequence: Synthetic oligonucleotide
  source 1..21: mol_type = other DNA
tcttcgaatgagaaggatagg

SEQ ID NO: 35894 - DNA, 21 bp, synthetic construct
  misc_feature 1..21: note = Description of Artificial Sequence: Synthetic oligonucleotide
  source 1..21: mol_type = other DNA
catcatagtactcttcagact

SEQ ID NO: 35895 - DNA, 21 bp, synthetic construct
  misc_feature 1..21: note = Description of Artificial Sequence: Synthetic oligonucleotide
  source 1..21: mol_type = other DNA
aacgccagcggccaaaaccaa

SEQ ID NO: 35896 - DNA, 21 bp, synthetic construct
  misc_feature 1..21: note = Description of Artificial Sequence: Synthetic oligonucleotide
  source 1..21: mol_type = other DNA
agcatgggcaacagcatcagc

SEQ ID NO: 35897 - DNA, 21 bp, synthetic construct
  misc_feature 1..21: note = Description of Artificial Sequence: Synthetic oligonucleotide
  source 1..21: mol_type = other DNA
agcgccgtcggcaaagccagc

SEQ ID NO: 35898 - DNA, 21 bp, synthetic construct
  misc_feature 1..21: note = Description of Artificial Sequence: Synthetic oligonucleotide
  source 1..21: mol_type = other DNA
cccagccacaaccccaccaac

SEQ ID NO: 35899 - DNA, 21 bp, synthetic construct
  misc_feature 1..21: note = Description of Artificial Sequence: Synthetic oligonucleotide
  source 1..21: mol_type = other DNA
tcggataagggtaatactcgg

SEQ ID NO: 35900 - DNA, 21 bp, synthetic construct
  misc_feature 1..21: note = Description of Artificial Sequence: Synthetic oligonucleotide
  source 1..21: mol_type = other DNA
agcagactcgaaaaaagcaac

SEQ ID NO: 35901 - DNA, 21 bp, synthetic construct
  misc_feature 1..21: note = Description of Artificial Sequence: Synthetic oligonucleotide
  source 1..21: mol_type = other DNA
cggccttcgatgcctcatagt

SEQ ID NO: 35902 - DNA, 21 bp, synthetic construct
  misc_feature 1..21: note = Description of Artificial Sequence: Synthetic oligonucleotide
  source 1..21: mol_type = other DNA
ctcagagacaccaacatgaac

SEQ ID NO: 35903 - DNA, 21 bp, synthetic construct
  misc_feature 1..21: note = Description of Artificial Sequence: Synthetic oligonucleotide
  source 1..21: mol_type = other DNA
agagtcaacctcaacgaactc

SEQ ID NO: 35904 - DNA, 21 bp, synthetic construct
  misc_feature 1..21: note = Description of Artificial Sequence: Synthetic oligonucleotide
  source 1..21: mol_type = other DNA
gggacgactaattcgcgtaat

SEQ ID NO: 35905 - DNA, 21 bp, synthetic construct
  misc_feature 1..21: note = Description of Artificial Sequence: Synthetic oligonucleotide
  source 1..21: mol_type = other DNA
aatagtaatgggtttaataat

SEQ ID NO: 35906 - DNA, 21 bp, synthetic construct
  misc_feature 1..21: note = Description of Artificial Sequence: Synthetic oligonucleotide
  source 1..21: mol_type = other DNA
aatcagggtggttatcatggt

SEQ ID NO: 35907 - DNA, 21 bp, synthetic construct
  misc_feature 1..21: note = Description of Artificial Sequence: Synthetic oligonucleotide
  source 1..21: mol_type = other DNA
atcagccccgtccccctcacc

SEQ ID NO: 35908 - DNA, 21 bp, synthetic construct
  misc_feature 1..21: note = Description of Artificial Sequence: Synthetic oligonucleotide
  source 1..21: mol_type = other DNA
catgtgccgtcgaagcttgct

SEQ ID NO: 35909 - DNA, 21 bp, synthetic construct
  misc_feature 1..21: note = Description of Artificial Sequence: Synthetic oligonucleotide
  source 1..21: mol_type = other DNA
tcgattccgtcgactagtcag

SEQ ID NO: 35910 - DNA, 21 bp, synthetic construct
  misc_feature 1..21: note = Description of Artificial Sequence: Synthetic oligonucleotide
  source 1..21: mol_type = other DNA
aacagagtcgaacacacccaa

SEQ ID NO: 35911 - DNA, 21 bp, synthetic construct
  misc_feature 1..21: note = Description of Artificial Sequence: Synthetic oligonucleotide
  source 1..21: mol_type = other DNA
agaatgagcagcacccacggc

SEQ ID NO: 35912 - DNA, 21 bp, synthetic construct
  misc_feature 1..21: note = Description of Artificial Sequence: Synthetic oligonucleotide
  source 1..21: mol_type = other DNA
ggtatgaagggtagtgttaat

SEQ ID NO: 35913 - DNA, 21 bp, synthetic construct
  misc_feature 1..21: note = Description of Artificial Sequence: Synthetic oligonucleotide
  source 1..21: mol_type = other DNA
agtgttgcgggtactagtagg

SEQ ID NO: 35914 - DNA, 21 bp, synthetic construct
  misc_feature 1..21: note = Description of Artificial Sequence: Synthetic oligonucleotide
  source 1..21: mol_type = other DNA
aacaaaagcaacaccttcctc

SEQ ID NO: 35915 - DNA, 21 bp, synthetic construct
  misc_feature 1..21: note = Description of Artificial Sequence: Synthetic oligonucleotide
  source 1..21: mol_type = other DNA
gacccccacagcggcggcaaa

SEQ ID NO: 35916 - DNA, 21 bp, synthetic construct
  misc_feature 1..21: note = Description of Artificial Sequence: Synthetic oligonucleotide
  source 1..21: mol_type = other DNA
ggcaccagcaccagcctcaga

SEQ ID NO: 35917 - DNA, 21 bp, synthetic construct
  misc_feature 1..21: note = Description of Artificial Sequence: Synthetic oligonucleotide
  source 1..21: mol_type = other DNA
ctcgccaccaacagaagcaac

SEQ ID NO: 35918 - DNA, 21 bp, synthetic construct
  misc_feature 1..21: note = Description of Artificial Sequence: Synthetic oligonucleotide
  source 1..21: mol_type = other DNA
aacagacaagtccccggcctc

SEQ ID NO: 35919 - DNA, 21 bp, synthetic construct
  misc_feature 1..21: note = Description of Artificial Sequence: Synthetic oligonucleotide
  source 1..21: mol_type = other DNA
tctactgggtcggtgagtaag

SEQ ID NO: 35920 - DNA, 21 bp, synthetic construct
  misc_feature 1..21: note = Description of Artificial Sequence: Synthetic oligonucleotide
  source 1..21: mol_type = other DNA
ggtctgccgcttaggtcggtt

SEQ ID NO: 35921 - DNA, 21 bp, synthetic construct
  misc_feature 1..21: note = Description of Artificial Sequence: Synthetic oligonucleotide
  source 1..21: mol_type = other DNA
caagtcaccagcatcggcgcc

SEQ ID NO: 35922 - DNA, 21 bp, synthetic construct
  misc_feature 1..21: note = Description of Artificial Sequence: Synthetic oligonucleotide
  source 1..21: mol_type = other DNA
cctcagtcgaggaagggggag

SEQ ID NO: 35923 - DNA, 21 bp, synthetic construct
  misc_feature 1..21: note = Description of Artificial Sequence: Synthetic oligonucleotide
  source 1..21: mol_type = other DNA
agctacgccgacaaacaaggc

SEQ ID NO: 35924 - DNA, 21 bp, synthetic construct
  misc_feature 1..21: note = Description of Artificial Sequence: Synthetic oligonucleotide
  source 1..21: mol_type = other DNA
cctcttcagcagaatcggtct

SEQ ID NO: 35925 - DNA, 21 bp, synthetic construct
  misc_feature 1..21: note = Description of Artificial Sequence: Synthetic oligonucleotide
  source 1..21: mol_type = other DNA
cacagcgaaaacggcaacaga

SEQ ID NO: 35926 - DNA, 21 bp, synthetic construct
  misc_feature 1..21: note = Description of Artificial Sequence: Synthetic oligonucleotide
  source 1..21: mol_type = other DNA
cgtgcttcgcagtctgtgggt

SEQ ID NO: 35927 - DNA, 21 bp, synthetic construct
  misc_feature 1..21: note = Description of Artificial Sequence: Synthetic oligonucleotide
  source 1..21: mol_type = other DNA
tttaattcttcttctggtagt

SEQ ID NO: 35928 - DNA, 21 bp, synthetic construct
  misc_feature 1..21: note = Description of Artificial Sequence: Synthetic oligonucleotide
  source 1..21: mol_type = other DNA
aacggttctggacagagtcaa

SEQ ID NO: 35929 - DNA, 21 bp, synthetic construct
  misc_feature 1..21: note = Description of Artificial Sequence: Synthetic oligonucleotide
  source 1..21: mol_type = other DNA
aacaccaccgccaaaagcagc

SEQ ID NO: 35930 - DNA, 21 bp, synthetic construct
  misc_feature 1..21: note = Description of Artificial Sequence: Synthetic oligonucleotide
  source 1..21: mol_type = other DNA
tctgtgagttctcctagggat

SEQ ID NO: 35931 - DNA, 21 bp, synthetic construct
  misc_feature 1..21: note = Description of Artificial Sequence: Synthetic oligonucleotide
  source 1..21: mol_type = other DNA
agccacggcccccaaatcacc

SEQ ID NO: 35932 - DNA, 21 bp, synthetic construct
  misc_feature 1..21: note = Description of Artificial Sequence: Synthetic oligonucleotide
  source 1..21: mol_type = other DNA
aaactccccgacagcagattc

SEQ ID NO: 35933 - DNA, 21 bp, synthetic construct
  misc_feature 1..21: note = Description of Artificial Sequence: Synthetic oligonucleotide
  source 1..21: mol_type = other DNA
gcgggtggtattaataagctt

SEQ ID NO: 35934 - DNA, 21 bp, synthetic construct
  misc_feature 1..21: note = Description of Artificial Sequence: Synthetic oligonucleotide
  source 1..21: mol_type = other DNA
ggtgctgagcggattttgcgt

SEQ ID NO: 35935 - DNA, 21 bp, synthetic construct
  misc_feature 1..21: note = Description of Artificial Sequence: Synthetic oligonucleotide
  source 1..21: mol_type = other DNA
ccgagtgcggggagggagaag

SEQ ID NO: 35936 - DNA, 21 bp, synthetic construct
  misc_feature 1..21: note = Description of Artificial Sequence: Synthetic oligonucleotide
  source 1..21: mol_type = other DNA
gttagtacgactcctgctttg

SEQ ID NO: 35937 - DNA, 21 bp, synthetic construct
  misc_feature 1..21: note = Description of Artificial Sequence: Synthetic oligonucleotide
  source 1..21: mol_type = other DNA
catagtacgtctttgtctaag

SEQ ID NO: 35938 - DNA, 21 bp, synthetic construct
  misc_feature 1..21: note = Description of Artificial Sequence: Synthetic oligonucleotide
  source 1..21: mol_type = other DNA
ggcagcagcatcccctggcaa

SEQ ID NO: 35939 - DNA, 21 bp, synthetic construct
  misc_feature 1..21: note = Description of Artificial Sequence: Synthetic oligonucleotide
  source 1..21: mol_type = other DNA
tggtcgacgagtaagcaggtt

SEQ ID NO: 35940 - DNA, 21 bp, synthetic construct
  misc_feature 1..21: note = Description of Artificial Sequence: Synthetic oligonucleotide
  source 1..21: mol_type = other DNA
ggtagtgcgggtaatatgctt

SEQ ID NO: 35941 - DNA, 21 bp, synthetic construct
  misc_feature 1..21: note = Description of Artificial Sequence: Synthetic oligonucleotide
  source 1..21: mol_type = other DNA
aacggtcctggacagaatcaa

SEQ ID NO: 35942 - DNA, 21 bp, synthetic construct
  misc_feature 1..21: note = Description of Artificial Sequence: Synthetic oligonucleotide
  source 1..21: mol_type = other DNA
actacttcgggtgctgggcgt

SEQ ID NO: 35943 - DNA, 21 bp, synthetic construct
  misc_feature 1..21: note = Description of Artificial Sequence: Synthetic oligonucleotide
  source 1..21: mol_type = other DNA
tcgcggaatacgcagtcgatg

SEQ ID NO: 35944 - DNA, 21 bp, synthetic construct
  misc_feature 1..21: note = Description of Artificial Sequence: Synthetic oligonucleotide
  source 1..21: mol_type = other DNA
accaccatgagcaaagtcggc

SEQ ID NO: 35945 - DNA, 21 bp, synthetic construct
  misc_feature 1..21: note = Description of Artificial Sequence: Synthetic oligonucleotide
  source 1..21: mol_type = other DNA
agtgggggtactcctgggcgt

SEQ ID NO: 35946 - DNA, 21 bp, synthetic construct
  misc_feature 1..21: note = Description of Artificial Sequence: Synthetic oligonucleotide
  source 1..21: mol_type = other DNA
attagggcgaaggagtctgcg

SEQ ID NO: 35947 - DNA, 21 bp, synthetic construct
  misc_feature 1..21: note = Description of Artificial Sequence: Synthetic oligonucleotide
  source 1..21: mol_type = other DNA
gggaatcgtgggtctgttatt

SEQ ID NO: 35948 - DNA, 21 bp, synthetic construct
  misc_feature 1..21: note = Description of Artificial Sequence: Synthetic oligonucleotide
  source 1..21: mol_type = other DNA
gacgactaccaacacaaaggc

SEQ ID NO: 35949 - DNA, 21 bp, synthetic construct
  misc_feature 1..21: note = Description of Artificial Sequence: Synthetic oligonucleotide
  source 1..21: mol_type = other DNA
aacagagtcggcagcatcagc

SEQ ID NO: 35950 - DNA, 21 bp, synthetic construct
  misc_feature 1..21: note = Description of Artificial Sequence: Synthetic oligonucleotide
  source 1..21: mol_type = other DNA
gatcttactcgggcgacgtct

SEQ ID NO: 35951 - DNA, 21 bp, synthetic construct
  misc_feature 1..21: note = Description of Artificial Sequence: Synthetic oligonucleotide
  source 1..21: mol_type = other DNA
catgcgacgtctggtacgcgt

SEQ ID NO: 35952 - DNA, 21 bp, synthetic construct
  misc_feature 1..21: note = Description of Artificial Sequence: Synthetic oligonucleotide
  source 1..21: mol_type = other DNA
aaaaactacgacaacgccgtc

SEQ ID NO: 35953 - DNA, 21 bp, synthetic construct
  misc_feature 1..21: note = Description of Artificial Sequence: Synthetic oligonucleotide
  source 1..21: mol_type = other DNA
agcttcgccaaaagcgccagc

SEQ ID NO: 35954 - DNA, 21 bp, synthetic construct
  misc_feature 1..21: note = Description of Artificial Sequence: Synthetic oligonucleotide
  source 1..21: mol_type = other DNA
caccacgacgccagccccaac

SEQ ID NO: 35955 - DNA, 21 bp, synthetic construct
  misc_feature 1..21: note = Description of Artificial Sequence: Synthetic oligonucleotide
  source 1..21: mol_type = other DNA
gacgtcctcagcaaaagccaa

SEQ ID NO: 35956 - DNA, 21 bp, synthetic construct
  misc_feature 1..21: note = Description of Artificial Sequence: Synthetic oligonucleotide
  source 1..21: mol_type = other DNA
caccccgaaaccgccttcaaa

SEQ ID NO: 35957 - DNA, 21 bp, synthetic construct
  misc_feature 1..21: note = Description of Artificial Sequence: Synthetic oligonucleotide
  source 1..21: mol_type = other DNA
agagccggcggcaacgccgtc

SEQ ID NO: 35958 - DNA, 21 bp, synthetic construct
  misc_feature 1..21: note = Description of Artificial Sequence: Synthetic oligonucleotide
  source 1..21: mol_type = other DNA
gtgggtggtggtcgtgataat

SEQ ID NO: 35959 - DNA, 21 bp, synthetic construct
  misc_feature 1..21: note = Description of Artificial Sequence: Synthetic oligonucleotide
  source 1..21: mol_type = other DNA
tgtactacgcggcagggtaat

SEQ ID NO: 35960 - DNA, 21 bp, synthetic construct
  misc_feature 1..21: note = Description of Artificial Sequence: Synthetic oligonucleotide
  source 1..21: mol_type = other DNA
tatggttcgaatacgccgact

SEQ ID NO: 35961 - DNA, 21 bp, synthetic construct
  misc_feature 1..21: note = Description of Artificial Sequence: Synthetic oligonucleotide
  source 1..21: mol_type = other DNA
ggccccatgagacccttccaa

SEQ ID NO: 35962 - DNA, 21 bp, synthetic construct
  misc_feature 1..21: note = Description of Artificial Sequence: Synthetic oligonucleotide
  source 1..21: mol_type = other DNA
gataggcataatacgacttct

SEQ ID NO: 35963 - DNA, 21 bp, synthetic construct
  misc_feature 1..21: note = Description of Artificial Sequence: Synthetic oligonucleotide
  source 1..21: mol_type = other DNA
ttgcctcatcatacttctgcg

SEQ ID NO: 35964 - DNA, 21 bp, synthetic construct
  misc_feature 1..21: note = Description of Artificial Sequence: Synthetic oligonucleotide
  source 1..21: mol_type = other DNA
agaaccgtcgacagcagcgac

SEQ ID NO: 35965 - DNA, 21 bp, synthetic construct
  misc_feature 1..21: note = Description of Artificial Sequence: Synthetic oligonucleotide
  source 1..21: mol_type = other DNA
agtgttcattcgaatgcgatt

SEQ ID NO: 35966 - DNA, 21 bp, synthetic construct
  misc_feature 1..21: note = Description of Artificial Sequence: Synthetic oligonucleotide
  source 1..21: mol_type = other DNA
gagggtcctagtagtcctcat

SEQ ID NO: 35967 - DNA, 21 bp, synthetic construct
  misc_feature 1..21: note = Description of Artificial Sequence: Synthetic oligonucleotide
  source 1..21: mol_type = other DNA
acgttttctaagggtactaat

SEQ ID NO: 35968 - DNA, 21 bp, synthetic construct
  misc_feature 1..21: note = Description of Artificial Sequence: Synthetic oligonucleotide
  source 1..21: mol_type = other DNA
tcgtcgcctgttaggaatact

SEQ ID NO: 35969 - DNA, 21 bp, synthetic construct
  misc_feature 1..21: note = Description of Artificial Sequence: Synthetic oligonucleotide
  source 1..21: mol_type = other DNA
aattcgagttcgtctaatcat

SEQ ID NO: 35970 - DNA, 21 bp, synthetic construct
  misc_feature 1..21: note = Description of Artificial Sequence: Synthetic oligonucleotide
  source 1..21: mol_type = other DNA
gacagaagcgccaccgtcaaa

SEQ ID NO: 35971 - DNA, 21 bp, synthetic construct
  misc_feature 1..21: note = Description of Artificial Sequence: Synthetic oligonucleotide
  source 1..21: mol_type = other DNA
agtgttcctggggtgtctcgg

SEQ ID NO: 35972 - DNA, 21 bp, synthetic construct
  misc_feature 1..21: note = Description of Artificial Sequence: Synthetic oligonucleotide
  source 1..21: mol_type = other DNA
cgtgagggtggtcagatggtg

SEQ ID NO: 35973 - DNA, 21 bp, synthetic construct
  misc_feature 1..21: note = Description of Artificial Sequence: Synthetic oligonucleotide
  source 1..21: mol_type = other DNA
ctgtcgacggttaatcagaat

SEQ ID NO: 35974 - DNA, 21 bp, synthetic construct
  misc_feature 1..21: note = Description of Artificial Sequence: Synthetic oligonucleotide
  source 1..21: mol_type = other DNA
agaaacaccagcgacctcgcc

SEQ ID NO: 35975 - DNA, 21 bp, synthetic construct
  misc_feature 1..21: note = Description of Artificial Sequence: Synthetic oligonucleotide
  source 1..21: mol_type = other DNA
aacggttctggactgaatcaa

SEQ ID NO: 35976 - DNA, 21 bp, synthetic construct
  misc_feature 1..21: note = Description of Artificial Sequence: Synthetic oligonucleotide
  source 1..21: mol_type = other DNA
cctggtttgcgtgatacggct

SEQ ID NO: 35977 - DNA, 21 bp, synthetic construct
  misc_feature 1..21: note = Description of Artificial Sequence: Synthetic oligonucleotide
  source 1..21: mol_type = other DNA
atgagtacgcatagttcgggt

SEQ ID NO: 35978 - DNA, 21 bp, synthetic construct
  misc_feature 1..21: note = Description of Artificial Sequence: Synthetic oligonucleotide
  source 1..21: mol_type = other DNA
gtttcgactgggaagagtgtc

SEQ ID NO: 35979 - DNA, 21 bp, synthetic construct
  misc_feature 1..21: note = Description of Artificial Sequence: Synthetic oligonucleotide
  source 1..21: mol_type = other DNA
aaccccagcatggccatgaaa

SEQ ID NO: 35980 - DNA, 21 bp, synthetic construct
  misc_feature 1..21: note = Description of Artificial Sequence: Synthetic oligonucleotide
  source 1..21: mol_type = other DNA
agactccccgaaaacgtcaga

SEQ ID NO: 35981 - DNA, 21 bp, synthetic construct
  misc_feature 1..21: note = Description of Artificial Sequence: Synthetic oligonucleotide
  source 1..21: mol_type = other DNA
cggccggatcgtactactctg

SEQ ID NO: 35982 - DNA, 21 bp, synthetic construct
  misc_feature 1..21: note = Description of Artificial Sequence: Synthetic oligonucleotide
  source 1..21: mol_type = other DNA
agcagagaaaccgtccccacc

SEQ ID NO: 35983 - DNA, 21 bp, synthetic construct
  misc_feature 1..21: note = Description of Artificial Sequence: Synthetic oligonucleotide
  source 1..21: mol_type = other DNA
gacccccacaacaccagcaga

SEQ ID NO: 35984 - DNA, 21 bp, synthetic construct
  misc_feature 1..21: note = Description of Artificial Sequence: Synthetic oligonucleotide
  source 1..21: mol_type = other DNA
agggatggtgggcaggatcgg

SEQ ID NO: 35985 - DNA, 21 bp, synthetic construct
  misc_feature 1..21: note = Description of Artificial Sequence: Synthetic oligonucleotide
  source 1..21: mol_type = other DNA
tcttttgattcgaagccgcct

SEQ ID NO: 35986 - DNA, 21 bp, synthetic construct
  misc_feature 1..21: note = Description of Artificial Sequence: Synthetic oligonucleotide
  source 1..21: mol_type = other DNA
tctaatgcgactaggtctagt

SEQ ID NO: 35987 - DNA, 21 bp, synthetic construct
  misc_feature 1..21: note = Description of Artificial Sequence: Synthetic oligonucleotide
  source 1..21: mol_type = other DNA
cctcagaatctggctcatgtt

SEQ ID NO: 35988 - DNA, 21 bp, synthetic construct
  misc_feature 1..21: note = Description of Artificial Sequence: Synthetic oligonucleotide
  source 1..21: mol_type = other DNA
aatacgggtagtggtagtcgg

SEQ ID NO: 35989 - DNA, 21 bp, synthetic construct
  misc_feature 1..21: note = Description of Artificial Sequence: Synthetic oligonucleotide
  source 1..21: mol_type = other DNA
atgaattcggggccgaaggtt

SEQ ID NO: 35990 - DNA, 21 bp, synthetic construct
  misc_feature 1..21: note = Description of Artificial Sequence: Synthetic oligonucleotide
  source 1..21: mol_type = other DNA
cagagtgggccgggggttact

SEQ ID NO: 35991 - DNA, 21 bp, synthetic construct
  misc_feature 1..21: note = Description of Artificial Sequence: Synthetic oligonucleotide
  source 1..21: mol_type = other DNA
aagcagggtgggcctactggg

SEQ ID NO: 35992 - DNA, 21 bp, synthetic construct
  misc_feature 1..21: note = Description of Artificial Sequence: Synthetic oligonucleotide
  source 1..21: mol_type = other DNA
acggggtctgggagtaatcat

SEQ ID NO: 35993 - DNA, 21 bp, synthetic construct
  misc_feature 1..21: note = Description of Artificial Sequence: Synthetic oligonucleotide
  source 1..21: mol_type = other DNA
cccgccaaccacaaaaccatg

SEQ ID NO: 35994 - DNA, 21 bp, synthetic construct
  misc_feature 1..21: note = Description of Artificial Sequence: Synthetic oligonucleotide
  source 1..21: mol_type = other DNA
gctcctagtgctggtaattct

SEQ ID NO: 35995 - DNA, 21 bp, synthetic construct
  misc_feature 1..21: note = Description of Artificial Sequence: Synthetic oligonucleotide
  source 1..21: mol_type = other DNA
ctttcgcttaataagtctcag

SEQ ID NO: 35996 - DNA, 21 bp, synthetic construct
  misc_feature 1..21: note = Description of Artificial Sequence: Synthetic oligonucleotide
  source 1..21: mol_type = other DNA
cctggtgctagtggtaaggtt

SEQ ID NO: 35997 - DNA, 21 bp, synthetic construct
  misc_feature 1..21: note = Description of Artificial Sequence: Synthetic oligonucleotide
  source 1..21: mol_type = other DNA
ctcagaagcgcccccagcatc

SEQ ID NO: 35998 - DNA, 21 bp, synthetic construct
  misc_feature 1..21: note = Description of Artificial Sequence: Synthetic oligonucleotide
  source 1..21: mol_type = other DNA
tcgatggcttcggcgtataag

SEQ ID NO: 35999 - DNA, 21 bp, synthetic construct
  misc_feature 1..21: note = Description of Artificial Sequence: Synthetic oligonucleotide
  source 1..21: mol_type = other DNA
ccctacgccggcaccagcccc

SEQ ID NO: 36000 - DNA, 21 bp, synthetic construct
  misc_feature 1..21: note = Description of Artificial Sequence: Synthetic oligonucleotide
  source 1..21: mol_type = other DNA
gtcaacaaaatcaacggcagc

SEQ ID NO: 36001 - DNA, 21 bp, synthetic construct
  misc_feature 1..21: note = Description of Artificial Sequence: Synthetic oligonucleotide
  source 1..21: mol_type = other DNA
ctccccaccgtcaccagaagc

SEQ ID NO: 36002 - DNA, 21 bp, synthetic construct
  misc_feature 1..21: note = Description of Artificial Sequence: Synthetic oligonucleotide
  source 1..21: mol_type = other DNA
aatcctggttcgggttatggt

SEQ ID NO: 36003 - DNA, 21 bp, synthetic construct
  misc_feature 1..21: note = Description of Artificial Sequence: Synthetic oligonucleotide
  source 1..21: mol_type = other DNA
caacccaacagcggcaccacc

SEQ ID NO: 36004 - DNA, 21 bp, synthetic construct
  misc_feature 1..21: note = Description of Artificial Sequence: Synthetic oligonucleotide
  source 1..21: mol_type = other DNA
ctcggcaacgcccaccaactc

SEQ ID NO: 36005 - DNA, 21 bp, synthetic construct
  misc_feature 1..21: note = Description of Artificial Sequence: Synthetic oligonucleotide
  source 1..21: mol_type = other DNA
agaacccaaagcctcaccgcc

SEQ ID NO: 36006 - DNA, 21 bp, synthetic construct
  misc_feature 1..21: note = Description of Artificial Sequence: Synthetic oligonucleotide
  source 1..21: mol_type = other DNA
tctggtgctcctggttcttcg

SEQ ID NO: 36007 - DNA, 21 bp, synthetic construct
  misc_feature 1..21: note = Description of Artificial Sequence: Synthetic oligonucleotide
  source 1..21: mol_type = other DNA
aatcttacttcttcgagttct

SEQ ID NO: 36008 - DNA, 21 bp, synthetic construct
  misc_feature 1..21: note = Description of Artificial Sequence: Synthetic oligonucleotide
  source 1..21: mol_type = other DNA
cctttttctcattcggttgct

SEQ ID NO: 36009 - DNA, 21 bp, synthetic construct
  misc_feature 1..21: note = Description of Artificial Sequence: Synthetic oligonucleotide
  source 1..21: mol_type = other DNA
ttgctgaagaatgatgcttct

SEQ ID NO: 36010 - DNA, 21 bp, synthetic construct
  misc_feature 1..21: note = Description of Artificial Sequence: Synthetic oligonucleotide
  source 1..21: mol_type = other DNA
gtcagagaaagcagaagcagc

SEQ ID NO: 36011 - DNA, 21 bp, synthetic construct
  misc_feature 1..21: note = Description of Artificial Sequence: Synthetic oligonucleotide
  source 1..21: mol_type = other DNA
agggagccgatgaagggtagt

SEQ ID NO: 36012 - DNA, 21 bp, synthetic construct
  misc_feature 1..21: note = Description of Artificial Sequence: Synthetic oligonucleotide
  source 1..21: mol_type = other DNA
gtccaacaaagcaaagcctac

SEQ ID NO: 36013 - DNA, 21 bp, synthetic construct
  misc_feature 1..21: note = Description of Artificial Sequence: Synthetic oligonucleotide
  source 1..21: mol_type = other DNA
aaaagcgccgaccaaggcaga

SEQ ID NO: 36014 - DNA, 21 bp, synthetic construct
  misc_feature 1..21: note = Description of Artificial Sequence: Synthetic oligonucleotide
  source 1..21: mol_type = other DNA
ggtacggggactcctaggact

SEQ ID NO: 36015 - DNA, 21 bp, synthetic construct
  misc_feature 1..21: note = Description of Artificial Sequence: Synthetic oligonucleotide
  source 1..21: mol_type = other DNA
caaaacacccccaaaagcacc

SEQ ID NO: 36016 - DNA, 21 bp, synthetic construct
  misc_feature 1..21: note = Description of Artificial Sequence: Synthetic oligonucleotide
  source 1..21: mol_type = other DNA
tcgagggattctagtattcat

SEQ ID NO: 36017 - DNA, 21 bp, synthetic construct
  misc_feature 1..21: note = Description of Artificial Sequence: Synthetic oligonucleotide
  source 1..21: mol_type = other DNA
cacaccgccaacagccaaagc

SEQ ID NO: 36018 - DNA, 21 bp, synthetic construct
  misc_feature 1..21: note = Description of Artificial Sequence: Synthetic oligonucleotide
  source 1..21: mol_type = other DNA
acccaacaacacggcagcaac

SEQ ID NO: 36019 - DNA, 21 bp, synthetic construct
  misc_feature 1..21: note = Description of Artificial Sequence: Synthetic oligonucleotide
  source 1..21: mol_type = other DNA
agcaccagcaaagactacacc

SEQ ID NO: 36020 - DNA, 21 bp, synthetic construct
  misc_feature 1..21: note = Description of Artificial Sequence: Synthetic oligonucleotide
  source 1..21: mol_type = other DNA
cttcctggggttcgtgttgcg

SEQ ID NO: 36021 - DNA, 21 bp, synthetic construct
  misc_feature 1..21: note = Description of Artificial Sequence: Synthetic oligonucleotide
  source 1..21: mol_type = other DNA
tctttgcctggggagtctaag

SEQ ID NO: 36022 - DNA, 21 bp, synthetic construct
  misc_feature 1..21: note = Description of Artificial Sequence: Synthetic oligonucleotide
  source 1..21: mol_type = other DNA
catacgtctccggggaagaat

SEQ ID NO: 36023 - DNA, 21 bp, synthetic construct
  misc_feature 1..21: note = Description of Artificial Sequence: Synthetic oligonucleotide
  source 1..21: mol_type = other DNA
cccgtcgtcggcaaaatgagc

SEQ ID NO: 36024 - DNA, 21 bp, synthetic construct
  misc_feature 1..21: note = Description of Artificial Sequence: Synthetic oligonucleotide
  source 1..21: mol_type = other DNA
cccagcctcgaaagaggcagc

SEQ ID NO: 36025 - DNA, 21 bp, synthetic construct
  misc_feature 1..21: note = Description of Artificial Sequence: Synthetic oligonucleotide
  source 1..21: mol_type = other DNA
tatattaatagtccttcgaat

SEQ ID NO: 36026 - DNA, 21 bp, synthetic construct
  misc_feature 1..21: note = Description of Artificial Sequence: Synthetic oligonucleotide
  source 1..21: mol_type = other DNA
tcgtctcaggcgcagccgact

SEQ ID NO: 36027 - DNA, 21 bp, synthetic construct
  misc_feature 1..21: note = Description of Artificial Sequence: Synthetic oligonucleotide
  source 1..21: mol_type = other DNA
gaccccgtcagaaaaaccagc

SEQ ID NO: 36028 - DNA, 21 bp, synthetic construct
  misc_feature 1..21: note = Description of Artificial Sequence: Synthetic oligonucleotide
  source 1..21: mol_type = other DNA
aattctcataatggtgcttct

SEQ ID NO: 36029 - DNA, 21 bp, synthetic construct
  misc_feature 1..21: note = Description of Artificial Sequence: Synthetic oligonucleotide
  source 1..21: mol_type = other DNA
cctgggcctgaggttggtcgg

SEQ ID NO: 36030 - DNA, 21 bp, synthetic construct
  misc_feature 1..21: note = Description of Artificial Sequence: Synthetic oligonucleotide
  source 1..21: mol_type = other DNA
ctccccatcaccgccagaaac

SEQ ID NO: 36031 - DNA, 21 bp, synthetic construct
  misc_feature 1..21: note = Description of Artificial Sequence: Synthetic oligonucleotide
  source 1..21: mol_type = other DNA
gtcgccagccaacccgtcaga

SEQ ID NO: 36032 - DNA, 21 bp, synthetic construct
  misc_feature 1..21: note = Description of Artificial Sequence: Synthetic oligonucleotide
  source 1..21: mol_type = other DNA
aatctgagtagttcgggtggt

SEQ ID NO: 36033 - DNA, 21 bp, synthetic construct
  misc_feature 1..21: note = Description of Artificial Sequence: Synthetic oligonucleotide
  source 1..21: mol_type = other DNA
gagcggaatgggaattttacg

SEQ ID NO: 36034 - DNA, 21 bp, synthetic construct
  misc_feature 1..21: note = Description of Artificial Sequence: Synthetic oligonucleotide
  source 1..21: mol_type = other DNA
cccggcagcagcaacagaaac

SEQ ID NO: 36035 - DNA, 21 bp, synthetic construct
  misc_feature 1..21: note = Description of Artificial Sequence: Synthetic oligonucleotide
  source 1..21: mol_type = other DNA
aaaagaatggacaaaagcagc

SEQ ID NO: 36036 - DNA, 21 bp, synthetic construct
  misc_feature 1..21: note = Description of Artificial Sequence: Synthetic oligonucleotide
  source 1..21: mol_type = other DNA
gtgaagtgtagtggttgtagt

SEQ ID NO: 36037 - DNA, 21 bp, synthetic construct
  misc_feature 1..21: note = Description of Artificial Sequence: Synthetic oligonucleotide
  source 1..21: mol_type = other DNA
tgtgttctgccttcggggaat

SEQ ID NO: 36038 - DNA, 21 bp, synthetic construct
  misc_feature 1..21: note = Description of Artificial Sequence: Synthetic oligonucleotide
  source 1..21: mol_type = other DNA
ttcaccagcaacaaagccagc

SEQ ID NO: 36039 - DNA, 21 bp, synthetic construct
  misc_feature 1..21: note = Description of Artificial Sequence: Synthetic oligonucleotide
  source 1..21: mol_type = other DNA
ttgagttcggataagaatgtt

SEQ ID NO: 36040 - DNA, 21 bp, synthetic construct
  misc_feature 1..21: note = Description of Artificial Sequence: Synthetic oligonucleotide
  source 1..21: mol_type = other DNA
agcagcagcacccacgccgtc

SEQ ID NO: 36041 - DNA, 21 bp, synthetic construct
  misc_feature 1..21: note = Description of Artificial Sequence: Synthetic oligonucleotide
  source 1..21: mol_type = other DNA
actaatccgaagtcgtcttct

SEQ ID NO: 36042 - DNA, 21 bp, synthetic construct
  misc_feature 1..21: note = Description of Artificial Sequence: Synthetic oligonucleotide
  source 1..21: mol_type = other DNA
agcagcgaacaaaccaccaga

SEQ ID NO: 36043 - DNA, 21 bp, synthetic construct
  misc_feature 1..21: note = Description of Artificial Sequence: Synthetic oligonucleotide
  source 1..21: mol_type = other DNA
gaacccctccaaggcagcaga

SEQ ID NO: 36044 - DNA, 21 bp, synthetic construct
  misc_feature 1..21: note = Description of Artificial Sequence: Synthetic oligonucleotide
  source 1..21: mol_type = other DNA
agtaagactgggactagtttg

SEQ ID NO: 36045 - DNA, 21 bp, synthetic construct
  misc_feature 1..21: note = Description of Artificial Sequence: Synthetic oligonucleotide
  source 1..21: mol_type = other DNA
agggtggtgaatcggggggat

SEQ ID NO: 36046 - DNA, 21 bp, synthetic construct
  misc_feature 1..21: note = Description of Artificial Sequence: Synthetic oligonucleotide
  source 1..21: mol_type = other DNA
cctatgtcgggtactcgtctg

SEQ ID NO: 36047 - DNA, 21 bp, synthetic construct
  misc_feature 1..21: note = Description of Artificial Sequence: Synthetic oligonucleotide
  source 1..21: mol_type = other DNA
acgtcgaatactaagcagggt

SEQ ID NO: 36048 - DNA, 21 bp, synthetic construct
  misc_feature 1..21: note = Description of Artificial Sequence: Synthetic oligonucleotide
  source 1..21: mol_type = other DNA
ggccccaaccaaagcggcaga

SEQ ID NO: 36049 - DNA, 21 bp, synthetic construct
  misc_feature 1..21: note = Description of Artificial Sequence: Synthetic oligonucleotide
  source 1..21: mol_type = other DNA
accaaccccaacccccacaga

SEQ ID NO: 36050 - DNA, 21 bp, synthetic construct
  misc_feature 1..21: note = Description of Artificial Sequence: Synthetic oligonucleotide
  source 1..21: mol_type = other DNA
cccggcagagaaaaaaccgtc

SEQ ID NO: 36051 - DNA, 21 bp, synthetic construct
  misc_feature 1..21: note = Description of Artificial Sequence: Synthetic oligonucleotide
  source 1..21: mol_type = other DNA
ttcgccaacaccgccaacaga

SEQ ID NO: 36052 - DNA, 21 bp, synthetic construct
  misc_feature 1..21: note = Description of Artificial Sequence: Synthetic oligonucleotide
  source 1..21: mol_type = other DNA
actgttctgggtgctaggggg

SEQ ID NO: 36053 - DNA, 21 bp, synthetic construct
  misc_feature 1..21: note = Description of Artificial Sequence: Synthetic oligonucleotide
  source 1..21: mol_type = other DNA
aacgtcaccacccccctcatc

SEQ ID NO: 36054 - DNA, 21 bp, synthetic construct
  misc_feature 1..21: note = Description of Artificial Sequence: Synthetic oligonucleotide
  source 1..21: mol_type = other DNA
tatagggcttctggtatttcg

SEQ ID NO: 36055 - DNA, 21 bp, synthetic construct
  misc_feature 1..21: note = Description of Artificial Sequence: Synthetic oligonucleotide
  source 1..21: mol_type = other DNA
ggtagtaataggaatcctctt

SEQ ID NO: 36056 - DNA, 21 bp, synthetic construct
  misc_feature 1..21: note = Description of Artificial Sequence: Synthetic oligonucleotide
  source 1..21: mol_type = other DNA
agtcggggtcagcctcctttg

SEQ ID NO: 36057 - DNA, 21 bp, synthetic construct
  misc_feature 1..21: note = Description of Artificial Sequence: Synthetic oligonucleotide
  source 1..21: mol_type = other DNA
ggggtgactggtactcatgtg

SEQ ID NO: 36058 - DNA, 21 bp, synthetic construct
  misc_feature 1..21: note = Description of Artificial Sequence: Synthetic oligonucleotide
  source 1..21: mol_type = other DNA
aatcttaagacgaagggggag

SEQ ID NO: 36059 - DNA, 21 bp, synthetic construct
  misc_feature 1..21: note = Description of Artificial Sequence: Synthetic oligonucleotide
  source 1..21: mol_type = other DNA
agaagccccggcagcaacacc

SEQ ID NO: 36060 - DNA, 21 bp, synthetic construct
  misc_feature 1..21: note = Description of Artificial Sequence: Synthetic oligonucleotide
  source 1..21: mol_type = other DNA
tggggtacgggtattggttct

SEQ ID NO: 36061 - DNA, 21 bp, synthetic construct
  misc_feature 1..21: note = Description of Artificial Sequence: Synthetic oligonucleotide
  source 1..21: mol_type = other DNA
gggtctatttcgacggctcat

SEQ ID NO: 36062 - DNA, 21 bp, synthetic construct
  misc_feature 1..21: note = Description of Artificial Sequence: Synthetic oligonucleotide
  source 1..21: mol_type = other DNA
cttcctggtcagggtgttggt

SEQ ID NO: 36063 - DNA, 21 bp, synthetic construct
  misc_feature 1..21: note = Description of Artificial Sequence: Synthetic oligonucleotide
  source 1..21: mol_type = other DNA
aatagtgggaagccgaatgcg

SEQ ID NO: 36064 - DNA, 21 bp, synthetic construct
  misc_feature 1..21: note = Description of Artificial Sequence: Synthetic oligonucleotide
  source 1..21: mol_type = other DNA
ttcgccagcagacccgtccaa

SEQ ID NO: 36065 - DNA, 21 bp, synthetic construct
  misc_feature 1..21: note = Description of Artificial Sequence: Synthetic oligonucleotide
  source 1..21: mol_type = other DNA
ggccaagtcaaagccatcggc

SEQ ID NO: 36066 - DNA, 21 bp, synthetic construct
  misc_feature 1..21: note = Description of Artificial Sequence: Synthetic oligonucleotide
  source 1..21: mol_type = other DNA
cagtcgagtcgtacggttact

SEQ ID NO: 36067 - DNA, 21 bp, synthetic construct
  misc_feature 1..21: note = Description of Artificial Sequence: Synthetic oligonucleotide
  source 1..21: mol_type = other DNA
acttcgtctcctcagccgtcg

SEQ ID NO: 36068 - DNA, 21 bp, synthetic construct
  misc_feature 1..21: note = Description of Artificial Sequence: Synthetic oligonucleotide
  source 1..21: mol_type = other DNA
ttgggggctagtactattttg

SEQ ID NO: 36069 - DNA, 21 bp, synthetic construct
  misc_feature 1..21: note = Description of Artificial Sequence: Synthetic oligonucleotide
  source 1..21: mol_type = other DNA
aacgaccaagccaaactcacc

SEQ ID NO: 36070 - DNA, 21 bp, synthetic construct
  misc_feature 1..21: note = Description of Artificial Sequence: Synthetic oligonucleotide
  source 1..21: mol_type = other DNA
actcggagtaaggagagtcct

SEQ ID NO: 36071 - DNA, 21 bp, synthetic construct
  misc_feature 1..21: note = Description of Artificial Sequence: Synthetic oligonucleotide
  source 1..21: mol_type = other DNA
caggggtctgggagtaatcat

SEQ ID NO: 36072 - DNA, 21 bp, synthetic construct
  misc_feature 1..21: note = Description of Artificial Sequence: Synthetic oligonucleotide
  source 1..21: mol_type = other DNA
aatagtgcgaataagactccg

SEQ ID NO: 36073 - DNA, 21 bp, synthetic construct
  misc_feature 1..21: note = Description of Artificial Sequence: Synthetic oligonucleotide
  source 1..21: mol_type = other DNA
gccacccacaacagcagccaa

SEQ ID NO: 36074 - DNA, 21 bp, synthetic construct
  misc_feature 1..21: note = Description of Artificial Sequence: Synthetic oligonucleotide
  source 1..21: mol_type = other DNA
tttccggttaatgggctgagt

SEQ ID NO: 36075 - DNA, 21 bp, synthetic construct
  misc_feature 1..21: note = Description of Artificial Sequence: Synthetic oligonucleotide
  source 1..21: mol_type = other DNA
tctgtggggtctggtgctttg

SEQ ID NO: 36076 - DNA, 21 bp, synthetic construct
  misc_feature 1..21: note = Description of Artificial Sequence: Synthetic oligonucleotide
  source 1..21: mol_type = other DNA
cagggtagttcgttgcgtact

SEQ ID NO: 36077 - DNA, 21 bp, synthetic construct
  misc_feature 1..21: note = Description of Artificial Sequence: Synthetic oligonucleotide
  source 1..21: mol_type = other DNA
agcagagtcgaccaatacaaa

SEQ ID NO: 36078 - DNA, 21 bp, synthetic construct
  misc_feature 1..21: note = Description of Artificial Sequence: Synthetic oligonucleotide
  source 1..21: mol_type = other DNA
cctttggctgcgggtggtacg

SEQ ID NO: 36079 - DNA, 21 bp, synthetic construct
  misc_feature 1..21: note = Description of Artificial Sequence: Synthetic oligonucleotide
  source 1..21: mol_type = other DNA
attaagcagtcttcttcggct

SEQ ID NO: 36080 - DNA, 21 bp, synthetic construct
  misc_feature 1..21: note = Description of Artificial Sequence: Synthetic oligonucleotide
  source 1..21: mol_type = other DNA
acccccagcatgagaaacacc

SEQ ID NO: 36081 - DNA, 21 bp, synthetic construct
  misc_feature 1..21: note = Description of Artificial Sequence: Synthetic oligonucleotide
  source 1..21: mol_type = other DNA
accagaatgaacaaacaaacc

SEQ ID NO: 36082 - DNA, 21 bp, synthetic construct
  misc_feature 1..21: note = Description of Artificial Sequence: Synthetic oligonucleotide
  source 1..21: mol_type = other DNA
gacttcagcgaaaaaagactc

SEQ ID NO: 36083 - DNA, 21 bp, synthetic construct
  misc_feature 1..21: note = Description of Artificial Sequence: Synthetic oligonucleotide
  source 1..21: mol_type = other DNA
tcggcttatgagaggacttcg

SEQ ID NO: 36084 - DNA, 21 bp, synthetic construct
  misc_feature 1..21: note = Description of Artificial Sequence: Synthetic oligonucleotide
  source 1..21: mol_type = other DNA
tctacttcgggtacgagtagt

SEQ ID NO: 36085 - DNA, 21 bp, synthetic construct
  misc_feature 1..21: note = Description of Artificial Sequence: Synthetic oligonucleotide
  source 1..21: mol_type = other DNA
ggtactacttctagtcgggat

SEQ ID NO: 36086 - DNA, 21 bp, synthetic construct
  misc_feature 1..21: note = Description of Artificial Sequence: Synthetic oligonucleotide
  source 1..21: mol_type = other DNA
cagtcgacgccgcgtatgggt

SEQ ID NO: 36087 - DNA, 21 bp, synthetic construct
  misc_feature 1..21: note = Description of Artificial Sequence: Synthetic oligonucleotide
  source 1..21: mol_type = other DNA
gggcaggtgaaggctcttggg

SEQ ID NO: 36088 - DNA, 21 bp, synthetic construct
  misc_feature 1..21: note = Description of Artificial Sequence: Synthetic oligonucleotide
  source 1..21: mol_type = other DNA
gttggtactaaggctgctacg

SEQ ID NO: 36089 - DNA, 21 bp, synthetic construct
  misc_feature 1..21: note = Description of Artificial Sequence: Synthetic oligonucleotide
  source 1..21: mol_type = other DNA
tcggatatgtctggtcagcgt

SEQ ID NO: 36090 - DNA, 21 bp, synthetic construct
  misc_feature 1..21: note = Description of Artificial Sequence: Synthetic oligonucleotide
  source 1..21: mol_type = other DNA
cctatttcgcatacgactggt

SEQ ID NO: 36091 - DNA, 21 bp, synthetic construct
  misc_feature 1..21: note = Description of Artificial Sequence: Synthetic oligonucleotide
  source 1..21: mol_type = other DNA
ggcagcagccccagcctcaga

SEQ ID NO: 36092 - DNA, 21 bp, synthetic construct
  misc_feature 1..21: note = Description of Artificial Sequence: Synthetic oligonucleotide
  source 1..21: mol_type = other DNA
ttgtcttcgaatcggcataat

SEQ ID NO: 36093 - DNA, 21 bp, synthetic construct
  misc_feature 1..21: note = Description of Artificial Sequence: Synthetic oligonucleotide
  source 1..21: mol_type = other DNA
catacgcatgatgtgggtaag

SEQ ID NO: 36094 - DNA, 21 bp, synthetic construct
  misc_feature 1..21: note = Description of Artificial Sequence: Synthetic oligonucleotide
  source 1..21: mol_type = other DNA
ggcctcaaaaacgaacccgcc

SEQ ID NO: 36095 - DNA, 21 bp, synthetic construct
  misc_feature 1..21: note = Description of Artificial Sequence: Synthetic oligonucleotide
  source 1..21: mol_type = other DNA
tctcggattggtatgagtacg

SEQ ID NO: 36096 - DNA, 21 bp, synthetic construct
  misc_feature 1..21: note = Description of Artificial Sequence: Synthetic oligonucleotide
  source 1..21: mol_type = other DNA
actgctaattcgcctgcgacg

SEQ ID NO: 36097 - DNA, 21 bp, synthetic construct
  misc_feature 1..21: note = Description of Artificial Sequence: Synthetic oligonucleotide
  source 1..21: mol_type = other DNA
agcgtcgaaaaagcccaaagc

SEQ ID NO: 36098 - DNA, 21 bp, synthetic construct
  misc_feature 1..21: note = Description of Artificial Sequence: Synthetic oligonucleotide
  source 1..21: mol_type = other DNA
gtcagcggcatgagcggcagc

SEQ ID NO: 36099 - DNA, 21 bp, synthetic construct
  misc_feature 1..21: note = Description of Artificial Sequence: Synthetic oligonucleotide
  source 1..21: mol_type = other DNA
catacttcgagtaattctctt

SEQ ID NO: 36100 - DNA, 21 bp, synthetic construct
  misc_feature 1..21: note = Description of Artificial Sequence: Synthetic oligonucleotide
  source 1..21: mol_type = other DNA
gggtctccgaatcatagtagt

SEQ ID NO: 36101 - DNA, 21 bp, synthetic construct
  misc_feature 1..21: note = Description of Artificial Sequence: Synthetic oligonucleotide
  source 1..21: mol_type = other DNA
ggccaagccatgcccttcaaa

SEQ ID NO: 36102 - DNA, 21 bp, synthetic construct
  misc_feature 1..21: note = Description of Artificial Sequence: Synthetic oligonucleotide
  source 1..21: mol_type = other DNA
cgtatgaagagtctggataat

SEQ ID NO: 36103 - DNA, 21 bp, synthetic construct
  misc_feature 1..21: note = Description of Artificial Sequence: Synthetic oligonucleotide
  source 1..21: mol_type = other DNA
tacagaagcgccgccaacagc

SEQ ID NO: 36104 - DNA, 21 bp, synthetic construct
  misc_feature 1..21: note = Description of Artificial Sequence: Synthetic oligonucleotide
  source 1..21: mol_type = other DNA
cttgggacgtctcatcagcag

SEQ ID NO: 36105 - DNA, 21 bp, synthetic construct
  misc_feature 1..21: note = Description of Artificial Sequence: Synthetic oligonucleotide
  source 1..21: mol_type = other DNA
aatatttcgactaggcagagt

SEQ ID NO: 36106 - DNA, 21 bp, synthetic construct
  misc_feature 1..21: note = Description of Artificial Sequence: Synthetic oligonucleotide
  source 1..21: mol_type = other DNA
cccggcatcaacaccaacagc

SEQ ID NO: 36107 - DNA, 21 bp, synthetic construct
  misc_feature 1..21: note = Description of Artificial Sequence: Synthetic oligonucleotide
  source 1..21: mol_type = other DNA
atggagattaagcctaatcgg

SEQ ID NO: 36108 - DNA, 21 bp, synthetic construct
  misc_feature 1..21: note = Description of Artificial Sequence: Synthetic oligonucleotide
  source 1..21: mol_type = other DNA
cttccgcaggatagggttggt

SEQ ID NO: 36109 - DNA, 21 bp, synthetic construct
  misc_feature 1..21: note = Description of Artificial Sequence: Synthetic oligonucleotide
  source 1..21: mol_type = other DNA
gaaggcctcaacaccagcaga

SEQ ID NO: 36110 - DNA, 21 bp, synthetic construct
  misc_feature 1..21: note = Description of Artificial Sequence: Synthetic oligonucleotide
  source 1..21: mol_type = other DNA
ttccacgtcggcgccagcagc

SEQ ID NO: 36111 - DNA, 21 bp, synthetic construct
  misc_feature 1..21: note = Description of Artificial Sequence: Synthetic oligonucleotide
  source 1..21: mol_type = other DNA
ggccccagcagccccagactc

SEQ ID NO: 36112 - DNA, 21 bp, synthetic construct
  misc_feature 1..21: note = Description of Artificial Sequence: Synthetic oligonucleotide
  source 1..21: mol_type = other DNA
gacagcacccacagagccacc

SEQ ID NO: 36113 - DNA, 21 bp, synthetic construct
  misc_feature 1..21: note = Description of Artificial Sequence: Synthetic oligonucleotide
  source 1..21: mol_type = other DNA
cctccgactgattcgggtctg

SEQ ID NO: 36114 - DNA, 21 bp, synthetic construct
  misc_feature 1..21: note = Description of Artificial Sequence: Synthetic oligonucleotide
  source 1..21: mol_type = other DNA
accgccaccaccctcagcagc

SEQ ID NO: 36115 - DNA, 21 bp, synthetic construct
  misc_feature 1..21: note = Description of Artificial Sequence: Synthetic oligonucleotide
  source 1..21: mol_type = other DNA
ctcaaaagcgtcagcggccaa

SEQ ID NO: 36116 - DNA, 21 bp, synthetic construct
  misc_feature 1..21: note = Description of Artificial Sequence: Synthetic oligonucleotide
  source 1..21: mol_type = other DNA
cccctccaaaccagcagaacc

SEQ ID NO: 36117 - DNA, 21 bp, synthetic construct
  misc_feature 1..21: note = Description of Artificial Sequence: Synthetic oligonucleotide
  source 1..21: mol_type = other DNA
gccaccggcaacggcagaggc

SEQ ID NO: 36118 - DNA, 21 bp, synthetic construct
  misc_feature 1..21: note = Description of Artificial Sequence: Synthetic oligonucleotide
  source 1..21: mol_type = other DNA
gatttgcatgtgcagaaggct

SEQ ID NO: 36119 - DNA, 21 bp, synthetic construct
  misc_feature 1..21: note = Description of Artificial Sequence: Synthetic oligonucleotide
  source 1..21: mol_type = other DNA
cccggcaccaaacaaagcagc

SEQ ID NO: 36120 - DNA, 21 bp, synthetic construct
  misc_feature 1..21: note = Description of Artificial Sequence: Synthetic oligonucleotide
  source 1..21: mol_type = other DNA
gcttcgagggatagggctggt

SEQ ID NO: 36121 - DNA, 21 bp, synthetic construct
  misc_feature 1..21: note = Description of Artificial Sequence: Synthetic oligonucleotide
  source 1..21: mol_type = other DNA
tttaatagttcgtcttcgaag

SEQ ID NO: 36122 - DNA, 21 bp, synthetic construct
  misc_feature 1..21: note = Description of Artificial Sequence: Synthetic oligonucleotide
  source 1..21: mol_type = other DNA
tcttcgtcggcgaagtctatt

SEQ ID NO: 36123 - DNA, 21 bp, synthetic construct
  misc_feature 1..21: note = Description of Artificial Sequence: Synthetic oligonucleotide
  source 1..21: mol_type = other DNA
ggcagagcccaactcgccagc

SEQ ID NO: 36124 - DNA, 21 bp, synthetic construct
  misc_feature 1..21: note = Description of Artificial Sequence: Synthetic oligonucleotide
  source 1..21: mol_type = other DNA
tttgtgaatactagtgcgcag

SEQ ID NO: 36125 - DNA, 21 bp, synthetic construct
  misc_feature 1..21: note = Description of Artificial Sequence: Synthetic oligonucleotide
  source 1..21: mol_type = other DNA
agaaaccaaggcgccctccaa

SEQ ID NO: 36126 - DNA, 21 bp, synthetic construct
  misc_feature 1..21: note = Description of Artificial Sequence: Synthetic oligonucleotide
  source 1..21: mol_type = other DNA
gacctcccccaccacaccaga

SEQ ID NO: 36127 - DNA, 21 bp, synthetic construct
  misc_feature 1..21: note = Description of Artificial Sequence: Synthetic oligonucleotide
  source 1..21: mol_type = other DNA
tacctcaaaaccggcgacaac

SEQ ID NO: 36128 - DNA, 21 bp, synthetic construct
  misc_feature 1..21: note = Description of Artificial Sequence: Synthetic oligonucleotide
  source 1..21: mol_type = other DNA
agacccagcagcacccacgcc

SEQ ID NO: 36129 - DNA, 21 bp, synthetic construct
  misc_feature 1..21: note = Description of Artificial Sequence: Synthetic oligonucleotide
  source 1..21: mol_type = other DNA
atcctcggcaacaaaagcagc

SEQ ID NO: 36130 - DNA, 21 bp, synthetic construct
  misc_feature 1..21: note = Description of Artificial Sequence: Synthetic oligonucleotide
  source 1..21: mol_type = other DNA
ggcctcgccggcagactcagc

SEQ ID NO: 36131 - DNA, 21 bp, synthetic construct
  misc_feature 1..21: note = Description of Artificial Sequence: Synthetic oligonucleotide
  source 1..21: mol_type = other DNA
accaacggcggcagagtcacc

SEQ ID NO: 36132 - DNA, 21 bp, synthetic construct
  misc_feature 1..21: note = Description of Artificial Sequence: Synthetic oligonucleotide
  source 1..21: mol_type = other DNA
accggcatgagcaacaacaga

SEQ ID NO: 36133 - DNA, 21 bp, synthetic construct
  misc_feature 1..21: note = Description of Artificial Sequence: Synthetic oligonucleotide
  source 1..21: mol_type = other DNA
cctaagttgtcgcatacgggg

SEQ ID NO: 36134 - DNA, 21 bp, synthetic construct
  misc_feature 1..21: note = Description of Artificial Sequence: Synthetic oligonucleotide
  source 1..21: mol_type = other DNA
agcatcggcaaaggctacaac

SEQ ID NO: 36135 - DNA, 21 bp, synthetic construct
  misc_feature 1..21: note = Description of Artificial Sequence: Synthetic oligonucleotide
  source 1..21: mol_type = other DNA
accaccatgagcaaacccagc

SEQ ID NO: 36136 - DNA, 21 bp, synthetic construct
  misc_feature 1..21: note = Description of Artificial Sequence: Synthetic oligonucleotide
  source 1..21: mol_type = other DNA
accgaaagaaccaaagccacc

SEQ ID NO: 36137 - DNA, 21 bp, synthetic construct
  misc_feature 1..21: note = Description of Artificial Sequence: Synthetic oligonucleotide
  source 1..21: mol_type = other DNA
gttagttcgaatgctagtatg

SEQ ID NO: 36138 - DNA, 21 bp, synthetic construct
  misc_feature 1..21: note = Description of Artificial Sequence: Synthetic oligonucleotide
  source 1..21: mol_type = other DNA
cccaacctccaaagcagcaaa

SEQ ID NO: 36139 - DNA, 21 bp, synthetic construct
  misc_feature 1..21: note = Description of Artificial Sequence: Synthetic oligonucleotide
  source 1..21: mol_type = other DNA
agccccggcaacgtcagaaaa

SEQ ID NO: 36140 - DNA, 21 bp, synthetic construct
  misc_feature 1..21: note = Description of Artificial Sequence: Synthetic oligonucleotide
  source 1..21: mol_type = other DNA
caaggcagcagcaaaaccacc

SEQ ID NO: 36141 - DNA, 21 bp, synthetic construct
  misc_feature 1..21: note = Description of Artificial Sequence: Synthetic oligonucleotide
  source 1..21: mol_type = other DNA
aatgcggttcgttctgagaat

SEQ ID NO: 36142 - DNA, 21 bp, synthetic construct
  misc_feature 1..21: note = Description of Artificial Sequence: Synthetic oligonucleotide
  source 1..21: mol_type = other DNA
actgaggctcggtcggcgaat

SEQ ID NO: 36143 - DNA, 21 bp, synthetic construct
  misc_feature 1..21: note = Description of Artificial Sequence: Synthetic oligonucleotide
  source 1..21: mol_type = other DNA
ctcaccacccacggcatgaaa

SEQ ID NO: 36144 - DNA, 21 bp, synthetic construct
  misc_feature 1..21: note = Description of Artificial Sequence: Synthetic oligonucleotide
  source 1..21: mol_type = other DNA
cgtcagaatggtggtgtgaag

SEQ ID NO: 36145 - DNA, 21 bp, synthetic construct
  misc_feature 1..21: note = Description of Artificial Sequence: Synthetic oligonucleotide
  source 1..21: mol_type = other DNA
agagtcagcgacagacacatc

SEQ ID NO: 36146 - DNA, 21 bp, synthetic construct
  misc_feature 1..21: note = Description of Artificial Sequence: Synthetic oligonucleotide
  source 1..21: mol_type = other DNA
gaaggcagcagcggcagaaga

SEQ ID NO: 36147 - DNA, 21 bp, synthetic construct
  misc_feature 1..21: note = Description of Artificial Sequence: Synthetic oligonucleotide
  source 1..21: mol_type = other DNA
cggggggatactaagaatttg

SEQ ID NO: 36148 - DNA, 21 bp, synthetic construct
  misc_feature 1..21: note = Description of Artificial Sequence: Synthetic oligonucleotide
  source 1..21: mol_type = other DNA
aatattaattcgcgtttggcg

SEQ ID NO: 36149 - DNA, 21 bp, synthetic construct
  misc_feature 1..21: note = Description of Artificial Sequence: Synthetic oligonucleotide
  source 1..21: mol_type = other DNA
acgtctaggggtaatttgtct

SEQ ID NO: 36150 - DNA, 21 bp, synthetic construct
  misc_feature 1..21: note = Description of Artificial Sequence: Synthetic oligonucleotide
  source 1..21: mol_type = other DNA
aacggcagcgccagaatgacc

SEQ ID NO: 36151 - DNA, 21 bp, synthetic construct
  misc_feature 1..21: note = Description of Artificial Sequence: Synthetic oligonucleotide
  source 1..21: mol_type = other DNA
gggagttctcctaagcttact

SEQ ID NO: 36152 - DNA, 21 bp, synthetic construct
  misc_feature 1..21: note = Description of Artificial Sequence: Synthetic oligonucleotide
  source 1..21: mol_type = other DNA
tatcagaataagtctctgacg

SEQ ID NO: 36153 - DNA, 21 bp, synthetic construct
  misc_feature 1..21: note = Description of Artificial Sequence: Synthetic oligonucleotide
  source 1..21: mol_type = other DNA
agccccctcctcgactacaaa

SEQ ID NO: 36154 - DNA, 21 bp, synthetic construct
  misc_feature 1..21: note = Description of Artificial Sequence: Synthetic oligonucleotide
  source 1..21: mol_type = other DNA
cccagcaacaccggcaccatc

SEQ ID NO: 36155 - DNA, 21 bp, synthetic construct
  misc_feature 1..21: note = Description of Artificial Sequence: Synthetic oligonucleotide
  source 1..21: mol_type = other DNA
tctgctacgaagagtagttgt

SEQ ID NO: 36156 - DNA, 21 bp, synthetic construct
  misc_feature 1..21: note = Description of Artificial Sequence: Synthetic oligonucleotide
  source 1..21: mol_type = other DNA
cagaatctgaattctttttcg

SEQ ID NO: 36157 - DNA, 21 bp, synthetic construct
  misc_feature 1..21: note = Description of Artificial Sequence: Synthetic oligonucleotide
  source 1..21: mol_type = other DNA
ggcagcgccagcatcgaaaaa

SEQ ID NO: 36158 - DNA, 21 bp, synthetic construct
  misc_feature 1..21: note = Description of Artificial Sequence: Synthetic oligonucleotide
  source 1..21: mol_type = other DNA
tatcgtccggtgtcggtgcag

SEQ ID NO: 36159 - DNA, 21 bp, synthetic construct
  misc_feature 1..21: note = Description of Artificial Sequence: Synthetic oligonucleotide
  source 1..21: mol_type = other DNA
ttcagaaccaccgccagcacc

SEQ ID NO: 36160 - DNA, 21 bp, synthetic construct
  misc_feature 1..21: note = Description of Artificial Sequence: Synthetic oligonucleotide
  source 1..21: mol_type = other DNA
aataatgctgctactcattcg

SEQ ID NO: 36161 - DNA, 21 bp, synthetic construct
  misc_feature 1..21: note = Description of Artificial Sequence: Synthetic oligonucleotide
  source 1..21: mol_type = other DNA
actcagcggtcgcaggctgct

SEQ ID NO: 36162 - DNA, 21 bp, synthetic construct
  misc_feature 1..21: note = Description of Artificial Sequence: Synthetic oligonucleotide
  source 1..21: mol_type = other DNA
cccggcagcgccatgctcaac

SEQ ID NO: 36163 - DNA, 21 bp, synthetic construct
  misc_feature 1..21: note = Description of Artificial Sequence: Synthetic oligonucleotide
  source 1..21: mol_type = other DNA
ccttataagggtaatgggctt

SEQ ID NO: 36164 - DNA, 21 bp, synthetic construct
  misc_feature 1..21: note = Description of Artificial Sequence: Synthetic oligonucleotide
  source 1..21: mol_type = other DNA
attagttctggtacgcatggg

SEQ ID NO: 36165 - DNA, 21 bp, synthetic construct
  misc_feature 1..21: note = Description of Artificial Sequence: Synthetic oligonucleotide
  source 1..21: mol_type = other DNA
caaaacctccccaaagccagc

SEQ ID NO: 36166 - DNA, 21 bp, synthetic construct
  misc_feature 1..21: note = Description of Artificial Sequence: Synthetic oligonucleotide
  source 1..21: mol_type = other DNA
aatccttcgcatacttctgtg

SEQ ID NO: 36167 - DNA, 21 bp, synthetic construct
  misc_feature 1..21: note = Description of Artificial Sequence: Synthetic oligonucleotide
  source 1..21: mol_type = other DNA
tatcagatgacgactcctcag

SEQ ID NO: 36168 - DNA, 21 bp, synthetic construct
  misc_feature 1..21: note = Description of Artificial Sequence: Synthetic oligonucleotide
  source 1..21: mol_type = other DNA
gacagcagcaccagaggccaa

SEQ ID NO: 36169 - DNA, 21 bp, synthetic construct
  misc_feature 1..21: note = Description of Artificial Sequence: Synthetic oligonucleotide
  source 1..21: mol_type = other DNA
cagggtcatagttcgtttctg

SEQ ID NO: 36170 - DNA, 21 bp, synthetic construct
  misc_feature 1..21: note = Description of Artificial Sequence: Synthetic oligonucleotide
  source 1..21: mol_type = other DNA
accagcagcggcaacctcagc

SEQ ID NO: 36171 - DNA, 21 bp, synthetic construct
  misc_feature 1..21: note = Description of Artificial Sequence: Synthetic oligonucleotide
  source 1..21: mol_type = other DNA
agcctcaccagcaccggcaaa

SEQ ID NO: 36172 - DNA, 21 bp, synthetic construct
  misc_feature 1..21: note = Description of Artificial Sequence: Synthetic oligonucleotide
  source 1..21: mol_type = other DNA
ggcaccgacagcaaaagacac

SEQ ID NO: 36173 - DNA, 21 bp, synthetic construct
  misc_feature 1..21: note = Description of Artificial Sequence: Synthetic oligonucleotide
  source 1..21: mol_type = other DNA
gagggtaatcgttctaatatg

SEQ ID NO: 36174 - DNA, 21 bp, synthetic construct
  misc_feature 1..21: note = Description of Artificial Sequence: Synthetic oligonucleotide
  source 1..21: mol_type = other DNA
tacaacagaaccagcatcgtc

SEQ ID NO: 36175 - DNA, 21 bp, synthetic construct
  misc_feature 1..21: note = Description of Artificial Sequence: Synthetic oligonucleotide
  source 1..21: mol_type = other DNA
tcgttgaatgcgccgaatagg

SEQ ID NO: 36176 - DNA, 21 bp, synthetic construct
  misc_feature 1..21: note = Description of Artificial Sequence: Synthetic oligonucleotide
  source 1..21: mol_type = other DNA
gtgctttcgtcttcgcctaag

SEQ ID NO: 36177 - DNA, 21 bp, synthetic construct
  misc_feature 1..21: note = Description of Artificial Sequence: Synthetic oligonucleotide
  source 1..21: mol_type = other DNA
ccggggcagaagcagggtatt

SEQ ID NO: 36178 - DNA, 21 bp, synthetic construct
  misc_feature 1..21: note = Description of Artificial Sequence: Synthetic oligonucleotide
  source 1..21: mol_type = other DNA
gaaaccagaaaacaaggcgtc

SEQ ID NO: 36179 - DNA, 21 bp, synthetic construct
  misc_feature 1..21: note = Description of Artificial Sequence: Synthetic oligonucleotide
  source 1..21: mol_type = other DNA
accccccaaaacgtcagaaac

SEQ ID NO: 36180 - DNA, 21 bp, synthetic construct
  misc_feature 1..21: note = Description of Artificial Sequence: Synthetic oligonucleotide
  source 1..21: mol_type = other DNA
caggatgctactcctcgtagt

SEQ ID NO: 36181 - DNA, 21 bp, synthetic construct
  misc_feature 1..21: note = Description of Artificial Sequence: Synthetic oligonucleotide
  source 1..21: mol_type = other DNA
agccccaacgccaacagcgtc

SEQ ID NO: 36182 - DNA, 21 bp, synthetic construct
  misc_feature 1..21: note = Description of Artificial Sequence: Synthetic oligonucleotide
  source 1..21: mol_type = other DNA
caagacatgagactcagcggc

SEQ ID NO: 36183 - DNA, 21 bp, synthetic construct
  misc_feature 1..21: note = Description of Artificial Sequence: Synthetic oligonucleotide
  source 1..21: mol_type = other DNA
aatcgtgttaagccgatggtg

SEQ ID NO: 36184 - DNA, 21 bp, synthetic construct
  misc_feature 1..21: note = Description of Artificial Sequence: Synthetic oligonucleotide
  source 1..21: mol_type = other DNA
cctggtgagagtggtaaggtt

SEQ ID NO: 36185 - DNA, 21 bp, synthetic construct
  misc_feature 1..21: note = Description of Artificial Sequence: Synthetic oligonucleotide
  source 1..21: mol_type = other DNA
tatcggaatgtgaatgcgatg

SEQ ID NO: 36186 - DNA, 21 bp, synthetic construct
  misc_feature 1..21: note = Description of Artificial Sequence: Synthetic oligonucleotide
  source 1..21: mol_type = other DNA
ttccccagcgtcagcaccacc

SEQ ID NO: 36187 - DNA, 21 bp, synthetic construct
  misc_feature 1..21: note = Description of Artificial Sequence: Synthetic oligonucleotide
  source 1..21: mol_type = other DNA
agcaccgtcgccaccagcttc

SEQ ID NO: 36188 - DNA, 21 bp, synthetic construct
  misc_feature 1..21: note = Description of Artificial Sequence: Synthetic oligonucleotide
  source 1..21: mol_type = other DNA
cctagtgctaggatgtctggt

SEQ ID NO: 36189 - DNA, 21 bp, synthetic construct
  misc_feature 1..21: note = Description of Artificial Sequence: Synthetic oligonucleotide
  source 1..21: mol_type = other DNA
catcttagggggtctaatact

SEQ ID NO: 36190 - DNA, 21 bp, synthetic construct
  misc_feature 1..21: note = Description of Artificial Sequence: Synthetic oligonucleotide
  source 1..21: mol_type = other DNA
gtgggggcggcgactattcgt

SEQ ID NO: 36191 - DNA, 21 bp, synthetic construct
  misc_feature 1..21: note = Description of Artificial Sequence: Synthetic oligonucleotide
  source 1..21: mol_type = other DNA
gggtcgagggataagtcgact

SEQ ID NO: 36192 - DNA, 21 bp, synthetic construct
  misc_feature 1..21: note = Description of Artificial Sequence: Synthetic oligonucleotide
  source 1..21: mol_type = other DNA
agactcgtccccgccagcggc

SEQ ID NO: 36193 - DNA, 21 bp, synthetic construct
  misc_feature 1..21: note = Description of Artificial Sequence: Synthetic oligonucleotide
  source 1..21: mol_type = other DNA
atcagccaaagcaccaccaga

SEQ ID NO: 36194 - DNA, 21 bp, synthetic construct
  misc_feature 1..21: note = Description of Artificial Sequence: Synthetic oligonucleotide
  source 1..21: mol_type = other DNA
agtagttcggcgcctcgtctt

SEQ ID NO: 36195 - DNA, 21 bp, synthetic construct
  misc_feature 1..21: note = Description of Artificial Sequence: Synthetic oligonucleotide
  source 1..21: mol_type = other DNA
tggatgtctggtaagaatagt

SEQ ID NO: 36196 - DNA, 21 bp, synthetic construct
  misc_feature 1..21: note = Description of Artificial Sequence: Synthetic oligonucleotide
  source 1..21: mol_type = other DNA
cagcatactacgactaatcag

SEQ ID NO: 36197 - DNA, 21 bp, synthetic construct
  misc_feature 1..21: note = Description of Artificial Sequence: Synthetic oligonucleotide
  source 1..21: mol_type = other DNA
tatagtggtggtactcagcag

SEQ ID NO: 36198 - DNA, 21 bp, synthetic construct
  misc_feature 1..21: note = Description of Artificial Sequence: Synthetic oligonucleotide
  source 1..21: mol_type = other DNA
cttcttagtgctaaggggggg

SEQ ID NO: 36199 - DNA, 21 bp, synthetic construct
  misc_feature 1..21: note = Description of Artificial Sequence: Synthetic oligonucleotide
  source 1..21: mol_type = other DNA
caagaaggcgtcagaagcagc

SEQ ID NO: 36200 - DNA, 21 bp, synthetic construct
  misc_feature 1..21: note = Description of Artificial Sequence: Synthetic oligonucleotide
  source 1..21: mol_type = other DNA
gctagtagggcgcctcctggg

SEQ ID NO: 36201 - DNA, 21 bp, synthetic construct
  misc_feature 1..21: note = Description of Artificial Sequence: Synthetic oligonucleotide
  source 1..21: mol_type = other DNA
caaagaaccgtcggcaccgcc

SEQ ID NO: 36202 - DNA, 21 bp, synthetic construct
  misc_feature 1..21: note = Description of Artificial Sequence: Synthetic oligonucleotide
  source 1..21: mol_type = other DNA
tcttcgtctacgtcgcctagg

SEQ ID NO: 36203 - DNA, 21 bp, synthetic construct
  misc_feature 1..21: note = Description of Artificial Sequence: Synthetic oligonucleotide
  source 1..21: mol_type = other DNA
caaacccaaggccaactcaaa

SEQ ID NO: 36204 - DNA, 21 bp, synthetic construct
  misc_feature 1..21: note = Description of Artificial Sequence: Synthetic oligonucleotide
  source 1..21: mol_type = other DNA
ggccccaccgaccacaaactc

SEQ ID NO: 36205 - DNA, 21 bp, synthetic construct
  misc_feature 1..21: note = Description of Artificial Sequence: Synthetic oligonucleotide
  source 1..21: mol_type = other DNA
ggtgttaataataatattaat

SEQ ID NO: 36206 - DNA, 21 bp, synthetic construct
  misc_feature 1..21: note = Description of Artificial Sequence: Synthetic oligonucleotide
  source 1..21: mol_type = other DNA
gctgggcgggcgtctaatact

SEQ ID NO: 36207 - DNA, 21 bp, synthetic construct
  misc_feature 1..21: note = Description of Artificial Sequence: Synthetic oligonucleotide
  source 1..21: mol_type = other DNA
agttctgctaagagttcgctt

SEQ ID NO: 36208 - DNA, 21 bp, synthetic construct
  misc_feature 1..21: note = Description of Artificial Sequence: Synthetic oligonucleotide
  source 1..21: mol_type = other DNA
accagcaaaaacgccgccatg

SEQ ID NO: 36209 - DNA, 21 bp, synthetic construct
  misc_feature 1..21: note = Description of Artificial Sequence: Synthetic oligonucleotide
  source 1..21: mol_type = other DNA
gccgcccaacccagcctcaaa

SEQ ID NO: 36210 - DNA, 21 bp, synthetic construct
  misc_feature 1..21: note = Description of Artificial Sequence: Synthetic oligonucleotide
  source 1..21: mol_type = other DNA
cacagagaaatcgtcatgaaa

SEQ ID NO: 36211 - DNA, 21 bp, synthetic construct
  misc_feature 1..21: note = Description of Artificial Sequence: Synthetic oligonucleotide
  source 1..21: mol_type = other DNA
aataatactcagaagaattct

SEQ ID NO: 36212 - DNA, 21 bp, synthetic construct
  misc_feature 1..21: note = Description of Artificial Sequence: Synthetic oligonucleotide
  source 1..21: mol_type = other DNA
ggtgcgcgtccggtgcttcag

SEQ ID NO: 36213 - DNA, 21 bp, synthetic construct
  misc_feature 1..21: note = Description of Artificial Sequence: Synthetic oligonucleotide
  source 1..21: mol_type = other DNA
gggggtgataataagcttacg

SEQ ID NO: 36214 - DNA, 21 bp, synthetic construct
  misc_feature 1..21: note = Description of Artificial Sequence: Synthetic oligonucleotide
  source 1..21: mol_type = other DNA
aactgttctggacagaatcaa

SEQ ID NO: 36215 - DNA, 21 bp, synthetic construct
  misc_feature 1..21: note = Description of Artificial Sequence: Synthetic oligonucleotide
  source 1..21: mol_type = other DNA
aatgggagtccgggtttttat

SEQ ID NO: 36216 - DNA, 21 bp, synthetic construct
  misc_feature 1..21: note = Description of Artificial Sequence: Synthetic oligonucleotide
  source 1..21: mol_type = other DNA
agaagacaagacacccaagaa

SEQ ID NO: 36217 - DNA, 21 bp, synthetic construct
  misc_feature 1..21: note = Description of Artificial Sequence: Synthetic oligonucleotide
  source 1..21: mol_type = other DNA
attagtgggcttgatggtaat

SEQ ID NO: 36218 - DNA, 21 bp, synthetic construct
  misc_feature 1..21: note = Description of Artificial Sequence: Synthetic oligonucleotide
  source 1..21: mol_type = other DNA
aataggaatgggtttaataat

SEQ ID NO: 36219 - DNA, 21 bp, synthetic construct
  misc_feature 1..21: note = Description of Artificial Sequence: Synthetic oligonucleotide
  source 1..21: mol_type = other DNA
aacagttctggacagaatcaa

SEQ ID NO: 36220 - DNA, 21 bp, synthetic construct
  misc_feature 1..21: note = Description of Artificial Sequence: Synthetic oligonucleotide
  source 1..21: mol_type = other DNA
aataataattctggtagtggt

SEQ ID NO: 36221 - DNA, 21 bp, synthetic construct
  misc_feature 1..21: note = Description of Artificial Sequence: Synthetic oligonucleotide
  source 1..21: mol_type = other DNA
gggcttagtcctgttcttaag

SEQ ID NO: 36222 - DNA, 21 bp, synthetic construct
  misc_feature 1..21: note = Description of Artificial Sequence: Synthetic oligonucleotide
  source 1..21: mol_type = other DNA
aacggtgctggacagaatcaa

SEQ ID NO: 36223 - DNA, 21 bp, synthetic construct
  misc_feature 1..21: note = Description of Artificial Sequence: Synthetic oligonucleotide
  source 1..21: mol_type = other DNA
aacggttctggacagagtcaa

SEQ ID NO: 36224 - DNA, 21 bp, synthetic construct
  misc_feature 1..21: note = Description of Artificial Sequence: Synthetic oligonucleotide
  source 1..21: mol_type = other DNA
gatttttctgagaagcgtctt

SEQ ID NO: 36225 - DNA, 21 bp, synthetic construct
  misc_feature 1..21: note = Description of Artificial Sequence: Synthetic oligonucleotide
  source 1..21: mol_type = other DNA
ggcaccgacaacaacaccaga

SEQ ID NO: 36226 - DNA, 21 bp, synthetic construct
  misc_feature 1..21: note = Description of Artificial Sequence: Synthetic oligonucleotide
  source 1..21: mol_type = other DNA
gaggttttttcttctcagaag

SEQ ID NO: 36227 - DNA, 21 bp, synthetic construct
  misc_feature 1..21: note = Description of Artificial Sequence: Synthetic oligonucleotide
  source 1..21: mol_type = other DNA
cccagcaacaccggcaccatc

SEQ ID NO: 36228 - DNA, 21 bp, synthetic construct
  misc_feature 1..21: note = Description of Artificial Sequence: Synthetic oligonucleotide
  source 1..21: mol_type = other DNA
atgggcgccggcgccctcacc

SEQ ID NO: 36229 - DNA, 21 bp, synthetic construct
  misc_feature 1..21: note = Description of Artificial Sequence: Synthetic oligonucleotide
  source 1..21: mol_type = other DNA
ttcagaagcaaagaaagcgcc

SEQ ID NO: 36230 - DNA, 21 bp, synthetic construct
  misc_feature 1..21: note = Description of Artificial Sequence: Synthetic oligonucleotide
  source 1..21: mol_type = other DNA
caacaaggcgtcggcaacaac

SEQ ID NO: 36231 - DNA, 21 bp, synthetic construct
  misc_feature 1..21: note = Description of Artificial Sequence: Synthetic oligonucleotide
  source 1..21: mol_type = other DNA
gattctaggaataatatgacg

SEQ ID NO: 36232 - DNA, 21 bp, synthetic construct
  misc_feature 1..21: note = Description of Artificial Sequence: Synthetic oligonucleotide
  source 1..21: mol_type = other DNA
atgagcagaagcgaccccccc

SEQ ID NO: 36233 - DNA, 21 bp, synthetic construct
  misc_feature 1..21: note = Description of Artificial Sequence: Synthetic oligonucleotide
  source 1..21: mol_type = other DNA
caatacgacagcagcagcggc

SEQ ID NO: 36234 - DNA, 21 bp, synthetic construct
  misc_feature 1..21: note = Description of Artificial Sequence: Synthetic oligonucleotide
  source 1..21: mol_type = other DNA
tttaattcttcttctggtagt

SEQ ID NO: 36235 - DNA, 21 bp, synthetic construct
  misc_feature 1..21: note = Description of Artificial Sequence: Synthetic oligonucleotide
  source 1..21: mol_type = other DNA
taccccagcagcgtccaacaa

SEQ ID NO: 36236 - DNA, 21 bp, synthetic construct
  misc_feature 1..21: note = Description of Artificial Sequence: Synthetic oligonucleotide
  source 1..21: mol_type = other DNA
aacgccaccagccccagaaaa

SEQ ID NO: 36237 - DNA, 21 bp, synthetic construct
  misc_feature 1..21: note = Description of Artificial Sequence: Synthetic oligonucleotide
  source 1..21: mol_type = other DNA
aacggcagcggccaaatccaa

SEQ ID NO: 36238 - DNA, 21 bp, synthetic construct
  misc_feature 1..21: note = Description of Artificial Sequence: Synthetic oligonucleotide
  source 1..21: mol_type = other DNA
agacccgaaagcagctacagc

SEQ ID NO: 36239 - DNA, 21 bp, synthetic construct
  misc_feature 1..21: note = Description of Artificial Sequence: Synthetic oligonucleotide
  source 1..21: mol_type = other DNA
aatgcggttcgttctgagaat

SEQ ID NO: 36240 - DNA, 21 bp, synthetic construct
  misc_feature 1..21: note = Description of Artificial Sequence: Synthetic oligonucleotide
  source 1..21: mol_type = other DNA
tctgtggggtctggtgctttg

SEQ ID NO: 36241 - DNA, 21 bp, synthetic construct
  misc_feature 1..21: note = Description of Artificial Sequence: Synthetic oligonucleotide
  source 1..21: mol_type = other DNA
accacccaaaccccctacaaa

SEQ ID NO: 36242 - DNA, 21 bp, synthetic construct
  misc_feature 1..21: note = Description of Artificial Sequence: Synthetic oligonucleotide
  source 1..21: mol_type = other DNA
aacggttgtggacagaatcaa

SEQ ID NO: 36243 - DNA, 21 bp, synthetic construct
  misc_feature 1..21: note = Description of Artificial Sequence: Synthetic oligonucleotide
  source 1..21: mol_type = other DNA
tattcggataataagactact

SEQ ID NO: 36244 - DNA, 21 bp, synthetic construct
  misc_feature 1..21: note = Description of Artificial Sequence: Synthetic oligonucleotide
  source 1..21: mol_type = other DNA
atgaggcaggatacgagtaag

SEQ ID NO: 36245 - DNA, 21 bp, synthetic construct
  misc_feature 1..21: note = Description of Artificial Sequence: Synthetic oligonucleotide
  source 1..21: mol_type = other DNA
ctcaacagcggcaacggcagc

SEQ ID NO: 36246 - DNA, 21 bp, synthetic construct
  misc_feature 1..21: note = Description of Artificial Sequence: Synthetic oligonucleotide
  source 1..21: mol_type = other DNA
agcagcaacgaaaaagacaga

SEQ ID NO: 36247 - DNA, 21 bp, synthetic construct
  misc_feature 1..21: note = Description of Artificial Sequence: Synthetic oligonucleotide
  source 1..21: mol_type = other DNA
ctccccagcggcaacaccagc

SEQ ID NO: 36248 - DNA, 21 bp, synthetic construct
  misc_feature 1..21: note = Description of Artificial Sequence: Synthetic oligonucleotide
  source 1..21: mol_type = other DNA
aatcctgggcataagttgact

SEQ ID NO: 36249 - DNA, 21 bp, synthetic construct
  misc_feature 1..21: note = Description of Artificial Sequence: Synthetic oligonucleotide
  source 1..21: mol_type = other DNA
caaaccagcagccacgcctac

SEQ ID NO: 36250 - DNA, 21 bp, synthetic construct
  misc_feature 1..21: note = Description of Artificial Sequence: Synthetic oligonucleotide
  source 1..21: mol_type = other DNA
agcaacaacggcacccaaaaa

SEQ ID NO: 36251 - DNA, 21 bp, synthetic construct
  misc_feature 1..21: note = Description of Artificial Sequence: Synthetic oligonucleotide
  source 1..21: mol_type = other DNA
ggggatcataataggattaat

SEQ ID NO: 36252 - DNA, 21 bp, synthetic construct
  misc_feature 1..21: note = Description of Artificial Sequence: Synthetic oligonucleotide
  source 1..21: mol_type = other DNA
gtcagcggcaccaaaatcgaa

SEQ ID NO: 36253 - DNA, 21 bp, synthetic construct
  misc_feature 1..21: note = Description of Artificial Sequence: Synthetic oligonucleotide
  source 1..21: mol_type = other DNA
gtcggcgaagccggcaaagcc

SEQ ID NO: 36254 - DNA, 21 bp, synthetic construct
  misc_feature 1..21: note = Description of Artificial Sequence: Synthetic oligonucleotide
  source 1..21: mol_type = other DNA
attgctggtaggggtcttggt

SEQ ID NO: 36255 - DNA, 21 bp, synthetic construct
  misc_feature 1..21: note = Description of Artificial Sequence: Synthetic oligonucleotide
  source 1..21: mol_type = other DNA
aatgttttgggtcgggagggg

SEQ ID NO: 36256 - DNA, 21 bp, synthetic construct
  misc_feature 1..21: note = Description of Artificial Sequence: Synthetic oligonucleotide
  source 1..21: mol_type = other DNA
agtggtcagcattctttgaat

SEQ ID NO: 36257 - DNA, 21 bp, synthetic construct
  misc_feature 1..21: note = Description of Artificial Sequence: Synthetic oligonucleotide
  source 1..21: mol_type = other DNA
aacggttctggacagactcaa

SEQ ID NO: 36258 - DNA, 21 bp, synthetic construct
  misc_feature 1..21: note = Description of Artificial Sequence: Synthetic oligonucleotide
  source 1..21: mol_type = other DNA
gatatggtgagtccgcggaat

SEQ ID NO: 36259 - DNA, 21 bp, synthetic construct
  misc_feature 1..21: note = Description of Artificial Sequence: Synthetic oligonucleotide
  source 1..21: mol_type = other DNA
atgactactcagttgaatagt

SEQ ID NO: 36260 - DNA, 21 bp, synthetic construct
  misc_feature 1..21: note = Description of Artificial Sequence: Synthetic oligonucleotide
  source 1..21: mol_type = other DNA
caaacccccgtcagcgccccc

SEQ ID NO: 36261 - DNA, 21 bp, synthetic construct
  misc_feature 1..21: note = Description of Artificial Sequence: Synthetic oligonucleotide
  source 1..21: mol_type = other DNA
aacgtcgccaccctcagcgcc

SEQ ID NO: 36262 - DNA, 21 bp, synthetic construct
  misc_feature 1..21: note = Description of Artificial Sequence: Synthetic oligonucleotide
  source 1..21: mol_type = other DNA
tcggcggatcatattcggaat

SEQ ID NO: 36263 - DNA, 21 bp, synthetic construct
  misc_feature 1..21: note = Description of Artificial Sequence: Synthetic oligonucleotide
  source 1..21: mol_type = other DNA
agtgttagtacgaatttttcg

SEQ ID NO: 36264 - DNA, 21 bp, synthetic construct
  misc_feature 1..21: note = Description of Artificial Sequence: Synthetic oligonucleotide
  source 1..21: mol_type = other DNA
aacgattctggacagaatcaa

SEQ ID NO: 36265 - DNA, 21 bp, synthetic construct
  misc_feature 1..21: note = Description of Artificial Sequence: Synthetic oligonucleotide
  source 1..21: mol_type = other DNA
gcgactggttctcctagtaag

SEQ ID NO: 36266 - DNA, 21 bp, synthetic construct
  misc_feature 1..21: note = Description of Artificial Sequence: Synthetic oligonucleotide
  source 1..21: mol_type = other DNA
acccaacaacacggcagcaac

SEQ ID NO: 36267 - DNA, 21 bp, synthetic construct
  misc_feature 1..21: note = Description of Artificial Sequence: Synthetic oligonucleotide
  source 1..21: mol_type = other DNA
gagaatcggacttctgttcag

SEQ ID NO: 36268 - DNA, 21 bp, synthetic construct
  misc_feature 1..21: note = Description of Artificial Sequence: Synthetic oligonucleotide
  source 1..21: mol_type = other DNA
accagccaagtcagccacggc

SEQ ID NO: 36269 - DNA, 21 bp, synthetic construct
  misc_feature 1..21: note = Description of Artificial Sequence: Synthetic oligonucleotide
  source 1..21: mol_type = other DNA
gacagagtcctcagccaaggc

SEQ ID NO: 36270 - DNA, 21 bp, synthetic construct
  misc_feature 1..21: note = Description of Artificial Sequence: Synthetic oligonucleotide
  source 1..21: mol_type = other DNA
gacagcggcagcagcaccaaa

SEQ ID NO: 36271 - DNA, 21 bp, synthetic construct
  misc_feature 1..21: note = Description of Artificial Sequence: Synthetic oligonucleotide
  source 1..21: mol_type = other DNA
ccgactcatgcttcgagtctt

SEQ ID NO: 36272 - DNA, 21 bp, synthetic construct
  misc_feature 1..21: note = Description of Artificial Sequence: Synthetic oligonucleotide
  source 1..21: mol_type = other DNA
aacggcagcggccaaaacccc

SEQ ID NO: 36273 - DNA, 21 bp, synthetic construct
  misc_feature 1..21: note = Description of Artificial Sequence: Synthetic oligonucleotide
  source 1..21: mol_type = other DNA
cccaacggcgcccacgtcacc

SEQ ID NO: 36274 - DNA, 21 bp, synthetic construct
  misc_feature 1..21: note = Description of Artificial Sequence: Synthetic oligonucleotide
  source 1..21: mol_type = other DNA
ggtgctaaggagagtcagagt

SEQ ID NO: 36275 - DNA, 21 bp, synthetic construct
  misc_feature 1..21: note = Description of Artificial Sequence: Synthetic oligonucleotide
  source 1..21: mol_type = other DNA
ggccacgacggccaaagcaga

SEQ ID NO: 36276 - DNA, 21 bp, synthetic construct
  misc_feature 1..21: note = Description of Artificial Sequence: Synthetic oligonucleotide
  source 1..21: mol_type = other DNA
cggtcttatgagggtatgcag

SEQ ID NO: 36277 - DNA, 21 bp, synthetic construct
  misc_feature 1..21: note = Description of Artificial Sequence: Synthetic oligonucleotide
  source 1..21: mol_type = other DNA
acgactgtgggtagtggttat

SEQ ID NO: 36278 - DNA, 21 bp, synthetic construct
  misc_feature 1..21: note = Description of Artificial Sequence: Synthetic oligonucleotide
  source 1..21: mol_type = other DNA
ggcatcgccaccaccaacaga

SEQ ID NO: 36279 - DNA, 21 bp, synthetic construct
  misc_feature 1..21: note = Description of Artificial Sequence: Synthetic oligonucleotide
  source 1..21: mol_type = other DNA
agctacagcggcaccctcggc

SEQ ID NO: 36280 - DNA, 21 bp, synthetic construct
  misc_feature 1..21: note = Description of Artificial Sequence: Synthetic oligonucleotide
  source 1..21: mol_type = other DNA
ttttctactcatgaggtttct

SEQ ID NO: 36281 - DNA, 21 bp, synthetic construct
  misc_feature 1..21: note = Description of Artificial Sequence: Synthetic oligonucleotide
  source 1..21: mol_type = other DNA
atcaccggcaaccaaggcgtc

SEQ ID NO: 36282 - DNA, 21 bp, synthetic construct
  misc_feature 1..21: note = Description of Artificial Sequence: Synthetic oligonucleotide
  source 1..21: mol_type = other DNA
tctacggtgggtcatatgaat

SEQ ID NO: 36283 - DNA, 21 bp, synthetic construct
  misc_feature 1..21: note = Description of Artificial Sequence: Synthetic oligonucleotide
  source 1..21: mol_type = other DNA
tctggtgttaaggctttttct

SEQ ID NO: 36284 - DNA, 21 bp, synthetic construct
  misc_feature 1..21: note = Description of Artificial Sequence: Synthetic oligonucleotide
  source 1..21: mol_type = other DNA
cacaaagtccccggcagcggc

SEQ ID NO: 36285 - DNA, 21 bp, synthetic construct
  misc_feature 1..21: note = Description of Artificial Sequence: Synthetic oligonucleotide
  source 1..21: mol_type = other DNA
agcaacgacagcaacaaaaaa

SEQ ID NO: 36286 - DNA, 21 bp, synthetic construct
  misc_feature 1..21: note = Description of Artificial Sequence: Synthetic oligonucleotide
  source 1..21: mol_type = other DNA
aataatggggcttcggttgtg

SEQ ID NO: 36287 - DNA, 21 bp, synthetic construct
  misc_feature 1..21: note = Description of Artificial Sequence: Synthetic oligonucleotide
  source 1..21: mol_type = other DNA
actgcttcgccgaataatcgt

SEQ ID NO: 36288 - DNA, 21 bp, synthetic construct
  misc_feature 1..21: note = Description of Artificial Sequence: Synthetic oligonucleotide
  source 1..21: mol_type = other DNA
accaaccccaaaagcagcagc

SEQ ID NO: 36289 - DNA, 21 bp, synthetic construct
  misc_feature 1..21: note = Description of Artificial Sequence: Synthetic oligonucleotide
  source 1..21: mol_type = other DNA
ttcaaccaacacagcagcctc

SEQ ID NO: 36290 - DNA, 21 bp, synthetic construct
  misc_feature 1..21: note = Description of Artificial Sequence: Synthetic oligonucleotide
  source 1..21: mol_type = other DNA
actccgcagaattctgtgaag

SEQ ID NO: 36291 - DNA, 21 bp, synthetic construct
  misc_feature 1..21: note = Description of Artificial Sequence: Synthetic oligonucleotide
  source 1..21: mol_type = other DNA
ggcggcctcagccccaaagtc

SEQ ID NO: 36292 - DNA, 21 bp, synthetic construct
  misc_feature 1..21: note = Description of Artificial Sequence: Synthetic oligonucleotide
  source 1..21: mol_type = other DNA
tctactgggtcggtgagtaag

SEQ ID NO: 36293 - DNA, 21 bp, synthetic construct
  misc_feature 1..21: note = Description of Artificial Sequence: Synthetic oligonucleotide
  source 1..21: mol_type = other DNA
actctgccttctaattatatg

SEQ ID NO: 36294 - DNA, 21 bp, synthetic construct
  misc_feature 1..21: note = Description of Artificial Sequence: Synthetic oligonucleotide
  source 1..21: mol_type = other DNA
atggccgccaaacccaacgac

SEQ ID NO: 36295 - DNA, 21 bp, synthetic construct
  misc_feature 1..21: note = Description of Artificial Sequence: Synthetic oligonucleotide
  source 1..21: mol_type = other DNA
cccggcaccggcagcaaccac

SEQ ID NO: 36296 - DNA, 21 bp, synthetic construct
  misc_feature 1..21: note = Description of Artificial Sequence: Synthetic oligonucleotide
  source 1..21: mol_type = other DNA
ggcagcgccggcaacatgctc

SEQ ID NO: 36297 - DNA, 21 bp, synthetic construct
  misc_feature 1..21: note = Description of Artificial Sequence: Synthetic oligonucleotide
  source 1..21: mol_type = other DNA
gacgccaacagcacccacgcc

SEQ ID NO: 36298 - DNA, 21 bp, synthetic construct
  misc_feature 1..21: note = Description of Artificial Sequence: Synthetic oligonucleotide
  source 1..21: mol_type = other DNA
caactcagaagcgaccaaacc

SEQ ID NO: 36299 - DNA, 21 bp, synthetic construct
  misc_feature 1..21: note = Description of Artificial Sequence: Synthetic oligonucleotide
  source 1..21: mol_type = other DNA
aatcttaagacgaagggggag

SEQ ID NO: 36300 - DNA, 21 bp, synthetic construct
  misc_feature 1..21: note = Description of Artificial Sequence: Synthetic oligonucleotide
  source 1..21: mol_type = other DNA
agtattagtgataagcttggt

SEQ ID NO: 36301 - DNA, 21 bp, synthetic construct
  misc_feature 1..21: note = Description of Artificial Sequence: Synthetic oligonucleotide
  source 1..21: mol_type = other DNA
gaaagacccggcggcaccccc

SEQ ID NO: 36302 - DNA, 21 bp, synthetic construct
  misc_feature 1..21: note = Description of Artificial Sequence: Synthetic oligonucleotide
  source 1..21: mol_type = other DNA
agcaacagcagacaagccgac

SEQ ID NO: 36303 - DNA, 21 bp, synthetic construct
  misc_feature 1..21: note = Description of Artificial Sequence: Synthetic oligonucleotide
  source 1..21: mol_type = other DNA
gaaagcgtcagcaacagcctc

SEQ ID NO: 36304 - DNA, 21 bp, synthetic construct
  misc_feature 1..21: note = Description of Artificial Sequence: Synthetic oligonucleotide
  source 1..21: mol_type = other DNA
aacgccagcggccaaaaccaa

SEQ ID NO: 36305 - DNA, 21 bp, synthetic construct
  misc_feature 1..21: note = Description of Artificial Sequence: Synthetic oligonucleotide
  source 1..21: mol_type = other DNA
ctcctcagccaacacagcgac

SEQ ID NO: 36306 - DNA, 21 bp, synthetic construct
  misc_feature 1..21: note = Description of Artificial Sequence: Synthetic oligonucleotide
  source 1..21: mol_type = other DNA
tctgttactagtcctaataag

SEQ ID NO: 36307 - DNA, 21 bp, synthetic construct
  misc_feature 1..21: note = Description of Artificial Sequence: Synthetic oligonucleotide
  source 1..21: mol_type = other DNA
gctactgggaatgggcggggg

SEQ ID NO: 36308 - DNA, 21 bp, synthetic construct
  misc_feature 1..21: note = Description of Artificial Sequence: Synthetic oligonucleotide
  source 1..21: mol_type = other DNA
attaggtcgaaggagtctgag

SEQ ID NO: 36309 - DNA, 21 bp, synthetic construct
  misc_feature 1..21: note = Description of Artificial Sequence: Synthetic oligonucleotide
  source 1..21: mol_type = other DNA
tcgggtacgaatatgtggcag

SEQ ID NO: 36310 - DNA, 21 bp, synthetic construct
  misc_feature 1..21: note = Description of Artificial Sequence: Synthetic oligonucleotide
  source 1..21: mol_type = other DNA
ccgactactaggatggtgaat

SEQ ID NO: 36311 - DNA, 21 bp, synthetic construct
  misc_feature 1..21: note = Description of Artificial Sequence: Synthetic oligonucleotide
  source 1..21: mol_type = other DNA
ggggataagaatcatggtagt

SEQ ID NO: 36312 - DNA, 21 bp, synthetic construct
  misc_feature 1..21: note = Description of Artificial Sequence: Synthetic oligonucleotide
  source 1..21: mol_type = other DNA
cagagtcatggtattacgaat

SEQ ID NO: 36313 - DNA, 21 bp, synthetic construct
  misc_feature 1..21: note = Description of Artificial Sequence: Synthetic oligonucleotide
  source 1..21: mol_type = other DNA
aatagtactccgtcgactagg

SEQ ID NO: 36314 - DNA, 21 bp, synthetic construct
  misc_feature 1..21: note = Description of Artificial Sequence: Synthetic oligonucleotide
  source 1..21: mol_type = other DNA
ctggttcagggtggtgttaat

SEQ ID NO: 36315 - DNA, 21 bp, synthetic construct
  misc_feature 1..21: note = Description of Artificial Sequence: Synthetic oligonucleotide
  source 1..21: mol_type = other DNA
attccgactgctcgtgctgcg

SEQ ID NO: 36316 - DNA, 21 bp, synthetic construct
  misc_feature 1..21: note = Description of Artificial Sequence: Synthetic oligonucleotide
  source 1..21: mol_type = other DNA
tacaaccacggcagcgtcgac

SEQ ID NO: 36317 - DNA, 21 bp, synthetic construct
  misc_feature 1..21: note = Description of Artificial Sequence: Synthetic oligonucleotide
  source 1..21: mol_type = other DNA
tggtctttggggcataatgat

SEQ ID NO: 36318 - DNA, 21 bp, synthetic construct
  misc_feature 1..21: note = Description of Artificial Sequence: Synthetic oligonucleotide
  source 1..21: mol_type = other DNA
actcagtcgcataatcttgct

SEQ ID NO: 36319 - DNA, 21 bp, synthetic construct
  misc_feature 1..21: note = Description of Artificial Sequence: Synthetic oligonucleotide
  source 1..21: mol_type = other DNA
aatcctggttcgggttatggt

SEQ ID NO: 36320 - DNA, 21 bp, synthetic construct
  misc_feature 1..21: note = Description of Artificial Sequence: Synthetic oligonucleotide
  source 1..21: mol_type = other DNA
aaccccagccacaccagcgtc

SEQ ID NO: 36321 - DNA, 21 bp, synthetic construct
  misc_feature 1..21: note = Description of Artificial Sequence: Synthetic oligonucleotide
  source 1..21: mol_type = other DNA
caaagcaacaccagccccacc

SEQ ID NO: 36322 - DNA, 21 bp, synthetic construct
  misc_feature 1..21: note = Description of Artificial Sequence: Synthetic oligonucleotide
  source 1..21: mol_type = other DNA
ccggggtctgggagtaatcat

SEQ ID NO: 36323 - DNA, 21 bp, synthetic construct
  misc_feature 1..21: note = Description of Artificial Sequence: Synthetic oligonucleotide
  source 1..21: mol_type = other DNA
gccagaggcgccagcaccaac

SEQ ID NO: 36324 - DNA, 21 bp, synthetic construct
  misc_feature 1..21: note = Description of Artificial Sequence: Synthetic oligonucleotide
  source 1..21: mol_type = other DNA
gacaacatgagcacccccaaa

SEQ ID NO: 36325 - DNA, 21 bp, synthetic construct
  misc_feature 1..21: note = Description of Artificial Sequence: Synthetic oligonucleotide
  source 1..21: mol_type = other DNA
accgccacccaaaaaggccaa

SEQ ID NO: 36326 - DNA, 21 bp, synthetic construct
  misc_feature 1..21: note = Description of Artificial Sequence: Synthetic oligonucleotide
  source 1..21: mol_type = other DNA
atgccgacttcgtctttgaat

SEQ ID NO: 36327 - DNA, 21 bp, synthetic construct
  misc_feature 1..21: note = Description of Artificial Sequence: Synthetic oligonucleotide
  source 1..21: mol_type = other DNA
tcttctcataaggattatttg

SEQ ID NO: 36328 - DNA, 21 bp, synthetic construct
  misc_feature 1..21: note = Description of Artificial Sequence: Synthetic oligonucleotide
  source 1..21: mol_type = other DNA
gccggcgccagcagcaacacc

SEQ ID NO: 36329 - DNA, 21 bp, synthetic construct
  misc_feature 1..21: note = Description of Artificial Sequence: Synthetic oligonucleotide
  source 1..21: mol_type = other DNA
agcgtccacagcaacgccatc

SEQ ID NO: 36330 - DNA, 21 bp, synthetic construct
  misc_feature 1..21: note = Description of Artificial Sequence: Synthetic oligonucleotide
  source 1..21: mol_type = other DNA
gtcctcgccggcagcaacacc

SEQ ID NO: 36331 - DNA, 21 bp, synthetic construct
  misc_feature 1..21: note = Description of Artificial Sequence: Synthetic oligonucleotide
  source 1..21: mol_type = other DNA
cagacgggtactagttctact

SEQ ID NO: 36332 - DNA, 21 bp, synthetic construct
  misc_feature 1..21: note = Description of Artificial Sequence: Synthetic oligonucleotide
  source 1..21: mol_type = other DNA
gcttctactccgaataatact

SEQ ID NO: 36333 - DNA, 21 bp, synthetic construct
  misc_feature 1..21: note = Description of Artificial Sequence: Synthetic oligonucleotide
  source 1..21: mol_type = other DNA
accaacatccaagccagcaaa

SEQ ID NO: 36334 - DNA, 21 bp, synthetic construct
  misc_feature 1..21: note = Description of Artificial Sequence: Synthetic oligonucleotide
  source 1..21: mol_type = other DNA
gctccgagtcatgcttctctt

SEQ ID NO: 36335 - DNA, 21 bp, synthetic construct
  misc_feature 1..21: note = Description of Artificial Sequence: Synthetic oligonucleotide
  source 1..21: mol_type = other DNA
ggtcagattaagaatttgggt

SEQ ID NO: 36336 - DNA, 21 bp, synthetic construct
  misc_feature 1..21: note = Description of Artificial Sequence: Synthetic oligonucleotide
  source 1..21: mol_type = other DNA
ggcctcgaccacctcagaacc

SEQ ID NO: 36337 - DNA, 21 bp, synthetic construct
  misc_feature 1..21: note = Description of Artificial Sequence: Synthetic oligonucleotide
  source 1..21: mol_type = other DNA
tctctgtctcgtgagcatatg

SEQ ID NO: 36338 - DNA, 21 bp, synthetic construct
  misc_feature 1..21: note = Description of Artificial Sequence: Synthetic oligonucleotide
  source 1..21: mol_type = other DNA
acccccaccctcgcccacggc

SEQ ID NO: 36339 - DNA, 21 bp, synthetic construct
  misc_feature 1..21: note = Description of Artificial Sequence: Synthetic oligonucleotide
  source 1..21: mol_type = other DNA
tctgttcatcagaatcgggcg

SEQ ID NO: 36340 - DNA, 21 bp, synthetic construct
  misc_feature 1..21: note = Description of Artificial Sequence: Synthetic oligonucleotide
  source 1..21: mol_type = other DNA
agcagagacagcggcggcgcc

SEQ ID NO: 36341 - DNA, 21 bp, synthetic construct
  misc_feature 1..21: note = Description of Artificial Sequence: Synthetic oligonucleotide
  source 1..21: mol_type = other DNA
agcagcgaagccagactcatg

SEQ ID NO: 36342 - DNA, 21 bp, synthetic construct
  misc_feature 1..21: note = Description of Artificial Sequence: Synthetic oligonucleotide
  source 1..21: mol_type = other DNA
tctacgtctcgtgatgctact

SEQ ID NO: 36343 - DNA, 21 bp, synthetic construct
  misc_feature 1..21: note = Description of Artificial Sequence: Synthetic oligonucleotide
  source 1..21: mol_type = other DNA
tgcaaccaaagccccaacaga

SEQ ID NO: 36344 - DNA, 21 bp, synthetic construct
  misc_feature 1..21: note = Description of Artificial Sequence: Synthetic oligonucleotide
  source 1..21: mol_type = other DNA
ggccaaaccagagaaagcagc

SEQ ID NO: 36345 - DNA, 21 bp, synthetic construct
  misc_feature 1..21: note = Description of Artificial Sequence: Synthetic oligonucleotide
  source 1..21: mol_type = other DNA
agcagcaccaaaagcagcctc

SEQ ID NO: 36346 - DNA, 21 bp, synthetic construct
  misc_feature 1..21: note = Description of Artificial Sequence: Synthetic oligonucleotide
  source 1..21: mol_type = other DNA
cctcttgcttcgcctatggtg

SEQ ID NO: 36347 - DNA, 21 bp, synthetic construct
  misc_feature 1..21: note = Description of Artificial Sequence: Synthetic oligonucleotide
  source 1..21: mol_type = other DNA
ggcaccagccccagcaccatg

SEQ ID NO: 36348 - DNA, 21 bp, synthetic construct
  misc_feature 1..21: note = Description of Artificial Sequence: Synthetic oligonucleotide
  source 1..21: mol_type = other DNA
atcagcaaagccagcacccac

SEQ ID NO: 36349 - DNA, 21 bp, synthetic construct
  misc_feature 1..21: note = Description of Artificial Sequence: Synthetic oligonucleotide
  source 1..21: mol_type = other DNA
aatggtaatatttctattggg

SEQ ID NO: 36350 - DNA, 21 bp, synthetic construct
  misc_feature 1..21: note = Description of Artificial Sequence: Synthetic oligonucleotide
  source 1..21: mol_type = other DNA
accgccgtcaccgccaaccaa

SEQ ID NO: 36351 - DNA, 21 bp, synthetic construct
  misc_feature 1..21: note = Description of Artificial Sequence: Synthetic oligonucleotide
  source 1..21: mol_type = other DNA
gatgggggtaatcagaggagt

SEQ ID NO: 36352 - DNA, 21 bp, synthetic construct
  misc_feature 1..21: note = Description of Artificial Sequence: Synthetic oligonucleotide
  source 1..21: mol_type = other DNA
gacgacagaagcaacctcagc

SEQ ID NO: 36353 - DNA, 21 bp, synthetic construct
  misc_feature 1..21: note = Description of Artificial Sequence: Synthetic oligonucleotide
  source 1..21: mol_type = other DNA
cctgttccgtatcgtgctgat

SEQ ID NO: 36354 - DNA, 21 bp, synthetic construct
  misc_feature 1..21: note = Description of Artificial Sequence: Synthetic oligonucleotide
  source 1..21: mol_type = other DNA
aattctcgtgagaagggtgcg

SEQ ID NO: 36355 - DNA, 21 bp, synthetic construct
  misc_feature 1..21: note = Description of Artificial Sequence: Synthetic oligonucleotide
  source 1..21: mol_type = other DNA
agactccccgcccaccaagcc

SEQ ID NO: 36356 - DNA, 21 bp, synthetic construct
  misc_feature 1..21: note = Description of Artificial Sequence: Synthetic oligonucleotide
  source 1..21: mol_type = other DNA
aacgccaaccaaaaccaaatg

SEQ ID NO: 36357 - DNA, 21 bp, synthetic construct
  misc_feature 1..21: note = Description of Artificial Sequence: Synthetic oligonucleotide
  source 1..21: mol_type = other DNA
tataatgtgaatcgtaatacg

SEQ ID NO: 36358 - DNA, 21 bp, synthetic construct
  misc_feature 1..21: note = Description of Artificial Sequence: Synthetic oligonucleotide
  source 1..21: mol_type = other DNA
tattctgggggtaatatgagt

SEQ ID NO: 36359 - DNA, 21 bp, synthetic construct
  misc_feature 1..21: note = Description of Artificial Sequence: Synthetic oligonucleotide
  source 1..21: mol_type = other DNA
gccaccaacaacggcagcaaa

SEQ ID NO: 36360 - DNA, 21 bp, synthetic construct
  misc_feature 1..21: note = Description of Artificial Sequence: Synthetic oligonucleotide
  source 1..21: mol_type = other DNA
gacagcatcggcagcagcaaa

SEQ ID NO: 36361 - DNA, 21 bp, synthetic construct
  misc_feature 1..21: note = Description of Artificial Sequence: Synthetic oligonucleotide
  source 1..21: mol_type = other DNA
gacggcatcaaaagctacgcc

SEQ ID NO: 36362 - DNA, 21 bp, synthetic construct
  misc_feature 1..21: note = Description of Artificial Sequence: Synthetic oligonucleotide
  source 1..21: mol_type = other DNA
agcagacccagcaacatggcc

SEQ ID NO: 36363 - DNA, 21 bp, synthetic construct
  misc_feature 1..21: note = Description of Artificial Sequence: Synthetic oligonucleotide
  source 1..21: mol_type = other DNA
ggtctgccgactgagaagatg

SEQ ID NO: 36364 - DNA, 21 bp, synthetic construct
  misc_feature 1..21: note = Description of Artificial Sequence: Synthetic oligonucleotide
  source 1..21: mol_type = other DNA
aacggttctgcacagaatcaa

SEQ ID NO: 36365 - DNA, 21 bp, synthetic construct
  misc_feature 1..21: note = Description of Artificial Sequence: Synthetic oligonucleotide
  source 1..21: mol_type = other DNA
accagcagagtcggccaagtc

SEQ ID NO: 36366 - DNA, 21 bp, synthetic construct
  misc_feature 1..21: note = Description of Artificial Sequence: Synthetic oligonucleotide
  source 1..21: mol_type = other DNA
agtactagtaatattgcttcg

SEQ ID NO: 36367 - DNA, 21 bp, synthetic construct
  misc_feature 1..21: note = Description of Artificial Sequence: Synthetic oligonucleotide
  source 1..21: mol_type = other DNA
aatgcgaatccgtctttgagg

SEQ ID NO: 36368 - DNA, 21 bp, synthetic construct
  misc_feature 1..21: note = Description of Artificial Sequence: Synthetic oligonucleotide
  source 1..21: mol_type = other DNA
gagagtaattcgagtcggggg

SEQ ID NO: 36369 - DNA, 21 bp, synthetic construct
  misc_feature 1..21: note = Description of Artificial Sequence: Synthetic oligonucleotide
  source 1..21: mol_type = other DNA
tcgggtggtcaggctatgggg

SEQ ID NO: 36370 - DNA, 21 bp, synthetic construct
  misc_feature 1..21: note = Description of Artificial Sequence: Synthetic oligonucleotide
  source 1..21: mol_type = other DNA
tttgtgaatactagtgcgcag

SEQ ID NO: 36371 - DNA, 21 bp, synthetic construct
  misc_feature 1..21: note = Description of Artificial Sequence: Synthetic oligonucleotide
  source 1..21: mol_type = other DNA
atgatgggcggcgtcaaaaac

SEQ ID NO: 36372 - DNA, 21 bp, synthetic construct
  misc_feature 1..21: note = Description of Artificial Sequence: Synthetic oligonucleotide
  source 1..21: mol_type = other DNA
catacgcctgatgtgggtaag

SEQ ID NO: 36373 - DNA, 21 bp, synthetic construct
  misc_feature 1..21: note = Description of Artificial Sequence: Synthetic oligonucleotide
  source 1..21: mol_type = other DNA
agaagcagcagcgccatgacc

SEQ ID NO: 36374 - DNA, 21 bp, synthetic construct
  misc_feature 1..21: note = Description of Artificial Sequence: Synthetic oligonucleotide
  source 1..21: mol_type = other DNA
agtcagattccgccgtctact

SEQ ID NO: 36375 - DNA, 21 bp, synthetic construct
  misc_feature 1..21: note = Description of Artificial Sequence: Synthetic oligonucleotide
  source 1..21: mol_type = other DNA
agcggcagcaacaacttcctc

SEQ ID NO: 36376 - DNA, 21 bp, synthetic construct
  misc_feature 1..21: note = Description of Artificial Sequence: Synthetic oligonucleotide
  source 1..21: mol_type = other DNA
atgcgtgctgagtctggtcag

SEQ ID NO: 36377 - DNA, 21 bp, synthetic construct
  misc_feature 1..21: note = Description of Artificial Sequence: Synthetic oligonucleotide
  source 1..21: mol_type = other DNA
tcgatttctcattcgtctagt

SEQ ID NO: 36378 - DNA, 21 bp, synthetic construct
  misc_feature 1..21: note = Description of Artificial Sequence: Synthetic oligonucleotide
  source 1..21: mol_type = other DNA
tacagagccagcggcatcagc

SEQ ID NO: 36379 - DNA, 21 bp, synthetic construct
  misc_feature 1..21: note = Description of Artificial Sequence: Synthetic oligonucleotide
  source 1..21: mol_type = other DNA
tctggtacgacgacgtttggt

SEQ ID NO: 36380 - DNA, 21 bp, synthetic construct
  misc_feature 1..21: note = Description of Artificial Sequence: Synthetic oligonucleotide
  source 1..21: mol_type = other DNA
gccctcagcagccaaaaaggc

SEQ ID NO: 36381 - DNA, 21 bp, synthetic construct
  misc_feature 1..21: note = Description of Artificial Sequence: Synthetic oligonucleotide
  source 1..21: mol_type = other DNA
ctcggcgtcaaaacccccacc

SEQ ID NO: 36382 - DNA, 21 bp, synthetic construct
  misc_feature 1..21: note = Description of Artificial Sequence: Synthetic oligonucleotide
  source 1..21: mol_type = other DNA
aatgatcgtggtcagaatggg

SEQ ID NO: 36383 - DNA, 21 bp, synthetic construct
  misc_feature 1..21: note = Description of Artificial Sequence: Synthetic oligonucleotide
  source 1..21: mol_type = other DNA
ttccacgccaacagcaccgtc

SEQ ID NO: 36384 - DNA, 21 bp, synthetic construct
  misc_feature 1..21: note = Description of Artificial Sequence: Synthetic oligonucleotide
  source 1..21: mol_type = other DNA
aaaagcgtcaaccccctcctc

SEQ ID NO: 36385 - DNA, 21 bp, synthetic construct
  misc_feature 1..21: note = Description of Artificial Sequence: Synthetic oligonucleotide
  source 1..21: mol_type = other DNA
cacagcagcagacccctcgaa

SEQ ID NO: 36386 - DNA, 21 bp, synthetic construct
  misc_feature 1..21: note = Description of Artificial Sequence: Synthetic oligonucleotide
  source 1..21: mol_type = other DNA
agtgataataagggttcggtg

SEQ ID NO: 36387 - DNA, 21 bp, synthetic construct
  misc_feature 1..21: note = Description of Artificial Sequence: Synthetic oligonucleotide
  source 1..21: mol_type = other DNA
agaatgggcaacaaagaagcc

SEQ ID NO: 36388 - DNA, 21 bp, synthetic construct
  misc_feature 1..21: note = Description of Artificial Sequence: Synthetic oligonucleotide
  source 1..21: mol_type = other DNA
ggcctcgccgaccccagaacc

SEQ ID NO: 36389 - DNA, 21 bp, synthetic construct
  misc_feature 1..21: note = Description of Artificial Sequence: Synthetic oligonucleotide
  source 1..21: mol_type = other DNA
atcaccagcaccggcagcagc

SEQ ID NO: 36390 - DNA, 21 bp, synthetic construct
  misc_feature 1..21: note = Description of Artificial Sequence: Synthetic oligonucleotide
  source 1..21: mol_type = other DNA
gcgggttcgtctcctcctacg

SEQ ID NO: 36391 - DNA, 21 bp, synthetic construct
  misc_feature 1..21: note = Description of Artificial Sequence: Synthetic oligonucleotide
  source 1..21: mol_type = other DNA
ccgttgcctaagaatagtagt

SEQ ID NO: 36392 - DNA, 21 bp, synthetic construct
  misc_feature 1..21: note = Description of Artificial Sequence: Synthetic oligonucleotide
  source 1..21: mol_type = other DNA
agcagagtcgaccaatacaaa

SEQ ID NO: 36393 - DNA, 21 bp, synthetic construct
  misc_feature 1..21: note = Description of Artificial Sequence: Synthetic oligonucleotide
  source 1..21: mol_type = other DNA
ggcatgacccaaggcggcaaa

SEQ ID NO: 36394 - DNA, 21 bp, synthetic construct
  misc_feature 1..21: note = Description of Artificial Sequence: Synthetic oligonucleotide
  source 1..21: mol_type = other DNA
caattccccggcaccctcaga

SEQ ID NO: 36395 - DNA, 21 bp, synthetic construct
  misc_feature 1..21: note = Description of Artificial Sequence: Synthetic oligonucleotide
  source 1..21: mol_type = other DNA
ggtgctaatacgaatccgggg

SEQ ID NO: 36396 - DNA, 21 bp, synthetic construct
  misc_feature 1..21: note = Description of Artificial Sequence: Synthetic oligonucleotide
  source 1..21: mol_type = other DNA
gatcgggctgatgcgaattct

SEQ ID NO: 36397 - DNA, 21 bp, synthetic construct
  misc_feature 1..21: note = Description of Artificial Sequence: Synthetic oligonucleotide
  source 1..21: mol_type = other DNA
actactcataatattaagggg

SEQ ID NO: 36398 - DNA, 21 bp, synthetic construct
  misc_feature 1..21: note = Description of Artificial Sequence: Synthetic oligonucleotide
  source 1..21: mol_type = other DNA
gtcggcagccaaaccaacagc

SEQ ID NO: 36399 - DNA, 21 bp, synthetic construct
  misc_feature 1..21: note = Description of Artificial Sequence: Synthetic oligonucleotide
  source 1..21: mol_type = other DNA
catacggcgactcctcttctg

SEQ ID NO: 36400 - DNA, 21 bp, synthetic construct
  misc_feature 1..21: note = Description of Artificial Sequence: Synthetic oligonucleotide
  source 1..21: mol_type = other DNA
gctgttggtaagtcgacggag

SEQ ID NO: 36401 - DNA, 21 bp, synthetic construct
  misc_feature 1..21: note = Description of Artificial Sequence: Synthetic oligonucleotide
  source 1..21: mol_type = other DNA
ggggcggctgtgcaggcgaat

SEQ ID NO: 36402 - DNA, 21 bp, synthetic construct
  misc_feature 1..21: note = Description of Artificial Sequence: Synthetic oligonucleotide
  source 1..21: mol_type = other DNA
gaccccctcggcaaacaaggc

SEQ ID NO: 36403 - DNA, 21 bp, synthetic construct
  misc_feature 1..21: note = Description of Artificial Sequence: Synthetic oligonucleotide
  source 1..21: mol_type = other DNA
agcatcaaaagcgccgccgcc

SEQ ID NO: 36404 - DNA, 21 bp, synthetic construct
  misc_feature 1..21: note = Description of Artificial Sequence: Synthetic oligonucleotide
  source 1..21: mol_type = other DNA
tcgaatcagcgtggtgagggt

SEQ ID NO: 36405 - DNA, 21 bp, synthetic construct
  misc_feature 1..21: note = Description of Artificial Sequence: Synthetic oligonucleotide
  source 1..21: mol_type = other DNA
cacggcatcagcaaccaaagc

SEQ ID NO: 36406 - DNA, 21 bp, synthetic construct
  misc_feature 1..21: note = Description of Artificial Sequence: Synthetic oligonucleotide
  source 1..21: mol_type = other DNA
ggcaccggcgtccccggcaaa

SEQ ID NO: 36407 - DNA, 21 bp, synthetic construct
  misc_feature 1..21: note = Description of Artificial Sequence: Synthetic oligonucleotide
  source 1..21: mol_type = other DNA
accggcagcggccaaaaccaa

SEQ ID NO: 36408 - DNA, 21 bp, synthetic construct
  misc_feature 1..21: note = Description of Artificial Sequence: Synthetic oligonucleotide
  source 1..21: mol_type = other DNA
cctaatctgagtaagagtttg

SEQ ID NO: 36409 - DNA, 21 bp, synthetic construct
  misc_feature 1..21: note = Description of Artificial Sequence: Synthetic oligonucleotide
  source 1..21: mol_type = other DNA
gattatcataatagtaagctg

SEQ ID NO: 36410 - DNA, 21 bp, synthetic construct
  misc_feature 1..21: note = Description of Artificial Sequence: Synthetic oligonucleotide
  source 1..21: mol_type = other DNA
tctgttaattctcggagtgag

SEQ ID NO: 36411 - DNA, 21 bp, synthetic construct
  misc_feature 1..21: note = Description of Artificial Sequence: Synthetic oligonucleotide
  source 1..21: mol_type = other DNA
caacccaacagagccgacaac

SEQ ID NO: 36412 - DNA, 21 bp, synthetic construct
  misc_feature 1..21: note = Description of Artificial Sequence: Synthetic oligonucleotide
  source 1..21: mol_type = other DNA
gccgccaccatgagaaacagc

SEQ ID NO: 36413 - DNA, 21 bp, synthetic construct
  misc_feature 1..21: note = Description of Artificial Sequence: Synthetic oligonucleotide
  source 1..21: mol_type = other DNA
agccaacaaagccccagcatg

SEQ ID NO: 36414 - DNA, 21 bp, synthetic construct
  misc_feature 1..21: note = Description of Artificial Sequence: Synthetic oligonucleotide
  source 1..21: mol_type = other DNA
catcgtgatcaggtttcgctt

SEQ ID NO: 36415 - DNA, 21 bp, synthetic construct
  misc_feature 1..21: note = Description of Artificial Sequence: Synthetic oligonucleotide
  source 1..21: mol_type = other DNA
agcaacgaaaccaaaagcagc

SEQ ID NO: 36416 - DNA, 21 bp, synthetic construct
  misc_feature 1..21: note = Description of Artificial Sequence: Synthetic oligonucleotide
  source 1..21: mol_type = other DNA
agcggcagcggccaaaaccaa

SEQ ID NO: 36417 - DNA, 21 bp, synthetic construct
  misc_feature 1..21: note = Description of Artificial Sequence: Synthetic oligonucleotide
  source 1..21: mol_type = other DNA
tcgtctgaggcggctactagg

SEQ ID NO: 36418 - DNA, 21 bp, synthetic construct
  misc_feature 1..21: note = Description of Artificial Sequence: Synthetic oligonucleotide
  source 1..21: mol_type = other DNA
tctggtagtgataagtttagt

SEQ ID NO: 36419 - DNA, 21 bp, synthetic construct
  misc_feature 1..21: note = Description of Artificial Sequence: Synthetic oligonucleotide
  source 1..21: mol_type = other DNA
cctaataatcagtctacgagg

SEQ ID NO: 36420 - DNA, 21 bp, synthetic construct
  misc_feature 1..21: note = Description of Artificial Sequence: Synthetic oligonucleotide
  source 1..21: mol_type = other DNA
tcgcataattcgaaggattct

SEQ ID NO: 36421 - DNA, 21 bp, synthetic construct
  misc_feature 1..21: note = Description of Artificial Sequence: Synthetic oligonucleotide
  source 1..21: mol_type = other DNA
tgcaccaccagacaaggcaac

SEQ ID NO: 36422 - DNA, 21 bp, synthetic construct
  misc_feature 1..21: note = Description of Artificial Sequence: Synthetic oligonucleotide
  source 1..21: mol_type = other DNA
gtcttcaaccacgccagcaaa

SEQ ID NO: 36423 - DNA, 21 bp, synthetic construct
  misc_feature 1..21: note = Description of Artificial Sequence: Synthetic oligonucleotide
  source 1..21: mol_type = other DNA
gaactccacagcaaaaacgcc

SEQ ID NO: 36424 - DNA, 21 bp, synthetic construct
  misc_feature 1..21: note = Description of Artificial Sequence: Synthetic oligonucleotide
  source 1..21: mol_type = other DNA
ggccccggcagaaacctcatc

SEQ ID NO: 36425 - DNA, 21 bp, synthetic construct
  misc_feature 1..21: note = Description of Artificial Sequence: Synthetic oligonucleotide
  source 1..21: mol_type = other DNA
agcctcggcagagaccacgcc

SEQ ID NO: 36426 - DNA, 21 bp, synthetic construct
  misc_feature 1..21: note = Description of Artificial Sequence: Synthetic oligonucleotide
  source 1..21: mol_type = other DNA
tacggccaaaccaaaacccaa

SEQ ID NO: 36427 - DNA, 21 bp, synthetic construct
  misc_feature 1..21: note = Description of Artificial Sequence: Synthetic oligonucleotide
  source 1..21: mol_type = other DNA
gccaccaaccacagcccccaa

SEQ ID NO: 36428 - DNA, 21 bp, synthetic construct
  misc_feature 1..21: note = Description of Artificial Sequence: Synthetic oligonucleotide
  source 1..21: mol_type = other DNA
aatgtgactacgccgcttatt

SEQ ID NO: 36429 - DNA, 21 bp, synthetic construct
  misc_feature 1..21: note = Description of Artificial Sequence: Synthetic oligonucleotide
  source 1..21: mol_type = other DNA
cccaccaaaggcgccaacgcc

SEQ ID NO: 36430 - DNA, 21 bp, synthetic construct
  misc_feature 1..21: note = Description of Artificial Sequence: Synthetic oligonucleotide
  source 1..21: mol_type = other DNA
ggttcttcgcatcttactacg

SEQ ID NO: 36431 - DNA, 21 bp, synthetic construct
  misc_feature 1..21: note = Description of Artificial Sequence: Synthetic oligonucleotide
  source 1..21: mol_type = other DNA
tctctgacgacgaaggctaat

SEQ ID NO: 36432 - DNA, 21 bp, synthetic construct
  misc_feature 1..21: note = Description of Artificial Sequence: Synthetic oligonucleotide
  source 1..21: mol_type = other DNA
accggcagcagcaaagtcggc

SEQ ID NO: 36433 - DNA, 21 bp, synthetic construct
  misc_feature 1..21: note = Description of Artificial Sequence: Synthetic oligonucleotide
  source 1..21: mol_type = other DNA
agccaaagccccaacagaggc

SEQ ID NO: 36434 - DNA, 21 bp, synthetic construct
  misc_feature 1..21: note = Description of Artificial Sequence: Synthetic oligonucleotide
  source 1..21: mol_type = other DNA
ggtttgaaggggtcttttccg

SEQ ID NO: 36435 - DNA, 21 bp, synthetic construct
  misc_feature 1..21: note = Description of Artificial Sequence: Synthetic oligonucleotide
  source 1..21: mol_type = other DNA
tcgatggggaattcgattagt

SEQ ID NO: 36436 - DNA, 21 bp, synthetic construct
  misc_feature 1..21: note = Description of Artificial Sequence: Synthetic oligonucleotide
  source 1..21: mol_type = other DNA
gagacgaattctcgtttgggt

SEQ ID NO: 36437 - DNA, 21 bp, synthetic construct
  misc_feature 1..21: note = Description of Artificial Sequence: Synthetic oligonucleotide
  source 1..21: mol_type = other DNA
gcgcctaatgggactctgtcg

SEQ ID NO: 36438 - DNA, 21 bp, synthetic construct
  misc_feature 1..21: note = Description of Artificial Sequence: Synthetic oligonucleotide
  source 1..21: mol_type = other DNA
ctgagtacggcgaataagtct

SEQ ID NO: 36439 - DNA, 21 bp, synthetic construct
  misc_feature 1..21: note = Description of Artificial Sequence: Synthetic oligonucleotide
  source 1..21: mol_type = other DNA
atgcagactagtcagtcgact

SEQ ID NO: 36440 - DNA, 21 bp, synthetic construct
  misc_feature 1..21: note = Description of Artificial Sequence: Synthetic oligonucleotide
  source 1..21: mol_type = other DNA
aatagtgcgaataagactccg

SEQ ID NO: 36441 - DNA, 21 bp, synthetic construct
  misc_feature 1..21: note = Description of Artificial Sequence: Synthetic oligonucleotide
  source 1..21: mol_type = other DNA
atcggcaccagcatcaacagc

SEQ ID NO: 36442 - DNA, 21 bp, synthetic construct
  misc_feature 1..21: note = Description of Artificial Sequence: Synthetic oligonucleotide
  source 1..21: mol_type = other DNA
tttaggacgactgcttcgact

SEQ ID NO: 36443 - DNA, 21 bp, synthetic construct
  misc_feature 1..21: note = Description of Artificial Sequence: Synthetic oligonucleotide
  source 1..21: mol_type = other DNA
tcggcttatgagaggacttcg

SEQ ID NO: 36444 - DNA, 21 bp, synthetic construct
  misc_feature 1..21: note = Description of Artificial Sequence: Synthetic oligonucleotide
  source 1..21: mol_type = other DNA
agcatcaccggcaacagaacc

SEQ ID NO: 36445 - DNA, 21 bp, synthetic construct
  misc_feature 1..21: note = Description of Artificial Sequence: Synthetic oligonucleotide
  source 1..21: mol_type = other DNA
gccttcggcggcgaaaccaaa

SEQ ID NO: 36446 - DNA, 21 bp, synthetic construct
  misc_feature 1..21: note = Description of Artificial Sequence: Synthetic oligonucleotide
  source 1..21: mol_type = other DNA
ggcaccgccagaggcgtcgcc

SEQ ID NO: 36447 - DNA, 21 bp, synthetic construct
  misc_feature 1..21: note = Description of Artificial Sequence: Synthetic oligonucleotide
  source 1..21: mol_type = other DNA
tctcatggtcctcagattact

SEQ ID NO: 36448 - DNA, 21 bp, synthetic construct
  misc_feature 1..21: note = Description of Artificial Sequence: Synthetic oligonucleotide
  source 1..21: mol_type = other DNA
ctggtttcgtctaagagtagt

SEQ ID NO: 36449 - DNA, 21 bp, synthetic construct
  misc_feature 1..21: note = Description of Artificial Sequence: Synthetic oligonucleotide
  source 1..21: mol_type = other DNA
gcccaagtcgacaaaagaagc

SEQ ID NO: 36450 - DNA, 21 bp, synthetic construct
  misc_feature 1..21: note = Description of Artificial Sequence: Synthetic oligonucleotide
  source 1..21: mol_type = other DNA
gagaatacgaagacttatagt

SEQ ID NO: 36451 - DNA, 21 bp, synthetic construct
  misc_feature 1..21: note = Description of Artificial Sequence: Synthetic oligonucleotide
  source 1..21: mol_type = other DNA
agcaacatgcccggcatggtc

SEQ ID NO: 36452 - DNA, 21 bp, synthetic construct
  misc_feature 1..21: note = Description of Artificial Sequence: Synthetic oligonucleotide
  source 1..21: mol_type = other DNA
gccgaacaccaaagcggcaaa

SEQ ID NO: 36453 - DNA, 21 bp, synthetic construct
  misc_feature 1..21: note = Description of Artificial Sequence: Synthetic oligonucleotide
  source 1..21: mol_type = other DNA
ggcaaaaccggccccaacagc

SEQ ID NO: 36454 - DNA, 21 bp, synthetic construct
  misc_feature 1..21: note = Description of Artificial Sequence: Synthetic oligonucleotide
  source 1..21: mol_type = other DNA
gggaatatttcgacttcgtct

SEQ ID NO: 36455 - DNA, 21 bp, synthetic construct
  misc_feature 1..21: note = Description of Artificial Sequence: Synthetic oligonucleotide
  source 1..21: mol_type = other DNA
acggtggctcatcctagtcat

SEQ ID NO: 36456 - DNA, 21 bp, synthetic construct
  misc_feature 1..21: note = Description of Artificial Sequence: Synthetic oligonucleotide
  source 1..21: mol_type = other DNA
cccaccatgcaaggcgtccac

SEQ ID NO: 36457 - DNA, 21 bp, synthetic construct
  misc_feature 1..21: note = Description of Artificial Sequence: Synthetic oligonucleotide
  source 1..21: mol_type = other DNA
agaatgaacggcggcggcccc

SEQ ID NO: 36458 - DNA, 21 bp, synthetic construct
  misc_feature 1..21: note = Description of Artificial Sequence: Synthetic oligonucleotide
  source 1..21: mol_type = other DNA
aatcagtcgtcttctgctcgg

SEQ ID NO: 36459 - DNA, 21 bp, synthetic construct
  misc_feature 1..21: note = Description of Artificial Sequence: Synthetic oligonucleotide
  source 1..21: mol_type = other DNA
atcggcagcggccaaaaccaa

SEQ ID NO: 36460 - DNA, 21 bp, synthetic construct
  misc_feature 1..21: note = Description of Artificial Sequence: Synthetic oligonucleotide
  source 1..21: mol_type = other DNA
atggagattaagcctaatcgg

SEQ ID NO: 36461 - DNA, 21 bp, synthetic construct
  misc_feature 1..21: note = Description of Artificial Sequence: Synthetic oligonucleotide
  source 1..21: mol_type = other DNA
aatgcggtgggggttgggtat

SEQ ID NO: 36462 - DNA, 21 bp, synthetic construct
  misc_feature 1..21: note = Description of Artificial Sequence: Synthetic oligonucleotide
  source 1..21: mol_type = other DNA
caccaaggcaacgtcatcagc

SEQ ID NO: 36463 - DNA, 21 bp, synthetic construct
  misc_feature 1..21: note = Description of Artificial Sequence: Synthetic oligonucleotide
  source 1..21: mol_type = other DNA
cataatgttggtgggggggat

SEQ ID NO: 36464 - DNA, 21 bp, synthetic construct
  misc_feature 1..21: note = Description of Artificial Sequence: Synthetic oligonucleotide
  source 1..21: mol_type = other DNA
acgccgacgctgtctcatact

SEQ ID NO: 36465 - DNA, 21 bp, synthetic construct
  misc_feature 1..21: note = Description of Artificial Sequence: Synthetic oligonucleotide
  source 1..21: mol_type = other DNA
aacaacaccagcacccacctc

SEQ ID NO: 36466 - DNA, 21 bp, synthetic construct
  misc_feature 1..21: note = Description of Artificial Sequence: Synthetic oligonucleotide
  source 1..21: mol_type = other DNA
aatattgctagtaaggggccg

SEQ ID NO: 36467 - DNA, 21 bp, synthetic construct
  misc_feature 1..21: note = Description of Artificial Sequence: Synthetic oligonucleotide
  source 1..21: mol_type = other DNA
aacggttctgaacagaatcaa

SEQ ID NO: 36468 - DNA, 21 bp, synthetic construct
  misc_feature 1..21: note = Description of Artificial Sequence: Synthetic oligonucleotide
  source 1..21: mol_type = other DNA
ggtagtaggtcttctacgact

SEQ ID NO: 36469 - DNA, 21 bp, synthetic construct
  misc_feature 1..21: note = Description of Artificial Sequence: Synthetic oligonucleotide
  source 1..21: mol_type = other DNA
tttaatacttctaagcttagt

SEQ ID NO: 36470 - DNA, 21 bp, synthetic construct
  misc_feature 1..21: note = Description of Artificial Sequence: Synthetic oligonucleotide
  source 1..21: mol_type = other DNA
agacccacccaagtcggcgcc

SEQ ID NO: 36471 - DNA, 21 bp, synthetic construct
  misc_feature 1..21: note = Description of Artificial Sequence: Synthetic oligonucleotide
  source 1..21: mol_type = other DNA
cagtctactgagcggttggcg

SEQ ID NO: 36472 - DNA, 21 bp, synthetic construct
  misc_feature 1..21: note = Description of Artificial Sequence: Synthetic oligonucleotide
  source 1..21: mol_type = other DNA
atgagtacgcatagttcgggt

SEQ ID NO: 36473 - DNA, 21 bp, synthetic construct
  misc_feature 1..21: note = Description of Artificial Sequence: Synthetic oligonucleotide
  source 1..21: mol_type = other DNA
caacaagccagcctcagcagc

SEQ ID NO: 36474 - DNA, 21 bp, synthetic construct
  misc_feature 1..21: note = Description of Artificial Sequence: Synthetic oligonucleotide
  source 1..21: mol_type = other DNA
attgatggtcatcggaatggt

SEQ ID NO: 36475 - DNA, 21 bp, synthetic construct
  misc_feature 1..21: note = Description of Artificial Sequence: Synthetic oligonucleotide
  source 1..21: mol_type = other DNA
tgttctccgccgactaggggg

SEQ ID NO: 36476 - DNA, 21 bp, synthetic construct
  misc_feature 1..21: note = Description of Artificial Sequence: Synthetic oligonucleotide
  source 1..21: mol_type = other DNA
tcgggtgcggggtcggctggg

SEQ ID NO: 36477 - DNA, 21 bp, synthetic construct
  misc_feature 1..21: note = Description of Artificial Sequence: Synthetic oligonucleotide
  source 1..21: mol_type = other DNA
agagaaagcagccccagcctc

SEQ ID NO: 36478 - DNA, 21 bp, synthetic construct
  misc_feature 1..21: note = Description of Artificial Sequence: Synthetic oligonucleotide
  source 1..21: mol_type = other DNA
gtgaatacgtctcatacgaat

SEQ ID NO: 36479 - DNA, 21 bp, synthetic construct
  misc_feature 1..21: note = Description of Artificial Sequence: Synthetic oligonucleotide
  source 1..21: mol_type = other DNA
gcctaccccaaaaacagcaac

SEQ ID NO: 36480 - DNA, 21 bp, synthetic construct
  misc_feature 1..21: note = Description of Artificial Sequence: Synthetic oligonucleotide
  source 1..21: mol_type = other DNA
ttcgccaacaccgccaacaga

SEQ ID NO: 36481 - DNA, 21 bp, synthetic construct
  misc_feature 1..21: note = Description of Artificial Sequence: Synthetic oligonucleotide
  source 1..21: mol_type = other DNA
aattcggcgagtctgaatcat

SEQ ID NO: 36482 - DNA, 21 bp, synthetic construct
  misc_feature 1..21: note = Description of Artificial Sequence: Synthetic oligonucleotide
  source 1..21: mol_type = other DNA
ggtgatgctggtagttttagt

SEQ ID NO: 36483 - DNA, 21 bp, synthetic construct
  misc_feature 1..21: note = Description of Artificial Sequence: Synthetic oligonucleotide
  source 1..21: mol_type = other DNA
ttcaacgaacaaagagtcagc

SEQ ID NO: 36484 - DNA, 21 bp, synthetic construct
  misc_feature 1..21: note = Description of Artificial Sequence: Synthetic oligonucleotide
  source 1..21: mol_type = other DNA
ctcagaagcaaagaaagcgcc

SEQ ID NO: 36485 - DNA, 21 bp, synthetic construct
  misc_feature 1..21: note = Description of Artificial Sequence: Synthetic oligonucleotide
  source 1..21: mol_type = other DNA
tttcgtacgcagtctacgaag

SEQ ID NO: 36486 - DNA, 21 bp, synthetic construct
  misc_feature 1..21: note = Description of Artificial Sequence: Synthetic oligonucleotide
  source 1..21: mol_type = other DNA
cccaccggcgaaaaaagactc

SEQ ID NO: 36487 - DNA, 21 bp, synthetic construct
  misc_feature 1..21: note = Description of Artificial Sequence: Synthetic oligonucleotide
  source 1..21: mol_type = other DNA
gggcgggagagtaatctgagt

SEQ ID NO: 36488 - DNA, 21 bp, synthetic construct
  misc_feature 1..21: note = Description of Artificial Sequence: Synthetic oligonucleotide
  source 1..21: mol_type = other DNA
cagggtcctaagaatgctgat

SEQ ID NO: 36489 - DNA, 21 bp, synthetic construct
  misc_feature 1..21: note = Description of Artificial Sequence: Synthetic oligonucleotide
  source 1..21: mol_type = other DNA
catgcgacgtctggtacgcgt

SEQ ID NO: 36490 - DNA, 21 bp, synthetic construct
  misc_feature 1..21: note = Description of Artificial Sequence: Synthetic oligonucleotide
  source 1..21: mol_type = other DNA
ggcggcagcaacctcagaacc

SEQ ID NO: 36491 - DNA, 21 bp, synthetic construct
  misc_feature 1..21: note = Description of Artificial Sequence: Synthetic oligonucleotide
  source 1..21: mol_type = other DNA
aacgccagcaccgccaacatg

SEQ ID NO: 36492 - DNA, 21 bp, synthetic construct
  misc_feature 1..21: note = Description of Artificial Sequence: Synthetic oligonucleotide
  source 1..21: mol_type = other DNA
gctttggctaatccgcagact

SEQ ID NO: 36493 - DNA, 21 bp, synthetic construct
  misc_feature 1..21: note = Description of Artificial Sequence: Synthetic oligonucleotide
  source 1..21: mol_type = other DNA
agaagcggcaacgccaccatc

SEQ ID NO: 36494 - DNA, 21 bp, synthetic construct
  misc_feature 1..21: note = Description of Artificial Sequence: Synthetic oligonucleotide
  source 1..21: mol_type = other DNA
caaagcgaaatcgtcaacaaa

SEQ ID NO: 36495 - DNA, 21 bp, synthetic construct
  misc_feature 1..21: note = Description of Artificial Sequence: Synthetic oligonucleotide
  source 1..21: mol_type = other DNA
aacggttatggacagaatcaa

SEQ ID NO: 36496 - DNA, 21 bp, synthetic construct
  misc_feature 1..21: note = Description of Artificial Sequence: Synthetic oligonucleotide
  source 1..21: mol_type = other DNA
agaagcagccccgccagcctc

SEQ ID NO: 36497 - DNA, 21 bp, synthetic construct
  misc_feature 1..21: note = Description of Artificial Sequence: Synthetic oligonucleotide
  source 1..21: mol_type = other DNA
gcggtgacgggtgcgagtggt

SEQ ID NO: 36498 - DNA, 21 bp, synthetic construct
  misc_feature 1..21: note = Description of Artificial Sequence: Synthetic oligonucleotide
  source 1..21: mol_type = other DNA
agcggcagcgaacacctcaga

SEQ ID NO: 36499 - DNA, 21 bp, synthetic construct
  misc_feature 1..21: note = Description of Artificial Sequence: Synthetic oligonucleotide
  source 1..21: mol_type = other DNA
catatgaatcgtaagcttgag

SEQ ID NO: 36500 - DNA, 21 bp, synthetic construct
  misc_feature 1..21: note = Description of Artificial Sequence: Synthetic oligonucleotide
  source 1..21: mol_type = other DNA
gataatactggtcgtaatgct

SEQ ID NO: 36501 - DNA, 21 bp, synthetic construct
  misc_feature 1..21: note = Description of Artificial Sequence: Synthetic oligonucleotide
  source 1..21: mol_type = other DNA
cccggcgccgccctcagcatc

SEQ ID NO: 36502 - DNA, 21 bp, synthetic construct
  misc_feature 1..21: note = Description of Artificial Sequence: Synthetic oligonucleotide
  source 1..21: mol_type = other DNA
agaaccgaccacggcggcgtc

SEQ ID NO: 36503 - DNA, 21 bp, synthetic construct
  misc_feature 1..21: note = Description of Artificial Sequence: Synthetic oligonucleotide
  source 1..21: mol_type = other DNA
ctcaacagcaccgccggcaaa

SEQ ID NO: 36504 - DNA, 21 bp, synthetic construct
  misc_feature 1..21: note = Description of Artificial Sequence: Synthetic oligonucleotide
  source 1..21: mol_type = other DNA
tcgcatcttgatcgtttgaat

SEQ ID NO: 36505 - DNA, 21 bp, synthetic construct
  misc_feature 1..21: note = Description of Artificial Sequence: Synthetic oligonucleotide
  source 1..21: mol_type = other DNA
agctacgccgacaaacaaggc

SEQ ID NO: 36506 - DNA, 21 bp, synthetic construct
  misc_feature 1..21: note = Description of Artificial Sequence: Synthetic oligonucleotide
  source 1..21: mol_type = other DNA
actgcgacgacgctttcgagt

SEQ ID NO: 36507 - DNA, 21 bp, synthetic construct
  misc_feature 1..21: note = Description of Artificial Sequence: Synthetic oligonucleotide
  source 1..21: mol_type = other DNA
cctcggactggtacgttgatg

SEQ ID NO: 36508 - DNA, 21 bp, synthetic construct
  misc_feature 1..21: note = Description of Artificial Sequence: Synthetic oligonucleotide
  source 1..21: mol_type = other DNA
gctagtactaatagtatgcag

SEQ ID NO: 36509 - DNA, 21 bp, synthetic construct
  misc_feature 1..21: note = Description of Artificial Sequence: Synthetic oligonucleotide
  source 1..21: mol_type = other DNA
ggtaattctatggctgggact

SEQ ID NO: 36510 - DNA, 21 bp, synthetic construct
  misc_feature 1..21: note = Description of Artificial Sequence: Synthetic oligonucleotide
  source 1..21: mol_type = other DNA
gctgtgtcgagtaaggtgggg

SEQ ID NO: 36511 - DNA, 21 bp, synthetic construct
  misc_feature 1..21: note = Description of Artificial Sequence: Synthetic oligonucleotide
  source 1..21: mol_type = other DNA
tctgcgagtccgagtattaag

SEQ ID NO: 36512 - DNA, 21 bp, synthetic construct
  misc_feature 1..21: note = Description of Artificial Sequence: Synthetic oligonucleotide
  source 1..21: mol_type = other DNA
cttagtatgaatacttcgaag

SEQ ID NO: 36513 - DNA, 21 bp, synthetic construct
  misc_feature 1..21: note = Description of Artificial Sequence: Synthetic oligonucleotide
  source 1..21: mol_type = other DNA
cccaacggcagccccctcagc

SEQ ID NO: 36514 - DNA, 21 bp, synthetic construct
  misc_feature 1..21: note = Description of Artificial Sequence: Synthetic oligonucleotide
  source 1..21: mol_type = other DNA
aacggttctggacagaataaa

SEQ ID NO: 36515 - DNA, 21 bp, synthetic construct
  misc_feature 1..21: note = Description of Artificial Sequence: Synthetic oligonucleotide
  source 1..21: mol_type = other DNA
gtcaaaaccgccaaagtcaac

SEQ ID NO: 36516 - DNA, 21 bp, synthetic construct
  misc_feature 1..21: note = Description of Artificial Sequence: Synthetic oligonucleotide
  source 1..21: mol_type = other DNA
cacagagtcgacaaccaaggc

SEQ ID NO: 36517 - DNA, 21 bp, synthetic construct
  misc_feature 1..21: note = Description of Artificial Sequence: Synthetic oligonucleotide
  source 1..21: mol_type = other DNA
cctcttgtgcctaggggtacg

SEQ ID NO: 36518 - DNA, 21 bp, synthetic construct
  misc_feature 1..21: note = Description of Artificial Sequence: Synthetic oligonucleotide
  source 1..21: mol_type = other DNA
agcagccaagcccaacccacc

SEQ ID NO: 36519 - DNA, 21 bp, synthetic construct
  misc_feature 1..21: note = Description of Artificial Sequence: Synthetic oligonucleotide
  source 1..21: mol_type = other DNA
gctggtaatacgggttcgcat

SEQ ID NO: 36520 - DNA, 21 bp, synthetic construct
  misc_feature 1..21: note = Description of Artificial Sequence: Synthetic oligonucleotide
  source 1..21: mol_type = other DNA
agcatccccagcaccagccaa

SEQ ID NO: 36521 - DNA, 21 bp, synthetic construct
  misc_feature 1..21: note = Description of Artificial Sequence: Synthetic oligonucleotide
  source 1..21: mol_type = other DNA
atgagtcatactaagtcgaat

SEQ ID NO: 36522 - DNA, 21 bp, synthetic construct
  misc_feature 1..21: note = Description of Artificial Sequence: Synthetic oligonucleotide
  source 1..21: mol_type = other DNA
cagggtgcgggggtttcgtct

SEQ ID NO: 36523 - DNA, 21 bp, synthetic construct
  misc_feature 1..21: note = Description of Artificial Sequence: Synthetic oligonucleotide
  source 1..21: mol_type = other DNA
caagaaaccagaggcaacagc

SEQ ID NO: 36524 - DNA, 21 bp, synthetic construct
  misc_feature 1..21: note = Description of Artificial Sequence: Synthetic oligonucleotide
  source 1..21: mol_type = other DNA
gtcagcggcagcaacagcctc

SEQ ID NO: 36525 - DNA, 21 bp, synthetic construct
  misc_feature 1..21: note = Description of Artificial Sequence: Synthetic oligonucleotide
  source 1..21: mol_type = other DNA
agtgcggggacttcggttggt

SEQ ID NO: 36526 - DNA, 21 bp, synthetic construct
  misc_feature 1..21: note = Description of Artificial Sequence: Synthetic oligonucleotide
  source 1..21: mol_type = other DNA
aacagcgccggcaccagagtc

SEQ ID NO: 36527 - DNA, 21 bp, synthetic construct
  misc_feature 1..21: note = Description of Artificial Sequence: Synthetic oligonucleotide
  source 1..21: mol_type = other DNA
cgtctggaggggagtatggcg

SEQ ID NO: 36528 - DNA, 21 bp, synthetic construct
  misc_feature 1..21: note = Description of Artificial Sequence: Synthetic oligonucleotide
  source 1..21: mol_type = other DNA
cccgccgaccacggcaaactc

SEQ ID NO: 36529 - DNA, 21 bp, synthetic construct
  misc_feature 1..21: note = Description of Artificial Sequence: Synthetic oligonucleotide
  source 1..21: mol_type = other DNA
atggatgggaggtcgactact

SEQ ID NO: 36530 - DNA, 21 bp, synthetic construct
  misc_feature 1..21: note = Description of Artificial Sequence: Synthetic oligonucleotide
  source 1..21: mol_type = other DNA
actgggactgattcgcggtcg

SEQ ID NO: 36531 - DNA, 21 bp, synthetic construct
  misc_feature 1..21: note = Description of Artificial Sequence: Synthetic oligonucleotide
  source 1..21: mol_type = other DNA
attaggacgaaggagtctgcg

SEQ ID NO: 36532 - DNA, 21 bp, synthetic construct
  misc_feature 1..21: note = Description of Artificial Sequence: Synthetic oligonucleotide
  source 1..21: mol_type = other DNA
agagacgtcgacgtcagaaac

SEQ ID NO: 36533 - DNA, 21 bp, synthetic construct
  misc_feature 1..21: note = Description of Artificial Sequence: Synthetic oligonucleotide
  source 1..21: mol_type = other DNA
tacgtcagcagcggcaaagcc

SEQ ID NO: 36534 - DNA, 21 bp, synthetic construct
  misc_feature 1..21: note = Description of Artificial Sequence: Synthetic oligonucleotide
  source 1..21: mol_type = other DNA
agttttcctcctggtaatgtt

SEQ ID NO: 36535 - DNA, 21 bp, synthetic construct
  misc_feature 1..21: note = Description of Artificial Sequence: Synthetic oligonucleotide
  source 1..21: mol_type = other DNA
caactccccaccatgaccgtc

SEQ ID NO: 36536 - DNA, 21 bp, synthetic construct
  misc_feature 1..21: note = Description of Artificial Sequence: Synthetic oligonucleotide
  source 1..21: mol_type = other DNA
cccaccaccctcaaacacgac

SEQ ID NO: 36537 - DNA, 21 bp, synthetic construct
  misc_feature 1..21: note = Description of Artificial Sequence: Synthetic oligonucleotide
  source 1..21: mol_type = other DNA
ggtcctagtacgcattcgggt

SEQ ID NO: 36538 - DNA, 21 bp, synthetic construct
  misc_feature 1..21: note = Description of Artificial Sequence: Synthetic oligonucleotide
  source 1..21: mol_type = other DNA
cacagaagccccagcacccaa

SEQ ID NO: 36539 - DNA, 21 bp, synthetic construct
  misc_feature 1..21: note = Description of Artificial Sequence: Synthetic oligonucleotide
  source 1..21: mol_type = other DNA
caaagagtcaacaccgccagc

SEQ ID NO: 36540 - DNA, 21 bp, synthetic construct
  misc_feature 1..21: note = Description of Artificial Sequence: Synthetic oligonucleotide
  source 1..21: mol_type = other DNA
cacaacagcggcaacggcagc

SEQ ID NO: 36541 - DNA, 21 bp, synthetic construct
  misc_feature 1..21: note = Description of Artificial Sequence: Synthetic oligonucleotide
  source 1..21: mol_type = other DNA
acggctcagggtccgtctgct

SEQ ID NO: 36542 - DNA, 21 bp, synthetic construct
  misc_feature 1..21: note = Description of Artificial Sequence: Synthetic oligonucleotide
  source 1..21: mol_type = other DNA
ccggttacgcgttctaaggat

SEQ ID NO: 36543 - DNA, 21 bp, synthetic construct
  misc_feature 1..21: note = Description of Artificial Sequence: Synthetic oligonucleotide
  source 1..21: mol_type = other DNA
gccgccaccaacagcctcacc

SEQ ID NO: 36544 - DNA, 21 bp, synthetic construct
  misc_feature 1..21: note = Description of Artificial Sequence: Synthetic oligonucleotide
  source 1..21: mol_type = other DNA
tctggtgctcctggttcttcg

SEQ ID NO: 36545 - DNA, 21 bp, synthetic construct
  misc_feature 1..21: note = Description of Artificial Sequence: Synthetic oligonucleotide
  source 1..21: mol_type = other DNA
accagcaacaccaaacaaggc

SEQ ID NO: 36546 - DNA, 21 bp, synthetic construct
  misc_feature 1..21: note = Description of Artificial Sequence: Synthetic oligonucleotide
  source 1..21: mol_type = other DNA
agaacccccaccgccagcggc

SEQ ID NO: 36547 - DNA, 21 bp, synthetic construct
  misc_feature 1..21: note = Description of Artificial Sequence: Synthetic oligonucleotide
  source 1..21: mol_type = other DNA
ggggcttcgactcctaggctt

SEQ ID NO: 36548 - DNA, 21 bp, synthetic construct
  misc_feature 1..21: note = Description of Artificial Sequence: Synthetic oligonucleotide
  source 1..21: mol_type = other DNA
atgctcaacaacgccagcgcc

SEQ ID NO: 36549 - DNA, 21 bp, synthetic construct
  misc_feature 1..21: note = Description of Artificial Sequence: Synthetic oligonucleotide
  source 1..21: mol_type = other DNA
gattatgggaaggggagttct

SEQ ID NO: 36550 - DNA, 21 bp, synthetic construct
  misc_feature 1..21: note = Description of Artificial Sequence: Synthetic oligonucleotide
  source 1..21: mol_type = other DNA
ggtaatatgcgtaatttggct

SEQ ID NO: 36551 - DNA, 21 bp, synthetic construct
  misc_feature 1..21: note = Description of Artificial Sequence: Synthetic oligonucleotide
  source 1..21: mol_type = other DNA
catgctaattcgcctgcgacg

SEQ ID NO: 36552 - DNA, 21 bp, synthetic construct
  misc_feature 1..21: note = Description of Artificial Sequence: Synthetic oligonucleotide
  source 1..21: mol_type = other DNA
gcgtctcggagtgtgaatgct

SEQ ID NO: 36553 - DNA, 21 bp, synthetic construct
  misc_feature 1..21: note = Description of Artificial Sequence: Synthetic oligonucleotide
  source 1..21: mol_type = other DNA
gagaatcgggtgaaggttaat

SEQ ID NO: 36554 - DNA, 21 bp, synthetic construct
  misc_feature 1..21: note = Description of Artificial Sequence: Synthetic oligonucleotide
  source 1..21: mol_type = other DNA
aacgtttctggacagaatcaa

SEQ ID NO: 36555 - DNA, 21 bp, synthetic construct
  misc_feature 1..21: note = Description of Artificial Sequence: Synthetic oligonucleotide
  source 1..21: mol_type = other DNA
ttcatgggcagacccaacgtc

SEQ ID NO: 36556 - DNA, 21 bp, synthetic construct
  misc_feature 1..21: note = Description of Artificial Sequence: Synthetic oligonucleotide
  source 1..21: mol_type = other DNA
gattctcgttctattaagggg

SEQ ID NO: 36557 - DNA, 21 bp, synthetic construct
  misc_feature 1..21: note = Description of Artificial Sequence: Synthetic oligonucleotide
  source 1..21: mol_type = other DNA
ctccaaaaacccagcctcgtc

SEQ ID NO: 36558 - DNA, 21 bp, synthetic construct
  misc_feature 1..21: note = Description of Artificial Sequence: Synthetic oligonucleotide
  source 1..21: mol_type = other DNA
tcgaaggataggagtactgtt

SEQ ID NO: 36559 - DNA, 21 bp, synthetic construct
  misc_feature 1..21: note = Description of Artificial Sequence: Synthetic oligonucleotide
  source 1..21: mol_type = other DNA
acccaaaacaccaaaagcatc

SEQ ID NO: 36560 - DNA, 21 bp, synthetic construct
  misc_feature 1..21: note = Description of Artificial Sequence: Synthetic oligonucleotide
  source 1..21: mol_type = other DNA
aatcctgttgctctgagggat

SEQ ID NO: 36561 - DNA, 21 bp, synthetic construct
  misc_feature 1..21: note = Description of Artificial Sequence: Synthetic oligonucleotide
  source 1..21: mol_type = other DNA
ggccaaagcaacgtcaccctc

SEQ ID NO: 36562 - DNA, 21 bp, synthetic construct
  misc_feature 1..21: note = Description of Artificial Sequence: Synthetic oligonucleotide
  source 1..21: mol_type = other DNA
agcagcagcggcggcgtcaaa

SEQ ID NO: 36563 - DNA, 21 bp, synthetic construct
  misc_feature 1..21: note = Description of Artificial Sequence: Synthetic oligonucleotide
  source 1..21: mol_type = other DNA
agcgacatcaacagaagcacc

SEQ ID NO: 36564 - DNA, 21 bp, synthetic construct
  misc_feature 1..21: note = Description of Artificial Sequence: Synthetic oligonucleotide
  source 1..21: mol_type = other DNA
aacagagtcgaacacacccaa

SEQ ID NO: 36565 - DNA, 21 bp, synthetic construct
  misc_feature 1..21: note = Description of Artificial Sequence: Synthetic oligonucleotide
  source 1..21: mol_type = other DNA
gatcagggtaatggttatggg

SEQ ID NO: 36566 - DNA, 21 bp, synthetic construct
  misc_feature 1..21: note = Description of Artificial Sequence: Synthetic oligonucleotide
  source 1..21: mol_type = other DNA
cgtttggagactaagtcgggt

SEQ ID NO: 36567 - DNA, 21 bp, synthetic construct
  misc_feature 1..21: note = Description of Artificial Sequence: Synthetic oligonucleotide
  source 1..21: mol_type = other DNA
tctactcctattcgttcggtt

SEQ ID NO: 36568 - DNA, 21 bp, synthetic construct
  misc_feature 1..21: note = Description of Artificial Sequence: Synthetic oligonucleotide
  source 1..21: mol_type = other DNA
acgtcttctgcgcgtgttacg

SEQ ID NO: 36569 - DNA, 21 bp, synthetic construct
  misc_feature 1..21: note = Description of Artificial Sequence: Synthetic oligonucleotide
  source 1..21: mol_type = other DNA
gaggctgttactatgcatggt

SEQ ID NO: 36570 - DNA, 21 bp, synthetic construct
  misc_feature 1..21: note = Description of Artificial Sequence: Synthetic oligonucleotide
  source 1..21: mol_type = other DNA
actaagggtggttcgcagttg

SEQ ID NO: 36571 - DNA, 21 bp, synthetic construct
  misc_feature 1..21: note = Description of Artificial Sequence: Synthetic oligonucleotide
  source 1..21: mol_type = other DNA
ggcaccggcaacagcaacctc

SEQ ID NO: 36572 - DNA, 21 bp, synthetic construct
  misc_feature 1..21: note = Description of Artificial Sequence: Synthetic oligonucleotide
  source 1..21: mol_type = other DNA
ggcaccagcaccagcctcaga

SEQ ID NO: 36573 - DNA, 21 bp, synthetic construct
  misc_feature 1..21: note = Description of Artificial Sequence: Synthetic oligonucleotide
  source 1..21: mol_type = other DNA
cttggtcctcatcctacgcat

SEQ ID NO: 36574 - DNA, 21 bp, synthetic construct
  misc_feature 1..21: note = Description of Artificial Sequence: Synthetic oligonucleotide
  source 1..21: mol_type = other DNA
gcgtcggtgagtcagcggtcg

SEQ ID NO: 36575 - DNA, 21 bp, synthetic construct
  misc_feature 1..21: note = Description of Artificial Sequence: Synthetic oligonucleotide
  source 1..21: mol_type = other DNA
cccagcacccccaccatcaaa

SEQ ID NO: 36576 - DNA, 21 bp, synthetic construct
  misc_feature 1..21: note = Description of Artificial Sequence: Synthetic oligonucleotide
  source 1..21: mol_type = other DNA
aggtcttctgggggtttgact

SEQ ID NO: 36577 - DNA, 21 bp, synthetic construct
  misc_feature 1..21: note = Description of Artificial Sequence: Synthetic oligonucleotide
  source 1..21: mol_type = other DNA
tctaggtctcatgcgatgact

SEQ ID NO: 36578 - DNA, 21 bp, synthetic construct
  misc_feature 1..21: note = Description of Artificial Sequence: Synthetic oligonucleotide
  source 1..21: mol_type = other DNA
ttcctcaaaggcaccggcagc

SEQ ID NO: 36579 - DNA, 21 bp, synthetic construct
  misc_feature 1..21: note = Description of Artificial Sequence: Synthetic oligonucleotide
  source 1..21: mol_type = other DNA
ccttctacgtcttctgcgggg

SEQ ID NO: 36580 - DNA, 21 bp, synthetic construct
  misc_feature 1..21: note = Description of Artificial Sequence: Synthetic oligonucleotide
  source 1..21: mol_type = other DNA
gaccccctcagaagcatgcac

SEQ ID NO: 36581 - DNA, 21 bp, synthetic construct
  misc_feature 1..21: note = Description of Artificial Sequence: Synthetic oligonucleotide
  source 1..21: mol_type = other DNA
tatcaggtgggtgatactagg

SEQ ID NO: 36582 - DNA, 21 bp, synthetic construct
  misc_feature 1..21: note = Description of Artificial Sequence: Synthetic oligonucleotide
  source 1..21: mol_type = other DNA
gagggttctgggaggcttact

SEQ ID NO: 36583 - DNA, 21 bp, synthetic construct
  misc_feature 1..21: note = Description of Artificial Sequence: Synthetic oligonucleotide
  source 1..21: mol_type = other DNA
agcgacagcagaagcagaagc

SEQ ID NO: 36584 - DNA, 21 bp, synthetic construct
  misc_feature 1..21: note = Description of Artificial Sequence: Synthetic oligonucleotide
  source 1..21: mol_type = other DNA
tcgctggagaggcttaagact

SEQ ID NO: 36585 - DNA, 21 bp, synthetic construct
  misc_feature 1..21: note = Description of Artificial Sequence: Synthetic oligonucleotide
  source 1..21: mol_type = other DNA
accaccaacaacatccaaggc

SEQ ID NO: 36586 - DNA, 21 bp, synthetic construct
  misc_feature 1..21: note = Description of Artificial Sequence: Synthetic oligonucleotide
  source 1..21: mol_type = other DNA
agtaatggtcagaggaaggag

SEQ ID NO: 36587 - DNA, 21 bp, synthetic construct
  misc_feature 1..21: note = Description of Artificial Sequence: Synthetic oligonucleotide
  source 1..21: mol_type = other DNA
aaggataatactcctgggagg

SEQ ID NO: 36588 - DNA, 21 bp, synthetic construct
  misc_feature 1..21: note = Description of Artificial Sequence: Synthetic oligonucleotide
  source 1..21: mol_type = other DNA
cagacttcgcattctgctaag

SEQ ID NO: 36589 - DNA, 21 bp, synthetic construct
  misc_feature 1..21: note = Description of Artificial Sequence: Synthetic oligonucleotide
  source 1..21: mol_type = other DNA
ggcatgggcggcctcaaaaac

SEQ ID NO: 36590 - DNA, 21 bp, synthetic construct
  misc_feature 1..21: note = Description of Artificial Sequence: Synthetic oligonucleotide
  source 1..21: mol_type = other DNA
catgagcgtggtcagaatggg

SEQ ID NO: 36591 - DNA, 21 bp, synthetic construct
  misc_feature 1..21: note = Description of Artificial Sequence: Synthetic oligonucleotide
  source 1..21: mol_type = other DNA
agcaccagcaccgtccacagc

SEQ ID NO: 36592 - DNA, 21 bp, synthetic construct
  misc_feature 1..21: note = Description of Artificial Sequence: Synthetic oligonucleotide
  source 1..21: mol_type = other DNA
ggcggccacccccccaccagc

SEQ ID NO: 36593 - DNA, 21 bp, synthetic construct
  misc_feature 1..21: note = Description of Artificial Sequence: Synthetic oligonucleotide
  source 1..21: mol_type = other DNA
gggtctatttcgacggctcat

SEQ ID NO: 36594 - DNA, 21 bp, synthetic construct
  misc_feature 1..21: note = Description of Artificial Sequence: Synthetic oligonucleotide
  source 1..21: mol_type = other DNA
tcgagtccgtctaagatggcg

SEQ ID NO: 36595 - DNA, 21 bp, synthetic construct
  misc_feature 1..21: note = Description of Artificial Sequence: Synthetic oligonucleotide
  source 1..21: mol_type = other DNA
tggggtacgggtattggttct

SEQ ID NO: 36596 - DNA, 21 bp, synthetic construct
  misc_feature 1..21: note = Description of Artificial Sequence: Synthetic oligonucleotide
  source 1..21: mol_type = other DNA
cgggctcctggtagtaatact

SEQ ID NO: 36597 - DNA, 21 bp, synthetic construct
  misc_feature 1..21: note = Description of Artificial Sequence: Synthetic oligonucleotide
  source 1..21: mol_type = other DNA
gttgtgcctgagaggtctaag

SEQ ID NO: 36598 - DNA, 21 bp, synthetic construct
  misc_feature 1..21: note = Description of Artificial Sequence: Synthetic oligonucleotide
  source 1..21: mol_type = other DNA
ctcggcatgagagacaacacc

SEQ ID NO: 36599 - DNA, 21 bp, synthetic construct
  misc_feature 1..21: note = Description of Artificial Sequence: Synthetic oligonucleotide
  source 1..21: mol_type = other DNA
ggccccagcagcatcaacaga

SEQ ID NO: 36600 - DNA, 21 bp, synthetic construct
  misc_feature 1..21: note = Description of Artificial Sequence: Synthetic oligonucleotide
  source 1..21: mol_type = other DNA
aacttcagcaaccccaccgtc

SEQ ID NO: 36601 - DNA, 21 bp, synthetic construct
  misc_feature 1..21: note = Description of Artificial Sequence: Synthetic oligonucleotide
  source 1..21: mol_type = other DNA
actgggcgggggacggatgtg

SEQ ID NO: 36602 - DNA, 21 bp, synthetic construct
  misc_feature 1..21: note = Description of Artificial Sequence: Synthetic oligonucleotide
  source 1..21: mol_type = other DNA
tacagagtcacccaaagcagc

SEQ ID NO: 36603 - DNA, 21 bp, synthetic construct
  misc_feature 1..21: note = Description of Artificial Sequence: Synthetic oligonucleotide
  source 1..21: mol_type = other DNA
acgtcgaatactaagtctgtt

SEQ ID NO: 36604 - DNA, 21 bp, synthetic construct
  misc_feature 1..21: note = Description of Artificial Sequence: Synthetic oligonucleotide
  source 1..21: mol_type = other DNA
agactcacccaaagcagccaa

SEQ ID NO: 36605 - DNA, 21 bp, synthetic construct
  misc_feature 1..21: note = Description of Artificial Sequence: Synthetic oligonucleotide
  source 1..21: mol_type = other DNA
cccgccaacagccccgccacc

SEQ ID NO: 36606 - DNA, 21 bp, synthetic construct
  misc_feature 1..21: note = Description of Artificial Sequence: Synthetic oligonucleotide
  source 1..21: mol_type = other DNA
cccagaagccaacccgtcccc

SEQ ID NO: 36607 - DNA, 21 bp, synthetic construct
  misc_feature 1..21: note = Description of Artificial Sequence: Synthetic oligonucleotide
  source 1..21: mol_type = other DNA
cccgacaccctcaccagacaa

SEQ ID NO: 36608 - DNA, 21 bp, synthetic construct
  misc_feature 1..21: note = Description of Artificial Sequence: Synthetic oligonucleotide
  source 1..21: mol_type = other DNA
aatgggcgggggtcggatgtg

SEQ ID NO: 36609 - DNA, 21 bp, synthetic construct
  misc_feature 1..21: note = Description of Artificial Sequence: Synthetic oligonucleotide
  source 1..21: mol_type = other DNA
gcgaatggtactaagtctagt

SEQ ID NO: 36610 - DNA, 21 bp, synthetic construct
  misc_feature 1..21: note = Description of Artificial Sequence: Synthetic oligonucleotide
  source 1..21: mol_type = other DNA
ccggggggtactacgaagggt

SEQ ID NO: 36611 - DNA, 21 bp, synthetic construct
  misc_feature 1..21: note = Description of Artificial Sequence: Synthetic oligonucleotide
  source 1..21: mol_type = other DNA
cccacccacagcagcagagac

SEQ ID NO: 36612 - DNA, 21 bp, synthetic construct
  misc_feature 1..21: note = Description of Artificial Sequence: Synthetic oligonucleotide
  source 1..21: mol_type = other DNA
agtggtatggcttcggttacg

SEQ ID NO: 36613 - DNA, 21 bp, synthetic construct
  misc_feature 1..21: note = Description of Artificial Sequence: Synthetic oligonucleotide
  source 1..21: mol_type = other DNA
gggcctgttaatgctcattct

SEQ ID NO: 36614 - DNA, 21 bp, synthetic construct
  misc_feature 1..21: note = Description of Artificial Sequence: Synthetic oligonucleotide
  source 1..21: mol_type = other DNA
ggcaacaccggcagctaccaa

SEQ ID NO: 36615 - DNA, 21 bp, synthetic construct
  misc_feature 1..21: note = Description of Artificial Sequence: Synthetic oligonucleotide
  source 1..21: mol_type = other DNA
gccctcagcagccccgccaac

SEQ ID NO: 36616 - DNA, 21 bp, synthetic construct
  misc_feature 1..21: note = Description of Artificial Sequence: Synthetic oligonucleotide
  source 1..21: mol_type = other DNA
cagcagtctcctcggaatggg

SEQ ID NO: 36617 - DNA, 21 bp, synthetic construct
  misc_feature 1..21: note = Description of Artificial Sequence: Synthetic oligonucleotide
  source 1..21: mol_type = other DNA
ccttctcagactaagccgagt

SEQ ID NO: 36618 - DNA, 21 bp, synthetic construct
  misc_feature 1..21: note = Description of Artificial Sequence: Synthetic oligonucleotide
  source 1..21: mol_type = other DNA
caaaccagcagcagagaaatg

SEQ ID NO: 36619 - DNA, 21 bp, synthetic construct
  misc_feature 1..21: note = Description of Artificial Sequence: Synthetic oligonucleotide
  source 1..21: mol_type = other DNA
aacaccaccgccaaaagcagc

SEQ ID NO: 36620 - DNA, 21 bp, synthetic construct
  misc_feature 1..21: note = Description of Artificial Sequence: Synthetic oligonucleotide
  source 1..21: mol_type = other DNA
gagcgggttggttcgatttct

SEQ ID NO: 36621 - DNA, 21 bp, synthetic construct
  misc_feature 1..21: note = Description of Artificial Sequence: Synthetic oligonucleotide
  source 1..21: mol_type = other DNA
caaaccagaaccgacgtcacc

SEQ ID NO: 36622 - DNA, 21 bp, synthetic construct
  misc_feature 1..21: note = Description of Artificial Sequence: Synthetic oligonucleotide
  source 1..21: mol_type = other DNA
ggtaatcgtccgacgacgttg

SEQ ID NO: 36623 - DNA, 21 bp, synthetic construct
  misc_feature 1..21: note = Description of Artificial Sequence: Synthetic oligonucleotide
  source 1..21: mol_type = other DNA
gttggtactaatcatacttcg

SEQ ID NO: 36624 - DNA, 21 bp, synthetic construct
  misc_feature 1..21: note = Description of Artificial Sequence: Synthetic oligonucleotide
  source 1..21: mol_type = other DNA
gatcatcgtaatatttcttcg

SEQ ID NO: 36625 - DNA, 21 bp, synthetic construct
  misc_feature 1..21: note = Description of Artificial Sequence: Synthetic oligonucleotide
  source 1..21: mol_type = other DNA
aacaccagcaacaacatccaa

SEQ ID NO: 36626 - DNA, 21 bp, synthetic construct
  misc_feature 1..21: note = Description of Artificial Sequence: Synthetic oligonucleotide
  source 1..21: mol_type = other DNA
gggacgactaattcgcgtaat

SEQ ID NO: 36627 - DNA, 21 bp, synthetic construct
  misc_feature 1..21: note = Description of Artificial Sequence: Synthetic oligonucleotide
  source 1..21: mol_type = other DNA
tcttatgggaaggagagtagt

SEQ ID NO: 36628 - DNA, 21 bp, synthetic construct
  misc_feature 1..21: note = Description of Artificial Sequence: Synthetic oligonucleotide
  source 1..21: mol_type = other DNA
cggagtgatacgaatcgtggg

SEQ ID NO: 36629 - DNA, 21 bp, synthetic construct
  misc_feature 1..21: note = Description of Artificial Sequence: Synthetic oligonucleotide
  source 1..21: mol_type = other DNA
cccctcaacgccagaggcagc

SEQ ID NO: 36630 - DNA, 21 bp, synthetic construct
  misc_feature 1..21: note = Description of Artificial Sequence: Synthetic oligonucleotide
  source 1..21: mol_type = other DNA
gatttgcatgtgcagaaggct

SEQ ID NO: 36631 - DNA, 21 bp, synthetic construct
  misc_feature 1..21: note = Description of Artificial Sequence: Synthetic oligonucleotide
  source 1..21: mol_type = other DNA
agcggcggcacccacatcgcc

SEQ ID NO: 36632 - DNA, 21 bp, synthetic construct
  misc_feature 1..21: note = Description of Artificial Sequence: Synthetic oligonucleotide
  source 1..21: mol_type = other DNA
agcgccagcaccagcaccctc

SEQ ID NO: 36633 - DNA, 21 bp, synthetic construct
  misc_feature 1..21: note = Description of Artificial Sequence: Synthetic oligonucleotide
  source 1..21: mol_type = other DNA
gctgctactaggcagcctgat

SEQ ID NO: 36634 - DNA, 21 bp, synthetic construct
  misc_feature 1..21: note = Description of Artificial Sequence: Synthetic oligonucleotide
  source 1..21: mol_type = other DNA
gtcggcagcagcagcgtcatg

SEQ ID NO: 36635 - DNA, 21 bp, synthetic construct
  misc_feature 1..21: note = Description of Artificial Sequence: Synthetic oligonucleotide
  source 1..21: mol_type = other DNA
tcgtcgagtcctaatgttaag

SEQ ID NO: 36636 - DNA, 21 bp, synthetic construct
  misc_feature 1..21: note = Description of Artificial Sequence: Synthetic oligonucleotide
  source 1..21: mol_type = other DNA
aacaacgcccacagcagcagc

SEQ ID NO: 36637 - DNA, 21 bp, synthetic construct
  misc_feature 1..21: note = Description of Artificial Sequence: Synthetic oligonucleotide
  source 1..21: mol_type = other DNA
agagacagcaccaaactcgtc

SEQ ID NO: 36638 - DNA, 21 bp, synthetic construct
  misc_feature 1..21: note = Description of Artificial Sequence: Synthetic oligonucleotide
  source 1..21: mol_type = other DNA
accctcagcagcaccggcggc

SEQ ID NO: 36639 - DNA, 21 bp, synthetic construct
  misc_feature 1..21: note = Description of Artificial Sequence: Synthetic oligonucleotide
  source 1..21: mol_type = other DNA
agaatcggccaaggcagcagc

SEQ ID NO: 36640 - DNA, 21 bp, synthetic construct
  misc_feature 1..21: note = Description of Artificial Sequence: Synthetic oligonucleotide
  source 1..21: mol_type = other DNA
tctatttcgcatgctcgtgag

SEQ ID NO: 36641 - DNA, 21 bp, synthetic construct
  misc_feature 1..21: note = Description of Artificial Sequence: Synthetic oligonucleotide
  source 1..21: mol_type = other DNA
gaccccagaaacagcaccagc

SEQ ID NO: 36642 - DNA, 21 bp, synthetic construct
  misc_feature 1..21: note = Description of Artificial Sequence: Synthetic oligonucleotide
  source 1..21: mol_type = other DNA
gatagtcatcctcgttctatt

SEQ ID NO: 36643 - DNA, 21 bp, synthetic construct
  misc_feature 1..21: note = Description of Artificial Sequence: Synthetic oligonucleotide
  source 1..21: mol_type = other DNA
ttgccgggtcatcctcgggcg

SEQ ID NO: 36644 - DNA, 21 bp, synthetic construct
  misc_feature 1..21: note = Description of Artificial Sequence: Synthetic oligonucleotide
  source 1..21: mol_type = other DNA
tacggttctggacagaatcaa

SEQ ID NO: 36645 - DNA, 21 bp, synthetic construct
  misc_feature 1..21: note = Description of Artificial Sequence: Synthetic oligonucleotide
  source 1..21: mol_type = other DNA
agcgccaacagacccagcgcc

SEQ ID NO: 36646 - DNA, 21 bp, synthetic construct
  misc_feature 1..21: note = Description of Artificial Sequence: Synthetic oligonucleotide
  source 1..21: mol_type = other DNA
acccccggcgccagcctcagc

SEQ ID NO: 36647 - DNA, 21 bp, synthetic construct
  misc_feature 1..21: note = Description of Artificial Sequence: Synthetic oligonucleotide
  source 1..21: mol_type = other DNA
gaaggcatgggcgtccacggc

SEQ ID NO: 36648 - DNA, 21 bp, synthetic construct
  misc_feature 1..21: note = Description of Artificial Sequence: Synthetic oligonucleotide
  source 1..21: mol_type = other DNA
acgacggcgcctgggcttcgg

SEQ ID NO: 36649 - DNA, 21 bp, synthetic construct
  misc_feature 1..21: note = Description of Artificial Sequence: Synthetic oligonucleotide
  source 1..21: mol_type = other DNA
cccctcagcggcagcaaagcc

SEQ ID NO: 36650 - DNA, 21 bp, synthetic construct
  misc_feature 1..21: note = Description of Artificial Sequence: Synthetic oligonucleotide
  source 1..21: mol_type = other DNA
caccaaatcagcagcctcaaa

SEQ ID NO: 36651 - DNA, 21 bp, synthetic construct
  misc_feature 1..21: note = Description of Artificial Sequence: Synthetic oligonucleotide
  source 1..21: mol_type = other DNA
ccttctaagggtacgtatcct

SEQ ID NO: 36652 - DNA, 21 bp, synthetic construct
  misc_feature 1..21: note = Description of Artificial Sequence: Synthetic oligonucleotide
  source 1..21: mol_type = other DNA
agcgacatgagcggccaaaga

SEQ ID NO: 36653 - DNA, 21 bp, synthetic construct
  misc_feature 1..21: note = Description of Artificial Sequence: Synthetic oligonucleotide
  source 1..21: mol_type = other DNA
gtcgccgacaaaggcagcatg

SEQ ID NO: 36654 - DNA, 21 bp, synthetic construct
  misc_feature 1..21: note = Description of Artificial Sequence: Synthetic oligonucleotide
  source 1..21: mol_type = other DNA
ggttatgaggctaataggggg

SEQ ID NO: 36655 - DNA, 21 bp, synthetic construct
  misc_feature 1..21: note = Description of Artificial Sequence: Synthetic oligonucleotide
  source 1..21: mol_type = other DNA
gatgagagtggtaagtcgaag

SEQ ID NO: 36656 - DNA, 21 bp, synthetic construct
  misc_feature 1..21: note = Description of Artificial Sequence: Synthetic oligonucleotide
  source 1..21: mol_type = other DNA
ggggttaggacggctatgtct

SEQ ID NO: 36657 - DNA, 21 bp, synthetic construct
  misc_feature 1..21: note = Description of Artificial Sequence: Synthetic oligonucleotide
  source 1..21: mol_type = other DNA
agcggcagcaccaaaggccaa

SEQ ID NO: 36658 - DNA, 21 bp, synthetic construct
  misc_feature 1..21: note = Description of Artificial Sequence: Synthetic oligonucleotide
  source 1..21: mol_type = other DNA
ttggggtctaatcgttattct

SEQ ID NO: 36659 - DNA, 21 bp, synthetic construct
  misc_feature 1..21: note = Description of Artificial Sequence: Synthetic oligonucleotide
  source 1..21: mol_type = other DNA
ggcggcggcaccagcttcggc

SEQ ID NO: 36660 - DNA, 21 bp, synthetic construct
  misc_feature 1..21: note = Description of Artificial Sequence: Synthetic oligonucleotide
  source 1..21: mol_type = other DNA
gtcaacctcagaagcaacacc

SEQ ID NO: 36661 - DNA, 21 bp, synthetic construct
  misc_feature 1..21: note = Description of Artificial Sequence: Synthetic oligonucleotide
  source 1..21: mol_type = other DNA
ccctacgccggcaccagcccc

SEQ ID NO: 36662 - DNA, 21 bp, synthetic construct
  misc_feature 1..21: note = Description of Artificial Sequence: Synthetic oligonucleotide
  source 1..21: mol_type = other DNA
catacgcatgatgtgggtaag

SEQ ID NO: 36663 - DNA, 21 bp, synthetic construct
  misc_feature 1..21: note = Description of Artificial Sequence: Synthetic oligonucleotide
  source 1..21: mol_type = other DNA
accggcaccaaaagcgacaac

SEQ ID NO: 36664 - DNA, 21 bp, synthetic construct
  misc_feature 1..21: note = Description of Artificial Sequence: Synthetic oligonucleotide
  source 1..21: mol_type = other DNA
agtaagtctacgcatcaggcg

SEQ ID NO: 36665 - DNA, 21 bp, synthetic construct
  misc_feature 1..21: note = Description of Artificial Sequence: Synthetic oligonucleotide
  source 1..21: mol_type = other DNA
gacagcagacaaaccagcctc

SEQ ID NO: 36666 - DNA, 21 bp, synthetic construct
  misc_feature 1..21: note = Description of Artificial Sequence: Synthetic oligonucleotide
  source 1..21: mol_type = other DNA
cttgcgccggggcatggtaat

SEQ ID NO: 36667 - DNA, 21 bp, synthetic construct
  misc_feature 1..21: note = Description of Artificial Sequence: Synthetic oligonucleotide
  source 1..21: mol_type = other DNA
agtgtgcatggtaatcagctg

SEQ ID NO: 36668 - DNA, 21 bp, synthetic construct
  misc_feature 1..21: note = Description of Artificial Sequence: Synthetic oligonucleotide
  source 1..21: mol_type = other DNA
tcttcgacgtctcctgggagg

SEQ ID NO: 36669 - DNA, 21 bp, synthetic construct
  misc_feature 1..21: note = Description of Artificial Sequence: Synthetic oligonucleotide
  source 1..21: mol_type = other DNA
actaatcctactggttatcgt

SEQ ID NO: 36670 - DNA, 21 bp, synthetic construct
  misc_feature 1..21: note = Description of Artificial Sequence: Synthetic oligonucleotide
  source 1..21: mol_type = other DNA
catgtgccgtcgaagcttgct

SEQ ID NO: 36671 - DNA, 21 bp, synthetic construct
  misc_feature 1..21: note = Description of Artificial Sequence: Synthetic oligonucleotide
  source 1..21: mol_type = other DNA
caggtgacgggtgcgagtcat

SEQ ID NO: 36672 - DNA, 21 bp, synthetic construct
  misc_feature 1..21: note = Description of Artificial Sequence: Synthetic oligonucleotide
  source 1..21: mol_type = other DNA
agacccggcggcaaagacggc

SEQ ID NO: 36673 - DNA, 21 bp, synthetic construct
  misc_feature 1..21: note = Description of Artificial Sequence: Synthetic oligonucleotide
  source 1..21: mol_type = other DNA
cacaccagcaacaccagagtc

SEQ ID NO: 36674 - DNA, 21 bp, synthetic construct
  misc_feature 1..21: note = Description of Artificial Sequence: Synthetic oligonucleotide
  source 1..21: mol_type = other DNA
agaagcaccagcagcgccccc

SEQ ID NO: 36675 - DNA, 21 bp, synthetic construct
  misc_feature 1..21: note = Description of Artificial Sequence: Synthetic oligonucleotide
  source 1..21: mol_type = other DNA
atgggcaaccccagacacgtc

SEQ ID NO: 36676 - DNA, 21 bp, synthetic construct
  misc_feature 1..21: note = Description of Artificial Sequence: Synthetic oligonucleotide
  source 1..21: mol_type = other DNA
actcctgcggggccgaataag

SEQ ID NO: 36677 - DNA, 21 bp, synthetic construct
  misc_feature 1..21: note = Description of Artificial Sequence: Synthetic oligonucleotide
  source 1..21: mol_type = other DNA
agcggcggcggcaccagaacc

SEQ ID NO: 36678 - DNA, 21 bp, synthetic construct
  misc_feature 1..21: note = Description of Artificial Sequence: Synthetic oligonucleotide
  source 1..21: mol_type = other DNA
gctgggtcgtcttcgcctgct

SEQ ID NO: 36679 - DNA, 21 bp, synthetic construct
  misc_feature 1..21: note = Description of Artificial Sequence: Synthetic oligonucleotide
  source 1..21: mol_type = other DNA
gttagttttaagcctaatgag

SEQ ID NO: 36680 - DNA, 21 bp, synthetic construct
  misc_feature 1..21: note = Description of Artificial Sequence: Synthetic oligonucleotide
  source 1..21: mol_type = other DNA
tcgtatcctagtcagttgaat

SEQ ID NO: 36681 - DNA, 21 bp, synthetic construct
  misc_feature 1..21: note = Description of Artificial Sequence: Synthetic oligonucleotide
  source 1..21: mol_type = other DNA
ccttctcatatggcttcggcg

SEQ ID NO: 36682 - DNA, 21 bp, synthetic construct
  misc_feature 1..21: note = Description of Artificial Sequence: Synthetic oligonucleotide
  source 1..21: mol_type = other DNA
cggactctttctaataatggt

SEQ ID NO: 36683 - DNA, 21 bp, synthetic construct
  misc_feature 1..21: note = Description of Artificial Sequence: Synthetic oligonucleotide
  source 1..21: mol_type = other DNA
aacggtcctggacagaatcaa

SEQ ID NO: 36684 - DNA, 21 bp, synthetic construct
  misc_feature 1..21: note = Description of Artificial Sequence: Synthetic oligonucleotide
  source 1..21: mol_type = other DNA
gacctcccccaccacaccaga

SEQ ID NO: 36685 - DNA, 21 bp, synthetic construct
  misc_feature 1..21: note = Description of Artificial Sequence: Synthetic oligonucleotide
  source 1..21: mol_type = other DNA
aacggttctggacagaatcga

SEQ ID NO: 36686 - DNA, 21 bp, synthetic construct
  misc_feature 1..21: note = Description of Artificial Sequence: Synthetic oligonucleotide
  source 1..21: mol_type = other DNA
cacggttctggacagaatcaa

SEQ ID NO: 36687 - DNA, 21 bp, synthetic construct
  misc_feature 1..21: note = Description of Artificial Sequence: Synthetic oligonucleotide
  source 1..21: mol_type = other DNA
tctcagacggttaagactggt

SEQ ID NO: 36688 - DNA, 21 bp, synthetic construct
  misc_feature 1..21: note = Description of Artificial Sequence: Synthetic oligonucleotide
  source 1..21: mol_type = other DNA
agcagcgcccccagcctcagc

SEQ ID NO: 36689 - DNA, 21 bp, synthetic construct
  misc_feature 1..21: note = Description of Artificial Sequence: Synthetic oligonucleotide
  source 1..21: mol_type = other DNA
aggactttgagtgcttcgtcg

SEQ ID NO: 36690 - DNA, 21 bp, synthetic construct
  misc_feature 1..21: note = Description of Artificial Sequence: Synthetic oligonucleotide
  source 1..21: mol_type = other DNA
catccgacttctccggcgatg

SEQ ID NO: 36691 - DNA, 21 bp, synthetic construct
  misc_feature 1..21: note = Description of Artificial Sequence: Synthetic oligonucleotide
  source 1..21: mol_type = other DNA
gaacccagcagaagcagcacc

SEQ ID NO: 36692 - DNA, 21 bp, synthetic construct
  misc_feature 1..21: note = Description of Artificial Sequence: Synthetic oligonucleotide
  source 1..21: mol_type = other DNA
cacaacaccgcccacgccagc

SEQ ID NO: 36693 - DNA, 21 bp, synthetic construct
  misc_feature 1..21: note = Description of Artificial Sequence: Synthetic oligonucleotide
  source 1..21: mol_type = other DNA
caggtgacgtctattggtgct

SEQ ID NO: 36694 - DNA, 21 bp, synthetic construct
  misc_feature 1..21: note = Description of Artificial Sequence: Synthetic oligonucleotide
  source 1..21: mol_type = other DNA
cccggcagcgtcaccggcagc

SEQ ID NO: 36695 - DNA, 21 bp, synthetic construct
  misc_feature 1..21: note = Description of Artificial Sequence: Synthetic oligonucleotide
  source 1..21: mol_type = other DNA
cagtcgagtcgtacggttact

SEQ ID NO: 36696 - DNA, 21 bp, synthetic construct
  misc_feature 1..21: note = Description of Artificial Sequence: Synthetic oligonucleotide
  source 1..21: mol_type = other DNA
gggcgtctgaatactaatggt

SEQ ID NO: 36697 - DNA, 21 bp, synthetic construct
  misc_feature 1..21: note = Description of Artificial Sequence: Synthetic oligonucleotide
  source 1..21: mol_type = other DNA
accagaagccaaggcatcctc

SEQ ID NO: 36698 - DNA, 21 bp, synthetic construct
  misc_feature 1..21: note = Description of Artificial Sequence: Synthetic oligonucleotide
  source 1..21: mol_type = other DNA
cgggatgttggttctgctgct

SEQ ID NO: 36699 - DNA, 21 bp, synthetic construct
  misc_feature 1..21: note = Description of Artificial Sequence: Synthetic oligonucleotide
  source 1..21: mol_type = other DNA
aacggttctggacagtatcaa

SEQ ID NO: 36700 - DNA, 21 bp, synthetic construct
  misc_feature 1..21: note = Description of Artificial Sequence: Synthetic oligonucleotide
  source 1..21: mol_type = other DNA
gctggtgcgcctaagacggat

SEQ ID NO: 36701 - DNA, 21 bp, synthetic construct
  misc_feature 1..21: note = Description of Artificial Sequence: Synthetic oligonucleotide
  source 1..21: mol_type = other DNA
ggcaccgtcgacaaagccagc

SEQ ID NO: 36702 - DNA, 21 bp, synthetic construct
  misc_feature 1..21: note = Description of Artificial Sequence: Synthetic oligonucleotide
  source 1..21: mol_type = other DNA
aacaaaatgaccagcgtcagc

SEQ ID NO: 36703 - DNA, 21 bp, synthetic construct
  misc_feature 1..21: note = Description of Artificial Sequence: Synthetic oligonucleotide
  source 1..21: mol_type = other DNA
gagtttactaaggttggtgct

SEQ ID NO: 36704 - DNA, 21 bp, synthetic construct
  misc_feature 1..21: note = Description of Artificial Sequence: Synthetic oligonucleotide
  source 1..21: mol_type = other DNA
gcgacgagtcctcggttgtct

SEQ ID NO: 36705 - DNA, 21 bp, synthetic construct
  misc_feature 1..21: note = Description of Artificial Sequence: Synthetic oligonucleotide
  source 1..21: mol_type = other DNA
gtcacccaaagcagcagcaaa

SEQ ID NO: 36706 - DNA, 21 bp, synthetic construct
  misc_feature 1..21: note = Description of Artificial Sequence: Synthetic oligonucleotide
  source 1..21: mol_type = other DNA
cctaagggtgttcattcgatg

SEQ ID NO: 36707 - DNA, 21 bp, synthetic construct
  misc_feature 1..21: note = Description of Artificial Sequence: Synthetic oligonucleotide
  source 1..21: mol_type = other DNA
cgtggggtttcgactccgact

SEQ ID NO: 36708 - DNA, 21 bp, synthetic construct
  misc_feature 1..21: note = Description of Artificial Sequence: Synthetic oligonucleotide
  source 1..21: mol_type = other DNA
gacatccccgccaaaaccgcc

SEQ ID NO: 36709 - DNA, 21 bp, synthetic construct
  misc_feature 1..21: note = Description of Artificial Sequence: Synthetic oligonucleotide
  source 1..21: mol_type = other DNA
agtacgtctgggattcgttct

SEQ ID NO: 36710 - DNA, 21 bp, synthetic construct
  misc_feature 1..21: note = Description of Artificial Sequence: Synthetic oligonucleotide
  source 1..21: mol_type = other DNA
tcgagggattctagtattcat

SEQ ID NO: 36711 - DNA, 21 bp, synthetic construct
  misc_feature 1..21: note = Description of Artificial Sequence: Synthetic oligonucleotide
  source 1..21: mol_type = other DNA
aatagtacgagtacttctcag

SEQ ID NO: 36712 - DNA, 21 bp, synthetic construct
  misc_feature 1..21: note = Description of Artificial Sequence: Synthetic oligonucleotide
  source 1..21: mol_type = other DNA
aacggtactggacagaatcaa

SEQ ID NO: 36713 - DNA, 21 bp, synthetic construct
  misc_feature 1..21: note = Description of Artificial Sequence: Synthetic oligonucleotide
  source 1..21: mol_type = other DNA
gtcaaaagcaacaacctcccc

SEQ ID NO: 36714 - DNA, 21 bp, synthetic construct
  misc_feature 1..21: note = Description of Artificial Sequence: Synthetic oligonucleotide
  source 1..21: mol_type = other DNA
ggccaaaccggcgacatgaga

SEQ ID NO: 36715 - DNA, 21 bp, synthetic construct
  misc_feature 1..21: note = Description of Artificial Sequence: Synthetic oligonucleotide
  source 1..21: mol_type = other DNA
gtccaacccagaaccagcacc

SEQ ID NO: 36716 - DNA, 21 bp, synthetic construct
  misc_feature 1..21: note = Description of Artificial Sequence: Synthetic oligonucleotide
  source 1..21: mol_type = other DNA
cagggtagttcgttgcgtact

SEQ ID NO: 36717 - DNA, 21 bp, synthetic construct
  misc_feature 1..21: note = Description of Artificial Sequence: Synthetic oligonucleotide
  source 1..21: mol_type = other DNA
atgagaagcaaccccaccagc

SEQ ID NO: 36718 - DNA, 21 bp, synthetic construct
  misc_feature 1..21: note = Description of Artificial Sequence: Synthetic oligonucleotide
  source 1..21: mol_type = other DNA
gagaatattagtaggtctcat

SEQ ID NO: 36719 - DNA, 21 bp, synthetic construct
  misc_feature 1..21: note = Description of Artificial Sequence: Synthetic oligonucleotide
  source 1..21: mol_type = other DNA
gggctggcgggtcgtcttagt

SEQ ID NO: 36720 - DNA, 21 bp, synthetic construct
  misc_feature 1..21: note = Description of Artificial Sequence: Synthetic oligonucleotide
  source 1..21: mol_type = other DNA
acgcctttgagtgcttcttgt

SEQ ID NO: 36721 - DNA, 21 bp, synthetic construct
  misc_feature 1..21: note = Description of Artificial Sequence: Synthetic oligonucleotide
  source 1..21: mol_type = other DNA
ggccccaccgaccacaaactc

SEQ ID NO: 36722 - DNA, 21 bp, synthetic construct
  misc_feature 1..21: note = Description of Artificial Sequence: Synthetic oligonucleotide
  source 1..21: mol_type = other DNA
gagaggtttactagttcttcg

SEQ ID NO: 36723 - DNA, 21 bp, synthetic construct
  misc_feature 1..21: note = Description of Artificial Sequence: Synthetic oligonucleotide
  source 1..21: mol_type = other DNA
acggctgggcaggcgtcggtt

SEQ ID NO: 36724 - DNA, 21 bp, synthetic construct
  misc_feature 1..21: note = Description of Artificial Sequence: Synthetic oligonucleotide
  source 1..21: mol_type = other DNA
agagtcatcacccccagcacc

SEQ ID NO: 36725 - DNA, 21 bp, synthetic construct
  misc_feature 1..21: note = Description of Artificial Sequence: Synthetic oligonucleotide
  source 1..21: mol_type = other DNA
ggtacttttcagagtgggacg

SEQ ID NO: 36726 - DNA, 21 bp, synthetic construct
  misc_feature 1..21: note = Description of Artificial Sequence: Synthetic oligonucleotide
  source 1..21: mol_type = other DNA
accgtcagcgcccccagcgcc

SEQ ID NO: 36727 - DNA, 21 bp, synthetic construct
  misc_feature 1..21: note = Description of Artificial Sequence: Synthetic oligonucleotide
  source 1..21: mol_type = other DNA
cggccgtcgagtactcatgcg

SEQ ID NO: 36728 - DNA, 21 bp, synthetic construct
  misc_feature 1..21: note = Description of Artificial Sequence: Synthetic oligonucleotide
  source 1..21: mol_type = other DNA
agcggcgccagcagcaacagc

SEQ ID NO: 36729 - DNA, 21 bp, synthetic construct
  misc_feature 1..21: note = Description of Artificial Sequence: Synthetic oligonucleotide
  source 1..21: mol_type = other DNA
cctcctgtgacgactcgtcct

SEQ ID NO: 36730 - DNA, 21 bp, synthetic construct
  misc_feature 1..21: note = Description of Artificial Sequence: Synthetic oligonucleotide
  source 1..21: mol_type = other DNA
gctttttctcattcttcgggt

SEQ ID NO: 36731 - DNA, 21 bp, synthetic construct
  misc_feature 1..21: note = Description of Artificial Sequence: Synthetic oligonucleotide
  source 1..21: mol_type = other DNA
aacggttctggacagcatcaa

SEQ ID NO: 36732 - DNA, 21 bp, synthetic construct
  misc_feature 1..21: note = Description of Artificial Sequence: Synthetic oligonucleotide
  source 1..21: mol_type = other DNA
aacggcagcggcctcaaccaa

SEQ ID NO: 36733 - DNA, 21 bp, synthetic construct
  misc_feature 1..21: note = Description of Artificial Sequence: Synthetic oligonucleotide
  source 1..21: mol_type = other DNA
ctcgtcaacagcgccgtccaa

SEQ ID NO: 36734 - DNA, 21 bp, synthetic construct
  misc_feature 1..21: note = Description of Artificial Sequence: Synthetic oligonucleotide
  source 1..21: mol_type = other DNA
cagtcgagtaatgctcggaat

SEQ ID NO: 36735 - DNA, 21 bp, synthetic construct
  misc_feature 1..21: note = Description of Artificial Sequence: Synthetic oligonucleotide
  source 1..21: mol_type = other DNA
ggcgtcctcggcagcaaaaac

SEQ ID NO: 36736 - DNA, 21 bp, synthetic construct
  misc_feature 1..21: note = Description of Artificial Sequence: Synthetic oligonucleotide
  source 1..21: mol_type = other DNA
agtccgaattctcatccttct

SEQ ID NO: 36737 - DNA, 21 bp, synthetic construct
  misc_feature 1..21: note = Description of Artificial Sequence: Synthetic oligonucleotide
  source 1..21: mol_type = other DNA
acgtcttcggctaatactgtg

SEQ ID NO: 36738 - DNA, 21 bp, synthetic construct
  misc_feature 1..21: note = Description of Artificial Sequence: Synthetic oligonucleotide
  source 1..21: mol_type = other DNA
ggttcgactaagccttctcct

SEQ ID NO: 36739 - DNA, 21 bp, synthetic construct
  misc_feature 1..21: note = Description of Artificial Sequence: Synthetic oligonucleotide
  source 1..21: mol_type = other DNA
tacgccagcagcagagacggc

SEQ ID NO: 36740 - DNA, 21 bp, synthetic construct
  misc_feature 1..21: note = Description of Artificial Sequence: Synthetic oligonucleotide
  source 1..21: mol_type = other DNA
aacaacgtccccctcatcaaa

SEQ ID NO: 36741 - DNA, 21 bp, synthetic construct
  misc_feature 1..21: note = Description of Artificial Sequence: Synthetic oligonucleotide
  source 1..21: mol_type = other DNA
agtagtgcttctacttataag

SEQ ID NO: 36742 - DNA, 21 bp, synthetic construct
  misc_feature 1..21: note = Description of Artificial Sequence: Synthetic oligonucleotide
  source 1..21: mol_type = other DNA
cggtcgggtaatggttctttg

SEQ ID NO: 36743 - DNA, 21 bp, synthetic construct
  misc_feature 1..21: note = Description of Artificial Sequence: Synthetic oligonucleotide
  source 1..21: mol_type = other DNA
gctggtgtgacgactgttaat

SEQ ID NO: 36744 - DNA, 21 bp, synthetic construct
  misc_feature 1..21: note = Description of Artificial Sequence: Synthetic oligonucleotide
  source 1..21: mol_type = other DNA
cctcgtactaatgttatgcct

SEQ ID NO: 36745 - DNA, 21 bp, synthetic construct
  misc_feature 1..21: note = Description of Artificial Sequence: Synthetic oligonucleotide
  source 1..21: mol_type = other DNA
tatgcggatggtgcgcgtaat

SEQ ID NO: 36746 - DNA, 21 bp, synthetic construct
  misc_feature 1..21: note = Description of Artificial Sequence: Synthetic oligonucleotide
  source 1..21: mol_type = other DNA
agcagcagcagaggccaaaac

SEQ ID NO: 36747 - DNA, 21 bp, synthetic construct
  misc_feature 1..21: note = Description of Artificial Sequence: Synthetic oligonucleotide
  source 1..21: mol_type = other DNA
gtgtcgactaagagtgctcct

SEQ ID NO: 36748 - DNA, 21 bp, synthetic construct
  misc_feature 1..21: note = Description of Artificial Sequence: Synthetic oligonucleotide
  source 1..21: mol_type = other DNA
atgggccaaggcaccctcaga

SEQ ID NO: 36749 - DNA, 21 bp, synthetic construct
  misc_feature 1..21: note = Description of Artificial Sequence: Synthetic oligonucleotide
  source 1..21: mol_type = other DNA
aggggtacgggtattggttct

SEQ ID NO: 36750 - DNA, 21 bp, synthetic construct
  misc_feature 1..21: note = Description of Artificial Sequence: Synthetic oligonucleotide
  source 1..21: mol_type = other DNA
tcggcgtcgcatggtgctctg

SEQ ID NO: 36751 - DNA, 21 bp, synthetic construct
  misc_feature 1..21: note = Description of Artificial Sequence: Synthetic oligonucleotide
  source 1..21: mol_type = other DNA
tctcatcctagttcttttggg

SEQ ID NO: 36752 - DNA, 21 bp, synthetic construct
  misc_feature 1..21: note = Description of Artificial Sequence: Synthetic oligonucleotide
  source 1..21: mol_type = other DNA
cctactcctgtttcgaatcgt

SEQ ID NO: 36753 - DNA, 21 bp, synthetic construct
  misc_feature 1..21: note = Description of Artificial Sequence: Synthetic oligonucleotide
  source 1..21: mol_type = other DNA
tcggctgcgtctaatgggcgt

SEQ ID NO: 36754 - DNA, 21 bp, synthetic construct
  misc_feature 1..21: note = Description of Artificial Sequence: Synthetic oligonucleotide
  source 1..21: mol_type = other DNA
gtcctccacaacgccagcagc

SEQ ID NO: 36755 - DNA, 21 bp, synthetic construct
  misc_feature 1..21: note = Description of Artificial Sequence: Synthetic oligonucleotide
  source 1..21: mol_type = other DNA
gggcatctttcgccttctagt

SEQ ID NO: 36756 - DNA, 21 bp, synthetic construct
  misc_feature 1..21: note = Description of Artificial Sequence: Synthetic oligonucleotide
  source 1..21: mol_type = other DNA
gctggtgcgggtatgtatgct

SEQ ID NO: 36757 - DNA, 21 bp, synthetic construct
  misc_feature 1..21: note = Description of Artificial Sequence: Synthetic oligonucleotide
  source 1..21: mol_type = other DNA
ggtacgaatactgggattgtt

SEQ ID NO: 36758 - DNA, 21 bp, synthetic construct
  misc_feature 1..21: note = Description of Artificial Sequence: Synthetic oligonucleotide
  source 1..21: mol_type = other DNA
agcatggacatcaaacccaga

SEQ ID NO: 36759 - DNA, 21 bp, synthetic construct
  misc_feature 1..21: note = Description of Artificial Sequence: Synthetic oligonucleotide
  source 1..21: mol_type = other DNA
cccgccaacagccacgccacc

SEQ ID NO: 36760 - DNA, 21 bp, synthetic construct
  misc_feature 1..21: note = Description of Artificial Sequence: Synthetic oligonucleotide
  source 1..21: mol_type = other DNA
ggtgttggtactccgcgttcg

SEQ ID NO: 36761 - DNA, 21 bp, synthetic construct
  misc_feature 1..21: note = Description of Artificial Sequence: Synthetic oligonucleotide
  source 1..21: mol_type = other DNA
agccaacccgccggcagaagc

SEQ ID NO: 36762 - DNA, 21 bp, synthetic construct
  misc_feature 1..21: note = Description of Artificial Sequence: Synthetic oligonucleotide
  source 1..21: mol_type = other DNA
cccggcatgaaagtcagcccc

SEQ ID NO: 36763 - DNA, 21 bp, synthetic construct
  misc_feature 1..21: note = Description of Artificial Sequence: Synthetic oligonucleotide
  source 1..21: mol_type = other DNA
gccggcgccggcaaagtctac

SEQ ID NO: 36764 - DNA, 21 bp, synthetic construct
  misc_feature 1..21: note = Description of Artificial Sequence: Synthetic oligonucleotide
  source 1..21: mol_type = other DNA
ggcagcctcacccccaaagcc

SEQ ID NO: 36765 - DNA, 21 bp, synthetic construct
  misc_feature 1..21: note = Description of Artificial Sequence: Synthetic oligonucleotide
  source 1..21: mol_type = other DNA
ccccccaccctcaacaccaga

SEQ ID NO: 36766 - DNA, 21 bp, synthetic construct
  misc_feature 1..21: note = Description of Artificial Sequence: Synthetic oligonucleotide
  source 1..21: mol_type = other DNA
gctttgccggcgaagtctgct

SEQ ID NO: 36767 - DNA, 21 bp, synthetic construct
  misc_feature 1..21: note = Description of Artificial Sequence: Synthetic oligonucleotide
  source 1..21: mol_type = other DNA
ctcatgcccagcagcagcagc

SEQ ID NO: 36768 - DNA, 21 bp, synthetic construct
  misc_feature 1..21: note = Description of Artificial Sequence: Synthetic oligonucleotide
  source 1..21: mol_type = other DNA
tgcctcgcccaacccagagtc

SEQ ID NO: 36769 - DNA, 21 bp, synthetic construct
  misc_feature 1..21: note = Description of Artificial Sequence: Synthetic oligonucleotide
  source 1..21: mol_type = other DNA
cagggtacgactgctaggtcg

SEQ ID NO: 36770 - DNA, 21 bp, synthetic construct
  misc_feature 1..21: note = Description of Artificial Sequence: Synthetic oligonucleotide
  source 1..21: mol_type = other DNA
agcgccagcaacgtcagcaga

SEQ ID NO: 36771 - DNA, 21 bp, synthetic construct
  misc_feature 1..21: note = Description of Artificial Sequence: Synthetic oligonucleotide
  source 1..21: mol_type = other DNA
tctacggtgggtcatatgact

SEQ ID NO: 36772 - DNA, 21 bp, synthetic construct
  misc_feature 1..21: note = Description of Artificial Sequence: Synthetic oligonucleotide
  source 1..21: mol_type = other DNA
atgggcgccgtcagcgtcagc

SEQ ID NO: 36773 - DNA, 21 bp, synthetic construct
  misc_feature 1..21: note = Description of Artificial Sequence: Synthetic oligonucleotide
  source 1..21: mol_type = other DNA
ggcaccagcctcaaaatgagc

SEQ ID NO: 36774 - DNA, 21 bp, synthetic construct
  misc_feature 1..21: note = Description of Artificial Sequence: Synthetic oligonucleotide
  source 1..21: mol_type = other DNA
agcagcgccggcacctacacc

SEQ ID NO: 36775 - DNA, 21 bp, synthetic construct
  misc_feature 1..21: note = Description of Artificial Sequence: Synthetic oligonucleotide
  source 1..21: mol_type = other DNA
ggcacccccaacaccaaagtc

SEQ ID NO: 36776 - DNA, 21 bp, synthetic construct
  misc_feature 1..21: note = Description of Artificial Sequence: Synthetic oligonucleotide
  source 1..21: mol_type = other DNA
caaaaaacccaaaccaccagc

SEQ ID NO: 36777 - DNA, 21 bp, synthetic construct
  misc_feature 1..21: note = Description of Artificial Sequence: Synthetic oligonucleotide
  source 1..21: mol_type = other DNA
gctagtactgcgattaatcag

SEQ ID NO: 36778 - DNA, 21 bp, synthetic construct
  misc_feature 1..21: note = Description of Artificial Sequence: Synthetic oligonucleotide
  source 1..21: mol_type = other DNA
ggtttgcatccgcctcgtact

SEQ ID NO: 36779 - DNA, 21 bp, synthetic construct
  misc_feature 1..21: note = Description of Artificial Sequence: Synthetic oligonucleotide
  source 1..21: mol_type = other DNA
ccttctcttgagcgtgggtct

SEQ ID NO: 36780 - DNA, 21 bp, synthetic construct
  misc_feature 1..21: note = Description of Artificial Sequence: Synthetic oligonucleotide
  source 1..21: mol_type = other DNA
atggctctgcagccgaatagg

SEQ ID NO: 36781 - DNA, 21 bp, synthetic construct
  misc_feature 1..21: note = Description of Artificial Sequence: Synthetic oligonucleotide
  source 1..21: mol_type = other DNA
ccgaggagtactacgggtggg

SEQ ID NO: 36782 - DNA, 21 bp, synthetic construct
  misc_feature 1..21: note = Description of Artificial Sequence: Synthetic oligonucleotide
  source 1..21: mol_type = other DNA
aacggttctagacagaatcaa

SEQ ID NO: 36783 - DNA, 21 bp, synthetic construct
  misc_feature 1..21: note = Description of Artificial Sequence: Synthetic oligonucleotide
  source 1..21: mol_type = other DNA
gccaacgccaccccccaccac

SEQ ID NO: 36784 - DNA, 21 bp, synthetic construct
  misc_feature 1..21: note = Description of Artificial Sequence: Synthetic oligonucleotide
  source 1..21: mol_type = other DNA
ccgaggatgcaggaggcgaat

SEQ ID NO: 36785 - DNA, 21 bp, synthetic construct
  misc_feature 1..21: note = Description of Artificial Sequence: Synthetic oligonucleotide
  source 1..21: mol_type = other DNA
tctactacgactgcttcttct

SEQ ID NO: 36786 - DNA, 21 bp, synthetic construct
  misc_feature 1..21: note = Description of Artificial Sequence: Synthetic oligonucleotide
  source 1..21: mol_type = other DNA
catggtgttaataagactgag

SEQ ID NO: 36787 - DNA, 21 bp, synthetic construct
  misc_feature 1..21: note = Description of Artificial Sequence: Synthetic oligonucleotide
  source 1..21: mol_type = other DNA
accaccagcaacaaagacagc

SEQ ID NO: 36788 - DNA, 21 bp, synthetic construct
  misc_feature 1..21: note = Description of Artificial Sequence: Synthetic oligonucleotide
  source 1..21: mol_type = other DNA
ggcaacaacaacggcagaacc

SEQ ID NO: 36789 - DNA, 21 bp, synthetic construct
  misc_feature 1..21: note = Description of Artificial Sequence: Synthetic oligonucleotide
  source 1..21: mol_type = other DNA
agtggtgtggtgaagtctagt

SEQ ID NO: 36790 - DNA, 21 bp, synthetic construct
  misc_feature 1..21: note = Description of Artificial Sequence: Synthetic oligonucleotide
  source 1..21: mol_type = other DNA
agcagcctcaccaccccccac

SEQ ID NO: 36791 - DNA, 21 bp, synthetic construct
  misc_feature 1..21: note = Description of Artificial Sequence: Synthetic oligonucleotide
  source 1..21: mol_type = other DNA
tacacccaaagcaccagcaga

SEQ ID NO: 36792 - DNA, 21 bp, synthetic construct
  misc_feature 1..21: note = Description of Artificial Sequence: Synthetic oligonucleotide
  source 1..21: mol_type = other DNA
catgtgactaagtctacggct

SEQ ID NO: 36793 - DNA, 21 bp, synthetic construct
  misc_feature 1..21: note = Description of Artificial Sequence: Synthetic oligonucleotide
  source 1..21: mol_type = other DNA
agcagcagcaacaaacacgtc

SEQ ID NO: 36794 - DNA, 21 bp, synthetic construct
  misc_feature 1..21: note = Description of Artificial Sequence: Synthetic oligonucleotide
  source 1..21: mol_type = other DNA
agcgaccaaagaaccgccaac

SEQ ID NO: 36795 - DNA, 21 bp, synthetic construct
  misc_feature 1..21: note = Description of Artificial Sequence: Synthetic oligonucleotide
  source 1..21: mol_type = other DNA
aaaggttctggacagaatcaa

SEQ ID NO: 36796 - DNA, 21 bp, synthetic construct
  misc_feature 1..21: note = Description of Artificial Sequence: Synthetic oligonucleotide
  source 1..21: mol_type = other DNA
gattctgggtttaagtctcct

SEQ ID NO: 36797 - DNA, 21 bp, synthetic construct
  misc_feature 1..21: note = Description of Artificial Sequence: Synthetic oligonucleotide
  source 1..21: mol_type = other DNA
agcaccccccaccacaccacc

SEQ ID NO: 36798 - DNA, 21 bp, synthetic construct
  misc_feature 1..21: note = Description of Artificial Sequence: Synthetic oligonucleotide
  source 1..21: mol_type = other DNA
aacggttctggagagaatcaa

SEQ ID NO: 36799 - DNA, 21 bp, synthetic construct
  misc_feature 1..21: note = Description of Artificial Sequence: Synthetic oligonucleotide
  source 1..21: mol_type = other DNA
tcgtcgcctgttaggaatact

SEQ ID NO: 36800 - DNA, 21 bp, synthetic construct
  misc_feature 1..21: note = Description of Artificial Sequence: Synthetic oligonucleotide
  source 1..21: mol_type = other DNA
tcttcgcgtactcagtctttg

SEQ ID NO: 36801 - DNA, 21 bp, synthetic construct
  misc_feature 1..21: note = Description of Artificial Sequence: Synthetic oligonucleotide
  source 1..21: mol_type = other DNA
ggcaccaacagcaccagaggc

SEQ ID NO: 36802 - DNA, 21 bp, synthetic construct
  misc_feature 1..21: note = Description of Artificial Sequence: Synthetic oligonucleotide
  source 1..21: mol_type = other DNA
ttgaatggtagtgctactgct

SEQ ID NO: 36803 - DNA, 21 bp, synthetic construct
  misc_feature 1..21: note = Description of Artificial Sequence: Synthetic oligonucleotide
  source 1..21: mol_type = other DNA
agcagcccccccgtcggcaga

SEQ ID NO: 36804 - DNA, 21 bp, synthetic construct
  misc_feature 1..21: note = Description of Artificial Sequence: Synthetic oligonucleotide
  source 1..21: mol_type = other DNA
actcatgctgctcattcttct

SEQ ID NO: 36805 - DNA, 21 bp, synthetic construct
  misc_feature 1..21: note = Description of Artificial Sequence: Synthetic oligonucleotide
  source 1..21: mol_type = other DNA
ggttcggctcagtcgcctagg

SEQ ID NO: 36806 - DNA, 21 bp, synthetic construct
  misc_feature 1..21: note = Description of Artificial Sequence: Synthetic oligonucleotide
  source 1..21: mol_type = other DNA
ccgattcatccgtcgagtggg

SEQ ID NO: 36807 - DNA, 21 bp, synthetic construct
  misc_feature 1..21: note = Description of Artificial Sequence: Synthetic oligonucleotide
  source 1..21: mol_type = other DNA
aggaatcagggtgcgttgcag

SEQ ID NO: 36808 - DNA, 21 bp, synthetic construct
  misc_feature 1..21: note = Description of Artificial Sequence: Synthetic oligonucleotide
  source 1..21: mol_type = other DNA
ggccaagtcaaccacaccacc

SEQ ID NO: 36809 - DNA, 21 bp, synthetic construct
  misc_feature 1..21: note = Description of Artificial Sequence: Synthetic oligonucleotide
  source 1..21: mol_type = other DNA
gggtctagtcagcgttcggat

SEQ ID NO: 36810 - DNA, 21 bp, synthetic construct
  misc_feature 1..21: note = Description of Artificial Sequence: Synthetic oligonucleotide
  source 1..21: mol_type = other DNA
acggggagggctccgtcttcg

SEQ ID NO: 36811 - DNA, 21 bp, synthetic construct
  misc_feature 1..21: note = Description of Artificial Sequence: Synthetic oligonucleotide
  source 1..21: mol_type = other DNA
ggcggcacccccacccacaga

SEQ ID NO: 36812 - DNA, 21 bp, synthetic construct
  misc_feature 1..21: note = Description of Artificial Sequence: Synthetic oligonucleotide
  source 1..21: mol_type = other DNA
gtcccccaagtcagcagcgcc

SEQ ID NO: 36813 - DNA, 21 bp, synthetic construct
  misc_feature 1..21: note = Description of Artificial Sequence: Synthetic oligonucleotide
  source 1..21: mol_type = other DNA
accaacggccaagccgccaga

SEQ ID NO: 36814 - DNA, 21 bp, synthetic construct
  misc_feature 1..21: note = Description of Artificial Sequence: Synthetic oligonucleotide
  source 1..21: mol_type = other DNA
gcgctgggtcataaccataat

SEQ ID NO: 36815 - DNA, 21 bp, synthetic construct
  misc_feature 1..21: note = Description of Artificial Sequence: Synthetic oligonucleotide
  source 1..21: mol_type = other DNA
gggtcggggcatggtacgaat

SEQ ID NO: 36816 - DNA, 21 bp, synthetic construct
  misc_feature 1..21: note = Description of Artificial Sequence: Synthetic oligonucleotide
  source 1..21: mol_type = other DNA
cccaccgtcagaagcagcacc

SEQ ID NO: 36817 - DNA, 21 bp, synthetic construct
  misc_feature 1..21: note = Description of Artificial Sequence: Synthetic oligonucleotide
  source 1..21: mol_type = other DNA
agcgtcaacaccaaagccctc

SEQ ID NO: 36818 - DNA, 21 bp, synthetic construct
  misc_feature 1..21: note = Description of Artificial Sequence: Synthetic oligonucleotide
  source 1..21: mol_type = other DNA
gagccgacgcatccgcggggt

SEQ ID NO: 36819 - DNA, 21 bp, synthetic construct
  misc_feature 1..21: note = Description of Artificial Sequence: Synthetic oligonucleotide
  source 1..21: mol_type = other DNA
caacacagccccagaaacggc

SEQ ID NO: 36820 - DNA, 21 bp, synthetic construct
  misc_feature 1..21: note = Description of Artificial Sequence: Synthetic oligonucleotide
  source 1..21: mol_type = other DNA
agcggcagcagcaccttcaga

SEQ ID NO: 36821 - DNA, 21 bp, synthetic construct
  misc_feature 1..21: note = Description of Artificial Sequence: Synthetic oligonucleotide
  source 1..21: mol_type = other DNA
cacggcagcagcagcttcacc

SEQ ID NO: 36822 - DNA, 21 bp, synthetic construct
  misc_feature 1..21: note = Description of Artificial Sequence: Synthetic oligonucleotide
  source 1..21: mol_type = other DNA
gctggttctcataagggtgtg

SEQ ID NO: 36823 - DNA, 21 bp, synthetic construct
  misc_feature 1..21: note = Description of Artificial Sequence: Synthetic oligonucleotide
  source 1..21: mol_type = other DNA
tcttcgccgactcgtggtttg

SEQ ID NO: 36824 - DNA, 21 bp, synthetic construct
  misc_feature 1..21: note = Description of Artificial Sequence: Synthetic oligonucleotide
  source 1..21: mol_type = other DNA
tcgcgtaattcgcctccgcag

SEQ ID NO: 36825 - DNA, 21 bp, synthetic construct
  misc_feature 1..21: note = Description of Artificial Sequence: Synthetic oligonucleotide
  source 1..21: mol_type = other DNA
ccggtgggttcggtgcggggg

SEQ ID NO: 36826 - DNA, 21 bp, synthetic construct
  misc_feature 1..21: note = Description of Artificial Sequence: Synthetic oligonucleotide
  source 1..21: mol_type = other DNA
ggtactggtcatcagaggtct

SEQ ID NO: 36827 - DNA, 21 bp, synthetic construct
  misc_feature 1..21: note = Description of Artificial Sequence: Synthetic oligonucleotide
  source 1..21: mol_type = other DNA
accacccaaagcagaagcctc

SEQ ID NO: 36828 - DNA, 21 bp, synthetic construct
  misc_feature 1..21: note = Description of Artificial Sequence: Synthetic oligonucleotide
  source 1..21: mol_type = other DNA
gcttcgagggatagggctggt

SEQ ID NO: 36829 - DNA, 21 bp, synthetic construct
  misc_feature 1..21: note = Description of Artificial Sequence: Synthetic oligonucleotide
  source 1..21: mol_type = other DNA
actggtatgcagagtttgtcg

SEQ ID NO: 36830 - DNA, 21 bp, synthetic construct
  misc_feature 1..21: note = Description of Artificial Sequence: Synthetic oligonucleotide
  source 1..21: mol_type = other DNA
tcttcgtcttctacgcatggt

SEQ ID NO: 36831 - DNA, 21 bp, synthetic construct
  misc_feature 1..21: note = Description of Artificial Sequence: Synthetic oligonucleotide
  source 1..21: mol_type = other DNA
aatattagtactatgtcgaag

SEQ ID NO: 36832 - DNA, 21 bp, synthetic construct
  misc_feature 1..21: note = Description of Artificial Sequence: Synthetic oligonucleotide
  source 1..21: mol_type = other DNA
ggtagggctcataatgtgatt

SEQ ID NO: 36833 - DNA, 21 bp, synthetic construct
  misc_feature 1..21: note = Description of Artificial Sequence: Synthetic oligonucleotide
  source 1..21: mol_type = other DNA
tcgcctgggaataagctgctt

SEQ ID NO: 36834 - DNA, 21 bp, synthetic construct
  misc_feature 1..21: note = Description of Artificial Sequence: Synthetic oligonucleotide
  source 1..21: mol_type = other DNA
gttcagccggtgaagatgagt

SEQ ID NO: 36835 - DNA, 21 bp, synthetic construct
  misc_feature 1..21: note = Description of Artificial Sequence: Synthetic oligonucleotide
  source 1..21: mol_type = other DNA
cagggttcgagtaagacgact

SEQ ID NO: 36836 - DNA, 21 bp, synthetic construct
  misc_feature 1..21: note = Description of Artificial Sequence: Synthetic oligonucleotide
  source 1..21: mol_type = other DNA
gttactaagtcgggtaatggg

SEQ ID NO: 36837 - DNA, 21 bp, synthetic construct
  misc_feature 1..21: note = Description of Artificial Sequence: Synthetic oligonucleotide
  source 1..21: mol_type = other DNA
ggtacgtatggtgagatgagg

SEQ ID NO: 36838 - DNA, 21 bp, synthetic construct
  misc_feature 1..21: note = Description of Artificial Sequence: Synthetic oligonucleotide
  source 1..21: mol_type = other DNA
gtcaacaccaacagagccgcc

SEQ ID NO: 36839 - DNA, 21 bp, synthetic construct
  misc_feature 1..21: note = Description of Artificial Sequence: Synthetic oligonucleotide
  source 1..21: mol_type = other DNA
aacggttctggacagaatgaa

SEQ ID NO: 36840 - DNA, 21 bp, synthetic construct
  misc_feature 1..21: note = Description of Artificial Sequence: Synthetic oligonucleotide
  source 1..21: mol_type = other DNA
gatgctggttctcgttcttct

SEQ ID NO: 36841 - DNA, 21 bp, synthetic construct
  misc_feature 1..21: note = Description of Artificial Sequence: Synthetic oligonucleotide
  source 1..21: mol_type = other DNA
cccctccccgcccacagcccc

SEQ ID NO: 36842 - DNA, 21 bp, synthetic construct
  misc_feature 1..21: note = Description of Artificial Sequence: Synthetic oligonucleotide
  source 1..21: mol_type = other DNA
actagtggtactaaggctcat

SEQ ID NO: 36843 - DNA, 21 bp, synthetic construct
  misc_feature 1..21: note = Description of Artificial Sequence: Synthetic oligonucleotide
  source 1..21: mol_type = other DNA
ttgcagcagcataatacgaag

SEQ ID NO: 36844 - DNA, 21 bp, synthetic construct
  misc_feature 1..21: note = Description of Artificial Sequence: Synthetic oligonucleotide
  source 1..21: mol_type = other DNA
caccaaagcagcagcagcagc

SEQ ID NO: 36845 - DNA, 21 bp, synthetic construct
  misc_feature 1..21: note = Description of Artificial Sequence: Synthetic oligonucleotide
  source 1..21: mol_type = other DNA
ttcagagcccaagccaacgtc

SEQ ID NO: 36846 - DNA, 21 bp, synthetic construct
  misc_feature 1..21: note = Description of Artificial Sequence: Synthetic oligonucleotide
  source 1..21: mol_type = other DNA
ccctacaacagcaaagccagc

SEQ ID NO: 36847 - DNA, 21 bp, synthetic construct
  misc_feature 1..21: note = Description of Artificial Sequence: Synthetic oligonucleotide
  source 1..21: mol_type = other DNA
gcgcatagtaataattcgtat

SEQ ID NO: 36848 - DNA, 21 bp, synthetic construct
  misc_feature 1..21: note = Description of Artificial Sequence: Synthetic oligonucleotide
  source 1..21: mol_type = other DNA
accaccgccagcagacccagc

SEQ ID NO: 36849 - DNA, 21 bp, synthetic construct
  misc_feature 1..21: note = Description of Artificial Sequence: Synthetic oligonucleotide
  source 1..21: mol_type = other DNA
gtcagcaccggcaaaagcgtc

SEQ ID NO: 36850 - DNA, 21 bp, synthetic construct
  misc_feature 1..21: note = Description of Artificial Sequence: Synthetic oligonucleotide
  source 1..21: mol_type = other DNA
ggcgccagcgtcaaccaaggc

SEQ ID NO: 36851 - DNA, 21 bp, synthetic construct
  misc_feature 1..21: note = Description of Artificial Sequence: Synthetic oligonucleotide
  source 1..21: mol_type = other DNA
aacggttctggacagaatcta

SEQ ID NO: 36852 - DNA, 21 bp, synthetic construct
  misc_feature 1..21: note = Description of Artificial Sequence: Synthetic oligonucleotide
  source 1..21: mol_type = other DNA
cagctgggttctacgactagg

SEQ ID NO: 36853 - DNA, 21 bp, synthetic construct
  misc_feature 1..21: note = Description of Artificial Sequence: Synthetic oligonucleotide
  source 1..21: mol_type = other DNA
agcggcagagacaaaatcagc

SEQ ID NO: 36854 - DNA, 21 bp, synthetic construct
  misc_feature 1..21: note = Description of Artificial Sequence: Synthetic oligonucleotide
  source 1..21: mol_type = other DNA
aacggttctgtacagaatcaa

SEQ ID NO: 36855 - DNA, 21 bp, synthetic construct
  misc_feature 1..21: note = Description of Artificial Sequence: Synthetic oligonucleotide
  source 1..21: mol_type = other DNA
atgccgagtcagagggatggt

SEQ ID NO: 36856 - DNA, 21 bp, synthetic construct
  misc_feature 1..21: note = Description of Artificial Sequence: Synthetic oligonucleotide
  source 1..21: mol_type = other DNA
gtcaccaccagcaccggcaga

SEQ ID NO: 36857 - DNA, 21 bp, synthetic construct
  misc_feature 1..21: note = Description of Artificial Sequence: Synthetic oligonucleotide
  source 1..21: mol_type = other DNA
aacggttctggacataatcaa

SEQ ID NO: 36858 - DNA, 21 bp, synthetic construct
  misc_feature 1..21: note = Description of Artificial Sequence: Synthetic oligonucleotide
  source 1..21: mol_type = other DNA
accggcatcggcagccacctc

SEQ ID NO: 36859 - DNA, 21 bp, synthetic construct
  misc_feature 1..21: note = Description of Artificial Sequence: Synthetic oligonucleotide
  source 1..21: mol_type = other DNA
aacggttctggacggaatcaa

SEQ ID NO: 36860 - DNA, 21 bp, synthetic construct
  misc_feature 1..21: note = Description of Artificial Sequence: Synthetic oligonucleotide
  source 1..21: mol_type = other DNA
gttcgtgagtctcgttcttct

SEQ ID NO: 36861 - DNA, 21 bp, synthetic construct
  misc_feature 1..21: note = Description of Artificial Sequence: Synthetic oligonucleotide
  source 1..21: mol_type = other DNA
ccccaaaacctcgcccacgtc

SEQ ID NO: 36862 - DNA, 21 bp, synthetic construct
  misc_feature 1..21: note = Description of Artificial Sequence: Synthetic oligonucleotide
  source 1..21: mol_type = other DNA
aaaaaccccagcagcgccccc

SEQ ID NO: 36863 - DNA, 21 bp, synthetic construct
  misc_feature 1..21: note = Description of Artificial Sequence: Synthetic oligonucleotide
  source 1..21: mol_type = other DNA
aacagcggcaaacccaacgcc

SEQ ID NO: 36864 - DNA, 21 bp, synthetic construct
  misc_feature 1..21: note = Description of Artificial Sequence: Synthetic oligonucleotide
  source 1..21: mol_type = other DNA
aacggttctggacagaagcaa

SEQ ID NO: 36865 - DNA, 21 bp, synthetic construct
  misc_feature 1..21: note = Description of Artificial Sequence: Synthetic oligonucleotide
  source 1..21: mol_type = other DNA
aacggcgtcccccaacccaaa

SEQ ID NO: 36866 - DNA, 21 bp, synthetic construct
  misc_feature 1..21: note = Description of Artificial Sequence: Synthetic oligonucleotide
  source 1..21: mol_type = other DNA
aacggttctggaaagaatcaa

SEQ ID NO: 36867 - DNA, 21 bp, synthetic construct
  misc_feature 1..21: note = Description of Artificial Sequence: Synthetic oligonucleotide
  source 1..21: mol_type = other DNA
aacggttctggacaggatcaa

SEQ ID NO: 36868 - DNA, 21 bp, synthetic construct
  misc_feature 1..21: note = Description of Artificial Sequence: Synthetic oligonucleotide
  source 1..21: mol_type = other DNA
ggcttcagcagacccaacacc

SEQ ID NO: 36869 - DNA, 21 bp, synthetic construct
  misc_feature 1..21: note = Description of Artificial Sequence: Synthetic oligonucleotide
  source 1..21: mol_type = other DNA
tctaggcaggctacgtcgtct

SEQ ID NO: 36870 - DNA, 21 bp, synthetic construct
  misc_feature 1..21: note = Description of Artificial Sequence: Synthetic oligonucleotide
  source 1..21: mol_type = other DNA
tacgccaacaacctcaacaga

SEQ ID NO: 36871 - DNA, 21 bp, synthetic construct
  misc_feature 1..21: note = Description of Artificial Sequence: Synthetic oligonucleotide
  source 1..21: mol_type = other DNA
gaagtcaccaacgcccccaaa

SEQ ID NO: 36872 - DNA, 21 bp, synthetic construct
  misc_feature 1..21: note = Description of Artificial Sequence: Synthetic oligonucleotide
  source 1..21: mol_type = other DNA
agcggcacccaaacctggagc

SEQ ID NO: 36873 - DNA, 21 bp, synthetic construct
  misc_feature 1..21: note = Description of Artificial Sequence: Synthetic oligonucleotide
  source 1..21: mol_type = other DNA
gccgtccccgccaaaggcgcc

SEQ ID NO: 36874 - DNA, 21 bp, synthetic construct
  misc_feature 1..21: note = Description of Artificial Sequence: Synthetic oligonucleotide
  source 1..21: mol_type = other DNA
cgtaattatacgggtgatagt

SEQ ID NO: 36875 - DNA, 21 bp, synthetic construct
  misc_feature 1..21: note = Description of Artificial Sequence: Synthetic oligonucleotide
  source 1..21: mol_type = other DNA
aacggttttggacagaatcaa

SEQ ID NO: 36876 - DNA, 21 bp, synthetic construct
  misc_feature 1..21: note = Description of Artificial Sequence: Synthetic oligonucleotide
  source 1..21: mol_type = other DNA
ctcagagccaccagcggcaac

SEQ ID NO: 36877 - DNA, 21 bp, synthetic construct
  misc_feature 1..21: note = Description of Artificial Sequence: Synthetic oligonucleotide
  source 1..21: mol_type = other DNA
gccgcccaacccagcctcaaa

SEQ ID NO: 36878 - DNA, 21 bp, synthetic construct
  misc_feature 1..21: note = Description of Artificial Sequence: Synthetic oligonucleotide
  source 1..21: mol_type = other DNA
cacatgaacagaaaactcgaa

SEQ ID NO: 36879 - DNA, 21 bp, synthetic construct
  misc_feature 1..21: note = Description of Artificial Sequence: Synthetic oligonucleotide
  source 1..21: mol_type = other DNA
ggcgccagacccgtcctccaa

SEQ ID NO: 36880 - DNA, 21 bp, synthetic construct
  misc_feature 1..21: note = Description of Artificial Sequence: Synthetic oligonucleotide
  source 1..21: mol_type = other DNA
cgtcatacgatgacgcatgtg

SEQ ID NO: 36881 - DNA, 21 bp, synthetic construct
  misc_feature 1..21: note = Description of Artificial Sequence: Synthetic oligonucleotide
  source 1..21: mol_type = other DNA
ggcctcagccccgtcctcaaa

SEQ ID NO: 36882 - DNA, 21 bp, synthetic construct
  misc_feature 1..21: note = Description of Artificial Sequence: Synthetic oligonucleotide
  source 1..21: mol_type = other DNA
caattccccggcaccctcaga

SEQ ID NO: 36883 - DNA, 21 bp, synthetic construct
  misc_feature 1..21: note = Description of Artificial Sequence: Synthetic oligonucleotide
  source 1..21: mol_type = other DNA
cacaacctccacatgcccggc

SEQ ID NO: 36884 - DNA, 21 bp, synthetic construct
  misc_feature 1..21: note = Description of Artificial Sequence: Synthetic oligonucleotide
  source 1..21: mol_type = other DNA
ccgaaggcgaggcagcataat

SEQ ID NO: 36885 - DNA, 21 bp, synthetic construct
  misc_feature 1..21: note = Description of Artificial Sequence: Synthetic oligonucleotide
  source 1..21: mol_type = other DNA
cgtcctcctgtggatgctgtg

SEQ ID NO: 36886 - DNA, 21 bp, synthetic construct
  misc_feature 1..21: note = Description of Artificial Sequence: Synthetic oligonucleotide
  source 1..21: mol_type = other DNA
aaacccaccagaagcaccgcc

SEQ ID NO: 36887 - DNA, 21 bp, synthetic construct
  misc_feature 1..21: note = Description of Artificial Sequence: Synthetic oligonucleotide
  source 1..21: mol_type = other DNA
aattatgtgggtcagaggtct

SEQ ID NO: 36888 - DNA, 21 bp, synthetic construct
  misc_feature 1..21: note = Description of Artificial Sequence: Synthetic oligonucleotide
  source 1..21: mol_type = other DNA
agccaagccaaaaaaaccggc

SEQ ID NO: 36889 - DNA, 21 bp, synthetic construct
  misc_feature 1..21: note = Description of Artificial Sequence: Synthetic oligonucleotide
  source 1..21: mol_type = other DNA
tatggtaattctggtcggtat

SEQ ID NO: 36890 - DNA, 21 bp, synthetic construct
  misc_feature 1..21: note = Description of Artificial Sequence: Synthetic oligonucleotide
  source 1..21: mol_type = other DNA
agaggccccggccacaacacc

SEQ ID NO: 36891 - DNA, 21 bp, synthetic construct
  misc_feature 1..21: note = Description of Artificial Sequence: Synthetic oligonucleotide
  source 1..21: mol_type = other DNA
tgtgctgtttcgaagagtcgg

SEQ ID NO: 36892 - DNA, 21 bp, synthetic construct
  misc_feature 1..21: note = Description of Artificial Sequence: Synthetic oligonucleotide
  source 1..21: mol_type = other DNA
aagcttaataagtctcaggcg

SEQ ID NO: 36893 - DNA, 21 bp, synthetic construct
  misc_feature 1..21: note = Description of Artificial Sequence: Synthetic oligonucleotide
  source 1..21: mol_type = other DNA
gatcagaagactgttaatcgt

SEQ ID NO: 36894 - DNA, 21 bp, synthetic construct
  misc_feature 1..21: note = Description of Artificial Sequence: Synthetic oligonucleotide
  source 1..21: mol_type = other DNA
ccggcggctcttaatgagttg

SEQ ID NO: 36895 - DNA, 21 bp, synthetic construct
  misc_feature 1..21: note = Description of Artificial Sequence: Synthetic oligonucleotide
  source 1..21: mol_type = other DNA
aaccccggccacaaactcacc

SEQ ID NO: 36896 - DNA, 21 bp, synthetic construct
  misc_feature 1..21: note = Description of Artificial Sequence: Synthetic oligonucleotide
  source 1..21: mol_type = other DNA
aatactcagagttatacgagg

SEQ ID NO: 36897 - DNA, 21 bp, synthetic construct
  misc_feature 1..21: note = Description of Artificial Sequence: Synthetic oligonucleotide
  source 1..21: mol_type = other DNA
caagtcgtccccgccaccaac

SEQ ID NO: 36898 - DNA, 21 bp, synthetic construct
  misc_feature 1..21: note = Description of Artificial Sequence: Synthetic oligonucleotide
  source 1..21: mol_type = other DNA
acggcgagttataagccttct

SEQ ID NO: 36899 - DNA, 21 bp, synthetic construct
  misc_feature 1..21: note = Description of Artificial Sequence: Synthetic oligonucleotide
  source 1..21: mol_type = other DNA
gaaatgagagtcgaaagaccc

SEQ ID NO: 36900 - DNA, 21 bp, synthetic construct
  misc_feature 1..21: note = Description of Artificial Sequence: Synthetic oligonucleotide
  source 1..21: mol_type = other DNA
atgaagtcgcagaagtatgct

SEQ ID NO: 36901 - DNA, 21 bp, synthetic construct
  misc_feature 1..21: note = Description of Artificial Sequence: Synthetic oligonucleotide
  source 1..21: mol_type = other DNA
aaggattttggtcagatgcgg

SEQ ID NO: 36902 - DNA, 21 bp, synthetic construct
  misc_feature 1..21: note = Description of Artificial Sequence: Synthetic oligonucleotide
  source 1..21: mol_type = other DNA
gagcatattggtcataatcat

SEQ ID NO: 36903 - DNA, 21 bp, synthetic construct
  misc_feature 1..21: note = Description of Artificial Sequence: Synthetic oligonucleotide
  source 1..21: mol_type = other DNA
aataatactcagaagaattct

SEQ ID NO: 36904 - DNA, 21 bp, synthetic construct
  misc_feature 1..21: note = Description of Artificial Sequence: Synthetic oligonucleotide
  source 1..21: mol_type = other DNA
tcttcgagtgggggtgtgaag

SEQ ID NO: 36905 - DNA, 21 bp, synthetic construct
  misc_feature 1..21: note = Description of Artificial Sequence: Synthetic oligonucleotide
  source 1..21: mol_type = other DNA
gttagtgggactaagattgag

SEQ ID NO: 36906 - DNA, 21 bp, synthetic construct
  misc_feature 1..21: note = Description of Artificial Sequence: Synthetic oligonucleotide
  source 1..21: mol_type = other DNA
tacggcatgagactcgtcaac

SEQ ID NO: 36907 - DNA, 21 bp, synthetic construct
  misc_feature 1..21: note = Description of Artificial Sequence: Synthetic oligonucleotide
  source 1..21: mol_type = other DNA
cccaaactcagccacaccggc

SEQ ID NO: 36908 - DNA, 21 bp, synthetic construct
  misc_feature 1..21: note = Description of Artificial Sequence: Synthetic oligonucleotide
  source 1..21: mol_type = other DNA
gagcggaaggttcagaattgt

SEQ ID NO: 36909 - DNA, 21 bp, synthetic construct
  misc_feature 1..21: note = Description of Artificial Sequence: Synthetic oligonucleotide
  source 1..21: mol_type = other DNA
cctggtacgtctgatagtgtt

SEQ ID NO: 36910 - DNA, 21 bp, synthetic construct
  misc_feature 1..21: note = Description of Artificial Sequence: Synthetic oligonucleotide
  source 1..21: mol_type = other DNA
tgtgtgtattctggtactagg

SEQ ID NO: 36911 - DNA, 21 bp, synthetic construct
  misc_feature 1..21: note = Description of Artificial Sequence: Synthetic oligonucleotide
  source 1..21: mol_type = other DNA
agctacgtcaccaccgccggc

SEQ ID NO: 36912 - DNA, 21 bp, synthetic construct
  misc_feature 1..21: note = Description of Artificial Sequence: Synthetic oligonucleotide
  source 1..21: mol_type = other DNA
aaaagcaacggccacagaatc

SEQ ID NO: 36913 - DNA, 21 bp, synthetic construct
  misc_feature 1..21: note = Description of Artificial Sequence: Synthetic oligonucleotide
  source 1..21: mol_type = other DNA
ggtaatgagctggtgcatttg

SEQ ID NO: 36914 - DNA, 21 bp, synthetic construct
  misc_feature 1..21: note = Description of Artificial Sequence: Synthetic oligonucleotide
  source 1..21: mol_type = other DNA
tctatggctcctgctggtctg

SEQ ID NO: 36915 - DNA, 21 bp, synthetic construct
  misc_feature 1..21: note = Description of Artificial Sequence: Synthetic oligonucleotide
  source 1..21: mol_type = other DNA
caacaagaaatgagcaaaaaa

SEQ ID NO: 36916 - DNA, 21 bp, synthetic construct
  misc_feature 1..21: note = Description of Artificial Sequence: Synthetic oligonucleotide
  source 1..21: mol_type = other DNA
aagaatcagagtcttatgtcg

SEQ ID NO: 36917 - DNA, 21 bp, synthetic construct
  misc_feature 1..21: note = Description of Artificial Sequence: Synthetic oligonucleotide
  source 1..21: mol_type = other DNA
catgttgagcggacgggggtg

SEQ ID NO: 36918 - DNA, 21 bp, synthetic construct
  misc_feature 1..21: note = Description of Artificial Sequence: Synthetic oligonucleotide
  source 1..21: mol_type = other DNA
ttgaaggctaatgctacgggt

SEQ ID NO: 36919 - DNA, 21 bp, synthetic construct
  misc_feature 1..21: note = Description of Artificial Sequence: Synthetic oligonucleotide
  source 1..21: mol_type = other DNA
aacagcacccaaatcaccccc

SEQ ID NO: 36920 - DNA, 21 bp, synthetic construct
  misc_feature 1..21: note = Description of Artificial Sequence: Synthetic oligonucleotide
  source 1..21: mol_type = other DNA
agtaagactagtaaggtgcat

SEQ ID NO: 36921 - DNA, 21 bp, synthetic construct
  misc_feature 1..21: note = Description of Artificial Sequence: Synthetic oligonucleotide
  source 1..21: mol_type = other DNA
cgtcattatacgggtgatagt

SEQ ID NO: 36922 - DNA, 21 bp, synthetic construct
  misc_feature 1..21: note = Description of Artificial Sequence: Synthetic oligonucleotide
  source 1..21: mol_type = other DNA
aatggtcggcctcagtttcgg

SEQ ID NO: 36923 - DNA, 21 bp, synthetic construct
  misc_feature 1..21: note = Description of Artificial Sequence: Synthetic oligonucleotide
  source 1..21: mol_type = other DNA
aattcggttggtcatagtagg

SEQ ID NO: 36924 - DNA, 21 bp, synthetic construct
  misc_feature 1..21: note = Description of Artificial Sequence: Synthetic oligonucleotide
  source 1..21: mol_type = other DNA
ggtccgacgccttattcgcgg

SEQ ID NO: 36925 - DNA, 21 bp, synthetic construct
  misc_feature 1..21: note = Description of Artificial Sequence: Synthetic oligonucleotide
  source 1..21: mol_type = other DNA
tctcctggtaatgttcgtaag

SEQ ID NO: 36926 - DNA, 21 bp, synthetic construct
  misc_feature 1..21: note = Description of Artificial Sequence: Synthetic oligonucleotide
  source 1..21: mol_type = other DNA
caaagcagcgaaaaaagacaa

SEQ ID NO: 36927 - DNA, 21 bp, synthetic construct
  misc_feature 1..21: note = Description of Artificial Sequence: Synthetic oligonucleotide
  source 1..21: mol_type = other DNA
atcgacggccacagaaacggc

SEQ ID NO: 36928 - DNA, 21 bp, synthetic construct
  misc_feature 1..21: note = Description of Artificial Sequence: Synthetic oligonucleotide
  source 1..21: mol_type = other DNA
ggttctcagattcctcgtatt

SEQ ID NO: 36929 - DNA, 21 bp, synthetic construct
  misc_feature 1..21: note = Description of Artificial Sequence: Synthetic oligonucleotide
  source 1..21: mol_type = other DNA
gacagaggcagacccgccggc

SEQ ID NO: 36930 - DNA, 21 bp, synthetic construct
  misc_feature 1..21: note = Description of Artificial Sequence: Synthetic oligonucleotide
  source 1..21: mol_type = other DNA
tctgattctcgtaatacgaat

SEQ ID NO: 36931 - DNA, 21 bp, synthetic construct
  misc_feature 1..21: note = Description of Artificial Sequence: Synthetic oligonucleotide
  source 1..21: mol_type = other DNA
tcgcgtacgcagtcttattgt

SEQ ID NO: 36932 - DNA, 21 bp, synthetic construct
  misc_feature 1..21: note = Description of Artificial Sequence: Synthetic oligonucleotide
  source 1..21: mol_type = other DNA
aataatcctaagaatgctgtt

SEQ ID NO: 36933 - DNA, 21 bp, synthetic construct
  misc_feature 1..21: note = Description of Artificial Sequence: Synthetic oligonucleotide
  source 1..21: mol_type = other DNA
cccagcagcggccacagcaga

SEQ ID NO: 36934 - DNA, 21 bp, synthetic construct
  misc_feature 1..21: note = Description of Artificial Sequence: Synthetic oligonucleotide
  source 1..21: mol_type = other DNA
ctcctcagcaacagcttcaaa

SEQ ID NO: 36935 - DNA, 21 bp, synthetic construct
  misc_feature 1..21: note = Description of Artificial Sequence: Synthetic oligonucleotide
  source 1..21: mol_type = other DNA
ccgttgggtgctacgtttgcg

SEQ ID NO: 36936 - DNA, 21 bp, synthetic construct
  misc_feature 1..21: note = Description of Artificial Sequence: Synthetic oligonucleotide
  source 1..21: mol_type = other DNA
cgtgttcctctttcgactatt

SEQ ID NO: 36937 - DNA, 21 bp, synthetic construct
  misc_feature 1..21: note = Description of Artificial Sequence: Synthetic oligonucleotide
  source 1..21: mol_type = other DNA
aatctgaagaatcaggttgct

SEQ ID NO: 36938 - DNA, 21 bp, synthetic construct
  misc_feature 1..21: note = Description of Artificial Sequence: Synthetic oligonucleotide
  source 1..21: mol_type = other DNA
gggttgcagagtcagtctcgt

SEQ ID NO: 36939 - DNA, 21 bp, synthetic construct
  misc_feature 1..21: note = Description of Artificial Sequence: Synthetic oligonucleotide
  source 1..21: mol_type = other DNA
gccagcagagccccccccggc

SEQ ID NO: 36940 - DNA, 21 bp, synthetic construct
  misc_feature 1..21: note = Description of Artificial Sequence: Synthetic oligonucleotide
  source 1..21: mol_type = other DNA
ggcaccgacagaaccctccac

SEQ ID NO: 36941 - DNA, 21 bp, synthetic construct
  misc_feature 1..21: note = Description of Artificial Sequence: Synthetic oligonucleotide
  source 1..21: mol_type = other DNA
aatagtttttctcggaatagt

SEQ ID NO: 36942 - DNA, 21 bp, synthetic construct
  misc_feature 1..21: note = Description of Artificial Sequence: Synthetic oligonucleotide
  source 1..21: mol_type = other DNA
tatattaagtctgttactaat

SEQ ID NO: 36943 - DNA, 21 bp, synthetic construct
  misc_feature 1..21: note = Description of Artificial Sequence: Synthetic oligonucleotide
  source 1..21: mol_type = other DNA
gtgctgcgtaatatttctaag

SEQ ID NO: 36944 - DNA, 21 bp, synthetic construct
  misc_feature 1..21: note = Description of Artificial Sequence: Synthetic oligonucleotide
  source 1..21: mol_type = other DNA
gccggccacagcggcagagac

SEQ ID NO: 36945 - DNA, 21 bp, synthetic construct
  misc_feature 1..21: note = Description of Artificial Sequence: Synthetic oligonucleotide
  source 1..21: mol_type = other DNA
cgggagctgaagaattcttcg

SEQ ID NO: 36946 - DNA, 21 bp, synthetic construct
  misc_feature 1..21: note = Description of Artificial Sequence: Synthetic oligonucleotide
  source 1..21: mol_type = other DNA
gctaggactaatatggtgaag

SEQ ID NO: 36947 - DNA, 21 bp, synthetic construct
  misc_feature 1..21: note = Description of Artificial Sequence: Synthetic oligonucleotide
  source 1..21: mol_type = other DNA
atccccgccaacagcttcaaa

SEQ ID NO: 36948 - DNA, 21 bp, synthetic construct
  misc_feature 1..21: note = Description of Artificial Sequence: Synthetic oligonucleotide
  source 1..21: mol_type = other DNA
cagactggttctaataataag

SEQ ID NO: 36949 - DNA, 21 bp, synthetic construct
  misc_feature 1..21: note = Description of Artificial Sequence: Synthetic oligonucleotide
  source 1..21: mol_type = other DNA
cggcagccgaagaaggattcg

SEQ ID NO: 36950 - DNA, 21 bp, synthetic construct
  misc_feature 1..21: note = Description of Artificial Sequence: Synthetic oligonucleotide
  source 1..21: mol_type = other DNA
aattcggggaggaattctgtt

SEQ ID NO: 36951 - DNA, 21 bp, synthetic construct
  misc_feature 1..21: note = Description of Artificial Sequence: Synthetic oligonucleotide
  source 1..21: mol_type = other DNA
agcttccccgtcggcgtcggc

SEQ ID NO: 36952 - DNA, 21 bp, synthetic construct
  misc_feature 1..21: note = Description of Artificial Sequence: Synthetic oligonucleotide
  source 1..21: mol_type = other DNA
gtcatggacgtccaacacaga

SEQ ID NO: 36953 - DNA, 21 bp, synthetic construct
  misc_feature 1..21: note = Description of Artificial Sequence: Synthetic oligonucleotide
  source 1..21: mol_type = other DNA
tctattacgtctgttactaat

SEQ ID NO: 36954 - DNA, 21 bp, synthetic construct
  misc_feature 1..21: note = Description of Artificial Sequence: Synthetic oligonucleotide
  source 1..21: mol_type = other DNA
aaagccggccaagaaagaacc

SEQ ID NO: 36955 - DNA, 21 bp, synthetic construct
  misc_feature 1..21: note = Description of Artificial Sequence: Synthetic oligonucleotide
  source 1..21: mol_type = other DNA
aaccccggcagacaacaattc

SEQ ID NO: 36956 - DNA, 21 bp, synthetic construct
  misc_feature 1..21: note = Description of Artificial Sequence: Synthetic oligonucleotide
  source 1..21: mol_type = other DNA
aagcttcctgattctaggttt

SEQ ID NO: 36957 - DNA, 21 bp, synthetic construct
  misc_feature 1..21: note = Description of Artificial Sequence: Synthetic oligonucleotide
  source 1..21: mol_type = other DNA
cataatctgtctctggtgaag

SEQ ID NO: 36958 - DNA, 21 bp, synthetic construct
  misc_feature 1..21: note = Description of Artificial Sequence: Synthetic oligonucleotide
  source 1..21: mol_type = other DNA
aatagtaatgggtttaataat

SEQ ID NO: 36959 - DNA, 21 bp, synthetic construct
  misc_feature 1..21: note = Description of Artificial Sequence: Synthetic oligonucleotide
  source 1..21: mol_type = other DNA
ccgatgggtactgggaggggc

SEQ ID NO: 36960 - DNA, 21 bp, synthetic construct
  misc_feature 1..21: note = Description of Artificial Sequence: Synthetic oligonucleotide
  source 1..21: mol_type = other DNA
gctcagacgaagggtactcag

SEQ ID NO: 36961 - DNA, 21 bp, synthetic construct
  misc_feature 1..21: note = Description of Artificial Sequence: Synthetic oligonucleotide
  source 1..21: mol_type = other DNA
accgccacccaaaaaggccaa

SEQ ID NO: 36962 - DNA, 21 bp, synthetic construct
  misc_feature 1..21: note = Description of Artificial Sequence: Synthetic oligonucleotide
  source 1..21: mol_type = other DNA
attcagacgcatactagtaat

SEQ ID NO: 36963 - DNA, 21 bp, synthetic construct
  misc_feature 1..21: note = Description of Artificial Sequence: Synthetic oligonucleotide
  source 1..21: mol_type = other DNA
aatttggggattcctaagggt

SEQ ID NO: 36964 - DNA, 21 bp, synthetic construct
  misc_feature 1..21: note = Description of Artificial Sequence: Synthetic oligonucleotide
  source 1..21: mol_type = other DNA
tctcctgctattcagaggagg

SEQ ID NO: 36965 - DNA, 21 bp, synthetic construct
  misc_feature 1..21: note = Description of Artificial Sequence: Synthetic oligonucleotide
  source 1..21: mol_type = other DNA
ggtagtaatgctattagtggt

SEQ ID NO: 36966 - DNA, 21 bp, synthetic construct
  misc_feature 1..21: note = Description of Artificial Sequence: Synthetic oligonucleotide
  source 1..21: mol_type = other DNA
tgtcttcattctaatgagggt

SEQ ID NO: 36967 - DNA, 21 bp, synthetic construct
  misc_feature 1..21: note = Description of Artificial Sequence: Synthetic oligonucleotide
  source 1..21: mol_type = other DNA
aggcgtgatgataaggatagg

SEQ ID NO: 36968 - DNA, 21 bp, synthetic construct
  misc_feature 1..21: note = Description of Artificial Sequence: Synthetic oligonucleotide
  source 1..21: mol_type = other DNA
cgtgttgttggtcagactact

SEQ ID NO: 36969 - DNA, 21 bp, synthetic construct
  misc_feature 1..21: note = Description of Artificial Sequence: Synthetic oligonucleotide
  source 1..21: mol_type = other DNA
caagacggcagcaaaggcaaa

SEQ ID NO: 36970 - DNA, 21 bp, synthetic construct
  misc_feature 1..21: note = Description of Artificial Sequence: Synthetic oligonucleotide
  source 1..21: mol_type = other DNA
actaggatgaataagcagact

SEQ ID NO: 36971 - DNA, 21 bp, synthetic construct
  misc_feature 1..21: note = Description of Artificial Sequence: Synthetic oligonucleotide
  source 1..21: mol_type = other DNA
atttctggtcagcagacgact

SEQ ID NO: 36972 - DNA, 21 bp, synthetic construct
  misc_feature 1..21: note = Description of Artificial Sequence: Synthetic oligonucleotide
  source 1..21: mol_type = other DNA
cacgtcgtcgaacaattcaaa

SEQ ID NO: 36973 - DNA, 21 bp, synthetic construct
  misc_feature 1..21: note = Description of Artificial Sequence: Synthetic oligonucleotide
  source 1..21: mol_type = other DNA
attccttcgcggaatctgtct

SEQ ID NO: 36974 - DNA, 21 bp, synthetic construct
  misc_feature 1..21: note = Description of Artificial Sequence: Synthetic oligonucleotide
  source 1..21: mol_type = other DNA
aatcctgttaatacgaagtct

SEQ ID NO: 36975 - DNA, 21 bp, synthetic construct
  misc_feature 1..21: note = Description of Artificial Sequence: Synthetic oligonucleotide
  source 1..21: mol_type = other DNA
cgttattcgagggataatgtt

SEQ ID NO: 36976 - DNA, 21 bp, synthetic construct
  misc_feature 1..21: note = Description of Artificial Sequence: Synthetic oligonucleotide
  source 1..21: mol_type = other DNA
gggcagtatgggcgtacttcg

SEQ ID NO: 36977 - DNA, 21 bp, synthetic construct
  misc_feature 1..21: note = Description of Artificial Sequence: Synthetic oligonucleotide
  source 1..21: mol_type = other DNA
gatcggacgaatactcagagg

SEQ ID NO: 36978 - DNA, 21 bp, synthetic construct
  misc_feature 1..21: note = Description of Artificial Sequence: Synthetic oligonucleotide
  source 1..21: mol_type = other DNA
actaattctccgagtcctggg

SEQ ID NO: 36979 - DNA, 21 bp, synthetic construct
  misc_feature 1..21: note = Description of Artificial Sequence: Synthetic oligonucleotide
  source 1..21: mol_type = other DNA
aatccttcggagaagatgttg

SEQ ID NO: 36980 - DNA, 21 bp, synthetic construct
  misc_feature 1..21: note = Description of Artificial Sequence: Synthetic oligonucleotide
  source 1..21: mol_type = other DNA
gacgaaagcggcaaaagcaaa

SEQ ID NO: 36981 - DNA, 21 bp, synthetic construct
  misc_feature 1..21: note = Description of Artificial Sequence: Synthetic oligonucleotide
  source 1..21: mol_type = other DNA
cctcagcatagtgtttattcg

SEQ ID NO: 36982 - DNA, 21 bp, synthetic construct
  misc_feature 1..21: note = Description of Artificial Sequence: Synthetic oligonucleotide
  source 1..21: mol_type = other DNA
cgtcgtgctgagctgttgact

SEQ ID NO: 36983 - DNA, 21 bp, synthetic construct
  misc_feature 1..21: note = Description of Artificial Sequence: Synthetic oligonucleotide
  source 1..21: mol_type = other DNA
tgcccccaaagcagagaaaaa

SEQ ID NO: 36984 - DNA, 21 bp, synthetic construct
  misc_feature 1..21: note = Description of Artificial Sequence: Synthetic oligonucleotide
  source 1..21: mol_type = other DNA
aatggtcaggcgggtaatagg

SEQ ID NO: 36985 - DNA, 21 bp, synthetic construct
  misc_feature 1..21: note = Description of Artificial Sequence: Synthetic oligonucleotide
  source 1..21: mol_type = other DNA
accccccacgacggccaaaga

SEQ ID NO: 36986 - DNA, 21 bp, synthetic construct
  misc_feature 1..21: note = Description of Artificial Sequence: Synthetic oligonucleotide
  source 1..21: mol_type = other DNA
tctgcgagtccgagtattaag

SEQ ID NO: 36987 - DNA, 21 bp, synthetic construct
  misc_feature 1..21: note = Description of Artificial Sequence: Synthetic oligonucleotide
  source 1..21: mol_type = other DNA
tctgtttctgggaggcatatt

SEQ ID NO: 36988 - DNA, 21 bp, synthetic construct
  misc_feature 1..21: note = Description of Artificial Sequence: Synthetic oligonucleotide
  source 1..21: mol_type = other DNA
aatcatggtgctgcgcagggg

SEQ ID NO: 36989 - DNA, 21 bp, synthetic construct
  misc_feature 1..21: note = Description of Artificial Sequence: Synthetic oligonucleotide
  source 1..21: mol_type = other DNA
tctgctcagaagaatcttatt

SEQ ID NO: 36990 - DNA, 21 bp, synthetic construct
  misc_feature 1..21: note = Description of Artificial Sequence: Synthetic oligonucleotide
  source 1..21: mol_type = other DNA
ggtcatgggggtcagtctagg

SEQ ID NO: 36991 - DNA, 21 bp, synthetic construct
  misc_feature 1..21: note = Description of Artificial Sequence: Synthetic oligonucleotide
  source 1..21: mol_type = other DNA
atgaatatgcggagtactcat

SEQ ID NO: 36992 - DNA, 21 bp, synthetic construct
  misc_feature 1..21: note = Description of Artificial Sequence: Synthetic oligonucleotide
  source 1..21: mol_type = other DNA
caagacaaacacaaccccggc

SEQ ID NO: 36993 - DNA, 21 bp, synthetic construct
  misc_feature 1..21: note = Description of Artificial Sequence: Synthetic oligonucleotide
  source 1..21: mol_type = other DNA
aactgttctggacagaatcaa

SEQ ID NO: 36994 - DNA, 21 bp, synthetic construct
  misc_feature 1..21: note = Description of Artificial Sequence: Synthetic oligonucleotide
  source 1..21: mol_type = other DNA
agtgtgggtagtggttataag

SEQ ID NO: 36995 - DNA, 21 bp, synthetic construct
  misc_feature 1..21: note = Description of Artificial Sequence: Synthetic oligonucleotide
  source 1..21: mol_type = other DNA
ggcagaggcaaagactacaga

SEQ ID NO: 36996 - DNA, 21 bp, synthetic construct
  misc_feature 1..21: note = Description of Artificial Sequence: Synthetic oligonucleotide
  source 1..21: mol_type = other DNA
cctgcgcatcgtaggagtgag

SEQ ID NO: 36997 - DNA, 21 bp, synthetic construct
  misc_feature 1..21: note = Description of Artificial Sequence: Synthetic oligonucleotide
  source 1..21: mol_type = other DNA
aacgacgtcaaacaaggccac

SEQ ID NO: 36998 - DNA, 21 bp, synthetic construct
  misc_feature 1..21: note = Description of Artificial Sequence: Synthetic oligonucleotide
  source 1..21: mol_type = other DNA
ggtatgaagggtagtgttaat

SEQ ID NO: 36999 - DNA, 21 bp, synthetic construct
  misc_feature 1..21: note = Description of Artificial Sequence: Synthetic oligonucleotide
  source 1..21: mol_type = other DNA
cacaccagccccggcaaaaac

SEQ ID NO: 37000 - DNA, 21 bp, synthetic construct
  misc_feature 1..21: note = Description of Artificial Sequence: Synthetic oligonucleotide
  source 1..21: mol_type = other DNA
gggcttgcggcggggtttggg

SEQ ID NO: 37001 - DNA, 21 bp, synthetic construct
  misc_feature 1..21: note = Description of Artificial Sequence: Synthetic oligonucleotide
  source 1..21: mol_type = other DNA
gcgtcgctgcatcgtaataat

SEQ ID NO: 37002 - DNA, 21 bp, synthetic construct
  misc_feature 1..21: note = Description of Artificial Sequence: Synthetic oligonucleotide
  source 1..21: mol_type = other DNA
gatcgtagtcgtgttctgggg

SEQ ID NO: 37003 - DNA, 21 bp, synthetic construct
  misc_feature 1..21: note = Description of Artificial Sequence: Synthetic oligonucleotide
  source 1..21: mol_type = other DNA
cctggtgataggggtaaggtt

SEQ ID NO: 37004 - DNA, 21 bp, synthetic construct
  misc_feature 1..21: note = Description of Artificial Sequence: Synthetic oligonucleotide
  source 1..21: mol_type = other DNA
aagacttctgagactcgttcg

SEQ ID NO: 37005 - DNA, 21 bp, synthetic construct
  misc_feature 1..21: note = Description of Artificial Sequence: Synthetic oligonucleotide
  source 1..21: mol_type = other DNA
gttaaggtgacgcatcagcag

SEQ ID NO: 37006 - DNA, 21 bp, synthetic construct
  misc_feature 1..21: note = Description of Artificial Sequence: Synthetic oligonucleotide
  source 1..21: mol_type = other DNA
catagtactccgtcgactagg

SEQ ID NO: 37007 - DNA, 21 bp, synthetic construct
  misc_feature 1..21: note = Description of Artificial Sequence: Synthetic oligonucleotide
  source 1..21: mol_type = other DNA
gctctgaataatcatcgggcg

SEQ ID NO: 37008 - DNA, 21 bp, synthetic construct
  misc_feature 1..21: note = Description of Artificial Sequence: Synthetic oligonucleotide
  source 1..21: mol_type = other DNA
aattctattactcggagtagt

SEQ ID NO: 37009 - DNA, 21 bp, synthetic construct
  misc_feature 1..21: note = Description of Artificial Sequence: Synthetic oligonucleotide
  source 1..21: mol_type = other DNA
cccaacagaaccagcagctac

SEQ ID NO: 37010 - DNA, 21 bp, synthetic construct
  misc_feature 1..21: note = Description of Artificial Sequence: Synthetic oligonucleotide
  source 1..21: mol_type = other DNA
agacccgaaagcagctacagc

SEQ ID NO: 37011 - DNA, 21 bp, synthetic construct
  misc_feature 1..21: note = Description of Artificial Sequence: Synthetic oligonucleotide
  source 1..21: mol_type = other DNA
gccctcgccaacccccaaacc

SEQ ID NO: 37012 - DNA, 21 bp, synthetic construct
  misc_feature 1..21: note = Description of Artificial Sequence: Synthetic oligonucleotide
  source 1..21: mol_type = other DNA
tgtaataatgctcgtgtttcg

SEQ ID NO: 37013 - DNA, 21 bp, synthetic construct
  misc_feature 1..21: note = Description of Artificial Sequence: Synthetic oligonucleotide
  source 1..21: mol_type = other DNA
catcgtgatcaggtttcgctt

SEQ ID NO: 37014 - DNA, 21 bp, synthetic construct
  misc_feature 1..21: note = Description of Artificial Sequence: Synthetic oligonucleotide
  source 1..21: mol_type = other DNA
aggggtaatgagaatattaat

SEQ ID NO: 37015 - DNA, 21 bp, synthetic construct
  misc_feature 1..21: note = Description of Artificial Sequence: Synthetic oligonucleotide
  source 1..21: mol_type = other DNA
caaatcaaaaccatcagcgcc

SEQ ID NO: 37016 - DNA, 21 bp, synthetic construct
  misc_feature 1..21: note = Description of Artificial Sequence: Synthetic oligonucleotide
  source 1..21: mol_type = other DNA
gatattcggaatctgcagcgg

SEQ ID NO: 37017 - DNA, 21 bp, synthetic construct
  misc_feature 1..21: note = Description of Artificial Sequence: Synthetic oligonucleotide
  source 1..21: mol_type = other DNA
atgcttacggtgccgcagcag

SEQ ID NO: 37018 - DNA, 21 bp, synthetic construct
  misc_feature 1..21: note = Description of Artificial Sequence: Synthetic oligonucleotide
  source 1..21: mol_type = other DNA
ctccaaagcggcggccacaga

SEQ ID NO: 37019 - DNA, 21 bp, synthetic construct
  misc_feature 1..21: note = Description of Artificial Sequence: Synthetic oligonucleotide
  source 1..21: mol_type = other DNA
ggtccgattcggccgattcag

SEQ ID NO: 37020 - DNA, 21 bp, synthetic construct
  misc_feature 1..21: note = Description of Artificial Sequence: Synthetic oligonucleotide
  source 1..21: mol_type = other DNA
gtttcgaatggtcagaatcct

SEQ ID NO: 37021 - DNA, 21 bp, synthetic construct
  misc_feature 1..21: note = Description of Artificial Sequence: Synthetic oligonucleotide
  source 1..21: mol_type = other DNA
tgtcgtgggatttctggtaag

SEQ ID NO: 37022 - DNA, 21 bp, synthetic construct
  misc_feature 1..21: note = Description of Artificial Sequence: Synthetic oligonucleotide
  source 1..21: mol_type = other DNA
tttacttatgcggaggggaat

SEQ ID NO: 37023 - DNA, 21 bp, synthetic construct
  misc_feature 1..21: note = Description of Artificial Sequence: Synthetic oligonucleotide
  source 1..21: mol_type = other DNA
ttgacgacgcatggtatgaag

SEQ ID NO: 37024 - DNA, 21 bp, synthetic construct
  misc_feature 1..21: note = Description of Artificial Sequence: Synthetic oligonucleotide
  source 1..21: mol_type = other DNA
gctcttttgaatattaatact

SEQ ID NO: 37025 - DNA, 21 bp, synthetic construct
  misc_feature 1..21: note = Description of Artificial Sequence: Synthetic oligonucleotide
  source 1..21: mol_type = other DNA
cttacgtttaattcgtctggt

SEQ ID NO: 37026 - DNA, 21 bp, synthetic construct
  misc_feature 1..21: note = Description of Artificial Sequence: Synthetic oligonucleotide
  source 1..21: mol_type = other DNA
actggggattcgcctctggct

SEQ ID NO: 37027 - DNA, 21 bp, synthetic construct
  misc_feature 1..21: note = Description of Artificial Sequence: Synthetic oligonucleotide
  source 1..21: mol_type = other DNA
tttcattctagggatagttct

SEQ ID NO: 37028 - DNA, 21 bp, synthetic construct
  misc_feature 1..21: note = Description of Artificial Sequence: Synthetic oligonucleotide
  source 1..21: mol_type = other DNA
gtcaaaaccgccagagccacc

SEQ ID NO: 37029 - DNA, 21 bp, synthetic construct
  misc_feature 1..21: note = Description of Artificial Sequence: Synthetic oligonucleotide
  source 1..21: mol_type = other DNA
ggcaccgccagaaccaccggc

SEQ ID NO: 37030 - DNA, 21 bp, synthetic construct
  misc_feature 1..21: note = Description of Artificial Sequence: Synthetic oligonucleotide
  source 1..21: mol_type = other DNA
cagcatattcagttgagtagg

SEQ ID NO: 37031 - DNA, 21 bp, synthetic construct
  misc_feature 1..21: note = Description of Artificial Sequence: Synthetic oligonucleotide
  source 1..21: mol_type = other DNA
tctaagttgcgtacgtctact

SEQ ID NO: 37032 - DNA, 21 bp, synthetic construct
  misc_feature 1..21: note = Description of Artificial Sequence: Synthetic oligonucleotide
  source 1..21: mol_type = other DNA
actcggagtaaggagagtcct

SEQ ID NO: 37033 - DNA, 21 bp, synthetic construct
  misc_feature 1..21: note = Description of Artificial Sequence: Synthetic oligonucleotide
  source 1..21: mol_type = other DNA
ttgcctacgggtaagatgttg

SEQ ID NO: 37034 - DNA, 21 bp, synthetic construct
  misc_feature 1..21: note = Description of Artificial Sequence: Synthetic oligonucleotide
  source 1..21: mol_type = other DNA
atgggcacccacagcatcggc

SEQ ID NO: 37035 - DNA, 21 bp, synthetic construct
  misc_feature 1..21: note = Description of Artificial Sequence: Synthetic oligonucleotide
  source 1..21: mol_type = other DNA
aagtctagttctggttggact

SEQ ID NO: 37036 - DNA, 21 bp, synthetic construct
  misc_feature 1..21: note = Description of Artificial Sequence: Synthetic oligonucleotide
  source 1..21: mol_type = other DNA
agcatcaccggcaacagaacc

SEQ ID NO: 37037 - DNA, 21 bp, synthetic construct
  misc_feature 1..21: note = Description of Artificial Sequence: Synthetic oligonucleotide
  source 1..21: mol_type = other DNA
atgaatttgagtactgagcgt

SEQ ID NO: 37038 - DNA, 21 bp, synthetic construct
  misc_feature 1..21: note = Description of Artificial Sequence: Synthetic oligonucleotide
  source 1..21: mol_type = other DNA
ggtcagagtctgtcggttatt

SEQ ID NO: 37039 - DNA, 21 bp, synthetic construct
  misc_feature 1..21: note = Description of Artificial Sequence: Synthetic oligonucleotide
  source 1..21: mol_type = other DNA
aaaaacgccaccggcatcctc

SEQ ID NO: 37040 - DNA, 21 bp, synthetic construct
  misc_feature 1..21: note = Description of Artificial Sequence: Synthetic oligonucleotide
  source 1..21: mol_type = other DNA
cccctcagagaactcaaaccc

SEQ ID NO: 37041 - DNA, 21 bp, synthetic construct
  misc_feature 1..21: note = Description of Artificial Sequence: Synthetic oligonucleotide
  source 1..21: mol_type = other DNA
agtctgtctacgttgacgctt

SEQ ID NO: 37042 - DNA, 21 bp, synthetic construct
  misc_feature 1..21: note = Description of Artificial Sequence: Synthetic oligonucleotide
  source 1..21: mol_type = other DNA
caagccaaaggcagcagagac

SEQ ID NO: 37043 - DNA, 21 bp, synthetic construct
  misc_feature 1..21: note = Description of Artificial Sequence: Synthetic oligonucleotide
  source 1..21: mol_type = other DNA
aagagggttacttatacggat

SEQ ID NO: 37044 - DNA, 21 bp, synthetic construct
  misc_feature 1..21: note = Description of Artificial Sequence: Synthetic oligonucleotide
  source 1..21: mol_type = other DNA
acccacctcaccggcgtccaa

SEQ ID NO: 37045 - DNA, 21 bp, synthetic construct
  misc_feature 1..21: note = Description of Artificial Sequence: Synthetic oligonucleotide
  source 1..21: mol_type = other DNA
gggcatacggctaggttgtat

SEQ ID NO: 37046 - DNA, 21 bp, synthetic construct
  misc_feature 1..21: note = Description of Artificial Sequence: Synthetic oligonucleotide
  source 1..21: mol_type = other DNA
tttgtgaagacgcatagtgcg

SEQ ID NO: 37047 - DNA, 21 bp, synthetic construct
  misc_feature 1..21: note = Description of Artificial Sequence: Synthetic oligonucleotide
  source 1..21: mol_type = other DNA
cctggtagtgtgactgggtct

SEQ ID NO: 37048 - DNA, 21 bp, synthetic construct
  misc_feature 1..21: note = Description of Artificial Sequence: Synthetic oligonucleotide
  source 1..21: mol_type = other DNA
cagacgggtactagttctact

SEQ ID NO: 37049 - DNA, 21 bp, synthetic construct
  misc_feature 1..21: note = Description of Artificial Sequence: Synthetic oligonucleotide
  source 1..21: mol_type = other DNA
agcaacaacggcacccaaaaa

SEQ ID NO: 37050 - DNA, 21 bp, synthetic construct
  misc_feature 1..21: note = Description of Artificial Sequence: Synthetic oligonucleotide
  source 1..21: mol_type = other DNA
cttggtactagtccgatgaag

SEQ ID NO: 37051 - DNA, 21 bp, synthetic construct
  misc_feature 1..21: note = Description of Artificial Sequence: Synthetic oligonucleotide
  source 1..21: mol_type = other DNA
accagaggccaaaaaccccaa

SEQ ID NO: 37052 - DNA, 21 bp, synthetic construct
  misc_feature 1..21: note = Description of Artificial Sequence: Synthetic oligonucleotide
  source 1..21: mol_type = other DNA
ggtcatagttcgaataatgct

SEQ ID NO: 37053 - DNA, 21 bp, synthetic construct
  misc_feature 1..21: note = Description of Artificial Sequence: Synthetic oligonucleotide
  source 1..21: mol_type = other DNA
gctaggggtgcttctactaat

SEQ ID NO: 37054 - DNA, 21 bp, synthetic construct
  misc_feature 1..21: note = Description of Artificial Sequence: Synthetic oligonucleotide
  source 1..21: mol_type = other DNA
atgaggcaggatacgagtaag

SEQ ID NO: 37055 - DNA, 21 bp, synthetic construct
  misc_feature 1..21: note = Description of Artificial Sequence: Synthetic oligonucleotide
  source 1..21: mol_type = other DNA
cgtgcttctggtgttactaat

SEQ ID NO: 37056 - DNA, 21 bp, synthetic construct
  misc_feature 1..21: note = Description of Artificial Sequence: Synthetic oligonucleotide
  source 1..21: mol_type = other DNA
ttgggggctagtactattttg

SEQ ID NO: 37057 - DNA, 21 bp, synthetic construct
  misc_feature 1..21: note = Description of Artificial Sequence: Synthetic oligonucleotide
  source 1..21: mol_type = other DNA
tatggggggttgcataatcct

SEQ ID NO: 37058 - DNA, 21 bp, synthetic construct
  misc_feature 1..21: note = Description of Artificial Sequence: Synthetic oligonucleotide
  source 1..21: mol_type = other DNA
gattctggttcttcgacgaag

SEQ ID NO: 37059 - DNA, 21 bp, synthetic construct
  misc_feature 1..21: note = Description of Artificial Sequence: Synthetic oligonucleotide
  source 1..21: mol_type = other DNA
gaagccagaaaagtcaccagc

SEQ ID NO: 37060 - DNA, 21 bp, synthetic construct
  misc_feature 1..21: note = Description of Artificial Sequence: Synthetic oligonucleotide
  source 1..21: mol_type = other DNA
gagtatcctcagcaggcgaag

SEQ ID NO: 37061 - DNA, 21 bp, synthetic construct
  misc_feature 1..21: note = Description of Artificial Sequence: Synthetic oligonucleotide
  source 1..21: mol_type = other DNA
ggtcagaggggtgatcatctt

SEQ ID NO: 37062 - DNA, 21 bp, synthetic construct
  misc_feature 1..21: note = Description of Artificial Sequence: Synthetic oligonucleotide
  source 1..21: mol_type = other DNA
tcttcgaggactgattcgccg

SEQ ID NO: 37063 - DNA, 21 bp, synthetic construct
  misc_feature 1..21: note = Description of Artificial Sequence: Synthetic oligonucleotide
  source 1..21: mol_type = other DNA
ctcaacgccggcaacaccaga

SEQ ID NO: 37064 - DNA, 21 bp, synthetic construct
  misc_feature 1..21: note = Description of Artificial Sequence: Synthetic oligonucleotide
  source 1..21: mol_type = other DNA
ccggggcagaagcagggtatt

SEQ ID NO: 37065 - DNA, 21 bp, synthetic construct
  misc_feature 1..21: note = Description of Artificial Sequence: Synthetic oligonucleotide
  source 1..21: mol_type = other DNA
tcgcggtattctggtcattct

SEQ ID NO: 37066 - DNA, 21 bp, synthetic construct
  misc_feature 1..21: note = Description of Artificial Sequence: Synthetic oligonucleotide
  source 1..21: mol_type = other DNA
cctgttctgggtacgatttct

SEQ ID NO: 37067 - DNA, 21 bp, synthetic construct
  misc_feature 1..21: note = Description of Artificial Sequence: Synthetic oligonucleotide
  source 1..21: mol_type = other DNA
cagaggccgagtacgggtaat

SEQ ID NO: 37068 - DNA, 21 bp, synthetic construct
  misc_feature 1..21: note = Description of Artificial Sequence: Synthetic oligonucleotide
  source 1..21: mol_type = other DNA
aggattgcgggtccgacggtg

SEQ ID NO: 37069 - DNA, 21 bp, synthetic construct
  misc_feature 1..21: note = Description of Artificial Sequence: Synthetic oligonucleotide
  source 1..21: mol_type = other DNA
caaaccagcagccacgcctac

SEQ ID NO: 37070 - DNA, 21 bp, synthetic construct
  misc_feature 1..21: note = Description of Artificial Sequence: Synthetic oligonucleotide
  source 1..21: mol_type = other DNA
aacggcaccagacaaaaccaa

SEQ ID NO: 37071 - DNA, 21 bp, synthetic construct
  misc_feature 1..21: note = Description of Artificial Sequence: Synthetic oligonucleotide
  source 1..21: mol_type = other DNA
aatgcgaatccgtctttgagg

SEQ ID NO: 37072 - DNA, 21 bp, synthetic construct
  misc_feature 1..21: note = Description of Artificial Sequence: Synthetic oligonucleotide
  source 1..21: mol_type = other DNA
ttcaacgaacaaagagtcagc

SEQ ID NO: 37073 - DNA, 21 bp, synthetic construct
  misc_feature 1..21: note = Description of Artificial Sequence: Synthetic oligonucleotide
  source 1..21: mol_type = other DNA
agggttattactccttctacg

SEQ ID NO: 37074 - DNA, 21 bp, synthetic construct
  misc_feature 1..21: note = Description of Artificial Sequence: Synthetic oligonucleotide
  source 1..21: mol_type = other DNA
gagcctgttacttctaagtct

SEQ ID NO: 37075 - DNA, 21 bp, synthetic construct
  misc_feature 1..21: note = Description of Artificial Sequence: Synthetic oligonucleotide
  source 1..21: mol_type = other DNA
agcaacgtcgccaaaagaacc

SEQ ID NO: 37076 - DNA, 21 bp, synthetic construct
  misc_feature 1..21: note = Description of Artificial Sequence: Synthetic oligonucleotide
  source 1..21: mol_type = other DNA
cagcgtaagtcgggtacgagt

SEQ ID NO: 37077 - DNA, 21 bp, synthetic construct
  misc_feature 1..21: note = Description of Artificial Sequence: Synthetic oligonucleotide
  source 1..21: mol_type = other DNA
aaaggcaaaagcaccgacccc

SEQ ID NO: 37078 - DNA, 21 bp, synthetic construct
  misc_feature 1..21: note = Description of Artificial Sequence: Synthetic oligonucleotide
  source 1..21: mol_type = other DNA
cagtatatgggggctaattct

SEQ ID NO: 37079 - DNA, 21 bp, synthetic construct
  misc_feature 1..21: note = Description of Artificial Sequence: Synthetic oligonucleotide
  source 1..21: mol_type = other DNA
tcgagtgatcagcctaggctt

SEQ ID NO: 37080 - DNA, 21 bp, synthetic construct
  misc_feature 1..21: note = Description of Artificial Sequence: Synthetic oligonucleotide
  source 1..21: mol_type = other DNA
ggtttttcgtcgcagcagcgg

SEQ ID NO: 37081 - DNA, 21 bp, synthetic construct
  misc_feature 1..21: note = Description of Artificial Sequence: Synthetic oligonucleotide
  source 1..21: mol_type = other DNA
tgccacaaaagacccggcgaa

SEQ ID NO: 37082 - DNA, 21 bp, synthetic construct
  misc_feature 1..21: note = Description of Artificial Sequence: Synthetic oligonucleotide
  source 1..21: mol_type = other DNA
gattcgactcttggtcagtct

SEQ ID NO: 37083 - DNA, 21 bp, synthetic construct
  misc_feature 1..21: note = Description of Artificial Sequence: Synthetic oligonucleotide
  source 1..21: mol_type = other DNA
ccggggagggagaagacggtg

SEQ ID NO: 37084 - DNA, 21 bp, synthetic construct
  misc_feature 1..21: note = Description of Artificial Sequence: Synthetic oligonucleotide
  source 1..21: mol_type = other DNA
gcggagtctggtggtagtagg

SEQ ID NO: 37085 - DNA, 21 bp, synthetic construct
  misc_feature 1..21: note = Description of Artificial Sequence: Synthetic oligonucleotide
  source 1..21: mol_type = other DNA
cttagggatacgaatatgaat

SEQ ID NO: 37086 - DNA, 21 bp, synthetic construct
  misc_feature 1..21: note = Description of Artificial Sequence: Synthetic oligonucleotide
  source 1..21: mol_type = other DNA
tgtccgagtacgaagagttgt

SEQ ID NO: 37087 - DNA, 21 bp, synthetic construct
  misc_feature 1..21: note = Description of Artificial Sequence: Synthetic oligonucleotide
  source 1..21: mol_type = other DNA
cacagcagcagcaaaatccac

SEQ ID NO: 37088 - DNA, 21 bp, synthetic construct
  misc_feature 1..21: note = Description of Artificial Sequence: Synthetic oligonucleotide
  source 1..21: mol_type = other DNA
ggcctccaaaccccccccaga

SEQ ID NO: 37089 - DNA, 21 bp, synthetic construct
  misc_feature 1..21: note = Description of Artificial Sequence: Synthetic oligonucleotide
  source 1..21: mol_type = other DNA
gagagtaattcgagtcggggg

SEQ ID NO: 37090 - DNA, 21 bp, synthetic construct
  misc_feature 1..21: note = Description of Artificial Sequence: Synthetic oligonucleotide
  source 1..21: mol_type = other DNA
gttactacggggggttctaag

SEQ ID NO: 37091 - DNA, 21 bp, synthetic construct
  misc_feature 1..21: note = Description of Artificial Sequence: Synthetic oligonucleotide
  source 1..21: mol_type = other DNA
ggcagcctcgacaacagaaaa

SEQ ID NO: 37092 - DNA, 21 bp, synthetic construct
  misc_feature 1..21: note = Description of Artificial Sequence: Synthetic oligonucleotide
  source 1..21: mol_type = other DNA
aacggcgtccaacaacccaaa

SEQ ID NO: 37093 - DNA, 21 bp, synthetic construct
  misc_feature 1..21: note = Description of Artificial Sequence: Synthetic oligonucleotide
  source 1..21: mol_type = other DNA
caacccagccaaggccacagc

SEQ ID NO: 37094 - DNA, 21 bp, synthetic construct
  misc_feature 1..21: note = Description of Artificial Sequence: Synthetic oligonucleotide
  source 1..21: mol_type = other DNA
ggtacggataataatacgagg

SEQ ID NO: 37095 - DNA, 21 bp, synthetic construct
  misc_feature 1..21: note = Description of Artificial Sequence: Synthetic oligonucleotide
  source 1..21: mol_type = other DNA
catcagcctcatcagaatcag

SEQ ID NO: 37096 - DNA, 21 bp, synthetic construct
  misc_feature 1..21: note = Description of Artificial Sequence: Synthetic oligonucleotide
  source 1..21: mol_type = other DNA
tctacggcttctgtgaatcag

SEQ ID NO: 37097 - DNA, 21 bp, synthetic construct
  misc_feature 1..21: note = Description of Artificial Sequence: Synthetic oligonucleotide
  source 1..21: mol_type = other DNA
aatagtgcgaataagactccg

SEQ ID NO: 37098 - DNA, 21 bp, synthetic construct
  misc_feature 1..21: note = Description of Artificial Sequence: Synthetic oligonucleotide
  source 1..21: mol_type = other DNA
aacagaagcaccgacttcaaa

SEQ ID NO: 37099 - DNA, 21 bp, synthetic construct
  misc_feature 1..21: note = Description of Artificial Sequence: Synthetic oligonucleotide
  source 1..21: mol_type = other DNA
cttaatattgctaatagtaag

SEQ ID NO: 37100 - DNA, 21 bp, synthetic construct
  misc_feature 1..21: note = Description of Artificial Sequence: Synthetic oligonucleotide
  source 1..21: mol_type = other DNA
tacaaccaacccgtcggcaaa

SEQ ID NO: 37101 - DNA, 21 bp, synthetic construct
  misc_feature 1..21: note = Description of Artificial Sequence: Synthetic oligonucleotide
  source 1..21: mol_type = other DNA
aatttgggtaattctctgaag

SEQ ID NO: 37102 - DNA, 21 bp, synthetic construct
  misc_feature 1..21: note = Description of Artificial Sequence: Synthetic oligonucleotide
  source 1..21: mol_type = other DNA
gggcctaatccgggtaatcat

SEQ ID NO: 37103 - DNA, 21 bp, synthetic construct
  misc_feature 1..21: note = Description of Artificial Sequence: Synthetic oligonucleotide
  source 1..21: mol_type = other DNA
atgggtgggcatacgcatacg

SEQ ID NO: 37104 - DNA, 21 bp, synthetic construct
  misc_feature 1..21: note = Description of Artificial Sequence: Synthetic oligonucleotide
  source 1..21: mol_type = other DNA
cagtcggggtcgaagcctggg

SEQ ID NO: 37105 - DNA, 21 bp, synthetic construct
  misc_feature 1..21: note = Description of Artificial Sequence: Synthetic oligonucleotide
  source 1..21: mol_type = other DNA
tctaatgattcgaataagaag

SEQ ID NO: 37106 - DNA, 21 bp, synthetic construct
  misc_feature 1..21: note = Description of Artificial Sequence: Synthetic oligonucleotide
  source 1..21: mol_type = other DNA
tcttcgcaggcggtttttcgg

SEQ ID NO: 37107 - DNA, 21 bp, synthetic construct
  misc_feature 1..21: note = Description of Artificial Sequence: Synthetic oligonucleotide
  source 1..21: mol_type = other DNA
agccacgacaacggccaaagc

SEQ ID NO: 37108 - DNA, 21 bp, synthetic construct
  misc_feature 1..21: note = Description of Artificial Sequence: Synthetic oligonucleotide
  source 1..21: mol_type = other DNA
ttcagaagcaaagaaagcgcc

SEQ ID NO: 37109 - DNA, 21 bp, synthetic construct
  misc_feature 1..21: note = Description of Artificial Sequence: Synthetic oligonucleotide
  source 1..21: mol_type = other DNA
caaggcagcagcaaaaccacc

SEQ ID NO: 37110 - DNA, 21 bp, synthetic construct
  misc_feature 1..21: note = Description of Artificial Sequence: Synthetic oligonucleotide
  source 1..21: mol_type = other DNA
actggtcagcagccggctact

SEQ ID NO: 37111 - DNA, 21 bp, synthetic construct
  misc_feature 1..21: note = Description of Artificial Sequence: Synthetic oligonucleotide
  source 1..21: mol_type = other DNA
acgaataggaatacgtatgtt

SEQ ID NO: 37112 - DNA, 21 bp, synthetic construct
  misc_feature 1..21: note = Description of Artificial Sequence: Synthetic oligonucleotide
  source 1..21: mol_type = other DNA
gctctgcagtataaggctagt

SEQ ID NO: 37113 - DNA, 21 bp, synthetic construct
  misc_feature 1..21: note = Description of Artificial Sequence: Synthetic oligonucleotide
  source 1..21: mol_type = other DNA
ggtagtaataggaatcctctt

SEQ ID NO: 37114 - DNA, 21 bp, synthetic construct
  misc_feature 1..21: note = Description of Artificial Sequence: Synthetic oligonucleotide
  source 1..21: mol_type = other DNA
gggactgttcctaagcctcgt

SEQ ID NO: 37115 - DNA, 21 bp, synthetic construct
  misc_feature 1..21: note = Description of Artificial Sequence: Synthetic oligonucleotide
  source 1..21: mol_type = other DNA
ggtactggtaattctaatctt

SEQ ID NO: 37116 - DNA, 21 bp, synthetic construct
  misc_feature 1..21: note = Description of Artificial Sequence: Synthetic oligonucleotide
  source 1..21: mol_type = other DNA
aatcgggagtcgccgcagagg

SEQ ID NO: 37117 - DNA, 21 bp, synthetic construct
  misc_feature 1..21: note = Description of Artificial Sequence: Synthetic oligonucleotide
  source 1..21: mol_type = other DNA
tcgtcgacggtgaagagtggt

SEQ ID NO: 37118 - DNA, 21 bp, synthetic construct
  misc_feature 1..21: note = Description of Artificial Sequence: Synthetic oligonucleotide
  source 1..21: mol_type = other DNA
ttcaacatgcaaagaagccaa

SEQ ID NO: 37119 - DNA, 21 bp, synthetic construct
  misc_feature 1..21: note = Description of Artificial Sequence: Synthetic oligonucleotide
  source 1..21: mol_type = other DNA
cacagcgaaaacggcaacaga

SEQ ID NO: 37120 - DNA, 21 bp, synthetic construct
  misc_feature 1..21: note = Description of Artificial Sequence: Synthetic oligonucleotide
  source 1..21: mol_type = other DNA
tcgaatgagactaagtcttcg

SEQ ID NO: 37121 - DNA, 21 bp, synthetic construct
  misc_feature 1..21: note = Description of Artificial Sequence: Synthetic oligonucleotide
  source 1..21: mol_type = other DNA
cttcagccgtctgttattgct

SEQ ID NO: 37122 - DNA, 21 bp, synthetic construct
  misc_feature 1..21: note = Description of Artificial Sequence: Synthetic oligonucleotide
  source 1..21: mol_type = other DNA
aatgttgcttctaattattcg

SEQ ID NO: 37123 - DNA, 21 bp, synthetic construct
  misc_feature 1..21: note = Description of Artificial Sequence: Synthetic oligonucleotide
  source 1..21: mol_type = other DNA
atggatgggaggtcgactact

SEQ ID NO: 37124 - DNA, 21 bp, synthetic construct
  misc_feature 1..21: note = Description of Artificial Sequence: Synthetic oligonucleotide
  source 1..21: mol_type = other DNA
tctaggaatcctaatatgatt

SEQ ID NO: 37125 - DNA, 21 bp, synthetic construct
  misc_feature 1..21: note = Description of Artificial Sequence: Synthetic oligonucleotide
  source 1..21: mol_type = other DNA
aaattcccccccaacagcggc

SEQ ID NO: 37126 - DNA, 21 bp, synthetic construct
  misc_feature 1..21: note = Description of Artificial Sequence: Synthetic oligonucleotide
  source 1..21: mol_type = other DNA
tgtattagggctggttcttgt

SEQ ID NO: 37127 - DNA, 21 bp, synthetic construct
  misc_feature 1..21: note = Description of Artificial Sequence: Synthetic oligonucleotide
  source 1..21: mol_type = other DNA
gggtctcatattgcttatact

SEQ ID NO: 37128 - DNA, 21 bp, synthetic construct
  misc_feature 1..21: note = Description of Artificial Sequence: Synthetic oligonucleotide
  source 1..21: mol_type = other DNA
tcttcgtcggcgaagtctatt

SEQ ID NO: 37129 - DNA, 21 bp, synthetic construct
  misc_feature 1..21: note = Description of Artificial Sequence: Synthetic oligonucleotide
  source 1..21: mol_type = other DNA
gctgctcattcgactatgaat

SEQ ID NO: 37130 - DNA, 21 bp, synthetic construct
  misc_feature 1..21: note = Description of Artificial Sequence: Synthetic oligonucleotide
  source 1..21: mol_type = other DNA
tctgtggggtctggtgctttg

SEQ ID NO: 37131 - DNA, 21 bp, synthetic construct
  misc_feature 1..21: note = Description of Artificial Sequence: Synthetic oligonucleotide
  source 1..21: mol_type = other DNA
ccgaatggggcgcatgttacg

SEQ ID NO: 37132 - DNA, 21 bp, synthetic construct
  misc_feature 1..21: note = Description of Artificial Sequence: Synthetic oligonucleotide
  source 1..21: mol_type = other DNA
cccgacagaagacccctcgaa

SEQ ID NO: 37133 - DNA, 21 bp, synthetic construct
  misc_feature 1..21: note = Description of Artificial Sequence: Synthetic oligonucleotide
  source 1..21: mol_type = other DNA
tctgatcgtgggcagtctcat

SEQ ID NO: 37134 - DNA, 21 bp, synthetic construct
  misc_feature 1..21: note = Description of Artificial Sequence: Synthetic oligonucleotide
  source 1..21: mol_type = other DNA
tcgccggttaaggggtctgtt

SEQ ID NO: 37135 - DNA, 21 bp, synthetic construct
  misc_feature 1..21: note = Description of Artificial Sequence: Synthetic oligonucleotide
  source 1..21: mol_type = other DNA
gatgcgactaagaatcattcg

SEQ ID NO: 37136 - DNA, 21 bp, synthetic construct
  misc_feature 1..21: note = Description of Artificial Sequence: Synthetic oligonucleotide
  source 1..21: mol_type = other DNA
gagcgtctgactcgttcttct

SEQ ID NO: 37137 - DNA, 21 bp, synthetic construct
  misc_feature 1..21: note = Description of Artificial Sequence: Synthetic oligonucleotide
  source 1..21: mol_type = other DNA
gatagtcgtgcgggtgttcat

SEQ ID NO: 37138 - DNA, 21 bp, synthetic construct
  misc_feature 1..21: note = Description of Artificial Sequence: Synthetic oligonucleotide
  source 1..21: mol_type = other DNA
ggccaaaccggcgacatgaga

SEQ ID NO: 37139 - DNA, 21 bp, synthetic construct
  misc_feature 1..21: note = Description of Artificial Sequence: Synthetic oligonucleotide
  source 1..21: mol_type = other DNA
ggcagactcgaagcccaaaaa

SEQ ID NO: 37140 - DNA, 21 bp, synthetic construct
  misc_feature 1..21: note = Description of Artificial Sequence: Synthetic oligonucleotide
  source 1..21: mol_type = other DNA
tctagtggtttgtcgtcgtct

SEQ ID NO: 37141 - DNA, 21 bp, synthetic construct
  misc_feature 1..21: note = Description of Artificial Sequence: Synthetic oligonucleotide
  source 1..21: mol_type = other DNA
gatcctccgaagggtagtcgg

SEQ ID NO: 37142 - DNA, 21 bp, synthetic construct
  misc_feature 1..21: note = Description of Artificial Sequence: Synthetic oligonucleotide
  source 1..21: mol_type = other DNA
ggcgaccacaacagaatcaac

SEQ ID NO: 37143 - DNA, 21 bp, synthetic construct
  misc_feature 1..21: note = Description of Artificial Sequence: Synthetic oligonucleotide
  source 1..21: mol_type = other DNA
gccagcgccctcagaagccac

SEQ ID NO: 37144 - DNA, 21 bp, synthetic construct
  misc_feature 1..21: note = Description of Artificial Sequence: Synthetic oligonucleotide
  source 1..21: mol_type = other DNA
tacagcacccacctcaacaac

SEQ ID NO: 37145 - DNA, 21 bp, synthetic construct
  misc_feature 1..21: note = Description of Artificial Sequence: Synthetic oligonucleotide
  source 1..21: mol_type = other DNA
acttataatagtagtcaggcg

SEQ ID NO: 37146 - DNA, 21 bp, synthetic construct
  misc_feature 1..21: note = Description of Artificial Sequence: Synthetic oligonucleotide
  source 1..21: mol_type = other DNA
aacggttctagacagaatcaa

SEQ ID NO: 37147 - DNA, 21 bp, synthetic construct
  misc_feature 1..21: note = Description of Artificial Sequence: Synthetic oligonucleotide
  source 1..21: mol_type = other DNA
gttgtgcctgagaggtctaag

SEQ ID NO: 37148 - DNA, 21 bp, synthetic construct
  misc_feature 1..21: note = Description of Artificial Sequence: Synthetic oligonucleotide
  source 1..21: mol_type = other DNA
gttgggctgcagagtccggag

SEQ ID NO: 37149 - DNA, 21 bp, synthetic construct
  misc_feature 1..21: note = Description of Artificial Sequence: Synthetic oligonucleotide
  source 1..21: mol_type = other DNA
actattaagtctgttactaat

SEQ ID NO: 37150 - DNA, 21 bp, synthetic construct
  misc_feature 1..21: note = Description of Artificial Sequence: Synthetic oligonucleotide
  source 1..21: mol_type = other DNA
agaaacgacaaacaaaacagc

SEQ ID NO: 37151 - DNA, 21 bp, synthetic construct
  misc_feature 1..21: note = Description of Artificial Sequence: Synthetic oligonucleotide
  source 1..21: mol_type = other DNA
ggtgataaggggttgcagcgt

SEQ ID NO: 37152 - DNA, 21 bp, synthetic construct
  misc_feature 1..21: note = Description of Artificial Sequence: Synthetic oligonucleotide
  source 1..21: mol_type = other DNA
tgcagcagcgacacccacaga

SEQ ID NO: 37153 - DNA, 21 bp, synthetic construct
  misc_feature 1..21: note = Description of Artificial Sequence: Synthetic oligonucleotide
  source 1..21: mol_type = other DNA
tcggcggatcatattcggaat

SEQ ID NO: 37154 - DNA, 21 bp, synthetic construct
  misc_feature 1..21: note = Description of Artificial Sequence: Synthetic oligonucleotide
  source 1..21: mol_type = other DNA
aatgggattagtaagtctaat

SEQ ID NO: 37155 - DNA, 21 bp, synthetic construct
  misc_feature 1..21: note = Description of Artificial Sequence: Synthetic oligonucleotide
  source 1..21: mol_type = other DNA
agagccacccccctcagcggc

SEQ ID NO: 37156 - DNA, 21 bp, synthetic construct
  misc_feature 1..21: note = Description of Artificial Sequence: Synthetic oligonucleotide
  source 1..21: mol_type = other DNA
gacggcggcaaccaaagaagc

SEQ ID NO: 37157 - DNA, 21 bp, synthetic construct
  misc_feature 1..21: note = Description of Artificial Sequence: Synthetic oligonucleotide
  source 1..21: mol_type = other DNA
gtgagtgataatacttataag

SEQ ID NO: 37158 - DNA, 21 bp, synthetic construct
  misc_feature 1..21: note = Description of Artificial Sequence: Synthetic oligonucleotide
  source 1..21: mol_type = other DNA
aacgtttctggacagaatcaa

SEQ ID NO: 37159 - DNA, 21 bp, synthetic construct
  misc_feature 1..21: note = Description of Artificial Sequence: Synthetic oligonucleotide
  source 1..21: mol_type = other DNA
agtaatcaggttcgtcagatt

SEQ ID NO: 37160 - DNA, 21 bp, synthetic construct
  misc_feature 1..21: note = Description of Artificial Sequence: Synthetic oligonucleotide
  source 1..21: mol_type = other DNA
ccggggggtgataggttgagg

SEQ ID NO: 37161 - DNA, 21 bp, synthetic construct
  misc_feature 1..21: note = Description of Artificial Sequence: Synthetic oligonucleotide
  source 1..21: mol_type = other DNA
tttattaggacggcgtcgatt

SEQ ID NO: 37162 - DNA, 21 bp, synthetic construct
  misc_feature 1..21: note = Description of Artificial Sequence: Synthetic oligonucleotide
  source 1..21: mol_type = other DNA
agcatgcacgccctccaatgc

SEQ ID NO: 37163 - DNA, 21 bp, synthetic construct
  misc_feature 1..21: note = Description of Artificial Sequence: Synthetic oligonucleotide
  source 1..21: mol_type = other DNA
agaaccggcagctacacccaa

SEQ ID NO: 37164 - DNA, 21 bp, synthetic construct
  misc_feature 1..21: note = Description of Artificial Sequence: Synthetic oligonucleotide
  source 1..21: mol_type = other DNA
attattaagaaggatcaggtt

SEQ ID NO: 37165 - DNA, 21 bp, synthetic construct
  misc_feature 1..21: note = Description of Artificial Sequence: Synthetic oligonucleotide
  source 1..21: mol_type = other DNA
aggccggtggggggtctggcg

SEQ ID NO: 37166 - DNA, 21 bp, synthetic construct
  misc_feature 1..21: note = Description of Artificial Sequence: Synthetic oligonucleotide
  source 1..21: mol_type = other DNA
gggatgggtggtttgaagaat

SEQ ID NO: 37167 - DNA, 21 bp, synthetic construct
  misc_feature 1..21: note = Description of Artificial Sequence: Synthetic oligonucleotide
  source 1..21: mol_type = other DNA
ggtgtgattaataatgagcgg

SEQ ID NO: 37168 - DNA, 21 bp, synthetic construct
  misc_feature 1..21: note = Description of Artificial Sequence: Synthetic oligonucleotide
  source 1..21: mol_type = other DNA
atcatcagccaaaaaggcatg

SEQ ID NO: 37169 - DNA, 21 bp, synthetic construct
  misc_feature 1..21: note = Description of Artificial Sequence: Synthetic oligonucleotide
  source 1..21: mol_type = other DNA
ctcctcgaccaacccagaaac

SEQ ID NO: 37170 - DNA, 21 bp, synthetic construct
  misc_feature 1..21: note = Description of Artificial Sequence: Synthetic oligonucleotide
  source 1..21: mol_type = other DNA
ggggtgactgggtctcggggt

SEQ ID NO: 37171 - DNA, 21 bp, synthetic construct
  misc_feature 1..21: note = Description of Artificial Sequence: Synthetic oligonucleotide
  source 1..21: mol_type = other DNA
gaagtcaacaccagaagcaga

SEQ ID NO: 37172 - DNA, 21 bp, synthetic construct
  misc_feature 1..21: note = Description of Artificial Sequence: Synthetic oligonucleotide
  source 1..21: mol_type = other DNA
aataataattctggtagtggt

SEQ ID NO: 37173 - DNA, 21 bp, synthetic construct
  misc_feature 1..21: note = Description of Artificial Sequence: Synthetic oligonucleotide
  source 1..21: mol_type = other DNA
cttgctaagaatcctgtgatt

SEQ ID NO: 37174 - DNA, 21 bp, synthetic construct
  misc_feature 1..21: note = Description of Artificial Sequence: Synthetic oligonucleotide
  source 1..21: mol_type = other DNA
ccggggggtactacgaagggt

SEQ ID NO: 37175 - DNA, 21 bp, synthetic construct
  misc_feature 1..21: note = Description of Artificial Sequence: Synthetic oligonucleotide
  source 1..21: mol_type = other DNA
tggcgtagtcagcataattcg

SEQ ID NO: 37176 - DNA, 21 bp, synthetic construct
  misc_feature 1..21: note = Description of Artificial Sequence: Synthetic oligonucleotide
  source 1..21: mol_type = other DNA
tcgcagagttctcgtagtggt

SEQ ID NO: 37177 - DNA, 21 bp, synthetic construct
  misc_feature 1..21: note = Description of Artificial Sequence: Synthetic oligonucleotide
  source 1..21: mol_type = other DNA
ggtttgcatccgcctcgtact

SEQ ID NO: 37178 - DNA, 21 bp, synthetic construct
  misc_feature 1..21: note = Description of Artificial Sequence: Synthetic oligonucleotide
  source 1..21: mol_type = other DNA
ggccaagaaagaaccaacatg

SEQ ID NO: 37179 - DNA, 21 bp, synthetic construct
  misc_feature 1..21: note = Description of Artificial Sequence: Synthetic oligonucleotide
  source 1..21: mol_type = other DNA
tacctcggcaaagtccaagtc

SEQ ID NO: 37180 - DNA, 21 bp, synthetic construct
  misc_feature 1..21: note = Description of Artificial Sequence: Synthetic oligonucleotide
  source 1..21: mol_type = other DNA
tacgccgacggcgccagaaac

SEQ ID NO: 37181 - DNA, 21 bp, synthetic construct
  misc_feature 1..21: note = Description of Artificial Sequence: Synthetic oligonucleotide
  source 1..21: mol_type = other DNA
agtagggagcagggggttggg

SEQ ID NO: 37182 - DNA, 21 bp, synthetic construct
  misc_feature 1..21: note = Description of Artificial Sequence: Synthetic oligonucleotide
  source 1..21: mol_type = other DNA
agcaccagcatccccggcatg

SEQ ID NO: 37183 - DNA, 21 bp, synthetic construct
  misc_feature 1..21: note = Description of Artificial Sequence: Synthetic oligonucleotide
  source 1..21: mol_type = other DNA
ttgcatcctaaggggcagact

SEQ ID NO: 37184 - DNA, 21 bp, synthetic construct
  misc_feature 1..21: note = Description of Artificial Sequence: Synthetic oligonucleotide
  source 1..21: mol_type = other DNA
cccagaaccgacagaaacacc

SEQ ID NO: 37185 - DNA, 21 bp, synthetic construct
  misc_feature 1..21: note = Description of Artificial Sequence: Synthetic oligonucleotide
  source 1..21: mol_type = other DNA
cccagaagcctcagcaccagc

SEQ ID NO: 37186 - DNA, 21 bp, synthetic construct
  misc_feature 1..21: note = Description of Artificial Sequence: Synthetic oligonucleotide
  source 1..21: mol_type = other DNA
tttccgagtaatgggcggact

SEQ ID NO: 37187 - DNA, 21 bp, synthetic construct
  misc_feature 1..21: note = Description of Artificial Sequence: Synthetic oligonucleotide
  source 1..21: mol_type = other DNA
tcgatggcttcggcgtataag

SEQ ID NO: 37188 - DNA, 21 bp, synthetic construct
  misc_feature 1..21: note = Description of Artificial Sequence: Synthetic oligonucleotide
  source 1..21: mol_type = other DNA
ctcgacgccggcgtcgccaga

SEQ ID NO: 37189 - DNA, 21 bp, synthetic construct
  misc_feature 1..21: note = Description of Artificial Sequence: Synthetic oligonucleotide
  source 1..21: mol_type = other DNA
caccccagcaacaaacccctc

SEQ ID NO: 37190 - DNA, 21 bp, synthetic construct
  misc_feature 1..21: note = Description of Artificial Sequence: Synthetic oligonucleotide
  source 1..21: mol_type = other DNA
gaaaacatcagcagaagccac

SEQ ID NO: 37191 - DNA, 21 bp, synthetic construct
  misc_feature 1..21: note = Description of Artificial Sequence: Synthetic oligonucleotide
  source 1..21: mol_type = other DNA
atggggattgctaatattggg

SEQ ID NO: 37192 - DNA, 21 bp, synthetic construct
  misc_feature 1..21: note = Description of Artificial Sequence: Synthetic oligonucleotide
  source 1..21: mol_type = other DNA
caaagcgaaatcgtcaacaaa

SEQ ID NO: 37193 - DNA, 21 bp, synthetic construct
  misc_feature 1..21: note = Description of Artificial Sequence: Synthetic oligonucleotide
  source 1..21: mol_type = other DNA
ttccaaaaagaaagataccaa

SEQ ID NO: 37194 - DNA, 21 bp, synthetic construct
  misc_feature 1..21: note = Description of Artificial Sequence: Synthetic oligonucleotide
  source 1..21: mol_type = other DNA
cccggcgccggcaacaccaga

SEQ ID NO: 37195 - DNA, 21 bp, synthetic construct
  misc_feature 1..21: note = Description of Artificial Sequence: Synthetic oligonucleotide
  source 1..21: mol_type = other DNA
agtgttcctggggtgtctcgg

SEQ ID NO: 37196 - DNA, 21 bp, synthetic construct
  misc_feature 1..21: note = Description of Artificial Sequence: Synthetic oligonucleotide
  source 1..21: mol_type = other DNA
cgggtgtcttcggggatgtcg

SEQ ID NO: 37197 - DNA, 21 bp, synthetic construct
  misc_feature 1..21: note = Description of Artificial Sequence: Synthetic oligonucleotide
  source 1..21: mol_type = other DNA
cataataattctaagagtgcg

SEQ ID NO: 37198 - DNA, 21 bp, synthetic construct
  misc_feature 1..21: note = Description of Artificial Sequence: Synthetic oligonucleotide
  source 1..21: mol_type = other DNA
gtgggggctcgtactgggggg

SEQ ID NO: 37199 - DNA, 21 bp, synthetic construct
  misc_feature 1..21: note = Description of Artificial Sequence: Synthetic oligonucleotide
  source 1..21: mol_type = other DNA
cgtgagaataatactagttct

SEQ ID NO: 37200 - DNA, 21 bp, synthetic construct
  misc_feature 1..21: note = Description of Artificial Sequence: Synthetic oligonucleotide
  source 1..21: mol_type = other DNA
agtccggggcgtacgcagagt

SEQ ID NO: 37201 - DNA, 21 bp, synthetic construct
  misc_feature 1..21: note = Description of Artificial Sequence: Synthetic oligonucleotide
  source 1..21: mol_type = other DNA
aacgcccccaacagcagcggc

SEQ ID NO: 37202 - DNA, 21 bp, synthetic construct
  misc_feature 1..21: note = Description of Artificial Sequence: Synthetic oligonucleotide
  source 1..21: mol_type = other DNA
ccggggagtgctatgttgaat

SEQ ID NO: 37203 - DNA, 21 bp, synthetic construct
  misc_feature 1..21: note = Description of Artificial Sequence: Synthetic oligonucleotide
  source 1..21: mol_type = other DNA
catgggcagacggggctgatt

SEQ ID NO: 37204 - DNA, 21 bp, synthetic construct
  misc_feature 1..21: note = Description of Artificial Sequence: Synthetic oligonucleotide
  source 1..21: mol_type = other DNA
agtatgatgccgagttcgtcg

SEQ ID NO: 37205 - DNA, 21 bp, synthetic construct
  misc_feature 1..21: note = Description of Artificial Sequence: Synthetic oligonucleotide
  source 1..21: mol_type = other DNA
caaaaaacccaaaccaccagc

SEQ ID NO: 37206 - DNA, 21 bp, synthetic construct
  misc_feature 1..21: note = Description of Artificial Sequence: Synthetic oligonucleotide
  source 1..21: mol_type = other DNA
gtccccggcaacctccccagc

SEQ ID NO: 37207 - DNA, 21 bp, synthetic construct
  misc_feature 1..21: note = Description of Artificial Sequence: Synthetic oligonucleotide
  source 1..21: mol_type = other DNA
agttctggtagtaataggtct

SEQ ID NO: 37208 - DNA, 21 bp, synthetic construct
  misc_feature 1..21: note = Description of Artificial Sequence: Synthetic oligonucleotide
  source 1..21: mol_type = other DNA
tctggtgttaaggctttttct

SEQ ID NO: 37209 - DNA, 21 bp, synthetic construct
  misc_feature 1..21: note = Description of Artificial Sequence: Synthetic oligonucleotide
  source 1..21: mol_type = other DNA
aagggtgatggtagggtgatg

SEQ ID NO: 37210 - DNA, 21 bp, synthetic construct
  misc_feature 1..21: note = Description of Artificial Sequence: Synthetic oligonucleotide
  source 1..21: mol_type = other DNA
ggcgtcgtcatcagcagcaga

SEQ ID NO: 37211 - DNA, 21 bp, synthetic construct
  misc_feature 1..21: note = Description of Artificial Sequence: Synthetic oligonucleotide
  source 1..21: mol_type = other DNA
cggctggttccggcttctggt

SEQ ID NO: 37212 - DNA, 21 bp, synthetic construct
  misc_feature 1..21: note = Description of Artificial Sequence: Synthetic oligonucleotide
  source 1..21: mol_type = other DNA
agggttctttcgaatgagacg

SEQ ID NO: 37213 - DNA, 21 bp, synthetic construct
  misc_feature 1..21: note = Description of Artificial Sequence: Synthetic oligonucleotide
  source 1..21: mol_type = other DNA
atcagaaccagcaaaatgaac

SEQ ID NO: 37214 - DNA, 21 bp, synthetic construct
  misc_feature 1..21: note = Description of Artificial Sequence: Synthetic oligonucleotide
  source 1..21: mol_type = other DNA
tggagcaccagcaaacaagtc

SEQ ID NO: 37215 - DNA, 21 bp, synthetic construct
  misc_feature 1..21: note = Description of Artificial Sequence: Synthetic oligonucleotide
  source 1..21: mol_type = other DNA
cagccgaatgcttcgcctact

SEQ ID NO: 37216 - DNA, 21 bp, synthetic construct
  misc_feature 1..21: note = Description of Artificial Sequence: Synthetic oligonucleotide
  source 1..21: mol_type = other DNA
tctaatgctactagggcgatt

SEQ ID NO: 37217 - DNA, 21 bp, synthetic construct
  misc_feature 1..21: note = Description of Artificial Sequence: Synthetic oligonucleotide
  source 1..21: mol_type = other DNA
agtacgactccggggttgaag

SEQ ID NO: 37218 - DNA, 21 bp, synthetic construct
  misc_feature 1..21: note = Description of Artificial Sequence: Synthetic oligonucleotide
  source 1..21: mol_type = other DNA
attgggactagtattaattct

SEQ ID NO: 37219 - DNA, 21 bp, synthetic construct
  misc_feature 1..21: note = Description of Artificial Sequence: Synthetic oligonucleotide
  source 1..21: mol_type = other DNA
gaaaacagagtcaaagtcaac

SEQ ID NO: 37220 - DNA, 21 bp, synthetic construct
  misc_feature 1..21: note = Description of Artificial Sequence: Synthetic oligonucleotide
  source 1..21: mol_type = other DNA
attggtaagaattctatggct

SEQ ID NO: 37221 - DNA, 21 bp, synthetic construct
  misc_feature 1..21: note = Description of Artificial Sequence: Synthetic oligonucleotide
  source 1..21: mol_type = other DNA
gacaacatgagcacccccaaa

SEQ ID NO: 37222 - DNA, 21 bp, synthetic construct
  misc_feature 1..21: note = Description of Artificial Sequence: Synthetic oligonucleotide
  source 1..21: mol_type = other DNA
tatggtcgtgggcgtgatctt

SEQ ID NO: 37223 - DNA, 21 bp, synthetic construct
  misc_feature 1..21: note = Description of Artificial Sequence: Synthetic oligonucleotide
  source 1..21: mol_type = other DNA
ggttctcggaattcgagtgcg

SEQ ID NO: 37224 - DNA, 21 bp, synthetic construct
  misc_feature 1..21: note = Description of Artificial Sequence: Synthetic oligonucleotide
  source 1..21: mol_type = other DNA
cacgtctaccccaaacaaagc

SEQ ID NO: 37225 - DNA, 21 bp, synthetic construct
  misc_feature 1..21: note = Description of Artificial Sequence: Synthetic oligonucleotide
  source 1..21: mol_type = other DNA
tttaatcggtcgaaggttact

SEQ ID NO: 37226 - DNA, 21 bp, synthetic construct
  misc_feature 1..21: note = Description of Artificial Sequence: Synthetic oligonucleotide
  source 1..21: mol_type = other DNA
ggttcgcggccgccggggact

SEQ ID NO: 37227 - DNA, 21 bp, synthetic construct
  misc_feature 1..21: note = Description of Artificial Sequence: Synthetic oligonucleotide
  source 1..21: mol_type = other DNA
gctaatgctacgccgcatcat

SEQ ID NO: 37228 - DNA, 21 bp, synthetic construct
  misc_feature 1..21: note = Description of Artificial Sequence: Synthetic oligonucleotide
  source 1..21: mol_type = other DNA
gtggctggggctgctcagagg

SEQ ID NO: 37229 - DNA, 21 bp, synthetic construct
  misc_feature 1..21: note = Description of Artificial Sequence: Synthetic oligonucleotide
  source 1..21: mol_type = other DNA
ccgaaggtgagggatgggtat

SEQ ID NO: 37230 - DNA, 21 bp, synthetic construct
  misc_feature 1..21: note = Description of Artificial Sequence: Synthetic oligonucleotide
  source 1..21: mol_type = other DNA
ccccccaacggctaccaaagc

SEQ ID NO: 37231 - DNA, 21 bp, synthetic construct
  misc_feature 1..21: note = Description of Artificial Sequence: Synthetic oligonucleotide
  source 1..21: mol_type = other DNA
aatgtgccttctattagtagg

SEQ ID NO: 37232 - DNA, 21 bp, synthetic construct
  misc_feature 1..21: note = Description of Artificial Sequence: Synthetic oligonucleotide
  source 1..21: mol_type = other DNA
actccgcagaattctgtgaag

SEQ ID NO: 37233 - DNA, 21 bp, synthetic construct
  misc_feature 1..21: note = Description of Artificial Sequence: Synthetic oligonucleotide
  source 1..21: mol_type = other DNA
tctcatacgggtaatatggtt

SEQ ID NO: 37234 - DNA, 21 bp, synthetic construct
  misc_feature 1..21: note = Description of Artificial Sequence: Synthetic oligonucleotide
  source 1..21: mol_type = other DNA
agggatcctacgcctgttcgt

SEQ ID NO: 37235 - DNA, 21 bp, synthetic construct
  misc_feature 1..21: note = Description of Artificial Sequence: Synthetic oligonucleotide
  source 1..21: mol_type = other DNA
tatgttactagttctgggggt

SEQ ID NO: 37236 - DNA, 21 bp, synthetic construct
  misc_feature 1..21: note = Description of Artificial Sequence: Synthetic oligonucleotide
  source 1..21: mol_type = other DNA
ggtactggtcatcagaggtct

SEQ ID NO: 37237 - DNA, 21 bp, synthetic construct
  misc_feature 1..21: note = Description of Artificial Sequence: Synthetic oligonucleotide
  source 1..21: mol_type = other DNA
ggcagcggcatcaaaagagaa

SEQ ID NO: 37238 - DNA, 21 bp, synthetic construct
  misc_feature 1..21: note = Description of Artificial Sequence: Synthetic oligonucleotide
  source 1..21: mol_type = other DNA
gttaagactgcgaaggttaat

SEQ ID NO: 37239 - DNA, 21 bp, synthetic construct
  misc_feature 1..21: note = Description of Artificial Sequence: Synthetic oligonucleotide
  source 1..21: mol_type = other DNA
gtgactggtcagaatcagact

SEQ ID NO: 37240 - DNA, 21 bp, synthetic construct
  misc_feature 1..21: note = Description of Artificial Sequence: Synthetic oligonucleotide
  source 1..21: mol_type = other DNA
tcgggtcggagtgttggtaat

SEQ ID NO: 37241 - DNA, 21 bp, synthetic construct
  misc_feature 1..21: note = Description of Artificial Sequence: Synthetic oligonucleotide
  source 1..21: mol_type = other DNA
cctccttctacgcttaagaat

SEQ ID NO: 37242 - DNA, 21 bp, synthetic construct
  misc_feature 1..21: note = Description of Artificial Sequence: Synthetic oligonucleotide
  source 1..21: mol_type = other DNA
cccaacctccaaagcagcaaa

SEQ ID NO: 37243 - DNA, 21 bp, synthetic construct
  misc_feature 1..21: note = Description of Artificial Sequence: Synthetic oligonucleotide
  source 1..21: mol_type = other DNA
agagaacccagagtccaagaa

SEQ ID NO: 37244 - DNA, 21 bp, synthetic construct
  misc_feature 1..21: note = Description of Artificial Sequence: Synthetic oligonucleotide
  source 1..21: mol_type = other DNA
aacagaagcggccaaaaccaa

SEQ ID NO: 37245 - DNA, 21 bp, synthetic construct
  misc_feature 1..21: note = Description of Artificial Sequence: Synthetic oligonucleotide
  source 1..21: mol_type = other DNA
caagtcagcgccaaaagcgcc

SEQ ID NO: 37246 - DNA, 21 bp, synthetic construct
  misc_feature 1..21: note = Description of Artificial Sequence: Synthetic oligonucleotide
  source 1..21: mol_type = other DNA
agtactcataagaatagtcct

SEQ ID NO: 37247 - DNA, 21 bp, synthetic construct
  misc_feature 1..21: note = Description of Artificial Sequence: Synthetic oligonucleotide
  source 1..21: mol_type = other DNA
acgttttctaagggtactaat

SEQ ID NO: 37248 - DNA, 21 bp, synthetic construct
  misc_feature 1..21: note = Description of Artificial Sequence: Synthetic oligonucleotide
  source 1..21: mol_type = other DNA
ggtcttgagcataatcgggct

SEQ ID NO: 37249 - DNA, 21 bp, synthetic construct
  misc_feature 1..21: note = Description of Artificial Sequence: Synthetic oligonucleotide
  source 1..21: mol_type = other DNA
agaagcaccaaaaccgaaaac

SEQ ID NO: 37250 - DNA, 21 bp, synthetic construct
  misc_feature 1..21: note = Description of Artificial Sequence: Synthetic oligonucleotide
  source 1..21: mol_type = other DNA
caactcggcgacagaaacaga

SEQ ID NO: 37251 - DNA, 21 bp, synthetic construct
  misc_feature 1..21: note = Description of Artificial Sequence: Synthetic oligonucleotide
  source 1..21: mol_type = other DNA
cataatagtaagagtcagatt

SEQ ID NO: 37252 - DNA, 21 bp, synthetic construct
  misc_feature 1..21: note = Description of Artificial Sequence: Synthetic oligonucleotide
  source 1..21: mol_type = other DNA
cccagagaaagagacagaagc

SEQ ID NO: 37253 - DNA, 21 bp, synthetic construct
  misc_feature 1..21: note = Description of Artificial Sequence: Synthetic oligonucleotide
  source 1..21: mol_type = other DNA
caggagggtgtgcgtagttct

SEQ ID NO: 37254 - DNA, 21 bp, synthetic construct
  misc_feature 1..21: note = Description of Artificial Sequence: Synthetic oligonucleotide
  source 1..21: mol_type = other DNA
aatgttaatggtcggactcat

SEQ ID NO: 37255 - DNA, 21 bp, synthetic construct
  misc_feature 1..21: note = Description of Artificial Sequence: Synthetic oligonucleotide
  source 1..21: mol_type = other DNA
gctactaataagacgacgaat

SEQ ID NO: 37256 - DNA, 21 bp, synthetic construct
  misc_feature 1..21: note = Description of Artificial Sequence: Synthetic oligonucleotide
  source 1..21: mol_type = other DNA
caaagcaccggcagagaaaga

SEQ ID NO: 37257 - DNA, 21 bp, synthetic construct
  misc_feature 1..21: note = Description of Artificial Sequence: Synthetic oligonucleotide
  source 1..21: mol_type = other DNA
taccacagcaaaggcaccacc

SEQ ID NO: 37258 - DNA, 21 bp, synthetic construct
  misc_feature 1..21: note = Description of Artificial Sequence: Synthetic oligonucleotide
  source 1..21: mol_type = other DNA
ggcaacagacccaccaccctc

SEQ ID NO: 37259 - DNA, 21 bp, synthetic construct
  misc_feature 1..21: note = Description of Artificial Sequence: Synthetic oligonucleotide
  source 1..21: mol_type = other DNA
caaagaaacgtcagcgtcgtc

SEQ ID NO: 37260 - DNA, 21 bp, synthetic construct
  misc_feature 1..21: note = Description of Artificial Sequence: Synthetic oligonucleotide
  source 1..21: mol_type = other DNA
gataatactggtcgtaatgct

SEQ ID NO: 37261 - DNA, 21 bp, synthetic construct
  misc_feature 1..21: note = Description of Artificial Sequence: Synthetic oligonucleotide
  source 1..21: mol_type = other DNA
cagacgcaggggcagttgaag

SEQ ID NO: 37262 - DNA, 21 bp, synthetic construct
  misc_feature 1..21: note = Description of Artificial Sequence: Synthetic oligonucleotide
  source 1..21: mol_type = other DNA
aacggttctggacagaataaa

SEQ ID NO: 37263 - DNA, 21 bp, synthetic construct
  misc_feature 1..21: note = Description of Artificial Sequence: Synthetic oligonucleotide
  source 1..21: mol_type = other DNA
aatagtgaggcgaggcttagt

SEQ ID NO: 37264 - DNA, 21 bp, synthetic construct
  misc_feature 1..21: note = Description of Artificial Sequence: Synthetic oligonucleotide
  source 1..21: mol_type = other DNA
ttgtgtagggctcagactggc

SEQ ID NO: 37265 - DNA, 21 bp, synthetic construct
  misc_feature 1..21: note = Description of Artificial Sequence: Synthetic oligonucleotide
  source 1..21: mol_type = other DNA
agggatgggacgcctccgact

SEQ ID NO: 37266 - DNA, 21 bp, synthetic construct
  misc_feature 1..21: note = Description of Artificial Sequence: Synthetic oligonucleotide
  source 1..21: mol_type = other DNA
cgtatgaatggtggtgggcct

SEQ ID NO: 37267 - DNA, 21 bp, synthetic construct
  misc_feature 1..21: note = Description of Artificial Sequence: Synthetic oligonucleotide
  source 1..21: mol_type = other DNA
gctggtcgtactcattcgtgt

SEQ ID NO: 37268 - DNA, 21 bp, synthetic construct
  misc_feature 1..21: note = Description of Artificial Sequence: Synthetic oligonucleotide
  source 1..21: mol_type = other DNA
aaaagagacgcccacaccgcc

SEQ ID NO: 37269 - DNA, 21 bp, synthetic construct
  misc_feature 1..21: note = Description of Artificial Sequence: Synthetic oligonucleotide
  source 1..21: mol_type = other DNA
acttctatgaatggtaataag

SEQ ID NO: 37270 - DNA, 21 bp, synthetic construct
  misc_feature 1..21: note = Description of Artificial Sequence: Synthetic oligonucleotide
  source 1..21: mol_type = other DNA
caagaacaccccgacagaaga

SEQ ID NO: 37271 - DNA, 21 bp, synthetic construct
  misc_feature 1..21: note = Description of Artificial Sequence: Synthetic oligonucleotide
  source 1..21: mol_type = other DNA
cagtcgaagattccgcatccg

SEQ ID NO: 37272 - DNA, 21 bp, synthetic construct
  misc_feature 1..21: note = Description of Artificial Sequence: Synthetic oligonucleotide
  source 1..21: mol_type = other DNA
gtctgcagccccgaaggcaaa

SEQ ID NO: 37273 - DNA, 21 bp, synthetic construct
  misc_feature 1..21: note = Description of Artificial Sequence: Synthetic oligonucleotide
  source 1..21: mol_type = other DNA
cagttgaatgaggagcatggg

SEQ ID NO: 37274 - DNA, 21 bp, synthetic construct
  misc_feature 1..21: note = Description of Artificial Sequence: Synthetic oligonucleotide
  source 1..21: mol_type = other DNA
gaaaccaccacccccagaaaa

SEQ ID NO: 37275 - DNA, 21 bp, synthetic construct
  misc_feature 1..21: note = Description of Artificial Sequence: Synthetic oligonucleotide
  source 1..21: mol_type = other DNA
gagatgaaggggcatacggct

SEQ ID NO: 37276 - DNA, 21 bp, synthetic construct
  misc_feature 1..21: note = Description of Artificial Sequence: Synthetic oligonucleotide
  source 1..21: mol_type = other DNA
accaacagaggcggcaccccc

SEQ ID NO: 37277 - DNA, 21 bp, synthetic construct
  misc_feature 1..21: note = Description of Artificial Sequence: Synthetic oligonucleotide
  source 1..21: mol_type = other DNA
tctggttcgaataattttttg

SEQ ID NO: 37278 - DNA, 21 bp, synthetic construct
  misc_feature 1..21: note = Description of Artificial Sequence: Synthetic oligonucleotide
  source 1..21: mol_type = other DNA
agttctgctaagagttcgctt

SEQ ID NO: 37279 - DNA, 21 bp, synthetic construct
  misc_feature 1..21: note = Description of Artificial Sequence: Synthetic oligonucleotide
  source 1..21: mol_type = other DNA
tgggcgggtagtaatccgcgt

SEQ ID NO: 37280 - DNA, 21 bp, synthetic construct
  misc_feature 1..21: note = Description of Artificial Sequence: Synthetic oligonucleotide
  source 1..21: mol_type = other DNA
aacaacaaaagcgccagccaa

SEQ ID NO: 37281 - DNA, 21 bp, synthetic construct
  misc_feature 1..21: note = Description of Artificial Sequence: Synthetic oligonucleotide
  source 1..21: mol_type = other DNA
aaaagcgcccaaggcggcaac

SEQ ID NO: 37282 - DNA, 21 bp, synthetic construct
  misc_feature 1..21: note = Description of Artificial Sequence: Synthetic oligonucleotide
  source 1..21: mol_type = other DNA
tctagtgggccgtcttctggg

SEQ ID NO: 37283 - DNA, 21 bp, synthetic construct
  misc_feature 1..21: note = Description of Artificial Sequence: Synthetic oligonucleotide
  source 1..21: mol_type = other DNA
gaaaccctccccagcctcatc

SEQ ID NO: 37284 - DNA, 21 bp, synthetic construct
  misc_feature 1..21: note = Description of Artificial Sequence: Synthetic oligonucleotide
  source 1..21: mol_type = other DNA
caagccaacaccagcaccgaa

SEQ ID NO: 37285 - DNA, 21 bp, synthetic construct
  misc_feature 1..21: note = Description of Artificial Sequence: Synthetic oligonucleotide
  source 1..21: mol_type = other DNA
gggattaataagaatggtact

SEQ ID NO: 37286 - DNA, 21 bp, synthetic construct
  misc_feature 1..21: note = Description of Artificial Sequence: Synthetic oligonucleotide
  source 1..21: mol_type = other DNA
agacccatgaaaagcaccaac

SEQ ID NO: 37287 - DNA, 21 bp, synthetic construct
  misc_feature 1..21: note = Description of Artificial Sequence: Synthetic oligonucleotide
  source 1..21: mol_type = other DNA
cctgagattggtaagcagcgg

SEQ ID NO: 37288 - DNA, 21 bp, synthetic construct
  misc_feature 1..21: note = Description of Artificial Sequence: Synthetic oligonucleotide
  source 1..21: mol_type = other DNA
aaggtggataagaggactgat

SEQ ID NO: 37289 - DNA, 21 bp, synthetic construct
  misc_feature 1..21: note = Description of Artificial Sequence: Synthetic oligonucleotide
  source 1..21: mol_type = other DNA
attccgcttactctgagtctt

SEQ ID NO: 37290 - DNA, 21 bp, synthetic construct
  misc_feature 1..21: note = Description of Artificial Sequence: Synthetic oligonucleotide
  source 1..21: mol_type = other DNA
tttcctctgaagctggggagg

SEQ ID NO: 37291 - DNA, 21 bp, synthetic construct
  misc_feature 1..21: note = Description of Artificial Sequence: Synthetic oligonucleotide
  source 1..21: mol_type = other DNA
ctgtctcgtagtaagcagggt

SEQ ID NO: 37292 - DNA, 21 bp, synthetic construct
  misc_feature 1..21: note = Description of Artificial Sequence: Synthetic oligonucleotide
  source 1..21: mol_type = other DNA
gataagccggctgggtctctg

SEQ ID NO: 37293 - DNA, 21 bp, synthetic construct
  misc_feature 1..21: note = Description of Artificial Sequence: Synthetic oligonucleotide
  source 1..21: mol_type = other DNA
ctgaatcctaatgttgctcgt

SEQ ID NO: 37294 - DNA, 21 bp, synthetic construct
  misc_feature 1..21: note = Description of Artificial Sequence: Synthetic oligonucleotide
  source 1..21: mol_type = other DNA
caaagcaaagccggcaacagc

SEQ ID NO: 37295 - DNA, 21 bp, synthetic construct
  misc_feature 1..21: note = Description of Artificial Sequence: Synthetic oligonucleotide
  source 1..21: mol_type = other DNA
cccaacagagtccccaaccac

SEQ ID NO: 37296 - DNA, 21 bp, synthetic construct
  misc_feature 1..21: note = Description of Artificial Sequence: Synthetic oligonucleotide
  source 1..21: mol_type = other DNA
actactattccgaagcgtcag

SEQ ID NO: 37297 - DNA, 21 bp, synthetic construct
  misc_feature 1..21: note = Description of Artificial Sequence: Synthetic oligonucleotide
  source 1..21: mol_type = other DNA
tttggggatcatactcgtacg

SEQ ID NO: 37298 - DNA, 21 bp, synthetic construct
  misc_feature 1..21: note = Description of Artificial Sequence: Synthetic oligonucleotide
  source 1..21: mol_type = other DNA
cccagaatcagcggcaacctc

SEQ ID NO: 37299 - DNA, 21 bp, synthetic construct
  misc_feature 1..21: note = Description of Artificial Sequence: Synthetic oligonucleotide
  source 1..21: mol_type = other DNA
cggaataatccgactacggtt

SEQ ID NO: 37300 - DNA, 21 bp, synthetic construct
  misc_feature 1..21: note = Description of Artificial Sequence: Synthetic oligonucleotide
  source 1..21: mol_type = other DNA
gctactactaaggatggtatt

SEQ ID NO: 37301 - DNA, 21 bp, synthetic construct
  misc_feature 1..21: note = Description of Artificial Sequence: Synthetic oligonucleotide
  source 1..21: mol_type = other DNA
agtaagccgagtggttcttct

SEQ ID NO: 37302 - DNA, 21 bp, synthetic construct
  misc_feature 1..21: note = Description of Artificial Sequence: Synthetic oligonucleotide
  source 1..21: mol_type = other DNA
cccagcaccaaaaccagagtc

SEQ ID NO: 37303 - DNA, 21 bp, synthetic construct
  misc_feature 1..21: note = Description of Artificial Sequence: Synthetic oligonucleotide
  source 1..21: mol_type = other DNA
gatccgttggggaagcagggt

SEQ ID NO: 37304 - DNA, 21 bp, synthetic construct
  misc_feature 1..21: note = Description of Artificial Sequence: Synthetic oligonucleotide
  source 1..21: mol_type = other DNA
catactcgtcctaattcgatg

SEQ ID NO: 37305 - DNA, 21 bp, synthetic construct
  misc_feature 1..21: note = Description of Artificial Sequence: Synthetic oligonucleotide
  source 1..21: mol_type = other DNA
acccaaagccacaacctcgcc

SEQ ID NO: 37306 - DNA, 21 bp, synthetic construct
  misc_feature 1..21: note = Description of Artificial Sequence: Synthetic oligonucleotide
  source 1..21: mol_type = other DNA
ctcggcaaaagcgcccacagc

SEQ ID NO: 37307 - DNA, 21 bp, synthetic construct
  misc_feature 1..21: note = Description of Artificial Sequence: Synthetic oligonucleotide
  source 1..21: mol_type = other DNA
cataatgggcgtaatgtgagt

SEQ ID NO: 37308 - DNA, 21 bp, synthetic construct
  misc_feature 1..21: note = Description of Artificial Sequence: Synthetic oligonucleotide
  source 1..21: mol_type = other DNA
tataataatggtggtactcgt

SEQ ID NO: 37309 - DNA, 21 bp, synthetic construct
  misc_feature 1..21: note = Description of Artificial Sequence: Synthetic oligonucleotide
  source 1..21: mol_type = other DNA
tcgactactgctcaggttaag

SEQ ID NO: 37310 - DNA, 21 bp, synthetic construct
  misc_feature 1..21: note = Description of Artificial Sequence: Synthetic oligonucleotide
  source 1..21: mol_type = other DNA
ttcagaaacaacggcagccac

SEQ ID NO: 37311 - DNA, 21 bp, synthetic construct
  misc_feature 1..21: note = Description of Artificial Sequence: Synthetic oligonucleotide
  source 1..21: mol_type = other DNA
ggccaaatcaaaaacctcggc

SEQ ID NO: 37312 - DNA, 21 bp, synthetic construct
  misc_feature 1..21: note = Description of Artificial Sequence: Synthetic oligonucleotide
  source 1..21: mol_type = other DNA
aatccggtggctgcggctacg

SEQ ID NO: 37313 - DNA, 21 bp, synthetic construct
  misc_feature 1..21: note = Description of Artificial Sequence: Synthetic oligonucleotide
  source 1..21: mol_type = other DNA
cccagcgccggcagagaaaaa

SEQ ID NO: 37314 - DNA, 21 bp, synthetic construct
  misc_feature 1..21: note = Description of Artificial Sequence: Synthetic oligonucleotide
  source 1..21: mol_type = other DNA
actggggtttcgcctctggct

SEQ ID NO: 37315 - DNA, 21 bp, synthetic construct
  misc_feature 1..21: note = Description of Artificial Sequence: Synthetic oligonucleotide
  source 1..21: mol_type = other DNA
ttccccgtcaacgccggcgcc

SEQ ID NO: 37316 - DNA, 21 bp, synthetic construct
  misc_feature 1..21: note = Description of Artificial Sequence: Synthetic oligonucleotide
  source 1..21: mol_type = other DNA
tcttttagtggggctaataag

SEQ ID NO: 37317 - DNA, 21 bp, synthetic construct
  misc_feature 1..21: note = Description of Artificial Sequence: Synthetic oligonucleotide
  source 1..21: mol_type = other DNA
aagcagggtgggcctactggg

SEQ ID NO: 37318 - DNA, 21 bp, synthetic construct
  misc_feature 1..21: note = Description of Artificial Sequence: Synthetic oligonucleotide
  source 1..21: mol_type = other DNA
acgaagtctactagtcatgtt

SEQ ID NO: 37319 - DNA, 21 bp, synthetic construct
  misc_feature 1..21: note = Description of Artificial Sequence: Synthetic oligonucleotide
  source 1..21: mol_type = other DNA
gggtctattaaggcgccgcct

SEQ ID NO: 37320 - DNA, 21 bp, synthetic construct
  misc_feature 1..21: note = Description of Artificial Sequence: Synthetic oligonucleotide
  source 1..21: mol_type = other DNA
tatgggctgccgagtagtcgt

SEQ ID NO: 37321 - DNA, 21 bp, synthetic construct
  misc_feature 1..21: note = Description of Artificial Sequence: Synthetic oligonucleotide
  source 1..21: mol_type = other DNA
cgtcaggatagtactcctggg

SEQ ID NO: 37322 - DNA, 21 bp, synthetic construct
  misc_feature 1..21: note = Description of Artificial Sequence: Synthetic oligonucleotide
  source 1..21: mol_type = other DNA
cccaccctcgccagcggcaga

SEQ ID NO: 37323 - DNA, 21 bp, synthetic construct
  misc_feature 1..21: note = Description of Artificial Sequence: Synthetic oligonucleotide
  source 1..21: mol_type = other DNA
aatcctggttcgggttatggt

SEQ ID NO: 37324 - DNA, 21 bp, synthetic construct
  misc_feature 1..21: note = Description of Artificial Sequence: Synthetic oligonucleotide
  source 1..21: mol_type = other DNA
ttggttgcgtcggggcagaag

SEQ ID NO: 37325 - DNA, 21 bp, synthetic construct
  misc_feature 1..21: note = Description of Artificial Sequence: Synthetic oligonucleotide
  source 1..21: mol_type = other DNA
ggcctccccaccgaaaaaatg

SEQ ID NO: 37326 - DNA, 21 bp, synthetic construct
  misc_feature 1..21: note = Description of Artificial Sequence: Synthetic oligonucleotide
  source 1..21: mol_type = other DNA
accgtcggcaccaccaccatc

SEQ ID NO: 37327 - DNA, 21 bp, synthetic construct
  misc_feature 1..21: note = Description of Artificial Sequence: Synthetic oligonucleotide
  source 1..21: mol_type = other DNA
cctagtgtgaataggactcct

SEQ ID NO: 37328 - DNA, 21 bp, synthetic construct
  misc_feature 1..21: note = Description of Artificial Sequence: Synthetic oligonucleotide
  source 1..21: mol_type = other DNA
cttggtactagtcagatgaag

SEQ ID NO: 37329 - DNA, 21 bp, synthetic construct
  misc_feature 1..21: note = Description of Artificial Sequence: Synthetic oligonucleotide
  source 1..21: mol_type = other DNA
cagaagactaataagctttat

SEQ ID NO: 37330 - DNA, 21 bp, synthetic construct
  misc_feature 1..21: note = Description of Artificial Sequence: Synthetic oligonucleotide
  source 1..21: mol_type = other DNA
acgagtaagcctaattctccg

SEQ ID NO: 37331 - DNA, 21 bp, synthetic construct
  misc_feature 1..21: note = Description of Artificial Sequence: Synthetic oligonucleotide
  source 1..21: mol_type = other DNA
acgtctacgcagaagggtcag

SEQ ID NO: 37332 - DNA, 21 bp, synthetic construct
  misc_feature 1..21: note = Description of Artificial Sequence: Synthetic oligonucleotide
  source 1..21: mol_type = other DNA
agtatttcgaatcagcgtagt

SEQ ID NO: 37333 - DNA, 21 bp, synthetic construct
  misc_feature 1..21: note = Description of Artificial Sequence: Synthetic oligonucleotide
  source 1..21: mol_type = other DNA
tatactattacgccgcagaag

SEQ ID NO: 37334 - DNA, 21 bp, synthetic construct
  misc_feature 1..21: note = Description of Artificial Sequence: Synthetic oligonucleotide
  source 1..21: mol_type = other DNA
ttggggattcgtgataatact

SEQ ID NO: 37335 - DNA, 21 bp, synthetic construct
  misc_feature 1..21: note = Description of Artificial Sequence: Synthetic oligonucleotide
  source 1..21: mol_type = other DNA
aaagtcagcgcccaagccctc

SEQ ID NO: 37336 - DNA, 21 bp, synthetic construct
  misc_feature 1..21: note = Description of Artificial Sequence: Synthetic oligonucleotide
  source 1..21: mol_type = other DNA
ccgtctacgtttacggaggtt

SEQ ID NO: 37337 - DNA, 21 bp, synthetic construct
  misc_feature 1..21: note = Description of Artificial Sequence: Synthetic oligonucleotide
  source 1..21: mol_type = other DNA
aacagaagcaaagaaagcgcc

SEQ ID NO: 37338 - DNA, 21 bp, synthetic construct
  misc_feature 1..21: note = Description of Artificial Sequence: Synthetic oligonucleotide
  source 1..21: mol_type = other DNA
tcgcataattcgaaggtttct

SEQ ID NO: 37339 - DNA, 21 bp, synthetic construct
  misc_feature 1..21: note = Description of Artificial Sequence: Synthetic oligonucleotide
  source 1..21: mol_type = other DNA
gaaacccccaacagaagccaa

SEQ ID NO: 37340 - DNA, 21 bp, synthetic construct
  misc_feature 1..21: note = Description of Artificial Sequence: Synthetic oligonucleotide
  source 1..21: mol_type = other DNA
gagactaagcgttctaatatg

SEQ ID NO: 37341 - DNA, 21 bp, synthetic construct
  misc_feature 1..21: note = Description of Artificial Sequence: Synthetic oligonucleotide
  source 1..21: mol_type = other DNA
ctccctagttttaggcctcct

SEQ ID NO: 37342 - DNA, 21 bp, synthetic construct
  misc_feature 1..21: note = Description of Artificial Sequence: Synthetic oligonucleotide
  source 1..21: mol_type = other DNA
ccggggactgggagtaatcat

SEQ ID NO: 37343 - DNA, 21 bp, synthetic construct
  misc_feature 1..21: note = Description of Artificial Sequence: Synthetic oligonucleotide
  source 1..21: mol_type = other DNA
cctggtagtagggctcttact

SEQ ID NO: 37344 - DNA, 21 bp, synthetic construct
  misc_feature 1..21: note = Description of Artificial Sequence: Synthetic oligonucleotide
  source 1..21: mol_type = other DNA
aataatagtcgggttcttggg

SEQ ID NO: 37345 - DNA, 21 bp, synthetic construct
  misc_feature 1..21: note = Description of Artificial Sequence: Synthetic oligonucleotide
  source 1..21: mol_type = other DNA
atgaacagagcccccaccaac

SEQ ID NO: 37346 - DNA, 21 bp, synthetic construct
  misc_feature 1..21: note = Description of Artificial Sequence: Synthetic oligonucleotide
  source 1..21: mol_type = other DNA
ggtccgcatactgcggttggt

SEQ ID NO: 37347 - DNA, 21 bp, synthetic construct
  misc_feature 1..21: note = Description of Artificial Sequence: Synthetic oligonucleotide
  source 1..21: mol_type = other DNA
cagtcgcattcggggatttct

SEQ ID NO: 37348 - DNA, 21 bp, synthetic construct
  misc_feature 1..21: note = Description of Artificial Sequence: Synthetic oligonucleotide
  source 1..21: mol_type = other DNA
catgggggtcctggtgctgtt

SEQ ID NO: 37349 - DNA, 21 bp, synthetic construct
  misc_feature 1..21: note = Description of Artificial Sequence: Synthetic oligonucleotide
  source 1..21: mol_type = other DNA
ctcaacagagcccacaccagc

SEQ ID NO: 37350 - DNA, 21 bp, synthetic construct
  misc_feature 1..21: note = Description of Artificial Sequence: Synthetic oligonucleotide
  source 1..21: mol_type = other DNA
gccggcagcaaaaccaccagc

SEQ ID NO: 37351 - DNA, 21 bp, synthetic construct
  misc_feature 1..21: note = Description of Artificial Sequence: Synthetic oligonucleotide
  source 1..21: mol_type = other DNA
gaactcatgaacaaaagcaaa

SEQ ID NO: 37352 - DNA, 21 bp, synthetic construct
  misc_feature 1..21: note = Description of Artificial Sequence: Synthetic oligonucleotide
  source 1..21: mol_type = other DNA
gagggttctgggaggcttact

SEQ ID NO: 37353 - DNA, 21 bp, synthetic construct
  misc_feature 1..21: note = Description of Artificial Sequence: Synthetic oligonucleotide
  source 1..21: mol_type = other DNA
gccgtcggcaaaagcaccgaa

SEQ ID NO: 37354 - DNA, 21 bp, synthetic construct
  misc_feature 1..21: note = Description of Artificial Sequence: Synthetic oligonucleotide
  source 1..21: mol_type = other DNA
tatcgttcgaaggagattggt

SEQ ID NO: 37355 - DNA, 21 bp, synthetic construct
  misc_feature 1..21: note = Description of Artificial Sequence: Synthetic oligonucleotide
  source 1..21: mol_type = other DNA
agcagaaacagccccccccaa

SEQ ID NO: 37356 - DNA, 21 bp, synthetic construct
  misc_feature 1..21: note = Description of Artificial Sequence: Synthetic oligonucleotide
  source 1..21: mol_type = other DNA
accggttctggacagaatcaa

SEQ ID NO: 37357 - DNA, 21 bp, synthetic construct
  misc_feature 1..21: note = Description of Artificial Sequence: Synthetic oligonucleotide
  source 1..21: mol_type = other DNA
cccaacaaccaaagcaccaga

SEQ ID NO: 37358 - DNA, 21 bp, synthetic construct
  misc_feature 1..21: note = Description of Artificial Sequence: Synthetic oligonucleotide
  source 1..21: mol_type = other DNA
gggacttttagtactcagagt

SEQ ID NO: 37359 - DNA, 21 bp, synthetic construct
  misc_feature 1..21: note = Description of Artificial Sequence: Synthetic oligonucleotide
  source 1..21: mol_type = other DNA
aatatttcgtctaaggttgcg

SEQ ID NO: 37360 - DNA, 21 bp, synthetic construct
  misc_feature 1..21: note = Description of Artificial Sequence: Synthetic oligonucleotide
  source 1..21: mol_type = other DNA
caagccgtcgccagacaagcc

SEQ ID NO: 37361 - DNA, 21 bp, synthetic construct
  misc_feature 1..21: note = Description of Artificial Sequence: Synthetic oligonucleotide
  source 1..21: mol_type = other DNA
cctttggagcgtactactaag

SEQ ID NO: 37362 - DNA, 21 bp, synthetic construct
  misc_feature 1..21: note = Description of Artificial Sequence: Synthetic oligonucleotide
  source 1..21: mol_type = other DNA
taccaaaccaacaacaaacac

SEQ ID NO: 37363 - DNA, 21 bp, synthetic construct
  misc_feature 1..21: note = Description of Artificial Sequence: Synthetic oligonucleotide
  source 1..21: mol_type = other DNA
agaaccgacacccacagcctc

SEQ ID NO: 37364 - DNA, 21 bp, synthetic construct
  misc_feature 1..21: note = Description of Artificial Sequence: Synthetic oligonucleotide
  source 1..21: mol_type = other DNA
agttttagggctcaggagggg

SEQ ID NO: 37365 - DNA, 21 bp, synthetic construct
  misc_feature 1..21: note = Description of Artificial Sequence: Synthetic oligonucleotide
  source 1..21: mol_type = other DNA
accaccggcggccacgccctc

SEQ ID NO: 37366 - DNA, 21 bp, synthetic construct
  misc_feature 1..21: note = Description of Artificial Sequence: Synthetic oligonucleotide
  source 1..21: mol_type = other DNA
atgagcagcaaacaagtcagc

SEQ ID NO: 37367 - DNA, 21 bp, synthetic construct
  misc_feature 1..21: note = Description of Artificial Sequence: Synthetic oligonucleotide
  source 1..21: mol_type = other DNA
ccgtataatgttaggcctgct

SEQ ID NO: 37368 - DNA, 21 bp, synthetic construct
  misc_feature 1..21: note = Description of Artificial Sequence: Synthetic oligonucleotide
  source 1..21: mol_type = other DNA
caacaaagccccagaaacggc

SEQ ID NO: 37369 - DNA, 21 bp, synthetic construct
  misc_feature 1..21: note = Description of Artificial Sequence: Synthetic oligonucleotide
  source 1..21: mol_type = other DNA
accaccatgagcaaagtcggc

SEQ ID NO: 37370 - DNA, 21 bp, synthetic construct
  misc_feature 1..21: note = Description of Artificial Sequence: Synthetic oligonucleotide
  source 1..21: mol_type = other DNA
ccttataattctaaggcttcg

SEQ ID NO: 37371 - DNA, 21 bp, synthetic construct
  misc_feature 1..21: note = Description of Artificial Sequence: Synthetic oligonucleotide
  source 1..21: mol_type = other DNA
cgggctattacgcagtctaat

SEQ ID NO: 37372 - DNA, 21 bp, synthetic construct
  misc_feature 1..21: note = Description of Artificial Sequence: Synthetic oligonucleotide
  source 1..21: mol_type = other DNA
cggcatgcttctgatttttat

SEQ ID NO: 37373 - DNA, 21 bp, synthetic construct
  misc_feature 1..21: note = Description of Artificial Sequence: Synthetic oligonucleotide
  source 1..21: mol_type = other DNA
aacacccaaagctacaccagc

SEQ ID NO: 37374 - DNA, 21 bp, synthetic construct
  misc_feature 1..21: note = Description of Artificial Sequence: Synthetic oligonucleotide
  source 1..21: mol_type = other DNA
cccaccgacagaatcaacaga

SEQ ID NO: 37375 - DNA, 21 bp, synthetic construct
  misc_feature 1..21: note = Description of Artificial Sequence: Synthetic oligonucleotide
  source 1..21: mol_type = other DNA
aacgcccaacaagcccaaaga

SEQ ID NO: 37376 - DNA, 21 bp, synthetic construct
  misc_feature 1..21: note = Description of Artificial Sequence: Synthetic oligonucleotide
  source 1..21: mol_type = other DNA
atgagcctcagcaaaaaccac

SEQ ID NO: 37377 - DNA, 21 bp, synthetic construct
  misc_feature 1..21: note = Description of Artificial Sequence: Synthetic oligonucleotide
  source 1..21: mol_type = other DNA
gctactactagtcgtattagt

SEQ ID NO: 37378 - DNA, 21 bp, synthetic construct
  misc_feature 1..21: note = Description of Artificial Sequence: Synthetic oligonucleotide
  source 1..21: mol_type = other DNA
tctttgggttctggttttcag

SEQ ID NO: 37379 - DNA, 21 bp, synthetic construct
  misc_feature 1..21: note = Description of Artificial Sequence: Synthetic oligonucleotide
  source 1..21: mol_type = other DNA
gaggggcttaatactagtcgt

SEQ ID NO: 37380 - DNA, 21 bp, synthetic construct
  misc_feature 1..21: note = Description of Artificial Sequence: Synthetic oligonucleotide
  source 1..21: mol_type = other DNA
tcttcgcaggaggttttgcgg

SEQ ID NO: 37381 - DNA, 21 bp, synthetic construct
  misc_feature 1..21: note = Description of Artificial Sequence: Synthetic oligonucleotide
  source 1..21: mol_type = other DNA
cgtgcgacggagggtgttttt

SEQ ID NO: 37382 - DNA, 21 bp, synthetic construct
  misc_feature 1..21: note = Description of Artificial Sequence: Synthetic oligonucleotide
  source 1..21: mol_type = other DNA
ggcaccaccagcagcagagac

SEQ ID NO: 37383 - DNA, 21 bp, synthetic construct
  misc_feature 1..21: note = Description of Artificial Sequence: Synthetic oligonucleotide
  source 1..21: mol_type = other DNA
aatcgtcaggggattctgtct

SEQ ID NO: 37384 - DNA, 21 bp, synthetic construct
  misc_feature 1..21: note = Description of Artificial Sequence: Synthetic oligonucleotide
  source 1..21: mol_type = other DNA
agcaccaccaaagacggcatc

SEQ ID NO: 37385 - DNA, 21 bp, synthetic construct
  misc_feature 1..21: note = Description of Artificial Sequence: Synthetic oligonucleotide
  source 1..21: mol_type = other DNA
agaagcggcagcgtcaacccc

SEQ ID NO: 37386 - DNA, 21 bp, synthetic construct
  misc_feature 1..21: note = Description of Artificial Sequence: Synthetic oligonucleotide
  source 1..21: mol_type = other DNA
gatacgaataagactagttat

SEQ ID NO: 37387 - DNA, 21 bp, synthetic construct
  misc_feature 1..21: note = Description of Artificial Sequence: Synthetic oligonucleotide
  source 1..21: mol_type = other DNA
cttcctgggcagttgaggact

SEQ ID NO: 37388 - DNA, 21 bp, synthetic construct
  misc_feature 1..21: note = Description of Artificial Sequence: Synthetic oligonucleotide
  source 1..21: mol_type = other DNA
actacttcgggtgctgggcgt

SEQ ID NO: 37389 - DNA, 21 bp, synthetic construct
  misc_feature 1..21: note = Description of Artificial Sequence: Synthetic oligonucleotide
  source 1..21: mol_type = other DNA
gccttcggcggcgaaaccaaa

SEQ ID NO: 37390 - DNA, 21 bp, synthetic construct
  misc_feature 1..21: note = Description of Artificial Sequence: Synthetic oligonucleotide
  source 1..21: mol_type = other DNA
tctactggtgttcgggtgggg

SEQ ID NO: 37391 - DNA, 21 bp, synthetic construct
  misc_feature 1..21: note = Description of Artificial Sequence: Synthetic oligonucleotide
  source 1..21: mol_type = other DNA
cctgcgcgtgatagtaagtcg

SEQ ID NO: 37392 - DNA, 21 bp, synthetic construct
  misc_feature 1..21: note = Description of Artificial Sequence: Synthetic oligonucleotide
  source 1..21: mol_type = other DNA
gggcatcctacgaatacgact

SEQ ID NO: 37393 - DNA, 21 bp, synthetic construct
  misc_feature 1..21: note = Description of Artificial Sequence: Synthetic oligonucleotide
  source 1..21: mol_type = other DNA
tcgagtgcggggacttatact

SEQ ID NO: 37394 - DNA, 21 bp, synthetic construct
  misc_feature 1..21: note = Description of Artificial Sequence: Synthetic oligonucleotide
  source 1..21: mol_type = other DNA
actccgattactcctatgact

SEQ ID NO: 37395 - DNA, 21 bp, synthetic construct
  misc_feature 1..21: note = Description of Artificial Sequence: Synthetic oligonucleotide
  source 1..21: mol_type = other DNA
attaggtcgaaggcgtctgcg

SEQ ID NO: 37396 - DNA, 21 bp, synthetic construct
  misc_feature 1..21: note = Description of Artificial Sequence: Synthetic oligonucleotide
  source 1..21: mol_type = other DNA
cctgttggttcgagtggtcct

SEQ ID NO: 37397 - DNA, 21 bp, synthetic construct
  misc_feature 1..21: note = Description of Artificial Sequence: Synthetic oligonucleotide
  source 1..21: mol_type = other DNA
actcagcagcatgggagtaat

SEQ ID NO: 37398 - DNA, 21 bp, synthetic construct
  misc_feature 1..21: note = Description of Artificial Sequence: Synthetic oligonucleotide
  source 1..21: mol_type = other DNA
agtactacgaatagtaagaat

SEQ ID NO: 37399 - DNA, 21 bp, synthetic construct
  misc_feature 1..21: note = Description of Artificial Sequence: Synthetic oligonucleotide
  source 1..21: mol_type = other DNA
cctggtagttcgaataggaat

SEQ ID NO: 37400 - DNA, 21 bp, synthetic construct
  misc_feature 1..21: note = Description of Artificial Sequence: Synthetic oligonucleotide
  source 1..21: mol_type = other DNA
cccatcggcagccaacacatc

SEQ ID NO: 37401 - DNA, 21 bp, synthetic construct
  misc_feature 1..21: note = Description of Artificial Sequence: Synthetic oligonucleotide
  source 1..21: mol_type = other DNA
aataatgctcatagttcgtct

SEQ ID NO: 37402 - DNA, 21 bp, synthetic construct
  misc_feature 1..21: note = Description of Artificial Sequence: Synthetic oligonucleotide
  source 1..21: mol_type = other DNA
aatacgcttcaggggcatcgg

SEQ ID NO: 37403 - DNA, 21 bp, synthetic construct
  misc_feature 1..21: note = Description of Artificial Sequence: Synthetic oligonucleotide
  source 1..21: mol_type = other DNA
tacaacagaagcgaaagaccc

SEQ ID NO: 37404 - DNA, 21 bp, synthetic construct
  misc_feature 1..21: note = Description of Artificial Sequence: Synthetic oligonucleotide
  source 1..21: mol_type = other DNA
ccgacgaagggggctaatgcg

SEQ ID NO: 37405 - DNA, 21 bp, synthetic construct
  misc_feature 1..21: note = Description of Artificial Sequence: Synthetic oligonucleotide
  source 1..21: mol_type = other DNA
ccgctgggtcagtcttatcgg

SEQ ID NO: 37406 - DNA, 21 bp, synthetic construct
  misc_feature 1..21: note = Description of Artificial Sequence: Synthetic oligonucleotide
  source 1..21: mol_type = other DNA
actaatccgaagtcgtcttct

SEQ ID NO: 37407 - DNA, 21 bp, synthetic construct
  misc_feature 1..21: note = Description of Artificial Sequence: Synthetic oligonucleotide
  source 1..21: mol_type = other DNA
gccgaacaaagacccggccaa

SEQ ID NO: 37408 - DNA, 21 bp, synthetic construct
  misc_feature 1..21: note = Description of Artificial Sequence: Synthetic oligonucleotide
  source 1..21: mol_type = other DNA
gatcctcgtaattctacgtct

SEQ ID NO: 37409 - DNA, 21 bp, synthetic construct
  misc_feature 1..21: note = Description of Artificial Sequence: Synthetic oligonucleotide
  source 1..21: mol_type = other DNA
gtgagtactcggagtatttcg

SEQ ID NO: 37410 - DNA, 21 bp, synthetic construct
  misc_feature 1..21: note = Description of Artificial Sequence: Synthetic oligonucleotide
  source 1..21: mol_type = other DNA
tggagaaccagcaaagccacc

SEQ ID NO: 37411 - DNA, 21 bp, synthetic construct
  misc_feature 1..21: note = Description of Artificial Sequence: Synthetic oligonucleotide
  source 1..21: mol_type = other DNA
tatactgggagtcagtatatg

SEQ ID NO: 37412 - DNA, 21 bp, synthetic construct
  misc_feature 1..21: note = Description of Artificial Sequence: Synthetic oligonucleotide
  source 1..21: mol_type = other DNA
tgtggtcgtcctcagattcgt

SEQ ID NO: 37413 - DNA, 21 bp, synthetic construct
  misc_feature 1..21: note = Description of Artificial Sequence: Synthetic oligonucleotide
  source 1..21: mol_type = other DNA
gtcttcaacagaaacgccagc

SEQ ID NO: 37414 - DNA, 21 bp, synthetic construct
  misc_feature 1..21: note = Description of Artificial Sequence: Synthetic oligonucleotide
  source 1..21: mol_type = other DNA
ggtacttctgggggtattgtt

SEQ ID NO: 37415 - DNA, 21 bp, synthetic construct
  misc_feature 1..21: note = Description of Artificial Sequence: Synthetic oligonucleotide
  source 1..21: mol_type = other DNA
cgtgttgtgacgaataatctg

SEQ ID NO: 37416 - DNA, 21 bp, synthetic construct
  misc_feature 1..21: note = Description of Artificial Sequence: Synthetic oligonucleotide
  source 1..21: mol_type = other DNA
caaaccagaagcgccgaaaga

SEQ ID NO: 37417 - DNA, 21 bp, synthetic construct
  misc_feature 1..21: note = Description of Artificial Sequence: Synthetic oligonucleotide
  source 1..21: mol_type = other DNA
ctgaatcattcgaagtattcg

SEQ ID NO: 37418 - DNA, 21 bp, synthetic construct
  misc_feature 1..21: note = Description of Artificial Sequence: Synthetic oligonucleotide
  source 1..21: mol_type = other DNA
gccaccaaccacagcccccaa

SEQ ID NO: 37419 - DNA, 21 bp, synthetic construct
  misc_feature 1..21: note = Description of Artificial Sequence: Synthetic oligonucleotide
  source 1..21: mol_type = other DNA
tgttcgaatcagcgtatgctg

SEQ ID NO: 37420 - DNA, 21 bp, synthetic construct
  misc_feature 1..21: note = Description of Artificial Sequence: Synthetic oligonucleotide
  source 1..21: mol_type = other DNA
cacggttctggacagaatcaa

SEQ ID NO: 37421 - DNA, 21 bp, synthetic construct
  misc_feature 1..21: note = Description of Artificial Sequence: Synthetic oligonucleotide
  source 1..21: mol_type = other DNA
cctgggactacgagtgtgggg

SEQ ID NO: 37422 - DNA, 21 bp, synthetic construct
  misc_feature 1..21: note = Description of Artificial Sequence: Synthetic oligonucleotide
  source 1..21: mol_type = other DNA
attggtaataagcagtcgcag

SEQ ID NO: 37423 - DNA, 21 bp, synthetic construct
  misc_feature 1..21: note = Description of Artificial Sequence: Synthetic oligonucleotide
  source 1..21: mol_type = other DNA
aatccgggtaaggggtcgtct

SEQ ID NO: 37424 - DNA, 21 bp, synthetic construct
  misc_feature 1..21: note = Description of Artificial Sequence: Synthetic oligonucleotide
  source 1..21: mol_type = other DNA
aattctaatactcgtggtcct

SEQ ID NO: 37425 - DNA, 21 bp, synthetic construct
  misc_feature 1..21: note = Description of Artificial Sequence: Synthetic oligonucleotide
  source 1..21: mol_type = other DNA
gcgggttcgtctcctcctacg

SEQ ID NO: 37426 - DNA, 21 bp, synthetic construct
  misc_feature 1..21: note = Description of Artificial Sequence: Synthetic oligonucleotide
  source 1..21: mol_type = other DNA
caaaaccaaaacagcggcaga

SEQ ID NO: 37427 - DNA, 21 bp, synthetic construct
  misc_feature 1..21: note = Description of Artificial Sequence: Synthetic oligonucleotide
  source 1..21: mol_type = other DNA
agtatggcgaatacggtggct

SEQ ID NO: 37428 - DNA, 21 bp, synthetic construct
  misc_feature 1..21: note = Description of Artificial Sequence: Synthetic oligonucleotide
  source 1..21: mol_type = other DNA
gtccaaagaagcagcaaccaa

SEQ ID NO: 37429 - DNA, 21 bp, synthetic construct
  misc_feature 1..21: note = Description of Artificial Sequence: Synthetic oligonucleotide
  source 1..21: mol_type = other DNA
aatggtaatatttctattggg

SEQ ID NO: 37430 - DNA, 21 bp, synthetic construct
  misc_feature 1..21: note = Description of Artificial Sequence: Synthetic oligonucleotide
  source 1..21: mol_type = other DNA
tcgcctgagaagaatatgcgg

SEQ ID NO: 37431 - DNA, 21 bp, synthetic construct
  misc_feature 1..21: note = Description of Artificial Sequence: Synthetic oligonucleotide
  source 1..21: mol_type = other DNA
caagacatgagactcagcggc

SEQ ID NO: 37432 - DNA, 21 bp, synthetic construct
  misc_feature 1..21: note = Description of Artificial Sequence: Synthetic oligonucleotide
  source 1..21: mol_type = other DNA
ggtaatgggatttctactaag

SEQ ID NO: 37433 - DNA, 21 bp, synthetic construct
  misc_feature 1..21: note = Description of Artificial Sequence: Synthetic oligonucleotide
  source 1..21: mol_type = other DNA
tttcagccgaggagttctacg

SEQ ID NO: 37434 - DNA, 21 bp, synthetic construct
  misc_feature 1..21: note = Description of Artificial Sequence: Synthetic oligonucleotide
  source 1..21: mol_type = other DNA
gaccccgtcaccagacaaagc

SEQ ID NO: 37435 - DNA, 21 bp, synthetic construct
  misc_feature 1..21: note = Description of Artificial Sequence: Synthetic oligonucleotide
  source 1..21: mol_type = other DNA
tcgatttctcattcgtctagt

SEQ ID NO: 37436 - DNA, 21 bp, synthetic construct
  misc_feature 1..21: note = Description of Artificial Sequence: Synthetic oligonucleotide
  source 1..21: mol_type = other DNA
ccgggtaatatgacgagtcgt

SEQ ID NO: 37437 - DNA, 21 bp, synthetic construct
  misc_feature 1..21: note = Description of Artificial Sequence: Synthetic oligonucleotide
  source 1..21: mol_type = other DNA
ctctgcgccagcaaatgcgac

SEQ ID NO: 37438 - DNA, 21 bp, synthetic construct
  misc_feature 1..21: note = Description of Artificial Sequence: Synthetic oligonucleotide
  source 1..21: mol_type = other DNA
aacgattctggacagaatcaa

SEQ ID NO: 37439 - DNA, 21 bp, synthetic construct
  misc_feature 1..21: note = Description of Artificial Sequence: Synthetic oligonucleotide
  source 1..21: mol_type = other DNA
cccagcaacagcggcaacaac

SEQ ID NO: 37440 - DNA, 21 bp, synthetic construct
  misc_feature 1..21: note = Description of Artificial Sequence: Synthetic oligonucleotide
  source 1..21: mol_type = other DNA
cgtcagaatggtggtgtgaag

SEQ ID NO: 37441 - DNA, 21 bp, synthetic construct
  misc_feature 1..21: note = Description of Artificial Sequence: Synthetic oligonucleotide
  source 1..21: mol_type = other DNA
accagcgaaagacccacctgc

SEQ ID NO: 37442 - DNA, 21 bp, synthetic construct
  misc_feature 1..21: note = Description of Artificial Sequence: Synthetic oligonucleotide
  source 1..21: mol_type = other DNA
accagatacgacaacgtcggc

SEQ ID NO: 37443 - DNA, 21 bp, synthetic construct
  misc_feature 1..21: note = Description of Artificial Sequence: Synthetic oligonucleotide
  source 1..21: mol_type = other DNA
ggcgccggcagagccctccaa

SEQ ID NO: 37444 - DNA, 21 bp, synthetic construct
  misc_feature 1..21: note = Description of Artificial Sequence: Synthetic oligonucleotide
  source 1..21: mol_type = other DNA
aacggcgtcccccaccccaaa

SEQ ID NO: 37445 - DNA, 21 bp, synthetic construct
  misc_feature 1..21: note = Description of Artificial Sequence: Synthetic oligonucleotide
  source 1..21: mol_type = other DNA
ccttctactcagtcgagttct

SEQ ID NO: 37446 - DNA, 21 bp, synthetic construct
  misc_feature 1..21: note = Description of Artificial Sequence: Synthetic oligonucleotide
  source 1..21: mol_type = other DNA
actaagccgggggttggttct

SEQ ID NO: 37447 - DNA, 21 bp, synthetic construct
  misc_feature 1..21: note = Description of Artificial Sequence: Synthetic oligonucleotide
  source 1..21: mol_type = other DNA
agcatcaaaaccgtcaccaac

SEQ ID NO: 37448 - DNA, 21 bp, synthetic construct
  misc_feature 1..21: note = Description of Artificial Sequence: Synthetic oligonucleotide
  source 1..21: mol_type = other DNA
agacaaagcaccaacatcggc

SEQ ID NO: 37449 - DNA, 21 bp, synthetic construct
  misc_feature 1..21: note = Description of Artificial Sequence: Synthetic oligonucleotide
  source 1..21: mol_type = other DNA
cccaccagccaacaaagaccc

SEQ ID NO: 37450 - DNA, 21 bp, synthetic construct
  misc_feature 1..21: note = Description of Artificial Sequence: Synthetic oligonucleotide
  source 1..21: mol_type = other DNA
ccgacggttcaggttacgaag

SEQ ID NO: 37451 - DNA, 21 bp, synthetic construct
  misc_feature 1..21: note = Description of Artificial Sequence: Synthetic oligonucleotide
  source 1..21: mol_type = other DNA
aatacgtctaataatattcag

SEQ ID NO: 37452 - DNA, 21 bp, synthetic construct
  misc_feature 1..21: note = Description of Artificial Sequence: Synthetic oligonucleotide
  source 1..21: mol_type = other DNA
cagccggcggggaaggtggtt

SEQ ID NO: 37453 - DNA, 21 bp, synthetic construct
  misc_feature 1..21: note = Description of Artificial Sequence: Synthetic oligonucleotide
  source 1..21: mol_type = other DNA
gttcgtgagtctcgttcttct

SEQ ID NO: 37454 - DNA, 21 bp, synthetic construct
  misc_feature 1..21: note = Description of Artificial Sequence: Synthetic oligonucleotide
  source 1..21: mol_type = other DNA
atgggttctgtggcgatgctt

SEQ ID NO: 37455 - DNA, 21 bp, synthetic construct
  misc_feature 1..21: note = Description of Artificial Sequence: Synthetic oligonucleotide
  source 1..21: mol_type = other DNA
cttcctggtcagggtgttggt

SEQ ID NO: 37456 - DNA, 21 bp, synthetic construct
  misc_feature 1..21: note = Description of Artificial Sequence: Synthetic oligonucleotide
  source 1..21: mol_type = other DNA
agtaatggtcagaggaaggag

SEQ ID NO: 37457 - DNA, 21 bp, synthetic construct
  misc_feature 1..21: note = Description of Artificial Sequence: Synthetic oligonucleotide
  source 1..21: mol_type = other DNA
ccgggtattaatactaatagt

SEQ ID NO: 37458 - DNA, 21 bp, synthetic construct
  misc_feature 1..21: note = Description of Artificial Sequence: Synthetic oligonucleotide
  source 1..21: mol_type = other DNA
ccgactactaggatggtgaat

SEQ ID NO: 37459 - DNA, 21 bp, synthetic construct
  misc_feature 1..21: note = Description of Artificial Sequence: Synthetic oligonucleotide
  source 1..21: mol_type = other DNA
tatgggaagagtgttacgcct

SEQ ID NO: 37460 - DNA, 21 bp, synthetic construct
  misc_feature 1..21: note = Description of Artificial Sequence: Synthetic oligonucleotide
  source 1..21: mol_type = other DNA
agcctccaccaagtcggcggc

SEQ ID NO: 37461 - DNA, 21 bp, synthetic construct
  misc_feature 1..21: note = Description of Artificial Sequence: Synthetic oligonucleotide
  source 1..21: mol_type = other DNA
gagaattctagtaaggctaag

SEQ ID NO: 37462 - DNA, 21 bp, synthetic construct
  misc_feature 1..21: note = Description of Artificial Sequence: Synthetic oligonucleotide
  source 1..21: mol_type = other DNA
atgagttctgagcgtccgggt

SEQ ID NO: 37463 - DNA, 21 bp, synthetic construct
  misc_feature 1..21: note = Description of Artificial Sequence: Synthetic oligonucleotide
  source 1..21: mol_type = other DNA
agcaaagccggcagagtcacc

SEQ ID NO: 37464 - DNA, 21 bp, synthetic construct
  misc_feature 1..21: note = Description of Artificial Sequence: Synthetic oligonucleotide
  source 1..21: mol_type = other DNA
cacaaagtccccggcagcggc

SEQ ID NO: 37465 - DNA, 21 bp, synthetic construct
  misc_feature 1..21: note = Description of Artificial Sequence: Synthetic oligonucleotide
  source 1..21: mol_type = other DNA
catctgagggataagtattcg

SEQ ID NO: 37466 - DNA, 21 bp, synthetic construct
  misc_feature 1..21: note = Description of Artificial Sequence: Synthetic oligonucleotide
  source 1..21: mol_type = other DNA
aagaatggttctgtggctctt

SEQ ID NO: 37467 - DNA, 21 bp, synthetic construct
  misc_feature 1..21: note = Description of Artificial Sequence: Synthetic oligonucleotide
  source 1..21: mol_type = other DNA
tttacttctaataaggcgtcg

SEQ ID NO: 37468 - DNA, 21 bp, synthetic construct
  misc_feature 1..21: note = Description of Artificial Sequence: Synthetic oligonucleotide
  source 1..21: mol_type = other DNA
ggtactggtaagattatgccg

SEQ ID NO: 37469 - DNA, 21 bp, synthetic construct
  misc_feature 1..21: note = Description of Artificial Sequence: Synthetic oligonucleotide
  source 1..21: mol_type = other DNA
ccgagtgggtcgccggtgagg

SEQ ID NO: 37470 - DNA, 21 bp, synthetic construct
  misc_feature 1..21: note = Description of Artificial Sequence: Synthetic oligonucleotide
  source 1..21: mol_type = other DNA
cctagggagactcataagcag

SEQ ID NO: 37471 - DNA, 21 bp, synthetic construct
  misc_feature 1..21: note = Description of Artificial Sequence: Synthetic oligonucleotide
  source 1..21: mol_type = other DNA
cagggtcctaagaatgctgat

SEQ ID NO: 37472 - DNA, 21 bp, synthetic construct
  misc_feature 1..21: note = Description of Artificial Sequence: Synthetic oligonucleotide
  source 1..21: mol_type = other DNA
accagcaacggcggcagcgcc

SEQ ID NO: 37473 - DNA, 21 bp, synthetic construct
  misc_feature 1..21: note = Description of Artificial Sequence: Synthetic oligonucleotide
  source 1..21: mol_type = other DNA
cagggtgcgggggtttcgtct

SEQ ID NO: 37474 - DNA, 21 bp, synthetic construct
  misc_feature 1..21: note = Description of Artificial Sequence: Synthetic oligonucleotide
  source 1..21: mol_type = other DNA
attggggggaataagcctctt

SEQ ID NO: 37475 - DNA, 21 bp, synthetic construct
  misc_feature 1..21: note = Description of Artificial Sequence: Synthetic oligonucleotide
  source 1..21: mol_type = other DNA
tatcctctttctcggtctact

SEQ ID NO: 37476 - DNA, 21 bp, synthetic construct
  misc_feature 1..21: note = Description of Artificial Sequence: Synthetic oligonucleotide
  source 1..21: mol_type = other DNA
agtactactgggggggctagt

SEQ ID NO: 37477 - DNA, 21 bp, synthetic construct
  misc_feature 1..21: note = Description of Artificial Sequence: Synthetic oligonucleotide
  source 1..21: mol_type = other DNA
tacagcggcggcacccaacaa

SEQ ID NO: 37478 - DNA, 21 bp, synthetic construct
  misc_feature 1..21: note = Description of Artificial Sequence: Synthetic oligonucleotide
  source 1..21: mol_type = other DNA
ggggttgttcctcctacgaag

SEQ ID NO: 37479 - DNA, 21 bp, synthetic construct
  misc_feature 1..21: note = Description of Artificial Sequence: Synthetic oligonucleotide
  source 1..21: mol_type = other DNA
agcagaaccaacgccaccgcc

SEQ ID NO: 37480 - DNA, 21 bp, synthetic construct
  misc_feature 1..21: note = Description of Artificial Sequence: Synthetic oligonucleotide
  source 1..21: mol_type = other DNA
aagaatgagtcgatggttctt

SEQ ID NO: 37481 - DNA, 21 bp, synthetic construct
  misc_feature 1..21: note = Description of Artificial Sequence: Synthetic oligonucleotide
  source 1..21: mol_type = other DNA
accatgagagccacccccccc

SEQ ID NO: 37482 - DNA, 21 bp, synthetic construct
  misc_feature 1..21: note = Description of Artificial Sequence: Synthetic oligonucleotide
  source 1..21: mol_type = other DNA
gagcagggttcgggtaatcat

SEQ ID NO: 37483 - DNA, 21 bp, synthetic construct
  misc_feature 1..21: note = Description of Artificial Sequence: Synthetic oligonucleotide
  source 1..21: mol_type = other DNA
gttaatacgaatctggttggt

SEQ ID NO: 37484 - DNA, 21 bp, synthetic construct
  misc_feature 1..21: note = Description of Artificial Sequence: Synthetic oligonucleotide
  source 1..21: mol_type = other DNA
agcggcaacgacaaaaacaac

SEQ ID NO: 37485 - DNA, 21 bp, synthetic construct
  misc_feature 1..21: note = Description of Artificial Sequence: Synthetic oligonucleotide
  source 1..21: mol_type = other DNA
cccctcagccacagcaaaatg

SEQ ID NO: 37486 - DNA, 21 bp, synthetic construct
  misc_feature 1..21: note = Description of Artificial Sequence: Synthetic oligonucleotide
  source 1..21: mol_type = other DNA
gctcagcagctgaatggtgtt

SEQ ID NO: 37487 - DNA, 21 bp, synthetic construct
  misc_feature 1..21: note = Description of Artificial Sequence: Synthetic oligonucleotide
  source 1..21: mol_type = other DNA
aaaaaagtcaccggccaaggc

SEQ ID NO: 37488 - DNA, 21 bp, synthetic construct
  misc_feature 1..21: note = Description of Artificial Sequence: Synthetic oligonucleotide
  source 1..21: mol_type = other DNA
gataatgtgtcgacttttacg

SEQ ID NO: 37489 - DNA, 21 bp, synthetic construct
  misc_feature 1..21: note = Description of Artificial Sequence: Synthetic oligonucleotide
  source 1..21: mol_type = other DNA
gccagcagcaaaggcctcacc

SEQ ID NO: 37490 - DNA, 21 bp, synthetic construct
  misc_feature 1..21: note = Description of Artificial Sequence: Synthetic oligonucleotide
  source 1..21: mol_type = other DNA
agagacggcggccaagacaga

SEQ ID NO: 37491 - DNA, 21 bp, synthetic construct
  misc_feature 1..21: note = Description of Artificial Sequence: Synthetic oligonucleotide
  source 1..21: mol_type = other DNA
ctccccagcggcaacaccagc

SEQ ID NO: 37492 - DNA, 21 bp, synthetic construct
  misc_feature 1..21: note = Description of Artificial Sequence: Synthetic oligonucleotide
  source 1..21: mol_type = other DNA
tcgaaggctacgcataatatt

SEQ ID NO: 37493 - DNA, 21 bp, synthetic construct
  misc_feature 1..21: note = Description of Artificial Sequence: Synthetic oligonucleotide
  source 1..21: mol_type = other DNA
tctggtacgcagatgcatttg

SEQ ID NO: 37494 - DNA, 21 bp, synthetic construct
  misc_feature 1..21: note = Description of Artificial Sequence: Synthetic oligonucleotide
  source 1..21: mol_type = other DNA
gcgacggttcagtcggcgact

SEQ ID NO: 37495 - DNA, 21 bp, synthetic construct
  misc_feature 1..21: note = Description of Artificial Sequence: Synthetic oligonucleotide
  source 1..21: mol_type = other DNA
cccgtcagagacggcggcaga

SEQ ID NO: 37496 - DNA, 21 bp, synthetic construct
  misc_feature 1..21: note = Description of Artificial Sequence: Synthetic oligonucleotide
  source 1..21: mol_type = other DNA
tatgtgaggcctggtactggt

SEQ ID NO: 37497 - DNA, 21 bp, synthetic construct
  misc_feature 1..21: note = Description of Artificial Sequence: Synthetic oligonucleotide
  source 1..21: mol_type = other DNA
actggttctggtcggggtctt

SEQ ID NO: 37498 - DNA, 21 bp, synthetic construct
  misc_feature 1..21: note = Description of Artificial Sequence: Synthetic oligonucleotide
  source 1..21: mol_type = other DNA
atgagcagcagaagcagcgtc

SEQ ID NO: 37499 - DNA, 21 bp, synthetic construct
  misc_feature 1..21: note = Description of Artificial Sequence: Synthetic oligonucleotide
  source 1..21: mol_type = other DNA
gattatgggaaggggagttct

SEQ ID NO: 37500 - DNA, 21 bp, synthetic construct
  misc_feature 1..21: note = Description of Artificial Sequence: Synthetic oligonucleotide
  source 1..21: mol_type = other DNA
agtaagactgggactagtttg

SEQ ID NO: 37501 - DNA, 21 bp, synthetic construct
  misc_feature 1..21: note = Description of Artificial Sequence: Synthetic oligonucleotide
  source 1..21: mol_type = other DNA
atgcccagccaaagagacggc

SEQ ID NO: 37502 - DNA, 21 bp, synthetic construct
  misc_feature 1..21: note = Description of Artificial Sequence: Synthetic oligonucleotide
  source 1..21: mol_type = other DNA
ggccaaagcggcagcagactc

SEQ ID NO: 37503 - DNA, 21 bp, synthetic construct
  misc_feature 1..21: note = Description of Artificial Sequence: Synthetic oligonucleotide
  source 1..21: mol_type = other DNA
agcagaaacgtcaacgccatg

SEQ ID NO: 37504 - DNA, 21 bp, synthetic construct
  misc_feature 1..21: note = Description of Artificial Sequence: Synthetic oligonucleotide
  source 1..21: mol_type = other DNA
caggtgagtccgttgaatgcg

SEQ ID NO: 37505 - DNA, 21 bp, synthetic construct
  misc_feature 1..21: note = Description of Artificial Sequence: Synthetic oligonucleotide
  source 1..21: mol_type = other DNA
ctcaacagcaccgccggcaaa

SEQ ID NO: 37506 - DNA, 21 bp, synthetic construct
  misc_feature 1..21: note = Description of Artificial Sequence: Synthetic oligonucleotide
  source 1..21: mol_type = other DNA
cccacccaacccagataccaa

SEQ ID NO: 37507 - DNA, 21 bp, synthetic construct
  misc_feature 1..21: note = Description of Artificial Sequence: Synthetic oligonucleotide
  source 1..21: mol_type = other DNA
actaggagtgacagggtggct

SEQ ID NO: 37508 - DNA, 21 bp, synthetic construct
  misc_feature 1..21: note = Description of Artificial Sequence: Synthetic oligonucleotide
  source 1..21: mol_type = other DNA
tgttccacgggtactcggaag

SEQ ID NO: 37509 - DNA, 21 bp, synthetic construct
  misc_feature 1..21: note = Description of Artificial Sequence: Synthetic oligonucleotide
  source 1..21: mol_type = other DNA
ggcacccccaacaccaaagtc

SEQ ID NO: 37510 - DNA, 21 bp, synthetic construct
  misc_feature 1..21: note = Description of Artificial Sequence: Synthetic oligonucleotide
  source 1..21: mol_type = other DNA
gcgggttctagtaggaatctt

SEQ ID NO: 37511 - DNA, 21 bp, synthetic construct
  misc_feature 1..21: note = Description of Artificial Sequence: Synthetic oligonucleotide
  source 1..21: mol_type = other DNA
tacaccgccagcagaatggaa

SEQ ID NO: 37512 - DNA, 21 bp, synthetic construct
  misc_feature 1..21: note = Description of Artificial Sequence: Synthetic oligonucleotide
  source 1..21: mol_type = other DNA
ggccaaaacagaaacaacacc

SEQ ID NO: 37513 - DNA, 21 bp, synthetic construct
  misc_feature 1..21: note = Description of Artificial Sequence: Synthetic oligonucleotide
  source 1..21: mol_type = other DNA
aacccctacaccgccaacaac

SEQ ID NO: 37514 - DNA, 21 bp, synthetic construct
  misc_feature 1..21: note = Description of Artificial Sequence: Synthetic oligonucleotide
  source 1..21: mol_type = other DNA
agaagcctcagcaccgaaaac

SEQ ID NO: 37515 - DNA, 21 bp, synthetic construct
  misc_feature 1..21: note = Description of Artificial Sequence: Synthetic oligonucleotide
  source 1..21: mol_type = other DNA
tctgggcctagggggaattcg

SEQ ID NO: 37516 - DNA, 21 bp, synthetic construct
  misc_feature 1..21: note = Description of Artificial Sequence: Synthetic oligonucleotide
  source 1..21: mol_type = other DNA
acgcaggatcatcatgttaag

SEQ ID NO: 37517 - DNA, 21 bp, synthetic construct
  misc_feature 1..21: note = Description of Artificial Sequence: Synthetic oligonucleotide
  source 1..21: mol_type = other DNA
gaggtgactcctctgaggaag

SEQ ID NO: 37518 - DNA, 21 bp, synthetic construct
  misc_feature 1..21: note = Description of Artificial Sequence: Synthetic oligonucleotide
  source 1..21: mol_type = other DNA
gacatggtcagccccagaaac

SEQ ID NO: 37519 - DNA, 21 bp, synthetic construct
  misc_feature 1..21: note = Description of Artificial Sequence: Synthetic oligonucleotide
  source 1..21: mol_type = other DNA
gactacagcgaaaccagaaga

SEQ ID NO: 37520 - DNA, 21 bp, synthetic construct
  misc_feature 1..21: note = Description of Artificial Sequence: Synthetic oligonucleotide
  source 1..21: mol_type = other DNA
cccagaagcaccgccagcctc

SEQ ID NO: 37521 - DNA, 21 bp, synthetic construct
  misc_feature 1..21: note = Description of Artificial Sequence: Synthetic oligonucleotide
  source 1..21: mol_type = other DNA
tacttcaacagccacagcaac

SEQ ID NO: 37522 - DNA, 21 bp, synthetic construct
  misc_feature 1..21: note = Description of Artificial Sequence: Synthetic oligonucleotide
  source 1..21: mol_type = other DNA
aacctcgtccaagacagaaga

SEQ ID NO: 37523 - DNA, 21 bp, synthetic construct
  misc_feature 1..21: note = Description of Artificial Sequence: Synthetic oligonucleotide
  source 1..21: mol_type = other DNA
gccgacgacaaaagcctcaga

SEQ ID NO: 37524 - DNA, 21 bp, synthetic construct
  misc_feature 1..21: note = Description of Artificial Sequence: Synthetic oligonucleotide
  source 1..21: mol_type = other DNA
gaagccagagaaagaaaaggc

SEQ ID NO: 37525 - DNA, 21 bp, synthetic construct
  misc_feature 1..21: note = Description of Artificial Sequence: Synthetic oligonucleotide
  source 1..21: mol_type = other DNA
tacagaagcgccgccaacagc

SEQ ID NO: 37526 - DNA, 21 bp, synthetic construct
  misc_feature 1..21: note = Description of Artificial Sequence: Synthetic oligonucleotide
  source 1..21: mol_type = other DNA
agccacaacagcaaagacagc

SEQ ID NO: 37527 - DNA, 21 bp, synthetic construct
  misc_feature 1..21: note = Description of Artificial Sequence: Synthetic oligonucleotide
  source 1..21: mol_type = other DNA
ctcagcggccacagcccccaa

SEQ ID NO: 37528 - DNA, 21 bp, synthetic construct
  misc_feature 1..21: note = Description of Artificial Sequence: Synthetic oligonucleotide
  source 1..21: mol_type = other DNA
tgcaccggcagcagaagcatg

SEQ ID NO: 37529 - DNA, 21 bp, synthetic construct
  misc_feature 1..21: note = Description of Artificial Sequence: Synthetic oligonucleotide
  source 1..21: mol_type = other DNA
agacactacaccggcgaaagc

SEQ ID NO: 37530 - DNA, 21 bp, synthetic construct
  misc_feature 1..21: note = Description of Artificial Sequence: Synthetic oligonucleotide
  source 1..21: mol_type = other DNA
aattcgagttcgtctaatcat

SEQ ID NO: 37531 - DNA, 21 bp, synthetic construct
  misc_feature 1..21: note = Description of Artificial Sequence: Synthetic oligonucleotide
  source 1..21: mol_type = other DNA
acgccgacgctgtctcatact

SEQ ID NO: 37532 - DNA, 21 bp, synthetic construct
  misc_feature 1..21: note = Description of Artificial Sequence: Synthetic oligonucleotide
  source 1..21: mol_type = other DNA
aacagcatcagcagagtcacc

SEQ ID NO: 37533 - DNA, 21 bp, synthetic construct
  misc_feature 1..21: note = Description of Artificial Sequence: Synthetic oligonucleotide
  source 1..21: mol_type = other DNA
aacaacctccccagaaacctc

SEQ ID NO: 37534 - DNA, 21 bp, synthetic construct
  misc_feature 1..21: note = Description of Artificial Sequence: Synthetic oligonucleotide
  source 1..21: mol_type = other DNA
ggcagacaaaacgaatacaga

SEQ ID NO: 37535 - DNA, 21 bp, synthetic construct
  misc_feature 1..21: note = Description of Artificial Sequence: Synthetic oligonucleotide
  source 1..21: mol_type = other DNA
gccaacaccaccagactcacc

SEQ ID NO: 37536 - DNA, 21 bp, synthetic construct
  misc_feature 1..21: note = Description of Artificial Sequence: Synthetic oligonucleotide
  source 1..21: mol_type = other DNA
aatctttcgcatagtgcgggg

SEQ ID NO: 37537 - DNA, 21 bp, synthetic construct
  misc_feature 1..21: note = Description of Artificial Sequence: Synthetic oligonucleotide
  source 1..21: mol_type = other DNA
cagactcgtagtactggtaat

SEQ ID NO: 37538 - DNA, 21 bp, synthetic construct
  misc_feature 1..21: note = Description of Artificial Sequence: Synthetic oligonucleotide
  source 1..21: mol_type = other DNA
aataatgtgggtgttcgtggt

SEQ ID NO: 37539 - DNA, 21 bp, synthetic construct
  misc_feature 1..21: note = Description of Artificial Sequence: Synthetic oligonucleotide
  source 1..21: mol_type = other DNA
gggatgacgcaggggggtaag

SEQ ID NO: 37540 - DNA, 21 bp, synthetic construct
  misc_feature 1..21: note = Description of Artificial Sequence: Synthetic oligonucleotide
  source 1..21: mol_type = other DNA
ccggttgctagggctgcgcag

SEQ ID NO: 37541 - DNA, 21 bp, synthetic construct
  misc_feature 1..21: note = Description of Artificial Sequence: Synthetic oligonucleotide
  source 1..21: mol_type = other DNA
agccacagcaccagactcggc

SEQ ID NO: 37542 - DNA, 21 bp, synthetic construct
  misc_feature 1..21: note = Description of Artificial Sequence: Synthetic oligonucleotide
  source 1..21: mol_type = other DNA
accaacagccaaaaactcgcc

SEQ ID NO: 37543 - DNA, 21 bp, synthetic construct
  misc_feature 1..21: note = Description of Artificial Sequence: Synthetic oligonucleotide
  source 1..21: mol_type = other DNA
cccacccacagcagcagagac

SEQ ID NO: 37544 - DNA, 21 bp, synthetic construct
  misc_feature 1..21: note = Description of Artificial Sequence: Synthetic oligonucleotide
  source 1..21: mol_type = other DNA
tctcattctgttactcctggg

SEQ ID NO: 37545 - DNA, 21 bp, synthetic construct
  misc_feature 1..21: note = Description of Artificial Sequence: Synthetic oligonucleotide
  source 1..21: mol_type = other DNA
cctaatctgagtaagagtttg

SEQ ID NO: 37546 - DNA, 21 bp, synthetic construct
  misc_feature 1..21: note = Description of Artificial Sequence: Synthetic oligonucleotide
  source 1..21: mol_type = other DNA
attattcagaatcagtctaag

SEQ ID NO: 37547 - DNA, 21 bp, synthetic construct
  misc_feature 1..21: note = Description of Artificial Sequence: Synthetic oligonucleotide
  source 1..21: mol_type = other DNA
cagacttcgcattctgctaag

SEQ ID NO: 37548 - DNA, 21 bp, synthetic construct
  misc_feature 1..21: note = Description of Artificial Sequence: Synthetic oligonucleotide
  source 1..21: mol_type = other DNA
gacggcaaccacgccagagcc

SEQ ID NO: 37549 - DNA, 21 bp, synthetic construct
  misc_feature 1..21: note = Description of Artificial Sequence: Synthetic oligonucleotide
  source 1..21: mol_type = other DNA
gagcggatggggaagaatcag

SEQ ID NO: 37550 - DNA, 21 bp, synthetic construct
  misc_feature 1..21: note = Description of Artificial Sequence: Synthetic oligonucleotide
  source 1..21: mol_type = other DNA
agcgtcctcaacagaaacggc

SEQ ID NO: 37551 - DNA, 21 bp, synthetic construct
  misc_feature 1..21: note = Description of Artificial Sequence: Synthetic oligonucleotide
  source 1..21: mol_type = other DNA
caaagcagcagccaacaaaga

SEQ ID NO: 37552 - DNA, 21 bp, synthetic construct
  misc_feature 1..21: note = Description of Artificial Sequence: Synthetic oligonucleotide
  source 1..21: mol_type = other DNA
ccttataagggtaatgggctt

SEQ ID NO: 37553 - DNA, 21 bp, synthetic construct
  misc_feature 1..21: note = Description of Artificial Sequence: Synthetic oligonucleotide
  source 1..21: mol_type = other DNA
tcttcgcagcagaaggcttct

SEQ ID NO: 37554 - DNA, 21 bp, synthetic construct
  misc_feature 1..21: note = Description of Artificial Sequence: Synthetic oligonucleotide
  source 1..21: mol_type = other DNA
agtaatccgagtgggttttcg

SEQ ID NO: 37555 - DNA, 21 bp, synthetic construct
  misc_feature 1..21: note = Description of Artificial Sequence: Synthetic oligonucleotide
  source 1..21: mol_type = other DNA
catgtgcaggatgggaggact

SEQ ID NO: 37556 - DNA, 21 bp, synthetic construct
  misc_feature 1..21: note = Description of Artificial Sequence: Synthetic oligonucleotide
  source 1..21: mol_type = other DNA
ggcagccacaacgacagcaga

SEQ ID NO: 37557 - DNA, 21 bp, synthetic construct
  misc_feature 1..21: note = Description of Artificial Sequence: Synthetic oligonucleotide
  source 1..21: mol_type = other DNA
gctaagactaatttgaggtct

SEQ ID NO: 37558 - DNA, 21 bp, synthetic construct
  misc_feature 1..21: note = Description of Artificial Sequence: Synthetic oligonucleotide
  source 1..21: mol_type = other DNA
gtgcagccgtctggtcgtcct

SEQ ID NO: 37559 - DNA, 21 bp, synthetic construct
  misc_feature 1..21: note = Description of Artificial Sequence: Synthetic oligonucleotide
  source 1..21: mol_type = other DNA
agcgaaagcggccaacaaaga

SEQ ID NO: 37560 - DNA, 21 bp, synthetic construct
  misc_feature 1..21: note = Description of Artificial Sequence: Synthetic oligonucleotide
  source 1..21: mol_type = other DNA
tttagtagtgcttcttttacg

SEQ ID NO: 37561 - DNA, 21 bp, synthetic construct
  misc_feature 1..21: note = Description of Artificial Sequence: Synthetic oligonucleotide
  source 1..21: mol_type = other DNA
gttcagccggtgaagatgagt

SEQ ID NO: 37562 - DNA, 21 bp, synthetic construct
  misc_feature 1..21: note = Description of Artificial Sequence: Synthetic oligonucleotide
  source 1..21: mol_type = other DNA
accggcaccggcagcttccac

SEQ ID NO: 37563 - DNA, 21 bp, synthetic construct
  misc_feature 1..21: note = Description of Artificial Sequence: Synthetic oligonucleotide
  source 1..21: mol_type = other DNA
aacggttctggacagagtcaa

SEQ ID NO: 37564 - DNA, 21 bp, synthetic construct
  misc_feature 1..21: note = Description of Artificial Sequence: Synthetic oligonucleotide
  source 1..21: mol_type = other DNA
ctccccaccgacagcctcaga

SEQ ID NO: 37565 - DNA, 21 bp, synthetic construct
  misc_feature 1..21: note = Description of Artificial Sequence: Synthetic oligonucleotide
  source 1..21: mol_type = other DNA
gaccccgccaccagaaaaagc

SEQ ID NO: 37566 - DNA, 21 bp, synthetic construct
  misc_feature 1..21: note = Description of Artificial Sequence: Synthetic oligonucleotide
  source 1..21: mol_type = other DNA
cgtgttactaatcagaatgcg

SEQ ID NO: 37567 - DNA, 21 bp, synthetic construct
  misc_feature 1..21: note = Description of Artificial Sequence: Synthetic oligonucleotide
  source 1..21: mol_type = other DNA
ctcaacaaccaaagaatcgcc

SEQ ID NO: 37568 - DNA, 21 bp, synthetic construct
  misc_feature 1..21: note = Description of Artificial Sequence: Synthetic oligonucleotide
  source 1..21: mol_type = other DNA
gttaatggtcatggggttagt

SEQ ID NO: 37569 - DNA, 21 bp, synthetic construct
  misc_feature 1..21: note = Description of Artificial Sequence: Synthetic oligonucleotide
  source 1..21: mol_type = other DNA
aatcagtcgaaggcgtctgtt

SEQ ID NO: 37570 - DNA, 21 bp, synthetic construct
  misc_feature 1..21: note = Description of Artificial Sequence: Synthetic oligonucleotide
  source 1..21: mol_type = other DNA
cccaccggcgaaaaaagactc

SEQ ID NO: 37571 - DNA, 21 bp, synthetic construct
  misc_feature 1..21: note = Description of Artificial Sequence: Synthetic oligonucleotide
  source 1..21: mol_type = other DNA
tctaatgcgactaggtctagt

SEQ ID NO: 37572 - DNA, 21 bp, synthetic construct
  misc_feature 1..21: note = Description of Artificial Sequence: Synthetic oligonucleotide
  source 1..21: mol_type = other DNA
cctggtgctagtggtaaggtt

SEQ ID NO: 37573 - DNA, 21 bp, synthetic construct
  misc_feature 1..21: note = Description of Artificial Sequence: Synthetic oligonucleotide
  source 1..21: mol_type = other DNA
tatgctaataatcttaatcgt

SEQ ID NO: 37574 - DNA, 21 bp, synthetic construct
  misc_feature 1..21: note = Description of Artificial Sequence: Synthetic oligonucleotide
  source 1..21: mol_type = other DNA
gggcttaatgttaattctaat

SEQ ID NO: 37575 - DNA, 21 bp, synthetic construct
  misc_feature 1..21: note = Description of Artificial Sequence: Synthetic oligonucleotide
  source 1..21: mol_type = other DNA
tcttctccgcaggatcataat

SEQ ID NO: 37576 - DNA, 21 bp, synthetic construct
  misc_feature 1..21: note = Description of Artificial Sequence: Synthetic oligonucleotide
  source 1..21: mol_type = other DNA
aaccaaggcggctaccacggc

SEQ ID NO: 37577 - DNA, 21 bp, synthetic construct
  misc_feature 1..21: note = Description of Artificial Sequence: Synthetic oligonucleotide
  source 1..21: mol_type = other DNA
gatttggatacgaaggcgctt

SEQ ID NO: 37578 - DNA, 21 bp, synthetic construct
  misc_feature 1..21: note = Description of Artificial Sequence: Synthetic oligonucleotide
  source 1..21: mol_type = other DNA
actatggatgtgcgttctgat

SEQ ID NO: 37579 - DNA, 21 bp, synthetic construct
  misc_feature 1..21: note = Description of Artificial Sequence: Synthetic oligonucleotide
  source 1..21: mol_type = other DNA
aataataaggggaatccgggt

SEQ ID NO: 37580 - DNA, 21 bp, synthetic construct
  misc_feature 1..21: note = Description of Artificial Sequence: Synthetic oligonucleotide
  source 1..21: mol_type = other DNA
aatctgagtagttcgggtggt

SEQ ID NO: 37581 - DNA, 21 bp, synthetic construct
  misc_feature 1..21: note = Description of Artificial Sequence: Synthetic oligonucleotide
  source 1..21: mol_type = other DNA
agcagcagccccagcagcctc

SEQ ID NO: 37582 - DNA, 21 bp, synthetic construct
  misc_feature 1..21: note = Description of Artificial Sequence: Synthetic oligonucleotide
  source 1..21: mol_type = other DNA
agcaccaacggcaacggcctc

SEQ ID NO: 37583 - DNA, 21 bp, synthetic construct
  misc_feature 1..21: note = Description of Artificial Sequence: Synthetic oligonucleotide
  source 1..21: mol_type = other DNA
aacgcttctggacagaatcaa

SEQ ID NO: 37584 - DNA, 21 bp, synthetic construct
  misc_feature 1..21: note = Description of Artificial Sequence: Synthetic oligonucleotide
  source 1..21: mol_type = other DNA
cccagaaccagagaaaaccaa

SEQ ID NO: 37585 - DNA, 21 bp, synthetic construct
  misc_feature 1..21: note = Description of Artificial Sequence: Synthetic oligonucleotide
  source 1..21: mol_type = other DNA
cagcagggtgtgggtaataat

SEQ ID NO: 37586 - DNA, 21 bp, synthetic construct
  misc_feature 1..21: note = Description of Artificial Sequence: Synthetic oligonucleotide
  source 1..21: mol_type = other DNA
gcgcgggctagttctaattcg

SEQ ID NO: 37587 - DNA, 21 bp, synthetic construct
  misc_feature 1..21: note = Description of Artificial Sequence: Synthetic oligonucleotide
  source 1..21: mol_type = other DNA
gggagtaatcttaatagtact

SEQ ID NO: 37588 - DNA, 21 bp, synthetic construct
  misc_feature 1..21: note = Description of Artificial Sequence: Synthetic oligonucleotide
  source 1..21: mol_type = other DNA
acgtctagtggtcattctgtt

SEQ ID NO: 37589 - DNA, 21 bp, synthetic construct
  misc_feature 1..21: note = Description of Artificial Sequence: Synthetic oligonucleotide
  source 1..21: mol_type = other DNA
ccttctcatgaggggcagcag

SEQ ID NO: 37590 - DNA, 21 bp, synthetic construct
  misc_feature 1..21: note = Description of Artificial Sequence: Synthetic oligonucleotide
  source 1..21: mol_type = other DNA
tacacccaaagcaccagcaga

SEQ ID NO: 37591 - DNA, 21 bp, synthetic construct
  misc_feature 1..21: note = Description of Artificial Sequence: Synthetic oligonucleotide
  source 1..21: mol_type = other DNA
gttcgggctaaggtggcttcg

SEQ ID NO: 37592 - DNA, 21 bp, synthetic construct
  misc_feature 1..21: note = Description of Artificial Sequence: Synthetic oligonucleotide
  source 1..21: mol_type = other DNA
gacatccccagcagagccgcc

SEQ ID NO: 37593 - DNA, 21 bp, synthetic construct
  misc_feature 1..21: note = Description of Artificial Sequence: Synthetic oligonucleotide
  source 1..21: mol_type = other DNA
ccgcctcatgatgggcagcgt

SEQ ID NO: 37594 - DNA, 21 bp, synthetic construct
  misc_feature 1..21: note = Description of Artificial Sequence: Synthetic oligonucleotide
  source 1..21: mol_type = other DNA
atggagattaagcctaatcgg

SEQ ID NO: 37595 - DNA, 21 bp, synthetic construct
  misc_feature 1..21: note = Description of Artificial Sequence: Synthetic oligonucleotide
  source 1..21: mol_type = other DNA
tgggtcggcagccccgtctgc

SEQ ID NO: 37596 - DNA, 21 bp, synthetic construct
  misc_feature 1..21: note = Description of Artificial Sequence: Synthetic oligonucleotide
  source 1..21: mol_type = other DNA
ggttatgaggctaataggggg

SEQ ID NO: 37597 - DNA, 21 bp, synthetic construct
  misc_feature 1..21: note = Description of Artificial Sequence: Synthetic oligonucleotide
  source 1..21: mol_type = other DNA
ctcgtcagcaaaagcggcacc

SEQ ID NO: 37598 - DNA, 21 bp, synthetic construct
  misc_feature 1..21: note = Description of Artificial Sequence: Synthetic oligonucleotide
  source 1..21: mol_type = other DNA
aaaggctacagcagcaacgaa

SEQ ID NO: 37599 - DNA, 21 bp, synthetic construct
  misc_feature 1..21: note = Description of Artificial Sequence: Synthetic oligonucleotide
  source 1..21: mol_type = other DNA
cccctcgccgaaatgcacggc

SEQ ID NO: 37600 - DNA, 21 bp, synthetic construct
  misc_feature 1..21: note = Description of Artificial Sequence: Synthetic oligonucleotide
  source 1..21: mol_type = other DNA
cctagtcgggcgtcgattact

SEQ ID NO: 37601 - DNA, 21 bp, synthetic construct
  misc_feature 1..21: note = Description of Artificial Sequence: Synthetic oligonucleotide
  source 1..21: mol_type = other DNA
ctgaggaatagtacgagtgtg

SEQ ID NO: 37602 - DNA, 21 bp, synthetic construct
  misc_feature 1..21: note = Description of Artificial Sequence: Synthetic oligonucleotide
  source 1..21: mol_type = other DNA
gaacccctcagcaaacaaagc

SEQ ID NO: 37603 - DNA, 21 bp, synthetic construct
  misc_feature 1..21: note = Description of Artificial Sequence: Synthetic oligonucleotide
  source 1..21: mol_type = other DNA
gccagccacctccccgtcaac

SEQ ID NO: 37604 - DNA, 21 bp, synthetic construct
  misc_feature 1..21: note = Description of Artificial Sequence: Synthetic oligonucleotide
  source 1..21: mol_type = other DNA
agttcgggtaagtcgttttct

SEQ ID NO: 37605 - DNA, 21 bp, synthetic construct
  misc_feature 1..21: note = Description of Artificial Sequence: Synthetic oligonucleotide
  source 1..21: mol_type = other DNA
cccctcagcggcagaatcggc

SEQ ID NO: 37606 - DNA, 21 bp, synthetic construct
  misc_feature 1..21: note = Description of Artificial Sequence: Synthetic oligonucleotide
  source 1..21: mol_type = other DNA
ggtcagtcgaatgttactttg

SEQ ID NO: 37607 - DNA, 21 bp, synthetic construct
  misc_feature 1..21: note = Description of Artificial Sequence: Synthetic oligonucleotide
  source 1..21: mol_type = other DNA
atgaacatgagcgccagacaa

SEQ ID NO: 37608 - DNA, 21 bp, synthetic construct
  misc_feature 1..21: note = Description of Artificial Sequence: Synthetic oligonucleotide
  source 1..21: mol_type = other DNA
gtgaatcagagtggttttagt

SEQ ID NO: 37609 - DNA, 21 bp, synthetic construct
  misc_feature 1..21: note = Description of Artificial Sequence: Synthetic oligonucleotide
  source 1..21: mol_type = other DNA
tctgttactagtcctaataag

SEQ ID NO: 37610 - DNA, 21 bp, synthetic construct
  misc_feature 1..21: note = Description of Artificial Sequence: Synthetic oligonucleotide
  source 1..21: mol_type = other DNA
agcagcgccagcacctacaaa

SEQ ID NO: 37611 - DNA, 21 bp, synthetic construct
  misc_feature 1..21: note = Description of Artificial Sequence: Synthetic oligonucleotide
  source 1..21: mol_type = other DNA
ctggttcagggtggtgttaat

SEQ ID NO: 37612 - DNA, 21 bp, synthetic construct
  misc_feature 1..21: note = Description of Artificial Sequence: Synthetic oligonucleotide
  source 1..21: mol_type = other DNA
agacccctcctcagccacgaa

SEQ ID NO: 37613 - DNA, 21 bp, synthetic construct
  misc_feature 1..21: note = Description of Artificial Sequence: Synthetic oligonucleotide
  source 1..21: mol_type = other DNA
ttcagaacccaaagcgtcggc

SEQ ID NO: 37614 - DNA, 21 bp, synthetic construct
  misc_feature 1..21: note = Description of Artificial Sequence: Synthetic oligonucleotide
  source 1..21: mol_type = other DNA
ggtacggagggggcgtcgggt

SEQ ID NO: 37615 - DNA, 21 bp, synthetic construct
  misc_feature 1..21: note = Description of Artificial Sequence: Synthetic oligonucleotide
  source 1..21: mol_type = other DNA
cccagcagaaacaccagcctc

SEQ ID NO: 37616 - DNA, 21 bp, synthetic construct
  misc_feature 1..21: note = Description of Artificial Sequence: Synthetic oligonucleotide
  source 1..21: mol_type = other DNA
aagcttagtcagactagtcag

SEQ ID NO: 37617 - DNA, 21 bp, synthetic construct
  misc_feature 1..21: note = Description of Artificial Sequence: Synthetic oligonucleotide
  source 1..21: mol_type = other DNA
aacaacggcaaagtcagaagc

SEQ ID NO: 37618 - DNA, 21 bp, synthetic construct
  misc_feature 1..21: note = Description of Artificial Sequence: Synthetic oligonucleotide
  source 1..21: mol_type = other DNA
accgccagaggcggccccacc

SEQ ID NO: 37619 - DNA, 21 bp, synthetic construct
  misc_feature 1..21: note = Description of Artificial Sequence: Synthetic oligonucleotide
  source 1..21: mol_type = other DNA
gtcagaagcagagaaagcccc

SEQ ID NO: 37620 - DNA, 21 bp, synthetic construct
  misc_feature 1..21: note = Description of Artificial Sequence: Synthetic oligonucleotide
  source 1..21: mol_type = other DNA
aacagcgccgccgccatgaaa

SEQ ID NO: 37621 - DNA, 21 bp, synthetic construct
  misc_feature 1..21: note = Description of Artificial Sequence: Synthetic oligonucleotide
  source 1..21: mol_type = other DNA
tcgaatatgcctggtatggtg

SEQ ID NO: 37622 - DNA, 21 bp, synthetic construct
  misc_feature 1..21: note = Description of Artificial Sequence: Synthetic oligonucleotide
  source 1..21: mol_type = other DNA
agagccaacaacagccaaatg

SEQ ID NO: 37623 - DNA, 21 bp, synthetic construct
  misc_feature 1..21: note = Description of Artificial Sequence: Synthetic oligonucleotide
  source 1..21: mol_type = other DNA
atgcttcctcagaatggtagg

SEQ ID NO: 37624 - DNA, 21 bp, synthetic construct
  misc_feature 1..21: note = Description of Artificial Sequence: Synthetic oligonucleotide
  source 1..21: mol_type = other DNA
agcagcctcgaaaaaagcaac

SEQ ID NO: 37625 - DNA, 21 bp, synthetic construct
  misc_feature 1..21: note = Description of Artificial Sequence: Synthetic oligonucleotide
  source 1..21: mol_type = other DNA
catcgggttgataatcagggg

SEQ ID NO: 37626 - DNA, 21 bp, synthetic construct
  misc_feature 1..21: note = Description of Artificial Sequence: Synthetic oligonucleotide
  source 1..21: mol_type = other DNA
gccaccagaggcatcagcagc

SEQ ID NO: 37627 - DNA, 21 bp, synthetic construct
  misc_feature 1..21: note = Description of Artificial Sequence: Synthetic oligonucleotide
  source 1..21: mol_type = other DNA
cagatgaagcatctgcagggt

SEQ ID NO: 37628 - DNA, 21 bp, synthetic construct
  misc_feature 1..21: note = Description of Artificial Sequence: Synthetic oligonucleotide
  source 1..21: mol_type = other DNA
aatacgtcgactcagaagatt

SEQ ID NO: 37629 - DNA, 21 bp, synthetic construct
  misc_feature 1..21: note = Description of Artificial Sequence: Synthetic oligonucleotide
  source 1..21: mol_type = other DNA
atgaaggttaagttgaatcag

SEQ ID NO: 37630 - DNA, 21 bp, synthetic construct
  misc_feature 1..21: note = Description of Artificial Sequence: Synthetic oligonucleotide
  source 1..21: mol_type = other DNA
ggtccggcgaatactagtggt

SEQ ID NO: 37631 - DNA, 21 bp, synthetic construct
  misc_feature 1..21: note = Description of Artificial Sequence: Synthetic oligonucleotide
  source 1..21: mol_type = other DNA
cagagggagcagcttcttaag

SEQ ID NO: 37632 - DNA, 21 bp, synthetic construct
  misc_feature 1..21: note = Description of Artificial Sequence: Synthetic oligonucleotide
  source 1..21: mol_type = other DNA
ggtgttaatcgtagtagtggt

SEQ ID NO: 37633 - DNA, 21 bp, synthetic construct
  misc_feature 1..21: note = Description of Artificial Sequence: Synthetic oligonucleotide
  source 1..21: mol_type = other DNA
gatcctcaggtgagggctctt

SEQ ID NO: 37634 - DNA, 21 bp, synthetic construct
  misc_feature 1..21: note = Description of Artificial Sequence: Synthetic oligonucleotide
  source 1..21: mol_type = other DNA
gcggggattaattctcaggtg

SEQ ID NO: 37635 - DNA, 21 bp, synthetic construct
  misc_feature 1..21: note = Description of Artificial Sequence: Synthetic oligonucleotide
  source 1..21: mol_type = other DNA
cgtatgtctcctcctactggg

SEQ ID NO: 37636 - DNA, 21 bp, synthetic construct
  misc_feature 1..21: note = Description of Artificial Sequence: Synthetic oligonucleotide
  source 1..21: mol_type = other DNA
gtgcgtaatgcgtctagtgct

SEQ ID NO: 37637 - DNA, 21 bp, synthetic construct
  misc_feature 1..21: note = Description of Artificial Sequence: Synthetic oligonucleotide
  source 1..21: mol_type = other DNA
aatactacgccgtctaggggt

SEQ ID NO: 37638 - DNA, 21 bp, synthetic construct
  misc_feature 1..21: note = Description of Artificial Sequence: Synthetic oligonucleotide
  source 1..21: mol_type = other DNA
tatgttagtaattctaatgcg

SEQ ID NO: 37639 - DNA, 21 bp, synthetic construct
  misc_feature 1..21: note = Description of Artificial Sequence: Synthetic oligonucleotide
  source 1..21: mol_type = other DNA
aattctagtcataatgtttct

SEQ ID NO: 37640 - DNA, 21 bp, synthetic construct
  misc_feature 1..21: note = Description of Artificial Sequence: Synthetic oligonucleotide
  source 1..21: mol_type = other DNA
tggagcaacggcagaaccagc

SEQ ID NO: 37641 - DNA, 21 bp, synthetic construct
  misc_feature 1..21: note = Description of Artificial Sequence: Synthetic oligonucleotide
  source 1..21: mol_type = other DNA
accatcagcaccagacaaagc

SEQ ID NO: 37642 - DNA, 21 bp, synthetic construct
  misc_feature 1..21: note = Description of Artificial Sequence: Synthetic oligonucleotide
  source 1..21: mol_type = other DNA
atgaaaggcaacaacctcagc

SEQ ID NO: 37643 - DNA, 21 bp, synthetic construct
  misc_feature 1..21: note = Description of Artificial Sequence: Synthetic oligonucleotide
  source 1..21: mol_type = other DNA
cccggcgaaagcggcaaagtc

SEQ ID NO: 37644 - DNA, 21 bp, synthetic construct
  misc_feature 1..21: note = Description of Artificial Sequence: Synthetic oligonucleotide
  source 1..21: mol_type = other DNA
ggtactcagaagcagacgagt

SEQ ID NO: 37645 - DNA, 21 bp, synthetic construct
  misc_feature 1..21: note = Description of Artificial Sequence: Synthetic oligonucleotide
  source 1..21: mol_type = other DNA
gatacgaataatagggctaat

SEQ ID NO: 37646 - DNA, 21 bp, synthetic construct
  misc_feature 1..21: note = Description of Artificial Sequence: Synthetic oligonucleotide
  source 1..21: mol_type = other DNA
atgagcggcggcaacatgaga

SEQ ID NO: 37647 - DNA, 21 bp, synthetic construct
  misc_feature 1..21: note = Description of Artificial Sequence: Synthetic oligonucleotide
  source 1..21: mol_type = other DNA
aatggtccgattcggaattcg

SEQ ID NO: 37648 - DNA, 21 bp, synthetic construct
  misc_feature 1..21: note = Description of Artificial Sequence: Synthetic oligonucleotide
  source 1..21: mol_type = other DNA
gggtcgagtgataagtcgact

SEQ ID NO: 37649 - DNA, 21 bp, synthetic construct
  misc_feature 1..21: note = Description of Artificial Sequence: Synthetic oligonucleotide
  source 1..21: mol_type = other DNA
ccttctcagactaagccgagt

SEQ ID NO: 37650 - DNA, 21 bp, synthetic construct
  misc_feature 1..21: note = Description of Artificial Sequence: Synthetic oligonucleotide
  source 1..21: mol_type = other DNA
tcggtttcgaatactaatact

SEQ ID NO: 37651 - DNA, 21 bp, synthetic construct
  misc_feature 1..21: note = Description of Artificial Sequence: Synthetic oligonucleotide
  source 1..21: mol_type = other DNA
acggctagtggtaatttgtct

SEQ ID NO: 37652 - DNA, 21 bp, synthetic construct
  misc_feature 1..21: note = Description of Artificial Sequence: Synthetic oligonucleotide
  source 1..21: mol_type = other DNA
tcgtatagtggtactcttggt

SEQ ID NO: 37653 - DNA, 21 bp, synthetic construct
  misc_feature 1..21: note = Description of Artificial Sequence: Synthetic oligonucleotide
  source 1..21: mol_type = other DNA
ggggctaagccgggtttggct

SEQ ID NO: 37654 - DNA, 21 bp, synthetic construct
  misc_feature 1..21: note = Description of Artificial Sequence: Synthetic oligonucleotide
  source 1..21: mol_type = other DNA
ctgaagagtactgggacgact

SEQ ID NO: 37655 - DNA, 21 bp, synthetic construct
  misc_feature 1..21: note = Description of Artificial Sequence: Synthetic oligonucleotide
  source 1..21: mol_type = other DNA
catgggagtcgtagtatgtct

SEQ ID NO: 37656 - DNA, 21 bp, synthetic construct
  misc_feature 1..21: note = Description of Artificial Sequence: Synthetic oligonucleotide
  source 1..21: mol_type = other DNA
cacagcagcagacccctcgaa

SEQ ID NO: 37657 - DNA, 21 bp, synthetic construct
  misc_feature 1..21: note = Description of Artificial Sequence: Synthetic oligonucleotide
  source 1..21: mol_type = other DNA
ggcacctacggcgaaatgaga

SEQ ID NO: 37658 - DNA, 21 bp, synthetic construct
  misc_feature 1..21: note = Description of Artificial Sequence: Synthetic oligonucleotide
  source 1..21: mol_type = other DNA
tttaatacttctaagcttagt

SEQ ID NO: 37659 - DNA, 21 bp, synthetic construct
  misc_feature 1..21: note = Description of Artificial Sequence: Synthetic oligonucleotide
  source 1..21: mol_type = other DNA
tctacgtctcgtgatgctact

SEQ ID NO: 37660 - DNA, 21 bp, synthetic construct
  misc_feature 1..21: note = Description of Artificial Sequence: Synthetic oligonucleotide
  source 1..21: mol_type = other DNA
tctaatcggccttctattgtg

SEQ ID NO: 37661 - DNA, 21 bp, synthetic construct
  misc_feature 1..21: note = Description of Artificial Sequence: Synthetic oligonucleotide
  source 1..21: mol_type = other DNA
ggcctcgccaaagaccaaaga

SEQ ID NO: 37662 - DNA, 21 bp, synthetic construct
  misc_feature 1..21: note = Description of Artificial Sequence: Synthetic oligonucleotide
  source 1..21: mol_type = other DNA
agccccagagccagcctcaac

SEQ ID NO: 37663 - DNA, 21 bp, synthetic construct
  misc_feature 1..21: note = Description of Artificial Sequence: Synthetic oligonucleotide
  source 1..21: mol_type = other DNA
aacggttctggacagaatcta

SEQ ID NO: 37664 - DNA, 21 bp, synthetic construct
  misc_feature 1..21: note = Description of Artificial Sequence: Synthetic oligonucleotide
  source 1..21: mol_type = other DNA
aagaatagtagtggtagtacg

SEQ ID NO: 37665 - DNA, 21 bp, synthetic construct
  misc_feature 1..21: note = Description of Artificial Sequence: Synthetic oligonucleotide
  source 1..21: mol_type = other DNA
agttcgccgtcgaggtctagt

SEQ ID NO: 37666 - DNA, 21 bp, synthetic construct
  misc_feature 1..21: note = Description of Artificial Sequence: Synthetic oligonucleotide
  source 1..21: mol_type = other DNA
aaggggagtgctggttctgtg

SEQ ID NO: 37667 - DNA, 21 bp, synthetic construct
  misc_feature 1..21: note = Description of Artificial Sequence: Synthetic oligonucleotide
  source 1..21: mol_type = other DNA
atgggccccaccacccacaaa

SEQ ID NO: 37668 - DNA, 21 bp, synthetic construct
  misc_feature 1..21: note = Description of Artificial Sequence: Synthetic oligonucleotide
  source 1..21: mol_type = other DNA
gatgctggttctcgttcttct

SEQ ID NO: 37669 - DNA, 21 bp, synthetic construct
  misc_feature 1..21: note = Description of Artificial Sequence: Synthetic oligonucleotide
  source 1..21: mol_type = other DNA
accggcgaaagacaaagcagc

SEQ ID NO: 37670 - DNA, 21 bp, synthetic construct
  misc_feature 1..21: note = Description of Artificial Sequence: Synthetic oligonucleotide
  source 1..21: mol_type = other DNA
cagaatgttggtgggattcgt

SEQ ID NO: 37671 - DNA, 21 bp, synthetic construct
  misc_feature 1..21: note = Description of Artificial Sequence: Synthetic oligonucleotide
  source 1..21: mol_type = other DNA
acgaatgctaagcaggcgatt

SEQ ID NO: 37672 - DNA, 21 bp, synthetic construct
  misc_feature 1..21: note = Description of Artificial Sequence: Synthetic oligonucleotide
  source 1..21: mol_type = other DNA
gcgactggttctcctagtaag

SEQ ID NO: 37673 - DNA, 21 bp, synthetic construct
  misc_feature 1..21: note = Description of Artificial Sequence: Synthetic oligonucleotide
  source 1..21: mol_type = other DNA
aggtcgtcgaattctgatcat

SEQ ID NO: 37674 - DNA, 21 bp, synthetic construct
  misc_feature 1..21: note = Description of Artificial Sequence: Synthetic oligonucleotide
  source 1..21: mol_type = other DNA
ggtactaattctactaggggt

SEQ ID NO: 37675 - DNA, 21 bp, synthetic construct
  misc_feature 1..21: note = Description of Artificial Sequence: Synthetic oligonucleotide
  source 1..21: mol_type = other DNA
tcttctactagggcgctgtct

SEQ ID NO: 37676 - DNA, 21 bp, synthetic construct
  misc_feature 1..21: note = Description of Artificial Sequence: Synthetic oligonucleotide
  source 1..21: mol_type = other DNA
cctaagctgcatcaggatcgg

SEQ ID NO: 37677 - DNA, 21 bp, synthetic construct
  misc_feature 1..21: note = Description of Artificial Sequence: Synthetic oligonucleotide
  source 1..21: mol_type = other DNA
gattctagtgagaggattagg

SEQ ID NO: 37678 - DNA, 21 bp, synthetic construct
  misc_feature 1..21: note = Description of Artificial Sequence: Synthetic oligonucleotide
  source 1..21: mol_type = other DNA
aagggttctaatcattcgggt

SEQ ID NO: 37679 - DNA, 21 bp, synthetic construct
  misc_feature 1..21: note = Description of Artificial Sequence: Synthetic oligonucleotide
  source 1..21: mol_type = other DNA
aagactgataagactgttgat

SEQ ID NO: 37680 - DNA, 21 bp, synthetic construct
  misc_feature 1..21: note = Description of Artificial Sequence: Synthetic oligonucleotide
  source 1..21: mol_type = other DNA
aataagtcgaatgggcagtcg

SEQ ID NO: 37681 - DNA, 21 bp, synthetic construct
  misc_feature 1..21: note = Description of Artificial Sequence: Synthetic oligonucleotide
  source 1..21: mol_type = other DNA
gggcctcgttctatgtctaat

SEQ ID NO: 37682 - DNA, 21 bp, synthetic construct
  misc_feature 1..21: note = Description of Artificial Sequence: Synthetic oligonucleotide
  source 1..21: mol_type = other DNA
gtcctcgccggcagcaacacc

SEQ ID NO: 37683 - DNA, 21 bp, synthetic construct
  misc_feature 1..21: note = Description of Artificial Sequence: Synthetic oligonucleotide
  source 1..21: mol_type = other DNA
catgatcgtggtaagaatggg

SEQ ID NO: 37684 - DNA, 21 bp, synthetic construct
  misc_feature 1..21: note = Description of Artificial Sequence: Synthetic oligonucleotide
  source 1..21: mol_type = other DNA
cttaattctaggcaggttacg

SEQ ID NO: 37685 - DNA, 21 bp, synthetic construct
  misc_feature 1..21: note = Description of Artificial Sequence: Synthetic oligonucleotide
  source 1..21: mol_type = other DNA
atccaaaacagcagcaacacc

SEQ ID NO: 37686 - DNA, 21 bp, synthetic construct
  misc_feature 1..21: note = Description of Artificial Sequence: Synthetic oligonucleotide
  source 1..21: mol_type = other DNA
aaccaaagcgccaaaagcacc

SEQ ID NO: 37687 - DNA, 21 bp, synthetic construct
  misc_feature 1..21: note = Description of Artificial Sequence: Synthetic oligonucleotide
  source 1..21: mol_type = other DNA
gatacggcgactcgtaatagg

SEQ ID NO: 37688 - DNA, 21 bp, synthetic construct
  misc_feature 1..21: note = Description of Artificial Sequence: Synthetic oligonucleotide
  source 1..21: mol_type = other DNA
agcagaagcaacgccatggcc

SEQ ID NO: 37689 - DNA, 21 bp, synthetic construct
  misc_feature 1..21: note = Description of Artificial Sequence: Synthetic oligonucleotide
  source 1..21: mol_type = other DNA
gtcgccagccaaagaaccctc

SEQ ID NO: 37690 - DNA, 21 bp, synthetic construct
  misc_feature 1..21: note = Description of Artificial Sequence: Synthetic oligonucleotide
  source 1..21: mol_type = other DNA
ttttctcagcattcttctaat

SEQ ID NO: 37691 - DNA, 21 bp, synthetic construct
  misc_feature 1..21: note = Description of Artificial Sequence: Synthetic oligonucleotide
  source 1..21: mol_type = other DNA
atgaagaatacgactgtggtt

SEQ ID NO: 37692 - DNA, 21 bp, synthetic construct
  misc_feature 1..21: note = Description of Artificial Sequence: Synthetic oligonucleotide
  source 1..21: mol_type = other DNA
cactacaccggcaaacaaaac

SEQ ID NO: 37693 - DNA, 21 bp, synthetic construct
  misc_feature 1..21: note = Description of Artificial Sequence: Synthetic oligonucleotide
  source 1..21: mol_type = other DNA
tacagagtcacccaaagcagc

SEQ ID NO: 37694 - DNA, 21 bp, synthetic construct
  misc_feature 1..21: note = Description of Artificial Sequence: Synthetic oligonucleotide
  source 1..21: mol_type = other DNA
ccttctcaggaggggcagcag

SEQ ID NO: 37695 - DNA, 21 bp, synthetic construct
  misc_feature 1..21: note = Description of Artificial Sequence: Synthetic oligonucleotide
  source 1..21: mol_type = other DNA
agcaccgacagaagcttcaac

SEQ ID NO: 37696 - DNA, 21 bp, synthetic construct
  misc_feature 1..21: note = Description of Artificial Sequence: Synthetic oligonucleotide
  source 1..21: mol_type = other DNA
aatatggatggggctactcgg

SEQ ID NO: 37697 - DNA, 21 bp, synthetic construct
  misc_feature 1..21: note = Description of Artificial Sequence: Synthetic oligonucleotide
  source 1..21: mol_type = other DNA
gacggcagcggccaaaaccaa

SEQ ID NO: 37698 - DNA, 21 bp, synthetic construct
  misc_feature 1..21: note = Description of Artificial Sequence: Synthetic oligonucleotide
  source 1..21: mol_type = other DNA
tatcaggcgaatgctctgggt

SEQ ID NO: 37699 - DNA, 21 bp, synthetic construct
  misc_feature 1..21: note = Description of Artificial Sequence: Synthetic oligonucleotide
  source 1..21: mol_type = other DNA
aatgggagtccgggtttttat

SEQ ID NO: 37700 - DNA, 21 bp, synthetic construct
  misc_feature 1..21: note = Description of Artificial Sequence: Synthetic oligonucleotide
  source 1..21: mol_type = other DNA
cggcgtgagattgcgtcttct

SEQ ID NO: 37701 - DNA, 21 bp, synthetic construct
  misc_feature 1..21: note = Description of Artificial Sequence: Synthetic oligonucleotide
  source 1..21: mol_type = other DNA
ttttgttcgccggtgggtaag

SEQ ID NO: 37702 - DNA, 21 bp, synthetic construct
  misc_feature 1..21: note = Description of Artificial Sequence: Synthetic oligonucleotide
  source 1..21: mol_type = other DNA
aacgtctgcaccaaccaaatc

SEQ ID NO: 37703 - DNA, 21 bp, synthetic construct
  misc_feature 1..21: note = Description of Artificial Sequence: Synthetic oligonucleotide
  source 1..21: mol_type = other DNA
gccagcagcccccaagaaaaa

SEQ ID NO: 37704 - DNA, 21 bp, synthetic construct
  misc_feature 1..21: note = Description of Artificial Sequence: Synthetic oligonucleotide
  source 1..21: mol_type = other DNA
ggcatccacaaagaatacctc

SEQ ID NO: 37705 - DNA, 21 bp, synthetic construct
  misc_feature 1..21: note = Description of Artificial Sequence: Synthetic oligonucleotide
  source 1..21: mol_type = other DNA
ggggatcataataggcttaat

SEQ ID NO: 37706 - DNA, 21 bp, synthetic construct
  misc_feature 1..21: note = Description of Artificial Sequence: Synthetic oligonucleotide
  source 1..21: mol_type = other DNA
cctcgggatactactgggtct

SEQ ID NO: 37707 - DNA, 21 bp, synthetic construct
  misc_feature 1..21: note = Description of Artificial Sequence: Synthetic oligonucleotide
  source 1..21: mol_type = other DNA
gggtatactgtggggactaat

SEQ ID NO: 37708 - DNA, 21 bp, synthetic construct
  misc_feature 1..21: note = Description of Artificial Sequence: Synthetic oligonucleotide
  source 1..21: mol_type = other DNA
tctcgtgtgacttctggtggt

SEQ ID NO: 37709 - DNA, 21 bp, synthetic construct
  misc_feature 1..21: note = Description of Artificial Sequence: Synthetic oligonucleotide
  source 1..21: mol_type = other DNA
gagcgtaagacttctaatgcg

SEQ ID NO: 37710 - DNA, 21 bp, synthetic construct
  misc_feature 1..21: note = Description of Artificial Sequence: Synthetic oligonucleotide
  source 1..21: mol_type = other DNA
aatcgtgagaagttgtcgtat

SEQ ID NO: 37711 - DNA, 21 bp, synthetic construct
  misc_feature 1..21: note = Description of Artificial Sequence: Synthetic oligonucleotide
  source 1..21: mol_type = other DNA
gtttcttctccgaggcagatt

SEQ ID NO: 37712 - DNA, 21 bp, synthetic construct
  misc_feature 1..21: note = Description of Artificial Sequence: Synthetic oligonucleotide
  source 1..21: mol_type = other DNA
agtccgaatgcgaatagtgtt

SEQ ID NO: 37713 - DNA, 21 bp, synthetic construct
  misc_feature 1..21: note = Description of Artificial Sequence: Synthetic oligonucleotide
  source 1..21: mol_type = other DNA
ttgcctattactgcgcgtaat

SEQ ID NO: 37714 - DNA, 21 bp, synthetic construct
  misc_feature 1..21: note = Description of Artificial Sequence: Synthetic oligonucleotide
  source 1..21: mol_type = other DNA
gttagtaagagtccgtctact

SEQ ID NO: 37715 - DNA, 21 bp, synthetic construct
  misc_feature 1..21: note = Description of Artificial Sequence: Synthetic oligonucleotide
  source 1..21: mol_type = other DNA
cctctgagtcattcgaatatg

SEQ ID NO: 37716 - DNA, 21 bp, synthetic construct
  misc_feature 1..21: note = Description of Artificial Sequence: Synthetic oligonucleotide
  source 1..21: mol_type = other DNA
accggcgcccaaagcaccatg

SEQ ID NO: 37717 - DNA, 21 bp, synthetic construct
  misc_feature 1..21: note = Description of Artificial Sequence: Synthetic oligonucleotide
  source 1..21: mol_type = other DNA
tttgtttcgcgggagcatact

SEQ ID NO: 37718 - DNA, 21 bp, synthetic construct
  misc_feature 1..21: note = Description of Artificial Sequence: Synthetic oligonucleotide
  source 1..21: mol_type = other DNA
attatttcgcagaatgggctg

SEQ ID NO: 37719 - DNA, 21 bp, synthetic construct
  misc_feature 1..21: note = Description of Artificial Sequence: Synthetic oligonucleotide
  source 1..21: mol_type = other DNA
gtgggtgaggctgggaaggct

SEQ ID NO: 37720 - DNA, 21 bp, synthetic construct
  misc_feature 1..21: note = Description of Artificial Sequence: Synthetic oligonucleotide
  source 1..21: mol_type = other DNA
ggcggccacagccccaacaga

SEQ ID NO: 37721 - DNA, 21 bp, synthetic construct
  misc_feature 1..21: note = Description of Artificial Sequence: Synthetic oligonucleotide
  source 1..21: mol_type = other DNA
acgcagttgggggggtttaag

SEQ ID NO: 37722 - DNA, 21 bp, synthetic construct
  misc_feature 1..21: note = Description of Artificial Sequence: Synthetic oligonucleotide
  source 1..21: mol_type = other DNA
gggaagcatggtactaattct

SEQ ID NO: 37723 - DNA, 21 bp, synthetic construct
  misc_feature 1..21: note = Description of Artificial Sequence: Synthetic oligonucleotide
  source 1..21: mol_type = other DNA
tacggcctccacaacgccaga

SEQ ID NO: 37724 - DNA, 21 bp, synthetic construct
  misc_feature 1..21: note = Description of Artificial Sequence: Synthetic oligonucleotide
  source 1..21: mol_type = other DNA
accatcagcaccagaaaaagc

SEQ ID NO: 37725 - DNA, 21 bp, synthetic construct
  misc_feature 1..21: note = Description of Artificial Sequence: Synthetic oligonucleotide
  source 1..21: mol_type = other DNA
cttccttcgtcgattgtgcct

SEQ ID NO: 37726 - DNA, 21 bp, synthetic construct
  misc_feature 1..21: note = Description of Artificial Sequence: Synthetic oligonucleotide
  source 1..21: mol_type = other DNA
agagtccaaagcaacctcaaa

SEQ ID NO: 37727 - DNA, 21 bp, synthetic construct
  misc_feature 1..21: note = Description of Artificial Sequence: Synthetic oligonucleotide
  source 1..21: mol_type = other DNA
cccctcgcctacgaaaacaac

SEQ ID NO: 37728 - DNA, 21 bp, synthetic construct
  misc_feature 1..21: note = Description of Artificial Sequence: Synthetic oligonucleotide
  source 1..21: mol_type = other DNA
ggggctctgaatagtcgtggg

SEQ ID NO: 37729 - DNA, 21 bp, synthetic construct
  misc_feature 1..21: note = Description of Artificial Sequence: Synthetic oligonucleotide
  source 1..21: mol_type = other DNA
gggattgctactactaatagg

SEQ ID NO: 37730 - DNA, 21 bp, synthetic construct
  misc_feature 1..21: note = Description of Artificial Sequence: Synthetic oligonucleotide
  source 1..21: mol_type = other DNA
atgaggtctgagcgtgctgct

SEQ ID NO: 37731 - DNA, 21 bp, synthetic construct
  misc_feature 1..21: note = Description of Artificial Sequence: Synthetic oligonucleotide
  source 1..21: mol_type = other DNA
ccgatgtctcatgtgtcgggg

SEQ ID NO: 37732 - DNA, 21 bp, synthetic construct
  misc_feature 1..21: note = Description of Artificial Sequence: Synthetic oligonucleotide
  source 1..21: mol_type = other DNA
atgtctgctaggcctgtttct

SEQ ID NO: 37733 - DNA, 21 bp, synthetic construct
  misc_feature 1..21: note = Description of Artificial Sequence: Synthetic oligonucleotide
  source 1..21: mol_type = other DNA
cgggatcatagtggttcgagg

SEQ ID NO: 37734 - DNA, 21 bp, synthetic construct
  misc_feature 1..21: note = Description of Artificial Sequence: Synthetic oligonucleotide
  source 1..21: mol_type = other DNA
ctcaccgccaccaaccccaga

SEQ ID NO: 37735 - DNA, 21 bp, synthetic construct
  misc_feature 1..21: note = Description of Artificial Sequence: Synthetic oligonucleotide
  source 1..21: mol_type = other DNA
aatatgcgtgctagtacggag

SEQ ID NO: 37736 - DNA, 21 bp, synthetic construct
  misc_feature 1..21: note = Description of Artificial Sequence: Synthetic oligonucleotide
  source 1..21: mol_type = other DNA
aagggtacgccgggtcattcg

SEQ ID NO: 37737 - DNA, 21 bp, synthetic construct
  misc_feature 1..21: note = Description of Artificial Sequence: Synthetic oligonucleotide
  source 1..21: mol_type = other DNA
gaaagcagaaaaagcgtcagc

SEQ ID NO: 37738 - DNA, 21 bp, synthetic construct
  misc_feature 1..21: note = Description of Artificial Sequence: Synthetic oligonucleotide
  source 1..21: mol_type = other DNA
cctgctgatcgtactcatatt

SEQ ID NO: 37739 - DNA, 21 bp, synthetic construct
  misc_feature 1..21: note = Description of Artificial Sequence: Synthetic oligonucleotide
  source 1..21: mol_type = other DNA
aggagtacggatcctcatggg

SEQ ID NO: 37740 - DNA, 21 bp, synthetic construct
  misc_feature 1..21: note = Description of Artificial Sequence: Synthetic oligonucleotide
  source 1..21: mol_type = other DNA
agaagcgccagcggccaactc

SEQ ID NO: 37741 - DNA, 21 bp, synthetic construct
  misc_feature 1..21: note = Description of Artificial Sequence: Synthetic oligonucleotide
  source 1..21: mol_type = other DNA
ggcgccagcggcaaaatcggc

SEQ ID NO: 37742 - DNA, 21 bp, synthetic construct
  misc_feature 1..21: note = Description of Artificial Sequence: Synthetic oligonucleotide
  source 1..21: mol_type = other DNA
cattctacgaggtcttcgttg

SEQ ID NO: 37743 - DNA, 21 bp, synthetic construct
  misc_feature 1..21: note = Description of Artificial Sequence: Synthetic oligonucleotide
  source 1..21: mol_type = other DNA
ggtatgagttcgccgcatatt

SEQ ID NO: 37744 - DNA, 21 bp, synthetic construct
  misc_feature 1..21: note = Description of Artificial Sequence: Synthetic oligonucleotide
  source 1..21: mol_type = other DNA
aggtcttctgggggtttgact

SEQ ID NO: 37745 - DNA, 21 bp, synthetic construct
  misc_feature 1..21: note = Description of Artificial Sequence: Synthetic oligonucleotide
  source 1..21: mol_type = other DNA
aacggcgccaccaaaaacagc

SEQ ID NO: 37746 - DNA, 21 bp, synthetic construct
  misc_feature 1..21: note = Description of Artificial Sequence: Synthetic oligonucleotide
  source 1..21: mol_type = other DNA
aacggttctgtacagaatcaa

SEQ ID NO: 37747 - DNA, 21 bp, synthetic construct
  misc_feature 1..21: note = Description of Artificial Sequence: Synthetic oligonucleotide
  source 1..21: mol_type = other DNA
actactgataagagtcgtttg

SEQ ID NO: 37748 - DNA, 21 bp, synthetic construct
  misc_feature 1..21: note = Description of Artificial Sequence: Synthetic oligonucleotide
  source 1..21: mol_type = other DNA
tctaggtcgcctggtacgtcg

SEQ ID NO: 37749 - DNA, 21 bp, synthetic construct
  misc_feature 1..21: note = Description of Artificial Sequence: Synthetic oligonucleotide
  source 1..21: mol_type = other DNA
agttttactaagggggcgggg

SEQ ID NO: 37750 - DNA, 21 bp, synthetic construct
  misc_feature 1..21: note = Description of Artificial Sequence: Synthetic oligonucleotide
  source 1..21: mol_type = other DNA
aatgtgactacgccgcttatt

SEQ ID NO: 37751 - DNA, 21 bp, synthetic construct
  misc_feature 1..21: note = Description of Artificial Sequence: Synthetic oligonucleotide
  source 1..21: mol_type = other DNA
accctcggccaagccgtcaga

SEQ ID NO: 37752 - DNA, 21 bp, synthetic construct
  misc_feature 1..21: note = Description of Artificial Sequence: Synthetic oligonucleotide
  source 1..21: mol_type = other DNA
agcaccaccaccgccagcagc

SEQ ID NO: 37753 - DNA, 21 bp, synthetic construct
  misc_feature 1..21: note = Description of Artificial Sequence: Synthetic oligonucleotide
  source 1..21: mol_type = other DNA
tcgggtacgattggtcaggtt

SEQ ID NO: 37754 - DNA, 21 bp, synthetic construct
  misc_feature 1..21: note = Description of Artificial Sequence: Synthetic oligonucleotide
  source 1..21: mol_type = other DNA
cccagcaccgaaagaaacaga

SEQ ID NO: 37755 - DNA, 21 bp, synthetic construct
  misc_feature 1..21: note = Description of Artificial Sequence: Synthetic oligonucleotide
  source 1..21: mol_type = other DNA
cttcttacgtcgcctaattcg

SEQ ID NO: 37756 - DNA, 21 bp, synthetic construct
  misc_feature 1..21: note = Description of Artificial Sequence: Synthetic oligonucleotide
  source 1..21: mol_type = other DNA
agcagagacagcagcatccac

SEQ ID NO: 37757 - DNA, 21 bp, synthetic construct
  misc_feature 1..21: note = Description of Artificial Sequence: Synthetic oligonucleotide
  source 1..21: mol_type = other DNA
aatcttgcttctagttcttat

SEQ ID NO: 37758 - DNA, 21 bp, synthetic construct
  misc_feature 1..21: note = Description of Artificial Sequence: Synthetic oligonucleotide
  source 1..21: mol_type = other DNA
ctgagggctggtactgtgcgt

SEQ ID NO: 37759 - DNA, 21 bp, synthetic construct
  misc_feature 1..21: note = Description of Artificial Sequence: Synthetic oligonucleotide
  source 1..21: mol_type = other DNA
atggtttcgggtaagagttat

SEQ ID NO: 37760 - DNA, 21 bp, synthetic construct
  misc_feature 1..21: note = Description of Artificial Sequence: Synthetic oligonucleotide
  source 1..21: mol_type = other DNA
gtgcctagtacggctggtaag

SEQ ID NO: 37761 - DNA, 21 bp, synthetic construct
  misc_feature 1..21: note = Description of Artificial Sequence: Synthetic oligonucleotide
  source 1..21: mol_type = other DNA
ggtttttcgaggcctaatacg

SEQ ID NO: 37762 - DNA, 21 bp, synthetic construct
  misc_feature 1..21: note = Description of Artificial Sequence: Synthetic oligonucleotide
  source 1..21: mol_type = other DNA
caggttgggcgtccgaatgcg

SEQ ID NO: 37763 - DNA, 21 bp, synthetic construct
  misc_feature 1..21: note = Description of Artificial Sequence: Synthetic oligonucleotide
  source 1..21: mol_type = other DNA
gatactgcgcgtcctactaag

SEQ ID NO: 37764 - DNA, 21 bp, synthetic construct
  misc_feature 1..21: note = Description of Artificial Sequence: Synthetic oligonucleotide
  source 1..21: mol_type = other DNA
cggctggatggtctgtctcgt

SEQ ID NO: 37765 - DNA, 21 bp, synthetic construct
  misc_feature 1..21: note = Description of Artificial Sequence: Synthetic oligonucleotide
  source 1..21: mol_type = other DNA
gacagacacaacaccaccagc

SEQ ID NO: 37766 - DNA, 21 bp, synthetic construct
  misc_feature 1..21: note = Description of Artificial Sequence: Synthetic oligonucleotide
  source 1..21: mol_type = other DNA
tatgctaaggatcagcagtcg

SEQ ID NO: 37767 - DNA, 21 bp, synthetic construct
  misc_feature 1..21: note = Description of Artificial Sequence: Synthetic oligonucleotide
  source 1..21: mol_type = other DNA
aatagtactccgtcgactagg

SEQ ID NO: 37768 - DNA, 21 bp, synthetic construct
  misc_feature 1..21: note = Description of Artificial Sequence: Synthetic oligonucleotide
  source 1..21: mol_type = other DNA
gcccccctccaaagcaacctc

SEQ ID NO: 37769 - DNA, 21 bp, synthetic construct
  misc_feature 1..21: note = Description of Artificial Sequence: Synthetic oligonucleotide
  source 1..21: mol_type = other DNA
gaggggatttcgtctatttct

SEQ ID NO: 37770 - DNA, 21 bp, synthetic construct
  misc_feature 1..21: note = Description of Artificial Sequence: Synthetic oligonucleotide
  source 1..21: mol_type = other DNA
caaagcctcaccagaacccac

SEQ ID NO: 37771 - DNA, 21 bp, synthetic construct
  misc_feature 1..21: note = Description of Artificial Sequence: Synthetic oligonucleotide
  source 1..21: mol_type = other DNA
gtggtgtcggctactggtact

SEQ ID NO: 37772 - DNA, 21 bp, synthetic construct
  misc_feature 1..21: note = Description of Artificial Sequence: Synthetic oligonucleotide
  source 1..21: mol_type = other DNA
cgtaatggtgctatgtctaat

SEQ ID NO: 37773 - DNA, 21 bp, synthetic construct
  misc_feature 1..21: note = Description of Artificial Sequence: Synthetic oligonucleotide
  source 1..21: mol_type = other DNA
caactcaaccacagcgccaaa

SEQ ID NO: 37774 - DNA, 21 bp, synthetic construct
  misc_feature 1..21: note = Description of Artificial Sequence: Synthetic oligonucleotide
  source 1..21: mol_type = other DNA
tcgtttacgggtaatacggtg

SEQ ID NO: 37775 - DNA, 21 bp, synthetic construct
  misc_feature 1..21: note = Description of Artificial Sequence: Synthetic oligonucleotide
  source 1..21: mol_type = other DNA
agagacaccaaaagcggcatg

SEQ ID NO: 37776 - DNA, 21 bp, synthetic construct
  misc_feature 1..21: note = Description of Artificial Sequence: Synthetic oligonucleotide
  source 1..21: mol_type = other DNA
gattctcgttctattaagggg

SEQ ID NO: 37777 - DNA, 21 bp, synthetic construct
  misc_feature 1..21: note = Description of Artificial Sequence: Synthetic oligonucleotide
  source 1..21: mol_type = other DNA
agccacggcccccaaatcacc

SEQ ID NO: 37778 - DNA, 21 bp, synthetic construct
  misc_feature 1..21: note = Description of Artificial Sequence: Synthetic oligonucleotide
  source 1..21: mol_type = other DNA
attgtttcgccggtttctaag

SEQ ID NO: 37779 - DNA, 21 bp, synthetic construct
  misc_feature 1..21: note = Description of Artificial Sequence: Synthetic oligonucleotide
  source 1..21: mol_type = other DNA
gggtctccgaatcatagtagt

SEQ ID NO: 37780 - DNA, 21 bp, synthetic construct
  misc_feature 1..21: note = Description of Artificial Sequence: Synthetic oligonucleotide
  source 1..21: mol_type = other DNA
agtcctcttcttgattataag

SEQ ID NO: 37781 - DNA, 21 bp, synthetic construct
  misc_feature 1..21: note = Description of Artificial Sequence: Synthetic oligonucleotide
  source 1..21: mol_type = other DNA
cggatgcagccgagtggtaat

SEQ ID NO: 37782 - DNA, 21 bp, synthetic construct
  misc_feature 1..21: note = Description of Artificial Sequence: Synthetic oligonucleotide
  source 1..21: mol_type = other DNA
cctgggcctgaggttggtcgg

SEQ ID NO: 37783 - DNA, 21 bp, synthetic construct
  misc_feature 1..21: note = Description of Artificial Sequence: Synthetic oligonucleotide
  source 1..21: mol_type = other DNA
tctacgcctagtaatgttttg

SEQ ID NO: 37784 - DNA, 21 bp, synthetic construct
  misc_feature 1..21: note = Description of Artificial Sequence: Synthetic oligonucleotide
  source 1..21: mol_type = other DNA
tctaattcgggtcgtggtatg

SEQ ID NO: 37785 - DNA, 21 bp, synthetic construct
  misc_feature 1..21: note = Description of Artificial Sequence: Synthetic oligonucleotide
  source 1..21: mol_type = other DNA
gctctttcttcgcctgctaat

SEQ ID NO: 37786 - DNA, 21 bp, synthetic construct
  misc_feature 1..21: note = Description of Artificial Sequence: Synthetic oligonucleotide
  source 1..21: mol_type = other DNA
ctcggcgaaaccagcatgaga

SEQ ID NO: 37787 - DNA, 21 bp, synthetic construct
  misc_feature 1..21: note = Description of Artificial Sequence: Synthetic oligonucleotide
  source 1..21: mol_type = other DNA
ctgatttcgtctaagagtagt

SEQ ID NO: 37788 - DNA, 21 bp, synthetic construct
  misc_feature 1..21: note = Description of Artificial Sequence: Synthetic oligonucleotide
  source 1..21: mol_type = other DNA
cccgtcagacccgccaacctc

SEQ ID NO: 37789 - DNA, 21 bp, synthetic construct
  misc_feature 1..21: note = Description of Artificial Sequence: Synthetic oligonucleotide
  source 1..21: mol_type = other DNA
ggtattcagccggggtctaat

SEQ ID NO: 37790 - DNA, 21 bp, synthetic construct
  misc_feature 1..21: note = Description of Artificial Sequence: Synthetic oligonucleotide
  source 1..21: mol_type = other DNA
atgaattcggggccgaaggtt

SEQ ID NO: 37791 - DNA, 21 bp, synthetic construct
  misc_feature 1..21: note = Description of Artificial Sequence: Synthetic oligonucleotide
  source 1..21: mol_type = other DNA
ctcatcagcaccgcccaaaga

SEQ ID NO: 37792 - DNA, 21 bp, synthetic construct
  misc_feature 1..21: note = Description of Artificial Sequence: Synthetic oligonucleotide
  source 1..21: mol_type = other DNA
agttctgatttgggtaagcgt

SEQ ID NO: 37793 - DNA, 21 bp, synthetic construct
  misc_feature 1..21: note = Description of Artificial Sequence: Synthetic oligonucleotide
  source 1..21: mol_type = other DNA
gatattgggaatcctactaat

SEQ ID NO: 37794 - DNA, 21 bp, synthetic construct
  misc_feature 1..21: note = Description of Artificial Sequence: Synthetic oligonucleotide
  source 1..21: mol_type = other DNA
tctggtattaacaatcctccg

SEQ ID NO: 37795 - DNA, 21 bp, synthetic construct
  misc_feature 1..21: note = Description of Artificial Sequence: Synthetic oligonucleotide
  source 1..21: mol_type = other DNA
tcgagtccgtctaagatggcg

SEQ ID NO: 37796 - DNA, 21 bp, synthetic construct
  misc_feature 1..21: note = Description of Artificial Sequence: Synthetic oligonucleotide
  source 1..21: mol_type = other DNA
ggtagggataattctcggcag

SEQ ID NO: 37797 - DNA, 21 bp, synthetic construct
  misc_feature 1..21: note = Description of Artificial Sequence: Synthetic oligonucleotide
  source 1..21: mol_type = other DNA
atgtctttgcctggtcagcgg

SEQ ID NO: 37798 - DNA, 21 bp, synthetic construct
  misc_feature 1..21: note = Description of Artificial Sequence: Synthetic oligonucleotide
  source 1..21: mol_type = other DNA
agcgtcgaccaaagaagactc

SEQ ID NO: 37799 - DNA, 21 bp, synthetic construct
  misc_feature 1..21: note = Description of Artificial Sequence: Synthetic oligonucleotide
  source 1..21: mol_type = other DNA
ggtgttaggagtgtggctggg

SEQ ID NO: 37800 - DNA, 21 bp, synthetic construct
  misc_feature 1..21: note = Description of Artificial Sequence: Synthetic oligonucleotide
  source 1..21: mol_type = other DNA
agcgaccaagtcagaagcgcc

SEQ ID NO: 37801 - DNA, 21 bp, synthetic construct
  misc_feature 1..21: note = Description of Artificial Sequence: Synthetic oligonucleotide
  source 1..21: mol_type = other DNA
aaaagaatggacaaaagcagc

SEQ ID NO: 37802 - DNA, 21 bp, synthetic construct
  misc_feature 1..21: note = Description of Artificial Sequence: Synthetic oligonucleotide
  source 1..21: mol_type = other DNA
cattcgggtacgaggactagt

SEQ ID NO: 37803 - DNA, 21 bp, synthetic construct
  misc_feature 1..21: note = Description of Artificial Sequence: Synthetic oligonucleotide
  source 1..21: mol_type = other DNA
atgcctcatccttcgtcgaag

SEQ ID NO: 37804 - DNA, 21 bp, synthetic construct
  misc_feature 1..21: note = Description of Artificial Sequence: Synthetic oligonucleotide
  source 1..21: mol_type = other DNA
gcgggtgcttcttctaatacg

SEQ ID NO: 37805 - DNA, 21 bp, synthetic construct
  misc_feature 1..21: note = Description of Artificial Sequence: Synthetic oligonucleotide
  source 1..21: mol_type = other DNA
cctagtaataagactaattcg

SEQ ID NO: 37806 - DNA, 21 bp, synthetic construct
  misc_feature 1..21: note = Description of Artificial Sequence: Synthetic oligonucleotide
  source 1..21: mol_type = other DNA
tctaatgtgtcgaagccgcag

SEQ ID NO: 37807 - DNA, 21 bp, synthetic construct
  misc_feature 1..21: note = Description of Artificial Sequence: Synthetic oligonucleotide
  source 1..21: mol_type = other DNA
tacaacgtcaacagaaacacc

SEQ ID NO: 37808 - DNA, 21 bp, synthetic construct
  misc_feature 1..21: note = Description of Artificial Sequence: Synthetic oligonucleotide
  source 1..21: mol_type = other DNA
ccccacagcaccggcagcatc

SEQ ID NO: 37809 - DNA, 21 bp, synthetic construct
  misc_feature 1..21: note = Description of Artificial Sequence: Synthetic oligonucleotide
  source 1..21: mol_type = other DNA
cccagaagcaacacccaaaga

SEQ ID NO: 37810 - DNA, 21 bp, synthetic construct
  misc_feature 1..21: note = Description of Artificial Sequence: Synthetic oligonucleotide
  source 1..21: mol_type = other DNA
cacggccaaaccggcatgatc

SEQ ID NO: 37811 - DNA, 21 bp, synthetic construct
  misc_feature 1..21: note = Description of Artificial Sequence: Synthetic oligonucleotide
  source 1..21: mol_type = other DNA
catggtgttaataagactgag

SEQ ID NO: 37812 - DNA, 21 bp, synthetic construct
  misc_feature 1..21: note = Description of Artificial Sequence: Synthetic oligonucleotide
  source 1..21: mol_type = other DNA
tttagtactattaagggtgtg

SEQ ID NO: 37813 - DNA, 21 bp, synthetic construct
  misc_feature 1..21: note = Description of Artificial Sequence: Synthetic oligonucleotide
  source 1..21: mol_type = other DNA
aacggcagcggccaaaacgaa

SEQ ID NO: 37814 - DNA, 21 bp, synthetic construct
  misc_feature 1..21: note = Description of Artificial Sequence: Synthetic oligonucleotide
  source 1..21: mol_type = other DNA
cggctgtcttctcgggattct

SEQ ID NO: 37815 - DNA, 21 bp, synthetic construct
  misc_feature 1..21: note = Description of Artificial Sequence: Synthetic oligonucleotide
  source 1..21: mol_type = other DNA
tgccacgccagagaacacatc

SEQ ID NO: 37816 - DNA, 21 bp, synthetic construct
  misc_feature 1..21: note = Description of Artificial Sequence: Synthetic oligonucleotide
  source 1..21: mol_type = other DNA
atgagaaccagcagcttctac

SEQ ID NO: 37817 - DNA, 21 bp, synthetic construct
  misc_feature 1..21: note = Description of Artificial Sequence: Synthetic oligonucleotide
  source 1..21: mol_type = other DNA
gtttcgggtcggccgactggt

SEQ ID NO: 37818 - DNA, 21 bp, synthetic construct
  misc_feature 1..21: note = Description of Artificial Sequence: Synthetic oligonucleotide
  source 1..21: mol_type = other DNA
ggtattactaagaatcttgcg

SEQ ID NO: 37819 - DNA, 21 bp, synthetic construct
  misc_feature 1..21: note = Description of Artificial Sequence: Synthetic oligonucleotide
  source 1..21: mol_type = other DNA
gtcagaatccccaaaagcaac

SEQ ID NO: 37820 - DNA, 21 bp, synthetic construct
  misc_feature 1..21: note = Description of Artificial Sequence: Synthetic oligonucleotide
  source 1..21: mol_type = other DNA
cagaatcttccgaaggcgtct

SEQ ID NO: 37821 - DNA, 21 bp, synthetic construct
  misc_feature 1..21: note = Description of Artificial Sequence: Synthetic oligonucleotide
  source 1..21: mol_type = other DNA
ctcagagccaccagcggcaac

SEQ ID NO: 37822 - DNA, 21 bp, synthetic construct
  misc_feature 1..21: note = Description of Artificial Sequence: Synthetic oligonucleotide
  source 1..21: mol_type = other DNA
gtttctggttctaaggttggt

SEQ ID NO: 37823 - DNA, 21 bp, synthetic construct
  misc_feature 1..21: note = Description of Artificial Sequence: Synthetic oligonucleotide
  source 1..21: mol_type = other DNA
cggtctggtaatgctacgatt

SEQ ID NO: 37824 - DNA, 21 bp, synthetic construct
  misc_feature 1..21: note = Description of Artificial Sequence: Synthetic oligonucleotide
  source 1..21: mol_type = other DNA
gccgaaaaaaccagaagcctc

SEQ ID NO: 37825 - DNA, 21 bp, synthetic construct
  misc_feature 1..21: note = Description of Artificial Sequence: Synthetic oligonucleotide
  source 1..21: mol_type = other DNA
ggcggccacaaaagcctcaac

SEQ ID NO: 37826 - DNA, 21 bp, synthetic construct
  misc_feature 1..21: note = Description of Artificial Sequence: Synthetic oligonucleotide
  source 1..21: mol_type = other DNA
gtcggcgacagaagctggagc

SEQ ID NO: 37827 - DNA, 21 bp, synthetic construct
  misc_feature 1..21: note = Description of Artificial Sequence: Synthetic oligonucleotide
  source 1..21: mol_type = other DNA
agagacagcaccgccgccaga

SEQ ID NO: 37828 - DNA, 21 bp, synthetic construct
  misc_feature 1..21: note = Description of Artificial Sequence: Synthetic oligonucleotide
  source 1..21: mol_type = other DNA
atggcccccagaaccgtcccc

SEQ ID NO: 37829 - DNA, 21 bp, synthetic construct
  misc_feature 1..21: note = Description of Artificial Sequence: Synthetic oligonucleotide
  source 1..21: mol_type = other DNA
cttcttggggatacgaagccg

SEQ ID NO: 37830 - DNA, 21 bp, synthetic construct
  misc_feature 1..21: note = Description of Artificial Sequence: Synthetic oligonucleotide
  source 1..21: mol_type = other DNA
gacagccacctcgtcgacaaa

SEQ ID NO: 37831 - DNA, 21 bp, synthetic construct
  misc_feature 1..21: note = Description of Artificial Sequence: Synthetic oligonucleotide
  source 1..21: mol_type = other DNA
aggtcgactaatacggataat

SEQ ID NO: 37832 - DNA, 21 bp, synthetic construct
  misc_feature 1..21: note = Description of Artificial Sequence: Synthetic oligonucleotide
  source 1..21: mol_type = other DNA
tctagttttcaggcgaataag

SEQ ID NO: 37833 - DNA, 21 bp, synthetic construct
  misc_feature 1..21: note = Description of Artificial Sequence: Synthetic oligonucleotide
  source 1..21: mol_type = other DNA
cctactagtaatgggagtctt

SEQ ID NO: 37834 - DNA, 21 bp, synthetic construct
  misc_feature 1..21: note = Description of Artificial Sequence: Synthetic oligonucleotide
  source 1..21: mol_type = other DNA
ctttcggctaatccgcataat

SEQ ID NO: 37835 - DNA, 21 bp, synthetic construct
  misc_feature 1..21: note = Description of Artificial Sequence: Synthetic oligonucleotide
  source 1..21: mol_type = other DNA
caacccaacagcggcaccacc

SEQ ID NO: 37836 - DNA, 21 bp, synthetic construct
  misc_feature 1..21: note = Description of Artificial Sequence: Synthetic oligonucleotide
  source 1..21: mol_type = other DNA
gccaccgccaacacccacatg

SEQ ID NO: 37837 - DNA, 21 bp, synthetic construct
  misc_feature 1..21: note = Description of Artificial Sequence: Synthetic oligonucleotide
  source 1..21: mol_type = other DNA
ccctacgccggcaccagcccc

SEQ ID NO: 37838 - DNA, 21 bp, synthetic construct
  misc_feature 1..21: note = Description of Artificial Sequence: Synthetic oligonucleotide
  source 1..21: mol_type = other DNA
ccgctgggttctagggtgaat

SEQ ID NO: 37839 - DNA, 21 bp, synthetic construct
  misc_feature 1..21: note = Description of Artificial Sequence: Synthetic oligonucleotide
  source 1..21: mol_type = other DNA
gttaatacgaatcgggctgct

SEQ ID NO: 37840 - DNA, 21 bp, synthetic construct
  misc_feature 1..21: note = Description of Artificial Sequence: Synthetic oligonucleotide
  source 1..21: mol_type = other DNA
agtccgaattctcatccttct

SEQ ID NO: 37841 - DNA, 21 bp, synthetic construct
  misc_feature 1..21: note = Description of Artificial Sequence: Synthetic oligonucleotide
  source 1..21: mol_type = other DNA
tcgttgaatagtagggagggt

SEQ ID NO: 37842 - DNA, 21 bp, synthetic construct
  misc_feature 1..21: note = Description of Artificial Sequence: Synthetic oligonucleotide
  source 1..21: mol_type = other DNA
tgcaaccaaagccccaacaga

SEQ ID NO: 37843 - DNA, 21 bp, synthetic construct
  misc_feature 1..21: note = Description of Artificial Sequence: Synthetic oligonucleotide
  source 1..21: mol_type = other DNA
tcttttgattcgaagccgcct

SEQ ID NO: 37844 - DNA, 21 bp, synthetic construct
  misc_feature 1..21: note = Description of Artificial Sequence: Synthetic oligonucleotide
  source 1..21: mol_type = other DNA
ccgaatgggggtattcctcct

SEQ ID NO: 37845 - DNA, 21 bp, synthetic construct
  misc_feature 1..21: note = Description of Artificial Sequence: Synthetic oligonucleotide
  source 1..21: mol_type = other DNA
caaggcagcttcaacgccctc

SEQ ID NO: 37846 - DNA, 21 bp, synthetic construct
  misc_feature 1..21: note = Description of Artificial Sequence: Synthetic oligonucleotide
  source 1..21: mol_type = other DNA
catactgatacgagtgcggtg

SEQ ID NO: 37847 - DNA, 21 bp, synthetic construct
  misc_feature 1..21: note = Description of Artificial Sequence: Synthetic oligonucleotide
  source 1..21: mol_type = other DNA
cttttggatcggagggctgct

SEQ ID NO: 37848 - DNA, 21 bp, synthetic construct
  misc_feature 1..21: note = Description of Artificial Sequence: Synthetic oligonucleotide
  source 1..21: mol_type = other DNA
cgtttggagactaagtcgggt

SEQ ID NO: 37849 - DNA, 21 bp, synthetic construct
  misc_feature 1..21: note = Description of Artificial Sequence: Synthetic oligonucleotide
  source 1..21: mol_type = other DNA
gttgcggataagggttctatg

SEQ ID NO: 37850 - DNA, 21 bp, synthetic construct
  misc_feature 1..21: note = Description of Artificial Sequence: Synthetic oligonucleotide
  source 1..21: mol_type = other DNA
tctatgctgccgggggataat

SEQ ID NO: 37851 - DNA, 21 bp, synthetic construct
  misc_feature 1..21: note = Description of Artificial Sequence: Synthetic oligonucleotide
  source 1..21: mol_type = other DNA
tgtgcgacgcgtgcgagttat

SEQ ID NO: 37852 - DNA, 21 bp, synthetic construct
  misc_feature 1..21: note = Description of Artificial Sequence: Synthetic oligonucleotide
  source 1..21: mol_type = other DNA
cagacgcctgtttcggctcct

SEQ ID NO: 37853 - DNA, 21 bp, synthetic construct
  misc_feature 1..21: note = Description of Artificial Sequence: Synthetic oligonucleotide
  source 1..21: mol_type = other DNA
actgagtctcggtcggcgaat

SEQ ID NO: 37854 - DNA, 21 bp, synthetic construct
  misc_feature 1..21: note = Description of Artificial Sequence: Synthetic oligonucleotide
  source 1..21: mol_type = other DNA
aattctgttaagactcctgag

SEQ ID NO: 37855 - DNA, 21 bp, synthetic construct
  misc_feature 1..21: note = Description of Artificial Sequence: Synthetic oligonucleotide
  source 1..21: mol_type = other DNA
cctacgtctttttcgggtact

SEQ ID NO: 37856 - DNA, 21 bp, synthetic construct
  misc_feature 1..21: note = Description of Artificial Sequence: Synthetic oligonucleotide
  source 1..21: mol_type = other DNA
aatacttcttcttctcatacg

SEQ ID NO: 37857 - DNA, 21 bp, synthetic construct
  misc_feature 1..21: note = Description of Artificial Sequence: Synthetic oligonucleotide
  source 1..21: mol_type = other DNA
cccatcctcgacagaaaaagc

SEQ ID NO: 37858 - DNA, 21 bp, synthetic construct
  misc_feature 1..21: note = Description of Artificial Sequence: Synthetic oligonucleotide
  source 1..21: mol_type = other DNA
cgtacttcgacttctcttctt

SEQ ID NO: 37859 - DNA, 21 bp, synthetic construct
  misc_feature 1..21: note = Description of Artificial Sequence: Synthetic oligonucleotide
  source 1..21: mol_type = other DNA
actacgtctgctcggcctaat

SEQ ID NO: 37860 - DNA, 21 bp, synthetic construct
  misc_feature 1..21: note = Description of Artificial Sequence: Synthetic oligonucleotide
  source 1..21: mol_type = other DNA
ttgagtcaggggaggatggtt

SEQ ID NO: 37861 - DNA, 21 bp, synthetic construct
  misc_feature 1..21: note = Description of Artificial Sequence: Synthetic oligonucleotide
  source 1..21: mol_type = other DNA
aaccaaagcagacccggcgtc

SEQ ID NO: 37862 - DNA, 21 bp, synthetic construct
  misc_feature 1..21: note = Description of Artificial Sequence: Synthetic oligonucleotide
  source 1..21: mol_type = other DNA
acggagcaggctcgggctatg

SEQ ID NO: 37863 - DNA, 21 bp, synthetic construct
  misc_feature 1..21: note = Description of Artificial Sequence: Synthetic oligonucleotide
  source 1..21: mol_type = other DNA
ggcagcagcctcaccagcaga

SEQ ID NO: 37864 - DNA, 21 bp, synthetic construct
  misc_feature 1..21: note = Description of Artificial Sequence: Synthetic oligonucleotide
  source 1..21: mol_type = other DNA
agagacagaccccaaagcacc

SEQ ID NO: 37865 - DNA, 21 bp, synthetic construct
  misc_feature 1..21: note = Description of Artificial Sequence: Synthetic oligonucleotide
  source 1..21: mol_type = other DNA
gggtctgggtctcggttgatt

SEQ ID NO: 37866 - DNA, 21 bp, synthetic construct
  misc_feature 1..21: note = Description of Artificial Sequence: Synthetic oligonucleotide
  source 1..21: mol_type = other DNA
ggggatatggggatttcgaag

SEQ ID NO: 37867 - DNA, 21 bp, synthetic construct
  misc_feature 1..21: note = Description of Artificial Sequence: Synthetic oligonucleotide
  source 1..21: mol_type = other DNA
gtgagtggtcaggggaattct

SEQ ID NO: 37868 - DNA, 21 bp, synthetic construct
  misc_feature 1..21: note = Description of Artificial Sequence: Synthetic oligonucleotide
  source 1..21: mol_type = other DNA
atcagcacccccaaaaccgcc

SEQ ID NO: 37869 - DNA, 21 bp, synthetic construct
  misc_feature 1..21: note = Description of Artificial Sequence: Synthetic oligonucleotide
  source 1..21: mol_type = other DNA
ggtcctggtaggaatttgatt

SEQ ID NO: 37870 - DNA, 21 bp, synthetic construct
  misc_feature 1..21: note = Description of Artificial Sequence: Synthetic oligonucleotide
  source 1..21: mol_type = other DNA
attgcgactaaggcggttgct

SEQ ID NO: 37871 - DNA, 21 bp, synthetic construct
  misc_feature 1..21: note = Description of Artificial Sequence: Synthetic oligonucleotide
  source 1..21: mol_type = other DNA
cctccgctgggttcgacggtg

SEQ ID NO: 37872 - DNA, 21 bp, synthetic construct
  misc_feature 1..21: note = Description of Artificial Sequence: Synthetic oligonucleotide
  source 1..21: mol_type = other DNA
ggcgccagcacccccagactc

SEQ ID NO: 37873 - DNA, 21 bp, synthetic construct
  misc_feature 1..21: note = Description of Artificial Sequence: Synthetic oligonucleotide
  source 1..21: mol_type = other DNA
accagcagcggcggcctcacc

SEQ ID NO: 37874 - DNA, 21 bp, synthetic construct
  misc_feature 1..21: note = Description of Artificial Sequence: Synthetic oligonucleotide
  source 1..21: mol_type = other DNA
cagtctgatcatcggagtttg

SEQ ID NO: 37875 - DNA, 21 bp, synthetic construct
  misc_feature 1..21: note = Description of Artificial Sequence: Synthetic oligonucleotide
  source 1..21: mol_type = other DNA
tacagaaacaccaccagcgcc

SEQ ID NO: 37876 - DNA, 21 bp, synthetic construct
  misc_feature 1..21: note = Description of Artificial Sequence: Synthetic oligonucleotide
  source 1..21: mol_type = other DNA
gctatgactggttcgcatact

SEQ ID NO: 37877 - DNA, 21 bp, synthetic construct
  misc_feature 1..21: note = Description of Artificial Sequence: Synthetic oligonucleotide
  source 1..21: mol_type = other DNA
aaccaaagcagcagcgccaga

SEQ ID NO: 37878 - DNA, 21 bp, synthetic construct
  misc_feature 1..21: note = Description of Artificial Sequence: Synthetic oligonucleotide
  source 1..21: mol_type = other DNA
gttcagcagtcgaaggcgtat

SEQ ID NO: 37879 - DNA, 21 bp, synthetic construct
  misc_feature 1..21: note = Description of Artificial Sequence: Synthetic oligonucleotide
  source 1..21: mol_type = other DNA
actggtactcaggggactagg

SEQ ID NO: 37880 - DNA, 21 bp, synthetic construct
  misc_feature 1..21: note = Description of Artificial Sequence: Synthetic oligonucleotide
  source 1..21: mol_type = other DNA
ggcagcagaaacaccagcacc

SEQ ID NO: 37881 - DNA, 21 bp, synthetic construct
  misc_feature 1..21: note = Description of Artificial Sequence: Synthetic oligonucleotide
  source 1..21: mol_type = other DNA
cctggtatgaaggtgagtccg

SEQ ID NO: 37882 - DNA, 21 bp, synthetic construct
  misc_feature 1..21: note = Description of Artificial Sequence: Synthetic oligonucleotide
  source 1..21: mol_type = other DNA
accctcgaaaacagcagaaga

SEQ ID NO: 37883 - DNA, 21 bp, synthetic construct
  misc_feature 1..21: note = Description of Artificial Sequence: Synthetic oligonucleotide
  source 1..21: mol_type = other DNA
cagattactccgcggagtggg

SEQ ID NO: 37884 - DNA, 21 bp, synthetic construct
  misc_feature 1..21: note = Description of Artificial Sequence: Synthetic oligonucleotide
  source 1..21: mol_type = other DNA
cgtagtgcgacttctagtgtt

SEQ ID NO: 37885 - DNA, 21 bp, synthetic construct
  misc_feature 1..21: note = Description of Artificial Sequence: Synthetic oligonucleotide
  source 1..21: mol_type = other DNA
tatcagaaggagcgtgttgtt

SEQ ID NO: 37886 - DNA, 21 bp, synthetic construct
  misc_feature 1..21: note = Description of Artificial Sequence: Synthetic oligonucleotide
  source 1..21: mol_type = other DNA
cttaggagtgctcctagtatt

SEQ ID NO: 37887 - DNA, 21 bp, synthetic construct
  misc_feature 1..21: note = Description of Artificial Sequence: Synthetic oligonucleotide
  source 1..21: mol_type = other DNA
cctcctgcggtggggtcgtcg

SEQ ID NO: 37888 - DNA, 21 bp, synthetic construct
  misc_feature 1..21: note = Description of Artificial Sequence: Synthetic oligonucleotide
  source 1..21: mol_type = other DNA
tcgagtcgtggtgggaatact

SEQ ID NO: 37889 - DNA, 21 bp, synthetic construct
  misc_feature 1..21: note = Description of Artificial Sequence: Synthetic oligonucleotide
  source 1..21: mol_type = other DNA
ctccaaagagccccccaaacc

SEQ ID NO: 37890 - DNA, 21 bp, synthetic construct
  misc_feature 1..21: note = Description of Artificial Sequence: Synthetic oligonucleotide
  source 1..21: mol_type = other DNA
gctggtactggtagttcgctt

SEQ ID NO: 37891 - DNA, 21 bp, synthetic construct
  misc_feature 1..21: note = Description of Artificial Sequence: Synthetic oligonucleotide
  source 1..21: mol_type = other DNA
aatcatgagagttcgtatcgg

SEQ ID NO: 37892 - DNA, 21 bp, synthetic construct
  misc_feature 1..21: note = Description of Artificial Sequence: Synthetic oligonucleotide
  source 1..21: mol_type = other DNA
ctcggcaccagccaccaacaa

SEQ ID NO: 37893 - DNA, 21 bp, synthetic construct
  misc_feature 1..21: note = Description of Artificial Sequence: Synthetic oligonucleotide
  source 1..21: mol_type = other DNA
cccatcaccagaagcctcctc

SEQ ID NO: 37894 - DNA, 21 bp, synthetic construct
  misc_feature 1..21: note = Description of Artificial Sequence: Synthetic oligonucleotide
  source 1..21: mol_type = other DNA
gtgcagcatactcattcgggt

SEQ ID NO: 37895 - DNA, 21 bp, synthetic construct
  misc_feature 1..21: note = Description of Artificial Sequence: Synthetic oligonucleotide
  source 1..21: mol_type = other DNA
cctctgccggctcatagtcct

SEQ ID NO: 37896 - DNA, 21 bp, synthetic construct
  misc_feature 1..21: note = Description of Artificial Sequence: Synthetic oligonucleotide
  source 1..21: mol_type = other DNA
atcatccaagacaccgccaga

SEQ ID NO: 37897 - DNA, 21 bp, synthetic construct
  misc_feature 1..21: note = Description of Artificial Sequence: Synthetic oligonucleotide
  source 1..21: mol_type = other DNA
cccagcctcaacaaaaactac

SEQ ID NO: 37898 - DNA, 21 bp, synthetic construct
  misc_feature 1..21: note = Description of Artificial Sequence: Synthetic oligonucleotide
  source 1..21: mol_type = other DNA
cccagactcaacgtcggcggc

SEQ ID NO: 37899 - DNA, 21 bp, synthetic construct
  misc_feature 1..21: note = Description of Artificial Sequence: Synthetic oligonucleotide
  source 1..21: mol_type = other DNA
actaatccgaatccgcatagg

SEQ ID NO: 37900 - DNA, 21 bp, synthetic construct
  misc_feature 1..21: note = Description of Artificial Sequence: Synthetic oligonucleotide
  source 1..21: mol_type = other DNA
aacagagaacaactcagagac

SEQ ID NO: 37901 - DNA, 21 bp, synthetic construct
  misc_feature 1..21: note = Description of Artificial Sequence: Synthetic oligonucleotide
  source 1..21: mol_type = other DNA
agtatgggtcatactttgaat

SEQ ID NO: 37902 - DNA, 21 bp, synthetic construct
  misc_feature 1..21: note = Description of Artificial Sequence: Synthetic oligonucleotide
  source 1..21: mol_type = other DNA
gctcctacttcgggtccgagt

SEQ ID NO: 37903 - DNA, 21 bp, synthetic construct
  misc_feature 1..21: note = Description of Artificial Sequence: Synthetic oligonucleotide
  source 1..21: mol_type = other DNA
caaagcagcaacgccagaaac

SEQ ID NO: 37904 - DNA, 21 bp, synthetic construct
  misc_feature 1..21: note = Description of Artificial Sequence: Synthetic oligonucleotide
  source 1..21: mol_type = other DNA
aaacaacacaacaccctcggc

SEQ ID NO: 37905 - DNA, 21 bp, synthetic construct
  misc_feature 1..21: note = Description of Artificial Sequence: Synthetic oligonucleotide
  source 1..21: mol_type = other DNA
agtcctgggacgaatactagt

SEQ ID NO: 37906 - DNA, 21 bp, synthetic construct
  misc_feature 1..21: note = Description of Artificial Sequence: Synthetic oligonucleotide
  source 1..21: mol_type = other DNA
acccaaagaagccaagccgcc

SEQ ID NO: 37907 - DNA, 21 bp, synthetic construct
  misc_feature 1..21: note = Description of Artificial Sequence: Synthetic oligonucleotide
  source 1..21: mol_type = other DNA
gacatcaccagaggccccagc

SEQ ID NO: 37908 - DNA, 21 bp, synthetic construct
  misc_feature 1..21: note = Description of Artificial Sequence: Synthetic oligonucleotide
  source 1..21: mol_type = other DNA
gtccaacccagaaccagcacc

SEQ ID NO: 37909 - DNA, 21 bp, synthetic construct
  misc_feature 1..21: note = Description of Artificial Sequence: Synthetic oligonucleotide
  source 1..21: mol_type = other DNA
gacaccagaggccaaatgaga

SEQ ID NO: 37910 - DNA, 21 bp, synthetic construct
  misc_feature 1..21: note = Description of Artificial Sequence: Synthetic oligonucleotide
  source 1..21: mol_type = other DNA
attaggacgaaggagtctgcg

SEQ ID NO: 37911 - DNA, 21 bp, synthetic construct
  misc_feature 1..21: note = Description of Artificial Sequence: Synthetic oligonucleotide
  source 1..21: mol_type = other DNA
gttagtgtggataagcgtcct

SEQ ID NO: 37912 - DNA, 21 bp, synthetic construct
  misc_feature 1..21: note = Description of Artificial Sequence: Synthetic oligonucleotide
  source 1..21: mol_type = other DNA
cccacccacgccagcagcctc

SEQ ID NO: 37913 - DNA, 21 bp, synthetic construct
  misc_feature 1..21: note = Description of Artificial Sequence: Synthetic oligonucleotide
  source 1..21: mol_type = other DNA
catgcgacgcagagtcgtaat

SEQ ID NO: 37914 - DNA, 21 bp, synthetic construct
  misc_feature 1..21: note = Description of Artificial Sequence: Synthetic oligonucleotide
  source 1..21: mol_type = other DNA
ggtcttgcgcgggctggtcat

SEQ ID NO: 37915 - DNA, 21 bp, synthetic construct
  misc_feature 1..21: note = Description of Artificial Sequence: Synthetic oligonucleotide
  source 1..21: mol_type = other DNA
cacgccagccccagcaccaga

SEQ ID NO: 37916 - DNA, 21 bp, synthetic construct
  misc_feature 1..21: note = Description of Artificial Sequence: Synthetic oligonucleotide
  source 1..21: mol_type = other DNA
ggcaacagacaaggcatgggc

SEQ ID NO: 37917 - DNA, 21 bp, synthetic construct
  misc_feature 1..21: note = Description of Artificial Sequence: Synthetic oligonucleotide
  source 1..21: mol_type = other DNA
atgtcgacgagttcgaagtct

SEQ ID NO: 37918 - DNA, 21 bp, synthetic construct
  misc_feature 1..21: note = Description of Artificial Sequence: Synthetic oligonucleotide
  source 1..21: mol_type = other DNA
agtgcgaataataagtcgggg

SEQ ID NO: 37919 - DNA, 21 bp, synthetic construct
  misc_feature 1..21: note = Description of Artificial Sequence: Synthetic oligonucleotide
  source 1..21: mol_type = other DNA
agccaacacagacccagcagc

SEQ ID NO: 37920 - DNA, 21 bp, synthetic construct
  misc_feature 1..21: note = Description of Artificial Sequence: Synthetic oligonucleotide
  source 1..21: mol_type = other DNA
accccccaaaacgtcagaaac

SEQ ID NO: 37921 - DNA, 21 bp, synthetic construct
  misc_feature 1..21: note = Description of Artificial Sequence: Synthetic oligonucleotide
  source 1..21: mol_type = other DNA
actcctgtgaataggactcat

SEQ ID NO: 37922 - DNA, 21 bp, synthetic construct
  misc_feature 1..21: note = Description of Artificial Sequence: Synthetic oligonucleotide
  source 1..21: mol_type = other DNA
ctcacccccagcaaaatcggc

SEQ ID NO: 37923 - DNA, 21 bp, synthetic construct
  misc_feature 1..21: note = Description of Artificial Sequence: Synthetic oligonucleotide
  source 1..21: mol_type = other DNA
gtgccgcatggggctacttct

SEQ ID NO: 37924 - DNA, 21 bp, synthetic construct
  misc_feature 1..21: note = Description of Artificial Sequence: Synthetic oligonucleotide
  source 1..21: mol_type = other DNA
agcggcagagacaaattcagc

SEQ ID NO: 37925 - DNA, 21 bp, synthetic construct
  misc_feature 1..21: note = Description of Artificial Sequence: Synthetic oligonucleotide
  source 1..21: mol_type = other DNA
agaggcgacccccacagagcc

SEQ ID NO: 37926 - DNA, 21 bp, synthetic construct
  misc_feature 1..21: note = Description of Artificial Sequence: Synthetic oligonucleotide
  source 1..21: mol_type = other DNA
ccgggtaattcgcataagatt

SEQ ID NO: 37927 - DNA, 21 bp, synthetic construct
  misc_feature 1..21: note = Description of Artificial Sequence: Synthetic oligonucleotide
  source 1..21: mol_type = other DNA
aatccggctcatggtcttaat

SEQ ID NO: 37928 - DNA, 21 bp, synthetic construct
  misc_feature 1..21: note = Description of Artificial Sequence: Synthetic oligonucleotide
  source 1..21: mol_type = other DNA
agaaccgccagcagcctcccc

SEQ ID NO: 37929 - DNA, 21 bp, synthetic construct
  misc_feature 1..21: note = Description of Artificial Sequence: Synthetic oligonucleotide
  source 1..21: mol_type = other DNA
agaagacaagacacccaagaa

SEQ ID NO: 37930 - DNA, 21 bp, synthetic construct
  misc_feature 1..21: note = Description of Artificial Sequence: Synthetic oligonucleotide
  source 1..21: mol_type = other DNA
gggtctgagcataagaagcag

SEQ ID NO: 37931 - DNA, 21 bp, synthetic construct
  misc_feature 1..21: note = Description of Artificial Sequence: Synthetic oligonucleotide
  source 1..21: mol_type = other DNA
gtcaacgaacacaacgtcaga

SEQ ID NO: 37932 - DNA, 21 bp, synthetic construct
  misc_feature 1..21: note = Description of Artificial Sequence: Synthetic oligonucleotide
  source 1..21: mol_type = other DNA
cccgaacccgccgccagaaac

SEQ ID NO: 37933 - DNA, 21 bp, synthetic construct
  misc_feature 1..21: note = Description of Artificial Sequence: Synthetic oligonucleotide
  source 1..21: mol_type = other DNA
cattataatcagactggtttg

SEQ ID NO: 37934 - DNA, 21 bp, synthetic construct
  misc_feature 1..21: note = Description of Artificial Sequence: Synthetic oligonucleotide
  source 1..21: mol_type = other DNA
agccaccaaacccccggctac

SEQ ID NO: 37935 - DNA, 21 bp, synthetic construct
  misc_feature 1..21: note = Description of Artificial Sequence: Synthetic oligonucleotide
  source 1..21: mol_type = other DNA
agtcttagttcgaagcagatg

SEQ ID NO: 37936 - DNA, 21 bp, synthetic construct
  misc_feature 1..21: note = Description of Artificial Sequence: Synthetic oligonucleotide
  source 1..21: mol_type = other DNA
aacgcccaaggcaccgccaaa

SEQ ID NO: 37937 - DNA, 21 bp, synthetic construct
  misc_feature 1..21: note = Description of Artificial Sequence: Synthetic oligonucleotide
  source 1..21: mol_type = other DNA
gtgactggtagtgtgtcggat

SEQ ID NO: 37938 - DNA, 21 bp, synthetic construct
  misc_feature 1..21: note = Description of Artificial Sequence: Synthetic oligonucleotide
  source 1..21: mol_type = other DNA
cccggccaaagcaccagcaaa

SEQ ID NO: 37939 - DNA, 21 bp, synthetic construct
  misc_feature 1..21: note = Description of Artificial Sequence: Synthetic oligonucleotide
  source 1..21: mol_type = other DNA
gtgctggatactaaggattgt

SEQ ID NO: 37940 - DNA, 21 bp, synthetic construct
  misc_feature 1..21: note = Description of Artificial Sequence: Synthetic oligonucleotide
  source 1..21: mol_type = other DNA
acggggggtaatcgtgttttg

SEQ ID NO: 37941 - DNA, 21 bp, synthetic construct
  misc_feature 1..21: note = Description of Artificial Sequence: Synthetic oligonucleotide
  source 1..21: mol_type = other DNA
gttagtaataagtctgtgctt

SEQ ID NO: 37942 - DNA, 21 bp, synthetic construct
  misc_feature 1..21: note = Description of Artificial Sequence: Synthetic oligonucleotide
  source 1..21: mol_type = other DNA
aatcatagggctaatcttatt

SEQ ID NO: 37943 - DNA, 21 bp, synthetic construct
  misc_feature 1..21: note = Description of Artificial Sequence: Synthetic oligonucleotide
  source 1..21: mol_type = other DNA
catgtgaatagtgggaagctg

SEQ ID NO: 37944 - DNA, 21 bp, synthetic construct
  misc_feature 1..21: note = Description of Artificial Sequence: Synthetic oligonucleotide
  source 1..21: mol_type = other DNA
caacaattcggcaccctcaaa

SEQ ID NO: 37945 - DNA, 21 bp, synthetic construct
  misc_feature 1..21: note = Description of Artificial Sequence: Synthetic oligonucleotide
  source 1..21: mol_type = other DNA
tggcaggaggagcgggggcag

SEQ ID NO: 37946 - DNA, 21 bp, synthetic construct
  misc_feature 1..21: note = Description of Artificial Sequence: Synthetic oligonucleotide
  source 1..21: mol_type = other DNA
ttcaccatccccagagccgcc

SEQ ID NO: 37947 - DNA, 21 bp, synthetic construct
  misc_feature 1..21: note = Description of Artificial Sequence: Synthetic oligonucleotide
  source 1..21: mol_type = other DNA
cagggtaagagtggggagcag

SEQ ID NO: 37948 - DNA, 21 bp, synthetic construct
  misc_feature 1..21: note = Description of Artificial Sequence: Synthetic oligonucleotide
  source 1..21: mol_type = other DNA
actgggacgtctgggagtcgt

SEQ ID NO: 37949 - DNA, 21 bp, synthetic construct
  misc_feature 1..21: note = Description of Artificial Sequence: Synthetic oligonucleotide
  source 1..21: mol_type = other DNA
actacgagtaagggtgggatt

SEQ ID NO: 37950 - DNA, 21 bp, synthetic construct
  misc_feature 1..21: note = Description of Artificial Sequence: Synthetic oligonucleotide
  source 1..21: mol_type = other DNA
aagccggcgactcctaatggg

SEQ ID NO: 37951 - DNA, 21 bp, synthetic construct
  misc_feature 1..21: note = Description of Artificial Sequence: Synthetic oligonucleotide
  source 1..21: mol_type = other DNA
cagaatacgaatgcggctatt

SEQ ID NO: 37952 - DNA, 21 bp, synthetic construct
  misc_feature 1..21: note = Description of Artificial Sequence: Synthetic oligonucleotide
  source 1..21: mol_type = other DNA
aattctcataatggtgcttct

SEQ ID NO: 37953 - DNA, 21 bp, synthetic construct
  misc_feature 1..21: note = Description of Artificial Sequence: Synthetic oligonucleotide
  source 1..21: mol_type = other DNA
cccgtcagcagaggcagcggc

SEQ ID NO: 37954 - DNA, 21 bp, synthetic construct
  misc_feature 1..21: note = Description of Artificial Sequence: Synthetic oligonucleotide
  source 1..21: mol_type = other DNA
tcgatggggaattcgattagt

SEQ ID NO: 37955 - DNA, 21 bp, synthetic construct
  misc_feature 1..21: note = Description of Artificial Sequence: Synthetic oligonucleotide
  source 1..21: mol_type = other DNA
agcggcagcggccaaaaccaa

SEQ ID NO: 37956 - DNA, 21 bp, synthetic construct
  misc_feature 1..21: note = Description of Artificial Sequence: Synthetic oligonucleotide
  source 1..21: mol_type = other DNA
ttcagaacccaaagcaccaaa

SEQ ID NO: 37957 - DNA, 21 bp, synthetic construct
  misc_feature 1..21: note = Description of Artificial Sequence: Synthetic oligonucleotide
  source 1..21: mol_type = other DNA
caggttccggctagtcatggg

SEQ ID NO: 37958 - DNA, 21 bp, synthetic construct
  misc_feature 1..21: note = Description of Artificial Sequence: Synthetic oligonucleotide
  source 1..21: mol_type = other DNA
cccaacctccaaagcagcaac

SEQ ID NO: 37959 - DNA, 21 bp, synthetic construct
  misc_feature 1..21: note = Description of Artificial Sequence: Synthetic oligonucleotide
  source 1..21: mol_type = other DNA
ggtcttgggcagcagacgaat

SEQ ID NO: 37960 - DNA, 21 bp, synthetic construct
  misc_feature 1..21: note = Description of Artificial Sequence: Synthetic oligonucleotide
  source 1..21: mol_type = other DNA
aaaaacgccccccaacaagcc

SEQ ID NO: 37961 - DNA, 21 bp, synthetic construct
  misc_feature 1..21: note = Description of Artificial Sequence: Synthetic oligonucleotide
  source 1..21: mol_type = other DNA
gacatccccgccaaaaccgcc

SEQ ID NO: 37962 - DNA, 21 bp, synthetic construct
  misc_feature 1..21: note = Description of Artificial Sequence: Synthetic oligonucleotide
  source 1..21: mol_type = other DNA
gtcacccccaccaaacacccc

SEQ ID NO: 37963 - DNA, 21 bp, synthetic construct
  misc_feature 1..21: note = Description of Artificial Sequence: Synthetic oligonucleotide
  source 1..21: mol_type = other DNA
agaatgagcaacctcctcggc

SEQ ID NO: 37964 - DNA, 21 bp, synthetic construct
  misc_feature 1..21: note = Description of Artificial Sequence: Synthetic oligonucleotide
  source 1..21: mol_type = other DNA
ccgaatacgaagcctgtgttg

SEQ ID NO: 37965 - DNA, 21 bp, synthetic construct
  misc_feature 1..21: note = Description of Artificial Sequence: Synthetic oligonucleotide
  source 1..21: mol_type = other DNA
gtcaccggcaccaccagcgaa

SEQ ID NO: 37966 - DNA, 21 bp, synthetic construct
  misc_feature 1..21: note = Description of Artificial Sequence: Synthetic oligonucleotide
  source 1..21: mol_type = other DNA
gttcctagggctcctggtatg

SEQ ID NO: 37967 - DNA, 21 bp, synthetic construct
  misc_feature 1..21: note = Description of Artificial Sequence: Synthetic oligonucleotide
  source 1..21: mol_type = other DNA
tctgcttctcgttctgcgtat

SEQ ID NO: 37968 - DNA, 21 bp, synthetic construct
  misc_feature 1..21: note = Description of Artificial Sequence: Synthetic oligonucleotide
  source 1..21: mol_type = other DNA
agaggcagcggcctcctcctc

SEQ ID NO: 37969 - DNA, 21 bp, synthetic construct
  misc_feature 1..21: note = Description of Artificial Sequence: Synthetic oligonucleotide
  source 1..21: mol_type = other DNA
cccaccaccgccagcagacaa

SEQ ID NO: 37970 - DNA, 21 bp, synthetic construct
  misc_feature 1..21: note = Description of Artificial Sequence: Synthetic oligonucleotide
  source 1..21: mol_type = other DNA
cacagcaccaccgtcgccaaa

SEQ ID NO: 37971 - DNA, 21 bp, synthetic construct
  misc_feature 1..21: note = Description of Artificial Sequence: Synthetic oligonucleotide
  source 1..21: mol_type = other DNA
aatagtgggaagccgaatgcg

SEQ ID NO: 37972 - DNA, 21 bp, synthetic construct
  misc_feature 1..21: note = Description of Artificial Sequence: Synthetic oligonucleotide
  source 1..21: mol_type = other DNA
tatggtcgtgataagtttagt

SEQ ID NO: 37973 - DNA, 21 bp, synthetic construct
  misc_feature 1..21: note = Description of Artificial Sequence: Synthetic oligonucleotide
  source 1..21: mol_type = other DNA
gtgggtccgtcgaagattcag

SEQ ID NO: 37974 - DNA, 21 bp, synthetic construct
  misc_feature 1..21: note = Description of Artificial Sequence: Synthetic oligonucleotide
  source 1..21: mol_type = other DNA
aacggcagcggccaataccaa

SEQ ID NO: 37975 - DNA, 21 bp, synthetic construct
  misc_feature 1..21: note = Description of Artificial Sequence: Synthetic oligonucleotide
  source 1..21: mol_type = other DNA
cctgggacgaagcagagttcg

SEQ ID NO: 37976 - DNA, 21 bp, synthetic construct
  misc_feature 1..21: note = Description of Artificial Sequence: Synthetic oligonucleotide
  source 1..21: mol_type = other DNA
ttcggcagcagcaacgccgtc

SEQ ID NO: 37977 - DNA, 21 bp, synthetic construct
  misc_feature 1..21: note = Description of Artificial Sequence: Synthetic oligonucleotide
  source 1..21: mol_type = other DNA
ctgtcgaatcagaataatcag

SEQ ID NO: 37978 - DNA, 21 bp, synthetic construct
  misc_feature 1..21: note = Description of Artificial Sequence: Synthetic oligonucleotide
  source 1..21: mol_type = other DNA
aggacgggtgagtcttatatg

SEQ ID NO: 37979 - DNA, 21 bp, synthetic construct
  misc_feature 1..21: note = Description of Artificial Sequence: Synthetic oligonucleotide
  source 1..21: mol_type = other DNA
tctattcattcgactaaggcg

SEQ ID NO: 37980 - DNA, 21 bp, synthetic construct
  misc_feature 1..21: note = Description of Artificial Sequence: Synthetic oligonucleotide
  source 1..21: mol_type = other DNA
tttagtaataatggttcgcat

SEQ ID NO: 37981 - DNA, 21 bp, synthetic construct
  misc_feature 1..21: note = Description of Artificial Sequence: Synthetic oligonucleotide
  source 1..21: mol_type = other DNA
ctcgtcagcgtcaaccaactc

SEQ ID NO: 37982 - DNA, 21 bp, synthetic construct
  misc_feature 1..21: note = Description of Artificial Sequence: Synthetic oligonucleotide
  source 1..21: mol_type = other DNA
tcgggttctacgaggagggat

SEQ ID NO: 37983 - DNA, 21 bp, synthetic construct
  misc_feature 1..21: note = Description of Artificial Sequence: Synthetic oligonucleotide
  source 1..21: mol_type = other DNA
gcgggtggtattaataagctt

SEQ ID NO: 37984 - DNA, 21 bp, synthetic construct
  misc_feature 1..21: note = Description of Artificial Sequence: Synthetic oligonucleotide
  source 1..21: mol_type = other DNA
actgctattggggatgtgtct

SEQ ID NO: 37985 - DNA, 21 bp, synthetic construct
  misc_feature 1..21: note = Description of Artificial Sequence: Synthetic oligonucleotide
  source 1..21: mol_type = other DNA
ccgtatgttaagagtgctggg

SEQ ID NO: 37986 - DNA, 21 bp, synthetic construct
  misc_feature 1..21: note = Description of Artificial Sequence: Synthetic oligonucleotide
  source 1..21: mol_type = other DNA
agaagccccggcagcaacacc

SEQ ID NO: 37987 - DNA, 21 bp, synthetic construct
  misc_feature 1..21: note = Description of Artificial Sequence: Synthetic oligonucleotide
  source 1..21: mol_type = other DNA
atgtaccaaaaacccgccagc

SEQ ID NO: 37988 - DNA, 21 bp, synthetic construct
  misc_feature 1..21: note = Description of Artificial Sequence: Synthetic oligonucleotide
  source 1..21: mol_type = other DNA
aattctcgtgagaagggtgcg

SEQ ID NO: 37989 - DNA, 21 bp, synthetic construct
  misc_feature 1..21: note = Description of Artificial Sequence: Synthetic oligonucleotide
  source 1..21: mol_type = other DNA
tctagtgggaatcggactact

SEQ ID NO: 37990 - DNA, 21 bp, synthetic construct
  misc_feature 1..21: note = Description of Artificial Sequence: Synthetic oligonucleotide
  source 1..21: mol_type = other DNA
gttgcgagtcagcctgttcgt

SEQ ID NO: 37991 - DNA, 21 bp, synthetic construct
  misc_feature 1..21: note = Description of Artificial Sequence: Synthetic oligonucleotide
  source 1..21: mol_type = other DNA
atgacccaacacaaacaagcc

SEQ ID NO: 37992 - DNA, 21 bp, synthetic construct
  misc_feature 1..21: note = Description of Artificial Sequence: Synthetic oligonucleotide
  source 1..21: mol_type = other DNA
tcgtcttatgtggggccttcg

SEQ ID NO: 37993 - DNA, 21 bp, synthetic construct
  misc_feature 1..21: note = Description of Artificial Sequence: Synthetic oligonucleotide
  source 1..21: mol_type = other DNA
cggatgagggataatcctggt

SEQ ID NO: 37994 - DNA, 21 bp, synthetic construct
  misc_feature 1..21: note = Description of Artificial Sequence: Synthetic oligonucleotide
  source 1..21: mol_type = other DNA
atgagtcatactaataggccg

SEQ ID NO: 37995 - DNA, 21 bp, synthetic construct
  misc_feature 1..21: note = Description of Artificial Sequence: Synthetic oligonucleotide
  source 1..21: mol_type = other DNA
ctgcgtgataagactggtgct

SEQ ID NO: 37996 - DNA, 21 bp, synthetic construct
  misc_feature 1..21: note = Description of Artificial Sequence: Synthetic oligonucleotide
  source 1..21: mol_type = other DNA
tctcagcagtctgctgcgctt

SEQ ID NO: 37997 - DNA, 21 bp, synthetic construct
  misc_feature 1..21: note = Description of Artificial Sequence: Synthetic oligonucleotide
  source 1..21: mol_type = other DNA
cagttgccggctttgcagggt

SEQ ID NO: 37998 - DNA, 21 bp, synthetic construct
  misc_feature 1..21: note = Description of Artificial Sequence: Synthetic oligonucleotide
  source 1..21: mol_type = other DNA
ccgtctggggagactagtaag

SEQ ID NO: 37999 - DNA, 21 bp, synthetic construct
  misc_feature 1..21: note = Description of Artificial Sequence: Synthetic oligonucleotide
  source 1..21: mol_type = other DNA
gctcgtggtggtgttttgagt

SEQ ID NO: 38000 - DNA, 21 bp, synthetic construct
  misc_feature 1..21: note = Description of Artificial Sequence: Synthetic oligonucleotide
  source 1..21: mol_type = other DNA
accgccagcggcagcaacgcc

SEQ ID NO: 38001 - DNA, 21 bp, synthetic construct
  misc_feature 1..21: note = Description of Artificial Sequence: Synthetic oligonucleotide
  source 1..21: mol_type = other DNA
aattcgtcgacgtcggcgaag

SEQ ID NO: 38002 - DNA, 21 bp, synthetic construct
  misc_feature 1..21: note = Description of Artificial Sequence: Synthetic oligonucleotide
  source 1..21: mol_type = other DNA
tacggcagcgaaagcaacaaa

SEQ ID NO: 38003 - DNA, 21 bp, synthetic construct
  misc_feature 1..21: note = Description of Artificial Sequence: Synthetic oligonucleotide
  source 1..21: mol_type = other DNA
cctcatatttcgcctaagggg

SEQ ID NO: 38004 - DNA, 21 bp, synthetic construct
  misc_feature 1..21: note = Description of Artificial Sequence: Synthetic oligonucleotide
  source 1..21: mol_type = other DNA
cccgtcagcgacagaagaggc

SEQ ID NO: 38005 - DNA, 21 bp, synthetic construct
  misc_feature 1..21: note = Description of Artificial Sequence: Synthetic oligonucleotide
  source 1..21: mol_type = other DNA
cagagtgggccgggggttact

SEQ ID NO: 38006 - DNA, 21 bp, synthetic construct
  misc_feature 1..21: note = Description of Artificial Sequence: Synthetic oligonucleotide
  source 1..21: mol_type = other DNA
cttcttagtgctaaggggggg

SEQ ID NO: 38007 - DNA, 21 bp, synthetic construct
  misc_feature 1..21: note = Description of Artificial Sequence: Synthetic oligonucleotide
  source 1..21: mol_type = other DNA
gtggggaatcgggcgaattgt

SEQ ID NO: 38008 - DNA, 21 bp, synthetic construct
  misc_feature 1..21: note = Description of Artificial Sequence: Synthetic oligonucleotide
  source 1..21: mol_type = other DNA
acgggtagttcggggcgtatt

SEQ ID NO: 38009 - DNA, 21 bp, synthetic construct
  misc_feature 1..21: note = Description of Artificial Sequence: Synthetic oligonucleotide
  source 1..21: mol_type = other DNA
gaagtcttcagcagccaaaaa

SEQ ID NO: 38010 - DNA, 21 bp, synthetic construct
  misc_feature 1..21: note = Description of Artificial Sequence: Synthetic oligonucleotide
  source 1..21: mol_type = other DNA
aacagccaccaaaaacccagc

SEQ ID NO: 38011 - DNA, 21 bp, synthetic construct
  misc_feature 1..21: note = Description of Artificial Sequence: Synthetic oligonucleotide
  source 1..21: mol_type = other DNA
cccctcagcggcagcaaagcc

SEQ ID NO: 38012 - DNA, 21 bp, synthetic construct
  misc_feature 1..21: note = Description of Artificial Sequence: Synthetic oligonucleotide
  source 1..21: mol_type = other DNA
accaccatgagcaaacccagc

SEQ ID NO: 38013 - DNA, 21 bp, synthetic construct
  misc_feature 1..21: note = Description of Artificial Sequence: Synthetic oligonucleotide
  source 1..21: mol_type = other DNA
gctttggcgggtactaagggg

SEQ ID NO: 38014 - DNA, 21 bp, synthetic construct
  misc_feature 1..21: note = Description of Artificial Sequence: Synthetic oligonucleotide
  source 1..21: mol_type = other DNA
cggggggatactaagaatttg

SEQ ID NO: 38015 - DNA, 21 bp, synthetic construct
  misc_feature 1..21: note = Description of Artificial Sequence: Synthetic oligonucleotide
  source 1..21: mol_type = other DNA
agcatcagcgacaaactcggc

SEQ ID NO: 38016 - DNA, 21 bp, synthetic construct
  misc_feature 1..21: note = Description of Artificial Sequence: Synthetic oligonucleotide
  source 1..21: mol_type = other DNA
agagaatacaacaccaccagc

SEQ ID NO: 38017 - DNA, 21 bp, synthetic construct
  misc_feature 1..21: note = Description of Artificial Sequence: Synthetic oligonucleotide
  source 1..21: mol_type = other DNA
ctttcgcggaatgggattaat

SEQ ID NO: 38018 - DNA, 21 bp, synthetic construct
  misc_feature 1..21: note = Description of Artificial Sequence: Synthetic oligonucleotide
  source 1..21: mol_type = other DNA
agacaaaacaacggcatcaaa

SEQ ID NO: 38019 - DNA, 21 bp, synthetic construct
  misc_feature 1..21: note = Description of Artificial Sequence: Synthetic oligonucleotide
  source 1..21: mol_type = other DNA
tctgttgttagtgaggttcgg

SEQ ID NO: 38020 - DNA, 21 bp, synthetic construct
  misc_feature 1..21: note = Description of Artificial Sequence: Synthetic oligonucleotide
  source 1..21: mol_type = other DNA
atcggccccagcggcgtcctc

SEQ ID NO: 38021 - DNA, 21 bp, synthetic construct
  misc_feature 1..21: note = Description of Artificial Sequence: Synthetic oligonucleotide
  source 1..21: mol_type = other DNA
agtgtgacgcctcgtgagtat

SEQ ID NO: 38022 - DNA, 21 bp, synthetic construct
  misc_feature 1..21: note = Description of Artificial Sequence: Synthetic oligonucleotide
  source 1..21: mol_type = other DNA
agcggcacccaaacctggagc

SEQ ID NO: 38023 - DNA, 21 bp, synthetic construct
  misc_feature 1..21: note = Description of Artificial Sequence: Synthetic oligonucleotide
  source 1..21: mol_type = other DNA
agtagttcggcgcctcgtctt

SEQ ID NO: 38024 - DNA, 21 bp, synthetic construct
  misc_feature 1..21: note = Description of Artificial Sequence: Synthetic oligonucleotide
  source 1..21: mol_type = other DNA
ccgatgggtaggaatgcgggg

SEQ ID NO: 38025 - DNA, 21 bp, synthetic construct
  misc_feature 1..21: note = Description of Artificial Sequence: Synthetic oligonucleotide
  source 1..21: mol_type = other DNA
ttcagacaaggcggcgccatc

SEQ ID NO: 38026 - DNA, 21 bp, synthetic construct
  misc_feature 1..21: note = Description of Artificial Sequence: Synthetic oligonucleotide
  source 1..21: mol_type = other DNA
gaccaagtcagccacaaactc

SEQ ID NO: 38027 - DNA, 21 bp, synthetic construct
  misc_feature 1..21: note = Description of Artificial Sequence: Synthetic oligonucleotide
  source 1..21: mol_type = other DNA
agcagcagccccaacgtcaaa

SEQ ID NO: 38028 - DNA, 21 bp, synthetic construct
  misc_feature 1..21: note = Description of Artificial Sequence: Synthetic oligonucleotide
  source 1..21: mol_type = other DNA
cagcctactcagaggatgggt

SEQ ID NO: 38029 - DNA, 21 bp, synthetic construct
  misc_feature 1..21: note = Description of Artificial Sequence: Synthetic oligonucleotide
  source 1..21: mol_type = other DNA
cataatgtggttggtcgtggt

SEQ ID NO: 38030 - DNA, 21 bp, synthetic construct
  misc_feature 1..21: note = Description of Artificial Sequence: Synthetic oligonucleotide
  source 1..21: mol_type = other DNA
ggttttcctaatgttgcgact

SEQ ID NO: 38031 - DNA, 21 bp, synthetic construct
  misc_feature 1..21: note = Description of Artificial Sequence: Synthetic oligonucleotide
  source 1..21: mol_type = other DNA
cagcctacgcggtctacggct

SEQ ID NO: 38032 - DNA, 21 bp, synthetic construct
  misc_feature 1..21: note = Description of Artificial Sequence: Synthetic oligonucleotide
  source 1..21: mol_type = other DNA
ggcaccgacagcaaaagacac

SEQ ID NO: 38033 - DNA, 21 bp, synthetic construct
  misc_feature 1..21: note = Description of Artificial Sequence: Synthetic oligonucleotide
  source 1..21: mol_type = other DNA
actggtatgtcgaataatcgt

SEQ ID NO: 38034 - DNA, 21 bp, synthetic construct
  misc_feature 1..21: note = Description of Artificial Sequence: Synthetic oligonucleotide
  source 1..21: mol_type = other DNA
ctcggcggcagaagcagcaac

SEQ ID NO: 38035 - DNA, 21 bp, synthetic construct
  misc_feature 1..21: note = Description of Artificial Sequence: Synthetic oligonucleotide
  source 1..21: mol_type = other DNA
accagagaaagcagaaccaac

SEQ ID NO: 38036 - DNA, 21 bp, synthetic construct
  misc_feature 1..21: note = Description of Artificial Sequence: Synthetic oligonucleotide
  source 1..21: mol_type = other DNA
catcaggagagggcgagtatg

SEQ ID NO: 38037 - DNA, 21 bp, synthetic construct
  misc_feature 1..21: note = Description of Artificial Sequence: Synthetic oligonucleotide
  source 1..21: mol_type = other DNA
ccccaagccagcagaggcatg

SEQ ID NO: 38038 - DNA, 21 bp, synthetic construct
  misc_feature 1..21: note = Description of Artificial Sequence: Synthetic oligonucleotide
  source 1..21: mol_type = other DNA
aaggatgagcgtaaggggatg

SEQ ID NO: 38039 - DNA, 21 bp, synthetic construct
  misc_feature 1..21: note = Description of Artificial Sequence: Synthetic oligonucleotide
  source 1..21: mol_type = other DNA
tcgatggggaagttgtctagt

SEQ ID NO: 38040 - DNA, 21 bp, synthetic construct
  misc_feature 1..21: note = Description of Artificial Sequence: Synthetic oligonucleotide
  source 1..21: mol_type = other DNA
aaaatcgccagcaaaagcgaa

SEQ ID NO: 38041 - DNA, 21 bp, synthetic construct
  misc_feature 1..21: note = Description of Artificial Sequence: Synthetic oligonucleotide
  source 1..21: mol_type = other DNA
caactccccgtccccagcaac

SEQ ID NO: 38042 - DNA, 21 bp, synthetic construct
  misc_feature 1..21: note = Description of Artificial Sequence: Synthetic oligonucleotide
  source 1..21: mol_type = other DNA
ggtacgcctaataatcgttct

SEQ ID NO: 38043 - DNA, 21 bp, synthetic construct
  misc_feature 1..21: note = Description of Artificial Sequence: Synthetic oligonucleotide
  source 1..21: mol_type = other DNA
gtgatgaatcgtacgggtggt

SEQ ID NO: 38044 - DNA, 21 bp, synthetic construct
  misc_feature 1..21: note = Description of Artificial Sequence: Synthetic oligonucleotide
  source 1..21: mol_type = other DNA
aacaccgtcagcaaaagccaa

SEQ ID NO: 38045 - DNA, 21 bp, synthetic construct
  misc_feature 1..21: note = Description of Artificial Sequence: Synthetic oligonucleotide
  source 1..21: mol_type = other DNA
gtttctagtcgtgcgtcgagt

SEQ ID NO: 38046 - DNA, 21 bp, synthetic construct
  misc_feature 1..21: note = Description of Artificial Sequence: Synthetic oligonucleotide
  source 1..21: mol_type = other DNA
tacgtccaaaacggcggcaga

SEQ ID NO: 38047 - DNA, 21 bp, synthetic construct
  misc_feature 1..21: note = Description of Artificial Sequence: Synthetic oligonucleotide
  source 1..21: mol_type = other DNA
agccccggcaacaaactcctc

SEQ ID NO: 38048 - DNA, 21 bp, synthetic construct
  misc_feature 1..21: note = Description of Artificial Sequence: Synthetic oligonucleotide
  source 1..21: mol_type = other DNA
tcgattaagagtgctgctgct

SEQ ID NO: 38049 - DNA, 21 bp, synthetic construct
  misc_feature 1..21: note = Description of Artificial Sequence: Synthetic oligonucleotide
  source 1..21: mol_type = other DNA
agcagaaccgcccacgaacaa

SEQ ID NO: 38050 - DNA, 21 bp, synthetic construct
  misc_feature 1..21: note = Description of Artificial Sequence: Synthetic oligonucleotide
  source 1..21: mol_type = other DNA
cctcttggttataaggctacg

SEQ ID NO: 38051 - DNA, 21 bp, synthetic construct
  misc_feature 1..21: note = Description of Artificial Sequence: Synthetic oligonucleotide
  source 1..21: mol_type = other DNA
aatagtggggcgaggcttagt

SEQ ID NO: 38052 - DNA, 21 bp, synthetic construct
  misc_feature 1..21: note = Description of Artificial Sequence: Synthetic oligonucleotide
  source 1..21: mol_type = other DNA
actgctactaggcagcctgat

SEQ ID NO: 38053 - DNA, 21 bp, synthetic construct
  misc_feature 1..21: note = Description of Artificial Sequence: Synthetic oligonucleotide
  source 1..21: mol_type = other DNA
caaagaaccagcgaccaaacc

SEQ ID NO: 38054 - DNA, 21 bp, synthetic construct
  misc_feature 1..21: note = Description of Artificial Sequence: Synthetic oligonucleotide
  source 1..21: mol_type = other DNA
agcggcagcgacaaattcagc

SEQ ID NO: 38055 - DNA, 21 bp, synthetic construct
  misc_feature 1..21: note = Description of Artificial Sequence: Synthetic oligonucleotide
  source 1..21: mol_type = other DNA
aagcttgctacggattcgttt

SEQ ID NO: 38056 - DNA, 21 bp, synthetic construct
  misc_feature 1..21: note = Description of Artificial Sequence: Synthetic oligonucleotide
  source 1..21: mol_type = other DNA
ccccaacacatgacccacacc

SEQ ID NO: 38057 - DNA, 21 bp, synthetic construct
  misc_feature 1..21: note = Description of Artificial Sequence: Synthetic oligonucleotide
  source 1..21: mol_type = other DNA
ttccaaaccagaaccgtcgcc

SEQ ID NO: 38058 - DNA, 21 bp, synthetic construct
  misc_feature 1..21: note = Description of Artificial Sequence: Synthetic oligonucleotide
  source 1..21: mol_type = other DNA
ggccaagccagccacatgaaa

SEQ ID NO: 38059 - DNA, 21 bp, synthetic construct
  misc_feature 1..21: note = Description of Artificial Sequence: Synthetic oligonucleotide
  source 1..21: mol_type = other DNA
aagcatcttgataatgagagt

SEQ ID NO: 38060 - DNA, 21 bp, synthetic construct
  misc_feature 1..21: note = Description of Artificial Sequence: Synthetic oligonucleotide
  source 1..21: mol_type = other DNA
gggtctagtcagcgttcggat

SEQ ID NO: 38061 - DNA, 21 bp, synthetic construct
  misc_feature 1..21: note = Description of Artificial Sequence: Synthetic oligonucleotide
  source 1..21: mol_type = other DNA
ggtcagggttctcatatgaag

SEQ ID NO: 38062 - DNA, 21 bp, synthetic construct
  misc_feature 1..21: note = Description of Artificial Sequence: Synthetic oligonucleotide
  source 1..21: mol_type = other DNA
aatactactgcgaagtctagt

SEQ ID NO: 38063 - DNA, 21 bp, synthetic construct
  misc_feature 1..21: note = Description of Artificial Sequence: Synthetic oligonucleotide
  source 1..21: mol_type = other DNA
accagcgtcagaagcctccaa

SEQ ID NO: 38064 - DNA, 21 bp, synthetic construct
  misc_feature 1..21: note = Description of Artificial Sequence: Synthetic oligonucleotide
  source 1..21: mol_type = other DNA
ggttcgccgggggttttgcgt

SEQ ID NO: 38065 - DNA, 21 bp, synthetic construct
  misc_feature 1..21: note = Description of Artificial Sequence: Synthetic oligonucleotide
  source 1..21: mol_type = other DNA
cacgccaccagcggcaccaga

SEQ ID NO: 38066 - DNA, 21 bp, synthetic construct
  misc_feature 1..21: note = Description of Artificial Sequence: Synthetic oligonucleotide
  source 1..21: mol_type = other DNA
aggacggggaataatcatgag

SEQ ID NO: 38067 - DNA, 21 bp, synthetic construct
  misc_feature 1..21: note = Description of Artificial Sequence: Synthetic oligonucleotide
  source 1..21: mol_type = other DNA
gataatatttctcggagtagg

SEQ ID NO: 38068 - DNA, 21 bp, synthetic construct
  misc_feature 1..21: note = Description of Artificial Sequence: Synthetic oligonucleotide
  source 1..21: mol_type = other DNA
cgtgagggtggtcagatggtg

SEQ ID NO: 38069 - DNA, 21 bp, synthetic construct
  misc_feature 1..21: note = Description of Artificial Sequence: Synthetic oligonucleotide
  source 1..21: mol_type = other DNA
ccttcgttgcagatgactagg

SEQ ID NO: 38070 - DNA, 21 bp, synthetic construct
  misc_feature 1..21: note = Description of Artificial Sequence: Synthetic oligonucleotide
  source 1..21: mol_type = other DNA
ctcccccaccacaccagcgcc

SEQ ID NO: 38071 - DNA, 21 bp, synthetic construct
  misc_feature 1..21: note = Description of Artificial Sequence: Synthetic oligonucleotide
  source 1..21: mol_type = other DNA
aacccccccgtctacaccagc

SEQ ID NO: 38072 - DNA, 21 bp, synthetic construct
  misc_feature 1..21: note = Description of Artificial Sequence: Synthetic oligonucleotide
  source 1..21: mol_type = other DNA
aagacgggggctaagatgggg

SEQ ID NO: 38073 - DNA, 21 bp, synthetic construct
  misc_feature 1..21: note = Description of Artificial Sequence: Synthetic oligonucleotide
  source 1..21: mol_type = other DNA
agggatgataagcagaattcg

SEQ ID NO: 38074 - DNA, 21 bp, synthetic construct
  misc_feature 1..21: note = Description of Artificial Sequence: Synthetic oligonucleotide
  source 1..21: mol_type = other DNA
ttcaaccaacacagcagcctc

SEQ ID NO: 38075 - DNA, 21 bp, synthetic construct
  misc_feature 1..21: note = Description of Artificial Sequence: Synthetic oligonucleotide
  source 1..21: mol_type = other DNA
atgaccgaaagcagcagaacc

SEQ ID NO: 38076 - DNA, 21 bp, synthetic construct
  misc_feature 1..21: note = Description of Artificial Sequence: Synthetic oligonucleotide
  source 1..21: mol_type = other DNA
aacggtactggacagaatcaa

SEQ ID NO: 38077 - DNA, 21 bp, synthetic construct
  misc_feature 1..21: note = Description of Artificial Sequence: Synthetic oligonucleotide
  source 1..21: mol_type = other DNA
ccgttgtcggctggtaagagt

SEQ ID NO: 38078 - DNA, 21 bp, synthetic construct
  misc_feature 1..21: note = Description of Artificial Sequence: Synthetic oligonucleotide
  source 1..21: mol_type = other DNA
ggttcggctcagtcgcctagg

SEQ ID NO: 38079 - DNA, 21 bp, synthetic construct
  misc_feature 1..21: note = Description of Artificial Sequence: Synthetic oligonucleotide
  source 1..21: mol_type = other DNA
ccggcttcgcttggtcagggt

SEQ ID NO: 38080 - DNA, 21 bp, synthetic construct
  misc_feature 1..21: note = Description of Artificial Sequence: Synthetic oligonucleotide
  source 1..21: mol_type = other DNA
tctcatgctagtagtactgcg

SEQ ID NO: 38081 - DNA, 21 bp, synthetic construct
  misc_feature 1..21: note = Description of Artificial Sequence: Synthetic oligonucleotide
  source 1..21: mol_type = other DNA
cagaatacgcctaagagtact

SEQ ID NO: 38082 - DNA, 21 bp, synthetic construct
  misc_feature 1..21: note = Description of Artificial Sequence: Synthetic oligonucleotide
  source 1..21: mol_type = other DNA
ctcagaagcaaagaaagcgcc

SEQ ID NO: 38083 - DNA, 21 bp, synthetic construct
  misc_feature 1..21: note = Description of Artificial Sequence: Synthetic oligonucleotide
  source 1..21: mol_type = other DNA
agcagacccggcctcagccaa

SEQ ID NO: 38084 - DNA, 21 bp, synthetic construct
  misc_feature 1..21: note = Description of Artificial Sequence: Synthetic oligonucleotide
  source 1..21: mol_type = other DNA
gaaggcaccagaggcgtcggc

SEQ ID NO: 38085 - DNA, 21 bp, synthetic construct
  misc_feature 1..21: note = Description of Artificial Sequence: Synthetic oligonucleotide
  source 1..21: mol_type = other DNA
aattcgatgcctactacgctt

SEQ ID NO: 38086 - DNA, 21 bp, synthetic construct
  misc_feature 1..21: note = Description of Artificial Sequence: Synthetic oligonucleotide
  source 1..21: mol_type = other DNA
gggacgactaattcgcgtaat

SEQ ID NO: 38087 - DNA, 21 bp, synthetic construct
  misc_feature 1..21: note = Description of Artificial Sequence: Synthetic oligonucleotide
  source 1..21: mol_type = other DNA
agcaccttcagccccagcaaa

SEQ ID NO: 38088 - DNA, 21 bp, synthetic construct
  misc_feature 1..21: note = Description of Artificial Sequence: Synthetic oligonucleotide
  source 1..21: mol_type = other DNA
gccagagacgaccaaagaaga

SEQ ID NO: 38089 - DNA, 21 bp, synthetic construct
  misc_feature 1..21: note = Description of Artificial Sequence: Synthetic oligonucleotide
  source 1..21: mol_type = other DNA
tcttctacgagtagtccgtat

SEQ ID NO: 38090 - DNA, 21 bp, synthetic construct
  misc_feature 1..21: note = Description of Artificial Sequence: Synthetic oligonucleotide
  source 1..21: mol_type = other DNA
tacagaaccacccacaccctc

SEQ ID NO: 38091 - DNA, 21 bp, synthetic construct
  misc_feature 1..21: note = Description of Artificial Sequence: Synthetic oligonucleotide
  source 1..21: mol_type = other DNA
tttggtccttcgcagcttccg

SEQ ID NO: 38092 - DNA, 21 bp, synthetic construct
  misc_feature 1..21: note = Description of Artificial Sequence: Synthetic oligonucleotide
  source 1..21: mol_type = other DNA
ggcggcctcagccccaaagtc

SEQ ID NO: 38093 - DNA, 21 bp, synthetic construct
  misc_feature 1..21: note = Description of Artificial Sequence: Synthetic oligonucleotide
  source 1..21: mol_type = other DNA
ggcaaaatccaagacatcaaa

SEQ ID NO: 38094 - DNA, 21 bp, synthetic construct
  misc_feature 1..21: note = Description of Artificial Sequence: Synthetic oligonucleotide
  source 1..21: mol_type = other DNA
caaaacctcagagtcggcgcc

SEQ ID NO: 38095 - DNA, 21 bp, synthetic construct
  misc_feature 1..21: note = Description of Artificial Sequence: Synthetic oligonucleotide
  source 1..21: mol_type = other DNA
cgtgttgagaaggctactctt

SEQ ID NO: 38096 - DNA, 21 bp, synthetic construct
  misc_feature 1..21: note = Description of Artificial Sequence: Synthetic oligonucleotide
  source 1..21: mol_type = other DNA
tctactacgggtgattcgaag

SEQ ID NO: 38097 - DNA, 21 bp, synthetic construct
  misc_feature 1..21: note = Description of Artificial Sequence: Synthetic oligonucleotide
  source 1..21: mol_type = other DNA
acggtggctcatcctagtcat

SEQ ID NO: 38098 - DNA, 21 bp, synthetic construct
  misc_feature 1..21: note = Description of Artificial Sequence: Synthetic oligonucleotide
  source 1..21: mol_type = other DNA
cagagtaagggtgggtcgaat

SEQ ID NO: 38099 - DNA, 21 bp, synthetic construct
  misc_feature 1..21: note = Description of Artificial Sequence: Synthetic oligonucleotide
  source 1..21: mol_type = other DNA
agacaaaccacccccctcggc

SEQ ID NO: 38100 - DNA, 21 bp, synthetic construct
  misc_feature 1..21: note = Description of Artificial Sequence: Synthetic oligonucleotide
  source 1..21: mol_type = other DNA
gggtgtattactaattgtagt

SEQ ID NO: 38101 - DNA, 21 bp, synthetic construct
  misc_feature 1..21: note = Description of Artificial Sequence: Synthetic oligonucleotide
  source 1..21: mol_type = other DNA
agttcgtctgataagcttcgt

SEQ ID NO: 38102 - DNA, 21 bp, synthetic construct
  misc_feature 1..21: note = Description of Artificial Sequence: Synthetic oligonucleotide
  source 1..21: mol_type = other DNA
gggattacggctaagttgacg

SEQ ID NO: 38103 - DNA, 21 bp, synthetic construct
  misc_feature 1..21: note = Description of Artificial Sequence: Synthetic oligonucleotide
  source 1..21: mol_type = other DNA
gcctaccccagcggcagcagc

SEQ ID NO: 38104 - DNA, 21 bp, synthetic construct
  misc_feature 1..21: note = Description of Artificial Sequence: Synthetic oligonucleotide
  source 1..21: mol_type = other DNA
atgggcctcggcagcaccaaa

SEQ ID NO: 38105 - DNA, 21 bp, synthetic construct
  misc_feature 1..21: note = Description of Artificial Sequence: Synthetic oligonucleotide
  source 1..21: mol_type = other DNA
ggcggccaaaccgccagaatc

SEQ ID NO: 38106 - DNA, 21 bp, synthetic construct
  misc_feature 1..21: note = Description of Artificial Sequence: Synthetic oligonucleotide
  source 1..21: mol_type = other DNA
cctcttcagcagaatcggtct

SEQ ID NO: 38107 - DNA, 21 bp, synthetic construct
  misc_feature 1..21: note = Description of Artificial Sequence: Synthetic oligonucleotide
  source 1..21: mol_type = other DNA
tctgatcgtaatatgtctcgt

SEQ ID NO: 38108 - DNA, 21 bp, synthetic construct
  misc_feature 1..21: note = Description of Artificial Sequence: Synthetic oligonucleotide
  source 1..21: mol_type = other DNA
gttcctagggttcctggtatg

SEQ ID NO: 38109 - DNA, 21 bp, synthetic construct
  misc_feature 1..21: note = Description of Artificial Sequence: Synthetic oligonucleotide
  source 1..21: mol_type = other DNA
tctgttcttcattcgtcgcag

SEQ ID NO: 38110 - DNA, 21 bp, synthetic construct
  misc_feature 1..21: note = Description of Artificial Sequence: Synthetic oligonucleotide
  source 1..21: mol_type = other DNA
cccaccggcgtcaacaaaatg

SEQ ID NO: 38111 - DNA, 21 bp, synthetic construct
  misc_feature 1..21: note = Description of Artificial Sequence: Synthetic oligonucleotide
  source 1..21: mol_type = other DNA
gagccgacgcatccgcggggt

SEQ ID NO: 38112 - DNA, 21 bp, synthetic construct
  misc_feature 1..21: note = Description of Artificial Sequence: Synthetic oligonucleotide
  source 1..21: mol_type = other DNA
aagaatccttcgagtgttaat

SEQ ID NO: 38113 - DNA, 21 bp, synthetic construct
  misc_feature 1..21: note = Description of Artificial Sequence: Synthetic oligonucleotide
  source 1..21: mol_type = other DNA
gtccaccaactccccatcgcc

SEQ ID NO: 38114 - DNA, 21 bp, synthetic construct
  misc_feature 1..21: note = Description of Artificial Sequence: Synthetic oligonucleotide
  source 1..21: mol_type = other DNA
ccttataatgtgagtcagaat

SEQ ID NO: 38115 - DNA, 21 bp, synthetic construct
  misc_feature 1..21: note = Description of Artificial Sequence: Synthetic oligonucleotide
  source 1..21: mol_type = other DNA
cttttgtcgtctaaggggaat

SEQ ID NO: 38116 - DNA, 21 bp, synthetic construct
  misc_feature 1..21: note = Description of Artificial Sequence: Synthetic oligonucleotide
  source 1..21: mol_type = other DNA
cacagccccaccggccccgcc

SEQ ID NO: 38117 - DNA, 21 bp, synthetic construct
  misc_feature 1..21: note = Description of Artificial Sequence: Synthetic oligonucleotide
  source 1..21: mol_type = other DNA
agaatgaaaagcctcgacaac

SEQ ID NO: 38118 - DNA, 21 bp, synthetic construct
  misc_feature 1..21: note = Description of Artificial Sequence: Synthetic oligonucleotide
  source 1..21: mol_type = other DNA
gcggtgccggcgaagggggct

SEQ ID NO: 38119 - DNA, 21 bp, synthetic construct
  misc_feature 1..21: note = Description of Artificial Sequence: Synthetic oligonucleotide
  source 1..21: mol_type = other DNA
actcctacgttggctcatggt

SEQ ID NO: 38120 - DNA, 21 bp, synthetic construct
  misc_feature 1..21: note = Description of Artificial Sequence: Synthetic oligonucleotide
  source 1..21: mol_type = other DNA
cacgacatcggcaaacaaaga

SEQ ID NO: 38121 - DNA, 21 bp, synthetic construct
  misc_feature 1..21: note = Description of Artificial Sequence: Synthetic oligonucleotide
  source 1..21: mol_type = other DNA
agaggccccaccggcatgatg

SEQ ID NO: 38122 - DNA, 21 bp, synthetic construct
  misc_feature 1..21: note = Description of Artificial Sequence: Synthetic oligonucleotide
  source 1..21: mol_type = other DNA
ccgacgaggaatgggaatatg

SEQ ID NO: 38123 - DNA, 21 bp, synthetic construct
  misc_feature 1..21: note = Description of Artificial Sequence: Synthetic oligonucleotide
  source 1..21: mol_type = other DNA
aacaccagaagcagcagcggc

SEQ ID NO: 38124 - DNA, 21 bp, synthetic construct
  misc_feature 1..21: note = Description of Artificial Sequence: Synthetic oligonucleotide
  source 1..21: mol_type = other DNA
gccggcggccccgccaacaga

SEQ ID NO: 38125 - DNA, 21 bp, synthetic construct
  misc_feature 1..21: note = Description of Artificial Sequence: Synthetic oligonucleotide
  source 1..21: mol_type = other DNA
cccagccacaaccccaccaac

SEQ ID NO: 38126 - DNA, 21 bp, synthetic construct
  misc_feature 1..21: note = Description of Artificial Sequence: Synthetic oligonucleotide
  source 1..21: mol_type = other DNA
tctcatgcgacggctgctact

SEQ ID NO: 38127 - DNA, 21 bp, synthetic construct
  misc_feature 1..21: note = Description of Artificial Sequence: Synthetic oligonucleotide
  source 1..21: mol_type = other DNA
cctgggacgccttcttctggt

SEQ ID NO: 38128 - DNA, 21 bp, synthetic construct
  misc_feature 1..21: note = Description of Artificial Sequence: Synthetic oligonucleotide
  source 1..21: mol_type = other DNA
aggcctgcggggcagcattct

SEQ ID NO: 38129 - DNA, 21 bp, synthetic construct
  misc_feature 1..21: note = Description of Artificial Sequence: Synthetic oligonucleotide
  source 1..21: mol_type = other DNA
cctcgtgtggggaatcgtacg

SEQ ID NO: 38130 - DNA, 21 bp, synthetic construct
  misc_feature 1..21: note = Description of Artificial Sequence: Synthetic oligonucleotide
  source 1..21: mol_type = other DNA
gacagaaaaaccctcagccac

SEQ ID NO: 38131 - DNA, 21 bp, synthetic construct
  misc_feature 1..21: note = Description of Artificial Sequence: Synthetic oligonucleotide
  source 1..21: mol_type = other DNA
taccaaaacgtcagcagcaaa

SEQ ID NO: 38132 - DNA, 21 bp, synthetic construct
  misc_feature 1..21: note = Description of Artificial Sequence: Synthetic oligonucleotide
  source 1..21: mol_type = other DNA
accggcatcgaaagacccatg

SEQ ID NO: 38133 - DNA, 21 bp, synthetic construct
  misc_feature 1..21: note = Description of Artificial Sequence: Synthetic oligonucleotide
  source 1..21: mol_type = other DNA
gcctaccccaaaaacagcaac

SEQ ID NO: 38134 - DNA, 21 bp, synthetic construct
  misc_feature 1..21: note = Description of Artificial Sequence: Synthetic oligonucleotide
  source 1..21: mol_type = other DNA
tctggggttactactaggggt

SEQ ID NO: 38135 - DNA, 21 bp, synthetic construct
  misc_feature 1..21: note = Description of Artificial Sequence: Synthetic oligonucleotide
  source 1..21: mol_type = other DNA
caagtccccgccaccaacaga

SEQ ID NO: 38136 - DNA, 21 bp, synthetic construct
  misc_feature 1..21: note = Description of Artificial Sequence: Synthetic oligonucleotide
  source 1..21: mol_type = other DNA
aaccaaatcaacgcccccaga

SEQ ID NO: 38137 - DNA, 21 bp, synthetic construct
  misc_feature 1..21: note = Description of Artificial Sequence: Synthetic oligonucleotide
  source 1..21: mol_type = other DNA
tttcttaagggtactggttcg

SEQ ID NO: 38138 - DNA, 21 bp, synthetic construct
  misc_feature 1..21: note = Description of Artificial Sequence: Synthetic oligonucleotide
  source 1..21: mol_type = other DNA
agggaggatactaagatgcat

SEQ ID NO: 38139 - DNA, 21 bp, synthetic construct
  misc_feature 1..21: note = Description of Artificial Sequence: Synthetic oligonucleotide
  source 1..21: mol_type = other DNA
aggattacgtcgagtaatcag

SEQ ID NO: 38140 - DNA, 21 bp, synthetic construct
  misc_feature 1..21: note = Description of Artificial Sequence: Synthetic oligonucleotide
  source 1..21: mol_type = other DNA
aatacgacgggtcatgctggg

SEQ ID NO: 38141 - DNA, 21 bp, synthetic construct
  misc_feature 1..21: note = Description of Artificial Sequence: Synthetic oligonucleotide
  source 1..21: mol_type = other DNA
aataatcctaagaatgttgtt

SEQ ID NO: 38142 - DNA, 21 bp, synthetic construct
  misc_feature 1..21: note = Description of Artificial Sequence: Synthetic oligonucleotide
  source 1..21: mol_type = other DNA
tctgttaattctcggagtgag

SEQ ID NO: 38143 - DNA, 21 bp, synthetic construct
  misc_feature 1..21: note = Description of Artificial Sequence: Synthetic oligonucleotide
  source 1..21: mol_type = other DNA
cttcttcgggagaggcatggg

SEQ ID NO: 38144 - DNA, 21 bp, synthetic construct
  misc_feature 1..21: note = Description of Artificial Sequence: Synthetic oligonucleotide
  source 1..21: mol_type = other DNA
catggtgagtctcggcaggcg

SEQ ID NO: 38145 - DNA, 21 bp, synthetic construct
  misc_feature 1..21: note = Description of Artificial Sequence: Synthetic oligonucleotide
  source 1..21: mol_type = other DNA
ggcaccagaagcgccgtcgtc

SEQ ID NO: 38146 - DNA, 21 bp, synthetic construct
  misc_feature 1..21: note = Description of Artificial Sequence: Synthetic oligonucleotide
  source 1..21: mol_type = other DNA
acgtctcaggtgtctcatggg

SEQ ID NO: 38147 - DNA, 21 bp, synthetic construct
  misc_feature 1..21: note = Description of Artificial Sequence: Synthetic oligonucleotide
  source 1..21: mol_type = other DNA
agggatagtacgaagttggtg

SEQ ID NO: 38148 - DNA, 21 bp, synthetic construct
  misc_feature 1..21: note = Description of Artificial Sequence: Synthetic oligonucleotide
  source 1..21: mol_type = other DNA
tttaattcgacggctaatcgg

SEQ ID NO: 38149 - DNA, 21 bp, synthetic construct
  misc_feature 1..21: note = Description of Artificial Sequence: Synthetic oligonucleotide
  source 1..21: mol_type = other DNA
aagacgggggatcagatgggg

SEQ ID NO: 38150 - DNA, 21 bp, synthetic construct
  misc_feature 1..21: note = Description of Artificial Sequence: Synthetic oligonucleotide
  source 1..21: mol_type = other DNA
gctcagtctacgtatcagtcg

SEQ ID NO: 38151 - DNA, 21 bp, synthetic construct
  misc_feature 1..21: note = Description of Artificial Sequence: Synthetic oligonucleotide
  source 1..21: mol_type = other DNA
ggtaataggtcttctgggctt

SEQ ID NO: 38152 - DNA, 21 bp, synthetic construct
  misc_feature 1..21: note = Description of Artificial Sequence: Synthetic oligonucleotide
  source 1..21: mol_type = other DNA
gccagcaccagcagaagcacc

SEQ ID NO: 38153 - DNA, 21 bp, synthetic construct
  misc_feature 1..21: note = Description of Artificial Sequence: Synthetic oligonucleotide
  source 1..21: mol_type = other DNA
caaagcgtcaaaacccccgaa

SEQ ID NO: 38154 - DNA, 21 bp, synthetic construct
  misc_feature 1..21: note = Description of Artificial Sequence: Synthetic oligonucleotide
  source 1..21: mol_type = other DNA
ttgaagcagcattcgagtctt

SEQ ID NO: 38155 - DNA, 21 bp, synthetic construct
  misc_feature 1..21: note = Description of Artificial Sequence: Synthetic oligonucleotide
  source 1..21: mol_type = other DNA
gccaccggcagaaacaccgcc

SEQ ID NO: 38156 - DNA, 21 bp, synthetic construct
  misc_feature 1..21: note = Description of Artificial Sequence: Synthetic oligonucleotide
  source 1..21: mol_type = other DNA
atggaaagcaaagccaacagc

SEQ ID NO: 38157 - DNA, 21 bp, synthetic construct
  misc_feature 1..21: note = Description of Artificial Sequence: Synthetic oligonucleotide
  source 1..21: mol_type = other DNA
aactacgacagcctcaaaaaa

SEQ ID NO: 38158 - DNA, 21 bp, synthetic construct
  misc_feature 1..21: note = Description of Artificial Sequence: Synthetic oligonucleotide
  source 1..21: mol_type = other DNA
gcgcatagtaataattcgtat

SEQ ID NO: 38159 - DNA, 21 bp, synthetic construct
  misc_feature 1..21: note = Description of Artificial Sequence: Synthetic oligonucleotide
  source 1..21: mol_type = other DNA
tttcgggcgcaggctaatgtt

SEQ ID NO: 38160 - DNA, 21 bp, synthetic construct
  misc_feature 1..21: note = Description of Artificial Sequence: Synthetic oligonucleotide
  source 1..21: mol_type = other DNA
tacagccaagaagtcttcaga

SEQ ID NO: 38161 - DNA, 21 bp, synthetic construct
  misc_feature 1..21: note = Description of Artificial Sequence: Synthetic oligonucleotide
  source 1..21: mol_type = other DNA
ccgacgagtagtccgcagagg

SEQ ID NO: 38162 - DNA, 21 bp, synthetic construct
  misc_feature 1..21: note = Description of Artificial Sequence: Synthetic oligonucleotide
  source 1..21: mol_type = other DNA
gccacccacaacagcagccaa

SEQ ID NO: 38163 - DNA, 21 bp, synthetic construct
  misc_feature 1..21: note = Description of Artificial Sequence: Synthetic oligonucleotide
  source 1..21: mol_type = other DNA
cccaacaacgccaccaaaaac

SEQ ID NO: 38164 - DNA, 21 bp, synthetic construct
  misc_feature 1..21: note = Description of Artificial Sequence: Synthetic oligonucleotide
  source 1..21: mol_type = other DNA
aatgctaatagtcgtcctgtt

SEQ ID NO: 38165 - DNA, 21 bp, synthetic construct
  misc_feature 1..21: note = Description of Artificial Sequence: Synthetic oligonucleotide
  source 1..21: mol_type = other DNA
gtttcggatggtattagtaag

SEQ ID NO: 38166 - DNA, 21 bp, synthetic construct
  misc_feature 1..21: note = Description of Artificial Sequence: Synthetic oligonucleotide
  source 1..21: mol_type = other DNA
agcaccgtcggccacatgacc

SEQ ID NO: 38167 - DNA, 21 bp, synthetic construct
  misc_feature 1..21: note = Description of Artificial Sequence: Synthetic oligonucleotide
  source 1..21: mol_type = other DNA
gttgcgccggttgggatgagt

SEQ ID NO: 38168 - DNA, 21 bp, synthetic construct
  misc_feature 1..21: note = Description of Artificial Sequence: Synthetic oligonucleotide
  source 1..21: mol_type = other DNA
agtccgtcttttaatcagggg

SEQ ID NO: 38169 - DNA, 21 bp, synthetic construct
  misc_feature 1..21: note = Description of Artificial Sequence: Synthetic oligonucleotide
  source 1..21: mol_type = other DNA
ttgttgagttcgaagacggct

SEQ ID NO: 38170 - DNA, 21 bp, synthetic construct
  misc_feature 1..21: note = Description of Artificial Sequence: Synthetic oligonucleotide
  source 1..21: mol_type = other DNA
gggtcggggcatggtacgaat

SEQ ID NO: 38171 - DNA, 21 bp, synthetic construct
  misc_feature 1..21: note = Description of Artificial Sequence: Synthetic oligonucleotide
  source 1..21: mol_type = other DNA
aggcttcctagtgtgtctagt

SEQ ID NO: 38172 - DNA, 21 bp, synthetic construct
  misc_feature 1..21: note = Description of Artificial Sequence: Synthetic oligonucleotide
  source 1..21: mol_type = other DNA
catgataatgctaattataat

SEQ ID NO: 38173 - DNA, 21 bp, synthetic construct
  misc_feature 1..21: note = Description of Artificial Sequence: Synthetic oligonucleotide
  source 1..21: mol_type = other DNA
caaagattccaaagcagccaa

SEQ ID NO: 38174 - DNA, 21 bp, synthetic construct
  misc_feature 1..21: note = Description of Artificial Sequence: Synthetic oligonucleotide
  source 1..21: mol_type = other DNA
accggcatcaccaaactcagc

SEQ ID NO: 38175 - DNA, 21 bp, synthetic construct
  misc_feature 1..21: note = Description of Artificial Sequence: Synthetic oligonucleotide
  source 1..21: mol_type = other DNA
ggtcgtactgggccgctggtt

SEQ ID NO: 38176 - DNA, 21 bp, synthetic construct
  misc_feature 1..21: note = Description of Artificial Sequence: Synthetic oligonucleotide
  source 1..21: mol_type = other DNA
catgagcgtggtcagaatggg

SEQ ID NO: 38177 - DNA, 21 bp, synthetic construct
  misc_feature 1..21: note = Description of Artificial Sequence: Synthetic oligonucleotide
  source 1..21: mol_type = other DNA
attactccgagtaatattggt

SEQ ID NO: 38178 - DNA, 21 bp, synthetic construct
  misc_feature 1..21: note = Description of Artificial Sequence: Synthetic oligonucleotide
  source 1..21: mol_type = other DNA
cacaccaccggcatgctcggc

SEQ ID NO: 38179 - DNA, 21 bp, synthetic construct
  misc_feature 1..21: note = Description of Artificial Sequence: Synthetic oligonucleotide
  source 1..21: mol_type = other DNA
atgcccagcgccagcctcggc

SEQ ID NO: 38180 - DNA, 21 bp, synthetic construct
  misc_feature 1..21: note = Description of Artificial Sequence: Synthetic oligonucleotide
  source 1..21: mol_type = other DNA
accgtcaaaagccccagaagc

SEQ ID NO: 38181 - DNA, 21 bp, synthetic construct
  misc_feature 1..21: note = Description of Artificial Sequence: Synthetic oligonucleotide
  source 1..21: mol_type = other DNA
cagagtagtcatgaggggagg

SEQ ID NO: 38182 - DNA, 21 bp, synthetic construct
  misc_feature 1..21: note = Description of Artificial Sequence: Synthetic oligonucleotide
  source 1..21: mol_type = other DNA
ggcgccgaaagaatcctcaga

SEQ ID NO: 38183 - DNA, 21 bp, synthetic construct
  misc_feature 1..21: note = Description of Artificial Sequence: Synthetic oligonucleotide
  source 1..21: mol_type = other DNA
tctacggtggttcatatgact

SEQ ID NO: 38184 - DNA, 21 bp, synthetic construct
  misc_feature 1..21: note = Description of Artificial Sequence: Synthetic oligonucleotide
  source 1..21: mol_type = other DNA
gattatgatgcgacgagtagg

SEQ ID NO: 38185 - DNA, 21 bp, synthetic construct
  misc_feature 1..21: note = Description of Artificial Sequence: Synthetic oligonucleotide
  source 1..21: mol_type = other DNA
agaaacgaccaaaccctcaaa

SEQ ID NO: 38186 - DNA, 21 bp, synthetic construct
  misc_feature 1..21: note = Description of Artificial Sequence: Synthetic oligonucleotide
  source 1..21: mol_type = other DNA
aacagactcggccaagccggc

SEQ ID NO: 38187 - DNA, 21 bp, synthetic construct
  misc_feature 1..21: note = Description of Artificial Sequence: Synthetic oligonucleotide
  source 1..21: mol_type = other DNA
gagaattggactaatcggaag

SEQ ID NO: 38188 - DNA, 21 bp, synthetic construct
  misc_feature 1..21: note = Description of Artificial Sequence: Synthetic oligonucleotide
  source 1..21: mol_type = other DNA
tcgtgtacgactcgttgtttg

SEQ ID NO: 38189 - DNA, 21 bp, synthetic construct
  misc_feature 1..21: note = Description of Artificial Sequence: Synthetic oligonucleotide
  source 1..21: mol_type = other DNA
tatacttcgaagtctactgcg

SEQ ID NO: 38190 - DNA, 21 bp, synthetic construct
  misc_feature 1..21: note = Description of Artificial Sequence: Synthetic oligonucleotide
  source 1..21: mol_type = other DNA
agcgtccacggcaaccaactc

SEQ ID NO: 38191 - DNA, 21 bp, synthetic construct
  misc_feature 1..21: note = Description of Artificial Sequence: Synthetic oligonucleotide
  source 1..21: mol_type = other DNA
ggtattcagagttctcctact

SEQ ID NO: 38192 - DNA, 21 bp, synthetic construct
  misc_feature 1..21: note = Description of Artificial Sequence: Synthetic oligonucleotide
  source 1..21: mol_type = other DNA
tcgaatatgactagtacgagg

SEQ ID NO: 38193 - DNA, 21 bp, synthetic construct
  misc_feature 1..21: note = Description of Artificial Sequence: Synthetic oligonucleotide
  source 1..21: mol_type = other DNA
atgtctacggctcgttctgct

SEQ ID NO: 38194 - DNA, 21 bp, synthetic construct
  misc_feature 1..21: note = Description of Artificial Sequence: Synthetic oligonucleotide
  source 1..21: mol_type = other DNA
tcgtatgcgagtactcagcag

SEQ ID NO: 38195 - DNA, 21 bp, synthetic construct
  misc_feature 1..21: note = Description of Artificial Sequence: Synthetic oligonucleotide
  source 1..21: mol_type = other DNA
gccggcagcaacagccaaggc

SEQ ID NO: 38196 - DNA, 21 bp, synthetic construct
  misc_feature 1..21: note = Description of Artificial Sequence: Synthetic oligonucleotide
  source 1..21: mol_type = other DNA
ccctacgccggcaaccaaaga

SEQ ID NO: 38197 - DNA, 21 bp, synthetic construct
  misc_feature 1..21: note = Description of Artificial Sequence: Synthetic oligonucleotide
  source 1..21: mol_type = other DNA
cgtcgtgatactaatatgtcg

SEQ ID NO: 38198 - DNA, 21 bp, synthetic construct
  misc_feature 1..21: note = Description of Artificial Sequence: Synthetic oligonucleotide
  source 1..21: mol_type = other DNA
agcttcgccaaaagcgccagc

SEQ ID NO: 38199 - DNA, 21 bp, synthetic construct
  misc_feature 1..21: note = Description of Artificial Sequence: Synthetic oligonucleotide
  source 1..21: mol_type = other DNA
ggtgtgtctgcgacggtgaag

SEQ ID NO: 38200 - DNA, 21 bp, synthetic construct
  misc_feature 1..21: note = Description of Artificial Sequence: Synthetic oligonucleotide
  source 1..21: mol_type = other DNA
ggtacttcgacgtctcttcgg

SEQ ID NO: 38201 - DNA, 21 bp, synthetic construct
  misc_feature 1..21: note = Description of Artificial Sequence: Synthetic oligonucleotide
  source 1..21: mol_type = other DNA
cgtaatgatacgaagcttttt

SEQ ID NO: 38202 - DNA, 21 bp, synthetic construct
  misc_feature 1..21: note = Description of Artificial Sequence: Synthetic oligonucleotide
  source 1..21: mol_type = other DNA
actcctgcggggccgaataag

SEQ ID NO: 38203 - DNA, 21 bp, synthetic construct
  misc_feature 1..21: note = Description of Artificial Sequence: Synthetic oligonucleotide
  source 1..21: mol_type = other DNA
aacaaccccaacagagaccaa

SEQ ID NO: 38204 - DNA, 21 bp, synthetic construct
  misc_feature 1..21: note = Description of Artificial Sequence: Synthetic oligonucleotide
  source 1..21: mol_type = other DNA
agagccgaaaccaacgccatc

SEQ ID NO: 38205 - DNA, 21 bp, synthetic construct
  misc_feature 1..21: note = Description of Artificial Sequence: Synthetic oligonucleotide
  source 1..21: mol_type = other DNA
catgagctgtcgaggactact

SEQ ID NO: 38206 - DNA, 21 bp, synthetic construct
  misc_feature 1..21: note = Description of Artificial Sequence: Synthetic oligonucleotide
  source 1..21: mol_type = other DNA
gcgggttctcagactggtgtt

SEQ ID NO: 38207 - DNA, 21 bp, synthetic construct
  misc_feature 1..21: note = Description of Artificial Sequence: Synthetic oligonucleotide
  source 1..21: mol_type = other DNA
agctacggcggccaaagcaga

SEQ ID NO: 38208 - DNA, 21 bp, synthetic construct
  misc_feature 1..21: note = Description of Artificial Sequence: Synthetic oligonucleotide
  source 1..21: mol_type = other DNA
taccaacccgaaagaagcagc

SEQ ID NO: 38209 - DNA, 21 bp, synthetic construct
  misc_feature 1..21: note = Description of Artificial Sequence: Synthetic oligonucleotide
  source 1..21: mol_type = other DNA
accgccaacaacagcatcgtc

SEQ ID NO: 38210 - DNA, 21 bp, synthetic construct
  misc_feature 1..21: note = Description of Artificial Sequence: Synthetic oligonucleotide
  source 1..21: mol_type = other DNA
atcgtcagcggcaaactcacc

SEQ ID NO: 38211 - DNA, 21 bp, synthetic construct
  misc_feature 1..21: note = Description of Artificial Sequence: Synthetic oligonucleotide
  source 1..21: mol_type = other DNA
cacatcacccccgccaccagc

SEQ ID NO: 38212 - DNA, 21 bp, synthetic construct
  misc_feature 1..21: note = Description of Artificial Sequence: Synthetic oligonucleotide
  source 1..21: mol_type = other DNA
agcaccagcaacatcgccagc

SEQ ID NO: 38213 - DNA, 21 bp, synthetic construct
  misc_feature 1..21: note = Description of Artificial Sequence: Synthetic oligonucleotide
  source 1..21: mol_type = other DNA
caagtcaccgccatcggcgcc

SEQ ID NO: 38214 - DNA, 21 bp, synthetic construct
  misc_feature 1..21: note = Description of Artificial Sequence: Synthetic oligonucleotide
  source 1..21: mol_type = other DNA
aatactcaggcgggtcattcg

SEQ ID NO: 38215 - DNA, 21 bp, synthetic construct
  misc_feature 1..21: note = Description of Artificial Sequence: Synthetic oligonucleotide
  source 1..21: mol_type = other DNA
gacgtccacagaagcagcggc

SEQ ID NO: 38216 - DNA, 21 bp, synthetic construct
  misc_feature 1..21: note = Description of Artificial Sequence: Synthetic oligonucleotide
  source 1..21: mol_type = other DNA
caaggcagcagccccatggaa

SEQ ID NO: 38217 - DNA, 21 bp, synthetic construct
  misc_feature 1..21: note = Description of Artificial Sequence: Synthetic oligonucleotide
  source 1..21: mol_type = other DNA
ttggatgctagtgctatgagg

SEQ ID NO: 38218 - DNA, 21 bp, synthetic construct
  misc_feature 1..21: note = Description of Artificial Sequence: Synthetic oligonucleotide
  source 1..21: mol_type = other DNA
ccggtggcgaatgtttcgcgt

SEQ ID NO: 38219 - DNA, 21 bp, synthetic construct
  misc_feature 1..21: note = Description of Artificial Sequence: Synthetic oligonucleotide
  source 1..21: mol_type = other DNA
tttccggttactgggctgagt

SEQ ID NO: 38220 - DNA, 21 bp, synthetic construct
  misc_feature 1..21: note = Description of Artificial Sequence: Synthetic oligonucleotide
  source 1..21: mol_type = other DNA
cagatgaatcatctgcaggtt

SEQ ID NO: 38221 - DNA, 21 bp, synthetic construct
  misc_feature 1..21: note = Description of Artificial Sequence: Synthetic oligonucleotide
  source 1..21: mol_type = other DNA
tcttatgggaaggggagttct

SEQ ID NO: 38222 - DNA, 21 bp, synthetic construct
  misc_feature 1..21: note = Description of Artificial Sequence: Synthetic oligonucleotide
  source 1..21: mol_type = other DNA
agagacgccagcggcctcaga

SEQ ID NO: 38223 - DNA, 21 bp, synthetic construct
  misc_feature 1..21: note = Description of Artificial Sequence: Synthetic oligonucleotide
  source 1..21: mol_type = other DNA
tcgagttcgcgtaatgtggct

SEQ ID NO: 38224 - DNA, 21 bp, synthetic construct
  misc_feature 1..21: note = Description of Artificial Sequence: Synthetic oligonucleotide
  source 1..21: mol_type = other DNA
atcaccgccacccacgcccac

SEQ ID NO: 38225 - DNA, 21 bp, synthetic construct
  misc_feature 1..21: note = Description of Artificial Sequence: Synthetic oligonucleotide
  source 1..21: mol_type = other DNA
aatcagcagaatgggagtaat

SEQ ID NO: 38226 - DNA, 21 bp, synthetic construct
  misc_feature 1..21: note = Description of Artificial Sequence: Synthetic oligonucleotide
  source 1..21: mol_type = other DNA
ggcagcgccggcaaagaaatg

SEQ ID NO: 38227 - DNA, 21 bp, synthetic construct
  misc_feature 1..21: note = Description of Artificial Sequence: Synthetic oligonucleotide
  source 1..21: mol_type = other DNA
aatgttaggcagactgagctg

SEQ ID NO: 38228 - DNA, 21 bp, synthetic construct
  misc_feature 1..21: note = Description of Artificial Sequence: Synthetic oligonucleotide
  source 1..21: mol_type = other DNA
ccgattcatccgtcgagtggg

SEQ ID NO: 38229 - DNA, 21 bp, synthetic construct
  misc_feature 1..21: note = Description of Artificial Sequence: Synthetic oligonucleotide
  source 1..21: mol_type = other DNA
gatcgggttggttcgatttct

SEQ ID NO: 38230 - DNA, 21 bp, synthetic construct
  misc_feature 1..21: note = Description of Artificial Sequence: Synthetic oligonucleotide
  source 1..21: mol_type = other DNA
gttggttctgggcgtgctaat

SEQ ID NO: 38231 - DNA, 21 bp, synthetic construct
  misc_feature 1..21: note = Description of Artificial Sequence: Synthetic oligonucleotide
  source 1..21: mol_type = other DNA
aacagcagcggccactaccaa

SEQ ID NO: 38232 - DNA, 21 bp, synthetic construct
  misc_feature 1..21: note = Description of Artificial Sequence: Synthetic oligonucleotide
  source 1..21: mol_type = other DNA
catacttcgagtaattctctt

SEQ ID NO: 38233 - DNA, 21 bp, synthetic construct
  misc_feature 1..21: note = Description of Artificial Sequence: Synthetic oligonucleotide
  source 1..21: mol_type = other DNA
ctccccagcaacagcatccac

SEQ ID NO: 38234 - DNA, 21 bp, synthetic construct
  misc_feature 1..21: note = Description of Artificial Sequence: Synthetic oligonucleotide
  source 1..21: mol_type = other DNA
agcgacagagacagaaaaacc

SEQ ID NO: 38235 - DNA, 21 bp, synthetic construct
  misc_feature 1..21: note = Description of Artificial Sequence: Synthetic oligonucleotide
  source 1..21: mol_type = other DNA
acccccggcagcaccatcaga

SEQ ID NO: 38236 - DNA, 21 bp, synthetic construct
  misc_feature 1..21: note = Description of Artificial Sequence: Synthetic oligonucleotide
  source 1..21: mol_type = other DNA
agtgttgcgggtactagtagg

SEQ ID NO: 38237 - DNA, 21 bp, synthetic construct
  misc_feature 1..21: note = Description of Artificial Sequence: Synthetic oligonucleotide
  source 1..21: mol_type = other DNA
atgagaagcaaccccaccagc

SEQ ID NO: 38238 - DNA, 21 bp, synthetic construct
  misc_feature 1..21: note = Description of Artificial Sequence: Synthetic oligonucleotide
  source 1..21: mol_type = other DNA
ggcagacccaacatgaccgtc

SEQ ID NO: 38239 - DNA, 21 bp, synthetic construct
  misc_feature 1..21: note = Description of Artificial Sequence: Synthetic oligonucleotide
  source 1..21: mol_type = other DNA
gatacgcatgtgagtggtcgg

SEQ ID NO: 38240 - DNA, 21 bp, synthetic construct
  misc_feature 1..21: note = Description of Artificial Sequence: Synthetic oligonucleotide
  source 1..21: mol_type = other DNA
atggggtcgagtgtgaggtct

SEQ ID NO: 38241 - DNA, 21 bp, synthetic construct
  misc_feature 1..21: note = Description of Artificial Sequence: Synthetic oligonucleotide
  source 1..21: mol_type = other DNA
cttaatgttggttctgtgagg

SEQ ID NO: 38242 - DNA, 21 bp, synthetic construct
  misc_feature 1..21: note = Description of Artificial Sequence: Synthetic oligonucleotide
  source 1..21: mol_type = other DNA
cctgtgcagcattcgagtaat

SEQ ID NO: 38243 - DNA, 21 bp, synthetic construct
  misc_feature 1..21: note = Description of Artificial Sequence: Synthetic oligonucleotide
  source 1..21: mol_type = other DNA
ggggatcagcataagccgttg

SEQ ID NO: 38244 - DNA, 21 bp, synthetic construct
  misc_feature 1..21: note = Description of Artificial Sequence: Synthetic oligonucleotide
  source 1..21: mol_type = other DNA
tcgccggcgagggcttctctt

SEQ ID NO: 38245 - DNA, 21 bp, synthetic construct
  misc_feature 1..21: note = Description of Artificial Sequence: Synthetic oligonucleotide
  source 1..21: mol_type = other DNA
atccccctcagcagccaaaga

SEQ ID NO: 38246 - DNA, 21 bp, synthetic construct
  misc_feature 1..21: note = Description of Artificial Sequence: Synthetic oligonucleotide
  source 1..21: mol_type = other DNA
tgtaatcggtctgggactttg

SEQ ID NO: 38247 - DNA, 21 bp, synthetic construct
  misc_feature 1..21: note = Description of Artificial Sequence: Synthetic oligonucleotide
  source 1..21: mol_type = other DNA
ctccccagcctccccatcaga

SEQ ID NO: 38248 - DNA, 21 bp, synthetic construct
  misc_feature 1..21: note = Description of Artificial Sequence: Synthetic oligonucleotide
  source 1..21: mol_type = other DNA
cacggcagcctccacccccaa

SEQ ID NO: 38249 - DNA, 21 bp, synthetic construct
  misc_feature 1..21: note = Description of Artificial Sequence: Synthetic oligonucleotide
  source 1..21: mol_type = other DNA
gtcatcagacccagcagcaaa

SEQ ID NO: 38250 - DNA, 21 bp, synthetic construct
  misc_feature 1..21: note = Description of Artificial Sequence: Synthetic oligonucleotide
  source 1..21: mol_type = other DNA
cttcctggggttcgtgttgcg

SEQ ID NO: 38251 - DNA, 21 bp, synthetic construct
  misc_feature 1..21: note = Description of Artificial Sequence: Synthetic oligonucleotide
  source 1..21: mol_type = other DNA
aacatcaacagcagactcgcc

SEQ ID NO: 38252 - DNA, 21 bp, synthetic construct
  misc_feature 1..21: note = Description of Artificial Sequence: Synthetic oligonucleotide
  source 1..21: mol_type = other DNA
caacccatcaacgtccacaac

SEQ ID NO: 38253 - DNA, 21 bp, synthetic construct
  misc_feature 1..21: note = Description of Artificial Sequence: Synthetic oligonucleotide
  source 1..21: mol_type = other DNA
ccgcttaatgctcggggtagt

SEQ ID NO: 38254 - DNA, 21 bp, synthetic construct
  misc_feature 1..21: note = Description of Artificial Sequence: Synthetic oligonucleotide
  source 1..21: mol_type = other DNA
aaacaacccggcagcacccac

SEQ ID NO: 38255 - DNA, 21 bp, synthetic construct
  misc_feature 1..21: note = Description of Artificial Sequence: Synthetic oligonucleotide
  source 1..21: mol_type = other DNA
gagggtactcggatggcggcg

SEQ ID NO: 38256 - DNA, 21 bp, synthetic construct
  misc_feature 1..21: note = Description of Artificial Sequence: Synthetic oligonucleotide
  source 1..21: mol_type = other DNA
agagtcgaaagccccaccaac

SEQ ID NO: 38257 - DNA, 21 bp, synthetic construct
  misc_feature 1..21: note = Description of Artificial Sequence: Synthetic oligonucleotide
  source 1..21: mol_type = other DNA
gatagtgttgctggttttacg

SEQ ID NO: 38258 - DNA, 21 bp, synthetic construct
  misc_feature 1..21: note = Description of Artificial Sequence: Synthetic oligonucleotide
  source 1..21: mol_type = other DNA
aacaccggcagcggcagcaga

SEQ ID NO: 38259 - DNA, 21 bp, synthetic construct
  misc_feature 1..21: note = Description of Artificial Sequence: Synthetic oligonucleotide
  source 1..21: mol_type = other DNA
tcgaagactaatgctaaggtt

SEQ ID NO: 38260 - DNA, 21 bp, synthetic construct
  misc_feature 1..21: note = Description of Artificial Sequence: Synthetic oligonucleotide
  source 1..21: mol_type = other DNA
gagtctgctacgcctattagg

SEQ ID NO: 38261 - DNA, 21 bp, synthetic construct
  misc_feature 1..21: note = Description of Artificial Sequence: Synthetic oligonucleotide
  source 1..21: mol_type = other DNA
cgtgaggttgatgggattagg

SEQ ID NO: 38262 - DNA, 21 bp, synthetic construct
  misc_feature 1..21: note = Description of Artificial Sequence: Synthetic oligonucleotide
  source 1..21: mol_type = other DNA
tgttcgaatcatagtactcgg

SEQ ID NO: 38263 - DNA, 21 bp, synthetic construct
  misc_feature 1..21: note = Description of Artificial Sequence: Synthetic oligonucleotide
  source 1..21: mol_type = other DNA
ctcaaaagccccaaacaagcc

SEQ ID NO: 38264 - DNA, 21 bp, synthetic construct
  misc_feature 1..21: note = Description of Artificial Sequence: Synthetic oligonucleotide
  source 1..21: mol_type = other DNA
gacctcaccagagccaccagc

SEQ ID NO: 38265 - DNA, 21 bp, synthetic construct
  misc_feature 1..21: note = Description of Artificial Sequence: Synthetic oligonucleotide
  source 1..21: mol_type = other DNA
gatttgaggacgaattcgtct

SEQ ID NO: 38266 - DNA, 21 bp, synthetic construct
  misc_feature 1..21: note = Description of Artificial Sequence: Synthetic oligonucleotide
  source 1..21: mol_type = other DNA
gttaggtctaaggaggcgcat

SEQ ID NO: 38267 - DNA, 21 bp, synthetic construct
  misc_feature 1..21: note = Description of Artificial Sequence: Synthetic oligonucleotide
  source 1..21: mol_type = other DNA
gtgaagtgtagtggttgtagt

SEQ ID NO: 38268 - DNA, 21 bp, synthetic construct
  misc_feature 1..21: note = Description of Artificial Sequence: Synthetic oligonucleotide
  source 1..21: mol_type = other DNA
caacacaccaccaccaaccaa

SEQ ID NO: 38269 - DNA, 21 bp, synthetic construct
  misc_feature 1..21: note = Description of Artificial Sequence: Synthetic oligonucleotide
  source 1..21: mol_type = other DNA
aacggttctggacagactcaa

SEQ ID NO: 38270 - DNA, 21 bp, synthetic construct
  misc_feature 1..21: note = Description of Artificial Sequence: Synthetic oligonucleotide
  source 1..21: mol_type = other DNA
ggcaacacccaaaccagcaga

SEQ ID NO: 38271 - DNA, 21 bp, synthetic construct
  misc_feature 1..21: note = Description of Artificial Sequence: Synthetic oligonucleotide
  source 1..21: mol_type = other DNA
gccaccaacaacggcagcaaa

SEQ ID NO: 38272 - DNA, 21 bp, synthetic construct
  misc_feature 1..21: note = Description of Artificial Sequence: Synthetic oligonucleotide
  source 1..21: mol_type = other DNA
gatgtgaagtctacgcatgcg

SEQ ID NO: 38273 - DNA, 21 bp, synthetic construct
  misc_feature 1..21: note = Description of Artificial Sequence: Synthetic oligonucleotide
  source 1..21: mol_type = other DNA
ccggttggtactaagtctggt

SEQ ID NO: 38274 - DNA, 21 bp, synthetic construct
  misc_feature 1..21: note = Description of Artificial Sequence: Synthetic oligonucleotide
  source 1..21: mol_type = other DNA
tctactgggtcggtgagtaag

SEQ ID NO: 38275 - DNA, 21 bp, synthetic construct
  misc_feature 1..21: note = Description of Artificial Sequence: Synthetic oligonucleotide
  source 1..21: mol_type = other DNA
tatcggaatgtgaatgcgatg

SEQ ID NO: 38276 - DNA, 21 bp, synthetic construct
  misc_feature 1..21: note = Description of Artificial Sequence: Synthetic oligonucleotide
  source 1..21: mol_type = other DNA
tacggcgccagccccagcctc

SEQ ID NO: 38277 - DNA, 21 bp, synthetic construct
  misc_feature 1..21: note = Description of Artificial Sequence: Synthetic oligonucleotide
  source 1..21: mol_type = other DNA
aaaaaccacaccgccgtccaa

SEQ ID NO: 38278 - DNA, 21 bp, synthetic construct
  misc_feature 1..21: note = Description of Artificial Sequence: Synthetic oligonucleotide
  source 1..21: mol_type = other DNA
catcttggggttccgctgaag

SEQ ID NO: 38279 - DNA, 21 bp, synthetic construct
  misc_feature 1..21: note = Description of Artificial Sequence: Synthetic oligonucleotide
  source 1..21: mol_type = other DNA
aattttgggtctggtcctacg

SEQ ID NO: 38280 - DNA, 21 bp, synthetic construct
  misc_feature 1..21: note = Description of Artificial Sequence: Synthetic oligonucleotide
  source 1..21: mol_type = other DNA
gaccccgtcaccagaaaaagc

SEQ ID NO: 38281 - DNA, 21 bp, synthetic construct
  misc_feature 1..21: note = Description of Artificial Sequence: Synthetic oligonucleotide
  source 1..21: mol_type = other DNA
ggtacggttcttagtgatcgt

SEQ ID NO: 38282 - DNA, 21 bp, synthetic construct
  misc_feature 1..21: note = Description of Artificial Sequence: Synthetic oligonucleotide
  source 1..21: mol_type = other DNA
gatgggtctagtcgtgttggt

SEQ ID NO: 38283 - DNA, 21 bp, synthetic construct
  misc_feature 1..21: note = Description of Artificial Sequence: Synthetic oligonucleotide
  source 1..21: mol_type = other DNA
tcttcgacgtctcctgggagg

SEQ ID NO: 38284 - DNA, 21 bp, synthetic construct
  misc_feature 1..21: note = Description of Artificial Sequence: Synthetic oligonucleotide
  source 1..21: mol_type = other DNA
caacccaacagcgccagccac

SEQ ID NO: 38285 - DNA, 21 bp, synthetic construct
  misc_feature 1..21: note = Description of Artificial Sequence: Synthetic oligonucleotide
  source 1..21: mol_type = other DNA
gttcatgcttcgaatgttcag

SEQ ID NO: 38286 - DNA, 21 bp, synthetic construct
  misc_feature 1..21: note = Description of Artificial Sequence: Synthetic oligonucleotide
  source 1..21: mol_type = other DNA
tatggttctcgggagaatagt

SEQ ID NO: 38287 - DNA, 21 bp, synthetic construct
  misc_feature 1..21: note = Description of Artificial Sequence: Synthetic oligonucleotide
  source 1..21: mol_type = other DNA
aataatggtcatcagggtaag

SEQ ID NO: 38288 - DNA, 21 bp, synthetic construct
  misc_feature 1..21: note = Description of Artificial Sequence: Synthetic oligonucleotide
  source 1..21: mol_type = other DNA
cccagcagcagacaaagcgtc

SEQ ID NO: 38289 - DNA, 21 bp, synthetic construct
  misc_feature 1..21: note = Description of Artificial Sequence: Synthetic oligonucleotide
  source 1..21: mol_type = other DNA
cacctcgccatgaacagaaac

SEQ ID NO: 38290 - DNA, 21 bp, synthetic construct
  misc_feature 1..21: note = Description of Artificial Sequence: Synthetic oligonucleotide
  source 1..21: mol_type = other DNA
tttatgggtcgtcctaatgtt

SEQ ID NO: 38291 - DNA, 21 bp, synthetic construct
  misc_feature 1..21: note = Description of Artificial Sequence: Synthetic oligonucleotide
  source 1..21: mol_type = other DNA
tataatcggacttctattgtg

SEQ ID NO: 38292 - DNA, 21 bp, synthetic construct
  misc_feature 1..21: note = Description of Artificial Sequence: Synthetic oligonucleotide
  source 1..21: mol_type = other DNA
gccggcagcagcagccccgcc

SEQ ID NO: 38293 - DNA, 21 bp, synthetic construct
  misc_feature 1..21: note = Description of Artificial Sequence: Synthetic oligonucleotide
  source 1..21: mol_type = other DNA
ggtattgatactaagatgttg

SEQ ID NO: 38294 - DNA, 21 bp, synthetic construct
  misc_feature 1..21: note = Description of Artificial Sequence: Synthetic oligonucleotide
  source 1..21: mol_type = other DNA
cttgtttatgataatactcgt

SEQ ID NO: 38295 - DNA, 21 bp, synthetic construct
  misc_feature 1..21: note = Description of Artificial Sequence: Synthetic oligonucleotide
  source 1..21: mol_type = other DNA
ttgttggagtctacggggcgt

SEQ ID NO: 38296 - DNA, 21 bp, synthetic construct
  misc_feature 1..21: note = Description of Artificial Sequence: Synthetic oligonucleotide
  source 1..21: mol_type = other DNA
cttactccgagtaatattggt

SEQ ID NO: 38297 - DNA, 21 bp, synthetic construct
  misc_feature 1..21: note = Description of Artificial Sequence: Synthetic oligonucleotide
  source 1..21: mol_type = other DNA
tcggggggtactcacattgcg

SEQ ID NO: 38298 - DNA, 21 bp, synthetic construct
  misc_feature 1..21: note = Description of Artificial Sequence: Synthetic oligonucleotide
  source 1..21: mol_type = other DNA
ggcctcgccggcagcctccaa

SEQ ID NO: 38299 - DNA, 21 bp, synthetic construct
  misc_feature 1..21: note = Description of Artificial Sequence: Synthetic oligonucleotide
  source 1..21: mol_type = other DNA
tatactgctgctcctgggcgt

SEQ ID NO: 38300 - DNA, 21 bp, synthetic construct
  misc_feature 1..21: note = Description of Artificial Sequence: Synthetic oligonucleotide
  source 1..21: mol_type = other DNA
gattctgtgacttctagtggg

SEQ ID NO: 38301 - DNA, 21 bp, synthetic construct
  misc_feature 1..21: note = Description of Artificial Sequence: Synthetic oligonucleotide
  source 1..21: mol_type = other DNA
cgtattagtgagaatatgcgg

SEQ ID NO: 38302 - DNA, 21 bp, synthetic construct
  misc_feature 1..21: note = Description of Artificial Sequence: Synthetic oligonucleotide
  source 1..21: mol_type = other DNA
ggttcgtattctaatcctact

SEQ ID NO: 38303 - DNA, 21 bp, synthetic construct
  misc_feature 1..21: note = Description of Artificial Sequence: Synthetic oligonucleotide
  source 1..21: mol_type = other DNA
ctccccggcagcagactcagc

SEQ ID NO: 38304 - DNA, 21 bp, synthetic construct
  misc_feature 1..21: note = Description of Artificial Sequence: Synthetic oligonucleotide
  source 1..21: mol_type = other DNA
accagcaacaccaaaagcgtc

SEQ ID NO: 38305 - DNA, 21 bp, synthetic construct
  misc_feature 1..21: note = Description of Artificial Sequence: Synthetic oligonucleotide
  source 1..21: mol_type = other DNA
tctcatgttaattctactcgg

SEQ ID NO: 38306 - DNA, 21 bp, synthetic construct
  misc_feature 1..21: note = Description of Artificial Sequence: Synthetic oligonucleotide
  source 1..21: mol_type = other DNA
aggaatggtcagcgtgtgggg

SEQ ID NO: 38307 - DNA, 21 bp, synthetic construct
  misc_feature 1..21: note = Description of Artificial Sequence: Synthetic oligonucleotide
  source 1..21: mol_type = other DNA
gatgctggggctgctcctaag

SEQ ID NO: 38308 - DNA, 21 bp, synthetic construct
  misc_feature 1..21: note = Description of Artificial Sequence: Synthetic oligonucleotide
  source 1..21: mol_type = other DNA
acccaacaaaaaggcagcaac

SEQ ID NO: 38309 - DNA, 21 bp, synthetic construct
  misc_feature 1..21: note = Description of Artificial Sequence: Synthetic oligonucleotide
  source 1..21: mol_type = other DNA
tataggaatactcattctgag

SEQ ID NO: 38310 - DNA, 21 bp, synthetic construct
  misc_feature 1..21: note = Description of Artificial Sequence: Synthetic oligonucleotide
  source 1..21: mol_type = other DNA
actcttcatgatccgcggact

SEQ ID NO: 38311 - DNA, 21 bp, synthetic construct
  misc_feature 1..21: note = Description of Artificial Sequence: Synthetic oligonucleotide
  source 1..21: mol_type = other DNA
actgggcgggggtcggaggtg

SEQ ID NO: 38312 - DNA, 21 bp, synthetic construct
  misc_feature 1..21: note = Description of Artificial Sequence: Synthetic oligonucleotide
  source 1..21: mol_type = other DNA
tacaacaccaccagaatgacc

SEQ ID NO: 38313 - DNA, 21 bp, synthetic construct
  misc_feature 1..21: note = Description of Artificial Sequence: Synthetic oligonucleotide
  source 1..21: mol_type = other DNA
ggccaaaacacccacctcacc

SEQ ID NO: 38314 - DNA, 21 bp, synthetic construct
  misc_feature 1..21: note = Description of Artificial Sequence: Synthetic oligonucleotide
  source 1..21: mol_type = other DNA
cccagcaacaccggcaccatc

SEQ ID NO: 38315 - DNA, 21 bp, synthetic construct
  misc_feature 1..21: note = Description of Artificial Sequence: Synthetic oligonucleotide
  source 1..21: mol_type = other DNA
gctatggggtcgagtctgtct

SEQ ID NO: 38316 - DNA, 21 bp, synthetic construct
  misc_feature 1..21: note = Description of Artificial Sequence: Synthetic oligonucleotide
  source 1..21: mol_type = other DNA
ggcttcgaaagaaacagagaa

SEQ ID NO: 38317 - DNA, 21 bp, synthetic construct
  misc_feature 1..21: note = Description of Artificial Sequence: Synthetic oligonucleotide
  source 1..21: mol_type = other DNA
gggagtaatcgtaatcatgct

SEQ ID NO: 38318 - DNA, 21 bp, synthetic construct
  misc_feature 1..21: note = Description of Artificial Sequence: Synthetic oligonucleotide
  source 1..21: mol_type = other DNA
cttaatggtactcctcagtct

SEQ ID NO: 38319 - DNA, 21 bp, synthetic construct
  misc_feature 1..21: note = Description of Artificial Sequence: Synthetic oligonucleotide
  source 1..21: mol_type = other DNA
agacaaatcggcaaacaagtc

SEQ ID NO: 38320 - DNA, 21 bp, synthetic construct
  misc_feature 1..21: note = Description of Artificial Sequence: Synthetic oligonucleotide
  source 1..21: mol_type = other DNA
cccaccagaaccgccagcaac

SEQ ID NO: 38321 - DNA, 21 bp, synthetic construct
  misc_feature 1..21: note = Description of Artificial Sequence: Synthetic oligonucleotide
  source 1..21: mol_type = other DNA
agtaatactaggtctctttcg

SEQ ID NO: 38322 - DNA, 21 bp, synthetic construct
  misc_feature 1..21: note = Description of Artificial Sequence: Synthetic oligonucleotide
  source 1..21: mol_type = other DNA
tctaggtctcctccttcgggg

SEQ ID NO: 38323 - DNA, 21 bp, synthetic construct
  misc_feature 1..21: note = Description of Artificial Sequence: Synthetic oligonucleotide
  source 1..21: mol_type = other DNA
gtggtgtcgtctaagggttat

SEQ ID NO: 38324 - DNA, 21 bp, synthetic construct
  misc_feature 1..21: note = Description of Artificial Sequence: Synthetic oligonucleotide
  source 1..21: mol_type = other DNA
gtgtctgggcatcgttcggtt

SEQ ID NO: 38325 - DNA, 21 bp, synthetic construct
  misc_feature 1..21: note = Description of Artificial Sequence: Synthetic oligonucleotide
  source 1..21: mol_type = other DNA
ggcaacaccggcagctaccaa

SEQ ID NO: 38326 - DNA, 21 bp, synthetic construct
  misc_feature 1..21: note = Description of Artificial Sequence: Synthetic oligonucleotide
  source 1..21: mol_type = other DNA
ggtcatgataatggtattcag

SEQ ID NO: 38327 - DNA, 21 bp, synthetic construct
  misc_feature 1..21: note = Description of Artificial Sequence: Synthetic oligonucleotide
  source 1..21: mol_type = other DNA
ccgttgattaatcgtactatg

SEQ ID NO: 38328 - DNA, 21 bp, synthetic construct
  misc_feature 1..21: note = Description of Artificial Sequence: Synthetic oligonucleotide
  source 1..21: mol_type = other DNA
gggaataatcggccggcttcg

SEQ ID NO: 38329 - DNA, 21 bp, synthetic construct
  misc_feature 1..21: note = Description of Artificial Sequence: Synthetic oligonucleotide
  source 1..21: mol_type = other DNA
gaaagaggcaaaaacgccctc

SEQ ID NO: 38330 - DNA, 21 bp, synthetic construct
  misc_feature 1..21: note = Description of Artificial Sequence: Synthetic oligonucleotide
  source 1..21: mol_type = other DNA
ccccaccaaagagccggcagc

SEQ ID NO: 38331 - DNA, 21 bp, synthetic construct
  misc_feature 1..21: note = Description of Artificial Sequence: Synthetic oligonucleotide
  source 1..21: mol_type = other DNA
agccccaacaaaaccagcctc

SEQ ID NO: 38332 - DNA, 21 bp, synthetic construct
  misc_feature 1..21: note = Description of Artificial Sequence: Synthetic oligonucleotide
  source 1..21: mol_type = other DNA
aacaacgtcaccaaagccccc

SEQ ID NO: 38333 - DNA, 21 bp, synthetic construct
  misc_feature 1..21: note = Description of Artificial Sequence: Synthetic oligonucleotide
  source 1..21: mol_type = other DNA
agcatcaaaagcgtcaccaac

SEQ ID NO: 38334 - DNA, 21 bp, synthetic construct
  misc_feature 1..21: note = Description of Artificial Sequence: Synthetic oligonucleotide
  source 1..21: mol_type = other DNA
catcctactatgaattatagt

SEQ ID NO: 38335 - DNA, 21 bp, synthetic construct
  misc_feature 1..21: note = Description of Artificial Sequence: Synthetic oligonucleotide
  source 1..21: mol_type = other DNA
cacatgagagccaacgtcacc

SEQ ID NO: 38336 - DNA, 21 bp, synthetic construct
  misc_feature 1..21: note = Description of Artificial Sequence: Synthetic oligonucleotide
  source 1..21: mol_type = other DNA
ttgacggcgaagtcgagtcag

SEQ ID NO: 38337 - DNA, 21 bp, synthetic construct
  misc_feature 1..21: note = Description of Artificial Sequence: Synthetic oligonucleotide
  source 1..21: mol_type = other DNA
tctaatcggacttctattgtg

SEQ ID NO: 38338 - DNA, 21 bp, synthetic construct
  misc_feature 1..21: note = Description of Artificial Sequence: Synthetic oligonucleotide
  source 1..21: mol_type = other DNA
gatacgaatgtggattatagg

SEQ ID NO: 38339 - DNA, 21 bp, synthetic construct
  misc_feature 1..21: note = Description of Artificial Sequence: Synthetic oligonucleotide
  source 1..21: mol_type = other DNA
cccagaagcaccaccggcggc

SEQ ID NO: 38340 - DNA, 21 bp, synthetic construct
  misc_feature 1..21: note = Description of Artificial Sequence: Synthetic oligonucleotide
  source 1..21: mol_type = other DNA
atgcccgccagaaacgtcagc

SEQ ID NO: 38341 - DNA, 21 bp, synthetic construct
  misc_feature 1..21: note = Description of Artificial Sequence: Synthetic oligonucleotide
  source 1..21: mol_type = other DNA
cctaggatgcgggctgtgtct

SEQ ID NO: 38342 - DNA, 21 bp, synthetic construct
  misc_feature 1..21: note = Description of Artificial Sequence: Synthetic oligonucleotide
  source 1..21: mol_type = other DNA
ttcggcgaaagcagaggcaga

SEQ ID NO: 38343 - DNA, 21 bp, synthetic construct
  misc_feature 1..21: note = Description of Artificial Sequence: Synthetic oligonucleotide
  source 1..21: mol_type = other DNA
atggccaccgcccacggcggc

SEQ ID NO: 38344 - DNA, 21 bp, synthetic construct
  misc_feature 1..21: note = Description of Artificial Sequence: Synthetic oligonucleotide
  source 1..21: mol_type = other DNA
gctctgattgatcgtggtgat

SEQ ID NO: 38345 - DNA, 21 bp, synthetic construct
  misc_feature 1..21: note = Description of Artificial Sequence: Synthetic oligonucleotide
  source 1..21: mol_type = other DNA
ctgcctcaggggtcgatttct

SEQ ID NO: 38346 - DNA, 21 bp, synthetic construct
  misc_feature 1..21: note = Description of Artificial Sequence: Synthetic oligonucleotide
  source 1..21: mol_type = other DNA
aaactcgtcaacagcaacggc

SEQ ID NO: 38347 - DNA, 21 bp, synthetic construct
  misc_feature 1..21: note = Description of Artificial Sequence: Synthetic oligonucleotide
  source 1..21: mol_type = other DNA
atgaacgccagcgtcaacaga

SEQ ID NO: 38348 - DNA, 21 bp, synthetic construct
  misc_feature 1..21: note = Description of Artificial Sequence: Synthetic oligonucleotide
  source 1..21: mol_type = other DNA
ctggctacgaataggagtaat

SEQ ID NO: 38349 - DNA, 21 bp, synthetic construct
  misc_feature 1..21: note = Description of Artificial Sequence: Synthetic oligonucleotide
  source 1..21: mol_type = other DNA
ggcagacaagtcacccccacc

SEQ ID NO: 38350 - DNA, 21 bp, synthetic construct
  misc_feature 1..21: note = Description of Artificial Sequence: Synthetic oligonucleotide
  source 1..21: mol_type = other DNA
ctcggcaccagcaccatgaaa

SEQ ID NO: 38351 - DNA, 21 bp, synthetic construct
  misc_feature 1..21: note = Description of Artificial Sequence: Synthetic oligonucleotide
  source 1..21: mol_type = other DNA
aaccccaaccaaagcctcggc

SEQ ID NO: 38352 - DNA, 21 bp, synthetic construct
  misc_feature 1..21: note = Description of Artificial Sequence: Synthetic oligonucleotide
  source 1..21: mol_type = other DNA
gacttcagcgaaaaaagactc

SEQ ID NO: 38353 - DNA, 21 bp, synthetic construct
  misc_feature 1..21: note = Description of Artificial Sequence: Synthetic oligonucleotide
  source 1..21: mol_type = other DNA
accagcagagtcggccaagtc

SEQ ID NO: 38354 - DNA, 21 bp, synthetic construct
  misc_feature 1..21: note = Description of Artificial Sequence: Synthetic oligonucleotide
  source 1..21: mol_type = other DNA
catacgcagagtgcgacgggg

SEQ ID NO: 38355 - DNA, 21 bp, synthetic construct
  misc_feature 1..21: note = Description of Artificial Sequence: Synthetic oligonucleotide
  source 1..21: mol_type = other DNA
gccaccaccaaagccggcatc

SEQ ID NO: 38356 - DNA, 21 bp, synthetic construct
  misc_feature 1..21: note = Description of Artificial Sequence: Synthetic oligonucleotide
  source 1..21: mol_type = other DNA
cagcagtatgcgaagcaggcg

SEQ ID NO: 38357 - DNA, 21 bp, synthetic construct
  misc_feature 1..21: note = Description of Artificial Sequence: Synthetic oligonucleotide
  source 1..21: mol_type = other DNA
tcgaggcatcctagtactggt

SEQ ID NO: 38358 - DNA, 21 bp, synthetic construct
  misc_feature 1..21: note = Description of Artificial Sequence: Synthetic oligonucleotide
  source 1..21: mol_type = other DNA
ttgcgtaatcctacgtctaag

SEQ ID NO: 38359 - DNA, 21 bp, synthetic construct
  misc_feature 1..21: note = Description of Artificial Sequence: Synthetic oligonucleotide
  source 1..21: mol_type = other DNA
aatagttatgatccgaagcgt

SEQ ID NO: 38360 - DNA, 21 bp, synthetic construct
  misc_feature 1..21: note = Description of Artificial Sequence: Synthetic oligonucleotide
  source 1..21: mol_type = other DNA
actgggttgaaggatcagcat

SEQ ID NO: 38361 - DNA, 21 bp, synthetic construct
  misc_feature 1..21: note = Description of Artificial Sequence: Synthetic oligonucleotide
  source 1..21: mol_type = other DNA
gctagggatacggttgttagg

SEQ ID NO: 38362 - DNA, 21 bp, synthetic construct
  misc_feature 1..21: note = Description of Artificial Sequence: Synthetic oligonucleotide
  source 1..21: mol_type = other DNA
tcgcatgatacttcttatcgt

SEQ ID NO: 38363 - DNA, 21 bp, synthetic construct
  misc_feature 1..21: note = Description of Artificial Sequence: Synthetic oligonucleotide
  source 1..21: mol_type = other DNA
aatcctcgtatgagtatgtcg

SEQ ID NO: 38364 - DNA, 21 bp, synthetic construct
  misc_feature 1..21: note = Description of Artificial Sequence: Synthetic oligonucleotide
  source 1..21: mol_type = other DNA
ctcaacaccggcatcgtcaga

SEQ ID NO: 38365 - DNA, 21 bp, synthetic construct
  misc_feature 1..21: note = Description of Artificial Sequence: Synthetic oligonucleotide
  source 1..21: mol_type = other DNA
actagtcatatgcagcttagt

SEQ ID NO: 38366 - DNA, 21 bp, synthetic construct
  misc_feature 1..21: note = Description of Artificial Sequence: Synthetic oligonucleotide
  source 1..21: mol_type = other DNA
aaccccgtcgccctcagagac

SEQ ID NO: 38367 - DNA, 21 bp, synthetic construct
  misc_feature 1..21: note = Description of Artificial Sequence: Synthetic oligonucleotide
  source 1..21: mol_type = other DNA
gggaatcagagtcctcgggtt

SEQ ID NO: 38368 - DNA, 21 bp, synthetic construct
  misc_feature 1..21: note = Description of Artificial Sequence: Synthetic oligonucleotide
  source 1..21: mol_type = other DNA
gccaccaacagcacccccaga

SEQ ID NO: 38369 - DNA, 21 bp, synthetic construct
  misc_feature 1..21: note = Description of Artificial Sequence: Synthetic oligonucleotide
  source 1..21: mol_type = other DNA
cacagagtcgacagaagctgc

SEQ ID NO: 38370 - DNA, 21 bp, synthetic construct
  misc_feature 1..21: note = Description of Artificial Sequence: Synthetic oligonucleotide
  source 1..21: mol_type = other DNA
gacagaagcgccaccgtcaaa

SEQ ID NO: 38371 - DNA, 21 bp, synthetic construct
  misc_feature 1..21: note = Description of Artificial Sequence: Synthetic oligonucleotide
  source 1..21: mol_type = other DNA
gttactcttccgcctaatgcg

SEQ ID NO: 38372 - DNA, 21 bp, synthetic construct
  misc_feature 1..21: note = Description of Artificial Sequence: Synthetic oligonucleotide
  source 1..21: mol_type = other DNA
aacatcgcccaaaaagaactc

SEQ ID NO: 38373 - DNA, 21 bp, synthetic construct
  misc_feature 1..21: note = Description of Artificial Sequence: Synthetic oligonucleotide
  source 1..21: mol_type = other DNA
cacaccaccggcatcctcggc

SEQ ID NO: 38374 - DNA, 21 bp, synthetic construct
  misc_feature 1..21: note = Description of Artificial Sequence: Synthetic oligonucleotide
  source 1..21: mol_type = other DNA
ggcatcatggccaccagaggc

SEQ ID NO: 38375 - DNA, 21 bp, synthetic construct
  misc_feature 1..21: note = Description of Artificial Sequence: Synthetic oligonucleotide
  source 1..21: mol_type = other DNA
actacgtcgcgtccgaatgtt

SEQ ID NO: 38376 - DNA, 21 bp, synthetic construct
  misc_feature 1..21: note = Description of Artificial Sequence: Synthetic oligonucleotide
  source 1..21: mol_type = other DNA
cctatggcgcggtcggctggg

SEQ ID NO: 38377 - DNA, 21 bp, synthetic construct
  misc_feature 1..21: note = Description of Artificial Sequence: Synthetic oligonucleotide
  source 1..21: mol_type = other DNA
cagagtaatgatcgtgcgaag

SEQ ID NO: 38378 - DNA, 21 bp, synthetic construct
  misc_feature 1..21: note = Description of Artificial Sequence: Synthetic oligonucleotide
  source 1..21: mol_type = other DNA
aattctgcgggtactcgggtg

SEQ ID NO: 38379 - DNA, 21 bp, synthetic construct
  misc_feature 1..21: note = Description of Artificial Sequence: Synthetic oligonucleotide
  source 1..21: mol_type = other DNA
ggccccaaccaaagcggcaga

SEQ ID NO: 38380 - DNA, 21 bp, synthetic construct
  misc_feature 1..21: note = Description of Artificial Sequence: Synthetic oligonucleotide
  source 1..21: mol_type = other DNA
ccccaaaccagccccagaacc

SEQ ID NO: 38381 - DNA, 21 bp, synthetic construct
  misc_feature 1..21: note = Description of Artificial Sequence: Synthetic oligonucleotide
  source 1..21: mol_type = other DNA
gcggattctaatcgtccgggg

SEQ ID NO: 38382 - DNA, 21 bp, synthetic construct
  misc_feature 1..21: note = Description of Artificial Sequence: Synthetic oligonucleotide
  source 1..21: mol_type = other DNA
tgggacagcaaaacccccaga

SEQ ID NO: 38383 - DNA, 21 bp, synthetic construct
  misc_feature 1..21: note = Description of Artificial Sequence: Synthetic oligonucleotide
  source 1..21: mol_type = other DNA
ccgagtactagtggtgcgatg

SEQ ID NO: 38384 - DNA, 21 bp, synthetic construct
  misc_feature 1..21: note = Description of Artificial Sequence: Synthetic oligonucleotide
  source 1..21: mol_type = other DNA
attttgggtaataagtctagt

SEQ ID NO: 38385 - DNA, 21 bp, synthetic construct
  misc_feature 1..21: note = Description of Artificial Sequence: Synthetic oligonucleotide
  source 1..21: mol_type = other DNA
ttcaacagcagcagcagcaaa

SEQ ID NO: 38386 - DNA, 21 bp, synthetic construct
  misc_feature 1..21: note = Description of Artificial Sequence: Synthetic oligonucleotide
  source 1..21: mol_type = other DNA
gtggatgttagggggatgtcg

SEQ ID NO: 38387 - DNA, 21 bp, synthetic construct
  misc_feature 1..21: note = Description of Artificial Sequence: Synthetic oligonucleotide
  source 1..21: mol_type = other DNA
agttcggattcggggcggctt

SEQ ID NO: 38388 - DNA, 21 bp, synthetic construct
  misc_feature 1..21: note = Description of Artificial Sequence: Synthetic oligonucleotide
  source 1..21: mol_type = other DNA
gatagtccgaatcggggtagg

SEQ ID NO: 38389 - DNA, 21 bp, synthetic construct
  misc_feature 1..21: note = Description of Artificial Sequence: Synthetic oligonucleotide
  source 1..21: mol_type = other DNA
gtgacgcagtcttcgagtaag

SEQ ID NO: 38390 - DNA, 21 bp, synthetic construct
  misc_feature 1..21: note = Description of Artificial Sequence: Synthetic oligonucleotide
  source 1..21: mol_type = other DNA
cctgggattcggcctgagctt

SEQ ID NO: 38391 - DNA, 21 bp, synthetic construct
  misc_feature 1..21: note = Description of Artificial Sequence: Synthetic oligonucleotide
  source 1..21: mol_type = other DNA
cgtacggatcatgggggtgtg

SEQ ID NO: 38392 - DNA, 21 bp, synthetic construct
  misc_feature 1..21: note = Description of Artificial Sequence: Synthetic oligonucleotide
  source 1..21: mol_type = other DNA
aatgtgaatagtcagatgctg

SEQ ID NO: 38393 - DNA, 21 bp, synthetic construct
  misc_feature 1..21: note = Description of Artificial Sequence: Synthetic oligonucleotide
  source 1..21: mol_type = other DNA
gccgtcagagcccaccaacaa

SEQ ID NO: 38394 - DNA, 21 bp, synthetic construct
  misc_feature 1..21: note = Description of Artificial Sequence: Synthetic oligonucleotide
  source 1..21: mol_type = other DNA
gtccccggcaaaagcgcccaa

SEQ ID NO: 38395 - DNA, 21 bp, synthetic construct
  misc_feature 1..21: note = Description of Artificial Sequence: Synthetic oligonucleotide
  source 1..21: mol_type = other DNA
cttactccgagtaatatgggt

SEQ ID NO: 38396 - DNA, 21 bp, synthetic construct
  misc_feature 1..21: note = Description of Artificial Sequence: Synthetic oligonucleotide
  source 1..21: mol_type = other DNA
ggcaacggcaccagacaaaac

SEQ ID NO: 38397 - DNA, 21 bp, synthetic construct
  misc_feature 1..21: note = Description of Artificial Sequence: Synthetic oligonucleotide
  source 1..21: mol_type = other DNA
ggggatattacgcgtcttggt

SEQ ID NO: 38398 - DNA, 21 bp, synthetic construct
  misc_feature 1..21: note = Description of Artificial Sequence: Synthetic oligonucleotide
  source 1..21: mol_type = other DNA
aatagtcgtgagtcgcagggg

SEQ ID NO: 38399 - DNA, 21 bp, synthetic construct
  misc_feature 1..21: note = Description of Artificial Sequence: Synthetic oligonucleotide
  source 1..21: mol_type = other DNA
cccgccaccagacaacccgac

SEQ ID NO: 38400 - DNA, 21 bp, synthetic construct
  misc_feature 1..21: note = Description of Artificial Sequence: Synthetic oligonucleotide
  source 1..21: mol_type = other DNA
gtgactactagtcggggtgtt

SEQ ID NO: 38401 - DNA, 21 bp, synthetic construct
  misc_feature 1..21: note = Description of Artificial Sequence: Synthetic oligonucleotide
  source 1..21: mol_type = other DNA
gctggtgcgcctaagacggat

SEQ ID NO: 38402 - DNA, 21 bp, synthetic construct
  misc_feature 1..21: note = Description of Artificial Sequence: Synthetic oligonucleotide
  source 1..21: mol_type = other DNA
aacagagtcgaacacacccaa

SEQ ID NO: 38403 - DNA, 21 bp, synthetic construct
  misc_feature 1..21: note = Description of Artificial Sequence: Synthetic oligonucleotide
  source 1..21: mol_type = other DNA
caaatcagcgccagcaccaga

SEQ ID NO: 38404 - DNA, 21 bp, synthetic construct
  misc_feature 1..21: note = Description of Artificial Sequence: Synthetic oligonucleotide
  source 1..21: mol_type = other DNA
caaaacgtcagcaccatgaac

SEQ ID NO: 38405 - DNA, 21 bp, synthetic construct
  misc_feature 1..21: note = Description of Artificial Sequence: Synthetic oligonucleotide
  source 1..21: mol_type = other DNA
gttcctcttcagaagccttct

SEQ ID NO: 38406 - DNA, 21 bp, synthetic construct
  misc_feature 1..21: note = Description of Artificial Sequence: Synthetic oligonucleotide
  source 1..21: mol_type = other DNA
gttacgcgttctcggctggat

SEQ ID NO: 38407 - DNA, 21 bp, synthetic construct
  misc_feature 1..21: note = Description of Artificial Sequence: Synthetic oligonucleotide
  source 1..21: mol_type = other DNA
tatcgtacggcgacgtctcat

SEQ ID NO: 38408 - DNA, 21 bp, synthetic construct
  misc_feature 1..21: note = Description of Artificial Sequence: Synthetic oligonucleotide
  source 1..21: mol_type = other DNA
gacgtcatgcccagcggcaga

SEQ ID NO: 38409 - DNA, 21 bp, synthetic construct
  misc_feature 1..21: note = Description of Artificial Sequence: Synthetic oligonucleotide
  source 1..21: mol_type = other DNA
ttggatggtcgtcagcattcg

SEQ ID NO: 38410 - DNA, 21 bp, synthetic construct
  misc_feature 1..21: note = Description of Artificial Sequence: Synthetic oligonucleotide
  source 1..21: mol_type = other DNA
ctcagacccaacggccaactc

SEQ ID NO: 38411 - DNA, 21 bp, synthetic construct
  misc_feature 1..21: note = Description of Artificial Sequence: Synthetic oligonucleotide
  source 1..21: mol_type = other DNA
cgtggtgtggggaagcttacg

SEQ ID NO: 38412 - DNA, 21 bp, synthetic construct
  misc_feature 1..21: note = Description of Artificial Sequence: Synthetic oligonucleotide
  source 1..21: mol_type = other DNA
accagcaccagcagaagcagc

SEQ ID NO: 38413 - DNA, 21 bp, synthetic construct
  misc_feature 1..21: note = Description of Artificial Sequence: Synthetic oligonucleotide
  source 1..21: mol_type = other DNA
gaacccctccaaggcagcaga

SEQ ID NO: 38414 - DNA, 21 bp, synthetic construct
  misc_feature 1..21: note = Description of Artificial Sequence: Synthetic oligonucleotide
  source 1..21: mol_type = other DNA
tctcagacggttaagactggt

SEQ ID NO: 38415 - DNA, 21 bp, synthetic construct
  misc_feature 1..21: note = Description of Artificial Sequence: Synthetic oligonucleotide
  source 1..21: mol_type = other DNA
agcaccagcaaagactacacc

SEQ ID NO: 38416 - DNA, 21 bp, synthetic construct
  misc_feature 1..21: note = Description of Artificial Sequence: Synthetic oligonucleotide
  source 1..21: mol_type = other DNA
agagacaccaacagattcggc

SEQ ID NO: 38417 - DNA, 21 bp, synthetic construct
  misc_feature 1..21: note = Description of Artificial Sequence: Synthetic oligonucleotide
  source 1..21: mol_type = other DNA
agtcagattccgccgtctact

SEQ ID NO: 38418 - DNA, 21 bp, synthetic construct
  misc_feature 1..21: note = Description of Artificial Sequence: Synthetic oligonucleotide
  source 1..21: mol_type = other DNA
gcttctactccgaataatact

SEQ ID NO: 38419 - DNA, 21 bp, synthetic construct
  misc_feature 1..21: note = Description of Artificial Sequence: Synthetic oligonucleotide
  source 1..21: mol_type = other DNA
atccaccaaaaagtcaacgtc

SEQ ID NO: 38420 - DNA, 21 bp, synthetic construct
  misc_feature 1..21: note = Description of Artificial Sequence: Synthetic oligonucleotide
  source 1..21: mol_type = other DNA
aatcatggtagtggtacggct

SEQ ID NO: 38421 - DNA, 21 bp, synthetic construct
  misc_feature 1..21: note = Description of Artificial Sequence: Synthetic oligonucleotide
  source 1..21: mol_type = other DNA
aagtgtaattcggcttgtcag

SEQ ID NO: 38422 - DNA, 21 bp, synthetic construct
  misc_feature 1..21: note = Description of Artificial Sequence: Synthetic oligonucleotide
  source 1..21: mol_type = other DNA
gccagcctcaaaacccaaatg

SEQ ID NO: 38423 - DNA, 21 bp, synthetic construct
  misc_feature 1..21: note = Description of Artificial Sequence: Synthetic oligonucleotide
  source 1..21: mol_type = other DNA
aaactcggccaagacgtcaga

SEQ ID NO: 38424 - DNA, 21 bp, synthetic construct
  misc_feature 1..21: note = Description of Artificial Sequence: Synthetic oligonucleotide
  source 1..21: mol_type = other DNA
acccccagcgtcagcaccaaa

SEQ ID NO: 38425 - DNA, 21 bp, synthetic construct
  misc_feature 1..21: note = Description of Artificial Sequence: Synthetic oligonucleotide
  source 1..21: mol_type = other DNA
cacacccccgaagtcggcaaa

SEQ ID NO: 38426 - DNA, 21 bp, synthetic construct
  misc_feature 1..21: note = Description of Artificial Sequence: Synthetic oligonucleotide
  source 1..21: mol_type = other DNA
gggattgggtcggctgcggtt

SEQ ID NO: 38427 - DNA, 21 bp, synthetic construct
  misc_feature 1..21: note = Description of Artificial Sequence: Synthetic oligonucleotide
  source 1..21: mol_type = other DNA
gggggtcaggcgtctggtcgg

SEQ ID NO: 38428 - DNA, 21 bp, synthetic construct
  misc_feature 1..21: note = Description of Artificial Sequence: Synthetic oligonucleotide
  source 1..21: mol_type = other DNA
agaaacgacagcagacccccc

SEQ ID NO: 38429 - DNA, 21 bp, synthetic construct
  misc_feature 1..21: note = Description of Artificial Sequence: Synthetic oligonucleotide
  source 1..21: mol_type = other DNA
tgggggggttctgcggatagg

SEQ ID NO: 38430 - DNA, 21 bp, synthetic construct
  misc_feature 1..21: note = Description of Artificial Sequence: Synthetic oligonucleotide
  source 1..21: mol_type = other DNA
agcggcggcaaaggccccacc

SEQ ID NO: 38431 - DNA, 21 bp, synthetic construct
  misc_feature 1..21: note = Description of Artificial Sequence: Synthetic oligonucleotide
  source 1..21: mol_type = other DNA
agcagccccctcgaacacagc

SEQ ID NO: 38432 - DNA, 21 bp, synthetic construct
  misc_feature 1..21: note = Description of Artificial Sequence: Synthetic oligonucleotide
  source 1..21: mol_type = other DNA
ccgatggattattctcgttcg

SEQ ID NO: 38433 - DNA, 21 bp, synthetic construct
  misc_feature 1..21: note = Description of Artificial Sequence: Synthetic oligonucleotide
  source 1..21: mol_type = other DNA
ttgattaatcctgctggttct

SEQ ID NO: 38434 - DNA, 21 bp, synthetic construct
  misc_feature 1..21: note = Description of Artificial Sequence: Synthetic oligonucleotide
  source 1..21: mol_type = other DNA
ccgtggggtacgaatcttgat

SEQ ID NO: 38435 - DNA, 21 bp, synthetic construct
  misc_feature 1..21: note = Description of Artificial Sequence: Synthetic oligonucleotide
  source 1..21: mol_type = other DNA
caacaagccagcctcagcagc

SEQ ID NO: 38436 - DNA, 21 bp, synthetic construct
  misc_feature 1..21: note = Description of Artificial Sequence: Synthetic oligonucleotide
  source 1..21: mol_type = other DNA
ggttctaatattaataatggt

SEQ ID NO: 38437 - DNA, 21 bp, synthetic construct
  misc_feature 1..21: note = Description of Artificial Sequence: Synthetic oligonucleotide
  source 1..21: mol_type = other DNA
cccatcagccacaccaccggc

SEQ ID NO: 38438 - DNA, 21 bp, synthetic construct
  misc_feature 1..21: note = Description of Artificial Sequence: Synthetic oligonucleotide
  source 1..21: mol_type = other DNA
ttcgccagcagacccgtccaa

SEQ ID NO: 38439 - DNA, 21 bp, synthetic construct
  misc_feature 1..21: note = Description of Artificial Sequence: Synthetic oligonucleotide
  source 1..21: mol_type = other DNA
cttggggtgcatcatacgaat

SEQ ID NO: 38440 - DNA, 21 bp, synthetic construct
  misc_feature 1..21: note = Description of Artificial Sequence: Synthetic oligonucleotide
  source 1..21: mol_type = other DNA
gggtataataagtcgcttgcg

SEQ ID NO: 38441 - DNA, 21 bp, synthetic construct
  misc_feature 1..21: note = Description of Artificial Sequence: Synthetic oligonucleotide
  source 1..21: mol_type = other DNA
tgtccgattcgtatgagtaat

SEQ ID NO: 38442 - DNA, 21 bp, synthetic construct
  misc_feature 1..21: note = Description of Artificial Sequence: Synthetic oligonucleotide
  source 1..21: mol_type = other DNA
tggagccccgaaagaaccatc

SEQ ID NO: 38443 - DNA, 21 bp, synthetic construct
  misc_feature 1..21: note = Description of Artificial Sequence: Synthetic oligonucleotide
  source 1..21: mol_type = other DNA
atgtatagtgatcgttgtgct

SEQ ID NO: 38444 - DNA, 21 bp, synthetic construct
  misc_feature 1..21: note = Description of Artificial Sequence: Synthetic oligonucleotide
  source 1..21: mol_type = other DNA
catcagacgcgtactgcggcg

SEQ ID NO: 38445 - DNA, 21 bp, synthetic construct
  misc_feature 1..21: note = Description of Artificial Sequence: Synthetic oligonucleotide
  source 1..21: mol_type = other DNA
gtgggtagtcagactaatagt

SEQ ID NO: 38446 - DNA, 21 bp, synthetic construct
  misc_feature 1..21: note = Description of Artificial Sequence: Synthetic oligonucleotide
  source 1..21: mol_type = other DNA
agtcagcctaatagtgcgtat

SEQ ID NO: 38447 - DNA, 21 bp, synthetic construct
  misc_feature 1..21: note = Description of Artificial Sequence: Synthetic oligonucleotide
  source 1..21: mol_type = other DNA
ggtggggttccttctaggctt

SEQ ID NO: 38448 - DNA, 21 bp, synthetic construct
  misc_feature 1..21: note = Description of Artificial Sequence: Synthetic oligonucleotide
  source 1..21: mol_type = other DNA
acgactgtgggtagtggttat

SEQ ID NO: 38449 - DNA, 21 bp, synthetic construct
  misc_feature 1..21: note = Description of Artificial Sequence: Synthetic oligonucleotide
  source 1..21: mol_type = other DNA
aaaggttctggacagaatcaa

SEQ ID NO: 38450 - DNA, 21 bp, synthetic construct
  misc_feature 1..21: note = Description of Artificial Sequence: Synthetic oligonucleotide
  source 1..21: mol_type = other DNA
ctcaacagcggcaacggcagc

SEQ ID NO: 38451 - DNA, 21 bp, synthetic construct
  misc_feature 1..21: note = Description of Artificial Sequence: Synthetic oligonucleotide
  source 1..21: mol_type = other DNA
catacggctaatagtcagagt

SEQ ID NO: 38452 - DNA, 21 bp, synthetic construct
  misc_feature 1..21: note = Description of Artificial Sequence: Synthetic oligonucleotide
  source 1..21: mol_type = other DNA
tcgtatcctagtcagttgaat

SEQ ID NO: 38453 - DNA, 21 bp, synthetic construct
  misc_feature 1..21: note = Description of Artificial Sequence: Synthetic oligonucleotide
  source 1..21: mol_type = other DNA
tcgggggcttcgagtaattct

SEQ ID NO: 38454 - DNA, 21 bp, synthetic construct
  misc_feature 1..21: note = Description of Artificial Sequence: Synthetic oligonucleotide
  source 1..21: mol_type = other DNA
aggctggatcggcagcagggg

SEQ ID NO: 38455 - DNA, 21 bp, synthetic construct
  misc_feature 1..21: note = Description of Artificial Sequence: Synthetic oligonucleotide
  source 1..21: mol_type = other DNA
ctcgtcgccggcagcccccaa

SEQ ID NO: 38456 - DNA, 21 bp, synthetic construct
  misc_feature 1..21: note = Description of Artificial Sequence: Synthetic oligonucleotide
  source 1..21: mol_type = other DNA
accgtccccggcagaagcacc

SEQ ID NO: 38457 - DNA, 21 bp, synthetic construct
  misc_feature 1..21: note = Description of Artificial Sequence: Synthetic oligonucleotide
  source 1..21: mol_type = other DNA
cccagccacggccaaaacaga

SEQ ID NO: 38458 - DNA, 21 bp, synthetic construct
  misc_feature 1..21: note = Description of Artificial Sequence: Synthetic oligonucleotide
  source 1..21: mol_type = other DNA
gagaataatagtcgtgctact

SEQ ID NO: 38459 - DNA, 21 bp, synthetic construct
  misc_feature 1..21: note = Description of Artificial Sequence: Synthetic oligonucleotide
  source 1..21: mol_type = other DNA
aataatgctgctactcattcg

SEQ ID NO: 38460 - DNA, 21 bp, synthetic construct
  misc_feature 1..21: note = Description of Artificial Sequence: Synthetic oligonucleotide
  source 1..21: mol_type = other DNA
aacggcagcaccagcagcggc

SEQ ID NO: 38461 - DNA, 21 bp, synthetic construct
  misc_feature 1..21: note = Description of Artificial Sequence: Synthetic oligonucleotide
  source 1..21: mol_type = other DNA
cacggcatggaagtcgccaga

SEQ ID NO: 38462 - DNA, 21 bp, synthetic construct
  misc_feature 1..21: note = Description of Artificial Sequence: Synthetic oligonucleotide
  source 1..21: mol_type = other DNA
tgtattagtccgtcttcgcgt

SEQ ID NO: 38463 - DNA, 21 bp, synthetic construct
  misc_feature 1..21: note = Description of Artificial Sequence: Synthetic oligonucleotide
  source 1..21: mol_type = other DNA
aatccttctatggctatgaag

SEQ ID NO: 38464 - DNA, 21 bp, synthetic construct
  misc_feature 1..21: note = Description of Artificial Sequence: Synthetic oligonucleotide
  source 1..21: mol_type = other DNA
agtaagtctcagcctccgaag

SEQ ID NO: 38465 - DNA, 21 bp, synthetic construct
  misc_feature 1..21: note = Description of Artificial Sequence: Synthetic oligonucleotide
  source 1..21: mol_type = other DNA
cttaatagtatgtctcctagg

SEQ ID NO: 38466 - DNA, 21 bp, synthetic construct
  misc_feature 1..21: note = Description of Artificial Sequence: Synthetic oligonucleotide
  source 1..21: mol_type = other DNA
actcagcagaatgggaggaat

SEQ ID NO: 38467 - DNA, 21 bp, synthetic construct
  misc_feature 1..21: note = Description of Artificial Sequence: Synthetic oligonucleotide
  source 1..21: mol_type = other DNA
gtttctacgccgcgtcttagt

SEQ ID NO: 38468 - DNA, 21 bp, synthetic construct
  misc_feature 1..21: note = Description of Artificial Sequence: Synthetic oligonucleotide
  source 1..21: mol_type = other DNA
gtcaccgccaacagaagcacc

SEQ ID NO: 38469 - DNA, 21 bp, synthetic construct
  misc_feature 1..21: note = Description of Artificial Sequence: Synthetic oligonucleotide
  source 1..21: mol_type = other DNA
actcaggggtctcgtttgtct

SEQ ID NO: 38470 - DNA, 21 bp, synthetic construct
  misc_feature 1..21: note = Description of Artificial Sequence: Synthetic oligonucleotide
  source 1..21: mol_type = other DNA
agcaacggcagcagactcgcc

SEQ ID NO: 38471 - DNA, 21 bp, synthetic construct
  misc_feature 1..21: note = Description of Artificial Sequence: Synthetic oligonucleotide
  source 1..21: mol_type = other DNA
tttagttctaagacttctccg

SEQ ID NO: 38472 - DNA, 21 bp, synthetic construct
  misc_feature 1..21: note = Description of Artificial Sequence: Synthetic oligonucleotide
  source 1..21: mol_type = other DNA
gtcagcgacagcaacaccaaa

SEQ ID NO: 38473 - DNA, 21 bp, synthetic construct
  misc_feature 1..21: note = Description of Artificial Sequence: Synthetic oligonucleotide
  source 1..21: mol_type = other DNA
ggcgccctcgccacctacaga

SEQ ID NO: 38474 - DNA, 21 bp, synthetic construct
  misc_feature 1..21: note = Description of Artificial Sequence: Synthetic oligonucleotide
  source 1..21: mol_type = other DNA
cataggacgagtcgggatggt

SEQ ID NO: 38475 - DNA, 21 bp, synthetic construct
  misc_feature 1..21: note = Description of Artificial Sequence: Synthetic oligonucleotide
  source 1..21: mol_type = other DNA
atgcgtcagacggcttctctt

SEQ ID NO: 38476 - DNA, 21 bp, synthetic construct
  misc_feature 1..21: note = Description of Artificial Sequence: Synthetic oligonucleotide
  source 1..21: mol_type = other DNA
tcggtgacgggtggtcggggt

SEQ ID NO: 38477 - DNA, 21 bp, synthetic construct
  misc_feature 1..21: note = Description of Artificial Sequence: Synthetic oligonucleotide
  source 1..21: mol_type = other DNA
accacccaaagcagaagcctc

SEQ ID NO: 38478 - DNA, 21 bp, synthetic construct
  misc_feature 1..21: note = Description of Artificial Sequence: Synthetic oligonucleotide
  source 1..21: mol_type = other DNA
ctcaacagaggcaaacccgtc

SEQ ID NO: 38479 - DNA, 21 bp, synthetic construct
  misc_feature 1..21: note = Description of Artificial Sequence: Synthetic oligonucleotide
  source 1..21: mol_type = other DNA
agcagactcgaaaaaagcaac

SEQ ID NO: 38480 - DNA, 21 bp, synthetic construct
  misc_feature 1..21: note = Description of Artificial Sequence: Synthetic oligonucleotide
  source 1..21: mol_type = other DNA
agagtcagagccgacgacgac

SEQ ID NO: 38481 - DNA, 21 bp, synthetic construct
  misc_feature 1..21: note = Description of Artificial Sequence: Synthetic oligonucleotide
  source 1..21: mol_type = other DNA
gtcagcaccggcagcttcacc

SEQ ID NO: 38482 - DNA, 21 bp, synthetic construct
  misc_feature 1..21: note = Description of Artificial Sequence: Synthetic oligonucleotide
  source 1..21: mol_type = other DNA
agtggtgttgagcgggttaat

SEQ ID NO: 38483 - DNA, 21 bp, synthetic construct
  misc_feature 1..21: note = Description of Artificial Sequence: Synthetic oligonucleotide
  source 1..21: mol_type = other DNA
ccgtctaattctaagtgtggt

SEQ ID NO: 38484 - DNA, 21 bp, synthetic construct
  misc_feature 1..21: note = Description of Artificial Sequence: Synthetic oligonucleotide
  source 1..21: mol_type = other DNA
tatcatcttaattctcagtct

SEQ ID NO: 38485 - DNA, 21 bp, synthetic construct
  misc_feature 1..21: note = Description of Artificial Sequence: Synthetic oligonucleotide
  source 1..21: mol_type = other DNA
aatacttctacgaatggtatt

SEQ ID NO: 38486 - DNA, 21 bp, synthetic construct
  misc_feature 1..21: note = Description of Artificial Sequence: Synthetic oligonucleotide
  source 1..21: mol_type = other DNA
tcgcataataggacgaatgat

SEQ ID NO: 38487 - DNA, 21 bp, synthetic construct
  misc_feature 1..21: note = Description of Artificial Sequence: Synthetic oligonucleotide
  source 1..21: mol_type = other DNA
ggtagtcagagggcgcctggt

SEQ ID NO: 38488 - DNA, 21 bp, synthetic construct
  misc_feature 1..21: note = Description of Artificial Sequence: Synthetic oligonucleotide
  source 1..21: mol_type = other DNA
ttggggactagtactattttg

SEQ ID NO: 38489 - DNA, 21 bp, synthetic construct
  misc_feature 1..21: note = Description of Artificial Sequence: Synthetic oligonucleotide
  source 1..21: mol_type = other DNA
atgatgaatcggagtgctagt

SEQ ID NO: 38490 - DNA, 21 bp, synthetic construct
  misc_feature 1..21: note = Description of Artificial Sequence: Synthetic oligonucleotide
  source 1..21: mol_type = other DNA
tttgcgaatactgctaatagg

SEQ ID NO: 38491 - DNA, 21 bp, synthetic construct
  misc_feature 1..21: note = Description of Artificial Sequence: Synthetic oligonucleotide
  source 1..21: mol_type = other DNA
acttctaatagtaatattgcg

SEQ ID NO: 38492 - DNA, 21 bp, synthetic construct
  misc_feature 1..21: note = Description of Artificial Sequence: Synthetic oligonucleotide
  source 1..21: mol_type = other DNA
ctggataaggagcctaggggt

SEQ ID NO: 38493 - DNA, 21 bp, synthetic construct
  misc_feature 1..21: note = Description of Artificial Sequence: Synthetic oligonucleotide
  source 1..21: mol_type = other DNA
tacggcaaccccagacaagcc

SEQ ID NO: 38494 - DNA, 21 bp, synthetic construct
  misc_feature 1..21: note = Description of Artificial Sequence: Synthetic oligonucleotide
  source 1..21: mol_type = other DNA
atccaaagccccggcaacatg

SEQ ID NO: 38495 - DNA, 21 bp, synthetic construct
  misc_feature 1..21: note = Description of Artificial Sequence: Synthetic oligonucleotide
  source 1..21: mol_type = other DNA
gaccccgtcagaaaaaccagc

SEQ ID NO: 38496 - DNA, 21 bp, synthetic construct
  misc_feature 1..21: note = Description of Artificial Sequence: Synthetic oligonucleotide
  source 1..21: mol_type = other DNA
tgttgtactgtgcctttggtg

SEQ ID NO: 38497 - DNA, 21 bp, synthetic construct
  misc_feature 1..21: note = Description of Artificial Sequence: Synthetic oligonucleotide
  source 1..21: mol_type = other DNA
aagaatattggttctcatggg

SEQ ID NO: 38498 - DNA, 21 bp, synthetic construct
  misc_feature 1..21: note = Description of Artificial Sequence: Synthetic oligonucleotide
  source 1..21: mol_type = other DNA
gctgcttctatggagtatagt

SEQ ID NO: 38499 - DNA, 21 bp, synthetic construct
  misc_feature 1..21: note = Description of Artificial Sequence: Synthetic oligonucleotide
  source 1..21: mol_type = other DNA
agtaatgggactaagcgtcag

SEQ ID NO: 38500 - DNA, 21 bp, synthetic construct
  misc_feature 1..21: note = Description of Artificial Sequence: Synthetic oligonucleotide
  source 1..21: mol_type = other DNA
aacgtcgaaagcaaaagctgc

SEQ ID NO: 38501 - DNA, 21 bp, synthetic construct
  misc_feature 1..21: note = Description of Artificial Sequence: Synthetic oligonucleotide
  source 1..21: mol_type = other DNA
atgcttcctcagcatggtagg

SEQ ID NO: 38502 - DNA, 21 bp, synthetic construct
  misc_feature 1..21: note = Description of Artificial Sequence: Synthetic oligonucleotide
  source 1..21: mol_type = other DNA
acggggtctgggagtaatcat

SEQ ID NO: 38503 - DNA, 21 bp, synthetic construct
  misc_feature 1..21: note = Description of Artificial Sequence: Synthetic oligonucleotide
  source 1..21: mol_type = other DNA
cttaggaatggtattgcttct

SEQ ID NO: 38504 - DNA, 21 bp, synthetic construct
  misc_feature 1..21: note = Description of Artificial Sequence: Synthetic oligonucleotide
  source 1..21: mol_type = other DNA
atgagaagcggcacccacaac

SEQ ID NO: 38505 - DNA, 21 bp, synthetic construct
  misc_feature 1..21: note = Description of Artificial Sequence: Synthetic oligonucleotide
  source 1..21: mol_type = other DNA
acgtcgaatactaagcagggt

SEQ ID NO: 38506 - DNA, 21 bp, synthetic construct
  misc_feature 1..21: note = Description of Artificial Sequence: Synthetic oligonucleotide
  source 1..21: mol_type = other DNA
cctgggatggctggtcgtggg

SEQ ID NO: 38507 - DNA, 21 bp, synthetic construct
  misc_feature 1..21: note = Description of Artificial Sequence: Synthetic oligonucleotide
  source 1..21: mol_type = other DNA
cccagcaacagacaaatcgcc

SEQ ID NO: 38508 - DNA, 21 bp, synthetic construct
  misc_feature 1..21: note = Description of Artificial Sequence: Synthetic oligonucleotide
  source 1..21: mol_type = other DNA
gatggtcttcgtaattcgttg

SEQ ID NO: 38509 - DNA, 21 bp, synthetic construct
  misc_feature 1..21: note = Description of Artificial Sequence: Synthetic oligonucleotide
  source 1..21: mol_type = other DNA
ccgtcgacgccgacgattaag

SEQ ID NO: 38510 - DNA, 21 bp, synthetic construct
  misc_feature 1..21: note = Description of Artificial Sequence: Synthetic oligonucleotide
  source 1..21: mol_type = other DNA
gaggtgcatgctaagaataat

SEQ ID NO: 38511 - DNA, 21 bp, synthetic construct
  misc_feature 1..21: note = Description of Artificial Sequence: Synthetic oligonucleotide
  source 1..21: mol_type = other DNA
aataatgctcatcgggttgcg

SEQ ID NO: 38512 - DNA, 21 bp, synthetic construct
  misc_feature 1..21: note = Description of Artificial Sequence: Synthetic oligonucleotide
  source 1..21: mol_type = other DNA
aaagacaacacccccggcaga

SEQ ID NO: 38513 - DNA, 21 bp, synthetic construct
  misc_feature 1..21: note = Description of Artificial Sequence: Synthetic oligonucleotide
  source 1..21: mol_type = other DNA
tctcttggtcgtgatcatgct

SEQ ID NO: 38514 - DNA, 21 bp, synthetic construct
  misc_feature 1..21: note = Description of Artificial Sequence: Synthetic oligonucleotide
  source 1..21: mol_type = other DNA
actaatattcaggcgtctaag

SEQ ID NO: 38515 - DNA, 21 bp, synthetic construct
  misc_feature 1..21: note = Description of Artificial Sequence: Synthetic oligonucleotide
  source 1..21: mol_type = other DNA
caggggactcatactttgcgt

SEQ ID NO: 38516 - DNA, 21 bp, synthetic construct
  misc_feature 1..21: note = Description of Artificial Sequence: Synthetic oligonucleotide
  source 1..21: mol_type = other DNA
acgggttcggggacgattctt

SEQ ID NO: 38517 - DNA, 21 bp, synthetic construct
  misc_feature 1..21: note = Description of Artificial Sequence: Synthetic oligonucleotide
  source 1..21: mol_type = other DNA
gctcagcatgagcttcgtgct

SEQ ID NO: 38518 - DNA, 21 bp, synthetic construct
  misc_feature 1..21: note = Description of Artificial Sequence: Synthetic oligonucleotide
  source 1..21: mol_type = other DNA
catgttgatactaggcatgtg

SEQ ID NO: 38519 - DNA, 21 bp, synthetic construct
  misc_feature 1..21: note = Description of Artificial Sequence: Synthetic oligonucleotide
  source 1..21: mol_type = other DNA
tctgggggtaagtcggcgctt

SEQ ID NO: 38520 - DNA, 21 bp, synthetic construct
  misc_feature 1..21: note = Description of Artificial Sequence: Synthetic oligonucleotide
  source 1..21: mol_type = other DNA
atggctgggaatccgcatagt

SEQ ID NO: 38521 - DNA, 21 bp, synthetic construct
  misc_feature 1..21: note = Description of Artificial Sequence: Synthetic oligonucleotide
  source 1..21: mol_type = other DNA
aatagggtgcagccggcttcg

SEQ ID NO: 38522 - DNA, 21 bp, synthetic construct
  misc_feature 1..21: note = Description of Artificial Sequence: Synthetic oligonucleotide
  source 1..21: mol_type = other DNA
gaggctaaggctaatgggaag

SEQ ID NO: 38523 - DNA, 21 bp, synthetic construct
  misc_feature 1..21: note = Description of Artificial Sequence: Synthetic oligonucleotide
  source 1..21: mol_type = other DNA
ggcaccgtcagaaccctccac

SEQ ID NO: 38524 - DNA, 21 bp, synthetic construct
  misc_feature 1..21: note = Description of Artificial Sequence: Synthetic oligonucleotide
  source 1..21: mol_type = other DNA
cagacttcggctacgcagcgg

SEQ ID NO: 38525 - DNA, 21 bp, synthetic construct
  misc_feature 1..21: note = Description of Artificial Sequence: Synthetic oligonucleotide
  source 1..21: mol_type = other DNA
ccggggggtaagtcgcagttg

SEQ ID NO: 38526 - DNA, 21 bp, synthetic construct
  misc_feature 1..21: note = Description of Artificial Sequence: Synthetic oligonucleotide
  source 1..21: mol_type = other DNA
cgtacggtgccttcgagtctt

SEQ ID NO: 38527 - DNA, 21 bp, synthetic construct
  misc_feature 1..21: note = Description of Artificial Sequence: Synthetic oligonucleotide
  source 1..21: mol_type = other DNA
gtgctttcgtcttcgcctaag

SEQ ID NO: 38528 - DNA, 21 bp, synthetic construct
  misc_feature 1..21: note = Description of Artificial Sequence: Synthetic oligonucleotide
  source 1..21: mol_type = other DNA
tgcggcagaagcggcggcggc

SEQ ID NO: 38529 - DNA, 21 bp, synthetic construct
  misc_feature 1..21: note = Description of Artificial Sequence: Synthetic oligonucleotide
  source 1..21: mol_type = other DNA
cagaatagtaaggggtatgtg

SEQ ID NO: 38530 - DNA, 21 bp, synthetic construct
  misc_feature 1..21: note = Description of Artificial Sequence: Synthetic oligonucleotide
  source 1..21: mol_type = other DNA
taccaaaacaaaagcctcacc

SEQ ID NO: 38531 - DNA, 21 bp, synthetic construct
  misc_feature 1..21: note = Description of Artificial Sequence: Synthetic oligonucleotide
  source 1..21: mol_type = other DNA
accagcagaaccagctacgaa

SEQ ID NO: 38532 - DNA, 21 bp, synthetic construct
  misc_feature 1..21: note = Description of Artificial Sequence: Synthetic oligonucleotide
  source 1..21: mol_type = other DNA
atgcagactagtcagtcgact

SEQ ID NO: 38533 - DNA, 21 bp, synthetic construct
  misc_feature 1..21: note = Description of Artificial Sequence: Synthetic oligonucleotide
  source 1..21: mol_type = other DNA
aacggttgtggacagaatcaa

SEQ ID NO: 38534 - DNA, 21 bp, synthetic construct
  misc_feature 1..21: note = Description of Artificial Sequence: Synthetic oligonucleotide
  source 1..21: mol_type = other DNA
agttttcctcctggtaatgtt

SEQ ID NO: 38535 - DNA, 21 bp, synthetic construct
  misc_feature 1..21: note = Description of Artificial Sequence: Synthetic oligonucleotide
  source 1..21: mol_type = other DNA
ccgactggggcgcatgttacg

SEQ ID NO: 38536 - DNA, 21 bp, synthetic construct
  misc_feature 1..21: note = Description of Artificial Sequence: Synthetic oligonucleotide
  source 1..21: mol_type = other DNA
gacagcaaacaaaacctcacc

SEQ ID NO: 38537 - DNA, 21 bp, synthetic construct
  misc_feature 1..21: note = Description of Artificial Sequence: Synthetic oligonucleotide
  source 1..21: mol_type = other DNA
cttattcgtggtgggaataat

SEQ ID NO: 38538 - DNA, 21 bp, synthetic construct
  misc_feature 1..21: note = Description of Artificial Sequence: Synthetic oligonucleotide
  source 1..21: mol_type = other DNA
ggtttgaagaatgagcctgct

SEQ ID NO: 38539 - DNA, 21 bp, synthetic construct
  misc_feature 1..21: note = Description of Artificial Sequence: Synthetic oligonucleotide
  source 1..21: mol_type = other DNA
catgcttcgagggttaatatt

SEQ ID NO: 38540 - DNA, 21 bp, synthetic construct
  misc_feature 1..21: note = Description of Artificial Sequence: Synthetic oligonucleotide
  source 1..21: mol_type = other DNA
ttgaatctgaagcctattaat

SEQ ID NO: 38541 - DNA, 21 bp, synthetic construct
  misc_feature 1..21: note = Description of Artificial Sequence: Synthetic oligonucleotide
  source 1..21: mol_type = other DNA
acgacgcagactccgtataag

SEQ ID NO: 38542 - DNA, 21 bp, synthetic construct
  misc_feature 1..21: note = Description of Artificial Sequence: Synthetic oligonucleotide
  source 1..21: mol_type = other DNA
attgggttgggtaatacgcct

SEQ ID NO: 38543 - DNA, 21 bp, synthetic construct
  misc_feature 1..21: note = Description of Artificial Sequence: Synthetic oligonucleotide
  source 1..21: mol_type = other DNA
aactgcagcggccaaaaacaa

SEQ ID NO: 38544 - DNA, 21 bp, synthetic construct
  misc_feature 1..21: note = Description of Artificial Sequence: Synthetic oligonucleotide
  source 1..21: mol_type = other DNA
agccaagtcagccacagcgtc

SEQ ID NO: 38545 - DNA, 21 bp, synthetic construct
  misc_feature 1..21: note = Description of Artificial Sequence: Synthetic oligonucleotide
  source 1..21: mol_type = other DNA
tggaacaaaaccagcccccaa

SEQ ID NO: 38546 - DNA, 21 bp, synthetic construct
  misc_feature 1..21: note = Description of Artificial Sequence: Synthetic oligonucleotide
  source 1..21: mol_type = other DNA
caggggtctgggagtaatcat

SEQ ID NO: 38547 - DNA, 21 bp, synthetic construct
  misc_feature 1..21: note = Description of Artificial Sequence: Synthetic oligonucleotide
  source 1..21: mol_type = other DNA
gctctgaggaatcagagtcag

SEQ ID NO: 38548 - DNA, 21 bp, synthetic construct
  misc_feature 1..21: note = Description of Artificial Sequence: Synthetic oligonucleotide
  source 1..21: mol_type = other DNA
cccgccgaccacggcaaactc

SEQ ID NO: 38549 - DNA, 21 bp, synthetic construct
  misc_feature 1..21: note = Description of Artificial Sequence: Synthetic oligonucleotide
  source 1..21: mol_type = other DNA
gattctattggtagttctaag

SEQ ID NO: 38550 - DNA, 21 bp, synthetic construct
  misc_feature 1..21: note = Description of Artificial Sequence: Synthetic oligonucleotide
  source 1..21: mol_type = other DNA
aacggcatcaccaaaagcagc

SEQ ID NO: 38551 - DNA, 21 bp, synthetic construct
  misc_feature 1..21: note = Description of Artificial Sequence: Synthetic oligonucleotide
  source 1..21: mol_type = other DNA
ccgttgcaggcgactggtaag

SEQ ID NO: 38552 - DNA, 21 bp, synthetic construct
  misc_feature 1..21: note = Description of Artificial Sequence: Synthetic oligonucleotide
  source 1..21: mol_type = other DNA
tctagggtgcgtgatagtcat

SEQ ID NO: 38553 - DNA, 21 bp, synthetic construct
  misc_feature 1..21: note = Description of Artificial Sequence: Synthetic oligonucleotide
  source 1..21: mol_type = other DNA
tcttatgggaaggagagtagt

SEQ ID NO: 38554 - DNA, 21 bp, synthetic construct
  misc_feature 1..21: note = Description of Artificial Sequence: Synthetic oligonucleotide
  source 1..21: mol_type = other DNA
agactcgtcgacagccacaaa

SEQ ID NO: 38555 - DNA, 21 bp, synthetic construct
  misc_feature 1..21: note = Description of Artificial Sequence: Synthetic oligonucleotide
  source 1..21: mol_type = other DNA
tacgtcagcagcggcaaagcc

SEQ ID NO: 38556 - DNA, 21 bp, synthetic construct
  misc_feature 1..21: note = Description of Artificial Sequence: Synthetic oligonucleotide
  source 1..21: mol_type = other DNA
cagagtacggttgagtcgagg

SEQ ID NO: 38557 - DNA, 21 bp, synthetic construct
  misc_feature 1..21: note = Description of Artificial Sequence: Synthetic oligonucleotide
  source 1..21: mol_type = other DNA
tcttcgtctacgtcgcctagg

SEQ ID NO: 38558 - DNA, 21 bp, synthetic construct
  misc_feature 1..21: note = Description of Artificial Sequence: Synthetic oligonucleotide
  source 1..21: mol_type = other DNA
cgtcctggggggaaggatggg

SEQ ID NO: 38559 - DNA, 21 bp, synthetic construct
  misc_feature 1..21: note = Description of Artificial Sequence: Synthetic oligonucleotide
  source 1..21: mol_type = other DNA
agccccaccagacccatgaac

SEQ ID NO: 38560 - DNA, 21 bp, synthetic construct
  misc_feature 1..21: note = Description of Artificial Sequence: Synthetic oligonucleotide
  source 1..21: mol_type = other DNA
tctagtcagatgcatgggtcg

SEQ ID NO: 38561 - DNA, 21 bp, synthetic construct
  misc_feature 1..21: note = Description of Artificial Sequence: Synthetic oligonucleotide
  source 1..21: mol_type = other DNA
accggcagagcccccagcagc

SEQ ID NO: 38562 - DNA, 21 bp, synthetic construct
  misc_feature 1..21: note = Description of Artificial Sequence: Synthetic oligonucleotide
  source 1..21: mol_type = other DNA
caaagcaacaccagccccacc

SEQ ID NO: 38563 - DNA, 21 bp, synthetic construct
  misc_feature 1..21: note = Description of Artificial Sequence: Synthetic oligonucleotide
  source 1..21: mol_type = other DNA
ggtactatttcgcatatgacg

SEQ ID NO: 38564 - DNA, 21 bp, synthetic construct
  misc_feature 1..21: note = Description of Artificial Sequence: Synthetic oligonucleotide
  source 1..21: mol_type = other DNA
attcctgcgtcgtcgtcgggt

SEQ ID NO: 38565 - DNA, 21 bp, synthetic construct
  misc_feature 1..21: note = Description of Artificial Sequence: Synthetic oligonucleotide
  source 1..21: mol_type = other DNA
ttggcgactgcgaatagtcgt

SEQ ID NO: 38566 - DNA, 21 bp, synthetic construct
  misc_feature 1..21: note = Description of Artificial Sequence: Synthetic oligonucleotide
  source 1..21: mol_type = other DNA
gggactgcggatcggcatttg

SEQ ID NO: 38567 - DNA, 21 bp, synthetic construct
  misc_feature 1..21: note = Description of Artificial Sequence: Synthetic oligonucleotide
  source 1..21: mol_type = other DNA
acccaccaaagcagcaccagc

SEQ ID NO: 38568 - DNA, 21 bp, synthetic construct
  misc_feature 1..21: note = Description of Artificial Sequence: Synthetic oligonucleotide
  source 1..21: mol_type = other DNA
tctcctaataatcggggtatg

SEQ ID NO: 38569 - DNA, 21 bp, synthetic construct
  misc_feature 1..21: note = Description of Artificial Sequence: Synthetic oligonucleotide
  source 1..21: mol_type = other DNA
ggcggcggcaccagcttcggc

SEQ ID NO: 38570 - DNA, 21 bp, synthetic construct
  misc_feature 1..21: note = Description of Artificial Sequence: Synthetic oligonucleotide
  source 1..21: mol_type = other DNA
agaccccacgacaacgacaac

SEQ ID NO: 38571 - DNA, 21 bp, synthetic construct
  misc_feature 1..21: note = Description of Artificial Sequence: Synthetic oligonucleotide
  source 1..21: mol_type = other DNA
tatcctaatggtaagtcttcg

SEQ ID NO: 38572 - DNA, 21 bp, synthetic construct
  misc_feature 1..21: note = Description of Artificial Sequence: Synthetic oligonucleotide
  source 1..21: mol_type = other DNA
atcagaagcaaagaaagcgaa

SEQ ID NO: 38573 - DNA, 21 bp, synthetic construct
  misc_feature 1..21: note = Description of Artificial Sequence: Synthetic oligonucleotide
  source 1..21: mol_type = other DNA
ggccaagtcaaacaagccctc

SEQ ID NO: 38574 - DNA, 21 bp, synthetic construct
  misc_feature 1..21: note = Description of Artificial Sequence: Synthetic oligonucleotide
  source 1..21: mol_type = other DNA
aagcagccggtttctacgcat

SEQ ID NO: 38575 - DNA, 21 bp, synthetic construct
  misc_feature 1..21: note = Description of Artificial Sequence: Synthetic oligonucleotide
  source 1..21: mol_type = other DNA
actcagcagaatgggagtaat

SEQ ID NO: 38576 - DNA, 21 bp, synthetic construct
  misc_feature 1..21: note = Description of Artificial Sequence: Synthetic oligonucleotide
  source 1..21: mol_type = other DNA
gggggtgataataagcttacg

SEQ ID NO: 38577 - DNA, 21 bp, synthetic construct
  misc_feature 1..21: note = Description of Artificial Sequence: Synthetic oligonucleotide
  source 1..21: mol_type = other DNA
tacagcggcggcaacatgagc

SEQ ID NO: 38578 - DNA, 21 bp, synthetic construct
  misc_feature 1..21: note = Description of Artificial Sequence: Synthetic oligonucleotide
  source 1..21: mol_type = other DNA
tcgcatgatagtcgtgtggct

SEQ ID NO: 38579 - DNA, 21 bp, synthetic construct
  misc_feature 1..21: note = Description of Artificial Sequence: Synthetic oligonucleotide
  source 1..21: mol_type = other DNA
caatacaaccaagccggcctc

SEQ ID NO: 38580 - DNA, 21 bp, synthetic construct
  misc_feature 1..21: note = Description of Artificial Sequence: Synthetic oligonucleotide
  source 1..21: mol_type = other DNA
tctaattcggcgtcgtatggt

SEQ ID NO: 38581 - DNA, 21 bp, synthetic construct
  misc_feature 1..21: note = Description of Artificial Sequence: Synthetic oligonucleotide
  source 1..21: mol_type = other DNA
tttacggttactgggctgagt

SEQ ID NO: 38582 - DNA, 21 bp, synthetic construct
  misc_feature 1..21: note = Description of Artificial Sequence: Synthetic oligonucleotide
  source 1..21: mol_type = other DNA
catggtcggacttcggttttg

SEQ ID NO: 38583 - DNA, 21 bp, synthetic construct
  misc_feature 1..21: note = Description of Artificial Sequence: Synthetic oligonucleotide
  source 1..21: mol_type = other DNA
atgggtaatgcgggtgtgcgg

SEQ ID NO: 38584 - DNA, 21 bp, synthetic construct
  misc_feature 1..21: note = Description of Artificial Sequence: Synthetic oligonucleotide
  source 1..21: mol_type = other DNA
gattgtgtttcgcggtgtaag

SEQ ID NO: 38585 - DNA, 21 bp, synthetic construct
  misc_feature 1..21: note = Description of Artificial Sequence: Synthetic oligonucleotide
  source 1..21: mol_type = other DNA
ggtgtgaatattcatgcgtct

SEQ ID NO: 38586 - DNA, 21 bp, synthetic construct
  misc_feature 1..21: note = Description of Artificial Sequence: Synthetic oligonucleotide
  source 1..21: mol_type = other DNA
agaaacagcgccagcatcttc

SEQ ID NO: 38587 - DNA, 21 bp, synthetic construct
  misc_feature 1..21: note = Description of Artificial Sequence: Synthetic oligonucleotide
  source 1..21: mol_type = other DNA
caggcgaatactagtacggat

SEQ ID NO: 38588 - DNA, 21 bp, synthetic construct
  misc_feature 1..21: note = Description of Artificial Sequence: Synthetic oligonucleotide
  source 1..21: mol_type = other DNA
atcgccaacgcccactacaac

SEQ ID NO: 38589 - DNA, 21 bp, synthetic construct
  misc_feature 1..21: note = Description of Artificial Sequence: Synthetic oligonucleotide
  source 1..21: mol_type = other DNA
acgacgactactcgtccgagt

SEQ ID NO: 38590 - DNA, 21 bp, synthetic construct
  misc_feature 1..21: note = Description of Artificial Sequence: Synthetic oligonucleotide
  source 1..21: mol_type = other DNA
gtgctgaatgctaagtcgtct

SEQ ID NO: 38591 - DNA, 21 bp, synthetic construct
  misc_feature 1..21: note = Description of Artificial Sequence: Synthetic oligonucleotide
  source 1..21: mol_type = other DNA
cctggtcagagtacttctagt

SEQ ID NO: 38592 - DNA, 21 bp, synthetic construct
  misc_feature 1..21: note = Description of Artificial Sequence: Synthetic oligonucleotide
  source 1..21: mol_type = other DNA
ggtgatgctggtagttttagt

SEQ ID NO: 38593 - DNA, 21 bp, synthetic construct
  misc_feature 1..21: note = Description of Artificial Sequence: Synthetic oligonucleotide
  source 1..21: mol_type = other DNA
gtccaaggcagcctccccagc

SEQ ID NO: 38594 - DNA, 21 bp, synthetic construct
  misc_feature 1..21: note = Description of Artificial Sequence: Synthetic oligonucleotide
  source 1..21: mol_type = other DNA
gctcatcgtaatatttcttcg

SEQ ID NO: 38595 - DNA, 21 bp, synthetic construct
  misc_feature 1..21: note = Description of Artificial Sequence: Synthetic oligonucleotide
  source 1..21: mol_type = other DNA
gttgggaataataatcgtctg

SEQ ID NO: 38596 - DNA, 21 bp, synthetic construct
  misc_feature 1..21: note = Description of Artificial Sequence: Synthetic oligonucleotide
  source 1..21: mol_type = other DNA
ccccaaagcagaaaaggcgaa

SEQ ID NO: 38597 - DNA, 21 bp, synthetic construct
  misc_feature 1..21: note = Description of Artificial Sequence: Synthetic oligonucleotide
  source 1..21: mol_type = other DNA
atcggcagcggccaaaaccaa

SEQ ID NO: 38598 - DNA, 21 bp, synthetic construct
  misc_feature 1..21: note = Description of Artificial Sequence: Synthetic oligonucleotide
  source 1..21: mol_type = other DNA
cggattcctaataatccgagt

SEQ ID NO: 38599 - DNA, 21 bp, synthetic construct
  misc_feature 1..21: note = Description of Artificial Sequence: Synthetic oligonucleotide
  source 1..21: mol_type = other DNA
aagaatcaggcgccgttgctt

SEQ ID NO: 38600 - DNA, 21 bp, synthetic construct
  misc_feature 1..21: note = Description of Artificial Sequence: Synthetic oligonucleotide
  source 1..21: mol_type = other DNA
tcttcgagggcttctcaggat

SEQ ID NO: 38601 - DNA, 21 bp, synthetic construct
  misc_feature 1..21: note = Description of Artificial Sequence: Synthetic oligonucleotide
  source 1..21: mol_type = other DNA
cgtacgggtcgtgaggttgat

SEQ ID NO: 38602 - DNA, 21 bp, synthetic construct
  misc_feature 1..21: note = Description of Artificial Sequence: Synthetic oligonucleotide
  source 1..21: mol_type = other DNA
aacaacgtccccctcatcaaa

SEQ ID NO: 38603 - DNA, 21 bp, synthetic construct
  misc_feature 1..21: note = Description of Artificial Sequence: Synthetic oligonucleotide
  source 1..21: mol_type = other DNA
tatggttcgaatacgccgact

SEQ ID NO: 38604 - DNA, 21 bp, synthetic construct
  misc_feature 1..21: note = Description of Artificial Sequence: Synthetic oligonucleotide
  source 1..21: mol_type = other DNA
aggcctagtagtgtgaaggat

SEQ ID NO: 38605 - DNA, 21 bp, synthetic construct
  misc_feature 1..21: note = Description of Artificial Sequence: Synthetic oligonucleotide
  source 1..21: mol_type = other DNA
tacagcagaacccaacaaagc

SEQ ID NO: 38606 - DNA, 21 bp, synthetic construct
  misc_feature 1..21: note = Description of Artificial Sequence: Synthetic oligonucleotide
  source 1..21: mol_type = other DNA
cgggatgttggttctgctgct

SEQ ID NO: 38607 - DNA, 21 bp, synthetic construct
  misc_feature 1..21: note = Description of Artificial Sequence: Synthetic oligonucleotide
  source 1..21: mol_type = other DNA
caaggccaaaacagaaccgtc

SEQ ID NO: 38608 - DNA, 21 bp, synthetic construct
  misc_feature 1..21: note = Description of Artificial Sequence: Synthetic oligonucleotide
  source 1..21: mol_type = other DNA
agccaaagcagccccgtcgcc

SEQ ID NO: 38609 - DNA, 21 bp, synthetic construct
  misc_feature 1..21: note = Description of Artificial Sequence: Synthetic oligonucleotide
  source 1..21: mol_type = other DNA
agcacccacgaccacagcaga

SEQ ID NO: 38610 - DNA, 21 bp, synthetic construct
  misc_feature 1..21: note = Description of Artificial Sequence: Synthetic oligonucleotide
  source 1..21: mol_type = other DNA
cgtaatgttagtggtatgaat

SEQ ID NO: 38611 - DNA, 21 bp, synthetic construct
  misc_feature 1..21: note = Description of Artificial Sequence: Synthetic oligonucleotide
  source 1..21: mol_type = other DNA
attagggcgaaggagtctgcg

SEQ ID NO: 38612 - DNA, 21 bp, synthetic construct
  misc_feature 1..21: note = Description of Artificial Sequence: Synthetic oligonucleotide
  source 1..21: mol_type = other DNA
cacgccaacagccccgccacc

SEQ ID NO: 38613 - DNA, 21 bp, synthetic construct
  misc_feature 1..21: note = Description of Artificial Sequence: Synthetic oligonucleotide
  source 1..21: mol_type = other DNA
agaatgaccaccatgcaagcc

SEQ ID NO: 38614 - DNA, 21 bp, synthetic construct
  misc_feature 1..21: note = Description of Artificial Sequence: Synthetic oligonucleotide
  source 1..21: mol_type = other DNA
agtggtacgactcggactctg

SEQ ID NO: 38615 - DNA, 21 bp, synthetic construct
  misc_feature 1..21: note = Description of Artificial Sequence: Synthetic oligonucleotide
  source 1..21: mol_type = other DNA
gggcttgatcatcttcggacg

SEQ ID NO: 38616 - DNA, 21 bp, synthetic construct
  misc_feature 1..21: note = Description of Artificial Sequence: Synthetic oligonucleotide
  source 1..21: mol_type = other DNA
ctcagcctcaacaaaagccaa

SEQ ID NO: 38617 - DNA, 21 bp, synthetic construct
  misc_feature 1..21: note = Description of Artificial Sequence: Synthetic oligonucleotide
  source 1..21: mol_type = other DNA
ggcgccgccgtccaagccaac

SEQ ID NO: 38618 - DNA, 21 bp, synthetic construct
  misc_feature 1..21: note = Description of Artificial Sequence: Synthetic oligonucleotide
  source 1..21: mol_type = other DNA
ttcaacagcaacagagacagc

SEQ ID NO: 38619 - DNA, 21 bp, synthetic construct
  misc_feature 1..21: note = Description of Artificial Sequence: Synthetic oligonucleotide
  source 1..21: mol_type = other DNA
gtgcatacgggtcagaatggg

SEQ ID NO: 38620 - DNA, 21 bp, synthetic construct
  misc_feature 1..21: note = Description of Artificial Sequence: Synthetic oligonucleotide
  source 1..21: mol_type = other DNA
gaaagcaacagaagccaagtc

SEQ ID NO: 38621 - DNA, 21 bp, synthetic construct
  misc_feature 1..21: note = Description of Artificial Sequence: Synthetic oligonucleotide
  source 1..21: mol_type = other DNA
gctggtacgaattctaggcag

SEQ ID NO: 38622 - DNA, 21 bp, synthetic construct
  misc_feature 1..21: note = Description of Artificial Sequence: Synthetic oligonucleotide
  source 1..21: mol_type = other DNA
agtgctgttgggaaggcgagt

SEQ ID NO: 38623 - DNA, 21 bp, synthetic construct
  misc_feature 1..21: note = Description of Artificial Sequence: Synthetic oligonucleotide
  source 1..21: mol_type = other DNA
accgtcctcggcgccagaggc

SEQ ID NO: 38624 - DNA, 21 bp, synthetic construct
  misc_feature 1..21: note = Description of Artificial Sequence: Synthetic oligonucleotide
  source 1..21: mol_type = other DNA
aacagacaaagcagccccacc

SEQ ID NO: 38625 - DNA, 21 bp, synthetic construct
  misc_feature 1..21: note = Description of Artificial Sequence: Synthetic oligonucleotide
  source 1..21: mol_type = other DNA
atgaacaccagcagaagcagc

SEQ ID NO: 38626 - DNA, 21 bp, synthetic construct
  misc_feature 1..21: note = Description of Artificial Sequence: Synthetic oligonucleotide
  source 1..21: mol_type = other DNA
gcgaatggtactaagtctagt

SEQ ID NO: 38627 - DNA, 21 bp, synthetic construct
  misc_feature 1..21: note = Description of Artificial Sequence: Synthetic oligonucleotide
  source 1..21: mol_type = other DNA
agtccgcttcagtctattgtt

SEQ ID NO: 38628 - DNA, 21 bp, synthetic construct
  misc_feature 1..21: note = Description of Artificial Sequence: Synthetic oligonucleotide
  source 1..21: mol_type = other DNA
tacagagtcggcagcatcagc

SEQ ID NO: 38629 - DNA, 21 bp, synthetic construct
  misc_feature 1..21: note = Description of Artificial Sequence: Synthetic oligonucleotide
  source 1..21: mol_type = other DNA
aattctgggcattcgcatgat

SEQ ID NO: 38630 - DNA, 21 bp, synthetic construct
  misc_feature 1..21: note = Description of Artificial Sequence: Synthetic oligonucleotide
  source 1..21: mol_type = other DNA
caaaacagaaacaccgtcggc

SEQ ID NO: 38631 - DNA, 21 bp, synthetic construct
  misc_feature 1..21: note = Description of Artificial Sequence: Synthetic oligonucleotide
  source 1..21: mol_type = other DNA
cctacgaaggcgaatgttacg

SEQ ID NO: 38632 - DNA, 21 bp, synthetic construct
  misc_feature 1..21: note = Description of Artificial Sequence: Synthetic oligonucleotide
  source 1..21: mol_type = other DNA
ttcagagtcaccggcagcacc

SEQ ID NO: 38633 - DNA, 21 bp, synthetic construct
  misc_feature 1..21: note = Description of Artificial Sequence: Synthetic oligonucleotide
  source 1..21: mol_type = other DNA
atcaccagcggcagcaccaga

SEQ ID NO: 38634 - DNA, 21 bp, synthetic construct
  misc_feature 1..21: note = Description of Artificial Sequence: Synthetic oligonucleotide
  source 1..21: mol_type = other DNA
tctccgacgagtcctatgaat

SEQ ID NO: 38635 - DNA, 21 bp, synthetic construct
  misc_feature 1..21: note = Description of Artificial Sequence: Synthetic oligonucleotide
  source 1..21: mol_type = other DNA
gagctggctgcgccttctaag

SEQ ID NO: 38636 - DNA, 21 bp, synthetic construct
  misc_feature 1..21: note = Description of Artificial Sequence: Synthetic oligonucleotide
  source 1..21: mol_type = other DNA
ccccccaacctcaaactcagc

SEQ ID NO: 38637 - DNA, 21 bp, synthetic construct
  misc_feature 1..21: note = Description of Artificial Sequence: Synthetic oligonucleotide
  source 1..21: mol_type = other DNA
aatagtaattcgcatggttct

SEQ ID NO: 38638 - DNA, 21 bp, synthetic construct
  misc_feature 1..21: note = Description of Artificial Sequence: Synthetic oligonucleotide
  source 1..21: mol_type = other DNA
aatctgggtcagaatctgtct

SEQ ID NO: 38639 - DNA, 21 bp, synthetic construct
  misc_feature 1..21: note = Description of Artificial Sequence: Synthetic oligonucleotide
  source 1..21: mol_type = other DNA
aatcttggggctactgctagt

SEQ ID NO: 38640 - DNA, 21 bp, synthetic construct
  misc_feature 1..21: note = Description of Artificial Sequence: Synthetic oligonucleotide
  source 1..21: mol_type = other DNA
aacatgcccatgagaagcggc

SEQ ID NO: 38641 - DNA, 21 bp, synthetic construct
  misc_feature 1..21: note = Description of Artificial Sequence: Synthetic oligonucleotide
  source 1..21: mol_type = other DNA
agtcttcctttggcgattaat

SEQ ID NO: 38642 - DNA, 21 bp, synthetic construct
  misc_feature 1..21: note = Description of Artificial Sequence: Synthetic oligonucleotide
  source 1..21: mol_type = other DNA
cctcagaataatcaggcgcat

SEQ ID NO: 38643 - DNA, 21 bp, synthetic construct
  misc_feature 1..21: note = Description of Artificial Sequence: Synthetic oligonucleotide
  source 1..21: mol_type = other DNA
agcagcgaagccgccaccaga

SEQ ID NO: 38644 - DNA, 21 bp, synthetic construct
  misc_feature 1..21: note = Description of Artificial Sequence: Synthetic oligonucleotide
  source 1..21: mol_type = other DNA
tctgtgagttctcctagggat

SEQ ID NO: 38645 - DNA, 21 bp, synthetic construct
  misc_feature 1..21: note = Description of Artificial Sequence: Synthetic oligonucleotide
  source 1..21: mol_type = other DNA
cccggctacggcagcaaccac

SEQ ID NO: 38646 - DNA, 21 bp, synthetic construct
  misc_feature 1..21: note = Description of Artificial Sequence: Synthetic oligonucleotide
  source 1..21: mol_type = other DNA
aagattccgaattatgatcgt

SEQ ID NO: 38647 - DNA, 21 bp, synthetic construct
  misc_feature 1..21: note = Description of Artificial Sequence: Synthetic oligonucleotide
  source 1..21: mol_type = other DNA
cctcttcagacgagtaggact

SEQ ID NO: 38648 - DNA, 21 bp, synthetic construct
  misc_feature 1..21: note = Description of Artificial Sequence: Synthetic oligonucleotide
  source 1..21: mol_type = other DNA
agagaccccaaagccggcgtc

SEQ ID NO: 38649 - DNA, 21 bp, synthetic construct
  misc_feature 1..21: note = Description of Artificial Sequence: Synthetic oligonucleotide
  source 1..21: mol_type = other DNA
aatgcgactgctaatgggcag

SEQ ID NO: 38650 - DNA, 21 bp, synthetic construct
  misc_feature 1..21: note = Description of Artificial Sequence: Synthetic oligonucleotide
  source 1..21: mol_type = other DNA
actgggtcggggaggttgctt

SEQ ID NO: 38651 - DNA, 21 bp, synthetic construct
  misc_feature 1..21: note = Description of Artificial Sequence: Synthetic oligonucleotide
  source 1..21: mol_type = other DNA
attactggttctttgagtaag

SEQ ID NO: 38652 - DNA, 21 bp, synthetic construct
  misc_feature 1..21: note = Description of Artificial Sequence: Synthetic oligonucleotide
  source 1..21: mol_type = other DNA
tggtctcttggttcgcagtcg

SEQ ID NO: 38653 - DNA, 21 bp, synthetic construct
  misc_feature 1..21: note = Description of Artificial Sequence: Synthetic oligonucleotide
  source 1..21: mol_type = other DNA
acccccacccccgtcaaccaa

SEQ ID NO: 38654 - DNA, 21 bp, synthetic construct
  misc_feature 1..21: note = Description of Artificial Sequence: Synthetic oligonucleotide
  source 1..21: mol_type = other DNA
tcggatatgtctggtcagcgt

SEQ ID NO: 38655 - DNA, 21 bp, synthetic construct
  misc_feature 1..21: note = Description of Artificial Sequence: Synthetic oligonucleotide
  source 1..21: mol_type = other DNA
cccggcgacagcggcaaagtc

SEQ ID NO: 38656 - DNA, 21 bp, synthetic construct
  misc_feature 1..21: note = Description of Artificial Sequence: Synthetic oligonucleotide
  source 1..21: mol_type = other DNA
ggcgtcaacagaatccccgcc

SEQ ID NO: 38657 - DNA, 21 bp, synthetic construct
  misc_feature 1..21: note = Description of Artificial Sequence: Synthetic oligonucleotide
  source 1..21: mol_type = other DNA
gagcgtgctaaggggtctagt

SEQ ID NO: 38658 - DNA, 21 bp, synthetic construct
  misc_feature 1..21: note = Description of Artificial Sequence: Synthetic oligonucleotide
  source 1..21: mol_type = other DNA
gctgtgtctaagggtggtcct

SEQ ID NO: 38659 - DNA, 21 bp, synthetic construct
  misc_feature 1..21: note = Description of Artificial Sequence: Synthetic oligonucleotide
  source 1..21: mol_type = other DNA
ggcaccaaccccggcaccctc

SEQ ID NO: 38660 - DNA, 21 bp, synthetic construct
  misc_feature 1..21: note = Description of Artificial Sequence: Synthetic oligonucleotide
  source 1..21: mol_type = other DNA
gcctacggcaaaggcagcagc

SEQ ID NO: 38661 - DNA, 21 bp, synthetic construct
  misc_feature 1..21: note = Description of Artificial Sequence: Synthetic oligonucleotide
  source 1..21: mol_type = other DNA
ctttctattaagggtgcttcg

SEQ ID NO: 38662 - DNA, 21 bp, synthetic construct
  misc_feature 1..21: note = Description of Artificial Sequence: Synthetic oligonucleotide
  source 1..21: mol_type = other DNA
tctcagtggcagtcgtcttct

SEQ ID NO: 38663 - DNA, 21 bp, synthetic construct
  misc_feature 1..21: note = Description of Artificial Sequence: Synthetic oligonucleotide
  source 1..21: mol_type = other DNA
agcaacaccagagacatcaaa

SEQ ID NO: 38664 - DNA, 21 bp, synthetic construct
  misc_feature 1..21: note = Description of Artificial Sequence: Synthetic oligonucleotide
  source 1..21: mol_type = other DNA
aattctagtcataattcgcct

SEQ ID NO: 38665 - DNA, 21 bp, synthetic construct
  misc_feature 1..21: note = Description of Artificial Sequence: Synthetic oligonucleotide
  source 1..21: mol_type = other DNA
accacccacagcagcatcaac

SEQ ID NO: 38666 - DNA, 21 bp, synthetic construct
  misc_feature 1..21: note = Description of Artificial Sequence: Synthetic oligonucleotide
  source 1..21: mol_type = other DNA
tttgctcgtagtgctagttct

SEQ ID NO: 38667 - DNA, 21 bp, synthetic construct
  misc_feature 1..21: note = Description of Artificial Sequence: Synthetic oligonucleotide
  source 1..21: mol_type = other DNA
aagcagactatgggtactctt

SEQ ID NO: 38668 - DNA, 21 bp, synthetic construct
  misc_feature 1..21: note = Description of Artificial Sequence: Synthetic oligonucleotide
  source 1..21: mol_type = other DNA
gccatgagcgacacctaccac

SEQ ID NO: 38669 - DNA, 21 bp, synthetic construct
  misc_feature 1..21: note = Description of Artificial Sequence: Synthetic oligonucleotide
  source 1..21: mol_type = other DNA
ccgagtagtaatcatgttaag

SEQ ID NO: 38670 - DNA, 21 bp, synthetic construct
  misc_feature 1..21: note = Description of Artificial Sequence: Synthetic oligonucleotide
  source 1..21: mol_type = other DNA
gtcagcgccggcgccagaagc

SEQ ID NO: 38671 - DNA, 21 bp, synthetic construct
  misc_feature 1..21: note = Description of Artificial Sequence: Synthetic oligonucleotide
  source 1..21: mol_type = other DNA
caaaacggcgacgccatgggc

SEQ ID NO: 38672 - DNA, 21 bp, synthetic construct
  misc_feature 1..21: note = Description of Artificial Sequence: Synthetic oligonucleotide
  source 1..21: mol_type = other DNA
ttttcgcgtagtccggcggtg

SEQ ID NO: 38673 - DNA, 21 bp, synthetic construct
  misc_feature 1..21: note = Description of Artificial Sequence: Synthetic oligonucleotide
  source 1..21: mol_type = other DNA
agtgatgtgcgtgctcggagt

SEQ ID NO: 38674 - DNA, 21 bp, synthetic construct
  misc_feature 1..21: note = Description of Artificial Sequence: Synthetic oligonucleotide
  source 1..21: mol_type = other DNA
cccctcagaatcggcacccaa

SEQ ID NO: 38675 - DNA, 21 bp, synthetic construct
  misc_feature 1..21: note = Description of Artificial Sequence: Synthetic oligonucleotide
  source 1..21: mol_type = other DNA
ctccccgccagaagcgacggc

SEQ ID NO: 38676 - DNA, 21 bp, synthetic construct
  misc_feature 1..21: note = Description of Artificial Sequence: Synthetic oligonucleotide
  source 1..21: mol_type = other DNA
gtcctcaaaagcaacggctac

SEQ ID NO: 38677 - DNA, 21 bp, synthetic construct
  misc_feature 1..21: note = Description of Artificial Sequence: Synthetic oligonucleotide
  source 1..21: mol_type = other DNA
accaccaacagaagcgacaga

SEQ ID NO: 38678 - DNA, 21 bp, synthetic construct
  misc_feature 1..21: note = Description of Artificial Sequence: Synthetic oligonucleotide
  source 1..21: mol_type = other DNA
agccacagcagcagccacaaa

SEQ ID NO: 38679 - DNA, 21 bp, synthetic construct
  misc_feature 1..21: note = Description of Artificial Sequence: Synthetic oligonucleotide
  source 1..21: mol_type = other DNA
gcgtgtcagcctcagtcgttg

SEQ ID NO: 38680 - DNA, 21 bp, synthetic construct
  misc_feature 1..21: note = Description of Artificial Sequence: Synthetic oligonucleotide
  source 1..21: mol_type = other DNA
agaaacaacaacacccccggc

SEQ ID NO: 38681 - DNA, 21 bp, synthetic construct
  misc_feature 1..21: note = Description of Artificial Sequence: Synthetic oligonucleotide
  source 1..21: mol_type = other DNA
ttcgtcagcagcgacctcaga

SEQ ID NO: 38682 - DNA, 21 bp, synthetic construct
  misc_feature 1..21: note = Description of Artificial Sequence: Synthetic oligonucleotide
  source 1..21: mol_type = other DNA
gtgccgttggctgggaggccg

SEQ ID NO: 38683 - DNA, 21 bp, synthetic construct
  misc_feature 1..21: note = Description of Artificial Sequence: Synthetic oligonucleotide
  source 1..21: mol_type = other DNA
tattttaatagtccttcgaat

SEQ ID NO: 38684 - DNA, 21 bp, synthetic construct
  misc_feature 1..21: note = Description of Artificial Sequence: Synthetic oligonucleotide
  source 1..21: mol_type = other DNA
ctcggcagcatcaaccccgtc

SEQ ID NO: 38685 - DNA, 21 bp, synthetic construct
  misc_feature 1..21: note = Description of Artificial Sequence: Synthetic oligonucleotide
  source 1..21: mol_type = other DNA
acggttgttcagccgcatgcg

SEQ ID NO: 38686 - DNA, 21 bp, synthetic construct
  misc_feature 1..21: note = Description of Artificial Sequence: Synthetic oligonucleotide
  source 1..21: mol_type = other DNA
gtcagcaccggcaaaagcgtc

SEQ ID NO: 38687 - DNA, 21 bp, synthetic construct
  misc_feature 1..21: note = Description of Artificial Sequence: Synthetic oligonucleotide
  source 1..21: mol_type = other DNA
ggggggtcgaattctaggctg

SEQ ID NO: 38688 - DNA, 21 bp, synthetic construct
  misc_feature 1..21: note = Description of Artificial Sequence: Synthetic oligonucleotide
  source 1..21: mol_type = other DNA
tcgagtccgactaatatggcg

SEQ ID NO: 38689 - DNA, 21 bp, synthetic construct
  misc_feature 1..21: note = Description of Artificial Sequence: Synthetic oligonucleotide
  source 1..21: mol_type = other DNA
catagtacgtctttgtctaag

SEQ ID NO: 38690 - DNA, 21 bp, synthetic construct
  misc_feature 1..21: note = Description of Artificial Sequence: Synthetic oligonucleotide
  source 1..21: mol_type = other DNA
cccgtcctcaacaaagccacc

SEQ ID NO: 38691 - DNA, 21 bp, synthetic construct
  misc_feature 1..21: note = Description of Artificial Sequence: Synthetic oligonucleotide
  source 1..21: mol_type = other DNA
gctgttaatactaaggcgctt

SEQ ID NO: 38692 - DNA, 21 bp, synthetic construct
  misc_feature 1..21: note = Description of Artificial Sequence: Synthetic oligonucleotide
  source 1..21: mol_type = other DNA
ggtcagcctaattctgcgcgg

SEQ ID NO: 38693 - DNA, 21 bp, synthetic construct
  misc_feature 1..21: note = Description of Artificial Sequence: Synthetic oligonucleotide
  source 1..21: mol_type = other DNA
cagaatcgtgtttctaatggg

SEQ ID NO: 38694 - DNA, 21 bp, synthetic construct
  misc_feature 1..21: note = Description of Artificial Sequence: Synthetic oligonucleotide
  source 1..21: mol_type = other DNA
cggcattctaattcggtgttg

SEQ ID NO: 38695 - DNA, 21 bp, synthetic construct
  misc_feature 1..21: note = Description of Artificial Sequence: Synthetic oligonucleotide
  source 1..21: mol_type = other DNA
gattcgtctacgcgggggcag

SEQ ID NO: 38696 - DNA, 21 bp, synthetic construct
  misc_feature 1..21: note = Description of Artificial Sequence: Synthetic oligonucleotide
  source 1..21: mol_type = other DNA
ctcagcaacagaacccaacaa

SEQ ID NO: 38697 - DNA, 21 bp, synthetic construct
  misc_feature 1..21: note = Description of Artificial Sequence: Synthetic oligonucleotide
  source 1..21: mol_type = other DNA
ccgagtagtccgaattctatt

SEQ ID NO: 38698 - DNA, 21 bp, synthetic construct
  misc_feature 1..21: note = Description of Artificial Sequence: Synthetic oligonucleotide
  source 1..21: mol_type = other DNA
agtgcgggtggtgcggtgtct

SEQ ID NO: 38699 - DNA, 21 bp, synthetic construct
  misc_feature 1..21: note = Description of Artificial Sequence: Synthetic oligonucleotide
  source 1..21: mol_type = other DNA
ggttccccggctgctggtagg

SEQ ID NO: 38700 - DNA, 21 bp, synthetic construct
  misc_feature 1..21: note = Description of Artificial Sequence: Synthetic oligonucleotide
  source 1..21: mol_type = other DNA
agcagaccccacaccgacggc

SEQ ID NO: 38701 - DNA, 21 bp, synthetic construct
  misc_feature 1..21: note = Description of Artificial Sequence: Synthetic oligonucleotide
  source 1..21: mol_type = other DNA
accagcagaggcaacctcagc

SEQ ID NO: 38702 - DNA, 21 bp, synthetic construct
  misc_feature 1..21: note = Description of Artificial Sequence: Synthetic oligonucleotide
  source 1..21: mol_type = other DNA
cccctcgtccccagaggcacc

SEQ ID NO: 38703 - DNA, 21 bp, synthetic construct
  misc_feature 1..21: note = Description of Artificial Sequence: Synthetic oligonucleotide
  source 1..21: mol_type = other DNA
ggcagcagccccaaactcacc

SEQ ID NO: 38704 - DNA, 21 bp, synthetic construct
  misc_feature 1..21: note = Description of Artificial Sequence: Synthetic oligonucleotide
  source 1..21: mol_type = other DNA
agtgcgagtggtaataggtgt

SEQ ID NO: 38705 - DNA, 21 bp, synthetic construct
  misc_feature 1..21: note = Description of Artificial Sequence: Synthetic oligonucleotide
  source 1..21: mol_type = other DNA
cgtcagacggataagttgagt

SEQ ID NO: 38706 - DNA, 21 bp, synthetic construct
  misc_feature 1..21: note = Description of Artificial Sequence: Synthetic oligonucleotide
  source 1..21: mol_type = other DNA
ggtccttctagtattaatagg

SEQ ID NO: 38707 - DNA, 21 bp, synthetic construct
  misc_feature 1..21: note = Description of Artificial Sequence: Synthetic oligonucleotide
  source 1..21: mol_type = other DNA
gagggtaatcgttctaatatg

SEQ ID NO: 38708 - DNA, 21 bp, synthetic construct
  misc_feature 1..21: note = Description of Artificial Sequence: Synthetic oligonucleotide
  source 1..21: mol_type = other DNA
acgtctcagactaagattgtg

SEQ ID NO: 38709 - DNA, 21 bp, synthetic construct
  misc_feature 1..21: note = Description of Artificial Sequence: Synthetic oligonucleotide
  source 1..21: mol_type = other DNA
cccagcagccccaccgacaga

SEQ ID NO: 38710 - DNA, 21 bp, synthetic construct
  misc_feature 1..21: note = Description of Artificial Sequence: Synthetic oligonucleotide
  source 1..21: mol_type = other DNA
acttctcggcagtcttttgtg

SEQ ID NO: 38711 - DNA, 21 bp, synthetic construct
  misc_feature 1..21: note = Description of Artificial Sequence: Synthetic oligonucleotide
  source 1..21: mol_type = other DNA
agaagccccagcaccaacccc

SEQ ID NO: 38712 - DNA, 21 bp, synthetic construct
  misc_feature 1..21: note = Description of Artificial Sequence: Synthetic oligonucleotide
  source 1..21: mol_type = other DNA
tgtagttctgggaggcagagt

SEQ ID NO: 38713 - DNA, 21 bp, synthetic construct
  misc_feature 1..21: note = Description of Artificial Sequence: Synthetic oligonucleotide
  source 1..21: mol_type = other DNA
cggaatagggagagtattgct

SEQ ID NO: 38714 - DNA, 21 bp, synthetic construct
  misc_feature 1..21: note = Description of Artificial Sequence: Synthetic oligonucleotide
  source 1..21: mol_type = other DNA
gctcgtactaatagtgctcct

SEQ ID NO: 38715 - DNA, 21 bp, synthetic construct
  misc_feature 1..21: note = Description of Artificial Sequence: Synthetic oligonucleotide
  source 1..21: mol_type = other DNA
gtttcgggtatgagtgggagt

SEQ ID NO: 38716 - DNA, 21 bp, synthetic construct
  misc_feature 1..21: note = Description of Artificial Sequence: Synthetic oligonucleotide
  source 1..21: mol_type = other DNA
caactcagcggcgccagaagc

SEQ ID NO: 38717 - DNA, 21 bp, synthetic construct
  misc_feature 1..21: note = Description of Artificial Sequence: Synthetic oligonucleotide
  source 1..21: mol_type = other DNA
aattcggcgagtctgaatcat

SEQ ID NO: 38718 - DNA, 21 bp, synthetic construct
  misc_feature 1..21: note = Description of Artificial Sequence: Synthetic oligonucleotide
  source 1..21: mol_type = other DNA
ccttcgactaataggactggg

SEQ ID NO: 38719 - DNA, 21 bp, synthetic construct
  misc_feature 1..21: note = Description of Artificial Sequence: Synthetic oligonucleotide
  source 1..21: mol_type = other DNA
tgcctccccggcgccgccatg

SEQ ID NO: 38720 - DNA, 21 bp, synthetic construct
  misc_feature 1..21: note = Description of Artificial Sequence: Synthetic oligonucleotide
  source 1..21: mol_type = other DNA
gccggcgccggcaaagtctac

SEQ ID NO: 38721 - DNA, 21 bp, synthetic construct
  misc_feature 1..21: note = Description of Artificial Sequence: Synthetic oligonucleotide
  source 1..21: mol_type = other DNA
agtcttgggagtaggccgagt

SEQ ID NO: 38722 - DNA, 21 bp, synthetic construct
  misc_feature 1..21: note = Description of Artificial Sequence: Synthetic oligonucleotide
  source 1..21: mol_type = other DNA
tctattggtaaggggtataat

SEQ ID NO: 38723 - DNA, 21 bp, synthetic construct
  misc_feature 1..21: note = Description of Artificial Sequence: Synthetic oligonucleotide
  source 1..21: mol_type = other DNA
gacaaaaccaacctcagcagc

SEQ ID NO: 38724 - DNA, 21 bp, synthetic construct
  misc_feature 1..21: note = Description of Artificial Sequence: Synthetic oligonucleotide
  source 1..21: mol_type = other DNA
tcgctgtcgaagtctcagtcg

SEQ ID NO: 38725 - DNA, 21 bp, synthetic construct
  misc_feature 1..21: note = Description of Artificial Sequence: Synthetic oligonucleotide
  source 1..21: mol_type = other DNA
gtcagaaccgccggcagcgac

SEQ ID NO: 38726 - DNA, 21 bp, synthetic construct
  misc_feature 1..21: note = Description of Artificial Sequence: Synthetic oligonucleotide
  source 1..21: mol_type = other DNA
gatcagaatcgtgttccttat

SEQ ID NO: 38727 - DNA, 21 bp, synthetic construct
  misc_feature 1..21: note = Description of Artificial Sequence: Synthetic oligonucleotide
  source 1..21: mol_type = other DNA
tctgggcggcaggatgtgctg

SEQ ID NO: 38728 - DNA, 21 bp, synthetic construct
  misc_feature 1..21: note = Description of Artificial Sequence: Synthetic oligonucleotide
  source 1..21: mol_type = other DNA
agacaatacaccggcgacagc

SEQ ID NO: 38729 - DNA, 21 bp, synthetic construct
  misc_feature 1..21: note = Description of Artificial Sequence: Synthetic oligonucleotide
  source 1..21: mol_type = other DNA
cacagagacaccaacggcaaa

SEQ ID NO: 38730 - DNA, 21 bp, synthetic construct
  misc_feature 1..21: note = Description of Artificial Sequence: Synthetic oligonucleotide
  source 1..21: mol_type = other DNA
ggcctcatggcccaaagaagc

SEQ ID NO: 38731 - DNA, 21 bp, synthetic construct
  misc_feature 1..21: note = Description of Artificial Sequence: Synthetic oligonucleotide
  source 1..21: mol_type = other DNA
ccggggctttctaattcgcgt

SEQ ID NO: 38732 - DNA, 21 bp, synthetic construct
  misc_feature 1..21: note = Description of Artificial Sequence: Synthetic oligonucleotide
  source 1..21: mol_type = other DNA
gctattcctggtactatggct

SEQ ID NO: 38733 - DNA, 21 bp, synthetic construct
  misc_feature 1..21: note = Description of Artificial Sequence: Synthetic oligonucleotide
  source 1..21: mol_type = other DNA
cccggcctcagagacaccgcc

SEQ ID NO: 38734 - DNA, 21 bp, synthetic construct
  misc_feature 1..21: note = Description of Artificial Sequence: Synthetic oligonucleotide
  source 1..21: mol_type = other DNA
agtggtcctcagattattcgg

SEQ ID NO: 38735 - DNA, 21 bp, synthetic construct
  misc_feature 1..21: note = Description of Artificial Sequence: Synthetic oligonucleotide
  source 1..21: mol_type = other DNA
agactcccccaaatgacctgc

SEQ ID NO: 38736 - DNA, 21 bp, synthetic construct
  misc_feature 1..21: note = Description of Artificial Sequence: Synthetic oligonucleotide
  source 1..21: mol_type = other DNA
agcagcacccccagaagcgtc

SEQ ID NO: 38737 - DNA, 21 bp, synthetic construct
  misc_feature 1..21: note = Description of Artificial Sequence: Synthetic oligonucleotide
  source 1..21: mol_type = other DNA
cttaataggggtaatggttcg

SEQ ID NO: 38738 - DNA, 21 bp, synthetic construct
  misc_feature 1..21: note = Description of Artificial Sequence: Synthetic oligonucleotide
  source 1..21: mol_type = other DNA
cccagcaccagacaaagcaac

SEQ ID NO: 38739 - DNA, 21 bp, synthetic construct
  misc_feature 1..21: note = Description of Artificial Sequence: Synthetic oligonucleotide
  source 1..21: mol_type = other DNA
gccagagtcggcagcatcagc

SEQ ID NO: 38740 - DNA, 21 bp, synthetic construct
  misc_feature 1..21: note = Description of Artificial Sequence: Synthetic oligonucleotide
  source 1..21: mol_type = other DNA
aatcggttgactaatgtgagt

SEQ ID NO: 38741 - DNA, 21 bp, synthetic construct
  misc_feature 1..21: note = Description of Artificial Sequence: Synthetic oligonucleotide
  source 1..21: mol_type = other DNA
caaacccacgcccccaccagc

SEQ ID NO: 38742 - DNA, 21 bp, synthetic construct
  misc_feature 1..21: note = Description of Artificial Sequence: Synthetic oligonucleotide
  source 1..21: mol_type = other DNA
tcgggtaatcttcagcatgct

SEQ ID NO: 38743 - DNA, 21 bp, synthetic construct
  misc_feature 1..21: note = Description of Artificial Sequence: Synthetic oligonucleotide
  source 1..21: mol_type = other DNA
agaaccaccaacgccacctac

SEQ ID NO: 38744 - DNA, 21 bp, synthetic construct
  misc_feature 1..21: note = Description of Artificial Sequence: Synthetic oligonucleotide
  source 1..21: mol_type = other DNA
gcgcaggcgaggctgatgaat

SEQ ID NO: 38745 - DNA, 21 bp, synthetic construct
  misc_feature 1..21: note = Description of Artificial Sequence: Synthetic oligonucleotide
  source 1..21: mol_type = other DNA
gccggcgccggcatgtacgcc

SEQ ID NO: 38746 - DNA, 21 bp, synthetic construct
  misc_feature 1..21: note = Description of Artificial Sequence: Synthetic oligonucleotide
  source 1..21: mol_type = other DNA
aacagactccccgccaccaaa

SEQ ID NO: 38747 - DNA, 21 bp, synthetic construct
  misc_feature 1..21: note = Description of Artificial Sequence: Synthetic oligonucleotide
  source 1..21: mol_type = other DNA
tacggcgacggcaaaagctac

SEQ ID NO: 38748 - DNA, 21 bp, synthetic construct
  misc_feature 1..21: note = Description of Artificial Sequence: Synthetic oligonucleotide
  source 1..21: mol_type = other DNA
tcgacttctaatggtactctg

SEQ ID NO: 38749 - DNA, 21 bp, synthetic construct
  misc_feature 1..21: note = Description of Artificial Sequence: Synthetic oligonucleotide
  source 1..21: mol_type = other DNA
ttcggcaccaacaaagtcgac

SEQ ID NO: 38750 - DNA, 21 bp, synthetic construct
  misc_feature 1..21: note = Description of Artificial Sequence: Synthetic oligonucleotide
  source 1..21: mol_type = other DNA
atcagcaacagaagcagcagc

SEQ ID NO: 38751 - DNA, 21 bp, synthetic construct
  misc_feature 1..21: note = Description of Artificial Sequence: Synthetic oligonucleotide
  source 1..21: mol_type = other DNA
tttgttagtggtaaggtgcag

SEQ ID NO: 38752 - DNA, 21 bp, synthetic construct
  misc_feature 1..21: note = Description of Artificial Sequence: Synthetic oligonucleotide
  source 1..21: mol_type = other DNA
attgctgggcagtcgtatagg

SEQ ID NO: 38753 - DNA, 21 bp, synthetic construct
  misc_feature 1..21: note = Description of Artificial Sequence: Synthetic oligonucleotide
  source 1..21: mol_type = other DNA
cggtcgtatgataagtcgagt

SEQ ID NO: 38754 - DNA, 21 bp, synthetic construct
  misc_feature 1..21: note = Description of Artificial Sequence: Synthetic oligonucleotide
  source 1..21: mol_type = other DNA
gcccaagtcgacaaaagaagc

SEQ ID NO: 38755 - DNA, 21 bp, synthetic construct
  misc_feature 1..21: note = Description of Artificial Sequence: Synthetic oligonucleotide
  source 1..21: mol_type = other DNA
cggtcttatgagggtatgcag

SEQ ID NO: 38756 - DNA, 21 bp, synthetic construct
  misc_feature 1..21: note = Description of Artificial Sequence: Synthetic oligonucleotide
  source 1..21: mol_type = other DNA
gtccccatcaccagcagacaa

SEQ ID NO: 38757 - DNA, 21 bp, synthetic construct
  misc_feature 1..21: note = Description of Artificial Sequence: Synthetic oligonucleotide
  source 1..21: mol_type = other DNA
cataatagtggtaatggttcg

SEQ ID NO: 38758 - DNA, 21 bp, synthetic construct
  misc_feature 1..21: note = Description of Artificial Sequence: Synthetic oligonucleotide
  source 1..21: mol_type = other DNA
tcttcgggtgtgacggggcgt

SEQ ID NO: 38759 - DNA, 21 bp, synthetic construct
  misc_feature 1..21: note = Description of Artificial Sequence: Synthetic oligonucleotide
  source 1..21: mol_type = other DNA
agttcggagcagactactcgt

SEQ ID NO: 38760 - DNA, 21 bp, synthetic construct
  misc_feature 1..21: note = Description of Artificial Sequence: Synthetic oligonucleotide
  source 1..21: mol_type = other DNA
attcctcatgcggggacggcg

SEQ ID NO: 38761 - DNA, 21 bp, synthetic construct
  misc_feature 1..21: note = Description of Artificial Sequence: Synthetic oligonucleotide
  source 1..21: mol_type = other DNA
cacgtcagcggccccagactc

SEQ ID NO: 38762 - DNA, 21 bp, synthetic construct
  misc_feature 1..21: note = Description of Artificial Sequence: Synthetic oligonucleotide
  source 1..21: mol_type = other DNA
gtcagccaccaaaccgtcctc

SEQ ID NO: 38763 - DNA, 21 bp, synthetic construct
  misc_feature 1..21: note = Description of Artificial Sequence: Synthetic oligonucleotide
  source 1..21: mol_type = other DNA
aggattccgccgcagcaggat

SEQ ID NO: 38764 - DNA, 21 bp, synthetic construct
  misc_feature 1..21: note = Description of Artificial Sequence: Synthetic oligonucleotide
  source 1..21: mol_type = other DNA
caggaggcgcgtgtgtatagc

SEQ ID NO: 38765 - DNA, 21 bp, synthetic construct
  misc_feature 1..21: note = Description of Artificial Sequence: Synthetic oligonucleotide
  source 1..21: mol_type = other DNA
caaatgaaacacctccaagtc

SEQ ID NO: 38766 - DNA, 21 bp, synthetic construct
  misc_feature 1..21: note = Description of Artificial Sequence: Synthetic oligonucleotide
  source 1..21: mol_type = other DNA
gccgtccaagcccaaagaacc

SEQ ID NO: 38767 - DNA, 21 bp, synthetic construct
  misc_feature 1..21: note = Description of Artificial Sequence: Synthetic oligonucleotide
  source 1..21: mol_type = other DNA
cgtgtgatgcgggagtctcag

SEQ ID NO: 38768 - DNA, 21 bp, synthetic construct
  misc_feature 1..21: note = Description of Artificial Sequence: Synthetic oligonucleotide
  source 1..21: mol_type = other DNA
tcggatcctccgcctggtcag

SEQ ID NO: 38769 - DNA, 21 bp, synthetic construct
  misc_feature 1..21: note = Description of Artificial Sequence: Synthetic oligonucleotide
  source 1..21: mol_type = other DNA
ggcgccaaagaaagccaaagc

SEQ ID NO: 38770 - DNA, 21 bp, synthetic construct
  misc_feature 1..21: note = Description of Artificial Sequence: Synthetic oligonucleotide
  source 1..21: mol_type = other DNA
cgtacgaataagagtgttact

SEQ ID NO: 38771 - DNA, 21 bp, synthetic construct
  misc_feature 1..21: note = Description of Artificial Sequence: Synthetic oligonucleotide
  source 1..21: mol_type = other DNA
ctcagcaccagcagaaccgcc

SEQ ID NO: 38772 - DNA, 21 bp, synthetic construct
  misc_feature 1..21: note = Description of Artificial Sequence: Synthetic oligonucleotide
  source 1..21: mol_type = other DNA
tctactcctattcgttcggtt

SEQ ID NO: 38773 - DNA, 21 bp, synthetic construct
  misc_feature 1..21: note = Description of Artificial Sequence: Synthetic oligonucleotide
  source 1..21: mol_type = other DNA
gatcgtgcggggaagcagagt

SEQ ID NO: 38774 - DNA, 21 bp, synthetic construct
  misc_feature 1..21: note = Description of Artificial Sequence: Synthetic oligonucleotide
  source 1..21: mol_type = other DNA
accagaaaccaaagcgtcacc

SEQ ID NO: 38775 - DNA, 21 bp, synthetic construct
  misc_feature 1..21: note = Description of Artificial Sequence: Synthetic oligonucleotide
  source 1..21: mol_type = other DNA
gaaagagccggcctcaacagc

SEQ ID NO: 38776 - DNA, 21 bp, synthetic construct
  misc_feature 1..21: note = Description of Artificial Sequence: Synthetic oligonucleotide
  source 1..21: mol_type = other DNA
aacttcaccaccagcggccaa

SEQ ID NO: 38777 - DNA, 21 bp, synthetic construct
  misc_feature 1..21: note = Description of Artificial Sequence: Synthetic oligonucleotide
  source 1..21: mol_type = other DNA
agccaacaaagccccagcatg

SEQ ID NO: 38778 - DNA, 21 bp, synthetic construct
  misc_feature 1..21: note = Description of Artificial Sequence: Synthetic oligonucleotide
  source 1..21: mol_type = other DNA
agaaccagcgaacacgacaga

SEQ ID NO: 38779 - DNA, 21 bp, synthetic construct
  misc_feature 1..21: note = Description of Artificial Sequence: Synthetic oligonucleotide
  source 1..21: mol_type = other DNA
tttcggcagactagtgggaat

SEQ ID NO: 38780 - DNA, 21 bp, synthetic construct
  misc_feature 1..21: note = Description of Artificial Sequence: Synthetic oligonucleotide
  source 1..21: mol_type = other DNA
ttcagaaacacccacagcgaa

SEQ ID NO: 38781 - DNA, 21 bp, synthetic construct
  misc_feature 1..21: note = Description of Artificial Sequence: Synthetic oligonucleotide
  source 1..21: mol_type = other DNA
ggtcctaatattagtctgggt

SEQ ID NO: 38782 - DNA, 21 bp, synthetic construct
  misc_feature 1..21: note = Description of Artificial Sequence: Synthetic oligonucleotide
  source 1..21: mol_type = other DNA
atgggccaagtcggcgtcaga

SEQ ID NO: 38783 - DNA, 21 bp, synthetic construct
  misc_feature 1..21: note = Description of Artificial Sequence: Synthetic oligonucleotide
  source 1..21: mol_type = other DNA
gtcaacatgagaaacaccatg

SEQ ID NO: 38784 - DNA, 21 bp, synthetic construct
  misc_feature 1..21: note = Description of Artificial Sequence: Synthetic oligonucleotide
  source 1..21: mol_type = other DNA
actaatggtggtagggtgacg

SEQ ID NO: 38785 - DNA, 21 bp, synthetic construct
  misc_feature 1..21: note = Description of Artificial Sequence: Synthetic oligonucleotide
  source 1..21: mol_type = other DNA
agcagagtcgacgtcagaagc

SEQ ID NO: 38786 - DNA, 21 bp, synthetic construct
  misc_feature 1..21: note = Description of Artificial Sequence: Synthetic oligonucleotide
  source 1..21: mol_type = other DNA
aaggttcatcggagtgataat

SEQ ID NO: 38787 - DNA, 21 bp, synthetic construct
  misc_feature 1..21: note = Description of Artificial Sequence: Synthetic oligonucleotide
  source 1..21: mol_type = other DNA
tctactccgcatcatacgact

SEQ ID NO: 38788 - DNA, 21 bp, synthetic construct
  misc_feature 1..21: note = Description of Artificial Sequence: Synthetic oligonucleotide
  source 1..21: mol_type = other DNA
cctctgcctaataggaatcag

SEQ ID NO: 38789 - DNA, 21 bp, synthetic construct
  misc_feature 1..21: note = Description of Artificial Sequence: Synthetic oligonucleotide
  source 1..21: mol_type = other DNA
gttagtagtcctcgtatgagt

SEQ ID NO: 38790 - DNA, 21 bp, synthetic construct
  misc_feature 1..21: note = Description of Artificial Sequence: Synthetic oligonucleotide
  source 1..21: mol_type = other DNA
ccgaagggggcgcatgttacg

SEQ ID NO: 38791 - DNA, 21 bp, synthetic construct
  misc_feature 1..21: note = Description of Artificial Sequence: Synthetic oligonucleotide
  source 1..21: mol_type = other DNA
agctacccccaacaaagcgcc

SEQ ID NO: 38792 - DNA, 21 bp, synthetic construct
  misc_feature 1..21: note = Description of Artificial Sequence: Synthetic oligonucleotide
  source 1..21: mol_type = other DNA
ggcaccaacaccggcatcgtc

SEQ ID NO: 38793 - DNA, 21 bp, synthetic construct
  misc_feature 1..21: note = Description of Artificial Sequence: Synthetic oligonucleotide
  source 1..21: mol_type = other DNA
ccgattactcatcctttgcgt

SEQ ID NO: 38794 - DNA, 21 bp, synthetic construct
  misc_feature 1..21: note = Description of Artificial Sequence: Synthetic oligonucleotide
  source 1..21: mol_type = other DNA
ggcctccacagcgtcgccaaa

SEQ ID NO: 38795 - DNA, 21 bp, synthetic construct
  misc_feature 1..21: note = Description of Artificial Sequence: Synthetic oligonucleotide
  source 1..21: mol_type = other DNA
cctagtgctaggatgtctggt

SEQ ID NO: 38796 - DNA, 21 bp, synthetic construct
  misc_feature 1..21: note = Description of Artificial Sequence: Synthetic oligonucleotide
  source 1..21: mol_type = other DNA
aacagagtcacccaaagcagc

SEQ ID NO: 38797 - DNA, 21 bp, synthetic construct
  misc_feature 1..21: note = Description of Artificial Sequence: Synthetic oligonucleotide
  source 1..21: mol_type = other DNA
agcctccccaacaccaacggc

SEQ ID NO: 38798 - DNA, 21 bp, synthetic construct
  misc_feature 1..21: note = Description of Artificial Sequence: Synthetic oligonucleotide
  source 1..21: mol_type = other DNA
tctggtggtggtacgaggact

SEQ ID NO: 38799 - DNA, 21 bp, synthetic construct
  misc_feature 1..21: note = Description of Artificial Sequence: Synthetic oligonucleotide
  source 1..21: mol_type = other DNA
gtcaacctcagccccaaccac

SEQ ID NO: 38800 - DNA, 21 bp, synthetic construct
  misc_feature 1..21: note = Description of Artificial Sequence: Synthetic oligonucleotide
  source 1..21: mol_type = other DNA
gtgactcatggtccgtctcat

SEQ ID NO: 38801 - DNA, 21 bp, synthetic construct
  misc_feature 1..21: note = Description of Artificial Sequence: Synthetic oligonucleotide
  source 1..21: mol_type = other DNA
cttttgaattctactgggatg

SEQ ID NO: 38802 - DNA, 21 bp, synthetic construct
  misc_feature 1..21: note = Description of Artificial Sequence: Synthetic oligonucleotide
  source 1..21: mol_type = other DNA
aacagcgtcgtcagcgtcagc

SEQ ID NO: 38803 - DNA, 21 bp, synthetic construct
  misc_feature 1..21: note = Description of Artificial Sequence: Synthetic oligonucleotide
  source 1..21: mol_type = other DNA
gtgcggggtagttcgaatggt

SEQ ID NO: 38804 - DNA, 21 bp, synthetic construct
  misc_feature 1..21: note = Description of Artificial Sequence: Synthetic oligonucleotide
  source 1..21: mol_type = other DNA
tctgttaatactaaggcgctt

SEQ ID NO: 38805 - DNA, 21 bp, synthetic construct
  misc_feature 1..21: note = Description of Artificial Sequence: Synthetic oligonucleotide
  source 1..21: mol_type = other DNA
cgtctggaggggagtatggcg

SEQ ID NO: 38806 - DNA, 21 bp, synthetic construct
  misc_feature 1..21: note = Description of Artificial Sequence: Synthetic oligonucleotide
  source 1..21: mol_type = other DNA
cttggtaatgcgcatcagctt

SEQ ID NO: 38807 - DNA, 21 bp, synthetic construct
  misc_feature 1..21: note = Description of Artificial Sequence: Synthetic oligonucleotide
  source 1..21: mol_type = other DNA
atgagcgacaccagcaccaga

SEQ ID NO: 38808 - DNA, 21 bp, synthetic construct
  misc_feature 1..21: note = Description of Artificial Sequence: Synthetic oligonucleotide
  source 1..21: mol_type = other DNA
tcgacttcgagggtgcttaat

SEQ ID NO: 38809 - DNA, 21 bp, synthetic construct
  misc_feature 1..21: note = Description of Artificial Sequence: Synthetic oligonucleotide
  source 1..21: mol_type = other DNA
gatcgtcttggtaatactatg

SEQ ID NO: 38810 - DNA, 21 bp, synthetic construct
  misc_feature 1..21: note = Description of Artificial Sequence: Synthetic oligonucleotide
  source 1..21: mol_type = other DNA
cagaatttgccgaggacgtgt

SEQ ID NO: 38811 - DNA, 21 bp, synthetic construct
  misc_feature 1..21: note = Description of Artificial Sequence: Synthetic oligonucleotide
  source 1..21: mol_type = other DNA
gagggtagttcgggtaggcgt

SEQ ID NO: 38812 - DNA, 21 bp, synthetic construct
  misc_feature 1..21: note = Description of Artificial Sequence: Synthetic oligonucleotide
  source 1..21: mol_type = other DNA
agactcagcaacgcctacgcc

SEQ ID NO: 38813 - DNA, 21 bp, synthetic construct
  misc_feature 1..21: note = Description of Artificial Sequence: Synthetic oligonucleotide
  source 1..21: mol_type = other DNA
acgggtttgagtcatatgggt

SEQ ID NO: 38814 - DNA, 21 bp, synthetic construct
  misc_feature 1..21: note = Description of Artificial Sequence: Synthetic oligonucleotide
  source 1..21: mol_type = other DNA
tctacttcgggtacgagtagt

SEQ ID NO: 38815 - DNA, 21 bp, synthetic construct
  misc_feature 1..21: note = Description of Artificial Sequence: Synthetic oligonucleotide
  source 1..21: mol_type = other DNA
gagcggaatgggaattttacg

SEQ ID NO: 38816 - DNA, 21 bp, synthetic construct
  misc_feature 1..21: note = Description of Artificial Sequence: Synthetic oligonucleotide
  source 1..21: mol_type = other DNA
ggcagactcaacatgctcagc

SEQ ID NO: 38817 - DNA, 21 bp, synthetic construct
  misc_feature 1..21: note = Description of Artificial Sequence: Synthetic oligonucleotide
  source 1..21: mol_type = other DNA
tgttcgcagcgtcagtgtaat

SEQ ID NO: 38818 - DNA, 21 bp, synthetic construct
  misc_feature 1..21: note = Description of Artificial Sequence: Synthetic oligonucleotide
  source 1..21: mol_type = other DNA
ttcaaccaagccggcgtcaac

SEQ ID NO: 38819 - DNA, 21 bp, synthetic construct
  misc_feature 1..21: note = Description of Artificial Sequence: Synthetic oligonucleotide
  source 1..21: mol_type = other DNA
acggggaatgctagtagggtg

SEQ ID NO: 38820 - DNA, 21 bp, synthetic construct
  misc_feature 1..21: note = Description of Artificial Sequence: Synthetic oligonucleotide
  source 1..21: mol_type = other DNA
ggttcgacgggtcagcttatg

SEQ ID NO: 38821 - DNA, 21 bp, synthetic construct
  misc_feature 1..21: note = Description of Artificial Sequence: Synthetic oligonucleotide
  source 1..21: mol_type = other DNA
tatgcttctggtaagcatagt

SEQ ID NO: 38822 - DNA, 21 bp, synthetic construct
  misc_feature 1..21: note = Description of Artificial Sequence: Synthetic oligonucleotide
  source 1..21: mol_type = other DNA
agcagaaacaccctcggcagc

SEQ ID NO: 38823 - DNA, 21 bp, synthetic construct
  misc_feature 1..21: note = Description of Artificial Sequence: Synthetic oligonucleotide
  source 1..21: mol_type = other DNA
aacggttatggacagaatcaa

SEQ ID NO: 38824 - DNA, 21 bp, synthetic construct
  misc_feature 1..21: note = Description of Artificial Sequence: Synthetic oligonucleotide
  source 1..21: mol_type = other DNA
tcggcgaatctgcatggtaag

SEQ ID NO: 38825 - DNA, 21 bp, synthetic construct
  misc_feature 1..21: note = Description of Artificial Sequence: Synthetic oligonucleotide
  source 1..21: mol_type = other DNA
gacgtcaaccccagcgccaaa

SEQ ID NO: 38826 - DNA, 21 bp, synthetic construct
  misc_feature 1..21: note = Description of Artificial Sequence: Synthetic oligonucleotide
  source 1..21: mol_type = other DNA
agcctcaccacccaaaacagc

SEQ ID NO: 38827 - DNA, 21 bp, synthetic construct
  misc_feature 1..21: note = Description of Artificial Sequence: Synthetic oligonucleotide
  source 1..21: mol_type = other DNA
agcaaaagcgtcgcccaaagc

SEQ ID NO: 38828 - DNA, 21 bp, synthetic construct
  misc_feature 1..21: note = Description of Artificial Sequence: Synthetic oligonucleotide
  source 1..21: mol_type = other DNA
cacgccagcacccccgccaga

SEQ ID NO: 38829 - DNA, 21 bp, synthetic construct
  misc_feature 1..21: note = Description of Artificial Sequence: Synthetic oligonucleotide
  source 1..21: mol_type = other DNA
taccaaatgaccaccccccaa

SEQ ID NO: 38830 - DNA, 21 bp, synthetic construct
  misc_feature 1..21: note = Description of Artificial Sequence: Synthetic oligonucleotide
  source 1..21: mol_type = other DNA
ccttcgcatgggcctcctgct

SEQ ID NO: 38831 - DNA, 21 bp, synthetic construct
  misc_feature 1..21: note = Description of Artificial Sequence: Synthetic oligonucleotide
  source 1..21: mol_type = other DNA
acctacagcagcaaagccgac

SEQ ID NO: 38832 - DNA, 21 bp, synthetic construct
  misc_feature 1..21: note = Description of Artificial Sequence: Synthetic oligonucleotide
  source 1..21: mol_type = other DNA
cccgtcaccagaagcaaagac

SEQ ID NO: 38833 - DNA, 21 bp, synthetic construct
  misc_feature 1..21: note = Description of Artificial Sequence: Synthetic oligonucleotide
  source 1..21: mol_type = other DNA
acccaaatgggcaaaagcaac

SEQ ID NO: 38834 - DNA, 21 bp, synthetic construct
  misc_feature 1..21: note = Description of Artificial Sequence: Synthetic oligonucleotide
  source 1..21: mol_type = other DNA
tttgggtcgaggaatgagggt

SEQ ID NO: 38835 - DNA, 21 bp, synthetic construct
  misc_feature 1..21: note = Description of Artificial Sequence: Synthetic oligonucleotide
  source 1..21: mol_type = other DNA
gggtcgcatactaatacttct

SEQ ID NO: 38836 - DNA, 21 bp, synthetic construct
  misc_feature 1..21: note = Description of Artificial Sequence: Synthetic oligonucleotide
  source 1..21: mol_type = other DNA
ggggcttataatcatgttacg

SEQ ID NO: 38837 - DNA, 21 bp, synthetic construct
  misc_feature 1..21: note = Description of Artificial Sequence: Synthetic oligonucleotide
  source 1..21: mol_type = other DNA
ccctaccaaagccacagcccc

SEQ ID NO: 38838 - DNA, 21 bp, synthetic construct
  misc_feature 1..21: note = Description of Artificial Sequence: Synthetic oligonucleotide
  source 1..21: mol_type = other DNA
gggtctatttcgacggctcat

SEQ ID NO: 38839 - DNA, 21 bp, synthetic construct
  misc_feature 1..21: note = Description of Artificial Sequence: Synthetic oligonucleotide
  source 1..21: mol_type = other DNA
ggtagggatactcggagtagt

SEQ ID NO: 38840 - DNA, 21 bp, synthetic construct
  misc_feature 1..21: note = Description of Artificial Sequence: Synthetic oligonucleotide
  source 1..21: mol_type = other DNA
tatgggcagactaagacgcag

SEQ ID NO: 38841 - DNA, 21 bp, synthetic construct
  misc_feature 1..21: note = Description of Artificial Sequence: Synthetic oligonucleotide
  source 1..21: mol_type = other DNA
accaccgcccccggcctcaga

SEQ ID NO: 38842 - DNA, 21 bp, synthetic construct
  misc_feature 1..21: note = Description of Artificial Sequence: Synthetic oligonucleotide
  source 1..21: mol_type = other DNA
acgaagtatgagggttatact

SEQ ID NO: 38843 - DNA, 21 bp, synthetic construct
  misc_feature 1..21: note = Description of Artificial Sequence: Synthetic oligonucleotide
  source 1..21: mol_type = other DNA
accaacgccgccagagacagc

SEQ ID NO: 38844 - DNA, 21 bp, synthetic construct
  misc_feature 1..21: note = Description of Artificial Sequence: Synthetic oligonucleotide
  source 1..21: mol_type = other DNA
atccaacaaggcagcagaacc

SEQ ID NO: 38845 - DNA, 21 bp, synthetic construct
  misc_feature 1..21: note = Description of Artificial Sequence: Synthetic oligonucleotide
  source 1..21: mol_type = other DNA
catcgttctgggaatcagggt

SEQ ID NO: 38846 - DNA, 21 bp, synthetic construct
  misc_feature 1..21: note = Description of Artificial Sequence: Synthetic oligonucleotide
  source 1..21: mol_type = other DNA
tcgccgatgcgttcgcaggtt

SEQ ID NO: 38847 - DNA, 21 bp, synthetic construct
  misc_feature 1..21: note = Description of Artificial Sequence: Synthetic oligonucleotide
  source 1..21: mol_type = other DNA
gctaggtctcctccttcgggg

SEQ ID NO: 38848 - DNA, 21 bp, synthetic construct
  misc_feature 1..21: note = Description of Artificial Sequence: Synthetic oligonucleotide
  source 1..21: mol_type = other DNA
gagccgtcgcgtagttcgacg

SEQ ID NO: 38849 - DNA, 21 bp, synthetic construct
  misc_feature 1..21: note = Description of Artificial Sequence: Synthetic oligonucleotide
  source 1..21: mol_type = other DNA
tcttctccgcaggctcataat

SEQ ID NO: 38850 - DNA, 21 bp, synthetic construct
  misc_feature 1..21: note = Description of Artificial Sequence: Synthetic oligonucleotide
  source 1..21: mol_type = other DNA
gtcagctacgccagaaccgaa

SEQ ID NO: 38851 - DNA, 21 bp, synthetic construct
  misc_feature 1..21: note = Description of Artificial Sequence: Synthetic oligonucleotide
  source 1..21: mol_type = other DNA
tcgagtggtctgggtttttcg

SEQ ID NO: 38852 - DNA, 21 bp, synthetic construct
  misc_feature 1..21: note = Description of Artificial Sequence: Synthetic oligonucleotide
  source 1..21: mol_type = other DNA
aggtatacggggcagagtagt

SEQ ID NO: 38853 - DNA, 21 bp, synthetic construct
  misc_feature 1..21: note = Description of Artificial Sequence: Synthetic oligonucleotide
  source 1..21: mol_type = other DNA
cctgctaggtcgactctttct

SEQ ID NO: 38854 - DNA, 21 bp, synthetic construct
  misc_feature 1..21: note = Description of Artificial Sequence: Synthetic oligonucleotide
  source 1..21: mol_type = other DNA
tctggtgggagttcggttctg

SEQ ID NO: 38855 - DNA, 21 bp, synthetic construct
  misc_feature 1..21: note = Description of Artificial Sequence: Synthetic oligonucleotide
  source 1..21: mol_type = other DNA
agcagcagaagcaccgccagc

SEQ ID NO: 38856 - DNA, 21 bp, synthetic construct
  misc_feature 1..21: note = Description of Artificial Sequence: Synthetic oligonucleotide
  source 1..21: mol_type = other DNA
tcggcttatgagaggacttcg

SEQ ID NO: 38857 - DNA, 21 bp, synthetic construct
  misc_feature 1..21: note = Description of Artificial Sequence: Synthetic oligonucleotide
  source 1..21: mol_type = other DNA
actgctaattcgcctgcgacg

SEQ ID NO: 38858 - DNA, 21 bp, synthetic construct
  misc_feature 1..21: note = Description of Artificial Sequence: Synthetic oligonucleotide
  source 1..21: mol_type = other DNA
ccggttaatcttcagaatggg

SEQ ID NO: 38859 - DNA, 21 bp, synthetic construct
  misc_feature 1..21: note = Description of Artificial Sequence: Synthetic oligonucleotide
  source 1..21: mol_type = other DNA
atgactcctgggagggttgct

SEQ ID NO: 38860 - DNA, 21 bp, synthetic construct
  misc_feature 1..21: note = Description of Artificial Sequence: Synthetic oligonucleotide
  source 1..21: mol_type = other DNA
ccctacgcccccagaaaagac

SEQ ID NO: 38861 - DNA, 21 bp, synthetic construct
  misc_feature 1..21: note = Description of Artificial Sequence: Synthetic oligonucleotide
  source 1..21: mol_type = other DNA
atttcgcagtctactactagg

SEQ ID NO: 38862 - DNA, 21 bp, synthetic construct
  misc_feature 1..21: note = Description of Artificial Sequence: Synthetic oligonucleotide
  source 1..21: mol_type = other DNA
gaaaaactcagaaccagccaa

SEQ ID NO: 38863 - DNA, 21 bp, synthetic construct
  misc_feature 1..21: note = Description of Artificial Sequence: Synthetic oligonucleotide
  source 1..21: mol_type = other DNA
gtgaataagattaatgggtcc

SEQ ID NO: 38864 - DNA, 21 bp, synthetic construct
  misc_feature 1..21: note = Description of Artificial Sequence: Synthetic oligonucleotide
  source 1..21: mol_type = other DNA
aacagaagcaacaacagcgtc

SEQ ID NO: 38865 - DNA, 21 bp, synthetic construct
  misc_feature 1..21: note = Description of Artificial Sequence: Synthetic oligonucleotide
  source 1..21: mol_type = other DNA
tgccaaagcagcagagtcacc

SEQ ID NO: 38866 - DNA, 21 bp, synthetic construct
  misc_feature 1..21: note = Description of Artificial Sequence: Synthetic oligonucleotide
  source 1..21: mol_type = other DNA
actcagggtgcgagtaatttg

SEQ ID NO: 38867 - DNA, 21 bp, synthetic construct
  misc_feature 1..21: note = Description of Artificial Sequence: Synthetic oligonucleotide
  source 1..21: mol_type = other DNA
aatactactggtagtgggttg

SEQ ID NO: 38868 - DNA, 21 bp, synthetic construct
  misc_feature 1..21: note = Description of Artificial Sequence: Synthetic oligonucleotide
  source 1..21: mol_type = other DNA
gaaatcagagcccacaccacc

SEQ ID NO: 38869 - DNA, 21 bp, synthetic construct
  misc_feature 1..21: note = Description of Artificial Sequence: Synthetic oligonucleotide
  source 1..21: mol_type = other DNA
tctttgcctggggagtctaag

SEQ ID NO: 38870 - DNA, 21 bp, synthetic construct
  misc_feature 1..21: note = Description of Artificial Sequence: Synthetic oligonucleotide
  source 1..21: mol_type = other DNA
attacgggtaatcgtcatagt

SEQ ID NO: 38871 - DNA, 21 bp, synthetic construct
  misc_feature 1..21: note = Description of Artificial Sequence: Synthetic oligonucleotide
  source 1..21: mol_type = other DNA
aacagcggcccccccaaaccc

SEQ ID NO: 38872 - DNA, 21 bp, synthetic construct
  misc_feature 1..21: note = Description of Artificial Sequence: Synthetic oligonucleotide
  source 1..21: mol_type = other DNA
tggagtaagggtagtgggact

SEQ ID NO: 38873 - DNA, 21 bp, synthetic construct
  misc_feature 1..21: note = Description of Artificial Sequence: Synthetic oligonucleotide
  source 1..21: mol_type = other DNA
tctggtgctcctggttcttcg

SEQ ID NO: 38874 - DNA, 21 bp, synthetic construct
  misc_feature 1..21: note = Description of Artificial Sequence: Synthetic oligonucleotide
  source 1..21: mol_type = other DNA
agcatcagcaaaacccaagcc

SEQ ID NO: 38875 - DNA, 21 bp, synthetic construct
  misc_feature 1..21: note = Description of Artificial Sequence: Synthetic oligonucleotide
  source 1..21: mol_type = other DNA
gagaatacgaagacttatagt

SEQ ID NO: 38876 - DNA, 21 bp, synthetic construct
  misc_feature 1..21: note = Description of Artificial Sequence: Synthetic oligonucleotide
  source 1..21: mol_type = other DNA
aaggagcttgggtctccttct

SEQ ID NO: 38877 - DNA, 21 bp, synthetic construct
  misc_feature 1..21: note = Description of Artificial Sequence: Synthetic oligonucleotide
  source 1..21: mol_type = other DNA
tatagggcttctggtatttcg

SEQ ID NO: 38878 - DNA, 21 bp, synthetic construct
  misc_feature 1..21: note = Description of Artificial Sequence: Synthetic oligonucleotide
  source 1..21: mol_type = other DNA
gtccacggcaaccccagaaac

SEQ ID NO: 38879 - DNA, 21 bp, synthetic construct
  misc_feature 1..21: note = Description of Artificial Sequence: Synthetic oligonucleotide
  source 1..21: mol_type = other DNA
cataagcatcctaatgcgtat

SEQ ID NO: 38880 - DNA, 21 bp, synthetic construct
  misc_feature 1..21: note = Description of Artificial Sequence: Synthetic oligonucleotide
  source 1..21: mol_type = other DNA
caggggcatactcggtttact

SEQ ID NO: 38881 - DNA, 21 bp, synthetic construct
  misc_feature 1..21: note = Description of Artificial Sequence: Synthetic oligonucleotide
  source 1..21: mol_type = other DNA
actgggcgggggccggatgtg

SEQ ID NO: 38882 - DNA, 21 bp, synthetic construct
  misc_feature 1..21: note = Description of Artificial Sequence: Synthetic oligonucleotide
  source 1..21: mol_type = other DNA
cccgattcgctgcatgctaat

SEQ ID NO: 38883 - DNA, 21 bp, synthetic construct
  misc_feature 1..21: note = Description of Artificial Sequence: Synthetic oligonucleotide
  source 1..21: mol_type = other DNA
acccaaaacaccaaaagcatc

SEQ ID NO: 38884 - DNA, 21 bp, synthetic construct
  misc_feature 1..21: note = Description of Artificial Sequence: Synthetic oligonucleotide
  source 1..21: mol_type = other DNA
agcaacctccccagaaacctc

SEQ ID NO: 38885 - DNA, 21 bp, synthetic construct
  misc_feature 1..21: note = Description of Artificial Sequence: Synthetic oligonucleotide
  source 1..21: mol_type = other DNA
aacggtcctggacagaatcaa

SEQ ID NO: 38886 - DNA, 21 bp, synthetic construct
  misc_feature 1..21: note = Description of Artificial Sequence: Synthetic oligonucleotide
  source 1..21: mol_type = other DNA
ctcggcaccacccaacccaaa

SEQ ID NO: 38887 - DNA, 21 bp, synthetic construct
  misc_feature 1..21: note = Description of Artificial Sequence: Synthetic oligonucleotide
  source 1..21: mol_type = other DNA
cccctcgccagccccatggtc

SEQ ID NO: 38888 - DNA, 21 bp, synthetic construct
  misc_feature 1..21: note = Description of Artificial Sequence: Synthetic oligonucleotide
  source 1..21: mol_type = other DNA
cttgggcctgggaagaatact

SEQ ID NO: 38889 - DNA, 21 bp, synthetic construct
  misc_feature 1..21: note = Description of Artificial Sequence: Synthetic oligonucleotide
  source 1..21: mol_type = other DNA
ggtcatgggaataagggggcg

SEQ ID NO: 38890 - DNA, 21 bp, synthetic construct
  misc_feature 1..21: note = Description of Artificial Sequence: Synthetic oligonucleotide
  source 1..21: mol_type = other DNA
cccagcatccccagaaacgtc

SEQ ID NO: 38891 - DNA, 21 bp, synthetic construct
  misc_feature 1..21: note = Description of Artificial Sequence: Synthetic oligonucleotide
  source 1..21: mol_type = other DNA
aacctccacgccacccccctc

SEQ ID NO: 38892 - DNA, 21 bp, synthetic construct
  misc_feature 1..21: note = Description of Artificial Sequence: Synthetic oligonucleotide
  source 1..21: mol_type = other DNA
gttcttcataatgctagtagt

SEQ ID NO: 38893 - DNA, 21 bp, synthetic construct
  misc_feature 1..21: note = Description of Artificial Sequence: Synthetic oligonucleotide
  source 1..21: mol_type = other DNA
cagcttggtacgaataatagt

SEQ ID NO: 38894 - DNA, 21 bp, synthetic construct
  misc_feature 1..21: note = Description of Artificial Sequence: Synthetic oligonucleotide
  source 1..21: mol_type = other DNA
aacaacagaagcggcatgggc

SEQ ID NO: 38895 - DNA, 21 bp, synthetic construct
  misc_feature 1..21: note = Description of Artificial Sequence: Synthetic oligonucleotide
  source 1..21: mol_type = other DNA
ggtgctaatacgaatccgggg

SEQ ID NO: 38896 - DNA, 21 bp, synthetic construct
  misc_feature 1..21: note = Description of Artificial Sequence: Synthetic oligonucleotide
  source 1..21: mol_type = other DNA
agaccccaaaccagcatcagc

SEQ ID NO: 38897 - DNA, 21 bp, synthetic construct
  misc_feature 1..21: note = Description of Artificial Sequence: Synthetic oligonucleotide
  source 1..21: mol_type = other DNA
gtgcctgtgactaagtcgagt

SEQ ID NO: 38898 - DNA, 21 bp, synthetic construct
  misc_feature 1..21: note = Description of Artificial Sequence: Synthetic oligonucleotide
  source 1..21: mol_type = other DNA
tataggaatgttaatagttct

SEQ ID NO: 38899 - DNA, 21 bp, synthetic construct
  misc_feature 1..21: note = Description of Artificial Sequence: Synthetic oligonucleotide
  source 1..21: mol_type = other DNA
gtccaaacccaccaagtcaga

SEQ ID NO: 38900 - DNA, 21 bp, synthetic construct
  misc_feature 1..21: note = Description of Artificial Sequence: Synthetic oligonucleotide
  source 1..21: mol_type = other DNA
gttgcgactcggggtgatcat

SEQ ID NO: 38901 - DNA, 21 bp, synthetic construct
  misc_feature 1..21: note = Description of Artificial Sequence: Synthetic oligonucleotide
  source 1..21: mol_type = other DNA
acgggtatgaggaatattggg

SEQ ID NO: 38902 - DNA, 21 bp, synthetic construct
  misc_feature 1..21: note = Description of Artificial Sequence: Synthetic oligonucleotide
  source 1..21: mol_type = other DNA
cgtgagccggctaggggtgat

SEQ ID NO: 38903 - DNA, 21 bp, synthetic construct
  misc_feature 1..21: note = Description of Artificial Sequence: Synthetic oligonucleotide
  source 1..21: mol_type = other DNA
ggcgccgaaagaaccgtcctc

SEQ ID NO: 38904 - DNA, 21 bp, synthetic construct
  misc_feature 1..21: note = Description of Artificial Sequence: Synthetic oligonucleotide
  source 1..21: mol_type = other DNA
aaagccgacgccaccagaacc

SEQ ID NO: 38905 - DNA, 21 bp, synthetic construct
  misc_feature 1..21: note = Description of Artificial Sequence: Synthetic oligonucleotide
  source 1..21: mol_type = other DNA
gacaaccacagcaccctcatc

SEQ ID NO: 38906 - DNA, 21 bp, synthetic construct
  misc_feature 1..21: note = Description of Artificial Sequence: Synthetic oligonucleotide
  source 1..21: mol_type = other DNA
cgtaatactagtgatctggct

SEQ ID NO: 38907 - DNA, 21 bp, synthetic construct
  misc_feature 1..21: note = Description of Artificial Sequence: Synthetic oligonucleotide
  source 1..21: mol_type = other DNA
actaagggtggttcgcagttg

SEQ ID NO: 38908 - DNA, 21 bp, synthetic construct
  misc_feature 1..21: note = Description of Artificial Sequence: Synthetic oligonucleotide
  source 1..21: mol_type = other DNA
atccaccaaggcagcagcaga

SEQ ID NO: 38909 - DNA, 21 bp, synthetic construct
  misc_feature 1..21: note = Description of Artificial Sequence: Synthetic oligonucleotide
  source 1..21: mol_type = other DNA
aacggcgtcccccaacccaaa

SEQ ID NO: 38910 - DNA, 21 bp, synthetic construct
  misc_feature 1..21: note = Description of Artificial Sequence: Synthetic oligonucleotide
  source 1..21: mol_type = other DNA
aataatctggcggggagtaag

SEQ ID NO: 38911 - DNA, 21 bp, synthetic construct
  misc_feature 1..21: note = Description of Artificial Sequence: Synthetic oligonucleotide
  source 1..21: mol_type = other DNA
gctatttcgaggcagggtatg

SEQ ID NO: 38912 - DNA, 21 bp, synthetic construct
  misc_feature 1..21: note = Description of Artificial Sequence: Synthetic oligonucleotide
  source 1..21: mol_type = other DNA
cctgctaattcgcctgcgacg

SEQ ID NO: 38913 - DNA, 21 bp, synthetic construct
  misc_feature 1..21: note = Description of Artificial Sequence: Synthetic oligonucleotide
  source 1..21: mol_type = other DNA
agagaaagaaccggcttcaac

SEQ ID NO: 38914 - DNA, 21 bp, synthetic construct
  misc_feature 1..21: note = Description of Artificial Sequence: Synthetic oligonucleotide
  source 1..21: mol_type = other DNA
cccctcagcaaaagcgccctc

SEQ ID NO: 38915 - DNA, 21 bp, synthetic construct
  misc_feature 1..21: note = Description of Artificial Sequence: Synthetic oligonucleotide
  source 1..21: mol_type = other DNA
ggggataagaatcatggtagt

SEQ ID NO: 38916 - DNA, 21 bp, synthetic construct
  misc_feature 1..21: note = Description of Artificial Sequence: Synthetic oligonucleotide
  source 1..21: mol_type = other DNA
aataattctatttctaatccg

SEQ ID NO: 38917 - DNA, 21 bp, synthetic construct
  misc_feature 1..21: note = Description of Artificial Sequence: Synthetic oligonucleotide
  source 1..21: mol_type = other DNA
attcatgcgactagtctggct

SEQ ID NO: 38918 - DNA, 21 bp, synthetic construct
  misc_feature 1..21: note = Description of Artificial Sequence: Synthetic oligonucleotide
  source 1..21: mol_type = other DNA
tgcgccggcctcagcagcagc

SEQ ID NO: 38919 - DNA, 21 bp, synthetic construct
  misc_feature 1..21: note = Description of Artificial Sequence: Synthetic oligonucleotide
  source 1..21: mol_type = other DNA
gacctcccccaccacaccaga

SEQ ID NO: 38920 - DNA, 21 bp, synthetic construct
  misc_feature 1..21: note = Description of Artificial Sequence: Synthetic oligonucleotide
  source 1..21: mol_type = other DNA
gtcagcagaagcgccaccaac

SEQ ID NO: 38921 - DNA, 21 bp, synthetic construct
  misc_feature 1..21: note = Description of Artificial Sequence: Synthetic oligonucleotide
  source 1..21: mol_type = other DNA
gcgaagacggctaagaatgtg

SEQ ID NO: 38922 - DNA, 21 bp, synthetic construct
  misc_feature 1..21: note = Description of Artificial Sequence: Synthetic oligonucleotide
  source 1..21: mol_type = other DNA
gggtcttttaagccggattct

SEQ ID NO: 38923 - DNA, 21 bp, synthetic construct
  misc_feature 1..21: note = Description of Artificial Sequence: Synthetic oligonucleotide
  source 1..21: mol_type = other DNA
ccgttgggtaatcgtccttct

SEQ ID NO: 38924 - DNA, 21 bp, synthetic construct
  misc_feature 1..21: note = Description of Artificial Sequence: Synthetic oligonucleotide
  source 1..21: mol_type = other DNA
aatctgaattctgttagtaag

SEQ ID NO: 38925 - DNA, 21 bp, synthetic construct
  misc_feature 1..21: note = Description of Artificial Sequence: Synthetic oligonucleotide
  source 1..21: mol_type = other DNA
cgtccgtatgagacgcagttg

SEQ ID NO: 38926 - DNA, 21 bp, synthetic construct
  misc_feature 1..21: note = Description of Artificial Sequence: Synthetic oligonucleotide
  source 1..21: mol_type = other DNA
aacgccaaccaaaaccaaatg

SEQ ID NO: 38927 - DNA, 21 bp, synthetic construct
  misc_feature 1..21: note = Description of Artificial Sequence: Synthetic oligonucleotide
  source 1..21: mol_type = other DNA
gatgggaagagtcctcgtgtg

SEQ ID NO: 38928 - DNA, 21 bp, synthetic construct
  misc_feature 1..21: note = Description of Artificial Sequence: Synthetic oligonucleotide
  source 1..21: mol_type = other DNA
ccggtgggttcggtgcggggg

SEQ ID NO: 38929 - DNA, 21 bp, synthetic construct
  misc_feature 1..21: note = Description of Artificial Sequence: Synthetic oligonucleotide
  source 1..21: mol_type = other DNA
aacggttctggacataatcaa

SEQ ID NO: 38930 - DNA, 21 bp, synthetic construct
  misc_feature 1..21: note = Description of Artificial Sequence: Synthetic oligonucleotide
  source 1..21: mol_type = other DNA
actttgccgacgtcgattagg

SEQ ID NO: 38931 - DNA, 21 bp, synthetic construct
  misc_feature 1..21: note = Description of Artificial Sequence: Synthetic oligonucleotide
  source 1..21: mol_type = other DNA
cgtgatcggactaatgctgct

SEQ ID NO: 38932 - DNA, 21 bp, synthetic construct
  misc_feature 1..21: note = Description of Artificial Sequence: Synthetic oligonucleotide
  source 1..21: mol_type = other DNA
aataatgggaggcctattgcg

SEQ ID NO: 38933 - DNA, 21 bp, synthetic construct
  misc_feature 1..21: note = Description of Artificial Sequence: Synthetic oligonucleotide
  source 1..21: mol_type = other DNA
agcagccccgtcagaaacacc

SEQ ID NO: 38934 - DNA, 21 bp, synthetic construct
  misc_feature 1..21: note = Description of Artificial Sequence: Synthetic oligonucleotide
  source 1..21: mol_type = other DNA
ggcaaaaccaacgtcagcagc

SEQ ID NO: 38935 - DNA, 21 bp, synthetic construct
  misc_feature 1..21: note = Description of Artificial Sequence: Synthetic oligonucleotide
  source 1..21: mol_type = other DNA
gagcctgtgcctaagactagg

SEQ ID NO: 38936 - DNA, 21 bp, synthetic construct
  misc_feature 1..21: note = Description of Artificial Sequence: Synthetic oligonucleotide
  source 1..21: mol_type = other DNA
cagggtcgtgcgaatgggtct

SEQ ID NO: 38937 - DNA, 21 bp, synthetic construct
  misc_feature 1..21: note = Description of Artificial Sequence: Synthetic oligonucleotide
  source 1..21: mol_type = other DNA
ccggggtctgggagtaataat

SEQ ID NO: 38938 - DNA, 21 bp, synthetic construct
  misc_feature 1..21: note = Description of Artificial Sequence: Synthetic oligonucleotide
  source 1..21: mol_type = other DNA
ttgggggttcgtgataatact

SEQ ID NO: 38939 - DNA, 21 bp, synthetic construct
  misc_feature 1..21: note = Description of Artificial Sequence: Synthetic oligonucleotide
  source 1..21: mol_type = other DNA
aacagcgtcgccggcatgggc

SEQ ID NO: 38940 - DNA, 21 bp, synthetic construct
  misc_feature 1..21: note = Description of Artificial Sequence: Synthetic oligonucleotide
  source 1..21: mol_type = other DNA
gtcaacgaaaacagagtcagc

SEQ ID NO: 38941 - DNA, 21 bp, synthetic construct
  misc_feature 1..21: note = Description of Artificial Sequence: Synthetic oligonucleotide
  source 1..21: mol_type = other DNA
ggcaaaaccggccccaacagc

SEQ ID NO: 38942 - DNA, 21 bp, synthetic construct
  misc_feature 1..21: note = Description of Artificial Sequence: Synthetic oligonucleotide
  source 1..21: mol_type = other DNA
ggcctcgaaagcatgagacaa

SEQ ID NO: 38943 - DNA, 21 bp, synthetic construct
  misc_feature 1..21: note = Description of Artificial Sequence: Synthetic oligonucleotide
  source 1..21: mol_type = other DNA
ggcggccacccccccaccagc

SEQ ID NO: 38944 - DNA, 21 bp, synthetic construct
  misc_feature 1..21: note = Description of Artificial Sequence: Synthetic oligonucleotide
  source 1..21: mol_type = other DNA
gcgtcggtgagtcagcggtcg

SEQ ID NO: 38945 - DNA, 21 bp, synthetic construct
  misc_feature 1..21: note = Description of Artificial Sequence: Synthetic oligonucleotide
  source 1..21: mol_type = other DNA
tctaatacgaatgctgctatg

SEQ ID NO: 38946 - DNA, 21 bp, synthetic construct
  misc_feature 1..21: note = Description of Artificial Sequence: Synthetic oligonucleotide
  source 1..21: mol_type = other DNA
agaatgggcgtcagcaacacc

SEQ ID NO: 38947 - DNA, 21 bp, synthetic construct
  misc_feature 1..21: note = Description of Artificial Sequence: Synthetic oligonucleotide
  source 1..21: mol_type = other DNA
gcgctggcttataataagggg

SEQ ID NO: 38948 - DNA, 21 bp, synthetic construct
  misc_feature 1..21: note = Description of Artificial Sequence: Synthetic oligonucleotide
  source 1..21: mol_type = other DNA
aaaatcggcagcatgagcggc

SEQ ID NO: 38949 - DNA, 21 bp, synthetic construct
  misc_feature 1..21: note = Description of Artificial Sequence: Synthetic oligonucleotide
  source 1..21: mol_type = other DNA
ggcgccagcagctacatgaaa

SEQ ID NO: 38950 - DNA, 21 bp, synthetic construct
  misc_feature 1..21: note = Description of Artificial Sequence: Synthetic oligonucleotide
  source 1..21: mol_type = other DNA
agggtggctacgaataatccg

SEQ ID NO: 38951 - DNA, 21 bp, synthetic construct
  misc_feature 1..21: note = Description of Artificial Sequence: Synthetic oligonucleotide
  source 1..21: mol_type = other DNA
cgtgttacggatgctcatctt

SEQ ID NO: 38952 - DNA, 21 bp, synthetic construct
  misc_feature 1..21: note = Description of Artificial Sequence: Synthetic oligonucleotide
  source 1..21: mol_type = other DNA
tacagaagcaaacccctcacc

SEQ ID NO: 38953 - DNA, 21 bp, synthetic construct
  misc_feature 1..21: note = Description of Artificial Sequence: Synthetic oligonucleotide
  source 1..21: mol_type = other DNA
ccccaaagcagccaccaaacc

SEQ ID NO: 38954 - DNA, 21 bp, synthetic construct
  misc_feature 1..21: note = Description of Artificial Sequence: Synthetic oligonucleotide
  source 1..21: mol_type = other DNA
aacggcagccaaggcagacaa

SEQ ID NO: 38955 - DNA, 21 bp, synthetic construct
  misc_feature 1..21: note = Description of Artificial Sequence: Synthetic oligonucleotide
  source 1..21: mol_type = other DNA
ggcagcctcggcggcctcaac

SEQ ID NO: 38956 - DNA, 21 bp, synthetic construct
  misc_feature 1..21: note = Description of Artificial Sequence: Synthetic oligonucleotide
  source 1..21: mol_type = other DNA
cagtcgacgccgcgtatgggt

SEQ ID NO: 38957 - DNA, 21 bp, synthetic construct
  misc_feature 1..21: note = Description of Artificial Sequence: Synthetic oligonucleotide
  source 1..21: mol_type = other DNA
ccccaccaaggcaaacacaac

SEQ ID NO: 38958 - DNA, 21 bp, synthetic construct
  misc_feature 1..21: note = Description of Artificial Sequence: Synthetic oligonucleotide
  source 1..21: mol_type = other DNA
ggcagcggcaacaaagtcaac

SEQ ID NO: 38959 - DNA, 21 bp, synthetic construct
  misc_feature 1..21: note = Description of Artificial Sequence: Synthetic oligonucleotide
  source 1..21: mol_type = other DNA
agcctcagaggcagcaccgcc

SEQ ID NO: 38960 - DNA, 21 bp, synthetic construct
  misc_feature 1..21: note = Description of Artificial Sequence: Synthetic oligonucleotide
  source 1..21: mol_type = other DNA
atgctgaatagtcgtacgtct

SEQ ID NO: 38961 - DNA, 21 bp, synthetic construct
  misc_feature 1..21: note = Description of Artificial Sequence: Synthetic oligonucleotide
  source 1..21: mol_type = other DNA
cgtctgactcagagtagtcag

SEQ ID NO: 38962 - DNA, 21 bp, synthetic construct
  misc_feature 1..21: note = Description of Artificial Sequence: Synthetic oligonucleotide
  source 1..21: mol_type = other DNA
gttggtactaaggctgctacg

SEQ ID NO: 38963 - DNA, 21 bp, synthetic construct
  misc_feature 1..21: note = Description of Artificial Sequence: Synthetic oligonucleotide
  source 1..21: mol_type = other DNA
gtcaacaccagccacaccaac

SEQ ID NO: 38964 - DNA, 21 bp, synthetic construct
  misc_feature 1..21: note = Description of Artificial Sequence: Synthetic oligonucleotide
  source 1..21: mol_type = other DNA
tcgcgtgttagtttgagttcg

SEQ ID NO: 38965 - DNA, 21 bp, synthetic construct
  misc_feature 1..21: note = Description of Artificial Sequence: Synthetic oligonucleotide
  source 1..21: mol_type = other DNA
cataagactacgtctatggct

SEQ ID NO: 38966 - DNA, 21 bp, synthetic construct
  misc_feature 1..21: note = Description of Artificial Sequence: Synthetic oligonucleotide
  source 1..21: mol_type = other DNA
ccccacaccaacaaccccgac

SEQ ID NO: 38967 - DNA, 21 bp, synthetic construct
  misc_feature 1..21: note = Description of Artificial Sequence: Synthetic oligonucleotide
  source 1..21: mol_type = other DNA
gctcagcggtcgactatggtg

SEQ ID NO: 38968 - DNA, 21 bp, synthetic construct
  misc_feature 1..21: note = Description of Artificial Sequence: Synthetic oligonucleotide
  source 1..21: mol_type = other DNA
ccgactatgcagggggttcat

SEQ ID NO: 38969 - DNA, 21 bp, synthetic construct
  misc_feature 1..21: note = Description of Artificial Sequence: Synthetic oligonucleotide
  source 1..21: mol_type = other DNA
agtaatctggggcagtatggg

SEQ ID NO: 38970 - DNA, 21 bp, synthetic construct
  misc_feature 1..21: note = Description of Artificial Sequence: Synthetic oligonucleotide
  source 1..21: mol_type = other DNA
ccttctgggcatgatacggtt

SEQ ID NO: 38971 - DNA, 21 bp, synthetic construct
  misc_feature 1..21: note = Description of Artificial Sequence: Synthetic oligonucleotide
  source 1..21: mol_type = other DNA
gtcggcagaagcagcaacccc

SEQ ID NO: 38972 - DNA, 21 bp, synthetic construct
  misc_feature 1..21: note = Description of Artificial Sequence: Synthetic oligonucleotide
  source 1..21: mol_type = other DNA
ggtggtaatgataggtttcgg

SEQ ID NO: 38973 - DNA, 21 bp, synthetic construct
  misc_feature 1..21: note = Description of Artificial Sequence: Synthetic oligonucleotide
  source 1..21: mol_type = other DNA
aggccgaaggagagtgggtat

SEQ ID NO: 38974 - DNA, 21 bp, synthetic construct
  misc_feature 1..21: note = Description of Artificial Sequence: Synthetic oligonucleotide
  source 1..21: mol_type = other DNA
cctgggacgacttctgcgatg

SEQ ID NO: 38975 - DNA, 21 bp, synthetic construct
  misc_feature 1..21: note = Description of Artificial Sequence: Synthetic oligonucleotide
  source 1..21: mol_type = other DNA
accagccacgtcaacatcgcc

SEQ ID NO: 38976 - DNA, 21 bp, synthetic construct
  misc_feature 1..21: note = Description of Artificial Sequence: Synthetic oligonucleotide
  source 1..21: mol_type = other DNA
aggactcttaatcttaatact

SEQ ID NO: 38977 - DNA, 21 bp, synthetic construct
  misc_feature 1..21: note = Description of Artificial Sequence: Synthetic oligonucleotide
  source 1..21: mol_type = other DNA
gctctttctagtcagaagggt

SEQ ID NO: 38978 - DNA, 21 bp, synthetic construct
  misc_feature 1..21: note = Description of Artificial Sequence: Synthetic oligonucleotide
  source 1..21: mol_type = other DNA
cgttcgcagggttcgtatgcg

SEQ ID NO: 38979 - DNA, 21 bp, synthetic construct
  misc_feature 1..21: note = Description of Artificial Sequence: Synthetic oligonucleotide
  source 1..21: mol_type = other DNA
gtgcatacttcgggggtgcag

SEQ ID NO: 38980 - DNA, 21 bp, synthetic construct
  misc_feature 1..21: note = Description of Artificial Sequence: Synthetic oligonucleotide
  source 1..21: mol_type = other DNA
gaacacgaaaccagcagcaga

SEQ ID NO: 38981 - DNA, 21 bp, synthetic construct
  misc_feature 1..21: note = Description of Artificial Sequence: Synthetic oligonucleotide
  source 1..21: mol_type = other DNA
cccaaaggcgtccacagcatg

SEQ ID NO: 38982 - DNA, 21 bp, synthetic construct
  misc_feature 1..21: note = Description of Artificial Sequence: Synthetic oligonucleotide
  source 1..21: mol_type = other DNA
aacggttctgaacagaatcaa

SEQ ID NO: 38983 - DNA, 21 bp, synthetic construct
  misc_feature 1..21: note = Description of Artificial Sequence: Synthetic oligonucleotide
  source 1..21: mol_type = other DNA
gattctaggaataatatgacg

SEQ ID NO: 38984 - DNA, 21 bp, synthetic construct
  misc_feature 1..21: note = Description of Artificial Sequence: Synthetic oligonucleotide
  source 1..21: mol_type = other DNA
gagtcttcttcttctatgggt

SEQ ID NO: 38985 - DNA, 21 bp, synthetic construct
  misc_feature 1..21: note = Description of Artificial Sequence: Synthetic oligonucleotide
  source 1..21: mol_type = other DNA
gggatttctactctttcgagg

SEQ ID NO: 38986 - DNA, 21 bp, synthetic construct
  misc_feature 1..21: note = Description of Artificial Sequence: Synthetic oligonucleotide
  source 1..21: mol_type = other DNA
cataagtctggtttggttgat

SEQ ID NO: 38987 - DNA, 21 bp, synthetic construct
  misc_feature 1..21: note = Description of Artificial Sequence: Synthetic oligonucleotide
  source 1..21: mol_type = other DNA
tgtgggaatgctcctcggact

SEQ ID NO: 38988 - DNA, 21 bp, synthetic construct
  misc_feature 1..21: note = Description of Artificial Sequence: Synthetic oligonucleotide
  source 1..21: mol_type = other DNA
ctcaccagacccaaaatcatc

SEQ ID NO: 38989 - DNA, 21 bp, synthetic construct
  misc_feature 1..21: note = Description of Artificial Sequence: Synthetic oligonucleotide
  source 1..21: mol_type = other DNA
catgtgagtggtaaggctgtt

SEQ ID NO: 38990 - DNA, 21 bp, synthetic construct
  misc_feature 1..21: note = Description of Artificial Sequence: Synthetic oligonucleotide
  source 1..21: mol_type = other DNA
cgtcaggtgtcgactcctctt

SEQ ID NO: 38991 - DNA, 21 bp, synthetic construct
  misc_feature 1..21: note = Description of Artificial Sequence: Synthetic oligonucleotide
  source 1..21: mol_type = other DNA
catggtactagtcctcttcgt

SEQ ID NO: 38992 - DNA, 21 bp, synthetic construct
  misc_feature 1..21: note = Description of Artificial Sequence: Synthetic oligonucleotide
  source 1..21: mol_type = other DNA
ggtcctcttacgcggagtggt

SEQ ID NO: 38993 - DNA, 21 bp, synthetic construct
  misc_feature 1..21: note = Description of Artificial Sequence: Synthetic oligonucleotide
  source 1..21: mol_type = other DNA
caactcggcagcaccaccaga

SEQ ID NO: 38994 - DNA, 21 bp, synthetic construct
  misc_feature 1..21: note = Description of Artificial Sequence: Synthetic oligonucleotide
  source 1..21: mol_type = other DNA
gagcggactggtcgtcctggg

SEQ ID NO: 38995 - DNA, 21 bp, synthetic construct
  misc_feature 1..21: note = Description of Artificial Sequence: Synthetic oligonucleotide
  source 1..21: mol_type = other DNA
gggcaggtgaatcatactact

SEQ ID NO: 38996 - DNA, 21 bp, synthetic construct
  misc_feature 1..21: note = Description of Artificial Sequence: Synthetic oligonucleotide
  source 1..21: mol_type = other DNA
cggccggatcgtactactctg

SEQ ID NO: 38997 - DNA, 21 bp, synthetic construct
  misc_feature 1..21: note = Description of Artificial Sequence: Synthetic oligonucleotide
  source 1..21: mol_type = other DNA
ccgatttcttcgcgtgctggt

SEQ ID NO: 38998 - DNA, 21 bp, synthetic construct
  misc_feature 1..21: note = Description of Artificial Sequence: Synthetic oligonucleotide
  source 1..21: mol_type = other DNA
gaagccaccagcagcaccaaa

SEQ ID NO: 38999 - DNA, 21 bp, synthetic construct
  misc_feature 1..21: note = Description of Artificial Sequence: Synthetic oligonucleotide
  source 1..21: mol_type = other DNA
agaggcgccgccgacagcaac

SEQ ID NO: 39000 - DNA, 21 bp, synthetic construct
  misc_feature 1..21: note = Description of Artificial Sequence: Synthetic oligonucleotide
  source 1..21: mol_type = other DNA
gagcctgcttattctgtgaag

SEQ ID NO: 39001 - DNA, 21 bp, synthetic construct
  misc_feature 1..21: note = Description of Artificial Sequence: Synthetic oligonucleotide
  source 1..21: mol_type = other DNA
caaagcagccaaagcggcccc

SEQ ID NO: 39002 - DNA, 21 bp, synthetic construct
  misc_feature 1..21: note = Description of Artificial Sequence: Synthetic oligonucleotide
  source 1..21: mol_type = other DNA
gtgccgagtcagaatagggct

SEQ ID NO: 39003 - DNA, 21 bp, synthetic construct
  misc_feature 1..21: note = Description of Artificial Sequence: Synthetic oligonucleotide
  source 1..21: mol_type = other DNA
aatcagaagactcgtactgat

SEQ ID NO: 39004 - DNA, 21 bp, synthetic construct
  misc_feature 1..21: note = Description of Artificial Sequence: Synthetic oligonucleotide
  source 1..21: mol_type = other DNA
gtcaacgaccacaacgtcaga

SEQ ID NO: 39005 - DNA, 21 bp, synthetic construct
  misc_feature 1..21: note = Description of Artificial Sequence: Synthetic oligonucleotide
  source 1..21: mol_type = other DNA
gtcgccccccccaaaatcgaa

SEQ ID NO: 39006 - DNA, 21 bp, synthetic construct
  misc_feature 1..21: note = Description of Artificial Sequence: Synthetic oligonucleotide
  source 1..21: mol_type = other DNA
aaggtttcgaagccggcttat

SEQ ID NO: 39007 - DNA, 21 bp, synthetic construct
  misc_feature 1..21: note = Description of Artificial Sequence: Synthetic oligonucleotide
  source 1..21: mol_type = other DNA
tacagaaacatcgaagcccac

SEQ ID NO: 39008 - DNA, 21 bp, synthetic construct
  misc_feature 1..21: note = Description of Artificial Sequence: Synthetic oligonucleotide
  source 1..21: mol_type = other DNA
actacgtctcgggtttctgct

SEQ ID NO: 39009 - DNA, 21 bp, synthetic construct
  misc_feature 1..21: note = Description of Artificial Sequence: Synthetic oligonucleotide
  source 1..21: mol_type = other DNA
aacagcagagtcggccaaagc

SEQ ID NO: 39010 - DNA, 21 bp, synthetic construct
  misc_feature 1..21: note = Description of Artificial Sequence: Synthetic oligonucleotide
  source 1..21: mol_type = other DNA
tcgagtccgtctaatatggcg

SEQ ID NO: 39011 - DNA, 21 bp, synthetic construct
  misc_feature 1..21: note = Description of Artificial Sequence: Synthetic oligonucleotide
  source 1..21: mol_type = other DNA
ccgttgtctaaggatcggctg

SEQ ID NO: 39012 - DNA, 21 bp, synthetic construct
  misc_feature 1..21: note = Description of Artificial Sequence: Synthetic oligonucleotide
  source 1..21: mol_type = other DNA
gcgggtgcgaggtctatgcag

SEQ ID NO: 39013 - DNA, 21 bp, synthetic construct
  misc_feature 1..21: note = Description of Artificial Sequence: Synthetic oligonucleotide
  source 1..21: mol_type = other DNA
tctggtggtgattatgcgaag

SEQ ID NO: 39014 - DNA, 21 bp, synthetic construct
  misc_feature 1..21: note = Description of Artificial Sequence: Synthetic oligonucleotide
  source 1..21: mol_type = other DNA
atgggccacaaagtcgaagcc

SEQ ID NO: 39015 - DNA, 21 bp, synthetic construct
  misc_feature 1..21: note = Description of Artificial Sequence: Synthetic oligonucleotide
  source 1..21: mol_type = other DNA
ggccaagccatgcccttcaaa

SEQ ID NO: 39016 - DNA, 21 bp, synthetic construct
  misc_feature 1..21: note = Description of Artificial Sequence: Synthetic oligonucleotide
  source 1..21: mol_type = other DNA
ccggtgagtggggcgactatt

SEQ ID NO: 39017 - DNA, 21 bp, synthetic construct
  misc_feature 1..21: note = Description of Artificial Sequence: Synthetic oligonucleotide
  source 1..21: mol_type = other DNA
ggccacagccaaagccaccaa

SEQ ID NO: 39018 - DNA, 21 bp, synthetic construct
  misc_feature 1..21: note = Description of Artificial Sequence: Synthetic oligonucleotide
  source 1..21: mol_type = other DNA
tttggtagggcgacttctggt

SEQ ID NO: 39019 - DNA, 21 bp, synthetic construct
  misc_feature 1..21: note = Description of Artificial Sequence: Synthetic oligonucleotide
  source 1..21: mol_type = other DNA
agtagtgcgaatcatcctagg

SEQ ID NO: 39020 - DNA, 21 bp, synthetic construct
  misc_feature 1..21: note = Description of Artificial Sequence: Synthetic oligonucleotide
  source 1..21: mol_type = other DNA
attagttctggtacgcatggg

SEQ ID NO: 39021 - DNA, 21 bp, synthetic construct
  misc_feature 1..21: note = Description of Artificial Sequence: Synthetic oligonucleotide
  source 1..21: mol_type = other DNA
aatattgctagtaaggggccg

SEQ ID NO: 39022 - DNA, 21 bp, synthetic construct
  misc_feature 1..21: note = Description of Artificial Sequence: Synthetic oligonucleotide
  source 1..21: mol_type = other DNA
ccgcttgataagtctatgatg

SEQ ID NO: 39023 - DNA, 21 bp, synthetic construct
  misc_feature 1..21: note = Description of Artificial Sequence: Synthetic oligonucleotide
  source 1..21: mol_type = other DNA
gctggttcggctcctagggtg

SEQ ID NO: 39024 - DNA, 21 bp, synthetic construct
  misc_feature 1..21: note = Description of Artificial Sequence: Synthetic oligonucleotide
  source 1..21: mol_type = other DNA
agaagcaccaacgacggcaga

SEQ ID NO: 39025 - DNA, 21 bp, synthetic construct
  misc_feature 1..21: note = Description of Artificial Sequence: Synthetic oligonucleotide
  source 1..21: mol_type = other DNA
agccccagcagcccccacgac

SEQ ID NO: 39026 - DNA, 21 bp, synthetic construct
  misc_feature 1..21: note = Description of Artificial Sequence: Synthetic oligonucleotide
  source 1..21: mol_type = other DNA
tcgactaagagtaagccgatt

SEQ ID NO: 39027 - DNA, 21 bp, synthetic construct
  misc_feature 1..21: note = Description of Artificial Sequence: Synthetic oligonucleotide
  source 1..21: mol_type = other DNA
actgagaggactaaggctact

SEQ ID NO: 39028 - DNA, 21 bp, synthetic construct
  misc_feature 1..21: note = Description of Artificial Sequence: Synthetic oligonucleotide
  source 1..21: mol_type = other DNA
aagcagacgcattctgggtct

SEQ ID NO: 39029 - DNA, 21 bp, synthetic construct
  misc_feature 1..21: note = Description of Artificial Sequence: Synthetic oligonucleotide
  source 1..21: mol_type = other DNA
gagacgaggaagcagggggtt

SEQ ID NO: 39030 - DNA, 21 bp, synthetic construct
  misc_feature 1..21: note = Description of Artificial Sequence: Synthetic oligonucleotide
  source 1..21: mol_type = other DNA
cccctccccaaaaacagcagc

SEQ ID NO: 39031 - DNA, 21 bp, synthetic construct
  misc_feature 1..21: note = Description of Artificial Sequence: Synthetic oligonucleotide
  source 1..21: mol_type = other DNA
cgttcgagtccggctagtttg

SEQ ID NO: 39032 - DNA, 21 bp, synthetic construct
  misc_feature 1..21: note = Description of Artificial Sequence: Synthetic oligonucleotide
  source 1..21: mol_type = other DNA
agccaaagagccctcagcagc

SEQ ID NO: 39033 - DNA, 21 bp, synthetic construct
  misc_feature 1..21: note = Description of Artificial Sequence: Synthetic oligonucleotide
  source 1..21: mol_type = other DNA
cctcctcagcagtcgccgctg

SEQ ID NO: 39034 - DNA, 21 bp, synthetic construct
  misc_feature 1..21: note = Description of Artificial Sequence: Synthetic oligonucleotide
  source 1..21: mol_type = other DNA
aaaggcaacagcggcgccccc

SEQ ID NO: 39035 - DNA, 21 bp, synthetic construct
  misc_feature 1..21: note = Description of Artificial Sequence: Synthetic oligonucleotide
  source 1..21: mol_type = other DNA
atcagactcggcagcaccaac

SEQ ID NO: 39036 - DNA, 21 bp, synthetic construct
  misc_feature 1..21: note = Description of Artificial Sequence: Synthetic oligonucleotide
  source 1..21: mol_type = other DNA
ccggatgttaaggtgactagg

SEQ ID NO: 39037 - DNA, 21 bp, synthetic construct
  misc_feature 1..21: note = Description of Artificial Sequence: Synthetic oligonucleotide
  source 1..21: mol_type = other DNA
agccccggcaaactcaccacc

SEQ ID NO: 39038 - DNA, 21 bp, synthetic construct
  misc_feature 1..21: note = Description of Artificial Sequence: Synthetic oligonucleotide
  source 1..21: mol_type = other DNA
gggacgaatccttctttggct

SEQ ID NO: 39039 - DNA, 21 bp, synthetic construct
  misc_feature 1..21: note = Description of Artificial Sequence: Synthetic oligonucleotide
  source 1..21: mol_type = other DNA
agcatggtcagcacccccatg

SEQ ID NO: 39040 - DNA, 21 bp, synthetic construct
  misc_feature 1..21: note = Description of Artificial Sequence: Synthetic oligonucleotide
  source 1..21: mol_type = other DNA
cccctcagaggcggcagcagc

SEQ ID NO: 39041 - DNA, 21 bp, synthetic construct
  misc_feature 1..21: note = Description of Artificial Sequence: Synthetic oligonucleotide
  source 1..21: mol_type = other DNA
cggcctcgggatcgtacggat

SEQ ID NO: 39042 - DNA, 21 bp, synthetic construct
  misc_feature 1..21: note = Description of Artificial Sequence: Synthetic oligonucleotide
  source 1..21: mol_type = other DNA
cccaccctcagcggcagcaga

SEQ ID NO: 39043 - DNA, 21 bp, synthetic construct
  misc_feature 1..21: note = Description of Artificial Sequence: Synthetic oligonucleotide
  source 1..21: mol_type = other DNA
ctcgccaccagcagcgtcaga

SEQ ID NO: 39044 - DNA, 21 bp, synthetic construct
  misc_feature 1..21: note = Description of Artificial Sequence: Synthetic oligonucleotide
  source 1..21: mol_type = other DNA
accaccctccccagcagcaaa

SEQ ID NO: 39045 - DNA, 21 bp, synthetic construct
  misc_feature 1..21: note = Description of Artificial Sequence: Synthetic oligonucleotide
  source 1..21: mol_type = other DNA
gatcttactaatcatactaag

SEQ ID NO: 39046 - DNA, 21 bp, synthetic construct
  misc_feature 1..21: note = Description of Artificial Sequence: Synthetic oligonucleotide
  source 1..21: mol_type = other DNA
catacgcctgctgtgggtaag

SEQ ID NO: 39047 - DNA, 21 bp, synthetic construct
  misc_feature 1..21: note = Description of Artificial Sequence: Synthetic oligonucleotide
  source 1..21: mol_type = other DNA
aatcgtgttaagccgatggtg

SEQ ID NO: 39048 - DNA, 21 bp, synthetic construct
  misc_feature 1..21: note = Description of Artificial Sequence: Synthetic oligonucleotide
  source 1..21: mol_type = other DNA
tcgggtgcggggtcggctggg

SEQ ID NO: 39049 - DNA, 21 bp, synthetic construct
  misc_feature 1..21: note = Description of Artificial Sequence: Synthetic oligonucleotide
  source 1..21: mol_type = other DNA
acgctttcttctactggtggt

SEQ ID NO: 39050 - DNA, 21 bp, synthetic construct
  misc_feature 1..21: note = Description of Artificial Sequence: Synthetic oligonucleotide
  source 1..21: mol_type = other DNA
agcctcaccaccaaagccaac

SEQ ID NO: 39051 - DNA, 21 bp, synthetic construct
  misc_feature 1..21: note = Description of Artificial Sequence: Synthetic oligonucleotide
  source 1..21: mol_type = other DNA
agcagaagcaacgccaccgcc

SEQ ID NO: 39052 - DNA, 21 bp, synthetic construct
  misc_feature 1..21: note = Description of Artificial Sequence: Synthetic oligonucleotide
  source 1..21: mol_type = other DNA
ccttcgtctactccgaagctg

SEQ ID NO: 39053 - DNA, 21 bp, synthetic construct
  misc_feature 1..21: note = Description of Artificial Sequence: Synthetic oligonucleotide
  source 1..21: mol_type = other DNA
agacaaaccgtcagcagccac

SEQ ID NO: 39054 - DNA, 21 bp, synthetic construct
  misc_feature 1..21: note = Description of Artificial Sequence: Synthetic oligonucleotide
  source 1..21: mol_type = other DNA
aggcatgagtctaaggcgtat

SEQ ID NO: 39055 - DNA, 21 bp, synthetic construct
  misc_feature 1..21: note = Description of Artificial Sequence: Synthetic oligonucleotide
  source 1..21: mol_type = other DNA
actacttatggtgggaatcgg

SEQ ID NO: 39056 - DNA, 21 bp, synthetic construct
  misc_feature 1..21: note = Description of Artificial Sequence: Synthetic oligonucleotide
  source 1..21: mol_type = other DNA
gccttcagccacagcagcggc

SEQ ID NO: 39057 - DNA, 21 bp, synthetic construct
  misc_feature 1..21: note = Description of Artificial Sequence: Synthetic oligonucleotide
  source 1..21: mol_type = other DNA
caggagactcgtgggaattct

SEQ ID NO: 39058 - DNA, 21 bp, synthetic construct
  misc_feature 1..21: note = Description of Artificial Sequence: Synthetic oligonucleotide
  source 1..21: mol_type = other DNA
gatcctagggctcagagtcat

SEQ ID NO: 39059 - DNA, 21 bp, synthetic construct
  misc_feature 1..21: note = Description of Artificial Sequence: Synthetic oligonucleotide
  source 1..21: mol_type = other DNA
tctcttggttctaatgctaat

SEQ ID NO: 39060 - DNA, 21 bp, synthetic construct
  misc_feature 1..21: note = Description of Artificial Sequence: Synthetic oligonucleotide
  source 1..21: mol_type = other DNA
ggcctcagcagcggcaaaacc

SEQ ID NO: 39061 - DNA, 21 bp, synthetic construct
  misc_feature 1..21: note = Description of Artificial Sequence: Synthetic oligonucleotide
  source 1..21: mol_type = other DNA
tatgcgacggatggtcttaag

SEQ ID NO: 39062 - DNA, 21 bp, synthetic construct
  misc_feature 1..21: note = Description of Artificial Sequence: Synthetic oligonucleotide
  source 1..21: mol_type = other DNA
actcaggggctgggtcatctt

SEQ ID NO: 39063 - DNA, 21 bp, synthetic construct
  misc_feature 1..21: note = Description of Artificial Sequence: Synthetic oligonucleotide
  source 1..21: mol_type = other DNA
gcctgcaacaccagcagatgc

SEQ ID NO: 39064 - DNA, 21 bp, synthetic construct
  misc_feature 1..21: note = Description of Artificial Sequence: Synthetic oligonucleotide
  source 1..21: mol_type = other DNA
aataatggggcttcggttgtg

SEQ ID NO: 39065 - DNA, 21 bp, synthetic construct
  misc_feature 1..21: note = Description of Artificial Sequence: Synthetic oligonucleotide
  source 1..21: mol_type = other DNA
aaaatcctcaacgtcggcacc

SEQ ID NO: 39066 - DNA, 21 bp, synthetic construct
  misc_feature 1..21: note = Description of Artificial Sequence: Synthetic oligonucleotide
  source 1..21: mol_type = other DNA
cagtctatttctcatacgcgt

SEQ ID NO: 39067 - DNA, 21 bp, synthetic construct
  misc_feature 1..21: note = Description of Artificial Sequence: Synthetic oligonucleotide
  source 1..21: mol_type = other DNA
agcgtccaaaaaagcgtcaac

SEQ ID NO: 39068 - DNA, 21 bp, synthetic construct
  misc_feature 1..21: note = Description of Artificial Sequence: Synthetic oligonucleotide
  source 1..21: mol_type = other DNA
agagaaagcagccccagcctc

SEQ ID NO: 39069 - DNA, 21 bp, synthetic construct
  misc_feature 1..21: note = Description of Artificial Sequence: Synthetic oligonucleotide
  source 1..21: mol_type = other DNA
tctgggtctgggattatgatg

SEQ ID NO: 39070 - DNA, 21 bp, synthetic construct
  misc_feature 1..21: note = Description of Artificial Sequence: Synthetic oligonucleotide
  source 1..21: mol_type = other DNA
ggcagcagagacaaaagcacc

SEQ ID NO: 39071 - DNA, 21 bp, synthetic construct
  misc_feature 1..21: note = Description of Artificial Sequence: Synthetic oligonucleotide
  source 1..21: mol_type = other DNA
agtgcggatcggacgtcgaat

SEQ ID NO: 39072 - DNA, 21 bp, synthetic construct
  misc_feature 1..21: note = Description of Artificial Sequence: Synthetic oligonucleotide
  source 1..21: mol_type = other DNA
agcatccacagcgacagaacc

SEQ ID NO: 39073 - DNA, 21 bp, synthetic construct
  misc_feature 1..21: note = Description of Artificial Sequence: Synthetic oligonucleotide
  source 1..21: mol_type = other DNA
ctcagaagcggcgacgtcaga

SEQ ID NO: 39074 - DNA, 21 bp, synthetic construct
  misc_feature 1..21: note = Description of Artificial Sequence: Synthetic oligonucleotide
  source 1..21: mol_type = other DNA
gcccaacaaagagcccaagcc

SEQ ID NO: 39075 - DNA, 21 bp, synthetic construct
  misc_feature 1..21: note = Description of Artificial Sequence: Synthetic oligonucleotide
  source 1..21: mol_type = other DNA
cccgccgccatgagcagcgtc

SEQ ID NO: 39076 - DNA, 21 bp, synthetic construct
  misc_feature 1..21: note = Description of Artificial Sequence: Synthetic oligonucleotide
  source 1..21: mol_type = other DNA
gatgctcagcgtaggggtgtg

SEQ ID NO: 39077 - DNA, 21 bp, synthetic construct
  misc_feature 1..21: note = Description of Artificial Sequence: Synthetic oligonucleotide
  source 1..21: mol_type = other DNA
accatggtccacggcaacacc

SEQ ID NO: 39078 - DNA, 21 bp, synthetic construct
  misc_feature 1..21: note = Description of Artificial Sequence: Synthetic oligonucleotide
  source 1..21: mol_type = other DNA
gagaggcctgggggtacgcct

SEQ ID NO: 39079 - DNA, 21 bp, synthetic construct
  misc_feature 1..21: note = Description of Artificial Sequence: Synthetic oligonucleotide
  source 1..21: mol_type = other DNA
gctggtgtgacgactgttaat

SEQ ID NO: 39080 - DNA, 21 bp, synthetic construct
  misc_feature 1..21: note = Description of Artificial Sequence: Synthetic oligonucleotide
  source 1..21: mol_type = other DNA
cgtaatgttgataagtcgagt

SEQ ID NO: 39081 - DNA, 21 bp, synthetic construct
  misc_feature 1..21: note = Description of Artificial Sequence: Synthetic oligonucleotide
  source 1..21: mol_type = other DNA
tatattcataatccgactggt

SEQ ID NO: 39082 - DNA, 21 bp, synthetic construct
  misc_feature 1..21: note = Description of Artificial Sequence: Synthetic oligonucleotide
  source 1..21: mol_type = other DNA
tctatgtctgagcatctgaag

SEQ ID NO: 39083 - DNA, 21 bp, synthetic construct
  misc_feature 1..21: note = Description of Artificial Sequence: Synthetic oligonucleotide
  source 1..21: mol_type = other DNA
tctcgtgcgaattcggttccg

SEQ ID NO: 39084 - DNA, 21 bp, synthetic construct
  misc_feature 1..21: note = Description of Artificial Sequence: Synthetic oligonucleotide
  source 1..21: mol_type = other DNA
accagcgccgccccccacgcc

SEQ ID NO: 39085 - DNA, 21 bp, synthetic construct
  misc_feature 1..21: note = Description of Artificial Sequence: Synthetic oligonucleotide
  source 1..21: mol_type = other DNA
gggcatctttcgccttctagt

SEQ ID NO: 39086 - DNA, 21 bp, synthetic construct
  misc_feature 1..21: note = Description of Artificial Sequence: Synthetic oligonucleotide
  source 1..21: mol_type = other DNA
cccacccaaaacggcagaagc

SEQ ID NO: 39087 - DNA, 21 bp, synthetic construct
  misc_feature 1..21: note = Description of Artificial Sequence: Synthetic oligonucleotide
  source 1..21: mol_type = other DNA
aagacgccgactcatactatg

SEQ ID NO: 39088 - DNA, 21 bp, synthetic construct
  misc_feature 1..21: note = Description of Artificial Sequence: Synthetic oligonucleotide
  source 1..21: mol_type = other DNA
aattctgtggagcgtactcgt

SEQ ID NO: 39089 - DNA, 21 bp, synthetic construct
  misc_feature 1..21: note = Description of Artificial Sequence: Synthetic oligonucleotide
  source 1..21: mol_type = other DNA
agtattacggatcggcattcg

SEQ ID NO: 39090 - DNA, 21 bp, synthetic construct
  misc_feature 1..21: note = Description of Artificial Sequence: Synthetic oligonucleotide
  source 1..21: mol_type = other DNA
cccttcggcagcagcgccaga

SEQ ID NO: 39091 - DNA, 21 bp, synthetic construct
  misc_feature 1..21: note = Description of Artificial Sequence: Synthetic oligonucleotide
  source 1..21: mol_type = other DNA
attagtgggtctgggtatcat

SEQ ID NO: 39092 - DNA, 21 bp, synthetic construct
  misc_feature 1..21: note = Description of Artificial Sequence: Synthetic oligonucleotide
  source 1..21: mol_type = other DNA
aatgtggataatcgggggttt

SEQ ID NO: 39093 - DNA, 21 bp, synthetic construct
  misc_feature 1..21: note = Description of Artificial Sequence: Synthetic oligonucleotide
  source 1..21: mol_type = other DNA
agtcgggcgcctaatactttg

SEQ ID NO: 39094 - DNA, 21 bp, synthetic construct
  misc_feature 1..21: note = Description of Artificial Sequence: Synthetic oligonucleotide
  source 1..21: mol_type = other DNA
aataggaatgggtttaataat

SEQ ID NO: 39095 - DNA, 21 bp, synthetic construct
  misc_feature 1..21: note = Description of Artificial Sequence: Synthetic oligonucleotide
  source 1..21: mol_type = other DNA
aatgctgagcctacttcgagt

SEQ ID NO: 39096 - DNA, 21 bp, synthetic construct
  misc_feature 1..21: note = Description of Artificial Sequence: Synthetic oligonucleotide
  source 1..21: mol_type = other DNA
atgaatcgtaatggttcgctg

SEQ ID NO: 39097 - DNA, 21 bp, synthetic construct
  misc_feature 1..21: note = Description of Artificial Sequence: Synthetic oligonucleotide
  source 1..21: mol_type = other DNA
caccaacccgaaaaaatcgcc

SEQ ID NO: 39098 - DNA, 21 bp, synthetic construct
  misc_feature 1..21: note = Description of Artificial Sequence: Synthetic oligonucleotide
  source 1..21: mol_type = other DNA
agctacagcgaactcgtcaga

SEQ ID NO: 39099 - DNA, 21 bp, synthetic construct
  misc_feature 1..21: note = Description of Artificial Sequence: Synthetic oligonucleotide
  source 1..21: mol_type = other DNA
cctgtggtgactggtgtgcct

SEQ ID NO: 39100 - DNA, 21 bp, synthetic construct
  misc_feature 1..21: note = Description of Artificial Sequence: Synthetic oligonucleotide
  source 1..21: mol_type = other DNA
gccgacctcaccagaagcagc

SEQ ID NO: 39101 - DNA, 21 bp, synthetic construct
  misc_feature 1..21: note = Description of Artificial Sequence: Synthetic oligonucleotide
  source 1..21: mol_type = other DNA
agatacgacaaacaaaacagc

SEQ ID NO: 39102 - DNA, 21 bp, synthetic construct
  misc_feature 1..21: note = Description of Artificial Sequence: Synthetic oligonucleotide
  source 1..21: mol_type = other DNA
tgggggcggagttctatggat

SEQ ID NO: 39103 - DNA, 21 bp, synthetic construct
  misc_feature 1..21: note = Description of Artificial Sequence: Synthetic oligonucleotide
  source 1..21: mol_type = other DNA
aacgtcagaagcggcaccccc

SEQ ID NO: 39104 - DNA, 21 bp, synthetic construct
  misc_feature 1..21: note = Description of Artificial Sequence: Synthetic oligonucleotide
  source 1..21: mol_type = other DNA
cgtgcgggtagtgctgttgag

SEQ ID NO: 39105 - DNA, 21 bp, synthetic construct
  misc_feature 1..21: note = Description of Artificial Sequence: Synthetic oligonucleotide
  source 1..21: mol_type = other DNA
gccaacggccacccccaaagc

SEQ ID NO: 39106 - DNA, 21 bp, synthetic construct
  misc_feature 1..21: note = Description of Artificial Sequence: Synthetic oligonucleotide
  source 1..21: mol_type = other DNA
tacaccagcaccaacagaccc

SEQ ID NO: 39107 - DNA, 21 bp, synthetic construct
  misc_feature 1..21: note = Description of Artificial Sequence: Synthetic oligonucleotide
  source 1..21: mol_type = other DNA
cataatctgaatggttttcat

SEQ ID NO: 39108 - DNA, 21 bp, synthetic construct
  misc_feature 1..21: note = Description of Artificial Sequence: Synthetic oligonucleotide
  source 1..21: mol_type = other DNA
gacatgagagccaccgtcatg

SEQ ID NO: 39109 - DNA, 21 bp, synthetic construct
  misc_feature 1..21: note = Description of Artificial Sequence: Synthetic oligonucleotide
  source 1..21: mol_type = other DNA
tacctcggcagagtccccccc

SEQ ID NO: 39110 - DNA, 21 bp, synthetic construct
  misc_feature 1..21: note = Description of Artificial Sequence: Synthetic oligonucleotide
  source 1..21: mol_type = other DNA
ctcagcggccacgccagcggc

SEQ ID NO: 39111 - DNA, 21 bp, synthetic construct
  misc_feature 1..21: note = Description of Artificial Sequence: Synthetic oligonucleotide
  source 1..21: mol_type = other DNA
tctattccgacgtctgctagg

SEQ ID NO: 39112 - DNA, 21 bp, synthetic construct
  misc_feature 1..21: note = Description of Artificial Sequence: Synthetic oligonucleotide
  source 1..21: mol_type = other DNA
agcagaaacgccgccaacgcc

SEQ ID NO: 39113 - DNA, 21 bp, synthetic construct
  misc_feature 1..21: note = Description of Artificial Sequence: Synthetic oligonucleotide
  source 1..21: mol_type = other DNA
cagatgcctggtcatactggg

SEQ ID NO: 39114 - DNA, 21 bp, synthetic construct
  misc_feature 1..21: note = Description of Artificial Sequence: Synthetic oligonucleotide
  source 1..21: mol_type = other DNA
tgggctggtaataagtctgtg

SEQ ID NO: 39115 - DNA, 21 bp, synthetic construct
  misc_feature 1..21: note = Description of Artificial Sequence: Synthetic oligonucleotide
  source 1..21: mol_type = other DNA
actcttcctcgtactagtggt

SEQ ID NO: 39116 - DNA, 21 bp, synthetic construct
  misc_feature 1..21: note = Description of Artificial Sequence: Synthetic oligonucleotide
  source 1..21: mol_type = other DNA
gtccaaagaaacagcaacacc

SEQ ID NO: 39117 - DNA, 21 bp, synthetic construct
  misc_feature 1..21: note = Description of Artificial Sequence: Synthetic oligonucleotide
  source 1..21: mol_type = other DNA
catattacgtcgaatcatgcg

SEQ ID NO: 39118 - DNA, 21 bp, synthetic construct
  misc_feature 1..21: note = Description of Artificial Sequence: Synthetic oligonucleotide
  source 1..21: mol_type = other DNA
attaatgtgtcgaggagtacg

SEQ ID NO: 39119 - DNA, 21 bp, synthetic construct
  misc_feature 1..21: note = Description of Artificial Sequence: Synthetic oligonucleotide
  source 1..21: mol_type = other DNA
ttgactaatcggtcttcgagt

SEQ ID NO: 39120 - DNA, 21 bp, synthetic construct
  misc_feature 1..21: note = Description of Artificial Sequence: Synthetic oligonucleotide
  source 1..21: mol_type = other DNA
accagagacagccaagtcctc

SEQ ID NO: 39121 - DNA, 21 bp, synthetic construct
  misc_feature 1..21: note = Description of Artificial Sequence: Synthetic oligonucleotide
  source 1..21: mol_type = other DNA
aggactgtgaatagtgctaat

SEQ ID NO: 39122 - DNA, 21 bp, synthetic construct
  misc_feature 1..21: note = Description of Artificial Sequence: Synthetic oligonucleotide
  source 1..21: mol_type = other DNA
accaccaacaacatccaaggc

SEQ ID NO: 39123 - DNA, 21 bp, synthetic construct
  misc_feature 1..21: note = Description of Artificial Sequence: Synthetic oligonucleotide
  source 1..21: mol_type = other DNA
gggattaattctcgggggtcg

SEQ ID NO: 39124 - DNA, 21 bp, synthetic construct
  misc_feature 1..21: note = Description of Artificial Sequence: Synthetic oligonucleotide
  source 1..21: mol_type = other DNA
ctcggcagcagcggcagcaga

SEQ ID NO: 39125 - DNA, 21 bp, synthetic construct
  misc_feature 1..21: note = Description of Artificial Sequence: Synthetic oligonucleotide
  source 1..21: mol_type = other DNA
acccaaagaagccaaaccgcc

SEQ ID NO: 39126 - DNA, 21 bp, synthetic construct
  misc_feature 1..21: note = Description of Artificial Sequence: Synthetic oligonucleotide
  source 1..21: mol_type = other DNA
ggtagtgcgggtaatatgctt

SEQ ID NO: 39127 - DNA, 21 bp, synthetic construct
  misc_feature 1..21: note = Description of Artificial Sequence: Synthetic oligonucleotide
  source 1..21: mol_type = other DNA
gctcctagtgctggtaattct

SEQ ID NO: 39128 - DNA, 21 bp, synthetic construct
  misc_feature 1..21: note = Description of Artificial Sequence: Synthetic oligonucleotide
  source 1..21: mol_type = other DNA
ggcgtcagccaaggcaacaga

SEQ ID NO: 39129 - DNA, 21 bp, synthetic construct
  misc_feature 1..21: note = Description of Artificial Sequence: Synthetic oligonucleotide
  source 1..21: mol_type = other DNA
ctcaccaccggcaaccacatc

SEQ ID NO: 39130 - DNA, 21 bp, synthetic construct
  misc_feature 1..21: note = Description of Artificial Sequence: Synthetic oligonucleotide
  source 1..21: mol_type = other DNA
actcgttctactagtgcgact

SEQ ID NO: 39131 - DNA, 21 bp, synthetic construct
  misc_feature 1..21: note = Description of Artificial Sequence: Synthetic oligonucleotide
  source 1..21: mol_type = other DNA
ctccaaaaacccagcctcgtc

SEQ ID NO: 39132 - DNA, 21 bp, synthetic construct
  misc_feature 1..21: note = Description of Artificial Sequence: Synthetic oligonucleotide
  source 1..21: mol_type = other DNA
ggctacgccagcgtccccaga

SEQ ID NO: 39133 - DNA, 21 bp, synthetic construct
  misc_feature 1..21: note = Description of Artificial Sequence: Synthetic oligonucleotide
  source 1..21: mol_type = other DNA
cattatggtccggattcgaag

SEQ ID NO: 39134 - DNA, 21 bp, synthetic construct
  misc_feature 1..21: note = Description of Artificial Sequence: Synthetic oligonucleotide
  source 1..21: mol_type = other DNA
aatcgtgtgaataatgagatg

SEQ ID NO: 39135 - DNA, 21 bp, synthetic construct
  misc_feature 1..21: note = Description of Artificial Sequence: Synthetic oligonucleotide
  source 1..21: mol_type = other DNA
ggtcttcttggtgcttctact

SEQ ID NO: 39136 - DNA, 21 bp, synthetic construct
  misc_feature 1..21: note = Description of Artificial Sequence: Synthetic oligonucleotide
  source 1..21: mol_type = other DNA
agcggcagcgaacacctcaga

SEQ ID NO: 39137 - DNA, 21 bp, synthetic construct
  misc_feature 1..21: note = Description of Artificial Sequence: Synthetic oligonucleotide
  source 1..21: mol_type = other DNA
gctcctcctaatgggtcgctt

SEQ ID NO: 39138 - DNA, 21 bp, synthetic construct
  misc_feature 1..21: note = Description of Artificial Sequence: Synthetic oligonucleotide
  source 1..21: mol_type = other DNA
gggcgggagagtaatctgagt

SEQ ID NO: 39139 - DNA, 21 bp, synthetic construct
  misc_feature 1..21: note = Description of Artificial Sequence: Synthetic oligonucleotide
  source 1..21: mol_type = other DNA
ttgaatcagcattcgagtctt

SEQ ID NO: 39140 - DNA, 21 bp, synthetic construct
  misc_feature 1..21: note = Description of Artificial Sequence: Synthetic oligonucleotide
  source 1..21: mol_type = other DNA
atggggggtgttacgtcttct

SEQ ID NO: 39141 - DNA, 21 bp, synthetic construct
  misc_feature 1..21: note = Description of Artificial Sequence: Synthetic oligonucleotide
  source 1..21: mol_type = other DNA
aacggttctggacagcatcaa

SEQ ID NO: 39142 - DNA, 21 bp, synthetic construct
  misc_feature 1..21: note = Description of Artificial Sequence: Synthetic oligonucleotide
  source 1..21: mol_type = other DNA
aagagtgatgctcatacggct

SEQ ID NO: 39143 - DNA, 21 bp, synthetic construct
  misc_feature 1..21: note = Description of Artificial Sequence: Synthetic oligonucleotide
  source 1..21: mol_type = other DNA
ggccccaaccccatcaacggc

SEQ ID NO: 39144 - DNA, 21 bp, synthetic construct
  misc_feature 1..21: note = Description of Artificial Sequence: Synthetic oligonucleotide
  source 1..21: mol_type = other DNA
ctcatgcaaacccacggcagc

SEQ ID NO: 39145 - DNA, 21 bp, synthetic construct
  misc_feature 1..21: note = Description of Artificial Sequence: Synthetic oligonucleotide
  source 1..21: mol_type = other DNA
gggagtcgtgataattcgcgt

SEQ ID NO: 39146 - DNA, 21 bp, synthetic construct
  misc_feature 1..21: note = Description of Artificial Sequence: Synthetic oligonucleotide
  source 1..21: mol_type = other DNA
tgcagaagcaacgccaaatgc

SEQ ID NO: 39147 - DNA, 21 bp, synthetic construct
  misc_feature 1..21: note = Description of Artificial Sequence: Synthetic oligonucleotide
  source 1..21: mol_type = other DNA
cttgatagtcgggcgacggag

SEQ ID NO: 39148 - DNA, 21 bp, synthetic construct
  misc_feature 1..21: note = Description of Artificial Sequence: Synthetic oligonucleotide
  source 1..21: mol_type = other DNA
gcttcgtcgtctaagtctgtt

SEQ ID NO: 39149 - DNA, 21 bp, synthetic construct
  misc_feature 1..21: note = Description of Artificial Sequence: Synthetic oligonucleotide
  source 1..21: mol_type = other DNA
agtgttcattcgaatgcgatt

SEQ ID NO: 39150 - DNA, 21 bp, synthetic construct
  misc_feature 1..21: note = Description of Artificial Sequence: Synthetic oligonucleotide
  source 1..21: mol_type = other DNA
agaacccaagcccacaacgtc

SEQ ID NO: 39151 - DNA, 21 bp, synthetic construct
  misc_feature 1..21: note = Description of Artificial Sequence: Synthetic oligonucleotide
  source 1..21: mol_type = other DNA
accagcagcgccagagtcacc

SEQ ID NO: 39152 - DNA, 21 bp, synthetic construct
  misc_feature 1..21: note = Description of Artificial Sequence: Synthetic oligonucleotide
  source 1..21: mol_type = other DNA
gatggtcgtactcattcgtgt

SEQ ID NO: 39153 - DNA, 21 bp, synthetic construct
  misc_feature 1..21: note = Description of Artificial Sequence: Synthetic oligonucleotide
  source 1..21: mol_type = other DNA
tgggccgtcagcagacccacc

SEQ ID NO: 39154 - DNA, 21 bp, synthetic construct
  misc_feature 1..21: note = Description of Artificial Sequence: Synthetic oligonucleotide
  source 1..21: mol_type = other DNA
gatcctctgaggaatagtaat

SEQ ID NO: 39155 - DNA, 21 bp, synthetic construct
  misc_feature 1..21: note = Description of Artificial Sequence: Synthetic oligonucleotide
  source 1..21: mol_type = other DNA
ctgtcttcttctcatacgctg

SEQ ID NO: 39156 - DNA, 21 bp, synthetic construct
  misc_feature 1..21: note = Description of Artificial Sequence: Synthetic oligonucleotide
  source 1..21: mol_type = other DNA
tctcatcctagttcttttggg

SEQ ID NO: 39157 - DNA, 21 bp, synthetic construct
  misc_feature 1..21: note = Description of Artificial Sequence: Synthetic oligonucleotide
  source 1..21: mol_type = other DNA
tctactatgcataagaatgtt

SEQ ID NO: 39158 - DNA, 21 bp, synthetic construct
  misc_feature 1..21: note = Description of Artificial Sequence: Synthetic oligonucleotide
  source 1..21: mol_type = other DNA
tcgactgatttgaagtctagg

SEQ ID NO: 39159 - DNA, 21 bp, synthetic construct
  misc_feature 1..21: note = Description of Artificial Sequence: Synthetic oligonucleotide
  source 1..21: mol_type = other DNA
agacccgtcgtcgccagcacc

SEQ ID NO: 39160 - DNA, 21 bp, synthetic construct
  misc_feature 1..21: note = Description of Artificial Sequence: Synthetic oligonucleotide
  source 1..21: mol_type = other DNA
caactcagagtcggcaacggc

SEQ ID NO: 39161 - DNA, 21 bp, synthetic construct
  misc_feature 1..21: note = Description of Artificial Sequence: Synthetic oligonucleotide
  source 1..21: mol_type = other DNA
ggggcgatttcgaatgagcat

SEQ ID NO: 39162 - DNA, 21 bp, synthetic construct
  misc_feature 1..21: note = Description of Artificial Sequence: Synthetic oligonucleotide
  source 1..21: mol_type = other DNA
cacaaaaccggcgccaacgtc

SEQ ID NO: 39163 - DNA, 21 bp, synthetic construct
  misc_feature 1..21: note = Description of Artificial Sequence: Synthetic oligonucleotide
  source 1..21: mol_type = other DNA
agtggtccgactcagattcgg

SEQ ID NO: 39164 - DNA, 21 bp, synthetic construct
  misc_feature 1..21: note = Description of Artificial Sequence: Synthetic oligonucleotide
  source 1..21: mol_type = other DNA
atgagcagcaccagaagcatc

SEQ ID NO: 39165 - DNA, 21 bp, synthetic construct
  misc_feature 1..21: note = Description of Artificial Sequence: Synthetic oligonucleotide
  source 1..21: mol_type = other DNA
aacgccgtcagaagcgaaaac

SEQ ID NO: 39166 - DNA, 21 bp, synthetic construct
  misc_feature 1..21: note = Description of Artificial Sequence: Synthetic oligonucleotide
  source 1..21: mol_type = other DNA
tattcgatgaggcctactgag

SEQ ID NO: 39167 - DNA, 21 bp, synthetic construct
  misc_feature 1..21: note = Description of Artificial Sequence: Synthetic oligonucleotide
  source 1..21: mol_type = other DNA
gaaggccccagcagcccccac

SEQ ID NO: 39168 - DNA, 21 bp, synthetic construct
  misc_feature 1..21: note = Description of Artificial Sequence: Synthetic oligonucleotide
  source 1..21: mol_type = other DNA
ggtggggttggtgggaagtct

SEQ ID NO: 39169 - DNA, 21 bp, synthetic construct
  misc_feature 1..21: note = Description of Artificial Sequence: Synthetic oligonucleotide
  source 1..21: mol_type = other DNA
gattcgactcatcgtgctact

SEQ ID NO: 39170 - DNA, 21 bp, synthetic construct
  misc_feature 1..21: note = Description of Artificial Sequence: Synthetic oligonucleotide
  source 1..21: mol_type = other DNA
atgtctgctaatcagcatcgt

SEQ ID NO: 39171 - DNA, 21 bp, synthetic construct
  misc_feature 1..21: note = Description of Artificial Sequence: Synthetic oligonucleotide
  source 1..21: mol_type = other DNA
cctgcgtcgaatgttaggggt

SEQ ID NO: 39172 - DNA, 21 bp, synthetic construct
  misc_feature 1..21: note = Description of Artificial Sequence: Synthetic oligonucleotide
  source 1..21: mol_type = other DNA
ccgagtgtgcgtactcttggg

SEQ ID NO: 39173 - DNA, 21 bp, synthetic construct
  misc_feature 1..21: note = Description of Artificial Sequence: Synthetic oligonucleotide
  source 1..21: mol_type = other DNA
caggctcaggggtctatgcag

SEQ ID NO: 39174 - DNA, 21 bp, synthetic construct
  misc_feature 1..21: note = Description of Artificial Sequence: Synthetic oligonucleotide
  source 1..21: mol_type = other DNA
cagagggttcatccgagtggg

SEQ ID NO: 39175 - DNA, 21 bp, synthetic construct
  misc_feature 1..21: note = Description of Artificial Sequence: Synthetic oligonucleotide
  source 1..21: mol_type = other DNA
gatccgcattcgggtgggaag

SEQ ID NO: 39176 - DNA, 21 bp, synthetic construct
  misc_feature 1..21: note = Description of Artificial Sequence: Synthetic oligonucleotide
  source 1..21: mol_type = other DNA
tatttgacgagtacgtctaat

SEQ ID NO: 39177 - DNA, 21 bp, synthetic construct
  misc_feature 1..21: note = Description of Artificial Sequence: Synthetic oligonucleotide
  source 1..21: mol_type = other DNA
agggttattacggggcagcat

SEQ ID NO: 39178 - DNA, 21 bp, synthetic construct
  misc_feature 1..21: note = Description of Artificial Sequence: Synthetic oligonucleotide
  source 1..21: mol_type = other DNA
tcgcctcataagcaggcgaat

SEQ ID NO: 39179 - DNA, 21 bp, synthetic construct
  misc_feature 1..21: note = Description of Artificial Sequence: Synthetic oligonucleotide
  source 1..21: mol_type = other DNA
aaagtcagcagcgccaccccc

SEQ ID NO: 39180 - DNA, 21 bp, synthetic construct
  misc_feature 1..21: note = Description of Artificial Sequence: Synthetic oligonucleotide
  source 1..21: mol_type = other DNA
ggtactgcgaggggggttgct

SEQ ID NO: 39181 - DNA, 21 bp, synthetic construct
  misc_feature 1..21: note = Description of Artificial Sequence: Synthetic oligonucleotide
  source 1..21: mol_type = other DNA
ccgtatgcgcgtaatgcggag

SEQ ID NO: 39182 - DNA, 21 bp, synthetic construct
  misc_feature 1..21: note = Description of Artificial Sequence: Synthetic oligonucleotide
  source 1..21: mol_type = other DNA
tttgtgaatactagtgcgcag

SEQ ID NO: 39183 - DNA, 21 bp, synthetic construct
  misc_feature 1..21: note = Description of Artificial Sequence: Synthetic oligonucleotide
  source 1..21: mol_type = other DNA
gggcgtaattctcattttgtg

SEQ ID NO: 39184 - DNA, 21 bp, synthetic construct
  misc_feature 1..21: note = Description of Artificial Sequence: Synthetic oligonucleotide
  source 1..21: mol_type = other DNA
gatatgagtgtgcataatgtg

SEQ ID NO: 39185 - DNA, 21 bp, synthetic construct
  misc_feature 1..21: note = Description of Artificial Sequence: Synthetic oligonucleotide
  source 1..21: mol_type = other DNA
cctatgctgcagcatcgggct

SEQ ID NO: 39186 - DNA, 21 bp, synthetic construct
  misc_feature 1..21: note = Description of Artificial Sequence: Synthetic oligonucleotide
  source 1..21: mol_type = other DNA
ttgtctcagagtaatactcat

SEQ ID NO: 39187 - DNA, 21 bp, synthetic construct
  misc_feature 1..21: note = Description of Artificial Sequence: Synthetic oligonucleotide
  source 1..21: mol_type = other DNA
agagcccccaaaagcagcagc

SEQ ID NO: 39188 - DNA, 21 bp, synthetic construct
  misc_feature 1..21: note = Description of Artificial Sequence: Synthetic oligonucleotide
  source 1..21: mol_type = other DNA
caacccggcgtcagcggcaga

SEQ ID NO: 39189 - DNA, 21 bp, synthetic construct
  misc_feature 1..21: note = Description of Artificial Sequence: Synthetic oligonucleotide
  source 1..21: mol_type = other DNA
ccgagtgaggtgaggtcttct

SEQ ID NO: 39190 - DNA, 21 bp, synthetic construct
  misc_feature 1..21: note = Description of Artificial Sequence: Synthetic oligonucleotide
  source 1..21: mol_type = other DNA
gggattacgcatggttctcat

SEQ ID NO: 39191 - DNA, 21 bp, synthetic construct
  misc_feature 1..21: note = Description of Artificial Sequence: Synthetic oligonucleotide
  source 1..21: mol_type = other DNA
aacaacagcagcggcgcccaa

SEQ ID NO: 39192 - DNA, 21 bp, synthetic construct
  misc_feature 1..21: note = Description of Artificial Sequence: Synthetic oligonucleotide
  source 1..21: mol_type = other DNA
ttcagcgtccaaggccaatgc

SEQ ID NO: 39193 - DNA, 21 bp, synthetic construct
  misc_feature 1..21: note = Description of Artificial Sequence: Synthetic oligonucleotide
  source 1..21: mol_type = other DNA
cctaaggttcatcctttgaag

SEQ ID NO: 39194 - DNA, 21 bp, synthetic construct
  misc_feature 1..21: note = Description of Artificial Sequence: Synthetic oligonucleotide
  source 1..21: mol_type = other DNA
actaattcgcaggttccgcgt

SEQ ID NO: 39195 - DNA, 21 bp, synthetic construct
  misc_feature 1..21: note = Description of Artificial Sequence: Synthetic oligonucleotide
  source 1..21: mol_type = other DNA
tacggcagcggccaaaaccaa

SEQ ID NO: 39196 - DNA, 21 bp, synthetic construct
  misc_feature 1..21: note = Description of Artificial Sequence: Synthetic oligonucleotide
  source 1..21: mol_type = other DNA
tctcaggtgtcgaagccgcag

SEQ ID NO: 39197 - DNA, 21 bp, synthetic construct
  misc_feature 1..21: note = Description of Artificial Sequence: Synthetic oligonucleotide
  source 1..21: mol_type = other DNA
tcgagtccgtctcatatggcg

SEQ ID NO: 39198 - DNA, 21 bp, synthetic construct
  misc_feature 1..21: note = Description of Artificial Sequence: Synthetic oligonucleotide
  source 1..21: mol_type = other DNA
gatcgtcaggggttgtctggg

SEQ ID NO: 39199 - DNA, 21 bp, synthetic construct
  misc_feature 1..21: note = Description of Artificial Sequence: Synthetic oligonucleotide
  source 1..21: mol_type = other DNA
acgaggcagggtatgggtagt

SEQ ID NO: 39200 - DNA, 21 bp, synthetic construct
  misc_feature 1..21: note = Description of Artificial Sequence: Synthetic oligonucleotide
  source 1..21: mol_type = other DNA
aaaggcttcaaaaccgaaagc

SEQ ID NO: 39201 - DNA, 21 bp, synthetic construct
  misc_feature 1..21: note = Description of Artificial Sequence: Synthetic oligonucleotide
  source 1..21: mol_type = other DNA
actggtcagcagacggctact

SEQ ID NO: 39202 - DNA, 21 bp, synthetic construct
  misc_feature 1..21: note = Description of Artificial Sequence: Synthetic oligonucleotide
  source 1..21: mol_type = other DNA
gtccacgaagcccccctcaga

SEQ ID NO: 39203 - DNA, 21 bp, synthetic construct
  misc_feature 1..21: note = Description of Artificial Sequence: Synthetic oligonucleotide
  source 1..21: mol_type = other DNA
gttactaagtcgggtaatggg

SEQ ID NO: 39204 - DNA, 21 bp, synthetic construct
  misc_feature 1..21: note = Description of Artificial Sequence: Synthetic oligonucleotide
  source 1..21: mol_type = other DNA
agtggtcagcattctttgaat

SEQ ID NO: 39205 - DNA, 21 bp, synthetic construct
  misc_feature 1..21: note = Description of Artificial Sequence: Synthetic oligonucleotide
  source 1..21: mol_type = other DNA
agagaagtcagcagctacaaa

SEQ ID NO: 39206 - DNA, 21 bp, synthetic construct
  misc_feature 1..21: note = Description of Artificial Sequence: Synthetic oligonucleotide
  source 1..21: mol_type = other DNA
cacgccagaagcccccccgtc

SEQ ID NO: 39207 - DNA, 21 bp, synthetic construct
  misc_feature 1..21: note = Description of Artificial Sequence: Synthetic oligonucleotide
  source 1..21: mol_type = other DNA
cataatttgccgcagcatgat

SEQ ID NO: 39208 - DNA, 21 bp, synthetic construct
  misc_feature 1..21: note = Description of Artificial Sequence: Synthetic oligonucleotide
  source 1..21: mol_type = other DNA
gaattcaccaaagtcggcgcc

SEQ ID NO: 39209 - DNA, 21 bp, synthetic construct
  misc_feature 1..21: note = Description of Artificial Sequence: Synthetic oligonucleotide
  source 1..21: mol_type = other DNA
gtgtctaattcgccttcgagg

SEQ ID NO: 39210 - DNA, 21 bp, synthetic construct
  misc_feature 1..21: note = Description of Artificial Sequence: Synthetic oligonucleotide
  source 1..21: mol_type = other DNA
agcatcagccccaacagaacc

SEQ ID NO: 39211 - DNA, 21 bp, synthetic construct
  misc_feature 1..21: note = Description of Artificial Sequence: Synthetic oligonucleotide
  source 1..21: mol_type = other DNA
gtcttcaaccacgccagcaaa

SEQ ID NO: 39212 - DNA, 21 bp, synthetic construct
  misc_feature 1..21: note = Description of Artificial Sequence: Synthetic oligonucleotide
  source 1..21: mol_type = other DNA
gggcttatgactcatagtatt

SEQ ID NO: 39213 - DNA, 21 bp, synthetic construct
  misc_feature 1..21: note = Description of Artificial Sequence: Synthetic oligonucleotide
  source 1..21: mol_type = other DNA
agttttggtacggagaatcgg

SEQ ID NO: 39214 - DNA, 21 bp, synthetic construct
  misc_feature 1..21: note = Description of Artificial Sequence: Synthetic oligonucleotide
  source 1..21: mol_type = other DNA
aagcatggtggtagtagtgtg

SEQ ID NO: 39215 - DNA, 21 bp, synthetic construct
  misc_feature 1..21: note = Description of Artificial Sequence: Synthetic oligonucleotide
  source 1..21: mol_type = other DNA
gaagtcagagccgaccccaga

SEQ ID NO: 39216 - DNA, 21 bp, synthetic construct
  misc_feature 1..21: note = Description of Artificial Sequence: Synthetic oligonucleotide
  source 1..21: mol_type = other DNA
ggtcatatgggttcgattggt

SEQ ID NO: 39217 - DNA, 21 bp, synthetic construct
  misc_feature 1..21: note = Description of Artificial Sequence: Synthetic oligonucleotide
  source 1..21: mol_type = other DNA
ttgcatcagctgagtgctggt

SEQ ID NO: 39218 - DNA, 21 bp, synthetic construct
  misc_feature 1..21: note = Description of Artificial Sequence: Synthetic oligonucleotide
  source 1..21: mol_type = other DNA
acccacaccaacagactcggc

SEQ ID NO: 39219 - DNA, 21 bp, synthetic construct
  misc_feature 1..21: note = Description of Artificial Sequence: Synthetic oligonucleotide
  source 1..21: mol_type = other DNA
agaagcgaaagaacccacagc

SEQ ID NO: 39220 - DNA, 21 bp, synthetic construct
  misc_feature 1..21: note = Description of Artificial Sequence: Synthetic oligonucleotide
  source 1..21: mol_type = other DNA
agcagaatcaacaccagcccc

SEQ ID NO: 39221 - DNA, 21 bp, synthetic construct
  misc_feature 1..21: note = Description of Artificial Sequence: Synthetic oligonucleotide
  source 1..21: mol_type = other DNA
aggcagcttgtggatcctccg

SEQ ID NO: 39222 - DNA, 21 bp, synthetic construct
  misc_feature 1..21: note = Description of Artificial Sequence: Synthetic oligonucleotide
  source 1..21: mol_type = other DNA
gccagaagcagaagcaccgac

SEQ ID NO: 39223 - DNA, 21 bp, synthetic construct
  misc_feature 1..21: note = Description of Artificial Sequence: Synthetic oligonucleotide
  source 1..21: mol_type = other DNA
cgtacgggtcattatcaggat

SEQ ID NO: 39224 - DNA, 21 bp, synthetic construct
  misc_feature 1..21: note = Description of Artificial Sequence: Synthetic oligonucleotide
  source 1..21: mol_type = other DNA
ccttcgttgcagcttatgggt

SEQ ID NO: 39225 - DNA, 21 bp, synthetic construct
  misc_feature 1..21: note = Description of Artificial Sequence: Synthetic oligonucleotide
  source 1..21: mol_type = other DNA
gccagcagcagcagacccagc

SEQ ID NO: 39226 - DNA, 21 bp, synthetic construct
  misc_feature 1..21: note = Description of Artificial Sequence: Synthetic oligonucleotide
  source 1..21: mol_type = other DNA
ggccccagcagccccagactc

SEQ ID NO: 39227 - DNA, 21 bp, synthetic construct
  misc_feature 1..21: note = Description of Artificial Sequence: Synthetic oligonucleotide
  source 1..21: mol_type = other DNA
ggcagagaaaccgtcagcaga

SEQ ID NO: 39228 - DNA, 21 bp, synthetic construct
  misc_feature 1..21: note = Description of Artificial Sequence: Synthetic oligonucleotide
  source 1..21: mol_type = other DNA
cagtcttatgattctcatagg

SEQ ID NO: 39229 - DNA, 21 bp, synthetic construct
  misc_feature 1..21: note = Description of Artificial Sequence: Synthetic oligonucleotide
  source 1..21: mol_type = other DNA
ggggggcagaattctagtaag

SEQ ID NO: 39230 - DNA, 21 bp, synthetic construct
  misc_feature 1..21: note = Description of Artificial Sequence: Synthetic oligonucleotide
  source 1..21: mol_type = other DNA
ggggttcagactgctaggatt

SEQ ID NO: 39231 - DNA, 21 bp, synthetic construct
  misc_feature 1..21: note = Description of Artificial Sequence: Synthetic oligonucleotide
  source 1..21: mol_type = other DNA
acgggtattgctccggttggt

SEQ ID NO: 39232 - DNA, 21 bp, synthetic construct
  misc_feature 1..21: note = Description of Artificial Sequence: Synthetic oligonucleotide
  source 1..21: mol_type = other DNA
aggtcgggggggtcgttgtct

SEQ ID NO: 39233 - DNA, 21 bp, synthetic construct
  misc_feature 1..21: note = Description of Artificial Sequence: Synthetic oligonucleotide
  source 1..21: mol_type = other DNA
atgggtgttggtatgaatggt

SEQ ID NO: 39234 - DNA, 21 bp, synthetic construct
  misc_feature 1..21: note = Description of Artificial Sequence: Synthetic oligonucleotide
  source 1..21: mol_type = other DNA
gtcagaagccaagccatgagc

SEQ ID NO: 39235 - DNA, 21 bp, synthetic construct
  misc_feature 1..21: note = Description of Artificial Sequence: Synthetic oligonucleotide
  source 1..21: mol_type = other DNA
agcaccgccaccaacgtctac

SEQ ID NO: 39236 - DNA, 21 bp, synthetic construct
  misc_feature 1..21: note = Description of Artificial Sequence: Synthetic oligonucleotide
  source 1..21: mol_type = other DNA
ggtactcgtaatgctattgtt

SEQ ID NO: 39237 - DNA, 21 bp, synthetic construct
  misc_feature 1..21: note = Description of Artificial Sequence: Synthetic oligonucleotide
  source 1..21: mol_type = other DNA
gccagaagcgtcaaaagcgtc

SEQ ID NO: 39238 - DNA, 21 bp, synthetic construct
  misc_feature 1..21: note = Description of Artificial Sequence: Synthetic oligonucleotide
  source 1..21: mol_type = other DNA
agcagccaagccaaactcgtc

SEQ ID NO: 39239 - DNA, 21 bp, synthetic construct
  misc_feature 1..21: note = Description of Artificial Sequence: Synthetic oligonucleotide
  source 1..21: mol_type = other DNA
ggcagcgtcaacagaagcagc

SEQ ID NO: 39240 - DNA, 21 bp, synthetic construct
  misc_feature 1..21: note = Description of Artificial Sequence: Synthetic oligonucleotide
  source 1..21: mol_type = other DNA
cacaccagcccccccttcacc

SEQ ID NO: 39241 - DNA, 21 bp, synthetic construct
  misc_feature 1..21: note = Description of Artificial Sequence: Synthetic oligonucleotide
  source 1..21: mol_type = other DNA
ccttctacgtcttctgcgggg

SEQ ID NO: 39242 - DNA, 21 bp, synthetic construct
  misc_feature 1..21: note = Description of Artificial Sequence: Synthetic oligonucleotide
  source 1..21: mol_type = other DNA
acggggacggctactcttcgt

SEQ ID NO: 39243 - DNA, 21 bp, synthetic construct
  misc_feature 1..21: note = Description of Artificial Sequence: Synthetic oligonucleotide
  source 1..21: mol_type = other DNA
atcagcaaagccagcacccac

SEQ ID NO: 39244 - DNA, 21 bp, synthetic construct
  misc_feature 1..21: note = Description of Artificial Sequence: Synthetic oligonucleotide
  source 1..21: mol_type = other DNA
gaactcagaaccaacgccctc

SEQ ID NO: 39245 - DNA, 21 bp, synthetic construct
  misc_feature 1..21: note = Description of Artificial Sequence: Synthetic oligonucleotide
  source 1..21: mol_type = other DNA
ggtcagacgatgtctacgatg

SEQ ID NO: 39246 - DNA, 21 bp, synthetic construct
  misc_feature 1..21: note = Description of Artificial Sequence: Synthetic oligonucleotide
  source 1..21: mol_type = other DNA
ggcgtcaacaacaacatcaac

SEQ ID NO: 39247 - DNA, 21 bp, synthetic construct
  misc_feature 1..21: note = Description of Artificial Sequence: Synthetic oligonucleotide
  source 1..21: mol_type = other DNA
tcgggtagttcgacttttagg

SEQ ID NO: 39248 - DNA, 21 bp, synthetic construct
  misc_feature 1..21: note = Description of Artificial Sequence: Synthetic oligonucleotide
  source 1..21: mol_type = other DNA
agaagcgccaacaccaacgcc

SEQ ID NO: 39249 - DNA, 21 bp, synthetic construct
  misc_feature 1..21: note = Description of Artificial Sequence: Synthetic oligonucleotide
  source 1..21: mol_type = other DNA
ggtgttctggggtcgcctaag

SEQ ID NO: 39250 - DNA, 21 bp, synthetic construct
  misc_feature 1..21: note = Description of Artificial Sequence: Synthetic oligonucleotide
  source 1..21: mol_type = other DNA
gtgatgtcggcgaatactcat

SEQ ID NO: 39251 - DNA, 21 bp, synthetic construct
  misc_feature 1..21: note = Description of Artificial Sequence: Synthetic oligonucleotide
  source 1..21: mol_type = other DNA
tctcggattggtatgagtacg

SEQ ID NO: 39252 - DNA, 21 bp, synthetic construct
  misc_feature 1..21: note = Description of Artificial Sequence: Synthetic oligonucleotide
  source 1..21: mol_type = other DNA
cagcattctcctcggaatggg

SEQ ID NO: 39253 - DNA, 21 bp, synthetic construct
  misc_feature 1..21: note = Description of Artificial Sequence: Synthetic oligonucleotide
  source 1..21: mol_type = other DNA
cctcatggggataagacttct

SEQ ID NO: 39254 - DNA, 21 bp, synthetic construct
  misc_feature 1..21: note = Description of Artificial Sequence: Synthetic oligonucleotide
  source 1..21: mol_type = other DNA
agggagccgatgaagggtagt

SEQ ID NO: 39255 - DNA, 21 bp, synthetic construct
  misc_feature 1..21: note = Description of Artificial Sequence: Synthetic oligonucleotide
  source 1..21: mol_type = other DNA
atgagaagcaaagaaagcgcc

SEQ ID NO: 39256 - DNA, 21 bp, synthetic construct
  misc_feature 1..21: note = Description of Artificial Sequence: Synthetic oligonucleotide
  source 1..21: mol_type = other DNA
tggggcaccagaagcaccgtc

SEQ ID NO: 39257 - DNA, 21 bp, synthetic construct
  misc_feature 1..21: note = Description of Artificial Sequence: Synthetic oligonucleotide
  source 1..21: mol_type = other DNA
cgtaatacttctgcggatcgt

SEQ ID NO: 39258 - DNA, 21 bp, synthetic construct
  misc_feature 1..21: note = Description of Artificial Sequence: Synthetic oligonucleotide
  source 1..21: mol_type = other DNA
tcgtcttcgaataagcatgtt

SEQ ID NO: 39259 - DNA, 21 bp, synthetic construct
  misc_feature 1..21: note = Description of Artificial Sequence: Synthetic oligonucleotide
  source 1..21: mol_type = other DNA
tgtaatggttctaggctggcg

SEQ ID NO: 39260 - DNA, 21 bp, synthetic construct
  misc_feature 1..21: note = Description of Artificial Sequence: Synthetic oligonucleotide
  source 1..21: mol_type = other DNA
caaatgggcagcatgagcggc

SEQ ID NO: 39261 - DNA, 21 bp, synthetic construct
  misc_feature 1..21: note = Description of Artificial Sequence: Synthetic oligonucleotide
  source 1..21: mol_type = other DNA
ccgtcgggtcctgttaggggg

SEQ ID NO: 39262 - DNA, 21 bp, synthetic construct
  misc_feature 1..21: note = Description of Artificial Sequence: Synthetic oligonucleotide
  source 1..21: mol_type = other DNA
gatccgctgcggcattctgtt

SEQ ID NO: 39263 - DNA, 21 bp, synthetic construct
  misc_feature 1..21: note = Description of Artificial Sequence: Synthetic oligonucleotide
  source 1..21: mol_type = other DNA
cctcctgttgctaggtctggt

SEQ ID NO: 39264 - DNA, 21 bp, synthetic construct
  misc_feature 1..21: note = Description of Artificial Sequence: Synthetic oligonucleotide
  source 1..21: mol_type = other DNA
ggcagaccccaaatgcccaac

SEQ ID NO: 39265 - DNA, 21 bp, synthetic construct
  misc_feature 1..21: note = Description of Artificial Sequence: Synthetic oligonucleotide
  source 1..21: mol_type = other DNA
cgttcgaatcctactttggtg

SEQ ID NO: 39266 - DNA, 21 bp, synthetic construct
  misc_feature 1..21: note = Description of Artificial Sequence: Synthetic oligonucleotide
  source 1..21: mol_type = other DNA
ggcctccaaagcaaacaactc

SEQ ID NO: 39267 - DNA, 21 bp, synthetic construct
  misc_feature 1..21: note = Description of Artificial Sequence: Synthetic oligonucleotide
  source 1..21: mol_type = other DNA
cacagaaccacccccgtcagc

SEQ ID NO: 39268 - DNA, 21 bp, synthetic construct
  misc_feature 1..21: note = Description of Artificial Sequence: Synthetic oligonucleotide
  source 1..21: mol_type = other DNA
actccgcattcttctaagggt

SEQ ID NO: 39269 - DNA, 21 bp, synthetic construct
  misc_feature 1..21: note = Description of Artificial Sequence: Synthetic oligonucleotide
  source 1..21: mol_type = other DNA
cagggtacgactgctaggtcg

SEQ ID NO: 39270 - DNA, 21 bp, synthetic construct
  misc_feature 1..21: note = Description of Artificial Sequence: Synthetic oligonucleotide
  source 1..21: mol_type = other DNA
agcgtcagcaccaacttcagc

SEQ ID NO: 39271 - DNA, 21 bp, synthetic construct
  misc_feature 1..21: note = Description of Artificial Sequence: Synthetic oligonucleotide
  source 1..21: mol_type = other DNA
cccatggtcaacaccagcctc

SEQ ID NO: 39272 - DNA, 21 bp, synthetic construct
  misc_feature 1..21: note = Description of Artificial Sequence: Synthetic oligonucleotide
  source 1..21: mol_type = other DNA
ttcaacagcggcagcggcaga

SEQ ID NO: 39273 - DNA, 21 bp, synthetic construct
  misc_feature 1..21: note = Description of Artificial Sequence: Synthetic oligonucleotide
  source 1..21: mol_type = other DNA
ctgtcggcggctcgtagtcag

SEQ ID NO: 39274 - DNA, 21 bp, synthetic construct
  misc_feature 1..21: note = Description of Artificial Sequence: Synthetic oligonucleotide
  source 1..21: mol_type = other DNA
gctcagattaatacgcctact

SEQ ID NO: 39275 - DNA, 21 bp, synthetic construct
  misc_feature 1..21: note = Description of Artificial Sequence: Synthetic oligonucleotide
  source 1..21: mol_type = other DNA
aatgatcaggctaagttgacg

SEQ ID NO: 39276 - DNA, 21 bp, synthetic construct
  misc_feature 1..21: note = Description of Artificial Sequence: Synthetic oligonucleotide
  source 1..21: mol_type = other DNA
gaagccagcagcagcatgggc

SEQ ID NO: 39277 - DNA, 21 bp, synthetic construct
  misc_feature 1..21: note = Description of Artificial Sequence: Synthetic oligonucleotide
  source 1..21: mol_type = other DNA
cagagtcatggtattacgaat

SEQ ID NO: 39278 - DNA, 21 bp, synthetic construct
  misc_feature 1..21: note = Description of Artificial Sequence: Synthetic oligonucleotide
  source 1..21: mol_type = other DNA
gcgacttctaatggtactctg

SEQ ID NO: 39279 - DNA, 21 bp, synthetic construct
  misc_feature 1..21: note = Description of Artificial Sequence: Synthetic oligonucleotide
  source 1..21: mol_type = other DNA
gttcagtattcgcagatgcgg

SEQ ID NO: 39280 - DNA, 21 bp, synthetic construct
  misc_feature 1..21: note = Description of Artificial Sequence: Synthetic oligonucleotide
  source 1..21: mol_type = other DNA
agtaatagtaggcaggctgat

SEQ ID NO: 39281 - DNA, 21 bp, synthetic construct
  misc_feature 1..21: note = Description of Artificial Sequence: Synthetic oligonucleotide
  source 1..21: mol_type = other DNA
agtatttcgggtgagagggat

SEQ ID NO: 39282 - DNA, 21 bp, synthetic construct
  misc_feature 1..21: note = Description of Artificial Sequence: Synthetic oligonucleotide
  source 1..21: mol_type = other DNA
ggcagaagcagccacatggac

SEQ ID NO: 39283 - DNA, 21 bp, synthetic construct
  misc_feature 1..21: note = Description of Artificial Sequence: Synthetic oligonucleotide
  source 1..21: mol_type = other DNA
aaagacgccagcagctggctc

SEQ ID NO: 39284 - DNA, 21 bp, synthetic construct
  misc_feature 1..21: note = Description of Artificial Sequence: Synthetic oligonucleotide
  source 1..21: mol_type = other DNA
gatcctgttctgaagccggct

SEQ ID NO: 39285 - DNA, 21 bp, synthetic construct
  misc_feature 1..21: note = Description of Artificial Sequence: Synthetic oligonucleotide
  source 1..21: mol_type = other DNA
tttgggcagaagccttggaag

SEQ ID NO: 39286 - DNA, 21 bp, synthetic construct
  misc_feature 1..21: note = Description of Artificial Sequence: Synthetic oligonucleotide
  source 1..21: mol_type = other DNA
caggtgacgactattggtgct

SEQ ID NO: 39287 - DNA, 21 bp, synthetic construct
  misc_feature 1..21: note = Description of Artificial Sequence: Synthetic oligonucleotide
  source 1..21: mol_type = other DNA
ccggggtctgggcgtaatcat

SEQ ID NO: 39288 - DNA, 21 bp, synthetic construct
  misc_feature 1..21: note = Description of Artificial Sequence: Synthetic oligonucleotide
  source 1..21: mol_type = other DNA
ggggggcaggctggtacgatt

SEQ ID NO: 39289 - DNA, 21 bp, synthetic construct
  misc_feature 1..21: note = Description of Artificial Sequence: Synthetic oligonucleotide
  source 1..21: mol_type = other DNA
atgcaaagaaacggccacgtc

SEQ ID NO: 39290 - DNA, 21 bp, synthetic construct
  misc_feature 1..21: note = Description of Artificial Sequence: Synthetic oligonucleotide
  source 1..21: mol_type = other DNA
ggggctcgtgaggcttctcgg

SEQ ID NO: 39291 - DNA, 21 bp, synthetic construct
  misc_feature 1..21: note = Description of Artificial Sequence: Synthetic oligonucleotide
  source 1..21: mol_type = other DNA
gatcgggctgatgcgaattct

SEQ ID NO: 39292 - DNA, 21 bp, synthetic construct
  misc_feature 1..21: note = Description of Artificial Sequence: Synthetic oligonucleotide
  source 1..21: mol_type = other DNA
ccgacggttcggtcgtctacg

SEQ ID NO: 39293 - DNA, 21 bp, synthetic construct
  misc_feature 1..21: note = Description of Artificial Sequence: Synthetic oligonucleotide
  source 1..21: mol_type = other DNA
gatagtccgaatcggggtagt

SEQ ID NO: 39294 - DNA, 21 bp, synthetic construct
  misc_feature 1..21: note = Description of Artificial Sequence: Synthetic oligonucleotide
  source 1..21: mol_type = other DNA
gagattagtcgtcctgcttcg

SEQ ID NO: 39295 - DNA, 21 bp, synthetic construct
  misc_feature 1..21: note = Description of Artificial Sequence: Synthetic oligonucleotide
  source 1..21: mol_type = other DNA
ggcatcgccggcgtcaccaga

SEQ ID NO: 39296 - DNA, 21 bp, synthetic construct
  misc_feature 1..21: note = Description of Artificial Sequence: Synthetic oligonucleotide
  source 1..21: mol_type = other DNA
ctcgccagaaacaccacctac

SEQ ID NO: 39297 - DNA, 21 bp, synthetic construct
  misc_feature 1..21: note = Description of Artificial Sequence: Synthetic oligonucleotide
  source 1..21: mol_type = other DNA
agtgatgttcggctttctggt

SEQ ID NO: 39298 - DNA, 21 bp, synthetic construct
  misc_feature 1..21: note = Description of Artificial Sequence: Synthetic oligonucleotide
  source 1..21: mol_type = other DNA
cccgccaaccacaaaaccatg

SEQ ID NO: 39299 - DNA, 21 bp, synthetic construct
  misc_feature 1..21: note = Description of Artificial Sequence: Synthetic oligonucleotide
  source 1..21: mol_type = other DNA
atgggggcgggggcgcttacg

SEQ ID NO: 39300 - DNA, 21 bp, synthetic construct
  misc_feature 1..21: note = Description of Artificial Sequence: Synthetic oligonucleotide
  source 1..21: mol_type = other DNA
accgccagccccaacaacaga

SEQ ID NO: 39301 - DNA, 21 bp, synthetic construct
  misc_feature 1..21: note = Description of Artificial Sequence: Synthetic oligonucleotide
  source 1..21: mol_type = other DNA
aacggcagcgcccaaaaccaa

SEQ ID NO: 39302 - DNA, 21 bp, synthetic construct
  misc_feature 1..21: note = Description of Artificial Sequence: Synthetic oligonucleotide
  source 1..21: mol_type = other DNA
ggcatcacccaaagcggcggc

SEQ ID NO: 39303 - DNA, 21 bp, synthetic construct
  misc_feature 1..21: note = Description of Artificial Sequence: Synthetic oligonucleotide
  source 1..21: mol_type = other DNA
agagaccccaaaagcagcacc

SEQ ID NO: 39304 - DNA, 21 bp, synthetic construct
  misc_feature 1..21: note = Description of Artificial Sequence: Synthetic oligonucleotide
  source 1..21: mol_type = other DNA
gttaggcttggtagtgttaag

SEQ ID NO: 39305 - DNA, 21 bp, synthetic construct
  misc_feature 1..21: note = Description of Artificial Sequence: Synthetic oligonucleotide
  source 1..21: mol_type = other DNA
aattcgcatacgcctgtgcgg

SEQ ID NO: 39306 - DNA, 21 bp, synthetic construct
  misc_feature 1..21: note = Description of Artificial Sequence: Synthetic oligonucleotide
  source 1..21: mol_type = other DNA
agcgccaacaccagagtccaa

SEQ ID NO: 39307 - DNA, 21 bp, synthetic construct
  misc_feature 1..21: note = Description of Artificial Sequence: Synthetic oligonucleotide
  source 1..21: mol_type = other DNA
tctggtcgtgataagattagt

SEQ ID NO: 39308 - DNA, 21 bp, synthetic construct
  misc_feature 1..21: note = Description of Artificial Sequence: Synthetic oligonucleotide
  source 1..21: mol_type = other DNA
gtcagcggcacccccagagtc

SEQ ID NO: 39309 - DNA, 21 bp, synthetic construct
  misc_feature 1..21: note = Description of Artificial Sequence: Synthetic oligonucleotide
  source 1..21: mol_type = other DNA
gtgccggttaataatgagcgt

SEQ ID NO: 39310 - DNA, 21 bp, synthetic construct
  misc_feature 1..21: note = Description of Artificial Sequence: Synthetic oligonucleotide
  source 1..21: mol_type = other DNA
gggaatgagcatcttagggtt

SEQ ID NO: 39311 - DNA, 21 bp, synthetic construct
  misc_feature 1..21: note = Description of Artificial Sequence: Synthetic oligonucleotide
  source 1..21: mol_type = other DNA
tcgggttctagtaagccgact

SEQ ID NO: 39312 - DNA, 21 bp, synthetic construct
  misc_feature 1..21: note = Description of Artificial Sequence: Synthetic oligonucleotide
  source 1..21: mol_type = other DNA
gccgacagaaccaaaatgagc

SEQ ID NO: 39313 - DNA, 21 bp, synthetic construct
  misc_feature 1..21: note = Description of Artificial Sequence: Synthetic oligonucleotide
  source 1..21: mol_type = other DNA
agcggcgccaccacccccaga

SEQ ID NO: 39314 - DNA, 21 bp, synthetic construct
  misc_feature 1..21: note = Description of Artificial Sequence: Synthetic oligonucleotide
  source 1..21: mol_type = other DNA
catgcgcatagtaatgttggt

SEQ ID NO: 39315 - DNA, 21 bp, synthetic construct
  misc_feature 1..21: note = Description of Artificial Sequence: Synthetic oligonucleotide
  source 1..21: mol_type = other DNA
caccccaccagaagcaccgcc

SEQ ID NO: 39316 - DNA, 21 bp, synthetic construct
  misc_feature 1..21: note = Description of Artificial Sequence: Synthetic oligonucleotide
  source 1..21: mol_type = other DNA
atgtcgacttcttcttctcgt

SEQ ID NO: 39317 - DNA, 21 bp, synthetic construct
  misc_feature 1..21: note = Description of Artificial Sequence: Synthetic oligonucleotide
  source 1..21: mol_type = other DNA
agcgccatcagaaacgtcacc

SEQ ID NO: 39318 - DNA, 21 bp, synthetic construct
  misc_feature 1..21: note = Description of Artificial Sequence: Synthetic oligonucleotide
  source 1..21: mol_type = other DNA
accaacgacagaaacgccaga

SEQ ID NO: 39319 - DNA, 21 bp, synthetic construct
  misc_feature 1..21: note = Description of Artificial Sequence: Synthetic oligonucleotide
  source 1..21: mol_type = other DNA
agcgacatcaacagaagcacc

SEQ ID NO: 39320 - DNA, 21 bp, synthetic construct
  misc_feature 1..21: note = Description of Artificial Sequence: Synthetic oligonucleotide
  source 1..21: mol_type = other DNA
agaagcaccagaatcagcgaa

SEQ ID NO: 39321 - DNA, 21 bp, synthetic construct
  misc_feature 1..21: note = Description of Artificial Sequence: Synthetic oligonucleotide
  source 1..21: mol_type = other DNA
tctagggggcagttgagtcag

SEQ ID NO: 39322 - DNA, 21 bp, synthetic construct
  misc_feature 1..21: note = Description of Artificial Sequence: Synthetic oligonucleotide
  source 1..21: mol_type = other DNA
gctcggtctactcatctggag

SEQ ID NO: 39323 - DNA, 21 bp, synthetic construct
  misc_feature 1..21: note = Description of Artificial Sequence: Synthetic oligonucleotide
  source 1..21: mol_type = other DNA
gactaccacaacagcaaactc

SEQ ID NO: 39324 - DNA, 21 bp, synthetic construct
  misc_feature 1..21: note = Description of Artificial Sequence: Synthetic oligonucleotide
  source 1..21: mol_type = other DNA
caacccaacaccacctacaga

SEQ ID NO: 39325 - DNA, 21 bp, synthetic construct
  misc_feature 1..21: note = Description of Artificial Sequence: Synthetic oligonucleotide
  source 1..21: mol_type = other DNA
cagtctggtactaagcagggt

SEQ ID NO: 39326 - DNA, 21 bp, synthetic construct
  misc_feature 1..21: note = Description of Artificial Sequence: Synthetic oligonucleotide
  source 1..21: mol_type = other DNA
ggttatgggtctaaggttagt

SEQ ID NO: 39327 - DNA, 21 bp, synthetic construct
  misc_feature 1..21: note = Description of Artificial Sequence: Synthetic oligonucleotide
  source 1..21: mol_type = other DNA
gatcgggttttgagtcagggg

SEQ ID NO: 39328 - DNA, 21 bp, synthetic construct
  misc_feature 1..21: note = Description of Artificial Sequence: Synthetic oligonucleotide
  source 1..21: mol_type = other DNA
gggcagaatactgtttctcgt

SEQ ID NO: 39329 - DNA, 21 bp, synthetic construct
  misc_feature 1..21: note = Description of Artificial Sequence: Synthetic oligonucleotide
  source 1..21: mol_type = other DNA
gctatgggtcatcctttggcg

SEQ ID NO: 39330 - DNA, 21 bp, synthetic construct
  misc_feature 1..21: note = Description of Artificial Sequence: Synthetic oligonucleotide
  source 1..21: mol_type = other DNA
gcccaccaaagacccatccaa

SEQ ID NO: 39331 - DNA, 21 bp, synthetic construct
  misc_feature 1..21: note = Description of Artificial Sequence: Synthetic oligonucleotide
  source 1..21: mol_type = other DNA
agcagcagcacccacgccgtc

SEQ ID NO: 39332 - DNA, 21 bp, synthetic construct
  misc_feature 1..21: note = Description of Artificial Sequence: Synthetic oligonucleotide
  source 1..21: mol_type = other DNA
ggcggcaccaacaacctcaac

SEQ ID NO: 39333 - DNA, 21 bp, synthetic construct
  misc_feature 1..21: note = Description of Artificial Sequence: Synthetic oligonucleotide
  source 1..21: mol_type = other DNA
cggtctcgtgctgagtcggat

SEQ ID NO: 39334 - DNA, 21 bp, synthetic construct
  misc_feature 1..21: note = Description of Artificial Sequence: Synthetic oligonucleotide
  source 1..21: mol_type = other DNA
atgaacagaaccggcatcaaa

SEQ ID NO: 39335 - DNA, 21 bp, synthetic construct
  misc_feature 1..21: note = Description of Artificial Sequence: Synthetic oligonucleotide
  source 1..21: mol_type = other DNA
atgagcagaagcgaccccccc

SEQ ID NO: 39336 - DNA, 21 bp, synthetic construct
  misc_feature 1..21: note = Description of Artificial Sequence: Synthetic oligonucleotide
  source 1..21: mol_type = other DNA
agttcttctgttatggttagg

SEQ ID NO: 39337 - DNA, 21 bp, synthetic construct
  misc_feature 1..21: note = Description of Artificial Sequence: Synthetic oligonucleotide
  source 1..21: mol_type = other DNA
actcgtgttgttcctcggctt

SEQ ID NO: 39338 - DNA, 21 bp, synthetic construct
  misc_feature 1..21: note = Description of Artificial Sequence: Synthetic oligonucleotide
  source 1..21: mol_type = other DNA
catggtcagaagctgtttgat

SEQ ID NO: 39339 - DNA, 21 bp, synthetic construct
  misc_feature 1..21: note = Description of Artificial Sequence: Synthetic oligonucleotide
  source 1..21: mol_type = other DNA
agcgccagcagaaccatgggc

SEQ ID NO: 39340 - DNA, 21 bp, synthetic construct
  misc_feature 1..21: note = Description of Artificial Sequence: Synthetic oligonucleotide
  source 1..21: mol_type = other DNA
agagcccccggcagcaacacc

SEQ ID NO: 39341 - DNA, 21 bp, synthetic construct
  misc_feature 1..21: note = Description of Artificial Sequence: Synthetic oligonucleotide
  source 1..21: mol_type = other DNA
tcgcgtgttacttctgtttcg

SEQ ID NO: 39342 - DNA, 21 bp, synthetic construct
  misc_feature 1..21: note = Description of Artificial Sequence: Synthetic oligonucleotide
  source 1..21: mol_type = other DNA
gctaattctcgggatgctaag

SEQ ID NO: 39343 - DNA, 21 bp, synthetic construct
  misc_feature 1..21: note = Description of Artificial Sequence: Synthetic oligonucleotide
  source 1..21: mol_type = other DNA
agcgaccacagcagaagcctc

SEQ ID NO: 39344 - DNA, 21 bp, synthetic construct
  misc_feature 1..21: note = Description of Artificial Sequence: Synthetic oligonucleotide
  source 1..21: mol_type = other DNA
gggacgtctaatcggtatacg

SEQ ID NO: 39345 - DNA, 21 bp, synthetic construct
  misc_feature 1..21: note = Description of Artificial Sequence: Synthetic oligonucleotide
  source 1..21: mol_type = other DNA
gggattccgcgtacttcttcg

SEQ ID NO: 39346 - DNA, 21 bp, synthetic construct
  misc_feature 1..21: note = Description of Artificial Sequence: Synthetic oligonucleotide
  source 1..21: mol_type = other DNA
cgtggtaagtcgaatattgat

SEQ ID NO: 39347 - DNA, 21 bp, synthetic construct
  misc_feature 1..21: note = Description of Artificial Sequence: Synthetic oligonucleotide
  source 1..21: mol_type = other DNA
cacgccgaaaccaacctcaga

SEQ ID NO: 39348 - DNA, 21 bp, synthetic construct
  misc_feature 1..21: note = Description of Artificial Sequence: Synthetic oligonucleotide
  source 1..21: mol_type = other DNA
gccggcgaaaacaaactcagc

SEQ ID NO: 39349 - DNA, 21 bp, synthetic construct
  misc_feature 1..21: note = Description of Artificial Sequence: Synthetic oligonucleotide
  source 1..21: mol_type = other DNA
ggtgttaatactggtactcag

SEQ ID NO: 39350 - DNA, 21 bp, synthetic construct
  misc_feature 1..21: note = Description of Artificial Sequence: Synthetic oligonucleotide
  source 1..21: mol_type = other DNA
ccggtgggttcgcgtggtggt

SEQ ID NO: 39351 - DNA, 21 bp, synthetic construct
  misc_feature 1..21: note = Description of Artificial Sequence: Synthetic oligonucleotide
  source 1..21: mol_type = other DNA
agtactatgaagagtgcggcg

SEQ ID NO: 39352 - DNA, 21 bp, synthetic construct
  misc_feature 1..21: note = Description of Artificial Sequence: Synthetic oligonucleotide
  source 1..21: mol_type = other DNA
cttaataagtctacgcttccg

SEQ ID NO: 39353 - DNA, 21 bp, synthetic construct
  misc_feature 1..21: note = Description of Artificial Sequence: Synthetic oligonucleotide
  source 1..21: mol_type = other DNA
cacgacagcagaagcaacgcc

SEQ ID NO: 39354 - DNA, 21 bp, synthetic construct
  misc_feature 1..21: note = Description of Artificial Sequence: Synthetic oligonucleotide
  source 1..21: mol_type = other DNA
ggccccaaaagccccggcacc

SEQ ID NO: 39355 - DNA, 21 bp, synthetic construct
  misc_feature 1..21: note = Description of Artificial Sequence: Synthetic oligonucleotide
  source 1..21: mol_type = other DNA
ggcgaaaacagcgccaaaaga

SEQ ID NO: 39356 - DNA, 21 bp, synthetic construct
  misc_feature 1..21: note = Description of Artificial Sequence: Synthetic oligonucleotide
  source 1..21: mol_type = other DNA
gtccccggcagccaaatcggc

SEQ ID NO: 39357 - DNA, 21 bp, synthetic construct
  misc_feature 1..21: note = Description of Artificial Sequence: Synthetic oligonucleotide
  source 1..21: mol_type = other DNA
ggttttcctagtgggacgagg

SEQ ID NO: 39358 - DNA, 21 bp, synthetic construct
  misc_feature 1..21: note = Description of Artificial Sequence: Synthetic oligonucleotide
  source 1..21: mol_type = other DNA
ctcgacttcaaaaccctcccc

SEQ ID NO: 39359 - DNA, 21 bp, synthetic construct
  misc_feature 1..21: note = Description of Artificial Sequence: Synthetic oligonucleotide
  source 1..21: mol_type = other DNA
catcagggtaatgttatttct

SEQ ID NO: 39360 - DNA, 21 bp, synthetic construct
  misc_feature 1..21: note = Description of Artificial Sequence: Synthetic oligonucleotide
  source 1..21: mol_type = other DNA
ccgatggctcagcagcgggct

SEQ ID NO: 39361 - DNA, 21 bp, synthetic construct
  misc_feature 1..21: note = Description of Artificial Sequence: Synthetic oligonucleotide
  source 1..21: mol_type = other DNA
gtggagcagctggggggtcgt

SEQ ID NO: 39362 - DNA, 21 bp, synthetic construct
  misc_feature 1..21: note = Description of Artificial Sequence: Synthetic oligonucleotide
  source 1..21: mol_type = other DNA
ggtcggagtgatcatactaag

SEQ ID NO: 39363 - DNA, 21 bp, synthetic construct
  misc_feature 1..21: note = Description of Artificial Sequence: Synthetic oligonucleotide
  source 1..21: mol_type = other DNA
catgctaatagtcgtcctgtt

SEQ ID NO: 39364 - DNA, 21 bp, synthetic construct
  misc_feature 1..21: note = Description of Artificial Sequence: Synthetic oligonucleotide
  source 1..21: mol_type = other DNA
aacatccacaaacaaagcgcc

SEQ ID NO: 39365 - DNA, 21 bp, synthetic construct
  misc_feature 1..21: note = Description of Artificial Sequence: Synthetic oligonucleotide
  source 1..21: mol_type = other DNA
gaacacatgacccccagaagc

SEQ ID NO: 39366 - DNA, 21 bp, synthetic construct
  misc_feature 1..21: note = Description of Artificial Sequence: Synthetic oligonucleotide
  source 1..21: mol_type = other DNA
ggcgtcaccggcacccacgtc

SEQ ID NO: 39367 - DNA, 21 bp, synthetic construct
  misc_feature 1..21: note = Description of Artificial Sequence: Synthetic oligonucleotide
  source 1..21: mol_type = other DNA
cccagaaccaacaaccccagc

SEQ ID NO: 39368 - DNA, 21 bp, synthetic construct
  misc_feature 1..21: note = Description of Artificial Sequence: Synthetic oligonucleotide
  source 1..21: mol_type = other DNA
agtgcttctaatgttagtagg

SEQ ID NO: 39369 - DNA, 21 bp, synthetic construct
  misc_feature 1..21: note = Description of Artificial Sequence: Synthetic oligonucleotide
  source 1..21: mol_type = other DNA
agtggtacttctcggtttagt

SEQ ID NO: 39370 - DNA, 21 bp, synthetic construct
  misc_feature 1..21: note = Description of Artificial Sequence: Synthetic oligonucleotide
  source 1..21: mol_type = other DNA
cacagaaccaacggcctcacc

SEQ ID NO: 39371 - DNA, 21 bp, synthetic construct
  misc_feature 1..21: note = Description of Artificial Sequence: Synthetic oligonucleotide
  source 1..21: mol_type = other DNA
cgtacttctaataaggatttg

SEQ ID NO: 39372 - DNA, 21 bp, synthetic construct
  misc_feature 1..21: note = Description of Artificial Sequence: Synthetic oligonucleotide
  source 1..21: mol_type = other DNA
aacggttctggaaagaatcaa

SEQ ID NO: 39373 - DNA, 21 bp, synthetic construct
  misc_feature 1..21: note = Description of Artificial Sequence: Synthetic oligonucleotide
  source 1..21: mol_type = other DNA
gctcggactactaagattcag

SEQ ID NO: 39374 - DNA, 21 bp, synthetic construct
  misc_feature 1..21: note = Description of Artificial Sequence: Synthetic oligonucleotide
  source 1..21: mol_type = other DNA
ctcggcagcagcaccatcctc

SEQ ID NO: 39375 - DNA, 21 bp, synthetic construct
  misc_feature 1..21: note = Description of Artificial Sequence: Synthetic oligonucleotide
  source 1..21: mol_type = other DNA
tctgattctcggtcgggtatg

SEQ ID NO: 39376 - DNA, 21 bp, synthetic construct
  misc_feature 1..21: note = Description of Artificial Sequence: Synthetic oligonucleotide
  source 1..21: mol_type = other DNA
ggtgttggtactccgcgttcg

SEQ ID NO: 39377 - DNA, 21 bp, synthetic construct
  misc_feature 1..21: note = Description of Artificial Sequence: Synthetic oligonucleotide
  source 1..21: mol_type = other DNA
tcgccgatgggtgttactcgg

SEQ ID NO: 39378 - DNA, 21 bp, synthetic construct
  misc_feature 1..21: note = Description of Artificial Sequence: Synthetic oligonucleotide
  source 1..21: mol_type = other DNA
cacggcagcaaaccctacatc

SEQ ID NO: 39379 - DNA, 21 bp, synthetic construct
  misc_feature 1..21: note = Description of Artificial Sequence: Synthetic oligonucleotide
  source 1..21: mol_type = other DNA
gatagtaggcctcgtctggcg

SEQ ID NO: 39380 - DNA, 21 bp, synthetic construct
  misc_feature 1..21: note = Description of Artificial Sequence: Synthetic oligonucleotide
  source 1..21: mol_type = other DNA
cagagttctattcatacgaag

SEQ ID NO: 39381 - DNA, 21 bp, synthetic construct
  misc_feature 1..21: note = Description of Artificial Sequence: Synthetic oligonucleotide
  source 1..21: mol_type = other DNA
atgagcagcagcatgaccctc

SEQ ID NO: 39382 - DNA, 21 bp, synthetic construct
  misc_feature 1..21: note = Description of Artificial Sequence: Synthetic oligonucleotide
  source 1..21: mol_type = other DNA
ccggggattggtacgcctttt

SEQ ID NO: 39383 - DNA, 21 bp, synthetic construct
  misc_feature 1..21: note = Description of Artificial Sequence: Synthetic oligonucleotide
  source 1..21: mol_type = other DNA
agcgtcgccggcatgcaaaga

SEQ ID NO: 39384 - DNA, 21 bp, synthetic construct
  misc_feature 1..21: note = Description of Artificial Sequence: Synthetic oligonucleotide
  source 1..21: mol_type = other DNA
cacgggtcgtctgttcattct

SEQ ID NO: 39385 - DNA, 21 bp, synthetic construct
  misc_feature 1..21: note = Description of Artificial Sequence: Synthetic oligonucleotide
  source 1..21: mol_type = other DNA
cacgtcaaccaagccgccaga

SEQ ID NO: 39386 - DNA, 21 bp, synthetic construct
  misc_feature 1..21: note = Description of Artificial Sequence: Synthetic oligonucleotide
  source 1..21: mol_type = other DNA
cctggtcgtcctcagacggat

SEQ ID NO: 39387 - DNA, 21 bp, synthetic construct
  misc_feature 1..21: note = Description of Artificial Sequence: Synthetic oligonucleotide
  source 1..21: mol_type = other DNA
atggccctccaacccaacaga

SEQ ID NO: 39388 - DNA, 21 bp, synthetic construct
  misc_feature 1..21: note = Description of Artificial Sequence: Synthetic oligonucleotide
  source 1..21: mol_type = other DNA
agcaccatgaccaccagcaga

SEQ ID NO: 39389 - DNA, 21 bp, synthetic construct
  misc_feature 1..21: note = Description of Artificial Sequence: Synthetic oligonucleotide
  source 1..21: mol_type = other DNA
agccacggcgaaagccaaaga

SEQ ID NO: 39390 - DNA, 21 bp, synthetic construct
  misc_feature 1..21: note = Description of Artificial Sequence: Synthetic oligonucleotide
  source 1..21: mol_type = other DNA
caggatgctactcctcgtagt

SEQ ID NO: 39391 - DNA, 21 bp, synthetic construct
  misc_feature 1..21: note = Description of Artificial Sequence: Synthetic oligonucleotide
  source 1..21: mol_type = other DNA
tgtggtaatacgggtcgtagt

SEQ ID NO: 39392 - DNA, 21 bp, synthetic construct
  misc_feature 1..21: note = Description of Artificial Sequence: Synthetic oligonucleotide
  source 1..21: mol_type = other DNA
ccgaatgggagtcctctgagt

SEQ ID NO: 39393 - DNA, 21 bp, synthetic construct
  misc_feature 1..21: note = Description of Artificial Sequence: Synthetic oligonucleotide
  source 1..21: mol_type = other DNA
gaactccacagcaaaaacgcc

SEQ ID NO: 39394 - DNA, 21 bp, synthetic construct
  misc_feature 1..21: note = Description of Artificial Sequence: Synthetic oligonucleotide
  source 1..21: mol_type = other DNA
cccatgagcggcaccagactc

SEQ ID NO: 39395 - DNA, 21 bp, synthetic construct
  misc_feature 1..21: note = Description of Artificial Sequence: Synthetic oligonucleotide
  source 1..21: mol_type = other DNA
atcggcatcaccaaccacagc

SEQ ID NO: 39396 - DNA, 21 bp, synthetic construct
  misc_feature 1..21: note = Description of Artificial Sequence: Synthetic oligonucleotide
  source 1..21: mol_type = other DNA
agcagagtcggcaccgcctgc

SEQ ID NO: 39397 - DNA, 21 bp, synthetic construct
  misc_feature 1..21: note = Description of Artificial Sequence: Synthetic oligonucleotide
  source 1..21: mol_type = other DNA
aatagggtggagcgtgctgtt

SEQ ID NO: 39398 - DNA, 21 bp, synthetic construct
  misc_feature 1..21: note = Description of Artificial Sequence: Synthetic oligonucleotide
  source 1..21: mol_type = other DNA
tctatgtcgccgcgtaatggt

SEQ ID NO: 39399 - DNA, 21 bp, synthetic construct
  misc_feature 1..21: note = Description of Artificial Sequence: Synthetic oligonucleotide
  source 1..21: mol_type = other DNA
gcgaatcttactcagagtcgt

SEQ ID NO: 39400 - DNA, 21 bp, synthetic construct
  misc_feature 1..21: note = Description of Artificial Sequence: Synthetic oligonucleotide
  source 1..21: mol_type = other DNA
ggtcctagtacgcattcgggt

SEQ ID NO: 39401 - DNA, 21 bp, synthetic construct
  misc_feature 1..21: note = Description of Artificial Sequence: Synthetic oligonucleotide
  source 1..21: mol_type = other DNA
ctcagaaacgccagcagcgcc

SEQ ID NO: 39402 - DNA, 21 bp, synthetic construct
  misc_feature 1..21: note = Description of Artificial Sequence: Synthetic oligonucleotide
  source 1..21: mol_type = other DNA
gacccccacaacaccagcaga

SEQ ID NO: 39403 - DNA, 21 bp, synthetic construct
  misc_feature 1..21: note = Description of Artificial Sequence: Synthetic oligonucleotide
  source 1..21: mol_type = other DNA
acgcctacggggcatcgttct

SEQ ID NO: 39404 - DNA, 21 bp, synthetic construct
  misc_feature 1..21: note = Description of Artificial Sequence: Synthetic oligonucleotide
  source 1..21: mol_type = other DNA
aacggttctggacagaagcaa

SEQ ID NO: 39405 - DNA, 21 bp, synthetic construct
  misc_feature 1..21: note = Description of Artificial Sequence: Synthetic oligonucleotide
  source 1..21: mol_type = other DNA
cgtatgccttctgggaattcg

SEQ ID NO: 39406 - DNA, 21 bp, synthetic construct
  misc_feature 1..21: note = Description of Artificial Sequence: Synthetic oligonucleotide
  source 1..21: mol_type = other DNA
agagtcagcagccccagcaac

SEQ ID NO: 39407 - DNA, 21 bp, synthetic construct
  misc_feature 1..21: note = Description of Artificial Sequence: Synthetic oligonucleotide
  source 1..21: mol_type = other DNA
agaagcacccaaagcagcccc

SEQ ID NO: 39408 - DNA, 21 bp, synthetic construct
  misc_feature 1..21: note = Description of Artificial Sequence: Synthetic oligonucleotide
  source 1..21: mol_type = other DNA
tatcagactcctgcttatcgt

SEQ ID NO: 39409 - DNA, 21 bp, synthetic construct
  misc_feature 1..21: note = Description of Artificial Sequence: Synthetic oligonucleotide
  source 1..21: mol_type = other DNA
catcttcatgcgtcgcctgct

SEQ ID NO: 39410 - DNA, 21 bp, synthetic construct
  misc_feature 1..21: note = Description of Artificial Sequence: Synthetic oligonucleotide
  source 1..21: mol_type = other DNA
agaaccagcagcacctacagc

SEQ ID NO: 39411 - DNA, 21 bp, synthetic construct
  misc_feature 1..21: note = Description of Artificial Sequence: Synthetic oligonucleotide
  source 1..21: mol_type = other DNA
agacactacaaaggcgacagc

SEQ ID NO: 39412 - DNA, 21 bp, synthetic construct
  misc_feature 1..21: note = Description of Artificial Sequence: Synthetic oligonucleotide
  source 1..21: mol_type = other DNA
cacaccgccacccccctcctc

SEQ ID NO: 39413 - DNA, 21 bp, synthetic construct
  misc_feature 1..21: note = Description of Artificial Sequence: Synthetic oligonucleotide
  source 1..21: mol_type = other DNA
gccaccagagacagccacagc

SEQ ID NO: 39414 - DNA, 21 bp, synthetic construct
  misc_feature 1..21: note = Description of Artificial Sequence: Synthetic oligonucleotide
  source 1..21: mol_type = other DNA
agtagggttactgggggtact

SEQ ID NO: 39415 - DNA, 21 bp, synthetic construct
  misc_feature 1..21: note = Description of Artificial Sequence: Synthetic oligonucleotide
  source 1..21: mol_type = other DNA
aatacttatcagtctaagaat

SEQ ID NO: 39416 - DNA, 21 bp, synthetic construct
  misc_feature 1..21: note = Description of Artificial Sequence: Synthetic oligonucleotide
  source 1..21: mol_type = other DNA
gtggttcatcagccgtctacc

SEQ ID NO: 39417 - DNA, 21 bp, synthetic construct
  misc_feature 1..21: note = Description of Artificial Sequence: Synthetic oligonucleotide
  source 1..21: mol_type = other DNA
cacagataccaacaagaaacc

SEQ ID NO: 39418 - DNA, 21 bp, synthetic construct
  misc_feature 1..21: note = Description of Artificial Sequence: Synthetic oligonucleotide
  source 1..21: mol_type = other DNA
gccaacggcagcggcgtcggc

SEQ ID NO: 39419 - DNA, 21 bp, synthetic construct
  misc_feature 1..21: note = Description of Artificial Sequence: Synthetic oligonucleotide
  source 1..21: mol_type = other DNA
gatattaatcgtcagaggact

SEQ ID NO: 39420 - DNA, 21 bp, synthetic construct
  misc_feature 1..21: note = Description of Artificial Sequence: Synthetic oligonucleotide
  source 1..21: mol_type = other DNA
ttggcttctagttcttttaat

SEQ ID NO: 39421 - DNA, 21 bp, synthetic construct
  misc_feature 1..21: note = Description of Artificial Sequence: Synthetic oligonucleotide
  source 1..21: mol_type = other DNA
aggagtatttctagtgcggtg

SEQ ID NO: 39422 - DNA, 21 bp, synthetic construct
  misc_feature 1..21: note = Description of Artificial Sequence: Synthetic oligonucleotide
  source 1..21: mol_type = other DNA
ggtcagactagggagtctagt

SEQ ID NO: 39423 - DNA, 21 bp, synthetic construct
  misc_feature 1..21: note = Description of Artificial Sequence: Synthetic oligonucleotide
  source 1..21: mol_type = other DNA
cctcgtcatgctcctcttctg

SEQ ID NO: 39424 - DNA, 21 bp, synthetic construct
  misc_feature 1..21: note = Description of Artificial Sequence: Synthetic oligonucleotide
  source 1..21: mol_type = other DNA
aacaccctccccccctgcaaa

SEQ ID NO: 39425 - DNA, 21 bp, synthetic construct
  misc_feature 1..21: note = Description of Artificial Sequence: Synthetic oligonucleotide
  source 1..21: mol_type = other DNA
gggctggttgagacgtctagg

SEQ ID NO: 39426 - DNA, 21 bp, synthetic construct
  misc_feature 1..21: note = Description of Artificial Sequence: Synthetic oligonucleotide
  source 1..21: mol_type = other DNA
acttcgtctcctcagccgtcg

SEQ ID NO: 39427 - DNA, 21 bp, synthetic construct
  misc_feature 1..21: note = Description of Artificial Sequence: Synthetic oligonucleotide
  source 1..21: mol_type = other DNA
caacccagcgaaaaaagcctc

SEQ ID NO: 39428 - DNA, 21 bp, synthetic construct
  misc_feature 1..21: note = Description of Artificial Sequence: Synthetic oligonucleotide
  source 1..21: mol_type = other DNA
ttccccaacgtcaacagcgcc

SEQ ID NO: 39429 - DNA, 21 bp, synthetic construct
  misc_feature 1..21: note = Description of Artificial Sequence: Synthetic oligonucleotide
  source 1..21: mol_type = other DNA
gggggtaatccttcggggagt

SEQ ID NO: 39430 - DNA, 21 bp, synthetic construct
  misc_feature 1..21: note = Description of Artificial Sequence: Synthetic oligonucleotide
  source 1..21: mol_type = other DNA
cagcttcgttcggatcagact

SEQ ID NO: 39431 - DNA, 21 bp, synthetic construct
  misc_feature 1..21: note = Description of Artificial Sequence: Synthetic oligonucleotide
  source 1..21: mol_type = other DNA
gctacgcattcgaaggctagt

SEQ ID NO: 39432 - DNA, 21 bp, synthetic construct
  misc_feature 1..21: note = Description of Artificial Sequence: Synthetic oligonucleotide
  source 1..21: mol_type = other DNA
gatgctaattctacgcatgct

SEQ ID NO: 39433 - DNA, 21 bp, synthetic construct
  misc_feature 1..21: note = Description of Artificial Sequence: Synthetic oligonucleotide
  source 1..21: mol_type = other DNA
ctgggtgtgaagactccgact

SEQ ID NO: 39434 - DNA, 21 bp, synthetic construct
  misc_feature 1..21: note = Description of Artificial Sequence: Synthetic oligonucleotide
  source 1..21: mol_type = other DNA
ttgactacgtcggtgtataag

SEQ ID NO: 39435 - DNA, 21 bp, synthetic construct
  misc_feature 1..21: note = Description of Artificial Sequence: Synthetic oligonucleotide
  source 1..21: mol_type = other DNA
attatttcgcagcatgggatg

SEQ ID NO: 39436 - DNA, 21 bp, synthetic construct
  misc_feature 1..21: note = Description of Artificial Sequence: Synthetic oligonucleotide
  source 1..21: mol_type = other DNA
aattctggtactagggctaat

SEQ ID NO: 39437 - DNA, 21 bp, synthetic construct
  misc_feature 1..21: note = Description of Artificial Sequence: Synthetic oligonucleotide
  source 1..21: mol_type = other DNA
acgaatgcggcgtcgcatact

SEQ ID NO: 39438 - DNA, 21 bp, synthetic construct
  misc_feature 1..21: note = Description of Artificial Sequence: Synthetic oligonucleotide
  source 1..21: mol_type = other DNA
gaactcagaaacggccacaaa

SEQ ID NO: 39439 - DNA, 21 bp, synthetic construct
  misc_feature 1..21: note = Description of Artificial Sequence: Synthetic oligonucleotide
  source 1..21: mol_type = other DNA
tgcccccaaagagccagcacc

SEQ ID NO: 39440 - DNA, 21 bp, synthetic construct
  misc_feature 1..21: note = Description of Artificial Sequence: Synthetic oligonucleotide
  source 1..21: mol_type = other DNA
ttcctcaccggcagacaaagc

SEQ ID NO: 39441 - DNA, 21 bp, synthetic construct
  misc_feature 1..21: note = Description of Artificial Sequence: Synthetic oligonucleotide
  source 1..21: mol_type = other DNA
gtcagcgacagcaacagcctc

SEQ ID NO: 39442 - DNA, 21 bp, synthetic construct
  misc_feature 1..21: note = Description of Artificial Sequence: Synthetic oligonucleotide
  source 1..21: mol_type = other DNA
tgggcggcgggtagtcataag

SEQ ID NO: 39443 - DNA, 21 bp, synthetic construct
  misc_feature 1..21: note = Description of Artificial Sequence: Synthetic oligonucleotide
  source 1..21: mol_type = other DNA
ggccccggcagcccctggaaa

SEQ ID NO: 39444 - DNA, 21 bp, synthetic construct
  misc_feature 1..21: note = Description of Artificial Sequence: Synthetic oligonucleotide
  source 1..21: mol_type = other DNA
cccttcagccccaccgtcagc

SEQ ID NO: 39445 - DNA, 21 bp, synthetic construct
  misc_feature 1..21: note = Description of Artificial Sequence: Synthetic oligonucleotide
  source 1..21: mol_type = other DNA
cacagcacccccagcaccatg

SEQ ID NO: 39446 - DNA, 21 bp, synthetic construct
  misc_feature 1..21: note = Description of Artificial Sequence: Synthetic oligonucleotide
  source 1..21: mol_type = other DNA
gttcgggcggctagtaatcct

SEQ ID NO: 39447 - DNA, 21 bp, synthetic construct
  misc_feature 1..21: note = Description of Artificial Sequence: Synthetic oligonucleotide
  source 1..21: mol_type = other DNA
catttggttaggtcgtcgtgt

SEQ ID NO: 39448 - DNA, 21 bp, synthetic construct
  misc_feature 1..21: note = Description of Artificial Sequence: Synthetic oligonucleotide
  source 1..21: mol_type = other DNA
cccatgagccacaccctcggc

SEQ ID NO: 39449 - DNA, 21 bp, synthetic construct
  misc_feature 1..21: note = Description of Artificial Sequence: Synthetic oligonucleotide
  source 1..21: mol_type = other DNA
agcagcgccggccacagcaaa

SEQ ID NO: 39450 - DNA, 21 bp, synthetic construct
  misc_feature 1..21: note = Description of Artificial Sequence: Synthetic oligonucleotide
  source 1..21: mol_type = other DNA
catactactggtattattggg

SEQ ID NO: 39451 - DNA, 21 bp, synthetic construct
  misc_feature 1..21: note = Description of Artificial Sequence: Synthetic oligonucleotide
  source 1..21: mol_type = other DNA
tgtactaatgatcggggggtt

SEQ ID NO: 39452 - DNA, 21 bp, synthetic construct
  misc_feature 1..21: note = Description of Artificial Sequence: Synthetic oligonucleotide
  source 1..21: mol_type = other DNA
accggcctcagacacatgggc

SEQ ID NO: 39453 - DNA, 21 bp, synthetic construct
  misc_feature 1..21: note = Description of Artificial Sequence: Synthetic oligonucleotide
  source 1..21: mol_type = other DNA
aggaatcagggtgcgttgcag

SEQ ID NO: 39454 - DNA, 21 bp, synthetic construct
  misc_feature 1..21: note = Description of Artificial Sequence: Synthetic oligonucleotide
  source 1..21: mol_type = other DNA
tacaacggcggcaacagaagc

SEQ ID NO: 39455 - DNA, 21 bp, synthetic construct
  misc_feature 1..21: note = Description of Artificial Sequence: Synthetic oligonucleotide
  source 1..21: mol_type = other DNA
tcgcggaatacgcagtcgatg

SEQ ID NO: 39456 - DNA, 21 bp, synthetic construct
  misc_feature 1..21: note = Description of Artificial Sequence: Synthetic oligonucleotide
  source 1..21: mol_type = other DNA
ctggtttcgtctaagagtagt

SEQ ID NO: 39457 - DNA, 21 bp, synthetic construct
  misc_feature 1..21: note = Description of Artificial Sequence: Synthetic oligonucleotide
  source 1..21: mol_type = other DNA
cgtgcttcgcagtctgtgggt

SEQ ID NO: 39458 - DNA, 21 bp, synthetic construct
  misc_feature 1..21: note = Description of Artificial Sequence: Synthetic oligonucleotide
  source 1..21: mol_type = other DNA
aggattggtcagggttcgagt

SEQ ID NO: 39459 - DNA, 21 bp, synthetic construct
  misc_feature 1..21: note = Description of Artificial Sequence: Synthetic oligonucleotide
  source 1..21: mol_type = other DNA
gtcaccaccagcaccggcaga

SEQ ID NO: 39460 - DNA, 21 bp, synthetic construct
  misc_feature 1..21: note = Description of Artificial Sequence: Synthetic oligonucleotide
  source 1..21: mol_type = other DNA
agtcagtctcctaatcggggg

SEQ ID NO: 39461 - DNA, 21 bp, synthetic construct
  misc_feature 1..21: note = Description of Artificial Sequence: Synthetic oligonucleotide
  source 1..21: mol_type = other DNA
cggactactaatcatcagtct

SEQ ID NO: 39462 - DNA, 21 bp, synthetic construct
  misc_feature 1..21: note = Description of Artificial Sequence: Synthetic oligonucleotide
  source 1..21: mol_type = other DNA
gtgcgtactaatgcgaagggt

SEQ ID NO: 39463 - DNA, 21 bp, synthetic construct
  misc_feature 1..21: note = Description of Artificial Sequence: Synthetic oligonucleotide
  source 1..21: mol_type = other DNA
gcgaatattcgttctacgggt

SEQ ID NO: 39464 - DNA, 21 bp, synthetic construct
  misc_feature 1..21: note = Description of Artificial Sequence: Synthetic oligonucleotide
  source 1..21: mol_type = other DNA
cccaacctcaacagcagaggc

SEQ ID NO: 39465 - DNA, 21 bp, synthetic construct
  misc_feature 1..21: note = Description of Artificial Sequence: Synthetic oligonucleotide
  source 1..21: mol_type = other DNA
agattcagcgacagcaacacc

SEQ ID NO: 39466 - DNA, 21 bp, synthetic construct
  misc_feature 1..21: note = Description of Artificial Sequence: Synthetic oligonucleotide
  source 1..21: mol_type = other DNA
caacacaccaacaaccccgac

SEQ ID NO: 39467 - DNA, 21 bp, synthetic construct
  misc_feature 1..21: note = Description of Artificial Sequence: Synthetic oligonucleotide
  source 1..21: mol_type = other DNA
gcccacaaaagcgccatgaac

SEQ ID NO: 39468 - DNA, 21 bp, synthetic construct
  misc_feature 1..21: note = Description of Artificial Sequence: Synthetic oligonucleotide
  source 1..21: mol_type = other DNA
cgtgatacgagggagagtcag

SEQ ID NO: 39469 - DNA, 21 bp, synthetic construct
  misc_feature 1..21: note = Description of Artificial Sequence: Synthetic oligonucleotide
  source 1..21: mol_type = other DNA
gggtcgaataggatgagtagt

SEQ ID NO: 39470 - DNA, 21 bp, synthetic construct
  misc_feature 1..21: note = Description of Artificial Sequence: Synthetic oligonucleotide
  source 1..21: mol_type = other DNA
cctgggttgacgcctaagcag

SEQ ID NO: 39471 - DNA, 21 bp, synthetic construct
  misc_feature 1..21: note = Description of Artificial Sequence: Synthetic oligonucleotide
  source 1..21: mol_type = other DNA
accaacggccaagccgccaga

SEQ ID NO: 39472 - DNA, 21 bp, synthetic construct
  misc_feature 1..21: note = Description of Artificial Sequence: Synthetic oligonucleotide
  source 1..21: mol_type = other DNA
gccagcagcagagaaagcctc

SEQ ID NO: 39473 - DNA, 21 bp, synthetic construct
  misc_feature 1..21: note = Description of Artificial Sequence: Synthetic oligonucleotide
  source 1..21: mol_type = other DNA
gccctcagaaccagcaactac

SEQ ID NO: 39474 - DNA, 21 bp, synthetic construct
  misc_feature 1..21: note = Description of Artificial Sequence: Synthetic oligonucleotide
  source 1..21: mol_type = other DNA
ggcagacccggcatcagcaaa

SEQ ID NO: 39475 - DNA, 21 bp, synthetic construct
  misc_feature 1..21: note = Description of Artificial Sequence: Synthetic oligonucleotide
  source 1..21: mol_type = other DNA
ccccaacacagaagcatcccc

SEQ ID NO: 39476 - DNA, 21 bp, synthetic construct
  misc_feature 1..21: note = Description of Artificial Sequence: Synthetic oligonucleotide
  source 1..21: mol_type = other DNA
gccccccacagcgccgccaac

SEQ ID NO: 39477 - DNA, 21 bp, synthetic construct
  misc_feature 1..21: note = Description of Artificial Sequence: Synthetic oligonucleotide
  source 1..21: mol_type = other DNA
aatggtgctagtccgaagcgt

SEQ ID NO: 39478 - DNA, 21 bp, synthetic construct
  misc_feature 1..21: note = Description of Artificial Sequence: Synthetic oligonucleotide
  source 1..21: mol_type = other DNA
gtcagcatgaacaccaccaga

SEQ ID NO: 39479 - DNA, 21 bp, synthetic construct
  misc_feature 1..21: note = Description of Artificial Sequence: Synthetic oligonucleotide
  source 1..21: mol_type = other DNA
atccccagcggcgtccacagc

SEQ ID NO: 39480 - DNA, 21 bp, synthetic construct
  misc_feature 1..21: note = Description of Artificial Sequence: Synthetic oligonucleotide
  source 1..21: mol_type = other DNA
cccgtcaccagactcagcgaa

SEQ ID NO: 39481 - DNA, 21 bp, synthetic construct
  misc_feature 1..21: note = Description of Artificial Sequence: Synthetic oligonucleotide
  source 1..21: mol_type = other DNA
aacgccaccagccccagaaaa

SEQ ID NO: 39482 - DNA, 21 bp, synthetic construct
  misc_feature 1..21: note = Description of Artificial Sequence: Synthetic oligonucleotide
  source 1..21: mol_type = other DNA
gggaatcgtgggtctgttatt

SEQ ID NO: 39483 - DNA, 21 bp, synthetic construct
  misc_feature 1..21: note = Description of Artificial Sequence: Synthetic oligonucleotide
  source 1..21: mol_type = other DNA
taccccaaaaccaacgtcacc

SEQ ID NO: 39484 - DNA, 21 bp, synthetic construct
  misc_feature 1..21: note = Description of Artificial Sequence: Synthetic oligonucleotide
  source 1..21: mol_type = other DNA
caaagagtcaacaccgccagc

SEQ ID NO: 39485 - DNA, 21 bp, synthetic construct
  misc_feature 1..21: note = Description of Artificial Sequence: Synthetic oligonucleotide
  source 1..21: mol_type = other DNA
tcgaatgataattcgttgagg

SEQ ID NO: 39486 - DNA, 21 bp, synthetic construct
  misc_feature 1..21: note = Description of Artificial Sequence: Synthetic oligonucleotide
  source 1..21: mol_type = other DNA
aacggcagcggccaaatccaa

SEQ ID NO: 39487 - DNA, 21 bp, synthetic construct
  misc_feature 1..21: note = Description of Artificial Sequence: Synthetic oligonucleotide
  source 1..21: mol_type = other DNA
catacgatgactgcgcggact

SEQ ID NO: 39488 - DNA, 21 bp, synthetic construct
  misc_feature 1..21: note = Description of Artificial Sequence: Synthetic oligonucleotide
  source 1..21: mol_type = other DNA
atgagaagcaaagccagcatg

SEQ ID NO: 39489 - DNA, 21 bp, synthetic construct
  misc_feature 1..21: note = Description of Artificial Sequence: Synthetic oligonucleotide
  source 1..21: mol_type = other DNA
gtgccgcaggtgagttctgct

SEQ ID NO: 39490 - DNA, 21 bp, synthetic construct
  misc_feature 1..21: note = Description of Artificial Sequence: Synthetic oligonucleotide
  source 1..21: mol_type = other DNA
gccagcaccgccatcaaccaa

SEQ ID NO: 39491 - DNA, 21 bp, synthetic construct
  misc_feature 1..21: note = Description of Artificial Sequence: Synthetic oligonucleotide
  source 1..21: mol_type = other DNA
agcagcaccaccagcaccagc

SEQ ID NO: 39492 - DNA, 21 bp, synthetic construct
  misc_feature 1..21: note = Description of Artificial Sequence: Synthetic oligonucleotide
  source 1..21: mol_type = other DNA
accacctacggcagcctcggc

SEQ ID NO: 39493 - DNA, 21 bp, synthetic construct
  misc_feature 1..21: note = Description of Artificial Sequence: Synthetic oligonucleotide
  source 1..21: mol_type = other DNA
ctccccaacagcagagccagc

SEQ ID NO: 39494 - DNA, 21 bp, synthetic construct
  misc_feature 1..21: note = Description of Artificial Sequence: Synthetic oligonucleotide
  source 1..21: mol_type = other DNA
atgttccaaaaacaaggcaac

SEQ ID NO: 39495 - DNA, 21 bp, synthetic construct
  misc_feature 1..21: note = Description of Artificial Sequence: Synthetic oligonucleotide
  source 1..21: mol_type = other DNA
ggcgaaagactcagcagaagc

SEQ ID NO: 39496 - DNA, 21 bp, synthetic construct
  misc_feature 1..21: note = Description of Artificial Sequence: Synthetic oligonucleotide
  source 1..21: mol_type = other DNA
tcgatttcgcatacgcctgtg

SEQ ID NO: 39497 - DNA, 21 bp, synthetic construct
  misc_feature 1..21: note = Description of Artificial Sequence: Synthetic oligonucleotide
  source 1..21: mol_type = other DNA
gtccaaagaagaagcaacgaa

SEQ ID NO: 39498 - DNA, 21 bp, synthetic construct
  misc_feature 1..21: note = Description of Artificial Sequence: Synthetic oligonucleotide
  source 1..21: mol_type = other DNA
atgcttagttctagtcgtagt

SEQ ID NO: 39499 - DNA, 21 bp, synthetic construct
  misc_feature 1..21: note = Description of Artificial Sequence: Synthetic oligonucleotide
  source 1..21: mol_type = other DNA
gttaatacgactcgtgctgag

SEQ ID NO: 39500 - DNA, 21 bp, synthetic construct
  misc_feature 1..21: note = Description of Artificial Sequence: Synthetic oligonucleotide
  source 1..21: mol_type = other DNA
tatgctatggagagggttggg

SEQ ID NO: 39501 - DNA, 21 bp, synthetic construct
  misc_feature 1..21: note = Description of Artificial Sequence: Synthetic oligonucleotide
  source 1..21: mol_type = other DNA
gacatcagcagaagccacggc

SEQ ID NO: 39502 - DNA, 21 bp, synthetic construct
  misc_feature 1..21: note = Description of Artificial Sequence: Synthetic oligonucleotide
  source 1..21: mol_type = other DNA
atgggcagagaaatgaaaggc

SEQ ID NO: 39503 - DNA, 21 bp, synthetic construct
  misc_feature 1..21: note = Description of Artificial Sequence: Synthetic oligonucleotide
  source 1..21: mol_type = other DNA
catgcttcggatcggaagatg

SEQ ID NO: 39504 - DNA, 21 bp, synthetic construct
  misc_feature 1..21: note = Description of Artificial Sequence: Synthetic oligonucleotide
  source 1..21: mol_type = other DNA
ttgattaatgcgactcatcgg

SEQ ID NO: 39505 - DNA, 21 bp, synthetic construct
  misc_feature 1..21: note = Description of Artificial Sequence: Synthetic oligonucleotide
  source 1..21: mol_type = other DNA
tggaatccgatgtcttctggt

SEQ ID NO: 39506 - DNA, 21 bp, synthetic construct
  misc_feature 1..21: note = Description of Artificial Sequence: Synthetic oligonucleotide
  source 1..21: mol_type = other DNA
tccgatactaagccttttacg

SEQ ID NO: 39507 - DNA, 21 bp, synthetic construct
  misc_feature 1..21: note = Description of Artificial Sequence: Synthetic oligonucleotide
  source 1..21: mol_type = other DNA
ggtccgattcggccgtttcag

SEQ ID NO: 39508 - DNA, 21 bp, synthetic construct
  misc_feature 1..21: note = Description of Artificial Sequence: Synthetic oligonucleotide
  source 1..21: mol_type = other DNA
agcggcaccaccaccttcggc

SEQ ID NO: 39509 - DNA, 21 bp, synthetic construct
  misc_feature 1..21: note = Description of Artificial Sequence: Synthetic oligonucleotide
  source 1..21: mol_type = other DNA
cctcaggagtctagggggatg

SEQ ID NO: 39510 - DNA, 21 bp, synthetic construct
  misc_feature 1..21: note = Description of Artificial Sequence: Synthetic oligonucleotide
  source 1..21: mol_type = other DNA
tcggggagtacgaagggtcag

SEQ ID NO: 39511 - DNA, 21 bp, synthetic construct
  misc_feature 1..21: note = Description of Artificial Sequence: Synthetic oligonucleotide
  source 1..21: mol_type = other DNA
ggcgccagcgaaaacatgaga

SEQ ID NO: 39512 - DNA, 21 bp, synthetic construct
  misc_feature 1..21: note = Description of Artificial Sequence: Synthetic oligonucleotide
  source 1..21: mol_type = other DNA
ccgctgactacgaggccttcc

SEQ ID NO: 39513 - DNA, 21 bp, synthetic construct
  misc_feature 1..21: note = Description of Artificial Sequence: Synthetic oligonucleotide
  source 1..21: mol_type = other DNA
gagaggtttactagttcttcg

SEQ ID NO: 39514 - DNA, 21 bp, synthetic construct
  misc_feature 1..21: note = Description of Artificial Sequence: Synthetic oligonucleotide
  source 1..21: mol_type = other DNA
agcttcagccccgccagcaac

SEQ ID NO: 39515 - DNA, 21 bp, synthetic construct
  misc_feature 1..21: note = Description of Artificial Sequence: Synthetic oligonucleotide
  source 1..21: mol_type = other DNA
gacagaagcgccaccgccacc

SEQ ID NO: 39516 - DNA, 21 bp, synthetic construct
  misc_feature 1..21: note = Description of Artificial Sequence: Synthetic oligonucleotide
  source 1..21: mol_type = other DNA
tatggttcgcgtccgccttct

SEQ ID NO: 39517 - DNA, 21 bp, synthetic construct
  misc_feature 1..21: note = Description of Artificial Sequence: Synthetic oligonucleotide
  source 1..21: mol_type = other DNA
caagtcaccgtcagacccgtc

SEQ ID NO: 39518 - DNA, 21 bp, synthetic construct
  misc_feature 1..21: note = Description of Artificial Sequence: Synthetic oligonucleotide
  source 1..21: mol_type = other DNA
attgcttcgagtggtatgcat

SEQ ID NO: 39519 - DNA, 21 bp, synthetic construct
  misc_feature 1..21: note = Description of Artificial Sequence: Synthetic oligonucleotide
  source 1..21: mol_type = other DNA
atgcttagtgggagtcggaat

SEQ ID NO: 39520 - DNA, 21 bp, synthetic construct
  misc_feature 1..21: note = Description of Artificial Sequence: Synthetic oligonucleotide
  source 1..21: mol_type = other DNA
accagcagcggcaacctcagc

SEQ ID NO: 39521 - DNA, 21 bp, synthetic construct
  misc_feature 1..21: note = Description of Artificial Sequence: Synthetic oligonucleotide
  source 1..21: mol_type = other DNA
cagcgggtgtcgagtactttg

SEQ ID NO: 39522 - DNA, 21 bp, synthetic construct
  misc_feature 1..21: note = Description of Artificial Sequence: Synthetic oligonucleotide
  source 1..21: mol_type = other DNA
agttcttcgcatgctactcgt

SEQ ID NO: 39523 - DNA, 21 bp, synthetic construct
  misc_feature 1..21: note = Description of Artificial Sequence: Synthetic oligonucleotide
  source 1..21: mol_type = other DNA
cccaccggcaaactcagacaa

SEQ ID NO: 39524 - DNA, 21 bp, synthetic construct
  misc_feature 1..21: note = Description of Artificial Sequence: Synthetic oligonucleotide
  source 1..21: mol_type = other DNA
caagcccaacacaccagaagc

SEQ ID NO: 39525 - DNA, 21 bp, synthetic construct
  misc_feature 1..21: note = Description of Artificial Sequence: Synthetic oligonucleotide
  source 1..21: mol_type = other DNA
ctgcctcgtggtgcgcatagt

SEQ ID NO: 39526 - DNA, 21 bp, synthetic construct
  misc_feature 1..21: note = Description of Artificial Sequence: Synthetic oligonucleotide
  source 1..21: mol_type = other DNA
cagggtggtacgtcgcggcct

SEQ ID NO: 39527 - DNA, 21 bp, synthetic construct
  misc_feature 1..21: note = Description of Artificial Sequence: Synthetic oligonucleotide
  source 1..21: mol_type = other DNA
ggccacggcaacaacggcgcc

SEQ ID NO: 39528 - DNA, 21 bp, synthetic construct
  misc_feature 1..21: note = Description of Artificial Sequence: Synthetic oligonucleotide
  source 1..21: mol_type = other DNA
agcagcagcagaggccaaaac

SEQ ID NO: 39529 - DNA, 21 bp, synthetic construct
  misc_feature 1..21: note = Description of Artificial Sequence: Synthetic oligonucleotide
  source 1..21: mol_type = other DNA
cctcatacgatggagaggacg

SEQ ID NO: 39530 - DNA, 21 bp, synthetic construct
  misc_feature 1..21: note = Description of Artificial Sequence: Synthetic oligonucleotide
  source 1..21: mol_type = other DNA
gcgattcggtcggattatgtt

SEQ ID NO: 39531 - DNA, 21 bp, synthetic construct
  misc_feature 1..21: note = Description of Artificial Sequence: Synthetic oligonucleotide
  source 1..21: mol_type = other DNA
ggtgatactcgtctgaatgcg

SEQ ID NO: 39532 - DNA, 21 bp, synthetic construct
  misc_feature 1..21: note = Description of Artificial Sequence: Synthetic oligonucleotide
  source 1..21: mol_type = other DNA
acccccaccaccagcgccaac

SEQ ID NO: 39533 - DNA, 21 bp, synthetic construct
  misc_feature 1..21: note = Description of Artificial Sequence: Synthetic oligonucleotide
  source 1..21: mol_type = other DNA
ccgcatgttgctcggcagatg

SEQ ID NO: 39534 - DNA, 21 bp, synthetic construct
  misc_feature 1..21: note = Description of Artificial Sequence: Synthetic oligonucleotide
  source 1..21: mol_type = other DNA
gtgggtggtggtcgtgataat

SEQ ID NO: 39535 - DNA, 21 bp, synthetic construct
  misc_feature 1..21: note = Description of Artificial Sequence: Synthetic oligonucleotide
  source 1..21: mol_type = other DNA
cataatacggctcatgcttcg

SEQ ID NO: 39536 - DNA, 21 bp, synthetic construct
  misc_feature 1..21: note = Description of Artificial Sequence: Synthetic oligonucleotide
  source 1..21: mol_type = other DNA
caaaacatcggcagacccagc

SEQ ID NO: 39537 - DNA, 21 bp, synthetic construct
  misc_feature 1..21: note = Description of Artificial Sequence: Synthetic oligonucleotide
  source 1..21: mol_type = other DNA
ctcaaacccgacagaaacgcc

SEQ ID NO: 39538 - DNA, 21 bp, synthetic construct
  misc_feature 1..21: note = Description of Artificial Sequence: Synthetic oligonucleotide
  source 1..21: mol_type = other DNA
tttcatgcgaatagtactgtg

SEQ ID NO: 39539 - DNA, 21 bp, synthetic construct
  misc_feature 1..21: note = Description of Artificial Sequence: Synthetic oligonucleotide
  source 1..21: mol_type = other DNA
tttgggaggactaatcagggt

SEQ ID NO: 39540 - DNA, 21 bp, synthetic construct
  misc_feature 1..21: note = Description of Artificial Sequence: Synthetic oligonucleotide
  source 1..21: mol_type = other DNA
atgagaagcgaacccatcgcc

SEQ ID NO: 39541 - DNA, 21 bp, synthetic construct
  misc_feature 1..21: note = Description of Artificial Sequence: Synthetic oligonucleotide
  source 1..21: mol_type = other DNA
cctcttgtttcggttgggagg

SEQ ID NO: 39542 - DNA, 21 bp, synthetic construct
  misc_feature 1..21: note = Description of Artificial Sequence: Synthetic oligonucleotide
  source 1..21: mol_type = other DNA
cctctgcgtgatagtatgccg

SEQ ID NO: 39543 - DNA, 21 bp, synthetic construct
  misc_feature 1..21: note = Description of Artificial Sequence: Synthetic oligonucleotide
  source 1..21: mol_type = other DNA
aatctgaattcgttgaagatg

SEQ ID NO: 39544 - DNA, 21 bp, synthetic construct
  misc_feature 1..21: note = Description of Artificial Sequence: Synthetic oligonucleotide
  source 1..21: mol_type = other DNA
cctgtgctgggttctaggtat

SEQ ID NO: 39545 - DNA, 21 bp, synthetic construct
  misc_feature 1..21: note = Description of Artificial Sequence: Synthetic oligonucleotide
  source 1..21: mol_type = other DNA
gcgcaggctcggcagacggct

SEQ ID NO: 39546 - DNA, 21 bp, synthetic construct
  misc_feature 1..21: note = Description of Artificial Sequence: Synthetic oligonucleotide
  source 1..21: mol_type = other DNA
cccagaagcagcggcggcttc

SEQ ID NO: 39547 - DNA, 21 bp, synthetic construct
  misc_feature 1..21: note = Description of Artificial Sequence: Synthetic oligonucleotide
  source 1..21: mol_type = other DNA
gggaagtctcagatgcagttg

SEQ ID NO: 39548 - DNA, 21 bp, synthetic construct
  misc_feature 1..21: note = Description of Artificial Sequence: Synthetic oligonucleotide
  source 1..21: mol_type = other DNA
tcgaatactaatagtgcgaat

SEQ ID NO: 39549 - DNA, 21 bp, synthetic construct
  misc_feature 1..21: note = Description of Artificial Sequence: Synthetic oligonucleotide
  source 1..21: mol_type = other DNA
tatcgggctacgtcgggtcag

SEQ ID NO: 39550 - DNA, 21 bp, synthetic construct
  misc_feature 1..21: note = Description of Artificial Sequence: Synthetic oligonucleotide
  source 1..21: mol_type = other DNA
agttcgttgaagccgactctg

SEQ ID NO: 39551 - DNA, 21 bp, synthetic construct
  misc_feature 1..21: note = Description of Artificial Sequence: Synthetic oligonucleotide
  source 1..21: mol_type = other DNA
cggtcgactgtgtctccgaat

SEQ ID NO: 39552 - DNA, 21 bp, synthetic construct
  misc_feature 1..21: note = Description of Artificial Sequence: Synthetic oligonucleotide
  source 1..21: mol_type = other DNA
tgtagtgggtctccttgtcgt

SEQ ID NO: 39553 - DNA, 21 bp, synthetic construct
  misc_feature 1..21: note = Description of Artificial Sequence: Synthetic oligonucleotide
  source 1..21: mol_type = other DNA
agcagcagaacccaaagcctc

SEQ ID NO: 39554 - DNA, 21 bp, synthetic construct
  misc_feature 1..21: note = Description of Artificial Sequence: Synthetic oligonucleotide
  source 1..21: mol_type = other DNA
agcaccaaccccgccaacaga

SEQ ID NO: 39555 - DNA, 21 bp, synthetic construct
  misc_feature 1..21: note = Description of Artificial Sequence: Synthetic oligonucleotide
  source 1..21: mol_type = other DNA
gctcctcctgcgacggcgccg

SEQ ID NO: 39556 - DNA, 21 bp, synthetic construct
  misc_feature 1..21: note = Description of Artificial Sequence: Synthetic oligonucleotide
  source 1..21: mol_type = other DNA
tattcggataataagactact

SEQ ID NO: 39557 - DNA, 21 bp, synthetic construct
  misc_feature 1..21: note = Description of Artificial Sequence: Synthetic oligonucleotide
  source 1..21: mol_type = other DNA
atgcccctcaaaccccacctc

SEQ ID NO: 39558 - DNA, 21 bp, synthetic construct
  misc_feature 1..21: note = Description of Artificial Sequence: Synthetic oligonucleotide
  source 1..21: mol_type = other DNA
tctgattctcggaatcctgtt

SEQ ID NO: 39559 - DNA, 21 bp, synthetic construct
  misc_feature 1..21: note = Description of Artificial Sequence: Synthetic oligonucleotide
  source 1..21: mol_type = other DNA
ttcctcagcagcagagccagc

SEQ ID NO: 39560 - DNA, 21 bp, synthetic construct
  misc_feature 1..21: note = Description of Artificial Sequence: Synthetic oligonucleotide
  source 1..21: mol_type = other DNA
cacagagtcgaaggcagcctc

SEQ ID NO: 39561 - DNA, 21 bp, synthetic construct
  misc_feature 1..21: note = Description of Artificial Sequence: Synthetic oligonucleotide
  source 1..21: mol_type = other DNA
tctagtgttcggccgtatgct

SEQ ID NO: 39562 - DNA, 21 bp, synthetic construct
  misc_feature 1..21: note = Description of Artificial Sequence: Synthetic oligonucleotide
  source 1..21: mol_type = other DNA
accgtcctcaccaaacaacac

SEQ ID NO: 39563 - DNA, 21 bp, synthetic construct
  misc_feature 1..21: note = Description of Artificial Sequence: Synthetic oligonucleotide
  source 1..21: mol_type = other DNA
aataggcaggttcctggtttg

SEQ ID NO: 39564 - DNA, 21 bp, synthetic construct
  misc_feature 1..21: note = Description of Artificial Sequence: Synthetic oligonucleotide
  source 1..21: mol_type = other DNA
agtcatatgacgggggttact

SEQ ID NO: 39565 - DNA, 21 bp, synthetic construct
  misc_feature 1..21: note = Description of Artificial Sequence: Synthetic oligonucleotide
  source 1..21: mol_type = other DNA
cgtgtgcttacttctaatgcg

SEQ ID NO: 39566 - DNA, 21 bp, synthetic construct
  misc_feature 1..21: note = Description of Artificial Sequence: Synthetic oligonucleotide
  source 1..21: mol_type = other DNA
ctgattaggtcttcgtctatt

SEQ ID NO: 39567 - DNA, 21 bp, synthetic construct
  misc_feature 1..21: note = Description of Artificial Sequence: Synthetic oligonucleotide
  source 1..21: mol_type = other DNA
aatattaagggtgcttcgacg

SEQ ID NO: 39568 - DNA, 21 bp, synthetic construct
  misc_feature 1..21: note = Description of Artificial Sequence: Synthetic oligonucleotide
  source 1..21: mol_type = other DNA
tctgataggtcggttgatggg

SEQ ID NO: 39569 - DNA, 21 bp, synthetic construct
  misc_feature 1..21: note = Description of Artificial Sequence: Synthetic oligonucleotide
  source 1..21: mol_type = other DNA
cgtaatgtttcgcagccgatt

SEQ ID NO: 39570 - DNA, 21 bp, synthetic construct
  misc_feature 1..21: note = Description of Artificial Sequence: Synthetic oligonucleotide
  source 1..21: mol_type = other DNA
catggggtgggtagtatggtg

SEQ ID NO: 39571 - DNA, 21 bp, synthetic construct
  misc_feature 1..21: note = Description of Artificial Sequence: Synthetic oligonucleotide
  source 1..21: mol_type = other DNA
gcctacagcaacatccaaaac

SEQ ID NO: 39572 - DNA, 21 bp, synthetic construct
  misc_feature 1..21: note = Description of Artificial Sequence: Synthetic oligonucleotide
  source 1..21: mol_type = other DNA
accctccccaccaaatacccc

SEQ ID NO: 39573 - DNA, 21 bp, synthetic construct
  misc_feature 1..21: note = Description of Artificial Sequence: Synthetic oligonucleotide
  source 1..21: mol_type = other DNA
gccgaatacaccggcatggcc

SEQ ID NO: 39574 - DNA, 21 bp, synthetic construct
  misc_feature 1..21: note = Description of Artificial Sequence: Synthetic oligonucleotide
  source 1..21: mol_type = other DNA
tatgggtttagttctgttaat

SEQ ID NO: 39575 - DNA, 21 bp, synthetic construct
  misc_feature 1..21: note = Description of Artificial Sequence: Synthetic oligonucleotide
  source 1..21: mol_type = other DNA
tttaggtataaggagacgctg

SEQ ID NO: 39576 - DNA, 21 bp, synthetic construct
  misc_feature 1..21: note = Description of Artificial Sequence: Synthetic oligonucleotide
  source 1..21: mol_type = other DNA
cctcggactggtacgttgatg

SEQ ID NO: 39577 - DNA, 21 bp, synthetic construct
  misc_feature 1..21: note = Description of Artificial Sequence: Synthetic oligonucleotide
  source 1..21: mol_type = other DNA
tgtattactaagaatcttgcg

SEQ ID NO: 39578 - DNA, 21 bp, synthetic construct
  misc_feature 1..21: note = Description of Artificial Sequence: Synthetic oligonucleotide
  source 1..21: mol_type = other DNA
agcagcagcttcaccaacaaa

SEQ ID NO: 39579 - DNA, 21 bp, synthetic construct
  misc_feature 1..21: note = Description of Artificial Sequence: Synthetic oligonucleotide
  source 1..21: mol_type = other DNA
catacggatattaatcatcag

SEQ ID NO: 39580 - DNA, 21 bp, synthetic construct
  misc_feature 1..21: note = Description of Artificial Sequence: Synthetic oligonucleotide
  source 1..21: mol_type = other DNA
gctgggcgggcgtctaatact

SEQ ID NO: 39581 - DNA, 21 bp, synthetic construct
  misc_feature 1..21: note = Description of Artificial Sequence: Synthetic oligonucleotide
  source 1..21: mol_type = other DNA
tctatttcgcatgctcgtgag

SEQ ID NO: 39582 - DNA, 21 bp, synthetic construct
  misc_feature 1..21: note = Description of Artificial Sequence: Synthetic oligonucleotide
  source 1..21: mol_type = other DNA
cccgtcaacagcgtcagcaaa

SEQ ID NO: 39583 - DNA, 21 bp, synthetic construct
  misc_feature 1..21: note = Description of Artificial Sequence: Synthetic oligonucleotide
  source 1..21: mol_type = other DNA
gacaaaaccaccagagtctac

SEQ ID NO: 39584 - DNA, 21 bp, synthetic construct
  misc_feature 1..21: note = Description of Artificial Sequence: Synthetic oligonucleotide
  source 1..21: mol_type = other DNA
attacgccgggtgggcattcg

SEQ ID NO: 39585 - DNA, 21 bp, synthetic construct
  misc_feature 1..21: note = Description of Artificial Sequence: Synthetic oligonucleotide
  source 1..21: mol_type = other DNA
gttcattcttcgagtacgaag

SEQ ID NO: 39586 - DNA, 21 bp, synthetic construct
  misc_feature 1..21: note = Description of Artificial Sequence: Synthetic oligonucleotide
  source 1..21: mol_type = other DNA
ctcccccaaagaggcgtcagc

SEQ ID NO: 39587 - DNA, 21 bp, synthetic construct
  misc_feature 1..21: note = Description of Artificial Sequence: Synthetic oligonucleotide
  source 1..21: mol_type = other DNA
ggccccatgagacccttccaa

SEQ ID NO: 39588 - DNA, 21 bp, synthetic construct
  misc_feature 1..21: note = Description of Artificial Sequence: Synthetic oligonucleotide
  source 1..21: mol_type = other DNA
gatactacgatttctaagggt

SEQ ID NO: 39589 - DNA, 21 bp, synthetic construct
  misc_feature 1..21: note = Description of Artificial Sequence: Synthetic oligonucleotide
  source 1..21: mol_type = other DNA
catgtgccgtcgaagcttgct

SEQ ID NO: 39590 - DNA, 21 bp, synthetic construct
  misc_feature 1..21: note = Description of Artificial Sequence: Synthetic oligonucleotide
  source 1..21: mol_type = other DNA
ccgaatcatcagagtcttact

SEQ ID NO: 39591 - DNA, 21 bp, synthetic construct
  misc_feature 1..21: note = Description of Artificial Sequence: Synthetic oligonucleotide
  source 1..21: mol_type = other DNA
ggtcaggtttctcagatgaag

SEQ ID NO: 39592 - DNA, 21 bp, synthetic construct
  misc_feature 1..21: note = Description of Artificial Sequence: Synthetic oligonucleotide
  source 1..21: mol_type = other DNA
accagcaccagaaccgccccc

SEQ ID NO: 39593 - DNA, 21 bp, synthetic construct
  misc_feature 1..21: note = Description of Artificial Sequence: Synthetic oligonucleotide
  source 1..21: mol_type = other DNA
ctcagcagcgacaaaaacgtc

SEQ ID NO: 39594 - DNA, 21 bp, synthetic construct
  misc_feature 1..21: note = Description of Artificial Sequence: Synthetic oligonucleotide
  source 1..21: mol_type = other DNA
catcagcgtaatgttaattcg

SEQ ID NO: 39595 - DNA, 21 bp, synthetic construct
  misc_feature 1..21: note = Description of Artificial Sequence: Synthetic oligonucleotide
  source 1..21: mol_type = other DNA
tctaagccggctaataatgtt

SEQ ID NO: 39596 - DNA, 21 bp, synthetic construct
  misc_feature 1..21: note = Description of Artificial Sequence: Synthetic oligonucleotide
  source 1..21: mol_type = other DNA
caaaaaaccaccatcgacggc

SEQ ID NO: 39597 - DNA, 21 bp, synthetic construct
  misc_feature 1..21: note = Description of Artificial Sequence: Synthetic oligonucleotide
  source 1..21: mol_type = other DNA
atgatggtgagttctcgttcg

SEQ ID NO: 39598 - DNA, 21 bp, synthetic construct
  misc_feature 1..21: note = Description of Artificial Sequence: Synthetic oligonucleotide
  source 1..21: mol_type = other DNA
ccgcagactaataatcctgat

SEQ ID NO: 39599 - DNA, 21 bp, synthetic construct
  misc_feature 1..21: note = Description of Artificial Sequence: Synthetic oligonucleotide
  source 1..21: mol_type = other DNA
cgggctgatcatttggggcgt

SEQ ID NO: 39600 - DNA, 21 bp, synthetic construct
  misc_feature 1..21: note = Description of Artificial Sequence: Synthetic oligonucleotide
  source 1..21: mol_type = other DNA
cccagcaaaatcagcaacgcc

SEQ ID NO: 39601 - DNA, 21 bp, synthetic construct
  misc_feature 1..21: note = Description of Artificial Sequence: Synthetic oligonucleotide
  source 1..21: mol_type = other DNA
ccccaacccttcggcaaatac

SEQ ID NO: 39602 - DNA, 21 bp, synthetic construct
  misc_feature 1..21: note = Description of Artificial Sequence: Synthetic oligonucleotide
  source 1..21: mol_type = other DNA
agaagcaccctcggcagcggc

SEQ ID NO: 39603 - DNA, 21 bp, synthetic construct
  misc_feature 1..21: note = Description of Artificial Sequence: Synthetic oligonucleotide
  source 1..21: mol_type = other DNA
gctaggactaagggtaatgtg

SEQ ID NO: 39604 - DNA, 21 bp, synthetic construct
  misc_feature 1..21: note = Description of Artificial Sequence: Synthetic oligonucleotide
  source 1..21: mol_type = other DNA
gagccgcctcataagattttg

SEQ ID NO: 39605 - DNA, 21 bp, synthetic construct
  misc_feature 1..21: note = Description of Artificial Sequence: Synthetic oligonucleotide
  source 1..21: mol_type = other DNA
gccaccggcaacggcagaggc

SEQ ID NO: 39606 - DNA, 21 bp, synthetic construct
  misc_feature 1..21: note = Description of Artificial Sequence: Synthetic oligonucleotide
  source 1..21: mol_type = other DNA
ttcctcggcaaaagcggcgcc

SEQ ID NO: 39607 - DNA, 21 bp, synthetic construct
  misc_feature 1..21: note = Description of Artificial Sequence: Synthetic oligonucleotide
  source 1..21: mol_type = other DNA
ggtagtacttcgggtctggat

SEQ ID NO: 39608 - DNA, 21 bp, synthetic construct
  misc_feature 1..21: note = Description of Artificial Sequence: Synthetic oligonucleotide
  source 1..21: mol_type = other DNA
agaggcagcagcagccccagc

SEQ ID NO: 39609 - DNA, 21 bp, synthetic construct
  misc_feature 1..21: note = Description of Artificial Sequence: Synthetic oligonucleotide
  source 1..21: mol_type = other DNA
cggcctattgctagttcgggt

SEQ ID NO: 39610 - DNA, 21 bp, synthetic construct
  misc_feature 1..21: note = Description of Artificial Sequence: Synthetic oligonucleotide
  source 1..21: mol_type = other DNA
catgtgactaagtctacggct

SEQ ID NO: 39611 - DNA, 21 bp, synthetic construct
  misc_feature 1..21: note = Description of Artificial Sequence: Synthetic oligonucleotide
  source 1..21: mol_type = other DNA
gccaccagccccagactcagc

SEQ ID NO: 39612 - DNA, 21 bp, synthetic construct
  misc_feature 1..21: note = Description of Artificial Sequence: Synthetic oligonucleotide
  source 1..21: mol_type = other DNA
cgttctgggacttctcattcg

SEQ ID NO: 39613 - DNA, 21 bp, synthetic construct
  misc_feature 1..21: note = Description of Artificial Sequence: Synthetic oligonucleotide
  source 1..21: mol_type = other DNA
aacggcagcggcctcaaccaa

SEQ ID NO: 39614 - DNA, 21 bp, synthetic construct
  misc_feature 1..21: note = Description of Artificial Sequence: Synthetic oligonucleotide
  source 1..21: mol_type = other DNA
atgatggggggtgttaagaat

SEQ ID NO: 39615 - DNA, 21 bp, synthetic construct
  misc_feature 1..21: note = Description of Artificial Sequence: Synthetic oligonucleotide
  source 1..21: mol_type = other DNA
aagaggccgtcgcctgatatc

SEQ ID NO: 39616 - DNA, 21 bp, synthetic construct
  misc_feature 1..21: note = Description of Artificial Sequence: Synthetic oligonucleotide
  source 1..21: mol_type = other DNA
tcttatgcgaagttgactgcg

SEQ ID NO: 39617 - DNA, 21 bp, synthetic construct
  misc_feature 1..21: note = Description of Artificial Sequence: Synthetic oligonucleotide
  source 1..21: mol_type = other DNA
agaatcaccctcaacagcgcc

SEQ ID NO: 39618 - DNA, 21 bp, synthetic construct
  misc_feature 1..21: note = Description of Artificial Sequence: Synthetic oligonucleotide
  source 1..21: mol_type = other DNA
tatagtgggcttactggttcg

SEQ ID NO: 39619 - DNA, 21 bp, synthetic construct
  misc_feature 1..21: note = Description of Artificial Sequence: Synthetic oligonucleotide
  source 1..21: mol_type = other DNA
ggtgctgggacgagtcttcat

SEQ ID NO: 39620 - DNA, 21 bp, synthetic construct
  misc_feature 1..21: note = Description of Artificial Sequence: Synthetic oligonucleotide
  source 1..21: mol_type = other DNA
aatctgggtcggcaggttggg

SEQ ID NO: 39621 - DNA, 21 bp, synthetic construct
  misc_feature 1..21: note = Description of Artificial Sequence: Synthetic oligonucleotide
  source 1..21: mol_type = other DNA
attaggtcgaaggagtctgcg

SEQ ID NO: 39622 - DNA, 21 bp, synthetic construct
  misc_feature 1..21: note = Description of Artificial Sequence: Synthetic oligonucleotide
  source 1..21: mol_type = other DNA
ctccacgacggccaaaccaga

SEQ ID NO: 39623 - DNA, 21 bp, synthetic construct
  misc_feature 1..21: note = Description of Artificial Sequence: Synthetic oligonucleotide
  source 1..21: mol_type = other DNA
aaagaaaaccccgtcagaagc

SEQ ID NO: 39624 - DNA, 21 bp, synthetic construct
  misc_feature 1..21: note = Description of Artificial Sequence: Synthetic oligonucleotide
  source 1..21: mol_type = other DNA
agttcgaagggtattttggct

SEQ ID NO: 39625 - DNA, 21 bp, synthetic construct
  misc_feature 1..21: note = Description of Artificial Sequence: Synthetic oligonucleotide
  source 1..21: mol_type = other DNA
agaaccctcagaagcgtcgac

SEQ ID NO: 39626 - DNA, 21 bp, synthetic construct
  misc_feature 1..21: note = Description of Artificial Sequence: Synthetic oligonucleotide
  source 1..21: mol_type = other DNA
ggttatactgataagcatgtg

SEQ ID NO: 39627 - DNA, 21 bp, synthetic construct
  misc_feature 1..21: note = Description of Artificial Sequence: Synthetic oligonucleotide
  source 1..21: mol_type = other DNA
ggccaaggcgtcaccgccaaa

SEQ ID NO: 39628 - DNA, 21 bp, synthetic construct
  misc_feature 1..21: note = Description of Artificial Sequence: Synthetic oligonucleotide
  source 1..21: mol_type = other DNA
attcgggctgaggtgagtggg

SEQ ID NO: 39629 - DNA, 21 bp, synthetic construct
  misc_feature 1..21: note = Description of Artificial Sequence: Synthetic oligonucleotide
  source 1..21: mol_type = other DNA
gggctgaggacttcgtctcat

SEQ ID NO: 39630 - DNA, 21 bp, synthetic construct
  misc_feature 1..21: note = Description of Artificial Sequence: Synthetic oligonucleotide
  source 1..21: mol_type = other DNA
ggggtgcggggtctgaatgtt

SEQ ID NO: 39631 - DNA, 21 bp, synthetic construct
  misc_feature 1..21: note = Description of Artificial Sequence: Synthetic oligonucleotide
  source 1..21: mol_type = other DNA
aaagtcggcagccccaccgcc

SEQ ID NO: 39632 - DNA, 21 bp, synthetic construct
  misc_feature 1..21: note = Description of Artificial Sequence: Synthetic oligonucleotide
  source 1..21: mol_type = other DNA
cggggtagtcctcagtctcag

SEQ ID NO: 39633 - DNA, 21 bp, synthetic construct
  misc_feature 1..21: note = Description of Artificial Sequence: Synthetic oligonucleotide
  source 1..21: mol_type = other DNA
gacagaaaacacaccagcacc

SEQ ID NO: 39634 - DNA, 21 bp, synthetic construct
  misc_feature 1..21: note = Description of Artificial Sequence: Synthetic oligonucleotide
  source 1..21: mol_type = other DNA
gctccttcggcgcggccgagt

SEQ ID NO: 39635 - DNA, 21 bp, synthetic construct
  misc_feature 1..21: note = Description of Artificial Sequence: Synthetic oligonucleotide
  source 1..21: mol_type = other DNA
ggcttcaccggcagccacgtc

SEQ ID NO: 39636 - DNA, 21 bp, synthetic construct
  misc_feature 1..21: note = Description of Artificial Sequence: Synthetic oligonucleotide
  source 1..21: mol_type = other DNA
cagtctggtaatacgattcag

SEQ ID NO: 39637 - DNA, 21 bp, synthetic construct
  misc_feature 1..21: note = Description of Artificial Sequence: Synthetic oligonucleotide
  source 1..21: mol_type = other DNA
agcaccctcagaaacagcacc

SEQ ID NO: 39638 - DNA, 21 bp, synthetic construct
  misc_feature 1..21: note = Description of Artificial Sequence: Synthetic oligonucleotide
  source 1..21: mol_type = other DNA
agagtcgtcaacagaggcgac

SEQ ID NO: 39639 - DNA, 21 bp, synthetic construct
  misc_feature 1..21: note = Description of Artificial Sequence: Synthetic oligonucleotide
  source 1..21: mol_type = other DNA
tggcagacgggttcgactatg

SEQ ID NO: 39640 - DNA, 21 bp, synthetic construct
  misc_feature 1..21: note = Description of Artificial Sequence: Synthetic oligonucleotide
  source 1..21: mol_type = other DNA
gaaaacagaaccagcgtccaa

SEQ ID NO: 39641 - DNA, 21 bp, synthetic construct
  misc_feature 1..21: note = Description of Artificial Sequence: Synthetic oligonucleotide
  source 1..21: mol_type = other DNA
catttgcctcagactcagagt

SEQ ID NO: 39642 - DNA, 21 bp, synthetic construct
  misc_feature 1..21: note = Description of Artificial Sequence: Synthetic oligonucleotide
  source 1..21: mol_type = other DNA
accgcccccagccacaccaac

SEQ ID NO: 39643 - DNA, 21 bp, synthetic construct
  misc_feature 1..21: note = Description of Artificial Sequence: Synthetic oligonucleotide
  source 1..21: mol_type = other DNA
gctaatatgggtctggttaag

SEQ ID NO: 39644 - DNA, 21 bp, synthetic construct
  misc_feature 1..21: note = Description of Artificial Sequence: Synthetic oligonucleotide
  source 1..21: mol_type = other DNA
acgcatggtcctaatgtgcgt

SEQ ID NO: 39645 - DNA, 21 bp, synthetic construct
  misc_feature 1..21: note = Description of Artificial Sequence: Synthetic oligonucleotide
  source 1..21: mol_type = other DNA
gatcgtcgttctgctccttct

SEQ ID NO: 39646 - DNA, 21 bp, synthetic construct
  misc_feature 1..21: note = Description of Artificial Sequence: Synthetic oligonucleotide
  source 1..21: mol_type = other DNA
gcgaagactcagagtgtgaat

SEQ ID NO: 39647 - DNA, 21 bp, synthetic construct
  misc_feature 1..21: note = Description of Artificial Sequence: Synthetic oligonucleotide
  source 1..21: mol_type = other DNA
gctcagcctactgggactgcg

SEQ ID NO: 39648 - DNA, 21 bp, synthetic construct
  misc_feature 1..21: note = Description of Artificial Sequence: Synthetic oligonucleotide
  source 1..21: mol_type = other DNA
agcagaaacagcaaacccgtc

SEQ ID NO: 39649 - DNA, 21 bp, synthetic construct
  misc_feature 1..21: note = Description of Artificial Sequence: Synthetic oligonucleotide
  source 1..21: mol_type = other DNA
cagcggggtacgaagttggct

SEQ ID NO: 39650 - DNA, 21 bp, synthetic construct
  misc_feature 1..21: note = Description of Artificial Sequence: Synthetic oligonucleotide
  source 1..21: mol_type = other DNA
ggtgtgctgggttctaagaat

SEQ ID NO: 39651 - DNA, 21 bp, synthetic construct
  misc_feature 1..21: note = Description of Artificial Sequence: Synthetic oligonucleotide
  source 1..21: mol_type = other DNA
actcctggggcttctttgtcg

SEQ ID NO: 39652 - DNA, 21 bp, synthetic construct
  misc_feature 1..21: note = Description of Artificial Sequence: Synthetic oligonucleotide
  source 1..21: mol_type = other DNA
aagcctcaggggagtctggtt

SEQ ID NO: 39653 - DNA, 21 bp, synthetic construct
  misc_feature 1..21: note = Description of Artificial Sequence: Synthetic oligonucleotide
  source 1..21: mol_type = other DNA
cctgggtctattggtcagcat

SEQ ID NO: 39654 - DNA, 21 bp, synthetic construct
  misc_feature 1..21: note = Description of Artificial Sequence: Synthetic oligonucleotide
  source 1..21: mol_type = other DNA
ttttcgcttaagggtgggaat

SEQ ID NO: 39655 - DNA, 21 bp, synthetic construct
  misc_feature 1..21: note = Description of Artificial Sequence: Synthetic oligonucleotide
  source 1..21: mol_type = other DNA
ctggcgcaggagcgtggtact

SEQ ID NO: 39656 - DNA, 21 bp, synthetic construct
  misc_feature 1..21: note = Description of Artificial Sequence: Synthetic oligonucleotide
  source 1..21: mol_type = other DNA
gtccccagccaaagcctccac

SEQ ID NO: 39657 - DNA, 21 bp, synthetic construct
  misc_feature 1..21: note = Description of Artificial Sequence: Synthetic oligonucleotide
  source 1..21: mol_type = other DNA
gcttttccggcttctaattgt

SEQ ID NO: 39658 - DNA, 21 bp, synthetic construct
  misc_feature 1..21: note = Description of Artificial Sequence: Synthetic oligonucleotide
  source 1..21: mol_type = other DNA
tgtaggagtgctccgacgcgg

SEQ ID NO: 39659 - DNA, 21 bp, synthetic construct
  misc_feature 1..21: note = Description of Artificial Sequence: Synthetic oligonucleotide
  source 1..21: mol_type = other DNA
ggcggcagcgccaccgccgtc

SEQ ID NO: 39660 - DNA, 21 bp, synthetic construct
  misc_feature 1..21: note = Description of Artificial Sequence: Synthetic oligonucleotide
  source 1..21: mol_type = other DNA
aagattccgaagggtacgagt

SEQ ID NO: 39661 - DNA, 21 bp, synthetic construct
  misc_feature 1..21: note = Description of Artificial Sequence: Synthetic oligonucleotide
  source 1..21: mol_type = other DNA
caaaaacaaatcaaagtcggc

SEQ ID NO: 39662 - DNA, 21 bp, synthetic construct
  misc_feature 1..21: note = Description of Artificial Sequence: Synthetic oligonucleotide
  source 1..21: mol_type = other DNA
aacggcagcgccagaatgacc

SEQ ID NO: 39663 - DNA, 21 bp, synthetic construct
  misc_feature 1..21: note = Description of Artificial Sequence: Synthetic oligonucleotide
  source 1..21: mol_type = other DNA
gtcgccgccagagccagcatg

SEQ ID NO: 39664 - DNA, 21 bp, synthetic construct
  misc_feature 1..21: note = Description of Artificial Sequence: Synthetic oligonucleotide
  source 1..21: mol_type = other DNA
caagtcagccccgccagcaga

SEQ ID NO: 39665 - DNA, 21 bp, synthetic construct
  misc_feature 1..21: note = Description of Artificial Sequence: Synthetic oligonucleotide
  source 1..21: mol_type = other DNA
gggattcagagtgggcttggt

SEQ ID NO: 39666 - DNA, 21 bp, synthetic construct
  misc_feature 1..21: note = Description of Artificial Sequence: Synthetic oligonucleotide
  source 1..21: mol_type = other DNA
tataagccggggttgcagtct

SEQ ID NO: 39667 - DNA, 21 bp, synthetic construct
  misc_feature 1..21: note = Description of Artificial Sequence: Synthetic oligonucleotide
  source 1..21: mol_type = other DNA
agaagcgtcggcaacagcatg

SEQ ID NO: 39668 - DNA, 21 bp, synthetic construct
  misc_feature 1..21: note = Description of Artificial Sequence: Synthetic oligonucleotide
  source 1..21: mol_type = other DNA
tgcctcagcagcagcgccaaa

SEQ ID NO: 39669 - DNA, 21 bp, synthetic construct
  misc_feature 1..21: note = Description of Artificial Sequence: Synthetic oligonucleotide
  source 1..21: mol_type = other DNA
gataatccgaggcaggcttat

SEQ ID NO: 39670 - DNA, 21 bp, synthetic construct
  misc_feature 1..21: note = Description of Artificial Sequence: Synthetic oligonucleotide
  source 1..21: mol_type = other DNA
ttcaacggcctcagcacccaa

SEQ ID NO: 39671 - DNA, 21 bp, synthetic construct
  misc_feature 1..21: note = Description of Artificial Sequence: Synthetic oligonucleotide
  source 1..21: mol_type = other DNA
agtgtttctactaagagtgct

SEQ ID NO: 39672 - DNA, 21 bp, synthetic construct
  misc_feature 1..21: note = Description of Artificial Sequence: Synthetic oligonucleotide
  source 1..21: mol_type = other DNA
acgtctactagtccgatgaag

SEQ ID NO: 39673 - DNA, 21 bp, synthetic construct
  misc_feature 1..21: note = Description of Artificial Sequence: Synthetic oligonucleotide
  source 1..21: mol_type = other DNA
gctaggaatccgcaggtttcg

SEQ ID NO: 39674 - DNA, 21 bp, synthetic construct
  misc_feature 1..21: note = Description of Artificial Sequence: Synthetic oligonucleotide
  source 1..21: mol_type = other DNA
ctgcctacggttactcgttct

SEQ ID NO: 39675 - DNA, 21 bp, synthetic construct
  misc_feature 1..21: note = Description of Artificial Sequence: Synthetic oligonucleotide
  source 1..21: mol_type = other DNA
cggtctcatgagagtatgcat

SEQ ID NO: 39676 - DNA, 21 bp, synthetic construct
  misc_feature 1..21: note = Description of Artificial Sequence: Synthetic oligonucleotide
  source 1..21: mol_type = other DNA
atgagtacgcatagttcgggt

SEQ ID NO: 39677 - DNA, 21 bp, synthetic construct
  misc_feature 1..21: note = Description of Artificial Sequence: Synthetic oligonucleotide
  source 1..21: mol_type = other DNA
cacagaaccagccccgtcagc

SEQ ID NO: 39678 - DNA, 21 bp, synthetic construct
  misc_feature 1..21: note = Description of Artificial Sequence: Synthetic oligonucleotide
  source 1..21: mol_type = other DNA
atcaccagcgccagcccctgc

SEQ ID NO: 39679 - DNA, 21 bp, synthetic construct
  misc_feature 1..21: note = Description of Artificial Sequence: Synthetic oligonucleotide
  source 1..21: mol_type = other DNA
tcgagtatgcgtgagtcgagt

SEQ ID NO: 39680 - DNA, 21 bp, synthetic construct
  misc_feature 1..21: note = Description of Artificial Sequence: Synthetic oligonucleotide
  source 1..21: mol_type = other DNA
agcggcttccaacacaccaaa

SEQ ID NO: 39681 - DNA, 21 bp, synthetic construct
  misc_feature 1..21: note = Description of Artificial Sequence: Synthetic oligonucleotide
  source 1..21: mol_type = other DNA
agcggcatgagcagacacgtc

SEQ ID NO: 39682 - DNA, 21 bp, synthetic construct
  misc_feature 1..21: note = Description of Artificial Sequence: Synthetic oligonucleotide
  source 1..21: mol_type = other DNA
agtcggaatgggggtccgctg

SEQ ID NO: 39683 - DNA, 21 bp, synthetic construct
  misc_feature 1..21: note = Description of Artificial Sequence: Synthetic oligonucleotide
  source 1..21: mol_type = other DNA
ggttcgaatagtgcttatacg

SEQ ID NO: 39684 - DNA, 21 bp, synthetic construct
  misc_feature 1..21: note = Description of Artificial Sequence: Synthetic oligonucleotide
  source 1..21: mol_type = other DNA
gtgcaggggacgggtaatacg

SEQ ID NO: 39685 - DNA, 21 bp, synthetic construct
  misc_feature 1..21: note = Description of Artificial Sequence: Synthetic oligonucleotide
  source 1..21: mol_type = other DNA
atggtttcgtctaagagtagt

SEQ ID NO: 39686 - DNA, 21 bp, synthetic construct
  misc_feature 1..21: note = Description of Artificial Sequence: Synthetic oligonucleotide
  source 1..21: mol_type = other DNA
aggagtaatactccgccgaag

SEQ ID NO: 39687 - DNA, 21 bp, synthetic construct
  misc_feature 1..21: note = Description of Artificial Sequence: Synthetic oligonucleotide
  source 1..21: mol_type = other DNA
gccatgagcagcaacaacggc

SEQ ID NO: 39688 - DNA, 21 bp, synthetic construct
  misc_feature 1..21: note = Description of Artificial Sequence: Synthetic oligonucleotide
  source 1..21: mol_type = other DNA
gacaaagccagcagcgtcagc

SEQ ID NO: 39689 - DNA, 21 bp, synthetic construct
  misc_feature 1..21: note = Description of Artificial Sequence: Synthetic oligonucleotide
  source 1..21: mol_type = other DNA
tgcagcccccccaccagaggc

SEQ ID NO: 39690 - DNA, 21 bp, synthetic construct
  misc_feature 1..21: note = Description of Artificial Sequence: Synthetic oligonucleotide
  source 1..21: mol_type = other DNA
atgaatggtaaggatgtggtg

SEQ ID NO: 39691 - DNA, 21 bp, synthetic construct
  misc_feature 1..21: note = Description of Artificial Sequence: Synthetic oligonucleotide
  source 1..21: mol_type = other DNA
agaacccaaagcctcaccgcc

SEQ ID NO: 39692 - DNA, 21 bp, synthetic construct
  misc_feature 1..21: note = Description of Artificial Sequence: Synthetic oligonucleotide
  source 1..21: mol_type = other DNA
agaagcaccgacacccacggc

SEQ ID NO: 39693 - DNA, 21 bp, synthetic construct
  misc_feature 1..21: note = Description of Artificial Sequence: Synthetic oligonucleotide
  source 1..21: mol_type = other DNA
ggttctgatcagcgtcgtatg

SEQ ID NO: 39694 - DNA, 21 bp, synthetic construct
  misc_feature 1..21: note = Description of Artificial Sequence: Synthetic oligonucleotide
  source 1..21: mol_type = other DNA
gatcatcgtagtaaggttttg

SEQ ID NO: 39695 - DNA, 21 bp, synthetic construct
  misc_feature 1..21: note = Description of Artificial Sequence: Synthetic oligonucleotide
  source 1..21: mol_type = other DNA
tcttcgcttactactccgcat

SEQ ID NO: 39696 - DNA, 21 bp, synthetic construct
  misc_feature 1..21: note = Description of Artificial Sequence: Synthetic oligonucleotide
  source 1..21: mol_type = other DNA
cttgctagtggtactccttcg

SEQ ID NO: 39697 - DNA, 21 bp, synthetic construct
  misc_feature 1..21: note = Description of Artificial Sequence: Synthetic oligonucleotide
  source 1..21: mol_type = other DNA
ctggttcggcagtcttctgct

SEQ ID NO: 39698 - DNA, 21 bp, synthetic construct
  misc_feature 1..21: note = Description of Artificial Sequence: Synthetic oligonucleotide
  source 1..21: mol_type = other DNA
gctagtccgaatcggggtagt

SEQ ID NO: 39699 - DNA, 21 bp, synthetic construct
  misc_feature 1..21: note = Description of Artificial Sequence: Synthetic oligonucleotide
  source 1..21: mol_type = other DNA
tctcctcatactcatcagaag

SEQ ID NO: 39700 - DNA, 21 bp, synthetic construct
  misc_feature 1..21: note = Description of Artificial Sequence: Synthetic oligonucleotide
  source 1..21: mol_type = other DNA
gtcagaaccggcaccagcaac

SEQ ID NO: 39701 - DNA, 21 bp, synthetic construct
  misc_feature 1..21: note = Description of Artificial Sequence: Synthetic oligonucleotide
  source 1..21: mol_type = other DNA
cccctcaacacccaccaaagc

SEQ ID NO: 39702 - DNA, 21 bp, synthetic construct
  misc_feature 1..21: note = Description of Artificial Sequence: Synthetic oligonucleotide
  source 1..21: mol_type = other DNA
gggaatcatacgacgggtaag

SEQ ID NO: 39703 - DNA, 21 bp, synthetic construct
  misc_feature 1..21: note = Description of Artificial Sequence: Synthetic oligonucleotide
  source 1..21: mol_type = other DNA
tcgcagcctgctggtcgtagt

SEQ ID NO: 39704 - DNA, 21 bp, synthetic construct
  misc_feature 1..21: note = Description of Artificial Sequence: Synthetic oligonucleotide
  source 1..21: mol_type = other DNA
agcctccaaggcaacagaatg

SEQ ID NO: 39705 - DNA, 21 bp, synthetic construct
  misc_feature 1..21: note = Description of Artificial Sequence: Synthetic oligonucleotide
  source 1..21: mol_type = other DNA
accccccacggcaccagagtc

SEQ ID NO: 39706 - DNA, 21 bp, synthetic construct
  misc_feature 1..21: note = Description of Artificial Sequence: Synthetic oligonucleotide
  source 1..21: mol_type = other DNA
agccaacccatcggcgccaga

SEQ ID NO: 39707 - DNA, 21 bp, synthetic construct
  misc_feature 1..21: note = Description of Artificial Sequence: Synthetic oligonucleotide
  source 1..21: mol_type = other DNA
gtcggcctcagaagcaacacc

SEQ ID NO: 39708 - DNA, 21 bp, synthetic construct
  misc_feature 1..21: note = Description of Artificial Sequence: Synthetic oligonucleotide
  source 1..21: mol_type = other DNA
gccagaaaccccaccagcacc

SEQ ID NO: 39709 - DNA, 21 bp, synthetic construct
  misc_feature 1..21: note = Description of Artificial Sequence: Synthetic oligonucleotide
  source 1..21: mol_type = other DNA
atcaccgccaccgccgaaagc

SEQ ID NO: 39710 - DNA, 21 bp, synthetic construct
  misc_feature 1..21: note = Description of Artificial Sequence: Synthetic oligonucleotide
  source 1..21: mol_type = other DNA
gccagcaccaacagcatgcaa

SEQ ID NO: 39711 - DNA, 21 bp, synthetic construct
  misc_feature 1..21: note = Description of Artificial Sequence: Synthetic oligonucleotide
  source 1..21: mol_type = other DNA
aatgaggctcggtcggcgaat

SEQ ID NO: 39712 - DNA, 21 bp, synthetic construct
  misc_feature 1..21: note = Description of Artificial Sequence: Synthetic oligonucleotide
  source 1..21: mol_type = other DNA
agaagcagcgacagaagcgcc

SEQ ID NO: 39713 - DNA, 21 bp, synthetic construct
  misc_feature 1..21: note = Description of Artificial Sequence: Synthetic oligonucleotide
  source 1..21: mol_type = other DNA
cgtggttctgcgaattttctt

SEQ ID NO: 39714 - DNA, 21 bp, synthetic construct
  misc_feature 1..21: note = Description of Artificial Sequence: Synthetic oligonucleotide
  source 1..21: mol_type = other DNA
cttactccgaggggtcagatg

SEQ ID NO: 39715 - DNA, 21 bp, synthetic construct
  misc_feature 1..21: note = Description of Artificial Sequence: Synthetic oligonucleotide
  source 1..21: mol_type = other DNA
aatgggaattcgcttacgagg

SEQ ID NO: 39716 - DNA, 21 bp, synthetic construct
  misc_feature 1..21: note = Description of Artificial Sequence: Synthetic oligonucleotide
  source 1..21: mol_type = other DNA
gcctacagcgaaaccagaggc

SEQ ID NO: 39717 - DNA, 21 bp, synthetic construct
  misc_feature 1..21: note = Description of Artificial Sequence: Synthetic oligonucleotide
  source 1..21: mol_type = other DNA
aacatcgcccaaaaagacctc

SEQ ID NO: 39718 - DNA, 21 bp, synthetic construct
  misc_feature 1..21: note = Description of Artificial Sequence: Synthetic oligonucleotide
  source 1..21: mol_type = other DNA
tattcgacgagtgagtctaag

SEQ ID NO: 39719 - DNA, 21 bp, synthetic construct
  misc_feature 1..21: note = Description of Artificial Sequence: Synthetic oligonucleotide
  source 1..21: mol_type = other DNA
atggggaatcctcgtcatgtt

SEQ ID NO: 39720 - DNA, 21 bp, synthetic construct
  misc_feature 1..21: note = Description of Artificial Sequence: Synthetic oligonucleotide
  source 1..21: mol_type = other DNA
agtaggtcgaaggagtctgcg

SEQ ID NO: 39721 - DNA, 21 bp, synthetic construct
  misc_feature 1..21: note = Description of Artificial Sequence: Synthetic oligonucleotide
  source 1..21: mol_type = other DNA
caagccaacaccatcggcaaa

SEQ ID NO: 39722 - DNA, 21 bp, synthetic construct
  misc_feature 1..21: note = Description of Artificial Sequence: Synthetic oligonucleotide
  source 1..21: mol_type = other DNA
accagcgcccccagaagctgc

SEQ ID NO: 39723 - DNA, 21 bp, synthetic construct
  misc_feature 1..21: note = Description of Artificial Sequence: Synthetic oligonucleotide
  source 1..21: mol_type = other DNA
tatattaatagtccttcgaat

SEQ ID NO: 39724 - DNA, 21 bp, synthetic construct
  misc_feature 1..21: note = Description of Artificial Sequence: Synthetic oligonucleotide
  source 1..21: mol_type = other DNA
aataagtcgaatacgtttctt

SEQ ID NO: 39725 - DNA, 21 bp, synthetic construct
  misc_feature 1..21: note = Description of Artificial Sequence: Synthetic oligonucleotide
  source 1..21: mol_type = other DNA
gctcgggatgagagggctttt

SEQ ID NO: 39726 - DNA, 21 bp, synthetic construct
  misc_feature 1..21: note = Description of Artificial Sequence: Synthetic oligonucleotide
  source 1..21: mol_type = other DNA
aatcctggggagtcgcatcgt

SEQ ID NO: 39727 - DNA, 21 bp, synthetic construct
  misc_feature 1..21: note = Description of Artificial Sequence: Synthetic oligonucleotide
  source 1..21: mol_type = other DNA
agccacagcagcccctacaaa

SEQ ID NO: 39728 - DNA, 21 bp, synthetic construct
  misc_feature 1..21: note = Description of Artificial Sequence: Synthetic oligonucleotide
  source 1..21: mol_type = other DNA
agtacttctagttcggctagt

SEQ ID NO: 39729 - DNA, 21 bp, synthetic construct
  misc_feature 1..21: note = Description of Artificial Sequence: Synthetic oligonucleotide
  source 1..21: mol_type = other DNA
atcggccaaagcaccaacggc

SEQ ID NO: 39730 - DNA, 21 bp, synthetic construct
  misc_feature 1..21: note = Description of Artificial Sequence: Synthetic oligonucleotide
  source 1..21: mol_type = other DNA
actatgccggctcagaggagt

SEQ ID NO: 39731 - DNA, 21 bp, synthetic construct
  misc_feature 1..21: note = Description of Artificial Sequence: Synthetic oligonucleotide
  source 1..21: mol_type = other DNA
tgcatcggcaacaaaaccaac

SEQ ID NO: 39732 - DNA, 21 bp, synthetic construct
  misc_feature 1..21: note = Description of Artificial Sequence: Synthetic oligonucleotide
  source 1..21: mol_type = other DNA
ccggctgataatcataggccg

SEQ ID NO: 39733 - DNA, 21 bp, synthetic construct
  misc_feature 1..21: note = Description of Artificial Sequence: Synthetic oligonucleotide
  source 1..21: mol_type = other DNA
aatagtaatctgtcgactcag

SEQ ID NO: 39734 - DNA, 21 bp, synthetic construct
  misc_feature 1..21: note = Description of Artificial Sequence: Synthetic oligonucleotide
  source 1..21: mol_type = other DNA
gatggtgtgggtatgtatgct

SEQ ID NO: 39735 - DNA, 21 bp, synthetic construct
  misc_feature 1..21: note = Description of Artificial Sequence: Synthetic oligonucleotide
  source 1..21: mol_type = other DNA
cacatgaaacacctccaagtc

SEQ ID NO: 39736 - DNA, 21 bp, synthetic construct
  misc_feature 1..21: note = Description of Artificial Sequence: Synthetic oligonucleotide
  source 1..21: mol_type = other DNA
gctacggtgggtcatatgact

SEQ ID NO: 39737 - DNA, 21 bp, synthetic construct
  misc_feature 1..21: note = Description of Artificial Sequence: Synthetic oligonucleotide
  source 1..21: mol_type = other DNA
gatcagggtaatggttatggg

SEQ ID NO: 39738 - DNA, 21 bp, synthetic construct
  misc_feature 1..21: note = Description of Artificial Sequence: Synthetic oligonucleotide
  source 1..21: mol_type = other DNA
gacgtcgcccaagacagaagc

SEQ ID NO: 39739 - DNA, 21 bp, synthetic construct
  misc_feature 1..21: note = Description of Artificial Sequence: Synthetic oligonucleotide
  source 1..21: mol_type = other DNA
cgtcttacgggtatttcgact

SEQ ID NO: 39740 - DNA, 21 bp, synthetic construct
  misc_feature 1..21: note = Description of Artificial Sequence: Synthetic oligonucleotide
  source 1..21: mol_type = other DNA
ggtcggcttactagtagtatt

SEQ ID NO: 39741 - DNA, 21 bp, synthetic construct
  misc_feature 1..21: note = Description of Artificial Sequence: Synthetic oligonucleotide
  source 1..21: mol_type = other DNA
agattccaaaacaacaccggc

SEQ ID NO: 39742 - DNA, 21 bp, synthetic construct
  misc_feature 1..21: note = Description of Artificial Sequence: Synthetic oligonucleotide
  source 1..21: mol_type = other DNA
ggtccgtcgcagcaggtgatt

SEQ ID NO: 39743 - DNA, 21 bp, synthetic construct
  misc_feature 1..21: note = Description of Artificial Sequence: Synthetic oligonucleotide
  source 1..21: mol_type = other DNA
ggcagaagccccaccgccagc

SEQ ID NO: 39744 - DNA, 21 bp, synthetic construct
  misc_feature 1..21: note = Description of Artificial Sequence: Synthetic oligonucleotide
  source 1..21: mol_type = other DNA
gagaatgatcataatgttcgt

SEQ ID NO: 39745 - DNA, 21 bp, synthetic construct
  misc_feature 1..21: note = Description of Artificial Sequence: Synthetic oligonucleotide
  source 1..21: mol_type = other DNA
cttggtcctcatcctacgcat

SEQ ID NO: 39746 - DNA, 21 bp, synthetic construct
  misc_feature 1..21: note = Description of Artificial Sequence: Synthetic oligonucleotide
  source 1..21: mol_type = other DNA
gatgatcggtctgcgcggggg

SEQ ID NO: 39747 - DNA, 21 bp, synthetic construct
  misc_feature 1..21: note = Description of Artificial Sequence: Synthetic oligonucleotide
  source 1..21: mol_type = other DNA
acgggtatgagtcatatgggt

SEQ ID NO: 39748 - DNA, 21 bp, synthetic construct
  misc_feature 1..21: note = Description of Artificial Sequence: Synthetic oligonucleotide
  source 1..21: mol_type = other DNA
actggggcttcgcctctggct

SEQ ID NO: 39749 - DNA, 21 bp, synthetic construct
  misc_feature 1..21: note = Description of Artificial Sequence: Synthetic oligonucleotide
  source 1..21: mol_type = other DNA
accagcaccagaagcagctgc

SEQ ID NO: 39750 - DNA, 21 bp, synthetic construct
  misc_feature 1..21: note = Description of Artificial Sequence: Synthetic oligonucleotide
  source 1..21: mol_type = other DNA
tgtttggttcggcctatggct

SEQ ID NO: 39751 - DNA, 21 bp, synthetic construct
  misc_feature 1..21: note = Description of Artificial Sequence: Synthetic oligonucleotide
  source 1..21: mol_type = other DNA
aaactcaacatgaaaggcccc

SEQ ID NO: 39752 - DNA, 21 bp, synthetic construct
  misc_feature 1..21: note = Description of Artificial Sequence: Synthetic oligonucleotide
  source 1..21: mol_type = other DNA
tgtttgcctaatcattgtaat

SEQ ID NO: 39753 - DNA, 21 bp, synthetic construct
  misc_feature 1..21: note = Description of Artificial Sequence: Synthetic oligonucleotide
  source 1..21: mol_type = other DNA
ggctggaaccacgaaaacgtc

SEQ ID NO: 39754 - DNA, 21 bp, synthetic construct
  misc_feature 1..21: note = Description of Artificial Sequence: Synthetic oligonucleotide
  source 1..21: mol_type = other DNA
tttgctatgcctcgggagaat

SEQ ID NO: 39755 - DNA, 21 bp, synthetic construct
  misc_feature 1..21: note = Description of Artificial Sequence: Synthetic oligonucleotide
  source 1..21: mol_type = other DNA
ggcctcagaaacgacaccgtc

SEQ ID NO: 39756 - DNA, 21 bp, synthetic construct
  misc_feature 1..21: note = Description of Artificial Sequence: Synthetic oligonucleotide
  source 1..21: mol_type = other DNA
cagcagggtcggacggctggt

SEQ ID NO: 39757 - DNA, 21 bp, synthetic construct
  misc_feature 1..21: note = Description of Artificial Sequence: Synthetic oligonucleotide
  source 1..21: mol_type = other DNA
gggcagggtgtgcgtgctatg

SEQ ID NO: 39758 - DNA, 21 bp, synthetic construct
  misc_feature 1..21: note = Description of Artificial Sequence: Synthetic oligonucleotide
  source 1..21: mol_type = other DNA
tcgattagtacgcgtacgggg

SEQ ID NO: 39759 - DNA, 21 bp, synthetic construct
  misc_feature 1..21: note = Description of Artificial Sequence: Synthetic oligonucleotide
  source 1..21: mol_type = other DNA
caaagcagcagaaccgtcacc

SEQ ID NO: 39760 - DNA, 21 bp, synthetic construct
  misc_feature 1..21: note = Description of Artificial Sequence: Synthetic oligonucleotide
  source 1..21: mol_type = other DNA
cccagcacccacaaagcccaa

SEQ ID NO: 39761 - DNA, 21 bp, synthetic construct
  misc_feature 1..21: note = Description of Artificial Sequence: Synthetic oligonucleotide
  source 1..21: mol_type = other DNA
gccaacaccagcggccaagcc

SEQ ID NO: 39762 - DNA, 21 bp, synthetic construct
  misc_feature 1..21: note = Description of Artificial Sequence: Synthetic oligonucleotide
  source 1..21: mol_type = other DNA
gataagacgcagaagcagctg

SEQ ID NO: 39763 - DNA, 21 bp, synthetic construct
  misc_feature 1..21: note = Description of Artificial Sequence: Synthetic oligonucleotide
  source 1..21: mol_type = other DNA
tcgggggcgtctcctgctcgg

SEQ ID NO: 39764 - DNA, 21 bp, synthetic construct
  misc_feature 1..21: note = Description of Artificial Sequence: Synthetic oligonucleotide
  source 1..21: mol_type = other DNA
ggcaaacccacccaacaaggc

SEQ ID NO: 39765 - DNA, 21 bp, synthetic construct
  misc_feature 1..21: note = Description of Artificial Sequence: Synthetic oligonucleotide
  source 1..21: mol_type = other DNA
agaggcgtcagcacccccacc

SEQ ID NO: 39766 - DNA, 21 bp, synthetic construct
  misc_feature 1..21: note = Description of Artificial Sequence: Synthetic oligonucleotide
  source 1..21: mol_type = other DNA
tatgcttctagtagggatggt

SEQ ID NO: 39767 - DNA, 21 bp, synthetic construct
  misc_feature 1..21: note = Description of Artificial Sequence: Synthetic oligonucleotide
  source 1..21: mol_type = other DNA
gcccccagcgccggcatgagc

SEQ ID NO: 39768 - DNA, 21 bp, synthetic construct
  misc_feature 1..21: note = Description of Artificial Sequence: Synthetic oligonucleotide
  source 1..21: mol_type = other DNA
attggtagtaatgcgcggcag

SEQ ID NO: 39769 - DNA, 21 bp, synthetic construct
  misc_feature 1..21: note = Description of Artificial Sequence: Synthetic oligonucleotide
  source 1..21: mol_type = other DNA
ggcggcagcaacctcagaacc

SEQ ID NO: 39770 - DNA, 21 bp, synthetic construct
  misc_feature 1..21: note = Description of Artificial Sequence: Synthetic oligonucleotide
  source 1..21: mol_type = other DNA
actcagtcttcgagtaggacg

SEQ ID NO: 39771 - DNA, 21 bp, synthetic construct
  misc_feature 1..21: note = Description of Artificial Sequence: Synthetic oligonucleotide
  source 1..21: mol_type = other DNA
ggcctccccctcagaagcgtc

SEQ ID NO: 39772 - DNA, 21 bp, synthetic construct
  misc_feature 1..21: note = Description of Artificial Sequence: Synthetic oligonucleotide
  source 1..21: mol_type = other DNA
tcgagtgttgggaggctgaat

SEQ ID NO: 39773 - DNA, 21 bp, synthetic construct
  misc_feature 1..21: note = Description of Artificial Sequence: Synthetic oligonucleotide
  source 1..21: mol_type = other DNA
gacatgggcagcagcctcagc

SEQ ID NO: 39774 - DNA, 21 bp, synthetic construct
  misc_feature 1..21: note = Description of Artificial Sequence: Synthetic oligonucleotide
  source 1..21: mol_type = other DNA
gtgactaattctgctcctact

SEQ ID NO: 39775 - DNA, 21 bp, synthetic construct
  misc_feature 1..21: note = Description of Artificial Sequence: Synthetic oligonucleotide
  source 1..21: mol_type = other DNA
gctatggggtcgaggctgtct

SEQ ID NO: 39776 - DNA, 21 bp, synthetic construct
  misc_feature 1..21: note = Description of Artificial Sequence: Synthetic oligonucleotide
  source 1..21: mol_type = other DNA
actcctgcgcttaagaatgct

SEQ ID NO: 39777 - DNA, 21 bp, synthetic construct
  misc_feature 1..21: note = Description of Artificial Sequence: Synthetic oligonucleotide
  source 1..21: mol_type = other DNA
agcggcggccaagccatgggc

SEQ ID NO: 39778 - DNA, 21 bp, synthetic construct
  misc_feature 1..21: note = Description of Artificial Sequence: Synthetic oligonucleotide
  source 1..21: mol_type = other DNA
tcgcgtgagacggtgcctacg

SEQ ID NO: 39779 - DNA, 21 bp, synthetic construct
  misc_feature 1..21: note = Description of Artificial Sequence: Synthetic oligonucleotide
  source 1..21: mol_type = other DNA
atcaaccaaagcacctacaaa

SEQ ID NO: 39780 - DNA, 21 bp, synthetic construct
  misc_feature 1..21: note = Description of Artificial Sequence: Synthetic oligonucleotide
  source 1..21: mol_type = other DNA
cacgccagcagcccctgcatc

SEQ ID NO: 39781 - DNA, 21 bp, synthetic construct
  misc_feature 1..21: note = Description of Artificial Sequence: Synthetic oligonucleotide
  source 1..21: mol_type = other DNA
tctaagaatgtttcttcgaag

SEQ ID NO: 39782 - DNA, 21 bp, synthetic construct
  misc_feature 1..21: note = Description of Artificial Sequence: Synthetic oligonucleotide
  source 1..21: mol_type = other DNA
cacggcagcctcgaaagcgcc

SEQ ID NO: 39783 - DNA, 21 bp, synthetic construct
  misc_feature 1..21: note = Description of Artificial Sequence: Synthetic oligonucleotide
  source 1..21: mol_type = other DNA
catcgtacggctcctgttagt

SEQ ID NO: 39784 - DNA, 21 bp, synthetic construct
  misc_feature 1..21: note = Description of Artificial Sequence: Synthetic oligonucleotide
  source 1..21: mol_type = other DNA
aacatcagcaccatgagcaaa

SEQ ID NO: 39785 - DNA, 21 bp, synthetic construct
  misc_feature 1..21: note = Description of Artificial Sequence: Synthetic oligonucleotide
  source 1..21: mol_type = other DNA
ctcggcatgagagacaacacc

SEQ ID NO: 39786 - DNA, 21 bp, synthetic construct
  misc_feature 1..21: note = Description of Artificial Sequence: Synthetic oligonucleotide
  source 1..21: mol_type = other DNA
gatttgcagactagtgctaag

SEQ ID NO: 39787 - DNA, 21 bp, synthetic construct
  misc_feature 1..21: note = Description of Artificial Sequence: Synthetic oligonucleotide
  source 1..21: mol_type = other DNA
cagagtaatccgcgtcctggt

SEQ ID NO: 39788 - DNA, 21 bp, synthetic construct
  misc_feature 1..21: note = Description of Artificial Sequence: Synthetic oligonucleotide
  source 1..21: mol_type = other DNA
cacagcagcaaaagccacgac

SEQ ID NO: 39789 - DNA, 21 bp, synthetic construct
  misc_feature 1..21: note = Description of Artificial Sequence: Synthetic oligonucleotide
  source 1..21: mol_type = other DNA
agttcgactagtcttggttcg

SEQ ID NO: 39790 - DNA, 21 bp, synthetic construct
  misc_feature 1..21: note = Description of Artificial Sequence: Synthetic oligonucleotide
  source 1..21: mol_type = other DNA
ccgcgtcatactgttagtccg

SEQ ID NO: 39791 - DNA, 21 bp, synthetic construct
  misc_feature 1..21: note = Description of Artificial Sequence: Synthetic oligonucleotide
  source 1..21: mol_type = other DNA
gttaatggtgctactgctgtt

SEQ ID NO: 39792 - DNA, 21 bp, synthetic construct
  misc_feature 1..21: note = Description of Artificial Sequence: Synthetic oligonucleotide
  source 1..21: mol_type = other DNA
cccgtcatgaccagaaccccc

SEQ ID NO: 39793 - DNA, 21 bp, synthetic construct
  misc_feature 1..21: note = Description of Artificial Sequence: Synthetic oligonucleotide
  source 1..21: mol_type = other DNA
tgtactacgcggcagggtaat

SEQ ID NO: 39794 - DNA, 21 bp, synthetic construct
  misc_feature 1..21: note = Description of Artificial Sequence: Synthetic oligonucleotide
  source 1..21: mol_type = other DNA
gtcatgggcgccggcgccagc

SEQ ID NO: 39795 - DNA, 21 bp, synthetic construct
  misc_feature 1..21: note = Description of Artificial Sequence: Synthetic oligonucleotide
  source 1..21: mol_type = other DNA
cccgccgcccacaacgccgtc

SEQ ID NO: 39796 - DNA, 21 bp, synthetic construct
  misc_feature 1..21: note = Description of Artificial Sequence: Synthetic oligonucleotide
  source 1..21: mol_type = other DNA
ctgggtaagcctgctcagccg

SEQ ID NO: 39797 - DNA, 21 bp, synthetic construct
  misc_feature 1..21: note = Description of Artificial Sequence: Synthetic oligonucleotide
  source 1..21: mol_type = other DNA
tttaggacgactgcttcgact

SEQ ID NO: 39798 - DNA, 21 bp, synthetic construct
  misc_feature 1..21: note = Description of Artificial Sequence: Synthetic oligonucleotide
  source 1..21: mol_type = other DNA
attcggactaaggattctcgt

SEQ ID NO: 39799 - DNA, 21 bp, synthetic construct
  misc_feature 1..21: note = Description of Artificial Sequence: Synthetic oligonucleotide
  source 1..21: mol_type = other DNA
tcgcatacgcctaagcttgtt

SEQ ID NO: 39800 - DNA, 21 bp, synthetic construct
  misc_feature 1..21: note = Description of Artificial Sequence: Synthetic oligonucleotide
  source 1..21: mol_type = other DNA
cccgccggcagaagcagcaac

SEQ ID NO: 39801 - DNA, 21 bp, synthetic construct
  misc_feature 1..21: note = Description of Artificial Sequence: Synthetic oligonucleotide
  source 1..21: mol_type = other DNA
agaagcctccccaacgtcgcc

SEQ ID NO: 39802 - DNA, 21 bp, synthetic construct
  misc_feature 1..21: note = Description of Artificial Sequence: Synthetic oligonucleotide
  source 1..21: mol_type = other DNA
gttaggtctaatgtttcgggt

SEQ ID NO: 39803 - DNA, 21 bp, synthetic construct
  misc_feature 1..21: note = Description of Artificial Sequence: Synthetic oligonucleotide
  source 1..21: mol_type = other DNA
tcggataagggtaatactcgg

SEQ ID NO: 39804 - DNA, 21 bp, synthetic construct
  misc_feature 1..21: note = Description of Artificial Sequence: Synthetic oligonucleotide
  source 1..21: mol_type = other DNA
atgaatactcagggtcctatt

SEQ ID NO: 39805 - DNA, 21 bp, synthetic construct
  misc_feature 1..21: note = Description of Artificial Sequence: Synthetic oligonucleotide
  source 1..21: mol_type = other DNA
tcttcgcagactcgtggtttg

SEQ ID NO: 39806 - DNA, 21 bp, synthetic construct
  misc_feature 1..21: note = Description of Artificial Sequence: Synthetic oligonucleotide
  source 1..21: mol_type = other DNA
cctgataatcgtgtgcgggcg

SEQ ID NO: 39807 - DNA, 21 bp, synthetic construct
  misc_feature 1..21: note = Description of Artificial Sequence: Synthetic oligonucleotide
  source 1..21: mol_type = other DNA
taccccagacaaagaaccgaa

SEQ ID NO: 39808 - DNA, 21 bp, synthetic construct
  misc_feature 1..21: note = Description of Artificial Sequence: Synthetic oligonucleotide
  source 1..21: mol_type = other DNA
cttaagcctcagatgcatact

SEQ ID NO: 39809 - DNA, 21 bp, synthetic construct
  misc_feature 1..21: note = Description of Artificial Sequence: Synthetic oligonucleotide
  source 1..21: mol_type = other DNA
gccctcaccggcaaactcagc

SEQ ID NO: 39810 - DNA, 21 bp, synthetic construct
  misc_feature 1..21: note = Description of Artificial Sequence: Synthetic oligonucleotide
  source 1..21: mol_type = other DNA
cccacccaacaccaaagaggc

SEQ ID NO: 39811 - DNA, 21 bp, synthetic construct
  misc_feature 1..21: note = Description of Artificial Sequence: Synthetic oligonucleotide
  source 1..21: mol_type = other DNA
agcagagtcgaccaatacaaa

SEQ ID NO: 39812 - DNA, 21 bp, synthetic construct
  misc_feature 1..21: note = Description of Artificial Sequence: Synthetic oligonucleotide
  source 1..21: mol_type = other DNA
atcggcaccaccccccccaaa

SEQ ID NO: 39813 - DNA, 21 bp, synthetic construct
  misc_feature 1..21: note = Description of Artificial Sequence: Synthetic oligonucleotide
  source 1..21: mol_type = other DNA
ggcagcaccaaacccagcccc

SEQ ID NO: 39814 - DNA, 21 bp, synthetic construct
  misc_feature 1..21: note = Description of Artificial Sequence: Synthetic oligonucleotide
  source 1..21: mol_type = other DNA
tcgattccttctactgtgcgg

SEQ ID NO: 39815 - DNA, 21 bp, synthetic construct
  misc_feature 1..21: note = Description of Artificial Sequence: Synthetic oligonucleotide
  source 1..21: mol_type = other DNA
agtagttcggttactgcgagg

SEQ ID NO: 39816 - DNA, 21 bp, synthetic construct
  misc_feature 1..21: note = Description of Artificial Sequence: Synthetic oligonucleotide
  source 1..21: mol_type = other DNA
tcttctgggggtaatatgagt

SEQ ID NO: 39817 - DNA, 21 bp, synthetic construct
  misc_feature 1..21: note = Description of Artificial Sequence: Synthetic oligonucleotide
  source 1..21: mol_type = other DNA
agcgtcggcgcccccaccctc

SEQ ID NO: 39818 - DNA, 21 bp, synthetic construct
  misc_feature 1..21: note = Description of Artificial Sequence: Synthetic oligonucleotide
  source 1..21: mol_type = other DNA
attacgtctgtgaagactgcg

SEQ ID NO: 39819 - DNA, 21 bp, synthetic construct
  misc_feature 1..21: note = Description of Artificial Sequence: Synthetic oligonucleotide
  source 1..21: mol_type = other DNA
cggtcttatgatccgaatcgg

SEQ ID NO: 39820 - DNA, 21 bp, synthetic construct
  misc_feature 1..21: note = Description of Artificial Sequence: Synthetic oligonucleotide
  source 1..21: mol_type = other DNA
aacaaaatgaccagcgtcagc

SEQ ID NO: 39821 - DNA, 21 bp, synthetic construct
  misc_feature 1..21: note = Description of Artificial Sequence: Synthetic oligonucleotide
  source 1..21: mol_type = other DNA
ctggcgatggagaggcagcgt

SEQ ID NO: 39822 - DNA, 21 bp, synthetic construct
  misc_feature 1..21: note = Description of Artificial Sequence: Synthetic oligonucleotide
  source 1..21: mol_type = other DNA
ggtaagggtgttggtcagagg

SEQ ID NO: 39823 - DNA, 21 bp, synthetic construct
  misc_feature 1..21: note = Description of Artificial Sequence: Synthetic oligonucleotide
  source 1..21: mol_type = other DNA
cccgtcgacaccagccacaaa

SEQ ID NO: 39824 - DNA, 21 bp, synthetic construct
  misc_feature 1..21: note = Description of Artificial Sequence: Synthetic oligonucleotide
  source 1..21: mol_type = other DNA
cgtactacttcgtcgctggtg

SEQ ID NO: 39825 - DNA, 21 bp, synthetic construct
  misc_feature 1..21: note = Description of Artificial Sequence: Synthetic oligonucleotide
  source 1..21: mol_type = other DNA
gtccccagcagagccgccacc

SEQ ID NO: 39826 - DNA, 21 bp, synthetic construct
  misc_feature 1..21: note = Description of Artificial Sequence: Synthetic oligonucleotide
  source 1..21: mol_type = other DNA
gccgccaccaacagcctcacc

SEQ ID NO: 39827 - DNA, 21 bp, synthetic construct
  misc_feature 1..21: note = Description of Artificial Sequence: Synthetic oligonucleotide
  source 1..21: mol_type = other DNA
agtgcgactgggtcgaggctg

SEQ ID NO: 39828 - DNA, 21 bp, synthetic construct
  misc_feature 1..21: note = Description of Artificial Sequence: Synthetic oligonucleotide
  source 1..21: mol_type = other DNA
tcggttgtttctcataagtcg

SEQ ID NO: 39829 - DNA, 21 bp, synthetic construct
  misc_feature 1..21: note = Description of Artificial Sequence: Synthetic oligonucleotide
  source 1..21: mol_type = other DNA
agcagaaccgccggcgtccaa

SEQ ID NO: 39830 - DNA, 21 bp, synthetic construct
  misc_feature 1..21: note = Description of Artificial Sequence: Synthetic oligonucleotide
  source 1..21: mol_type = other DNA
accgtcaacaccagaagcgcc

SEQ ID NO: 39831 - DNA, 21 bp, synthetic construct
  misc_feature 1..21: note = Description of Artificial Sequence: Synthetic oligonucleotide
  source 1..21: mol_type = other DNA
tggactgtgagtcggtctggt

SEQ ID NO: 39832 - DNA, 21 bp, synthetic construct
  misc_feature 1..21: note = Description of Artificial Sequence: Synthetic oligonucleotide
  source 1..21: mol_type = other DNA
aacctcaccagcagcagcagc

SEQ ID NO: 39833 - DNA, 21 bp, synthetic construct
  misc_feature 1..21: note = Description of Artificial Sequence: Synthetic oligonucleotide
  source 1..21: mol_type = other DNA
agagcccaccccaccctcggc

SEQ ID NO: 39834 - DNA, 21 bp, synthetic construct
  misc_feature 1..21: note = Description of Artificial Sequence: Synthetic oligonucleotide
  source 1..21: mol_type = other DNA
ccgatgattaattcgagtgat

SEQ ID NO: 39835 - DNA, 21 bp, synthetic construct
  misc_feature 1..21: note = Description of Artificial Sequence: Synthetic oligonucleotide
  source 1..21: mol_type = other DNA
agcaccgtcgccaccagcttc

SEQ ID NO: 39836 - DNA, 21 bp, synthetic construct
  misc_feature 1..21: note = Description of Artificial Sequence: Synthetic oligonucleotide
  source 1..21: mol_type = other DNA
acttctgggtcggctcgtggg

SEQ ID NO: 39837 - DNA, 21 bp, synthetic construct
  misc_feature 1..21: note = Description of Artificial Sequence: Synthetic oligonucleotide
  source 1..21: mol_type = other DNA
tctacgacgaataaggctcat

SEQ ID NO: 39838 - DNA, 21 bp, synthetic construct
  misc_feature 1..21: note = Description of Artificial Sequence: Synthetic oligonucleotide
  source 1..21: mol_type = other DNA
aacctccacctcgccggcacc

SEQ ID NO: 39839 - DNA, 21 bp, synthetic construct
  misc_feature 1..21: note = Description of Artificial Sequence: Synthetic oligonucleotide
  source 1..21: mol_type = other DNA
aggaatgtgtctcatccgggt

SEQ ID NO: 39840 - DNA, 21 bp, synthetic construct
  misc_feature 1..21: note = Description of Artificial Sequence: Synthetic oligonucleotide
  source 1..21: mol_type = other DNA
agtactggtaaggctacttgt

SEQ ID NO: 39841 - DNA, 21 bp, synthetic construct
  misc_feature 1..21: note = Description of Artificial Sequence: Synthetic oligonucleotide
  source 1..21: mol_type = other DNA
aaaaactacgacaacgccgtc

SEQ ID NO: 39842 - DNA, 21 bp, synthetic construct
  misc_feature 1..21: note = Description of Artificial Sequence: Synthetic oligonucleotide
  source 1..21: mol_type = other DNA
actgaggctcggtcggcgaat

SEQ ID NO: 39843 - DNA, 21 bp, synthetic construct
  misc_feature 1..21: note = Description of Artificial Sequence: Synthetic oligonucleotide
  source 1..21: mol_type = other DNA
cggactctttctaatcatggt

SEQ ID NO: 39844 - DNA, 21 bp, synthetic construct
  misc_feature 1..21: note = Description of Artificial Sequence: Synthetic oligonucleotide
  source 1..21: mol_type = other DNA
tcttctgctccgagtctttct

SEQ ID NO: 39845 - DNA, 21 bp, synthetic construct
  misc_feature 1..21: note = Description of Artificial Sequence: Synthetic oligonucleotide
  source 1..21: mol_type = other DNA
ggcaacatgagaaacctcgcc

SEQ ID NO: 39846 - DNA, 21 bp, synthetic construct
  misc_feature 1..21: note = Description of Artificial Sequence: Synthetic oligonucleotide
  source 1..21: mol_type = other DNA
aatgtggttgggactggtgct

SEQ ID NO: 39847 - DNA, 21 bp, synthetic construct
  misc_feature 1..21: note = Description of Artificial Sequence: Synthetic oligonucleotide
  source 1..21: mol_type = other DNA
gagactactgtgagggcttct

SEQ ID NO: 39848 - DNA, 21 bp, synthetic construct
  misc_feature 1..21: note = Description of Artificial Sequence: Synthetic oligonucleotide
  source 1..21: mol_type = other DNA
acttcgtctacgacttctttg

SEQ ID NO: 39849 - DNA, 21 bp, synthetic construct
  misc_feature 1..21: note = Description of Artificial Sequence: Synthetic oligonucleotide
  source 1..21: mol_type = other DNA
agacccagcaacgccagcggc

SEQ ID NO: 39850 - DNA, 21 bp, synthetic construct
  misc_feature 1..21: note = Description of Artificial Sequence: Synthetic oligonucleotide
  source 1..21: mol_type = other DNA
ggcgaccacaacagaatgaac

SEQ ID NO: 39851 - DNA, 21 bp, synthetic construct
  misc_feature 1..21: note = Description of Artificial Sequence: Synthetic oligonucleotide
  source 1..21: mol_type = other DNA
gacagaatgggcaccgcccac

SEQ ID NO: 39852 - DNA, 21 bp, synthetic construct
  misc_feature 1..21: note = Description of Artificial Sequence: Synthetic oligonucleotide
  source 1..21: mol_type = other DNA
gttgcgtcttctccgcttcgt

SEQ ID NO: 39853 - DNA, 21 bp, synthetic construct
  misc_feature 1..21: note = Description of Artificial Sequence: Synthetic oligonucleotide
  source 1..21: mol_type = other DNA
atggccaccagcaccgtcaaa

SEQ ID NO: 39854 - DNA, 21 bp, synthetic construct
  misc_feature 1..21: note = Description of Artificial Sequence: Synthetic oligonucleotide
  source 1..21: mol_type = other DNA
cggactctttctaataatggt

SEQ ID NO: 39855 - DNA, 21 bp, synthetic construct
  misc_feature 1..21: note = Description of Artificial Sequence: Synthetic oligonucleotide
  source 1..21: mol_type = other DNA
ggcatgatccccagcagcaga

SEQ ID NO: 39856 - DNA, 21 bp, synthetic construct
  misc_feature 1..21: note = Description of Artificial Sequence: Synthetic oligonucleotide
  source 1..21: mol_type = other DNA
ccttctcatatggcttcggcg

SEQ ID NO: 39857 - DNA, 21 bp, synthetic construct
  misc_feature 1..21: note = Description of Artificial Sequence: Synthetic oligonucleotide
  source 1..21: mol_type = other DNA
cattctcatgggaagtcgatt

SEQ ID NO: 39858 - DNA, 21 bp, synthetic construct
  misc_feature 1..21: note = Description of Artificial Sequence: Synthetic oligonucleotide
  source 1..21: mol_type = other DNA
ggtaattctatggctgggact

SEQ ID NO: 39859 - DNA, 21 bp, synthetic construct
  misc_feature 1..21: note = Description of Artificial Sequence: Synthetic oligonucleotide
  source 1..21: mol_type = other DNA
gtgtcgactaagagtgctcct

SEQ ID NO: 39860 - DNA, 21 bp, synthetic construct
  misc_feature 1..21: note = Description of Artificial Sequence: Synthetic oligonucleotide
  source 1..21: mol_type = other DNA
ggtgtgaatattcatgcgact

SEQ ID NO: 39861 - DNA, 21 bp, synthetic construct
  misc_feature 1..21: note = Description of Artificial Sequence: Synthetic oligonucleotide
  source 1..21: mol_type = other DNA
gacgtcctcagcaaaagacaa

SEQ ID NO: 39862 - DNA, 21 bp, synthetic construct
  misc_feature 1..21: note = Description of Artificial Sequence: Synthetic oligonucleotide
  source 1..21: mol_type = other DNA
accgacaccaacagaatgtac

SEQ ID NO: 39863 - DNA, 21 bp, synthetic construct
  misc_feature 1..21: note = Description of Artificial Sequence: Synthetic oligonucleotide
  source 1..21: mol_type = other DNA
gccaaccacagcatcagaagc

SEQ ID NO: 39864 - DNA, 21 bp, synthetic construct
  misc_feature 1..21: note = Description of Artificial Sequence: Synthetic oligonucleotide
  source 1..21: mol_type = other DNA
cacggcgacagcggcaaagtc

SEQ ID NO: 39865 - DNA, 21 bp, synthetic construct
  misc_feature 1..21: note = Description of Artificial Sequence: Synthetic oligonucleotide
  source 1..21: mol_type = other DNA
agaatgcaagtcagccccttc

SEQ ID NO: 39866 - DNA, 21 bp, synthetic construct
  misc_feature 1..21: note = Description of Artificial Sequence: Synthetic oligonucleotide
  source 1..21: mol_type = other DNA
atgctgaatacttctcattat

SEQ ID NO: 39867 - DNA, 21 bp, synthetic construct
  misc_feature 1..21: note = Description of Artificial Sequence: Synthetic oligonucleotide
  source 1..21: mol_type = other DNA
tctctgtcgactgggtcgggg

SEQ ID NO: 39868 - DNA, 21 bp, synthetic construct
  misc_feature 1..21: note = Description of Artificial Sequence: Synthetic oligonucleotide
  source 1..21: mol_type = other DNA
aagtcgtcgtctcatgcgact

SEQ ID NO: 39869 - DNA, 21 bp, synthetic construct
  misc_feature 1..21: note = Description of Artificial Sequence: Synthetic oligonucleotide
  source 1..21: mol_type = other DNA
atggttccgaatgggcgtgct

SEQ ID NO: 39870 - DNA, 21 bp, synthetic construct
  misc_feature 1..21: note = Description of Artificial Sequence: Synthetic oligonucleotide
  source 1..21: mol_type = other DNA
ttgaatcagcattcgagtatt

SEQ ID NO: 39871 - DNA, 21 bp, synthetic construct
  misc_feature 1..21: note = Description of Artificial Sequence: Synthetic oligonucleotide
  source 1..21: mol_type = other DNA
tataataagaatgctcagttg

SEQ ID NO: 39872 - DNA, 21 bp, synthetic construct
  misc_feature 1..21: note = Description of Artificial Sequence: Synthetic oligonucleotide
  source 1..21: mol_type = other DNA
catccggagactgcttttaag

SEQ ID NO: 39873 - DNA, 21 bp, synthetic construct
  misc_feature 1..21: note = Description of Artificial Sequence: Synthetic oligonucleotide
  source 1..21: mol_type = other DNA
tctcagcagactacggaggcg

SEQ ID NO: 39874 - DNA, 21 bp, synthetic construct
  misc_feature 1..21: note = Description of Artificial Sequence: Synthetic oligonucleotide
  source 1..21: mol_type = other DNA
accctcggccaagaagtcaga

SEQ ID NO: 39875 - DNA, 21 bp, synthetic construct
  misc_feature 1..21: note = Description of Artificial Sequence: Synthetic oligonucleotide
  source 1..21: mol_type = other DNA
agaggcgccaccagcaccagc

SEQ ID NO: 39876 - DNA, 21 bp, synthetic construct
  misc_feature 1..21: note = Description of Artificial Sequence: Synthetic oligonucleotide
  source 1..21: mol_type = other DNA
agacacaccatcgacagcccc

SEQ ID NO: 39877 - DNA, 21 bp, synthetic construct
  misc_feature 1..21: note = Description of Artificial Sequence: Synthetic oligonucleotide
  source 1..21: mol_type = other DNA
cgttctagtaatgggtatctt

SEQ ID NO: 39878 - DNA, 21 bp, synthetic construct
  misc_feature 1..21: note = Description of Artificial Sequence: Synthetic oligonucleotide
  source 1..21: mol_type = other DNA
attttgcctcggggtgttgat

SEQ ID NO: 39879 - DNA, 21 bp, synthetic construct
  misc_feature 1..21: note = Description of Artificial Sequence: Synthetic oligonucleotide
  source 1..21: mol_type = other DNA
accaacatgcaaagcgtcctc

SEQ ID NO: 39880 - DNA, 21 bp, synthetic construct
  misc_feature 1..21: note = Description of Artificial Sequence: Synthetic oligonucleotide
  source 1..21: mol_type = other DNA
ggcgtctacggccaaagcctc

SEQ ID NO: 39881 - DNA, 21 bp, synthetic construct
  misc_feature 1..21: note = Description of Artificial Sequence: Synthetic oligonucleotide
  source 1..21: mol_type = other DNA
ggttctaatcggattcttggt

SEQ ID NO: 39882 - DNA, 21 bp, synthetic construct
  misc_feature 1..21: note = Description of Artificial Sequence: Synthetic oligonucleotide
  source 1..21: mol_type = other DNA
agttgtagtcgggattctact

SEQ ID NO: 39883 - DNA, 21 bp, synthetic construct
  misc_feature 1..21: note = Description of Artificial Sequence: Synthetic oligonucleotide
  source 1..21: mol_type = other DNA
aacagcagacaaggcaccaac

SEQ ID NO: 39884 - DNA, 21 bp, synthetic construct
  misc_feature 1..21: note = Description of Artificial Sequence: Synthetic oligonucleotide
  source 1..21: mol_type = other DNA
cagtctactgagcggttggcg

SEQ ID NO: 39885 - DNA, 21 bp, synthetic construct
  misc_feature 1..21: note = Description of Artificial Sequence: Synthetic oligonucleotide
  source 1..21: mol_type = other DNA
ccttttacgcgtaatgctctt

SEQ ID NO: 39886 - DNA, 21 bp, synthetic construct
  misc_feature 1..21: note = Description of Artificial Sequence: Synthetic oligonucleotide
  source 1..21: mol_type = other DNA
ggcagaagcatggaaagaagc

SEQ ID NO: 39887 - DNA, 21 bp, synthetic construct
  misc_feature 1..21: note = Description of Artificial Sequence: Synthetic oligonucleotide
  source 1..21: mol_type = other DNA
ggcgacaaaacccaagccatg

SEQ ID NO: 39888 - DNA, 21 bp, synthetic construct
  misc_feature 1..21: note = Description of Artificial Sequence: Synthetic oligonucleotide
  source 1..21: mol_type = other DNA
catggttctagttcttttacg

SEQ ID NO: 39889 - DNA, 21 bp, synthetic construct
  misc_feature 1..21: note = Description of Artificial Sequence: Synthetic oligonucleotide
  source 1..21: mol_type = other DNA
aacagaggcaaagccagcagc

SEQ ID NO: 39890 - DNA, 21 bp, synthetic construct
  misc_feature 1..21: note = Description of Artificial Sequence: Synthetic oligonucleotide
  source 1..21: mol_type = other DNA
tcttcgccgactcgtagtttg

SEQ ID NO: 39891 - DNA, 21 bp, synthetic construct
  misc_feature 1..21: note = Description of Artificial Sequence: Synthetic oligonucleotide
  source 1..21: mol_type = other DNA
gcggatggtcgtaatagtagt

SEQ ID NO: 39892 - DNA, 21 bp, synthetic construct
  misc_feature 1..21: note = Description of Artificial Sequence: Synthetic oligonucleotide
  source 1..21: mol_type = other DNA
tcgactcatcatccggctagt

SEQ ID NO: 39893 - DNA, 21 bp, synthetic construct
  misc_feature 1..21: note = Description of Artificial Sequence: Synthetic oligonucleotide
  source 1..21: mol_type = other DNA
aacggttctggacaggatcaa

SEQ ID NO: 39894 - DNA, 21 bp, synthetic construct
  misc_feature 1..21: note = Description of Artificial Sequence: Synthetic oligonucleotide
  source 1..21: mol_type = other DNA
aatccttcgcatacttctgtg

SEQ ID NO: 39895 - DNA, 21 bp, synthetic construct
  misc_feature 1..21: note = Description of Artificial Sequence: Synthetic oligonucleotide
  source 1..21: mol_type = other DNA
actcggtcgaattctgcggtg

SEQ ID NO: 39896 - DNA, 21 bp, synthetic construct
  misc_feature 1..21: note = Description of Artificial Sequence: Synthetic oligonucleotide
  source 1..21: mol_type = other DNA
atgagtactggtgtttctcct

SEQ ID NO: 39897 - DNA, 21 bp, synthetic construct
  misc_feature 1..21: note = Description of Artificial Sequence: Synthetic oligonucleotide
  source 1..21: mol_type = other DNA
cccatggacgtcagaagcgac

SEQ ID NO: 39898 - DNA, 21 bp, synthetic construct
  misc_feature 1..21: note = Description of Artificial Sequence: Synthetic oligonucleotide
  source 1..21: mol_type = other DNA
ccccaaaacctcgcccacgtc

SEQ ID NO: 39899 - DNA, 21 bp, synthetic construct
  misc_feature 1..21: note = Description of Artificial Sequence: Synthetic oligonucleotide
  source 1..21: mol_type = other DNA
aagaatcctagttcggcgcct

SEQ ID NO: 39900 - DNA, 21 bp, synthetic construct
  misc_feature 1..21: note = Description of Artificial Sequence: Synthetic oligonucleotide
  source 1..21: mol_type = other DNA
cctgttccgtatcgtgctgat

SEQ ID NO: 39901 - DNA, 21 bp, synthetic construct
  misc_feature 1..21: note = Description of Artificial Sequence: Synthetic oligonucleotide
  source 1..21: mol_type = other DNA
gcccaaagaaacatcagcagc

SEQ ID NO: 39902 - DNA, 21 bp, synthetic construct
  misc_feature 1..21: note = Description of Artificial Sequence: Synthetic oligonucleotide
  source 1..21: mol_type = other DNA
agccaaaacgtcagcagcaaa

SEQ ID NO: 39903 - DNA, 21 bp, synthetic construct
  misc_feature 1..21: note = Description of Artificial Sequence: Synthetic oligonucleotide
  source 1..21: mol_type = other DNA
taccccagcagcgtccaacaa

SEQ ID NO: 39904 - DNA, 21 bp, synthetic construct
  misc_feature 1..21: note = Description of Artificial Sequence: Synthetic oligonucleotide
  source 1..21: mol_type = other DNA
agcaccgcctacaacaccaac

SEQ ID NO: 39905 - DNA, 21 bp, synthetic construct
  misc_feature 1..21: note = Description of Artificial Sequence: Synthetic oligonucleotide
  source 1..21: mol_type = other DNA
agaatgagagaaaaaccctac

SEQ ID NO: 39906 - DNA, 21 bp, synthetic construct
  misc_feature 1..21: note = Description of Artificial Sequence: Synthetic oligonucleotide
  source 1..21: mol_type = other DNA
actctgcgtggtgggtcgagt

SEQ ID NO: 39907 - DNA, 21 bp, synthetic construct
  misc_feature 1..21: note = Description of Artificial Sequence: Synthetic oligonucleotide
  source 1..21: mol_type = other DNA
gtcagcagcatgaaaagcggc

SEQ ID NO: 39908 - DNA, 21 bp, synthetic construct
  misc_feature 1..21: note = Description of Artificial Sequence: Synthetic oligonucleotide
  source 1..21: mol_type = other DNA
ttgactcagagggatttttcg

SEQ ID NO: 39909 - DNA, 21 bp, synthetic construct
  misc_feature 1..21: note = Description of Artificial Sequence: Synthetic oligonucleotide
  source 1..21: mol_type = other DNA
gacgtcctcagcaaaagccaa

SEQ ID NO: 39910 - DNA, 21 bp, synthetic construct
  misc_feature 1..21: note = Description of Artificial Sequence: Synthetic oligonucleotide
  source 1..21: mol_type = other DNA
tgtgtgactggtggtcttact

SEQ ID NO: 39911 - DNA, 21 bp, synthetic construct
  misc_feature 1..21: note = Description of Artificial Sequence: Synthetic oligonucleotide
  source 1..21: mol_type = other DNA
aaacaacccgccagcacccac

SEQ ID NO: 39912 - DNA, 21 bp, synthetic construct
  misc_feature 1..21: note = Description of Artificial Sequence: Synthetic oligonucleotide
  source 1..21: mol_type = other DNA
catctgcgtggtgggtcgagt

SEQ ID NO: 39913 - DNA, 21 bp, synthetic construct
  misc_feature 1..21: note = Description of Artificial Sequence: Synthetic oligonucleotide
  source 1..21: mol_type = other DNA
gacgacagaagcaacctcagc

SEQ ID NO: 39914 - DNA, 21 bp, synthetic construct
  misc_feature 1..21: note = Description of Artificial Sequence: Synthetic oligonucleotide
  source 1..21: mol_type = other DNA
agcggcagccccctctgcggc

SEQ ID NO: 39915 - DNA, 21 bp, synthetic construct
  misc_feature 1..21: note = Description of Artificial Sequence: Synthetic oligonucleotide
  source 1..21: mol_type = other DNA
catattgggactggtgctagg

SEQ ID NO: 39916 - DNA, 21 bp, synthetic construct
  misc_feature 1..21: note = Description of Artificial Sequence: Synthetic oligonucleotide
  source 1..21: mol_type = other DNA
cccagaaccaacgtcatgccc

SEQ ID NO: 39917 - DNA, 21 bp, synthetic construct
  misc_feature 1..21: note = Description of Artificial Sequence: Synthetic oligonucleotide
  source 1..21: mol_type = other DNA
cctggtgggggtagggcgatt

SEQ ID NO: 39918 - DNA, 21 bp, synthetic construct
  misc_feature 1..21: note = Description of Artificial Sequence: Synthetic oligonucleotide
  source 1..21: mol_type = other DNA
taccaagtccccctcgccaaa

SEQ ID NO: 39919 - DNA, 21 bp, synthetic construct
  misc_feature 1..21: note = Description of Artificial Sequence: Synthetic oligonucleotide
  source 1..21: mol_type = other DNA
atgactggtcatagttctgtt

SEQ ID NO: 39920 - DNA, 21 bp, synthetic construct
  misc_feature 1..21: note = Description of Artificial Sequence: Synthetic oligonucleotide
  source 1..21: mol_type = other DNA
ctccaagtcaacatggccaga

SEQ ID NO: 39921 - DNA, 21 bp, synthetic construct
  misc_feature 1..21: note = Description of Artificial Sequence: Synthetic oligonucleotide
  source 1..21: mol_type = other DNA
cacaccgcccacagcagcctc

SEQ ID NO: 39922 - DNA, 21 bp, synthetic construct
  misc_feature 1..21: note = Description of Artificial Sequence: Synthetic oligonucleotide
  source 1..21: mol_type = other DNA
gggagttctccttctttaagg

SEQ ID NO: 39923 - DNA, 21 bp, synthetic construct
  misc_feature 1..21: note = Description of Artificial Sequence: Synthetic oligonucleotide
  source 1..21: mol_type = other DNA
tctggtacgagtattcggacg

SEQ ID NO: 39924 - DNA, 21 bp, synthetic construct
  misc_feature 1..21: note = Description of Artificial Sequence: Synthetic oligonucleotide
  source 1..21: mol_type = other DNA
cataggtctaatagtacgacg

SEQ ID NO: 39925 - DNA, 21 bp, synthetic construct
  misc_feature 1..21: note = Description of Artificial Sequence: Synthetic oligonucleotide
  source 1..21: mol_type = other DNA
actacgaatacggtgtctcgg

SEQ ID NO: 39926 - DNA, 21 bp, synthetic construct
  misc_feature 1..21: note = Description of Artificial Sequence: Synthetic oligonucleotide
  source 1..21: mol_type = other DNA
ggttattcgaatcagatgact

SEQ ID NO: 39927 - DNA, 21 bp, synthetic construct
  misc_feature 1..21: note = Description of Artificial Sequence: Synthetic oligonucleotide
  source 1..21: mol_type = other DNA
aaacaacccgacagcacccac

SEQ ID NO: 39928 - DNA, 21 bp, synthetic construct
  misc_feature 1..21: note = Description of Artificial Sequence: Synthetic oligonucleotide
  source 1..21: mol_type = other DNA
cgttctaatggttcggcggct

SEQ ID NO: 39929 - DNA, 21 bp, synthetic construct
  misc_feature 1..21: note = Description of Artificial Sequence: Synthetic oligonucleotide
  source 1..21: mol_type = other DNA
acgacttcgaataaggatagt

SEQ ID NO: 39930 - DNA, 21 bp, synthetic construct
  misc_feature 1..21: note = Description of Artificial Sequence: Synthetic oligonucleotide
  source 1..21: mol_type = other DNA
aacggcctccccggcgccatg

SEQ ID NO: 39931 - DNA, 21 bp, synthetic construct
  misc_feature 1..21: note = Description of Artificial Sequence: Synthetic oligonucleotide
  source 1..21: mol_type = other DNA
cgtgctggggggaatgctgtg

SEQ ID NO: 39932 - DNA, 21 bp, synthetic construct
  misc_feature 1..21: note = Description of Artificial Sequence: Synthetic oligonucleotide
  source 1..21: mol_type = other DNA
atgggtccgaatcatcttcct

SEQ ID NO: 39933 - DNA, 21 bp, synthetic construct
  misc_feature 1..21: note = Description of Artificial Sequence: Synthetic oligonucleotide
  source 1..21: mol_type = other DNA
agcctcagcaaacaagccgcc

SEQ ID NO: 39934 - DNA, 21 bp, synthetic construct
  misc_feature 1..21: note = Description of Artificial Sequence: Synthetic oligonucleotide
  source 1..21: mol_type = other DNA
attggtaatttgccgtcgcgg

SEQ ID NO: 39935 - DNA, 21 bp, synthetic construct
  misc_feature 1..21: note = Description of Artificial Sequence: Synthetic oligonucleotide
  source 1..21: mol_type = other DNA
aatcagatggcgcatcttaag

SEQ ID NO: 39936 - DNA, 21 bp, synthetic construct
  misc_feature 1..21: note = Description of Artificial Sequence: Synthetic oligonucleotide
  source 1..21: mol_type = other DNA
agcgtcgaaaaagcccaaagc

SEQ ID NO: 39937 - DNA, 21 bp, synthetic construct
  misc_feature 1..21: note = Description of Artificial Sequence: Synthetic oligonucleotide
  source 1..21: mol_type = other DNA
gccatgagcgccagcagaaac

SEQ ID NO: 39938 - DNA, 21 bp, synthetic construct
  misc_feature 1..21: note = Description of Artificial Sequence: Synthetic oligonucleotide
  source 1..21: mol_type = other DNA
cgtactaatcatgtggaggct

SEQ ID NO: 39939 - DNA, 21 bp, synthetic construct
  misc_feature 1..21: note = Description of Artificial Sequence: Synthetic oligonucleotide
  source 1..21: mol_type = other DNA
agtttttcgtcgactatgggt

SEQ ID NO: 39940 - DNA, 21 bp, synthetic construct
  misc_feature 1..21: note = Description of Artificial Sequence: Synthetic oligonucleotide
  source 1..21: mol_type = other DNA
gggcgggttaattcgggtatt

SEQ ID NO: 39941 - DNA, 21 bp, synthetic construct
  misc_feature 1..21: note = Description of Artificial Sequence: Synthetic oligonucleotide
  source 1..21: mol_type = other DNA
agtcttgtgtctaggtctacg

SEQ ID NO: 39942 - DNA, 21 bp, synthetic construct
  misc_feature 1..21: note = Description of Artificial Sequence: Synthetic oligonucleotide
  source 1..21: mol_type = other DNA
ctcggcctcagagacaacacc

SEQ ID NO: 39943 - DNA, 21 bp, synthetic construct
  misc_feature 1..21: note = Description of Artificial Sequence: Synthetic oligonucleotide
  source 1..21: mol_type = other DNA
catactatgcgtagttctgtt

SEQ ID NO: 39944 - DNA, 21 bp, synthetic construct
  misc_feature 1..21: note = Description of Artificial Sequence: Synthetic oligonucleotide
  source 1..21: mol_type = other DNA
tggggcaccggcatcggcagc

SEQ ID NO: 39945 - DNA, 21 bp, synthetic construct
  misc_feature 1..21: note = Description of Artificial Sequence: Synthetic oligonucleotide
  source 1..21: mol_type = other DNA
cagactcgtagtaatggtaat

SEQ ID NO: 39946 - DNA, 21 bp, synthetic construct
  misc_feature 1..21: note = Description of Artificial Sequence: Synthetic oligonucleotide
  source 1..21: mol_type = other DNA
cggatggcgcgtcctgctgtt

SEQ ID NO: 39947 - DNA, 21 bp, synthetic construct
  misc_feature 1..21: note = Description of Artificial Sequence: Synthetic oligonucleotide
  source 1..21: mol_type = other DNA
ggcaacaccaacagcttcctc

SEQ ID NO: 39948 - DNA, 21 bp, synthetic construct
  misc_feature 1..21: note = Description of Artificial Sequence: Synthetic oligonucleotide
  source 1..21: mol_type = other DNA
gcccccgtccaacccttcaga

SEQ ID NO: 39949 - DNA, 21 bp, synthetic construct
  misc_feature 1..21: note = Description of Artificial Sequence: Synthetic oligonucleotide
  source 1..21: mol_type = other DNA
atcagcgtcggcaacaccagc

SEQ ID NO: 39950 - DNA, 21 bp, synthetic construct
  misc_feature 1..21: note = Description of Artificial Sequence: Synthetic oligonucleotide
  source 1..21: mol_type = other DNA
agagacgtcagaatgagcgac

SEQ ID NO: 39951 - DNA, 21 bp, synthetic construct
  misc_feature 1..21: note = Description of Artificial Sequence: Synthetic oligonucleotide
  source 1..21: mol_type = other DNA
tcgcgtgagtcgagtccgctt

SEQ ID NO: 39952 - DNA, 21 bp, synthetic construct
  misc_feature 1..21: note = Description of Artificial Sequence: Synthetic oligonucleotide
  source 1..21: mol_type = other DNA
gggtctctgactcctaaggct

SEQ ID NO: 39953 - DNA, 21 bp, synthetic construct
  misc_feature 1..21: note = Description of Artificial Sequence: Synthetic oligonucleotide
  source 1..21: mol_type = other DNA
aacggttctggacagaatcca

SEQ ID NO: 39954 - DNA, 21 bp, synthetic construct
  misc_feature 1..21: note = Description of Artificial Sequence: Synthetic oligonucleotide
  source 1..21: mol_type = other DNA
aaaagcacccacggcatgacc

SEQ ID NO: 39955 - DNA, 21 bp, synthetic construct
  misc_feature 1..21: note = Description of Artificial Sequence: Synthetic oligonucleotide
  source 1..21: mol_type = other DNA
gagcaggttccgaagcatcgt

SEQ ID NO: 39956 - DNA, 21 bp, synthetic construct
  misc_feature 1..21: note = Description of Artificial Sequence: Synthetic oligonucleotide
  source 1..21: mol_type = other DNA
acccaaaacagcagcctcagc

SEQ ID NO: 39957 - DNA, 21 bp, synthetic construct
  misc_feature 1..21: note = Description of Artificial Sequence: Synthetic oligonucleotide
  source 1..21: mol_type = other DNA
accagcaacacccccagcatc

SEQ ID NO: 39958 - DNA, 21 bp, synthetic construct
  misc_feature 1..21: note = Description of Artificial Sequence: Synthetic oligonucleotide
  source 1..21: mol_type = other DNA
ccggtttcgacgcattcgtct

SEQ ID NO: 39959 - DNA, 21 bp, synthetic construct
  misc_feature 1..21: note = Description of Artificial Sequence: Synthetic oligonucleotide
  source 1..21: mol_type = other DNA
actcggcctaatcttcagacg

SEQ ID NO: 39960 - DNA, 21 bp, synthetic construct
  misc_feature 1..21: note = Description of Artificial Sequence: Synthetic oligonucleotide
  source 1..21: mol_type = other DNA
ctcgccagcagcagaagcggc

SEQ ID NO: 39961 - DNA, 21 bp, synthetic construct
  misc_feature 1..21: note = Description of Artificial Sequence: Synthetic oligonucleotide
  source 1..21: mol_type = other DNA
caaggccaaaccgccatgaga

SEQ ID NO: 39962 - DNA, 21 bp, synthetic construct
  misc_feature 1..21: note = Description of Artificial Sequence: Synthetic oligonucleotide
  source 1..21: mol_type = other DNA
gtgcgtaatgcgtctagtgat

SEQ ID NO: 39963 - DNA, 21 bp, synthetic construct
  misc_feature 1..21: note = Description of Artificial Sequence: Synthetic oligonucleotide
  source 1..21: mol_type = other DNA
actatgtcgactaggcagagt

SEQ ID NO: 39964 - DNA, 21 bp, synthetic construct
  misc_feature 1..21: note = Description of Artificial Sequence: Synthetic oligonucleotide
  source 1..21: mol_type = other DNA
ggcagcagcagaagcctcggc

SEQ ID NO: 39965 - DNA, 21 bp, synthetic construct
  misc_feature 1..21: note = Description of Artificial Sequence: Synthetic oligonucleotide
  source 1..21: mol_type = other DNA
cccgcccaccaaaaactcagc

SEQ ID NO: 39966 - DNA, 21 bp, synthetic construct
  misc_feature 1..21: note = Description of Artificial Sequence: Synthetic oligonucleotide
  source 1..21: mol_type = other DNA
ggtacggtgaatgcgaagggg

SEQ ID NO: 39967 - DNA, 21 bp, synthetic construct
  misc_feature 1..21: note = Description of Artificial Sequence: Synthetic oligonucleotide
  source 1..21: mol_type = other DNA
ggccaagtcaaagccctcggc

SEQ ID NO: 39968 - DNA, 21 bp, synthetic construct
  misc_feature 1..21: note = Description of Artificial Sequence: Synthetic oligonucleotide
  source 1..21: mol_type = other DNA
ggtgataggccttctgctaag

SEQ ID NO: 39969 - DNA, 21 bp, synthetic construct
  misc_feature 1..21: note = Description of Artificial Sequence: Synthetic oligonucleotide
  source 1..21: mol_type = other DNA
agcacctaccccaaaagcagc

SEQ ID NO: 39970 - DNA, 21 bp, synthetic construct
  misc_feature 1..21: note = Description of Artificial Sequence: Synthetic oligonucleotide
  source 1..21: mol_type = other DNA
ggccaagccggcggcagcaaa

SEQ ID NO: 39971 - DNA, 21 bp, synthetic construct
  misc_feature 1..21: note = Description of Artificial Sequence: Synthetic oligonucleotide
  source 1..21: mol_type = other DNA
actggtactaagtcggataat

SEQ ID NO: 39972 - DNA, 21 bp, synthetic construct
  misc_feature 1..21: note = Description of Artificial Sequence: Synthetic oligonucleotide
  source 1..21: mol_type = other DNA
atgctcggcagcagcaacaaa

SEQ ID NO: 39973 - DNA, 21 bp, synthetic construct
  misc_feature 1..21: note = Description of Artificial Sequence: Synthetic oligonucleotide
  source 1..21: mol_type = other DNA
ctccaacaacacaacaccaaa

SEQ ID NO: 39974 - DNA, 21 bp, synthetic construct
  misc_feature 1..21: note = Description of Artificial Sequence: Synthetic oligonucleotide
  source 1..21: mol_type = other DNA
gatagtaagcatactagtacg

SEQ ID NO: 39975 - DNA, 21 bp, synthetic construct
  misc_feature 1..21: note = Description of Artificial Sequence: Synthetic oligonucleotide
  source 1..21: mol_type = other DNA
agcgcccacggcagaaccaac

SEQ ID NO: 39976 - DNA, 21 bp, synthetic construct
  misc_feature 1..21: note = Description of Artificial Sequence: Synthetic oligonucleotide
  source 1..21: mol_type = other DNA
actcctcagatgacgccggtt

SEQ ID NO: 39977 - DNA, 21 bp, synthetic construct
  misc_feature 1..21: note = Description of Artificial Sequence: Synthetic oligonucleotide
  source 1..21: mol_type = other DNA
atgaccggcagactcaccacc

SEQ ID NO: 39978 - DNA, 21 bp, synthetic construct
  misc_feature 1..21: note = Description of Artificial Sequence: Synthetic oligonucleotide
  source 1..21: mol_type = other DNA
atgagcatgaaacaagtcacc

SEQ ID NO: 39979 - DNA, 21 bp, synthetic construct
  misc_feature 1..21: note = Description of Artificial Sequence: Synthetic oligonucleotide
  source 1..21: mol_type = other DNA
gttcatgtgacgagtcagact

SEQ ID NO: 39980 - DNA, 21 bp, synthetic construct
  misc_feature 1..21: note = Description of Artificial Sequence: Synthetic oligonucleotide
  source 1..21: mol_type = other DNA
ctgatgtctgcggcgactact

SEQ ID NO: 39981 - DNA, 21 bp, synthetic construct
  misc_feature 1..21: note = Description of Artificial Sequence: Synthetic oligonucleotide
  source 1..21: mol_type = other DNA
aaggttattaatccggcgcag

SEQ ID NO: 39982 - DNA, 21 bp, synthetic construct
  misc_feature 1..21: note = Description of Artificial Sequence: Synthetic oligonucleotide
  source 1..21: mol_type = other DNA
atcaaactcgacaaacaaatc

SEQ ID NO: 39983 - DNA, 21 bp, synthetic construct
  misc_feature 1..21: note = Description of Artificial Sequence: Synthetic oligonucleotide
  source 1..21: mol_type = other DNA
ttcggcgaaagcaccatgaga

SEQ ID NO: 39984 - DNA, 21 bp, synthetic construct
  misc_feature 1..21: note = Description of Artificial Sequence: Synthetic oligonucleotide
  source 1..21: mol_type = other DNA
gaccccctcagaagcatgcac

SEQ ID NO: 39985 - DNA, 21 bp, synthetic construct
  misc_feature 1..21: note = Description of Artificial Sequence: Synthetic oligonucleotide
  source 1..21: mol_type = other DNA
tgtgtttctaatgtgactaat

SEQ ID NO: 39986 - DNA, 21 bp, synthetic construct
  misc_feature 1..21: note = Description of Artificial Sequence: Synthetic oligonucleotide
  source 1..21: mol_type = other DNA
aacggcagcggcaccaaccaa

SEQ ID NO: 39987 - DNA, 21 bp, synthetic construct
  misc_feature 1..21: note = Description of Artificial Sequence: Synthetic oligonucleotide
  source 1..21: mol_type = other DNA
ttgcttagtcagcattcggat

SEQ ID NO: 39988 - DNA, 21 bp, synthetic construct
  misc_feature 1..21: note = Description of Artificial Sequence: Synthetic oligonucleotide
  source 1..21: mol_type = other DNA
ggcggcctccacggcagcggc

SEQ ID NO: 39989 - DNA, 21 bp, synthetic construct
  misc_feature 1..21: note = Description of Artificial Sequence: Synthetic oligonucleotide
  source 1..21: mol_type = other DNA
cctgttaataatgtgggtctt

SEQ ID NO: 39990 - DNA, 21 bp, synthetic construct
  misc_feature 1..21: note = Description of Artificial Sequence: Synthetic oligonucleotide
  source 1..21: mol_type = other DNA
gctgttactactaaggcgctt

SEQ ID NO: 39991 - DNA, 21 bp, synthetic construct
  misc_feature 1..21: note = Description of Artificial Sequence: Synthetic oligonucleotide
  source 1..21: mol_type = other DNA
agcagctacacccccagcggc

SEQ ID NO: 39992 - DNA, 21 bp, synthetic construct
  misc_feature 1..21: note = Description of Artificial Sequence: Synthetic oligonucleotide
  source 1..21: mol_type = other DNA
agtagtacgaagtctagtctg

SEQ ID NO: 39993 - DNA, 21 bp, synthetic construct
  misc_feature 1..21: note = Description of Artificial Sequence: Synthetic oligonucleotide
  source 1..21: mol_type = other DNA
cgtaattctgagtatactggg

SEQ ID NO: 39994 - DNA, 21 bp, synthetic construct
  misc_feature 1..21: note = Description of Artificial Sequence: Synthetic oligonucleotide
  source 1..21: mol_type = other DNA
gaagtcagaagacaaagcacc

SEQ ID NO: 39995 - DNA, 21 bp, synthetic construct
  misc_feature 1..21: note = Description of Artificial Sequence: Synthetic oligonucleotide
  source 1..21: mol_type = other DNA
atgaattcgaatcatcggaat

SEQ ID NO: 39996 - DNA, 21 bp, synthetic construct
  misc_feature 1..21: note = Description of Artificial Sequence: Synthetic oligonucleotide
  source 1..21: mol_type = other DNA
ccgcattctgggaatcgtcat

SEQ ID NO: 39997 - DNA, 21 bp, synthetic construct
  misc_feature 1..21: note = Description of Artificial Sequence: Synthetic oligonucleotide
  source 1..21: mol_type = other DNA
agcctcgccagccacaccaga

SEQ ID NO: 39998 - DNA, 21 bp, synthetic construct
  misc_feature 1..21: note = Description of Artificial Sequence: Synthetic oligonucleotide
  source 1..21: mol_type = other DNA
gccgaacaccaaagcggcaaa

SEQ ID NO: 39999 - DNA, 21 bp, synthetic construct
  misc_feature 1..21: note = Description of Artificial Sequence: Synthetic oligonucleotide
  source 1..21: mol_type = other DNA
tcgagtaaggctgctattact

SEQ ID NO: 40000 - DNA, 21 bp, synthetic construct
  misc_feature 1..21: note = Description of Artificial Sequence: Synthetic oligonucleotide
  source 1..21: mol_type = other DNA
ccccaatacggcgacaaagaa

SEQ ID NO: 40001 - DNA, 21 bp, synthetic construct
  misc_feature 1..21: note = Description of Artificial Sequence: Synthetic oligonucleotide
  source 1..21: mol_type = other DNA
ttcggcaaccccggcatcaga

SEQ ID NO: 40002 - DNA, 21 bp, synthetic construct
  misc_feature 1..21: note = Description of Artificial Sequence: Synthetic oligonucleotide
  source 1..21: mol_type = other DNA
gacagcggcttcaaaagcccc

SEQ ID NO: 40003 - DNA, 21 bp, synthetic construct
  misc_feature 1..21: note = Description of Artificial Sequence: Synthetic oligonucleotide
  source 1..21: mol_type = other DNA
agagccctcagcaaaggcggc

SEQ ID NO: 40004 - DNA, 21 bp, synthetic construct
  misc_feature 1..21: note = Description of Artificial Sequence: Synthetic oligonucleotide
  source 1..21: mol_type = other DNA
agtattagggggggtaaggat

SEQ ID NO: 40005 - DNA, 21 bp, synthetic construct
  misc_feature 1..21: note = Description of Artificial Sequence: Synthetic oligonucleotide
  source 1..21: mol_type = other DNA
gtcaacgccaacaaagcctgc

SEQ ID NO: 40006 - DNA, 21 bp, synthetic construct
  misc_feature 1..21: note = Description of Artificial Sequence: Synthetic oligonucleotide
  source 1..21: mol_type = other DNA
cccgacatcggcaaacaaaga

SEQ ID NO: 40007 - DNA, 21 bp, synthetic construct
  misc_feature 1..21: note = Description of Artificial Sequence: Synthetic oligonucleotide
  source 1..21: mol_type = other DNA
cccagagaaaacaaattcagc

SEQ ID NO: 40008 - DNA, 21 bp, synthetic construct
  misc_feature 1..21: note = Description of Artificial Sequence: Synthetic oligonucleotide
  source 1..21: mol_type = other DNA
ggcagagcccacaacgtcatc

SEQ ID NO: 40009 - DNA, 21 bp, synthetic construct
  misc_feature 1..21: note = Description of Artificial Sequence: Synthetic oligonucleotide
  source 1..21: mol_type = other DNA
tcgtcgtggcagaatagtttg

SEQ ID NO: 40010 - DNA, 21 bp, synthetic construct
  misc_feature 1..21: note = Description of Artificial Sequence: Synthetic oligonucleotide
  source 1..21: mol_type = other DNA
catgcgaagcatgtggtgggt

SEQ ID NO: 40011 - DNA, 21 bp, synthetic construct
  misc_feature 1..21: note = Description of Artificial Sequence: Synthetic oligonucleotide
  source 1..21: mol_type = other DNA
cctccgcgtcagaagctgggt

SEQ ID NO: 40012 - DNA, 21 bp, synthetic construct
  misc_feature 1..21: note = Description of Artificial Sequence: Synthetic oligonucleotide
  source 1..21: mol_type = other DNA
tgcgccggccccgaaaacgtc

SEQ ID NO: 40013 - DNA, 21 bp, synthetic construct
  misc_feature 1..21: note = Description of Artificial Sequence: Synthetic oligonucleotide
  source 1..21: mol_type = other DNA
tacaaacacagcgtcgtcctc

SEQ ID NO: 40014 - DNA, 21 bp, synthetic construct
  misc_feature 1..21: note = Description of Artificial Sequence: Synthetic oligonucleotide
  source 1..21: mol_type = other DNA
ccgggttctgagggtaggtgt

SEQ ID NO: 40015 - DNA, 21 bp, synthetic construct
  misc_feature 1..21: note = Description of Artificial Sequence: Synthetic oligonucleotide
  source 1..21: mol_type = other DNA
gttactccggctaggattatt

SEQ ID NO: 40016 - DNA, 21 bp, synthetic construct
  misc_feature 1..21: note = Description of Artificial Sequence: Synthetic oligonucleotide
  source 1..21: mol_type = other DNA
ccgtgggtgcagattgatggg

SEQ ID NO: 40017 - DNA, 21 bp, synthetic construct
  misc_feature 1..21: note = Description of Artificial Sequence: Synthetic oligonucleotide
  source 1..21: mol_type = other DNA
agaggcaccaaacccgccgcc

SEQ ID NO: 40018 - DNA, 21 bp, synthetic construct
  misc_feature 1..21: note = Description of Artificial Sequence: Synthetic oligonucleotide
  source 1..21: mol_type = other DNA
gggcgtcatggtgctccgact

SEQ ID NO: 40019 - DNA, 21 bp, synthetic construct
  misc_feature 1..21: note = Description of Artificial Sequence: Synthetic oligonucleotide
  source 1..21: mol_type = other DNA
actccgtctatgcgtaatact

SEQ ID NO: 40020 - DNA, 21 bp, synthetic construct
  misc_feature 1..21: note = Description of Artificial Sequence: Synthetic oligonucleotide
  source 1..21: mol_type = other DNA
ctcggcctcggcggcagaggc

SEQ ID NO: 40021 - DNA, 21 bp, synthetic construct
  misc_feature 1..21: note = Description of Artificial Sequence: Synthetic oligonucleotide
  source 1..21: mol_type = other DNA
ggcgccctcgaaagacacagc

SEQ ID NO: 40022 - DNA, 21 bp, synthetic construct
  misc_feature 1..21: note = Description of Artificial Sequence: Synthetic oligonucleotide
  source 1..21: mol_type = other DNA
cgttctgttggtgctaaggcg

SEQ ID NO: 40023 - DNA, 21 bp, synthetic construct
  misc_feature 1..21: note = Description of Artificial Sequence: Synthetic oligonucleotide
  source 1..21: mol_type = other DNA
aacagcaccagcaccagccaa

SEQ ID NO: 40024 - DNA, 21 bp, synthetic construct
  misc_feature 1..21: note = Description of Artificial Sequence: Synthetic oligonucleotide
  source 1..21: mol_type = other DNA
accacccacaacatcaaaggc

SEQ ID NO: 40025 - DNA, 21 bp, synthetic construct
  misc_feature 1..21: note = Description of Artificial Sequence: Synthetic oligonucleotide
  source 1..21: mol_type = other DNA
ccgacggcttcgaataggagt

SEQ ID NO: 40026 - DNA, 21 bp, synthetic construct
  misc_feature 1..21: note = Description of Artificial Sequence: Synthetic oligonucleotide
  source 1..21: mol_type = other DNA
aggacgagtactgcgcctcag

SEQ ID NO: 40027 - DNA, 21 bp, synthetic construct
  misc_feature 1..21: note = Description of Artificial Sequence: Synthetic oligonucleotide
  source 1..21: mol_type = other DNA
catgctaataatcgttcggtg

SEQ ID NO: 40028 - DNA, 21 bp, synthetic construct
  misc_feature 1..21: note = Description of Artificial Sequence: Synthetic oligonucleotide
  source 1..21: mol_type = other DNA
gagcggtatactactagtaag

SEQ ID NO: 40029 - DNA, 21 bp, synthetic construct
  misc_feature 1..21: note = Description of Artificial Sequence: Synthetic oligonucleotide
  source 1..21: mol_type = other DNA
agtgggtctctttcttctgct

SEQ ID NO: 40030 - DNA, 21 bp, synthetic construct
  misc_feature 1..21: note = Description of Artificial Sequence: Synthetic oligonucleotide
  source 1..21: mol_type = other DNA
tcgagtagtacgtcgcataag

SEQ ID NO: 40031 - DNA, 21 bp, synthetic construct
  misc_feature 1..21: note = Description of Artificial Sequence: Synthetic oligonucleotide
  source 1..21: mol_type = other DNA
ggtggtcttgatcatcatgct

SEQ ID NO: 40032 - DNA, 21 bp, synthetic construct
  misc_feature 1..21: note = Description of Artificial Sequence: Synthetic oligonucleotide
  source 1..21: mol_type = other DNA
atgaacaccagcatcaacaac

SEQ ID NO: 40033 - DNA, 21 bp, synthetic construct
  misc_feature 1..21: note = Description of Artificial Sequence: Synthetic oligonucleotide
  source 1..21: mol_type = other DNA
actgagtttagtcggacgaat

SEQ ID NO: 40034 - DNA, 21 bp, synthetic construct
  misc_feature 1..21: note = Description of Artificial Sequence: Synthetic oligonucleotide
  source 1..21: mol_type = other DNA
agtccgaatgcgaatcgtgtt

SEQ ID NO: 40035 - DNA, 21 bp, synthetic construct
  misc_feature 1..21: note = Description of Artificial Sequence: Synthetic oligonucleotide
  source 1..21: mol_type = other DNA
accccccaccaaagaagcagc

SEQ ID NO: 40036 - DNA, 21 bp, synthetic construct
  misc_feature 1..21: note = Description of Artificial Sequence: Synthetic oligonucleotide
  source 1..21: mol_type = other DNA
cggactaatcctgggtatgcg

SEQ ID NO: 40037 - DNA, 21 bp, synthetic construct
  misc_feature 1..21: note = Description of Artificial Sequence: Synthetic oligonucleotide
  source 1..21: mol_type = other DNA
cggtcgggtaatggttctttg

SEQ ID NO: 40038 - DNA, 21 bp, synthetic construct
  misc_feature 1..21: note = Description of Artificial Sequence: Synthetic oligonucleotide
  source 1..21: mol_type = other DNA
tacgaccccacccccagaggc

SEQ ID NO: 40039 - DNA, 21 bp, synthetic construct
  misc_feature 1..21: note = Description of Artificial Sequence: Synthetic oligonucleotide
  source 1..21: mol_type = other DNA
tcgtatggtcatcctggtgct

SEQ ID NO: 40040 - DNA, 21 bp, synthetic construct
  misc_feature 1..21: note = Description of Artificial Sequence: Synthetic oligonucleotide
  source 1..21: mol_type = other DNA
gacaccgtcagcagacacgtc

SEQ ID NO: 40041 - DNA, 21 bp, synthetic construct
  misc_feature 1..21: note = Description of Artificial Sequence: Synthetic oligonucleotide
  source 1..21: mol_type = other DNA
accagagacagcagcctccac

SEQ ID NO: 40042 - DNA, 21 bp, synthetic construct
  misc_feature 1..21: note = Description of Artificial Sequence: Synthetic oligonucleotide
  source 1..21: mol_type = other DNA
cccggcagcggcagcaaacac

SEQ ID NO: 40043 - DNA, 21 bp, synthetic construct
  misc_feature 1..21: note = Description of Artificial Sequence: Synthetic oligonucleotide
  source 1..21: mol_type = other DNA
aagatgacgccgcagtctact

SEQ ID NO: 40044 - DNA, 21 bp, synthetic construct
  misc_feature 1..21: note = Description of Artificial Sequence: Synthetic oligonucleotide
  source 1..21: mol_type = other DNA
agacaccaaggcaccctccaa

SEQ ID NO: 40045 - DNA, 21 bp, synthetic construct
  misc_feature 1..21: note = Description of Artificial Sequence: Synthetic oligonucleotide
  source 1..21: mol_type = other DNA
gacgccagaaccatggccgcc

SEQ ID NO: 40046 - DNA, 21 bp, synthetic construct
  misc_feature 1..21: note = Description of Artificial Sequence: Synthetic oligonucleotide
  source 1..21: mol_type = other DNA
aagtctccttctagtattttg

SEQ ID NO: 40047 - DNA, 21 bp, synthetic construct
  misc_feature 1..21: note = Description of Artificial Sequence: Synthetic oligonucleotide
  source 1..21: mol_type = other DNA
cacctcagccacgccagcagc

SEQ ID NO: 40048 - DNA, 21 bp, synthetic construct
  misc_feature 1..21: note = Description of Artificial Sequence: Synthetic oligonucleotide
  source 1..21: mol_type = other DNA
tgtccgcctcttccggttaat

SEQ ID NO: 40049 - DNA, 21 bp, synthetic construct
  misc_feature 1..21: note = Description of Artificial Sequence: Synthetic oligonucleotide
  source 1..21: mol_type = other DNA
tctacgcctgtgacgatgaat

SEQ ID NO: 40050 - DNA, 21 bp, synthetic construct
  misc_feature 1..21: note = Description of Artificial Sequence: Synthetic oligonucleotide
  source 1..21: mol_type = other DNA
agtggtcctaatagtcgtgtt

SEQ ID NO: 40051 - DNA, 21 bp, synthetic construct
  misc_feature 1..21: note = Description of Artificial Sequence: Synthetic oligonucleotide
  source 1..21: mol_type = other DNA
agtcggggggtgtcgtctgcg

SEQ ID NO: 40052 - DNA, 21 bp, synthetic construct
  misc_feature 1..21: note = Description of Artificial Sequence: Synthetic oligonucleotide
  source 1..21: mol_type = other DNA
ggtaatccttcgcctttggtt

SEQ ID NO: 40053 - DNA, 21 bp, synthetic construct
  misc_feature 1..21: note = Description of Artificial Sequence: Synthetic oligonucleotide
  source 1..21: mol_type = other DNA
agcaccagaccccccgccaac

SEQ ID NO: 40054 - DNA, 21 bp, synthetic construct
  misc_feature 1..21: note = Description of Artificial Sequence: Synthetic oligonucleotide
  source 1..21: mol_type = other DNA
actcatcgtacgcagaattcg

SEQ ID NO: 40055 - DNA, 21 bp, synthetic construct
  misc_feature 1..21: note = Description of Artificial Sequence: Synthetic oligonucleotide
  source 1..21: mol_type = other DNA
atgagtcatactaagtcgaat

SEQ ID NO: 40056 - DNA, 21 bp, synthetic construct
  misc_feature 1..21: note = Description of Artificial Sequence: Synthetic oligonucleotide
  source 1..21: mol_type = other DNA
gggcgtgcgaatggtcagacg

SEQ ID NO: 40057 - DNA, 21 bp, synthetic construct
  misc_feature 1..21: note = Description of Artificial Sequence: Synthetic oligonucleotide
  source 1..21: mol_type = other DNA
catagttctcgttcgacggtt

SEQ ID NO: 40058 - DNA, 21 bp, synthetic construct
  misc_feature 1..21: note = Description of Artificial Sequence: Synthetic oligonucleotide
  source 1..21: mol_type = other DNA
agcgcccacaacgccagcaga

SEQ ID NO: 40059 - DNA, 21 bp, synthetic construct
  misc_feature 1..21: note = Description of Artificial Sequence: Synthetic oligonucleotide
  source 1..21: mol_type = other DNA
gggcaggctgttaatactgct

SEQ ID NO: 40060 - DNA, 21 bp, synthetic construct
  misc_feature 1..21: note = Description of Artificial Sequence: Synthetic oligonucleotide
  source 1..21: mol_type = other DNA
cgtgatgctacgtctattggg

SEQ ID NO: 40061 - DNA, 21 bp, synthetic construct
  misc_feature 1..21: note = Description of Artificial Sequence: Synthetic oligonucleotide
  source 1..21: mol_type = other DNA
tacaacatcaaacaaggcagc

SEQ ID NO: 40062 - DNA, 21 bp, synthetic construct
  misc_feature 1..21: note = Description of Artificial Sequence: Synthetic oligonucleotide
  source 1..21: mol_type = other DNA
ggcgccgtcagcggcaaactc

SEQ ID NO: 40063 - DNA, 21 bp, synthetic construct
  misc_feature 1..21: note = Description of Artificial Sequence: Synthetic oligonucleotide
  source 1..21: mol_type = other DNA
cccaaccccctccaaaaagac

SEQ ID NO: 40064 - DNA, 21 bp, synthetic construct
  misc_feature 1..21: note = Description of Artificial Sequence: Synthetic oligonucleotide
  source 1..21: mol_type = other DNA
ggtaatgatgttcggattagt

SEQ ID NO: 40065 - DNA, 21 bp, synthetic construct
  misc_feature 1..21: note = Description of Artificial Sequence: Synthetic oligonucleotide
  source 1..21: mol_type = other DNA
tcgattcctcatggggtgagg

SEQ ID NO: 40066 - DNA, 21 bp, synthetic construct
  misc_feature 1..21: note = Description of Artificial Sequence: Synthetic oligonucleotide
  source 1..21: mol_type = other DNA
actgctatgggggatgtgtct

SEQ ID NO: 40067 - DNA, 21 bp, synthetic construct
  misc_feature 1..21: note = Description of Artificial Sequence: Synthetic oligonucleotide
  source 1..21: mol_type = other DNA
ggcagcaccaccagcggcaga

SEQ ID NO: 40068 - DNA, 21 bp, synthetic construct
  misc_feature 1..21: note = Description of Artificial Sequence: Synthetic oligonucleotide
  source 1..21: mol_type = other DNA
gctgtgtcgagtaaggtgggg

SEQ ID NO: 40069 - DNA, 21 bp, synthetic construct
  misc_feature 1..21: note = Description of Artificial Sequence: Synthetic oligonucleotide
  source 1..21: mol_type = other DNA
acccccagcgtcaccaacatg

SEQ ID NO: 40070 - DNA, 21 bp, synthetic construct
  misc_feature 1..21: note = Description of Artificial Sequence: Synthetic oligonucleotide
  source 1..21: mol_type = other DNA
gctcctcagcttaaggggtat

SEQ ID NO: 40071 - DNA, 21 bp, synthetic construct
  misc_feature 1..21: note = Description of Artificial Sequence: Synthetic oligonucleotide
  source 1..21: mol_type = other DNA
accgacaccagcagaagacaa

SEQ ID NO: 40072 - DNA, 21 bp, synthetic construct
  misc_feature 1..21: note = Description of Artificial Sequence: Synthetic oligonucleotide
  source 1..21: mol_type = other DNA
ccggggtctgggagtaatcat

SEQ ID NO: 40073 - DNA, 21 bp, synthetic construct
  misc_feature 1..21: note = Description of Artificial Sequence: Synthetic oligonucleotide
  source 1..21: mol_type = other DNA
aatacgggtatgtctgtgaat

SEQ ID NO: 40074 - DNA, 21 bp, synthetic construct
  misc_feature 1..21: note = Description of Artificial Sequence: Synthetic oligonucleotide
  source 1..21: mol_type = other DNA
atggctcatgatggttatcgg

SEQ ID NO: 40075 - DNA, 21 bp, synthetic construct
  misc_feature 1..21: note = Description of Artificial Sequence: Synthetic oligonucleotide
  source 1..21: mol_type = other DNA
tctcctggtaataagagtact

SEQ ID NO: 40076 - DNA, 21 bp, synthetic construct
  misc_feature 1..21: note = Description of Artificial Sequence: Synthetic oligonucleotide
  source 1..21: mol_type = other DNA
atgggcgtccacagcatcgcc

SEQ ID NO: 40077 - DNA, 21 bp, synthetic construct
  misc_feature 1..21: note = Description of Artificial Sequence: Synthetic oligonucleotide
  source 1..21: mol_type = other DNA
cagaagggtaataatttgccg

SEQ ID NO: 40078 - DNA, 21 bp, synthetic construct
  misc_feature 1..21: note = Description of Artificial Sequence: Synthetic oligonucleotide
  source 1..21: mol_type = other DNA
ggtcttcataggtctaatggt

SEQ ID NO: 40079 - DNA, 21 bp, synthetic construct
  misc_feature 1..21: note = Description of Artificial Sequence: Synthetic oligonucleotide
  source 1..21: mol_type = other DNA
agcctctaccccagcaaaggc

SEQ ID NO: 40080 - DNA, 21 bp, synthetic construct
  misc_feature 1..21: note = Description of Artificial Sequence: Synthetic oligonucleotide
  source 1..21: mol_type = other DNA
gcgccgaatggtatgcaggct

SEQ ID NO: 40081 - DNA, 21 bp, synthetic construct
  misc_feature 1..21: note = Description of Artificial Sequence: Synthetic oligonucleotide
  source 1..21: mol_type = other DNA
gttgggcatgggtctgatatg

SEQ ID NO: 40082 - DNA, 21 bp, synthetic construct
  misc_feature 1..21: note = Description of Artificial Sequence: Synthetic oligonucleotide
  source 1..21: mol_type = other DNA
aacggcttcaacagcaacaac

SEQ ID NO: 40083 - DNA, 21 bp, synthetic construct
  misc_feature 1..21: note = Description of Artificial Sequence: Synthetic oligonucleotide
  source 1..21: mol_type = other DNA
cagggtttgtctactaagagt

SEQ ID NO: 40084 - DNA, 21 bp, synthetic construct
  misc_feature 1..21: note = Description of Artificial Sequence: Synthetic oligonucleotide
  source 1..21: mol_type = other DNA
cccggcatcgccaccggcaga

SEQ ID NO: 40085 - DNA, 21 bp, synthetic construct
  misc_feature 1..21: note = Description of Artificial Sequence: Synthetic oligonucleotide
  source 1..21: mol_type = other DNA
gctacgatgcgttcgaatgag

SEQ ID NO: 40086 - DNA, 21 bp, synthetic construct
  misc_feature 1..21: note = Description of Artificial Sequence: Synthetic oligonucleotide
  source 1..21: mol_type = other DNA
cctacgcatgagagggctaag

SEQ ID NO: 40087 - DNA, 21 bp, synthetic construct
  misc_feature 1..21: note = Description of Artificial Sequence: Synthetic oligonucleotide
  source 1..21: mol_type = other DNA
gggactggtgttccggggaag

SEQ ID NO: 40088 - DNA, 21 bp, synthetic construct
  misc_feature 1..21: note = Description of Artificial Sequence: Synthetic oligonucleotide
  source 1..21: mol_type = other DNA
ccggattctactttttcgagt

SEQ ID NO: 40089 - DNA, 21 bp, synthetic construct
  misc_feature 1..21: note = Description of Artificial Sequence: Synthetic oligonucleotide
  source 1..21: mol_type = other DNA
ctcggcaccaaaatgtgcgcc

SEQ ID NO: 40090 - DNA, 21 bp, synthetic construct
  misc_feature 1..21: note = Description of Artificial Sequence: Synthetic oligonucleotide
  source 1..21: mol_type = other DNA
gttaggatttcgactcaggcg

SEQ ID NO: 40091 - DNA, 21 bp, synthetic construct
  misc_feature 1..21: note = Description of Artificial Sequence: Synthetic oligonucleotide
  source 1..21: mol_type = other DNA
actaatcctactggttatcgt

SEQ ID NO: 40092 - DNA, 21 bp, synthetic construct
  misc_feature 1..21: note = Description of Artificial Sequence: Synthetic oligonucleotide
  source 1..21: mol_type = other DNA
ctcggcgacagaagcttcatc

SEQ ID NO: 40093 - DNA, 21 bp, synthetic construct
  misc_feature 1..21: note = Description of Artificial Sequence: Synthetic oligonucleotide
  source 1..21: mol_type = other DNA
attcttgattcgcataatcgg

SEQ ID NO: 40094 - DNA, 21 bp, synthetic construct
  misc_feature 1..21: note = Description of Artificial Sequence: Synthetic oligonucleotide
  source 1..21: mol_type = other DNA
ggccacgccgccggcgtcagc

SEQ ID NO: 40095 - DNA, 21 bp, synthetic construct
  misc_feature 1..21: note = Description of Artificial Sequence: Synthetic oligonucleotide
  source 1..21: mol_type = other DNA
aacagcagcggccaaaacccc

SEQ ID NO: 40096 - DNA, 21 bp, synthetic construct
  misc_feature 1..21: note = Description of Artificial Sequence: Synthetic oligonucleotide
  source 1..21: mol_type = other DNA
tctgttcatcagaatcgggcg

SEQ ID NO: 40097 - DNA, 21 bp, synthetic construct
  misc_feature 1..21: note = Description of Artificial Sequence: Synthetic oligonucleotide
  source 1..21: mol_type = other DNA
gttagtacgactcctgctttg

SEQ ID NO: 40098 - DNA, 21 bp, synthetic construct
  misc_feature 1..21: note = Description of Artificial Sequence: Synthetic oligonucleotide
  source 1..21: mol_type = other DNA
atcaccaccagaagcagcatg

SEQ ID NO: 40099 - DNA, 21 bp, synthetic construct
  misc_feature 1..21: note = Description of Artificial Sequence: Synthetic oligonucleotide
  source 1..21: mol_type = other DNA
ggggttgagcgtatgaggggt

SEQ ID NO: 40100 - DNA, 21 bp, synthetic construct
  misc_feature 1..21: note = Description of Artificial Sequence: Synthetic oligonucleotide
  source 1..21: mol_type = other DNA
cccagcaacaaagccggcacc

SEQ ID NO: 40101 - DNA, 21 bp, synthetic construct
  misc_feature 1..21: note = Description of Artificial Sequence: Synthetic oligonucleotide
  source 1..21: mol_type = other DNA
cattatggtgagactcggaat

SEQ ID NO: 40102 - DNA, 21 bp, synthetic construct
  misc_feature 1..21: note = Description of Artificial Sequence: Synthetic oligonucleotide
  source 1..21: mol_type = other DNA
gttggtcataagggggggcct

SEQ ID NO: 40103 - DNA, 21 bp, synthetic construct
  misc_feature 1..21: note = Description of Artificial Sequence: Synthetic oligonucleotide
  source 1..21: mol_type = other DNA
cacgtcgcccaactcggcagc

SEQ ID NO: 40104 - DNA, 21 bp, synthetic construct
  misc_feature 1..21: note = Description of Artificial Sequence: Synthetic oligonucleotide
  source 1..21: mol_type = other DNA
ttcaccatccccagagccgac

SEQ ID NO: 40105 - DNA, 21 bp, synthetic construct
  misc_feature 1..21: note = Description of Artificial Sequence: Synthetic oligonucleotide
  source 1..21: mol_type = other DNA
ggccaaacccacgccgtcaga

SEQ ID NO: 40106 - DNA, 21 bp, synthetic construct
  misc_feature 1..21: note = Description of Artificial Sequence: Synthetic oligonucleotide
  source 1..21: mol_type = other DNA
gagatttcgcagcagggtact

SEQ ID NO: 40107 - DNA, 21 bp, synthetic construct
  misc_feature 1..21: note = Description of Artificial Sequence: Synthetic oligonucleotide
  source 1..21: mol_type = other DNA
atccaaagcagcgacagactc

SEQ ID NO: 40108 - DNA, 21 bp, synthetic construct
  misc_feature 1..21: note = Description of Artificial Sequence: Synthetic oligonucleotide
  source 1..21: mol_type = other DNA
agcctcagcagcaaccccagc

SEQ ID NO: 40109 - DNA, 21 bp, synthetic construct
  misc_feature 1..21: note = Description of Artificial Sequence: Synthetic oligonucleotide
  source 1..21: mol_type = other DNA
gcttcgagggatagggctggt

SEQ ID NO: 40110 - DNA, 21 bp, synthetic construct
  misc_feature 1..21: note = Description of Artificial Sequence: Synthetic oligonucleotide
  source 1..21: mol_type = other DNA
ccgattagtccgcgtatgagt

SEQ ID NO: 40111 - DNA, 21 bp, synthetic construct
  misc_feature 1..21: note = Description of Artificial Sequence: Synthetic oligonucleotide
  source 1..21: mol_type = other DNA
ggtcctgctgttacgaatcgt

SEQ ID NO: 40112 - DNA, 21 bp, synthetic construct
  misc_feature 1..21: note = Description of Artificial Sequence: Synthetic oligonucleotide
  source 1..21: mol_type = other DNA
gcgactcatacgtctgttagt

SEQ ID NO: 40113 - DNA, 21 bp, synthetic construct
  misc_feature 1..21: note = Description of Artificial Sequence: Synthetic oligonucleotide
  source 1..21: mol_type = other DNA
acgcattcgaagagttttgtg

SEQ ID NO: 40114 - DNA, 21 bp, synthetic construct
  misc_feature 1..21: note = Description of Artificial Sequence: Synthetic oligonucleotide
  source 1..21: mol_type = other DNA
cgggtgtctcatgctcaggat

SEQ ID NO: 40115 - DNA, 21 bp, synthetic construct
  misc_feature 1..21: note = Description of Artificial Sequence: Synthetic oligonucleotide
  source 1..21: mol_type = other DNA
gtcagcaacagccaaagcctc

SEQ ID NO: 40116 - DNA, 21 bp, synthetic construct
  misc_feature 1..21: note = Description of Artificial Sequence: Synthetic oligonucleotide
  source 1..21: mol_type = other DNA
gggactatgagtaatgggcat

SEQ ID NO: 40117 - DNA, 21 bp, synthetic construct
  misc_feature 1..21: note = Description of Artificial Sequence: Synthetic oligonucleotide
  source 1..21: mol_type = other DNA
tttacgattccgcgtgcggtt

SEQ ID NO: 40118 - DNA, 21 bp, synthetic construct
  misc_feature 1..21: note = Description of Artificial Sequence: Synthetic oligonucleotide
  source 1..21: mol_type = other DNA
agcaccaccctcagaaacagc

SEQ ID NO: 40119 - DNA, 21 bp, synthetic construct
  misc_feature 1..21: note = Description of Artificial Sequence: Synthetic oligonucleotide
  source 1..21: mol_type = other DNA
atgatcagcggcgccaccaga

SEQ ID NO: 40120 - DNA, 21 bp, synthetic construct
  misc_feature 1..21: note = Description of Artificial Sequence: Synthetic oligonucleotide
  source 1..21: mol_type = other DNA
accggcccccacatcaaagcc

SEQ ID NO: 40121 - DNA, 21 bp, synthetic construct
  misc_feature 1..21: note = Description of Artificial Sequence: Synthetic oligonucleotide
  source 1..21: mol_type = other DNA
cacgtccacgacggcagaacc

SEQ ID NO: 40122 - DNA, 21 bp, synthetic construct
  misc_feature 1..21: note = Description of Artificial Sequence: Synthetic oligonucleotide
  source 1..21: mol_type = other DNA
tcgaataatagtggttcgtgt

SEQ ID NO: 40123 - DNA, 21 bp, synthetic construct
  misc_feature 1..21: note = Description of Artificial Sequence: Synthetic oligonucleotide
  source 1..21: mol_type = other DNA
cagacgatgcctaagcttgct

SEQ ID NO: 40124 - DNA, 21 bp, synthetic construct
  misc_feature 1..21: note = Description of Artificial Sequence: Synthetic oligonucleotide
  source 1..21: mol_type = other DNA
ttgggtcggtcgccgcctgct

SEQ ID NO: 40125 - DNA, 21 bp, synthetic construct
  misc_feature 1..21: note = Description of Artificial Sequence: Synthetic oligonucleotide
  source 1..21: mol_type = other DNA
cacagagccagcaccgacgcc

SEQ ID NO: 40126 - DNA, 21 bp, synthetic construct
  misc_feature 1..21: note = Description of Artificial Sequence: Synthetic oligonucleotide
  source 1..21: mol_type = other DNA
agtcgttctgttaattttggt

SEQ ID NO: 40127 - DNA, 21 bp, synthetic construct
  misc_feature 1..21: note = Description of Artificial Sequence: Synthetic oligonucleotide
  source 1..21: mol_type = other DNA
gcgtcggggaatggtcgtcct

SEQ ID NO: 40128 - DNA, 21 bp, synthetic construct
  misc_feature 1..21: note = Description of Artificial Sequence: Synthetic oligonucleotide
  source 1..21: mol_type = other DNA
gggcatagtactgtgggtagt

SEQ ID NO: 40129 - DNA, 21 bp, synthetic construct
  misc_feature 1..21: note = Description of Artificial Sequence: Synthetic oligonucleotide
  source 1..21: mol_type = other DNA
gaaagacacgtccccagcagc

SEQ ID NO: 40130 - DNA, 21 bp, synthetic construct
  misc_feature 1..21: note = Description of Artificial Sequence: Synthetic oligonucleotide
  source 1..21: mol_type = other DNA
agacccgccaccagcaccccc

SEQ ID NO: 40131 - DNA, 21 bp, synthetic construct
  misc_feature 1..21: note = Description of Artificial Sequence: Synthetic oligonucleotide
  source 1..21: mol_type = other DNA
gttaaggttgatgggcagatt

SEQ ID NO: 40132 - DNA, 21 bp, synthetic construct
  misc_feature 1..21: note = Description of Artificial Sequence: Synthetic oligonucleotide
  source 1..21: mol_type = other DNA
caaggcaaaaccgccccctac

SEQ ID NO: 40133 - DNA, 21 bp, synthetic construct
  misc_feature 1..21: note = Description of Artificial Sequence: Synthetic oligonucleotide
  source 1..21: mol_type = other DNA
gccagaaacagagtcggcatc

SEQ ID NO: 40134 - DNA, 21 bp, synthetic construct
  misc_feature 1..21: note = Description of Artificial Sequence: Synthetic oligonucleotide
  source 1..21: mol_type = other DNA
ctccccaccagcagcgtcgcc

SEQ ID NO: 40135 - DNA, 21 bp, synthetic construct
  misc_feature 1..21: note = Description of Artificial Sequence: Synthetic oligonucleotide
  source 1..21: mol_type = other DNA
agtgggaaggatcggctgcat

SEQ ID NO: 40136 - DNA, 21 bp, synthetic construct
  misc_feature 1..21: note = Description of Artificial Sequence: Synthetic oligonucleotide
  source 1..21: mol_type = other DNA
cgtctgcataatatgtcggct

SEQ ID NO: 40137 - DNA, 21 bp, synthetic construct
  misc_feature 1..21: note = Description of Artificial Sequence: Synthetic oligonucleotide
  source 1..21: mol_type = other DNA
agtgataataagggttcggtg

SEQ ID NO: 40138 - DNA, 21 bp, synthetic construct
  misc_feature 1..21: note = Description of Artificial Sequence: Synthetic oligonucleotide
  source 1..21: mol_type = other DNA
accaacaccgccggctggagc

SEQ ID NO: 40139 - DNA, 21 bp, synthetic construct
  misc_feature 1..21: note = Description of Artificial Sequence: Synthetic oligonucleotide
  source 1..21: mol_type = other DNA
cgtactgggcatagtgcgggt

SEQ ID NO: 40140 - DNA, 21 bp, synthetic construct
  misc_feature 1..21: note = Description of Artificial Sequence: Synthetic oligonucleotide
  source 1..21: mol_type = other DNA
gccctcaaacaaaccgccgcc

SEQ ID NO: 40141 - DNA, 21 bp, synthetic construct
  misc_feature 1..21: note = Description of Artificial Sequence: Synthetic oligonucleotide
  source 1..21: mol_type = other DNA
atgaacggcagccccagaatc

SEQ ID NO: 40142 - DNA, 21 bp, synthetic construct
  misc_feature 1..21: note = Description of Artificial Sequence: Synthetic oligonucleotide
  source 1..21: mol_type = other DNA
gcctacagcaccaccaacaga

SEQ ID NO: 40143 - DNA, 21 bp, synthetic construct
  misc_feature 1..21: note = Description of Artificial Sequence: Synthetic oligonucleotide
  source 1..21: mol_type = other DNA
atcagaaccaacagcaccctc

SEQ ID NO: 40144 - DNA, 21 bp, synthetic construct
  misc_feature 1..21: note = Description of Artificial Sequence: Synthetic oligonucleotide
  source 1..21: mol_type = other DNA
ggtaatgggactcgtcatgtg

SEQ ID NO: 40145 - DNA, 21 bp, synthetic construct
  misc_feature 1..21: note = Description of Artificial Sequence: Synthetic oligonucleotide
  source 1..21: mol_type = other DNA
agctacgccgacaaacaaggc

SEQ ID NO: 40146 - DNA, 21 bp, synthetic construct
  misc_feature 1..21: note = Description of Artificial Sequence: Synthetic oligonucleotide
  source 1..21: mol_type = other DNA
ggcacccaagccgcccacgtc

SEQ ID NO: 40147 - DNA, 21 bp, synthetic construct
  misc_feature 1..21: note = Description of Artificial Sequence: Synthetic oligonucleotide
  source 1..21: mol_type = other DNA
ctcaacggcagcgccaccgcc

SEQ ID NO: 40148 - DNA, 21 bp, synthetic construct
  misc_feature 1..21: note = Description of Artificial Sequence: Synthetic oligonucleotide
  source 1..21: mol_type = other DNA
ttggttcgggcgactcatgag

SEQ ID NO: 40149 - DNA, 21 bp, synthetic construct
  misc_feature 1..21: note = Description of Artificial Sequence: Synthetic oligonucleotide
  source 1..21: mol_type = other DNA
cgtttgggtaatagtcatgcg

SEQ ID NO: 40150 - DNA, 21 bp, synthetic construct
  misc_feature 1..21: note = Description of Artificial Sequence: Synthetic oligonucleotide
  source 1..21: mol_type = other DNA
cctatgcgggggactttggcg

SEQ ID NO: 40151 - DNA, 21 bp, synthetic construct
  misc_feature 1..21: note = Description of Artificial Sequence: Synthetic oligonucleotide
  source 1..21: mol_type = other DNA
gtcggcagcagaaacgtcggc

SEQ ID NO: 40152 - DNA, 21 bp, synthetic construct
  misc_feature 1..21: note = Description of Artificial Sequence: Synthetic oligonucleotide
  source 1..21: mol_type = other DNA
cccagacacgtccccctcctc

SEQ ID NO: 40153 - DNA, 21 bp, synthetic construct
  misc_feature 1..21: note = Description of Artificial Sequence: Synthetic oligonucleotide
  source 1..21: mol_type = other DNA
agcagccacagcaacagcgaa

SEQ ID NO: 40154 - DNA, 21 bp, synthetic construct
  misc_feature 1..21: note = Description of Artificial Sequence: Synthetic oligonucleotide
  source 1..21: mol_type = other DNA
tctctgaggactccttctggt

SEQ ID NO: 40155 - DNA, 21 bp, synthetic construct
  misc_feature 1..21: note = Description of Artificial Sequence: Synthetic oligonucleotide
  source 1..21: mol_type = other DNA
ctccccaccaccgccagcagc

SEQ ID NO: 40156 - DNA, 21 bp, synthetic construct
  misc_feature 1..21: note = Description of Artificial Sequence: Synthetic oligonucleotide
  source 1..21: mol_type = other DNA
ggtgcgggtactagttatcat

SEQ ID NO: 40157 - DNA, 21 bp, synthetic construct
  misc_feature 1..21: note = Description of Artificial Sequence: Synthetic oligonucleotide
  source 1..21: mol_type = other DNA
agtacgtctgggattcgttct

SEQ ID NO: 40158 - DNA, 21 bp, synthetic construct
  misc_feature 1..21: note = Description of Artificial Sequence: Synthetic oligonucleotide
  source 1..21: mol_type = other DNA
attgggctgaatcgtactggg

SEQ ID NO: 40159 - DNA, 21 bp, synthetic construct
  misc_feature 1..21: note = Description of Artificial Sequence: Synthetic oligonucleotide
  source 1..21: mol_type = other DNA
gctaatcgtactcggcaggat

SEQ ID NO: 40160 - DNA, 21 bp, synthetic construct
  misc_feature 1..21: note = Description of Artificial Sequence: Synthetic oligonucleotide
  source 1..21: mol_type = other DNA
cccgtcagagaaggcagcatc

SEQ ID NO: 40161 - DNA, 21 bp, synthetic construct
  misc_feature 1..21: note = Description of Artificial Sequence: Synthetic oligonucleotide
  source 1..21: mol_type = other DNA
cctggtaatgagattggtagg

SEQ ID NO: 40162 - DNA, 21 bp, synthetic construct
  misc_feature 1..21: note = Description of Artificial Sequence: Synthetic oligonucleotide
  source 1..21: mol_type = other DNA
agtccttttcagtcttctcat

SEQ ID NO: 40163 - DNA, 21 bp, synthetic construct
  misc_feature 1..21: note = Description of Artificial Sequence: Synthetic oligonucleotide
  source 1..21: mol_type = other DNA
gctatgtctgagcatctgaag

SEQ ID NO: 40164 - DNA, 21 bp, synthetic construct
  misc_feature 1..21: note = Description of Artificial Sequence: Synthetic oligonucleotide
  source 1..21: mol_type = other DNA
catctggataggctgtctaag

SEQ ID NO: 40165 - DNA, 21 bp, synthetic construct
  misc_feature 1..21: note = Description of Artificial Sequence: Synthetic oligonucleotide
  source 1..21: mol_type = other DNA
gaagtcaccaacgcccccaaa

SEQ ID NO: 40166 - DNA, 21 bp, synthetic construct
  misc_feature 1..21: note = Description of Artificial Sequence: Synthetic oligonucleotide
  source 1..21: mol_type = other DNA
tcttcgaatgagaaggatagg

SEQ ID NO: 40167 - DNA, 21 bp, synthetic construct
  misc_feature 1..21: note = Description of Artificial Sequence: Synthetic oligonucleotide
  source 1..21: mol_type = other DNA
tctttgtcgcggcttagtggg

SEQ ID NO: 40168 - DNA, 21 bp, synthetic construct
  misc_feature 1..21: note = Description of Artificial Sequence: Synthetic oligonucleotide
  source 1..21: mol_type = other DNA
ggcctccccctcagacccaac

SEQ ID NO: 40169 - DNA, 21 bp, synthetic construct
  misc_feature 1..21: note = Description of Artificial Sequence: Synthetic oligonucleotide
  source 1..21: mol_type = other DNA
gaaaccagacccgccatctgc

SEQ ID NO: 40170 - DNA, 21 bp, synthetic construct
  misc_feature 1..21: note = Description of Artificial Sequence: Synthetic oligonucleotide
  source 1..21: mol_type = other DNA
aacagttctggacagaatcaa

SEQ ID NO: 40171 - DNA, 21 bp, synthetic construct
  misc_feature 1..21: note = Description of Artificial Sequence: Synthetic oligonucleotide
  source 1..21: mol_type = other DNA
agcagaagcgcccccagactc

SEQ ID NO: 40172 - DNA, 21 bp, synthetic construct
  misc_feature 1..21: note = Description of Artificial Sequence: Synthetic oligonucleotide
  source 1..21: mol_type = other DNA
gccaccggcagaagccccaac

SEQ ID NO: 40173 - DNA, 21 bp, synthetic construct
  misc_feature 1..21: note = Description of Artificial Sequence: Synthetic oligonucleotide
  source 1..21: mol_type = other DNA
tgccaacccagaagcgccaac

SEQ ID NO: 40174 - DNA, 21 bp, synthetic construct
  misc_feature 1..21: note = Description of Artificial Sequence: Synthetic oligonucleotide
  source 1..21: mol_type = other DNA
gcgacgtctgcgactaggatg

SEQ ID NO: 40175 - DNA, 21 bp, synthetic construct
  misc_feature 1..21: note = Description of Artificial Sequence: Synthetic oligonucleotide
  source 1..21: mol_type = other DNA
ctcaccgtcagaagccaaagc

SEQ ID NO: 40176 - DNA, 21 bp, synthetic construct
  misc_feature 1..21: note = Description of Artificial Sequence: Synthetic oligonucleotide
  source 1..21: mol_type = other DNA
tctaatactcattcgcctagt

SEQ ID NO: 40177 - DNA, 21 bp, synthetic construct
  misc_feature 1..21: note = Description of Artificial Sequence: Synthetic oligonucleotide
  source 1..21: mol_type = other DNA
attcgttcgacttctggtggg

SEQ ID NO: 40178 - DNA, 21 bp, synthetic construct
  misc_feature 1..21: note = Description of Artificial Sequence: Synthetic oligonucleotide
  source 1..21: mol_type = other DNA
acggctactaaggctgatagg

SEQ ID NO: 40179 - DNA, 21 bp, synthetic construct
  misc_feature 1..21: note = Description of Artificial Sequence: Synthetic oligonucleotide
  source 1..21: mol_type = other DNA
agtcagagtactcagtttggg

SEQ ID NO: 40180 - DNA, 21 bp, synthetic construct
  misc_feature 1..21: note = Description of Artificial Sequence: Synthetic oligonucleotide
  source 1..21: mol_type = other DNA
gcgcaggctagtaggactact

SEQ ID NO: 40181 - DNA, 21 bp, synthetic construct
  misc_feature 1..21: note = Description of Artificial Sequence: Synthetic oligonucleotide
  source 1..21: mol_type = other DNA
ggcggcagaagcgtcggcctc

SEQ ID NO: 40182 - DNA, 21 bp, synthetic construct
  misc_feature 1..21: note = Description of Artificial Sequence: Synthetic oligonucleotide
  source 1..21: mol_type = other DNA
actcatgctgctcattcttct

SEQ ID NO: 40183 - DNA, 21 bp, synthetic construct
  misc_feature 1..21: note = Description of Artificial Sequence: Synthetic oligonucleotide
  source 1..21: mol_type = other DNA
atgggtcatgctaagacggct

SEQ ID NO: 40184 - DNA, 21 bp, synthetic construct
  misc_feature 1..21: note = Description of Artificial Sequence: Synthetic oligonucleotide
  source 1..21: mol_type = other DNA
ggcatgcacagcgtcgccaaa

SEQ ID NO: 40185 - DNA, 21 bp, synthetic construct
  misc_feature 1..21: note = Description of Artificial Sequence: Synthetic oligonucleotide
  source 1..21: mol_type = other DNA
ccttattcgcgtcctgctcag

SEQ ID NO: 40186 - DNA, 21 bp, synthetic construct
  misc_feature 1..21: note = Description of Artificial Sequence: Synthetic oligonucleotide
  source 1..21: mol_type = other DNA
caggtgtcgcctttgattttg

SEQ ID NO: 40187 - DNA, 21 bp, synthetic construct
  misc_feature 1..21: note = Description of Artificial Sequence: Synthetic oligonucleotide
  source 1..21: mol_type = other DNA
agatacccccccgccacccac

SEQ ID NO: 40188 - DNA, 21 bp, synthetic construct
  misc_feature 1..21: note = Description of Artificial Sequence: Synthetic oligonucleotide
  source 1..21: mol_type = other DNA
aatttggggacgaatgttctg

SEQ ID NO: 40189 - DNA, 21 bp, synthetic construct
  misc_feature 1..21: note = Description of Artificial Sequence: Synthetic oligonucleotide
  source 1..21: mol_type = other DNA
aacggtgctggacagaatcaa

SEQ ID NO: 40190 - DNA, 21 bp, synthetic construct
  misc_feature 1..21: note = Description of Artificial Sequence: Synthetic oligonucleotide
  source 1..21: mol_type = other DNA
aatatttcgactaggcagagt

SEQ ID NO: 40191 - DNA, 21 bp, synthetic construct
  misc_feature 1..21: note = Description of Artificial Sequence: Synthetic oligonucleotide
  source 1..21: mol_type = other DNA
ggcaccgtcgacaaagccagc

SEQ ID NO: 40192 - DNA, 21 bp, synthetic construct
  misc_feature 1..21: note = Description of Artificial Sequence: Synthetic oligonucleotide
  source 1..21: mol_type = other DNA
aatgctatgaatactcggggt

SEQ ID NO: 40193 - DNA, 21 bp, synthetic construct
  misc_feature 1..21: note = Description of Artificial Sequence: Synthetic oligonucleotide
  source 1..21: mol_type = other DNA
cacctcagaggcagcaacacc

SEQ ID NO: 40194 - DNA, 21 bp, synthetic construct
  misc_feature 1..21: note = Description of Artificial Sequence: Synthetic oligonucleotide
  source 1..21: mol_type = other DNA
tcgcatcagcgtcctattcag

SEQ ID NO: 40195 - DNA, 21 bp, synthetic construct
  misc_feature 1..21: note = Description of Artificial Sequence: Synthetic oligonucleotide
  source 1..21: mol_type = other DNA
agacccagcggcagcgaaccc

SEQ ID NO: 40196 - DNA, 21 bp, synthetic construct
  misc_feature 1..21: note = Description of Artificial Sequence: Synthetic oligonucleotide
  source 1..21: mol_type = other DNA
agtgcgagtccgtctcttagt

SEQ ID NO: 40197 - DNA, 21 bp, synthetic construct
  misc_feature 1..21: note = Description of Artificial Sequence: Synthetic oligonucleotide
  source 1..21: mol_type = other DNA
catcagtctggtagtacgtgt

SEQ ID NO: 40198 - DNA, 21 bp, synthetic construct
  misc_feature 1..21: note = Description of Artificial Sequence: Synthetic oligonucleotide
  source 1..21: mol_type = other DNA
tctagtgttagtcgttctcat

SEQ ID NO: 40199 - DNA, 21 bp, synthetic construct
  misc_feature 1..21: note = Description of Artificial Sequence: Synthetic oligonucleotide
  source 1..21: mol_type = other DNA
agagccggcaacgcccccacc

SEQ ID NO: 40200 - DNA, 21 bp, synthetic construct
  misc_feature 1..21: note = Description of Artificial Sequence: Synthetic oligonucleotide
  source 1..21: mol_type = other DNA
tggctttctcagcagtctagt

SEQ ID NO: 40201 - DNA, 21 bp, synthetic construct
  misc_feature 1..21: note = Description of Artificial Sequence: Synthetic oligonucleotide
  source 1..21: mol_type = other DNA
aaagccaacatgagcaaccaa

SEQ ID NO: 40202 - DNA, 21 bp, synthetic construct
  misc_feature 1..21: note = Description of Artificial Sequence: Synthetic oligonucleotide
  source 1..21: mol_type = other DNA
ctcgaaaacagagccctcagc

SEQ ID NO: 40203 - DNA, 21 bp, synthetic construct
  misc_feature 1..21: note = Description of Artificial Sequence: Synthetic oligonucleotide
  source 1..21: mol_type = other DNA
tctactacgggtgatcgtctt

SEQ ID NO: 40204 - DNA, 21 bp, synthetic construct
  misc_feature 1..21: note = Description of Artificial Sequence: Synthetic oligonucleotide
  source 1..21: mol_type = other DNA
tttattgggacgaggagtgcg

SEQ ID NO: 40205 - DNA, 21 bp, synthetic construct
  misc_feature 1..21: note = Description of Artificial Sequence: Synthetic oligonucleotide
  source 1..21: mol_type = other DNA
gatgttcgggctcgtacggcg

SEQ ID NO: 40206 - DNA, 21 bp, synthetic construct
  misc_feature 1..21: note = Description of Artificial Sequence: Synthetic oligonucleotide
  source 1..21: mol_type = other DNA
cagtcgcgggtttctgttaat

SEQ ID NO: 40207 - DNA, 21 bp, synthetic construct
  misc_feature 1..21: note = Description of Artificial Sequence: Synthetic oligonucleotide
  source 1..21: mol_type = other DNA
cgggcgaggttgggtgatagt

SEQ ID NO: 40208 - DNA, 21 bp, synthetic construct
  misc_feature 1..21: note = Description of Artificial Sequence: Synthetic oligonucleotide
  source 1..21: mol_type = other DNA
accctctacagcaacaaaggc

SEQ ID NO: 40209 - DNA, 21 bp, synthetic construct
  misc_feature 1..21: note = Description of Artificial Sequence: Synthetic oligonucleotide
  source 1..21: mol_type = other DNA
gccctcgtcaccagacccacc

SEQ ID NO: 40210 - DNA, 21 bp, synthetic construct
  misc_feature 1..21: note = Description of Artificial Sequence: Synthetic oligonucleotide
  source 1..21: mol_type = other DNA
cacaccgacaccagagccgtc

SEQ ID NO: 40211 - DNA, 21 bp, synthetic construct
  misc_feature 1..21: note = Description of Artificial Sequence: Synthetic oligonucleotide
  source 1..21: mol_type = other DNA
ggtgggagtcgtccttttctt

SEQ ID NO: 40212 - DNA, 21 bp, synthetic construct
  misc_feature 1..21: note = Description of Artificial Sequence: Synthetic oligonucleotide
  source 1..21: mol_type = other DNA
tgtaattctcataatgcggct

SEQ ID NO: 40213 - DNA, 21 bp, synthetic construct
  misc_feature 1..21: note = Description of Artificial Sequence: Synthetic oligonucleotide
  source 1..21: mol_type = other DNA
ttggggtctaatcgttattct

SEQ ID NO: 40214 - DNA, 21 bp, synthetic construct
  misc_feature 1..21: note = Description of Artificial Sequence: Synthetic oligonucleotide
  source 1..21: mol_type = other DNA
tttgggtctagtactattttg

SEQ ID NO: 40215 - DNA, 21 bp, synthetic construct
  misc_feature 1..21: note = Description of Artificial Sequence: Synthetic oligonucleotide
  source 1..21: mol_type = other DNA
ggtacttctccttccacgatg

SEQ ID NO: 40216 - DNA, 21 bp, synthetic construct
  misc_feature 1..21: note = Description of Artificial Sequence: Synthetic oligonucleotide
  source 1..21: mol_type = other DNA
tcggtgcagggggagcggatg

SEQ ID NO: 40217 - DNA, 21 bp, synthetic construct
  misc_feature 1..21: note = Description of Artificial Sequence: Synthetic oligonucleotide
  source 1..21: mol_type = other DNA
ggggctcttcatacgagggat

SEQ ID NO: 40218 - DNA, 21 bp, synthetic construct
  misc_feature 1..21: note = Description of Artificial Sequence: Synthetic oligonucleotide
  source 1..21: mol_type = other DNA
ggcatgggcaacgaccccaga

SEQ ID NO: 40219 - DNA, 21 bp, synthetic construct
  misc_feature 1..21: note = Description of Artificial Sequence: Synthetic oligonucleotide
  source 1..21: mol_type = other DNA
ggtacggctttgattgctgct

SEQ ID NO: 40220 - DNA, 21 bp, synthetic construct
  misc_feature 1..21: note = Description of Artificial Sequence: Synthetic oligonucleotide
  source 1..21: mol_type = other DNA
ctgcagaataagttggtggtg

SEQ ID NO: 40221 - DNA, 21 bp, synthetic construct
  misc_feature 1..21: note = Description of Artificial Sequence: Synthetic oligonucleotide
  source 1..21: mol_type = other DNA
caagccaaaaacatccacagc

SEQ ID NO: 40222 - DNA, 21 bp, synthetic construct
  misc_feature 1..21: note = Description of Artificial Sequence: Synthetic oligonucleotide
  source 1..21: mol_type = other DNA
gttacgccgtcgaggggtttt

SEQ ID NO: 40223 - DNA, 21 bp, synthetic construct
  misc_feature 1..21: note = Description of Artificial Sequence: Synthetic oligonucleotide
  source 1..21: mol_type = other DNA
atgcaagccaaaagcggccac

SEQ ID NO: 40224 - DNA, 21 bp, synthetic construct
  misc_feature 1..21: note = Description of Artificial Sequence: Synthetic oligonucleotide
  source 1..21: mol_type = other DNA
agtctttcgggggtgatgact

SEQ ID NO: 40225 - DNA, 21 bp, synthetic construct
  misc_feature 1..21: note = Description of Artificial Sequence: Synthetic oligonucleotide
  source 1..21: mol_type = other DNA
tgtatgtctactaggttgact

SEQ ID NO: 40226 - DNA, 21 bp, synthetic construct
  misc_feature 1..21: note = Description of Artificial Sequence: Synthetic oligonucleotide
  source 1..21: mol_type = other DNA
gtccccagaggccccggcatg

SEQ ID NO: 40227 - DNA, 21 bp, synthetic construct
  misc_feature 1..21: note = Description of Artificial Sequence: Synthetic oligonucleotide
  source 1..21: mol_type = other DNA
agcatccaaagaaccagcagc

SEQ ID NO: 40228 - DNA, 21 bp, synthetic construct
  misc_feature 1..21: note = Description of Artificial Sequence: Synthetic oligonucleotide
  source 1..21: mol_type = other DNA
gccgccaccaacagcttcggc

SEQ ID NO: 40229 - DNA, 21 bp, synthetic construct
  misc_feature 1..21: note = Description of Artificial Sequence: Synthetic oligonucleotide
  source 1..21: mol_type = other DNA
catattcagggtcctcataat

SEQ ID NO: 40230 - DNA, 21 bp, synthetic construct
  misc_feature 1..21: note = Description of Artificial Sequence: Synthetic oligonucleotide
  source 1..21: mol_type = other DNA
attaatactagtagtgattcg

SEQ ID NO: 40231 - DNA, 21 bp, synthetic construct
  misc_feature 1..21: note = Description of Artificial Sequence: Synthetic oligonucleotide
  source 1..21: mol_type = other DNA
gagcgtgctcgtcctgttctt

SEQ ID NO: 40232 - DNA, 21 bp, synthetic construct
  misc_feature 1..21: note = Description of Artificial Sequence: Synthetic oligonucleotide
  source 1..21: mol_type = other DNA
catcctagtcgtcctgtgctt

SEQ ID NO: 40233 - DNA, 21 bp, synthetic construct
  misc_feature 1..21: note = Description of Artificial Sequence: Synthetic oligonucleotide
  source 1..21: mol_type = other DNA
agaaccagccccaccctcgtc

SEQ ID NO: 40234 - DNA, 21 bp, synthetic construct
  misc_feature 1..21: note = Description of Artificial Sequence: Synthetic oligonucleotide
  source 1..21: mol_type = other DNA
agcagaagcaccggcaccctc

SEQ ID NO: 40235 - DNA, 21 bp, synthetic construct
  misc_feature 1..21: note = Description of Artificial Sequence: Synthetic oligonucleotide
  source 1..21: mol_type = other DNA
accagaggcagccccctcatg

SEQ ID NO: 40236 - DNA, 21 bp, synthetic construct
  misc_feature 1..21: note = Description of Artificial Sequence: Synthetic oligonucleotide
  source 1..21: mol_type = other DNA
agtacgtcgacggttcattcg

SEQ ID NO: 40237 - DNA, 21 bp, synthetic construct
  misc_feature 1..21: note = Description of Artificial Sequence: Synthetic oligonucleotide
  source 1..21: mol_type = other DNA
ccttctaagggtacgtatcct

SEQ ID NO: 40238 - DNA, 21 bp, synthetic construct
  misc_feature 1..21: note = Description of Artificial Sequence: Synthetic oligonucleotide
  source 1..21: mol_type = other DNA
cacctcagccacagccccacc

SEQ ID NO: 40239 - DNA, 21 bp, synthetic construct
  misc_feature 1..21: note = Description of Artificial Sequence: Synthetic oligonucleotide
  source 1..21: mol_type = other DNA
ccccccagcaaacccaacacc

SEQ ID NO: 40240 - DNA, 21 bp, synthetic construct
  misc_feature 1..21: note = Description of Artificial Sequence: Synthetic oligonucleotide
  source 1..21: mol_type = other DNA
agtgttgttcctaagactaat

SEQ ID NO: 40241 - DNA, 21 bp, synthetic construct
  misc_feature 1..21: note = Description of Artificial Sequence: Synthetic oligonucleotide
  source 1..21: mol_type = other DNA
atcgccagccaacccctcaga

SEQ ID NO: 40242 - DNA, 21 bp, synthetic construct
  misc_feature 1..21: note = Description of Artificial Sequence: Synthetic oligonucleotide
  source 1..21: mol_type = other DNA
gacagagccagaaacgtccac

SEQ ID NO: 40243 - DNA, 21 bp, synthetic construct
  misc_feature 1..21: note = Description of Artificial Sequence: Synthetic oligonucleotide
  source 1..21: mol_type = other DNA
tattctaattcgcgtgtgggt

SEQ ID NO: 40244 - DNA, 21 bp, synthetic construct
  misc_feature 1..21: note = Description of Artificial Sequence: Synthetic oligonucleotide
  source 1..21: mol_type = other DNA
gaccccctcagacaaagcgtc

SEQ ID NO: 40245 - DNA, 21 bp, synthetic construct
  misc_feature 1..21: note = Description of Artificial Sequence: Synthetic oligonucleotide
  source 1..21: mol_type = other DNA
ggcagccaccaccccagcggc

SEQ ID NO: 40246 - DNA, 21 bp, synthetic construct
  misc_feature 1..21: note = Description of Artificial Sequence: Synthetic oligonucleotide
  source 1..21: mol_type = other DNA
accggcatcggcagccacctc

SEQ ID NO: 40247 - DNA, 21 bp, synthetic construct
  misc_feature 1..21: note = Description of Artificial Sequence: Synthetic oligonucleotide
  source 1..21: mol_type = other DNA
aatactaatgggagtcagcgt

SEQ ID NO: 40248 - DNA, 21 bp, synthetic construct
  misc_feature 1..21: note = Description of Artificial Sequence: Synthetic oligonucleotide
  source 1..21: mol_type = other DNA
agcagcaacaccagaatcgtc

SEQ ID NO: 40249 - DNA, 21 bp, synthetic construct
  misc_feature 1..21: note = Description of Artificial Sequence: Synthetic oligonucleotide
  source 1..21: mol_type = other DNA
ggtcctcaggtgtctcggact

SEQ ID NO: 40250 - DNA, 21 bp, synthetic construct
  misc_feature 1..21: note = Description of Artificial Sequence: Synthetic oligonucleotide
  source 1..21: mol_type = other DNA
aacaacaccagcacccacctc

SEQ ID NO: 40251 - DNA, 21 bp, synthetic construct
  misc_feature 1..21: note = Description of Artificial Sequence: Synthetic oligonucleotide
  source 1..21: mol_type = other DNA
ggcaccggcacccccagaacc

SEQ ID NO: 40252 - DNA, 21 bp, synthetic construct
  misc_feature 1..21: note = Description of Artificial Sequence: Synthetic oligonucleotide
  source 1..21: mol_type = other DNA
caagtccccgtcagacccgtc

SEQ ID NO: 40253 - DNA, 21 bp, synthetic construct
  misc_feature 1..21: note = Description of Artificial Sequence: Synthetic oligonucleotide
  source 1..21: mol_type = other DNA
attaatggtactcagacgctg

SEQ ID NO: 40254 - DNA, 21 bp, synthetic construct
  misc_feature 1..21: note = Description of Artificial Sequence: Synthetic oligonucleotide
  source 1..21: mol_type = other DNA
gaaagccccaacctccacagc

SEQ ID NO: 40255 - DNA, 21 bp, synthetic construct
  misc_feature 1..21: note = Description of Artificial Sequence: Synthetic oligonucleotide
  source 1..21: mol_type = other DNA
gttccgcataatcattcgttg

SEQ ID NO: 40256 - DNA, 21 bp, synthetic construct
  misc_feature 1..21: note = Description of Artificial Sequence: Synthetic oligonucleotide
  source 1..21: mol_type = other DNA
cccaaactcgccgccgacctc

SEQ ID NO: 40257 - DNA, 21 bp, synthetic construct
  misc_feature 1..21: note = Description of Artificial Sequence: Synthetic oligonucleotide
  source 1..21: mol_type = other DNA
aaaggcaaaagcggcgaacaa

SEQ ID NO: 40258 - DNA, 21 bp, synthetic construct
  misc_feature 1..21: note = Description of Artificial Sequence: Synthetic oligonucleotide
  source 1..21: mol_type = other DNA
tcgaaggttactgcgcagtct

SEQ ID NO: 40259 - DNA, 21 bp, synthetic construct
  misc_feature 1..21: note = Description of Artificial Sequence: Synthetic oligonucleotide
  source 1..21: mol_type = other DNA
gagacgaattctcgtttgggt

SEQ ID NO: 40260 - DNA, 21 bp, synthetic construct
  misc_feature 1..21: note = Description of Artificial Sequence: Synthetic oligonucleotide
  source 1..21: mol_type = other DNA
ggcagaaccaacagctacagc

SEQ ID NO: 40261 - DNA, 21 bp, synthetic construct
  misc_feature 1..21: note = Description of Artificial Sequence: Synthetic oligonucleotide
  source 1..21: mol_type = other DNA
cgtactccgactgctagtggg

SEQ ID NO: 40262 - DNA, 21 bp, synthetic construct
  misc_feature 1..21: note = Description of Artificial Sequence: Synthetic oligonucleotide
  source 1..21: mol_type = other DNA
tttcctctgactaagcctgct

SEQ ID NO: 40263 - DNA, 21 bp, synthetic construct
  misc_feature 1..21: note = Description of Artificial Sequence: Synthetic oligonucleotide
  source 1..21: mol_type = other DNA
tgcggcagcaccaaaaccagc

SEQ ID NO: 40264 - DNA, 21 bp, synthetic construct
  misc_feature 1..21: note = Description of Artificial Sequence: Synthetic oligonucleotide
  source 1..21: mol_type = other DNA
ccggcgactgtgactggtgtt

SEQ ID NO: 40265 - DNA, 21 bp, synthetic construct
  misc_feature 1..21: note = Description of Artificial Sequence: Synthetic oligonucleotide
  source 1..21: mol_type = other DNA
ggcttccccgtcagcagcatg

SEQ ID NO: 40266 - DNA, 21 bp, synthetic construct
  misc_feature 1..21: note = Description of Artificial Sequence: Synthetic oligonucleotide
  source 1..21: mol_type = other DNA
ttggggattgctaatattggg

SEQ ID NO: 40267 - DNA, 21 bp, synthetic construct
  misc_feature 1..21: note = Description of Artificial Sequence: Synthetic oligonucleotide
  source 1..21: mol_type = other DNA
cacgtcagactcagcggcagc

SEQ ID NO: 40268 - DNA, 21 bp, synthetic construct
  misc_feature 1..21: note = Description of Artificial Sequence: Synthetic oligonucleotide
  source 1..21: mol_type = other DNA
gatattatgtctcctttgaag

SEQ ID NO: 40269 - DNA, 21 bp, synthetic construct
  misc_feature 1..21: note = Description of Artificial Sequence: Synthetic oligonucleotide
  source 1..21: mol_type = other DNA
gccgtcagagtcgaaagaccc

SEQ ID NO: 40270 - DNA, 21 bp, synthetic construct
  misc_feature 1..21: note = Description of Artificial Sequence: Synthetic oligonucleotide
  source 1..21: mol_type = other DNA
tctaagggtaggcctactatt

SEQ ID NO: 40271 - DNA, 21 bp, synthetic construct
  misc_feature 1..21: note = Description of Artificial Sequence: Synthetic oligonucleotide
  source 1..21: mol_type = other DNA
cttaatgctggtcgttctacg

SEQ ID NO: 40272 - DNA, 21 bp, synthetic construct
  misc_feature 1..21: note = Description of Artificial Sequence: Synthetic oligonucleotide
  source 1..21: mol_type = other DNA
accacccacaacatgcaaggc

SEQ ID NO: 40273 - DNA, 21 bp, synthetic construct
  misc_feature 1..21: note = Description of Artificial Sequence: Synthetic oligonucleotide
  source 1..21: mol_type = other DNA
tcgattccgtcgactagtcag

SEQ ID NO: 40274 - DNA, 21 bp, synthetic construct
  misc_feature 1..21: note = Description of Artificial Sequence: Synthetic oligonucleotide
  source 1..21: mol_type = other DNA
accagcaacatggtcggcaaa

SEQ ID NO: 40275 - DNA, 21 bp, synthetic construct
  misc_feature 1..21: note = Description of Artificial Sequence: Synthetic oligonucleotide
  source 1..21: mol_type = other DNA
actggtaataaggggggggtg

SEQ ID NO: 40276 - DNA, 21 bp, synthetic construct
  misc_feature 1..21: note = Description of Artificial Sequence: Synthetic oligonucleotide
  source 1..21: mol_type = other DNA
gtcagcggcagcaacagcctc

SEQ ID NO: 40277 - DNA, 21 bp, synthetic construct
  misc_feature 1..21: note = Description of Artificial Sequence: Synthetic oligonucleotide
  source 1..21: mol_type = other DNA
cggatgttggatggtcattcg

SEQ ID NO: 40278 - DNA, 21 bp, synthetic construct
  misc_feature 1..21: note = Description of Artificial Sequence: Synthetic oligonucleotide
  source 1..21: mol_type = other DNA
aatgatcgtggtcagaatggg

SEQ ID NO: 40279 - DNA, 21 bp, synthetic construct
  misc_feature 1..21: note = Description of Artificial Sequence: Synthetic oligonucleotide
  source 1..21: mol_type = other DNA
agccaaagcaacagcttcctc

SEQ ID NO: 40280 - DNA, 21 bp, synthetic construct
  misc_feature 1..21: note = Description of Artificial Sequence: Synthetic oligonucleotide
  source 1..21: mol_type = other DNA
agtgatggtggtggtaggatg

SEQ ID NO: 40281 - DNA, 21 bp, synthetic construct
  misc_feature 1..21: note = Description of Artificial Sequence: Synthetic oligonucleotide
  source 1..21: mol_type = other DNA
agagtcgccaccagcgtcagc

SEQ ID NO: 40282 - DNA, 21 bp, synthetic construct
  misc_feature 1..21: note = Description of Artificial Sequence: Synthetic oligonucleotide
  source 1..21: mol_type = other DNA
agactcgcccaaagcggcctc

SEQ ID NO: 40283 - DNA, 21 bp, synthetic construct
  misc_feature 1..21: note = Description of Artificial Sequence: Synthetic oligonucleotide
  source 1..21: mol_type = other DNA
agcgtcgccgacaccagactc

SEQ ID NO: 40284 - DNA, 21 bp, synthetic construct
  misc_feature 1..21: note = Description of Artificial Sequence: Synthetic oligonucleotide
  source 1..21: mol_type = other DNA
aatgctaatgtgcagactcgg

SEQ ID NO: 40285 - DNA, 21 bp, synthetic construct
  misc_feature 1..21: note = Description of Artificial Sequence: Synthetic oligonucleotide
  source 1..21: mol_type = other DNA
tacagcggcgccagcggcaga

SEQ ID NO: 40286 - DNA, 21 bp, synthetic construct
  misc_feature 1..21: note = Description of Artificial Sequence: Synthetic oligonucleotide
  source 1..21: mol_type = other DNA
tctcggcagcctcttatgacg

SEQ ID NO: 40287 - DNA, 21 bp, synthetic construct
  misc_feature 1..21: note = Description of Artificial Sequence: Synthetic oligonucleotide
  source 1..21: mol_type = other DNA
caccacagcaccctccaaacc

SEQ ID NO: 40288 - DNA, 21 bp, synthetic construct
  misc_feature 1..21: note = Description of Artificial Sequence: Synthetic oligonucleotide
  source 1..21: mol_type = other DNA
accgtcaccaacgccgccaga

SEQ ID NO: 40289 - DNA, 21 bp, synthetic construct
  misc_feature 1..21: note = Description of Artificial Sequence: Synthetic oligonucleotide
  source 1..21: mol_type = other DNA
agcgtcaacagccaccacggc

SEQ ID NO: 40290 - DNA, 21 bp, synthetic construct
  misc_feature 1..21: note = Description of Artificial Sequence: Synthetic oligonucleotide
  source 1..21: mol_type = other DNA
ggggatctgaatcctccttct

SEQ ID NO: 40291 - DNA, 21 bp, synthetic construct
  misc_feature 1..21: note = Description of Artificial Sequence: Synthetic oligonucleotide
  source 1..21: mol_type = other DNA
aattctcatagtgggcatcgt

SEQ ID NO: 40292 - DNA, 21 bp, synthetic construct
  misc_feature 1..21: note = Description of Artificial Sequence: Synthetic oligonucleotide
  source 1..21: mol_type = other DNA
cctggtgctgatccgaatctt

SEQ ID NO: 40293 - DNA, 21 bp, synthetic construct
  misc_feature 1..21: note = Description of Artificial Sequence: Synthetic oligonucleotide
  source 1..21: mol_type = other DNA
catgcgaataataagctgatg

SEQ ID NO: 40294 - DNA, 21 bp, synthetic construct
  misc_feature 1..21: note = Description of Artificial Sequence: Synthetic oligonucleotide
  source 1..21: mol_type = other DNA
tatggttctcctgtgcatcag

SEQ ID NO: 40295 - DNA, 21 bp, synthetic construct
  misc_feature 1..21: note = Description of Artificial Sequence: Synthetic oligonucleotide
  source 1..21: mol_type = other DNA
gttagttcgaatgctagtatg

SEQ ID NO: 40296 - DNA, 21 bp, synthetic construct
  misc_feature 1..21: note = Description of Artificial Sequence: Synthetic oligonucleotide
  source 1..21: mol_type = other DNA
gggtttcatggtcagggttcg

SEQ ID NO: 40297 - DNA, 21 bp, synthetic construct
  misc_feature 1..21: note = Description of Artificial Sequence: Synthetic oligonucleotide
  source 1..21: mol_type = other DNA
agtctgactcggactttgggt

SEQ ID NO: 40298 - DNA, 21 bp, synthetic construct
  misc_feature 1..21: note = Description of Artificial Sequence: Synthetic oligonucleotide
  source 1..21: mol_type = other DNA
ctcagaagcgacagatgggac

SEQ ID NO: 40299 - DNA, 21 bp, synthetic construct
  misc_feature 1..21: note = Description of Artificial Sequence: Synthetic oligonucleotide
  source 1..21: mol_type = other DNA
actcagcggcctgctcagatg

SEQ ID NO: 40300 - DNA, 21 bp, synthetic construct
  misc_feature 1..21: note = Description of Artificial Sequence: Synthetic oligonucleotide
  source 1..21: mol_type = other DNA
ctggcgagtacttattctggt

SEQ ID NO: 40301 - DNA, 21 bp, synthetic construct
  misc_feature 1..21: note = Description of Artificial Sequence: Synthetic oligonucleotide
  source 1..21: mol_type = other DNA
ttcgccctcagcaacagcacc

SEQ ID NO: 40302 - DNA, 21 bp, synthetic construct
  misc_feature 1..21: note = Description of Artificial Sequence: Synthetic oligonucleotide
  source 1..21: mol_type = other DNA
gactacagcagcgacagcagc

SEQ ID NO: 40303 - DNA, 21 bp, synthetic construct
  misc_feature 1..21: note = Description of Artificial Sequence: Synthetic oligonucleotide
  source 1..21: mol_type = other DNA
gcctaccccaccaccggcagc

SEQ ID NO: 40304 - DNA, 21 bp, synthetic construct
  misc_feature 1..21: note = Description of Artificial Sequence: Synthetic oligonucleotide
  source 1..21: mol_type = other DNA
agaaacgtcagccacctcgaa

SEQ ID NO: 40305 - DNA, 21 bp, synthetic construct
  misc_feature 1..21: note = Description of Artificial Sequence: Synthetic oligonucleotide
  source 1..21: mol_type = other DNA
tctacggtgggtcatatgaat

SEQ ID NO: 40306 - DNA, 21 bp, synthetic construct
  misc_feature 1..21: note = Description of Artificial Sequence: Synthetic oligonucleotide
  source 1..21: mol_type = other DNA
gtcgaagccagacccacctgc

SEQ ID NO: 40307 - DNA, 21 bp, synthetic construct
  misc_feature 1..21: note = Description of Artificial Sequence: Synthetic oligonucleotide
  source 1..21: mol_type = other DNA
gaagtccaaagcagcagaaga

SEQ ID NO: 40308 - DNA, 21 bp, synthetic construct
  misc_feature 1..21: note = Description of Artificial Sequence: Synthetic oligonucleotide
  source 1..21: mol_type = other DNA
catagtcgtgattcgcctcat

SEQ ID NO: 40309 - DNA, 21 bp, synthetic construct
  misc_feature 1..21: note = Description of Artificial Sequence: Synthetic oligonucleotide
  source 1..21: mol_type = other DNA
cccgtcgtcggcaaaatgagc

SEQ ID NO: 40310 - DNA, 21 bp, synthetic construct
  misc_feature 1..21: note = Description of Artificial Sequence: Synthetic oligonucleotide
  source 1..21: mol_type = other DNA
agcgccgccagcaacggcaga

SEQ ID NO: 40311 - DNA, 21 bp, synthetic construct
  misc_feature 1..21: note = Description of Artificial Sequence: Synthetic oligonucleotide
  source 1..21: mol_type = other DNA
cgtactaatgctagtctttcg

SEQ ID NO: 40312 - DNA, 21 bp, synthetic construct
  misc_feature 1..21: note = Description of Artificial Sequence: Synthetic oligonucleotide
  source 1..21: mol_type = other DNA
ggggagccgactaggtatggg

SEQ ID NO: 40313 - DNA, 21 bp, synthetic construct
  misc_feature 1..21: note = Description of Artificial Sequence: Synthetic oligonucleotide
  source 1..21: mol_type = other DNA
gatattagtgttcggccgggt

SEQ ID NO: 40314 - DNA, 21 bp, synthetic construct
  misc_feature 1..21: note = Description of Artificial Sequence: Synthetic oligonucleotide
  source 1..21: mol_type = other DNA
caggcgcatacgcctccgacg

SEQ ID NO: 40315 - DNA, 21 bp, synthetic construct
  misc_feature 1..21: note = Description of Artificial Sequence: Synthetic oligonucleotide
  source 1..21: mol_type = other DNA
cctacgttgggtacgactaag

SEQ ID NO: 40316 - DNA, 21 bp, synthetic construct
  misc_feature 1..21: note = Description of Artificial Sequence: Synthetic oligonucleotide
  source 1..21: mol_type = other DNA
aacctcagcggcagcagatac

SEQ ID NO: 40317 - DNA, 21 bp, synthetic construct
  misc_feature 1..21: note = Description of Artificial Sequence: Synthetic oligonucleotide
  source 1..21: mol_type = other DNA
caggcgtatactaatgcggat

SEQ ID NO: 40318 - DNA, 21 bp, synthetic construct
  misc_feature 1..21: note = Description of Artificial Sequence: Synthetic oligonucleotide
  source 1..21: mol_type = other DNA
cacacccccgacgtcggcaaa

SEQ ID NO: 40319 - DNA, 21 bp, synthetic construct
  misc_feature 1..21: note = Description of Artificial Sequence: Synthetic oligonucleotide
  source 1..21: mol_type = other DNA
gtcaccagagtcgccggcaac

SEQ ID NO: 40320 - DNA, 21 bp, synthetic construct
  misc_feature 1..21: note = Description of Artificial Sequence: Synthetic oligonucleotide
  source 1..21: mol_type = other DNA
acgacgagtcatatgctgaag

SEQ ID NO: 40321 - DNA, 21 bp, synthetic construct
  misc_feature 1..21: note = Description of Artificial Sequence: Synthetic oligonucleotide
  source 1..21: mol_type = other DNA
ggcgcccccgactggagcaac

SEQ ID NO: 40322 - DNA, 21 bp, synthetic construct
  misc_feature 1..21: note = Description of Artificial Sequence: Synthetic oligonucleotide
  source 1..21: mol_type = other DNA
aacagcagaacccactacacc

SEQ ID NO: 40323 - DNA, 21 bp, synthetic construct
  misc_feature 1..21: note = Description of Artificial Sequence: Synthetic oligonucleotide
  source 1..21: mol_type = other DNA
gagagtgctcggattggttct

SEQ ID NO: 40324 - DNA, 21 bp, synthetic construct
  misc_feature 1..21: note = Description of Artificial Sequence: Synthetic oligonucleotide
  source 1..21: mol_type = other DNA
ttccccagcgtcagcaccacc

SEQ ID NO: 40325 - DNA, 21 bp, synthetic construct
  misc_feature 1..21: note = Description of Artificial Sequence: Synthetic oligonucleotide
  source 1..21: mol_type = other DNA
tcgtataagggtgcgctgtcg

SEQ ID NO: 40326 - DNA, 21 bp, synthetic construct
  misc_feature 1..21: note = Description of Artificial Sequence: Synthetic oligonucleotide
  source 1..21: mol_type = other DNA
ggttctggtggggatcgtaat

SEQ ID NO: 40327 - DNA, 21 bp, synthetic construct
  misc_feature 1..21: note = Description of Artificial Sequence: Synthetic oligonucleotide
  source 1..21: mol_type = other DNA
aacagcagaatcagccccagc

SEQ ID NO: 40328 - DNA, 21 bp, synthetic construct
  misc_feature 1..21: note = Description of Artificial Sequence: Synthetic oligonucleotide
  source 1..21: mol_type = other DNA
gcttttgggactacgttgagg

SEQ ID NO: 40329 - DNA, 21 bp, synthetic construct
  misc_feature 1..21: note = Description of Artificial Sequence: Synthetic oligonucleotide
  source 1..21: mol_type = other DNA
cccagaaacaccggcaacacc

SEQ ID NO: 40330 - DNA, 21 bp, synthetic construct
  misc_feature 1..21: note = Description of Artificial Sequence: Synthetic oligonucleotide
  source 1..21: mol_type = other DNA
tttaatcgtgatcggattggg

SEQ ID NO: 40331 - DNA, 21 bp, synthetic construct
  misc_feature 1..21: note = Description of Artificial Sequence: Synthetic oligonucleotide
  source 1..21: mol_type = other DNA
tctaggtctcatgcgatgact

SEQ ID NO: 40332 - DNA, 21 bp, synthetic construct
  misc_feature 1..21: note = Description of Artificial Sequence: Synthetic oligonucleotide
  source 1..21: mol_type = other DNA
tgtagtctgggtaaggttcag

SEQ ID NO: 40333 - DNA, 21 bp, synthetic construct
  misc_feature 1..21: note = Description of Artificial Sequence: Synthetic oligonucleotide
  source 1..21: mol_type = other DNA
cggaatttgcatatgcatgag

SEQ ID NO: 40334 - DNA, 21 bp, synthetic construct
  misc_feature 1..21: note = Description of Artificial Sequence: Synthetic oligonucleotide
  source 1..21: mol_type = other DNA
catcagagtgcggtgcagggg

SEQ ID NO: 40335 - DNA, 21 bp, synthetic construct
  misc_feature 1..21: note = Description of Artificial Sequence: Synthetic oligonucleotide
  source 1..21: mol_type = other DNA
cccatcagcgaaagcaccaga

SEQ ID NO: 40336 - DNA, 21 bp, synthetic construct
  misc_feature 1..21: note = Description of Artificial Sequence: Synthetic oligonucleotide
  source 1..21: mol_type = other DNA
gtgtcgggtcatggtgttcgg

SEQ ID NO: 40337 - DNA, 21 bp, synthetic construct
  misc_feature 1..21: note = Description of Artificial Sequence: Synthetic oligonucleotide
  source 1..21: mol_type = other DNA
agactcgacaaccaccccagc

SEQ ID NO: 40338 - DNA, 21 bp, synthetic construct
  misc_feature 1..21: note = Description of Artificial Sequence: Synthetic oligonucleotide
  source 1..21: mol_type = other DNA
ttccccaccagccccaccaga

SEQ ID NO: 40339 - DNA, 21 bp, synthetic construct
  misc_feature 1..21: note = Description of Artificial Sequence: Synthetic oligonucleotide
  source 1..21: mol_type = other DNA
tatacgaatagtagtacttgt

SEQ ID NO: 40340 - DNA, 21 bp, synthetic construct
  misc_feature 1..21: note = Description of Artificial Sequence: Synthetic oligonucleotide
  source 1..21: mol_type = other DNA
ggcgaaggcaccaaaagacac

SEQ ID NO: 40341 - DNA, 21 bp, synthetic construct
  misc_feature 1..21: note = Description of Artificial Sequence: Synthetic oligonucleotide
  source 1..21: mol_type = other DNA
gtcagaaccaacctcgacaaa

SEQ ID NO: 40342 - DNA, 21 bp, synthetic construct
  misc_feature 1..21: note = Description of Artificial Sequence: Synthetic oligonucleotide
  source 1..21: mol_type = other DNA
gtcagagacggcgtcagaagc

SEQ ID NO: 40343 - DNA, 21 bp, synthetic construct
  misc_feature 1..21: note = Description of Artificial Sequence: Synthetic oligonucleotide
  source 1..21: mol_type = other DNA
aacagcggcacccacttcaaa

SEQ ID NO: 40344 - DNA, 21 bp, synthetic construct
  misc_feature 1..21: note = Description of Artificial Sequence: Synthetic oligonucleotide
  source 1..21: mol_type = other DNA
ggtaattctacggcgaatagg

SEQ ID NO: 40345 - DNA, 21 bp, synthetic construct
  misc_feature 1..21: note = Description of Artificial Sequence: Synthetic oligonucleotide
  source 1..21: mol_type = other DNA
tatacggctgcgtcgcatcgg

SEQ ID NO: 40346 - DNA, 21 bp, synthetic construct
  misc_feature 1..21: note = Description of Artificial Sequence: Synthetic oligonucleotide
  source 1..21: mol_type = other DNA
agcatgaacagcaaacccacc

SEQ ID NO: 40347 - DNA, 21 bp, synthetic construct
  misc_feature 1..21: note = Description of Artificial Sequence: Synthetic oligonucleotide
  source 1..21: mol_type = other DNA
cccagaagccccagcaaactc

SEQ ID NO: 40348 - DNA, 21 bp, synthetic construct
  misc_feature 1..21: note = Description of Artificial Sequence: Synthetic oligonucleotide
  source 1..21: mol_type = other DNA
gggcgtgtggtgtctatgcag

SEQ ID NO: 40349 - DNA, 21 bp, synthetic construct
  misc_feature 1..21: note = Description of Artificial Sequence: Synthetic oligonucleotide
  source 1..21: mol_type = other DNA
tatcctagtccgacggttact

SEQ ID NO: 40350 - DNA, 21 bp, synthetic construct
  misc_feature 1..21: note = Description of Artificial Sequence: Synthetic oligonucleotide
  source 1..21: mol_type = other DNA
tcgggggttgggcatcgtggg

SEQ ID NO: 40351 - DNA, 21 bp, synthetic construct
  misc_feature 1..21: note = Description of Artificial Sequence: Synthetic oligonucleotide
  source 1..21: mol_type = other DNA
agcaccagcaaccacagagtc

SEQ ID NO: 40352 - DNA, 21 bp, synthetic construct
  misc_feature 1..21: note = Description of Artificial Sequence: Synthetic oligonucleotide
  source 1..21: mol_type = other DNA
ggcagaaccgccgaaggcaga

SEQ ID NO: 40353 - DNA, 21 bp, synthetic construct
  misc_feature 1..21: note = Description of Artificial Sequence: Synthetic oligonucleotide
  source 1..21: mol_type = other DNA
gacaacgtcccccacctcgcc

SEQ ID NO: 40354 - DNA, 21 bp, synthetic construct
  misc_feature 1..21: note = Description of Artificial Sequence: Synthetic oligonucleotide
  source 1..21: mol_type = other DNA
aataattctactggggtggct

SEQ ID NO: 40355 - DNA, 21 bp, synthetic construct
  misc_feature 1..21: note = Description of Artificial Sequence: Synthetic oligonucleotide
  source 1..21: mol_type = other DNA
tgtgggtttaagaatccgtct

SEQ ID NO: 40356 - DNA, 21 bp, synthetic construct
  misc_feature 1..21: note = Description of Artificial Sequence: Synthetic oligonucleotide
  source 1..21: mol_type = other DNA
ctcaccagcagaagcatggcc

SEQ ID NO: 40357 - DNA, 21 bp, synthetic construct
  misc_feature 1..21: note = Description of Artificial Sequence: Synthetic oligonucleotide
  source 1..21: mol_type = other DNA
agtagggagaagaataatgcg

SEQ ID NO: 40358 - DNA, 21 bp, synthetic construct
  misc_feature 1..21: note = Description of Artificial Sequence: Synthetic oligonucleotide
  source 1..21: mol_type = other DNA
tcgaataataaggctaatgtt

SEQ ID NO: 40359 - DNA, 21 bp, synthetic construct
  misc_feature 1..21: note = Description of Artificial Sequence: Synthetic oligonucleotide
  source 1..21: mol_type = other DNA
cccatgaccaacctcggcacc

SEQ ID NO: 40360 - DNA, 21 bp, synthetic construct
  misc_feature 1..21: note = Description of Artificial Sequence: Synthetic oligonucleotide
  source 1..21: mol_type = other DNA
attattgcgccgcagactcag

SEQ ID NO: 40361 - DNA, 21 bp, synthetic construct
  misc_feature 1..21: note = Description of Artificial Sequence: Synthetic oligonucleotide
  source 1..21: mol_type = other DNA
gttagtcagaatgggtctatg

SEQ ID NO: 40362 - DNA, 21 bp, synthetic construct
  misc_feature 1..21: note = Description of Artificial Sequence: Synthetic oligonucleotide
  source 1..21: mol_type = other DNA
tcgaatcagcgtggtgagggt

SEQ ID NO: 40363 - DNA, 21 bp, synthetic construct
  misc_feature 1..21: note = Description of Artificial Sequence: Synthetic oligonucleotide
  source 1..21: mol_type = other DNA
ccccacaacaccagcaaaggc

SEQ ID NO: 40364 - DNA, 21 bp, synthetic construct
  misc_feature 1..21: note = Description of Artificial Sequence: Synthetic oligonucleotide
  source 1..21: mol_type = other DNA
gccttcggcgaaatcagacaa

SEQ ID NO: 40365 - DNA, 21 bp, synthetic construct
  misc_feature 1..21: note = Description of Artificial Sequence: Synthetic oligonucleotide
  source 1..21: mol_type = other DNA
taccacgtcagcaaaccccaa

SEQ ID NO: 40366 - DNA, 21 bp, synthetic construct
  misc_feature 1..21: note = Description of Artificial Sequence: Synthetic oligonucleotide
  source 1..21: mol_type = other DNA
aaaaacatgggcagcagcaga

SEQ ID NO: 40367 - DNA, 21 bp, synthetic construct
  misc_feature 1..21: note = Description of Artificial Sequence: Synthetic oligonucleotide
  source 1..21: mol_type = other DNA
gaggggatgggtgttcatggg

SEQ ID NO: 40368 - DNA, 21 bp, synthetic construct
  misc_feature 1..21: note = Description of Artificial Sequence: Synthetic oligonucleotide
  source 1..21: mol_type = other DNA
tctaagtttagtgagactaag

SEQ ID NO: 40369 - DNA, 21 bp, synthetic construct
  misc_feature 1..21: note = Description of Artificial Sequence: Synthetic oligonucleotide
  source 1..21: mol_type = other DNA
tacgtccccagaagcagcctc

SEQ ID NO: 40370 - DNA, 21 bp, synthetic construct
  misc_feature 1..21: note = Description of Artificial Sequence: Synthetic oligonucleotide
  source 1..21: mol_type = other DNA
aattctaagtcggttctttcg

SEQ ID NO: 40371 - DNA, 21 bp, synthetic construct
  misc_feature 1..21: note = Description of Artificial Sequence: Synthetic oligonucleotide
  source 1..21: mol_type = other DNA
tgtttgggttcgaataatttg

SEQ ID NO: 40372 - DNA, 21 bp, synthetic construct
  misc_feature 1..21: note = Description of Artificial Sequence: Synthetic oligonucleotide
  source 1..21: mol_type = other DNA
agcaactacaaaagcagcaac

SEQ ID NO: 40373 - DNA, 21 bp, synthetic construct
  misc_feature 1..21: note = Description of Artificial Sequence: Synthetic oligonucleotide
  source 1..21: mol_type = other DNA
gggctggttcctaatttgatt

SEQ ID NO: 40374 - DNA, 21 bp, synthetic construct
  misc_feature 1..21: note = Description of Artificial Sequence: Synthetic oligonucleotide
  source 1..21: mol_type = other DNA
tgcagcttcggcaaccaactc

SEQ ID NO: 40375 - DNA, 21 bp, synthetic construct
  misc_feature 1..21: note = Description of Artificial Sequence: Synthetic oligonucleotide
  source 1..21: mol_type = other DNA
ggcagagcccaactcgccagc

SEQ ID NO: 40376 - DNA, 21 bp, synthetic construct
  misc_feature 1..21: note = Description of Artificial Sequence: Synthetic oligonucleotide
  source 1..21: mol_type = other DNA
agcagcagaaccggcagcatc

SEQ ID NO: 40377 - DNA, 21 bp, synthetic construct
  misc_feature 1..21: note = Description of Artificial Sequence: Synthetic oligonucleotide
  source 1..21: mol_type = other DNA
caacccaccaccagcgccctc

SEQ ID NO: 40378 - DNA, 21 bp, synthetic construct
  misc_feature 1..21: note = Description of Artificial Sequence: Synthetic oligonucleotide
  source 1..21: mol_type = other DNA
ctcggcggcggcaccctcaga

SEQ ID NO: 40379 - DNA, 21 bp, synthetic construct
  misc_feature 1..21: note = Description of Artificial Sequence: Synthetic oligonucleotide
  source 1..21: mol_type = other DNA
agtggtacttcgtcgtataag

SEQ ID NO: 40380 - DNA, 21 bp, synthetic construct
  misc_feature 1..21: note = Description of Artificial Sequence: Synthetic oligonucleotide
  source 1..21: mol_type = other DNA
acgttgggtgggcggaatctg

SEQ ID NO: 40381 - DNA, 21 bp, synthetic construct
  misc_feature 1..21: note = Description of Artificial Sequence: Synthetic oligonucleotide
  source 1..21: mol_type = other DNA
actggtgtgacgggtcctctt

SEQ ID NO: 40382 - DNA, 21 bp, synthetic construct
  misc_feature 1..21: note = Description of Artificial Sequence: Synthetic oligonucleotide
  source 1..21: mol_type = other DNA
ctcaccgccgtcagccccaaa

SEQ ID NO: 40383 - DNA, 21 bp, synthetic construct
  misc_feature 1..21: note = Description of Artificial Sequence: Synthetic oligonucleotide
  source 1..21: mol_type = other DNA
tatgatgctagtgcgcgggct

SEQ ID NO: 40384 - DNA, 21 bp, synthetic construct
  misc_feature 1..21: note = Description of Artificial Sequence: Synthetic oligonucleotide
  source 1..21: mol_type = other DNA
ggcgtcagcgccagcctcgcc

SEQ ID NO: 40385 - DNA, 21 bp, synthetic construct
  misc_feature 1..21: note = Description of Artificial Sequence: Synthetic oligonucleotide
  source 1..21: mol_type = other DNA
agcgccagcaacaccagcgtc

SEQ ID NO: 40386 - DNA, 21 bp, synthetic construct
  misc_feature 1..21: note = Description of Artificial Sequence: Synthetic oligonucleotide
  source 1..21: mol_type = other DNA
cctgttacgttgcggggtatt

SEQ ID NO: 40387 - DNA, 21 bp, synthetic construct
  misc_feature 1..21: note = Description of Artificial Sequence: Synthetic oligonucleotide
  source 1..21: mol_type = other DNA
catcagcttaagaatagtgtg

SEQ ID NO: 40388 - DNA, 21 bp, synthetic construct
  misc_feature 1..21: note = Description of Artificial Sequence: Synthetic oligonucleotide
  source 1..21: mol_type = other DNA
acgtctaattctattcagggg

SEQ ID NO: 40389 - DNA, 21 bp, synthetic construct
  misc_feature 1..21: note = Description of Artificial Sequence: Synthetic oligonucleotide
  source 1..21: mol_type = other DNA
ccgattcctaagtatcatgat

SEQ ID NO: 40390 - DNA, 21 bp, synthetic construct
  misc_feature 1..21: note = Description of Artificial Sequence: Synthetic oligonucleotide
  source 1..21: mol_type = other DNA
aaaggccaaaacaccatcagc

SEQ ID NO: 40391 - DNA, 21 bp, synthetic construct
  misc_feature 1..21: note = Description of Artificial Sequence: Synthetic oligonucleotide
  source 1..21: mol_type = other DNA
catcctactctggtgagtaag

SEQ ID NO: 40392 - DNA, 21 bp, synthetic construct
  misc_feature 1..21: note = Description of Artificial Sequence: Synthetic oligonucleotide
  source 1..21: mol_type = other DNA
tctaggcaggctacgtcgtct

SEQ ID NO: 40393 - DNA, 21 bp, synthetic construct
  misc_feature 1..21: note = Description of Artificial Sequence: Synthetic oligonucleotide
  source 1..21: mol_type = other DNA
ggcgccagcaccgtcggcaga

SEQ ID NO: 40394 - DNA, 21 bp, synthetic construct
  misc_feature 1..21: note = Description of Artificial Sequence: Synthetic oligonucleotide
  source 1..21: mol_type = other DNA
gtccccagcagcagaagcaac

SEQ ID NO: 40395 - DNA, 21 bp, synthetic construct
  misc_feature 1..21: note = Description of Artificial Sequence: Synthetic oligonucleotide
  source 1..21: mol_type = other DNA
agtaagtctacgcatcaggcg

SEQ ID NO: 40396 - DNA, 21 bp, synthetic construct
  misc_feature 1..21: note = Description of Artificial Sequence: Synthetic oligonucleotide
  source 1..21: mol_type = other DNA
aacggttctggacagaatcga

SEQ ID NO: 40397 - DNA, 21 bp, synthetic construct
  misc_feature 1..21: note = Description of Artificial Sequence: Synthetic oligonucleotide
  source 1..21: mol_type = other DNA
agcatcgccagacccttcacc

SEQ ID NO: 40398 - DNA, 21 bp, synthetic construct
  misc_feature 1..21: note = Description of Artificial Sequence: Synthetic oligonucleotide
  source 1..21: mol_type = other DNA
actaggacggcgggggttgat

SEQ ID NO: 40399 - DNA, 21 bp, synthetic construct
  misc_feature 1..21: note = Description of Artificial Sequence: Synthetic oligonucleotide
  source 1..21: mol_type = other DNA
cctagtgattttaagcatggt

SEQ ID NO: 40400 - DNA, 21 bp, synthetic construct
  misc_feature 1..21: note = Description of Artificial Sequence: Synthetic oligonucleotide
  source 1..21: mol_type = other DNA
cctatttctactcgttctgct

SEQ ID NO: 40401 - DNA, 21 bp, synthetic construct
  misc_feature 1..21: note = Description of Artificial Sequence: Synthetic oligonucleotide
  source 1..21: mol_type = other DNA
actggtatgcagagtttgtcg

SEQ ID NO: 40402 - DNA, 21 bp, synthetic construct
  misc_feature 1..21: note = Description of Artificial Sequence: Synthetic oligonucleotide
  source 1..21: mol_type = other DNA
tcgagtccggctaatatggcg

SEQ ID NO: 40403 - DNA, 21 bp, synthetic construct
  misc_feature 1..21: note = Description of Artificial Sequence: Synthetic oligonucleotide
  source 1..21: mol_type = other DNA
ctcaaccaccacagcagcctc

SEQ ID NO: 40404 - DNA, 21 bp, synthetic construct
  misc_feature 1..21: note = Description of Artificial Sequence: Synthetic oligonucleotide
  source 1..21: mol_type = other DNA
gatcgtgttacggggaagatg

SEQ ID NO: 40405 - DNA, 21 bp, synthetic construct
  misc_feature 1..21: note = Description of Artificial Sequence: Synthetic oligonucleotide
  source 1..21: mol_type = other DNA
agcacccccatgagcaacaga

SEQ ID NO: 40406 - DNA, 21 bp, synthetic construct
  misc_feature 1..21: note = Description of Artificial Sequence: Synthetic oligonucleotide
  source 1..21: mol_type = other DNA
tatacggcttcagctcttcgg

SEQ ID NO: 40407 - DNA, 21 bp, synthetic construct
  misc_feature 1..21: note = Description of Artificial Sequence: Synthetic oligonucleotide
  source 1..21: mol_type = other DNA
attaatctttctcattctacg

SEQ ID NO: 40408 - DNA, 21 bp, synthetic construct
  misc_feature 1..21: note = Description of Artificial Sequence: Synthetic oligonucleotide
  source 1..21: mol_type = other DNA
gtgaatttgaggtctaatacg

SEQ ID NO: 40409 - DNA, 21 bp, synthetic construct
  misc_feature 1..21: note = Description of Artificial Sequence: Synthetic oligonucleotide
  source 1..21: mol_type = other DNA
ttgcatcgggctggggatgct

SEQ ID NO: 40410 - DNA, 21 bp, synthetic construct
  misc_feature 1..21: note = Description of Artificial Sequence: Synthetic oligonucleotide
  source 1..21: mol_type = other DNA
caacacagcagcgccagagtc

SEQ ID NO: 40411 - DNA, 21 bp, synthetic construct
  misc_feature 1..21: note = Description of Artificial Sequence: Synthetic oligonucleotide
  source 1..21: mol_type = other DNA
agagtcagcgaccaactcagc

SEQ ID NO: 40412 - DNA, 21 bp, synthetic construct
  misc_feature 1..21: note = Description of Artificial Sequence: Synthetic oligonucleotide
  source 1..21: mol_type = other DNA
cgggatcttggtcatgataat

SEQ ID NO: 40413 - DNA, 21 bp, synthetic construct
  misc_feature 1..21: note = Description of Artificial Sequence: Synthetic oligonucleotide
  source 1..21: mol_type = other DNA
cctcctgtgacgactcgtcct

SEQ ID NO: 40414 - DNA, 21 bp, synthetic construct
  misc_feature 1..21: note = Description of Artificial Sequence: Synthetic oligonucleotide
  source 1..21: mol_type = other DNA
ggcaccaaaagcgccttcagc

SEQ ID NO: 40415 - DNA, 21 bp, synthetic construct
  misc_feature 1..21: note = Description of Artificial Sequence: Synthetic oligonucleotide
  source 1..21: mol_type = other DNA
gatcgtaatcatgcggctgag

SEQ ID NO: 40416 - DNA, 21 bp, synthetic construct
  misc_feature 1..21: note = Description of Artificial Sequence: Synthetic oligonucleotide
  source 1..21: mol_type = other DNA
catcgtacgtctactgttagt

SEQ ID NO: 40417 - DNA, 21 bp, synthetic construct
  misc_feature 1..21: note = Description of Artificial Sequence: Synthetic oligonucleotide
  source 1..21: mol_type = other DNA
aatcggatgactccggttatg

SEQ ID NO: 40418 - DNA, 21 bp, synthetic construct
  misc_feature 1..21: note = Description of Artificial Sequence: Synthetic oligonucleotide
  source 1..21: mol_type = other DNA
agcggcccccaacccgtcgcc

SEQ ID NO: 40419 - DNA, 21 bp, synthetic construct
  misc_feature 1..21: note = Description of Artificial Sequence: Synthetic oligonucleotide
  source 1..21: mol_type = other DNA
tgtcggcctactccttcgctg

SEQ ID NO: 40420 - DNA, 21 bp, synthetic construct
  misc_feature 1..21: note = Description of Artificial Sequence: Synthetic oligonucleotide
  source 1..21: mol_type = other DNA
agcagagaaagcaccagcgcc

SEQ ID NO: 40421 - DNA, 21 bp, synthetic construct
  misc_feature 1..21: note = Description of Artificial Sequence: Synthetic oligonucleotide
  source 1..21: mol_type = other DNA
cacatcagacccagcatgagc

SEQ ID NO: 40422 - DNA, 21 bp, synthetic construct
  misc_feature 1..21: note = Description of Artificial Sequence: Synthetic oligonucleotide
  source 1..21: mol_type = other DNA
gctggttctcataagggtgtg

SEQ ID NO: 40423 - DNA, 21 bp, synthetic construct
  misc_feature 1..21: note = Description of Artificial Sequence: Synthetic oligonucleotide
  source 1..21: mol_type = other DNA
gacagccaccccagaagcatc

SEQ ID NO: 40424 - DNA, 21 bp, synthetic construct
  misc_feature 1..21: note = Description of Artificial Sequence: Synthetic oligonucleotide
  source 1..21: mol_type = other DNA
agcggcagcaacaccatcggc

SEQ ID NO: 40425 - DNA, 21 bp, synthetic construct
  misc_feature 1..21: note = Description of Artificial Sequence: Synthetic oligonucleotide
  source 1..21: mol_type = other DNA
ggtgttgaggcgatgcggaat

SEQ ID NO: 40426 - DNA, 21 bp, synthetic construct
  misc_feature 1..21: note = Description of Artificial Sequence: Synthetic oligonucleotide
  source 1..21: mol_type = other DNA
actaatcgtgtgggttatggt

SEQ ID NO: 40427 - DNA, 21 bp, synthetic construct
  misc_feature 1..21: note = Description of Artificial Sequence: Synthetic oligonucleotide
  source 1..21: mol_type = other DNA
cataagaatggtgggcgggat

SEQ ID NO: 40428 - DNA, 21 bp, synthetic construct
  misc_feature 1..21: note = Description of Artificial Sequence: Synthetic oligonucleotide
  source 1..21: mol_type = other DNA
tatctgaagacgggtgataat

SEQ ID NO: 40429 - DNA, 21 bp, synthetic construct
  misc_feature 1..21: note = Description of Artificial Sequence: Synthetic oligonucleotide
  source 1..21: mol_type = other DNA
actgggactgattcgcggtcg

SEQ ID NO: 40430 - DNA, 21 bp, synthetic construct
  misc_feature 1..21: note = Description of Artificial Sequence: Synthetic oligonucleotide
  source 1..21: mol_type = other DNA
cctccttctgcggttatgggt

SEQ ID NO: 40431 - DNA, 21 bp, synthetic construct
  misc_feature 1..21: note = Description of Artificial Sequence: Synthetic oligonucleotide
  source 1..21: mol_type = other DNA
tgcatgaccagagacaccagc

SEQ ID NO: 40432 - DNA, 21 bp, synthetic construct
  misc_feature 1..21: note = Description of Artificial Sequence: Synthetic oligonucleotide
  source 1..21: mol_type = other DNA
cctacggcgagtccgtcgact

SEQ ID NO: 40433 - DNA, 21 bp, synthetic construct
  misc_feature 1..21: note = Description of Artificial Sequence: Synthetic oligonucleotide
  source 1..21: mol_type = other DNA
caggatagttctattcggaat

SEQ ID NO: 40434 - DNA, 21 bp, synthetic construct
  misc_feature 1..21: note = Description of Artificial Sequence: Synthetic oligonucleotide
  source 1..21: mol_type = other DNA
gttccggttactgggctgagt

SEQ ID NO: 40435 - DNA, 21 bp, synthetic construct
  misc_feature 1..21: note = Description of Artificial Sequence: Synthetic oligonucleotide
  source 1..21: mol_type = other DNA
tatcctggggctttgcagaag

SEQ ID NO: 40436 - DNA, 21 bp, synthetic construct
  misc_feature 1..21: note = Description of Artificial Sequence: Synthetic oligonucleotide
  source 1..21: mol_type = other DNA
cacgccagcagagaacccctc

SEQ ID NO: 40437 - DNA, 21 bp, synthetic construct
  misc_feature 1..21: note = Description of Artificial Sequence: Synthetic oligonucleotide
  source 1..21: mol_type = other DNA
ggcagacacacccccaccgcc

SEQ ID NO: 40438 - DNA, 21 bp, synthetic construct
  misc_feature 1..21: note = Description of Artificial Sequence: Synthetic oligonucleotide
  source 1..21: mol_type = other DNA
cctcggtctcagccggtgccg

SEQ ID NO: 40439 - DNA, 21 bp, synthetic construct
  misc_feature 1..21: note = Description of Artificial Sequence: Synthetic oligonucleotide
  source 1..21: mol_type = other DNA
tatcagccttcgttgtctaag

SEQ ID NO: 40440 - DNA, 21 bp, synthetic construct
  misc_feature 1..21: note = Description of Artificial Sequence: Synthetic oligonucleotide
  source 1..21: mol_type = other DNA
agacaaacccaccaacccagc

SEQ ID NO: 40441 - DNA, 21 bp, synthetic construct
  misc_feature 1..21: note = Description of Artificial Sequence: Synthetic oligonucleotide
  source 1..21: mol_type = other DNA
caacacaacaccctcggccaa

SEQ ID NO: 40442 - DNA, 21 bp, synthetic construct
  misc_feature 1..21: note = Description of Artificial Sequence: Synthetic oligonucleotide
  source 1..21: mol_type = other DNA
tggggcaacgaactcagaaga

SEQ ID NO: 40443 - DNA, 21 bp, synthetic construct
  misc_feature 1..21: note = Description of Artificial Sequence: Synthetic oligonucleotide
  source 1..21: mol_type = other DNA
gtgcatagtacggttcatagt

SEQ ID NO: 40444 - DNA, 21 bp, synthetic construct
  misc_feature 1..21: note = Description of Artificial Sequence: Synthetic oligonucleotide
  source 1..21: mol_type = other DNA
aagcttactgggcagcggagt

SEQ ID NO: 40445 - DNA, 21 bp, synthetic construct
  misc_feature 1..21: note = Description of Artificial Sequence: Synthetic oligonucleotide
  source 1..21: mol_type = other DNA
gagagtgttcgttcttcgagt

SEQ ID NO: 40446 - DNA, 21 bp, synthetic construct
  misc_feature 1..21: note = Description of Artificial Sequence: Synthetic oligonucleotide
  source 1..21: mol_type = other DNA
tctcctcatggtgctggttat

SEQ ID NO: 40447 - DNA, 21 bp, synthetic construct
  misc_feature 1..21: note = Description of Artificial Sequence: Synthetic oligonucleotide
  source 1..21: mol_type = other DNA
agcgccgccaaacccggcccc

SEQ ID NO: 40448 - DNA, 21 bp, synthetic construct
  misc_feature 1..21: note = Description of Artificial Sequence: Synthetic oligonucleotide
  source 1..21: mol_type = other DNA
gacaacatgcacagaagcaac

SEQ ID NO: 40449 - DNA, 21 bp, synthetic construct
  misc_feature 1..21: note = Description of Artificial Sequence: Synthetic oligonucleotide
  source 1..21: mol_type = other DNA
agtgggggtcggggtacttcg

SEQ ID NO: 40450 - DNA, 21 bp, synthetic construct
  misc_feature 1..21: note = Description of Artificial Sequence: Synthetic oligonucleotide
  source 1..21: mol_type = other DNA
aaaaccagcaccccctacagc

SEQ ID NO: 40451 - DNA, 21 bp, synthetic construct
  misc_feature 1..21: note = Description of Artificial Sequence: Synthetic oligonucleotide
  source 1..21: mol_type = other DNA
aatactcataatattcagggg

SEQ ID NO: 40452 - DNA, 21 bp, synthetic construct
  misc_feature 1..21: note = Description of Artificial Sequence: Synthetic oligonucleotide
  source 1..21: mol_type = other DNA
accggttctgaacagaatcaa

SEQ ID NO: 40453 - DNA, 21 bp, synthetic construct
  misc_feature 1..21: note = Description of Artificial Sequence: Synthetic oligonucleotide
  source 1..21: mol_type = other DNA
gccgccaccatgagaaacagc

SEQ ID NO: 40454 - DNA, 21 bp, synthetic construct
  misc_feature 1..21: note = Description of Artificial Sequence: Synthetic oligonucleotide
  source 1..21: mol_type = other DNA
ggtattaatcttagtcctggt

SEQ ID NO: 40455 - DNA, 21 bp, synthetic construct
  misc_feature 1..21: note = Description of Artificial Sequence: Synthetic oligonucleotide
  source 1..21: mol_type = other DNA
catacgcatgatgtgggtaag

SEQ ID NO: 40456 - DNA, 21 bp, synthetic construct
  misc_feature 1..21: note = Description of Artificial Sequence: Synthetic oligonucleotide
  source 1..21: mol_type = other DNA
tctggtagtcatcgtactcag

SEQ ID NO: 40457 - DNA, 21 bp, synthetic construct
  misc_feature 1..21: note = Description of Artificial Sequence: Synthetic oligonucleotide
  source 1..21: mol_type = other DNA
gtcagcagccacagaaacatg

SEQ ID NO: 40458 - DNA, 21 bp, synthetic construct
  misc_feature 1..21: note = Description of Artificial Sequence: Synthetic oligonucleotide
  source 1..21: mol_type = other DNA
gggcgtactactaaggctttt

SEQ ID NO: 40459 - DNA, 21 bp, synthetic construct
  misc_feature 1..21: note = Description of Artificial Sequence: Synthetic oligonucleotide
  source 1..21: mol_type = other DNA
caaatgctcggcagaggcggc

SEQ ID NO: 40460 - DNA, 21 bp, synthetic construct
  misc_feature 1..21: note = Description of Artificial Sequence: Synthetic oligonucleotide
  source 1..21: mol_type = other DNA
gccaccctcagcagcggcgaa

SEQ ID NO: 40461 - DNA, 21 bp, synthetic construct
  misc_feature 1..21: note = Description of Artificial Sequence: Synthetic oligonucleotide
  source 1..21: mol_type = other DNA
aatggtcgtcaggggcatacg

SEQ ID NO: 40462 - DNA, 21 bp, synthetic construct
  misc_feature 1..21: note = Description of Artificial Sequence: Synthetic oligonucleotide
  source 1..21: mol_type = other DNA
agttcgttgcagccttttact

SEQ ID NO: 40463 - DNA, 21 bp, synthetic construct
  misc_feature 1..21: note = Description of Artificial Sequence: Synthetic oligonucleotide
  source 1..21: mol_type = other DNA
gcttctcggtctacgaatcct

SEQ ID NO: 40464 - DNA, 21 bp, synthetic construct
  misc_feature 1..21: note = Description of Artificial Sequence: Synthetic oligonucleotide
  source 1..21: mol_type = other DNA
atgcccaacagcagcagcctc

SEQ ID NO: 40465 - DNA, 21 bp, synthetic construct
  misc_feature 1..21: note = Description of Artificial Sequence: Synthetic oligonucleotide
  source 1..21: mol_type = other DNA
cggaataataatcgtcttgag

SEQ ID NO: 40466 - DNA, 21 bp, synthetic construct
  misc_feature 1..21: note = Description of Artificial Sequence: Synthetic oligonucleotide
  source 1..21: mol_type = other DNA
aacagcgccgccctcaacagc

SEQ ID NO: 40467 - DNA, 21 bp, synthetic construct
  misc_feature 1..21: note = Description of Artificial Sequence: Synthetic oligonucleotide
  source 1..21: mol_type = other DNA
agcagcctccccagatacaac

SEQ ID NO: 40468 - DNA, 21 bp, synthetic construct
  misc_feature 1..21: note = Description of Artificial Sequence: Synthetic oligonucleotide
  source 1..21: mol_type = other DNA
cctcttcaggattcgcttcgt

SEQ ID NO: 40469 - DNA, 21 bp, synthetic construct
  misc_feature 1..21: note = Description of Artificial Sequence: Synthetic oligonucleotide
  source 1..21: mol_type = other DNA
gatcgtcttgatcattctagg

SEQ ID NO: 40470 - DNA, 21 bp, synthetic construct
  misc_feature 1..21: note = Description of Artificial Sequence: Synthetic oligonucleotide
  source 1..21: mol_type = other DNA
tcgattcagagggctgctgct

SEQ ID NO: 40471 - DNA, 21 bp, synthetic construct
  misc_feature 1..21: note = Description of Artificial Sequence: Synthetic oligonucleotide
  source 1..21: mol_type = other DNA
aggggtaatgggacgcatggt

SEQ ID NO: 40472 - DNA, 21 bp, synthetic construct
  misc_feature 1..21: note = Description of Artificial Sequence: Synthetic oligonucleotide
  source 1..21: mol_type = other DNA
agggtgaatcttaatgagttg

SEQ ID NO: 40473 - DNA, 21 bp, synthetic construct
  misc_feature 1..21: note = Description of Artificial Sequence: Synthetic oligonucleotide
  source 1..21: mol_type = other DNA
agccaacccggcagcaaccac

SEQ ID NO: 40474 - DNA, 21 bp, synthetic construct
  misc_feature 1..21: note = Description of Artificial Sequence: Synthetic oligonucleotide
  source 1..21: mol_type = other DNA
gacagcagacaaaccagcctc

SEQ ID NO: 40475 - DNA, 21 bp, synthetic construct
  misc_feature 1..21: note = Description of Artificial Sequence: Synthetic oligonucleotide
  source 1..21: mol_type = other DNA
agaatgaccagaggcgccgac

SEQ ID NO: 40476 - DNA, 21 bp, synthetic construct
  misc_feature 1..21: note = Description of Artificial Sequence: Synthetic oligonucleotide
  source 1..21: mol_type = other DNA
agtagtatttctcgtacttcg

SEQ ID NO: 40477 - DNA, 21 bp, synthetic construct
  misc_feature 1..21: note = Description of Artificial Sequence: Synthetic oligonucleotide
  source 1..21: mol_type = other DNA
gcgtctcttcgggagtcgcgt

SEQ ID NO: 40478 - DNA, 21 bp, synthetic construct
  misc_feature 1..21: note = Description of Artificial Sequence: Synthetic oligonucleotide
  source 1..21: mol_type = other DNA
cctagggatttgcgtgcgtcg

SEQ ID NO: 40479 - DNA, 21 bp, synthetic construct
  misc_feature 1..21: note = Description of Artificial Sequence: Synthetic oligonucleotide
  source 1..21: mol_type = other DNA
cagggtagttcgttgcgtact

SEQ ID NO: 40480 - DNA, 21 bp, synthetic construct
  misc_feature 1..21: note = Description of Artificial Sequence: Synthetic oligonucleotide
  source 1..21: mol_type = other DNA
agtctttatactaatgcggtt

SEQ ID NO: 40481 - DNA, 21 bp, synthetic construct
  misc_feature 1..21: note = Description of Artificial Sequence: Synthetic oligonucleotide
  source 1..21: mol_type = other DNA
gggtcgaatctggggcagatg

SEQ ID NO: 40482 - DNA, 21 bp, synthetic construct
  misc_feature 1..21: note = Description of Artificial Sequence: Synthetic oligonucleotide
  source 1..21: mol_type = other DNA
ctcaccaccagcaacatcggc

SEQ ID NO: 40483 - DNA, 21 bp, synthetic construct
  misc_feature 1..21: note = Description of Artificial Sequence: Synthetic oligonucleotide
  source 1..21: mol_type = other DNA
agtgcggggacttcggttggt

SEQ ID NO: 40484 - DNA, 21 bp, synthetic construct
  misc_feature 1..21: note = Description of Artificial Sequence: Synthetic oligonucleotide
  source 1..21: mol_type = other DNA
ctttcttctgggcggggtggt

SEQ ID NO: 40485 - DNA, 21 bp, synthetic construct
  misc_feature 1..21: note = Description of Artificial Sequence: Synthetic oligonucleotide
  source 1..21: mol_type = other DNA
ctttcgccgacttctactaat

SEQ ID NO: 40486 - DNA, 21 bp, synthetic construct
  misc_feature 1..21: note = Description of Artificial Sequence: Synthetic oligonucleotide
  source 1..21: mol_type = other DNA
attggtactagtccgatgaag

SEQ ID NO: 40487 - DNA, 21 bp, synthetic construct
  misc_feature 1..21: note = Description of Artificial Sequence: Synthetic oligonucleotide
  source 1..21: mol_type = other DNA
ggcgacagcaaaagcacctgg

SEQ ID NO: 40488 - DNA, 21 bp, synthetic construct
  misc_feature 1..21: note = Description of Artificial Sequence: Synthetic oligonucleotide
  source 1..21: mol_type = other DNA
caggtgacgggtgcgagtcat

SEQ ID NO: 40489 - DNA, 21 bp, synthetic construct
  misc_feature 1..21: note = Description of Artificial Sequence: Synthetic oligonucleotide
  source 1..21: mol_type = other DNA
tcgctggagaggcttaagact

SEQ ID NO: 40490 - DNA, 21 bp, synthetic construct
  misc_feature 1..21: note = Description of Artificial Sequence: Synthetic oligonucleotide
  source 1..21: mol_type = other DNA
accctccccagagtccccgcc

SEQ ID NO: 40491 - DNA, 21 bp, synthetic construct
  misc_feature 1..21: note = Description of Artificial Sequence: Synthetic oligonucleotide
  source 1..21: mol_type = other DNA
ccttctgtggcgaatgttatg

SEQ ID NO: 40492 - DNA, 21 bp, synthetic construct
  misc_feature 1..21: note = Description of Artificial Sequence: Synthetic oligonucleotide
  source 1..21: mol_type = other DNA
ggtacggctcgtacgttgcat

SEQ ID NO: 40493 - DNA, 21 bp, synthetic construct
  misc_feature 1..21: note = Description of Artificial Sequence: Synthetic oligonucleotide
  source 1..21: mol_type = other DNA
acttcggtgtcgaatcgtacg

SEQ ID NO: 40494 - DNA, 21 bp, synthetic construct
  misc_feature 1..21: note = Description of Artificial Sequence: Synthetic oligonucleotide
  source 1..21: mol_type = other DNA
cacatcggcagcccccacacc

SEQ ID NO: 40495 - DNA, 21 bp, synthetic construct
  misc_feature 1..21: note = Description of Artificial Sequence: Synthetic oligonucleotide
  source 1..21: mol_type = other DNA
ctcatgcacagcgccgtcagc

SEQ ID NO: 40496 - DNA, 21 bp, synthetic construct
  misc_feature 1..21: note = Description of Artificial Sequence: Synthetic oligonucleotide
  source 1..21: mol_type = other DNA
agtcgttctggtggtcaggtt

SEQ ID NO: 40497 - DNA, 21 bp, synthetic construct
  misc_feature 1..21: note = Description of Artificial Sequence: Synthetic oligonucleotide
  source 1..21: mol_type = other DNA
ttcaacatccaaggcatcggc

SEQ ID NO: 40498 - DNA, 21 bp, synthetic construct
  misc_feature 1..21: note = Description of Artificial Sequence: Synthetic oligonucleotide
  source 1..21: mol_type = other DNA
cctttggctgcgggtggtacg

SEQ ID NO: 40499 - DNA, 21 bp, synthetic construct
  misc_feature 1..21: note = Description of Artificial Sequence: Synthetic oligonucleotide
  source 1..21: mol_type = other DNA
acttcgctttctccttctgtt

SEQ ID NO: 40500 - DNA, 21 bp, synthetic construct
  misc_feature 1..21: note = Description of Artificial Sequence: Synthetic oligonucleotide
  source 1..21: mol_type = other DNA
gtgagtacgcaggctatttcg

SEQ ID NO: 40501 - DNA, 21 bp, synthetic construct
  misc_feature 1..21: note = Description of Artificial Sequence: Synthetic oligonucleotide
  source 1..21: mol_type = other DNA
acgaggcctaatggtggtggt

SEQ ID NO: 40502 - DNA, 21 bp, synthetic construct
  misc_feature 1..21: note = Description of Artificial Sequence: Synthetic oligonucleotide
  source 1..21: mol_type = other DNA
gtgggttctagtaagggttgt

SEQ ID NO: 40503 - DNA, 21 bp, synthetic construct
  misc_feature 1..21: note = Description of Artificial Sequence: Synthetic oligonucleotide
  source 1..21: mol_type = other DNA
gtgacgtatccgccggcgggg

SEQ ID NO: 40504 - DNA, 21 bp, synthetic construct
  misc_feature 1..21: note = Description of Artificial Sequence: Synthetic oligonucleotide
  source 1..21: mol_type = other DNA
tacagcagcagaagcggcccc

SEQ ID NO: 40505 - DNA, 21 bp, synthetic construct
  misc_feature 1..21: note = Description of Artificial Sequence: Synthetic oligonucleotide
  source 1..21: mol_type = other DNA
aggattcaggcgcctgggcgt

SEQ ID NO: 40506 - DNA, 21 bp, synthetic construct
  misc_feature 1..21: note = Description of Artificial Sequence: Synthetic oligonucleotide
  source 1..21: mol_type = other DNA
atgtcttataaggctcatgat

SEQ ID NO: 40507 - DNA, 21 bp, synthetic construct
  misc_feature 1..21: note = Description of Artificial Sequence: Synthetic oligonucleotide
  source 1..21: mol_type = other DNA
tggtctttggggcataatgat

SEQ ID NO: 40508 - DNA, 21 bp, synthetic construct
  misc_feature 1..21: note = Description of Artificial Sequence: Synthetic oligonucleotide
  source 1..21: mol_type = other DNA
gttccgacttctcgtcttaat

SEQ ID NO: 40509 - DNA, 21 bp, synthetic construct
  misc_feature 1..21: note = Description of Artificial Sequence: Synthetic oligonucleotide
  source 1..21: mol_type = other DNA
agatgcgaagccaccaccgcc

SEQ ID NO: 40510 - DNA, 21 bp, synthetic construct
  misc_feature 1..21: note = Description of Artificial Sequence: Synthetic oligonucleotide
  source 1..21: mol_type = other DNA
acccaaagcagcaccagaagc

SEQ ID NO: 40511 - DNA, 21 bp, synthetic construct
  misc_feature 1..21: note = Description of Artificial Sequence: Synthetic oligonucleotide
  source 1..21: mol_type = other DNA
ctcaccggcaccgcccaccaa

SEQ ID NO: 40512 - DNA, 21 bp, synthetic construct
  misc_feature 1..21: note = Description of Artificial Sequence: Synthetic oligonucleotide
  source 1..21: mol_type = other DNA
acgtcttcggctaatactgtg

SEQ ID NO: 40513 - DNA, 21 bp, synthetic construct
  misc_feature 1..21: note = Description of Artificial Sequence: Synthetic oligonucleotide
  source 1..21: mol_type = other DNA
agcgccagcggcaaaccctgc

SEQ ID NO: 40514 - DNA, 21 bp, synthetic construct
  misc_feature 1..21: note = Description of Artificial Sequence: Synthetic oligonucleotide
  source 1..21: mol_type = other DNA
cggtctgatcctactcgtggg

SEQ ID NO: 40515 - DNA, 21 bp, synthetic construct
  misc_feature 1..21: note = Description of Artificial Sequence: Synthetic oligonucleotide
  source 1..21: mol_type = other DNA
aagactcctcagctgtctcag

SEQ ID NO: 40516 - DNA, 21 bp, synthetic construct
  misc_feature 1..21: note = Description of Artificial Sequence: Synthetic oligonucleotide
  source 1..21: mol_type = other DNA
agcgccaccagcgtccccatc

SEQ ID NO: 40517 - DNA, 21 bp, synthetic construct
  misc_feature 1..21: note = Description of Artificial Sequence: Synthetic oligonucleotide
  source 1..21: mol_type = other DNA
atgaagtcgaaggagcgtccg

SEQ ID NO: 40518 - DNA, 21 bp, synthetic construct
  misc_feature 1..21: note = Description of Artificial Sequence: Synthetic oligonucleotide
  source 1..21: mol_type = other DNA
tttagtgcgagtggggcgagg

SEQ ID NO: 40519 - DNA, 21 bp, synthetic construct
  misc_feature 1..21: note = Description of Artificial Sequence: Synthetic oligonucleotide
  source 1..21: mol_type = other DNA
tacaacaccctccccgccaga

SEQ ID NO: 40520 - DNA, 21 bp, synthetic construct
  misc_feature 1..21: note = Description of Artificial Sequence: Synthetic oligonucleotide
  source 1..21: mol_type = other DNA
tatagtggttctgcggggcag

SEQ ID NO: 40521 - DNA, 21 bp, synthetic construct
  misc_feature 1..21: note = Description of Artificial Sequence: Synthetic oligonucleotide
  source 1..21: mol_type = other DNA
tcgtttactgctgatcggtct

SEQ ID NO: 40522 - DNA, 21 bp, synthetic construct
  misc_feature 1..21: note = Description of Artificial Sequence: Synthetic oligonucleotide
  source 1..21: mol_type = other DNA
gctccgagtcatgcttctctt

SEQ ID NO: 40523 - DNA, 21 bp, synthetic construct
  misc_feature 1..21: note = Description of Artificial Sequence: Synthetic oligonucleotide
  source 1..21: mol_type = other DNA
gccaaaaccaacctcagcagc

SEQ ID NO: 40524 - DNA, 21 bp, synthetic construct
  misc_feature 1..21: note = Description of Artificial Sequence: Synthetic oligonucleotide
  source 1..21: mol_type = other DNA
tcgtcgcattctgatacgcgt

SEQ ID NO: 40525 - DNA, 21 bp, synthetic construct
  misc_feature 1..21: note = Description of Artificial Sequence: Synthetic oligonucleotide
  source 1..21: mol_type = other DNA
acgcgggctcagcattcgggt

SEQ ID NO: 40526 - DNA, 21 bp, synthetic construct
  misc_feature 1..21: note = Description of Artificial Sequence: Synthetic oligonucleotide
  source 1..21: mol_type = other DNA
ggggttccggctgggcatact

SEQ ID NO: 40527 - DNA, 21 bp, synthetic construct
  misc_feature 1..21: note = Description of Artificial Sequence: Synthetic oligonucleotide
  source 1..21: mol_type = other DNA
gatactagtcgtgctccgggt

SEQ ID NO: 40528 - DNA, 21 bp, synthetic construct
  misc_feature 1..21: note = Description of Artificial Sequence: Synthetic oligonucleotide
  source 1..21: mol_type = other DNA
catgttaaggcgaatgggtct

SEQ ID NO: 40529 - DNA, 21 bp, synthetic construct
  misc_feature 1..21: note = Description of Artificial Sequence: Synthetic oligonucleotide
  source 1..21: mol_type = other DNA
agcagagacagcggcggcgcc

SEQ ID NO: 40530 - DNA, 21 bp, synthetic construct
  misc_feature 1..21: note = Description of Artificial Sequence: Synthetic oligonucleotide
  source 1..21: mol_type = other DNA
ggtgttacttctagtgggcct

SEQ ID NO: 40531 - DNA, 21 bp, synthetic construct
  misc_feature 1..21: note = Description of Artificial Sequence: Synthetic oligonucleotide
  source 1..21: mol_type = other DNA
agcagcatcaacaccgccgcc

SEQ ID NO: 40532 - DNA, 21 bp, synthetic construct
  misc_feature 1..21: note = Description of Artificial Sequence: Synthetic oligonucleotide
  source 1..21: mol_type = other DNA
agtggtatggcttcggttacg

SEQ ID NO: 40533 - DNA, 21 bp, synthetic construct
  misc_feature 1..21: note = Description of Artificial Sequence: Synthetic oligonucleotide
  source 1..21: mol_type = other DNA
ggcggcacccccacccacaga

SEQ ID NO: 40534 - DNA, 21 bp, synthetic construct
  misc_feature 1..21: note = Description of Artificial Sequence: Synthetic oligonucleotide
  source 1..21: mol_type = other DNA
cacagagaagccagactcctc

SEQ ID NO: 40535 - DNA, 21 bp, synthetic construct
  misc_feature 1..21: note = Description of Artificial Sequence: Synthetic oligonucleotide
  source 1..21: mol_type = other DNA
aacagcagaagccaccacgaa

SEQ ID NO: 40536 - DNA, 21 bp, synthetic construct
  misc_feature 1..21: note = Description of Artificial Sequence: Synthetic oligonucleotide
  source 1..21: mol_type = other DNA
ggtccgaggaattcgctgaat

SEQ ID NO: 40537 - DNA, 21 bp, synthetic construct
  misc_feature 1..21: note = Description of Artificial Sequence: Synthetic oligonucleotide
  source 1..21: mol_type = other DNA
accagaagccaagactaccaa

SEQ ID NO: 40538 - DNA, 21 bp, synthetic construct
  misc_feature 1..21: note = Description of Artificial Sequence: Synthetic oligonucleotide
  source 1..21: mol_type = other DNA
agaggcctcgacagcatcaac

SEQ ID NO: 40539 - DNA, 21 bp, synthetic construct
  misc_feature 1..21: note = Description of Artificial Sequence: Synthetic oligonucleotide
  source 1..21: mol_type = other DNA
agcgaccaccaaagcgtcaga

SEQ ID NO: 40540 - DNA, 21 bp, synthetic construct
  misc_feature 1..21: note = Description of Artificial Sequence: Synthetic oligonucleotide
  source 1..21: mol_type = other DNA
ccctacgcccaaggcagcttc

SEQ ID NO: 40541 - DNA, 21 bp, synthetic construct
  misc_feature 1..21: note = Description of Artificial Sequence: Synthetic oligonucleotide
  source 1..21: mol_type = other DNA
cccaccagcatcggcagagac

SEQ ID NO: 40542 - DNA, 21 bp, synthetic construct
  misc_feature 1..21: note = Description of Artificial Sequence: Synthetic oligonucleotide
  source 1..21: mol_type = other DNA
tcgttgagtcttgtgaagggt

SEQ ID NO: 40543 - DNA, 21 bp, synthetic construct
  misc_feature 1..21: note = Description of Artificial Sequence: Synthetic oligonucleotide
  source 1..21: mol_type = other DNA
cttgagaggaatggtttgaag

SEQ ID NO: 40544 - DNA, 21 bp, synthetic construct
  misc_feature 1..21: note = Description of Artificial Sequence: Synthetic oligonucleotide
  source 1..21: mol_type = other DNA
accgccttcagcaccaacaga

SEQ ID NO: 40545 - DNA, 21 bp, synthetic construct
  misc_feature 1..21: note = Description of Artificial Sequence: Synthetic oligonucleotide
  source 1..21: mol_type = other DNA
gatcatcgtaatatttcttcg

SEQ ID NO: 40546 - DNA, 21 bp, synthetic construct
  misc_feature 1..21: note = Description of Artificial Sequence: Synthetic oligonucleotide
  source 1..21: mol_type = other DNA
gttcggcagtcgcaggttatg

SEQ ID NO: 40547 - DNA, 21 bp, synthetic construct
  misc_feature 1..21: note = Description of Artificial Sequence: Synthetic oligonucleotide
  source 1..21: mol_type = other DNA
cgtgatcggggtgctgagcat

SEQ ID NO: 40548 - DNA, 21 bp, synthetic construct
  misc_feature 1..21: note = Description of Artificial Sequence: Synthetic oligonucleotide
  source 1..21: mol_type = other DNA
tcgaggggggatggtgtgacg

SEQ ID NO: 40549 - DNA, 21 bp, synthetic construct
  misc_feature 1..21: note = Description of Artificial Sequence: Synthetic oligonucleotide
  source 1..21: mol_type = other DNA
gatacgattacttcgaggggt

SEQ ID NO: 40550 - DNA, 21 bp, synthetic construct
  misc_feature 1..21: note = Description of Artificial Sequence: Synthetic oligonucleotide
  source 1..21: mol_type = other DNA
cccaacggccacgaagtcctc

SEQ ID NO: 40551 - DNA, 21 bp, synthetic construct
  misc_feature 1..21: note = Description of Artificial Sequence: Synthetic oligonucleotide
  source 1..21: mol_type = other DNA
tctgggaatagtcataatggg

SEQ ID NO: 40552 - DNA, 21 bp, synthetic construct
  misc_feature 1..21: note = Description of Artificial Sequence: Synthetic oligonucleotide
  source 1..21: mol_type = other DNA
aacaccgacaccagcgccgtc

SEQ ID NO: 40553 - DNA, 21 bp, synthetic construct
  misc_feature 1..21: note = Description of Artificial Sequence: Synthetic oligonucleotide
  source 1..21: mol_type = other DNA
ccccgtgatcgtgattatcat

SEQ ID NO: 40554 - DNA, 21 bp, synthetic construct
  misc_feature 1..21: note = Description of Artificial Sequence: Synthetic oligonucleotide
  source 1..21: mol_type = other DNA
ccggcgaatcagcttaggtct

SEQ ID NO: 40555 - DNA, 21 bp, synthetic construct
  misc_feature 1..21: note = Description of Artificial Sequence: Synthetic oligonucleotide
  source 1..21: mol_type = other DNA
aatattcatttggctggtact

SEQ ID NO: 40556 - DNA, 21 bp, synthetic construct
  misc_feature 1..21: note = Description of Artificial Sequence: Synthetic oligonucleotide
  source 1..21: mol_type = other DNA
atgagtgggagtggtacggag

SEQ ID NO: 40557 - DNA, 21 bp, synthetic construct
  misc_feature 1..21: note = Description of Artificial Sequence: Synthetic oligonucleotide
  source 1..21: mol_type = other DNA
cttaggggtacggttcctaag

SEQ ID NO: 40558 - DNA, 21 bp, synthetic construct
  misc_feature 1..21: note = Description of Artificial Sequence: Synthetic oligonucleotide
  source 1..21: mol_type = other DNA
actggttctagttcttcgcag

SEQ ID NO: 40559 - DNA, 21 bp, synthetic construct
  misc_feature 1..21: note = Description of Artificial Sequence: Synthetic oligonucleotide
  source 1..21: mol_type = other DNA
agcgccagagacagagccagc

SEQ ID NO: 40560 - DNA, 21 bp, synthetic construct
  misc_feature 1..21: note = Description of Artificial Sequence: Synthetic oligonucleotide
  source 1..21: mol_type = other DNA
agcaacagcagaatgggcacc

SEQ ID NO: 40561 - DNA, 21 bp, synthetic construct
  misc_feature 1..21: note = Description of Artificial Sequence: Synthetic oligonucleotide
  source 1..21: mol_type = other DNA
tacggcagcgacaaaagcatc

SEQ ID NO: 40562 - DNA, 21 bp, synthetic construct
  misc_feature 1..21: note = Description of Artificial Sequence: Synthetic oligonucleotide
  source 1..21: mol_type = other DNA
ggcctcagcaaaacctaccac

SEQ ID NO: 40563 - DNA, 21 bp, synthetic construct
  misc_feature 1..21: note = Description of Artificial Sequence: Synthetic oligonucleotide
  source 1..21: mol_type = other DNA
gttgctcggcgtgatgctttg

SEQ ID NO: 40564 - DNA, 21 bp, synthetic construct
  misc_feature 1..21: note = Description of Artificial Sequence: Synthetic oligonucleotide
  source 1..21: mol_type = other DNA
accggcccccacaccagcaga

SEQ ID NO: 40565 - DNA, 21 bp, synthetic construct
  misc_feature 1..21: note = Description of Artificial Sequence: Synthetic oligonucleotide
  source 1..21: mol_type = other DNA
ttgatgccttctagttcttcg

SEQ ID NO: 40566 - DNA, 21 bp, synthetic construct
  misc_feature 1..21: note = Description of Artificial Sequence: Synthetic oligonucleotide
  source 1..21: mol_type = other DNA
ctcccccccgccagccccaga

SEQ ID NO: 40567 - DNA, 21 bp, synthetic construct
  misc_feature 1..21: note = Description of Artificial Sequence: Synthetic oligonucleotide
  source 1..21: mol_type = other DNA
atggtcagccacacccacggc

SEQ ID NO: 40568 - DNA, 21 bp, synthetic construct
  misc_feature 1..21: note = Description of Artificial Sequence: Synthetic oligonucleotide
  source 1..21: mol_type = other DNA
agctacggccccaccccccaa

SEQ ID NO: 40569 - DNA, 21 bp, synthetic construct
  misc_feature 1..21: note = Description of Artificial Sequence: Synthetic oligonucleotide
  source 1..21: mol_type = other DNA
acggggccgggggcgcatgcg

SEQ ID NO: 40570 - DNA, 21 bp, synthetic construct
  misc_feature 1..21: note = Description of Artificial Sequence: Synthetic oligonucleotide
  source 1..21: mol_type = other DNA
gacagcagacaagccatgagc

SEQ ID NO: 40571 - DNA, 21 bp, synthetic construct
  misc_feature 1..21: note = Description of Artificial Sequence: Synthetic oligonucleotide
  source 1..21: mol_type = other DNA
agcagcatgagccaccaaaaa

SEQ ID NO: 40572 - DNA, 21 bp, synthetic construct
  misc_feature 1..21: note = Description of Artificial Sequence: Synthetic oligonucleotide
  source 1..21: mol_type = other DNA
ccttctcttcggagtatgacg

SEQ ID NO: 40573 - DNA, 21 bp, synthetic construct
  misc_feature 1..21: note = Description of Artificial Sequence: Synthetic oligonucleotide
  source 1..21: mol_type = other DNA
actaagtttaagactacgctg

SEQ ID NO: 40574 - DNA, 21 bp, synthetic construct
  misc_feature 1..21: note = Description of Artificial Sequence: Synthetic oligonucleotide
  source 1..21: mol_type = other DNA
gtcagcgccagcaacagcctc

SEQ ID NO: 40575 - DNA, 21 bp, synthetic construct
  misc_feature 1..21: note = Description of Artificial Sequence: Synthetic oligonucleotide
  source 1..21: mol_type = other DNA
gcgtcgacgggtcctaatgct

SEQ ID NO: 40576 - DNA, 21 bp, synthetic construct
  misc_feature 1..21: note = Description of Artificial Sequence: Synthetic oligonucleotide
  source 1..21: mol_type = other DNA
ggtagtaggtcttctacgact

SEQ ID NO: 40577 - DNA, 21 bp, synthetic construct
  misc_feature 1..21: note = Description of Artificial Sequence: Synthetic oligonucleotide
  source 1..21: mol_type = other DNA
agcggcggcacccccggcaga

SEQ ID NO: 40578 - DNA, 21 bp, synthetic construct
  misc_feature 1..21: note = Description of Artificial Sequence: Synthetic oligonucleotide
  source 1..21: mol_type = other DNA
gtgcatcaggctggggctaat

SEQ ID NO: 40579 - DNA, 21 bp, synthetic construct
  misc_feature 1..21: note = Description of Artificial Sequence: Synthetic oligonucleotide
  source 1..21: mol_type = other DNA
cccgaaatcagcgccagcaga

SEQ ID NO: 40580 - DNA, 21 bp, synthetic construct
  misc_feature 1..21: note = Description of Artificial Sequence: Synthetic oligonucleotide
  source 1..21: mol_type = other DNA
cacagacacgtcaaaagcgaa

SEQ ID NO: 40581 - DNA, 21 bp, synthetic construct
  misc_feature 1..21: note = Description of Artificial Sequence: Synthetic oligonucleotide
  source 1..21: mol_type = other DNA
cttggggctgggcagagggag

SEQ ID NO: 40582 - DNA, 21 bp, synthetic construct
  misc_feature 1..21: note = Description of Artificial Sequence: Synthetic oligonucleotide
  source 1..21: mol_type = other DNA
catatggctgcttcgacgggt

SEQ ID NO: 40583 - DNA, 21 bp, synthetic construct
  misc_feature 1..21: note = Description of Artificial Sequence: Synthetic oligonucleotide
  source 1..21: mol_type = other DNA
ggtaaggctggggcggggggt

SEQ ID NO: 40584 - DNA, 21 bp, synthetic construct
  misc_feature 1..21: note = Description of Artificial Sequence: Synthetic oligonucleotide
  source 1..21: mol_type = other DNA
tcttctagggtgtctcattct

SEQ ID NO: 40585 - DNA, 21 bp, synthetic construct
  misc_feature 1..21: note = Description of Artificial Sequence: Synthetic oligonucleotide
  source 1..21: mol_type = other DNA
acgggtgcgggtggttattgt

SEQ ID NO: 40586 - DNA, 21 bp, synthetic construct
  misc_feature 1..21: note = Description of Artificial Sequence: Synthetic oligonucleotide
  source 1..21: mol_type = other DNA
gccgtcctcaaccccagagtc

SEQ ID NO: 40587 - DNA, 21 bp, synthetic construct
  misc_feature 1..21: note = Description of Artificial Sequence: Synthetic oligonucleotide
  source 1..21: mol_type = other DNA
gttgcttcttcggctcatgtt

SEQ ID NO: 40588 - DNA, 21 bp, synthetic construct
  misc_feature 1..21: note = Description of Artificial Sequence: Synthetic oligonucleotide
  source 1..21: mol_type = other DNA
tcgtataagaatactggtgtt

SEQ ID NO: 40589 - DNA, 21 bp, synthetic construct
  misc_feature 1..21: note = Description of Artificial Sequence: Synthetic oligonucleotide
  source 1..21: mol_type = other DNA
ggcaacagcaacaccctcgcc

SEQ ID NO: 40590 - DNA, 21 bp, synthetic construct
  misc_feature 1..21: note = Description of Artificial Sequence: Synthetic oligonucleotide
  source 1..21: mol_type = other DNA
acccaaggccacaaagccctc

SEQ ID NO: 40591 - DNA, 21 bp, synthetic construct
  misc_feature 1..21: note = Description of Artificial Sequence: Synthetic oligonucleotide
  source 1..21: mol_type = other DNA
actattggtcctcctagtacg

SEQ ID NO: 40592 - DNA, 21 bp, synthetic construct
  misc_feature 1..21: note = Description of Artificial Sequence: Synthetic oligonucleotide
  source 1..21: mol_type = other DNA
tgctacggcgacagacacaac

SEQ ID NO: 40593 - DNA, 21 bp, synthetic construct
  misc_feature 1..21: note = Description of Artificial Sequence: Synthetic oligonucleotide
  source 1..21: mol_type = other DNA
cccgccagcagaatccccagc

SEQ ID NO: 40594 - DNA, 21 bp, synthetic construct
  misc_feature 1..21: note = Description of Artificial Sequence: Synthetic oligonucleotide
  source 1..21: mol_type = other DNA
agtgcgcataggtctggtgtg

SEQ ID NO: 40595 - DNA, 21 bp, synthetic construct
  misc_feature 1..21: note = Description of Artificial Sequence: Synthetic oligonucleotide
  source 1..21: mol_type = other DNA
caacccaacagagccgacaac

SEQ ID NO: 40596 - DNA, 21 bp, synthetic construct
  misc_feature 1..21: note = Description of Artificial Sequence: Synthetic oligonucleotide
  source 1..21: mol_type = other DNA
cgtcctgcttcgacgcatacg

SEQ ID NO: 40597 - DNA, 21 bp, synthetic construct
  misc_feature 1..21: note = Description of Artificial Sequence: Synthetic oligonucleotide
  source 1..21: mol_type = other DNA
agaggcaccggcatcggcagc

SEQ ID NO: 40598 - DNA, 21 bp, synthetic construct
  misc_feature 1..21: note = Description of Artificial Sequence: Synthetic oligonucleotide
  source 1..21: mol_type = other DNA
cagactagttctcgtgagatg

SEQ ID NO: 40599 - DNA, 21 bp, synthetic construct
  misc_feature 1..21: note = Description of Artificial Sequence: Synthetic oligonucleotide
  source 1..21: mol_type = other DNA
ggcaaagccggcgaaggcggc

SEQ ID NO: 40600 - DNA, 21 bp, synthetic construct
  misc_feature 1..21: note = Description of Artificial Sequence: Synthetic oligonucleotide
  source 1..21: mol_type = other DNA
tctagtcctgtgagtgctgtt

SEQ ID NO: 40601 - DNA, 21 bp, synthetic construct
  misc_feature 1..21: note = Description of Artificial Sequence: Synthetic oligonucleotide
  source 1..21: mol_type = other DNA
cccaccaccaccgccaaaccc

SEQ ID NO: 40602 - DNA, 21 bp, synthetic construct
  misc_feature 1..21: note = Description of Artificial Sequence: Synthetic oligonucleotide
  source 1..21: mol_type = other DNA
tctagtactaataggcctacg

SEQ ID NO: 40603 - DNA, 21 bp, synthetic construct
  misc_feature 1..21: note = Description of Artificial Sequence: Synthetic oligonucleotide
  source 1..21: mol_type = other DNA
caaatcggcagcctcagcggc

SEQ ID NO: 40604 - DNA, 21 bp, synthetic construct
  misc_feature 1..21: note = Description of Artificial Sequence: Synthetic oligonucleotide
  source 1..21: mol_type = other DNA
ggcatgcacgtcagcaacccc

SEQ ID NO: 40605 - DNA, 21 bp, synthetic construct
  misc_feature 1..21: note = Description of Artificial Sequence: Synthetic oligonucleotide
  source 1..21: mol_type = other DNA
aacttcggcccccaagccgac

SEQ ID NO: 40606 - DNA, 21 bp, synthetic construct
  misc_feature 1..21: note = Description of Artificial Sequence: Synthetic oligonucleotide
  source 1..21: mol_type = other DNA
aacagaaccagccccgtcagc

SEQ ID NO: 40607 - DNA, 21 bp, synthetic construct
  misc_feature 1..21: note = Description of Artificial Sequence: Synthetic oligonucleotide
  source 1..21: mol_type = other DNA
catacgcatgtgagtaatcgg

SEQ ID NO: 40608 - DNA, 21 bp, synthetic construct
  misc_feature 1..21: note = Description of Artificial Sequence: Synthetic oligonucleotide
  source 1..21: mol_type = other DNA
tctccggcttatgatacgagg

SEQ ID NO: 40609 - DNA, 21 bp, synthetic construct
  misc_feature 1..21: note = Description of Artificial Sequence: Synthetic oligonucleotide
  source 1..21: mol_type = other DNA
aaactcagcaacgacaacctc

SEQ ID NO: 40610 - DNA, 21 bp, synthetic construct
  misc_feature 1..21: note = Description of Artificial Sequence: Synthetic oligonucleotide
  source 1..21: mol_type = other DNA
ggcgaactccccgacagaaga

SEQ ID NO: 40611 - DNA, 21 bp, synthetic construct
  misc_feature 1..21: note = Description of Artificial Sequence: Synthetic oligonucleotide
  source 1..21: mol_type = other DNA
tatagtcgtccgactacgact

SEQ ID NO: 40612 - DNA, 21 bp, synthetic construct
  misc_feature 1..21: note = Description of Artificial Sequence: Synthetic oligonucleotide
  source 1..21: mol_type = other DNA
agcgtcgtcgcccacggcccc

SEQ ID NO: 40613 - DNA, 21 bp, synthetic construct
  misc_feature 1..21: note = Description of Artificial Sequence: Synthetic oligonucleotide
  source 1..21: mol_type = other DNA
gcgtcgtctttgttgaatgtg

SEQ ID NO: 40614 - DNA, 21 bp, synthetic construct
  misc_feature 1..21: note = Description of Artificial Sequence: Synthetic oligonucleotide
  source 1..21: mol_type = other DNA
actcagggtgcgaggaatttg

SEQ ID NO: 40615 - DNA, 21 bp, synthetic construct
  misc_feature 1..21: note = Description of Artificial Sequence: Synthetic oligonucleotide
  source 1..21: mol_type = other DNA
gtctacagcagccccagcgcc

SEQ ID NO: 40616 - DNA, 21 bp, synthetic construct
  misc_feature 1..21: note = Description of Artificial Sequence: Synthetic oligonucleotide
  source 1..21: mol_type = other DNA
ggcgtcagcaacctcgccagc

SEQ ID NO: 40617 - DNA, 21 bp, synthetic construct
  misc_feature 1..21: note = Description of Artificial Sequence: Synthetic oligonucleotide
  source 1..21: mol_type = other DNA
atgagacccaacagcggcatg

SEQ ID NO: 40618 - DNA, 21 bp, synthetic construct
  misc_feature 1..21: note = Description of Artificial Sequence: Synthetic oligonucleotide
  source 1..21: mol_type = other DNA
tgtgcggggactagtcgtgtg

SEQ ID NO: 40619 - DNA, 21 bp, synthetic construct
  misc_feature 1..21: note = Description of Artificial Sequence: Synthetic oligonucleotide
  source 1..21: mol_type = other DNA
tgtcgtgcgggtactattatg

SEQ ID NO: 40620 - DNA, 21 bp, synthetic construct
  misc_feature 1..21: note = Description of Artificial Sequence: Synthetic oligonucleotide
  source 1..21: mol_type = other DNA
tctagggctcagtcgattccg

SEQ ID NO: 40621 - DNA, 21 bp, synthetic construct
  misc_feature 1..21: note = Description of Artificial Sequence: Synthetic oligonucleotide
  source 1..21: mol_type = other DNA
tgtcatctgcatgctactacg

SEQ ID NO: 40622 - DNA, 21 bp, synthetic construct
  misc_feature 1..21: note = Description of Artificial Sequence: Synthetic oligonucleotide
  source 1..21: mol_type = other DNA
atcagccccgtccccctcacc

SEQ ID NO: 40623 - DNA, 21 bp, synthetic construct
  misc_feature 1..21: note = Description of Artificial Sequence: Synthetic oligonucleotide
  source 1..21: mol_type = other DNA
aaaagcaacagcagcctcggc

SEQ ID NO: 40624 - DNA, 21 bp, synthetic construct
  misc_feature 1..21: note = Description of Artificial Sequence: Synthetic oligonucleotide
  source 1..21: mol_type = other DNA
agtccgaaggcgaatcgtgtt

SEQ ID NO: 40625 - DNA, 21 bp, synthetic construct
  misc_feature 1..21: note = Description of Artificial Sequence: Synthetic oligonucleotide
  source 1..21: mol_type = other DNA
acccaaagcagcagagccggc

SEQ ID NO: 40626 - DNA, 21 bp, synthetic construct
  misc_feature 1..21: note = Description of Artificial Sequence: Synthetic oligonucleotide
  source 1..21: mol_type = other DNA
aaacaccaagaattcgtcggc

SEQ ID NO: 40627 - DNA, 21 bp, synthetic construct
  misc_feature 1..21: note = Description of Artificial Sequence: Synthetic oligonucleotide
  source 1..21: mol_type = other DNA
agtagtatttctagtgcggtg

SEQ ID NO: 40628 - DNA, 21 bp, synthetic construct
  misc_feature 1..21: note = Description of Artificial Sequence: Synthetic oligonucleotide
  source 1..21: mol_type = other DNA
gccgtcgccagcagaaccaac

SEQ ID NO: 40629 - DNA, 21 bp, synthetic construct
  misc_feature 1..21: note = Description of Artificial Sequence: Synthetic oligonucleotide
  source 1..21: mol_type = other DNA
gctcattctgttactcctggg

SEQ ID NO: 40630 - DNA, 21 bp, synthetic construct
  misc_feature 1..21: note = Description of Artificial Sequence: Synthetic oligonucleotide
  source 1..21: mol_type = other DNA
ccgattagtactcatttgaag

SEQ ID NO: 40631 - DNA, 21 bp, synthetic construct
  misc_feature 1..21: note = Description of Artificial Sequence: Synthetic oligonucleotide
  source 1..21: mol_type = other DNA
caaggcctcagcaaaagcggc

SEQ ID NO: 40632 - DNA, 21 bp, synthetic construct
  misc_feature 1..21: note = Description of Artificial Sequence: Synthetic oligonucleotide
  source 1..21: mol_type = other DNA
cctaatcaggctcatcgttcg

SEQ ID NO: 40633 - DNA, 21 bp, synthetic construct
  misc_feature 1..21: note = Description of Artificial Sequence: Synthetic oligonucleotide
  source 1..21: mol_type = other DNA
gctaggggtaagccggctctg

SEQ ID NO: 40634 - DNA, 21 bp, synthetic construct
  misc_feature 1..21: note = Description of Artificial Sequence: Synthetic oligonucleotide
  source 1..21: mol_type = other DNA
cccagagccaacgcccccaga

SEQ ID NO: 40635 - DNA, 21 bp, synthetic construct
  misc_feature 1..21: note = Description of Artificial Sequence: Synthetic oligonucleotide
  source 1..21: mol_type = other DNA
tgtcctccgattactaagggg

SEQ ID NO: 40636 - DNA, 21 bp, synthetic construct
  misc_feature 1..21: note = Description of Artificial Sequence: Synthetic oligonucleotide
  source 1..21: mol_type = other DNA
gccaccaccaaagaaggcatc

SEQ ID NO: 40637 - DNA, 21 bp, synthetic construct
  misc_feature 1..21: note = Description of Artificial Sequence: Synthetic oligonucleotide
  source 1..21: mol_type = other DNA
agtagtgataatcgtgggttg

SEQ ID NO: 40638 - DNA, 21 bp, synthetic construct
  misc_feature 1..21: note = Description of Artificial Sequence: Synthetic oligonucleotide
  source 1..21: mol_type = other DNA
gccggcgacggcgtcgtcaga

SEQ ID NO: 40639 - DNA, 21 bp, synthetic construct
  misc_feature 1..21: note = Description of Artificial Sequence: Synthetic oligonucleotide
  source 1..21: mol_type = other DNA
aacgcccacaccagacccgcc

SEQ ID NO: 40640 - DNA, 21 bp, synthetic construct
  misc_feature 1..21: note = Description of Artificial Sequence: Synthetic oligonucleotide
  source 1..21: mol_type = other DNA
gctcatacttctgcgggtggg

SEQ ID NO: 40641 - DNA, 21 bp, synthetic construct
  misc_feature 1..21: note = Description of Artificial Sequence: Synthetic oligonucleotide
  source 1..21: mol_type = other DNA
catacttctactaatacgatt

SEQ ID NO: 40642 - DNA, 21 bp, synthetic construct
  misc_feature 1..21: note = Description of Artificial Sequence: Synthetic oligonucleotide
  source 1..21: mol_type = other DNA
cttaataggcctagtcttggt

SEQ ID NO: 40643 - DNA, 21 bp, synthetic construct
  misc_feature 1..21: note = Description of Artificial Sequence: Synthetic oligonucleotide
  source 1..21: mol_type = other DNA
acgtcgggtaggactacgtat

SEQ ID NO: 40644 - DNA, 21 bp, synthetic construct
  misc_feature 1..21: note = Description of Artificial Sequence: Synthetic oligonucleotide
  source 1..21: mol_type = other DNA
cgtaagactagtctgaatgat

SEQ ID NO: 40645 - DNA, 21 bp, synthetic construct
  misc_feature 1..21: note = Description of Artificial Sequence: Synthetic oligonucleotide
  source 1..21: mol_type = other DNA
accaacagccacgtccccaga

SEQ ID NO: 40646 - DNA, 21 bp, synthetic construct
  misc_feature 1..21: note = Description of Artificial Sequence: Synthetic oligonucleotide
  source 1..21: mol_type = other DNA
gccagcagcctccccaaaaga

SEQ ID NO: 40647 - DNA, 21 bp, synthetic construct
  misc_feature 1..21: note = Description of Artificial Sequence: Synthetic oligonucleotide
  source 1..21: mol_type = other DNA
accgaaaccagaagcgccaac

SEQ ID NO: 40648 - DNA, 21 bp, synthetic construct
  misc_feature 1..21: note = Description of Artificial Sequence: Synthetic oligonucleotide
  source 1..21: mol_type = other DNA
agtcgtgctcagtcgcagatt

SEQ ID NO: 40649 - DNA, 21 bp, synthetic construct
  misc_feature 1..21: note = Description of Artificial Sequence: Synthetic oligonucleotide
  source 1..21: mol_type = other DNA
gtcagacacaccaccgacagc

SEQ ID NO: 40650 - DNA, 21 bp, synthetic construct
  misc_feature 1..21: note = Description of Artificial Sequence: Synthetic oligonucleotide
  source 1..21: mol_type = other DNA
cccagaatgaacggcatcaaa

SEQ ID NO: 40651 - DNA, 21 bp, synthetic construct
  misc_feature 1..21: note = Description of Artificial Sequence: Synthetic oligonucleotide
  source 1..21: mol_type = other DNA
gcgattcctgctgtgtctatg

SEQ ID NO: 40652 - DNA, 21 bp, synthetic construct
  misc_feature 1..21: note = Description of Artificial Sequence: Synthetic oligonucleotide
  source 1..21: mol_type = other DNA
ggcagcaccggcagcagcatc

SEQ ID NO: 40653 - DNA, 21 bp, synthetic construct
  misc_feature 1..21: note = Description of Artificial Sequence: Synthetic oligonucleotide
  source 1..21: mol_type = other DNA
gaaaacaacgccctcagcaga

SEQ ID NO: 40654 - DNA, 21 bp, synthetic construct
  misc_feature 1..21: note = Description of Artificial Sequence: Synthetic oligonucleotide
  source 1..21: mol_type = other DNA
tatccgaattctgtgcctagt

SEQ ID NO: 40655 - DNA, 21 bp, synthetic construct
  misc_feature 1..21: note = Description of Artificial Sequence: Synthetic oligonucleotide
  source 1..21: mol_type = other DNA
gttaatggtaagatttgttcg

SEQ ID NO: 40656 - DNA, 21 bp, synthetic construct
  misc_feature 1..21: note = Description of Artificial Sequence: Synthetic oligonucleotide
  source 1..21: mol_type = other DNA
catccttcttctaggaatagt

SEQ ID NO: 40657 - DNA, 21 bp, synthetic construct
  misc_feature 1..21: note = Description of Artificial Sequence: Synthetic oligonucleotide
  source 1..21: mol_type = other DNA
tctagggttacggtgagtcag

SEQ ID NO: 40658 - DNA, 21 bp, synthetic construct
  misc_feature 1..21: note = Description of Artificial Sequence: Synthetic oligonucleotide
  source 1..21: mol_type = other DNA
atgggggcgggggagcttacg

SEQ ID NO: 40659 - DNA, 21 bp, synthetic construct
  misc_feature 1..21: note = Description of Artificial Sequence: Synthetic oligonucleotide
  source 1..21: mol_type = other DNA
ggtcttgctgatcctcgtact

SEQ ID NO: 40660 - DNA, 21 bp, synthetic construct
  misc_feature 1..21: note = Description of Artificial Sequence: Synthetic oligonucleotide
  source 1..21: mol_type = other DNA
accctcgacaaccacagaagc

SEQ ID NO: 40661 - DNA, 21 bp, synthetic construct
  misc_feature 1..21: note = Description of Artificial Sequence: Synthetic oligonucleotide
  source 1..21: mol_type = other DNA
cttgatggtaggggttttagt

SEQ ID NO: 40662 - DNA, 21 bp, synthetic construct
  misc_feature 1..21: note = Description of Artificial Sequence: Synthetic oligonucleotide
  source 1..21: mol_type = other DNA
gctgggacgctggggcagatt

SEQ ID NO: 40663 - DNA, 21 bp, synthetic construct
  misc_feature 1..21: note = Description of Artificial Sequence: Synthetic oligonucleotide
  source 1..21: mol_type = other DNA
ggcgtctgcaaaccctacgcc

SEQ ID NO: 40664 - DNA, 21 bp, synthetic construct
  misc_feature 1..21: note = Description of Artificial Sequence: Synthetic oligonucleotide
  source 1..21: mol_type = other DNA
atgcgtgctaatcatacttcg

SEQ ID NO: 40665 - DNA, 21 bp, synthetic construct
  misc_feature 1..21: note = Description of Artificial Sequence: Synthetic oligonucleotide
  source 1..21: mol_type = other DNA
ggcctcaaaggcagcttcccc

SEQ ID NO: 40666 - DNA, 21 bp, synthetic construct
  misc_feature 1..21: note = Description of Artificial Sequence: Synthetic oligonucleotide
  source 1..21: mol_type = other DNA
gtcagacacaccgacgtcagc

SEQ ID NO: 40667 - DNA, 21 bp, synthetic construct
  misc_feature 1..21: note = Description of Artificial Sequence: Synthetic oligonucleotide
  source 1..21: mol_type = other DNA
cgtgtgcaggatacgcctcgt

SEQ ID NO: 40668 - DNA, 21 bp, synthetic construct
  misc_feature 1..21: note = Description of Artificial Sequence: Synthetic oligonucleotide
  source 1..21: mol_type = other DNA
ggcatgcaaaaaatgagcagc

SEQ ID NO: 40669 - DNA, 21 bp, synthetic construct
  misc_feature 1..21: note = Description of Artificial Sequence: Synthetic oligonucleotide
  source 1..21: mol_type = other DNA
cattcgcgggcgcaggctggg

SEQ ID NO: 40670 - DNA, 21 bp, synthetic construct
  misc_feature 1..21: note = Description of Artificial Sequence: Synthetic oligonucleotide
  source 1..21: mol_type = other DNA
gggaatggtattagtgctagg

SEQ ID NO: 40671 - DNA, 21 bp, synthetic construct
  misc_feature 1..21: note = Description of Artificial Sequence: Synthetic oligonucleotide
  source 1..21: mol_type = other DNA
attccggcttcgcataatccg

SEQ ID NO: 40672 - DNA, 21 bp, synthetic construct
  misc_feature 1..21: note = Description of Artificial Sequence: Synthetic oligonucleotide
  source 1..21: mol_type = other DNA
ggccccaccgaccacaaactc

SEQ ID NO: 40673 - DNA, 21 bp, synthetic construct
  misc_feature 1..21: note = Description of Artificial Sequence: Synthetic oligonucleotide
  source 1..21: mol_type = other DNA
tcgatgacttctcgtaattcg

SEQ ID NO: 40674 - DNA, 21 bp, synthetic construct
  misc_feature 1..21: note = Description of Artificial Sequence: Synthetic oligonucleotide
  source 1..21: mol_type = other DNA
gacgtcaacaccagaagcaga

SEQ ID NO: 40675 - DNA, 21 bp, synthetic construct
  misc_feature 1..21: note = Description of Artificial Sequence: Synthetic oligonucleotide
  source 1..21: mol_type = other DNA
caccacgacgccagccccaac

SEQ ID NO: 40676 - DNA, 21 bp, synthetic construct
  misc_feature 1..21: note = Description of Artificial Sequence: Synthetic oligonucleotide
  source 1..21: mol_type = other DNA
tatgcgcaggtgggtagttcg

SEQ ID NO: 40677 - DNA, 21 bp, synthetic construct
  misc_feature 1..21: note = Description of Artificial Sequence: Synthetic oligonucleotide
  source 1..21: mol_type = other DNA
gtcggcagcgacagcagcacc

SEQ ID NO: 40678 - DNA, 21 bp, synthetic construct
  misc_feature 1..21: note = Description of Artificial Sequence: Synthetic oligonucleotide
  source 1..21: mol_type = other DNA
agggctactagtcgtgaggct

SEQ ID NO: 40679 - DNA, 21 bp, synthetic construct
  misc_feature 1..21: note = Description of Artificial Sequence: Synthetic oligonucleotide
  source 1..21: mol_type = other DNA
ttggcgccgactaatgttaag

SEQ ID NO: 40680 - DNA, 21 bp, synthetic construct
  misc_feature 1..21: note = Description of Artificial Sequence: Synthetic oligonucleotide
  source 1..21: mol_type = other DNA
tacaaccacggcagcgtcgac

SEQ ID NO: 40681 - DNA, 21 bp, synthetic construct
  misc_feature 1..21: note = Description of Artificial Sequence: Synthetic oligonucleotide
  source 1..21: mol_type = other DNA
tgcagcaccaccgccatcaga

SEQ ID NO: 40682 - DNA, 21 bp, synthetic construct
  misc_feature 1..21: note = Description of Artificial Sequence: Synthetic oligonucleotide
  source 1..21: mol_type = other DNA
gcgcttcctgggagtactagt

SEQ ID NO: 40683 - DNA, 21 bp, synthetic construct
  misc_feature 1..21: note = Description of Artificial Sequence: Synthetic oligonucleotide
  source 1..21: mol_type = other DNA
actcagccttctcatgattcg

SEQ ID NO: 40684 - DNA, 21 bp, synthetic construct
  misc_feature 1..21: note = Description of Artificial Sequence: Synthetic oligonucleotide
  source 1..21: mol_type = other DNA
agcagccccgacagacccgtc

SEQ ID NO: 40685 - DNA, 21 bp, synthetic construct
  misc_feature 1..21: note = Description of Artificial Sequence: Synthetic oligonucleotide
  source 1..21: mol_type = other DNA
gcccacggcaccaccggcacc

SEQ ID NO: 40686 - DNA, 21 bp, synthetic construct
  misc_feature 1..21: note = Description of Artificial Sequence: Synthetic oligonucleotide
  source 1..21: mol_type = other DNA
tcgtcggttcagcatactggg

SEQ ID NO: 40687 - DNA, 21 bp, synthetic construct
  misc_feature 1..21: note = Description of Artificial Sequence: Synthetic oligonucleotide
  source 1..21: mol_type = other DNA
tcgacgtcgagtaggccgtcg

SEQ ID NO: 40688 - DNA, 21 bp, synthetic construct
  misc_feature 1..21: note = Description of Artificial Sequence: Synthetic oligonucleotide
  source 1..21: mol_type = other DNA
ggccacgtcaacgcccacgtc

SEQ ID NO: 40689 - DNA, 21 bp, synthetic construct
  misc_feature 1..21: note = Description of Artificial Sequence: Synthetic oligonucleotide
  source 1..21: mol_type = other DNA
cctaatcagcgtgttattggt

SEQ ID NO: 40690 - DNA, 21 bp, synthetic construct
  misc_feature 1..21: note = Description of Artificial Sequence: Synthetic oligonucleotide
  source 1..21: mol_type = other DNA
agcctcggcagaagccaactc

SEQ ID NO: 40691 - DNA, 21 bp, synthetic construct
  misc_feature 1..21: note = Description of Artificial Sequence: Synthetic oligonucleotide
  source 1..21: mol_type = other DNA
agcaacgccaacaacgtctgc

SEQ ID NO: 40692 - DNA, 21 bp, synthetic construct
  misc_feature 1..21: note = Description of Artificial Sequence: Synthetic oligonucleotide
  source 1..21: mol_type = other DNA
tgtacttctaagagtagttct

SEQ ID NO: 40693 - DNA, 21 bp, synthetic construct
  misc_feature 1..21: note = Description of Artificial Sequence: Synthetic oligonucleotide
  source 1..21: mol_type = other DNA
aggactttgagtgcttcgtcg

SEQ ID NO: 40694 - DNA, 21 bp, synthetic construct
  misc_feature 1..21: note = Description of Artificial Sequence: Synthetic oligonucleotide
  source 1..21: mol_type = other DNA
ctcagagccgaacacgtcaga

SEQ ID NO: 40695 - DNA, 21 bp, synthetic construct
  misc_feature 1..21: note = Description of Artificial Sequence: Synthetic oligonucleotide
  source 1..21: mol_type = other DNA
agcaacagacaacacggcctc

SEQ ID NO: 40696 - DNA, 21 bp, synthetic construct
  misc_feature 1..21: note = Description of Artificial Sequence: Synthetic oligonucleotide
  source 1..21: mol_type = other DNA
tcgattcagagtgctgctgct

SEQ ID NO: 40697 - DNA, 21 bp, synthetic construct
  misc_feature 1..21: note = Description of Artificial Sequence: Synthetic oligonucleotide
  source 1..21: mol_type = other DNA
cacaccagcaacaccagagtc

SEQ ID NO: 40698 - DNA, 21 bp, synthetic construct
  misc_feature 1..21: note = Description of Artificial Sequence: Synthetic oligonucleotide
  source 1..21: mol_type = other DNA
tctagggtggagattaatcgt

SEQ ID NO: 40699 - DNA, 21 bp, synthetic construct
  misc_feature 1..21: note = Description of Artificial Sequence: Synthetic oligonucleotide
  source 1..21: mol_type = other DNA
gctacttctacgaatggtatt

SEQ ID NO: 40700 - DNA, 21 bp, synthetic construct
  misc_feature 1..21: note = Description of Artificial Sequence: Synthetic oligonucleotide
  source 1..21: mol_type = other DNA
cctctgcttagtagtagggtg

SEQ ID NO: 40701 - DNA, 21 bp, synthetic construct
  misc_feature 1..21: note = Description of Artificial Sequence: Synthetic oligonucleotide
  source 1..21: mol_type = other DNA
ggcagcctcaccagccaaaaa

SEQ ID NO: 40702 - DNA, 21 bp, synthetic construct
  misc_feature 1..21: note = Description of Artificial Sequence: Synthetic oligonucleotide
  source 1..21: mol_type = other DNA
ctcgtcaacagcgccgtccaa

SEQ ID NO: 40703 - DNA, 21 bp, synthetic construct
  misc_feature 1..21: note = Description of Artificial Sequence: Synthetic oligonucleotide
  source 1..21: mol_type = other DNA
tctgctacgaatgggtctctg

SEQ ID NO: 40704 - DNA, 21 bp, synthetic construct
  misc_feature 1..21: note = Description of Artificial Sequence: Synthetic oligonucleotide
  source 1..21: mol_type = other DNA
catgctaataatgggacgtct

SEQ ID NO: 40705 - DNA, 21 bp, synthetic construct
  misc_feature 1..21: note = Description of Artificial Sequence: Synthetic oligonucleotide
  source 1..21: mol_type = other DNA
cagaatctgaattctttttcg

SEQ ID NO: 40706 - DNA, 21 bp, synthetic construct
  misc_feature 1..21: note = Description of Artificial Sequence: Synthetic oligonucleotide
  source 1..21: mol_type = other DNA
actaatttgcctcgttctcat

SEQ ID NO: 40707 - DNA, 21 bp, synthetic construct
  misc_feature 1..21: note = Description of Artificial Sequence: Synthetic oligonucleotide
  source 1..21: mol_type = other DNA
ggggttgggcatgatgatcgt

SEQ ID NO: 40708 - DNA, 21 bp, synthetic construct
  misc_feature 1..21: note = Description of Artificial Sequence: Synthetic oligonucleotide
  source 1..21: mol_type = other DNA
agcgtccaccaaaaaagagcc

SEQ ID NO: 40709 - DNA, 21 bp, synthetic construct
  misc_feature 1..21: note = Description of Artificial Sequence: Synthetic oligonucleotide
  source 1..21: mol_type = other DNA
acgcgtttggcgaatatgcat

SEQ ID NO: 40710 - DNA, 21 bp, synthetic construct
  misc_feature 1..21: note = Description of Artificial Sequence: Synthetic oligonucleotide
  source 1..21: mol_type = other DNA
ctcgccttcggcagcagcacc

SEQ ID NO: 40711 - DNA, 21 bp, synthetic construct
  misc_feature 1..21: note = Description of Artificial Sequence: Synthetic oligonucleotide
  source 1..21: mol_type = other DNA
cccagcctcgaaagaggcagc

SEQ ID NO: 40712 - DNA, 21 bp, synthetic construct
  misc_feature 1..21: note = Description of Artificial Sequence: Synthetic oligonucleotide
  source 1..21: mol_type = other DNA
ctcaacagcggcagcttcagc

SEQ ID NO: 40713 - DNA, 21 bp, synthetic construct
  misc_feature 1..21: note = Description of Artificial Sequence: Synthetic oligonucleotide
  source 1..21: mol_type = other DNA
cttattaggtcgggggagcgg

SEQ ID NO: 40714 - DNA, 21 bp, synthetic construct
  misc_feature 1..21: note = Description of Artificial Sequence: Synthetic oligonucleotide
  source 1..21: mol_type = other DNA
tcgcttactagtacgggtaag

SEQ ID NO: 40715 - DNA, 21 bp, synthetic construct
  misc_feature 1..21: note = Description of Artificial Sequence: Synthetic oligonucleotide
  source 1..21: mol_type = other DNA
gggcgtctgaatactaatggt

SEQ ID NO: 40716 - DNA, 21 bp, synthetic construct
  misc_feature 1..21: note = Description of Artificial Sequence: Synthetic oligonucleotide
  source 1..21: mol_type = other DNA
agaagcatgagcagcgccgtc

SEQ ID NO: 40717 - DNA, 21 bp, synthetic construct
  misc_feature 1..21: note = Description of Artificial Sequence: Synthetic oligonucleotide
  source 1..21: mol_type = other DNA
agcagacccggcatcagccaa

SEQ ID NO: 40718 - DNA, 21 bp, synthetic construct
  misc_feature 1..21: note = Description of Artificial Sequence: Synthetic oligonucleotide
  source 1..21: mol_type = other DNA
cctactactcttaagcatgat

SEQ ID NO: 40719 - DNA, 21 bp, synthetic construct
  misc_feature 1..21: note = Description of Artificial Sequence: Synthetic oligonucleotide
  source 1..21: mol_type = other DNA
agaagcaacatggccaccgcc

SEQ ID NO: 40720 - DNA, 21 bp, synthetic construct
  misc_feature 1..21: note = Description of Artificial Sequence: Synthetic oligonucleotide
  source 1..21: mol_type = other DNA
ggtagggctcagctgtctcag

SEQ ID NO: 40721 - DNA, 21 bp, synthetic construct
  misc_feature 1..21: note = Description of Artificial Sequence: Synthetic oligonucleotide
  source 1..21: mol_type = other DNA
gctctgcatgcttcgtataat

SEQ ID NO: 40722 - DNA, 21 bp, synthetic construct
  misc_feature 1..21: note = Description of Artificial Sequence: Synthetic oligonucleotide
  source 1..21: mol_type = other DNA
aacagcaacggcctcaacaac

SEQ ID NO: 40723 - DNA, 21 bp, synthetic construct
  misc_feature 1..21: note = Description of Artificial Sequence: Synthetic oligonucleotide
  source 1..21: mol_type = other DNA
ctcggcaccagacccatgaaa

SEQ ID NO: 40724 - DNA, 21 bp, synthetic construct
  misc_feature 1..21: note = Description of Artificial Sequence: Synthetic oligonucleotide
  source 1..21: mol_type = other DNA
gaaagaaccccccccagaatc

SEQ ID NO: 40725 - DNA, 21 bp, synthetic construct
  misc_feature 1..21: note = Description of Artificial Sequence: Synthetic oligonucleotide
  source 1..21: mol_type = other DNA
aacagccaccaaaaacccagc

SEQ ID NO: 40726 - DNA, 21 bp, synthetic construct
  misc_feature 1..21: note = Description of Artificial Sequence: Synthetic oligonucleotide
  source 1..21: mol_type = other DNA
caaagcggcagcaaacccggc

SEQ ID NO: 40727 - DNA, 21 bp, synthetic construct
  misc_feature 1..21: note = Description of Artificial Sequence: Synthetic oligonucleotide
  source 1..21: mol_type = other DNA
ggcaccgccagaaccaccggc

SEQ ID NO: 40728 - DNA, 21 bp, synthetic construct
  misc_feature 1..21: note = Description of Artificial Sequence: Synthetic oligonucleotide
  source 1..21: mol_type = other DNA
tttttgtcttcgagggcttct

SEQ ID NO: 40729 - DNA, 21 bp, synthetic construct
  misc_feature 1..21: note = Description of Artificial Sequence: Synthetic oligonucleotide
  source 1..21: mol_type = other DNA
aataatactcagaagaattct

SEQ ID NO: 40730 - DNA, 21 bp, synthetic construct
  misc_feature 1..21: note = Description of Artificial Sequence: Synthetic oligonucleotide
  source 1..21: mol_type = other DNA
aacgattctggacagaatcaa

SEQ ID NO: 40731 - DNA, 21 bp, synthetic construct
  misc_feature 1..21: note = Description of Artificial Sequence: Synthetic oligonucleotide
  source 1..21: mol_type = other DNA
gatcggtctagtaggggtgtg

SEQ ID NO: 40732 - DNA, 21 bp, synthetic construct
  misc_feature 1..21: note = Description of Artificial Sequence: Synthetic oligonucleotide
  source 1..21: mol_type = other DNA
aatattccttctccgcgtctt

SEQ ID NO: 40733 - DNA, 21 bp, synthetic construct
  misc_feature 1..21: note = Description of Artificial Sequence: Synthetic oligonucleotide
  source 1..21: mol_type = other DNA
ccggggctttctaattcgcgt

SEQ ID NO: 40734 - DNA, 21 bp, synthetic construct
  misc_feature 1..21: note = Description of Artificial Sequence: Synthetic oligonucleotide
  source 1..21: mol_type = other DNA
atggtttcgggtaagagttat

SEQ ID NO: 40735 - DNA, 21 bp, synthetic construct
  misc_feature 1..21: note = Description of Artificial Sequence: Synthetic oligonucleotide
  source 1..21: mol_type = other DNA
aattcggggaggaattctgtt

SEQ ID NO: 40736 - DNA, 21 bp, synthetic construct
  misc_feature 1..21: note = Description of Artificial Sequence: Synthetic oligonucleotide
  source 1..21: mol_type = other DNA
tggatgagcggcaaaaacagc

SEQ ID NO: 40737 - DNA, 21 bp, synthetic construct
  misc_feature 1..21: note = Description of Artificial Sequence: Synthetic oligonucleotide
  source 1..21: mol_type = other DNA
atcagaagcaccaaagcccaa

SEQ ID NO: 40738 - DNA, 21 bp, synthetic construct
  misc_feature 1..21: note = Description of Artificial Sequence: Synthetic oligonucleotide
  source 1..21: mol_type = other DNA
gaagtcttcagcagccaaaaa

SEQ ID NO: 40739 - DNA, 21 bp, synthetic construct
  misc_feature 1..21: note = Description of Artificial Sequence: Synthetic oligonucleotide
  source 1..21: mol_type = other DNA
agcttcaccaaaggcgccggc

SEQ ID NO: 40740 - DNA, 21 bp, synthetic construct
  misc_feature 1..21: note = Description of Artificial Sequence: Synthetic oligonucleotide
  source 1..21: mol_type = other DNA
accggcatgagaccccccggc

SEQ ID NO: 40741 - DNA, 21 bp, synthetic construct
  misc_feature 1..21: note = Description of Artificial Sequence: Synthetic oligonucleotide
  source 1..21: mol_type = other DNA
aataatagtaagagtcagatt

SEQ ID NO: 40742 - DNA, 21 bp, synthetic construct
  misc_feature 1..21: note = Description of Artificial Sequence: Synthetic oligonucleotide
  source 1..21: mol_type = other DNA
cccaaactcagccacaccggc

SEQ ID NO: 40743 - DNA, 21 bp, synthetic construct
  misc_feature 1..21: note = Description of Artificial Sequence: Synthetic oligonucleotide
  source 1..21: mol_type = other DNA
caaggccacaccagattcacc

SEQ ID NO: 40744 - DNA, 21 bp, synthetic construct
  misc_feature 1..21: note = Description of Artificial Sequence: Synthetic oligonucleotide
  source 1..21: mol_type = other DNA
caacccagccaaggccacagc

SEQ ID NO: 40745 - DNA, 21 bp, synthetic construct
  misc_feature 1..21: note = Description of Artificial Sequence: Synthetic oligonucleotide
  source 1..21: mol_type = other DNA
gacagaatcagaaccggccac

SEQ ID NO: 40746 - DNA, 21 bp, synthetic construct
  misc_feature 1..21: note = Description of Artificial Sequence: Synthetic oligonucleotide
  source 1..21: mol_type = other DNA
gcttattcgaatattcagaat

SEQ ID NO: 40747 - DNA, 21 bp, synthetic construct
  misc_feature 1..21: note = Description of Artificial Sequence: Synthetic oligonucleotide
  source 1..21: mol_type = other DNA
atcggcctcaacagaaccggc

SEQ ID NO: 40748 - DNA, 21 bp, synthetic construct
  misc_feature 1..21: note = Description of Artificial Sequence: Synthetic oligonucleotide
  source 1..21: mol_type = other DNA
gtcagcggcagacccaccggc

SEQ ID NO: 40749 - DNA, 21 bp, synthetic construct
  misc_feature 1..21: note = Description of Artificial Sequence: Synthetic oligonucleotide
  source 1..21: mol_type = other DNA
tacaccatcaccccccaaaaa

SEQ ID NO: 40750 - DNA, 21 bp, synthetic construct
  misc_feature 1..21: note = Description of Artificial Sequence: Synthetic oligonucleotide
  source 1..21: mol_type = other DNA
gaaaccaccacccccagaaaa

SEQ ID NO: 40751 - DNA, 21 bp, synthetic construct
  misc_feature 1..21: note = Description of Artificial Sequence: Synthetic oligonucleotide
  source 1..21: mol_type = other DNA
tcgcagagttctcgtagtggt

SEQ ID NO: 40752 - DNA, 21 bp, synthetic construct
  misc_feature 1..21: note = Description of Artificial Sequence: Synthetic oligonucleotide
  source 1..21: mol_type = other DNA
tatggtcttcataatgcgcgt

SEQ ID NO: 40753 - DNA, 21 bp, synthetic construct
  misc_feature 1..21: note = Description of Artificial Sequence: Synthetic oligonucleotide
  source 1..21: mol_type = other DNA
aaaaacgccccccaacaagcc

SEQ ID NO: 40754 - DNA, 21 bp, synthetic construct
  misc_feature 1..21: note = Description of Artificial Sequence: Synthetic oligonucleotide
  source 1..21: mol_type = other DNA
aacggcagcggccaaaacaaa

SEQ ID NO: 40755 - DNA, 21 bp, synthetic construct
  misc_feature 1..21: note = Description of Artificial Sequence: Synthetic oligonucleotide
  source 1..21: mol_type = other DNA
tctacggatcggtcgtttaat

SEQ ID NO: 40756 - DNA, 21 bp, synthetic construct
  misc_feature 1..21: note = Description of Artificial Sequence: Synthetic oligonucleotide
  source 1..21: mol_type = other DNA
ttcagcgccagcggcgccaga

SEQ ID NO: 40757 - DNA, 21 bp, synthetic construct
  misc_feature 1..21: note = Description of Artificial Sequence: Synthetic oligonucleotide
  source 1..21: mol_type = other DNA
ctttattctgggtcgcaggag

SEQ ID NO: 40758 - DNA, 21 bp, synthetic construct
  misc_feature 1..21: note = Description of Artificial Sequence: Synthetic oligonucleotide
  source 1..21: mol_type = other DNA
aacagccacacccccgtcaga

SEQ ID NO: 40759 - DNA, 21 bp, synthetic construct
  misc_feature 1..21: note = Description of Artificial Sequence: Synthetic oligonucleotide
  source 1..21: mol_type = other DNA
aaaagagacgcccacaccgcc

SEQ ID NO: 40760 - DNA, 21 bp, synthetic construct
  misc_feature 1..21: note = Description of Artificial Sequence: Synthetic oligonucleotide
  source 1..21: mol_type = other DNA
catggttctaagccgtatatt

SEQ ID NO: 40761 - DNA, 21 bp, synthetic construct
  misc_feature 1..21: note = Description of Artificial Sequence: Synthetic oligonucleotide
  source 1..21: mol_type = other DNA
aatccgggtaaggggtcgtct

SEQ ID NO: 40762 - DNA, 21 bp, synthetic construct
  misc_feature 1..21: note = Description of Artificial Sequence: Synthetic oligonucleotide
  source 1..21: mol_type = other DNA
tctttttcgaagggttctagt

SEQ ID NO: 40763 - DNA, 21 bp, synthetic construct
  misc_feature 1..21: note = Description of Artificial Sequence: Synthetic oligonucleotide
  source 1..21: mol_type = other DNA
aattctggtactcattttaag

SEQ ID NO: 40764 - DNA, 21 bp, synthetic construct
  misc_feature 1..21: note = Description of Artificial Sequence: Synthetic oligonucleotide
  source 1..21: mol_type = other DNA
agcagcatgagccaccaaaaa

SEQ ID NO: 40765 - DNA, 21 bp, synthetic construct
  misc_feature 1..21: note = Description of Artificial Sequence: Synthetic oligonucleotide
  source 1..21: mol_type = other DNA
tctattggtaaggggtataat

SEQ ID NO: 40766 - DNA, 21 bp, synthetic construct
  misc_feature 1..21: note = Description of Artificial Sequence: Synthetic oligonucleotide
  source 1..21: mol_type = other DNA
caaagcagcatccacaccaaa

SEQ ID NO: 40767 - DNA, 21 bp, synthetic construct
  misc_feature 1..21: note = Description of Artificial Sequence: Synthetic oligonucleotide
  source 1..21: mol_type = other DNA
tcttttagtggggctaataag

SEQ ID NO: 40768 - DNA, 21 bp, synthetic construct
  misc_feature 1..21: note = Description of Artificial Sequence: Synthetic oligonucleotide
  source 1..21: mol_type = other DNA
ggtcagactcttcctatttgt

SEQ ID NO: 40769 - DNA, 21 bp, synthetic construct
  misc_feature 1..21: note = Description of Artificial Sequence: Synthetic oligonucleotide
  source 1..21: mol_type = other DNA
gctcttttgaatattaatact

SEQ ID NO: 40770 - DNA, 21 bp, synthetic construct
  misc_feature 1..21: note = Description of Artificial Sequence: Synthetic oligonucleotide
  source 1..21: mol_type = other DNA
atgctccaaagagcccccggc

SEQ ID NO: 40771 - DNA, 21 bp, synthetic construct
  misc_feature 1..21: note = Description of Artificial Sequence: Synthetic oligonucleotide
  source 1..21: mol_type = other DNA
ggcaccggccaccaaagaagc

SEQ ID NO: 40772 - DNA, 21 bp, synthetic construct
  misc_feature 1..21: note = Description of Artificial Sequence: Synthetic oligonucleotide
  source 1..21: mol_type = other DNA
agtttgactcctatgggtcgg

SEQ ID NO: 40773 - DNA, 21 bp, synthetic construct
  misc_feature 1..21: note = Description of Artificial Sequence: Synthetic oligonucleotide
  source 1..21: mol_type = other DNA
ctcgtcgccagcggccaaaaa

SEQ ID NO: 40774 - DNA, 21 bp, synthetic construct
  misc_feature 1..21: note = Description of Artificial Sequence: Synthetic oligonucleotide
  source 1..21: mol_type = other DNA
cccagaaccagagaaaaccaa

SEQ ID NO: 40775 - DNA, 21 bp, synthetic construct
  misc_feature 1..21: note = Description of Artificial Sequence: Synthetic oligonucleotide
  source 1..21: mol_type = other DNA
aatatttcgtctaaggttgcg

SEQ ID NO: 40776 - DNA, 21 bp, synthetic construct
  misc_feature 1..21: note = Description of Artificial Sequence: Synthetic oligonucleotide
  source 1..21: mol_type = other DNA
ctccaaagagccccccaaacc

SEQ ID NO: 40777 - DNA, 21 bp, synthetic construct
  misc_feature 1..21: note = Description of Artificial Sequence: Synthetic oligonucleotide
  source 1..21: mol_type = other DNA
tctatttctaagactcaggct

SEQ ID NO: 40778 - DNA, 21 bp, synthetic construct
  misc_feature 1..21: note = Description of Artificial Sequence: Synthetic oligonucleotide
  source 1..21: mol_type = other DNA
gtcaccggccaaaaccaaacc

SEQ ID NO: 40779 - DNA, 21 bp, synthetic construct
  misc_feature 1..21: note = Description of Artificial Sequence: Synthetic oligonucleotide
  source 1..21: mol_type = other DNA
tttcttacgggtcgtcagtcg

SEQ ID NO: 40780 - DNA, 21 bp, synthetic construct
  misc_feature 1..21: note = Description of Artificial Sequence: Synthetic oligonucleotide
  source 1..21: mol_type = other DNA
accatgagagccacccccccc

SEQ ID NO: 40781 - DNA, 21 bp, synthetic construct
  misc_feature 1..21: note = Description of Artificial Sequence: Synthetic oligonucleotide
  source 1..21: mol_type = other DNA
aataatcttcctcggaatttg

SEQ ID NO: 40782 - DNA, 21 bp, synthetic construct
  misc_feature 1..21: note = Description of Artificial Sequence: Synthetic oligonucleotide
  source 1..21: mol_type = other DNA
accagcgaaagacccacctgc

SEQ ID NO: 40783 - DNA, 21 bp, synthetic construct
  misc_feature 1..21: note = Description of Artificial Sequence: Synthetic oligonucleotide
  source 1..21: mol_type = other DNA
ctccccaccggcaaaatgctc

SEQ ID NO: 40784 - DNA, 21 bp, synthetic construct
  misc_feature 1..21: note = Description of Artificial Sequence: Synthetic oligonucleotide
  source 1..21: mol_type = other DNA
tataagccggggttgcagtct

SEQ ID NO: 40785 - DNA, 21 bp, synthetic construct
  misc_feature 1..21: note = Description of Artificial Sequence: Synthetic oligonucleotide
  source 1..21: mol_type = other DNA
ggcagactcgaagcccaaaaa

SEQ ID NO: 40786 - DNA, 21 bp, synthetic construct
  misc_feature 1..21: note = Description of Artificial Sequence: Synthetic oligonucleotide
  source 1..21: mol_type = other DNA
gttcatgtgacgagtcagact

SEQ ID NO: 40787 - DNA, 21 bp, synthetic construct
  misc_feature 1..21: note = Description of Artificial Sequence: Synthetic oligonucleotide
  source 1..21: mol_type = other DNA
agaagccccagcaccaacccc

SEQ ID NO: 40788 - DNA, 21 bp, synthetic construct
  misc_feature 1..21: note = Description of Artificial Sequence: Synthetic oligonucleotide
  source 1..21: mol_type = other DNA
tttatgggtcgtcctaatgtt

SEQ ID NO: 40789 - DNA, 21 bp, synthetic construct
  misc_feature 1..21: note = Description of Artificial Sequence: Synthetic oligonucleotide
  source 1..21: mol_type = other DNA
caaggccccaaaaacgccgac

SEQ ID NO: 40790 - DNA, 21 bp, synthetic construct
  misc_feature 1..21: note = Description of Artificial Sequence: Synthetic oligonucleotide
  source 1..21: mol_type = other DNA
tcgccggttaaggggtctgtt

SEQ ID NO: 40791 - DNA, 21 bp, synthetic construct
  misc_feature 1..21: note = Description of Artificial Sequence: Synthetic oligonucleotide
  source 1..21: mol_type = other DNA
caccccagcaacaaacccctc

SEQ ID NO: 40792 - DNA, 21 bp, synthetic construct
  misc_feature 1..21: note = Description of Artificial Sequence: Synthetic oligonucleotide
  source 1..21: mol_type = other DNA
gaacccgtccccaaaaccaga

SEQ ID NO: 40793 - DNA, 21 bp, synthetic construct
  misc_feature 1..21: note = Description of Artificial Sequence: Synthetic oligonucleotide
  source 1..21: mol_type = other DNA
cacaacagcaaaagccaaatc

SEQ ID NO: 40794 - DNA, 21 bp, synthetic construct
  misc_feature 1..21: note = Description of Artificial Sequence: Synthetic oligonucleotide
  source 1..21: mol_type = other DNA
tttagttctaagacttctccg

SEQ ID NO: 40795 - DNA, 21 bp, synthetic construct
  misc_feature 1..21: note = Description of Artificial Sequence: Synthetic oligonucleotide
  source 1..21: mol_type = other DNA
cctaatcgggtgcctaatcat

SEQ ID NO: 40796 - DNA, 21 bp, synthetic construct
  misc_feature 1..21: note = Description of Artificial Sequence: Synthetic oligonucleotide
  source 1..21: mol_type = other DNA
tattcggataataagactact

SEQ ID NO: 40797 - DNA, 21 bp, synthetic construct
  misc_feature 1..21: note = Description of Artificial Sequence: Synthetic oligonucleotide
  source 1..21: mol_type = other DNA
agccccaccagacccatgaac

SEQ ID NO: 40798 - DNA, 21 bp, synthetic construct
  misc_feature 1..21: note = Description of Artificial Sequence: Synthetic oligonucleotide
  source 1..21: mol_type = other DNA
ttttctgggaagcctagtagg

SEQ ID NO: 40799 - DNA, 21 bp, synthetic construct
  misc_feature 1..21: note = Description of Artificial Sequence: Synthetic oligonucleotide
  source 1..21: mol_type = other DNA
cccagcgccggcagagaaaaa

SEQ ID NO: 40800 - DNA, 21 bp, synthetic construct
  misc_feature 1..21: note = Description of Artificial Sequence: Synthetic oligonucleotide
  source 1..21: mol_type = other DNA
cccggcagagaaaaaaccgtc

SEQ ID NO: 40801 - DNA, 21 bp, synthetic construct
  misc_feature 1..21: note = Description of Artificial Sequence: Synthetic oligonucleotide
  source 1..21: mol_type = other DNA
ttgcagcagcataatacgaag

SEQ ID NO: 40802 - DNA, 21 bp, synthetic construct
  misc_feature 1..21: note = Description of Artificial Sequence: Synthetic oligonucleotide
  source 1..21: mol_type = other DNA
atgacccaacacaaacaagcc

SEQ ID NO: 40803 - DNA, 21 bp, synthetic construct
  misc_feature 1..21: note = Description of Artificial Sequence: Synthetic oligonucleotide
  source 1..21: mol_type = other DNA
tacagcatgagacccaccgaa

SEQ ID NO: 40804 - DNA, 21 bp, synthetic construct
  misc_feature 1..21: note = Description of Artificial Sequence: Synthetic oligonucleotide
  source 1..21: mol_type = other DNA
aagggttttaagactgagagt

SEQ ID NO: 40805 - DNA, 21 bp, synthetic construct
  misc_feature 1..21: note = Description of Artificial Sequence: Synthetic oligonucleotide
  source 1..21: mol_type = other DNA
aacagagaaagcccccaaaga

SEQ ID NO: 40806 - DNA, 21 bp, synthetic construct
  misc_feature 1..21: note = Description of Artificial Sequence: Synthetic oligonucleotide
  source 1..21: mol_type = other DNA
aatttgggtaattctctgaag

SEQ ID NO: 40807 - DNA, 21 bp, synthetic construct
  misc_feature 1..21: note = Description of Artificial Sequence: Synthetic oligonucleotide
  source 1..21: mol_type = other DNA
caaaacctccccaaagccagc

SEQ ID NO: 40808 - DNA, 21 bp, synthetic construct
  misc_feature 1..21: note = Description of Artificial Sequence: Synthetic oligonucleotide
  source 1..21: mol_type = other DNA
acccaaaacaccaaaagcatc

SEQ ID NO: 40809 - DNA, 21 bp, synthetic construct
  misc_feature 1..21: note = Description of Artificial Sequence: Synthetic oligonucleotide
  source 1..21: mol_type = other DNA
ctcggccccggcaaaaacacc

SEQ ID NO: 40810 - DNA, 21 bp, synthetic construct
  misc_feature 1..21: note = Description of Artificial Sequence: Synthetic oligonucleotide
  source 1..21: mol_type = other DNA
caagtcagcgccaaaagcgcc

SEQ ID NO: 40811 - DNA, 21 bp, synthetic construct
  misc_feature 1..21: note = Description of Artificial Sequence: Synthetic oligonucleotide
  source 1..21: mol_type = other DNA
ctcaacggcaccccccaaagc

SEQ ID NO: 40812 - DNA, 21 bp, synthetic construct
  misc_feature 1..21: note = Description of Artificial Sequence: Synthetic oligonucleotide
  source 1..21: mol_type = other DNA
cttggtactagtccgatgaag

SEQ ID NO: 40813 - DNA, 21 bp, synthetic construct
  misc_feature 1..21: note = Description of Artificial Sequence: Synthetic oligonucleotide
  source 1..21: mol_type = other DNA
acgagggggtctcctttgatg

SEQ ID NO: 40814 - DNA, 21 bp, synthetic construct
  misc_feature 1..21: note = Description of Artificial Sequence: Synthetic oligonucleotide
  source 1..21: mol_type = other DNA
tcttctgggggtaatatgagt

SEQ ID NO: 40815 - DNA, 21 bp, synthetic construct
  misc_feature 1..21: note = Description of Artificial Sequence: Synthetic oligonucleotide
  source 1..21: mol_type = other DNA
cccggcaccggcagcaaccac

SEQ ID NO: 40816 - DNA, 21 bp, synthetic construct
  misc_feature 1..21: note = Description of Artificial Sequence: Synthetic oligonucleotide
  source 1..21: mol_type = other DNA
caaaacacccccaaaagcacc

SEQ ID NO: 40817 - DNA, 21 bp, synthetic construct
  misc_feature 1..21: note = Description of Artificial Sequence: Synthetic oligonucleotide
  source 1..21: mol_type = other DNA
ttcaacatgcaaagaagccaa

SEQ ID NO: 40818 - DNA, 21 bp, synthetic construct
  misc_feature 1..21: note = Description of Artificial Sequence: Synthetic oligonucleotide
  source 1..21: mol_type = other DNA
agtaatcttccgcggaatctg

SEQ ID NO: 40819 - DNA, 21 bp, synthetic construct
  misc_feature 1..21: note = Description of Artificial Sequence: Synthetic oligonucleotide
  source 1..21: mol_type = other DNA
agttcgggtaagtcgttttct

SEQ ID NO: 40820 - DNA, 21 bp, synthetic construct
  misc_feature 1..21: note = Description of Artificial Sequence: Synthetic oligonucleotide
  source 1..21: mol_type = other DNA
aacggttctagacagaatcaa

SEQ ID NO: 40821 - DNA, 21 bp, synthetic construct
  misc_feature 1..21: note = Description of Artificial Sequence: Synthetic oligonucleotide
  source 1..21: mol_type = other DNA
cccaccagcagcccccaaaga

SEQ ID NO: 40822 - DNA, 21 bp, synthetic construct
  misc_feature 1..21: note = Description of Artificial Sequence: Synthetic oligonucleotide
  source 1..21: mol_type = other DNA
agcttcgacagcaaacccccc

SEQ ID NO: 40823 - DNA, 21 bp, synthetic construct
  misc_feature 1..21: note = Description of Artificial Sequence: Synthetic oligonucleotide
  source 1..21: mol_type = other DNA
caaaccagcgccacccaaaga

SEQ ID NO: 40824 - DNA, 21 bp, synthetic construct
  misc_feature 1..21: note = Description of Artificial Sequence: Synthetic oligonucleotide
  source 1..21: mol_type = other DNA
cccagcaacaaaaccaacagc

SEQ ID NO: 40825 - DNA, 21 bp, synthetic construct
  misc_feature 1..21: note = Description of Artificial Sequence: Synthetic oligonucleotide
  source 1..21: mol_type = other DNA
actccgcagaattctgtgaag

SEQ ID NO: 40826 - DNA, 21 bp, synthetic construct
  misc_feature 1..21: note = Description of Artificial Sequence: Synthetic oligonucleotide
  source 1..21: mol_type = other DNA
tctcatacgggtaatatggtt

SEQ ID NO: 40827 - DNA, 21 bp, synthetic construct
  misc_feature 1..21: note = Description of Artificial Sequence: Synthetic oligonucleotide
  source 1..21: mol_type = other DNA
aatccttcggagaagatgttg

SEQ ID NO: 40828 - DNA, 21 bp, synthetic construct
  misc_feature 1..21: note = Description of Artificial Sequence: Synthetic oligonucleotide
  source 1..21: mol_type = other DNA
ctcggcaccagccaaatgaaa

SEQ ID NO: 40829 - DNA, 21 bp, synthetic construct
  misc_feature 1..21: note = Description of Artificial Sequence: Synthetic oligonucleotide
  source 1..21: mol_type = other DNA
ggcctccaaaccccccccaga

SEQ ID NO: 40830 - DNA, 21 bp, synthetic construct
  misc_feature 1..21: note = Description of Artificial Sequence: Synthetic oligonucleotide
  source 1..21: mol_type = other DNA
caaaccggcagcaacaacaaa

SEQ ID NO: 40831 - DNA, 21 bp, synthetic construct
  misc_feature 1..21: note = Description of Artificial Sequence: Synthetic oligonucleotide
  source 1..21: mol_type = other DNA
actccgattactcctatgact

SEQ ID NO: 40832 - DNA, 21 bp, synthetic construct
  misc_feature 1..21: note = Description of Artificial Sequence: Synthetic oligonucleotide
  source 1..21: mol_type = other DNA
acgttttctaagggtactaat

SEQ ID NO: 40833 - DNA, 21 bp, synthetic construct
  misc_feature 1..21: note = Description of Artificial Sequence: Synthetic oligonucleotide
  source 1..21: mol_type = other DNA
agccacagcagcccctacaaa

SEQ ID NO: 40834 - DNA, 21 bp, synthetic construct
  misc_feature 1..21: note = Description of Artificial Sequence: Synthetic oligonucleotide
  source 1..21: mol_type = other DNA
agaagcgccagcggccaactc

SEQ ID NO: 40835 - DNA, 21 bp, synthetic construct
  misc_feature 1..21: note = Description of Artificial Sequence: Synthetic oligonucleotide
  source 1..21: mol_type = other DNA
taccccagacaaagaaccgaa

SEQ ID NO: 40836 - DNA, 21 bp, synthetic construct
  misc_feature 1..21: note = Description of Artificial Sequence: Synthetic oligonucleotide
  source 1..21: mol_type = other DNA
tacggccaaaccaaaacccaa

SEQ ID NO: 40837 - DNA, 21 bp, synthetic construct
  misc_feature 1..21: note = Description of Artificial Sequence: Synthetic oligonucleotide
  source 1..21: mol_type = other DNA
caaatcagcgccagcaccaga

SEQ ID NO: 40838 - DNA, 21 bp, synthetic construct
  misc_feature 1..21: note = Description of Artificial Sequence: Synthetic oligonucleotide
  source 1..21: mol_type = other DNA
agctacgccagcacccaacaa

SEQ ID NO: 40839 - DNA, 21 bp, synthetic construct
  misc_feature 1..21: note = Description of Artificial Sequence: Synthetic oligonucleotide
  source 1..21: mol_type = other DNA
aaaggccaaaacaccatcagc

SEQ ID NO: 40840 - DNA, 21 bp, synthetic construct
  misc_feature 1..21: note = Description of Artificial Sequence: Synthetic oligonucleotide
  source 1..21: mol_type = other DNA
cccaccaccggcccccaaaga

SEQ ID NO: 40841 - DNA, 21 bp, synthetic construct
  misc_feature 1..21: note = Description of Artificial Sequence: Synthetic oligonucleotide
  source 1..21: mol_type = other DNA
agcaacaacggcacccaaaaa

SEQ ID NO: 40842 - DNA, 21 bp, synthetic construct
  misc_feature 1..21: note = Description of Artificial Sequence: Synthetic oligonucleotide
  source 1..21: mol_type = other DNA
agtcgttctggtggtcaggtt

SEQ ID NO: 40843 - DNA, 21 bp, synthetic construct
  misc_feature 1..21: note = Description of Artificial Sequence: Synthetic oligonucleotide
  source 1..21: mol_type = other DNA
gggaataatcggccggcttcg

SEQ ID NO: 40844 - DNA, 21 bp, synthetic construct
  misc_feature 1..21: note = Description of Artificial Sequence: Synthetic oligonucleotide
  source 1..21: mol_type = other DNA
aaaaaccaagcccccctcctc

SEQ ID NO: 40845 - DNA, 21 bp, synthetic construct
  misc_feature 1..21: note = Description of Artificial Sequence: Synthetic oligonucleotide
  source 1..21: mol_type = other DNA
aatggggctacgaagaatagt

SEQ ID NO: 40846 - DNA, 21 bp, synthetic construct
  misc_feature 1..21: note = Description of Artificial Sequence: Synthetic oligonucleotide
  source 1..21: mol_type = other DNA
ggcacccaaaaacaaaccagc

SEQ ID NO: 40847 - DNA, 21 bp, synthetic construct
  misc_feature 1..21: note = Description of Artificial Sequence: Synthetic oligonucleotide
  source 1..21: mol_type = other DNA
aaggtggataagaggactgat

SEQ ID NO: 40848 - DNA, 21 bp, synthetic construct
  misc_feature 1..21: note = Description of Artificial Sequence: Synthetic oligonucleotide
  source 1..21: mol_type = other DNA
tctggtgttaaggctttttct

SEQ ID NO: 40849 - DNA, 21 bp, synthetic construct
  misc_feature 1..21: note = Description of Artificial Sequence: Synthetic oligonucleotide
  source 1..21: mol_type = other DNA
tataataagaatgctcagttg

SEQ ID NO: 40850 - DNA, 21 bp, synthetic construct
  misc_feature 1..21: note = Description of Artificial Sequence: Synthetic oligonucleotide
  source 1..21: mol_type = other DNA
acccaaagacccgcccaaatg

SEQ ID NO: 40851 - DNA, 21 bp, synthetic construct
  misc_feature 1..21: note = Description of Artificial Sequence: Synthetic oligonucleotide
  source 1..21: mol_type = other DNA
caaacccaaggccaactcaaa

SEQ ID NO: 40852 - DNA, 21 bp, synthetic construct
  misc_feature 1..21: note = Description of Artificial Sequence: Synthetic oligonucleotide
  source 1..21: mol_type = other DNA
tctaattctcataagatttat

SEQ ID NO: 40853 - DNA, 21 bp, synthetic construct
  misc_feature 1..21: note = Description of Artificial Sequence: Synthetic oligonucleotide
  source 1..21: mol_type = other DNA
gccaacggccacccccaaagc

SEQ ID NO: 40854 - DNA, 21 bp, synthetic construct
  misc_feature 1..21: note = Description of Artificial Sequence: Synthetic oligonucleotide
  source 1..21: mol_type = other DNA
aggccggtggggggtctggcg

SEQ ID NO: 40855 - DNA, 21 bp, synthetic construct
  misc_feature 1..21: note = Description of Artificial Sequence: Synthetic oligonucleotide
  source 1..21: mol_type = other DNA
ccccaaagcagccaccaaacc

SEQ ID NO: 40856 - DNA, 21 bp, synthetic construct
  misc_feature 1..21: note = Description of Artificial Sequence: Synthetic oligonucleotide
  source 1..21: mol_type = other DNA
acttataatagtagtcaggcg

SEQ ID NO: 40857 - DNA, 21 bp, synthetic construct
  misc_feature 1..21: note = Description of Artificial Sequence: Synthetic oligonucleotide
  source 1..21: mol_type = other DNA
agtaatcaggttcgtcagatt

SEQ ID NO: 40858 - DNA, 21 bp, synthetic construct
  misc_feature 1..21: note = Description of Artificial Sequence: Synthetic oligonucleotide
  source 1..21: mol_type = other DNA
agcctcaccaccaaagccaac

SEQ ID NO: 40859 - DNA, 21 bp, synthetic construct
  misc_feature 1..21: note = Description of Artificial Sequence: Synthetic oligonucleotide
  source 1..21: mol_type = other DNA
agccccggcaacaaaagcacc

SEQ ID NO: 40860 - DNA, 21 bp, synthetic construct
  misc_feature 1..21: note = Description of Artificial Sequence: Synthetic oligonucleotide
  source 1..21: mol_type = other DNA
tacggcaaccccagacaagcc

SEQ ID NO: 40861 - DNA, 21 bp, synthetic construct
  misc_feature 1..21: note = Description of Artificial Sequence: Synthetic oligonucleotide
  source 1..21: mol_type = other DNA
agaagacaagacacccaagaa

SEQ ID NO: 40862 - DNA, 21 bp, synthetic construct
  misc_feature 1..21: note = Description of Artificial Sequence: Synthetic oligonucleotide
  source 1..21: mol_type = other DNA
aataataggagtgggatgggt

SEQ ID NO: 40863 - DNA, 21 bp, synthetic construct
  misc_feature 1..21: note = Description of Artificial Sequence: Synthetic oligonucleotide
  source 1..21: mol_type = other DNA
agcttcgccaaaagcgccagc

SEQ ID NO: 40864 - DNA, 21 bp, synthetic construct
  misc_feature 1..21: note = Description of Artificial Sequence: Synthetic oligonucleotide
  source 1..21: mol_type = other DNA
ggccaaaacagaaacaacacc

SEQ ID NO: 40865 - DNA, 21 bp, synthetic construct
  misc_feature 1..21: note = Description of Artificial Sequence: Synthetic oligonucleotide
  source 1..21: mol_type = other DNA
acccccgccggccccaacaaa

SEQ ID NO: 40866 - DNA, 21 bp, synthetic construct
  misc_feature 1..21: note = Description of Artificial Sequence: Synthetic oligonucleotide
  source 1..21: mol_type = other DNA
aatatttcgactaggcagagt

SEQ ID NO: 40867 - DNA, 21 bp, synthetic construct
  misc_feature 1..21: note = Description of Artificial Sequence: Synthetic oligonucleotide
  source 1..21: mol_type = other DNA
tatcatcttaattctcagtct

SEQ ID NO: 40868 - DNA, 21 bp, synthetic construct
  misc_feature 1..21: note = Description of Artificial Sequence: Synthetic oligonucleotide
  source 1..21: mol_type = other DNA
agtcttagttcgaagcagatg

SEQ ID NO: 40869 - DNA, 21 bp, synthetic construct
  misc_feature 1..21: note = Description of Artificial Sequence: Synthetic oligonucleotide
  source 1..21: mol_type = other DNA
aataatgggaggcctattgcg

SEQ ID NO: 40870 - DNA, 21 bp, synthetic construct
  misc_feature 1..21: note = Description of Artificial Sequence: Synthetic oligonucleotide
  source 1..21: mol_type = other DNA
aaccaaaaaaccagaaccgac

SEQ ID NO: 40871 - DNA, 21 bp, synthetic construct
  misc_feature 1..21: note = Description of Artificial Sequence: Synthetic oligonucleotide
  source 1..21: mol_type = other DNA
accagccaaaccaaaatcgtc

SEQ ID NO: 40872 - DNA, 21 bp, synthetic construct
  misc_feature 1..21: note = Description of Artificial Sequence: Synthetic oligonucleotide
  source 1..21: mol_type = other DNA
gtcacccccaccaaacacccc

SEQ ID NO: 40873 - DNA, 21 bp, synthetic construct
  misc_feature 1..21: note = Description of Artificial Sequence: Synthetic oligonucleotide
  source 1..21: mol_type = other DNA
cccggccaaagcaccagcaaa

SEQ ID NO: 40874 - DNA, 21 bp, synthetic construct
  misc_feature 1..21: note = Description of Artificial Sequence: Synthetic oligonucleotide
  source 1..21: mol_type = other DNA
aaaaccagcaccccctacagc

SEQ ID NO: 40875 - DNA, 21 bp, synthetic construct
  misc_feature 1..21: note = Description of Artificial Sequence: Synthetic oligonucleotide
  source 1..21: mol_type = other DNA
tctgggggtaagtcggcgctt

SEQ ID NO: 40876 - DNA, 21 bp, synthetic construct
  misc_feature 1..21: note = Description of Artificial Sequence: Synthetic oligonucleotide
  source 1..21: mol_type = other DNA
aacggcaccagacaaaaccaa

SEQ ID NO: 40877 - DNA, 21 bp, synthetic construct
  misc_feature 1..21: note = Description of Artificial Sequence: Synthetic oligonucleotide
  source 1..21: mol_type = other DNA
aacggccccggccaaaaccaa

SEQ ID NO: 40878 - DNA, 21 bp, synthetic construct
  misc_feature 1..21: note = Description of Artificial Sequence: Synthetic oligonucleotide
  source 1..21: mol_type = other DNA
gccaccaacaaaaccaccaac

SEQ ID NO: 40879 - DNA, 21 bp, synthetic construct
  misc_feature 1..21: note = Description of Artificial Sequence: Synthetic oligonucleotide
  source 1..21: mol_type = other DNA
accggcatgagaaacatcggc

SEQ ID NO: 40880 - DNA, 21 bp, synthetic construct
  misc_feature 1..21: note = Description of Artificial Sequence: Synthetic oligonucleotide
  source 1..21: mol_type = other DNA
cccaccaccaccgccaaaccc

SEQ ID NO: 40881 - DNA, 21 bp, synthetic construct
  misc_feature 1..21: note = Description of Artificial Sequence: Synthetic oligonucleotide
  source 1..21: mol_type = other DNA
ttccccaccagccccaccaga

SEQ ID NO: 40882 - DNA, 21 bp, synthetic construct
  misc_feature 1..21: note = Description of Artificial Sequence: Synthetic oligonucleotide
  source 1..21: mol_type = other DNA
ccttataattctaaggcttcg

SEQ ID NO: 40883 - DNA, 21 bp, synthetic construct
  misc_feature 1..21: note = Description of Artificial Sequence: Synthetic oligonucleotide
  source 1..21: mol_type = other DNA
ggcctccaaagcaaacaactc

SEQ ID NO: 40884 - DNA, 21 bp, synthetic construct
  misc_feature 1..21: note = Description of Artificial Sequence: Synthetic oligonucleotide
  source 1..21: mol_type = other DNA
gccagcctcaaaacccaaatg

SEQ ID NO: 40885 - DNA, 21 bp, synthetic construct
  misc_feature 1..21: note = Description of Artificial Sequence: Synthetic oligonucleotide
  source 1..21: mol_type = other DNA
agccccggcagaacccaaagc

SEQ ID NO: 40886 - DNA, 21 bp, synthetic construct
  misc_feature 1..21: note = Description of Artificial Sequence: Synthetic oligonucleotide
  source 1..21: mol_type = other DNA
gaactcatgaacaaaagcaaa

SEQ ID NO: 40887 - DNA, 21 bp, synthetic construct
  misc_feature 1..21: note = Description of Artificial Sequence: Synthetic oligonucleotide
  source 1..21: mol_type = other DNA
atcggcaacaaacaaagccaa

SEQ ID NO: 40888 - DNA, 21 bp, synthetic construct
  misc_feature 1..21: note = Description of Artificial Sequence: Synthetic oligonucleotide
  source 1..21: mol_type = other DNA
ccggggcagaagcagggtatt

SEQ ID NO: 40889 - DNA, 21 bp, synthetic construct
  misc_feature 1..21: note = Description of Artificial Sequence: Synthetic oligonucleotide
  source 1..21: mol_type = other DNA
gaacccacccaccccagaggc

SEQ ID NO: 40890 - DNA, 21 bp, synthetic construct
  misc_feature 1..21: note = Description of Artificial Sequence: Synthetic oligonucleotide
  source 1..21: mol_type = other DNA
tttcgggcgcaggctaatgtt

SEQ ID NO: 40891 - DNA, 21 bp, synthetic construct
  misc_feature 1..21: note = Description of Artificial Sequence: Synthetic oligonucleotide
  source 1..21: mol_type = other DNA
cccacccacgaaagagccaaa

SEQ ID NO: 40892 - DNA, 21 bp, synthetic construct
  misc_feature 1..21: note = Description of Artificial Sequence: Synthetic oligonucleotide
  source 1..21: mol_type = other DNA
cctggtagttcgaataggaat

SEQ ID NO: 40893 - DNA, 21 bp, synthetic construct
  misc_feature 1..21: note = Description of Artificial Sequence: Synthetic oligonucleotide
  source 1..21: mol_type = other DNA
gtccccctccaaaaacccagc

SEQ ID NO: 40894 - DNA, 21 bp, synthetic construct
  misc_feature 1..21: note = Description of Artificial Sequence: Synthetic oligonucleotide
  source 1..21: mol_type = other DNA
tttacttctaataaggcgtcg

SEQ ID NO: 40895 - DNA, 21 bp, synthetic construct
  misc_feature 1..21: note = Description of Artificial Sequence: Synthetic oligonucleotide
  source 1..21: mol_type = other DNA
gaaaacagcagcaaagccaaa

SEQ ID NO: 40896 - DNA, 21 bp, synthetic construct
  misc_feature 1..21: note = Description of Artificial Sequence: Synthetic oligonucleotide
  source 1..21: mol_type = other DNA
agcggcgccggcagcgccggc

SEQ ID NO: 40897 - DNA, 21 bp, synthetic construct
  misc_feature 1..21: note = Description of Artificial Sequence: Synthetic oligonucleotide
  source 1..21: mol_type = other DNA
ggcctcgccaaagaccaaaga

SEQ ID NO: 40898 - DNA, 21 bp, synthetic construct
  misc_feature 1..21: note = Description of Artificial Sequence: Synthetic oligonucleotide
  source 1..21: mol_type = other DNA
accccccacgacggccaaaga

SEQ ID NO: 40899 - DNA, 21 bp, synthetic construct
  misc_feature 1..21: note = Description of Artificial Sequence: Synthetic oligonucleotide
  source 1..21: mol_type = other DNA
tgtattgggaataagactaat

SEQ ID NO: 40900 - DNA, 21 bp, synthetic construct
  misc_feature 1..21: note = Description of Artificial Sequence: Synthetic oligonucleotide
  source 1..21: mol_type = other DNA
tatattaagtctgttactaat

SEQ ID NO: 40901 - DNA, 21 bp, synthetic construct
  misc_feature 1..21: note = Description of Artificial Sequence: Synthetic oligonucleotide
  source 1..21: mol_type = other DNA
accagcagcggccacagcgtc

SEQ ID NO: 40902 - DNA, 21 bp, synthetic construct
  misc_feature 1..21: note = Description of Artificial Sequence: Synthetic oligonucleotide
  source 1..21: mol_type = other DNA
aatagtttttctcggaatagt

SEQ ID NO: 40903 - DNA, 21 bp, synthetic construct
  misc_feature 1..21: note = Description of Artificial Sequence: Synthetic oligonucleotide
  source 1..21: mol_type = other DNA
tctgattctcgtaatacgaat

SEQ ID NO: 40904 - DNA, 21 bp, synthetic construct
  misc_feature 1..21: note = Description of Artificial Sequence: Synthetic oligonucleotide
  source 1..21: mol_type = other DNA
aacacccaaagctacaccaga

SEQ ID NO: 40905 - DNA, 21 bp, synthetic construct
  misc_feature 1..21: note = Description of Artificial Sequence: Synthetic oligonucleotide
  source 1..21: mol_type = other DNA
agcagaaacagccccccccaa

SEQ ID NO: 40906 - DNA, 21 bp, synthetic construct
  misc_feature 1..21: note = Description of Artificial Sequence: Synthetic oligonucleotide
  source 1..21: mol_type = other DNA
actatttcgactagtcagagt

SEQ ID NO: 40907 - DNA, 21 bp, synthetic construct
  misc_feature 1..21: note = Description of Artificial Sequence: Synthetic oligonucleotide
  source 1..21: mol_type = other DNA
aatggttttaatagtaataat

SEQ ID NO: 40908 - DNA, 21 bp, synthetic construct
  misc_feature 1..21: note = Description of Artificial Sequence: Synthetic oligonucleotide
  source 1..21: mol_type = other DNA
ttcaccaaactcgccagcccc

SEQ ID NO: 40909 - DNA, 21 bp, synthetic construct
  misc_feature 1..21: note = Description of Artificial Sequence: Synthetic oligonucleotide
  source 1..21: mol_type = other DNA
tggaggttgtctcggcagcag

SEQ ID NO: 40910 - DNA, 21 bp, synthetic construct
  misc_feature 1..21: note = Description of Artificial Sequence: Synthetic oligonucleotide
  source 1..21: mol_type = other DNA
caaaccagccacagcgccaaa

SEQ ID NO: 40911 - DNA, 21 bp, synthetic construct
  misc_feature 1..21: note = Description of Artificial Sequence: Synthetic oligonucleotide
  source 1..21: mol_type = other DNA
ccctacgccggcaaccaaaga

SEQ ID NO: 40912 - DNA, 21 bp, synthetic construct
  misc_feature 1..21: note = Description of Artificial Sequence: Synthetic oligonucleotide
  source 1..21: mol_type = other DNA
gggtctggtaataaggttaat

SEQ ID NO: 40913 - DNA, 21 bp, synthetic construct
  misc_feature 1..21: note = Description of Artificial Sequence: Synthetic oligonucleotide
  source 1..21: mol_type = other DNA
aatagtgggaagccgaatgcg

SEQ ID NO: 40914 - DNA, 21 bp, synthetic construct
  misc_feature 1..21: note = Description of Artificial Sequence: Synthetic oligonucleotide
  source 1..21: mol_type = other DNA
cctggtagtgtgactgggtct

SEQ ID NO: 40915 - DNA, 21 bp, synthetic construct
  misc_feature 1..21: note = Description of Artificial Sequence: Synthetic oligonucleotide
  source 1..21: mol_type = other DNA
aacggcatcaccaaaagcagc

SEQ ID NO: 40916 - DNA, 21 bp, synthetic construct
  misc_feature 1..21: note = Description of Artificial Sequence: Synthetic oligonucleotide
  source 1..21: mol_type = other DNA
caggggtctgggagtaatcat

SEQ ID NO: 40917 - DNA, 21 bp, synthetic construct
  misc_feature 1..21: note = Description of Artificial Sequence: Synthetic oligonucleotide
  source 1..21: mol_type = other DNA
ggtccgattcggccgattcag

SEQ ID NO: 40918 - DNA, 21 bp, synthetic construct
  misc_feature 1..21: note = Description of Artificial Sequence: Synthetic oligonucleotide
  source 1..21: mol_type = other DNA
ttcgccagcagacccgtccaa

SEQ ID NO: 40919 - DNA, 21 bp, synthetic construct
  misc_feature 1..21: note = Description of Artificial Sequence: Synthetic oligonucleotide
  source 1..21: mol_type = other DNA
agcaacgaaaccaaaagcagc

SEQ ID NO: 40920 - DNA, 21 bp, synthetic construct
  misc_feature 1..21: note = Description of Artificial Sequence: Synthetic oligonucleotide
  source 1..21: mol_type = other DNA
attcctgcgaattcttttaag

SEQ ID NO: 40921 - DNA, 21 bp, synthetic construct
  misc_feature 1..21: note = Description of Artificial Sequence: Synthetic oligonucleotide
  source 1..21: mol_type = other DNA
gcccaaaccaaaggcacccaa

SEQ ID NO: 40922 - DNA, 21 bp, synthetic construct
  misc_feature 1..21: note = Description of Artificial Sequence: Synthetic oligonucleotide
  source 1..21: mol_type = other DNA
acttctatgaatggtaataag

SEQ ID NO: 40923 - DNA, 21 bp, synthetic construct
  misc_feature 1..21: note = Description of Artificial Sequence: Synthetic oligonucleotide
  source 1..21: mol_type = other DNA
agccaagtcagcaaaccccaa

SEQ ID NO: 40924 - DNA, 21 bp, synthetic construct
  misc_feature 1..21: note = Description of Artificial Sequence: Synthetic oligonucleotide
  source 1..21: mol_type = other DNA
cccaacaccaaacccgtcctc

SEQ ID NO: 40925 - DNA, 21 bp, synthetic construct
  misc_feature 1..21: note = Description of Artificial Sequence: Synthetic oligonucleotide
  source 1..21: mol_type = other DNA
accccccaccaaagaagcagc

SEQ ID NO: 40926 - DNA, 21 bp, synthetic construct
  misc_feature 1..21: note = Description of Artificial Sequence: Synthetic oligonucleotide
  source 1..21: mol_type = other DNA
aatcagtcgaggccgggggtg

SEQ ID NO: 40927 - DNA, 21 bp, synthetic construct
  misc_feature 1..21: note = Description of Artificial Sequence: Synthetic oligonucleotide
  source 1..21: mol_type = other DNA
aataatagtaagagtcagatt

SEQ ID NO: 40928 - DNA, 21 bp, synthetic construct
  misc_feature 1..21: note = Description of Artificial Sequence: Synthetic oligonucleotide
  source 1..21: mol_type = other DNA
gctatgtctgagcatctgaag

SEQ ID NO: 40929 - DNA, 21 bp, synthetic construct
  misc_feature 1..21: note = Description of Artificial Sequence: Synthetic oligonucleotide
  source 1..21: mol_type = other DNA
cttattcttccgggtaataat

SEQ ID NO: 40930 - DNA, 21 bp, synthetic construct
  misc_feature 1..21: note = Description of Artificial Sequence: Synthetic oligonucleotide
  source 1..21: mol_type = other DNA
ggcgtcagcgaacacagaaaa

SEQ ID NO: 40931 - DNA, 21 bp, synthetic construct
  misc_feature 1..21: note = Description of Artificial Sequence: Synthetic oligonucleotide
  source 1..21: mol_type = other DNA
cattcggagaatgggaatcgt

SEQ ID NO: 40932 - DNA, 21 bp, synthetic construct
  misc_feature 1..21: note = Description of Artificial Sequence: Synthetic oligonucleotide
  source 1..21: mol_type = other DNA
gatttgcagactagtgctaag

SEQ ID NO: 40933 - DNA, 21 bp, synthetic construct
  misc_feature 1..21: note = Description of Artificial Sequence: Synthetic oligonucleotide
  source 1..21: mol_type = other DNA
cggtctttgcctaatgtggct

SEQ ID NO: 40934 - DNA, 21 bp, synthetic construct
  misc_feature 1..21: note = Description of Artificial Sequence: Synthetic oligonucleotide
  source 1..21: mol_type = other DNA
tattcggataataagactact

SEQ ID NO: 40935 - DNA, 21 bp, synthetic construct
  misc_feature 1..21: note = Description of Artificial Sequence: Synthetic oligonucleotide
  source 1..21: mol_type = other DNA
tcgcataataggacgaatgat

SEQ ID NO: 40936 - DNA, 21 bp, synthetic construct
  misc_feature 1..21: note = Description of Artificial Sequence: Synthetic oligonucleotide
  source 1..21: mol_type = other DNA
gttagtaataagtctgtgctt

SEQ ID NO: 40937 - DNA, 21 bp, synthetic construct
  misc_feature 1..21: note = Description of Artificial Sequence: Synthetic oligonucleotide
  source 1..21: mol_type = other DNA
cgggatcatagtggttcgagg

SEQ ID NO: 40938 - DNA, 21 bp, synthetic construct
  misc_feature 1..21: note = Description of Artificial Sequence: Synthetic oligonucleotide
  source 1..21: mol_type = other DNA
aacgccaaccaaaaccaaatg

SEQ ID NO: 40939 - DNA, 21 bp, synthetic construct
  misc_feature 1..21: note = Description of Artificial Sequence: Synthetic oligonucleotide
  source 1..21: mol_type = other DNA
acccaccaaagcagcaccagc

SEQ ID NO: 40940 - DNA, 21 bp, synthetic construct
  misc_feature 1..21: note = Description of Artificial Sequence: Synthetic oligonucleotide
  source 1..21: mol_type = other DNA
actttgcctagggtgccggcg

SEQ ID NO: 40941 - DNA, 21 bp, synthetic construct
  misc_feature 1..21: note = Description of Artificial Sequence: Synthetic oligonucleotide
  source 1..21: mol_type = other DNA
tcttattcgagttctcagctg

SEQ ID NO: 40942 - DNA, 21 bp, synthetic construct
  misc_feature 1..21: note = Description of Artificial Sequence: Synthetic oligonucleotide
  source 1..21: mol_type = other DNA
ccgaaggtgagggatgggtat

SEQ ID NO: 40943 - DNA, 21 bp, synthetic construct
  misc_feature 1..21: note = Description of Artificial Sequence: Synthetic oligonucleotide
  source 1..21: mol_type = other DNA
tacggccaaaccaaaacccaa

SEQ ID NO: 40944 - DNA, 21 bp, synthetic construct
  misc_feature 1..21: note = Description of Artificial Sequence: Synthetic oligonucleotide
  source 1..21: mol_type = other DNA
tctgcgagtccgagtattaag

SEQ ID NO: 40945 - DNA, 21 bp, synthetic construct
  misc_feature 1..21: note = Description of Artificial Sequence: Synthetic oligonucleotide
  source 1..21: mol_type = other DNA
cggtcgactgtgtctccgaat

SEQ ID NO: 40946 - DNA, 21 bp, synthetic construct
  misc_feature 1..21: note = Description of Artificial Sequence: Synthetic oligonucleotide
  source 1..21: mol_type = other DNA
gtccaaagaagcagcaaccaa

SEQ ID NO: 40947 - DNA, 21 bp, synthetic construct
  misc_feature 1..21: note = Description of Artificial Sequence: Synthetic oligonucleotide
  source 1..21: mol_type = other DNA
aacggttgtggacagaatcaa

SEQ ID NO: 40948 - DNA, 21 bp, synthetic construct
  misc_feature 1..21: note = Description of Artificial Sequence: Synthetic oligonucleotide
  source 1..21: mol_type = other DNA
agcaacatgaccagcaccaga

SEQ ID NO: 40949 - DNA, 21 bp, synthetic construct
  misc_feature 1..21: note = Description of Artificial Sequence: Synthetic oligonucleotide
  source 1..21: mol_type = other DNA
ccccccaacctcaaactcagc

SEQ ID NO: 40950 - DNA, 21 bp, synthetic construct
  misc_feature 1..21: note = Description of Artificial Sequence: Synthetic oligonucleotide
  source 1..21: mol_type = other DNA
gattctattggtagttctaag

SEQ ID NO: 40951 - DNA, 21 bp, synthetic construct
  misc_feature 1..21: note = Description of Artificial Sequence: Synthetic oligonucleotide
  source 1..21: mol_type = other DNA
atgcttgggtctagtaataag

SEQ ID NO: 40952 - DNA, 21 bp, synthetic construct
  misc_feature 1..21: note = Description of Artificial Sequence: Synthetic oligonucleotide
  source 1..21: mol_type = other DNA
gacaacatgagcacccccaaa

SEQ ID NO: 40953 - DNA, 21 bp, synthetic construct
  misc_feature 1..21: note = Description of Artificial Sequence: Synthetic oligonucleotide
  source 1..21: mol_type = other DNA
ctcggcagcagcaccatcctc

SEQ ID NO: 40954 - DNA, 21 bp, synthetic construct
  misc_feature 1..21: note = Description of Artificial Sequence: Synthetic oligonucleotide
  source 1..21: mol_type = other DNA
agcagcatgagccaccaaaaa

SEQ ID NO: 40955 - DNA, 21 bp, synthetic construct
  misc_feature 1..21: note = Description of Artificial Sequence: Synthetic oligonucleotide
  source 1..21: mol_type = other DNA
aaacaacccgccagcacccac

SEQ ID NO: 40956 - DNA, 21 bp, synthetic construct
  misc_feature 1..21: note = Description of Artificial Sequence: Synthetic oligonucleotide
  source 1..21: mol_type = other DNA
gccctcaccggcaaactcagc

SEQ ID NO: 40957 - DNA, 21 bp, synthetic construct
  misc_feature 1..21: note = Description of Artificial Sequence: Synthetic oligonucleotide
  source 1..21: mol_type = other DNA
ggcagcggccacggcaccaac

SEQ ID NO: 40958 - DNA, 21 bp, synthetic construct
  misc_feature 1..21: note = Description of Artificial Sequence: Synthetic oligonucleotide
  source 1..21: mol_type = other DNA
ccgacgggggtgaataagatg

SEQ ID NO: 40959 - DNA, 21 bp, synthetic construct
  misc_feature 1..21: note = Description of Artificial Sequence: Synthetic oligonucleotide
  source 1..21: mol_type = other DNA
acgagtagtgggggtctgact

SEQ ID NO: 40960 - DNA, 21 bp, synthetic construct
  misc_feature 1..21: note = Description of Artificial Sequence: Synthetic oligonucleotide
  source 1..21: mol_type = other DNA
aacagcagaagccaccacgaa

SEQ ID NO: 40961 - DNA, 21 bp, synthetic construct
  misc_feature 1..21: note = Description of Artificial Sequence: Synthetic oligonucleotide
  source 1..21: mol_type = other DNA
atggggggtgttacgtcttct

SEQ ID NO: 40962 - DNA, 21 bp, synthetic construct
  misc_feature 1..21: note = Description of Artificial Sequence: Synthetic oligonucleotide
  source 1..21: mol_type = other DNA
gggtatcgggggaatggtaat

SEQ ID NO: 40963 - DNA, 21 bp, synthetic construct
  misc_feature 1..21: note = Description of Artificial Sequence: Synthetic oligonucleotide
  source 1..21: mol_type = other DNA
actggtactgggagttttcat

SEQ ID NO: 40964 - DNA, 21 bp, synthetic construct
  misc_feature 1..21: note = Description of Artificial Sequence: Synthetic oligonucleotide
  source 1..21: mol_type = other DNA
acgggtttgagtcatatgggt

SEQ ID NO: 40965 - DNA, 21 bp, synthetic construct
  misc_feature 1..21: note = Description of Artificial Sequence: Synthetic oligonucleotide
  source 1..21: mol_type = other DNA
cttaggtcgaaggagtctgcg

SEQ ID NO: 40966 - DNA, 21 bp, synthetic construct
  misc_feature 1..21: note = Description of Artificial Sequence: Synthetic oligonucleotide
  source 1..21: mol_type = other DNA
ccgactcatgcttcgagtctt

SEQ ID NO: 40967 - DNA, 21 bp, synthetic construct
  misc_feature 1..21: note = Description of Artificial Sequence: Synthetic oligonucleotide
  source 1..21: mol_type = other DNA
aagattgcttcgaagtcggag

SEQ ID NO: 40968 - DNA, 21 bp, synthetic construct
  misc_feature 1..21: note = Description of Artificial Sequence: Synthetic oligonucleotide
  source 1..21: mol_type = other DNA
aacgtcagcaccggcgccacc

SEQ ID NO: 40969 - DNA, 21 bp, synthetic construct
  misc_feature 1..21: note = Description of Artificial Sequence: Synthetic oligonucleotide
  source 1..21: mol_type = other DNA
aacaggtctggacagaatcaa

SEQ ID NO: 40970 - DNA, 21 bp, synthetic construct
  misc_feature 1..21: note = Description of Artificial Sequence: Synthetic oligonucleotide
  source 1..21: mol_type = other DNA
agccccaccagccccatgaac

SEQ ID NO: 40971 - DNA, 21 bp, synthetic construct
  misc_feature 1..21: note = Description of Artificial Sequence: Synthetic oligonucleotide
  source 1..21: mol_type = other DNA
tataatcagccggttggtaag

SEQ ID NO: 40972 - DNA, 21 bp, synthetic construct
  misc_feature 1..21: note = Description of Artificial Sequence: Synthetic oligonucleotide
  source 1..21: mol_type = other DNA
gctacgatgcgttcgaatgag

SEQ ID NO: 40973 - DNA, 21 bp, synthetic construct
  misc_feature 1..21: note = Description of Artificial Sequence: Synthetic oligonucleotide
  source 1..21: mol_type = other DNA
aaaaaccccagcagcgccccc

SEQ ID NO: 40974 - DNA, 21 bp, synthetic construct
  misc_feature 1..21: note = Description of Artificial Sequence: Synthetic oligonucleotide
  source 1..21: mol_type = other DNA
aataatctggcggggagtaag

SEQ ID NO: 40975 - DNA, 21 bp, synthetic construct
  misc_feature 1..21: note = Description of Artificial Sequence: Synthetic oligonucleotide
  source 1..21: mol_type = other DNA
tctgattctcggtcgggtatg

SEQ ID NO: 40976 - DNA, 21 bp, synthetic construct
  misc_feature 1..21: note = Description of Artificial Sequence: Synthetic oligonucleotide
  source 1..21: mol_type = other DNA
cccagcaacaaaaccaacagc

SEQ ID NO: 40977 - DNA, 21 bp, synthetic construct
  misc_feature 1..21: note = Description of Artificial Sequence: Synthetic oligonucleotide
  source 1..21: mol_type = other DNA
gcccaagccagaatgatgaac

SEQ ID NO: 40978 - DNA, 21 bp, synthetic construct
  misc_feature 1..21: note = Description of Artificial Sequence: Synthetic oligonucleotide
  source 1..21: mol_type = other DNA
cagaagactaataagctttat

SEQ ID NO: 40979 - DNA, 21 bp, synthetic construct
  misc_feature 1..21: note = Description of Artificial Sequence: Synthetic oligonucleotide
  source 1..21: mol_type = other DNA
gtgactaggggtctgaatgtt

SEQ ID NO: 40980 - DNA, 21 bp, synthetic construct
  misc_feature 1..21: note = Description of Artificial Sequence: Synthetic oligonucleotide
  source 1..21: mol_type = other DNA
ggcagactcaccagcagcatc

SEQ ID NO: 40981 - DNA, 21 bp, synthetic construct
  misc_feature 1..21: note = Description of Artificial Sequence: Synthetic oligonucleotide
  source 1..21: mol_type = other DNA
tataatgtgaatcgtaatacg

SEQ ID NO: 40982 - DNA, 21 bp, synthetic construct
  misc_feature 1..21: note = Description of Artificial Sequence: Synthetic oligonucleotide
  source 1..21: mol_type = other DNA
cctgcggctcataatgcggtt

SEQ ID NO: 40983 - DNA, 21 bp, synthetic construct
  misc_feature 1..21: note = Description of Artificial Sequence: Synthetic oligonucleotide
  source 1..21: mol_type = other DNA
gtgtcgactaagagtgctcct

SEQ ID NO: 40984 - DNA, 21 bp, synthetic construct
  misc_feature 1..21: note = Description of Artificial Sequence: Synthetic oligonucleotide
  source 1..21: mol_type = other DNA
acggctgggcaggcgtcggtt

SEQ ID NO: 40985 - DNA, 21 bp, synthetic construct
  misc_feature 1..21: note = Description of Artificial Sequence: Synthetic oligonucleotide
  source 1..21: mol_type = other DNA
aatatttcgactaggcagagt

SEQ ID NO: 40986 - DNA, 21 bp, synthetic construct
  misc_feature 1..21: note = Description of Artificial Sequence: Synthetic oligonucleotide
  source 1..21: mol_type = other DNA
agcagcagcggcggcgtcaaa

SEQ ID NO: 40987 - DNA, 21 bp, synthetic construct
  misc_feature 1..21: note = Description of Artificial Sequence: Synthetic oligonucleotide
  source 1..21: mol_type = other DNA
aatagttatgatccgaagcgt

SEQ ID NO: 40988 - DNA, 21 bp, synthetic construct
  misc_feature 1..21: note = Description of Artificial Sequence: Synthetic oligonucleotide
  source 1..21: mol_type = other DNA
ctggttcggcagtcttctgct

SEQ ID NO: 40989 - DNA, 21 bp, synthetic construct
  misc_feature 1..21: note = Description of Artificial Sequence: Synthetic oligonucleotide
  source 1..21: mol_type = other DNA
aacgtcaacagccaaatgctc

SEQ ID NO: 40990 - DNA, 21 bp, synthetic construct
  misc_feature 1..21: note = Description of Artificial Sequence: Synthetic oligonucleotide
  source 1..21: mol_type = other DNA
cctggtgataggggtaaggtt

SEQ ID NO: 40991 - DNA, 21 bp, synthetic construct
  misc_feature 1..21: note = Description of Artificial Sequence: Synthetic oligonucleotide
  source 1..21: mol_type = other DNA
cccagcaccagcggcgccatg

SEQ ID NO: 40992 - DNA, 21 bp, synthetic construct
  misc_feature 1..21: note = Description of Artificial Sequence: Synthetic oligonucleotide
  source 1..21: mol_type = other DNA
agcagactcgaaaaaagcaac

SEQ ID NO: 40993 - DNA, 21 bp, synthetic construct
  misc_feature 1..21: note = Description of Artificial Sequence: Synthetic oligonucleotide
  source 1..21: mol_type = other DNA
gatacgaataatagggctaat

SEQ ID NO: 40994 - DNA, 21 bp, synthetic construct
  misc_feature 1..21: note = Description of Artificial Sequence: Synthetic oligonucleotide
  source 1..21: mol_type = other DNA
gcttctactccgaataatact

SEQ ID NO: 40995 - DNA, 21 bp, synthetic construct
  misc_feature 1..21: note = Description of Artificial Sequence: Synthetic oligonucleotide
  source 1..21: mol_type = other DNA
attgggactagtattaattct

SEQ ID NO: 40996 - DNA, 21 bp, synthetic construct
  misc_feature 1..21: note = Description of Artificial Sequence: Synthetic oligonucleotide
  source 1..21: mol_type = other DNA
gtcagcaccagaagcatcagc

SEQ ID NO: 40997 - DNA, 21 bp, synthetic construct
  misc_feature 1..21: note = Description of Artificial Sequence: Synthetic oligonucleotide
  source 1..21: mol_type = other DNA
ccgttgcctaagaatagtagt

SEQ ID NO: 40998 - DNA, 21 bp, synthetic construct
  misc_feature 1..21: note = Description of Artificial Sequence: Synthetic oligonucleotide
  source 1..21: mol_type = other DNA
gtgagtggtcaggggaattct

SEQ ID NO: 40999 - DNA, 21 bp, synthetic construct
  misc_feature 1..21: note = Description of Artificial Sequence: Synthetic oligonucleotide
  source 1..21: mol_type = other DNA
caagtcagcgccaaaagcgcc

SEQ ID NO: 41000 - DNA, 21 bp, synthetic construct
  misc_feature 1..21: note = Description of Artificial Sequence: Synthetic oligonucleotide
  source 1..21: mol_type = other DNA
cctacgttgggtacgactaag

SEQ ID NO: 41001 - DNA, 21 bp, synthetic construct
  misc_feature 1..21: note = Description of Artificial Sequence: Synthetic oligonucleotide
  source 1..21: mol_type = other DNA
ctccacgacggccaaaccaga

SEQ ID NO: 41002 - DNA, 21 bp, synthetic construct
  misc_feature 1..21: note = Description of Artificial Sequence: Synthetic oligonucleotide
  source 1..21: mol_type = other DNA
ggtattgcgggggtgactcgt

SEQ ID NO: 41003 - DNA, 21 bp, synthetic construct
  misc_feature 1..21: note = Description of Artificial Sequence: Synthetic oligonucleotide
  source 1..21: mol_type = other DNA
caaagaaccagcgaccaaacc

SEQ ID NO: 41004 - DNA, 21 bp, synthetic construct
  misc_feature 1..21: note = Description of Artificial Sequence: Synthetic oligonucleotide
  source 1..21: mol_type = other DNA
agccaagtcagcaaaccccaa

SEQ ID NO: 41005 - DNA, 21 bp, synthetic construct
  misc_feature 1..21: note = Description of Artificial Sequence: Synthetic oligonucleotide
  source 1..21: mol_type = other DNA
cccatcctcgacagaaaaagc

SEQ ID NO: 41006 - DNA, 21 bp, synthetic construct
  misc_feature 1..21: note = Description of Artificial Sequence: Synthetic oligonucleotide
  source 1..21: mol_type = other DNA
caccccagcaacaaacccctc

SEQ ID NO: 41007 - DNA, 21 bp, synthetic construct
  misc_feature 1..21: note = Description of Artificial Sequence: Synthetic oligonucleotide
  source 1..21: mol_type = other DNA
agcagcagcgccaaaagcatc

SEQ ID NO: 41008 - DNA, 21 bp, synthetic construct
  misc_feature 1..21: note = Description of Artificial Sequence: Synthetic oligonucleotide
  source 1..21: mol_type = other DNA
actggtattgggtctcatctt

SEQ ID NO: 41009 - DNA, 21 bp, synthetic construct
  misc_feature 1..21: note = Description of Artificial Sequence: Synthetic oligonucleotide
  source 1..21: mol_type = other DNA
gaccccgtcagaaaaaccagc

SEQ ID NO: 41010 - DNA, 21 bp, synthetic construct
  misc_feature 1..21: note = Description of Artificial Sequence: Synthetic oligonucleotide
  source 1..21: mol_type = other DNA
gatcctcaggtgagggctctt

SEQ ID NO: 41011 - DNA, 21 bp, synthetic construct
  misc_feature 1..21: note = Description of Artificial Sequence: Synthetic oligonucleotide
  source 1..21: mol_type = other DNA
agtgggtctctttcttctgct

SEQ ID NO: 41012 - DNA, 21 bp, synthetic construct
  misc_feature 1..21: note = Description of Artificial Sequence: Synthetic oligonucleotide
  source 1..21: mol_type = other DNA
ggccacctcagccccagcagc

SEQ ID NO: 41013 - DNA, 21 bp, synthetic construct
  misc_feature 1..21: note = Description of Artificial Sequence: Synthetic oligonucleotide
  source 1..21: mol_type = other DNA
agaaacgacaccaaactcttc

SEQ ID NO: 41014 - DNA, 21 bp, synthetic construct
  misc_feature 1..21: note = Description of Artificial Sequence: Synthetic oligonucleotide
  source 1..21: mol_type = other DNA
taccaaaacaaaagcctcacc

SEQ ID NO: 41015 - DNA, 21 bp, synthetic construct
  misc_feature 1..21: note = Description of Artificial Sequence: Synthetic oligonucleotide
  source 1..21: mol_type = other DNA
ggctacaccgacaaacacgtc

SEQ ID NO: 41016 - DNA, 21 bp, synthetic construct
  misc_feature 1..21: note = Description of Artificial Sequence: Synthetic oligonucleotide
  source 1..21: mol_type = other DNA
cccggcggcaaaagccaactc

SEQ ID NO: 41017 - DNA, 21 bp, synthetic construct
  misc_feature 1..21: note = Description of Artificial Sequence: Synthetic oligonucleotide
  source 1..21: mol_type = other DNA
agaagcgccagcggccaactc

SEQ ID NO: 41018 - DNA, 21 bp, synthetic construct
  misc_feature 1..21: note = Description of Artificial Sequence: Synthetic oligonucleotide
  source 1..21: mol_type = other DNA
ggttctcataatgatagtagg

SEQ ID NO: 41019 - DNA, 21 bp, synthetic construct
  misc_feature 1..21: note = Description of Artificial Sequence: Synthetic oligonucleotide
  source 1..21: mol_type = other DNA
aacggttctggacagaagcaa

SEQ ID NO: 41020 - DNA, 21 bp, synthetic construct
  misc_feature 1..21: note = Description of Artificial Sequence: Synthetic oligonucleotide
  source 1..21: mol_type = other DNA
tatgctatggagagggttggg

SEQ ID NO: 41021 - DNA, 21 bp, synthetic construct
  misc_feature 1..21: note = Description of Artificial Sequence: Synthetic oligonucleotide
  source 1..21: mol_type = other DNA
ggcctccacagcgtcgccaaa

SEQ ID NO: 41022 - DNA, 21 bp, synthetic construct
  misc_feature 1..21: note = Description of Artificial Sequence: Synthetic oligonucleotide
  source 1..21: mol_type = other DNA
tctgttcatcagaatcgggcg

SEQ ID NO: 41023 - DNA, 21 bp, synthetic construct
  misc_feature 1..21: note = Description of Artificial Sequence: Synthetic oligonucleotide
  source 1..21: mol_type = other DNA
cttgggcctgggaagaatact

SEQ ID NO: 41024 - DNA, 21 bp, synthetic construct
  misc_feature 1..21: note = Description of Artificial Sequence: Synthetic oligonucleotide
  source 1..21: mol_type = other DNA
gaaagaaaagtccaaaactgc

SEQ ID NO: 41025 - DNA, 21 bp, synthetic construct
  misc_feature 1..21: note = Description of Artificial Sequence: Synthetic oligonucleotide
  source 1..21: mol_type = other DNA
cccaccaaaggcgccaacgcc

SEQ ID NO: 41026 - DNA, 21 bp, synthetic construct
  misc_feature 1..21: note = Description of Artificial Sequence: Synthetic oligonucleotide
  source 1..21: mol_type = other DNA
ggtaataggtcttctgggctt

SEQ ID NO: 41027 - DNA, 21 bp, synthetic construct
  misc_feature 1..21: note = Description of Artificial Sequence: Synthetic oligonucleotide
  source 1..21: mol_type = other DNA
gtccaacaaagcaaagcctac

SEQ ID NO: 41028 - DNA, 21 bp, synthetic construct
  misc_feature 1..21: note = Description of Artificial Sequence: Synthetic oligonucleotide
  source 1..21: mol_type = other DNA
gggcaggagcgtactaatatg

SEQ ID NO: 41029 - DNA, 21 bp, synthetic construct
  misc_feature 1..21: note = Description of Artificial Sequence: Synthetic oligonucleotide
  source 1..21: mol_type = other DNA
gccaccgccaacacccacatg

SEQ ID NO: 41030 - DNA, 21 bp, synthetic construct
  misc_feature 1..21: note = Description of Artificial Sequence: Synthetic oligonucleotide
  source 1..21: mol_type = other DNA
gttaatacgactcgtgctgag

SEQ ID NO: 41031 - DNA, 21 bp, synthetic construct
  misc_feature 1..21: note = Description of Artificial Sequence: Synthetic oligonucleotide
  source 1..21: mol_type = other DNA
acccaacaacacggcagcaac

SEQ ID NO: 41032 - DNA, 21 bp, synthetic construct
  misc_feature 1..21: note = Description of Artificial Sequence: Synthetic oligonucleotide
  source 1..21: mol_type = other DNA
ctcaacctcaaacccatcaac

SEQ ID NO: 41033 - DNA, 21 bp, synthetic construct
  misc_feature 1..21: note = Description of Artificial Sequence: Synthetic oligonucleotide
  source 1..21: mol_type = other DNA
ggcgtcagcgccaccgtcaaa

SEQ ID NO: 41034 - DNA, 21 bp, synthetic construct
  misc_feature 1..21: note = Description of Artificial Sequence: Synthetic oligonucleotide
  source 1..21: mol_type = other DNA
acccccacccccgtcaaccaa

SEQ ID NO: 41035 - DNA, 21 bp, synthetic construct
  misc_feature 1..21: note = Description of Artificial Sequence: Synthetic oligonucleotide
  source 1..21: mol_type = other DNA
actactcataatatgcagggg

SEQ ID NO: 41036 - DNA, 21 bp, synthetic construct
  misc_feature 1..21: note = Description of Artificial Sequence: Synthetic oligonucleotide
  source 1..21: mol_type = other DNA
aacgcccaacaagcccaaaga

SEQ ID NO: 41037 - DNA, 21 bp, synthetic construct
  misc_feature 1..21: note = Description of Artificial Sequence: Synthetic oligonucleotide
  source 1..21: mol_type = other DNA
gttagtaagagtccgtctact

SEQ ID NO: 41038 - DNA, 21 bp, synthetic construct
  misc_feature 1..21: note = Description of Artificial Sequence: Synthetic oligonucleotide
  source 1..21: mol_type = other DNA
gtgggtgatcgtagttggtcg

SEQ ID NO: 41039 - DNA, 21 bp, synthetic construct
  misc_feature 1..21: note = Description of Artificial Sequence: Synthetic oligonucleotide
  source 1..21: mol_type = other DNA
catcgtgatcaggtttcgctt

SEQ ID NO: 41040 - DNA, 21 bp, synthetic construct
  misc_feature 1..21: note = Description of Artificial Sequence: Synthetic oligonucleotide
  source 1..21: mol_type = other DNA
ccgaatggggcgcatgttacg

SEQ ID NO: 41041 - DNA, 21 bp, synthetic construct
  misc_feature 1..21: note = Description of Artificial Sequence: Synthetic oligonucleotide
  source 1..21: mol_type = other DNA
actgtgcctggtcgttcgacg

SEQ ID NO: 41042 - DNA, 21 bp, synthetic construct
  misc_feature 1..21: note = Description of Artificial Sequence: Synthetic oligonucleotide
  source 1..21: mol_type = other DNA
tatgttagtaattctaatgcg

SEQ ID NO: 41043 - DNA, 21 bp, synthetic construct
  misc_feature 1..21: note = Description of Artificial Sequence: Synthetic oligonucleotide
  source 1..21: mol_type = other DNA
gctctttctagtcagaagggt

SEQ ID NO: 41044 - DNA, 21 bp, synthetic construct
  misc_feature 1..21: note = Description of Artificial Sequence: Synthetic oligonucleotide
  source 1..21: mol_type = other DNA
aacggttctggacagaataaa

SEQ ID NO: 41045 - DNA, 21 bp, synthetic construct
  misc_feature 1..21: note = Description of Artificial Sequence: Synthetic oligonucleotide
  source 1..21: mol_type = other DNA
ggtacggtgaatgcgaagggg

SEQ ID NO: 41046 - DNA, 21 bp, synthetic construct
  misc_feature 1..21: note = Description of Artificial Sequence: Synthetic oligonucleotide
  source 1..21: mol_type = other DNA
agagacggcggccaagacaga

SEQ ID NO: 41047 - DNA, 21 bp, synthetic construct
  misc_feature 1..21: note = Description of Artificial Sequence: Synthetic oligonucleotide
  source 1..21: mol_type = other DNA
cacagcagcagacccctcgaa

SEQ ID NO: 41048 - DNA, 21 bp, synthetic construct
  misc_feature 1..21: note = Description of Artificial Sequence: Synthetic oligonucleotide
  source 1..21: mol_type = other DNA
agcagcagcgacaaactcaga

SEQ ID NO: 41049 - DNA, 21 bp, synthetic construct
  misc_feature 1..21: note = Description of Artificial Sequence: Synthetic oligonucleotide
  source 1..21: mol_type = other DNA
gaccccctcagacaaagcgtc

SEQ ID NO: 41050 - DNA, 21 bp, synthetic construct
  misc_feature 1..21: note = Description of Artificial Sequence: Synthetic oligonucleotide
  source 1..21: mol_type = other DNA
cccctccaagccaccggcaaa

SEQ ID NO: 41051 - DNA, 21 bp, synthetic construct
  misc_feature 1..21: note = Description of Artificial Sequence: Synthetic oligonucleotide
  source 1..21: mol_type = other DNA
caggctaatactattggtaag

SEQ ID NO: 41052 - DNA, 21 bp, synthetic construct
  misc_feature 1..21: note = Description of Artificial Sequence: Synthetic oligonucleotide
  source 1..21: mol_type = other DNA
agaaccaccagcagcctcgtc

SEQ ID NO: 41053 - DNA, 21 bp, synthetic construct
  misc_feature 1..21: note = Description of Artificial Sequence: Synthetic oligonucleotide
  source 1..21: mol_type = other DNA
cggccttcgatgcctcatagt

SEQ ID NO: 41054 - DNA, 21 bp, synthetic construct
  misc_feature 1..21: note = Description of Artificial Sequence: Synthetic oligonucleotide
  source 1..21: mol_type = other DNA
cttaataggggtaatggttcg

SEQ ID NO: 41055 - DNA, 21 bp, synthetic construct
  misc_feature 1..21: note = Description of Artificial Sequence: Synthetic oligonucleotide
  source 1..21: mol_type = other DNA
aattctcataatggtgcttct

SEQ ID NO: 41056 - DNA, 21 bp, synthetic construct
  misc_feature 1..21: note = Description of Artificial Sequence: Synthetic oligonucleotide
  source 1..21: mol_type = other DNA
ccgtatgctggtaatcagcgg

SEQ ID NO: 41057 - DNA, 21 bp, synthetic construct
  misc_feature 1..21: note = Description of Artificial Sequence: Synthetic oligonucleotide
  source 1..21: mol_type = other DNA
agcgaaagcggccaacaaaga

SEQ ID NO: 41058 - DNA, 21 bp, synthetic construct
  misc_feature 1..21: note = Description of Artificial Sequence: Synthetic oligonucleotide
  source 1..21: mol_type = other DNA
caaagcagcgaaaaaagacaa

SEQ ID NO: 41059 - DNA, 21 bp, synthetic construct
  misc_feature 1..21: note = Description of Artificial Sequence: Synthetic oligonucleotide
  source 1..21: mol_type = other DNA
aggtcgactaatacggataat

SEQ ID NO: 41060 - DNA, 21 bp, synthetic construct
  misc_feature 1..21: note = Description of Artificial Sequence: Synthetic oligonucleotide
  source 1..21: mol_type = other DNA
aacaacaaaagcgccagccaa

SEQ ID NO: 41061 - DNA, 21 bp, synthetic construct
  misc_feature 1..21: note = Description of Artificial Sequence: Synthetic oligonucleotide
  source 1..21: mol_type = other DNA
agcatcagccacacccccgtc

SEQ ID NO: 41062 - DNA, 21 bp, synthetic construct
  misc_feature 1..21: note = Description of Artificial Sequence: Synthetic oligonucleotide
  source 1..21: mol_type = other DNA
agcgtcagcaacaccaacacc

SEQ ID NO: 41063 - DNA, 21 bp, synthetic construct
  misc_feature 1..21: note = Description of Artificial Sequence: Synthetic oligonucleotide
  source 1..21: mol_type = other DNA
tcgggtcagcagggtccgtgt

SEQ ID NO: 41064 - DNA, 21 bp, synthetic construct
  misc_feature 1..21: note = Description of Artificial Sequence: Synthetic oligonucleotide
  source 1..21: mol_type = other DNA
gggattgctactactaatagg

SEQ ID NO: 41065 - DNA, 21 bp, synthetic construct
  misc_feature 1..21: note = Description of Artificial Sequence: Synthetic oligonucleotide
  source 1..21: mol_type = other DNA
cccgccggcagaagcagcaac

SEQ ID NO: 41066 - DNA, 21 bp, synthetic construct
  misc_feature 1..21: note = Description of Artificial Sequence: Synthetic oligonucleotide
  source 1..21: mol_type = other DNA
ccgaatcttaatagtcggggt

SEQ ID NO: 41067 - DNA, 21 bp, synthetic construct
  misc_feature 1..21: note = Description of Artificial Sequence: Synthetic oligonucleotide
  source 1..21: mol_type = other DNA
cccatggcccaacaaagagcc

SEQ ID NO: 41068 - DNA, 21 bp, synthetic construct
  misc_feature 1..21: note = Description of Artificial Sequence: Synthetic oligonucleotide
  source 1..21: mol_type = other DNA
aagagtgatgctcatacggct

SEQ ID NO: 41069 - DNA, 21 bp, synthetic construct
  misc_feature 1..21: note = Description of Artificial Sequence: Synthetic oligonucleotide
  source 1..21: mol_type = other DNA
agcagcatcagcagaaccagc

SEQ ID NO: 41070 - DNA, 21 bp, synthetic construct
  misc_feature 1..21: note = Description of Artificial Sequence: Synthetic oligonucleotide
  source 1..21: mol_type = other DNA
agtacgcttccgccgcggacc

SEQ ID NO: 41071 - DNA, 21 bp, synthetic construct
  misc_feature 1..21: note = Description of Artificial Sequence: Synthetic oligonucleotide
  source 1..21: mol_type = other DNA
aataataggagtgggatgggt

SEQ ID NO: 41072 - DNA, 21 bp, synthetic construct
  misc_feature 1..21: note = Description of Artificial Sequence: Synthetic oligonucleotide
  source 1..21: mol_type = other DNA
gtcagcaccggcaaaagcgtc

SEQ ID NO: 41073 - DNA, 21 bp, synthetic construct
  misc_feature 1..21: note = Description of Artificial Sequence: Synthetic oligonucleotide
  source 1..21: mol_type = other DNA
aggcttcctagtgtgtctagt

SEQ ID NO: 41074 - DNA, 21 bp, synthetic construct
  misc_feature 1..21: note = Description of Artificial Sequence: Synthetic oligonucleotide
  source 1..21: mol_type = other DNA
ggcagcaccaccagcggcaga

SEQ ID NO: 41075 - DNA, 21 bp, synthetic construct
  misc_feature 1..21: note = Description of Artificial Sequence: Synthetic oligonucleotide
  source 1..21: mol_type = other DNA
actagtggtactaaggctcat

SEQ ID NO: 41076 - DNA, 21 bp, synthetic construct
  misc_feature 1..21: note = Description of Artificial Sequence: Synthetic oligonucleotide
  source 1..21: mol_type = other DNA
gacccccacaacaccagcaga

SEQ ID NO: 41077 - DNA, 21 bp, synthetic construct
  misc_feature 1..21: note = Description of Artificial Sequence: Synthetic oligonucleotide
  source 1..21: mol_type = other DNA
tttgtgaatactagtgcgcag

SEQ ID NO: 41078 - DNA, 21 bp, synthetic construct
  misc_feature 1..21: note = Description of Artificial Sequence: Synthetic oligonucleotide
  source 1..21: mol_type = other DNA
agcttcagcggcgccaacaaa

SEQ ID NO: 41079 - DNA, 21 bp, synthetic construct
  misc_feature 1..21: note = Description of Artificial Sequence: Synthetic oligonucleotide
  source 1..21: mol_type = other DNA
cagggttcttcgcctatggag

SEQ ID NO: 41080 - DNA, 21 bp, synthetic construct
  misc_feature 1..21: note = Description of Artificial Sequence: Synthetic oligonucleotide
  source 1..21: mol_type = other DNA
actcctatgactaagaatcct

SEQ ID NO: 41081 - DNA, 21 bp, synthetic construct
  misc_feature 1..21: note = Description of Artificial Sequence: Synthetic oligonucleotide
  source 1..21: mol_type = other DNA
agcagcgacctcggcaaaaga

SEQ ID NO: 41082 - DNA, 21 bp, synthetic construct
  misc_feature 1..21: note = Description of Artificial Sequence: Synthetic oligonucleotide
  source 1..21: mol_type = other DNA
atggctacgtctactcgtaat

SEQ ID NO: 41083 - DNA, 21 bp, synthetic construct
  misc_feature 1..21: note = Description of Artificial Sequence: Synthetic oligonucleotide
  source 1..21: mol_type = other DNA
ctcggcaccagcaccatgaaa

SEQ ID NO: 41084 - DNA, 21 bp, synthetic construct
  misc_feature 1..21: note = Description of Artificial Sequence: Synthetic oligonucleotide
  source 1..21: mol_type = other DNA
tacaccatcaccccccaaaaa

SEQ ID NO: 41085 - DNA, 21 bp, synthetic construct
  misc_feature 1..21: note = Description of Artificial Sequence: Synthetic oligonucleotide
  source 1..21: mol_type = other DNA
atcggcggcaacaaacccctc

SEQ ID NO: 41086 - DNA, 21 bp, synthetic construct
  misc_feature 1..21: note = Description of Artificial Sequence: Synthetic oligonucleotide
  source 1..21: mol_type = other DNA
cacagcagcagcaaaatccac

SEQ ID NO: 41087 - DNA, 21 bp, synthetic construct
  misc_feature 1..21: note = Description of Artificial Sequence: Synthetic oligonucleotide
  source 1..21: mol_type = other DNA
tcgaatactaatagtgcgaat

SEQ ID NO: 41088 - DNA, 21 bp, synthetic construct
  misc_feature 1..21: note = Description of Artificial Sequence: Synthetic oligonucleotide
  source 1..21: mol_type = other DNA
caaagcagcaacgccagaaac

SEQ ID NO: 41089 - DNA, 21 bp, synthetic construct
  misc_feature 1..21: note = Description of Artificial Sequence: Synthetic oligonucleotide
  source 1..21: mol_type = other DNA
gaactcatgaacaaaagcaaa

SEQ ID NO: 41090 - DNA, 21 bp, synthetic construct
  misc_feature 1..21: note = Description of Artificial Sequence: Synthetic oligonucleotide
  source 1..21: mol_type = other DNA
cgttcgactaagactgagaat

SEQ ID NO: 41091 - DNA, 21 bp, synthetic construct
  misc_feature 1..21: note = Description of Artificial Sequence: Synthetic oligonucleotide
  source 1..21: mol_type = other DNA
cccatgagccacgtcagcggc

SEQ ID NO: 41092 - DNA, 21 bp, synthetic construct
  misc_feature 1..21: note = Description of Artificial Sequence: Synthetic oligonucleotide
  source 1..21: mol_type = other DNA
ccgagtagtccgaattctatt

SEQ ID NO: 41093 - DNA, 21 bp, synthetic construct
  misc_feature 1..21: note = Description of Artificial Sequence: Synthetic oligonucleotide
  source 1..21: mol_type = other DNA
gaaacccccaacagaagccaa

SEQ ID NO: 41094 - DNA, 21 bp, synthetic construct
  misc_feature 1..21: note = Description of Artificial Sequence: Synthetic oligonucleotide
  source 1..21: mol_type = other DNA
ggtgctgagcggacggttctt

SEQ ID NO: 41095 - DNA, 21 bp, synthetic construct
  misc_feature 1..21: note = Description of Artificial Sequence: Synthetic oligonucleotide
  source 1..21: mol_type = other DNA
ctcgtcagcagcaaaagcagc

SEQ ID NO: 41096 - DNA, 21 bp, synthetic construct
  misc_feature 1..21: note = Description of Artificial Sequence: Synthetic oligonucleotide
  source 1..21: mol_type = other DNA
attaatggtactcagacgctg

SEQ ID NO: 41097 - DNA, 21 bp, synthetic construct
  misc_feature 1..21: note = Description of Artificial Sequence: Synthetic oligonucleotide
  source 1..21: mol_type = other DNA
cctggtcagagtacttctagt

SEQ ID NO: 41098 - DNA, 21 bp, synthetic construct
  misc_feature 1..21: note = Description of Artificial Sequence: Synthetic oligonucleotide
  source 1..21: mol_type = other DNA
gctgtgtcgagtaaggtgggg

SEQ ID NO: 41099 - DNA, 21 bp, synthetic construct
  misc_feature 1..21: note = Description of Artificial Sequence: Synthetic oligonucleotide
  source 1..21: mol_type = other DNA
ctgatttcgtctaagagtagt

SEQ ID NO: 41100 - DNA, 21 bp, synthetic construct
  misc_feature 1..21: note = Description of Artificial Sequence: Synthetic oligonucleotide
  source 1..21: mol_type = other DNA
tttcatgcgaatagtactgtg

SEQ ID NO: 41101 - DNA, 21 bp, synthetic construct
  misc_feature 1..21: note = Description of Artificial Sequence: Synthetic oligonucleotide
  source 1..21: mol_type = other DNA
ggtcagaatactcatcttact

SEQ ID NO: 41102 - DNA, 21 bp, synthetic construct
  misc_feature 1..21: note = Description of Artificial Sequence: Synthetic oligonucleotide
  source 1..21: mol_type = other DNA
agaaacgtcagcggcatgaac

SEQ ID NO: 41103 - DNA, 21 bp, synthetic construct
  misc_feature 1..21: note = Description of Artificial Sequence: Synthetic oligonucleotide
  source 1..21: mol_type = other DNA
agcagaccccacaccgacggc

SEQ ID NO: 41104 - DNA, 21 bp, synthetic construct
  misc_feature 1..21: note = Description of Artificial Sequence: Synthetic oligonucleotide
  source 1..21: mol_type = other DNA
ctcaacaaaagcaccctcccc

SEQ ID NO: 41105 - DNA, 21 bp, synthetic construct
  misc_feature 1..21: note = Description of Artificial Sequence: Synthetic oligonucleotide
  source 1..21: mol_type = other DNA
ggttatgaggctaataggggg

SEQ ID NO: 41106 - DNA, 21 bp, synthetic construct
  misc_feature 1..21: note = Description of Artificial Sequence: Synthetic oligonucleotide
  source 1..21: mol_type = other DNA
cgtccgactcaggttggggct

SEQ ID NO: 41107 - DNA, 21 bp, synthetic construct
  misc_feature 1..21: note = Description of Artificial Sequence: Synthetic oligonucleotide
  source 1..21: mol_type = other DNA
catacgtctccggggaagaat

SEQ ID NO: 41108 - DNA, 21 bp, synthetic construct
  misc_feature 1..21: note = Description of Artificial Sequence: Synthetic oligonucleotide
  source 1..21: mol_type = other DNA
gttccttctcagagtcttcat

SEQ ID NO: 41109 - DNA, 21 bp, synthetic construct
  misc_feature 1..21: note = Description of Artificial Sequence: Synthetic oligonucleotide
  source 1..21: mol_type = other DNA
tctcttagtaagcaggcggcg

SEQ ID NO: 41110 - DNA, 21 bp, synthetic construct
  misc_feature 1..21: note = Description of Artificial Sequence: Synthetic oligonucleotide
  source 1..21: mol_type = other DNA
aatactgggattcctacgctg

SEQ ID NO: 41111 - DNA, 21 bp, synthetic construct
  misc_feature 1..21: note = Description of Artificial Sequence: Synthetic oligonucleotide
  source 1..21: mol_type = other DNA
tctattccgacgtctgctagg

SEQ ID NO: 41112 - DNA, 21 bp, synthetic construct
  misc_feature 1..21: note = Description of Artificial Sequence: Synthetic oligonucleotide
  source 1..21: mol_type = other DNA
gagaggtttactagttcttcg

SEQ ID NO: 41113 - DNA, 21 bp, synthetic construct
  misc_feature 1..21: note = Description of Artificial Sequence: Synthetic oligonucleotide
  source 1..21: mol_type = other DNA
cagcaggtgaatactactcgg

SEQ ID NO: 41114 - DNA, 21 bp, synthetic construct
  misc_feature 1..21: note = Description of Artificial Sequence: Synthetic oligonucleotide
  source 1..21: mol_type = other DNA
tacaccagcaaaagcaccgcc

SEQ ID NO: 41115 - DNA, 21 bp, synthetic construct
  misc_feature 1..21: note = Description of Artificial Sequence: Synthetic oligonucleotide
  source 1..21: mol_type = other DNA
ggtcatgggaataatggggcg

SEQ ID NO: 41116 - DNA, 21 bp, synthetic construct
  misc_feature 1..21: note = Description of Artificial Sequence: Synthetic oligonucleotide
  source 1..21: mol_type = other DNA
ggtcggagtccgacggcttct

SEQ ID NO: 41117 - DNA, 21 bp, synthetic construct
  misc_feature 1..21: note = Description of Artificial Sequence: Synthetic oligonucleotide
  source 1..21: mol_type = other DNA
agcaccaccaacagcaaaaac

SEQ ID NO: 41118 - DNA, 21 bp, synthetic construct
  misc_feature 1..21: note = Description of Artificial Sequence: Synthetic oligonucleotide
  source 1..21: mol_type = other DNA
cctggtcagtctacgtctaag

SEQ ID NO: 41119 - DNA, 21 bp, synthetic construct
  misc_feature 1..21: note = Description of Artificial Sequence: Synthetic oligonucleotide
  source 1..21: mol_type = other DNA
attcctgggcatcctactgcg

SEQ ID NO: 41120 - DNA, 21 bp, synthetic construct
  misc_feature 1..21: note = Description of Artificial Sequence: Synthetic oligonucleotide
  source 1..21: mol_type = other DNA
aacaccagcaacaacatccaa

SEQ ID NO: 41121 - DNA, 21 bp, synthetic construct
  misc_feature 1..21: note = Description of Artificial Sequence: Synthetic oligonucleotide
  source 1..21: mol_type = other DNA
agcaccgacagaagcttcaac

SEQ ID NO: 41122 - DNA, 21 bp, synthetic construct
  misc_feature 1..21: note = Description of Artificial Sequence: Synthetic oligonucleotide
  source 1..21: mol_type = other DNA
agcttcagcaaaggcagcagc

SEQ ID NO: 41123 - DNA, 21 bp, synthetic construct
  misc_feature 1..21: note = Description of Artificial Sequence: Synthetic oligonucleotide
  source 1..21: mol_type = other DNA
aattcggctgctttgaatagt

SEQ ID NO: 41124 - DNA, 21 bp, synthetic construct
  misc_feature 1..21: note = Description of Artificial Sequence: Synthetic oligonucleotide
  source 1..21: mol_type = other DNA
cccctccccaacagaaaccaa

SEQ ID NO: 41125 - DNA, 21 bp, synthetic construct
  misc_feature 1..21: note = Description of Artificial Sequence: Synthetic oligonucleotide
  source 1..21: mol_type = other DNA
gaacacatgacccccagaagc

SEQ ID NO: 41126 - DNA, 21 bp, synthetic construct
  misc_feature 1..21: note = Description of Artificial Sequence: Synthetic oligonucleotide
  source 1..21: mol_type = other DNA
actactcataatattaagggg

SEQ ID NO: 41127 - DNA, 21 bp, synthetic construct
  misc_feature 1..21: note = Description of Artificial Sequence: Synthetic oligonucleotide
  source 1..21: mol_type = other DNA
gctgtgtctaagggtggtcct

SEQ ID NO: 41128 - DNA, 21 bp, synthetic construct
  misc_feature 1..21: note = Description of Artificial Sequence: Synthetic oligonucleotide
  source 1..21: mol_type = other DNA
agccccgccagcctccccaaa

SEQ ID NO: 41129 - DNA, 21 bp, synthetic construct
  misc_feature 1..21: note = Description of Artificial Sequence: Synthetic oligonucleotide
  source 1..21: mol_type = other DNA
ctcatcagaggcggcaacaac

SEQ ID NO: 41130 - DNA, 21 bp, synthetic construct
  misc_feature 1..21: note = Description of Artificial Sequence: Synthetic oligonucleotide
  source 1..21: mol_type = other DNA
agcagccaacaaaaagccagc

SEQ ID NO: 41131 - DNA, 21 bp, synthetic construct
  misc_feature 1..21: note = Description of Artificial Sequence: Synthetic oligonucleotide
  source 1..21: mol_type = other DNA
ccctacaacagcaaagccagc

SEQ ID NO: 41132 - DNA, 21 bp, synthetic construct
  misc_feature 1..21: note = Description of Artificial Sequence: Synthetic oligonucleotide
  source 1..21: mol_type = other DNA
atgaatcgtaatggttcgctg

SEQ ID NO: 41133 - DNA, 21 bp, synthetic construct
  misc_feature 1..21: note = Description of Artificial Sequence: Synthetic oligonucleotide
  source 1..21: mol_type = other DNA
actcgtaatcagtcggtgacg

SEQ ID NO: 41134 - DNA, 21 bp, synthetic construct
  misc_feature 1..21: note = Description of Artificial Sequence: Synthetic oligonucleotide
  source 1..21: mol_type = other DNA
ctcggcggcggcaccctcaga

SEQ ID NO: 41135 - DNA, 21 bp, synthetic construct
  misc_feature 1..21: note = Description of Artificial Sequence: Synthetic oligonucleotide
  source 1..21: mol_type = other DNA
aggacgggtgagtcttatatg

SEQ ID NO: 41136 - DNA, 21 bp, synthetic construct
  misc_feature 1..21: note = Description of Artificial Sequence: Synthetic oligonucleotide
  source 1..21: mol_type = other DNA
gcggattctaatcgtccgggg

SEQ ID NO: 41137 - DNA, 21 bp, synthetic construct
  misc_feature 1..21: note = Description of Artificial Sequence: Synthetic oligonucleotide
  source 1..21: mol_type = other DNA
gttatgggggcgggtgctagt

SEQ ID NO: 41138 - DNA, 21 bp, synthetic construct
  misc_feature 1..21: note = Description of Artificial Sequence: Synthetic oligonucleotide
  source 1..21: mol_type = other DNA
aacggttctggacagactcaa

SEQ ID NO: 41139 - DNA, 21 bp, synthetic construct
  misc_feature 1..21: note = Description of Artificial Sequence: Synthetic oligonucleotide
  source 1..21: mol_type = other DNA
tcgacgctgcctgggaattct

SEQ ID NO: 41140 - DNA, 21 bp, synthetic construct
  misc_feature 1..21: note = Description of Artificial Sequence: Synthetic oligonucleotide
  source 1..21: mol_type = other DNA
tatgggaatcctaggcaggct

SEQ ID NO: 41141 - DNA, 21 bp, synthetic construct
  misc_feature 1..21: note = Description of Artificial Sequence: Synthetic oligonucleotide
  source 1..21: mol_type = other DNA
cgttcgcagggttcgtatgcg

SEQ ID NO: 41142 - DNA, 21 bp, synthetic construct
  misc_feature 1..21: note = Description of Artificial Sequence: Synthetic oligonucleotide
  source 1..21: mol_type = other DNA
agtcttcctaatactaatggg

SEQ ID NO: 41143 - DNA, 21 bp, synthetic construct
  misc_feature 1..21: note = Description of Artificial Sequence: Synthetic oligonucleotide
  source 1..21: mol_type = other DNA
agaagcggcggcagcctcagc

SEQ ID NO: 41144 - DNA, 21 bp, synthetic construct
  misc_feature 1..21: note = Description of Artificial Sequence: Synthetic oligonucleotide
  source 1..21: mol_type = other DNA
agccccgtcaaaggcagcgtc

SEQ ID NO: 41145 - DNA, 21 bp, synthetic construct
  misc_feature 1..21: note = Description of Artificial Sequence: Synthetic oligonucleotide
  source 1..21: mol_type = other DNA
agcgtcagcaccaaaagcgcc

SEQ ID NO: 41146 - DNA, 21 bp, synthetic construct
  misc_feature 1..21: note = Description of Artificial Sequence: Synthetic oligonucleotide
  source 1..21: mol_type = other DNA
gatcctcgtaattctacgtct

SEQ ID NO: 41147 - DNA, 21 bp, synthetic construct
  misc_feature 1..21: note = Description of Artificial Sequence: Synthetic oligonucleotide
  source 1..21: mol_type = other DNA
tggagcgccagcagaagcgcc

SEQ ID NO: 41148 - DNA, 21 bp, synthetic construct
  misc_feature 1..21: note = Description of Artificial Sequence: Synthetic oligonucleotide
  source 1..21: mol_type = other DNA
tacagcggcggcacccaacaa

SEQ ID NO: 41149 - DNA, 21 bp, synthetic construct
  misc_feature 1..21: note = Description of Artificial Sequence: Synthetic oligonucleotide
  source 1..21: mol_type = other DNA
cccagccacaaccccaccaac

SEQ ID NO: 41150 - DNA, 21 bp, synthetic construct
  misc_feature 1..21: note = Description of Artificial Sequence: Synthetic oligonucleotide
  source 1..21: mol_type = other DNA
gggtctgggattaagcgtgag

SEQ ID NO: 41151 - DNA, 21 bp, synthetic construct
  misc_feature 1..21: note = Description of Artificial Sequence: Synthetic oligonucleotide
  source 1..21: mol_type = other DNA
aacggcatcagcaaaagcaac

SEQ ID NO: 41152 - DNA, 21 bp, synthetic construct
  misc_feature 1..21: note = Description of Artificial Sequence: Synthetic oligonucleotide
  source 1..21: mol_type = other DNA
atgacccaacacaaacaagcc

SEQ ID NO: 41153 - DNA, 21 bp, synthetic construct
  misc_feature 1..21: note = Description of Artificial Sequence: Synthetic oligonucleotide
  source 1..21: mol_type = other DNA
cagagtcatggtattacgaat

SEQ ID NO: 41154 - DNA, 21 bp, synthetic construct
  misc_feature 1..21: note = Description of Artificial Sequence: Synthetic oligonucleotide
  source 1..21: mol_type = other DNA
agcagcgccggcacctacacc

SEQ ID NO: 41155 - DNA, 21 bp, synthetic construct
  misc_feature 1..21: note = Description of Artificial Sequence: Synthetic oligonucleotide
  source 1..21: mol_type = other DNA
ggcagcagccccagcctcaga

SEQ ID NO: 41156 - DNA, 21 bp, synthetic construct
  misc_feature 1..21: note = Description of Artificial Sequence: Synthetic oligonucleotide
  source 1..21: mol_type = other DNA
ggcatcaccaaaaacctcgcc

SEQ ID NO: 41157 - DNA, 21 bp, synthetic construct
  misc_feature 1..21: note = Description of Artificial Sequence: Synthetic oligonucleotide
  source 1..21: mol_type = other DNA
tcgggtgcggggtcggctggg

SEQ ID NO: 41158 - DNA, 21 bp, synthetic construct
  misc_feature 1..21: note = Description of Artificial Sequence: Synthetic oligonucleotide
  source 1..21: mol_type = other DNA
gcccaaagcacctaccaaagc

SEQ ID NO: 41159 - DNA, 21 bp, synthetic construct
  misc_feature 1..21: note = Description of Artificial Sequence: Synthetic oligonucleotide
  source 1..21: mol_type = other DNA
ggcagcaacagaaaccccctc

SEQ ID NO: 41160 - DNA, 21 bp, synthetic construct
  misc_feature 1..21: note = Description of Artificial Sequence: Synthetic oligonucleotide
  source 1..21: mol_type = other DNA
tcgtctcgttctacggcttcg

SEQ ID NO: 41161 - DNA, 21 bp, synthetic construct
  misc_feature 1..21: note = Description of Artificial Sequence: Synthetic oligonucleotide
  source 1..21: mol_type = other DNA
agccacgacaccagctacaga

SEQ ID NO: 41162 - DNA, 21 bp, synthetic construct
  misc_feature 1..21: note = Description of Artificial Sequence: Synthetic oligonucleotide
  source 1..21: mol_type = other DNA
agcagcgccagcacctacaaa

SEQ ID NO: 41163 - DNA, 21 bp, synthetic construct
  misc_feature 1..21: note = Description of Artificial Sequence: Synthetic oligonucleotide
  source 1..21: mol_type = other DNA
aatcctaatcagtctcttggg

SEQ ID NO: 41164 - DNA, 21 bp, synthetic construct
  misc_feature 1..21: note = Description of Artificial Sequence: Synthetic oligonucleotide
  source 1..21: mol_type = other DNA
gtggggtcgcggaatgttggt

SEQ ID NO: 41165 - DNA, 21 bp, synthetic construct
  misc_feature 1..21: note = Description of Artificial Sequence: Synthetic oligonucleotide
  source 1..21: mol_type = other DNA
catgcgtctactccggctcgt

SEQ ID NO: 41166 - DNA, 21 bp, synthetic construct
  misc_feature 1..21: note = Description of Artificial Sequence: Synthetic oligonucleotide
  source 1..21: mol_type = other DNA
gccagcagcagcaaaagcgtc

SEQ ID NO: 41167 - DNA, 21 bp, synthetic construct
  misc_feature 1..21: note = Description of Artificial Sequence: Synthetic oligonucleotide
  source 1..21: mol_type = other DNA
aatctttcgcatagtgcgggg

SEQ ID NO: 41168 - DNA, 21 bp, synthetic construct
  misc_feature 1..21: note = Description of Artificial Sequence: Synthetic oligonucleotide
  source 1..21: mol_type = other DNA
tctattactgggaataggact

SEQ ID NO: 41169 - DNA, 21 bp, synthetic construct
  misc_feature 1..21: note = Description of Artificial Sequence: Synthetic oligonucleotide
  source 1..21: mol_type = other DNA
tcgactaatcctgcgaatcgg

SEQ ID NO: 41170 - DNA, 21 bp, synthetic construct
  misc_feature 1..21: note = Description of Artificial Sequence: Synthetic oligonucleotide
  source 1..21: mol_type = other DNA
attaggacgaaggagtctgcg

SEQ ID NO: 41171 - DNA, 21 bp, synthetic construct
  misc_feature 1..21: note = Description of Artificial Sequence: Synthetic oligonucleotide
  source 1..21: mol_type = other DNA
ggtattaatccgacttctgtg

SEQ ID NO: 41172 - DNA, 21 bp, synthetic construct
  misc_feature 1..21: note = Description of Artificial Sequence: Synthetic oligonucleotide
  source 1..21: mol_type = other DNA
gatcagcgtaataggagtatt

SEQ ID NO: 41173 - DNA, 21 bp, synthetic construct
  misc_feature 1..21: note = Description of Artificial Sequence: Synthetic oligonucleotide
  source 1..21: mol_type = other DNA
acggggagggctccgtcttcg

SEQ ID NO: 41174 - DNA, 21 bp, synthetic construct
  misc_feature 1..21: note = Description of Artificial Sequence: Synthetic oligonucleotide
  source 1..21: mol_type = other DNA
aacacccacaacatccaaggc

SEQ ID NO: 41175 - DNA, 21 bp, synthetic construct
  misc_feature 1..21: note = Description of Artificial Sequence: Synthetic oligonucleotide
  source 1..21: mol_type = other DNA
aaccaaagcagcagcgccaga

SEQ ID NO: 41176 - DNA, 21 bp, synthetic construct
  misc_feature 1..21: note = Description of Artificial Sequence: Synthetic oligonucleotide
  source 1..21: mol_type = other DNA
tttaattcgaatcgtgatagt

SEQ ID NO: 41177 - DNA, 21 bp, synthetic construct
  misc_feature 1..21: note = Description of Artificial Sequence: Synthetic oligonucleotide
  source 1..21: mol_type = other DNA
aacgattctggacagaatcaa

SEQ ID NO: 41178 - DNA, 21 bp, synthetic construct
  misc_feature 1..21: note = Description of Artificial Sequence: Synthetic oligonucleotide
  source 1..21: mol_type = other DNA
catggtactagtcctcttcgt

SEQ ID NO: 41179 - DNA, 21 bp, synthetic construct
  misc_feature 1..21: note = Description of Artificial Sequence: Synthetic oligonucleotide
  source 1..21: mol_type = other DNA
attacgtctggtagtactcgt

SEQ ID NO: 41180 - DNA, 21 bp, synthetic construct
  misc_feature 1..21: note = Description of Artificial Sequence: Synthetic oligonucleotide
  source 1..21: mol_type = other DNA
agaatgaacggcggcggcccc

SEQ ID NO: 41181 - DNA, 21 bp, synthetic construct
  misc_feature 1..21: note = Description of Artificial Sequence: Synthetic oligonucleotide
  source 1..21: mol_type = other DNA
gtcggcaccaaccacaccagc

SEQ ID NO: 41182 - DNA, 21 bp, synthetic construct
  misc_feature 1..21: note = Description of Artificial Sequence: Synthetic oligonucleotide
  source 1..21: mol_type = other DNA
tcgtatgctgataagcagggg

SEQ ID NO: 41183 - DNA, 21 bp, synthetic construct
  misc_feature 1..21: note = Description of Artificial Sequence: Synthetic oligonucleotide
  source 1..21: mol_type = other DNA
cttagggctgagcatgttagg

SEQ ID NO: 41184 - DNA, 21 bp, synthetic construct
  misc_feature 1..21: note = Description of Artificial Sequence: Synthetic oligonucleotide
  source 1..21: mol_type = other DNA
gtcaccaccagcagaggcgtc

SEQ ID NO: 41185 - DNA, 21 bp, synthetic construct
  misc_feature 1..21: note = Description of Artificial Sequence: Synthetic oligonucleotide
  source 1..21: mol_type = other DNA
aacgccaaccccagcctcaga

SEQ ID NO: 41186 - DNA, 21 bp, synthetic construct
  misc_feature 1..21: note = Description of Artificial Sequence: Synthetic oligonucleotide
  source 1..21: mol_type = other DNA
tcttctgctccgagtctttct

SEQ ID NO: 41187 - DNA, 21 bp, synthetic construct
  misc_feature 1..21: note = Description of Artificial Sequence: Synthetic oligonucleotide
  source 1..21: mol_type = other DNA
aacagcggcagaaacagcgtc

SEQ ID NO: 41188 - DNA, 21 bp, synthetic construct
  misc_feature 1..21: note = Description of Artificial Sequence: Synthetic oligonucleotide
  source 1..21: mol_type = other DNA
agttttactaagggggcgggg

SEQ ID NO: 41189 - DNA, 21 bp, synthetic construct
  misc_feature 1..21: note = Description of Artificial Sequence: Synthetic oligonucleotide
  source 1..21: mol_type = other DNA
accacccaaagcagaagcctc

SEQ ID NO: 41190 - DNA, 21 bp, synthetic construct
  misc_feature 1..21: note = Description of Artificial Sequence: Synthetic oligonucleotide
  source 1..21: mol_type = other DNA
tatcgggctacgtcgggtcag

SEQ ID NO: 41191 - DNA, 21 bp, synthetic construct
  misc_feature 1..21: note = Description of Artificial Sequence: Synthetic oligonucleotide
  source 1..21: mol_type = other DNA
ggcaaacacggcaccaacagc

SEQ ID NO: 41192 - DNA, 21 bp, synthetic construct
  misc_feature 1..21: note = Description of Artificial Sequence: Synthetic oligonucleotide
  source 1..21: mol_type = other DNA
accggcggcaacagagtcctc

SEQ ID NO: 41193 - DNA, 21 bp, synthetic construct
  misc_feature 1..21: note = Description of Artificial Sequence: Synthetic oligonucleotide
  source 1..21: mol_type = other DNA
caaagaaccgtcggcaccgcc

SEQ ID NO: 41194 - DNA, 21 bp, synthetic construct
  misc_feature 1..21: note = Description of Artificial Sequence: Synthetic oligonucleotide
  source 1..21: mol_type = other DNA
accagcggcagccaagtcaga

SEQ ID NO: 41195 - DNA, 21 bp, synthetic construct
  misc_feature 1..21: note = Description of Artificial Sequence: Synthetic oligonucleotide
  source 1..21: mol_type = other DNA
ggggctggtaatcttactggt

SEQ ID NO: 41196 - DNA, 21 bp, synthetic construct
  misc_feature 1..21: note = Description of Artificial Sequence: Synthetic oligonucleotide
  source 1..21: mol_type = other DNA
ggcggcagcaacctcagaacc

SEQ ID NO: 41197 - DNA, 21 bp, synthetic construct
  misc_feature 1..21: note = Description of Artificial Sequence: Synthetic oligonucleotide
  source 1..21: mol_type = other DNA
gctaggtctcctccttcgggg

SEQ ID NO: 41198 - DNA, 21 bp, synthetic construct
  misc_feature 1..21: note = Description of Artificial Sequence: Synthetic oligonucleotide
  source 1..21: mol_type = other DNA
tcgtcggttcagcatactggg

SEQ ID NO: 41199 - DNA, 21 bp, synthetic construct
  misc_feature 1..21: note = Description of Artificial Sequence: Synthetic oligonucleotide
  source 1..21: mol_type = other DNA
gctacggtttctaagacggct

SEQ ID NO: 41200 - DNA, 21 bp, synthetic construct
  misc_feature 1..21: note = Description of Artificial Sequence: Synthetic oligonucleotide
  source 1..21: mol_type = other DNA
aacggttctggacagcatcaa

SEQ ID NO: 41201 - DNA, 21 bp, synthetic construct
  misc_feature 1..21: note = Description of Artificial Sequence: Synthetic oligonucleotide
  source 1..21: mol_type = other DNA
gcgggtcattctgggagggat

SEQ ID NO: 41202 - DNA, 21 bp, synthetic construct
  misc_feature 1..21: note = Description of Artificial Sequence: Synthetic oligonucleotide
  source 1..21: mol_type = other DNA
gaaggcaccagaggcgtcggc

SEQ ID NO: 41203 - DNA, 21 bp, synthetic construct
  misc_feature 1..21: note = Description of Artificial Sequence: Synthetic oligonucleotide
  source 1..21: mol_type = other DNA
gggaatacgcagactagtcgt

SEQ ID NO: 41204 - DNA, 21 bp, synthetic construct
  misc_feature 1..21: note = Description of Artificial Sequence: Synthetic oligonucleotide
  source 1..21: mol_type = other DNA
atgaatactagtcgttcttcg

SEQ ID NO: 41205 - DNA, 21 bp, synthetic construct
  misc_feature 1..21: note = Description of Artificial Sequence: Synthetic oligonucleotide
  source 1..21: mol_type = other DNA
ggtactaattctactaggggt

SEQ ID NO: 41206 - DNA, 21 bp, synthetic construct
  misc_feature 1..21: note = Description of Artificial Sequence: Synthetic oligonucleotide
  source 1..21: mol_type = other DNA
cccagagtccaccccctcgtc

SEQ ID NO: 41207 - DNA, 21 bp, synthetic construct
  misc_feature 1..21: note = Description of Artificial Sequence: Synthetic oligonucleotide
  source 1..21: mol_type = other DNA
atgtcgggtggtaatatgcgg

SEQ ID NO: 41208 - DNA, 21 bp, synthetic construct
  misc_feature 1..21: note = Description of Artificial Sequence: Synthetic oligonucleotide
  source 1..21: mol_type = other DNA
gctacgaataatggttcgaag

SEQ ID NO: 41209 - DNA, 21 bp, synthetic construct
  misc_feature 1..21: note = Description of Artificial Sequence: Synthetic oligonucleotide
  source 1..21: mol_type = other DNA
gctaattctcgggatgctaag

SEQ ID NO: 41210 - DNA, 21 bp, synthetic construct
  misc_feature 1..21: note = Description of Artificial Sequence: Synthetic oligonucleotide
  source 1..21: mol_type = other DNA
ccggttgctagggctgcgcag

SEQ ID NO: 41211 - DNA, 21 bp, synthetic construct
  misc_feature 1..21: note = Description of Artificial Sequence: Synthetic oligonucleotide
  source 1..21: mol_type = other DNA
cagtctggtaatacgattcag

SEQ ID NO: 41212 - DNA, 21 bp, synthetic construct
  misc_feature 1..21: note = Description of Artificial Sequence: Synthetic oligonucleotide
  source 1..21: mol_type = other DNA
agagccagccaaagcgtcggc

SEQ ID NO: 41213 - DNA, 21 bp, synthetic construct
  misc_feature 1..21: note = Description of Artificial Sequence: Synthetic oligonucleotide
  source 1..21: mol_type = other DNA
cccaccctcagcggcagcaga

SEQ ID NO: 41214 - DNA, 21 bp, synthetic construct
  misc_feature 1..21: note = Description of Artificial Sequence: Synthetic oligonucleotide
  source 1..21: mol_type = other DNA
atgcgtcagacggcttctctt

SEQ ID NO: 41215 - DNA, 21 bp, synthetic construct
  misc_feature 1..21: note = Description of Artificial Sequence: Synthetic oligonucleotide
  source 1..21: mol_type = other DNA
aggagtacggatactcatggg

SEQ ID NO: 41216 - DNA, 21 bp, synthetic construct
  misc_feature 1..21: note = Description of Artificial Sequence: Synthetic oligonucleotide
  source 1..21: mol_type = other DNA
gagtttactaaggttggtgct

SEQ ID NO: 41217 - DNA, 21 bp, synthetic construct
  misc_feature 1..21: note = Description of Artificial Sequence: Synthetic oligonucleotide
  source 1..21: mol_type = other DNA
ccgatgggtcattcgcttctg

SEQ ID NO: 41218 - DNA, 21 bp, synthetic construct
  misc_feature 1..21: note = Description of Artificial Sequence: Synthetic oligonucleotide
  source 1..21: mol_type = other DNA
gccagaaacccccaagtcagc

SEQ ID NO: 41219 - DNA, 21 bp, synthetic construct
  misc_feature 1..21: note = Description of Artificial Sequence: Synthetic oligonucleotide
  source 1..21: mol_type = other DNA
ggcaccggcacccccagaacc

SEQ ID NO: 41220 - DNA, 21 bp, synthetic construct
  misc_feature 1..21: note = Description of Artificial Sequence: Synthetic oligonucleotide
  source 1..21: mol_type = other DNA
accgcccccagccacaccaac

SEQ ID NO: 41221 - DNA, 21 bp, synthetic construct
  misc_feature 1..21: note = Description of Artificial Sequence: Synthetic oligonucleotide
  source 1..21: mol_type = other DNA
tctgctacgaatgggtctctg

SEQ ID NO: 41222 - DNA, 21 bp, synthetic construct
  misc_feature 1..21: note = Description of Artificial Sequence: Synthetic oligonucleotide
  source 1..21: mol_type = other DNA
gcgacgcataattcgtctcag

SEQ ID NO: 41223 - DNA, 21 bp, synthetic construct
  misc_feature 1..21: note = Description of Artificial Sequence: Synthetic oligonucleotide
  source 1..21: mol_type = other DNA
ctcctcaccagccccaacagc

SEQ ID NO: 41224 - DNA, 21 bp, synthetic construct
  misc_feature 1..21: note = Description of Artificial Sequence: Synthetic oligonucleotide
  source 1..21: mol_type = other DNA
cagtcggggtcgaagcctggg

SEQ ID NO: 41225 - DNA, 21 bp, synthetic construct
  misc_feature 1..21: note = Description of Artificial Sequence: Synthetic oligonucleotide
  source 1..21: mol_type = other DNA
tggagaagccaacacaacagc

SEQ ID NO: 41226 - DNA, 21 bp, synthetic construct
  misc_feature 1..21: note = Description of Artificial Sequence: Synthetic oligonucleotide
  source 1..21: mol_type = other DNA
cagcctactcagaggatgggt

SEQ ID NO: 41227 - DNA, 21 bp, synthetic construct
  misc_feature 1..21: note = Description of Artificial Sequence: Synthetic oligonucleotide
  source 1..21: mol_type = other DNA
ggcatgacccaaggcggcaaa

SEQ ID NO: 41228 - DNA, 21 bp, synthetic construct
  misc_feature 1..21: note = Description of Artificial Sequence: Synthetic oligonucleotide
  source 1..21: mol_type = other DNA
gtcagcatgaacaccaccaga

SEQ ID NO: 41229 - DNA, 21 bp, synthetic construct
  misc_feature 1..21: note = Description of Artificial Sequence: Synthetic oligonucleotide
  source 1..21: mol_type = other DNA
agccccggcaacaaactcctc

SEQ ID NO: 41230 - DNA, 21 bp, synthetic construct
  misc_feature 1..21: note = Description of Artificial Sequence: Synthetic oligonucleotide
  source 1..21: mol_type = other DNA
gctacgcattcgaaggctagt

SEQ ID NO: 41231 - DNA, 21 bp, synthetic construct
  misc_feature 1..21: note = Description of Artificial Sequence: Synthetic oligonucleotide
  source 1..21: mol_type = other DNA
aacagcagccacaacgtcagc

SEQ ID NO: 41232 - DNA, 21 bp, synthetic construct
  misc_feature 1..21: note = Description of Artificial Sequence: Synthetic oligonucleotide
  source 1..21: mol_type = other DNA
gtcaacaccaacagagccgcc

SEQ ID NO: 41233 - DNA, 21 bp, synthetic construct
  misc_feature 1..21: note = Description of Artificial Sequence: Synthetic oligonucleotide
  source 1..21: mol_type = other DNA
cgttcgaatcctactttggtg

SEQ ID NO: 41234 - DNA, 21 bp, synthetic construct
  misc_feature 1..21: note = Description of Artificial Sequence: Synthetic oligonucleotide
  source 1..21: mol_type = other DNA
cttcctacgagtagtgttgcg

SEQ ID NO: 41235 - DNA, 21 bp, synthetic construct
  misc_feature 1..21: note = Description of Artificial Sequence: Synthetic oligonucleotide
  source 1..21: mol_type = other DNA
agtggtacttctcggtttagt

SEQ ID NO: 41236 - DNA, 21 bp, synthetic construct
  misc_feature 1..21: note = Description of Artificial Sequence: Synthetic oligonucleotide
  source 1..21: mol_type = other DNA
gctagtccgaatcggggtagt

SEQ ID NO: 41237 - DNA, 21 bp, synthetic construct
  misc_feature 1..21: note = Description of Artificial Sequence: Synthetic oligonucleotide
  source 1..21: mol_type = other DNA
ttcgtcagcggcaaagtccaa

SEQ ID NO: 41238 - DNA, 21 bp, synthetic construct
  misc_feature 1..21: note = Description of Artificial Sequence: Synthetic oligonucleotide
  source 1..21: mol_type = other DNA
tcttcgtctacgtcgcctagg

SEQ ID NO: 41239 - DNA, 21 bp, synthetic construct
  misc_feature 1..21: note = Description of Artificial Sequence: Synthetic oligonucleotide
  source 1..21: mol_type = other DNA
caaggcctcagcaaaagcggc

SEQ ID NO: 41240 - DNA, 21 bp, synthetic construct
  misc_feature 1..21: note = Description of Artificial Sequence: Synthetic oligonucleotide
  source 1..21: mol_type = other DNA
agcagcgaacaaaccaccaga

SEQ ID NO: 41241 - DNA, 21 bp, synthetic construct
  misc_feature 1..21: note = Description of Artificial Sequence: Synthetic oligonucleotide
  source 1..21: mol_type = other DNA
attggtactacgccgcctaag

SEQ ID NO: 41242 - DNA, 21 bp, synthetic construct
  misc_feature 1..21: note = Description of Artificial Sequence: Synthetic oligonucleotide
  source 1..21: mol_type = other DNA
cccctcagcaaagacagactc

SEQ ID NO: 41243 - DNA, 21 bp, synthetic construct
  misc_feature 1..21: note = Description of Artificial Sequence: Synthetic oligonucleotide
  source 1..21: mol_type = other DNA
accccccaaaacgtcagaaac

SEQ ID NO: 41244 - DNA, 21 bp, synthetic construct
  misc_feature 1..21: note = Description of Artificial Sequence: Synthetic oligonucleotide
  source 1..21: mol_type = other DNA
ccctacgcccccagaaaagac

SEQ ID NO: 41245 - DNA, 21 bp, synthetic construct
  misc_feature 1..21: note = Description of Artificial Sequence: Synthetic oligonucleotide
  source 1..21: mol_type = other DNA
tcttcgacgtctcctgggagg

SEQ ID NO: 41246 - DNA, 21 bp, synthetic construct
  misc_feature 1..21: note = Description of Artificial Sequence: Synthetic oligonucleotide
  source 1..21: mol_type = other DNA
gggtctctgactcctaaggct

SEQ ID NO: 41247 - DNA, 21 bp, synthetic construct
  misc_feature 1..21: note = Description of Artificial Sequence: Synthetic oligonucleotide
  source 1..21: mol_type = other DNA
atggccaccagcaccgtcaaa

SEQ ID NO: 41248 - DNA, 21 bp, synthetic construct
  misc_feature 1..21: note = Description of Artificial Sequence: Synthetic oligonucleotide
  source 1..21: mol_type = other DNA
agcgccgtcggcaaagccagc

SEQ ID NO: 41249 - DNA, 21 bp, synthetic construct
  misc_feature 1..21: note = Description of Artificial Sequence: Synthetic oligonucleotide
  source 1..21: mol_type = other DNA
agacccgtcggcggcctcgcc

SEQ ID NO: 41250 - DNA, 21 bp, synthetic construct
  misc_feature 1..21: note = Description of Artificial Sequence: Synthetic oligonucleotide
  source 1..21: mol_type = other DNA
agcaacacccacagccccagc

SEQ ID NO: 41251 - DNA, 21 bp, synthetic construct
  misc_feature 1..21: note = Description of Artificial Sequence: Synthetic oligonucleotide
  source 1..21: mol_type = other DNA
ggcgaccacaacagaatgaac

SEQ ID NO: 41252 - DNA, 21 bp, synthetic construct
  misc_feature 1..21: note = Description of Artificial Sequence: Synthetic oligonucleotide
  source 1..21: mol_type = other DNA
agcagccccgtcagcgccgtc

SEQ ID NO: 41253 - DNA, 21 bp, synthetic construct
  misc_feature 1..21: note = Description of Artificial Sequence: Synthetic oligonucleotide
  source 1..21: mol_type = other DNA
caaaacctccccaaagccagc

SEQ ID NO: 41254 - DNA, 21 bp, synthetic construct
  misc_feature 1..21: note = Description of Artificial Sequence: Synthetic oligonucleotide
  source 1..21: mol_type = other DNA
actaatgctgctcgggattcg

SEQ ID NO: 41255 - DNA, 21 bp, synthetic construct
  misc_feature 1..21: note = Description of Artificial Sequence: Synthetic oligonucleotide
  source 1..21: mol_type = other DNA
gaaaccaacagcagactcggc

SEQ ID NO: 41256 - DNA, 21 bp, synthetic construct
  misc_feature 1..21: note = Description of Artificial Sequence: Synthetic oligonucleotide
  source 1..21: mol_type = other DNA
accagagacagcagcctccac

SEQ ID NO: 41257 - DNA, 21 bp, synthetic construct
  misc_feature 1..21: note = Description of Artificial Sequence: Synthetic oligonucleotide
  source 1..21: mol_type = other DNA
gtgacgcagtcttcgagtaag

SEQ ID NO: 41258 - DNA, 21 bp, synthetic construct
  misc_feature 1..21: note = Description of Artificial Sequence: Synthetic oligonucleotide
  source 1..21: mol_type = other DNA
gctcagacgaagggtactcag

SEQ ID NO: 41259 - DNA, 21 bp, synthetic construct
  misc_feature 1..21: note = Description of Artificial Sequence: Synthetic oligonucleotide
  source 1..21: mol_type = other DNA
ttgttgagttcgaagacggct

SEQ ID NO: 41260 - DNA, 21 bp, synthetic construct
  misc_feature 1..21: note = Description of Artificial Sequence: Synthetic oligonucleotide
  source 1..21: mol_type = other DNA
tctcctcatactcatcagaag

SEQ ID NO: 41261 - DNA, 21 bp, synthetic construct
  misc_feature 1..21: note = Description of Artificial Sequence: Synthetic oligonucleotide
  source 1..21: mol_type = other DNA
cccagcaacaccggcaccatc

SEQ ID NO: 41262 - DNA, 21 bp, synthetic construct
  misc_feature 1..21: note = Description of Artificial Sequence: Synthetic oligonucleotide
  source 1..21: mol_type = other DNA
caaaaccaaaacagcggcaga

SEQ ID NO: 41263 - DNA, 21 bp, synthetic construct
  misc_feature 1..21: note = Description of Artificial Sequence: Synthetic oligonucleotide
  source 1..21: mol_type = other DNA
ccgacgtctcagcagcgtccg

SEQ ID NO: 41264 - DNA, 21 bp, synthetic construct
  misc_feature 1..21: note = Description of Artificial Sequence: Synthetic oligonucleotide
  source 1..21: mol_type = other DNA
cggggtgctacgagtacgtct

SEQ ID NO: 41265 - DNA, 21 bp, synthetic construct
  misc_feature 1..21: note = Description of Artificial Sequence: Synthetic oligonucleotide
  source 1..21: mol_type = other DNA
agcagcgtcggcagactcaac

SEQ ID NO: 41266 - DNA, 21 bp, synthetic construct
  misc_feature 1..21: note = Description of Artificial Sequence: Synthetic oligonucleotide
  source 1..21: mol_type = other DNA
cagcctaattcgggtacgacg

SEQ ID NO: 41267 - DNA, 21 bp, synthetic construct
  misc_feature 1..21: note = Description of Artificial Sequence: Synthetic oligonucleotide
  source 1..21: mol_type = other DNA
gcttatcctaagaattcgaat

SEQ ID NO: 41268 - DNA, 21 bp, synthetic construct
  misc_feature 1..21: note = Description of Artificial Sequence: Synthetic oligonucleotide
  source 1..21: mol_type = other DNA
tcgcttactagtacgggtaag

SEQ ID NO: 41269 - DNA, 21 bp, synthetic construct
  misc_feature 1..21: note = Description of Artificial Sequence: Synthetic oligonucleotide
  source 1..21: mol_type = other DNA
accagcggcagcgccagaggc

SEQ ID NO: 41270 - DNA, 21 bp, synthetic construct
  misc_feature 1..21: note = Description of Artificial Sequence: Synthetic oligonucleotide
  source 1..21: mol_type = other DNA
ctcaacagacccagcctcggc

SEQ ID NO: 41271 - DNA, 21 bp, synthetic construct
  misc_feature 1..21: note = Description of Artificial Sequence: Synthetic oligonucleotide
  source 1..21: mol_type = other DNA
aactgttctggacagaatcaa

SEQ ID NO: 41272 - DNA, 21 bp, synthetic construct
  misc_feature 1..21: note = Description of Artificial Sequence: Synthetic oligonucleotide
  source 1..21: mol_type = other DNA
atgctcccccaaaacggcaga

SEQ ID NO: 41273 - DNA, 21 bp, synthetic construct
  misc_feature 1..21: note = Description of Artificial Sequence: Synthetic oligonucleotide
  source 1..21: mol_type = other DNA
ggttatgggtctaaggttagt

SEQ ID NO: 41274 - DNA, 21 bp, synthetic construct
  misc_feature 1..21: note = Description of Artificial Sequence: Synthetic oligonucleotide
  source 1..21: mol_type = other DNA
agcctcagcagcaaacaaatg

SEQ ID NO: 41275 - DNA, 21 bp, synthetic construct
  misc_feature 1..21: note = Description of Artificial Sequence: Synthetic oligonucleotide
  source 1..21: mol_type = other DNA
aacggcgccaccaaaaacagc

SEQ ID NO: 41276 - DNA, 21 bp, synthetic construct
  misc_feature 1..21: note = Description of Artificial Sequence: Synthetic oligonucleotide
  source 1..21: mol_type = other DNA
gggcctcgttctatgtctaat

SEQ ID NO: 41277 - DNA, 21 bp, synthetic construct
  misc_feature 1..21: note = Description of Artificial Sequence: Synthetic oligonucleotide
  source 1..21: mol_type = other DNA
accagcgccgccccccacgcc

SEQ ID NO: 41278 - DNA, 21 bp, synthetic construct
  misc_feature 1..21: note = Description of Artificial Sequence: Synthetic oligonucleotide
  source 1..21: mol_type = other DNA
agaagcagccccgccagcctc

SEQ ID NO: 41279 - DNA, 21 bp, synthetic construct
  misc_feature 1..21: note = Description of Artificial Sequence: Synthetic oligonucleotide
  source 1..21: mol_type = other DNA
gggcaggtgaaggctcttggg

SEQ ID NO: 41280 - DNA, 21 bp, synthetic construct
  misc_feature 1..21: note = Description of Artificial Sequence: Synthetic oligonucleotide
  source 1..21: mol_type = other DNA
tctgataatactgctcggagt

SEQ ID NO: 41281 - DNA, 21 bp, synthetic construct
  misc_feature 1..21: note = Description of Artificial Sequence: Synthetic oligonucleotide
  source 1..21: mol_type = other DNA
agaagcaacggcagcgccgcc

SEQ ID NO: 41282 - DNA, 21 bp, synthetic construct
  misc_feature 1..21: note = Description of Artificial Sequence: Synthetic oligonucleotide
  source 1..21: mol_type = other DNA
tacctcaccagcaccagcaac

SEQ ID NO: 41283 - DNA, 21 bp, synthetic construct
  misc_feature 1..21: note = Description of Artificial Sequence: Synthetic oligonucleotide
  source 1..21: mol_type = other DNA
agctacaaaaacaccggcgtc

SEQ ID NO: 41284 - DNA, 21 bp, synthetic construct
  misc_feature 1..21: note = Description of Artificial Sequence: Synthetic oligonucleotide
  source 1..21: mol_type = other DNA
accagaagccaaggcatcctc

SEQ ID NO: 41285 - DNA, 21 bp, synthetic construct
  misc_feature 1..21: note = Description of Artificial Sequence: Synthetic oligonucleotide
  source 1..21: mol_type = other DNA
agtcagtctcctaatcggggg

SEQ ID NO: 41286 - DNA, 21 bp, synthetic construct
  misc_feature 1..21: note = Description of Artificial Sequence: Synthetic oligonucleotide
  source 1..21: mol_type = other DNA
ttcagcagaagccccgccgtc

SEQ ID NO: 41287 - DNA, 21 bp, synthetic construct
  misc_feature 1..21: note = Description of Artificial Sequence: Synthetic oligonucleotide
  source 1..21: mol_type = other DNA
tacggcaaaagcgtcaccccc

SEQ ID NO: 41288 - DNA, 21 bp, synthetic construct
  misc_feature 1..21: note = Description of Artificial Sequence: Synthetic oligonucleotide
  source 1..21: mol_type = other DNA
acgcagatgggtaagtcgaat

SEQ ID NO: 41289 - DNA, 21 bp, synthetic construct
  misc_feature 1..21: note = Description of Artificial Sequence: Synthetic oligonucleotide
  source 1..21: mol_type = other DNA
ttggcgactgcgaatagtcgt

SEQ ID NO: 41290 - DNA, 21 bp, synthetic construct
  misc_feature 1..21: note = Description of Artificial Sequence: Synthetic oligonucleotide
  source 1..21: mol_type = other DNA
gtccccagcagagccgccacc

SEQ ID NO: 41291 - DNA, 21 bp, synthetic construct
  misc_feature 1..21: note = Description of Artificial Sequence: Synthetic oligonucleotide
  source 1..21: mol_type = other DNA
gatagtcatcctcgttctatt

SEQ ID NO: 41292 - DNA, 21 bp, synthetic construct
  misc_feature 1..21: note = Description of Artificial Sequence: Synthetic oligonucleotide
  source 1..21: mol_type = other DNA
agcggcagcggccaaaaccaa

SEQ ID NO: 41293 - DNA, 21 bp, synthetic construct
  misc_feature 1..21: note = Description of Artificial Sequence: Synthetic oligonucleotide
  source 1..21: mol_type = other DNA
atgagtcatactaagtcgaat

SEQ ID NO: 41294 - DNA, 21 bp, synthetic construct
  misc_feature 1..21: note = Description of Artificial Sequence: Synthetic oligonucleotide
  source 1..21: mol_type = other DNA
gggcgtgagactgtttctcgg

SEQ ID NO: 41295 - DNA, 21 bp, synthetic construct
  misc_feature 1..21: note = Description of Artificial Sequence: Synthetic oligonucleotide
  source 1..21: mol_type = other DNA
ggcgtcctcggcagccccaaa

SEQ ID NO: 41296 - DNA, 21 bp, synthetic construct
  misc_feature 1..21: note = Description of Artificial Sequence: Synthetic oligonucleotide
  source 1..21: mol_type = other DNA
cccggcatgaaagtcagcccc

SEQ ID NO: 41297 - DNA, 21 bp, synthetic construct
  misc_feature 1..21: note = Description of Artificial Sequence: Synthetic oligonucleotide
  source 1..21: mol_type = other DNA
caggataagggtaatgcgggt

SEQ ID NO: 41298 - DNA, 21 bp, synthetic construct
  misc_feature 1..21: note = Description of Artificial Sequence: Synthetic oligonucleotide
  source 1..21: mol_type = other DNA
ggcggcagcagcagaaccctc

SEQ ID NO: 41299 - DNA, 21 bp, synthetic construct
  misc_feature 1..21: note = Description of Artificial Sequence: Synthetic oligonucleotide
  source 1..21: mol_type = other DNA
cccagcaacagacaaatcgcc

SEQ ID NO: 41300 - DNA, 21 bp, synthetic construct
  misc_feature 1..21: note = Description of Artificial Sequence: Synthetic oligonucleotide
  source 1..21: mol_type = other DNA
gggacgactaattcgcgtaat

SEQ ID NO: 41301 - DNA, 21 bp, synthetic construct
  misc_feature 1..21: note = Description of Artificial Sequence: Synthetic oligonucleotide
  source 1..21: mol_type = other DNA
cctctgcgtggtgggtcgagt

SEQ ID NO: 41302 - DNA, 21 bp, synthetic construct
  misc_feature 1..21: note = Description of Artificial Sequence: Synthetic oligonucleotide
  source 1..21: mol_type = other DNA
agccccaacagccaccccagc

SEQ ID NO: 41303 - DNA, 21 bp, synthetic construct
  misc_feature 1..21: note = Description of Artificial Sequence: Synthetic oligonucleotide
  source 1..21: mol_type = other DNA
cccagcaaaggcacctacccc

SEQ ID NO: 41304 - DNA, 21 bp, synthetic construct
  misc_feature 1..21: note = Description of Artificial Sequence: Synthetic oligonucleotide
  source 1..21: mol_type = other DNA
gggaatggtattagtgctagg

SEQ ID NO: 41305 - DNA, 21 bp, synthetic construct
  misc_feature 1..21: note = Description of Artificial Sequence: Synthetic oligonucleotide
  source 1..21: mol_type = other DNA
agcagcggcaacagaaccacc

SEQ ID NO: 41306 - DNA, 21 bp, synthetic construct
  misc_feature 1..21: note = Description of Artificial Sequence: Synthetic oligonucleotide
  source 1..21: mol_type = other DNA
ggcaccatcaacggcatcacc

SEQ ID NO: 41307 - DNA, 21 bp, synthetic construct
  misc_feature 1..21: note = Description of Artificial Sequence: Synthetic oligonucleotide
  source 1..21: mol_type = other DNA
cacaccgtccccagaagcgtc

SEQ ID NO: 41308 - DNA, 21 bp, synthetic construct
  misc_feature 1..21: note = Description of Artificial Sequence: Synthetic oligonucleotide
  source 1..21: mol_type = other DNA
caaagcaaagccggcaacagc

SEQ ID NO: 41309 - DNA, 21 bp, synthetic construct
  misc_feature 1..21: note = Description of Artificial Sequence: Synthetic oligonucleotide
  source 1..21: mol_type = other DNA
ggcctccccctcagaagcgtc

SEQ ID NO: 41310 - DNA, 21 bp, synthetic construct
  misc_feature 1..21: note = Description of Artificial Sequence: Synthetic oligonucleotide
  source 1..21: mol_type = other DNA
atgccgagtcagagggatggt

SEQ ID NO: 41311 - DNA, 21 bp, synthetic construct
  misc_feature 1..21: note = Description of Artificial Sequence: Synthetic oligonucleotide
  source 1..21: mol_type = other DNA
gggcgtgcgaatggtcagacg

SEQ ID NO: 41312 - DNA, 21 bp, synthetic construct
  misc_feature 1..21: note = Description of Artificial Sequence: Synthetic oligonucleotide
  source 1..21: mol_type = other DNA
tttcgggcgcaggctaatgtt

SEQ ID NO: 41313 - DNA, 21 bp, synthetic construct
  misc_feature 1..21: note = Description of Artificial Sequence: Synthetic oligonucleotide
  source 1..21: mol_type = other DNA
accgccagccccaacaacaga

SEQ ID NO: 41314 - DNA, 21 bp, synthetic construct
  misc_feature 1..21: note = Description of Artificial Sequence: Synthetic oligonucleotide
  source 1..21: mol_type = other DNA
tctagtactaataggcctacg

SEQ ID NO: 41315 - DNA, 21 bp, synthetic construct
  misc_feature 1..21: note = Description of Artificial Sequence: Synthetic oligonucleotide
  source 1..21: mol_type = other DNA
ggtagtgttaatcggtcgtct

SEQ ID NO: 41316 - DNA, 21 bp, synthetic construct
  misc_feature 1..21: note = Description of Artificial Sequence: Synthetic oligonucleotide
  source 1..21: mol_type = other DNA
accatgcccgcccaaagaagc

SEQ ID NO: 41317 - DNA, 21 bp, synthetic construct
  misc_feature 1..21: note = Description of Artificial Sequence: Synthetic oligonucleotide
  source 1..21: mol_type = other DNA
ggggtgactgggtctcggggt

SEQ ID NO: 41318 - DNA, 21 bp, synthetic construct
  misc_feature 1..21: note = Description of Artificial Sequence: Synthetic oligonucleotide
  source 1..21: mol_type = other DNA
agcaccaccctcagaaacagc

SEQ ID NO: 41319 - DNA, 21 bp, synthetic construct
  misc_feature 1..21: note = Description of Artificial Sequence: Synthetic oligonucleotide
  source 1..21: mol_type = other DNA
cccagaaccaacaaccccagc

SEQ ID NO: 41320 - DNA, 21 bp, synthetic construct
  misc_feature 1..21: note = Description of Artificial Sequence: Synthetic oligonucleotide
  source 1..21: mol_type = other DNA
gagggttctgggaggcttact

SEQ ID NO: 41321 - DNA, 21 bp, synthetic construct
  misc_feature 1..21: note = Description of Artificial Sequence: Synthetic oligonucleotide
  source 1..21: mol_type = other DNA
atgagaagcaaccccaccagc

SEQ ID NO: 41322 - DNA, 21 bp, synthetic construct
  misc_feature 1..21: note = Description of Artificial Sequence: Synthetic oligonucleotide
  source 1..21: mol_type = other DNA
ttcctcggcaaaagcggcgcc

SEQ ID NO: 41323 - DNA, 21 bp, synthetic construct
  misc_feature 1..21: note = Description of Artificial Sequence: Synthetic oligonucleotide
  source 1..21: mol_type = other DNA
gtcccccacaaccacagcctc

SEQ ID NO: 41324 - DNA, 21 bp, synthetic construct
  misc_feature 1..21: note = Description of Artificial Sequence: Synthetic oligonucleotide
  source 1..21: mol_type = other DNA
caagtcagccccgccagcaga

SEQ ID NO: 41325 - DNA, 21 bp, synthetic construct
  misc_feature 1..21: note = Description of Artificial Sequence: Synthetic oligonucleotide
  source 1..21: mol_type = other DNA
agtccgaatgcgaatcgtgtt

SEQ ID NO: 41326 - DNA, 21 bp, synthetic construct
  misc_feature 1..21: note = Description of Artificial Sequence: Synthetic oligonucleotide
  source 1..21: mol_type = other DNA
agttcgccgtcgaggtctagt

SEQ ID NO: 41327 - DNA, 21 bp, synthetic construct
  misc_feature 1..21: note = Description of Artificial Sequence: Synthetic oligonucleotide
  source 1..21: mol_type = other DNA
gagccgacgcatccgcggggt

SEQ ID NO: 41328 - DNA, 21 bp, synthetic construct
  misc_feature 1..21: note = Description of Artificial Sequence: Synthetic oligonucleotide
  source 1..21: mol_type = other DNA
atgcaggcgaagtcggggcat

SEQ ID NO: 41329 - DNA, 21 bp, synthetic construct
  misc_feature 1..21: note = Description of Artificial Sequence: Synthetic oligonucleotide
  source 1..21: mol_type = other DNA
aatgcggctcgtaataatgcg

SEQ ID NO: 41330 - DNA, 21 bp, synthetic construct
  misc_feature 1..21: note = Description of Artificial Sequence: Synthetic oligonucleotide
  source 1..21: mol_type = other DNA
agcgccaacagacccagcgcc

SEQ ID NO: 41331 - DNA, 21 bp, synthetic construct
  misc_feature 1..21: note = Description of Artificial Sequence: Synthetic oligonucleotide
  source 1..21: mol_type = other DNA
cggtctccgactagtcagtct

SEQ ID NO: 41332 - DNA, 21 bp, synthetic construct
  misc_feature 1..21: note = Description of Artificial Sequence: Synthetic oligonucleotide
  source 1..21: mol_type = other DNA
gccctccccgccaaaagcgcc

SEQ ID NO: 41333 - DNA, 21 bp, synthetic construct
  misc_feature 1..21: note = Description of Artificial Sequence: Synthetic oligonucleotide
  source 1..21: mol_type = other DNA
cccgtcatgaccagaaccccc

SEQ ID NO: 41334 - DNA, 21 bp, synthetic construct
  misc_feature 1..21: note = Description of Artificial Sequence: Synthetic oligonucleotide
  source 1..21: mol_type = other DNA
ggcaaccccagccccctcgtc

SEQ ID NO: 41335 - DNA, 21 bp, synthetic construct
  misc_feature 1..21: note = Description of Artificial Sequence: Synthetic oligonucleotide
  source 1..21: mol_type = other DNA
gccaacggcaccaaaagcagc

SEQ ID NO: 41336 - DNA, 21 bp, synthetic construct
  misc_feature 1..21: note = Description of Artificial Sequence: Synthetic oligonucleotide
  source 1..21: mol_type = other DNA
cctagggatttgcgtgcgtcg

SEQ ID NO: 41337 - DNA, 21 bp, synthetic construct
  misc_feature 1..21: note = Description of Artificial Sequence: Synthetic oligonucleotide
  source 1..21: mol_type = other DNA
cagcctggtgtgtcgggtcgt

SEQ ID NO: 41338 - DNA, 21 bp, synthetic construct
  misc_feature 1..21: note = Description of Artificial Sequence: Synthetic oligonucleotide
  source 1..21: mol_type = other DNA
cccctcaccaccagacccagc

SEQ ID NO: 41339 - DNA, 21 bp, synthetic construct
  misc_feature 1..21: note = Description of Artificial Sequence: Synthetic oligonucleotide
  source 1..21: mol_type = other DNA
ccccacagcaccggcagcatc

SEQ ID NO: 41340 - DNA, 21 bp, synthetic construct
  misc_feature 1..21: note = Description of Artificial Sequence: Synthetic oligonucleotide
  source 1..21: mol_type = other DNA
ggcggccaaaacagcagcaaa

SEQ ID NO: 41341 - DNA, 21 bp, synthetic construct
  misc_feature 1..21: note = Description of Artificial Sequence: Synthetic oligonucleotide
  source 1..21: mol_type = other DNA
gagccgtcgcgtagttcgacg

SEQ ID NO: 41342 - DNA, 21 bp, synthetic construct
  misc_feature 1..21: note = Description of Artificial Sequence: Synthetic oligonucleotide
  source 1..21: mol_type = other DNA
gcttatcctagtggttcgtcg

SEQ ID NO: 41343 - DNA, 21 bp, synthetic construct
  misc_feature 1..21: note = Description of Artificial Sequence: Synthetic oligonucleotide
  source 1..21: mol_type = other DNA
cagctgggttctacgactagg

SEQ ID NO: 41344 - DNA, 21 bp, synthetic construct
  misc_feature 1..21: note = Description of Artificial Sequence: Synthetic oligonucleotide
  source 1..21: mol_type = other DNA
gctcgttctgagtctacggct

SEQ ID NO: 41345 - DNA, 21 bp, synthetic construct
  misc_feature 1..21: note = Description of Artificial Sequence: Synthetic oligonucleotide
  source 1..21: mol_type = other DNA
gctccttcggcgcggccgagt

SEQ ID NO: 41346 - DNA, 21 bp, synthetic construct
  misc_feature 1..21: note = Description of Artificial Sequence: Synthetic oligonucleotide
  source 1..21: mol_type = other DNA
acgtcgaatactaagtctgtt

SEQ ID NO: 41347 - DNA, 21 bp, synthetic construct
  misc_feature 1..21: note = Description of Artificial Sequence: Synthetic oligonucleotide
  source 1..21: mol_type = other DNA
cctgggattgctacgggtcgg

SEQ ID NO: 41348 - DNA, 21 bp, synthetic construct
  misc_feature 1..21: note = Description of Artificial Sequence: Synthetic oligonucleotide
  source 1..21: mol_type = other DNA
accagcacccaaaaaggccaa

SEQ ID NO: 41349 - DNA, 21 bp, synthetic construct
  misc_feature 1..21: note = Description of Artificial Sequence: Synthetic oligonucleotide
  source 1..21: mol_type = other DNA
gataggatgggtactgcgcat

SEQ ID NO: 41350 - DNA, 21 bp, synthetic construct
  misc_feature 1..21: note = Description of Artificial Sequence: Synthetic oligonucleotide
  source 1..21: mol_type = other DNA
agccacacccccaaactcgtc

SEQ ID NO: 41351 - DNA, 21 bp, synthetic construct
  misc_feature 1..21: note = Description of Artificial Sequence: Synthetic oligonucleotide
  source 1..21: mol_type = other DNA
aggggtaatgggacgcatggt

SEQ ID NO: 41352 - DNA, 21 bp, synthetic construct
  misc_feature 1..21: note = Description of Artificial Sequence: Synthetic oligonucleotide
  source 1..21: mol_type = other DNA
ccttctcatggtcagaatagg

SEQ ID NO: 41353 - DNA, 21 bp, synthetic construct
  misc_feature 1..21: note = Description of Artificial Sequence: Synthetic oligonucleotide
  source 1..21: mol_type = other DNA
agcagccccaccagaggcctc

SEQ ID NO: 41354 - DNA, 21 bp, synthetic construct
  misc_feature 1..21: note = Description of Artificial Sequence: Synthetic oligonucleotide
  source 1..21: mol_type = other DNA
actcgttttacgtcttcggct

SEQ ID NO: 41355 - DNA, 21 bp, synthetic construct
  misc_feature 1..21: note = Description of Artificial Sequence: Synthetic oligonucleotide
  source 1..21: mol_type = other DNA
agccccttccaaagcagccac

SEQ ID NO: 41356 - DNA, 21 bp, synthetic construct
  misc_feature 1..21: note = Description of Artificial Sequence: Synthetic oligonucleotide
  source 1..21: mol_type = other DNA
gggcatagtactgtgggtagt

SEQ ID NO: 41357 - DNA, 21 bp, synthetic construct
  misc_feature 1..21: note = Description of Artificial Sequence: Synthetic oligonucleotide
  source 1..21: mol_type = other DNA
agcatgaacagcaaacccacc

SEQ ID NO: 41358 - DNA, 21 bp, synthetic construct
  misc_feature 1..21: note = Description of Artificial Sequence: Synthetic oligonucleotide
  source 1..21: mol_type = other DNA
cctcatatttcgcctaagggg

SEQ ID NO: 41359 - DNA, 21 bp, synthetic construct
  misc_feature 1..21: note = Description of Artificial Sequence: Synthetic oligonucleotide
  source 1..21: mol_type = other DNA
gcgggttctagtaggaatctt

SEQ ID NO: 41360 - DNA, 21 bp, synthetic construct
  misc_feature 1..21: note = Description of Artificial Sequence: Synthetic oligonucleotide
  source 1..21: mol_type = other DNA
aatcgtcagagtagtccgacg

SEQ ID NO: 41361 - DNA, 21 bp, synthetic construct
  misc_feature 1..21: note = Description of Artificial Sequence: Synthetic oligonucleotide
  source 1..21: mol_type = other DNA
atgagacccaacagcggcatg

SEQ ID NO: 41362 - DNA, 21 bp, synthetic construct
  misc_feature 1..21: note = Description of Artificial Sequence: Synthetic oligonucleotide
  source 1..21: mol_type = other DNA
gggggtcaggcgtctggtcgg

SEQ ID NO: 41363 - DNA, 21 bp, synthetic construct
  misc_feature 1..21: note = Description of Artificial Sequence: Synthetic oligonucleotide
  source 1..21: mol_type = other DNA
atgtctacggctcgttctgct

SEQ ID NO: 41364 - DNA, 21 bp, synthetic construct
  misc_feature 1..21: note = Description of Artificial Sequence: Synthetic oligonucleotide
  source 1..21: mol_type = other DNA
aacctcggcaccaacgtcctc

SEQ ID NO: 41365 - DNA, 21 bp, synthetic construct
  misc_feature 1..21: note = Description of Artificial Sequence: Synthetic oligonucleotide
  source 1..21: mol_type = other DNA
ggcacccccaacaacagaagc

SEQ ID NO: 41366 - DNA, 21 bp, synthetic construct
  misc_feature 1..21: note = Description of Artificial Sequence: Synthetic oligonucleotide
  source 1..21: mol_type = other DNA
cccgtcggcagcagaggcggc

SEQ ID NO: 41367 - DNA, 21 bp, synthetic construct
  misc_feature 1..21: note = Description of Artificial Sequence: Synthetic oligonucleotide
  source 1..21: mol_type = other DNA
caagtcggcagacccaacgcc

SEQ ID NO: 41368 - DNA, 21 bp, synthetic construct
  misc_feature 1..21: note = Description of Artificial Sequence: Synthetic oligonucleotide
  source 1..21: mol_type = other DNA
agcgtcaacaccaaagccctc

SEQ ID NO: 41369 - DNA, 21 bp, synthetic construct
  misc_feature 1..21: note = Description of Artificial Sequence: Synthetic oligonucleotide
  source 1..21: mol_type = other DNA
tcgccgatgcgttcgcaggtt

SEQ ID NO: 41370 - DNA, 21 bp, synthetic construct
  misc_feature 1..21: note = Description of Artificial Sequence: Synthetic oligonucleotide
  source 1..21: mol_type = other DNA
tcgagtccgtctaagatggcg

SEQ ID NO: 41371 - DNA, 21 bp, synthetic construct
  misc_feature 1..21: note = Description of Artificial Sequence: Synthetic oligonucleotide
  source 1..21: mol_type = other DNA
agccaacccatcggcgccaga

SEQ ID NO: 41372 - DNA, 21 bp, synthetic construct
  misc_feature 1..21: note = Description of Artificial Sequence: Synthetic oligonucleotide
  source 1..21: mol_type = other DNA
agccacgtcaacagcaccaga

SEQ ID NO: 41373 - DNA, 21 bp, synthetic construct
  misc_feature 1..21: note = Description of Artificial Sequence: Synthetic oligonucleotide
  source 1..21: mol_type = other DNA
acgacgactactcgtccgagt

SEQ ID NO: 41374 - DNA, 21 bp, synthetic construct
  misc_feature 1..21: note = Description of Artificial Sequence: Synthetic oligonucleotide
  source 1..21: mol_type = other DNA
gacggttctggacagaatcaa

SEQ ID NO: 41375 - DNA, 21 bp, synthetic construct
  misc_feature 1..21: note = Description of Artificial Sequence: Synthetic oligonucleotide
  source 1..21: mol_type = other DNA
aacggttctggagagaatcaa

SEQ ID NO: 41376 - DNA, 21 bp, synthetic construct
  misc_feature 1..21: note = Description of Artificial Sequence: Synthetic oligonucleotide
  source 1..21: mol_type = other DNA
catgctgagactaatcttcgt

SEQ ID NO: 41377 - DNA, 21 bp, synthetic construct
  misc_feature 1..21: note = Description of Artificial Sequence: Synthetic oligonucleotide
  source 1..21: mol_type = other DNA
aacggttctggacaggatcaa

SEQ ID NO: 41378 - DNA, 21 bp, synthetic construct
  misc_feature 1..21: note = Description of Artificial Sequence: Synthetic oligonucleotide
  source 1..21: mol_type = other DNA
aacggccccggccaaaaccaa

SEQ ID NO: 41379 - DNA, 21 bp, synthetic construct
  misc_feature 1..21: note = Description of Artificial Sequence: Synthetic oligonucleotide
  source 1..21: mol_type = other DNA
cagggtacgactgctaggtcg

SEQ ID NO: 41380 - DNA, 21 bp, synthetic construct
  misc_feature 1..21: note = Description of Artificial Sequence: Synthetic oligonucleotide
  source 1..21: mol_type = other DNA
caacccaacagcgccagccac

SEQ ID NO: 41381 - DNA, 21 bp, synthetic construct
  misc_feature 1..21: note = Description of Artificial Sequence: Synthetic oligonucleotide
  source 1..21: mol_type = other DNA
aacggttctgaacagaatcaa

SEQ ID NO: 41382 - DNA, 21 bp, synthetic construct
  misc_feature 1..21: note = Description of Artificial Sequence: Synthetic oligonucleotide
  source 1..21: mol_type = other DNA
cacggttctggacagaatcaa

SEQ ID NO: 41383 - DNA, 21 bp, synthetic construct
  misc_feature 1..21: note = Description of Artificial Sequence: Synthetic oligonucleotide
  source 1..21: mol_type = other DNA
gtgggtccgtcgaagattcag

SEQ ID NO: 41384 - DNA, 21 bp, synthetic construct
  misc_feature 1..21: note = Description of Artificial Sequence: Synthetic oligonucleotide
  source 1..21: mol_type = other DNA
atgaaaggcaacaacctcagc

SEQ ID NO: 41385 - DNA, 21 bp, synthetic construct
  misc_feature 1..21: note = Description of Artificial Sequence: Synthetic oligonucleotide
  source 1..21: mol_type = other DNA
aacggttctggacagaatcca

SEQ ID NO: 41386 - DNA, 21 bp, synthetic construct
  misc_feature 1..21: note = Description of Artificial Sequence: Synthetic oligonucleotide
  source 1..21: mol_type = other DNA
cacaacaccgcccacgccagc

SEQ ID NO: 41387 - DNA, 21 bp, synthetic construct
  misc_feature 1..21: note = Description of Artificial Sequence: Synthetic oligonucleotide
  source 1..21: mol_type = other DNA
agcaaaaccggcaccagcctc

SEQ ID NO: 41388 - DNA, 21 bp, synthetic construct
  misc_feature 1..21: note = Description of Artificial Sequence: Synthetic oligonucleotide
  source 1..21: mol_type = other DNA
cgtccgaatagtcttattgat

SEQ ID NO: 41389 - DNA, 21 bp, synthetic construct
  misc_feature 1..21: note = Description of Artificial Sequence: Synthetic oligonucleotide
  source 1..21: mol_type = other DNA
aacggttatggacagaatcaa

SEQ ID NO: 41390 - DNA, 21 bp, synthetic construct
  misc_feature 1..21: note = Description of Artificial Sequence: Synthetic oligonucleotide
  source 1..21: mol_type = other DNA
gatgctggttctcgttcttct

SEQ ID NO: 41391 - DNA, 21 bp, synthetic construct
  misc_feature 1..21: note = Description of Artificial Sequence: Synthetic oligonucleotide
  source 1..21: mol_type = other DNA
aacggtactggacagaatcaa

SEQ ID NO: 41392 - DNA, 21 bp, synthetic construct
  misc_feature 1..21: note = Description of Artificial Sequence: Synthetic oligonucleotide
  source 1..21: mol_type = other DNA
gggacggatagtaagaggcat

SEQ ID NO: 41393 - DNA, 21 bp, synthetic construct
  misc_feature 1..21: note = Description of Artificial Sequence: Synthetic oligonucleotide
  source 1..21: mol_type = other DNA
actggtcagcagacggctact

SEQ ID NO: 41394 - DNA, 21 bp, synthetic construct
  misc_feature 1..21: note = Description of Artificial Sequence: Synthetic oligonucleotide
  source 1..21: mol_type = other DNA
aactacagcggcgcccacacc

SEQ ID NO: 41395 - DNA, 21 bp, synthetic construct
  misc_feature 1..21: note = Description of Artificial Sequence: Synthetic oligonucleotide
  source 1..21: mol_type = other DNA
aacggttctagacagaatcaa

SEQ ID NO: 41396 - DNA, 21 bp, synthetic construct
  misc_feature 1..21: note = Description of Artificial Sequence: Synthetic oligonucleotide
  source 1..21: mol_type = other DNA
cgttcttcggatcggagtgcg

SEQ ID NO: 41397 - DNA, 21 bp, synthetic construct
  misc_feature 1..21: note = Description of Artificial Sequence: Synthetic oligonucleotide
  source 1..21: mol_type = other DNA
gtcggcagcggcagagccaac

SEQ ID NO: 41398 - DNA, 21 bp, synthetic construct
  misc_feature 1..21: note = Description of Artificial Sequence: Synthetic oligonucleotide
  source 1..21: mol_type = other DNA
acttcgaatatggtgggtaag

SEQ ID NO: 41399 - DNA, 21 bp, synthetic construct
  misc_feature 1..21: note = Description of Artificial Sequence: Synthetic oligonucleotide
  source 1..21: mol_type = other DNA
aacggtgctggacagaatcaa

SEQ ID NO: 41400 - DNA, 21 bp, synthetic construct
  misc_feature 1..21: note = Description of Artificial Sequence: Synthetic oligonucleotide
  source 1..21: mol_type = other DNA
aacggttctggacagagtcaa

SEQ ID NO: 41401 - DNA, 21 bp, synthetic construct
  misc_feature 1..21: note = Description of Artificial Sequence: Synthetic oligonucleotide
  source 1..21: mol_type = other DNA
ctcgccaccagcggcagcgcc

SEQ ID NO: 41402 - DNA, 21 bp, synthetic construct
  misc_feature 1..21: note = Description of Artificial Sequence: Synthetic oligonucleotide
  source 1..21: mol_type = other DNA
gagcgtcatagtgggtcgaag

SEQ ID NO: 41403 - DNA, 21 bp, synthetic construct
  misc_feature 1..21: note = Description of Artificial Sequence: Synthetic oligonucleotide
  source 1..21: mol_type = other DNA
agtgctcataataggtctgtt

SEQ ID NO: 41404 - DNA, 21 bp, synthetic construct
  misc_feature 1..21: note = Description of Artificial Sequence: Synthetic oligonucleotide
  source 1..21: mol_type = other DNA
gggcgtctgaatactaatggt

SEQ ID NO: 41405 - DNA, 21 bp, synthetic construct
  misc_feature 1..21: note = Description of Artificial Sequence: Synthetic oligonucleotide
  source 1..21: mol_type = other DNA
cctccttctaagccgaatact

SEQ ID NO: 41406 - DNA, 21 bp, synthetic construct
  misc_feature 1..21: note = Description of Artificial Sequence: Synthetic oligonucleotide
  source 1..21: mol_type = other DNA
catcagagtagttcgagttcg

SEQ ID NO: 41407 - DNA, 21 bp, synthetic construct
  misc_feature 1..21: note = Description of Artificial Sequence: Synthetic oligonucleotide
  source 1..21: mol_type = other DNA
cctgcgcgtgatagtaagtcg

SEQ ID NO: 41408 - DNA, 21 bp, synthetic construct
  misc_feature 1..21: note = Description of Artificial Sequence: Synthetic oligonucleotide
  source 1..21: mol_type = other DNA
agcgtcagcggcagacacatc

SEQ ID NO: 41409 - DNA, 21 bp, synthetic construct
  misc_feature 1..21: note = Description of Artificial Sequence: Synthetic oligonucleotide
  source 1..21: mol_type = other DNA
cttgcgccggggcatggtaat

SEQ ID NO: 41410 - DNA, 21 bp, synthetic construct
  misc_feature 1..21: note = Description of Artificial Sequence: Synthetic oligonucleotide
  source 1..21: mol_type = other DNA
catggttctaagccgtatatt

SEQ ID NO: 41411 - DNA, 21 bp, synthetic construct
  misc_feature 1..21: note = Description of Artificial Sequence: Synthetic oligonucleotide
  source 1..21: mol_type = other DNA
gaggtgcatgctaagaataat

SEQ ID NO: 41412 - DNA, 21 bp, synthetic construct
  misc_feature 1..21: note = Description of Artificial Sequence: Synthetic oligonucleotide
  source 1..21: mol_type = other DNA
agtaggacgaatgctacggct

SEQ ID NO: 41413 - DNA, 21 bp, synthetic construct
  misc_feature 1..21: note = Description of Artificial Sequence: Synthetic oligonucleotide
  source 1..21: mol_type = other DNA
gttcagccggtgaagatgagt

SEQ ID NO: 41414 - DNA, 21 bp, synthetic construct
  misc_feature 1..21: note = Description of Artificial Sequence: Synthetic oligonucleotide
  source 1..21: mol_type = other DNA
tctactccgatgtcgaatcgt

SEQ ID NO: 41415 - DNA, 21 bp, synthetic construct
  misc_feature 1..21: note = Description of Artificial Sequence: Synthetic oligonucleotide
  source 1..21: mol_type = other DNA
ggttcgccgggggttttgcgt

SEQ ID NO: 41416 - DNA, 21 bp, synthetic construct
  misc_feature 1..21: note = Description of Artificial Sequence: Synthetic oligonucleotide
  source 1..21: mol_type = other DNA
accggcatcgaaagacccatg

SEQ ID NO: 41417 - DNA, 21 bp, synthetic construct
  misc_feature 1..21: note = Description of Artificial Sequence: Synthetic oligonucleotide
  source 1..21: mol_type = other DNA
atcagcaaagccagcacccac

SEQ ID NO: 41418 - DNA, 21 bp, synthetic construct
  misc_feature 1..21: note = Description of Artificial Sequence: Synthetic oligonucleotide
  source 1..21: mol_type = other DNA
aggacgagtactgcgcctcag

SEQ ID NO: 41419 - DNA, 21 bp, synthetic construct
  misc_feature 1..21: note = Description of Artificial Sequence: Synthetic oligonucleotide
  source 1..21: mol_type = other DNA
agggaggatactaagatgcat

SEQ ID NO: 41420 - DNA, 21 bp, synthetic construct
  misc_feature 1..21: note = Description of Artificial Sequence: Synthetic oligonucleotide
  source 1..21: mol_type = other DNA
cctgctcatcttaagcatagt

SEQ ID NO: 41421 - DNA, 21 bp, synthetic construct
  misc_feature 1..21: note = Description of Artificial Sequence: Synthetic oligonucleotide
  source 1..21: mol_type = other DNA
cacaccgacaccagagccgtc

SEQ ID NO: 41422 - DNA, 21 bp, synthetic construct
  misc_feature 1..21: note = Description of Artificial Sequence: Synthetic oligonucleotide
  source 1..21: mol_type = other DNA
aataatactcagaagaattct

SEQ ID NO: 41423 - DNA, 21 bp, synthetic construct
  misc_feature 1..21: note = Description of Artificial Sequence: Synthetic oligonucleotide
  source 1..21: mol_type = other DNA
cccctcgaaagaaccaccaaa

SEQ ID NO: 41424 - DNA, 21 bp, synthetic construct
  misc_feature 1..21: note = Description of Artificial Sequence: Synthetic oligonucleotide
  source 1..21: mol_type = other DNA
gggactgcgattcctcgttct

SEQ ID NO: 41425 - DNA, 21 bp, synthetic construct
  misc_feature 1..21: note = Description of Artificial Sequence: Synthetic oligonucleotide
  source 1..21: mol_type = other DNA
aacagagtcgaaagagccgtc

SEQ ID NO: 41426 - DNA, 21 bp, synthetic construct
  misc_feature 1..21: note = Description of Artificial Sequence: Synthetic oligonucleotide
  source 1..21: mol_type = other DNA
caccacagcaccctccaaacc

SEQ ID NO: 41427 - DNA, 21 bp, synthetic construct
  misc_feature 1..21: note = Description of Artificial Sequence: Synthetic oligonucleotide
  source 1..21: mol_type = other DNA
gccggcgccggcatgtacgcc

SEQ ID NO: 41428 - DNA, 21 bp, synthetic construct
  misc_feature 1..21: note = Description of Artificial Sequence: Synthetic oligonucleotide
  source 1..21: mol_type = other DNA
ggtacttttcagagtgggacg

SEQ ID NO: 41429 - DNA, 21 bp, synthetic construct
  misc_feature 1..21: note = Description of Artificial Sequence: Synthetic oligonucleotide
  source 1..21: mol_type = other DNA
caaggccaaaacagaaccgtc

SEQ ID NO: 41430 - DNA, 21 bp, synthetic construct
  misc_feature 1..21: note = Description of Artificial Sequence: Synthetic oligonucleotide
  source 1..21: mol_type = other DNA
atcaacctcagccacagcacc

SEQ ID NO: 41431 - DNA, 21 bp, synthetic construct
  misc_feature 1..21: note = Description of Artificial Sequence: Synthetic oligonucleotide
  source 1..21: mol_type = other DNA
ggtcatgtttcggctatgcgt

SEQ ID NO: 41432 - DNA, 21 bp, synthetic construct
  misc_feature 1..21: note = Description of Artificial Sequence: Synthetic oligonucleotide
  source 1..21: mol_type = other DNA
agcctcaccaccaaagccaac

SEQ ID NO: 41433 - DNA, 21 bp, synthetic construct
  misc_feature 1..21: note = Description of Artificial Sequence: Synthetic oligonucleotide
  source 1..21: mol_type = other DNA
gttaatcttagtccgaatcat

SEQ ID NO: 41434 - DNA, 21 bp, synthetic construct
  misc_feature 1..21: note = Description of Artificial Sequence: Synthetic oligonucleotide
  source 1..21: mol_type = other DNA
gctgtgactagtcatgctagg

SEQ ID NO: 41435 - DNA, 21 bp, synthetic construct
  misc_feature 1..21: note = Description of Artificial Sequence: Synthetic oligonucleotide
  source 1..21: mol_type = other DNA
aatatgcctatgaggagtggg

SEQ ID NO: 41436 - DNA, 21 bp, synthetic construct
  misc_feature 1..21: note = Description of Artificial Sequence: Synthetic oligonucleotide
  source 1..21: mol_type = other DNA
attaggactaatagtactctt

SEQ ID NO: 41437 - DNA, 21 bp, synthetic construct
  misc_feature 1..21: note = Description of Artificial Sequence: Synthetic oligonucleotide
  source 1..21: mol_type = other DNA
ccgtctactgagaggaatcgt

SEQ ID NO: 41438 - DNA, 21 bp, synthetic construct
  misc_feature 1..21: note = Description of Artificial Sequence: Synthetic oligonucleotide
  source 1..21: mol_type = other DNA
cgtccggtggttgctagtacg

SEQ ID NO: 41439 - DNA, 21 bp, synthetic construct
  misc_feature 1..21: note = Description of Artificial Sequence: Synthetic oligonucleotide
  source 1..21: mol_type = other DNA
tatgggctgccgagtagtcgt

SEQ ID NO: 41440 - DNA, 21 bp, synthetic construct
  misc_feature 1..21: note = Description of Artificial Sequence: Synthetic oligonucleotide
  source 1..21: mol_type = other DNA
ggcagcagccccaaactcacc

SEQ ID NO: 41441 - DNA, 21 bp, synthetic construct
  misc_feature 1..21: note = Description of Artificial Sequence: Synthetic oligonucleotide
  source 1..21: mol_type = other DNA
agagacagcaccgccgccaga

SEQ ID NO: 41442 - DNA, 21 bp, synthetic construct
  misc_feature 1..21: note = Description of Artificial Sequence: Synthetic oligonucleotide
  source 1..21: mol_type = other DNA
aattgtcgtccgaataccacg

SEQ ID NO: 41443 - DNA, 21 bp, synthetic construct
  misc_feature 1..21: note = Description of Artificial Sequence: Synthetic oligonucleotide
  source 1..21: mol_type = other DNA
catcctgggaagcctgctggt

SEQ ID NO: 41444 - DNA, 21 bp, synthetic construct
  misc_feature 1..21: note = Description of Artificial Sequence: Synthetic oligonucleotide
  source 1..21: mol_type = other DNA
gagtctcctaatcttcattcg

SEQ ID NO: 41445 - DNA, 21 bp, synthetic construct
  misc_feature 1..21: note = Description of Artificial Sequence: Synthetic oligonucleotide
  source 1..21: mol_type = other DNA
agcatccccagcaccgtcaga

SEQ ID NO: 41446 - DNA, 21 bp, synthetic construct
  misc_feature 1..21: note = Description of Artificial Sequence: Synthetic oligonucleotide
  source 1..21: mol_type = other DNA
gtcagagccgccagcaacccc

SEQ ID NO: 41447 - DNA, 21 bp, synthetic construct
  misc_feature 1..21: note = Description of Artificial Sequence: Synthetic oligonucleotide
  source 1..21: mol_type = other DNA
atgggcagcagcgtcagaagc

SEQ ID NO: 41448 - DNA, 21 bp, synthetic construct
  misc_feature 1..21: note = Description of Artificial Sequence: Synthetic oligonucleotide
  source 1..21: mol_type = other DNA
tcggtgcttaatcgtaatggg

SEQ ID NO: 41449 - DNA, 21 bp, synthetic construct
  misc_feature 1..21: note = Description of Artificial Sequence: Synthetic oligonucleotide
  source 1..21: mol_type = other DNA
gatagtaggcctcgtctggcg

SEQ ID NO: 41450 - DNA, 21 bp, synthetic construct
  misc_feature 1..21: note = Description of Artificial Sequence: Synthetic oligonucleotide
  source 1..21: mol_type = other DNA
ggtgctgggacgagtcttcat

SEQ ID NO: 41451 - DNA, 21 bp, synthetic construct
  misc_feature 1..21: note = Description of Artificial Sequence: Synthetic oligonucleotide
  source 1..21: mol_type = other DNA
cagccttctcaggggcatagt

SEQ ID NO: 41452 - DNA, 21 bp, synthetic construct
  misc_feature 1..21: note = Description of Artificial Sequence: Synthetic oligonucleotide
  source 1..21: mol_type = other DNA
gccagcaccgccatcaaccaa

SEQ ID NO: 41453 - DNA, 21 bp, synthetic construct
  misc_feature 1..21: note = Description of Artificial Sequence: Synthetic oligonucleotide
  source 1..21: mol_type = other DNA
aatcttgcttctagttcttat

SEQ ID NO: 41454 - DNA, 21 bp, synthetic construct
  misc_feature 1..21: note = Description of Artificial Sequence: Synthetic oligonucleotide
  source 1..21: mol_type = other DNA
tcgaaggttactgcgcagtct

SEQ ID NO: 41455 - DNA, 21 bp, synthetic construct
  misc_feature 1..21: note = Description of Artificial Sequence: Synthetic oligonucleotide
  source 1..21: mol_type = other DNA
cacatgaacagaaaactcgaa

SEQ ID NO: 41456 - DNA, 21 bp, synthetic construct
  misc_feature 1..21: note = Description of Artificial Sequence: Synthetic oligonucleotide
  source 1..21: mol_type = other DNA
ggtgcgcgtccggtgcttcag

SEQ ID NO: 41457 - DNA, 21 bp, synthetic construct
  misc_feature 1..21: note = Description of Artificial Sequence: Synthetic oligonucleotide
  source 1..21: mol_type = other DNA
gccgcccaacccagcctcaaa

SEQ ID NO: 41458 - DNA, 21 bp, synthetic construct
  misc_feature 1..21: note = Description of Artificial Sequence: Synthetic oligonucleotide
  source 1..21: mol_type = other DNA
gactacagcgaaaccagaaga

SEQ ID NO: 41459 - DNA, 21 bp, synthetic construct
  misc_feature 1..21: note = Description of Artificial Sequence: Synthetic oligonucleotide
  source 1..21: mol_type = other DNA
aacaacagcaaaagccaaatc

SEQ ID NO: 41460 - DNA, 21 bp, synthetic construct
  misc_feature 1..21: note = Description of Artificial Sequence: Synthetic oligonucleotide
  source 1..21: mol_type = other DNA
cctctgccggctcatagtcct

SEQ ID NO: 41461 - DNA, 21 bp, synthetic construct
  misc_feature 1..21: note = Description of Artificial Sequence: Synthetic oligonucleotide
  source 1..21: mol_type = other DNA
tcgccggttaaggggtctgtt

SEQ ID NO: 41462 - DNA, 21 bp, synthetic construct
  misc_feature 1..21: note = Description of Artificial Sequence: Synthetic oligonucleotide
  source 1..21: mol_type = other DNA
tttggttcgacgaaggcttcg

SEQ ID NO: 41463 - DNA, 21 bp, synthetic construct
  misc_feature 1..21: note = Description of Artificial Sequence: Synthetic oligonucleotide
  source 1..21: mol_type = other DNA
ccggggtctgggagtaataat

SEQ ID NO: 41464 - DNA, 21 bp, synthetic construct
  misc_feature 1..21: note = Description of Artificial Sequence: Synthetic oligonucleotide
  source 1..21: mol_type = other DNA
tgtttgggttcgaataatttg

SEQ ID NO: 41465 - DNA, 21 bp, synthetic construct
  misc_feature 1..21: note = Description of Artificial Sequence: Synthetic oligonucleotide
  source 1..21: mol_type = other DNA
aacggttctggacataatcaa

SEQ ID NO: 41466 - DNA, 21 bp, synthetic construct
  misc_feature 1..21: note = Description of Artificial Sequence: Synthetic oligonucleotide
  source 1..21: mol_type = other DNA
cttaataagtctacgcttccg

SEQ ID NO: 41467 - DNA, 21 bp, synthetic construct
  misc_feature 1..21: note = Description of Artificial Sequence: Synthetic oligonucleotide
  source 1..21: mol_type = other DNA
ggcgccgaaagaatcctcaga

SEQ ID NO: 41468 - DNA, 21 bp, synthetic construct
  misc_feature 1..21: note = Description of Artificial Sequence: Synthetic oligonucleotide
  source 1..21: mol_type = other DNA
agccccgaaaaaaacatgaga

SEQ ID NO: 41469 - DNA, 21 bp, synthetic construct
  misc_feature 1..21: note = Description of Artificial Sequence: Synthetic oligonucleotide
  source 1..21: mol_type = other DNA
gagagtgctcggattggttct

SEQ ID NO: 41470 - DNA, 21 bp, synthetic construct
  misc_feature 1..21: note = Description of Artificial Sequence: Synthetic oligonucleotide
  source 1..21: mol_type = other DNA
gccgccaccaacagcttcggc

SEQ ID NO: 41471 - DNA, 21 bp, synthetic construct
  misc_feature 1..21: note = Description of Artificial Sequence: Synthetic oligonucleotide
  source 1..21: mol_type = other DNA
cacatgaacagaaaactcgaa

SEQ ID NO: 41472 - DNA, 21 bp, synthetic construct
  misc_feature 1..21: note = Description of Artificial Sequence: Synthetic oligonucleotide
  source 1..21: mol_type = other DNA
gccgcccaacccagcctcaaa

SEQ ID NO: 41473 - DNA, 21 bp, synthetic construct
  misc_feature 1..21: note = Description of Artificial Sequence: Synthetic oligonucleotide
  source 1..21: mol_type = other DNA
ggcgccagacccgtcctccaa

SEQ ID NO: 41474 - DNA, 21 bp, synthetic construct
  misc_feature 1..21: note = Description of Artificial Sequence: Synthetic oligonucleotide
  source 1..21: mol_type = other DNA
caagtcctcagcgtcgccggc

SEQ ID NO: 41475 - DNA, 21 bp, synthetic construct
  misc_feature 1..21: note = Description of Artificial Sequence: Synthetic oligonucleotide
  source 1..21: mol_type = other DNA
aagcttaataagtctcaggcg

SEQ ID NO: 41476 - DNA, 21 bp, synthetic construct
  misc_feature 1..21: note = Description of Artificial Sequence: Synthetic oligonucleotide
  source 1..21: mol_type = other DNA
aataatactcagaagaattct

SEQ ID NO: 41477 - DNA, 21 bp, synthetic construct
  misc_feature 1..21: note = Description of Artificial Sequence: Synthetic oligonucleotide
  source 1..21: mol_type = other DNA
ggtgggactaataatcttaat

SEQ ID NO: 41478 - DNA, 21 bp, synthetic construct
  misc_feature 1..21: note = Description of Artificial Sequence: Synthetic oligonucleotide
  source 1..21: mol_type = other DNA
ggcctcagccccgtcctcaaa

SEQ ID NO: 41479 - DNA, 21 bp, synthetic construct
  misc_feature 1..21: note = Description of Artificial Sequence: Synthetic oligonucleotide
  source 1..21: mol_type = other DNA
agtactactgggggggctagt

SEQ ID NO: 41480 - DNA, 21 bp, synthetic construct
  misc_feature 1..21: note = Description of Artificial Sequence: Synthetic oligonucleotide
  source 1..21: mol_type = other DNA
aatactcagagttatacgagt

SEQ ID NO: 41481 - DNA, 21 bp, synthetic construct
  misc_feature 1..21: note = Description of Artificial Sequence: Synthetic oligonucleotide
  source 1..21: mol_type = other DNA
gaaaccaccacccccagaaaa

SEQ ID NO: 41482 - DNA, 21 bp, synthetic construct
  misc_feature 1..21: note = Description of Artificial Sequence: Synthetic oligonucleotide
  source 1..21: mol_type = other DNA
tattcgcaggaggtttttcgg

SEQ ID NO: 41483 - DNA, 21 bp, synthetic construct
  misc_feature 1..21: note = Description of Artificial Sequence: Synthetic oligonucleotide
  source 1..21: mol_type = other DNA
attattcaggatactgctcgt

SEQ ID NO: 41484 - DNA, 21 bp, synthetic construct
  misc_feature 1..21: note = Description of Artificial Sequence: Synthetic oligonucleotide
  source 1..21: mol_type = other DNA
tatattaatagtccttcgaat

SEQ ID NO: 41485 - DNA, 21 bp, synthetic construct
  misc_feature 1..21: note = Description of Artificial Sequence: Synthetic oligonucleotide
  source 1..21: mol_type = other DNA
catattactccggctacttcg

SEQ ID NO: 41486 - DNA, 21 bp, synthetic construct
  misc_feature 1..21: note = Description of Artificial Sequence: Synthetic oligonucleotide
  source 1..21: mol_type = other DNA
gtcaaagtcgacggccaaatc

SEQ ID NO: 41487 - DNA, 21 bp, synthetic construct
  misc_feature 1..21: note = Description of Artificial Sequence: Synthetic oligonucleotide
  source 1..21: mol_type = other DNA
aatagtaatgggattaataat

SEQ ID NO: 41488 - DNA, 21 bp, synthetic construct
  misc_feature 1..21: note = Description of Artificial Sequence: Synthetic oligonucleotide
  source 1..21: mol_type = other DNA
agcggcgccggcagcgccggc

SEQ ID NO: 41489 - DNA, 21 bp, synthetic construct
  misc_feature 1..21: note = Description of Artificial Sequence: Synthetic oligonucleotide
  source 1..21: mol_type = other DNA
cccagacaataccaaagcgac

SEQ ID NO: 41490 - DNA, 21 bp, synthetic construct
  misc_feature 1..21: note = Description of Artificial Sequence: Synthetic oligonucleotide
  source 1..21: mol_type = other DNA
agtactacgaatagtaagaat

SEQ ID NO: 41491 - DNA, 21 bp, synthetic construct
  misc_feature 1..21: note = Description of Artificial Sequence: Synthetic oligonucleotide
  source 1..21: mol_type = other DNA
tattctgggggtaatatgagt

SEQ ID NO: 41492 - DNA, 21 bp, synthetic construct
  misc_feature 1..21: note = Description of Artificial Sequence: Synthetic oligonucleotide
  source 1..21: mol_type = other DNA
tctattaagtctgttactaat

SEQ ID NO: 41493 - DNA, 21 bp, synthetic construct
  misc_feature 1..21: note = Description of Artificial Sequence: Synthetic oligonucleotide
  source 1..21: mol_type = other DNA
ctcagcagcacccacatgacc

SEQ ID NO: 41494 - DNA, 21 bp, synthetic construct
  misc_feature 1..21: note = Description of Artificial Sequence: Synthetic oligonucleotide
  source 1..21: mol_type = other DNA
aattctattactcggagtagt

SEQ ID NO: 41495 - DNA, 21 bp, synthetic construct
  misc_feature 1..21: note = Description of Artificial Sequence: Synthetic oligonucleotide
  source 1..21: mol_type = other DNA
gacagagtcggcagcatctac

SEQ ID NO: 41496 - DNA, 21 bp, synthetic construct
  misc_feature 1..21: note = Description of Artificial Sequence: Synthetic oligonucleotide
  source 1..21: mol_type = other DNA
ccttataatgtgagtcagaat

SEQ ID NO: 41497 - DNA, 21 bp, synthetic construct
  misc_feature 1..21: note = Description of Artificial Sequence: Synthetic oligonucleotide
  source 1..21: mol_type = other DNA
aacagagaaaaactcagctac

SEQ ID NO: 41498 - DNA, 21 bp, synthetic construct
  misc_feature 1..21: note = Description of Artificial Sequence: Synthetic oligonucleotide
  source 1..21: mol_type = other DNA
cctggtagtgtgactgggtct

SEQ ID NO: 41499 - DNA, 21 bp, synthetic construct
  misc_feature 1..21: note = Description of Artificial Sequence: Synthetic oligonucleotide
  source 1..21: mol_type = other DNA
gatcgggttttgagtcagggg

SEQ ID NO: 41500 - DNA, 21 bp, synthetic construct
  misc_feature 1..21: note = Description of Artificial Sequence: Synthetic oligonucleotide
  source 1..21: mol_type = other DNA
aggactcttaatcttaatact

SEQ ID NO: 41501 - DNA, 21 bp, synthetic construct
  misc_feature 1..21: note = Description of Artificial Sequence: Synthetic oligonucleotide
  source 1..21: mol_type = other DNA
gccagagacgaccaaagaaga

SEQ ID NO: 41502 - DNA, 21 bp, synthetic construct
  misc_feature 1..21: note = Description of Artificial Sequence: Synthetic oligonucleotide
  source 1..21: mol_type = other DNA
aattatgatagtttgaagaag

SEQ ID NO: 41503 - DNA, 21 bp, synthetic construct
  misc_feature 1..21: note = Description of Artificial Sequence: Synthetic oligonucleotide
  source 1..21: mol_type = other DNA
ctgtcgaatcagaataatcag

SEQ ID NO: 41504 - DNA, 21 bp, synthetic construct
  misc_feature 1..21: note = Description of Artificial Sequence: Synthetic oligonucleotide
  source 1..21: mol_type = other DNA
tcttctgggggtaatatgagt

SEQ ID NO: 41505 - DNA, 21 bp, synthetic construct
  misc_feature 1..21: note = Description of Artificial Sequence: Synthetic oligonucleotide
  source 1..21: mol_type = other DNA
tatgagaagaatagtctgatg

SEQ ID NO: 41506 - DNA, 21 bp, synthetic construct
  misc_feature 1..21: note = Description of Artificial Sequence: Synthetic oligonucleotide
  source 1..21: mol_type = other DNA
tctactgggtcggtgagtaag

SEQ ID NO: 41507 - DNA, 21 bp, synthetic construct
  misc_feature 1..21: note = Description of Artificial Sequence: Synthetic oligonucleotide
  source 1..21: mol_type = other DNA
gtcagcaaaagccccagcacc

SEQ ID NO: 41508 - DNA, 21 bp, synthetic construct
  misc_feature 1..21: note = Description of Artificial Sequence: Synthetic oligonucleotide
  source 1..21: mol_type = other DNA
attaagctggataagcagatt

SEQ ID NO: 41509 - DNA, 21 bp, synthetic construct
  misc_feature 1..21: note = Description of Artificial Sequence: Synthetic oligonucleotide
  source 1..21: mol_type = other DNA
tattcggataataagactact

SEQ ID NO: 41510 - DNA, 21 bp, synthetic construct
  misc_feature 1..21: note = Description of Artificial Sequence: Synthetic oligonucleotide
  source 1..21: mol_type = other DNA
cctcagaataatcaggcgcat

SEQ ID NO: 41511 - DNA, 21 bp, synthetic construct
  misc_feature 1..21: note = Description of Artificial Sequence: Synthetic oligonucleotide
  source 1..21: mol_type = other DNA
actacttatggtgggaatcgg

SEQ ID NO: 41512 - DNA, 21 bp, synthetic construct
  misc_feature 1..21: note = Description of Artificial Sequence: Synthetic oligonucleotide
  source 1..21: mol_type = other DNA
tctccggcttatgatacgagg

SEQ ID NO: 41513 - DNA, 21 bp, synthetic construct
  misc_feature 1..21: note = Description of Artificial Sequence: Synthetic oligonucleotide
  source 1..21: mol_type = other DNA
aacggcgccggccaaaaccaa

SEQ ID NO: 41514 - DNA, 21 bp, synthetic construct
  misc_feature 1..21: note = Description of Artificial Sequence: Synthetic oligonucleotide
  source 1..21: mol_type = other DNA
gatcttactaatcatactaag

SEQ ID NO: 41515 - DNA, 21 bp, synthetic construct
  misc_feature 1..21: note = Description of Artificial Sequence: Synthetic oligonucleotide
  source 1..21: mol_type = other DNA
attagggcgaaggagtctgcg

SEQ ID NO: 41516 - DNA, 21 bp, synthetic construct
  misc_feature 1..21: note = Description of Artificial Sequence: Synthetic oligonucleotide
  source 1..21: mol_type = other DNA
ggccaaatcaaaaacctcggc

SEQ ID NO: 41517 - DNA, 21 bp, synthetic construct
  misc_feature 1..21: note = Description of Artificial Sequence: Synthetic oligonucleotide
  source 1..21: mol_type = other DNA
atcggttctggacagaatcaa

SEQ ID NO: 41518 - DNA, 21 bp, synthetic construct
  misc_feature 1..21: note = Description of Artificial Sequence: Synthetic oligonucleotide
  source 1..21: mol_type = other DNA
ggtactggtaattctaatctt

SEQ ID NO: 41519 - DNA, 21 bp, synthetic construct
  misc_feature 1..21: note = Description of Artificial Sequence: Synthetic oligonucleotide
  source 1..21: mol_type = other DNA
gccagcacccccaacaacacc

SEQ ID NO: 41520 - DNA, 21 bp, synthetic construct
  misc_feature 1..21: note = Description of Artificial Sequence: Synthetic oligonucleotide
  source 1..21: mol_type = other DNA
ggtattcagccggggtctaat

SEQ ID NO: 41521 - DNA, 21 bp, synthetic construct
  misc_feature 1..21: note = Description of Artificial Sequence: Synthetic oligonucleotide
  source 1..21: mol_type = other DNA
gattctggttcttcgacgaag

SEQ ID NO: 41522 - DNA, 21 bp, synthetic construct
  misc_feature 1..21: note = Description of Artificial Sequence: Synthetic oligonucleotide
  source 1..21: mol_type = other DNA
aagacgagtcttaatacgagt

SEQ ID NO: 41523 - DNA, 21 bp, synthetic construct
  misc_feature 1..21: note = Description of Artificial Sequence: Synthetic oligonucleotide
  source 1..21: mol_type = other DNA
aaacaacccgacagcacccac

SEQ ID NO: 41524 - DNA, 21 bp, synthetic construct
  misc_feature 1..21: note = Description of Artificial Sequence: Synthetic oligonucleotide
  source 1..21: mol_type = other DNA
aacatggacggcgccaccaga

SEQ ID NO: 41525 - DNA, 21 bp, synthetic construct
  misc_feature 1..21: note = Description of Artificial Sequence: Synthetic oligonucleotide
  source 1..21: mol_type = other DNA
aaactcagcaacgacaacctc

SEQ ID NO: 41526 - DNA, 21 bp, synthetic construct
  misc_feature 1..21: note = Description of Artificial Sequence: Synthetic oligonucleotide
  source 1..21: mol_type = other DNA
atgtttcagaagcaggggaat

SEQ ID NO: 41527 - DNA, 21 bp, synthetic construct
  misc_feature 1..21: note = Description of Artificial Sequence: Synthetic oligonucleotide
  source 1..21: mol_type = other DNA
cgggtggatactattactaag

SEQ ID NO: 41528 - DNA, 21 bp, synthetic construct
  misc_feature 1..21: note = Description of Artificial Sequence: Synthetic oligonucleotide
  source 1..21: mol_type = other DNA
tcgacgtcgattccggggatg

SEQ ID NO: 41529 - DNA, 21 bp, synthetic construct
  misc_feature 1..21: note = Description of Artificial Sequence: Synthetic oligonucleotide
  source 1..21: mol_type = other DNA
aagactgataagactgttgat

SEQ ID NO: 41530 - DNA, 21 bp, synthetic construct
  misc_feature 1..21: note = Description of Artificial Sequence: Synthetic oligonucleotide
  source 1..21: mol_type = other DNA
agtctttatactaatgcggtt

SEQ ID NO: 41531 - DNA, 21 bp, synthetic construct
  misc_feature 1..21: note = Description of Artificial Sequence: Synthetic oligonucleotide
  source 1..21: mol_type = other DNA
atgagccacaccaacagaccc

SEQ ID NO: 41532 - DNA, 21 bp, synthetic construct
  misc_feature 1..21: note = Description of Artificial Sequence: Synthetic oligonucleotide
  source 1..21: mol_type = other DNA
tcgaattctgatagggcgaat

SEQ ID NO: 41533 - DNA, 21 bp, synthetic construct
  misc_feature 1..21: note = Description of Artificial Sequence: Synthetic oligonucleotide
  source 1..21: mol_type = other DNA
cacaccagccccggcaaaaac

SEQ ID NO: 41534 - DNA, 21 bp, synthetic construct
  misc_feature 1..21: note = Description of Artificial Sequence: Synthetic oligonucleotide
  source 1..21: mol_type = other DNA
gaacccctccaaggcagcaga

SEQ ID NO: 41535 - DNA, 21 bp, synthetic construct
  misc_feature 1..21: note = Description of Artificial Sequence: Synthetic oligonucleotide
  source 1..21: mol_type = other DNA
ccgggtaattcgcataagatt

SEQ ID NO: 41536 - DNA, 21 bp, synthetic construct
  misc_feature 1..21: note = Description of Artificial Sequence: Synthetic oligonucleotide
  source 1..21: mol_type = other DNA
tcttctccgcaggctcataat

SEQ ID NO: 41537 - DNA, 21 bp, synthetic construct
  misc_feature 1..21: note = Description of Artificial Sequence: Synthetic oligonucleotide
  source 1..21: mol_type = other DNA
accaccgacaaaaaaaccgaa

SEQ ID NO: 41538 - DNA, 21 bp, synthetic construct
  misc_feature 1..21: note = Description of Artificial Sequence: Synthetic oligonucleotide
  source 1..21: mol_type = other DNA
gcgatgagttctaataatggt

SEQ ID NO: 41539 - DNA, 21 bp, synthetic construct
  misc_feature 1..21: note = Description of Artificial Sequence: Synthetic oligonucleotide
  source 1..21: mol_type = other DNA
agcgacagcagaaacaccaac

SEQ ID NO: 41540 - DNA, 21 bp, synthetic construct
  misc_feature 1..21: note = Description of Artificial Sequence: Synthetic oligonucleotide
  source 1..21: mol_type = other DNA
ttcaacatgcaaagaagccaa

SEQ ID NO: 41541 - DNA, 21 bp, synthetic construct
  misc_feature 1..21: note = Description of Artificial Sequence: Synthetic oligonucleotide
  source 1..21: mol_type = other DNA
atggccctccaacccaacaga

SEQ ID NO: 41542 - DNA, 21 bp, synthetic construct
  misc_feature 1..21: note = Description of Artificial Sequence: Synthetic oligonucleotide
  source 1..21: mol_type = other DNA
aatagtgaggcgaggcttagt

SEQ ID NO: 41543 - DNA, 21 bp, synthetic construct
  misc_feature 1..21: note = Description of Artificial Sequence: Synthetic oligonucleotide
  source 1..21: mol_type = other DNA
ccgagtagtccgaattctatt

SEQ ID NO: 41544 - DNA, 21 bp, synthetic construct
  misc_feature 1..21: note = Description of Artificial Sequence: Synthetic oligonucleotide
  source 1..21: mol_type = other DNA
ttgattaatcctgctggttct

SEQ ID NO: 41545 - DNA, 21 bp, synthetic construct
  misc_feature 1..21: note = Description of Artificial Sequence: Synthetic oligonucleotide
  source 1..21: mol_type = other DNA
gaaatcagcagacccgccagc

SEQ ID NO: 41546 - DNA, 21 bp, synthetic construct
  misc_feature 1..21: note = Description of Artificial Sequence: Synthetic oligonucleotide
  source 1..21: mol_type = other DNA
gaagtcttcagcagccaaaaa

SEQ ID NO: 41547 - DNA, 21 bp, synthetic construct
  misc_feature 1..21: note = Description of Artificial Sequence: Synthetic oligonucleotide
  source 1..21: mol_type = other DNA
gagagtaattcgagtcggggg

SEQ ID NO: 41548 - DNA, 21 bp, synthetic construct
  misc_feature 1..21: note = Description of Artificial Sequence: Synthetic oligonucleotide
  source 1..21: mol_type = other DNA
caactccaacccagagtcgcc

SEQ ID NO: 41549 - DNA, 21 bp, synthetic construct
  misc_feature 1..21: note = Description of Artificial Sequence: Synthetic oligonucleotide
  source 1..21: mol_type = other DNA
cagagtgggccgggggttact

SEQ ID NO: 41550 - DNA, 21 bp, synthetic construct
  misc_feature 1..21: note = Description of Artificial Sequence: Synthetic oligonucleotide
  source 1..21: mol_type = other DNA
aacagcgccgccgccatgaaa

SEQ ID NO: 41551 - DNA, 21 bp, synthetic construct
  misc_feature 1..21: note = Description of Artificial Sequence: Synthetic oligonucleotide
  source 1..21: mol_type = other DNA
tttccgagtgtttcgacgact

SEQ ID NO: 41552 - DNA, 21 bp, synthetic construct
  misc_feature 1..21: note = Description of Artificial Sequence: Synthetic oligonucleotide
  source 1..21: mol_type = other DNA
gagaataatagtcgtgctact

SEQ ID NO: 41553 - DNA, 21 bp, synthetic construct
  misc_feature 1..21: note = Description of Artificial Sequence: Synthetic oligonucleotide
  source 1..21: mol_type = other DNA
ttgccttcgggtaatactagt

SEQ ID NO: 41554 - DNA, 21 bp, synthetic construct
  misc_feature 1..21: note = Description of Artificial Sequence: Synthetic oligonucleotide
  source 1..21: mol_type = other DNA
aataagtcgaatacgtttctt

SEQ ID NO: 41555 - DNA, 21 bp, synthetic construct
  misc_feature 1..21: note = Description of Artificial Sequence: Synthetic oligonucleotide
  source 1..21: mol_type = other DNA
cctggtcagagtacttctagt

SEQ ID NO: 41556 - DNA, 21 bp, synthetic construct
  misc_feature 1..21: note = Description of Artificial Sequence: Synthetic oligonucleotide
  source 1..21: mol_type = other DNA
ctcagcggccacagcccccaa

SEQ ID NO: 41557 - DNA, 21 bp, synthetic construct
  misc_feature 1..21: note = Description of Artificial Sequence: Synthetic oligonucleotide
  source 1..21: mol_type = other DNA
agtccgcttcagtctattgtt

SEQ ID NO: 41558 - DNA, 21 bp, synthetic construct
  misc_feature 1..21: note = Description of Artificial Sequence: Synthetic oligonucleotide
  source 1..21: mol_type = other DNA
agaatcgccggccccaccgtc

SEQ ID NO: 41559 - DNA, 21 bp, synthetic construct
  misc_feature 1..21: note = Description of Artificial Sequence: Synthetic oligonucleotide
  source 1..21: mol_type = other DNA
ggtgttgaggcgatgcggaat

SEQ ID NO: 41560 - DNA, 21 bp, synthetic construct
  misc_feature 1..21: note = Description of Artificial Sequence: Synthetic oligonucleotide
  source 1..21: mol_type = other DNA
caggagactcgtgggaattct

SEQ ID NO: 41561 - DNA, 21 bp, synthetic construct
  misc_feature 1..21: note = Description of Artificial Sequence: Synthetic oligonucleotide
  source 1..21: mol_type = other DNA
gctcgggatgagagggctttt

SEQ ID NO: 41562 - DNA, 21 bp, synthetic construct
  misc_feature 1..21: note = Description of Artificial Sequence: Synthetic oligonucleotide
  source 1..21: mol_type = other DNA
tatattgatgcttctgcgcgg

SEQ ID NO: 41563 - DNA, 21 bp, synthetic construct
  misc_feature 1..21: note = Description of Artificial Sequence: Synthetic oligonucleotide
  source 1..21: mol_type = other DNA
cctagtactggtaattcggtg

SEQ ID NO: 41564 - DNA, 21 bp, synthetic construct
  misc_feature 1..21: note = Description of Artificial Sequence: Synthetic oligonucleotide
  source 1..21: mol_type = other DNA
agaatcaccagcagcaaccaa

SEQ ID NO: 41565 - DNA, 21 bp, synthetic construct
  misc_feature 1..21: note = Description of Artificial Sequence: Synthetic oligonucleotide
  source 1..21: mol_type = other DNA
ggcagaagcatggaaagaagc

SEQ ID NO: 41566 - DNA, 21 bp, synthetic construct
  misc_feature 1..21: note = Description of Artificial Sequence: Synthetic oligonucleotide
  source 1..21: mol_type = other DNA
gtgactaggggtctgaatgtt

SEQ ID NO: 41567 - DNA, 21 bp, synthetic construct
  misc_feature 1..21: note = Description of Artificial Sequence: Synthetic oligonucleotide
  source 1..21: mol_type = other DNA
tttcatgcgaatagtactgtg

SEQ ID NO: 41568 - DNA, 21 bp, synthetic construct
  misc_feature 1..21: note = Description of Artificial Sequence: Synthetic oligonucleotide
  source 1..21: mol_type = other DNA
atgcccctcaaaccccacctc

SEQ ID NO: 41569 - DNA, 21 bp, synthetic construct
  misc_feature 1..21: note = Description of Artificial Sequence: Synthetic oligonucleotide
  source 1..21: mol_type = other DNA
gaagccaccagcagcaccaaa

SEQ ID NO: 41570 - DNA, 21 bp, synthetic construct
  misc_feature 1..21: note = Description of Artificial Sequence: Synthetic oligonucleotide
  source 1..21: mol_type = other DNA
attaattttagtggtactagg

SEQ ID NO: 41571 - DNA, 21 bp, synthetic construct
  misc_feature 1..21: note = Description of Artificial Sequence: Synthetic oligonucleotide
  source 1..21: mol_type = other DNA
aatccggctcatggtcttaat

SEQ ID NO: 41572 - DNA, 21 bp, synthetic construct
  misc_feature 1..21: note = Description of Artificial Sequence: Synthetic oligonucleotide
  source 1..21: mol_type = other DNA
atggggtcgagtgtgaggtct

SEQ ID NO: 41573 - DNA, 21 bp, synthetic construct
  misc_feature 1..21: note = Description of Artificial Sequence: Synthetic oligonucleotide
  source 1..21: mol_type = other DNA
gtcagctacgccagaaccgaa

SEQ ID NO: 41574 - DNA, 21 bp, synthetic construct
  misc_feature 1..21: note = Description of Artificial Sequence: Synthetic oligonucleotide
  source 1..21: mol_type = other DNA
caaagcgaaatcgtcaacaaa

SEQ ID NO: 41575 - DNA, 21 bp, synthetic construct
  misc_feature 1..21: note = Description of Artificial Sequence: Synthetic oligonucleotide
  source 1..21: mol_type = other DNA
tattctaattcgcgtgtgggt

SEQ ID NO: 41576 - DNA, 21 bp, synthetic construct
  misc_feature 1..21: note = Description of Artificial Sequence: Synthetic oligonucleotide
  source 1..21: mol_type = other DNA
gtccaaagaagcagcaaccaa

SEQ ID NO: 41577 - DNA, 21 bp, synthetic construct
  misc_feature 1..21: note = Description of Artificial Sequence: Synthetic oligonucleotide
  source 1..21: mol_type = other DNA
tcttatgtgggtactacggct

SEQ ID NO: 41578 - DNA, 21 bp, synthetic construct
  misc_feature 1..21: note = Description of Artificial Sequence: Synthetic oligonucleotide
  source 1..21: mol_type = other DNA
accagccaaaccaaaatcgtc

SEQ ID NO: 41579 - DNA, 21 bp, synthetic construct
  misc_feature 1..21: note = Description of Artificial Sequence: Synthetic oligonucleotide
  source 1..21: mol_type = other DNA
aatagggagcagcttcgggat

SEQ ID NO: 41580 - DNA, 21 bp, synthetic construct
  misc_feature 1..21: note = Description of Artificial Sequence: Synthetic oligonucleotide
  source 1..21: mol_type = other DNA
cagtttcctgggactttgcgt

SEQ ID NO: 41581 - DNA, 21 bp, synthetic construct
  misc_feature 1..21: note = Description of Artificial Sequence: Synthetic oligonucleotide
  source 1..21: mol_type = other DNA
gaactcatgaacaaaagcaaa

SEQ ID NO: 41582 - DNA, 21 bp, synthetic construct
  misc_feature 1..21: note = Description of Artificial Sequence: Synthetic oligonucleotide
  source 1..21: mol_type = other DNA
attaggactaatagtactctt

SEQ ID NO: 41583 - DNA, 21 bp, synthetic construct
  misc_feature 1..21: note = Description of Artificial Sequence: Synthetic oligonucleotide
  source 1..21: mol_type = other DNA
gaggtgactaatgctcctaag

SEQ ID NO: 41584 - DNA, 21 bp, synthetic construct
  misc_feature 1..21: note = Description of Artificial Sequence: Synthetic oligonucleotide
  source 1..21: mol_type = other DNA
caacaaagccccagaaacggc

SEQ ID NO: 41585 - DNA, 21 bp, synthetic construct
  misc_feature 1..21: note = Description of Artificial Sequence: Synthetic oligonucleotide
  source 1..21: mol_type = other DNA
cacaccagcccccccttcacc

SEQ ID NO: 41586 - DNA, 21 bp, synthetic construct
  misc_feature 1..21: note = Description of Artificial Sequence: Synthetic oligonucleotide
  source 1..21: mol_type = other DNA
ggtcttgggcagcagacgaat

SEQ ID NO: 41587 - DNA, 21 bp, synthetic construct
  misc_feature 1..21: note = Description of Artificial Sequence: Synthetic oligonucleotide
  source 1..21: mol_type = other DNA
aatagttatgatccgaagcgt

SEQ ID NO: 41588 - DNA, 21 bp, synthetic construct
  misc_feature 1..21: note = Description of Artificial Sequence: Synthetic oligonucleotide
  source 1..21: mol_type = other DNA
gatcctagggctcagagtcat

SEQ ID NO: 41589 - DNA, 21 bp, synthetic construct
  misc_feature 1..21: note = Description of Artificial Sequence: Synthetic oligonucleotide
  source 1..21: mol_type = other DNA
cacagagacaccaacggcaaa

SEQ ID NO: 41590 - DNA, 21 bp, synthetic construct
  misc_feature 1..21: note = Description of Artificial Sequence: Synthetic oligonucleotide
  source 1..21: mol_type = other DNA
aataatctggcggggagtaag

SEQ ID NO: 41591 - DNA, 21 bp, synthetic construct
  misc_feature 1..21: note = Description of Artificial Sequence: Synthetic oligonucleotide
  source 1..21: mol_type = other DNA
agagtcagcagccccagcaac

SEQ ID NO: 41592 - DNA, 21 bp, synthetic construct
  misc_feature 1..21: note = Description of Artificial Sequence: Synthetic oligonucleotide
  source 1..21: mol_type = other DNA
attgcttcgagtggtatgcat

SEQ ID NO: 41593 - DNA, 21 bp, synthetic construct
  misc_feature 1..21: note = Description of Artificial Sequence: Synthetic oligonucleotide
  source 1..21: mol_type = other DNA
agagccacccccctcagcggc

SEQ ID NO: 41594 - DNA, 21 bp, synthetic construct
  misc_feature 1..21: note = Description of Artificial Sequence: Synthetic oligonucleotide
  source 1..21: mol_type = other DNA
aacagagtcgaacacacccaa

SEQ ID NO: 41595 - DNA, 21 bp, synthetic construct
  misc_feature 1..21: note = Description of Artificial Sequence: Synthetic oligonucleotide
  source 1..21: mol_type = other DNA
atgcttgggtctagtaataag

SEQ ID NO: 41596 - DNA, 21 bp, synthetic construct
  misc_feature 1..21: note = Description of Artificial Sequence: Synthetic oligonucleotide
  source 1..21: mol_type = other DNA
catggtatttctaatcagagt

SEQ ID NO: 41597 - DNA, 21 bp, synthetic construct
  misc_feature 1..21: note = Description of Artificial Sequence: Synthetic oligonucleotide
  source 1..21: mol_type = other DNA
gctctttctagtcagaagggt

SEQ ID NO: 41598 - DNA, 21 bp, synthetic construct
  misc_feature 1..21: note = Description of Artificial Sequence: Synthetic oligonucleotide
  source 1..21: mol_type = other DNA
actacggcttcgagtccgact

SEQ ID NO: 41599 - DNA, 21 bp, synthetic construct
  misc_feature 1..21: note = Description of Artificial Sequence: Synthetic oligonucleotide
  source 1..21: mol_type = other DNA
agcctcagcaccggcagcggc

SEQ ID NO: 41600 - DNA, 21 bp, synthetic construct
  misc_feature 1..21: note = Description of Artificial Sequence: Synthetic oligonucleotide
  source 1..21: mol_type = other DNA
aaaccccaaggcagcctcgtc

SEQ ID NO: 41601 - DNA, 21 bp, synthetic construct
  misc_feature 1..21: note = Description of Artificial Sequence: Synthetic oligonucleotide
  source 1..21: mol_type = other DNA
ccccacctcccccaaagcgcc

SEQ ID NO: 41602 - DNA, 21 bp, synthetic construct
  misc_feature 1..21: note = Description of Artificial Sequence: Synthetic oligonucleotide
  source 1..21: mol_type = other DNA
ggcgaactccccgacagaaga

SEQ ID NO: 41603 - DNA, 21 bp, synthetic construct
  misc_feature 1..21: note = Description of Artificial Sequence: Synthetic oligonucleotide
  source 1..21: mol_type = other DNA
tctttgggttctggttttcag

SEQ ID NO: 41604 - DNA, 21 bp, synthetic construct
  misc_feature 1..21: note = Description of Artificial Sequence: Synthetic oligonucleotide
  source 1..21: mol_type = other DNA
ccgaatggggcgcatgttacg

SEQ ID NO: 41605 - DNA, 21 bp, synthetic construct
  misc_feature 1..21: note = Description of Artificial Sequence: Synthetic oligonucleotide
  source 1..21: mol_type = other DNA
gccaccaccagcagaatcagc

SEQ ID NO: 41606 - DNA, 21 bp, synthetic construct
  misc_feature 1..21: note = Description of Artificial Sequence: Synthetic oligonucleotide
  source 1..21: mol_type = other DNA
agcaaagtcaccgcccaaagc

SEQ ID NO: 41607 - DNA, 21 bp, synthetic construct
  misc_feature 1..21: note = Description of Artificial Sequence: Synthetic oligonucleotide
  source 1..21: mol_type = other DNA
tcgaattataagtcttcgaat

SEQ ID NO: 41608 - DNA, 21 bp, synthetic construct
  misc_feature 1..21: note = Description of Artificial Sequence: Synthetic oligonucleotide
  source 1..21: mol_type = other DNA
aacttcagcaaccccaccgtc

SEQ ID NO: 41609 - DNA, 21 bp, synthetic construct
  misc_feature 1..21: note = Description of Artificial Sequence: Synthetic oligonucleotide
  source 1..21: mol_type = other DNA
ccggggtatgggagtaatcat

SEQ ID NO: 41610 - DNA, 21 bp, synthetic construct
  misc_feature 1..21: note = Description of Artificial Sequence: Synthetic oligonucleotide
  source 1..21: mol_type = other DNA
tttcagccgaggagttctacg

SEQ ID NO: 41611 - DNA, 21 bp, synthetic construct
  misc_feature 1..21: note = Description of Artificial Sequence: Synthetic oligonucleotide
  source 1..21: mol_type = other DNA
ggcatcagagaatacaacaaa

SEQ ID NO: 41612 - DNA, 21 bp, synthetic construct
  misc_feature 1..21: note = Description of Artificial Sequence: Synthetic oligonucleotide
  source 1..21: mol_type = other DNA
aataatcctaagaatgctgtt

SEQ ID NO: 41613 - DNA, 21 bp, synthetic construct
  misc_feature 1..21: note = Description of Artificial Sequence: Synthetic oligonucleotide
  source 1..21: mol_type = other DNA
cttccttctaattctattcat

SEQ ID NO: 41614 - DNA, 21 bp, synthetic construct
  misc_feature 1..21: note = Description of Artificial Sequence: Synthetic oligonucleotide
  source 1..21: mol_type = other DNA
agacccgaaagcagctacagc

SEQ ID NO: 41615 - DNA, 21 bp, synthetic construct
  misc_feature 1..21: note = Description of Artificial Sequence: Synthetic oligonucleotide
  source 1..21: mol_type = other DNA
aaccccagcgaaaaaatgctc

SEQ ID NO: 41616 - DNA, 21 bp, synthetic construct
  misc_feature 1..21: note = Description of Artificial Sequence: Synthetic oligonucleotide
  source 1..21: mol_type = other DNA
aacggttctagacagaatcaa

SEQ ID NO: 41617 - DNA, 21 bp, synthetic construct
  misc_feature 1..21: note = Description of Artificial Sequence: Synthetic oligonucleotide
  source 1..21: mol_type = other DNA
tatgttactagttctgggggt

SEQ ID NO: 41618 - DNA, 21 bp, synthetic construct
  misc_feature 1..21: note = Description of Artificial Sequence: Synthetic oligonucleotide
  source 1..21: mol_type = other DNA
tacaccgccagcagaatggaa

SEQ ID NO: 41619 - DNA, 21 bp, synthetic construct
  misc_feature 1..21: note = Description of Artificial Sequence: Synthetic oligonucleotide
  source 1..21: mol_type = other DNA
ctctgcgccagcaaatgcgac

SEQ ID NO: 41620 - DNA, 21 bp, synthetic construct
  misc_feature 1..21: note = Description of Artificial Sequence: Synthetic oligonucleotide
  source 1..21: mol_type = other DNA
ttcagcagcgccagcttcacc

SEQ ID NO: 41621 - DNA, 21 bp, synthetic construct
  misc_feature 1..21: note = Description of Artificial Sequence: Synthetic oligonucleotide
  source 1..21: mol_type = other DNA
ctgatgtctgcggcgactact

SEQ ID NO: 41622 - DNA, 21 bp, synthetic construct
  misc_feature 1..21: note = Description of Artificial Sequence: Synthetic oligonucleotide
  source 1..21: mol_type = other DNA
ggcctccccaccgaaaaaatg

SEQ ID NO: 41623 - DNA, 21 bp, synthetic construct
  misc_feature 1..21: note = Description of Artificial Sequence: Synthetic oligonucleotide
  source 1..21: mol_type = other DNA
ttcgtcaaaacccacagcgcc

SEQ ID NO: 41624 - DNA, 21 bp, synthetic construct
  misc_feature 1..21: note = Description of Artificial Sequence: Synthetic oligonucleotide
  source 1..21: mol_type = other DNA
ggtagtcttgataataggaag

SEQ ID NO: 41625 - DNA, 21 bp, synthetic construct
  misc_feature 1..21: note = Description of Artificial Sequence: Synthetic oligonucleotide
  source 1..21: mol_type = other DNA
actggttctagttcttcgcag

SEQ ID NO: 41626 - DNA, 21 bp, synthetic construct
  misc_feature 1..21: note = Description of Artificial Sequence: Synthetic oligonucleotide
  source 1..21: mol_type = other DNA
aatggggctacgaagaatagt

SEQ ID NO: 41627 - DNA, 21 bp, synthetic construct
  misc_feature 1..21: note = Description of Artificial Sequence: Synthetic oligonucleotide
  source 1..21: mol_type = other DNA
agggaggatactaagatgcat

SEQ ID NO: 41628 - DNA, 21 bp, synthetic construct
  misc_feature 1..21: note = Description of Artificial Sequence: Synthetic oligonucleotide
  source 1..21: mol_type = other DNA
agaaccgccagcagcctcccc

SEQ ID NO: 41629 - DNA, 21 bp, synthetic construct
  misc_feature 1..21: note = Description of Artificial Sequence: Synthetic oligonucleotide
  source 1..21: mol_type = other DNA
cttagggatacgaatatgaat

SEQ ID NO: 41630 - DNA, 21 bp, synthetic construct
  misc_feature 1..21: note = Description of Artificial Sequence: Synthetic oligonucleotide
  source 1..21: mol_type = other DNA
actcagtcgcataatcttgct

SEQ ID NO: 41631 - DNA, 21 bp, synthetic construct
  misc_feature 1..21: note = Description of Artificial Sequence: Synthetic oligonucleotide
  source 1..21: mol_type = other DNA
cccttcagcgaaatgcaaaaa

SEQ ID NO: 41632 - DNA, 21 bp, synthetic construct
  misc_feature 1..21: note = Description of Artificial Sequence: Synthetic oligonucleotide
  source 1..21: mol_type = other DNA
gggaagacgggtccgaatagt

SEQ ID NO: 41633 - DNA, 21 bp, synthetic construct
  misc_feature 1..21: note = Description of Artificial Sequence: Synthetic oligonucleotide
  source 1..21: mol_type = other DNA
caagaagccagagtctacagc

SEQ ID NO: 41634 - DNA, 21 bp, synthetic construct
  misc_feature 1..21: note = Description of Artificial Sequence: Synthetic oligonucleotide
  source 1..21: mol_type = other DNA
gttactacggggggttctaag

SEQ ID NO: 41635 - DNA, 21 bp, synthetic construct
  misc_feature 1..21: note = Description of Artificial Sequence: Synthetic oligonucleotide
  source 1..21: mol_type = other DNA
actgcgcgtgggggtcctact

SEQ ID NO: 41636 - DNA, 21 bp, synthetic construct
  misc_feature 1..21: note = Description of Artificial Sequence: Synthetic oligonucleotide
  source 1..21: mol_type = other DNA
aatttgggtaattctctgaag

SEQ ID NO: 41637 - DNA, 21 bp, synthetic construct
  misc_feature 1..21: note = Description of Artificial Sequence: Synthetic oligonucleotide
  source 1..21: mol_type = other DNA
tctgtgagttctcctagggat

SEQ ID NO: 41638 - DNA, 21 bp, synthetic construct
  misc_feature 1..21: note = Description of Artificial Sequence: Synthetic oligonucleotide
  source 1..21: mol_type = other DNA
gctatggggtcgagtctgtct

SEQ ID NO: 41639 - DNA, 21 bp, synthetic construct
  misc_feature 1..21: note = Description of Artificial Sequence: Synthetic oligonucleotide
  source 1..21: mol_type = other DNA
ccggggtctgggagtaagcat

SEQ ID NO: 41640 - DNA, 21 bp, synthetic construct
  misc_feature 1..21: note = Description of Artificial Sequence: Synthetic oligonucleotide
  source 1..21: mol_type = other DNA
caacccaacgccagccccacc

SEQ ID NO: 41641 - DNA, 21 bp, synthetic construct
  misc_feature 1..21: note = Description of Artificial Sequence: Synthetic oligonucleotide
  source 1..21: mol_type = other DNA
gtgacgcagtcttcgagtaag

SEQ ID NO: 41642 - DNA, 21 bp, synthetic construct
  misc_feature 1..21: note = Description of Artificial Sequence: Synthetic oligonucleotide
  source 1..21: mol_type = other DNA
gcttatcctagtggttcgtcg

SEQ ID NO: 41643 - DNA, 21 bp, synthetic construct
  misc_feature 1..21: note = Description of Artificial Sequence: Synthetic oligonucleotide
  source 1..21: mol_type = other DNA
tttagttctaagacttctccg

SEQ ID NO: 41644 - DNA, 21 bp, synthetic construct
  misc_feature 1..21: note = Description of Artificial Sequence: Synthetic oligonucleotide
  source 1..21: mol_type = other DNA
cccagccacaaccccaccaac

SEQ ID NO: 41645 - DNA, 21 bp, synthetic construct
  misc_feature 1..21: note = Description of Artificial Sequence: Synthetic oligonucleotide
  source 1..21: mol_type = other DNA
accggcagcagcaaagtcggc

SEQ ID NO: 41646 - DNA, 21 bp, synthetic construct
  misc_feature 1..21: note = Description of Artificial Sequence: Synthetic oligonucleotide
  source 1..21: mol_type = other DNA
gtcagcggcaccaaaatcgaa

SEQ ID NO: 41647 - DNA, 21 bp, synthetic construct
  misc_feature 1..21: note = Description of Artificial Sequence: Synthetic oligonucleotide
  source 1..21: mol_type = other DNA
agccacagcagcccctacaaa

SEQ ID NO: 41648 - DNA, 21 bp, synthetic construct
  misc_feature 1..21: note = Description of Artificial Sequence: Synthetic oligonucleotide
  source 1..21: mol_type = other DNA
cagaatcagaattctgggcgt

SEQ ID NO: 41649 - DNA, 21 bp, synthetic construct
  misc_feature 1..21: note = Description of Artificial Sequence: Synthetic oligonucleotide
  source 1..21: mol_type = other DNA
ggcctccacagcgtcgccaaa

SEQ ID NO: 41650 - DNA, 21 bp, synthetic construct
  misc_feature 1..21: note = Description of Artificial Sequence: Synthetic oligonucleotide
  source 1..21: mol_type = other DNA
agccccaccagccccatgaac

SEQ ID NO: 41651 - DNA, 21 bp, synthetic construct
  misc_feature 1..21: note = Description of Artificial Sequence: Synthetic oligonucleotide
  source 1..21: mol_type = other DNA
agtattagtgataagcttggt

SEQ ID NO: 41652 - DNA, 21 bp, synthetic construct
  misc_feature 1..21: note = Description of Artificial Sequence: Synthetic oligonucleotide
  source 1..21: mol_type = other DNA
gggcctaatccgggtaatcat

SEQ ID NO: 41653 - DNA, 21 bp, synthetic construct
  misc_feature 1..21: note = Description of Artificial Sequence: Synthetic oligonucleotide
  source 1..21: mol_type = other DNA
ccgagtgggtcgccggtgagg

SEQ ID NO: 41654 - DNA, 21 bp, synthetic construct
  misc_feature 1..21: note = Description of Artificial Sequence: Synthetic oligonucleotide
  source 1..21: mol_type = other DNA
ggtattactaagaatcttgcg

SEQ ID NO: 41655 - DNA, 21 bp, synthetic construct
  misc_feature 1..21: note = Description of Artificial Sequence: Synthetic oligonucleotide
  source 1..21: mol_type = other DNA
gctggttctaatagtcagggt

SEQ ID NO: 41656 - DNA, 21 bp, synthetic construct
  misc_feature 1..21: note = Description of Artificial Sequence: Synthetic oligonucleotide
  source 1..21: mol_type = other DNA
cctgctaggtcgactctttct

SEQ ID NO: 41657 - DNA, 21 bp, synthetic construct
  misc_feature 1..21: note = Description of Artificial Sequence: Synthetic oligonucleotide
  source 1..21: mol_type = other DNA
gagagtgttcgttcttcgagt

SEQ ID NO: 41658 - DNA, 21 bp, synthetic construct
  misc_feature 1..21: note = Description of Artificial Sequence: Synthetic oligonucleotide
  source 1..21: mol_type = other DNA
gtgaatacgtctcatacgaat

SEQ ID NO: 41659 - DNA, 21 bp, synthetic construct
  misc_feature 1..21: note = Description of Artificial Sequence: Synthetic oligonucleotide
  source 1..21: mol_type = other DNA
tataatgggggtaatcgtagt

SEQ ID NO: 41660 - DNA, 21 bp, synthetic construct
  misc_feature 1..21: note = Description of Artificial Sequence: Synthetic oligonucleotide
  source 1..21: mol_type = other DNA
ggggatcataataggcttaat

SEQ ID NO: 41661 - DNA, 21 bp, synthetic construct
  misc_feature 1..21: note = Description of Artificial Sequence: Synthetic oligonucleotide
  source 1..21: mol_type = other DNA
gccagagtcggcagcatcagc

SEQ ID NO: 41662 - DNA, 21 bp, synthetic construct
  misc_feature 1..21: note = Description of Artificial Sequence: Synthetic oligonucleotide
  source 1..21: mol_type = other DNA
aacaacgtcggcgtcagaggc

SEQ ID NO: 41663 - DNA, 21 bp, synthetic construct
  misc_feature 1..21: note = Description of Artificial Sequence: Synthetic oligonucleotide
  source 1..21: mol_type = other DNA
acggggtctgggagtaatcat

SEQ ID NO: 41664 - DNA, 21 bp, synthetic construct
  misc_feature 1..21: note = Description of Artificial Sequence: Synthetic oligonucleotide
  source 1..21: mol_type = other DNA
aacggcagcaccagcagcggc

SEQ ID NO: 41665 - DNA, 21 bp, synthetic construct
  misc_feature 1..21: note = Description of Artificial Sequence: Synthetic oligonucleotide
  source 1..21: mol_type = other DNA
ggtgtgctgggttctaagaat

SEQ ID NO: 41666 - DNA, 21 bp, synthetic construct
  misc_feature 1..21: note = Description of Artificial Sequence: Synthetic oligonucleotide
  source 1..21: mol_type = other DNA
attgtttctggtaagcttacg

SEQ ID NO: 41667 - DNA, 21 bp, synthetic construct
  misc_feature 1..21: note = Description of Artificial Sequence: Synthetic oligonucleotide
  source 1..21: mol_type = other DNA
cctagtgctaggatgtctggt

SEQ ID NO: 41668 - DNA, 21 bp, synthetic construct
  misc_feature 1..21: note = Description of Artificial Sequence: Synthetic oligonucleotide
  source 1..21: mol_type = other DNA
tttccggttaatgggctgagt

SEQ ID NO: 41669 - DNA, 21 bp, synthetic construct
  misc_feature 1..21: note = Description of Artificial Sequence: Synthetic oligonucleotide
  source 1..21: mol_type = other DNA
cagggtcctaagaatgctgat

SEQ ID NO: 41670 - DNA, 21 bp, synthetic construct
  misc_feature 1..21: note = Description of Artificial Sequence: Synthetic oligonucleotide
  source 1..21: mol_type = other DNA
cagtcgaatactagtcctacc

SEQ ID NO: 41671 - DNA, 21 bp, synthetic construct
  misc_feature 1..21: note = Description of Artificial Sequence: Synthetic oligonucleotide
  source 1..21: mol_type = other DNA
gcgatttcgccgacttatatg

SEQ ID NO: 41672 - DNA, 21 bp, synthetic construct
  misc_feature 1..21: note = Description of Artificial Sequence: Synthetic oligonucleotide
  source 1..21: mol_type = other DNA
aatccggtggctgcggctacg

SEQ ID NO: 41673 - DNA, 21 bp, synthetic construct
  misc_feature 1..21: note = Description of Artificial Sequence: Synthetic oligonucleotide
  source 1..21: mol_type = other DNA
aacagcgccaacaaaaccccc

SEQ ID NO: 41674 - DNA, 21 bp, synthetic construct
  misc_feature 1..21: note = Description of Artificial Sequence: Synthetic oligonucleotide
  source 1..21: mol_type = other DNA
cattcggttaatggtcatagt

SEQ ID NO: 41675 - DNA, 21 bp, synthetic construct
  misc_feature 1..21: note = Description of Artificial Sequence: Synthetic oligonucleotide
  source 1..21: mol_type = other DNA
gctggtgtgacgactgttaat

SEQ ID NO: 41676 - DNA, 21 bp, synthetic construct
  misc_feature 1..21: note = Description of Artificial Sequence: Synthetic oligonucleotide
  source 1..21: mol_type = other DNA
aacgccagcggccaaaaccaa

SEQ ID NO: 41677 - DNA, 21 bp, synthetic construct
  misc_feature 1..21: note = Description of Artificial Sequence: Synthetic oligonucleotide
  source 1..21: mol_type = other DNA
aatctttcgcatagtgcgggg

SEQ ID NO: 41678 - DNA, 21 bp, synthetic construct
  misc_feature 1..21: note = Description of Artificial Sequence: Synthetic oligonucleotide
  source 1..21: mol_type = other DNA
cacggccaaaccggcatgatc

SEQ ID NO: 41679 - DNA, 21 bp, synthetic construct
  misc_feature 1..21: note = Description of Artificial Sequence: Synthetic oligonucleotide
  source 1..21: mol_type = other DNA
tggactgtgagtcggtctggt

SEQ ID NO: 41680 - DNA, 21 bp, synthetic construct
  misc_feature 1..21: note = Description of Artificial Sequence: Synthetic oligonucleotide
  source 1..21: mol_type = other DNA
tcggtttcgaatactaatact

SEQ ID NO: 41681 - DNA, 21 bp, synthetic construct
  misc_feature 1..21: note = Description of Artificial Sequence: Synthetic oligonucleotide
  source 1..21: mol_type = other DNA
caaagagaacaactcctcaaa

SEQ ID NO: 41682 - DNA, 21 bp, synthetic construct
  misc_feature 1..21: note = Description of Artificial Sequence: Synthetic oligonucleotide
  source 1..21: mol_type = other DNA
aacgccgaacccaccagcagc

SEQ ID NO: 41683 - DNA, 21 bp, synthetic construct
  misc_feature 1..21: note = Description of Artificial Sequence: Synthetic oligonucleotide
  source 1..21: mol_type = other DNA
cctcgggatactactgggtct

SEQ ID NO: 41684 - DNA, 21 bp, synthetic construct
  misc_feature 1..21: note = Description of Artificial Sequence: Synthetic oligonucleotide
  source 1..21: mol_type = other DNA
atgagtagtaggtcgagtgtg

SEQ ID NO: 41685 - DNA, 21 bp, synthetic construct
  misc_feature 1..21: note = Description of Artificial Sequence: Synthetic oligonucleotide
  source 1..21: mol_type = other DNA
actcagcagaatgggaggaat

SEQ ID NO: 41686 - DNA, 21 bp, synthetic construct
  misc_feature 1..21: note = Description of Artificial Sequence: Synthetic oligonucleotide
  source 1..21: mol_type = other DNA
actactaataatattcagggg

SEQ ID NO: 41687 - DNA, 21 bp, synthetic construct
  misc_feature 1..21: note = Description of Artificial Sequence: Synthetic oligonucleotide
  source 1..21: mol_type = other DNA
tctcagtctaatagttttctg

SEQ ID NO: 41688 - DNA, 21 bp, synthetic construct
  misc_feature 1..21: note = Description of Artificial Sequence: Synthetic oligonucleotide
  source 1..21: mol_type = other DNA
ggtcctaagtctcctgggacg

SEQ ID NO: 41689 - DNA, 21 bp, synthetic construct
  misc_feature 1..21: note = Description of Artificial Sequence: Synthetic oligonucleotide
  source 1..21: mol_type = other DNA
gccggcgaaaacaaactcagc

SEQ ID NO: 41690 - DNA, 21 bp, synthetic construct
  misc_feature 1..21: note = Description of Artificial Sequence: Synthetic oligonucleotide
  source 1..21: mol_type = other DNA
accggcgaaagacaaagcagc

SEQ ID NO: 41691 - DNA, 21 bp, synthetic construct
  misc_feature 1..21: note = Description of Artificial Sequence: Synthetic oligonucleotide
  source 1..21: mol_type = other DNA
ttgcatgatggtcagactcgt

SEQ ID NO: 41692 - DNA, 21 bp, synthetic construct
  misc_feature 1..21: note = Description of Artificial Sequence: Synthetic oligonucleotide
  source 1..21: mol_type = other DNA
atgctcagcggcagcagaaac

SEQ ID NO: 41693 - DNA, 21 bp, synthetic construct
  misc_feature 1..21: note = Description of Artificial Sequence: Synthetic oligonucleotide
  source 1..21: mol_type = other DNA
agttttagtcctgcttctaat

SEQ ID NO: 41694 - DNA, 21 bp, synthetic construct
  misc_feature 1..21: note = Description of Artificial Sequence: Synthetic oligonucleotide
  source 1..21: mol_type = other DNA
actccgattactcctatgact

SEQ ID NO: 41695 - DNA, 21 bp, synthetic construct
  misc_feature 1..21: note = Description of Artificial Sequence: Synthetic oligonucleotide
  source 1..21: mol_type = other DNA
caccaaccccaccaaaaccaa

SEQ ID NO: 41696 - DNA, 21 bp, synthetic construct
  misc_feature 1..21: note = Description of Artificial Sequence: Synthetic oligonucleotide
  source 1..21: mol_type = other DNA
gccaccaacaacggcagcaaa

SEQ ID NO: 41697 - DNA, 21 bp, synthetic construct
  misc_feature 1..21: note = Description of Artificial Sequence: Synthetic oligonucleotide
  source 1..21: mol_type = other DNA
aatagtatttcgcgggttacg

SEQ ID NO: 41698 - DNA, 21 bp, synthetic construct
  misc_feature 1..21: note = Description of Artificial Sequence: Synthetic oligonucleotide
  source 1..21: mol_type = other DNA
tctaatgattcgaataagaag

SEQ ID NO: 41699 - DNA, 21 bp, synthetic construct
  misc_feature 1..21: note = Description of Artificial Sequence: Synthetic oligonucleotide
  source 1..21: mol_type = other DNA
tcgccggttaaggggtctgtt

SEQ ID NO: 41700 - DNA, 21 bp, synthetic construct
  misc_feature 1..21: note = Description of Artificial Sequence: Synthetic oligonucleotide
  source 1..21: mol_type = other DNA
agaagcagcaacagcgaccac

SEQ ID NO: 41701 - DNA, 21 bp, synthetic construct
  misc_feature 1..21: note = Description of Artificial Sequence: Synthetic oligonucleotide
  source 1..21: mol_type = other DNA
ctgcaggtgaatatggctcgt

SEQ ID NO: 41702 - DNA, 21 bp, synthetic construct
  misc_feature 1..21: note = Description of Artificial Sequence: Synthetic oligonucleotide
  source 1..21: mol_type = other DNA
gctggtactggtagttcgctt

SEQ ID NO: 41703 - DNA, 21 bp, synthetic construct
  misc_feature 1..21: note = Description of Artificial Sequence: Synthetic oligonucleotide
  source 1..21: mol_type = other DNA
gggagtaatcttaatagtact

SEQ ID NO: 41704 - DNA, 21 bp, synthetic construct
  misc_feature 1..21: note = Description of Artificial Sequence: Synthetic oligonucleotide
  source 1..21: mol_type = other DNA
ccgaatcatcagagtcttact

SEQ ID NO: 41705 - DNA, 21 bp, synthetic construct
  misc_feature 1..21: note = Description of Artificial Sequence: Synthetic oligonucleotide
  source 1..21: mol_type = other DNA
accggttctggacagaatcaa

SEQ ID NO: 41706 - DNA, 21 bp, synthetic construct
  misc_feature 1..21: note = Description of Artificial Sequence: Synthetic oligonucleotide
  source 1..21: mol_type = other DNA
gagacgcctaataggagtcag

SEQ ID NO: 41707 - DNA, 21 bp, synthetic construct
  misc_feature 1..21: note = Description of Artificial Sequence: Synthetic oligonucleotide
  source 1..21: mol_type = other DNA
aataatagttctggggctcag

SEQ ID NO: 41708 - DNA, 21 bp, synthetic construct
  misc_feature 1..21: note = Description of Artificial Sequence: Synthetic oligonucleotide
  source 1..21: mol_type = other DNA
agcagcagcggcggcgtcaaa

SEQ ID NO: 41709 - DNA, 21 bp, synthetic construct
  misc_feature 1..21: note = Description of Artificial Sequence: Synthetic oligonucleotide
  source 1..21: mol_type = other DNA
tgtacttctaagagtagttct

SEQ ID NO: 41710 - DNA, 21 bp, synthetic construct
  misc_feature 1..21: note = Description of Artificial Sequence: Synthetic oligonucleotide
  source 1..21: mol_type = other DNA
atttctccggtgccgctgact

SEQ ID NO: 41711 - DNA, 21 bp, synthetic construct
  misc_feature 1..21: note = Description of Artificial Sequence: Synthetic oligonucleotide
  source 1..21: mol_type = other DNA
cagcggaatgtgagtgtggtt

SEQ ID NO: 41712 - DNA, 21 bp, synthetic construct
  misc_feature 1..21: note = Description of Artificial Sequence: Synthetic oligonucleotide
  source 1..21: mol_type = other DNA
gacttcagcgaaaaaagactc

SEQ ID NO: 41713 - DNA, 21 bp, synthetic construct
  misc_feature 1..21: note = Description of Artificial Sequence: Synthetic oligonucleotide
  source 1..21: mol_type = other DNA
agtaggccggggctttctcag

SEQ ID NO: 41714 - DNA, 21 bp, synthetic construct
  misc_feature 1..21: note = Description of Artificial Sequence: Synthetic oligonucleotide
  source 1..21: mol_type = other DNA
tatggttcgaatacgccgact

SEQ ID NO: 41715 - DNA, 21 bp, synthetic construct
  misc_feature 1..21: note = Description of Artificial Sequence: Synthetic oligonucleotide
  source 1..21: mol_type = other DNA
agaatcaccctcaacagcgcc

SEQ ID NO: 41716 - DNA, 21 bp, synthetic construct
  misc_feature 1..21: note = Description of Artificial Sequence: Synthetic oligonucleotide
  source 1..21: mol_type = other DNA
cccctcaacacccaccaaagc

SEQ ID NO: 41717 - DNA, 21 bp, synthetic construct
  misc_feature 1..21: note = Description of Artificial Sequence: Synthetic oligonucleotide
  source 1..21: mol_type = other DNA
tttcggaatacgcatagtgag

SEQ ID NO: 41718 - DNA, 21 bp, synthetic construct
  misc_feature 1..21: note = Description of Artificial Sequence: Synthetic oligonucleotide
  source 1..21: mol_type = other DNA
agcagcgaccaacccagactc

SEQ ID NO: 41719 - DNA, 21 bp, synthetic construct
  misc_feature 1..21: note = Description of Artificial Sequence: Synthetic oligonucleotide
  source 1..21: mol_type = other DNA
gaactcgccgcccccagcaaa

SEQ ID NO: 41720 - DNA, 21 bp, synthetic construct
  misc_feature 1..21: note = Description of Artificial Sequence: Synthetic oligonucleotide
  source 1..21: mol_type = other DNA
gctactactaaggctggtatt

SEQ ID NO: 41721 - DNA, 21 bp, synthetic construct
  misc_feature 1..21: note = Description of Artificial Sequence: Synthetic oligonucleotide
  source 1..21: mol_type = other DNA
gctgagcagaggccggggcag

SEQ ID NO: 41722 - DNA, 21 bp, synthetic construct
  misc_feature 1..21: note = Description of Artificial Sequence: Synthetic oligonucleotide
  source 1..21: mol_type = other DNA
ggcatcgacaccaaaatgctc

SEQ ID NO: 41723 - DNA, 21 bp, synthetic construct
  misc_feature 1..21: note = Description of Artificial Sequence: Synthetic oligonucleotide
  source 1..21: mol_type = other DNA
tctcctaataagacttctctt

SEQ ID NO: 41724 - DNA, 21 bp, synthetic construct
  misc_feature 1..21: note = Description of Artificial Sequence: Synthetic oligonucleotide
  source 1..21: mol_type = other DNA
catacttcgagtaattctctt

SEQ ID NO: 41725 - DNA, 21 bp, synthetic construct
  misc_feature 1..21: note = Description of Artificial Sequence: Synthetic oligonucleotide
  source 1..21: mol_type = other DNA
tctcagacggttaagactggt

SEQ ID NO: 41726 - DNA, 21 bp, synthetic construct
  misc_feature 1..21: note = Description of Artificial Sequence: Synthetic oligonucleotide
  source 1..21: mol_type = other DNA
cccaacaaccaaagcaccaga

SEQ ID NO: 41727 - DNA, 21 bp, synthetic construct
  misc_feature 1..21: note = Description of Artificial Sequence: Synthetic oligonucleotide
  source 1..21: mol_type = other DNA
gtcaaccaaagcggcttcagc

SEQ ID NO: 41728 - DNA, 21 bp, synthetic construct
  misc_feature 1..21: note = Description of Artificial Sequence: Synthetic oligonucleotide
  source 1..21: mol_type = other DNA
gatgggaagagtcctcgtgtg

SEQ ID NO: 41729 - DNA, 21 bp, synthetic construct
  misc_feature 1..21: note = Description of Artificial Sequence: Synthetic oligonucleotide
  source 1..21: mol_type = other DNA
tatgttagtaattctaatgcg

SEQ ID NO: 41730 - DNA, 21 bp, synthetic construct
  misc_feature 1..21: note = Description of Artificial Sequence: Synthetic oligonucleotide
  source 1..21: mol_type = other DNA
gaatacccccaacaagccaaa

SEQ ID NO: 41731 - DNA, 21 bp, synthetic construct
  misc_feature 1..21: note = Description of Artificial Sequence: Synthetic oligonucleotide
  source 1..21: mol_type = other DNA
ggcgtccaaaccaaactcctc

SEQ ID NO: 41732 - DNA, 21 bp, synthetic construct
  misc_feature 1..21: note = Description of Artificial Sequence: Synthetic oligonucleotide
  source 1..21: mol_type = other DNA
ggccaaaccggcgacatgaga

SEQ ID NO: 41733 - DNA, 21 bp, synthetic construct
  misc_feature 1..21: note = Description of Artificial Sequence: Synthetic oligonucleotide
  source 1..21: mol_type = other DNA
aacggcagcggcaccaaccaa

SEQ ID NO: 41734 - DNA, 21 bp, synthetic construct
  misc_feature 1..21: note = Description of Artificial Sequence: Synthetic oligonucleotide
  source 1..21: mol_type = other DNA
cgtaatgttgataagtcgagt

SEQ ID NO: 41735 - DNA, 21 bp, synthetic construct
  misc_feature 1..21: note = Description of Artificial Sequence: Synthetic oligonucleotide
  source 1..21: mol_type = other DNA
cgtccgtatgagacgcagttg

SEQ ID NO: 41736 - DNA, 21 bp, synthetic construct
  misc_feature 1..21: note = Description of Artificial Sequence: Synthetic oligonucleotide
  source 1..21: mol_type = other DNA
cctgcgcgtgatagtaagtcg

SEQ ID NO: 41737 - DNA, 21 bp, synthetic construct
  misc_feature 1..21: note = Description of Artificial Sequence: Synthetic oligonucleotide
  source 1..21: mol_type = other DNA
tataataggagtgagcgtcct

SEQ ID NO: 41738 - DNA, 21 bp, synthetic construct
  misc_feature 1..21: note = Description of Artificial Sequence: Synthetic oligonucleotide
  source 1..21: mol_type = other DNA
gaccaagtcagccacaaactc

SEQ ID NO: 41739 - DNA, 21 bp, synthetic construct
  misc_feature 1..21: note = Description of Artificial Sequence: Synthetic oligonucleotide
  source 1..21: mol_type = other DNA
tacatcaaaagcgtcaccaac

SEQ ID NO: 41740 - DNA, 21 bp, synthetic construct
  misc_feature 1..21: note = Description of Artificial Sequence: Synthetic oligonucleotide
  source 1..21: mol_type = other DNA
agaagccccggcagcaacacc

SEQ ID NO: 41741 - DNA, 21 bp, synthetic construct
  misc_feature 1..21: note = Description of Artificial Sequence: Synthetic oligonucleotide
  source 1..21: mol_type = other DNA
agcttcgacagcaaacccccc

SEQ ID NO: 41742 - DNA, 21 bp, synthetic construct
  misc_feature 1..21: note = Description of Artificial Sequence: Synthetic oligonucleotide
  source 1..21: mol_type = other DNA
gtcaacaccaccagagccgaa

SEQ ID NO: 41743 - DNA, 21 bp, synthetic construct
  misc_feature 1..21: note = Description of Artificial Sequence: Synthetic oligonucleotide
  source 1..21: mol_type = other DNA
tcgatggggaattcgattagt

SEQ ID NO: 41744 - DNA, 21 bp, synthetic construct
  misc_feature 1..21: note = Description of Artificial Sequence: Synthetic oligonucleotide
  source 1..21: mol_type = other DNA
aacggttctggacagaataaa

SEQ ID NO: 41745 - DNA, 21 bp, synthetic construct
  misc_feature 1..21: note = Description of Artificial Sequence: Synthetic oligonucleotide
  source 1..21: mol_type = other DNA
accggccaacaaaccgccacc

SEQ ID NO: 41746 - DNA, 21 bp, synthetic construct
  misc_feature 1..21: note = Description of Artificial Sequence: Synthetic oligonucleotide
  source 1..21: mol_type = other DNA
cccagccaaaccaaacccagc

SEQ ID NO: 41747 - DNA, 21 bp, synthetic construct
  misc_feature 1..21: note = Description of Artificial Sequence: Synthetic oligonucleotide
  source 1..21: mol_type = other DNA
cgtctggaggggagtatggcg

SEQ ID NO: 41748 - DNA, 21 bp, synthetic construct
  misc_feature 1..21: note = Description of Artificial Sequence: Synthetic oligonucleotide
  source 1..21: mol_type = other DNA
cctacgaaggcgaatgttacg

SEQ ID NO: 41749 - DNA, 21 bp, synthetic construct
  misc_feature 1..21: note = Description of Artificial Sequence: Synthetic oligonucleotide
  source 1..21: mol_type = other DNA
gggggttcgaatttgcgtact

SEQ ID NO: 41750 - DNA, 21 bp, synthetic construct
  misc_feature 1..21: note = Description of Artificial Sequence: Synthetic oligonucleotide
  source 1..21: mol_type = other DNA
ggtccttctagtattaatagg

SEQ ID NO: 41751 - DNA, 21 bp, synthetic construct
  misc_feature 1..21: note = Description of Artificial Sequence: Synthetic oligonucleotide
  source 1..21: mol_type = other DNA
tatagtggttctgcggggcag

SEQ ID NO: 41752 - DNA, 21 bp, synthetic construct
  misc_feature 1..21: note = Description of Artificial Sequence: Synthetic oligonucleotide
  source 1..21: mol_type = other DNA
ggggttccggctgggcatact

SEQ ID NO: 41753 - DNA, 21 bp, synthetic construct
  misc_feature 1..21: note = Description of Artificial Sequence: Synthetic oligonucleotide
  source 1..21: mol_type = other DNA
ccgacgagtagtccgcagagg

SEQ ID NO: 41754 - DNA, 21 bp, synthetic construct
  misc_feature 1..21: note = Description of Artificial Sequence: Synthetic oligonucleotide
  source 1..21: mol_type = other DNA
tgtaataatgctcgtgtttcg

SEQ ID NO: 41755 - DNA, 21 bp, synthetic construct
  misc_feature 1..21: note = Description of Artificial Sequence: Synthetic oligonucleotide
  source 1..21: mol_type = other DNA
gtttttaatcgtaatgcttct

SEQ ID NO: 41756 - DNA, 21 bp, synthetic construct
  misc_feature 1..21: note = Description of Artificial Sequence: Synthetic oligonucleotide
  source 1..21: mol_type = other DNA
cctacgattagtgtggatagg

SEQ ID NO: 41757 - DNA, 21 bp, synthetic construct
  misc_feature 1..21: note = Description of Artificial Sequence: Synthetic oligonucleotide
  source 1..21: mol_type = other DNA
ccggggtctgggagtaatcat

SEQ ID NO: 41758 - DNA, 21 bp, synthetic construct
  misc_feature 1..21: note = Description of Artificial Sequence: Synthetic oligonucleotide
  source 1..21: mol_type = other DNA
ggtcctgctgttacgaatcgt

SEQ ID NO: 41759 - DNA, 21 bp, synthetic construct
  misc_feature 1..21: note = Description of Artificial Sequence: Synthetic oligonucleotide
  source 1..21: mol_type = other DNA
atgaggcaggatacgagtaag

SEQ ID NO: 41760 - DNA, 21 bp, synthetic construct
  misc_feature 1..21: note = Description of Artificial Sequence: Synthetic oligonucleotide
  source 1..21: mol_type = other DNA
tatacttcgaagtctactgcg

SEQ ID NO: 41761 - DNA, 21 bp, synthetic construct
  misc_feature 1..21: note = Description of Artificial Sequence: Synthetic oligonucleotide
  source 1..21: mol_type = other DNA
aatgtgaatagtcagatgctg

SEQ ID NO: 41762 - DNA, 21 bp, synthetic construct
  misc_feature 1..21: note = Description of Artificial Sequence: Synthetic oligonucleotide
  source 1..21: mol_type = other DNA
aaccccagaggcaccaccctc

SEQ ID NO: 41763 - DNA, 21 bp, synthetic construct
  misc_feature 1..21: note = Description of Artificial Sequence: Synthetic oligonucleotide
  source 1..21: mol_type = other DNA
atgagcagcaccagaagcatc

SEQ ID NO: 41764 - DNA, 21 bp, synthetic construct
  misc_feature 1..21: note = Description of Artificial Sequence: Synthetic oligonucleotide
  source 1..21: mol_type = other DNA
ccttctacgtcttctgcgggg

SEQ ID NO: 41765 - DNA, 21 bp, synthetic construct
  misc_feature 1..21: note = Description of Artificial Sequence: Synthetic oligonucleotide
  source 1..21: mol_type = other DNA
gtgcctgtgactaagtcgagt

SEQ ID NO: 41766 - DNA, 21 bp, synthetic construct
  misc_feature 1..21: note = Description of Artificial Sequence: Synthetic oligonucleotide
  source 1..21: mol_type = other DNA
ccgggtattaatactaatagt

SEQ ID NO: 41767 - DNA, 21 bp, synthetic construct
  misc_feature 1..21: note = Description of Artificial Sequence: Synthetic oligonucleotide
  source 1..21: mol_type = other DNA
cgttctaatggttcggcggct

SEQ ID NO: 41768 - DNA, 21 bp, synthetic construct
  misc_feature 1..21: note = Description of Artificial Sequence: Synthetic oligonucleotide
  source 1..21: mol_type = other DNA
gagcgggctggtctgaattct

SEQ ID NO: 41769 - DNA, 21 bp, synthetic construct
  misc_feature 1..21: note = Description of Artificial Sequence: Synthetic oligonucleotide
  source 1..21: mol_type = other DNA
gagcggtatactactagtaag

SEQ ID NO: 41770 - DNA, 21 bp, synthetic construct
  misc_feature 1..21: note = Description of Artificial Sequence: Synthetic oligonucleotide
  source 1..21: mol_type = other DNA
ctcagaaacagcaccagcgtc

SEQ ID NO: 41771 - DNA, 21 bp, synthetic construct
  misc_feature 1..21: note = Description of Artificial Sequence: Synthetic oligonucleotide
  source 1..21: mol_type = other DNA
ggggatatggggatttcgaag

SEQ ID NO: 41772 - DNA, 21 bp, synthetic construct
  misc_feature 1..21: note = Description of Artificial Sequence: Synthetic oligonucleotide
  source 1..21: mol_type = other DNA
aacctcaacagcgtcagcaaa

SEQ ID NO: 41773 - DNA, 21 bp, synthetic construct
  misc_feature 1..21: note = Description of Artificial Sequence: Synthetic oligonucleotide
  source 1..21: mol_type = other DNA
ccgccgacccttgagcagagt

SEQ ID NO: 41774 - DNA, 21 bp, synthetic construct
  misc_feature 1..21: note = Description of Artificial Sequence: Synthetic oligonucleotide
  source 1..21: mol_type = other DNA
tatcgtcttgatcattctagg

SEQ ID NO: 41775 - DNA, 21 bp, synthetic construct
  misc_feature 1..21: note = Description of Artificial Sequence: Synthetic oligonucleotide
  source 1..21: mol_type = other DNA
cggaataatccgactacggtt

SEQ ID NO: 41776 - DNA, 21 bp, synthetic construct
  misc_feature 1..21: note = Description of Artificial Sequence: Synthetic oligonucleotide
  source 1..21: mol_type = other DNA
tcttttagtggggctaataag

SEQ ID NO: 41777 - DNA, 21 bp, synthetic construct
  misc_feature 1..21: note = Description of Artificial Sequence: Synthetic oligonucleotide
  source 1..21: mol_type = other DNA
catgtttctcatggtccgggg

SEQ ID NO: 41778 - DNA, 21 bp, synthetic construct
  misc_feature 1..21: note = Description of Artificial Sequence: Synthetic oligonucleotide
  source 1..21: mol_type = other DNA
ccttataagggtaatgggctt

SEQ ID NO: 41779 - DNA, 21 bp, synthetic construct
  misc_feature 1..21: note = Description of Artificial Sequence: Synthetic oligonucleotide
  source 1..21: mol_type = other DNA
ctggtttcgtctaagagtagt

SEQ ID NO: 41780 - DNA, 21 bp, synthetic construct
  misc_feature 1..21: note = Description of Artificial Sequence: Synthetic oligonucleotide
  source 1..21: mol_type = other DNA
ggtagtgcgggtaatatgctt

SEQ ID NO: 41781 - DNA, 21 bp, synthetic construct
  misc_feature 1..21: note = Description of Artificial Sequence: Synthetic oligonucleotide
  source 1..21: mol_type = other DNA
aatacgacgggtcatgctggg

SEQ ID NO: 41782 - DNA, 21 bp, synthetic construct
  misc_feature 1..21: note = Description of Artificial Sequence: Synthetic oligonucleotide
  source 1..21: mol_type = other DNA
aatcctgttgctctgagggat

SEQ ID NO: 41783 - DNA, 21 bp, synthetic construct
  misc_feature 1..21: note = Description of Artificial Sequence: Synthetic oligonucleotide
  source 1..21: mol_type = other DNA
agtgtttctactaagagtgct

SEQ ID NO: 41784 - DNA, 21 bp, synthetic construct
  misc_feature 1..21: note = Description of Artificial Sequence: Synthetic oligonucleotide
  source 1..21: mol_type = other DNA
aggactttgagtgcttcgtcg

SEQ ID NO: 41785 - DNA, 21 bp, synthetic construct
  misc_feature 1..21: note = Description of Artificial Sequence: Synthetic oligonucleotide
  source 1..21: mol_type = other DNA
actgggtcggggaggttgctt

SEQ ID NO: 41786 - DNA, 21 bp, synthetic construct
  misc_feature 1..21: note = Description of Artificial Sequence: Synthetic oligonucleotide
  source 1..21: mol_type = other DNA
gtgggtggtggtcgtgataat

SEQ ID NO: 41787 - DNA, 21 bp, synthetic construct
  misc_feature 1..21: note = Description of Artificial Sequence: Synthetic oligonucleotide
  source 1..21: mol_type = other DNA
agtacgtcgacggttcattcg

SEQ ID NO: 41788 - DNA, 21 bp, synthetic construct
  misc_feature 1..21: note = Description of Artificial Sequence: Synthetic oligonucleotide
  source 1..21: mol_type = other DNA
cccctcatcaacagaaccatg

SEQ ID NO: 41789 - DNA, 21 bp, synthetic construct
  misc_feature 1..21: note = Description of Artificial Sequence: Synthetic oligonucleotide
  source 1..21: mol_type = other DNA
catcagggtaatgttatttct

SEQ ID NO: 41790 - DNA, 21 bp, synthetic construct
  misc_feature 1..21: note = Description of Artificial Sequence: Synthetic oligonucleotide
  source 1..21: mol_type = other DNA
agccaagtcagccacagcgtc

SEQ ID NO: 41791 - DNA, 21 bp, synthetic construct
  misc_feature 1..21: note = Description of Artificial Sequence: Synthetic oligonucleotide
  source 1..21: mol_type = other DNA
tctgttactagtcctaataag

SEQ ID NO: 41792 - DNA, 21 bp, synthetic construct
  misc_feature 1..21: note = Description of Artificial Sequence: Synthetic oligonucleotide
  source 1..21: mol_type = other DNA
cctagtcgggcgtcgattact

SEQ ID NO: 41793 - DNA, 21 bp, synthetic construct
  misc_feature 1..21: note = Description of Artificial Sequence: Synthetic oligonucleotide
  source 1..21: mol_type = other DNA
tcgaaggataggagtactgtt

SEQ ID NO: 41794 - DNA, 21 bp, synthetic construct
  misc_feature 1..21: note = Description of Artificial Sequence: Synthetic oligonucleotide
  source 1..21: mol_type = other DNA
cagacttcggctacgcagcgg

SEQ ID NO: 41795 - DNA, 21 bp, synthetic construct
  misc_feature 1..21: note = Description of Artificial Sequence: Synthetic oligonucleotide
  source 1..21: mol_type = other DNA
tcgtcgagtcctaatgttaag

SEQ ID NO: 41796 - DNA, 21 bp, synthetic construct
  misc_feature 1..21: note = Description of Artificial Sequence: Synthetic oligonucleotide
  source 1..21: mol_type = other DNA
tatagtgggcttactggttcg

SEQ ID NO: 41797 - DNA, 21 bp, synthetic construct
  misc_feature 1..21: note = Description of Artificial Sequence: Synthetic oligonucleotide
  source 1..21: mol_type = other DNA
ctcggccccggcaaaaacacc

SEQ ID NO: 41798 - DNA, 21 bp, synthetic construct
  misc_feature 1..21: note = Description of Artificial Sequence: Synthetic oligonucleotide
  source 1..21: mol_type = other DNA
cagacgggtactagttctact

SEQ ID NO: 41799 - DNA, 21 bp, synthetic construct
  misc_feature 1..21: note = Description of Artificial Sequence: Synthetic oligonucleotide
  source 1..21: mol_type = other DNA
cctatttcgcatacgactggt

SEQ ID NO: 41800 - DNA, 21 bp, synthetic construct
  misc_feature 1..21: note = Description of Artificial Sequence: Synthetic oligonucleotide
  source 1..21: mol_type = other DNA
gctcagacgaagggtactcag

SEQ ID NO: 41801 - DNA, 21 bp, synthetic construct
  misc_feature 1..21: note = Description of Artificial Sequence: Synthetic oligonucleotide
  source 1..21: mol_type = other DNA
gtcctcgccggcagcaacacc

SEQ ID NO: 41802 - DNA, 21 bp, synthetic construct
  misc_feature 1..21: note = Description of Artificial Sequence: Synthetic oligonucleotide
  source 1..21: mol_type = other DNA
caactcagcggcgccagaagc

SEQ ID NO: 41803 - DNA, 21 bp, synthetic construct
  misc_feature 1..21: note = Description of Artificial Sequence: Synthetic oligonucleotide
  source 1..21: mol_type = other DNA
cctggtgataggggtaaggtt

SEQ ID NO: 41804 - DNA, 21 bp, synthetic construct
  misc_feature 1..21: note = Description of Artificial Sequence: Synthetic oligonucleotide
  source 1..21: mol_type = other DNA
agttttactaagggggcgggg

SEQ ID NO: 41805 - DNA, 21 bp, synthetic construct
  misc_feature 1..21: note = Description of Artificial Sequence: Synthetic oligonucleotide
  source 1..21: mol_type = other DNA
ccgtctggggagactagtaag

SEQ ID NO: 41806 - DNA, 21 bp, synthetic construct
  misc_feature 1..21: note = Description of Artificial Sequence: Synthetic oligonucleotide
  source 1..21: mol_type = other DNA
cccagaaacatggaagaaatg

SEQ ID NO: 41807 - DNA, 21 bp, synthetic construct
  misc_feature 1..21: note = Description of Artificial Sequence: Synthetic oligonucleotide
  source 1..21: mol_type = other DNA
ggtccgtcgcagcatgtgatt

SEQ ID NO: 41808 - DNA, 21 bp, synthetic construct
  misc_feature 1..21: note = Description of Artificial Sequence: Synthetic oligonucleotide
  source 1..21: mol_type = other DNA
agtaagactgggactagtttg

SEQ ID NO: 41809 - DNA, 21 bp, synthetic construct
  misc_feature 1..21: note = Description of Artificial Sequence: Synthetic oligonucleotide
  source 1..21: mol_type = other DNA
atgctgaatacttctcattat

SEQ ID NO: 41810 - DNA, 21 bp, synthetic construct
  misc_feature 1..21: note = Description of Artificial Sequence: Synthetic oligonucleotide
  source 1..21: mol_type = other DNA
agaagcggcaccagccacagc

SEQ ID NO: 41811 - DNA, 21 bp, synthetic construct
  misc_feature 1..21: note = Description of Artificial Sequence: Synthetic oligonucleotide
  source 1..21: mol_type = other DNA
agagccgaaatcaacaccaga

SEQ ID NO: 41812 - DNA, 21 bp, synthetic construct
  misc_feature 1..21: note = Description of Artificial Sequence: Synthetic oligonucleotide
  source 1..21: mol_type = other DNA
agtgcttctaatgttagtagg

SEQ ID NO: 41813 - DNA, 21 bp, synthetic construct
  misc_feature 1..21: note = Description of Artificial Sequence: Synthetic oligonucleotide
  source 1..21: mol_type = other DNA
atggaaatcaaacccaacaga

SEQ ID NO: 41814 - DNA, 21 bp, synthetic construct
  misc_feature 1..21: note = Description of Artificial Sequence: Synthetic oligonucleotide
  source 1..21: mol_type = other DNA
ctcagcatgaacaccagcaaa

SEQ ID NO: 41815 - DNA, 21 bp, synthetic construct
  misc_feature 1..21: note = Description of Artificial Sequence: Synthetic oligonucleotide
  source 1..21: mol_type = other DNA
taccaaaacaaaagcctcacc

SEQ ID NO: 41816 - DNA, 21 bp, synthetic construct
  misc_feature 1..21: note = Description of Artificial Sequence: Synthetic oligonucleotide
  source 1..21: mol_type = other DNA
agaagcacccaaagcagcccc

SEQ ID NO: 41817 - DNA, 21 bp, synthetic construct
  misc_feature 1..21: note = Description of Artificial Sequence: Synthetic oligonucleotide
  source 1..21: mol_type = other DNA
caagtcggcagacccaacgcc

SEQ ID NO: 41818 - DNA, 21 bp, synthetic construct
  misc_feature 1..21: note = Description of Artificial Sequence: Synthetic oligonucleotide
  source 1..21: mol_type = other DNA
agcaccaacatggccgtcgtc

SEQ ID NO: 41819 - DNA, 21 bp, synthetic construct
  misc_feature 1..21: note = Description of Artificial Sequence: Synthetic oligonucleotide
  source 1..21: mol_type = other DNA
tctactccgatgtcgaatcgt

SEQ ID NO: 41820 - DNA, 21 bp, synthetic construct
  misc_feature 1..21: note = Description of Artificial Sequence: Synthetic oligonucleotide
  source 1..21: mol_type = other DNA
tctcgtgtgacttctggtggt

SEQ ID NO: 41821 - DNA, 21 bp, synthetic construct
  misc_feature 1..21: note = Description of Artificial Sequence: Synthetic oligonucleotide
  source 1..21: mol_type = other DNA
gctacggtttctaagacggct

SEQ ID NO: 41822 - DNA, 21 bp, synthetic construct
  misc_feature 1..21: note = Description of Artificial Sequence: Synthetic oligonucleotide
  source 1..21: mol_type = other DNA
acgacttcgaataaggatagt

SEQ ID NO: 41823 - DNA, 21 bp, synthetic construct
  misc_feature 1..21: note = Description of Artificial Sequence: Synthetic oligonucleotide
  source 1..21: mol_type = other DNA
aatgtgactacgccgcttatt

SEQ ID NO: 41824 - DNA, 21 bp, synthetic construct
  misc_feature 1..21: note = Description of Artificial Sequence: Synthetic oligonucleotide
  source 1..21: mol_type = other DNA
cataatacggctcatgcttcg

SEQ ID NO: 41825 - DNA, 21 bp, synthetic construct
  misc_feature 1..21: note = Description of Artificial Sequence: Synthetic oligonucleotide
  source 1..21: mol_type = other DNA
aattctaatactcgtggtcct

SEQ ID NO: 41826 - DNA, 21 bp, synthetic construct
  misc_feature 1..21: note = Description of Artificial Sequence: Synthetic oligonucleotide
  source 1..21: mol_type = other DNA
caggtttctccggcgtctcgg

SEQ ID NO: 41827 - DNA, 21 bp, synthetic construct
  misc_feature 1..21: note = Description of Artificial Sequence: Synthetic oligonucleotide
  source 1..21: mol_type = other DNA
tacagcggcggcacccaacaa

SEQ ID NO: 41828 - DNA, 21 bp, synthetic construct
  misc_feature 1..21: note = Description of Artificial Sequence: Synthetic oligonucleotide
  source 1..21: mol_type = other DNA
gctacgaatcattcgccgcag

SEQ ID NO: 41829 - DNA, 21 bp, synthetic construct
  misc_feature 1..21: note = Description of Artificial Sequence: Synthetic oligonucleotide
  source 1..21: mol_type = other DNA
cccaacaacgccaccaaaaac

SEQ ID NO: 41830 - DNA, 21 bp, synthetic construct
  misc_feature 1..21: note = Description of Artificial Sequence: Synthetic oligonucleotide
  source 1..21: mol_type = other DNA
agcagcgccagcacctacaaa

SEQ ID NO: 41831 - DNA, 21 bp, synthetic construct
  misc_feature 1..21: note = Description of Artificial Sequence: Synthetic oligonucleotide
  source 1..21: mol_type = other DNA
ccggtgggttcggtgcggggg

SEQ ID NO: 41832 - DNA, 21 bp, synthetic construct
  misc_feature 1..21: note = Description of Artificial Sequence: Synthetic oligonucleotide
  source 1..21: mol_type = other DNA
agccccgccagagccagcctc

SEQ ID NO: 41833 - DNA, 21 bp, synthetic construct
  misc_feature 1..21: note = Description of Artificial Sequence: Synthetic oligonucleotide
  source 1..21: mol_type = other DNA
tctactccgcatcatacgact

SEQ ID NO: 41834 - DNA, 21 bp, synthetic construct
  misc_feature 1..21: note = Description of Artificial Sequence: Synthetic oligonucleotide
  source 1..21: mol_type = other DNA
ccggttacgcgttctaaggat

SEQ ID NO: 41835 - DNA, 21 bp, synthetic construct
  misc_feature 1..21: note = Description of Artificial Sequence: Synthetic oligonucleotide
  source 1..21: mol_type = other DNA
ccgacgcggacggcgagtaat

SEQ ID NO: 41836 - DNA, 21 bp, synthetic construct
  misc_feature 1..21: note = Description of Artificial Sequence: Synthetic oligonucleotide
  source 1..21: mol_type = other DNA
agtccgaattctcatccttct

SEQ ID NO: 41837 - DNA, 21 bp, synthetic construct
  misc_feature 1..21: note = Description of Artificial Sequence: Synthetic oligonucleotide
  source 1..21: mol_type = other DNA
cagaggacttcggatcagact

SEQ ID NO: 41838 - DNA, 21 bp, synthetic construct
  misc_feature 1..21: note = Description of Artificial Sequence: Synthetic oligonucleotide
  source 1..21: mol_type = other DNA
aacaccagaagcagcagcggc

SEQ ID NO: 41839 - DNA, 21 bp, synthetic construct
  misc_feature 1..21: note = Description of Artificial Sequence: Synthetic oligonucleotide
  source 1..21: mol_type = other DNA
gataggcataatacgacttct

SEQ ID NO: 41840 - DNA, 21 bp, synthetic construct
  misc_feature 1..21: note = Description of Artificial Sequence: Synthetic oligonucleotide
  source 1..21: mol_type = other DNA
aacggcttcaacagcaacaac

SEQ ID NO: 41841 - DNA, 21 bp, synthetic construct
  misc_feature 1..21: note = Description of Artificial Sequence: Synthetic oligonucleotide
  source 1..21: mol_type = other DNA
aaccccgtcaacaccaaaagc

SEQ ID NO: 41842 - DNA, 21 bp, synthetic construct
  misc_feature 1..21: note = Description of Artificial Sequence: Synthetic oligonucleotide
  source 1..21: mol_type = other DNA
atgatgaacagaagcgccagc

SEQ ID NO: 41843 - DNA, 21 bp, synthetic construct
  misc_feature 1..21: note = Description of Artificial Sequence: Synthetic oligonucleotide
  source 1..21: mol_type = other DNA
acttctcggcagtcttttgtg

SEQ ID NO: 41844 - DNA, 21 bp, synthetic construct
  misc_feature 1..21: note = Description of Artificial Sequence: Synthetic oligonucleotide
  source 1..21: mol_type = other DNA
acccaagaccaccacgtcaaa

SEQ ID NO: 41845 - DNA, 21 bp, synthetic construct
  misc_feature 1..21: note = Description of Artificial Sequence: Synthetic oligonucleotide
  source 1..21: mol_type = other DNA
gcgacgcataattcgtctcag

SEQ ID NO: 41846 - DNA, 21 bp, synthetic construct
  misc_feature 1..21: note = Description of Artificial Sequence: Synthetic oligonucleotide
  source 1..21: mol_type = other DNA
ctcccccaaggcagcatcagc

SEQ ID NO: 41847 - DNA, 21 bp, synthetic construct
  misc_feature 1..21: note = Description of Artificial Sequence: Synthetic oligonucleotide
  source 1..21: mol_type = other DNA
cttcttacgtcgcctaattcg

SEQ ID NO: 41848 - DNA, 21 bp, synthetic construct
  misc_feature 1..21: note = Description of Artificial Sequence: Synthetic oligonucleotide
  source 1..21: mol_type = other DNA
aattctagtcataatgtttct

SEQ ID NO: 41849 - DNA, 21 bp, synthetic construct
  misc_feature 1..21: note = Description of Artificial Sequence: Synthetic oligonucleotide
  source 1..21: mol_type = other DNA
tgcctcaccgacgccagagcc

SEQ ID NO: 41850 - DNA, 21 bp, synthetic construct
  misc_feature 1..21: note = Description of Artificial Sequence: Synthetic oligonucleotide
  source 1..21: mol_type = other DNA
ccccaaagcagccaccaaacc

SEQ ID NO: 41851 - DNA, 21 bp, synthetic construct
  misc_feature 1..21: note = Description of Artificial Sequence: Synthetic oligonucleotide
  source 1..21: mol_type = other DNA
ttgcatgctgatcagcatagt

SEQ ID NO: 41852 - DNA, 21 bp, synthetic construct
  misc_feature 1..21: note = Description of Artificial Sequence: Synthetic oligonucleotide
  source 1..21: mol_type = other DNA
agacaactccccagcggcctc

SEQ ID NO: 41853 - DNA, 21 bp, synthetic construct
  misc_feature 1..21: note = Description of Artificial Sequence: Synthetic oligonucleotide
  source 1..21: mol_type = other DNA
agttcggagcagactactcgt

SEQ ID NO: 41854 - DNA, 21 bp, synthetic construct
  misc_feature 1..21: note = Description of Artificial Sequence: Synthetic oligonucleotide
  source 1..21: mol_type = other DNA
accgtcggcaccaccaccatc

SEQ ID NO: 41855 - DNA, 21 bp, synthetic construct
  misc_feature 1..21: note = Description of Artificial Sequence: Synthetic oligonucleotide
  source 1..21: mol_type = other DNA
ctggttcagggtggtgttaat

SEQ ID NO: 41856 - DNA, 21 bp, synthetic construct
  misc_feature 1..21: note = Description of Artificial Sequence: Synthetic oligonucleotide
  source 1..21: mol_type = other DNA
ggccaaagcggcagcagactc

SEQ ID NO: 41857 - DNA, 21 bp, synthetic construct
  misc_feature 1..21: note = Description of Artificial Sequence: Synthetic oligonucleotide
  source 1..21: mol_type = other DNA
gacaccatcaccagcagaggc

SEQ ID NO: 41858 - DNA, 21 bp, synthetic construct
  misc_feature 1..21: note = Description of Artificial Sequence: Synthetic oligonucleotide
  source 1..21: mol_type = other DNA
agttctggtagtaataggtct

SEQ ID NO: 41859 - DNA, 21 bp, synthetic construct
  misc_feature 1..21: note = Description of Artificial Sequence: Synthetic oligonucleotide
  source 1..21: mol_type = other DNA
aatagtgggaagccgaatgcg

SEQ ID NO: 41860 - DNA, 21 bp, synthetic construct
  misc_feature 1..21: note = Description of Artificial Sequence: Synthetic oligonucleotide
  source 1..21: mol_type = other DNA
ggcaacaccaaaaacggcatc

SEQ ID NO: 41861 - DNA, 21 bp, synthetic construct
  misc_feature 1..21: note = Description of Artificial Sequence: Synthetic oligonucleotide
  source 1..21: mol_type = other DNA
attactggttctttgagtaag

SEQ ID NO: 41862 - DNA, 21 bp, synthetic construct
  misc_feature 1..21: note = Description of Artificial Sequence: Synthetic oligonucleotide
  source 1..21: mol_type = other DNA
tctgctaatactaggattgct

SEQ ID NO: 41863 - DNA, 21 bp, synthetic construct
  misc_feature 1..21: note = Description of Artificial Sequence: Synthetic oligonucleotide
  source 1..21: mol_type = other DNA
tcgaatgagactaagtcttcg

SEQ ID NO: 41864 - DNA, 21 bp, synthetic construct
  misc_feature 1..21: note = Description of Artificial Sequence: Synthetic oligonucleotide
  source 1..21: mol_type = other DNA
tacagcatgagacccaccgaa

SEQ ID NO: 41865 - DNA, 21 bp, synthetic construct
  misc_feature 1..21: note = Description of Artificial Sequence: Synthetic oligonucleotide
  source 1..21: mol_type = other DNA
ggccacgacggccaaagcaga

SEQ ID NO: 41866 - DNA, 21 bp, synthetic construct
  misc_feature 1..21: note = Description of Artificial Sequence: Synthetic oligonucleotide
  source 1..21: mol_type = other DNA
aatgctaatagtcgtcctgtt

SEQ ID NO: 41867 - DNA, 21 bp, synthetic construct
  misc_feature 1..21: note = Description of Artificial Sequence: Synthetic oligonucleotide
  source 1..21: mol_type = other DNA
agcaccgtcggccacatgacc

SEQ ID NO: 41868 - DNA, 21 bp, synthetic construct
  misc_feature 1..21: note = Description of Artificial Sequence: Synthetic oligonucleotide
  source 1..21: mol_type = other DNA
cacgccaacagccccgccacc

SEQ ID NO: 41869 - DNA, 21 bp, synthetic construct
  misc_feature 1..21: note = Description of Artificial Sequence: Synthetic oligonucleotide
  source 1..21: mol_type = other DNA
catgatagtcggtcgaatgcg

SEQ ID NO: 41870 - DNA, 21 bp, synthetic construct
  misc_feature 1..21: note = Description of Artificial Sequence: Synthetic oligonucleotide
  source 1..21: mol_type = other DNA
ggcacccccaacaccaaagtc

SEQ ID NO: 41871 - DNA, 21 bp, synthetic construct
  misc_feature 1..21: note = Description of Artificial Sequence: Synthetic oligonucleotide
  source 1..21: mol_type = other DNA
gcgggttctaagacgacgagt

SEQ ID NO: 41872 - DNA, 21 bp, synthetic construct
  misc_feature 1..21: note = Description of Artificial Sequence: Synthetic oligonucleotide
  source 1..21: mol_type = other DNA
ctttcttctgggcggggtggt

SEQ ID NO: 41873 - DNA, 21 bp, synthetic construct
  misc_feature 1..21: note = Description of Artificial Sequence: Synthetic oligonucleotide
  source 1..21: mol_type = other DNA
actaatccgaatccgcatagg

SEQ ID NO: 41874 - DNA, 21 bp, synthetic construct
  misc_feature 1..21: note = Description of Artificial Sequence: Synthetic oligonucleotide
  source 1..21: mol_type = other DNA
gttgtgcctgagaggtctaag

SEQ ID NO: 41875 - DNA, 21 bp, synthetic construct
  misc_feature 1..21: note = Description of Artificial Sequence: Synthetic oligonucleotide
  source 1..21: mol_type = other DNA
caagtcaccggcgccagccac

SEQ ID NO: 41876 - DNA, 21 bp, synthetic construct
  misc_feature 1..21: note = Description of Artificial Sequence: Synthetic oligonucleotide
  source 1..21: mol_type = other DNA
gccgcccaacccagcctcaaa

SEQ ID NO: 41877 - DNA, 21 bp, synthetic construct
  misc_feature 1..21: note = Description of Artificial Sequence: Synthetic oligonucleotide
  source 1..21: mol_type = other DNA
cacatgaacagaaaactcgaa

SEQ ID NO: 41878 - DNA, 21 bp, synthetic construct
  misc_feature 1..21: note = Description of Artificial Sequence: Synthetic oligonucleotide
  source 1..21: mol_type = other DNA
ttgagttcggataagaatgtt

SEQ ID NO: 41879 - DNA, 21 bp, synthetic construct
  misc_feature 1..21: note = Description of Artificial Sequence: Synthetic oligonucleotide
  source 1..21: mol_type = other DNA
ccggggactgggagtaatcat

SEQ ID NO: 41880 - DNA, 21 bp, synthetic construct
  misc_feature 1..21: note = Description of Artificial Sequence: Synthetic oligonucleotide
  source 1..21: mol_type = other DNA
aatagtaatgggttgaataat

SEQ ID NO: 41881 - DNA, 21 bp, synthetic construct
  misc_feature 1..21: note = Description of Artificial Sequence: Synthetic oligonucleotide
  source 1..21: mol_type = other DNA
ggtgcgcgtccggtgcttcag

SEQ ID NO: 41882 - DNA, 21 bp, synthetic construct
  misc_feature 1..21: note = Description of Artificial Sequence: Synthetic oligonucleotide
  source 1..21: mol_type = other DNA
ttccccgtcaacgccggcgcc

SEQ ID NO: 41883 - DNA, 21 bp, synthetic construct
  misc_feature 1..21: note = Description of Artificial Sequence: Synthetic oligonucleotide
  source 1..21: mol_type = other DNA
gacaacatgagcacccccaaa

SEQ ID NO: 41884 - DNA, 21 bp, synthetic construct
  misc_feature 1..21: note = Description of Artificial Sequence: Synthetic oligonucleotide
  source 1..21: mol_type = other DNA
ctcctcgaccaacccagaaac

SEQ ID NO: 41885 - DNA, 21 bp, synthetic construct
  misc_feature 1..21: note = Description of Artificial Sequence: Synthetic oligonucleotide
  source 1..21: mol_type = other DNA
gggcttagtcctgttcttaag

SEQ ID NO: 41886 - DNA, 21 bp, synthetic construct
  misc_feature 1..21: note = Description of Artificial Sequence: Synthetic oligonucleotide
  source 1..21: mol_type = other DNA
ccgagtagtccgaattctatt

SEQ ID NO: 41887 - DNA, 21 bp, synthetic construct
  misc_feature 1..21: note = Description of Artificial Sequence: Synthetic oligonucleotide
  source 1..21: mol_type = other DNA
gtcctcgccggcagcaacacc

SEQ ID NO: 41888 - DNA, 21 bp, synthetic construct
  misc_feature 1..21: note = Description of Artificial Sequence: Synthetic oligonucleotide
  source 1..21: mol_type = other DNA
tattctcgtgttcagagtgag

SEQ ID NO: 41889 - DNA, 21 bp, synthetic construct
  misc_feature 1..21: note = Description of Artificial Sequence: Synthetic oligonucleotide
  source 1..21: mol_type = other DNA
agaccctacgaaacccaactc

SEQ ID NO: 41890 - DNA, 21 bp, synthetic construct
  misc_feature 1..21: note = Description of Artificial Sequence: Synthetic oligonucleotide
  source 1..21: mol_type = other DNA
tacggccaaaccaaaacccaa

SEQ ID NO: 41891 - DNA, 21 bp, synthetic construct
  misc_feature 1..21: note = Description of Artificial Sequence: Synthetic oligonucleotide
  source 1..21: mol_type = other DNA
tctattactgggaataggact

SEQ ID NO: 41892 - DNA, 21 bp, synthetic construct
  misc_feature 1..21: note = Description of Artificial Sequence: Synthetic oligonucleotide
  source 1..21: mol_type = other DNA
agcaaattcagcgaaaccaaa

SEQ ID NO: 41893 - DNA, 21 bp, synthetic construct
  misc_feature 1..21: note = Description of Artificial Sequence: Synthetic oligonucleotide
  source 1..21: mol_type = other DNA
catcgggttgataatcagggg

SEQ ID NO: 41894 - DNA, 21 bp, synthetic construct
  misc_feature 1..21: note = Description of Artificial Sequence: Synthetic oligonucleotide
  source 1..21: mol_type = other DNA
aaaccccaaggcagcctcgtc

SEQ ID NO: 41895 - DNA, 21 bp, synthetic construct
  misc_feature 1..21: note = Description of Artificial Sequence: Synthetic oligonucleotide
  source 1..21: mol_type = other DNA
agcggcagacaagacgtcctc

SEQ ID NO: 41896 - DNA, 21 bp, synthetic construct
  misc_feature 1..21: note = Description of Artificial Sequence: Synthetic oligonucleotide
  source 1..21: mol_type = other DNA
cccagcacccaaagcagcagc

SEQ ID NO: 41897 - DNA, 21 bp, synthetic construct
  misc_feature 1..21: note = Description of Artificial Sequence: Synthetic oligonucleotide
  source 1..21: mol_type = other DNA
agtggtagtaatactattggg

SEQ ID NO: 41898 - DNA, 21 bp, synthetic construct
  misc_feature 1..21: note = Description of Artificial Sequence: Synthetic oligonucleotide
  source 1..21: mol_type = other DNA
ggtacgaatactgggattgtt

SEQ ID NO: 41899 - DNA, 21 bp, synthetic construct
  misc_feature 1..21: note = Description of Artificial Sequence: Synthetic oligonucleotide
  source 1..21: mol_type = other DNA
ggcccccacaccgccgtcggc

SEQ ID NO: 41900 - DNA, 21 bp, synthetic construct
  misc_feature 1..21: note = Description of Artificial Sequence: Synthetic oligonucleotide
  source 1..21: mol_type = other DNA
ttcagcaacaacggcagccac

SEQ ID NO: 41901 - DNA, 21 bp, synthetic construct
  misc_feature 1..21: note = Description of Artificial Sequence: Synthetic oligonucleotide
  source 1..21: mol_type = other DNA
aattctagtcataatgtttct

SEQ ID NO: 41902 - DNA, 21 bp, synthetic construct
  misc_feature 1..21: note = Description of Artificial Sequence: Synthetic oligonucleotide
  source 1..21: mol_type = other DNA
agaatcaccagcagcaaccaa

SEQ ID NO: 41903 - DNA, 21 bp, synthetic construct
  misc_feature 1..21: note = Description of Artificial Sequence: Synthetic oligonucleotide
  source 1..21: mol_type = other DNA
atgggtgggcatacgcatacg

SEQ ID NO: 41904 - DNA, 21 bp, synthetic construct
  misc_feature 1..21: note = Description of Artificial Sequence: Synthetic oligonucleotide
  source 1..21: mol_type = other DNA
ctgcctcaggggtcgatttct

SEQ ID NO: 41905 - DNA, 21 bp, synthetic construct
  misc_feature 1..21: note = Description of Artificial Sequence: Synthetic oligonucleotide
  source 1..21: mol_type = other DNA
ggtgatactcgtctgaatgcg

SEQ ID NO: 41906 - DNA, 21 bp, synthetic construct
  misc_feature 1..21: note = Description of Artificial Sequence: Synthetic oligonucleotide
  source 1..21: mol_type = other DNA
ctgaggaatagtacgagtgtg

SEQ ID NO: 41907 - DNA, 21 bp, synthetic construct
  misc_feature 1..21: note = Description of Artificial Sequence: Synthetic oligonucleotide
  source 1..21: mol_type = other DNA
agagaaagcagccccagcctc

SEQ ID NO: 41908 - DNA, 21 bp, synthetic construct
  misc_feature 1..21: note = Description of Artificial Sequence: Synthetic oligonucleotide
  source 1..21: mol_type = other DNA
atcggccaaagcaccaacggc

SEQ ID NO: 41909 - DNA, 21 bp, synthetic construct
  misc_feature 1..21: note = Description of Artificial Sequence: Synthetic oligonucleotide
  source 1..21: mol_type = other DNA
gttgtgcctgagaggtctaag

SEQ ID NO: 41910 - DNA, 21 bp, synthetic construct
  misc_feature 1..21: note = Description of Artificial Sequence: Synthetic oligonucleotide
  source 1..21: mol_type = other DNA
aacttcagcaaccccaccgtc

SEQ ID NO: 41911 - DNA, 21 bp, synthetic construct
  misc_feature 1..21: note = Description of Artificial Sequence: Synthetic oligonucleotide
  source 1..21: mol_type = other DNA
atcacccccagcaacatcggc

SEQ ID NO: 41912 - DNA, 21 bp, synthetic construct
  misc_feature 1..21: note = Description of Artificial Sequence: Synthetic oligonucleotide
  source 1..21: mol_type = other DNA
cccaacaaccaaagcaccaga

SEQ ID NO: 41913 - DNA, 21 bp, synthetic construct
  misc_feature 1..21: note = Description of Artificial Sequence: Synthetic oligonucleotide
  source 1..21: mol_type = other DNA
ggtagggctcagcttgcgtcg

SEQ ID NO: 41914 - DNA, 21 bp, synthetic construct
  misc_feature 1..21: note = Description of Artificial Sequence: Synthetic oligonucleotide
  source 1..21: mol_type = other DNA
agttctactccgcggtctgtg

SEQ ID NO: 41915 - DNA, 21 bp, synthetic construct
  misc_feature 1..21: note = Description of Artificial Sequence: Synthetic oligonucleotide
  source 1..21: mol_type = other DNA
gaaagacccggcggcaccccc

SEQ ID NO: 41916 - DNA, 21 bp, synthetic construct
  misc_feature 1..21: note = Description of Artificial Sequence: Synthetic oligonucleotide
  source 1..21: mol_type = other DNA
gccggcgaaaacaaactcagc

SEQ ID NO: 41917 - DNA, 21 bp, synthetic construct
  misc_feature 1..21: note = Description of Artificial Sequence: Synthetic oligonucleotide
  source 1..21: mol_type = other DNA
tgtcagcctcggtctgctaat

SEQ ID NO: 41918 - DNA, 21 bp, synthetic construct
  misc_feature 1..21: note = Description of Artificial Sequence: Synthetic oligonucleotide
  source 1..21: mol_type = other DNA
caagtccccaccagaagcgac

SEQ ID NO: 41919 - DNA, 21 bp, synthetic construct
  misc_feature 1..21: note = Description of Artificial Sequence: Synthetic oligonucleotide
  source 1..21: mol_type = other DNA
gatcatcgtaatacggttcgg

SEQ ID NO: 41920 - DNA, 21 bp, synthetic construct
  misc_feature 1..21: note = Description of Artificial Sequence: Synthetic oligonucleotide
  source 1..21: mol_type = other DNA
gaaagcaacagaagccaagtc

SEQ ID NO: 41921 - DNA, 21 bp, synthetic construct
  misc_feature 1..21: note = Description of Artificial Sequence: Synthetic oligonucleotide
  source 1..21: mol_type = other DNA
cttatgcagactcatgggtct

SEQ ID NO: 41922 - DNA, 21 bp, synthetic construct
  misc_feature 1..21: note = Description of Artificial Sequence: Synthetic oligonucleotide
  source 1..21: mol_type = other DNA
tctactacgggtgattcgaag

SEQ ID NO: 41923 - DNA, 21 bp, synthetic construct
  misc_feature 1..21: note = Description of Artificial Sequence: Synthetic oligonucleotide
  source 1..21: mol_type = other DNA
cccgtcagcacccacagcagc

SEQ ID NO: 41924 - DNA, 21 bp, synthetic construct
  misc_feature 1..21: note = Description of Artificial Sequence: Synthetic oligonucleotide
  source 1..21: mol_type = other DNA
aatgaggctcggtcggcgaat

SEQ ID NO: 41925 - DNA, 21 bp, synthetic construct
  misc_feature 1..21: note = Description of Artificial Sequence: Synthetic oligonucleotide
  source 1..21: mol_type = other DNA
gcctaccccaaaaacagcaac

SEQ ID NO: 41926 - DNA, 21 bp, synthetic construct
  misc_feature 1..21: note = Description of Artificial Sequence: Synthetic oligonucleotide
  source 1..21: mol_type = other DNA
ggccaagtcaaccacaccacc

SEQ ID NO: 41927 - DNA, 21 bp, synthetic construct
  misc_feature 1..21: note = Description of Artificial Sequence: Synthetic oligonucleotide
  source 1..21: mol_type = other DNA
caagcccaaggcagcatgcaa

SEQ ID NO: 41928 - DNA, 21 bp, synthetic construct
  misc_feature 1..21: note = Description of Artificial Sequence: Synthetic oligonucleotide
  source 1..21: mol_type = other DNA
tcggtgacgccgcatgttacg

SEQ ID NO: 41929 - DNA, 21 bp, synthetic construct
  misc_feature 1..21: note = Description of Artificial Sequence: Synthetic oligonucleotide
  source 1..21: mol_type = other DNA
aattcgagttcgtctaatcat

SEQ ID NO: 41930 - DNA, 21 bp, synthetic construct
  misc_feature 1..21: note = Description of Artificial Sequence: Synthetic oligonucleotide
  source 1..21: mol_type = other DNA
tttagtgcgagtggggcgagg

SEQ ID NO: 41931 - DNA, 21 bp, synthetic construct
  misc_feature 1..21: note = Description of Artificial Sequence: Synthetic oligonucleotide
  source 1..21: mol_type = other DNA
cccgtcggcaccaaaagcggc

SEQ ID NO: 41932 - DNA, 21 bp, synthetic construct
  misc_feature 1..21: note = Description of Artificial Sequence: Synthetic oligonucleotide
  source 1..21: mol_type = other DNA
ccgcttaatgctcggggtagt

SEQ ID NO: 41933 - DNA, 21 bp, synthetic construct
  misc_feature 1..21: note = Description of Artificial Sequence: Synthetic oligonucleotide
  source 1..21: mol_type = other DNA
agacccgtcgtcgccagcacc

SEQ ID NO: 41934 - DNA, 21 bp, synthetic construct
  misc_feature 1..21: note = Description of Artificial Sequence: Synthetic oligonucleotide
  source 1..21: mol_type = other DNA
cctaatcttcagtcttcgaag

SEQ ID NO: 41935 - DNA, 21 bp, synthetic construct
  misc_feature 1..21: note = Description of Artificial Sequence: Synthetic oligonucleotide
  source 1..21: mol_type = other DNA
ggcggcctcgaccaccacgcc

SEQ ID NO: 41936 - DNA, 21 bp, synthetic construct
  misc_feature 1..21: note = Description of Artificial Sequence: Synthetic oligonucleotide
  source 1..21: mol_type = other DNA
ggccacggcaacaacggcgcc

SEQ ID NO: 41937 - DNA, 21 bp, synthetic construct
  misc_feature 1..21: note = Description of Artificial Sequence: Synthetic oligonucleotide
  source 1..21: mol_type = other DNA
agaaccctcagcgccagcagc

SEQ ID NO: 41938 - DNA, 21 bp, synthetic construct
  misc_feature 1..21: note = Description of Artificial Sequence: Synthetic oligonucleotide
  source 1..21: mol_type = other DNA
gctactgggaatgggcggggg

SEQ ID NO: 41939 - DNA, 21 bp, synthetic construct
  misc_feature 1..21: note = Description of Artificial Sequence: Synthetic oligonucleotide
  source 1..21: mol_type = other DNA
gggtcggggcatggtacgaat

SEQ ID NO: 41940 - DNA, 21 bp, synthetic construct
  misc_feature 1..21: note = Description of Artificial Sequence: Synthetic oligonucleotide
  source 1..21: mol_type = other DNA
tcgcctgggaataagctgctt

SEQ ID NO: 41941 - DNA, 21 bp, synthetic construct
  misc_feature 1..21: note = Description of Artificial Sequence: Synthetic oligonucleotide
  source 1..21: mol_type = other DNA
tcgcataattcgaaggattct

SEQ ID NO: 41942 - DNA, 21 bp, synthetic construct
  misc_feature 1..21: note = Description of Artificial Sequence: Synthetic oligonucleotide
  source 1..21: mol_type = other DNA
tacgtcagcaacagcaacgcc

SEQ ID NO: 41943 - DNA, 21 bp, synthetic construct
  misc_feature 1..21: note = Description of Artificial Sequence: Synthetic oligonucleotide
  source 1..21: mol_type = other DNA
agcagcggcagcaacagaagc

SEQ ID NO: 41944 - DNA, 21 bp, synthetic construct
  misc_feature 1..21: note = Description of Artificial Sequence: Synthetic oligonucleotide
  source 1..21: mol_type = other DNA
aacggttctggacagaataaa

SEQ ID NO: 41945 - DNA, 21 bp, synthetic construct
  misc_feature 1..21: note = Description of Artificial Sequence: Synthetic oligonucleotide
  source 1..21: mol_type = other DNA
ccttctcagactaagccgagt

SEQ ID NO: 41946 - DNA, 21 bp, synthetic construct
  misc_feature 1..21: note = Description of Artificial Sequence: Synthetic oligonucleotide
  source 1..21: mol_type = other DNA
ggtacttcgacgtctcttcgg

SEQ ID NO: 41947 - DNA, 21 bp, synthetic construct
  misc_feature 1..21: note = Description of Artificial Sequence: Synthetic oligonucleotide
  source 1..21: mol_type = other DNA
aacggcagcggcctcaaccaa

SEQ ID NO: 41948 - DNA, 21 bp, synthetic construct
  misc_feature 1..21: note = Description of Artificial Sequence: Synthetic oligonucleotide
  source 1..21: mol_type = other DNA
aatcgggttactcagagtagt

SEQ ID NO: 41949 - DNA, 21 bp, synthetic construct
  misc_feature 1..21: note = Description of Artificial Sequence: Synthetic oligonucleotide
  source 1..21: mol_type = other DNA
cagactcgtagtaatggtaat

SEQ ID NO: 41950 - DNA, 21 bp, synthetic construct
  misc_feature 1..21: note = Description of Artificial Sequence: Synthetic oligonucleotide
  source 1..21: mol_type = other DNA
agcggcagcaccaaaggccaa

SEQ ID NO: 41951 - DNA, 21 bp, synthetic construct
  misc_feature 1..21: note = Description of Artificial Sequence: Synthetic oligonucleotide
  source 1..21: mol_type = other DNA
acgccttctgtgtcgactaag

SEQ ID NO: 41952 - DNA, 21 bp, synthetic construct
  misc_feature 1..21: note = Description of Artificial Sequence: Synthetic oligonucleotide
  source 1..21: mol_type = other DNA
gcccaaatcaacacccccacc

SEQ ID NO: 41953 - DNA, 21 bp, synthetic construct
  misc_feature 1..21: note = Description of Artificial Sequence: Synthetic oligonucleotide
  source 1..21: mol_type = other DNA
gggcatgtgtctcctgctttt

SEQ ID NO: 41954 - DNA, 21 bp, synthetic construct
  misc_feature 1..21: note = Description of Artificial Sequence: Synthetic oligonucleotide
  source 1..21: mol_type = other DNA
gctccttcggcgcggccgagt

SEQ ID NO: 41955 - DNA, 21 bp, synthetic construct
  misc_feature 1..21: note = Description of Artificial Sequence: Synthetic oligonucleotide
  source 1..21: mol_type = other DNA
cccaccagcttcagcggcacc

SEQ ID NO: 41956 - DNA, 21 bp, synthetic construct
  misc_feature 1..21: note = Description of Artificial Sequence: Synthetic oligonucleotide
  source 1..21: mol_type = other DNA
cctaggttgaatgtgggtggt

SEQ ID NO: 41957 - DNA, 21 bp, synthetic construct
  misc_feature 1..21: note = Description of Artificial Sequence: Synthetic oligonucleotide
  source 1..21: mol_type = other DNA
cggcataatactattgcgggt

SEQ ID NO: 41958 - DNA, 21 bp, synthetic construct
  misc_feature 1..21: note = Description of Artificial Sequence: Synthetic oligonucleotide
  source 1..21: mol_type = other DNA
cgtggggtttcgactccgact

SEQ ID NO: 41959 - DNA, 21 bp, synthetic construct
  misc_feature 1..21: note = Description of Artificial Sequence: Synthetic oligonucleotide
  source 1..21: mol_type = other DNA
cccagagtccaccccctcgtc

SEQ ID NO: 41960 - DNA, 21 bp, synthetic construct
  misc_feature 1..21: note = Description of Artificial Sequence: Synthetic oligonucleotide
  source 1..21: mol_type = other DNA
caggataagcataatcctggt

SEQ ID NO: 41961 - DNA, 21 bp, synthetic construct
  misc_feature 1..21: note = Description of Artificial Sequence: Synthetic oligonucleotide
  source 1..21: mol_type = other DNA
aataatgctcatagttcgtct

SEQ ID NO: 41962 - DNA, 21 bp, synthetic construct
  misc_feature 1..21: note = Description of Artificial Sequence: Synthetic oligonucleotide
  source 1..21: mol_type = other DNA
gagtctcctaatcttcattcg

SEQ ID NO: 41963 - DNA, 21 bp, synthetic construct
  misc_feature 1..21: note = Description of Artificial Sequence: Synthetic oligonucleotide
  source 1..21: mol_type = other DNA
agtagggagcagggggttggg

SEQ ID NO: 41964 - DNA, 21 bp, synthetic construct
  misc_feature 1..21: note = Description of Artificial Sequence: Synthetic oligonucleotide
  source 1..21: mol_type = other DNA
aacgattctggacagaatcaa

SEQ ID NO: 41965 - DNA, 21 bp, synthetic construct
  misc_feature 1..21: note = Description of Artificial Sequence: Synthetic oligonucleotide
  source 1..21: mol_type = other DNA
agtcttactaattcggctttg

SEQ ID NO: 41966 - DNA, 21 bp, synthetic construct
  misc_feature 1..21: note = Description of Artificial Sequence: Synthetic oligonucleotide
  source 1..21: mol_type = other DNA
caaaccagaaccgacgtcacc

SEQ ID NO: 41967 - DNA, 21 bp, synthetic construct
  misc_feature 1..21: note = Description of Artificial Sequence: Synthetic oligonucleotide
  source 1..21: mol_type = other DNA
atggctcatgatggttatcgg

SEQ ID NO: 41968 - DNA, 21 bp, synthetic construct
  misc_feature 1..21: note = Description of Artificial Sequence: Synthetic oligonucleotide
  source 1..21: mol_type = other DNA
aactgttctggacagaatcaa

SEQ ID NO: 41969 - DNA, 21 bp, synthetic construct
  misc_feature 1..21: note = Description of Artificial Sequence: Synthetic oligonucleotide
  source 1..21: mol_type = other DNA
tcgatggggaattcgattagt

SEQ ID NO: 41970 - DNA, 21 bp, synthetic construct
  misc_feature 1..21: note = Description of Artificial Sequence: Synthetic oligonucleotide
  source 1..21: mol_type = other DNA
tttccggttactgggctgagt

SEQ ID NO: 41971 - DNA, 21 bp, synthetic construct
  misc_feature 1..21: note = Description of Artificial Sequence: Synthetic oligonucleotide
  source 1..21: mol_type = other DNA
gcgattcctgctgtgtctatg

SEQ ID NO: 41972 - DNA, 21 bp, synthetic construct
  misc_feature 1..21: note = Description of Artificial Sequence: Synthetic oligonucleotide
  source 1..21: mol_type = other DNA
ggtgttacttctagtgggcct

SEQ ID NO: 41973 - DNA, 21 bp, synthetic construct
  misc_feature 1..21: note = Description of Artificial Sequence: Synthetic oligonucleotide
  source 1..21: mol_type = other DNA
tctatttcgcatgctcgtgag

SEQ ID NO: 41974 - DNA, 21 bp, synthetic construct
  misc_feature 1..21: note = Description of Artificial Sequence: Synthetic oligonucleotide
  source 1..21: mol_type = other DNA
ctttcgccgacttctactaat

SEQ ID NO: 41975 - DNA, 21 bp, synthetic construct
  misc_feature 1..21: note = Description of Artificial Sequence: Synthetic oligonucleotide
  source 1..21: mol_type = other DNA
aaaagcaacagcagcctcggc

SEQ ID NO: 41976 - DNA, 21 bp, synthetic construct
  misc_feature 1..21: note = Description of Artificial Sequence: Synthetic oligonucleotide
  source 1..21: mol_type = other DNA
ggtattgatactaagatgttg

SEQ ID NO: 41977 - DNA, 21 bp, synthetic construct
  misc_feature 1..21: note = Description of Artificial Sequence: Synthetic oligonucleotide
  source 1..21: mol_type = other DNA
aacggttctggacagactcaa

SEQ ID NO: 41978 - DNA, 21 bp, synthetic construct
  misc_feature 1..21: note = Description of Artificial Sequence: Synthetic oligonucleotide
  source 1..21: mol_type = other DNA
gacggttctggacagaatcaa

SEQ ID NO: 41979 - DNA, 21 bp, synthetic construct
  misc_feature 1..21: note = Description of Artificial Sequence: Synthetic oligonucleotide
  source 1..21: mol_type = other DNA
gatattatgtctcctttgaag

SEQ ID NO: 41980 - DNA, 21 bp, synthetic construct
  misc_feature 1..21: note = Description of Artificial Sequence: Synthetic oligonucleotide
  source 1..21: mol_type = other DNA
aacggttctggacggaatcaa

SEQ ID NO: 41981 - DNA, 21 bp, synthetic construct
  misc_feature 1..21: note = Description of Artificial Sequence: Synthetic oligonucleotide
  source 1..21: mol_type = other DNA
aacggttctggacagaatcca

SEQ ID NO: 41982 - DNA, 21 bp, synthetic construct
  misc_feature 1..21: note = Description of Artificial Sequence: Synthetic oligonucleotide
  source 1..21: mol_type = other DNA
tcgccggcgagggcttctctt

SEQ ID NO: 41983 - DNA, 21 bp, synthetic construct
  misc_feature 1..21: note = Description of Artificial Sequence: Synthetic oligonucleotide
  source 1..21: mol_type = other DNA
tctattacgtctgttactaat

SEQ ID NO: 41984 - DNA, 21 bp, synthetic construct
  misc_feature 1..21: note = Description of Artificial Sequence: Synthetic oligonucleotide
  source 1..21: mol_type = other DNA
catacgtctccggggaagaat

SEQ ID NO: 41985 - DNA, 21 bp, synthetic construct
  misc_feature 1..21: note = Description of Artificial Sequence: Synthetic oligonucleotide
  source 1..21: mol_type = other DNA
cttgctagtggtactccttcg

SEQ ID NO: 41986 - DNA, 21 bp, synthetic construct
  misc_feature 1..21: note = Description of Artificial Sequence: Synthetic oligonucleotide
  source 1..21: mol_type = other DNA
aacggttctgaacagaatcaa

SEQ ID NO: 41987 - DNA, 21 bp, synthetic construct
  misc_feature 1..21: note = Description of Artificial Sequence: Synthetic oligonucleotide
  source 1..21: mol_type = other DNA
aacggtactggacagaatcaa

SEQ ID NO: 41988 - DNA, 21 bp, synthetic construct
  misc_feature 1..21: note = Description of Artificial Sequence: Synthetic oligonucleotide
  source 1..21: mol_type = other DNA
aacggcagcggccaaaaacaa

SEQ ID NO: 41989 - DNA, 21 bp, synthetic construct
  misc_feature 1..21: note = Description of Artificial Sequence: Synthetic oligonucleotide
  source 1..21: mol_type = other DNA
aacggttctggagagaatcaa

SEQ ID NO: 41990 - DNA, 21 bp, synthetic construct
  misc_feature 1..21: note = Description of Artificial Sequence: Synthetic oligonucleotide
  source 1..21: mol_type = other DNA
cgtgttacggatgctcatctt

SEQ ID NO: 41991 - DNA, 21 bp, synthetic construct
  misc_feature 1..21: note = Description of Artificial Sequence: Synthetic oligonucleotide
  source 1..21: mol_type = other DNA
aacggttgtggacagaatcaa

SEQ ID NO: 41992 - DNA, 21 bp, synthetic construct
  misc_feature 1..21: note = Description of Artificial Sequence: Synthetic oligonucleotide
  source 1..21: mol_type = other DNA
aacggttctggacagaatgaa

SEQ ID NO: 41993 - DNA, 21 bp, synthetic construct
  misc_feature 1..21: note = Description of Artificial Sequence: Synthetic oligonucleotide
  source 1..21: mol_type = other DNA
cgtctggatatttctaataag

SEQ ID NO: 41994 - DNA, 21 bp, synthetic construct
  misc_feature 1..21: note = Description of Artificial Sequence: Synthetic oligonucleotide
  source 1..21: mol_type = other DNA
catatgccttcgtgtgggggt

SEQ ID NO: 41995 - DNA, 21 bp, synthetic construct
  misc_feature 1..21: note = Description of Artificial Sequence: Synthetic oligonucleotide
  source 1..21: mol_type = other DNA
aacggttctggacataatcaa

SEQ ID NO: 41996 - DNA, 21 bp, synthetic construct
  misc_feature 1..21: note = Description of Artificial Sequence: Synthetic oligonucleotide
  source 1..21: mol_type = other DNA
aacggtgctggacagaatcaa

SEQ ID NO: 41997 - DNA, 21 bp, synthetic construct
  misc_feature 1..21: note = Description of Artificial Sequence: Synthetic oligonucleotide
  source 1..21: mol_type = other DNA
catcttggttcggattcgcgg

SEQ ID NO: 41998 - DNA, 21 bp, synthetic construct
  misc_feature 1..21: note = Description of Artificial Sequence: Synthetic oligonucleotide
  source 1..21: mol_type = other DNA
aacggttctggacaggatcaa

SEQ ID NO: 41999 - DNA, 21 bp, synthetic construct
  misc_feature 1..21: note = Description of Artificial Sequence: Synthetic oligonucleotide
  source 1..21: mol_type = other DNA
aacggttctggacagcatcaa

SEQ ID NO: 42000 - DNA, 21 bp, synthetic construct
  misc_feature 1..21: note = Description of Artificial Sequence: Synthetic oligonucleotide
  source 1..21: mol_type = other DNA
actattaagtctgttactaat

SEQ ID NO: 42001 - DNA, 21 bp, synthetic construct
  misc_feature 1..21: note = Description of Artificial Sequence: Synthetic oligonucleotide
  source 1..21: mol_type = other DNA
aacggttctggacagaatcga

SEQ ID NO: 42002 - DNA, 21 bp, synthetic construct
  misc_feature 1..21: note = Description of Artificial Sequence: Synthetic oligonucleotide
  source 1..21: mol_type = other DNA
aacggttctggacagagtcaa

SEQ ID NO: 42003 - DNA, 21 bp, synthetic construct
  misc_feature 1..21: note = Description of Artificial Sequence: Synthetic oligonucleotide
  source 1..21: mol_type = other DNA
aacgtttctggacagaatcaa

SEQ ID NO: 42004 - DNA, 21 bp, synthetic construct
  misc_feature 1..21: note = Description of Artificial Sequence: Synthetic oligonucleotide
  source 1..21: mol_type = other DNA
accggttctggacagaatcaa

SEQ ID NO: 42005 - DNA, 21 bp, synthetic construct
  misc_feature 1..21: note = Description of Artificial Sequence: Synthetic oligonucleotide
  source 1..21: mol_type = other DNA
aacggttctggacagattcaa

SEQ ID NO: 42006 - DNA, 21 bp, synthetic construct
  misc_feature 1..21: note = Description of Artificial Sequence: Synthetic oligonucleotide
  source 1..21: mol_type = other DNA
aactggtctggacagaatcaa

SEQ ID NO: 42007 - DNA, 21 bp, synthetic construct
  misc_feature 1..21: note = Description of Artificial Sequence: Synthetic oligonucleotide
  source 1..21: mol_type = other DNA
agtgctgttgggaaggcgagt

SEQ ID NO: 42008 - DNA, 21 bp, synthetic construct
  misc_feature 1..21: note = Description of Artificial Sequence: Synthetic oligonucleotide
  source 1..21: mol_type = other DNA
gccatctacagcgaatacaaa

SEQ ID NO: 42009 - DNA, 21 bp, synthetic construct
  misc_feature 1..21: note = Description of Artificial Sequence: Synthetic oligonucleotide
  source 1..21: mol_type = other DNA
aacggttatggacagaatcaa

SEQ ID NO: 42010 - DNA, 21 bp, synthetic construct
  misc_feature 1..21: note = Description of Artificial Sequence: Synthetic oligonucleotide
  source 1..21: mol_type = other DNA
aacggttctggaccgaatcaa

SEQ ID NO: 42011 - DNA, 21 bp, synthetic construct
  misc_feature 1..21: note = Description of Artificial Sequence: Synthetic oligonucleotide
  source 1..21: mol_type = other DNA
aacggttttggacagaatcaa

SEQ ID NO: 42012 - DNA, 21 bp, synthetic construct
  misc_feature 1..21: note = Description of Artificial Sequence: Synthetic oligonucleotide
  source 1..21: mol_type = other DNA
ccggggtctgggagtaataat

SEQ ID NO: 42013 - DNA, 21 bp, synthetic construct
  misc_feature 1..21: note = Description of Artificial Sequence: Synthetic oligonucleotide
  source 1..21: mol_type = other DNA
aacggttctgcacagaatcaa

SEQ ID NO: 42014 - DNA, 21 bp, synthetic construct
  misc_feature 1..21: note = Description of Artificial Sequence: Synthetic oligonucleotide
  source 1..21: mol_type = other DNA
tcgggtgcgactacgcctagg

SEQ ID NO: 42015 - DNA, 21 bp, synthetic construct
  misc_feature 1..21: note = Description of Artificial Sequence: Synthetic oligonucleotide
  source 1..21: mol_type = other DNA
acgacttatggtagtctgggg

SEQ ID NO: 42016 - DNA, 21 bp, synthetic construct
  misc_feature 1..21: note = Description of Artificial Sequence: Synthetic oligonucleotide
  source 1..21: mol_type = other DNA
atgccgagtcagagggatggt

SEQ ID NO: 42017 - DNA, 21 bp, synthetic construct
  misc_feature 1..21: note = Description of Artificial Sequence: Synthetic oligonucleotide
  source 1..21: mol_type = other DNA
agcggttctggacagaatcaa

SEQ ID NO: 42018 - DNA, 21 bp, synthetic construct
  misc_feature 1..21: note = Description of Artificial Sequence: Synthetic oligonucleotide
  source 1..21: mol_type = other DNA
aacgcttctggacagaatcaa

SEQ ID NO: 42019 - DNA, 21 bp, synthetic construct
  misc_feature 1..21: note = Description of Artificial Sequence: Synthetic oligonucleotide
  source 1..21: mol_type = other DNA
aacagttctggacagaatcaa

SEQ ID NO: 42020 - DNA, 21 bp, synthetic construct
  misc_feature 1..21: note = Description of Artificial Sequence: Synthetic oligonucleotide
  source 1..21: mol_type = other DNA
aacggtcctggacagaatcaa

SEQ ID NO: 42021 - DNA, 21 bp, synthetic construct
  misc_feature 1..21: note = Description of Artificial Sequence: Synthetic oligonucleotide
  source 1..21: mol_type = other DNA
aacggttctagacagaatcaa

SEQ ID NO: 42022 - DNA, 21 bp, synthetic construct
  misc_feature 1..21: note = Description of Artificial Sequence: Synthetic oligonucleotide
  source 1..21: mol_type = other DNA
acccccggcgccagcctcagc

SEQ ID NO: 42023 - DNA, 21 bp, synthetic construct
  misc_feature 1..21: note = Description of Artificial Sequence: Synthetic oligonucleotide
  source 1..21: mol_type = other DNA
agccccaccagccccatgaac

SEQ ID NO: 42024 - DNA, 21 bp, synthetic construct
  misc_feature 1..21: note = Description of Artificial Sequence: Synthetic oligonucleotide
  source 1..21: mol_type = other DNA
aaaggttctggacagaatcaa

SEQ ID NO: 42025 - DNA, 21 bp, synthetic construct
  misc_feature 1..21: note = Description of Artificial Sequence: Synthetic oligonucleotide
  source 1..21: mol_type = other DNA
agtggtgttgagcgggttaat

SEQ ID NO: 42026 - DNA, 21 bp, synthetic construct
  misc_feature 1..21: note = Description of Artificial Sequence: Synthetic oligonucleotide
  source 1..21: mol_type = other DNA
cgtgatacgagggagagtcag

SEQ ID NO: 42027 - DNA, 21 bp, synthetic construct
  misc_feature 1..21: note = Description of Artificial Sequence: Synthetic oligonucleotide
  source 1..21: mol_type = other DNA
gctggtgagggtatgtatgct

SEQ ID NO: 42028 - DNA, 21 bp, synthetic construct
  misc_feature 1..21: note = Description of Artificial Sequence: Synthetic oligonucleotide
  source 1..21: mol_type = other DNA
atcggcagcggccaaaaccaa

SEQ ID NO: 42029 - DNA, 21 bp, synthetic construct
  misc_feature 1..21: note = Description of Artificial Sequence: Synthetic oligonucleotide
  source 1..21: mol_type = other DNA
attaatagtggtaatggttcg

SEQ ID NO: 42030 - DNA, 21 bp, synthetic construct
  misc_feature 1..21: note = Description of Artificial Sequence: Synthetic oligonucleotide
  source 1..21: mol_type = other DNA
agcgtcagcaccaacttcagc

SEQ ID NO: 42031 - DNA, 21 bp, synthetic construct
  misc_feature 1..21: note = Description of Artificial Sequence: Synthetic oligonucleotide
  source 1..21: mol_type = other DNA
cacggttctggacagaatcaa

SEQ ID NO: 42032 - DNA, 21 bp, synthetic construct
  misc_feature 1..21: note = Description of Artificial Sequence: Synthetic oligonucleotide
  source 1..21: mol_type = other DNA
ccggggtctgggagtaatcat

SEQ ID NO: 42033 - DNA, 21 bp, synthetic construct
  misc_feature 1..21: note = Description of Artificial Sequence: Synthetic oligonucleotide
  source 1..21: mol_type = other DNA
aacggttctgtacagaatcaa

SEQ ID NO: 42034 - DNA, 21 bp, synthetic construct
  misc_feature 1..21: note = Description of Artificial Sequence: Synthetic oligonucleotide
  source 1..21: mol_type = other DNA
ttcagaagcaaagaaagcgcc

SEQ ID NO: 42035 - DNA, 21 bp, synthetic construct
  misc_feature 1..21: note = Description of Artificial Sequence: Synthetic oligonucleotide
  source 1..21: mol_type = other DNA
cagtatatgggggctaattct

SEQ ID NO: 42036 - DNA, 21 bp, synthetic construct
  misc_feature 1..21: note = Description of Artificial Sequence: Synthetic oligonucleotide
  source 1..21: mol_type = other DNA
cccttcggcagcagcgccaga

SEQ ID NO: 42037 - DNA, 21 bp, synthetic construct
  misc_feature 1..21: note = Description of Artificial Sequence: Synthetic oligonucleotide
  source 1..21: mol_type = other DNA
tcgaatgagactaagtcttcg

SEQ ID NO: 42038 - DNA, 21 bp, synthetic construct
  misc_feature 1..21: note = Description of Artificial Sequence: Synthetic oligonucleotide
  source 1..21: mol_type = other DNA
ccgggtattaatactaatagt

SEQ ID NO: 42039 - DNA, 21 bp, synthetic construct
  misc_feature 1..21: note = Description of Artificial Sequence: Synthetic oligonucleotide
  source 1..21: mol_type = other DNA
agcagaaacagccccccccaa

SEQ ID NO: 42040 - DNA, 21 bp, synthetic construct
  misc_feature 1..21: note = Description of Artificial Sequence: Synthetic oligonucleotide
  source 1..21: mol_type = other DNA
cggctggatggtctgtctcgt

SEQ ID NO: 42041 - DNA, 21 bp, synthetic construct
  misc_feature 1..21: note = Description of Artificial Sequence: Synthetic oligonucleotide
  source 1..21: mol_type = other DNA
tcgtctcaggcgcagccgact

SEQ ID NO: 42042 - DNA, 21 bp, synthetic construct
  misc_feature 1..21: note = Description of Artificial Sequence: Synthetic oligonucleotide
  source 1..21: mol_type = other DNA
catcttagtcattcgccgact

SEQ ID NO: 42043 - DNA, 21 bp, synthetic construct
  misc_feature 1..21: note = Description of Artificial Sequence: Synthetic oligonucleotide
  source 1..21: mol_type = other DNA
agggctacgccgctttctggt

SEQ ID NO: 42044 - DNA, 21 bp, synthetic construct
  misc_feature 1..21: note = Description of Artificial Sequence: Synthetic oligonucleotide
  source 1..21: mol_type = other DNA
atgggggcggtgtctgtgagt

SEQ ID NO: 42045 - DNA, 21 bp, synthetic construct
  misc_feature 1..21: note = Description of Artificial Sequence: Synthetic oligonucleotide
  source 1..21: mol_type = other DNA
gattatcataatagtaagctg

SEQ ID NO: 42046 - DNA, 21 bp, synthetic construct
  misc_feature 1..21: note = Description of Artificial Sequence: Synthetic oligonucleotide
  source 1..21: mol_type = other DNA
aaaaacgccaccggcatcctc

SEQ ID NO: 42047 - DNA, 21 bp, synthetic construct
  misc_feature 1..21: note = Description of Artificial Sequence: Synthetic oligonucleotide
  source 1..21: mol_type = other DNA
tgcaacaacgccagagtcagc

SEQ ID NO: 42048 - DNA, 21 bp, synthetic construct
  misc_feature 1..21: note = Description of Artificial Sequence: Synthetic oligonucleotide
  source 1..21: mol_type = other DNA
ggcaccgccagcggcgtcgcc

SEQ ID NO: 42049 - DNA, 21 bp, synthetic construct
  misc_feature 1..21: note = Description of Artificial Sequence: Synthetic oligonucleotide
  source 1..21: mol_type = other DNA
ggccaaagcggcagcagactc

SEQ ID NO: 42050 - DNA, 21 bp, synthetic construct
  misc_feature 1..21: note = Description of Artificial Sequence: Synthetic oligonucleotide
  source 1..21: mol_type = other DNA
aacaacgccgccacccacagc

SEQ ID NO: 42051 - DNA, 21 bp, synthetic construct
  misc_feature 1..21: note = Description of Artificial Sequence: Synthetic oligonucleotide
  source 1..21: mol_type = other DNA
cccggcagcggcagcaaacac

SEQ ID NO: 42052 - DNA, 21 bp, synthetic construct
  misc_feature 1..21: note = Description of Artificial Sequence: Synthetic oligonucleotide
  source 1..21: mol_type = other DNA
gcgcgggctagttctaattcg

SEQ ID NO: 42053 - DNA, 21 bp, synthetic construct
  misc_feature 1..21: note = Description of Artificial Sequence: Synthetic oligonucleotide
  source 1..21: mol_type = other DNA
gaacccctcagcaaacaaagc

SEQ ID NO: 42054 - DNA, 21 bp, synthetic construct
  misc_feature 1..21: note = Description of Artificial Sequence: Synthetic oligonucleotide
  source 1..21: mol_type = other DNA
tacagcagacccaccaccacc

SEQ ID NO: 42055 - DNA, 21 bp, synthetic construct
  misc_feature 1..21: note = Description of Artificial Sequence: Synthetic oligonucleotide
  source 1..21: mol_type = other DNA
aacaggtctggacagaatcaa

SEQ ID NO: 42056 - DNA, 21 bp, synthetic construct
  misc_feature 1..21: note = Description of Artificial Sequence: Synthetic oligonucleotide
  source 1..21: mol_type = other DNA
gaatacccccaacaagccaaa

SEQ ID NO: 42057 - DNA, 21 bp, synthetic construct
  misc_feature 1..21: note = Description of Artificial Sequence: Synthetic oligonucleotide
  source 1..21: mol_type = other DNA
atggggggtgttacgtcttct

SEQ ID NO: 42058 - DNA, 21 bp, synthetic construct
  misc_feature 1..21: note = Description of Artificial Sequence: Synthetic oligonucleotide
  source 1..21: mol_type = other DNA
cacaccgacatcaaccaccaa

SEQ ID NO: 42059 - DNA, 21 bp, synthetic construct
  misc_feature 1..21: note = Description of Artificial Sequence: Synthetic oligonucleotide
  source 1..21: mol_type = other DNA
catgtgcatgatgggaggact

SEQ ID NO: 42060 - DNA, 21 bp, synthetic construct
  misc_feature 1..21: note = Description of Artificial Sequence: Synthetic oligonucleotide
  source 1..21: mol_type = other DNA
gaaagcgccacccccatcaga

SEQ ID NO: 42061 - DNA, 21 bp, synthetic construct
  misc_feature 1..21: note = Description of Artificial Sequence: Synthetic oligonucleotide
  source 1..21: mol_type = other DNA
tacggttctggacagaatcaa

SEQ ID NO: 42062 - DNA, 21 bp, synthetic construct
  misc_feature 1..21: note = Description of Artificial Sequence: Synthetic oligonucleotide
  source 1..21: mol_type = other DNA
gttccttctcagagtcttcat

SEQ ID NO: 42063 - DNA, 21 bp, synthetic construct
  misc_feature 1..21: note = Description of Artificial Sequence: Synthetic oligonucleotide
  source 1..21: mol_type = other DNA
agcaacacccacagccccagc

SEQ ID NO: 42064 - DNA, 21 bp, synthetic construct
  misc_feature 1..21: note = Description of Artificial Sequence: Synthetic oligonucleotide
  source 1..21: mol_type = other DNA
ggtcagactcttcctatttgt

SEQ ID NO: 42065 - DNA, 21 bp, synthetic construct
  misc_feature 1..21: note = Description of Artificial Sequence: Synthetic oligonucleotide
  source 1..21: mol_type = other DNA
aaggtggataagaggactgat

SEQ ID NO: 42066 - DNA, 21 bp, synthetic construct
  misc_feature 1..21: note = Description of Artificial Sequence: Synthetic oligonucleotide
  source 1..21: mol_type = other DNA
cggacgggtagttatacgcag

SEQ ID NO: 42067 - DNA, 21 bp, synthetic construct
  misc_feature 1..21: note = Description of Artificial Sequence: Synthetic oligonucleotide
  source 1..21: mol_type = other DNA
aacggcagaccccaattcaga

SEQ ID NO: 42068 - DNA, 21 bp, synthetic construct
  misc_feature 1..21: note = Description of Artificial Sequence: Synthetic oligonucleotide
  source 1..21: mol_type = other DNA
gatccggttacgaggaagagg

SEQ ID NO: 42069 - DNA, 21 bp, synthetic construct
  misc_feature 1..21: note = Description of Artificial Sequence: Synthetic oligonucleotide
  source 1..21: mol_type = other DNA
gccgacagcaacagacccggc

SEQ ID NO: 42070 - DNA, 21 bp, synthetic construct
  misc_feature 1..21: note = Description of Artificial Sequence: Synthetic oligonucleotide
  source 1..21: mol_type = other DNA
atcacccccggcggccacagc

SEQ ID NO: 42071 - DNA, 21 bp, synthetic construct
  misc_feature 1..21: note = Description of Artificial Sequence: Synthetic oligonucleotide
  source 1..21: mol_type = other DNA
aagcatgagggttataatgtg

SEQ ID NO: 42072 - DNA, 21 bp, synthetic construct
  misc_feature 1..21: note = Description of Artificial Sequence: Synthetic oligonucleotide
  source 1..21: mol_type = other DNA
atcaaactcgacaaacaaatc

SEQ ID NO: 42073 - DNA, 21 bp, synthetic construct
  misc_feature 1..21: note = Description of Artificial Sequence: Synthetic oligonucleotide
  source 1..21: mol_type = other DNA
cccagaagcaacaaatacccc

SEQ ID NO: 42074 - DNA, 21 bp, synthetic construct
  misc_feature 1..21: note = Description of Artificial Sequence: Synthetic oligonucleotide
  source 1..21: mol_type = other DNA
aagattaatactcgtaatatg

SEQ ID NO: 42075 - DNA, 21 bp, synthetic construct
  misc_feature 1..21: note = Description of Artificial Sequence: Synthetic oligonucleotide
  source 1..21: mol_type = other DNA
tttcattctagggatagttct

SEQ ID NO: 42076 - DNA, 21 bp, synthetic construct
  misc_feature 1..21: note = Description of Artificial Sequence: Synthetic oligonucleotide
  source 1..21: mol_type = other DNA
tatattaagtctgttactaat

SEQ ID NO: 42077 - DNA, 21 bp, synthetic construct
  misc_feature 1..21: note = Description of Artificial Sequence: Synthetic oligonucleotide
  source 1..21: mol_type = other DNA
aaccccggcagacaacaattc

SEQ ID NO: 42078 - DNA, 21 bp, synthetic construct
  misc_feature 1..21: note = Description of Artificial Sequence: Synthetic oligonucleotide
  source 1..21: mol_type = other DNA
atcatccaaaaccaaagcaaa

SEQ ID NO: 42079 - DNA, 21 bp, synthetic construct
  misc_feature 1..21: note = Description of Artificial Sequence: Synthetic oligonucleotide
  source 1..21: mol_type = other DNA
accagcagcggccacagcgtc

SEQ ID NO: 42080 - DNA, 21 bp, synthetic construct
  misc_feature 1..21: note = Description of Artificial Sequence: Synthetic oligonucleotide
  source 1..21: mol_type = other DNA
tacagaaaacacaccagcacc

SEQ ID NO: 42081 - DNA, 21 bp, synthetic construct
  misc_feature 1..21: note = Description of Artificial Sequence: Synthetic oligonucleotide
  source 1..21: mol_type = other DNA
agcatgaccagcagaaacagc

SEQ ID NO: 42082 - DNA, 21 bp, synthetic construct
  misc_feature 1..21: note = Description of Artificial Sequence: Synthetic oligonucleotide
  source 1..21: mol_type = other DNA
gaccaaaaaaccgtcaacaga

SEQ ID NO: 42083 - DNA, 21 bp, synthetic construct
  misc_feature 1..21: note = Description of Artificial Sequence: Synthetic oligonucleotide
  source 1..21: mol_type = other DNA
aattcggggaggaattctgtt

SEQ ID NO: 42084 - DNA, 21 bp, synthetic construct
  misc_feature 1..21: note = Description of Artificial Sequence: Synthetic oligonucleotide
  source 1..21: mol_type = other DNA
cctgagattggtaagcagcgg

SEQ ID NO: 42085 - DNA, 21 bp, synthetic construct
  misc_feature 1..21: note = Description of Artificial Sequence: Synthetic oligonucleotide
  source 1..21: mol_type = other DNA
cccatcagcagcagagccggc

SEQ ID NO: 42086 - DNA, 21 bp, synthetic construct
  misc_feature 1..21: note = Description of Artificial Sequence: Synthetic oligonucleotide
  source 1..21: mol_type = other DNA
aatggttttaatagtaataat

SEQ ID NO: 42087 - DNA, 21 bp, synthetic construct
  misc_feature 1..21: note = Description of Artificial Sequence: Synthetic oligonucleotide
  source 1..21: mol_type = other DNA
ttccccggcggcaaccacacc

SEQ ID NO: 42088 - DNA, 21 bp, synthetic construct
  misc_feature 1..21: note = Description of Artificial Sequence: Synthetic oligonucleotide
  source 1..21: mol_type = other DNA
tcttctgggggtaatatgagt

SEQ ID NO: 42089 - DNA, 21 bp, synthetic construct
  misc_feature 1..21: note = Description of Artificial Sequence: Synthetic oligonucleotide
  source 1..21: mol_type = other DNA
tataatcggacttctattgtg

SEQ ID NO: 42090 - DNA, 21 bp, synthetic construct
  misc_feature 1..21: note = Description of Artificial Sequence: Synthetic oligonucleotide
  source 1..21: mol_type = other DNA
atgagcagaagcgaccccccc

SEQ ID NO: 42091 - DNA, 21 bp, synthetic construct
  misc_feature 1..21: note = Description of Artificial Sequence: Synthetic oligonucleotide
  source 1..21: mol_type = other DNA
agtccgaatgcgaagcgtgtt

SEQ ID NO: 42092 - DNA, 21 bp, synthetic construct
  misc_feature 1..21: note = Description of Artificial Sequence: Synthetic oligonucleotide
  source 1..21: mol_type = other DNA
agacaactccccagcggcctc

SEQ ID NO: 42093 - DNA, 21 bp, synthetic construct
  misc_feature 1..21: note = Description of Artificial Sequence: Synthetic oligonucleotide
  source 1..21: mol_type = other DNA
ggcagctacagcaaccccacc

SEQ ID NO: 42094 - DNA, 21 bp, synthetic construct
  misc_feature 1..21: note = Description of Artificial Sequence: Synthetic oligonucleotide
  source 1..21: mol_type = other DNA
ggccaaaacagaaacaacacc

SEQ ID NO: 42095 - DNA, 21 bp, synthetic construct
  misc_feature 1..21: note = Description of Artificial Sequence: Synthetic oligonucleotide
  source 1..21: mol_type = other DNA
agcaactacaaaagcagcaac

SEQ ID NO: 42096 - DNA, 21 bp, synthetic construct
  misc_feature 1..21: note = Description of Artificial Sequence: Synthetic oligonucleotide
  source 1..21: mol_type = other DNA
atgccccaccccagcagcaaa

SEQ ID NO: 42097 - DNA, 21 bp, synthetic construct
  misc_feature 1..21: note = Description of Artificial Sequence: Synthetic oligonucleotide
  source 1..21: mol_type = other DNA
aagattccgaattatgatcgt

SEQ ID NO: 42098 - DNA, 21 bp, synthetic construct
  misc_feature 1..21: note = Description of Artificial Sequence: Synthetic oligonucleotide
  source 1..21: mol_type = other DNA
agcagagaaaaaaacaacgcc

SEQ ID NO: 42099 - DNA, 21 bp, synthetic construct
  misc_feature 1..21: note = Description of Artificial Sequence: Synthetic oligonucleotide
  source 1..21: mol_type = other DNA
atgagcctcagcaaaaaccac

SEQ ID NO: 42100 - DNA, 21 bp, synthetic construct
  misc_feature 1..21: note = Description of Artificial Sequence: Synthetic oligonucleotide
  source 1..21: mol_type = other DNA
aaaatcagcagccccttcatc

SEQ ID NO: 42101 - DNA, 21 bp, synthetic construct
  misc_feature 1..21: note = Description of Artificial Sequence: Synthetic oligonucleotide
  source 1..21: mol_type = other DNA
aatccttctatggctatgaag

SEQ ID NO: 42102 - DNA, 21 bp, synthetic construct
  misc_feature 1..21: note = Description of Artificial Sequence: Synthetic oligonucleotide
  source 1..21: mol_type = other DNA
cgtgttagttctccgtctaat

SEQ ID NO: 42103 - DNA, 21 bp, synthetic construct
  misc_feature 1..21: note = Description of Artificial Sequence: Synthetic oligonucleotide
  source 1..21: mol_type = other DNA
cggacttattctcctcagatt

SEQ ID NO: 42104 - DNA, 21 bp, synthetic construct
  misc_feature 1..21: note = Description of Artificial Sequence: Synthetic oligonucleotide
  source 1..21: mol_type = other DNA
aggaatgataagcagaattcg

SEQ ID NO: 42105 - DNA, 21 bp, synthetic construct
  misc_feature 1..21: note = Description of Artificial Sequence: Synthetic oligonucleotide
  source 1..21: mol_type = other DNA
gagcagggttcgggtaatcat

SEQ ID NO: 42106 - DNA, 21 bp, synthetic construct
  misc_feature 1..21: note = Description of Artificial Sequence: Synthetic oligonucleotide
  source 1..21: mol_type = other DNA
gacccccccaaaggcagcaga

SEQ ID NO: 42107 - DNA, 21 bp, synthetic construct
  misc_feature 1..21: note = Description of Artificial Sequence: Synthetic oligonucleotide
  source 1..21: mol_type = other DNA
actattaagtctgttactaat

SEQ ID NO: 42108 - DNA, 21 bp, synthetic construct
  misc_feature 1..21: note = Description of Artificial Sequence: Synthetic oligonucleotide
  source 1..21: mol_type = other DNA
agcatcaaagaaaaaaccaga

SEQ ID NO: 42109 - DNA, 21 bp, synthetic construct
  misc_feature 1..21: note = Description of Artificial Sequence: Synthetic oligonucleotide
  source 1..21: mol_type = other DNA
cagagttctattcatacgaag

SEQ ID NO: 42110 - DNA, 21 bp, synthetic construct
  misc_feature 1..21: note = Description of Artificial Sequence: Synthetic oligonucleotide
  source 1..21: mol_type = other DNA
ttcggcagaaccaaccaaggc

SEQ ID NO: 42111 - DNA, 21 bp, synthetic construct
  misc_feature 1..21: note = Description of Artificial Sequence: Synthetic oligonucleotide
  source 1..21: mol_type = other DNA
accaaaaacagcacccacggc

SEQ ID NO: 42112 - DNA, 21 bp, synthetic construct
  misc_feature 1..21: note = Description of Artificial Sequence: Synthetic oligonucleotide
  source 1..21: mol_type = other DNA
gctcatcagtctcttgatagg

SEQ ID NO: 42113 - DNA, 21 bp, synthetic construct
  misc_feature 1..21: note = Description of Artificial Sequence: Synthetic oligonucleotide
  source 1..21: mol_type = other DNA
aacagacacgaaagagtcatc

SEQ ID NO: 42114 - DNA, 21 bp, synthetic construct
  misc_feature 1..21: note = Description of Artificial Sequence: Synthetic oligonucleotide
  source 1..21: mol_type = other DNA
tatagtagtcggagtgggccg

SEQ ID NO: 42115 - DNA, 21 bp, synthetic construct
  misc_feature 1..21: note = Description of Artificial Sequence: Synthetic oligonucleotide
  source 1..21: mol_type = other DNA
cccagcagcggccacagcaga

SEQ ID NO: 42116 - DNA, 21 bp, synthetic construct
  misc_feature 1..21: note = Description of Artificial Sequence: Synthetic oligonucleotide
  source 1..21: mol_type = other DNA
accggcagcggcagactcctc

SEQ ID NO: 42117 - DNA, 21 bp, synthetic construct
  misc_feature 1..21: note = Description of Artificial Sequence: Synthetic oligonucleotide
  source 1..21: mol_type = other DNA
acgaagtctactagtcatgtt

SEQ ID NO: 42118 - DNA, 21 bp, synthetic construct
  misc_feature 1..21: note = Description of Artificial Sequence: Synthetic oligonucleotide
  source 1..21: mol_type = other DNA
atcagaagcaccagcggcggc

SEQ ID NO: 42119 - DNA, 21 bp, synthetic construct
  misc_feature 1..21: note = Description of Artificial Sequence: Synthetic oligonucleotide
  source 1..21: mol_type = other DNA
tatgtgaggcctggtactggt

SEQ ID NO: 42120 - DNA, 21 bp, synthetic construct
  misc_feature 1..21: note = Description of Artificial Sequence: Synthetic oligonucleotide
  source 1..21: mol_type = other DNA
gttcatgtgacgagtcagact

SEQ ID NO: 42121 - DNA, 21 bp, synthetic construct
  misc_feature 1..21: note = Description of Artificial Sequence: Synthetic oligonucleotide
  source 1..21: mol_type = other DNA
tgtgctgctaaggggattcgg

SEQ ID NO: 42122 - DNA, 21 bp, synthetic construct
  misc_feature 1..21: note = Description of Artificial Sequence: Synthetic oligonucleotide
  source 1..21: mol_type = other DNA
agggcgcctaagagttcttct

SEQ ID NO: 42123 - DNA, 21 bp, synthetic construct
  misc_feature 1..21: note = Description of Artificial Sequence: Synthetic oligonucleotide
  source 1..21: mol_type = other DNA
aatctgggtcggcaggttggg

SEQ ID NO: 42124 - DNA, 21 bp, synthetic construct
  misc_feature 1..21: note = Description of Artificial Sequence: Synthetic oligonucleotide
  source 1..21: mol_type = other DNA
cctttggagcgtactactaag

SEQ ID NO: 42125 - DNA, 21 bp, synthetic construct
  misc_feature 1..21: note = Description of Artificial Sequence: Synthetic oligonucleotide
  source 1..21: mol_type = other DNA
gacagcaccctcggccaaagc

SEQ ID NO: 42126 - DNA, 21 bp, synthetic construct
  misc_feature 1..21: note = Description of Artificial Sequence: Synthetic oligonucleotide
  source 1..21: mol_type = other DNA
aacaacagaagcggcatgggc

SEQ ID NO: 42127 - DNA, 21 bp, synthetic construct
  misc_feature 1..21: note = Description of Artificial Sequence: Synthetic oligonucleotide
  source 1..21: mol_type = other DNA
cccggcagagaaaaaaccgtc

SEQ ID NO: 42128 - DNA, 21 bp, synthetic construct
  misc_feature 1..21: note = Description of Artificial Sequence: Synthetic oligonucleotide
  source 1..21: mol_type = other DNA
tataataagaatgctcagttg

SEQ ID NO: 42129 - DNA, 21 bp, synthetic construct
  misc_feature 1..21: note = Description of Artificial Sequence: Synthetic oligonucleotide
  source 1..21: mol_type = other DNA
ttccccctcaaactcggcaga

SEQ ID NO: 42130 - DNA, 21 bp, synthetic construct
  misc_feature 1..21: note = Description of Artificial Sequence: Synthetic oligonucleotide
  source 1..21: mol_type = other DNA
aagattgcttcgaagtcggag

SEQ ID NO: 42131 - DNA, 21 bp, synthetic construct
  misc_feature 1..21: note = Description of Artificial Sequence: Synthetic oligonucleotide
  source 1..21: mol_type = other DNA
tcttatgggaaggggagttct

SEQ ID NO: 42132 - DNA, 21 bp, synthetic construct
  misc_feature 1..21: note = Description of Artificial Sequence: Synthetic oligonucleotide
  source 1..21: mol_type = other DNA
tttcggcagactagtgggaat

SEQ ID NO: 42133 - DNA, 21 bp, synthetic construct
  misc_feature 1..21: note = Description of Artificial Sequence: Synthetic oligonucleotide
  source 1..21: mol_type = other DNA
atgaatcggactgggattaag

SEQ ID NO: 42134 - DNA, 21 bp, synthetic construct
  misc_feature 1..21: note = Description of Artificial Sequence: Synthetic oligonucleotide
  source 1..21: mol_type = other DNA
ggtccgaatcagtcgggtcgg

SEQ ID NO: 42135 - DNA, 21 bp, synthetic construct
  misc_feature 1..21: note = Description of Artificial Sequence: Synthetic oligonucleotide
  source 1..21: mol_type = other DNA
attaggtcgaaggcgtctgcg

SEQ ID NO: 42136 - DNA, 21 bp, synthetic construct
  misc_feature 1..21: note = Description of Artificial Sequence: Synthetic oligonucleotide
  source 1..21: mol_type = other DNA
gccagcagaagcaccaacccc

SEQ ID NO: 42137 - DNA, 21 bp, synthetic construct
  misc_feature 1..21: note = Description of Artificial Sequence: Synthetic oligonucleotide
  source 1..21: mol_type = other DNA
gacagatacaacagacaactc

SEQ ID NO: 42138 - DNA, 21 bp, synthetic construct
  misc_feature 1..21: note = Description of Artificial Sequence: Synthetic oligonucleotide
  source 1..21: mol_type = other DNA
cacatcaccggcagacaactc

SEQ ID NO: 42139 - DNA, 21 bp, synthetic construct
  misc_feature 1..21: note = Description of Artificial Sequence: Synthetic oligonucleotide
  source 1..21: mol_type = other DNA
agagtcgaaagccccaccaac

SEQ ID NO: 42140 - DNA, 21 bp, synthetic construct
  misc_feature 1..21: note = Description of Artificial Sequence: Synthetic oligonucleotide
  source 1..21: mol_type = other DNA
aatgcgcagggtactgctaag

SEQ ID NO: 42141 - DNA, 21 bp, synthetic construct
  misc_feature 1..21: note = Description of Artificial Sequence: Synthetic oligonucleotide
  source 1..21: mol_type = other DNA
gccaaaaccaacctcagaagc

SEQ ID NO: 42142 - DNA, 21 bp, synthetic construct
  misc_feature 1..21: note = Description of Artificial Sequence: Synthetic oligonucleotide
  source 1..21: mol_type = other DNA
ctcatcaacgccacccacaga

SEQ ID NO: 42143 - DNA, 21 bp, synthetic construct
  misc_feature 1..21: note = Description of Artificial Sequence: Synthetic oligonucleotide
  source 1..21: mol_type = other DNA
catgcttcgagggttaatatt

SEQ ID NO: 42144 - DNA, 21 bp, synthetic construct
  misc_feature 1..21: note = Description of Artificial Sequence: Synthetic oligonucleotide
  source 1..21: mol_type = other DNA
tttaatgggttgagtactcag

SEQ ID NO: 42145 - DNA, 21 bp, synthetic construct
  misc_feature 1..21: note = Description of Artificial Sequence: Synthetic oligonucleotide
  source 1..21: mol_type = other DNA
attcagaatagttctaatact

SEQ ID NO: 42146 - DNA, 21 bp, synthetic construct
  misc_feature 1..21: note = Description of Artificial Sequence: Synthetic oligonucleotide
  source 1..21: mol_type = other DNA
cattataatcagactggtttg

SEQ ID NO: 42147 - DNA, 21 bp, synthetic construct
  misc_feature 1..21: note = Description of Artificial Sequence: Synthetic oligonucleotide
  source 1..21: mol_type = other DNA
aacgccaccagccccagaaaa

SEQ ID NO: 42148 - DNA, 21 bp, synthetic construct
  misc_feature 1..21: note = Description of Artificial Sequence: Synthetic oligonucleotide
  source 1..21: mol_type = other DNA
catctgagggataagtattcg

SEQ ID NO: 42149 - DNA, 21 bp, synthetic construct
  misc_feature 1..21: note = Description of Artificial Sequence: Synthetic oligonucleotide
  source 1..21: mol_type = other DNA
gaagtcaccaacagccccaga

SEQ ID NO: 42150 - DNA, 21 bp, synthetic construct
  misc_feature 1..21: note = Description of Artificial Sequence: Synthetic oligonucleotide
  source 1..21: mol_type = other DNA
gggagtaatcgtaatcatgct

SEQ ID NO: 42151 - DNA, 21 bp, synthetic construct
  misc_feature 1..21: note = Description of Artificial Sequence: Synthetic oligonucleotide
  source 1..21: mol_type = other DNA
ttcaacatgcaaagaagccaa

SEQ ID NO: 42152 - DNA, 21 bp, synthetic construct
  misc_feature 1..21: note = Description of Artificial Sequence: Synthetic oligonucleotide
  source 1..21: mol_type = other DNA
agcgtctacacccacagcctc

SEQ ID NO: 42153 - DNA, 21 bp, synthetic construct
  misc_feature 1..21: note = Description of Artificial Sequence: Synthetic oligonucleotide
  source 1..21: mol_type = other DNA
catgctgctaggccgttggtt

SEQ ID NO: 42154 - DNA, 21 bp, synthetic construct
  misc_feature 1..21: note = Description of Artificial Sequence: Synthetic oligonucleotide
  source 1..21: mol_type = other DNA
agagccaccgaaggcgtcttc

SEQ ID NO: 42155 - DNA, 21 bp, synthetic construct
  misc_feature 1..21: note = Description of Artificial Sequence: Synthetic oligonucleotide
  source 1..21: mol_type = other DNA
gcccacagaaacatcagcagc

SEQ ID NO: 42156 - DNA, 21 bp, synthetic construct
  misc_feature 1..21: note = Description of Artificial Sequence: Synthetic oligonucleotide
  source 1..21: mol_type = other DNA
aatcggtcgacggattttaag

SEQ ID NO: 42157 - DNA, 21 bp, synthetic construct
  misc_feature 1..21: note = Description of Artificial Sequence: Synthetic oligonucleotide
  source 1..21: mol_type = other DNA
agagccagcggccccttcgtc

SEQ ID NO: 42158 - DNA, 21 bp, synthetic construct
  misc_feature 1..21: note = Description of Artificial Sequence: Synthetic oligonucleotide
  source 1..21: mol_type = other DNA
tgtattagggctggttcttgt

SEQ ID NO: 42159 - DNA, 21 bp, synthetic construct
  misc_feature 1..21: note = Description of Artificial Sequence: Synthetic oligonucleotide
  source 1..21: mol_type = other DNA
atgcccctcaaaccccacctc

SEQ ID NO: 42160 - DNA, 21 bp, synthetic construct
  misc_feature 1..21: note = Description of Artificial Sequence: Synthetic oligonucleotide
  source 1..21: mol_type = other DNA
tttacgtttaatgcggcgact

SEQ ID NO: 42161 - DNA, 21 bp, synthetic construct
  misc_feature 1..21: note = Description of Artificial Sequence: Synthetic oligonucleotide
  source 1..21: mol_type = other DNA
atggtttcgggtaagagttat

SEQ ID NO: 42162 - DNA, 21 bp, synthetic construct
  misc_feature 1..21: note = Description of Artificial Sequence: Synthetic oligonucleotide
  source 1..21: mol_type = other DNA
tcttcggcgggtcatagtaag

SEQ ID NO: 42163 - DNA, 21 bp, synthetic construct
  misc_feature 1..21: note = Description of Artificial Sequence: Synthetic oligonucleotide
  source 1..21: mol_type = other DNA
ttcaacagcagcagcagcaaa

SEQ ID NO: 42164 - DNA, 21 bp, synthetic construct
  misc_feature 1..21: note = Description of Artificial Sequence: Synthetic oligonucleotide
  source 1..21: mol_type = other DNA
cagattactccgcggagtggg

SEQ ID NO: 42165 - DNA, 21 bp, synthetic construct
  misc_feature 1..21: note = Description of Artificial Sequence: Synthetic oligonucleotide
  source 1..21: mol_type = other DNA
aattctggtactcattttaag

SEQ ID NO: 42166 - DNA, 21 bp, synthetic construct
  misc_feature 1..21: note = Description of Artificial Sequence: Synthetic oligonucleotide
  source 1..21: mol_type = other DNA
cttggtaatgcgcatcagctt

SEQ ID NO: 42167 - DNA, 21 bp, synthetic construct
  misc_feature 1..21: note = Description of Artificial Sequence: Synthetic oligonucleotide
  source 1..21: mol_type = other DNA
cacgacagcaaagtcatcagc

SEQ ID NO: 42168 - DNA, 21 bp, synthetic construct
  misc_feature 1..21: note = Description of Artificial Sequence: Synthetic oligonucleotide
  source 1..21: mol_type = other DNA
catcagcttaagaatagtgtg

SEQ ID NO: 42169 - DNA, 21 bp, synthetic construct
  misc_feature 1..21: note = Description of Artificial Sequence: Synthetic oligonucleotide
  source 1..21: mol_type = other DNA
agcgcccacaacagaagcgtc

SEQ ID NO: 42170 - DNA, 21 bp, synthetic construct
  misc_feature 1..21: note = Description of Artificial Sequence: Synthetic oligonucleotide
  source 1..21: mol_type = other DNA
tatgggaatcctaggcaggct

SEQ ID NO: 42171 - DNA, 21 bp, synthetic construct
  misc_feature 1..21: note = Description of Artificial Sequence: Synthetic oligonucleotide
  source 1..21: mol_type = other DNA
tgcctcggcagacccatggcc

SEQ ID NO: 42172 - DNA, 21 bp, synthetic construct
  misc_feature 1..21: note = Description of Artificial Sequence: Synthetic oligonucleotide
  source 1..21: mol_type = other DNA
tctgttcagaagtcggttaat

SEQ ID NO: 42173 - DNA, 21 bp, synthetic construct
  misc_feature 1..21: note = Description of Artificial Sequence: Synthetic oligonucleotide
  source 1..21: mol_type = other DNA
cctgtgggttctggtgtgcct

SEQ ID NO: 42174 - DNA, 21 bp, synthetic construct
  misc_feature 1..21: note = Description of Artificial Sequence: Synthetic oligonucleotide
  source 1..21: mol_type = other DNA
catggttctaagccgtatatt

SEQ ID NO: 42175 - DNA, 21 bp, synthetic construct
  misc_feature 1..21: note = Description of Artificial Sequence: Synthetic oligonucleotide
  source 1..21: mol_type = other DNA
tctcctggtaataagagtact

SEQ ID NO: 42176 - DNA, 21 bp, synthetic construct
  misc_feature 1..21: note = Description of Artificial Sequence: Synthetic oligonucleotide
  source 1..21: mol_type = other DNA
tctttgggttctggttttcag

SEQ ID NO: 42177 - DNA, 21 bp, synthetic construct
  misc_feature 1..21: note = Description of Artificial Sequence: Synthetic oligonucleotide
  source 1..21: mol_type = other DNA
cccgacatcggcaaacaaaga

SEQ ID NO: 42178 - DNA, 21 bp, synthetic construct
  misc_feature 1..21: note = Description of Artificial Sequence: Synthetic oligonucleotide
  source 1..21: mol_type = other DNA
agggtgactaatgcgcggaat

SEQ ID NO: 42179 - DNA, 21 bp, synthetic construct
  misc_feature 1..21: note = Description of Artificial Sequence: Synthetic oligonucleotide
  source 1..21: mol_type = other DNA
tctttttcgaagggttctagt

SEQ ID NO: 42180 - DNA, 21 bp, synthetic construct
  misc_feature 1..21: note = Description of Artificial Sequence: Synthetic oligonucleotide
  source 1..21: mol_type = other DNA
gtgcctggtaagtctgcgcag

SEQ ID NO: 42181 - DNA, 21 bp, synthetic construct
  misc_feature 1..21: note = Description of Artificial Sequence: Synthetic oligonucleotide
  source 1..21: mol_type = other DNA
acgagtaagcctaattctccg

SEQ ID NO: 42182 - DNA, 21 bp, synthetic construct
  misc_feature 1..21: note = Description of Artificial Sequence: Synthetic oligonucleotide
  source 1..21: mol_type = other DNA
tcgcctgagaagaatatgcgg

SEQ ID NO: 42183 - DNA, 21 bp, synthetic construct
  misc_feature 1..21: note = Description of Artificial Sequence: Synthetic oligonucleotide
  source 1..21: mol_type = other DNA
caggggtctgggagtaatcat

SEQ ID NO: 42184 - DNA, 21 bp, synthetic construct
  misc_feature 1..21: note = Description of Artificial Sequence: Synthetic oligonucleotide
  source 1..21: mol_type = other DNA
tgtcagtctcggtcgggtgcg

SEQ ID NO: 42185 - DNA, 21 bp, synthetic construct
  misc_feature 1..21: note = Description of Artificial Sequence: Synthetic oligonucleotide
  source 1..21: mol_type = other DNA
cccagcaccgaaagaaacaga

SEQ ID NO: 42186 - DNA, 21 bp, synthetic construct
  misc_feature 1..21: note = Description of Artificial Sequence: Synthetic oligonucleotide
  source 1..21: mol_type = other DNA
gccctcggccacaaccacaac

SEQ ID NO: 42187 - DNA, 21 bp, synthetic construct
  misc_feature 1..21: note = Description of Artificial Sequence: Synthetic oligonucleotide
  source 1..21: mol_type = other DNA
cagcctattattagtcctacg

SEQ ID NO: 42188 - DNA, 21 bp, synthetic construct
  misc_feature 1..21: note = Description of Artificial Sequence: Synthetic oligonucleotide
  source 1..21: mol_type = other DNA
gtgagtggtcaggggaattct

SEQ ID NO: 42189 - DNA, 21 bp, synthetic construct
  misc_feature 1..21: note = Description of Artificial Sequence: Synthetic oligonucleotide
  source 1..21: mol_type = other DNA
gctgttaatactaaggcgctt

SEQ ID NO: 42190 - DNA, 21 bp, synthetic construct
  misc_feature 1..21: note = Description of Artificial Sequence: Synthetic oligonucleotide
  source 1..21: mol_type = other DNA
cttaatgttggttctgtgagg

SEQ ID NO: 42191 - DNA, 21 bp, synthetic construct
  misc_feature 1..21: note = Description of Artificial Sequence: Synthetic oligonucleotide
  source 1..21: mol_type = other DNA
ttgcatgatggtcagactcgt

SEQ ID NO: 42192 - DNA, 21 bp, synthetic construct
  misc_feature 1..21: note = Description of Artificial Sequence: Synthetic oligonucleotide
  source 1..21: mol_type = other DNA
atcagaaccggcagcctccac

SEQ ID NO: 42193 - DNA, 21 bp, synthetic construct
  misc_feature 1..21: note = Description of Artificial Sequence: Synthetic oligonucleotide
  source 1..21: mol_type = other DNA
ggtacgaagtcggcgtttagt

SEQ ID NO: 42194 - DNA, 21 bp, synthetic construct
  misc_feature 1..21: note = Description of Artificial Sequence: Synthetic oligonucleotide
  source 1..21: mol_type = other DNA
ctcagcagcagcagaatgggc

SEQ ID NO: 42195 - DNA, 21 bp, synthetic construct
  misc_feature 1..21: note = Description of Artificial Sequence: Synthetic oligonucleotide
  source 1..21: mol_type = other DNA
gccagagtcgtccccagactc

SEQ ID NO: 42196 - DNA, 21 bp, synthetic construct
  misc_feature 1..21: note = Description of Artificial Sequence: Synthetic oligonucleotide
  source 1..21: mol_type = other DNA
gagagtaaggctgcttctaag

SEQ ID NO: 42197 - DNA, 21 bp, synthetic construct
  misc_feature 1..21: note = Description of Artificial Sequence: Synthetic oligonucleotide
  source 1..21: mol_type = other DNA
ccttctaagggtacgtatcct

SEQ ID NO: 42198 - DNA, 21 bp, synthetic construct
  misc_feature 1..21: note = Description of Artificial Sequence: Synthetic oligonucleotide
  source 1..21: mol_type = other DNA
catgtgagtagtacgtctgtg

SEQ ID NO: 42199 - DNA, 21 bp, synthetic construct
  misc_feature 1..21: note = Description of Artificial Sequence: Synthetic oligonucleotide
  source 1..21: mol_type = other DNA
agggagaagcagcataatggg

SEQ ID NO: 42200 - DNA, 21 bp, synthetic construct
  misc_feature 1..21: note = Description of Artificial Sequence: Synthetic oligonucleotide
  source 1..21: mol_type = other DNA
agaaacgacaccaaactcttc

SEQ ID NO: 42201 - DNA, 21 bp, synthetic construct
  misc_feature 1..21: note = Description of Artificial Sequence: Synthetic oligonucleotide
  source 1..21: mol_type = other DNA
ctttcggctaatccgcataat

SEQ ID NO: 42202 - DNA, 21 bp, synthetic construct
  misc_feature 1..21: note = Description of Artificial Sequence: Synthetic oligonucleotide
  source 1..21: mol_type = other DNA
aacagaagcaaagaaagcgcc

SEQ ID NO: 42203 - DNA, 21 bp, synthetic construct
  misc_feature 1..21: note = Description of Artificial Sequence: Synthetic oligonucleotide
  source 1..21: mol_type = other DNA
atgaaaagccaaaaatacgcc

SEQ ID NO: 42204 - DNA, 21 bp, synthetic construct
  misc_feature 1..21: note = Description of Artificial Sequence: Synthetic oligonucleotide
  source 1..21: mol_type = other DNA
gttcttcgtgatgggcatcgg

SEQ ID NO: 42205 - DNA, 21 bp, synthetic construct
  misc_feature 1..21: note = Description of Artificial Sequence: Synthetic oligonucleotide
  source 1..21: mol_type = other DNA
accaaaggcggcagccaactc

SEQ ID NO: 42206 - DNA, 21 bp, synthetic construct
  misc_feature 1..21: note = Description of Artificial Sequence: Synthetic oligonucleotide
  source 1..21: mol_type = other DNA
atcagcctcacccaaagcaga

SEQ ID NO: 42207 - DNA, 21 bp, synthetic construct
  misc_feature 1..21: note = Description of Artificial Sequence: Synthetic oligonucleotide
  source 1..21: mol_type = other DNA
agagaactcaaaaacagcagc

SEQ ID NO: 42208 - DNA, 21 bp, synthetic construct
  misc_feature 1..21: note = Description of Artificial Sequence: Synthetic oligonucleotide
  source 1..21: mol_type = other DNA
aggacgcaggcgcataatgtt

SEQ ID NO: 42209 - DNA, 21 bp, synthetic construct
  misc_feature 1..21: note = Description of Artificial Sequence: Synthetic oligonucleotide
  source 1..21: mol_type = other DNA
agtccggggcgtacgcagagt

SEQ ID NO: 42210 - DNA, 21 bp, synthetic construct
  misc_feature 1..21: note = Description of Artificial Sequence: Synthetic oligonucleotide
  source 1..21: mol_type = other DNA
tgtaagactcatgtgtctgtt

SEQ ID NO: 42211 - DNA, 21 bp, synthetic construct
  misc_feature 1..21: note = Description of Artificial Sequence: Synthetic oligonucleotide
  source 1..21: mol_type = other DNA
tctcatgataatggtcagtcg

SEQ ID NO: 42212 - DNA, 21 bp, synthetic construct
  misc_feature 1..21: note = Description of Artificial Sequence: Synthetic oligonucleotide
  source 1..21: mol_type = other DNA
agttctactccgcggtctgtg

SEQ ID NO: 42213 - DNA, 21 bp, synthetic construct
  misc_feature 1..21: note = Description of Artificial Sequence: Synthetic oligonucleotide
  source 1..21: mol_type = other DNA
cctagtgctaggatgtctggt

SEQ ID NO: 42214 - DNA, 21 bp, synthetic construct
  misc_feature 1..21: note = Description of Artificial Sequence: Synthetic oligonucleotide
  source 1..21: mol_type = other DNA
gatattgggaatcctactaat

SEQ ID NO: 42215 - DNA, 21 bp, synthetic construct
  misc_feature 1..21: note = Description of Artificial Sequence: Synthetic oligonucleotide
  source 1..21: mol_type = other DNA
attgggccgtctggtgttttg

SEQ ID NO: 42216 - DNA, 21 bp, synthetic construct
  misc_feature 1..21: note = Description of Artificial Sequence: Synthetic oligonucleotide
  source 1..21: mol_type = other DNA
tcgccggttaaggggtctgtt

SEQ ID NO: 42217 - DNA, 21 bp, synthetic construct
  misc_feature 1..21: note = Description of Artificial Sequence: Synthetic oligonucleotide
  source 1..21: mol_type = other DNA
cttcgtgttaatgctactggg

SEQ ID NO: 42218 - DNA, 21 bp, synthetic construct
  misc_feature 1..21: note = Description of Artificial Sequence: Synthetic oligonucleotide
  source 1..21: mol_type = other DNA
ggcaacggcaccagacaaaac

SEQ ID NO: 42219 - DNA, 21 bp, synthetic construct
  misc_feature 1..21: note = Description of Artificial Sequence: Synthetic oligonucleotide
  source 1..21: mol_type = other DNA
gttcgggttggtcagcatctg

SEQ ID NO: 42220 - DNA, 21 bp, synthetic construct
  misc_feature 1..21: note = Description of Artificial Sequence: Synthetic oligonucleotide
  source 1..21: mol_type = other DNA
ttcgaaacccacagcagaccc

SEQ ID NO: 42221 - DNA, 21 bp, synthetic construct
  misc_feature 1..21: note = Description of Artificial Sequence: Synthetic oligonucleotide
  source 1..21: mol_type = other DNA
cgtatgggtgtgtcgaatacg

SEQ ID NO: 42222 - DNA, 21 bp, synthetic construct
  misc_feature 1..21: note = Description of Artificial Sequence: Synthetic oligonucleotide
  source 1..21: mol_type = other DNA
tcttcgcgtaatcttgttacg

SEQ ID NO: 42223 - DNA, 21 bp, synthetic construct
  misc_feature 1..21: note = Description of Artificial Sequence: Synthetic oligonucleotide
  source 1..21: mol_type = other DNA
agccccagcttcaaccaaggc

SEQ ID NO: 42224 - DNA, 21 bp, synthetic construct
  misc_feature 1..21: note = Description of Artificial Sequence: Synthetic oligonucleotide
  source 1..21: mol_type = other DNA
cattctcatgggaagtcgatt

SEQ ID NO: 42225 - DNA, 21 bp, synthetic construct
  misc_feature 1..21: note = Description of Artificial Sequence: Synthetic oligonucleotide
  source 1..21: mol_type = other DNA
ggtccggatacgcattctcag

SEQ ID NO: 42226 - DNA, 21 bp, synthetic construct
  misc_feature 1..21: note = Description of Artificial Sequence: Synthetic oligonucleotide
  source 1..21: mol_type = other DNA
ggtgtgattaataatgagcgg

SEQ ID NO: 42227 - DNA, 21 bp, synthetic construct
  misc_feature 1..21: note = Description of Artificial Sequence: Synthetic oligonucleotide
  source 1..21: mol_type = other DNA
tcgtctatgtcgcatcagaag

SEQ ID NO: 42228 - DNA, 21 bp, synthetic construct
  misc_feature 1..21: note = Description of Artificial Sequence: Synthetic oligonucleotide
  source 1..21: mol_type = other DNA
tcgggggcttcgagtaattct

SEQ ID NO: 42229 - DNA, 21 bp, synthetic construct
  misc_feature 1..21: note = Description of Artificial Sequence: Synthetic oligonucleotide
  source 1..21: mol_type = other DNA
aacaacagcaaaagccaaatc

SEQ ID NO: 42230 - DNA, 21 bp, synthetic construct
  misc_feature 1..21: note = Description of Artificial Sequence: Synthetic oligonucleotide
  source 1..21: mol_type = other DNA
gccatcagaccccacagcggc

SEQ ID NO: 42231 - DNA, 21 bp, synthetic construct
  misc_feature 1..21: note = Description of Artificial Sequence: Synthetic oligonucleotide
  source 1..21: mol_type = other DNA
aaactcaccggccaaagaagc

SEQ ID NO: 42232 - DNA, 21 bp, synthetic construct
  misc_feature 1..21: note = Description of Artificial Sequence: Synthetic oligonucleotide
  source 1..21: mol_type = other DNA
agagtccaaaaaagcagcttc

SEQ ID NO: 42233 - DNA, 21 bp, synthetic construct
  misc_feature 1..21: note = Description of Artificial Sequence: Synthetic oligonucleotide
  source 1..21: mol_type = other DNA
agaagcaaccccaccctcgtc

SEQ ID NO: 42234 - DNA, 21 bp, synthetic construct
  misc_feature 1..21: note = Description of Artificial Sequence: Synthetic oligonucleotide
  source 1..21: mol_type = other DNA
cccaccggcaaactcagacaa

SEQ ID NO: 42235 - DNA, 21 bp, synthetic construct
  misc_feature 1..21: note = Description of Artificial Sequence: Synthetic oligonucleotide
  source 1..21: mol_type = other DNA
ggtgcgggtactagttatcat

SEQ ID NO: 42236 - DNA, 21 bp, synthetic construct
  misc_feature 1..21: note = Description of Artificial Sequence: Synthetic oligonucleotide
  source 1..21: mol_type = other DNA
tcttcgcaggcggtttttcgg

SEQ ID NO: 42237 - DNA, 21 bp, synthetic construct
  misc_feature 1..21: note = Description of Artificial Sequence: Synthetic oligonucleotide
  source 1..21: mol_type = other DNA
ggccaagccgtcaacaccgcc

SEQ ID NO: 42238 - DNA, 21 bp, synthetic construct
  misc_feature 1..21: note = Description of Artificial Sequence: Synthetic oligonucleotide
  source 1..21: mol_type = other DNA
ttcatcggcaccagaagcgcc

SEQ ID NO: 42239 - DNA, 21 bp, synthetic construct
  misc_feature 1..21: note = Description of Artificial Sequence: Synthetic oligonucleotide
  source 1..21: mol_type = other DNA
actgggcgggggccggatgtg

SEQ ID NO: 42240 - DNA, 21 bp, synthetic construct
  misc_feature 1..21: note = Description of Artificial Sequence: Synthetic oligonucleotide
  source 1..21: mol_type = other DNA
ctcaacaaccaaagaatcgcc

SEQ ID NO: 42241 - DNA, 21 bp, synthetic construct
  misc_feature 1..21: note = Description of Artificial Sequence: Synthetic oligonucleotide
  source 1..21: mol_type = other DNA
actccgcagaattctgtgaag

SEQ ID NO: 42242 - DNA, 21 bp, synthetic construct
  misc_feature 1..21: note = Description of Artificial Sequence: Synthetic oligonucleotide
  source 1..21: mol_type = other DNA
aatccttcggagaagatgttg

SEQ ID NO: 42243 - DNA, 21 bp, synthetic construct
  misc_feature 1..21: note = Description of Artificial Sequence: Synthetic oligonucleotide
  source 1..21: mol_type = other DNA
gtttttaatcgtaatgcttct

SEQ ID NO: 42244 - DNA, 21 bp, synthetic construct
  misc_feature 1..21: note = Description of Artificial Sequence: Synthetic oligonucleotide
  source 1..21: mol_type = other DNA
actccgacgccggttaatcag

SEQ ID NO: 42245 - DNA, 21 bp, synthetic construct
  misc_feature 1..21: note = Description of Artificial Sequence: Synthetic oligonucleotide
  source 1..21: mol_type = other DNA
ttcaacagcggcagcggcaga

SEQ ID NO: 42246 - DNA, 21 bp, synthetic construct
  misc_feature 1..21: note = Description of Artificial Sequence: Synthetic oligonucleotide
  source 1..21: mol_type = other DNA
catgtgactaagtctacggct

SEQ ID NO: 42247 - DNA, 21 bp, synthetic construct
  misc_feature 1..21: note = Description of Artificial Sequence: Synthetic oligonucleotide
  source 1..21: mol_type = other DNA
tttgtttcggctcgtagtggt

SEQ ID NO: 42248 - DNA, 21 bp, synthetic construct
  misc_feature 1..21: note = Description of Artificial Sequence: Synthetic oligonucleotide
  source 1..21: mol_type = other DNA
actcctgcggggccgaataag

SEQ ID NO: 42249 - DNA, 21 bp, synthetic construct
  misc_feature 1..21: note = Description of Artificial Sequence: Synthetic oligonucleotide
  source 1..21: mol_type = other DNA
atgagttctaagcaggttagt

SEQ ID NO: 42250 - DNA, 21 bp, synthetic construct
  misc_feature 1..21: note = Description of Artificial Sequence: Synthetic oligonucleotide
  source 1..21: mol_type = other DNA
tggatgtctggtaagaatagt

SEQ ID NO: 42251 - DNA, 21 bp, synthetic construct
  misc_feature 1..21: note = Description of Artificial Sequence: Synthetic oligonucleotide
  source 1..21: mol_type = other DNA
atttcgactccgaagactgcg

SEQ ID NO: 42252 - DNA, 21 bp, synthetic construct
  misc_feature 1..21: note = Description of Artificial Sequence: Synthetic oligonucleotide
  source 1..21: mol_type = other DNA
actaggaataataagagtgag

SEQ ID NO: 42253 - DNA, 21 bp, synthetic construct
  misc_feature 1..21: note = Description of Artificial Sequence: Synthetic oligonucleotide
  source 1..21: mol_type = other DNA
gatcctgttctgaagccggct

SEQ ID NO: 42254 - DNA, 21 bp, synthetic construct
  misc_feature 1..21: note = Description of Artificial Sequence: Synthetic oligonucleotide
  source 1..21: mol_type = other DNA
cctggtgctagtggtaaggtt

SEQ ID NO: 42255 - DNA, 21 bp, synthetic construct
  misc_feature 1..21: note = Description of Artificial Sequence: Synthetic oligonucleotide
  source 1..21: mol_type = other DNA
aataatgttacgaaggctccg

SEQ ID NO: 42256 - DNA, 21 bp, synthetic construct
  misc_feature 1..21: note = Description of Artificial Sequence: Synthetic oligonucleotide
  source 1..21: mol_type = other DNA
aatgctatgaatactcggggt

SEQ ID NO: 42257 - DNA, 21 bp, synthetic construct
  misc_feature 1..21: note = Description of Artificial Sequence: Synthetic oligonucleotide
  source 1..21: mol_type = other DNA
catggtgttaataagactgag

SEQ ID NO: 42258 - DNA, 21 bp, synthetic construct
  misc_feature 1..21: note = Description of Artificial Sequence: Synthetic oligonucleotide
  source 1..21: mol_type = other DNA
tataatcgtaagcctgctcag

SEQ ID NO: 42259 - DNA, 21 bp, synthetic construct
  misc_feature 1..21: note = Description of Artificial Sequence: Synthetic oligonucleotide
  source 1..21: mol_type = other DNA
cccggcggcaaaagccaactc

SEQ ID NO: 42260 - DNA, 21 bp, synthetic construct
  misc_feature 1..21: note = Description of Artificial Sequence: Synthetic oligonucleotide
  source 1..21: mol_type = other DNA
tacggccaaaccaaaacccaa

SEQ ID NO: 42261 - DNA, 21 bp, synthetic construct
  misc_feature 1..21: note = Description of Artificial Sequence: Synthetic oligonucleotide
  source 1..21: mol_type = other DNA
ggtcagactcatgcggttcgg

SEQ ID NO: 42262 - DNA, 21 bp, synthetic construct
  misc_feature 1..21: note = Description of Artificial Sequence: Synthetic oligonucleotide
  source 1..21: mol_type = other DNA
ttgactacgtcggtgtataag

SEQ ID NO: 42263 - DNA, 21 bp, synthetic construct
  misc_feature 1..21: note = Description of Artificial Sequence: Synthetic oligonucleotide
  source 1..21: mol_type = other DNA
ttcggcaaccccggcatcaga

SEQ ID NO: 42264 - DNA, 21 bp, synthetic construct
  misc_feature 1..21: note = Description of Artificial Sequence: Synthetic oligonucleotide
  source 1..21: mol_type = other DNA
agacccgacagaaccaccctc

SEQ ID NO: 42265 - DNA, 21 bp, synthetic construct
  misc_feature 1..21: note = Description of Artificial Sequence: Synthetic oligonucleotide
  source 1..21: mol_type = other DNA
agcttcaccaaaggcgccggc

SEQ ID NO: 42266 - DNA, 21 bp, synthetic construct
  misc_feature 1..21: note = Description of Artificial Sequence: Synthetic oligonucleotide
  source 1..21: mol_type = other DNA
actaatagggggggtactcct

SEQ ID NO: 42267 - DNA, 21 bp, synthetic construct
  misc_feature 1..21: note = Description of Artificial Sequence: Synthetic oligonucleotide
  source 1..21: mol_type = other DNA
ctcaccgccaccaaccccaga

SEQ ID NO: 42268 - DNA, 21 bp, synthetic construct
  misc_feature 1..21: note = Description of Artificial Sequence: Synthetic oligonucleotide
  source 1..21: mol_type = other DNA
cctgtgtctcgggggagtggg

SEQ ID NO: 42269 - DNA, 21 bp, synthetic construct
  misc_feature 1..21: note = Description of Artificial Sequence: Synthetic oligonucleotide
  source 1..21: mol_type = other DNA
ggcctccacccccccagaacc

SEQ ID NO: 42270 - DNA, 21 bp, synthetic construct
  misc_feature 1..21: note = Description of Artificial Sequence: Synthetic oligonucleotide
  source 1..21: mol_type = other DNA
agagtcgccaccagcgtcagc

SEQ ID NO: 42271 - DNA, 21 bp, synthetic construct
  misc_feature 1..21: note = Description of Artificial Sequence: Synthetic oligonucleotide
  source 1..21: mol_type = other DNA
actcatgctgctcattcttct

SEQ ID NO: 42272 - DNA, 21 bp, synthetic construct
  misc_feature 1..21: note = Description of Artificial Sequence: Synthetic oligonucleotide
  source 1..21: mol_type = other DNA
ggtacgaatcctgggacgttg

SEQ ID NO: 42273 - DNA, 21 bp, synthetic construct
  misc_feature 1..21: note = Description of Artificial Sequence: Synthetic oligonucleotide
  source 1..21: mol_type = other DNA
acccaaaacaccaaaagcatc

SEQ ID NO: 42274 - DNA, 21 bp, synthetic construct
  misc_feature 1..21: note = Description of Artificial Sequence: Synthetic oligonucleotide
  source 1..21: mol_type = other DNA
agccacggcgaaagccaaaga

SEQ ID NO: 42275 - DNA, 21 bp, synthetic construct
  misc_feature 1..21: note = Description of Artificial Sequence: Synthetic oligonucleotide
  source 1..21: mol_type = other DNA
ctccacagagccggcgacgcc

SEQ ID NO: 42276 - DNA, 21 bp, synthetic construct
  misc_feature 1..21: note = Description of Artificial Sequence: Synthetic oligonucleotide
  source 1..21: mol_type = other DNA
tctattggtaaggggtataat

SEQ ID NO: 42277 - DNA, 21 bp, synthetic construct
  misc_feature 1..21: note = Description of Artificial Sequence: Synthetic oligonucleotide
  source 1..21: mol_type = other DNA
ccctacaaaaacaaacccagc

SEQ ID NO: 42278 - DNA, 21 bp, synthetic construct
  misc_feature 1..21: note = Description of Artificial Sequence: Synthetic oligonucleotide
  source 1..21: mol_type = other DNA
cttaatagtatgtctcctagg

SEQ ID NO: 42279 - DNA, 21 bp, synthetic construct
  misc_feature 1..21: note = Description of Artificial Sequence: Synthetic oligonucleotide
  source 1..21: mol_type = other DNA
aggtatgataagcagaattcg

SEQ ID NO: 42280 - DNA, 21 bp, synthetic construct
  misc_feature 1..21: note = Description of Artificial Sequence: Synthetic oligonucleotide
  source 1..21: mol_type = other DNA
cacgtcaacagcggcaaactc

SEQ ID NO: 42281 - DNA, 21 bp, synthetic construct
  misc_feature 1..21: note = Description of Artificial Sequence: Synthetic oligonucleotide
  source 1..21: mol_type = other DNA
gttcattcttcgagtacgaag

SEQ ID NO: 42282 - DNA, 21 bp, synthetic construct
  misc_feature 1..21: note = Description of Artificial Sequence: Synthetic oligonucleotide
  source 1..21: mol_type = other DNA
agcaccggcagcgtcagcaaa

SEQ ID NO: 42283 - DNA, 21 bp, synthetic construct
  misc_feature 1..21: note = Description of Artificial Sequence: Synthetic oligonucleotide
  source 1..21: mol_type = other DNA
accaccaccaccagacccagc

SEQ ID NO: 42284 - DNA, 21 bp, synthetic construct
  misc_feature 1..21: note = Description of Artificial Sequence: Synthetic oligonucleotide
  source 1..21: mol_type = other DNA
tctgttgttagtgaggttcgg

SEQ ID NO: 42285 - DNA, 21 bp, synthetic construct
  misc_feature 1..21: note = Description of Artificial Sequence: Synthetic oligonucleotide
  source 1..21: mol_type = other DNA
gccagcctcaaaacccaaatg

SEQ ID NO: 42286 - DNA, 21 bp, synthetic construct
  misc_feature 1..21: note = Description of Artificial Sequence: Synthetic oligonucleotide
  source 1..21: mol_type = other DNA
ttcaccaccggcaactactgc

SEQ ID NO: 42287 - DNA, 21 bp, synthetic construct
  misc_feature 1..21: note = Description of Artificial Sequence: Synthetic oligonucleotide
  source 1..21: mol_type = other DNA
ttttcgcgtagtccggcggtg

SEQ ID NO: 42288 - DNA, 21 bp, synthetic construct
  misc_feature 1..21: note = Description of Artificial Sequence: Synthetic oligonucleotide
  source 1..21: mol_type = other DNA
tataatattaagcaggggagt

SEQ ID NO: 42289 - DNA, 21 bp, synthetic construct
  misc_feature 1..21: note = Description of Artificial Sequence: Synthetic oligonucleotide
  source 1..21: mol_type = other DNA
gattgtgtttcgcggtgtaag

SEQ ID NO: 42290 - DNA, 21 bp, synthetic construct
  misc_feature 1..21: note = Description of Artificial Sequence: Synthetic oligonucleotide
  source 1..21: mol_type = other DNA
agtattagggggggtaaggat

SEQ ID NO: 42291 - DNA, 21 bp, synthetic construct
  misc_feature 1..21: note = Description of Artificial Sequence: Synthetic oligonucleotide
  source 1..21: mol_type = other DNA
gcgaagacggctaagaatgtg

SEQ ID NO: 42292 - DNA, 21 bp, synthetic construct
  misc_feature 1..21: note = Description of Artificial Sequence: Synthetic oligonucleotide
  source 1..21: mol_type = other DNA
ttcagaacccaaagcaccaaa

SEQ ID NO: 42293 - DNA, 21 bp, synthetic construct
  misc_feature 1..21: note = Description of Artificial Sequence: Synthetic oligonucleotide
  source 1..21: mol_type = other DNA
gacagcggcagcagcaccaaa

SEQ ID NO: 42294 - DNA, 21 bp, synthetic construct
  misc_feature 1..21: note = Description of Artificial Sequence: Synthetic oligonucleotide
  source 1..21: mol_type = other DNA
ggtactgcgaggggggttgct

SEQ ID NO: 42295 - DNA, 21 bp, synthetic construct
  misc_feature 1..21: note = Description of Artificial Sequence: Synthetic oligonucleotide
  source 1..21: mol_type = other DNA
agggctacgccgctttctggt

SEQ ID NO: 42296 - DNA, 21 bp, synthetic construct
  misc_feature 1..21: note = Description of Artificial Sequence: Synthetic oligonucleotide
  source 1..21: mol_type = other DNA
agcagcagcggcggcgtcaaa

SEQ ID NO: 42297 - DNA, 21 bp, synthetic construct
  misc_feature 1..21: note = Description of Artificial Sequence: Synthetic oligonucleotide
  source 1..21: mol_type = other DNA
tcggggagtacgaagggtcag

SEQ ID NO: 42298 - DNA, 21 bp, synthetic construct
  misc_feature 1..21: note = Description of Artificial Sequence: Synthetic oligonucleotide
  source 1..21: mol_type = other DNA
gctaagactaatttgagttct

SEQ ID NO: 42299 - DNA, 21 bp, synthetic construct
  misc_feature 1..21: note = Description of Artificial Sequence: Synthetic oligonucleotide
  source 1..21: mol_type = other DNA
aagaatccttcgagtgttaat

SEQ ID NO: 42300 - DNA, 21 bp, synthetic construct
  misc_feature 1..21: note = Description of Artificial Sequence: Synthetic oligonucleotide
  source 1..21: mol_type = other DNA
atggctcctcgtccggttcct

SEQ ID NO: 42301 - DNA, 21 bp, synthetic construct
  misc_feature 1..21: note = Description of Artificial Sequence: Synthetic oligonucleotide
  source 1..21: mol_type = other DNA
actcatcgtacgcagaattcg

SEQ ID NO: 42302 - DNA, 21 bp, synthetic construct
  misc_feature 1..21: note = Description of Artificial Sequence: Synthetic oligonucleotide
  source 1..21: mol_type = other DNA
ctttcgcggaatgggattaat

SEQ ID NO: 42303 - DNA, 21 bp, synthetic construct
  misc_feature 1..21: note = Description of Artificial Sequence: Synthetic oligonucleotide
  source 1..21: mol_type = other DNA
gccagaaaccccaccagcacc

SEQ ID NO: 42304 - DNA, 21 bp, synthetic construct
  misc_feature 1..21: note = Description of Artificial Sequence: Synthetic oligonucleotide
  source 1..21: mol_type = other DNA
gggtctaggtcgtcttatgtt

SEQ ID NO: 42305 - DNA, 21 bp, synthetic construct
  misc_feature 1..21: note = Description of Artificial Sequence: Synthetic oligonucleotide
  source 1..21: mol_type = other DNA
aacgcccaaagcagactcacc

SEQ ID NO: 42306 - DNA, 21 bp, synthetic construct
  misc_feature 1..21: note = Description of Artificial Sequence: Synthetic oligonucleotide
  source 1..21: mol_type = other DNA
ttgggtgatcgttcttttatt

SEQ ID NO: 42307 - DNA, 21 bp, synthetic construct
  misc_feature 1..21: note = Description of Artificial Sequence: Synthetic oligonucleotide
  source 1..21: mol_type = other DNA
ctgtgtgcgtctaagtgtgat

SEQ ID NO: 42308 - DNA, 21 bp, synthetic construct
  misc_feature 1..21: note = Description of Artificial Sequence: Synthetic oligonucleotide
  source 1..21: mol_type = other DNA
ggcttcgaaagaaacagagaa

SEQ ID NO: 42309 - DNA, 21 bp, synthetic construct
  misc_feature 1..21: note = Description of Artificial Sequence: Synthetic oligonucleotide
  source 1..21: mol_type = other DNA
ctttctattaagggtgcttcg

SEQ ID NO: 42310 - DNA, 21 bp, synthetic construct
  misc_feature 1..21: note = Description of Artificial Sequence: Synthetic oligonucleotide
  source 1..21: mol_type = other DNA
gtcctcaaaagcaacggctac

SEQ ID NO: 42311 - DNA, 21 bp, synthetic construct
  misc_feature 1..21: note = Description of Artificial Sequence: Synthetic oligonucleotide
  source 1..21: mol_type = other DNA
tttcgtccttctactgtggtg

SEQ ID NO: 42312 - DNA, 21 bp, synthetic construct
  misc_feature 1..21: note = Description of Artificial Sequence: Synthetic oligonucleotide
  source 1..21: mol_type = other DNA
taccccagaagcggcgtccaa

SEQ ID NO: 42313 - DNA, 21 bp, synthetic construct
  misc_feature 1..21: note = Description of Artificial Sequence: Synthetic oligonucleotide
  source 1..21: mol_type = other DNA
agagccaacaacagccaaatg

SEQ ID NO: 42314 - DNA, 21 bp, synthetic construct
  misc_feature 1..21: note = Description of Artificial Sequence: Synthetic oligonucleotide
  source 1..21: mol_type = other DNA
atggaaagcaaagccaacagc

SEQ ID NO: 42315 - DNA, 21 bp, synthetic construct
  misc_feature 1..21: note = Description of Artificial Sequence: Synthetic oligonucleotide
  source 1..21: mol_type = other DNA
gtccccctcgccggcagaccc

SEQ ID NO: 42316 - DNA, 21 bp, synthetic construct
  misc_feature 1..21: note = Description of Artificial Sequence: Synthetic oligonucleotide
  source 1..21: mol_type = other DNA
gaccccgccaccagaaaaagc

SEQ ID NO: 42317 - DNA, 21 bp, synthetic construct
  misc_feature 1..21: note = Description of Artificial Sequence: Synthetic oligonucleotide
  source 1..21: mol_type = other DNA
aatgtggataatcgggggttt

SEQ ID NO: 42318 - DNA, 21 bp, synthetic construct
  misc_feature 1..21: note = Description of Artificial Sequence: Synthetic oligonucleotide
  source 1..21: mol_type = other DNA
cctagtgtgaataggactcct

SEQ ID NO: 42319 - DNA, 21 bp, synthetic construct
  misc_feature 1..21: note = Description of Artificial Sequence: Synthetic oligonucleotide
  source 1..21: mol_type = other DNA
aattctcatcagaagccttct

SEQ ID NO: 42320 - DNA, 21 bp, synthetic construct
  misc_feature 1..21: note = Description of Artificial Sequence: Synthetic oligonucleotide
  source 1..21: mol_type = other DNA
agaatgagcaacgaaggcaaa

SEQ ID NO: 42321 - DNA, 21 bp, synthetic construct
  misc_feature 1..21: note = Description of Artificial Sequence: Synthetic oligonucleotide
  source 1..21: mol_type = other DNA
agcagacacggcagcgccacc

SEQ ID NO: 42322 - DNA, 21 bp, synthetic construct
  misc_feature 1..21: note = Description of Artificial Sequence: Synthetic oligonucleotide
  source 1..21: mol_type = other DNA
ccggggactgggagtaatcat

SEQ ID NO: 42323 - DNA, 21 bp, synthetic construct
  misc_feature 1..21: note = Description of Artificial Sequence: Synthetic oligonucleotide
  source 1..21: mol_type = other DNA
gccggccccctcgccggcccc

SEQ ID NO: 42324 - DNA, 21 bp, synthetic construct
  misc_feature 1..21: note = Description of Artificial Sequence: Synthetic oligonucleotide
  source 1..21: mol_type = other DNA
aacgtttctggacagaatcaa

SEQ ID NO: 42325 - DNA, 21 bp, synthetic construct
  misc_feature 1..21: note = Description of Artificial Sequence: Synthetic oligonucleotide
  source 1..21: mol_type = other DNA
tatcatgtgtcgaagccgcag

SEQ ID NO: 42326 - DNA, 21 bp, synthetic construct
  misc_feature 1..21: note = Description of Artificial Sequence: Synthetic oligonucleotide
  source 1..21: mol_type = other DNA
tctggtggtgattatgcgaag

SEQ ID NO: 42327 - DNA, 21 bp, synthetic construct
  misc_feature 1..21: note = Description of Artificial Sequence: Synthetic oligonucleotide
  source 1..21: mol_type = other DNA
atgagaagcaaagccagcatg

SEQ ID NO: 42328 - DNA, 21 bp, synthetic construct
  misc_feature 1..21: note = Description of Artificial Sequence: Synthetic oligonucleotide
  source 1..21: mol_type = other DNA
cttggtactagtcagatgaag

SEQ ID NO: 42329 - DNA, 21 bp, synthetic construct
  misc_feature 1..21: note = Description of Artificial Sequence: Synthetic oligonucleotide
  source 1..21: mol_type = other DNA
ctggctacgaataggagtaat

SEQ ID NO: 42330 - DNA, 21 bp, synthetic construct
  misc_feature 1..21: note = Description of Artificial Sequence: Synthetic oligonucleotide
  source 1..21: mol_type = other DNA
tgtattgggaataagactaat

SEQ ID NO: 42331 - DNA, 21 bp, synthetic construct
  misc_feature 1..21: note = Description of Artificial Sequence: Synthetic oligonucleotide
  source 1..21: mol_type = other DNA
gctgtgtcgagtaaggtgggg

SEQ ID NO: 42332 - DNA, 21 bp, synthetic construct
  misc_feature 1..21: note = Description of Artificial Sequence: Synthetic oligonucleotide
  source 1..21: mol_type = other DNA
aatagtcggatttctccttcg

SEQ ID NO: 42333 - DNA, 21 bp, synthetic construct
  misc_feature 1..21: note = Description of Artificial Sequence: Synthetic oligonucleotide
  source 1..21: mol_type = other DNA
gtttctggttctaaggttggt

SEQ ID NO: 42334 - DNA, 21 bp, synthetic construct
  misc_feature 1..21: note = Description of Artificial Sequence: Synthetic oligonucleotide
  source 1..21: mol_type = other DNA
cgtgcttcgcagtctgtgggt

SEQ ID NO: 42335 - DNA, 21 bp, synthetic construct
  misc_feature 1..21: note = Description of Artificial Sequence: Synthetic oligonucleotide
  source 1..21: mol_type = other DNA
cccagcaccagacaaagcaac

SEQ ID NO: 42336 - DNA, 21 bp, synthetic construct
  misc_feature 1..21: note = Description of Artificial Sequence: Synthetic oligonucleotide
  source 1..21: mol_type = other DNA
accagatacaacagcagcctc

SEQ ID NO: 42337 - DNA, 21 bp, synthetic construct
  misc_feature 1..21: note = Description of Artificial Sequence: Synthetic oligonucleotide
  source 1..21: mol_type = other DNA
aagacttcgactccttattcg

SEQ ID NO: 42338 - DNA, 21 bp, synthetic construct
  misc_feature 1..21: note = Description of Artificial Sequence: Synthetic oligonucleotide
  source 1..21: mol_type = other DNA
aatgctaatagtcgtcctgtt

SEQ ID NO: 42339 - DNA, 21 bp, synthetic construct
  misc_feature 1..21: note = Description of Artificial Sequence: Synthetic oligonucleotide
  source 1..21: mol_type = other DNA
aggagtacggatcctcatggg

SEQ ID NO: 42340 - DNA, 21 bp, synthetic construct
  misc_feature 1..21: note = Description of Artificial Sequence: Synthetic oligonucleotide
  source 1..21: mol_type = other DNA
caactcggcgacagaaacaga

SEQ ID NO: 42341 - DNA, 21 bp, synthetic construct
  misc_feature 1..21: note = Description of Artificial Sequence: Synthetic oligonucleotide
  source 1..21: mol_type = other DNA
agcggcggcaaaggccccacc

SEQ ID NO: 42342 - DNA, 21 bp, synthetic construct
  misc_feature 1..21: note = Description of Artificial Sequence: Synthetic oligonucleotide
  source 1..21: mol_type = other DNA
atccaaacccacaccagcaac

SEQ ID NO: 42343 - DNA, 21 bp, synthetic construct
  misc_feature 1..21: note = Description of Artificial Sequence: Synthetic oligonucleotide
  source 1..21: mol_type = other DNA
gcttttgggggtgagactaag

SEQ ID NO: 42344 - DNA, 21 bp, synthetic construct
  misc_feature 1..21: note = Description of Artificial Sequence: Synthetic oligonucleotide
  source 1..21: mol_type = other DNA
agaggccccaccggcatgatg

SEQ ID NO: 42345 - DNA, 21 bp, synthetic construct
  misc_feature 1..21: note = Description of Artificial Sequence: Synthetic oligonucleotide
  source 1..21: mol_type = other DNA
aatattgctagtaaggggccg

SEQ ID NO: 42346 - DNA, 21 bp, synthetic construct
  misc_feature 1..21: note = Description of Artificial Sequence: Synthetic oligonucleotide
  source 1..21: mol_type = other DNA
gctgttgatagtactcgggcg

SEQ ID NO: 42347 - DNA, 21 bp, synthetic construct
  misc_feature 1..21: note = Description of Artificial Sequence: Synthetic oligonucleotide
  source 1..21: mol_type = other DNA
caaatgaaacacctccaaggc

SEQ ID NO: 42348 - DNA, 21 bp, synthetic construct
  misc_feature 1..21: note = Description of Artificial Sequence: Synthetic oligonucleotide
  source 1..21: mol_type = other DNA
gggaagtctcagatgcagttg

SEQ ID NO: 42349 - DNA, 21 bp, synthetic construct
  misc_feature 1..21: note = Description of Artificial Sequence: Synthetic oligonucleotide
  source 1..21: mol_type = other DNA
gtgaataagattaatgggtcc

SEQ ID NO: 42350 - DNA, 21 bp, synthetic construct
  misc_feature 1..21: note = Description of Artificial Sequence: Synthetic oligonucleotide
  source 1..21: mol_type = other DNA
gctagtcatcttcctgttaat

SEQ ID NO: 42351 - DNA, 21 bp, synthetic construct
  misc_feature 1..21: note = Description of Artificial Sequence: Synthetic oligonucleotide
  source 1..21: mol_type = other DNA
acggggagggctccgtcttcg

SEQ ID NO: 42352 - DNA, 21 bp, synthetic construct
  misc_feature 1..21: note = Description of Artificial Sequence: Synthetic oligonucleotide
  source 1..21: mol_type = other DNA
acgtcgggtaggactacgtat

SEQ ID NO: 42353 - DNA, 21 bp, synthetic construct
  misc_feature 1..21: note = Description of Artificial Sequence: Synthetic oligonucleotide
  source 1..21: mol_type = other DNA
ccgaatcttaatagtcggggt

SEQ ID NO: 42354 - DNA, 21 bp, synthetic construct
  misc_feature 1..21: note = Description of Artificial Sequence: Synthetic oligonucleotide
  source 1..21: mol_type = other DNA
gagactactacgcctcggaag

SEQ ID NO: 42355 - DNA, 21 bp, synthetic construct
  misc_feature 1..21: note = Description of Artificial Sequence: Synthetic oligonucleotide
  source 1..21: mol_type = other DNA
tctgctacgaagagtagttgt

SEQ ID NO: 42356 - DNA, 21 bp, synthetic construct
  misc_feature 1..21: note = Description of Artificial Sequence: Synthetic oligonucleotide
  source 1..21: mol_type = other DNA
agtaagacggatcatagtttg

SEQ ID NO: 42357 - DNA, 21 bp, synthetic construct
  misc_feature 1..21: note = Description of Artificial Sequence: Synthetic oligonucleotide
  source 1..21: mol_type = other DNA
agaagcaccaacgacggcaga

SEQ ID NO: 42358 - DNA, 21 bp, synthetic construct
  misc_feature 1..21: note = Description of Artificial Sequence: Synthetic oligonucleotide
  source 1..21: mol_type = other DNA
cagtctatttctcatacgcgt

SEQ ID NO: 42359 - DNA, 21 bp, synthetic construct
  misc_feature 1..21: note = Description of Artificial Sequence: Synthetic oligonucleotide
  source 1..21: mol_type = other DNA
cgtacgaataagagtgttact

SEQ ID NO: 42360 - DNA, 21 bp, synthetic construct
  misc_feature 1..21: note = Description of Artificial Sequence: Synthetic oligonucleotide
  source 1..21: mol_type = other DNA
aatacttctacgaatggtatt

SEQ ID NO: 42361 - DNA, 21 bp, synthetic construct
  misc_feature 1..21: note = Description of Artificial Sequence: Synthetic oligonucleotide
  source 1..21: mol_type = other DNA
cctatgcagagtatgaatagg

SEQ ID NO: 42362 - DNA, 21 bp, synthetic construct
  misc_feature 1..21: note = Description of Artificial Sequence: Synthetic oligonucleotide
  source 1..21: mol_type = other DNA
acgacggcgcctgggcttcgg

SEQ ID NO: 42363 - DNA, 21 bp, synthetic construct
  misc_feature 1..21: note = Description of Artificial Sequence: Synthetic oligonucleotide
  source 1..21: mol_type = other DNA
tctcggaatgtgaatgcgatg

SEQ ID NO: 42364 - DNA, 21 bp, synthetic construct
  misc_feature 1..21: note = Description of Artificial Sequence: Synthetic oligonucleotide
  source 1..21: mol_type = other DNA
atgagcagcagaagcagcgtc

SEQ ID NO: 42365 - DNA, 21 bp, synthetic construct
  misc_feature 1..21: note = Description of Artificial Sequence: Synthetic oligonucleotide
  source 1..21: mol_type = other DNA
agtgggggtactcctgggcgt

SEQ ID NO: 42366 - DNA, 21 bp, synthetic construct
  misc_feature 1..21: note = Description of Artificial Sequence: Synthetic oligonucleotide
  source 1..21: mol_type = other DNA
cctaagttgtcgcatacgggg

SEQ ID NO: 42367 - DNA, 21 bp, synthetic construct
  misc_feature 1..21: note = Description of Artificial Sequence: Synthetic oligonucleotide
  source 1..21: mol_type = other DNA
ggcaacagcgccaacagaacc

SEQ ID NO: 42368 - DNA, 21 bp, synthetic construct
  misc_feature 1..21: note = Description of Artificial Sequence: Synthetic oligonucleotide
  source 1..21: mol_type = other DNA
catcggcatgagaagtcggtt

SEQ ID NO: 42369 - DNA, 21 bp, synthetic construct
  misc_feature 1..21: note = Description of Artificial Sequence: Synthetic oligonucleotide
  source 1..21: mol_type = other DNA
caaagcagcagccaacaaaga

SEQ ID NO: 42370 - DNA, 21 bp, synthetic construct
  misc_feature 1..21: note = Description of Artificial Sequence: Synthetic oligonucleotide
  source 1..21: mol_type = other DNA
ccgactactgggccgcagcgg

SEQ ID NO: 42371 - DNA, 21 bp, synthetic construct
  misc_feature 1..21: note = Description of Artificial Sequence: Synthetic oligonucleotide
  source 1..21: mol_type = other DNA
aacagcttcagcagaaacagc

SEQ ID NO: 42372 - DNA, 21 bp, synthetic construct
  misc_feature 1..21: note = Description of Artificial Sequence: Synthetic oligonucleotide
  source 1..21: mol_type = other DNA
ttgactagtcggagtatggct

SEQ ID NO: 42373 - DNA, 21 bp, synthetic construct
  misc_feature 1..21: note = Description of Artificial Sequence: Synthetic oligonucleotide
  source 1..21: mol_type = other DNA
ggtgttaatcgtattcctgct

SEQ ID NO: 42374 - DNA, 21 bp, synthetic construct
  misc_feature 1..21: note = Description of Artificial Sequence: Synthetic oligonucleotide
  source 1..21: mol_type = other DNA
aagccggcgactcctaatggg

SEQ ID NO: 42375 - DNA, 21 bp, synthetic construct
  misc_feature 1..21: note = Description of Artificial Sequence: Synthetic oligonucleotide
  source 1..21: mol_type = other DNA
agacccgccagcacccacacc

SEQ ID NO: 42376 - DNA, 21 bp, synthetic construct
  misc_feature 1..21: note = Description of Artificial Sequence: Synthetic oligonucleotide
  source 1..21: mol_type = other DNA
aatctgaattctgttagtaag

SEQ ID NO: 42377 - DNA, 21 bp, synthetic construct
  misc_feature 1..21: note = Description of Artificial Sequence: Synthetic oligonucleotide
  source 1..21: mol_type = other DNA
cacagaaccagccccgtcagc

SEQ ID NO: 42378 - DNA, 21 bp, synthetic construct
  misc_feature 1..21: note = Description of Artificial Sequence: Synthetic oligonucleotide
  source 1..21: mol_type = other DNA
cccagaaccgacagaaacacc

SEQ ID NO: 42379 - DNA, 21 bp, synthetic construct
  misc_feature 1..21: note = Description of Artificial Sequence: Synthetic oligonucleotide
  source 1..21: mol_type = other DNA
agaaccaaccccggctacgcc

SEQ ID NO: 42380 - DNA, 21 bp, synthetic construct
  misc_feature 1..21: note = Description of Artificial Sequence: Synthetic oligonucleotide
  source 1..21: mol_type = other DNA
cattctacgaggtcttcgttg

SEQ ID NO: 42381 - DNA, 21 bp, synthetic construct
  misc_feature 1..21: note = Description of Artificial Sequence: Synthetic oligonucleotide
  source 1..21: mol_type = other DNA
ccgttgtctaaggatcggctg

SEQ ID NO: 42382 - DNA, 21 bp, synthetic construct
  misc_feature 1..21: note = Description of Artificial Sequence: Synthetic oligonucleotide
  source 1..21: mol_type = other DNA
aagaatcagagtcttatgtcg

SEQ ID NO: 42383 - DNA, 21 bp, synthetic construct
  misc_feature 1..21: note = Description of Artificial Sequence: Synthetic oligonucleotide
  source 1..21: mol_type = other DNA
aatgctcagcaggctcagagg

SEQ ID NO: 42384 - DNA, 21 bp, synthetic construct
  misc_feature 1..21: note = Description of Artificial Sequence: Synthetic oligonucleotide
  source 1..21: mol_type = other DNA
ccccccagcaacggcagactc

SEQ ID NO: 42385 - DNA, 21 bp, synthetic construct
  misc_feature 1..21: note = Description of Artificial Sequence: Synthetic oligonucleotide
  source 1..21: mol_type = other DNA
gatcatcgtagtaaggttttg

SEQ ID NO: 42386 - DNA, 21 bp, synthetic construct
  misc_feature 1..21: note = Description of Artificial Sequence: Synthetic oligonucleotide
  source 1..21: mol_type = other DNA
ggtcggcttactagtagtatt

SEQ ID NO: 42387 - DNA, 21 bp, synthetic construct
  misc_feature 1..21: note = Description of Artificial Sequence: Synthetic oligonucleotide
  source 1..21: mol_type = other DNA
ggcagcgaccaaagaagaatg

SEQ ID NO: 42388 - DNA, 21 bp, synthetic construct
  misc_feature 1..21: note = Description of Artificial Sequence: Synthetic oligonucleotide
  source 1..21: mol_type = other DNA
aatgctaatcagaatcagatg

SEQ ID NO: 42389 - DNA, 21 bp, synthetic construct
  misc_feature 1..21: note = Description of Artificial Sequence: Synthetic oligonucleotide
  source 1..21: mol_type = other DNA
ttcagcaccagaagcgtcgtc

SEQ ID NO: 42390 - DNA, 21 bp, synthetic construct
  misc_feature 1..21: note = Description of Artificial Sequence: Synthetic oligonucleotide
  source 1..21: mol_type = other DNA
gaatacccccaacaagccaaa

SEQ ID NO: 42391 - DNA, 21 bp, synthetic construct
  misc_feature 1..21: note = Description of Artificial Sequence: Synthetic oligonucleotide
  source 1..21: mol_type = other DNA
caacccagccaaggccacagc

SEQ ID NO: 42392 - DNA, 21 bp, synthetic construct
  misc_feature 1..21: note = Description of Artificial Sequence: Synthetic oligonucleotide
  source 1..21: mol_type = other DNA
cctacgttggcttcggggagg

SEQ ID NO: 42393 - DNA, 21 bp, synthetic construct
  misc_feature 1..21: note = Description of Artificial Sequence: Synthetic oligonucleotide
  source 1..21: mol_type = other DNA
acgcgtgggcatccgttggtg

SEQ ID NO: 42394 - DNA, 21 bp, synthetic construct
  misc_feature 1..21: note = Description of Artificial Sequence: Synthetic oligonucleotide
  source 1..21: mol_type = other DNA
cctactactcttaagcatgat

SEQ ID NO: 42395 - DNA, 21 bp, synthetic construct
  misc_feature 1..21: note = Description of Artificial Sequence: Synthetic oligonucleotide
  source 1..21: mol_type = other DNA
gcttatcctaagaattcgaat

SEQ ID NO: 42396 - DNA, 21 bp, synthetic construct
  misc_feature 1..21: note = Description of Artificial Sequence: Synthetic oligonucleotide
  source 1..21: mol_type = other DNA
atcaccagcggcagcaccaga

SEQ ID NO: 42397 - DNA, 21 bp, synthetic construct
  misc_feature 1..21: note = Description of Artificial Sequence: Synthetic oligonucleotide
  source 1..21: mol_type = other DNA
cctcgtactaatgttatgcct

SEQ ID NO: 42398 - DNA, 21 bp, synthetic construct
  misc_feature 1..21: note = Description of Artificial Sequence: Synthetic oligonucleotide
  source 1..21: mol_type = other DNA
caactcaaccacagcgccaaa

SEQ ID NO: 42399 - DNA, 21 bp, synthetic construct
  misc_feature 1..21: note = Description of Artificial Sequence: Synthetic oligonucleotide
  source 1..21: mol_type = other DNA
acgggtagttcggggcgtatt

SEQ ID NO: 42400 - DNA, 21 bp, synthetic construct
  misc_feature 1..21: note = Description of Artificial Sequence: Synthetic oligonucleotide
  source 1..21: mol_type = other DNA
aacatcaacagcagactcgcc

SEQ ID NO: 42401 - DNA, 21 bp, synthetic construct
  misc_feature 1..21: note = Description of Artificial Sequence: Synthetic oligonucleotide
  source 1..21: mol_type = other DNA
aacggccccggccaaaaccaa

SEQ ID NO: 42402 - DNA, 21 bp, synthetic construct
  misc_feature 1..21: note = Description of Artificial Sequence: Synthetic oligonucleotide
  source 1..21: mol_type = other DNA
cctgcggctcataatgcggtt

SEQ ID NO: 42403 - DNA, 21 bp, synthetic construct
  misc_feature 1..21: note = Description of Artificial Sequence: Synthetic oligonucleotide
  source 1..21: mol_type = other DNA
caaagaaaaagcggcaccagc

SEQ ID NO: 42404 - DNA, 21 bp, synthetic construct
  misc_feature 1..21: note = Description of Artificial Sequence: Synthetic oligonucleotide
  source 1..21: mol_type = other DNA
ggtggtcggagggtgggtctg

SEQ ID NO: 42405 - DNA, 21 bp, synthetic construct
  misc_feature 1..21: note = Description of Artificial Sequence: Synthetic oligonucleotide
  source 1..21: mol_type = other DNA
accctcagccaaaccgtcaga

SEQ ID NO: 42406 - DNA, 21 bp, synthetic construct
  misc_feature 1..21: note = Description of Artificial Sequence: Synthetic oligonucleotide
  source 1..21: mol_type = other DNA
tggggttcgggtcttaatcat

SEQ ID NO: 42407 - DNA, 21 bp, synthetic construct
  misc_feature 1..21: note = Description of Artificial Sequence: Synthetic oligonucleotide
  source 1..21: mol_type = other DNA
aattctgtggagcgtactcgt

SEQ ID NO: 42408 - DNA, 21 bp, synthetic construct
  misc_feature 1..21: note = Description of Artificial Sequence: Synthetic oligonucleotide
  source 1..21: mol_type = other DNA
gccagcgccctcagaagccac

SEQ ID NO: 42409 - DNA, 21 bp, synthetic construct
  misc_feature 1..21: note = Description of Artificial Sequence: Synthetic oligonucleotide
  source 1..21: mol_type = other DNA
tctggtcgtgataagattagt

SEQ ID NO: 42410 - DNA, 21 bp, synthetic construct
  misc_feature 1..21: note = Description of Artificial Sequence: Synthetic oligonucleotide
  source 1..21: mol_type = other DNA
gatcgggttttgagtcagggg

SEQ ID NO: 42411 - DNA, 21 bp, synthetic construct
  misc_feature 1..21: note = Description of Artificial Sequence: Synthetic oligonucleotide
  source 1..21: mol_type = other DNA
gtccacaccagcggcgtccaa

SEQ ID NO: 42412 - DNA, 21 bp, synthetic construct
  misc_feature 1..21: note = Description of Artificial Sequence: Synthetic oligonucleotide
  source 1..21: mol_type = other DNA
agatacccccccgccacccac

SEQ ID NO: 42413 - DNA, 21 bp, synthetic construct
  misc_feature 1..21: note = Description of Artificial Sequence: Synthetic oligonucleotide
  source 1..21: mol_type = other DNA
gtcagcgacaacacctacaaa

SEQ ID NO: 42414 - DNA, 21 bp, synthetic construct
  misc_feature 1..21: note = Description of Artificial Sequence: Synthetic oligonucleotide
  source 1..21: mol_type = other DNA
aatgttgagtcgaagtcgtgt

SEQ ID NO: 42415 - DNA, 21 bp, synthetic construct
  misc_feature 1..21: note = Description of Artificial Sequence: Synthetic oligonucleotide
  source 1..21: mol_type = other DNA
cccagaaccaacaaccccagc

SEQ ID NO: 42416 - DNA, 21 bp, synthetic construct
  misc_feature 1..21: note = Description of Artificial Sequence: Synthetic oligonucleotide
  source 1..21: mol_type = other DNA
ggcaccgacagcaaaagacac

SEQ ID NO: 42417 - DNA, 21 bp, synthetic construct
  misc_feature 1..21: note = Description of Artificial Sequence: Synthetic oligonucleotide
  source 1..21: mol_type = other DNA
gttaatacgaatcgggctgct

SEQ ID NO: 42418 - DNA, 21 bp, synthetic construct
  misc_feature 1..21: note = Description of Artificial Sequence: Synthetic oligonucleotide
  source 1..21: mol_type = other DNA
gtcacccaaagcagcagcaaa

SEQ ID NO: 42419 - DNA, 21 bp, synthetic construct
  misc_feature 1..21: note = Description of Artificial Sequence: Synthetic oligonucleotide
  source 1..21: mol_type = other DNA
ggtattactaagaatcttgcg

SEQ ID NO: 42420 - DNA, 21 bp, synthetic construct
  misc_feature 1..21: note = Description of Artificial Sequence: Synthetic oligonucleotide
  source 1..21: mol_type = other DNA
agcaacaccaacagcgccaac

SEQ ID NO: 42421 - DNA, 21 bp, synthetic construct
  misc_feature 1..21: note = Description of Artificial Sequence: Synthetic oligonucleotide
  source 1..21: mol_type = other DNA
tcttcgcagactcgtggtttg

SEQ ID NO: 42422 - DNA, 21 bp, synthetic construct
  misc_feature 1..21: note = Description of Artificial Sequence: Synthetic oligonucleotide
  source 1..21: mol_type = other DNA
ggcagagtcgtcagcatgcaa

SEQ ID NO: 42423 - DNA, 21 bp, synthetic construct
  misc_feature 1..21: note = Description of Artificial Sequence: Synthetic oligonucleotide
  source 1..21: mol_type = other DNA
aacggcagccaaggcagacaa

SEQ ID NO: 42424 - DNA, 21 bp, synthetic construct
  misc_feature 1..21: note = Description of Artificial Sequence: Synthetic oligonucleotide
  source 1..21: mol_type = other DNA
cgtatgtcgtctacgcatggg

SEQ ID NO: 42425 - DNA, 21 bp, synthetic construct
  misc_feature 1..21: note = Description of Artificial Sequence: Synthetic oligonucleotide
  source 1..21: mol_type = other DNA
agtgctgttgggaaggcgagt

SEQ ID NO: 42426 - DNA, 21 bp, synthetic construct
  misc_feature 1..21: note = Description of Artificial Sequence: Synthetic oligonucleotide
  source 1..21: mol_type = other DNA
gacagaaccaacacccaaaga

SEQ ID NO: 42427 - DNA, 21 bp, synthetic construct
  misc_feature 1..21: note = Description of Artificial Sequence: Synthetic oligonucleotide
  source 1..21: mol_type = other DNA
cataatagtaagagtcagatt

SEQ ID NO: 42428 - DNA, 21 bp, synthetic construct
  misc_feature 1..21: note = Description of Artificial Sequence: Synthetic oligonucleotide
  source 1..21: mol_type = other DNA
ccgtatgctggtaatcagcgg

SEQ ID NO: 42429 - DNA, 21 bp, synthetic construct
  misc_feature 1..21: note = Description of Artificial Sequence: Synthetic oligonucleotide
  source 1..21: mol_type = other DNA
ggtggttcgtctcgtactctt

SEQ ID NO: 42430 - DNA, 21 bp, synthetic construct
  misc_feature 1..21: note = Description of Artificial Sequence: Synthetic oligonucleotide
  source 1..21: mol_type = other DNA
gtggctggggctgctcagagg

SEQ ID NO: 42431 - DNA, 21 bp, synthetic construct
  misc_feature 1..21: note = Description of Artificial Sequence: Synthetic oligonucleotide
  source 1..21: mol_type = other DNA
agagacagcaccaaactcgtc

SEQ ID NO: 42432 - DNA, 21 bp, synthetic construct
  misc_feature 1..21: note = Description of Artificial Sequence: Synthetic oligonucleotide
  source 1..21: mol_type = other DNA
aattcgcatacgcctgtgcgg

SEQ ID NO: 42433 - DNA, 21 bp, synthetic construct
  misc_feature 1..21: note = Description of Artificial Sequence: Synthetic oligonucleotide
  source 1..21: mol_type = other DNA
cccagagtcaaacccgccagc

SEQ ID NO: 42434 - DNA, 21 bp, synthetic construct
  misc_feature 1..21: note = Description of Artificial Sequence: Synthetic oligonucleotide
  source 1..21: mol_type = other DNA
cctccttctaagccgaatact

SEQ ID NO: 42435 - DNA, 21 bp, synthetic construct
  misc_feature 1..21: note = Description of Artificial Sequence: Synthetic oligonucleotide
  source 1..21: mol_type = other DNA
ggcagcaacagaatcctcggc

SEQ ID NO: 42436 - DNA, 21 bp, synthetic construct
  misc_feature 1..21: note = Description of Artificial Sequence: Synthetic oligonucleotide
  source 1..21: mol_type = other DNA
ggcggccacagccccaacaga

SEQ ID NO: 42437 - DNA, 21 bp, synthetic construct
  misc_feature 1..21: note = Description of Artificial Sequence: Synthetic oligonucleotide
  source 1..21: mol_type = other DNA
tttgtttcgcgggagaggtcg

SEQ ID NO: 42438 - DNA, 21 bp, synthetic construct
  misc_feature 1..21: note = Description of Artificial Sequence: Synthetic oligonucleotide
  source 1..21: mol_type = other DNA
tacaccgccgcccccggcaga

SEQ ID NO: 42439 - DNA, 21 bp, synthetic construct
  misc_feature 1..21: note = Description of Artificial Sequence: Synthetic oligonucleotide
  source 1..21: mol_type = other DNA
tataatgtgaatcgtaatacg

SEQ ID NO: 42440 - DNA, 21 bp, synthetic construct
  misc_feature 1..21: note = Description of Artificial Sequence: Synthetic oligonucleotide
  source 1..21: mol_type = other DNA
gagcggaaggttcagaattgt

SEQ ID NO: 42441 - DNA, 21 bp, synthetic construct
  misc_feature 1..21: note = Description of Artificial Sequence: Synthetic oligonucleotide
  source 1..21: mol_type = other DNA
ggtaggcttaatatgctgtcg

SEQ ID NO: 42442 - DNA, 21 bp, synthetic construct
  misc_feature 1..21: note = Description of Artificial Sequence: Synthetic oligonucleotide
  source 1..21: mol_type = other DNA
ttgcagaagccgagtctggtt

SEQ ID NO: 42443 - DNA, 21 bp, synthetic construct
  misc_feature 1..21: note = Description of Artificial Sequence: Synthetic oligonucleotide
  source 1..21: mol_type = other DNA
ggcagaaccgccgaaggcaga

SEQ ID NO: 42444 - DNA, 21 bp, synthetic construct
  misc_feature 1..21: note = Description of Artificial Sequence: Synthetic oligonucleotide
  source 1..21: mol_type = other DNA
cacgtcatcgccccccaacaa

SEQ ID NO: 42445 - DNA, 21 bp, synthetic construct
  misc_feature 1..21: note = Description of Artificial Sequence: Synthetic oligonucleotide
  source 1..21: mol_type = other DNA
caccaaaccaccggcctcaaa

SEQ ID NO: 42446 - DNA, 21 bp, synthetic construct
  misc_feature 1..21: note = Description of Artificial Sequence: Synthetic oligonucleotide
  source 1..21: mol_type = other DNA
gggcagagtgggagtcgtttg

SEQ ID NO: 42447 - DNA, 21 bp, synthetic construct
  misc_feature 1..21: note = Description of Artificial Sequence: Synthetic oligonucleotide
  source 1..21: mol_type = other DNA
caaggcagcagcccccaaaga

SEQ ID NO: 42448 - DNA, 21 bp, synthetic construct
  misc_feature 1..21: note = Description of Artificial Sequence: Synthetic oligonucleotide
  source 1..21: mol_type = other DNA
gccgccaccaacagattcggc

SEQ ID NO: 42449 - DNA, 21 bp, synthetic construct
  misc_feature 1..21: note = Description of Artificial Sequence: Synthetic oligonucleotide
  source 1..21: mol_type = other DNA
agattccccgccaaagaattc

SEQ ID NO: 42450 - DNA, 21 bp, synthetic construct
  misc_feature 1..21: note = Description of Artificial Sequence: Synthetic oligonucleotide
  source 1..21: mol_type = other DNA
acggggtctgggagtaatcat

SEQ ID NO: 42451 - DNA, 21 bp, synthetic construct
  misc_feature 1..21: note = Description of Artificial Sequence: Synthetic oligonucleotide
  source 1..21: mol_type = other DNA
caggttcctgtgcggcctgtt

SEQ ID NO: 42452 - DNA, 21 bp, synthetic construct
  misc_feature 1..21: note = Description of Artificial Sequence: Synthetic oligonucleotide
  source 1..21: mol_type = other DNA
actcttgcttatgataataac

SEQ ID NO: 42453 - DNA, 21 bp, synthetic construct
  misc_feature 1..21: note = Description of Artificial Sequence: Synthetic oligonucleotide
  source 1..21: mol_type = other DNA
cctcggtcttctggtggtttt

SEQ ID NO: 42454 - DNA, 21 bp, synthetic construct
  misc_feature 1..21: note = Description of Artificial Sequence: Synthetic oligonucleotide
  source 1..21: mol_type = other DNA
cccagcagaaacaccagcctc

SEQ ID NO: 42455 - DNA, 21 bp, synthetic construct
  misc_feature 1..21: note = Description of Artificial Sequence: Synthetic oligonucleotide
  source 1..21: mol_type = other DNA
acgggtatgaggaatattggg

SEQ ID NO: 42456 - DNA, 21 bp, synthetic construct
  misc_feature 1..21: note = Description of Artificial Sequence: Synthetic oligonucleotide
  source 1..21: mol_type = other DNA
ggcctccaaaccccccccaga

SEQ ID NO: 42457 - DNA, 21 bp, synthetic construct
  misc_feature 1..21: note = Description of Artificial Sequence: Synthetic oligonucleotide
  source 1..21: mol_type = other DNA
tttcagccgaggagttctacg

SEQ ID NO: 42458 - DNA, 21 bp, synthetic construct
  misc_feature 1..21: note = Description of Artificial Sequence: Synthetic oligonucleotide
  source 1..21: mol_type = other DNA
cccatgagccacgtcagcggc

SEQ ID NO: 42459 - DNA, 21 bp, synthetic construct
  misc_feature 1..21: note = Description of Artificial Sequence: Synthetic oligonucleotide
  source 1..21: mol_type = other DNA
gttagggggtctgatccgacg

SEQ ID NO: 42460 - DNA, 21 bp, synthetic construct
  misc_feature 1..21: note = Description of Artificial Sequence: Synthetic oligonucleotide
  source 1..21: mol_type = other DNA
atgaaggggaataatctgagt

SEQ ID NO: 42461 - DNA, 21 bp, synthetic construct
  misc_feature 1..21: note = Description of Artificial Sequence: Synthetic oligonucleotide
  source 1..21: mol_type = other DNA
cgtattagtgagaatatgcgg

SEQ ID NO: 42462 - DNA, 21 bp, synthetic construct
  misc_feature 1..21: note = Description of Artificial Sequence: Synthetic oligonucleotide
  source 1..21: mol_type = other DNA
tatgggaagagtgttacgcct

SEQ ID NO: 42463 - DNA, 21 bp, synthetic construct
  misc_feature 1..21: note = Description of Artificial Sequence: Synthetic oligonucleotide
  source 1..21: mol_type = other DNA
aatgctaatgtgcagactcgg

SEQ ID NO: 42464 - DNA, 21 bp, synthetic construct
  misc_feature 1..21: note = Description of Artificial Sequence: Synthetic oligonucleotide
  source 1..21: mol_type = other DNA
aagtctgcggatcagggtcgt

SEQ ID NO: 42465 - DNA, 21 bp, synthetic construct
  misc_feature 1..21: note = Description of Artificial Sequence: Synthetic oligonucleotide
  source 1..21: mol_type = other DNA
gctgggtcttcgtcgcgtagt

SEQ ID NO: 42466 - DNA, 21 bp, synthetic construct
  misc_feature 1..21: note = Description of Artificial Sequence: Synthetic oligonucleotide
  source 1..21: mol_type = other DNA
catcatgatgctagtccgaat

SEQ ID NO: 42467 - DNA, 21 bp, synthetic construct
  misc_feature 1..21: note = Description of Artificial Sequence: Synthetic oligonucleotide
  source 1..21: mol_type = other DNA
gccatgggcagcagactcagc

SEQ ID NO: 42468 - DNA, 21 bp, synthetic construct
  misc_feature 1..21: note = Description of Artificial Sequence: Synthetic oligonucleotide
  source 1..21: mol_type = other DNA
tattctaattcgcgtgtgggt

SEQ ID NO: 42469 - DNA, 21 bp, synthetic construct
  misc_feature 1..21: note = Description of Artificial Sequence: Synthetic oligonucleotide
  source 1..21: mol_type = other DNA
gtcagaagcctccccgccatg

SEQ ID NO: 42470 - DNA, 21 bp, synthetic construct
  misc_feature 1..21: note = Description of Artificial Sequence: Synthetic oligonucleotide
  source 1..21: mol_type = other DNA
tacttcaacagccacagcaac

SEQ ID NO: 42471 - DNA, 21 bp, synthetic construct
  misc_feature 1..21: note = Description of Artificial Sequence: Synthetic oligonucleotide
  source 1..21: mol_type = other DNA
ccgacggcttcgaataggagt

SEQ ID NO: 42472 - DNA, 21 bp, synthetic construct
  misc_feature 1..21: note = Description of Artificial Sequence: Synthetic oligonucleotide
  source 1..21: mol_type = other DNA
actcagcagaatgggagtaat

SEQ ID NO: 42473 - DNA, 21 bp, synthetic construct
  misc_feature 1..21: note = Description of Artificial Sequence: Synthetic oligonucleotide
  source 1..21: mol_type = other DNA
agcaccagcaaagactacacc

SEQ ID NO: 42474 - DNA, 21 bp, synthetic construct
  misc_feature 1..21: note = Description of Artificial Sequence: Synthetic oligonucleotide
  source 1..21: mol_type = other DNA
aatcctgctgagcagtatacg

SEQ ID NO: 42475 - DNA, 21 bp, synthetic construct
  misc_feature 1..21: note = Description of Artificial Sequence: Synthetic oligonucleotide
  source 1..21: mol_type = other DNA
tctaggtctcatgcgatgact

SEQ ID NO: 42476 - DNA, 21 bp, synthetic construct
  misc_feature 1..21: note = Description of Artificial Sequence: Synthetic oligonucleotide
  source 1..21: mol_type = other DNA
cggtcgggtaatggttctttg

SEQ ID NO: 42477 - DNA, 21 bp, synthetic construct
  misc_feature 1..21: note = Description of Artificial Sequence: Synthetic oligonucleotide
  source 1..21: mol_type = other DNA
caccccaccagaagcaccgcc

SEQ ID NO: 42478 - DNA, 21 bp, synthetic construct
  misc_feature 1..21: note = Description of Artificial Sequence: Synthetic oligonucleotide
  source 1..21: mol_type = other DNA
actcctgtgaataggactcat

SEQ ID NO: 42479 - DNA, 21 bp, synthetic construct
  misc_feature 1..21: note = Description of Artificial Sequence: Synthetic oligonucleotide
  source 1..21: mol_type = other DNA
agtagtgcttctacttataag

SEQ ID NO: 42480 - DNA, 21 bp, synthetic construct
  misc_feature 1..21: note = Description of Artificial Sequence: Synthetic oligonucleotide
  source 1..21: mol_type = other DNA
tctacggtgggtcatatgaat

SEQ ID NO: 42481 - DNA, 21 bp, synthetic construct
  misc_feature 1..21: note = Description of Artificial Sequence: Synthetic oligonucleotide
  source 1..21: mol_type = other DNA
cagggtcctaagaatgctgat

SEQ ID NO: 42482 - DNA, 21 bp, synthetic construct
  misc_feature 1..21: note = Description of Artificial Sequence: Synthetic oligonucleotide
  source 1..21: mol_type = other DNA
agcagccacagcccccacaga

SEQ ID NO: 42483 - DNA, 21 bp, synthetic construct
  misc_feature 1..21: note = Description of Artificial Sequence: Synthetic oligonucleotide
  source 1..21: mol_type = other DNA
gaaaacatcagcagaagccac

SEQ ID NO: 42484 - DNA, 21 bp, synthetic construct
  misc_feature 1..21: note = Description of Artificial Sequence: Synthetic oligonucleotide
  source 1..21: mol_type = other DNA
actaggatgaataagcagact

SEQ ID NO: 42485 - DNA, 21 bp, synthetic construct
  misc_feature 1..21: note = Description of Artificial Sequence: Synthetic oligonucleotide
  source 1..21: mol_type = other DNA
tttagtagtgcttcttttacg

SEQ ID NO: 42486 - DNA, 21 bp, synthetic construct
  misc_feature 1..21: note = Description of Artificial Sequence: Synthetic oligonucleotide
  source 1..21: mol_type = other DNA
tgcggcaccctcagcagctgc

SEQ ID NO: 42487 - DNA, 21 bp, synthetic construct
  misc_feature 1..21: note = Description of Artificial Sequence: Synthetic oligonucleotide
  source 1..21: mol_type = other DNA
cacgggtcgtctgttcattct

SEQ ID NO: 42488 - DNA, 21 bp, synthetic construct
  misc_feature 1..21: note = Description of Artificial Sequence: Synthetic oligonucleotide
  source 1..21: mol_type = other DNA
tcgggtagttcgacttttagg

SEQ ID NO: 42489 - DNA, 21 bp, synthetic construct
  misc_feature 1..21: note = Description of Artificial Sequence: Synthetic oligonucleotide
  source 1..21: mol_type = other DNA
agcatcagcaaccaaagaagc

SEQ ID NO: 42490 - DNA, 21 bp, synthetic construct
  misc_feature 1..21: note = Description of Artificial Sequence: Synthetic oligonucleotide
  source 1..21: mol_type = other DNA
aacggttctggacagaatcga

SEQ ID NO: 42491 - DNA, 21 bp, synthetic construct
  misc_feature 1..21: note = Description of Artificial Sequence: Synthetic oligonucleotide
  source 1..21: mol_type = other DNA
cgggatcatagtggttcgagg

SEQ ID NO: 42492 - DNA, 21 bp, synthetic construct
  misc_feature 1..21: note = Description of Artificial Sequence: Synthetic oligonucleotide
  source 1..21: mol_type = other DNA
tcttctaagactaatgtttcg

SEQ ID NO: 42493 - DNA, 21 bp, synthetic construct
  misc_feature 1..21: note = Description of Artificial Sequence: Synthetic oligonucleotide
  source 1..21: mol_type = other DNA
agcagagcccaaagcatcccc

SEQ ID NO: 42494 - DNA, 21 bp, synthetic construct
  misc_feature 1..21: note = Description of Artificial Sequence: Synthetic oligonucleotide
  source 1..21: mol_type = other DNA
cttaataggggtaagcctgtt

SEQ ID NO: 42495 - DNA, 21 bp, synthetic construct
  misc_feature 1..21: note = Description of Artificial Sequence: Synthetic oligonucleotide
  source 1..21: mol_type = other DNA
cattcgggtacgaggactagt

SEQ ID NO: 42496 - DNA, 21 bp, synthetic construct
  misc_feature 1..21: note = Description of Artificial Sequence: Synthetic oligonucleotide
  source 1..21: mol_type = other DNA
aatgatcaggctcagttgacg

SEQ ID NO: 42497 - DNA, 21 bp, synthetic construct
  misc_feature 1..21: note = Description of Artificial Sequence: Synthetic oligonucleotide
  source 1..21: mol_type = other DNA
aacaccaccgccaaaagcagc

SEQ ID NO: 42498 - DNA, 21 bp, synthetic construct
  misc_feature 1..21: note = Description of Artificial Sequence: Synthetic oligonucleotide
  source 1..21: mol_type = other DNA
aacggttctggaaagaatcaa

SEQ ID NO: 42499 - DNA, 21 bp, synthetic construct
  misc_feature 1..21: note = Description of Artificial Sequence: Synthetic oligonucleotide
  source 1..21: mol_type = other DNA
caaacccaaggccaactcaaa

SEQ ID NO: 42500 - DNA, 21 bp, synthetic construct
  misc_feature 1..21: note = Description of Artificial Sequence: Synthetic oligonucleotide
  source 1..21: mol_type = other DNA
aattctgcgggtactcgggtg

SEQ ID NO: 42501 - DNA, 21 bp, synthetic construct
  misc_feature 1..21: note = Description of Artificial Sequence: Synthetic oligonucleotide
  source 1..21: mol_type = other DNA
ccggtgggttcgcgtggtggt

SEQ ID NO: 42502 - DNA, 21 bp, synthetic construct
  misc_feature 1..21: note = Description of Artificial Sequence: Synthetic oligonucleotide
  source 1..21: mol_type = other DNA
gatacgaataatagggctaat

SEQ ID NO: 42503 - DNA, 21 bp, synthetic construct
  misc_feature 1..21: note = Description of Artificial Sequence: Synthetic oligonucleotide
  source 1..21: mol_type = other DNA
agccaccccagcagcttcggc

SEQ ID NO: 42504 - DNA, 21 bp, synthetic construct
  misc_feature 1..21: note = Description of Artificial Sequence: Synthetic oligonucleotide
  source 1..21: mol_type = other DNA
aaggttcatcggagtgataat

SEQ ID NO: 42505 - DNA, 21 bp, synthetic construct
  misc_feature 1..21: note = Description of Artificial Sequence: Synthetic oligonucleotide
  source 1..21: mol_type = other DNA
ggttcgccgggggttttgcgt

SEQ ID NO: 42506 - DNA, 21 bp, synthetic construct
  misc_feature 1..21: note = Description of Artificial Sequence: Synthetic oligonucleotide
  source 1..21: mol_type = other DNA
cggcagacgactccgctgggt

SEQ ID NO: 42507 - DNA, 21 bp, synthetic construct
  misc_feature 1..21: note = Description of Artificial Sequence: Synthetic oligonucleotide
  source 1..21: mol_type = other DNA
gatatggtgagtccgcggaat

SEQ ID NO: 42508 - DNA, 21 bp, synthetic construct
  misc_feature 1..21: note = Description of Artificial Sequence: Synthetic oligonucleotide
  source 1..21: mol_type = other DNA
agcaacgacagcagaatcaga

SEQ ID NO: 42509 - DNA, 21 bp, synthetic construct
  misc_feature 1..21: note = Description of Artificial Sequence: Synthetic oligonucleotide
  source 1..21: mol_type = other DNA
caaaccatgcccaaactcgcc

SEQ ID NO: 42510 - DNA, 21 bp, synthetic construct
  misc_feature 1..21: note = Description of Artificial Sequence: Synthetic oligonucleotide
  source 1..21: mol_type = other DNA
gggcctcgttctatgtctaat

SEQ ID NO: 42511 - DNA, 21 bp, synthetic construct
  misc_feature 1..21: note = Description of Artificial Sequence: Synthetic oligonucleotide
  source 1..21: mol_type = other DNA
tttcgggcgcaggctaatgtt

SEQ ID NO: 42512 - DNA, 21 bp, synthetic construct
  misc_feature 1..21: note = Description of Artificial Sequence: Synthetic oligonucleotide
  source 1..21: mol_type = other DNA
tcgactaagagtaagccgatt

SEQ ID NO: 42513 - DNA, 21 bp, synthetic construct
  misc_feature 1..21: note = Description of Artificial Sequence: Synthetic oligonucleotide
  source 1..21: mol_type = other DNA
cccggcaacatgaccagcaga

SEQ ID NO: 42514 - DNA, 21 bp, synthetic construct
  misc_feature 1..21: note = Description of Artificial Sequence: Synthetic oligonucleotide
  source 1..21: mol_type = other DNA
agcaaagccggcagagtcacc

SEQ ID NO: 42515 - DNA, 21 bp, synthetic construct
  misc_feature 1..21: note = Description of Artificial Sequence: Synthetic oligonucleotide
  source 1..21: mol_type = other DNA
atggggtcgagtgtgaggtct

SEQ ID NO: 42516 - DNA, 21 bp, synthetic construct
  misc_feature 1..21: note = Description of Artificial Sequence: Synthetic oligonucleotide
  source 1..21: mol_type = other DNA
gcccacagcaacaacagctac

SEQ ID NO: 42517 - DNA, 21 bp, synthetic construct
  misc_feature 1..21: note = Description of Artificial Sequence: Synthetic oligonucleotide
  source 1..21: mol_type = other DNA
caaaccaaacccgccttcaga

SEQ ID NO: 42518 - DNA, 21 bp, synthetic construct
  misc_feature 1..21: note = Description of Artificial Sequence: Synthetic oligonucleotide
  source 1..21: mol_type = other DNA
attgcgactaaggcggttgct

SEQ ID NO: 42519 - DNA, 21 bp, synthetic construct
  misc_feature 1..21: note = Description of Artificial Sequence: Synthetic oligonucleotide
  source 1..21: mol_type = other DNA
actcagcagaaggggagtaat

SEQ ID NO: 42520 - DNA, 21 bp, synthetic construct
  misc_feature 1..21: note = Description of Artificial Sequence: Synthetic oligonucleotide
  source 1..21: mol_type = other DNA
tctgattctcgtaatacgaat

SEQ ID NO: 42521 - DNA, 21 bp, synthetic construct
  misc_feature 1..21: note = Description of Artificial Sequence: Synthetic oligonucleotide
  source 1..21: mol_type = other DNA
ccggcgactgtgactggtgtt

SEQ ID NO: 42522 - DNA, 21 bp, synthetic construct
  misc_feature 1..21: note = Description of Artificial Sequence: Synthetic oligonucleotide
  source 1..21: mol_type = other DNA
gggattacggctaagttgacg

SEQ ID NO: 42523 - DNA, 21 bp, synthetic construct
  misc_feature 1..21: note = Description of Artificial Sequence: Synthetic oligonucleotide
  source 1..21: mol_type = other DNA
cctgtgtctgatcggaggggt

SEQ ID NO: 42524 - DNA, 21 bp, synthetic construct
  misc_feature 1..21: note = Description of Artificial Sequence: Synthetic oligonucleotide
  source 1..21: mol_type = other DNA
tctaaggctagtgggtttgct

SEQ ID NO: 42525 - DNA, 21 bp, synthetic construct
  misc_feature 1..21: note = Description of Artificial Sequence: Synthetic oligonucleotide
  source 1..21: mol_type = other DNA
ccgcttaatgctcggggtagt

SEQ ID NO: 42526 - DNA, 21 bp, synthetic construct
  misc_feature 1..21: note = Description of Artificial Sequence: Synthetic oligonucleotide
  source 1..21: mol_type = other DNA
ggccaaaccagagaaagcagc

SEQ ID NO: 42527 - DNA, 21 bp, synthetic construct
  misc_feature 1..21: note = Description of Artificial Sequence: Synthetic oligonucleotide
  source 1..21: mol_type = other DNA
agccccgccagcctccccaaa

SEQ ID NO: 42528 - DNA, 21 bp, synthetic construct
  misc_feature 1..21: note = Description of Artificial Sequence: Synthetic oligonucleotide
  source 1..21: mol_type = other DNA
aacggcagcggccaaaacaaa

SEQ ID NO: 42529 - DNA, 21 bp, synthetic construct
  misc_feature 1..21: note = Description of Artificial Sequence: Synthetic oligonucleotide
  source 1..21: mol_type = other DNA
aaggggcctggttctccttct

SEQ ID NO: 42530 - DNA, 21 bp, synthetic construct
  misc_feature 1..21: note = Description of Artificial Sequence: Synthetic oligonucleotide
  source 1..21: mol_type = other DNA
ggtagggagattggtaattat

SEQ ID NO: 42531 - DNA, 21 bp, synthetic construct
  misc_feature 1..21: note = Description of Artificial Sequence: Synthetic oligonucleotide
  source 1..21: mol_type = other DNA
agaagcgtcggcgccaaagcc

SEQ ID NO: 42532 - DNA, 21 bp, synthetic construct
  misc_feature 1..21: note = Description of Artificial Sequence: Synthetic oligonucleotide
  source 1..21: mol_type = other DNA
agaagactcaacatcgaagac

SEQ ID NO: 42533 - DNA, 21 bp, synthetic construct
  misc_feature 1..21: note = Description of Artificial Sequence: Synthetic oligonucleotide
  source 1..21: mol_type = other DNA
ccgagtaatagtaatatgctg

SEQ ID NO: 42534 - DNA, 21 bp, synthetic construct
  misc_feature 1..21: note = Description of Artificial Sequence: Synthetic oligonucleotide
  source 1..21: mol_type = other DNA
gaccccagaaacagcaccagc

SEQ ID NO: 42535 - DNA, 21 bp, synthetic construct
  misc_feature 1..21: note = Description of Artificial Sequence: Synthetic oligonucleotide
  source 1..21: mol_type = other DNA
gagacgaggaagcagggggtt

SEQ ID NO: 42536 - DNA, 21 bp, synthetic construct
  misc_feature 1..21: note = Description of Artificial Sequence: Synthetic oligonucleotide
  source 1..21: mol_type = other DNA
gtgtcttatgctcgtacggag

SEQ ID NO: 42537 - DNA, 21 bp, synthetic construct
  misc_feature 1..21: note = Description of Artificial Sequence: Synthetic oligonucleotide
  source 1..21: mol_type = other DNA
cagcctacgcggtctacggct

SEQ ID NO: 42538 - DNA, 21 bp, synthetic construct
  misc_feature 1..21: note = Description of Artificial Sequence: Synthetic oligonucleotide
  source 1..21: mol_type = other DNA
cctcggacgagggatacttct

SEQ ID NO: 42539 - DNA, 21 bp, synthetic construct
  misc_feature 1..21: note = Description of Artificial Sequence: Synthetic oligonucleotide
  source 1..21: mol_type = other DNA
gccctccacgccagctacaac

SEQ ID NO: 42540 - DNA, 21 bp, synthetic construct
  misc_feature 1..21: note = Description of Artificial Sequence: Synthetic oligonucleotide
  source 1..21: mol_type = other DNA
aaaagcaaaatccaacacccc

SEQ ID NO: 42541 - DNA, 21 bp, synthetic construct
  misc_feature 1..21: note = Description of Artificial Sequence: Synthetic oligonucleotide
  source 1..21: mol_type = other DNA
aaagacaacacccccggcaga

SEQ ID NO: 42542 - DNA, 21 bp, synthetic construct
  misc_feature 1..21: note = Description of Artificial Sequence: Synthetic oligonucleotide
  source 1..21: mol_type = other DNA
aagcctacgcggtctacggct

SEQ ID NO: 42543 - DNA, 21 bp, synthetic construct
  misc_feature 1..21: note = Description of Artificial Sequence: Synthetic oligonucleotide
  source 1..21: mol_type = other DNA
caacccaacaccacctacaga

SEQ ID NO: 42544 - DNA, 21 bp, synthetic construct
  misc_feature 1..21: note = Description of Artificial Sequence: Synthetic oligonucleotide
  source 1..21: mol_type = other DNA
tacatccacaaccaaaccggc

SEQ ID NO: 42545 - DNA, 21 bp, synthetic construct
  misc_feature 1..21: note = Description of Artificial Sequence: Synthetic oligonucleotide
  source 1..21: mol_type = other DNA
tttaatattcagggtcttggt

SEQ ID NO: 42546 - DNA, 21 bp, synthetic construct
  misc_feature 1..21: note = Description of Artificial Sequence: Synthetic oligonucleotide
  source 1..21: mol_type = other DNA
gcttattcgaatattcagaat

SEQ ID NO: 42547 - DNA, 21 bp, synthetic construct
  misc_feature 1..21: note = Description of Artificial Sequence: Synthetic oligonucleotide
  source 1..21: mol_type = other DNA
aagaatgagtcgatggttctt

SEQ ID NO: 42548 - DNA, 21 bp, synthetic construct
  misc_feature 1..21: note = Description of Artificial Sequence: Synthetic oligonucleotide
  source 1..21: mol_type = other DNA
tctggttcgaataattttttg

SEQ ID NO: 42549 - DNA, 21 bp, synthetic construct
  misc_feature 1..21: note = Description of Artificial Sequence: Synthetic oligonucleotide
  source 1..21: mol_type = other DNA
gcgattcggtcgggttatgtt

SEQ ID NO: 42550 - DNA, 21 bp, synthetic construct
  misc_feature 1..21: note = Description of Artificial Sequence: Synthetic oligonucleotide
  source 1..21: mol_type = other DNA
ttttcggtgcaggggcagtgt

SEQ ID NO: 42551 - DNA, 21 bp, synthetic construct
  misc_feature 1..21: note = Description of Artificial Sequence: Synthetic oligonucleotide
  source 1..21: mol_type = other DNA
aacagcacccaaatcaccccc

SEQ ID NO: 42552 - DNA, 21 bp, synthetic construct
  misc_feature 1..21: note = Description of Artificial Sequence: Synthetic oligonucleotide
  source 1..21: mol_type = other DNA
accaacatcaccccccccctc

SEQ ID NO: 42553 - DNA, 21 bp, synthetic construct
  misc_feature 1..21: note = Description of Artificial Sequence: Synthetic oligonucleotide
  source 1..21: mol_type = other DNA
ttccccagcaacggcagaacc

SEQ ID NO: 42554 - DNA, 21 bp, synthetic construct
  misc_feature 1..21: note = Description of Artificial Sequence: Synthetic oligonucleotide
  source 1..21: mol_type = other DNA
ggtaatagtactcgtcttttg

SEQ ID NO: 42555 - DNA, 21 bp, synthetic construct
  misc_feature 1..21: note = Description of Artificial Sequence: Synthetic oligonucleotide
  source 1..21: mol_type = other DNA
tacagacacaccagcaccggc

SEQ ID NO: 42556 - DNA, 21 bp, synthetic construct
  misc_feature 1..21: note = Description of Artificial Sequence: Synthetic oligonucleotide
  source 1..21: mol_type = other DNA
aataatactcagaagaattct

SEQ ID NO: 42557 - DNA, 21 bp, synthetic construct
  misc_feature 1..21: note = Description of Artificial Sequence: Synthetic oligonucleotide
  source 1..21: mol_type = other DNA
ccgctgggtcagtcttatcgg

SEQ ID NO: 42558 - DNA, 21 bp, synthetic construct
  misc_feature 1..21: note = Description of Artificial Sequence: Synthetic oligonucleotide
  source 1..21: mol_type = other DNA
cgtaattctgagtatactggg

SEQ ID NO: 42559 - DNA, 21 bp, synthetic construct
  misc_feature 1..21: note = Description of Artificial Sequence: Synthetic oligonucleotide
  source 1..21: mol_type = other DNA
agccaaaccgtcaaaaccggc

SEQ ID NO: 42560 - DNA, 21 bp, synthetic construct
  misc_feature 1..21: note = Description of Artificial Sequence: Synthetic oligonucleotide
  source 1..21: mol_type = other DNA
gctcttttgaatattaatact

SEQ ID NO: 42561 - DNA, 21 bp, synthetic construct
  misc_feature 1..21: note = Description of Artificial Sequence: Synthetic oligonucleotide
  source 1..21: mol_type = other DNA
atgctccaaagagcccccggc

SEQ ID NO: 42562 - DNA, 21 bp, synthetic construct
  misc_feature 1..21: note = Description of Artificial Sequence: Synthetic oligonucleotide
  source 1..21: mol_type = other DNA
gaaaacatgggcagacccggc

SEQ ID NO: 42563 - DNA, 21 bp, synthetic construct
  misc_feature 1..21: note = Description of Artificial Sequence: Synthetic oligonucleotide
  source 1..21: mol_type = other DNA
tacgtcagacccggcaccggc

SEQ ID NO: 42564 - DNA, 21 bp, synthetic construct
  misc_feature 1..21: note = Description of Artificial Sequence: Synthetic oligonucleotide
  source 1..21: mol_type = other DNA
ccggggtctgggagtaataat

SEQ ID NO: 42565 - DNA, 21 bp, synthetic construct
  misc_feature 1..21: note = Description of Artificial Sequence: Synthetic oligonucleotide
  source 1..21: mol_type = other DNA
aatagtaatgggattaataat

SEQ ID NO: 42566 - DNA, 21 bp, synthetic construct
  misc_feature 1..21: note = Description of Artificial Sequence: Synthetic oligonucleotide
  source 1..21: mol_type = other DNA
aattttaatagtccttcgaat

SEQ ID NO: 42567 - DNA, 21 bp, synthetic construct
  misc_feature 1..21: note = Description of Artificial Sequence: Synthetic oligonucleotide
  source 1..21: mol_type = other DNA
agcacctactgcaaagacccc

SEQ ID NO: 42568 - DNA, 21 bp, synthetic construct
  misc_feature 1..21: note = Description of Artificial Sequence: Synthetic oligonucleotide
  source 1..21: mol_type = other DNA
aatagtaatgggttgaataat

SEQ ID NO: 42569 - DNA, 21 bp, synthetic construct
  misc_feature 1..21: note = Description of Artificial Sequence: Synthetic oligonucleotide
  source 1..21: mol_type = other DNA
tctattggtaaggggtataat

SEQ ID NO: 42570 - DNA, 21 bp, synthetic construct
  misc_feature 1..21: note = Description of Artificial Sequence: Synthetic oligonucleotide
  source 1..21: mol_type = other DNA
taccaaaaagaaagagtcgtc

SEQ ID NO: 42571 - DNA, 21 bp, synthetic construct
  misc_feature 1..21: note = Description of Artificial Sequence: Synthetic oligonucleotide
  source 1..21: mol_type = other DNA
aattcggggaggaattctgtt

SEQ ID NO: 42572 - DNA, 21 bp, synthetic construct
  misc_feature 1..21: note = Description of Artificial Sequence: Synthetic oligonucleotide
  source 1..21: mol_type = other DNA
tgccacaaaagacccggcgaa

SEQ ID NO: 42573 - DNA, 21 bp, synthetic construct
  misc_feature 1..21: note = Description of Artificial Sequence: Synthetic oligonucleotide
  source 1..21: mol_type = other DNA
aatagtaatctgtcgactcag

SEQ ID NO: 42574 - DNA, 21 bp, synthetic construct
  misc_feature 1..21: note = Description of Artificial Sequence: Synthetic oligonucleotide
  source 1..21: mol_type = other DNA
tcttctgggggtaatatgagt

SEQ ID NO: 42575 - DNA, 21 bp, synthetic construct
  misc_feature 1..21: note = Description of Artificial Sequence: Synthetic oligonucleotide
  source 1..21: mol_type = other DNA
aaggattttggtcagatgcgg

SEQ ID NO: 42576 - DNA, 21 bp, synthetic construct
  misc_feature 1..21: note = Description of Artificial Sequence: Synthetic oligonucleotide
  source 1..21: mol_type = other DNA
tctattaagactgttactaat

SEQ ID NO: 42577 - DNA, 21 bp, synthetic construct
  misc_feature 1..21: note = Description of Artificial Sequence: Synthetic oligonucleotide
  source 1..21: mol_type = other DNA
gaagtcttcagcagccaaaaa

SEQ ID NO: 42578 - DNA, 21 bp, synthetic construct
  misc_feature 1..21: note = Description of Artificial Sequence: Synthetic oligonucleotide
  source 1..21: mol_type = other DNA
aatggttttaatagtaataat

SEQ ID NO: 42579 - DNA, 21 bp, synthetic construct
  misc_feature 1..21: note = Description of Artificial Sequence: Synthetic oligonucleotide
  source 1..21: mol_type = other DNA
gccagcagagccccccccggc

SEQ ID NO: 42580 - DNA, 21 bp, synthetic construct
  misc_feature 1..21: note = Description of Artificial Sequence: Synthetic oligonucleotide
  source 1..21: mol_type = other DNA
catctttattctcctcgtggt

SEQ ID NO: 42581 - DNA, 21 bp, synthetic construct
  misc_feature 1..21: note = Description of Artificial Sequence: Synthetic oligonucleotide
  source 1..21: mol_type = other DNA
agtcagattccgccgtctact

SEQ ID NO: 42582 - DNA, 21 bp, synthetic construct
  misc_feature 1..21: note = Description of Artificial Sequence: Synthetic oligonucleotide
  source 1..21: mol_type = other DNA
aacaacaaaggcaaccccggc

SEQ ID NO: 42583 - DNA, 21 bp, synthetic construct
  misc_feature 1..21: note = Description of Artificial Sequence: Synthetic oligonucleotide
  source 1..21: mol_type = other DNA
cccaaagccagacaacacaac

SEQ ID NO: 42584 - DNA, 21 bp, synthetic construct
  misc_feature 1..21: note = Description of Artificial Sequence: Synthetic oligonucleotide
  source 1..21: mol_type = other DNA
aaagccaccgtccccgccggc

SEQ ID NO: 42585 - DNA, 21 bp, synthetic construct
  misc_feature 1..21: note = Description of Artificial Sequence: Synthetic oligonucleotide
  source 1..21: mol_type = other DNA
cctgttcgggagggttctatt

SEQ ID NO: 42586 - DNA, 21 bp, synthetic construct
  misc_feature 1..21: note = Description of Artificial Sequence: Synthetic oligonucleotide
  source 1..21: mol_type = other DNA
aatccttcggagaagatgttg

SEQ ID NO: 42587 - DNA, 21 bp, synthetic construct
  misc_feature 1..21: note = Description of Artificial Sequence: Synthetic oligonucleotide
  source 1..21: mol_type = other DNA
aaaatcaacaccagaaacatg

SEQ ID NO: 42588 - DNA, 21 bp, synthetic construct
  misc_feature 1..21: note = Description of Artificial Sequence: Synthetic oligonucleotide
  source 1..21: mol_type = other DNA
ggtgttaataataatattaat

SEQ ID NO: 42589 - DNA, 21 bp, synthetic construct
  misc_feature 1..21: note = Description of Artificial Sequence: Synthetic oligonucleotide
  source 1..21: mol_type = other DNA
agcttcaccaaaggcgccggc

SEQ ID NO: 42590 - DNA, 21 bp, synthetic construct
  misc_feature 1..21: note = Description of Artificial Sequence: Synthetic oligonucleotide
  source 1..21: mol_type = other DNA
attcagaatagttctaatact

SEQ ID NO: 42591 - DNA, 21 bp, synthetic construct
  misc_feature 1..21: note = Description of Artificial Sequence: Synthetic oligonucleotide
  source 1..21: mol_type = other DNA
ctcgcccaagaaagaggcacc

SEQ ID NO: 42592 - DNA, 21 bp, synthetic construct
  misc_feature 1..21: note = Description of Artificial Sequence: Synthetic oligonucleotide
  source 1..21: mol_type = other DNA
gaagtcagaagacaaagcacc

SEQ ID NO: 42593 - DNA, 21 bp, synthetic construct
  misc_feature 1..21: note = Description of Artificial Sequence: Synthetic oligonucleotide
  source 1..21: mol_type = other DNA
ctcagcagcacccacatgacc

SEQ ID NO: 42594 - DNA, 21 bp, synthetic construct
  misc_feature 1..21: note = Description of Artificial Sequence: Synthetic oligonucleotide
  source 1..21: mol_type = other DNA
attcagtcgcctgggaatatg

SEQ ID NO: 42595 - DNA, 21 bp, synthetic construct
  misc_feature 1..21: note = Description of Artificial Sequence: Synthetic oligonucleotide
  source 1..21: mol_type = other DNA
tttaattcgacggctaatcgg

SEQ ID NO: 42596 - DNA, 21 bp, synthetic construct
  misc_feature 1..21: note = Description of Artificial Sequence: Synthetic oligonucleotide
  source 1..21: mol_type = other DNA
aaaaaccaagcccccctcctc

SEQ ID NO: 42597 - DNA, 21 bp, synthetic construct
  misc_feature 1..21: note = Description of Artificial Sequence: Synthetic oligonucleotide
  source 1..21: mol_type = other DNA
agcgtcgacaccagaaccggc

SEQ ID NO: 42598 - DNA, 21 bp, synthetic construct
  misc_feature 1..21: note = Description of Artificial Sequence: Synthetic oligonucleotide
  source 1..21: mol_type = other DNA
aaagccggccaagaaagaacc

SEQ ID NO: 42599 - DNA, 21 bp, synthetic construct
  misc_feature 1..21: note = Description of Artificial Sequence: Synthetic oligonucleotide
  source 1..21: mol_type = other DNA
tttcttacggggaatactgct

SEQ ID NO: 42600 - DNA, 21 bp, synthetic construct
  misc_feature 1..21: note = Description of Artificial Sequence: Synthetic oligonucleotide
  source 1..21: mol_type = other DNA
gacaacggcgacggctacccc

SEQ ID NO: 42601 - DNA, 21 bp, synthetic construct
  misc_feature 1..21: note = Description of Artificial Sequence: Synthetic oligonucleotide
  source 1..21: mol_type = other DNA
tattctgggggtaatatgagt

SEQ ID NO: 42602 - DNA, 21 bp, synthetic construct
  misc_feature 1..21: note = Description of Artificial Sequence: Synthetic oligonucleotide
  source 1..21: mol_type = other DNA
ctcatcagcaccgcccaaaga

SEQ ID NO: 42603 - DNA, 21 bp, synthetic construct
  misc_feature 1..21: note = Description of Artificial Sequence: Synthetic oligonucleotide
  source 1..21: mol_type = other DNA
attcctgcgaattcttttaag

SEQ ID NO: 42604 - DNA, 21 bp, synthetic construct
  misc_feature 1..21: note = Description of Artificial Sequence: Synthetic oligonucleotide
  source 1..21: mol_type = other DNA
tctatgtctgagcatctgaag

SEQ ID NO: 42605 - DNA, 21 bp, synthetic construct
  misc_feature 1..21: note = Description of Artificial Sequence: Synthetic oligonucleotide
  source 1..21: mol_type = other DNA
gattattctagtgatagttcg

SEQ ID NO: 42606 - DNA, 21 bp, synthetic construct
  misc_feature 1..21: note = Description of Artificial Sequence: Synthetic oligonucleotide
  source 1..21: mol_type = other DNA
gaaaccaccacccccagaaaa

SEQ ID NO: 42607 - DNA, 21 bp, synthetic construct
  misc_feature 1..21: note = Description of Artificial Sequence: Synthetic oligonucleotide
  source 1..21: mol_type = other DNA
aatcctggggagtcgcatcgt

SEQ ID NO: 42608 - DNA, 21 bp, synthetic construct
  misc_feature 1..21: note = Description of Artificial Sequence: Synthetic oligonucleotide
  source 1..21: mol_type = other DNA
tctttgggttctggttttcag

SEQ ID NO: 42609 - DNA, 21 bp, synthetic construct
  misc_feature 1..21: note = Description of Artificial Sequence: Synthetic oligonucleotide
  source 1..21: mol_type = other DNA
tatattcataatccgactggt

SEQ ID NO: 42610 - DNA, 21 bp, synthetic construct
  misc_feature 1..21: note = Description of Artificial Sequence: Synthetic oligonucleotide
  source 1..21: mol_type = other DNA
catacttcgagtaattctctt

SEQ ID NO: 42611 - DNA, 21 bp, synthetic construct
  misc_feature 1..21: note = Description of Artificial Sequence: Synthetic oligonucleotide
  source 1..21: mol_type = other DNA
aataatagtaagagtcagatt

SEQ ID NO: 42612 - DNA, 21 bp, synthetic construct
  misc_feature 1..21: note = Description of Artificial Sequence: Synthetic oligonucleotide
  source 1..21: mol_type = other DNA
gaagtcaacaccagaagcaga

SEQ ID NO: 42613 - DNA, 21 bp, synthetic construct
  misc_feature 1..21: note = Description of Artificial Sequence: Synthetic oligonucleotide
  source 1..21: mol_type = other DNA
catacggctaatagtcagagt

SEQ ID NO: 42614 - DNA, 21 bp, synthetic construct
  misc_feature 1..21: note = Description of Artificial Sequence: Synthetic oligonucleotide
  source 1..21: mol_type = other DNA
ggtccggcgaatactagtggt

SEQ ID NO: 42615 - DNA, 21 bp, synthetic construct
  misc_feature 1..21: note = Description of Artificial Sequence: Synthetic oligonucleotide
  source 1..21: mol_type = other DNA
cccgccaaaagccccgccacc

SEQ ID NO: 42616 - DNA, 21 bp, synthetic construct
  misc_feature 1..21: note = Description of Artificial Sequence: Synthetic oligonucleotide
  source 1..21: mol_type = other DNA
ttcagcgccagcggcgccaga

SEQ ID NO: 42617 - DNA, 21 bp, synthetic construct
  misc_feature 1..21: note = Description of Artificial Sequence: Synthetic oligonucleotide
  source 1..21: mol_type = other DNA
caacaaggcagaaccgccggc

SEQ ID NO: 42618 - DNA, 21 bp, synthetic construct
  misc_feature 1..21: note = Description of Artificial Sequence: Synthetic oligonucleotide
  source 1..21: mol_type = other DNA
tcgcgtgctgcgcattatggg

SEQ ID NO: 42619 - DNA, 21 bp, synthetic construct
  misc_feature 1..21: note = Description of Artificial Sequence: Synthetic oligonucleotide
  source 1..21: mol_type = other DNA
ggcctcgccagagccggccac

SEQ ID NO: 42620 - DNA, 21 bp, synthetic construct
  misc_feature 1..21: note = Description of Artificial Sequence: Synthetic oligonucleotide
  source 1..21: mol_type = other DNA
agtactactgggggggctagt

SEQ ID NO: 42621 - DNA, 21 bp, synthetic construct
  misc_feature 1..21: note = Description of Artificial Sequence: Synthetic oligonucleotide
  source 1..21: mol_type = other DNA
ggttctaatattaataatggt

SEQ ID NO: 42622 - DNA, 21 bp, synthetic construct
  misc_feature 1..21: note = Description of Artificial Sequence: Synthetic oligonucleotide
  source 1..21: mol_type = other DNA
attcagacgcatactagtaat

SEQ ID NO: 42623 - DNA, 21 bp, synthetic construct
  misc_feature 1..21: note = Description of Artificial Sequence: Synthetic oligonucleotide
  source 1..21: mol_type = other DNA
tcttattcggagctggttcgg

SEQ ID NO: 42624 - DNA, 21 bp, synthetic construct
  misc_feature 1..21: note = Description of Artificial Sequence: Synthetic oligonucleotide
  source 1..21: mol_type = other DNA
ctcggcagcagcaccatcttc

SEQ ID NO: 42625 - DNA, 21 bp, synthetic construct
  misc_feature 1..21: note = Description of Artificial Sequence: Synthetic oligonucleotide
  source 1..21: mol_type = other DNA
atggccggcaacagcgtcccc

SEQ ID NO: 42626 - DNA, 21 bp, synthetic construct
  misc_feature 1..21: note = Description of Artificial Sequence: Synthetic oligonucleotide
  source 1..21: mol_type = other DNA
catgatagtaaggttatttct

SEQ ID NO: 42627 - DNA, 21 bp, synthetic construct
  misc_feature 1..21: note = Description of Artificial Sequence: Synthetic oligonucleotide
  source 1..21: mol_type = other DNA
ttcatcggcaccagcaccccc

SEQ ID NO: 42628 - DNA, 21 bp, synthetic construct
  misc_feature 1..21: note = Description of Artificial Sequence: Synthetic oligonucleotide
  source 1..21: mol_type = other DNA
gtcctcagagacggccacaga

SEQ ID NO: 42629 - DNA, 21 bp, synthetic construct
  misc_feature 1..21: note = Description of Artificial Sequence: Synthetic oligonucleotide
  source 1..21: mol_type = other DNA
accggcgacagccccctcgcc

SEQ ID NO: 42630 - DNA, 21 bp, synthetic construct
  misc_feature 1..21: note = Description of Artificial Sequence: Synthetic oligonucleotide
  source 1..21: mol_type = other DNA
cccgtcctcggctacagctac

SEQ ID NO: 42631 - DNA, 21 bp, synthetic construct
  misc_feature 1..21: note = Description of Artificial Sequence: Synthetic oligonucleotide
  source 1..21: mol_type = other DNA
gacttcagcgaaaaaagactc

SEQ ID NO: 42632 - DNA, 21 bp, synthetic construct
  misc_feature 1..21: note = Description of Artificial Sequence: Synthetic oligonucleotide
  source 1..21: mol_type = other DNA
gggaatcagagtcctcgggtt

SEQ ID NO: 42633 - DNA, 21 bp, synthetic construct
  misc_feature 1..21: note = Description of Artificial Sequence: Synthetic oligonucleotide
  source 1..21: mol_type = other DNA
cctcgggatactactgggtct

SEQ ID NO: 42634 - DNA, 21 bp, synthetic construct
  misc_feature 1..21: note = Description of Artificial Sequence: Synthetic oligonucleotide
  source 1..21: mol_type = other DNA
cttagggatacgaatatgaat

SEQ ID NO: 42635 - DNA, 21 bp, synthetic construct
  misc_feature 1..21: note = Description of Artificial Sequence: Synthetic oligonucleotide
  source 1..21: mol_type = other DNA
tctgttactagtcctaataag

SEQ ID NO: 42636 - DNA, 21 bp, synthetic construct
  misc_feature 1..21: note = Description of Artificial Sequence: Synthetic oligonucleotide
  source 1..21: mol_type = other DNA
gacagcaaacacaccagcacc

SEQ ID NO: 42637 - DNA, 21 bp, synthetic construct
  misc_feature 1..21: note = Description of Artificial Sequence: Synthetic oligonucleotide
  source 1..21: mol_type = other DNA
accggccaacaaaccgccacc

SEQ ID NO: 42638 - DNA, 21 bp, synthetic construct
  misc_feature 1..21: note = Description of Artificial Sequence: Synthetic oligonucleotide
  source 1..21: mol_type = other DNA
tttatgggtcgtcctaatgtt

SEQ ID NO: 42639 - DNA, 21 bp, synthetic construct
  misc_feature 1..21: note = Description of Artificial Sequence: Synthetic oligonucleotide
  source 1..21: mol_type = other DNA
gtccaacacacccacagcggc

SEQ ID NO: 42640 - DNA, 21 bp, synthetic construct
  misc_feature 1..21: note = Description of Artificial Sequence: Synthetic oligonucleotide
  source 1..21: mol_type = other DNA
agaaacgacaaacaaaacagc

SEQ ID NO: 42641 - DNA, 21 bp, synthetic construct
  misc_feature 1..21: note = Description of Artificial Sequence: Synthetic oligonucleotide
  source 1..21: mol_type = other DNA
aacgacgtcaaacaaggccac

SEQ ID NO: 42642 - DNA, 21 bp, synthetic construct
  misc_feature 1..21: note = Description of Artificial Sequence: Synthetic oligonucleotide
  source 1..21: mol_type = other DNA
tataataatggtggtactcgt

SEQ ID NO: 42643 - DNA, 21 bp, synthetic construct
  misc_feature 1..21: note = Description of Artificial Sequence: Synthetic oligonucleotide
  source 1..21: mol_type = other DNA
tctttttcgaagggttctagt

SEQ ID NO: 42644 - DNA, 21 bp, synthetic construct
  misc_feature 1..21: note = Description of Artificial Sequence: Synthetic oligonucleotide
  source 1..21: mol_type = other DNA
cttgggcctgggaagaatact

SEQ ID NO: 42645 - DNA, 21 bp, synthetic construct
  misc_feature 1..21: note = Description of Artificial Sequence: Synthetic oligonucleotide
  source 1..21: mol_type = other DNA
cccagcaacaaaaccaacagc

SEQ ID NO: 42646 - DNA, 21 bp, synthetic construct
  misc_feature 1..21: note = Description of Artificial Sequence: Synthetic oligonucleotide
  source 1..21: mol_type = other DNA
ggcctccaaaccccccccaga

SEQ ID NO: 42647 - DNA, 21 bp, synthetic construct
  misc_feature 1..21: note = Description of Artificial Sequence: Synthetic oligonucleotide
  source 1..21: mol_type = other DNA
actcatctgactggtgttcag

SEQ ID NO: 42648 - DNA, 21 bp, synthetic construct
  misc_feature 1..21: note = Description of Artificial Sequence: Synthetic oligonucleotide
  source 1..21: mol_type = other DNA
actggtactgggagttttcat

SEQ ID NO: 42649 - DNA, 21 bp, synthetic construct
  misc_feature 1..21: note = Description of Artificial Sequence: Synthetic oligonucleotide
  source 1..21: mol_type = other DNA
ttggttcgggcgactcatgag

SEQ ID NO: 42650 - DNA, 21 bp, synthetic construct
  misc_feature 1..21: note = Description of Artificial Sequence: Synthetic oligonucleotide
  source 1..21: mol_type = other DNA
gccctcgccaacccccaaacc

SEQ ID NO: 42651 - DNA, 21 bp, synthetic construct
  misc_feature 1..21: note = Description of Artificial Sequence: Synthetic oligonucleotide
  source 1..21: mol_type = other DNA
tttgtgaagacgcatagtgcg

SEQ ID NO: 42652 - DNA, 21 bp, synthetic construct
  misc_feature 1..21: note = Description of Artificial Sequence: Synthetic oligonucleotide
  source 1..21: mol_type = other DNA
agagtcgaaagccccaccaac

SEQ ID NO: 42653 - DNA, 21 bp, synthetic construct
  misc_feature 1..21: note = Description of Artificial Sequence: Synthetic oligonucleotide
  source 1..21: mol_type = other DNA
actgctaattcgcctgcgacg

SEQ ID NO: 42654 - DNA, 21 bp, synthetic construct
  misc_feature 1..21: note = Description of Artificial Sequence: Synthetic oligonucleotide
  source 1..21: mol_type = other DNA
cagattaagactatttctgct

SEQ ID NO: 42655 - DNA, 21 bp, synthetic construct
  misc_feature 1..21: note = Description of Artificial Sequence: Synthetic oligonucleotide
  source 1..21: mol_type = other DNA
cattatacggggaagcagaat

SEQ ID NO: 42656 - DNA, 21 bp, synthetic construct
  misc_feature 1..21: note = Description of Artificial Sequence: Synthetic oligonucleotide
  source 1..21: mol_type = other DNA
ctggttcagggtggtgttaat

SEQ ID NO: 42657 - DNA, 21 bp, synthetic construct
  misc_feature 1..21: note = Description of Artificial Sequence: Synthetic oligonucleotide
  source 1..21: mol_type = other DNA
tcttcgcaggcggtttttcgg

SEQ ID NO: 42658 - DNA, 21 bp, synthetic construct
  misc_feature 1..21: note = Description of Artificial Sequence: Synthetic oligonucleotide
  source 1..21: mol_type = other DNA
catgggcagacggggatgatt

SEQ ID NO: 42659 - DNA, 21 bp, synthetic construct
  misc_feature 1..21: note = Description of Artificial Sequence: Synthetic oligonucleotide
  source 1..21: mol_type = other DNA
gggtctgtgagtccgatgacg

SEQ ID NO: 42660 - DNA, 21 bp, synthetic construct
  misc_feature 1..21: note = Description of Artificial Sequence: Synthetic oligonucleotide
  source 1..21: mol_type = other DNA
tctagttttcaggcgaataag

SEQ ID NO: 42661 - DNA, 21 bp, synthetic construct
  misc_feature 1..21: note = Description of Artificial Sequence: Synthetic oligonucleotide
  source 1..21: mol_type = other DNA
ggcaccgacaacggcatccaa

SEQ ID NO: 42662 - DNA, 21 bp, synthetic construct
  misc_feature 1..21: note = Description of Artificial Sequence: Synthetic oligonucleotide
  source 1..21: mol_type = other DNA
agagtcatgagagaaagccaa

SEQ ID NO: 42663 - DNA, 21 bp, synthetic construct
  misc_feature 1..21: note = Description of Artificial Sequence: Synthetic oligonucleotide
  source 1..21: mol_type = other DNA
caggcgaatactagtacggag

SEQ ID NO: 42664 - DNA, 21 bp, synthetic construct
  misc_feature 1..21: note = Description of Artificial Sequence: Synthetic oligonucleotide
  source 1..21: mol_type = other DNA
cggattcctaataatccgagt

SEQ ID NO: 42665 - DNA, 21 bp, synthetic construct
  misc_feature 1..21: note = Description of Artificial Sequence: Synthetic oligonucleotide
  source 1..21: mol_type = other DNA
aataataggagtgggatgggt

SEQ ID NO: 42666 - DNA, 21 bp, synthetic construct
  misc_feature 1..21: note = Description of Artificial Sequence: Synthetic oligonucleotide
  source 1..21: mol_type = other DNA
cccaccgtccaagtcaccaaa

SEQ ID NO: 42667 - DNA, 21 bp, synthetic construct
  misc_feature 1..21: note = Description of Artificial Sequence: Synthetic oligonucleotide
  source 1..21: mol_type = other DNA
ctctacagcggcagccaagaa

SEQ ID NO: 42668 - DNA, 21 bp, synthetic construct
  misc_feature 1..21: note = Description of Artificial Sequence: Synthetic oligonucleotide
  source 1..21: mol_type = other DNA
aagattctgaatgttggtact

SEQ ID NO: 42669 - DNA, 21 bp, synthetic construct
  misc_feature 1..21: note = Description of Artificial Sequence: Synthetic oligonucleotide
  source 1..21: mol_type = other DNA
tgcccccaaagcagagaaaaa

SEQ ID NO: 42670 - DNA, 21 bp, synthetic construct
  misc_feature 1..21: note = Description of Artificial Sequence: Synthetic oligonucleotide
  source 1..21: mol_type = other DNA
acttctaatagtaatattgcg

SEQ ID NO: 42671 - DNA, 21 bp, synthetic construct
  misc_feature 1..21: note = Description of Artificial Sequence: Synthetic oligonucleotide
  source 1..21: mol_type = other DNA
cctagtgtgaataggactcct

SEQ ID NO: 42672 - DNA, 21 bp, synthetic construct
  misc_feature 1..21: note = Description of Artificial Sequence: Synthetic oligonucleotide
  source 1..21: mol_type = other DNA
aagcttaataagtctcaggcg

SEQ ID NO: 42673 - DNA, 21 bp, synthetic construct
  misc_feature 1..21: note = Description of Artificial Sequence: Synthetic oligonucleotide
  source 1..21: mol_type = other DNA
cataatagtaagagtcagatt

SEQ ID NO: 42674 - DNA, 21 bp, synthetic construct
  misc_feature 1..21: note = Description of Artificial Sequence: Synthetic oligonucleotide
  source 1..21: mol_type = other DNA
gacagcaaacaaaacctcacc

SEQ ID NO: 42675 - DNA, 21 bp, synthetic construct
  misc_feature 1..21: note = Description of Artificial Sequence: Synthetic oligonucleotide
  source 1..21: mol_type = other DNA
gagaatcggacttctgttcag

SEQ ID NO: 42676 - DNA, 21 bp, synthetic construct
  misc_feature 1..21: note = Description of Artificial Sequence: Synthetic oligonucleotide
  source 1..21: mol_type = other DNA
ggtcctgagaatggtattcag

SEQ ID NO: 42677 - DNA, 21 bp, synthetic construct
  misc_feature 1..21: note = Description of Artificial Sequence: Synthetic oligonucleotide
  source 1..21: mol_type = other DNA
acgaggtataatagttctctg

SEQ ID NO: 42678 - DNA, 21 bp, synthetic construct
  misc_feature 1..21: note = Description of Artificial Sequence: Synthetic oligonucleotide
  source 1..21: mol_type = other DNA
tttggttcgtcgaatgctgtt

SEQ ID NO: 42679 - DNA, 21 bp, synthetic construct
  misc_feature 1..21: note = Description of Artificial Sequence: Synthetic oligonucleotide
  source 1..21: mol_type = other DNA
agcgccgaccacatcagaaac

SEQ ID NO: 42680 - DNA, 21 bp, synthetic construct
  misc_feature 1..21: note = Description of Artificial Sequence: Synthetic oligonucleotide
  source 1..21: mol_type = other DNA
tttcagaaggagcggtatcag

SEQ ID NO: 42681 - DNA, 21 bp, synthetic construct
  misc_feature 1..21: note = Description of Artificial Sequence: Synthetic oligonucleotide
  source 1..21: mol_type = other DNA
cttgcgccggggcatggtaat

SEQ ID NO: 42682 - DNA, 21 bp, synthetic construct
  misc_feature 1..21: note = Description of Artificial Sequence: Synthetic oligonucleotide
  source 1..21: mol_type = other DNA
aatactactgcgaagtctagt

SEQ ID NO: 42683 - DNA, 21 bp, synthetic construct
  misc_feature 1..21: note = Description of Artificial Sequence: Synthetic oligonucleotide
  source 1..21: mol_type = other DNA
acccccgtcaacagaacccac

SEQ ID NO: 42684 - DNA, 21 bp, synthetic construct
  misc_feature 1..21: note = Description of Artificial Sequence: Synthetic oligonucleotide
  source 1..21: mol_type = other DNA
cctagtactggtaattcggtg

SEQ ID NO: 42685 - DNA, 21 bp, synthetic construct
  misc_feature 1..21: note = Description of Artificial Sequence: Synthetic oligonucleotide
  source 1..21: mol_type = other DNA
ttttctcagcattcttctaat

SEQ ID NO: 42686 - DNA, 21 bp, synthetic construct
  misc_feature 1..21: note = Description of Artificial Sequence: Synthetic oligonucleotide
  source 1..21: mol_type = other DNA
gtgaatgatcataatgttcgt

SEQ ID NO: 42687 - DNA, 21 bp, synthetic construct
  misc_feature 1..21: note = Description of Artificial Sequence: Synthetic oligonucleotide
  source 1..21: mol_type = other DNA
ggcagctacagcaaccccacc

SEQ ID NO: 42688 - DNA, 21 bp, synthetic construct
  misc_feature 1..21: note = Description of Artificial Sequence: Synthetic oligonucleotide
  source 1..21: mol_type = other DNA
caggatctgcaggctcgtgtt

SEQ ID NO: 42689 - DNA, 21 bp, synthetic construct
  misc_feature 1..21: note = Description of Artificial Sequence: Synthetic oligonucleotide
  source 1..21: mol_type = other DNA
ctcaacgccggcaacaccaga

SEQ ID NO: 42690 - DNA, 21 bp, synthetic construct
  misc_feature 1..21: note = Description of Artificial Sequence: Synthetic oligonucleotide
  source 1..21: mol_type = other DNA
gaagtcaccaacgcccccaaa

SEQ ID NO: 42691 - DNA, 21 bp, synthetic construct
  misc_feature 1..21: note = Description of Artificial Sequence: Synthetic oligonucleotide
  source 1..21: mol_type = other DNA
caccccagcaacaaacccctc

SEQ ID NO: 42692 - DNA, 21 bp, synthetic construct
  misc_feature 1..21: note = Description of Artificial Sequence: Synthetic oligonucleotide
  source 1..21: mol_type = other DNA
aacgattctggacagaatcaa

SEQ ID NO: 42693 - DNA, 21 bp, synthetic construct
  misc_feature 1..21: note = Description of Artificial Sequence: Synthetic oligonucleotide
  source 1..21: mol_type = other DNA
ctcggcaaacccgcccaaccc

SEQ ID NO: 42694 - DNA, 21 bp, synthetic construct
  misc_feature 1..21: note = Description of Artificial Sequence: Synthetic oligonucleotide
  source 1..21: mol_type = other DNA
aatattaagggtgcttcgacg

SEQ ID NO: 42695 - DNA, 21 bp, synthetic construct
  misc_feature 1..21: note = Description of Artificial Sequence: Synthetic oligonucleotide
  source 1..21: mol_type = other DNA
aatacttctacgaatggtatt

SEQ ID NO: 42696 - DNA, 21 bp, synthetic construct
  misc_feature 1..21: note = Description of Artificial Sequence: Synthetic oligonucleotide
  source 1..21: mol_type = other DNA
aatttgggtaattctctgaag

SEQ ID NO: 42697 - DNA, 21 bp, synthetic construct
  misc_feature 1..21: note = Description of Artificial Sequence: Synthetic oligonucleotide
  source 1..21: mol_type = other DNA
aaccccggcagacaacaattc

SEQ ID NO: 42698 - DNA, 21 bp, synthetic construct
  misc_feature 1..21: note = Description of Artificial Sequence: Synthetic oligonucleotide
  source 1..21: mol_type = other DNA
actaatccgaagtcgtcttct

SEQ ID NO: 42699 - DNA, 21 bp, synthetic construct
  misc_feature 1..21: note = Description of Artificial Sequence: Synthetic oligonucleotide
  source 1..21: mol_type = other DNA
tttccgagtgtttcgacgact

SEQ ID NO: 42700 - DNA, 21 bp, synthetic construct
  misc_feature 1..21: note = Description of Artificial Sequence: Synthetic oligonucleotide
  source 1..21: mol_type = other DNA
agcagcgaccaacccagactc

SEQ ID NO: 42701 - DNA, 21 bp, synthetic construct
  misc_feature 1..21: note = Description of Artificial Sequence: Synthetic oligonucleotide
  source 1..21: mol_type = other DNA
gccgaacaaagacccggccaa

SEQ ID NO: 42702 - DNA, 21 bp, synthetic construct
  misc_feature 1..21: note = Description of Artificial Sequence: Synthetic oligonucleotide
  source 1..21: mol_type = other DNA
catgataatgctaattataat

SEQ ID NO: 42703 - DNA, 21 bp, synthetic construct
  misc_feature 1..21: note = Description of Artificial Sequence: Synthetic oligonucleotide
  source 1..21: mol_type = other DNA
agcagcgtccaacacaccggc

SEQ ID NO: 42704 - DNA, 21 bp, synthetic construct
  misc_feature 1..21: note = Description of Artificial Sequence: Synthetic oligonucleotide
  source 1..21: mol_type = other DNA
atgaagaatacgactgtggtt

SEQ ID NO: 42705 - DNA, 21 bp, synthetic construct
  misc_feature 1..21: note = Description of Artificial Sequence: Synthetic oligonucleotide
  source 1..21: mol_type = other DNA
taccccctcagcagaagcacc

SEQ ID NO: 42706 - DNA, 21 bp, synthetic construct
  misc_feature 1..21: note = Description of Artificial Sequence: Synthetic oligonucleotide
  source 1..21: mol_type = other DNA
aatgctaatagtcgtcctgtt

SEQ ID NO: 42707 - DNA, 21 bp, synthetic construct
  misc_feature 1..21: note = Description of Artificial Sequence: Synthetic oligonucleotide
  source 1..21: mol_type = other DNA
gtgagtggtcaggggaattct

SEQ ID NO: 42708 - DNA, 21 bp, synthetic construct
  misc_feature 1..21: note = Description of Artificial Sequence: Synthetic oligonucleotide
  source 1..21: mol_type = other DNA
cgtcattatacgggtgatagt

SEQ ID NO: 42709 - DNA, 21 bp, synthetic construct
  misc_feature 1..21: note = Description of Artificial Sequence: Synthetic oligonucleotide
  source 1..21: mol_type = other DNA
caacaatacgccaaacaagcc

SEQ ID NO: 42710 - DNA, 21 bp, synthetic construct
  misc_feature 1..21: note = Description of Artificial Sequence: Synthetic oligonucleotide
  source 1..21: mol_type = other DNA
ctcccccaaggcagcatcagc

SEQ ID NO: 42711 - DNA, 21 bp, synthetic construct
  misc_feature 1..21: note = Description of Artificial Sequence: Synthetic oligonucleotide
  source 1..21: mol_type = other DNA
cctggtgataggggtaaggtt

SEQ ID NO: 42712 - DNA, 21 bp, synthetic construct
  misc_feature 1..21: note = Description of Artificial Sequence: Synthetic oligonucleotide
  source 1..21: mol_type = other DNA
cataataattctaagagtgcg

SEQ ID NO: 42713 - DNA, 21 bp, synthetic construct
  misc_feature 1..21: note = Description of Artificial Sequence: Synthetic oligonucleotide
  source 1..21: mol_type = other DNA
tcttctacgagtagtccgtat

SEQ ID NO: 42714 - DNA, 21 bp, synthetic construct
  misc_feature 1..21: note = Description of Artificial Sequence: Synthetic oligonucleotide
  source 1..21: mol_type = other DNA
attttgggtaataagtctagt

SEQ ID NO: 42715 - DNA, 21 bp, synthetic construct
  misc_feature 1..21: note = Description of Artificial Sequence: Synthetic oligonucleotide
  source 1..21: mol_type = other DNA
gcttctactccgaataatact

SEQ ID NO: 42716 - DNA, 21 bp, synthetic construct
  misc_feature 1..21: note = Description of Artificial Sequence: Synthetic oligonucleotide
  source 1..21: mol_type = other DNA
gggaatacgggtagttatcag

SEQ ID NO: 42717 - DNA, 21 bp, synthetic construct
  misc_feature 1..21: note = Description of Artificial Sequence: Synthetic oligonucleotide
  source 1..21: mol_type = other DNA
accggccaacaacccgccacc

SEQ ID NO: 42718 - DNA, 21 bp, synthetic construct
  misc_feature 1..21: note = Description of Artificial Sequence: Synthetic oligonucleotide
  source 1..21: mol_type = other DNA
agcatcagcgacaaactcggc

SEQ ID NO: 42719 - DNA, 21 bp, synthetic construct
  misc_feature 1..21: note = Description of Artificial Sequence: Synthetic oligonucleotide
  source 1..21: mol_type = other DNA
attgctaatgcgcattataat

SEQ ID NO: 42720 - DNA, 21 bp, synthetic construct
  misc_feature 1..21: note = Description of Artificial Sequence: Synthetic oligonucleotide
  source 1..21: mol_type = other DNA
ctgggtgtgaagactccgact

SEQ ID NO: 42721 - DNA, 21 bp, synthetic construct
  misc_feature 1..21: note = Description of Artificial Sequence: Synthetic oligonucleotide
  source 1..21: mol_type = other DNA
ctgggtggtggtactttgagg

SEQ ID NO: 42722 - DNA, 21 bp, synthetic construct
  misc_feature 1..21: note = Description of Artificial Sequence: Synthetic oligonucleotide
  source 1..21: mol_type = other DNA
agaagacaagacacccaagaa

SEQ ID NO: 42723 - DNA, 21 bp, synthetic construct
  misc_feature 1..21: note = Description of Artificial Sequence: Synthetic oligonucleotide
  source 1..21: mol_type = other DNA
ggcaccgacagaaccctccac

SEQ ID NO: 42724 - DNA, 21 bp, synthetic construct
  misc_feature 1..21: note = Description of Artificial Sequence: Synthetic oligonucleotide
  source 1..21: mol_type = other DNA
actcagcagaatgggaggaat

SEQ ID NO: 42725 - DNA, 21 bp, synthetic construct
  misc_feature 1..21: note = Description of Artificial Sequence: Synthetic oligonucleotide
  source 1..21: mol_type = other DNA
agtgatcatcagagtgttcgg

SEQ ID NO: 42726 - DNA, 21 bp, synthetic construct
  misc_feature 1..21: note = Description of Artificial Sequence: Synthetic oligonucleotide
  source 1..21: mol_type = other DNA
ttgttgagttcgaagacggct

SEQ ID NO: 42727 - DNA, 21 bp, synthetic construct
  misc_feature 1..21: note = Description of Artificial Sequence: Synthetic oligonucleotide
  source 1..21: mol_type = other DNA
cctgtgcagcattcgagtaat

SEQ ID NO: 42728 - DNA, 21 bp, synthetic construct
  misc_feature 1..21: note = Description of Artificial Sequence: Synthetic oligonucleotide
  source 1..21: mol_type = other DNA
aatgggattagtaagtctaat

SEQ ID NO: 42729 - DNA, 21 bp, synthetic construct
  misc_feature 1..21: note = Description of Artificial Sequence: Synthetic oligonucleotide
  source 1..21: mol_type = other DNA
gagtctgctacgcctattagg

SEQ ID NO: 42730 - DNA, 21 bp, synthetic construct
  misc_feature 1..21: note = Description of Artificial Sequence: Synthetic oligonucleotide
  source 1..21: mol_type = other DNA
aatactactggtagtgggttg

SEQ ID NO: 42731 - DNA, 21 bp, synthetic construct
  misc_feature 1..21: note = Description of Artificial Sequence: Synthetic oligonucleotide
  source 1..21: mol_type = other DNA
agcagcagccccaacgtcaaa

SEQ ID NO: 42732 - DNA, 21 bp, synthetic construct
  misc_feature 1..21: note = Description of Artificial Sequence: Synthetic oligonucleotide
  source 1..21: mol_type = other DNA
gccaccaacagcacccccaga

SEQ ID NO: 42733 - DNA, 21 bp, synthetic construct
  misc_feature 1..21: note = Description of Artificial Sequence: Synthetic oligonucleotide
  source 1..21: mol_type = other DNA
tacagaaacacccacagcgaa

SEQ ID NO: 42734 - DNA, 21 bp, synthetic construct
  misc_feature 1..21: note = Description of Artificial Sequence: Synthetic oligonucleotide
  source 1..21: mol_type = other DNA
ctggataaggagcctaggggt

SEQ ID NO: 42735 - DNA, 21 bp, synthetic construct
  misc_feature 1..21: note = Description of Artificial Sequence: Synthetic oligonucleotide
  source 1..21: mol_type = other DNA
gtcggccacaaaggcggcccc

SEQ ID NO: 42736 - DNA, 21 bp, synthetic construct
  misc_feature 1..21: note = Description of Artificial Sequence: Synthetic oligonucleotide
  source 1..21: mol_type = other DNA
attgtttcgccggtttctaag

SEQ ID NO: 42737 - DNA, 21 bp, synthetic construct
  misc_feature 1..21: note = Description of Artificial Sequence: Synthetic oligonucleotide
  source 1..21: mol_type = other DNA
cccagaatgagagccgtcagc

SEQ ID NO: 42738 - DNA, 21 bp, synthetic construct
  misc_feature 1..21: note = Description of Artificial Sequence: Synthetic oligonucleotide
  source 1..21: mol_type = other DNA
tacagaaccacccacaccctc

SEQ ID NO: 42739 - DNA, 21 bp, synthetic construct
  misc_feature 1..21: note = Description of Artificial Sequence: Synthetic oligonucleotide
  source 1..21: mol_type = other DNA
aagaatgcgactgggattctg

SEQ ID NO: 42740 - DNA, 21 bp, synthetic construct
  misc_feature 1..21: note = Description of Artificial Sequence: Synthetic oligonucleotide
  source 1..21: mol_type = other DNA
aacggcagcggccaaaacaaa

SEQ ID NO: 42741 - DNA, 21 bp, synthetic construct
  misc_feature 1..21: note = Description of Artificial Sequence: Synthetic oligonucleotide
  source 1..21: mol_type = other DNA
aaccaaaaaaccagaaccgac

SEQ ID NO: 42742 - DNA, 21 bp, synthetic construct
  misc_feature 1..21: note = Description of Artificial Sequence: Synthetic oligonucleotide
  source 1..21: mol_type = other DNA
aaggttgggtctccgactgct

SEQ ID NO: 42743 - DNA, 21 bp, synthetic construct
  misc_feature 1..21: note = Description of Artificial Sequence: Synthetic oligonucleotide
  source 1..21: mol_type = other DNA
accaccgacaaaaaaaccgaa

SEQ ID NO: 42744 - DNA, 21 bp, synthetic construct
  misc_feature 1..21: note = Description of Artificial Sequence: Synthetic oligonucleotide
  source 1..21: mol_type = other DNA
gattctggttcttcgacgaag

SEQ ID NO: 42745 - DNA, 21 bp, synthetic construct
  misc_feature 1..21: note = Description of Artificial Sequence: Synthetic oligonucleotide
  source 1..21: mol_type = other DNA
aatactcagagttatacgagt

SEQ ID NO: 42746 - DNA, 21 bp, synthetic construct
  misc_feature 1..21: note = Description of Artificial Sequence: Synthetic oligonucleotide
  source 1..21: mol_type = other DNA
tttccgggtggtaatcatacg

SEQ ID NO: 42747 - DNA, 21 bp, synthetic construct
  misc_feature 1..21: note = Description of Artificial Sequence: Synthetic oligonucleotide
  source 1..21: mol_type = other DNA
cacaccgccacccccctcctc

SEQ ID NO: 42748 - DNA, 21 bp, synthetic construct
  misc_feature 1..21: note = Description of Artificial Sequence: Synthetic oligonucleotide
  source 1..21: mol_type = other DNA
aataattctactggggtggct

SEQ ID NO: 42749 - DNA, 21 bp, synthetic construct
  misc_feature 1..21: note = Description of Artificial Sequence: Synthetic oligonucleotide
  source 1..21: mol_type = other DNA
actccgagtgttactaatatg

SEQ ID NO: 42750 - DNA, 21 bp, synthetic construct
  misc_feature 1..21: note = Description of Artificial Sequence: Synthetic oligonucleotide
  source 1..21: mol_type = other DNA
cttacgtttaattcgtctggt

SEQ ID NO: 42751 - DNA, 21 bp, synthetic construct
  misc_feature 1..21: note = Description of Artificial Sequence: Synthetic oligonucleotide
  source 1..21: mol_type = other DNA
agagacggcaccccccccacc

SEQ ID NO: 42752 - DNA, 21 bp, synthetic construct
  misc_feature 1..21: note = Description of Artificial Sequence: Synthetic oligonucleotide
  source 1..21: mol_type = other DNA
aacagaaaacacaccagcacc

SEQ ID NO: 42753 - DNA, 21 bp, synthetic construct
  misc_feature 1..21: note = Description of Artificial Sequence: Synthetic oligonucleotide
  source 1..21: mol_type = other DNA
catcttcagagtactgatcct

SEQ ID NO: 42754 - DNA, 21 bp, synthetic construct
  misc_feature 1..21: note = Description of Artificial Sequence: Synthetic oligonucleotide
  source 1..21: mol_type = other DNA
gaccccgacaccagaaaaagc

SEQ ID NO: 42755 - DNA, 21 bp, synthetic construct
  misc_feature 1..21: note = Description of Artificial Sequence: Synthetic oligonucleotide
  source 1..21: mol_type = other DNA
caaagattccaaagcagccaa

SEQ ID NO: 42756 - DNA, 21 bp, synthetic construct
  misc_feature 1..21: note = Description of Artificial Sequence: Synthetic oligonucleotide
  source 1..21: mol_type = other DNA
aattctaatactcgtggtcct

SEQ ID NO: 42757 - DNA, 21 bp, synthetic construct
  misc_feature 1..21: note = Description of Artificial Sequence: Synthetic oligonucleotide
  source 1..21: mol_type = other DNA
ggttctggtggggatcgtaat

SEQ ID NO: 42758 - DNA, 21 bp, synthetic construct
  misc_feature 1..21: note = Description of Artificial Sequence: Synthetic oligonucleotide
  source 1..21: mol_type = other DNA
cccagcacccaaagcagcagc

SEQ ID NO: 42759 - DNA, 21 bp, synthetic construct
  misc_feature 1..21: note = Description of Artificial Sequence: Synthetic oligonucleotide
  source 1..21: mol_type = other DNA
ctcaccaccagcgtctacaaa

SEQ ID NO: 42760 - DNA, 21 bp, synthetic construct
  misc_feature 1..21: note = Description of Artificial Sequence: Synthetic oligonucleotide
  source 1..21: mol_type = other DNA
ggtagtacgggtagttctatt

SEQ ID NO: 42761 - DNA, 21 bp, synthetic construct
  misc_feature 1..21: note = Description of Artificial Sequence: Synthetic oligonucleotide
  source 1..21: mol_type = other DNA
gctagtcttaagactcagatg

SEQ ID NO: 42762 - DNA, 21 bp, synthetic construct
  misc_feature 1..21: note = Description of Artificial Sequence: Synthetic oligonucleotide
  source 1..21: mol_type = other DNA
gactgcgtcagcagatgcaaa

SEQ ID NO: 42763 - DNA, 21 bp, synthetic construct
  misc_feature 1..21: note = Description of Artificial Sequence: Synthetic oligonucleotide
  source 1..21: mol_type = other DNA
agttttagtcctgcttctaat

SEQ ID NO: 42764 - DNA, 21 bp, synthetic construct
  misc_feature 1..21: note = Description of Artificial Sequence: Synthetic oligonucleotide
  source 1..21: mol_type = other DNA
aacagcacccccagcaccaga

SEQ ID NO: 42765 - DNA, 21 bp, synthetic construct
  misc_feature 1..21: note = Description of Artificial Sequence: Synthetic oligonucleotide
  source 1..21: mol_type = other DNA
cacgaactcagcagaaccacc

SEQ ID NO: 42766 - DNA, 21 bp, synthetic construct
  misc_feature 1..21: note = Description of Artificial Sequence: Synthetic oligonucleotide
  source 1..21: mol_type = other DNA
aatgatcgtggtcagaatggg

SEQ ID NO: 42767 - DNA, 21 bp, synthetic construct
  misc_feature 1..21: note = Description of Artificial Sequence: Synthetic oligonucleotide
  source 1..21: mol_type = other DNA
ccttctcatgaggggcagcag

SEQ ID NO: 42768 - DNA, 21 bp, synthetic construct
  misc_feature 1..21: note = Description of Artificial Sequence: Synthetic oligonucleotide
  source 1..21: mol_type = other DNA
cagggtgcgggggtttcgtct

SEQ ID NO: 42769 - DNA, 21 bp, synthetic construct
  misc_feature 1..21: note = Description of Artificial Sequence: Synthetic oligonucleotide
  source 1..21: mol_type = other DNA
aaaaccggcgaccaaatgggc

SEQ ID NO: 42770 - DNA, 21 bp, synthetic construct
  misc_feature 1..21: note = Description of Artificial Sequence: Synthetic oligonucleotide
  source 1..21: mol_type = other DNA
attaggtcgaaggagtctgcg

SEQ ID NO: 42771 - DNA, 21 bp, synthetic construct
  misc_feature 1..21: note = Description of Artificial Sequence: Synthetic oligonucleotide
  source 1..21: mol_type = other DNA
ggcctcggccaacaaaccaac

SEQ ID NO: 42772 - DNA, 21 bp, synthetic construct
  misc_feature 1..21: note = Description of Artificial Sequence: Synthetic oligonucleotide
  source 1..21: mol_type = other DNA
ccggggtatgggagtaatcat

SEQ ID NO: 42773 - DNA, 21 bp, synthetic construct
  misc_feature 1..21: note = Description of Artificial Sequence: Synthetic oligonucleotide
  source 1..21: mol_type = other DNA
caaagcgaaatcgtcaacaaa

SEQ ID NO: 42774 - DNA, 21 bp, synthetic construct
  misc_feature 1..21: note = Description of Artificial Sequence: Synthetic oligonucleotide
  source 1..21: mol_type = other DNA
gggattcagagtgggcttggt

SEQ ID NO: 42775 - DNA, 21 bp, synthetic construct
  misc_feature 1..21: note = Description of Artificial Sequence: Synthetic oligonucleotide
  source 1..21: mol_type = other DNA
gaagtctacagcggcagcaac

SEQ ID NO: 42776 - DNA, 21 bp, synthetic construct
  misc_feature 1..21: note = Description of Artificial Sequence: Synthetic oligonucleotide
  source 1..21: mol_type = other DNA
aaaaaccacaccgccgtccaa

SEQ ID NO: 42777 - DNA, 21 bp, synthetic construct
  misc_feature 1..21: note = Description of Artificial Sequence: Synthetic oligonucleotide
  source 1..21: mol_type = other DNA
aattcggctgctttgaatagt

SEQ ID NO: 42778 - DNA, 21 bp, synthetic construct
  misc_feature 1..21: note = Description of Artificial Sequence: Synthetic oligonucleotide
  source 1..21: mol_type = other DNA
aacggcagccaaggcagacaa

SEQ ID NO: 42779 - DNA, 21 bp, synthetic construct
  misc_feature 1..21: note = Description of Artificial Sequence: Synthetic oligonucleotide
  source 1..21: mol_type = other DNA
tcttattcgagttctcagctg

SEQ ID NO: 42780 - DNA, 21 bp, synthetic construct
  misc_feature 1..21: note = Description of Artificial Sequence: Synthetic oligonucleotide
  source 1..21: mol_type = other DNA
actcaggggctgggtcatctt

SEQ ID NO: 42781 - DNA, 21 bp, synthetic construct
  misc_feature 1..21: note = Description of Artificial Sequence: Synthetic oligonucleotide
  source 1..21: mol_type = other DNA
accatgagagccacccccccc

SEQ ID NO: 42782 - DNA, 21 bp, synthetic construct
  misc_feature 1..21: note = Description of Artificial Sequence: Synthetic oligonucleotide
  source 1..21: mol_type = other DNA
tctagggtgagtcgtaatctt

SEQ ID NO: 42783 - DNA, 21 bp, synthetic construct
  misc_feature 1..21: note = Description of Artificial Sequence: Synthetic oligonucleotide
  source 1..21: mol_type = other DNA
attagtgggtctgggtatcat

SEQ ID NO: 42784 - DNA, 21 bp, synthetic construct
  misc_feature 1..21: note = Description of Artificial Sequence: Synthetic oligonucleotide
  source 1..21: mol_type = other DNA
aatgtggataatcgggggttt

SEQ ID NO: 42785 - DNA, 21 bp, synthetic construct
  misc_feature 1..21: note = Description of Artificial Sequence: Synthetic oligonucleotide
  source 1..21: mol_type = other DNA
ttggggatgcgtgataatact

SEQ ID NO: 42786 - DNA, 21 bp, synthetic construct
  misc_feature 1..21: note = Description of Artificial Sequence: Synthetic oligonucleotide
  source 1..21: mol_type = other DNA
gagcagggttcgggtaatcat

SEQ ID NO: 42787 - DNA, 21 bp, synthetic construct
  misc_feature 1..21: note = Description of Artificial Sequence: Synthetic oligonucleotide
  source 1..21: mol_type = other DNA
ggggatatggggatttcgaag

SEQ ID NO: 42788 - DNA, 21 bp, synthetic construct
  misc_feature 1..21: note = Description of Artificial Sequence: Synthetic oligonucleotide
  source 1..21: mol_type = other DNA
caaaacctccccaaagccagc

SEQ ID NO: 42789 - DNA, 21 bp, synthetic construct
  misc_feature 1..21: note = Description of Artificial Sequence: Synthetic oligonucleotide
  source 1..21: mol_type = other DNA
cacggcggccccggcgccgtc

SEQ ID NO: 42790 - DNA, 21 bp, synthetic construct
  misc_feature 1..21: note = Description of Artificial Sequence: Synthetic oligonucleotide
  source 1..21: mol_type = other DNA
ggcagcaccggccaactcatg

SEQ ID NO: 42791 - DNA, 21 bp, synthetic construct
  misc_feature 1..21: note = Description of Artificial Sequence: Synthetic oligonucleotide
  source 1..21: mol_type = other DNA
agagacctcggccacgacaac

SEQ ID NO: 42792 - DNA, 21 bp, synthetic construct
  misc_feature 1..21: note = Description of Artificial Sequence: Synthetic oligonucleotide
  source 1..21: mol_type = other DNA
catggtatttctaatcagagt

SEQ ID NO: 42793 - DNA, 21 bp, synthetic construct
  misc_feature 1..21: note = Description of Artificial Sequence: Synthetic oligonucleotide
  source 1..21: mol_type = other DNA
caaaacaccaacgccgccatc

SEQ ID NO: 42794 - DNA, 21 bp, synthetic construct
  misc_feature 1..21: note = Description of Artificial Sequence: Synthetic oligonucleotide
  source 1..21: mol_type = other DNA
tggggttcgggtcttaatcat

SEQ ID NO: 42795 - DNA, 21 bp, synthetic construct
  misc_feature 1..21: note = Description of Artificial Sequence: Synthetic oligonucleotide
  source 1..21: mol_type = other DNA
cctccttctaagccgaatact

SEQ ID NO: 42796 - DNA, 21 bp, synthetic construct
  misc_feature 1..21: note = Description of Artificial Sequence: Synthetic oligonucleotide
  source 1..21: mol_type = other DNA
aaattcccccccaacagcggc

SEQ ID NO: 42797 - DNA, 21 bp, synthetic construct
  misc_feature 1..21: note = Description of Artificial Sequence: Synthetic oligonucleotide
  source 1..21: mol_type = other DNA
caagtcgtccccgccaccaac

SEQ ID NO: 42798 - DNA, 21 bp, synthetic construct
  misc_feature 1..21: note = Description of Artificial Sequence: Synthetic oligonucleotide
  source 1..21: mol_type = other DNA
aaagacgccggcgaatacggc

SEQ ID NO: 42799 - DNA, 21 bp, synthetic construct
  misc_feature 1..21: note = Description of Artificial Sequence: Synthetic oligonucleotide
  source 1..21: mol_type = other DNA
tcttcgtcggcgaagtctatt

SEQ ID NO: 42800 - DNA, 21 bp, synthetic construct
  misc_feature 1..21: note = Description of Artificial Sequence: Synthetic oligonucleotide
  source 1..21: mol_type = other DNA
tttaatagttcgtcttcgaag

SEQ ID NO: 42801 - DNA, 21 bp, synthetic construct
  misc_feature 1..21: note = Description of Artificial Sequence: Synthetic oligonucleotide
  source 1..21: mol_type = other DNA
tctaattcgggtcgtggtatg

SEQ ID NO: 42802 - DNA, 21 bp, synthetic construct
  misc_feature 1..21: note = Description of Artificial Sequence: Synthetic oligonucleotide
  source 1..21: mol_type = other DNA
gacgaaagcggcaaaagcaaa

SEQ ID NO: 42803 - DNA, 21 bp, synthetic construct
  misc_feature 1..21: note = Description of Artificial Sequence: Synthetic oligonucleotide
  source 1..21: mol_type = other DNA
ggggagaggtctgatgttcgt

SEQ ID NO: 42804 - DNA, 21 bp, synthetic construct
  misc_feature 1..21: note = Description of Artificial Sequence: Synthetic oligonucleotide
  source 1..21: mol_type = other DNA
atcaaccaaagcacctacaaa

SEQ ID NO: 42805 - DNA, 21 bp, synthetic construct
  misc_feature 1..21: note = Description of Artificial Sequence: Synthetic oligonucleotide
  source 1..21: mol_type = other DNA
ttgactcagagggatttttcg

SEQ ID NO: 42806 - DNA, 21 bp, synthetic construct
  misc_feature 1..21: note = Description of Artificial Sequence: Synthetic oligonucleotide
  source 1..21: mol_type = other DNA
tctattaattcgcagcagtgt

SEQ ID NO: 42807 - DNA, 21 bp, synthetic construct
  misc_feature 1..21: note = Description of Artificial Sequence: Synthetic oligonucleotide
  source 1..21: mol_type = other DNA
acggctacgcagaagggtcag

SEQ ID NO: 42808 - DNA, 21 bp, synthetic construct
  misc_feature 1..21: note = Description of Artificial Sequence: Synthetic oligonucleotide
  source 1..21: mol_type = other DNA
agcagcaacgaaaaagacaga

SEQ ID NO: 42809 - DNA, 21 bp, synthetic construct
  misc_feature 1..21: note = Description of Artificial Sequence: Synthetic oligonucleotide
  source 1..21: mol_type = other DNA
tatgttagtaattctaatgcg

SEQ ID NO: 42810 - DNA, 21 bp, synthetic construct
  misc_feature 1..21: note = Description of Artificial Sequence: Synthetic oligonucleotide
  source 1..21: mol_type = other DNA
aaccccggcgaaatgagactc

SEQ ID NO: 42811 - DNA, 21 bp, synthetic construct
  misc_feature 1..21: note = Description of Artificial Sequence: Synthetic oligonucleotide
  source 1..21: mol_type = other DNA
cattcggagaatgggaatcgt

SEQ ID NO: 42812 - DNA, 21 bp, synthetic construct
  misc_feature 1..21: note = Description of Artificial Sequence: Synthetic oligonucleotide
  source 1..21: mol_type = other DNA
cttactccgagtaagattggt

SEQ ID NO: 42813 - DNA, 21 bp, synthetic construct
  misc_feature 1..21: note = Description of Artificial Sequence: Synthetic oligonucleotide
  source 1..21: mol_type = other DNA
cccagaagcaacacccaaaga

SEQ ID NO: 42814 - DNA, 21 bp, synthetic construct
  misc_feature 1..21: note = Description of Artificial Sequence: Synthetic oligonucleotide
  source 1..21: mol_type = other DNA
caaatgaaacacctccaagtc

SEQ ID NO: 42815 - DNA, 21 bp, synthetic construct
  misc_feature 1..21: note = Description of Artificial Sequence: Synthetic oligonucleotide
  source 1..21: mol_type = other DNA
caaagcaccgaaagactcgcc

SEQ ID NO: 42816 - DNA, 21 bp, synthetic construct
  misc_feature 1..21: note = Description of Artificial Sequence: Synthetic oligonucleotide
  source 1..21: mol_type = other DNA
aattttactacgtcgggtcag

SEQ ID NO: 42817 - DNA, 21 bp, synthetic construct
  misc_feature 1..21: note = Description of Artificial Sequence: Synthetic oligonucleotide
  source 1..21: mol_type = other DNA
agagaatacaacaccaccagc

SEQ ID NO: 42818 - DNA, 21 bp, synthetic construct
  misc_feature 1..21: note = Description of Artificial Sequence: Synthetic oligonucleotide
  source 1..21: mol_type = other DNA
ctcggcaccagccaccaacaa

SEQ ID NO: 42819 - DNA, 21 bp, synthetic construct
  misc_feature 1..21: note = Description of Artificial Sequence: Synthetic oligonucleotide
  source 1..21: mol_type = other DNA
aacgccagcggccaaaaccaa

SEQ ID NO: 42820 - DNA, 21 bp, synthetic construct
  misc_feature 1..21: note = Description of Artificial Sequence: Synthetic oligonucleotide
  source 1..21: mol_type = other DNA
ccgggtattaatactaatagt

SEQ ID NO: 42821 - DNA, 21 bp, synthetic construct
  misc_feature 1..21: note = Description of Artificial Sequence: Synthetic oligonucleotide
  source 1..21: mol_type = other DNA
gctactactaaggagggtatt

SEQ ID NO: 42822 - DNA, 21 bp, synthetic construct
  misc_feature 1..21: note = Description of Artificial Sequence: Synthetic oligonucleotide
  source 1..21: mol_type = other DNA
caaaccggcagcaacaacaaa

SEQ ID NO: 42823 - DNA, 21 bp, synthetic construct
  misc_feature 1..21: note = Description of Artificial Sequence: Synthetic oligonucleotide
  source 1..21: mol_type = other DNA
accagagaaagcagaaccaac

SEQ ID NO: 42824 - DNA, 21 bp, synthetic construct
  misc_feature 1..21: note = Description of Artificial Sequence: Synthetic oligonucleotide
  source 1..21: mol_type = other DNA
caaagaaccagcgaccaaacc

SEQ ID NO: 42825 - DNA, 21 bp, synthetic construct
  misc_feature 1..21: note = Description of Artificial Sequence: Synthetic oligonucleotide
  source 1..21: mol_type = other DNA
gtcagcggcagacccaccggc

SEQ ID NO: 42826 - DNA, 21 bp, synthetic construct
  misc_feature 1..21: note = Description of Artificial Sequence: Synthetic oligonucleotide
  source 1..21: mol_type = other DNA
cctcttcgggagctgaagcct

SEQ ID NO: 42827 - DNA, 21 bp, synthetic construct
  misc_feature 1..21: note = Description of Artificial Sequence: Synthetic oligonucleotide
  source 1..21: mol_type = other DNA
ctttctattaagggtgcttcg

SEQ ID NO: 42828 - DNA, 21 bp, synthetic construct
  misc_feature 1..21: note = Description of Artificial Sequence: Synthetic oligonucleotide
  source 1..21: mol_type = other DNA
aattatgtgggtcagaggtct

SEQ ID NO: 42829 - DNA, 21 bp, synthetic construct
  misc_feature 1..21: note = Description of Artificial Sequence: Synthetic oligonucleotide
  source 1..21: mol_type = other DNA
cccaacagaaccagcagctac

SEQ ID NO: 42830 - DNA, 21 bp, synthetic construct
  misc_feature 1..21: note = Description of Artificial Sequence: Synthetic oligonucleotide
  source 1..21: mol_type = other DNA
agtagggagaagaataatgcg

SEQ ID NO: 42831 - DNA, 21 bp, synthetic construct
  misc_feature 1..21: note = Description of Artificial Sequence: Synthetic oligonucleotide
  source 1..21: mol_type = other DNA
cacagcaccagcctcagcaaa

SEQ ID NO: 42832 - DNA, 21 bp, synthetic construct
  misc_feature 1..21: note = Description of Artificial Sequence: Synthetic oligonucleotide
  source 1..21: mol_type = other DNA
atttctggtcagcagacgact

SEQ ID NO: 42833 - DNA, 21 bp, synthetic construct
  misc_feature 1..21: note = Description of Artificial Sequence: Synthetic oligonucleotide
  source 1..21: mol_type = other DNA
tgcagcgtcgccggcaaaaga

SEQ ID NO: 42834 - DNA, 21 bp, synthetic construct
  misc_feature 1..21: note = Description of Artificial Sequence: Synthetic oligonucleotide
  source 1..21: mol_type = other DNA
agtaagactgggactagtttg

SEQ ID NO: 42835 - DNA, 21 bp, synthetic construct
  misc_feature 1..21: note = Description of Artificial Sequence: Synthetic oligonucleotide
  source 1..21: mol_type = other DNA
atttctgtgggtaatacttct

SEQ ID NO: 42836 - DNA, 21 bp, synthetic construct
  misc_feature 1..21: note = Description of Artificial Sequence: Synthetic oligonucleotide
  source 1..21: mol_type = other DNA
cggactctttctaagcatggt

SEQ ID NO: 42837 - DNA, 21 bp, synthetic construct
  misc_feature 1..21: note = Description of Artificial Sequence: Synthetic oligonucleotide
  source 1..21: mol_type = other DNA
cctggtagtgtgactgggtct

SEQ ID NO: 42838 - DNA, 21 bp, synthetic construct
  misc_feature 1..21: note = Description of Artificial Sequence: Synthetic oligonucleotide
  source 1..21: mol_type = other DNA
tctacttcgaaggattatact

SEQ ID NO: 42839 - DNA, 21 bp, synthetic construct
  misc_feature 1..21: note = Description of Artificial Sequence: Synthetic oligonucleotide
  source 1..21: mol_type = other DNA
gtcagaatcagcacccaagcc

SEQ ID NO: 42840 - DNA, 21 bp, synthetic construct
  misc_feature 1..21: note = Description of Artificial Sequence: Synthetic oligonucleotide
  source 1..21: mol_type = other DNA
tatattaatagtccttcgaat

SEQ ID NO: 42841 - DNA, 21 bp, synthetic construct
  misc_feature 1..21: note = Description of Artificial Sequence: Synthetic oligonucleotide
  source 1..21: mol_type = other DNA
aacaacaaaagcgccagccaa

SEQ ID NO: 42842 - DNA, 21 bp, synthetic construct
  misc_feature 1..21: note = Description of Artificial Sequence: Synthetic oligonucleotide
  source 1..21: mol_type = other DNA
tttaatcaggctggggttaat

SEQ ID NO: 42843 - DNA, 21 bp, synthetic construct
  misc_feature 1..21: note = Description of Artificial Sequence: Synthetic oligonucleotide
  source 1..21: mol_type = other DNA
caacaagaaatgagcaaaaaa

SEQ ID NO: 42844 - DNA, 21 bp, synthetic construct
  misc_feature 1..21: note = Description of Artificial Sequence: Synthetic oligonucleotide
  source 1..21: mol_type = other DNA
cccagccacaaccccaccaac

SEQ ID NO: 42845 - DNA, 21 bp, synthetic construct
  misc_feature 1..21: note = Description of Artificial Sequence: Synthetic oligonucleotide
  source 1..21: mol_type = other DNA
agtggtagtaatactattggg

SEQ ID NO: 42846 - DNA, 21 bp, synthetic construct
  misc_feature 1..21: note = Description of Artificial Sequence: Synthetic oligonucleotide
  source 1..21: mol_type = other DNA
aatagtgcgaataagactccg

SEQ ID NO: 42847 - DNA, 21 bp, synthetic construct
  misc_feature 1..21: note = Description of Artificial Sequence: Synthetic oligonucleotide
  source 1..21: mol_type = other DNA
gggaatcgtgggtctgttatt

SEQ ID NO: 42848 - DNA, 21 bp, synthetic construct
  misc_feature 1..21: note = Description of Artificial Sequence: Synthetic oligonucleotide
  source 1..21: mol_type = other DNA
ccgaatggggcgcatgttacg

SEQ ID NO: 42849 - DNA, 21 bp, synthetic construct
  misc_feature 1..21: note = Description of Artificial Sequence: Synthetic oligonucleotide
  source 1..21: mol_type = other DNA
atgggtgttcattctattgct

SEQ ID NO: 42850 - DNA, 21 bp, synthetic construct
  misc_feature 1..21: note = Description of Artificial Sequence: Synthetic oligonucleotide
  source 1..21: mol_type = other DNA
ctccacgacggccaaaccaga

SEQ ID NO: 42851 - DNA, 21 bp, synthetic construct
  misc_feature 1..21: note = Description of Artificial Sequence: Synthetic oligonucleotide
  source 1..21: mol_type = other DNA
tcttttgattcgaagccgcct

SEQ ID NO: 42852 - DNA, 21 bp, synthetic construct
  misc_feature 1..21: note = Description of Artificial Sequence: Synthetic oligonucleotide
  source 1..21: mol_type = other DNA
tatgttactagttctgggggt

SEQ ID NO: 42853 - DNA, 21 bp, synthetic construct
  misc_feature 1..21: note = Description of Artificial Sequence: Synthetic oligonucleotide
  source 1..21: mol_type = other DNA
cccgccgaccacggcaaactc

SEQ ID NO: 42854 - DNA, 21 bp, synthetic construct
  misc_feature 1..21: note = Description of Artificial Sequence: Synthetic oligonucleotide
  source 1..21: mol_type = other DNA
gatgcgactaagaatcattcg

SEQ ID NO: 42855 - DNA, 21 bp, synthetic construct
  misc_feature 1..21: note = Description of Artificial Sequence: Synthetic oligonucleotide
  source 1..21: mol_type = other DNA
caaagagaacaactcctcaaa

SEQ ID NO: 42856 - DNA, 21 bp, synthetic construct
  misc_feature 1..21: note = Description of Artificial Sequence: Synthetic oligonucleotide
  source 1..21: mol_type = other DNA
catagtacttctgggggtcat

SEQ ID NO: 42857 - DNA, 21 bp, synthetic construct
  misc_feature 1..21: note = Description of Artificial Sequence: Synthetic oligonucleotide
  source 1..21: mol_type = other DNA
cataatagtgcggtgcagggg

SEQ ID NO: 42858 - DNA, 21 bp, synthetic construct
  misc_feature 1..21: note = Description of Artificial Sequence: Synthetic oligonucleotide
  source 1..21: mol_type = other DNA
ccccaaagcagccaccaaacc

SEQ ID NO: 42859 - DNA, 21 bp, synthetic construct
  misc_feature 1..21: note = Description of Artificial Sequence: Synthetic oligonucleotide
  source 1..21: mol_type = other DNA
cttcctggggttcgtgttgcg

SEQ ID NO: 42860 - DNA, 21 bp, synthetic construct
  misc_feature 1..21: note = Description of Artificial Sequence: Synthetic oligonucleotide
  source 1..21: mol_type = other DNA
aacagctacgaccccaaaaga

SEQ ID NO: 42861 - DNA, 21 bp, synthetic construct
  misc_feature 1..21: note = Description of Artificial Sequence: Synthetic oligonucleotide
  source 1..21: mol_type = other DNA
ggtagtaattatgaggttggg

SEQ ID NO: 42862 - DNA, 21 bp, synthetic construct
  misc_feature 1..21: note = Description of Artificial Sequence: Synthetic oligonucleotide
  source 1..21: mol_type = other DNA
ggcctcatgacccacagcatc

SEQ ID NO: 42863 - DNA, 21 bp, synthetic construct
  misc_feature 1..21: note = Description of Artificial Sequence: Synthetic oligonucleotide
  source 1..21: mol_type = other DNA
ctcagcaaccaaaacaaccaa

SEQ ID NO: 42864 - DNA, 21 bp, synthetic construct
  misc_feature 1..21: note = Description of Artificial Sequence: Synthetic oligonucleotide
  source 1..21: mol_type = other DNA
ggtctgccgactgagaagatg

SEQ ID NO: 42865 - DNA, 21 bp, synthetic construct
  misc_feature 1..21: note = Description of Artificial Sequence: Synthetic oligonucleotide
  source 1..21: mol_type = other DNA
aatgtgactacgccgcttatt

SEQ ID NO: 42866 - DNA, 21 bp, synthetic construct
  misc_feature 1..21: note = Description of Artificial Sequence: Synthetic oligonucleotide
  source 1..21: mol_type = other DNA
accagctaccccaaccacaga

SEQ ID NO: 42867 - DNA, 21 bp, synthetic construct
  misc_feature 1..21: note = Description of Artificial Sequence: Synthetic oligonucleotide
  source 1..21: mol_type = other DNA
gccaccagagacagccacagc

SEQ ID NO: 42868 - DNA, 21 bp, synthetic construct
  misc_feature 1..21: note = Description of Artificial Sequence: Synthetic oligonucleotide
  source 1..21: mol_type = other DNA
caaggcagcggcagcaaccac

SEQ ID NO: 42869 - DNA, 21 bp, synthetic construct
  misc_feature 1..21: note = Description of Artificial Sequence: Synthetic oligonucleotide
  source 1..21: mol_type = other DNA
tctagttcgactcatgctgtg

SEQ ID NO: 42870 - DNA, 21 bp, synthetic construct
  misc_feature 1..21: note = Description of Artificial Sequence: Synthetic oligonucleotide
  source 1..21: mol_type = other DNA
aacaacctccccagaaacctc

SEQ ID NO: 42871 - DNA, 21 bp, synthetic construct
  misc_feature 1..21: note = Description of Artificial Sequence: Synthetic oligonucleotide
  source 1..21: mol_type = other DNA
agttcggagcagactactcgt

SEQ ID NO: 42872 - DNA, 21 bp, synthetic construct
  misc_feature 1..21: note = Description of Artificial Sequence: Synthetic oligonucleotide
  source 1..21: mol_type = other DNA
gacaccgccagacccaccaaa

SEQ ID NO: 42873 - DNA, 21 bp, synthetic construct
  misc_feature 1..21: note = Description of Artificial Sequence: Synthetic oligonucleotide
  source 1..21: mol_type = other DNA
aatatttcgactaggcagagt

SEQ ID NO: 42874 - DNA, 21 bp, synthetic construct
  misc_feature 1..21: note = Description of Artificial Sequence: Synthetic oligonucleotide
  source 1..21: mol_type = other DNA
tatactattacgccgcagaag

SEQ ID NO: 42875 - DNA, 21 bp, synthetic construct
  misc_feature 1..21: note = Description of Artificial Sequence: Synthetic oligonucleotide
  source 1..21: mol_type = other DNA
gaaaacatcagcagaagccac

SEQ ID NO: 42876 - DNA, 21 bp, synthetic construct
  misc_feature 1..21: note = Description of Artificial Sequence: Synthetic oligonucleotide
  source 1..21: mol_type = other DNA
ccgagtaagattagtaatgcg

SEQ ID NO: 42877 - DNA, 21 bp, synthetic construct
  misc_feature 1..21: note = Description of Artificial Sequence: Synthetic oligonucleotide
  source 1..21: mol_type = other DNA
tgtaattctcataatgcggct

SEQ ID NO: 42878 - DNA, 21 bp, synthetic construct
  misc_feature 1..21: note = Description of Artificial Sequence: Synthetic oligonucleotide
  source 1..21: mol_type = other DNA
gttagttttaagcctaatgag

SEQ ID NO: 42879 - DNA, 21 bp, synthetic construct
  misc_feature 1..21: note = Description of Artificial Sequence: Synthetic oligonucleotide
  source 1..21: mol_type = other DNA
gacaaaacccaaaaacaactc

SEQ ID NO: 42880 - DNA, 21 bp, synthetic construct
  misc_feature 1..21: note = Description of Artificial Sequence: Synthetic oligonucleotide
  source 1..21: mol_type = other DNA
aacaacgtcaccaaagccccc

SEQ ID NO: 42881 - DNA, 21 bp, synthetic construct
  misc_feature 1..21: note = Description of Artificial Sequence: Synthetic oligonucleotide
  source 1..21: mol_type = other DNA
cagaatgttggtgggattcgt

SEQ ID NO: 42882 - DNA, 21 bp, synthetic construct
  misc_feature 1..21: note = Description of Artificial Sequence: Synthetic oligonucleotide
  source 1..21: mol_type = other DNA
agttctgctaagagttcgctt

SEQ ID NO: 42883 - DNA, 21 bp, synthetic construct
  misc_feature 1..21: note = Description of Artificial Sequence: Synthetic oligonucleotide
  source 1..21: mol_type = other DNA
catcatgatgctagtccgaat

SEQ ID NO: 42884 - DNA, 21 bp, synthetic construct
  misc_feature 1..21: note = Description of Artificial Sequence: Synthetic oligonucleotide
  source 1..21: mol_type = other DNA
actggtattgggtctcatctt

SEQ ID NO: 42885 - DNA, 21 bp, synthetic construct
  misc_feature 1..21: note = Description of Artificial Sequence: Synthetic oligonucleotide
  source 1..21: mol_type = other DNA
caagtccccaccagaagcgac

SEQ ID NO: 42886 - DNA, 21 bp, synthetic construct
  misc_feature 1..21: note = Description of Artificial Sequence: Synthetic oligonucleotide
  source 1..21: mol_type = other DNA
cccgaacccgccgccagaaac

SEQ ID NO: 42887 - DNA, 21 bp, synthetic construct
  misc_feature 1..21: note = Description of Artificial Sequence: Synthetic oligonucleotide
  source 1..21: mol_type = other DNA
cccagcagcacccccaaactc

SEQ ID NO: 42888 - DNA, 21 bp, synthetic construct
  misc_feature 1..21: note = Description of Artificial Sequence: Synthetic oligonucleotide
  source 1..21: mol_type = other DNA
cacgacagcagaagcaacgcc

SEQ ID NO: 42889 - DNA, 21 bp, synthetic construct
  misc_feature 1..21: note = Description of Artificial Sequence: Synthetic oligonucleotide
  source 1..21: mol_type = other DNA
gatggtgtgggtatgtatgct

SEQ ID NO: 42890 - DNA, 21 bp, synthetic construct
  misc_feature 1..21: note = Description of Artificial Sequence: Synthetic oligonucleotide
  source 1..21: mol_type = other DNA
acgcggaagactcctactact

SEQ ID NO: 42891 - DNA, 21 bp, synthetic construct
  misc_feature 1..21: note = Description of Artificial Sequence: Synthetic oligonucleotide
  source 1..21: mol_type = other DNA
gttaatacgaatctggttggt

SEQ ID NO: 42892 - DNA, 21 bp, synthetic construct
  misc_feature 1..21: note = Description of Artificial Sequence: Synthetic oligonucleotide
  source 1..21: mol_type = other DNA
tacaccgccagcagaatggaa

SEQ ID NO: 42893 - DNA, 21 bp, synthetic construct
  misc_feature 1..21: note = Description of Artificial Sequence: Synthetic oligonucleotide
  source 1..21: mol_type = other DNA
ggctacaccgtcggcaccaac

SEQ ID NO: 42894 - DNA, 21 bp, synthetic construct
  misc_feature 1..21: note = Description of Artificial Sequence: Synthetic oligonucleotide
  source 1..21: mol_type = other DNA
tctaatgctactagggcgatt

SEQ ID NO: 42895 - DNA, 21 bp, synthetic construct
  misc_feature 1..21: note = Description of Artificial Sequence: Synthetic oligonucleotide
  source 1..21: mol_type = other DNA
agacccgccaccagcaccccc

SEQ ID NO: 42896 - DNA, 21 bp, synthetic construct
  misc_feature 1..21: note = Description of Artificial Sequence: Synthetic oligonucleotide
  source 1..21: mol_type = other DNA
tattttaatagtcattcgaat

SEQ ID NO: 42897 - DNA, 21 bp, synthetic construct
  misc_feature 1..21: note = Description of Artificial Sequence: Synthetic oligonucleotide
  source 1..21: mol_type = other DNA
aagattggtagtatgagtggt

SEQ ID NO: 42898 - DNA, 21 bp, synthetic construct
  misc_feature 1..21: note = Description of Artificial Sequence: Synthetic oligonucleotide
  source 1..21: mol_type = other DNA
atcagaaacgacctcagcaac

SEQ ID NO: 42899 - DNA, 21 bp, synthetic construct
  misc_feature 1..21: note = Description of Artificial Sequence: Synthetic oligonucleotide
  source 1..21: mol_type = other DNA
ccgagtaataaggctgggact

SEQ ID NO: 42900 - DNA, 21 bp, synthetic construct
  misc_feature 1..21: note = Description of Artificial Sequence: Synthetic oligonucleotide
  source 1..21: mol_type = other DNA
gggtctctgactcctaaggct

SEQ ID NO: 42901 - DNA, 21 bp, synthetic construct
  misc_feature 1..21: note = Description of Artificial Sequence: Synthetic oligonucleotide
  source 1..21: mol_type = other DNA
cctgttacgttgcggggtatt

SEQ ID NO: 42902 - DNA, 21 bp, synthetic construct
  misc_feature 1..21: note = Description of Artificial Sequence: Synthetic oligonucleotide
  source 1..21: mol_type = other DNA
atgagtacgcatagttcgggt

SEQ ID NO: 42903 - DNA, 21 bp, synthetic construct
  misc_feature 1..21: note = Description of Artificial Sequence: Synthetic oligonucleotide
  source 1..21: mol_type = other DNA
gtgccgcatggggctacttct

SEQ ID NO: 42904 - DNA, 21 bp, synthetic construct
  misc_feature 1..21: note = Description of Artificial Sequence: Synthetic oligonucleotide
  source 1..21: mol_type = other DNA
caagtccccgtcagacccgtc

SEQ ID NO: 42905 - DNA, 21 bp, synthetic construct
  misc_feature 1..21: note = Description of Artificial Sequence: Synthetic oligonucleotide
  source 1..21: mol_type = other DNA
tcggcgcgggatagggcgtcg

SEQ ID NO: 42906 - DNA, 21 bp, synthetic construct
  misc_feature 1..21: note = Description of Artificial Sequence: Synthetic oligonucleotide
  source 1..21: mol_type = other DNA
tcgaatatgcctggtatggtg

SEQ ID NO: 42907 - DNA, 21 bp, synthetic construct
  misc_feature 1..21: note = Description of Artificial Sequence: Synthetic oligonucleotide
  source 1..21: mol_type = other DNA
aatggggctacgaagaatagt

SEQ ID NO: 42908 - DNA, 21 bp, synthetic construct
  misc_feature 1..21: note = Description of Artificial Sequence: Synthetic oligonucleotide
  source 1..21: mol_type = other DNA
atgaatacgagtattaataat

SEQ ID NO: 42909 - DNA, 21 bp, synthetic construct
  misc_feature 1..21: note = Description of Artificial Sequence: Synthetic oligonucleotide
  source 1..21: mol_type = other DNA
atcctcgacagccacaacaga

SEQ ID NO: 42910 - DNA, 21 bp, synthetic construct
  misc_feature 1..21: note = Description of Artificial Sequence: Synthetic oligonucleotide
  source 1..21: mol_type = other DNA
gacctccaaaccagcgccaaa

SEQ ID NO: 42911 - DNA, 21 bp, synthetic construct
  misc_feature 1..21: note = Description of Artificial Sequence: Synthetic oligonucleotide
  source 1..21: mol_type = other DNA
gaccaagtcagccacaaactc

SEQ ID NO: 42912 - DNA, 21 bp, synthetic construct
  misc_feature 1..21: note = Description of Artificial Sequence: Synthetic oligonucleotide
  source 1..21: mol_type = other DNA
acggctagtggtaatttgtct

SEQ ID NO: 42913 - DNA, 21 bp, synthetic construct
  misc_feature 1..21: note = Description of Artificial Sequence: Synthetic oligonucleotide
  source 1..21: mol_type = other DNA
gaaagattcaccagcagcagc

SEQ ID NO: 42914 - DNA, 21 bp, synthetic construct
  misc_feature 1..21: note = Description of Artificial Sequence: Synthetic oligonucleotide
  source 1..21: mol_type = other DNA
accctccccagagtccccgcc

SEQ ID NO: 42915 - DNA, 21 bp, synthetic construct
  misc_feature 1..21: note = Description of Artificial Sequence: Synthetic oligonucleotide
  source 1..21: mol_type = other DNA
gaacccctcaaaaacaacccc

SEQ ID NO: 42916 - DNA, 21 bp, synthetic construct
  misc_feature 1..21: note = Description of Artificial Sequence: Synthetic oligonucleotide
  source 1..21: mol_type = other DNA
catactgatacgagtgcggtg

SEQ ID NO: 42917 - DNA, 21 bp, synthetic construct
  misc_feature 1..21: note = Description of Artificial Sequence: Synthetic oligonucleotide
  source 1..21: mol_type = other DNA
gtcgtccccgaaagaagcaaa

SEQ ID NO: 42918 - DNA, 21 bp, synthetic construct
  misc_feature 1..21: note = Description of Artificial Sequence: Synthetic oligonucleotide
  source 1..21: mol_type = other DNA
actcatatgcgcacgcagagt

SEQ ID NO: 42919 - DNA, 21 bp, synthetic construct
  misc_feature 1..21: note = Description of Artificial Sequence: Synthetic oligonucleotide
  source 1..21: mol_type = other DNA
acgagggggtctcctttgatg

SEQ ID NO: 42920 - DNA, 21 bp, synthetic construct
  misc_feature 1..21: note = Description of Artificial Sequence: Synthetic oligonucleotide
  source 1..21: mol_type = other DNA
actggtactaagtcggataat

SEQ ID NO: 42921 - DNA, 21 bp, synthetic construct
  misc_feature 1..21: note = Description of Artificial Sequence: Synthetic oligonucleotide
  source 1..21: mol_type = other DNA
ggccccgacacccacagccaa

SEQ ID NO: 42922 - DNA, 21 bp, synthetic construct
  misc_feature 1..21: note = Description of Artificial Sequence: Synthetic oligonucleotide
  source 1..21: mol_type = other DNA
aacggtcctggacagaatcaa

SEQ ID NO: 42923 - DNA, 21 bp, synthetic construct
  misc_feature 1..21: note = Description of Artificial Sequence: Synthetic oligonucleotide
  source 1..21: mol_type = other DNA
cattataatcagactggtttg

SEQ ID NO: 42924 - DNA, 21 bp, synthetic construct
  misc_feature 1..21: note = Description of Artificial Sequence: Synthetic oligonucleotide
  source 1..21: mol_type = other DNA
agccaccaaacccccggctac

SEQ ID NO: 42925 - DNA, 21 bp, synthetic construct
  misc_feature 1..21: note = Description of Artificial Sequence: Synthetic oligonucleotide
  source 1..21: mol_type = other DNA
aacggcaccagacaaaaccaa

SEQ ID NO: 42926 - DNA, 21 bp, synthetic construct
  misc_feature 1..21: note = Description of Artificial Sequence: Synthetic oligonucleotide
  source 1..21: mol_type = other DNA
ttcagcagcaaaaccagcccc

SEQ ID NO: 42927 - DNA, 21 bp, synthetic construct
  misc_feature 1..21: note = Description of Artificial Sequence: Synthetic oligonucleotide
  source 1..21: mol_type = other DNA
tcgatggggaattcgattagt

SEQ ID NO: 42928 - DNA, 21 bp, synthetic construct
  misc_feature 1..21: note = Description of Artificial Sequence: Synthetic oligonucleotide
  source 1..21: mol_type = other DNA
ttcaacgaacaaagagtcagc

SEQ ID NO: 42929 - DNA, 21 bp, synthetic construct
  misc_feature 1..21: note = Description of Artificial Sequence: Synthetic oligonucleotide
  source 1..21: mol_type = other DNA
gacatccccgccaaaaccgcc

SEQ ID NO: 42930 - DNA, 21 bp, synthetic construct
  misc_feature 1..21: note = Description of Artificial Sequence: Synthetic oligonucleotide
  source 1..21: mol_type = other DNA
tctcatacgggtaatatggtt

SEQ ID NO: 42931 - DNA, 21 bp, synthetic construct
  misc_feature 1..21: note = Description of Artificial Sequence: Synthetic oligonucleotide
  source 1..21: mol_type = other DNA
agcaacgtcgccaaaagaacc

SEQ ID NO: 42932 - DNA, 21 bp, synthetic construct
  misc_feature 1..21: note = Description of Artificial Sequence: Synthetic oligonucleotide
  source 1..21: mol_type = other DNA
tctaatgcgactaggtctagt

SEQ ID NO: 42933 - DNA, 21 bp, synthetic construct
  misc_feature 1..21: note = Description of Artificial Sequence: Synthetic oligonucleotide
  source 1..21: mol_type = other DNA
cttggggagacttctatgagg

SEQ ID NO: 42934 - DNA, 21 bp, synthetic construct
  misc_feature 1..21: note = Description of Artificial Sequence: Synthetic oligonucleotide
  source 1..21: mol_type = other DNA
gagggtaatcgttctaatatg

SEQ ID NO: 42935 - DNA, 21 bp, synthetic construct
  misc_feature 1..21: note = Description of Artificial Sequence: Synthetic oligonucleotide
  source 1..21: mol_type = other DNA
cctgctgatcgtactcatatt

SEQ ID NO: 42936 - DNA, 21 bp, synthetic construct
  misc_feature 1..21: note = Description of Artificial Sequence: Synthetic oligonucleotide
  source 1..21: mol_type = other DNA
acccccgccggccccaacaaa

SEQ ID NO: 42937 - DNA, 21 bp, synthetic construct
  misc_feature 1..21: note = Description of Artificial Sequence: Synthetic oligonucleotide
  source 1..21: mol_type = other DNA
caggtgtcgcctttgattttg

SEQ ID NO: 42938 - DNA, 21 bp, synthetic construct
  misc_feature 1..21: note = Description of Artificial Sequence: Synthetic oligonucleotide
  source 1..21: mol_type = other DNA
tctctgtcgactgggtcgggg

SEQ ID NO: 42939 - DNA, 21 bp, synthetic construct
  misc_feature 1..21: note = Description of Artificial Sequence: Synthetic oligonucleotide
  source 1..21: mol_type = other DNA
agtgcttctaatactagtgtt

SEQ ID NO: 42940 - DNA, 21 bp, synthetic construct
  misc_feature 1..21: note = Description of Artificial Sequence: Synthetic oligonucleotide
  source 1..21: mol_type = other DNA
agagacaccaccagcaccgac

SEQ ID NO: 42941 - DNA, 21 bp, synthetic construct
  misc_feature 1..21: note = Description of Artificial Sequence: Synthetic oligonucleotide
  source 1..21: mol_type = other DNA
cctagtaattcgggtaataat

SEQ ID NO: 42942 - DNA, 21 bp, synthetic construct
  misc_feature 1..21: note = Description of Artificial Sequence: Synthetic oligonucleotide
  source 1..21: mol_type = other DNA
ccggtgggttcggtgcggggg

SEQ ID NO: 42943 - DNA, 21 bp, synthetic construct
  misc_feature 1..21: note = Description of Artificial Sequence: Synthetic oligonucleotide
  source 1..21: mol_type = other DNA
gctagggctgattctaatttt

SEQ ID NO: 42944 - DNA, 21 bp, synthetic construct
  misc_feature 1..21: note = Description of Artificial Sequence: Synthetic oligonucleotide
  source 1..21: mol_type = other DNA
gatggtaagaataataatgtg

SEQ ID NO: 42945 - DNA, 21 bp, synthetic construct
  misc_feature 1..21: note = Description of Artificial Sequence: Synthetic oligonucleotide
  source 1..21: mol_type = other DNA
aaacccgccacccccaacggc

SEQ ID NO: 42946 - DNA, 21 bp, synthetic construct
  misc_feature 1..21: note = Description of Artificial Sequence: Synthetic oligonucleotide
  source 1..21: mol_type = other DNA
gaaagcaacagcagcagaggc

SEQ ID NO: 42947 - DNA, 21 bp, synthetic construct
  misc_feature 1..21: note = Description of Artificial Sequence: Synthetic oligonucleotide
  source 1..21: mol_type = other DNA
gaaatgaaccacagcccctgc

SEQ ID NO: 42948 - DNA, 21 bp, synthetic construct
  misc_feature 1..21: note = Description of Artificial Sequence: Synthetic oligonucleotide
  source 1..21: mol_type = other DNA
actgcggaggcgaattcttct

SEQ ID NO: 42949 - DNA, 21 bp, synthetic construct
  misc_feature 1..21: note = Description of Artificial Sequence: Synthetic oligonucleotide
  source 1..21: mol_type = other DNA
cccggcaccggcagcaaccac

SEQ ID NO: 42950 - DNA, 21 bp, synthetic construct
  misc_feature 1..21: note = Description of Artificial Sequence: Synthetic oligonucleotide
  source 1..21: mol_type = other DNA
gaactcatgaacaaaagcaaa

SEQ ID NO: 42951 - DNA, 21 bp, synthetic construct
  misc_feature 1..21: note = Description of Artificial Sequence: Synthetic oligonucleotide
  source 1..21: mol_type = other DNA
aaaagcgcccaaggcggcaac

SEQ ID NO: 42952 - DNA, 21 bp, synthetic construct
  misc_feature 1..21: note = Description of Artificial Sequence: Synthetic oligonucleotide
  source 1..21: mol_type = other DNA
actcctggggcttctttgtcg

SEQ ID NO: 42953 - DNA, 21 bp, synthetic construct
  misc_feature 1..21: note = Description of Artificial Sequence: Synthetic oligonucleotide
  source 1..21: mol_type = other DNA
gtcatcgaacccggcagcacc

SEQ ID NO: 42954 - DNA, 21 bp, synthetic construct
  misc_feature 1..21: note = Description of Artificial Sequence: Synthetic oligonucleotide
  source 1..21: mol_type = other DNA
ggtgttaagacgaatcctctt

SEQ ID NO: 42955 - DNA, 21 bp, synthetic construct
  misc_feature 1..21: note = Description of Artificial Sequence: Synthetic oligonucleotide
  source 1..21: mol_type = other DNA
ctcatgggcagccccagaggc

SEQ ID NO: 42956 - DNA, 21 bp, synthetic construct
  misc_feature 1..21: note = Description of Artificial Sequence: Synthetic oligonucleotide
  source 1..21: mol_type = other DNA
gctagttctaagggtttgact

SEQ ID NO: 42957 - DNA, 21 bp, synthetic construct
  misc_feature 1..21: note = Description of Artificial Sequence: Synthetic oligonucleotide
  source 1..21: mol_type = other DNA
ggccacgccgccggcgtcagc

SEQ ID NO: 42958 - DNA, 21 bp, synthetic construct
  misc_feature 1..21: note = Description of Artificial Sequence: Synthetic oligonucleotide
  source 1..21: mol_type = other DNA
gtgtctatgaatactactagg

SEQ ID NO: 42959 - DNA, 21 bp, synthetic construct
  misc_feature 1..21: note = Description of Artificial Sequence: Synthetic oligonucleotide
  source 1..21: mol_type = other DNA
tcgagtccggctaatatggcg

SEQ ID NO: 42960 - DNA, 21 bp, synthetic construct
  misc_feature 1..21: note = Description of Artificial Sequence: Synthetic oligonucleotide
  source 1..21: mol_type = other DNA
tctgtggagaaggctcagagt

SEQ ID NO: 42961 - DNA, 21 bp, synthetic construct
  misc_feature 1..21: note = Description of Artificial Sequence: Synthetic oligonucleotide
  source 1..21: mol_type = other DNA
gttactcttccgcctaatgcg

SEQ ID NO: 42962 - DNA, 21 bp, synthetic construct
  misc_feature 1..21: note = Description of Artificial Sequence: Synthetic oligonucleotide
  source 1..21: mol_type = other DNA
cccaacggccacgaagtcctc

SEQ ID NO: 42963 - DNA, 21 bp, synthetic construct
  misc_feature 1..21: note = Description of Artificial Sequence: Synthetic oligonucleotide
  source 1..21: mol_type = other DNA
actactgataagagtcgtttg

SEQ ID NO: 42964 - DNA, 21 bp, synthetic construct
  misc_feature 1..21: note = Description of Artificial Sequence: Synthetic oligonucleotide
  source 1..21: mol_type = other DNA
cctttgaatactcatcagtcg

SEQ ID NO: 42965 - DNA, 21 bp, synthetic construct
  misc_feature 1..21: note = Description of Artificial Sequence: Synthetic oligonucleotide
  source 1..21: mol_type = other DNA
tttcggcagactagtgggaat

SEQ ID NO: 42966 - DNA, 21 bp, synthetic construct
  misc_feature 1..21: note = Description of Artificial Sequence: Synthetic oligonucleotide
  source 1..21: mol_type = other DNA
gtcggcgaagccggcaaagcc

SEQ ID NO: 42967 - DNA, 21 bp, synthetic construct
  misc_feature 1..21: note = Description of Artificial Sequence: Synthetic oligonucleotide
  source 1..21: mol_type = other DNA
ggcatcgacaccaaaatgctc

SEQ ID NO: 42968 - DNA, 21 bp, synthetic construct
  misc_feature 1..21: note = Description of Artificial Sequence: Synthetic oligonucleotide
  source 1..21: mol_type = other DNA
cacggcatggaagtcgccaga

SEQ ID NO: 42969 - DNA, 21 bp, synthetic construct
  misc_feature 1..21: note = Description of Artificial Sequence: Synthetic oligonucleotide
  source 1..21: mol_type = other DNA
gcgcttaagagttctaatgag

SEQ ID NO: 42970 - DNA, 21 bp, synthetic construct
  misc_feature 1..21: note = Description of Artificial Sequence: Synthetic oligonucleotide
  source 1..21: mol_type = other DNA
ggtcctagtacgcattcgggt

SEQ ID NO: 42971 - DNA, 21 bp, synthetic construct
  misc_feature 1..21: note = Description of Artificial Sequence: Synthetic oligonucleotide
  source 1..21: mol_type = other DNA
gatgctggggctgctcctaag

SEQ ID NO: 42972 - DNA, 21 bp, synthetic construct
  misc_feature 1..21: note = Description of Artificial Sequence: Synthetic oligonucleotide
  source 1..21: mol_type = other DNA
agtcgggcgcctaatactttg

SEQ ID NO: 42973 - DNA, 21 bp, synthetic construct
  misc_feature 1..21: note = Description of Artificial Sequence: Synthetic oligonucleotide
  source 1..21: mol_type = other DNA
tctgataggtcggttgatggg

SEQ ID NO: 42974 - DNA, 21 bp, synthetic construct
  misc_feature 1..21: note = Description of Artificial Sequence: Synthetic oligonucleotide
  source 1..21: mol_type = other DNA
caagaagccagagtctacagc

SEQ ID NO: 42975 - DNA, 21 bp, synthetic construct
  misc_feature 1..21: note = Description of Artificial Sequence: Synthetic oligonucleotide
  source 1..21: mol_type = other DNA
accaccaccaccagacccagc

SEQ ID NO: 42976 - DNA, 21 bp, synthetic construct
  misc_feature 1..21: note = Description of Artificial Sequence: Synthetic oligonucleotide
  source 1..21: mol_type = other DNA
aaagtcagcagcgccaccccc

SEQ ID NO: 42977 - DNA, 21 bp, synthetic construct
  misc_feature 1..21: note = Description of Artificial Sequence: Synthetic oligonucleotide
  source 1..21: mol_type = other DNA
tctggtggtgattatgcgaag

SEQ ID NO: 42978 - DNA, 21 bp, synthetic construct
  misc_feature 1..21: note = Description of Artificial Sequence: Synthetic oligonucleotide
  source 1..21: mol_type = other DNA
aacagcgaagccagactcagc

SEQ ID NO: 42979 - DNA, 21 bp, synthetic construct
  misc_feature 1..21: note = Description of Artificial Sequence: Synthetic oligonucleotide
  source 1..21: mol_type = other DNA
gctgctcattcgactatgaat

SEQ ID NO: 42980 - DNA, 21 bp, synthetic construct
  misc_feature 1..21: note = Description of Artificial Sequence: Synthetic oligonucleotide
  source 1..21: mol_type = other DNA
ccccaaaccagccccagaacc

SEQ ID NO: 42981 - DNA, 21 bp, synthetic construct
  misc_feature 1..21: note = Description of Artificial Sequence: Synthetic oligonucleotide
  source 1..21: mol_type = other DNA
gacaccaacaacagagccaac

SEQ ID NO: 42982 - DNA, 21 bp, synthetic construct
  misc_feature 1..21: note = Description of Artificial Sequence: Synthetic oligonucleotide
  source 1..21: mol_type = other DNA
tctactatgcataagaatgtt

SEQ ID NO: 42983 - DNA, 21 bp, synthetic construct
  misc_feature 1..21: note = Description of Artificial Sequence: Synthetic oligonucleotide
  source 1..21: mol_type = other DNA
cctggtgctagtggtaaggtt

SEQ ID NO: 42984 - DNA, 21 bp, synthetic construct
  misc_feature 1..21: note = Description of Artificial Sequence: Synthetic oligonucleotide
  source 1..21: mol_type = other DNA
tcgattcagagtgctgctgct

SEQ ID NO: 42985 - DNA, 21 bp, synthetic construct
  misc_feature 1..21: note = Description of Artificial Sequence: Synthetic oligonucleotide
  source 1..21: mol_type = other DNA
cacagcagccacagccccagc

SEQ ID NO: 42986 - DNA, 21 bp, synthetic construct
  misc_feature 1..21: note = Description of Artificial Sequence: Synthetic oligonucleotide
  source 1..21: mol_type = other DNA
gaatacccccaacaagccaaa

SEQ ID NO: 42987 - DNA, 21 bp, synthetic construct
  misc_feature 1..21: note = Description of Artificial Sequence: Synthetic oligonucleotide
  source 1..21: mol_type = other DNA
tctaagccggctaataatgtt

SEQ ID NO: 42988 - DNA, 21 bp, synthetic construct
  misc_feature 1..21: note = Description of Artificial Sequence: Synthetic oligonucleotide
  source 1..21: mol_type = other DNA
caaaaaaccaccatcgacggc

SEQ ID NO: 42989 - DNA, 21 bp, synthetic construct
  misc_feature 1..21: note = Description of Artificial Sequence: Synthetic oligonucleotide
  source 1..21: mol_type = other DNA
cccatcaccagaagcctcctc

SEQ ID NO: 42990 - DNA, 21 bp, synthetic construct
  misc_feature 1..21: note = Description of Artificial Sequence: Synthetic oligonucleotide
  source 1..21: mol_type = other DNA
cctactggtgagaagcgtttg

SEQ ID NO: 42991 - DNA, 21 bp, synthetic construct
  misc_feature 1..21: note = Description of Artificial Sequence: Synthetic oligonucleotide
  source 1..21: mol_type = other DNA
gcccccctccaaagcaacctc

SEQ ID NO: 42992 - DNA, 21 bp, synthetic construct
  misc_feature 1..21: note = Description of Artificial Sequence: Synthetic oligonucleotide
  source 1..21: mol_type = other DNA
atgaatcggactgggattaag

SEQ ID NO: 42993 - DNA, 21 bp, synthetic construct
  misc_feature 1..21: note = Description of Artificial Sequence: Synthetic oligonucleotide
  source 1..21: mol_type = other DNA
cactacggccccgacagcaaa

SEQ ID NO: 42994 - DNA, 21 bp, synthetic construct
  misc_feature 1..21: note = Description of Artificial Sequence: Synthetic oligonucleotide
  source 1..21: mol_type = other DNA
cacgccaacagccccgccacc

SEQ ID NO: 42995 - DNA, 21 bp, synthetic construct
  misc_feature 1..21: note = Description of Artificial Sequence: Synthetic oligonucleotide
  source 1..21: mol_type = other DNA
aatccttctatggctatgaag

SEQ ID NO: 42996 - DNA, 21 bp, synthetic construct
  misc_feature 1..21: note = Description of Artificial Sequence: Synthetic oligonucleotide
  source 1..21: mol_type = other DNA
gaaatcagagcccacaccacc

SEQ ID NO: 42997 - DNA, 21 bp, synthetic construct
  misc_feature 1..21: note = Description of Artificial Sequence: Synthetic oligonucleotide
  source 1..21: mol_type = other DNA
tcgcctgggaataagctgctt

SEQ ID NO: 42998 - DNA, 21 bp, synthetic construct
  misc_feature 1..21: note = Description of Artificial Sequence: Synthetic oligonucleotide
  source 1..21: mol_type = other DNA
agagaaagaaccggcttcaac

SEQ ID NO: 42999 - DNA, 21 bp, synthetic construct
  misc_feature 1..21: note = Description of Artificial Sequence: Synthetic oligonucleotide
  source 1..21: mol_type = other DNA
aatccggctcatggtcttaat

SEQ ID NO: 43000 - DNA, 21 bp, synthetic construct
  misc_feature 1..21: note = Description of Artificial Sequence: Synthetic oligonucleotide
  source 1..21: mol_type = other DNA
atgcttccttctgtgtctggt

SEQ ID NO: 43001 - DNA, 21 bp, synthetic construct
  misc_feature 1..21: note = Description of Artificial Sequence: Synthetic oligonucleotide
  source 1..21: mol_type = other DNA
aagtcggttagttcttctggt

SEQ ID NO: 43002 - DNA, 21 bp, synthetic construct
  misc_feature 1..21: note = Description of Artificial Sequence: Synthetic oligonucleotide
  source 1..21: mol_type = other DNA
gcctgcaacaccagcagatgc

SEQ ID NO: 43003 - DNA, 21 bp, synthetic construct
  misc_feature 1..21: note = Description of Artificial Sequence: Synthetic oligonucleotide
  source 1..21: mol_type = other DNA
gaacccctcagcaaacaaagc

SEQ ID NO: 43004 - DNA, 21 bp, synthetic construct
  misc_feature 1..21: note = Description of Artificial Sequence: Synthetic oligonucleotide
  source 1..21: mol_type = other DNA
aattctaataatgcgatggct

SEQ ID NO: 43005 - DNA, 21 bp, synthetic construct
  misc_feature 1..21: note = Description of Artificial Sequence: Synthetic oligonucleotide
  source 1..21: mol_type = other DNA
tctaattctcataagatttat

SEQ ID NO: 43006 - DNA, 21 bp, synthetic construct
  misc_feature 1..21: note = Description of Artificial Sequence: Synthetic oligonucleotide
  source 1..21: mol_type = other DNA
actaatcctactggttatcgt

SEQ ID NO: 43007 - DNA, 21 bp, synthetic construct
  misc_feature 1..21: note = Description of Artificial Sequence: Synthetic oligonucleotide
  source 1..21: mol_type = other DNA
ggcctcgtccccaacctcatc

SEQ ID NO: 43008 - DNA, 21 bp, synthetic construct
  misc_feature 1..21: note = Description of Artificial Sequence: Synthetic oligonucleotide
  source 1..21: mol_type = other DNA
ggcaccgccggcagattcaac

SEQ ID NO: 43009 - DNA, 21 bp, synthetic construct
  misc_feature 1..21: note = Description of Artificial Sequence: Synthetic oligonucleotide
  source 1..21: mol_type = other DNA
aataggaatgggtttaataat

SEQ ID NO: 43010 - DNA, 21 bp, synthetic construct
  misc_feature 1..21: note = Description of Artificial Sequence: Synthetic oligonucleotide
  source 1..21: mol_type = other DNA
gccgccgccgtcaaaggcggc

SEQ ID NO: 43011 - DNA, 21 bp, synthetic construct
  misc_feature 1..21: note = Description of Artificial Sequence: Synthetic oligonucleotide
  source 1..21: mol_type = other DNA
ctgatggatcatcgtacgcgg

SEQ ID NO: 43012 - DNA, 21 bp, synthetic construct
  misc_feature 1..21: note = Description of Artificial Sequence: Synthetic oligonucleotide
  source 1..21: mol_type = other DNA
gtgaatgcgaataaggcgtgt

SEQ ID NO: 43013 - DNA, 21 bp, synthetic construct
  misc_feature 1..21: note = Description of Artificial Sequence: Synthetic oligonucleotide
  source 1..21: mol_type = other DNA
agccacagcgtcacccccggc

SEQ ID NO: 43014 - DNA, 21 bp, synthetic construct
  misc_feature 1..21: note = Description of Artificial Sequence: Synthetic oligonucleotide
  source 1..21: mol_type = other DNA
agtcttcttgggggtttgggg

SEQ ID NO: 43015 - DNA, 21 bp, synthetic construct
  misc_feature 1..21: note = Description of Artificial Sequence: Synthetic oligonucleotide
  source 1..21: mol_type = other DNA
gggtcgcatactaatacttct

SEQ ID NO: 43016 - DNA, 21 bp, synthetic construct
  misc_feature 1..21: note = Description of Artificial Sequence: Synthetic oligonucleotide
  source 1..21: mol_type = other DNA
gggccgaatccgattaatggg

SEQ ID NO: 43017 - DNA, 21 bp, synthetic construct
  misc_feature 1..21: note = Description of Artificial Sequence: Synthetic oligonucleotide
  source 1..21: mol_type = other DNA
actgggcgggggtcggatgtg

SEQ ID NO: 43018 - DNA, 21 bp, synthetic construct
  misc_feature 1..21: note = Description of Artificial Sequence: Synthetic oligonucleotide
  source 1..21: mol_type = other DNA
ggtttgcagagtaagcagttg

SEQ ID NO: 43019 - DNA, 21 bp, synthetic construct
  misc_feature 1..21: note = Description of Artificial Sequence: Synthetic oligonucleotide
  source 1..21: mol_type = other DNA
tcgccggttaaggggtctgtt

SEQ ID NO: 43020 - DNA, 21 bp, synthetic construct
  misc_feature 1..21: note = Description of Artificial Sequence: Synthetic oligonucleotide
  source 1..21: mol_type = other DNA
gatccgttggggaagcagggt

SEQ ID NO: 43021 - DNA, 21 bp, synthetic construct
  misc_feature 1..21: note = Description of Artificial Sequence: Synthetic oligonucleotide
  source 1..21: mol_type = other DNA
ttgagttcggataagaatgtt

SEQ ID NO: 43022 - DNA, 21 bp, synthetic construct
  misc_feature 1..21: note = Description of Artificial Sequence: Synthetic oligonucleotide
  source 1..21: mol_type = other DNA
cacgacacccacaaattcctc

SEQ ID NO: 43023 - DNA, 21 bp, synthetic construct
  misc_feature 1..21: note = Description of Artificial Sequence: Synthetic oligonucleotide
  source 1..21: mol_type = other DNA
aatctttcgcatagtgcgggg

SEQ ID NO: 43024 - DNA, 21 bp, synthetic construct
  misc_feature 1..21: note = Description of Artificial Sequence: Synthetic oligonucleotide
  source 1..21: mol_type = other DNA
tatagtggtggtactcagcag

SEQ ID NO: 43025 - DNA, 21 bp, synthetic construct
  misc_feature 1..21: note = Description of Artificial Sequence: Synthetic oligonucleotide
  source 1..21: mol_type = other DNA
tctttgcctggggagtctaag

SEQ ID NO: 43026 - DNA, 21 bp, synthetic construct
  misc_feature 1..21: note = Description of Artificial Sequence: Synthetic oligonucleotide
  source 1..21: mol_type = other DNA
tctaggaatcctaatatgatt

SEQ ID NO: 43027 - DNA, 21 bp, synthetic construct
  misc_feature 1..21: note = Description of Artificial Sequence: Synthetic oligonucleotide
  source 1..21: mol_type = other DNA
aatatttcgtctaaggttgcg

SEQ ID NO: 43028 - DNA, 21 bp, synthetic construct
  misc_feature 1..21: note = Description of Artificial Sequence: Synthetic oligonucleotide
  source 1..21: mol_type = other DNA
agtaatccgagtgggttttcg

SEQ ID NO: 43029 - DNA, 21 bp, synthetic construct
  misc_feature 1..21: note = Description of Artificial Sequence: Synthetic oligonucleotide
  source 1..21: mol_type = other DNA
agaagaatcgacaccatcccc

SEQ ID NO: 43030 - DNA, 21 bp, synthetic construct
  misc_feature 1..21: note = Description of Artificial Sequence: Synthetic oligonucleotide
  source 1..21: mol_type = other DNA
catgtttctcatggtccgggg

SEQ ID NO: 43031 - DNA, 21 bp, synthetic construct
  misc_feature 1..21: note = Description of Artificial Sequence: Synthetic oligonucleotide
  source 1..21: mol_type = other DNA
gccagcagcccccaagaaaaa

SEQ ID NO: 43032 - DNA, 21 bp, synthetic construct
  misc_feature 1..21: note = Description of Artificial Sequence: Synthetic oligonucleotide
  source 1..21: mol_type = other DNA
caactcaacgaagaacacggc

SEQ ID NO: 43033 - DNA, 21 bp, synthetic construct
  misc_feature 1..21: note = Description of Artificial Sequence: Synthetic oligonucleotide
  source 1..21: mol_type = other DNA
gaaacccccaacagaagccaa

SEQ ID NO: 43034 - DNA, 21 bp, synthetic construct
  misc_feature 1..21: note = Description of Artificial Sequence: Synthetic oligonucleotide
  source 1..21: mol_type = other DNA
aagatgacgccgcagtctact

SEQ ID NO: 43035 - DNA, 21 bp, synthetic construct
  misc_feature 1..21: note = Description of Artificial Sequence: Synthetic oligonucleotide
  source 1..21: mol_type = other DNA
caaaccagcagccacgcctac

SEQ ID NO: 43036 - DNA, 21 bp, synthetic construct
  misc_feature 1..21: note = Description of Artificial Sequence: Synthetic oligonucleotide
  source 1..21: mol_type = other DNA
cggatgcagccgagtggtaat

SEQ ID NO: 43037 - DNA, 21 bp, synthetic construct
  misc_feature 1..21: note = Description of Artificial Sequence: Synthetic oligonucleotide
  source 1..21: mol_type = other DNA
cctcgtactaatgttatgcct

SEQ ID NO: 43038 - DNA, 21 bp, synthetic construct
  misc_feature 1..21: note = Description of Artificial Sequence: Synthetic oligonucleotide
  source 1..21: mol_type = other DNA
gccaccaccaaagccggcatc

SEQ ID NO: 43039 - DNA, 21 bp, synthetic construct
  misc_feature 1..21: note = Description of Artificial Sequence: Synthetic oligonucleotide
  source 1..21: mol_type = other DNA
aagaatagtagtggtagtacg

SEQ ID NO: 43040 - DNA, 21 bp, synthetic construct
  misc_feature 1..21: note = Description of Artificial Sequence: Synthetic oligonucleotide
  source 1..21: mol_type = other DNA
tctgcgagtccgagtattaag

SEQ ID NO: 43041 - DNA, 21 bp, synthetic construct
  misc_feature 1..21: note = Description of Artificial Sequence: Synthetic oligonucleotide
  source 1..21: mol_type = other DNA
atgcccctcaaaccccacctc

SEQ ID NO: 43042 - DNA, 21 bp, synthetic construct
  misc_feature 1..21: note = Description of Artificial Sequence: Synthetic oligonucleotide
  source 1..21: mol_type = other DNA
cagagtaagggtgggtcgaat

SEQ ID NO: 43043 - DNA, 21 bp, synthetic construct
  misc_feature 1..21: note = Description of Artificial Sequence: Synthetic oligonucleotide
  source 1..21: mol_type = other DNA
aacaacctcgccggcagcaaa

SEQ ID NO: 43044 - DNA, 21 bp, synthetic construct
  misc_feature 1..21: note = Description of Artificial Sequence: Synthetic oligonucleotide
  source 1..21: mol_type = other DNA
caaagcagccaaagcggcccc

SEQ ID NO: 43045 - DNA, 21 bp, synthetic construct
  misc_feature 1..21: note = Description of Artificial Sequence: Synthetic oligonucleotide
  source 1..21: mol_type = other DNA
gggatgggtggtttgaagaat

SEQ ID NO: 43046 - DNA, 21 bp, synthetic construct
  misc_feature 1..21: note = Description of Artificial Sequence: Synthetic oligonucleotide
  source 1..21: mol_type = other DNA
agaagctacgaaggcatgcaa

SEQ ID NO: 43047 - DNA, 21 bp, synthetic construct
  misc_feature 1..21: note = Description of Artificial Sequence: Synthetic oligonucleotide
  source 1..21: mol_type = other DNA
aacccctacaccgccaacaac

SEQ ID NO: 43048 - DNA, 21 bp, synthetic construct
  misc_feature 1..21: note = Description of Artificial Sequence: Synthetic oligonucleotide
  source 1..21: mol_type = other DNA
catagtactccgtcgactagg

SEQ ID NO: 43049 - DNA, 21 bp, synthetic construct
  misc_feature 1..21: note = Description of Artificial Sequence: Synthetic oligonucleotide
  source 1..21: mol_type = other DNA
tgtattgggaataagactaat

SEQ ID NO: 43050 - DNA, 21 bp, synthetic construct
  misc_feature 1..21: note = Description of Artificial Sequence: Synthetic oligonucleotide
  source 1..21: mol_type = other DNA
ggggtgactgggtctcggggt

SEQ ID NO: 43051 - DNA, 21 bp, synthetic construct
  misc_feature 1..21: note = Description of Artificial Sequence: Synthetic oligonucleotide
  source 1..21: mol_type = other DNA
tctccgacgaggcctatgaat

SEQ ID NO: 43052 - DNA, 21 bp, synthetic construct
  misc_feature 1..21: note = Description of Artificial Sequence: Synthetic oligonucleotide
  source 1..21: mol_type = other DNA
tgtccgcagcgtgcgtctact

SEQ ID NO: 43053 - DNA, 21 bp, synthetic construct
  misc_feature 1..21: note = Description of Artificial Sequence: Synthetic oligonucleotide
  source 1..21: mol_type = other DNA
cctcttcagacgagtaggact

SEQ ID NO: 43054 - DNA, 21 bp, synthetic construct
  misc_feature 1..21: note = Description of Artificial Sequence: Synthetic oligonucleotide
  source 1..21: mol_type = other DNA
gattctaggaataatatgacg

SEQ ID NO: 43055 - DNA, 21 bp, synthetic construct
  misc_feature 1..21: note = Description of Artificial Sequence: Synthetic oligonucleotide
  source 1..21: mol_type = other DNA
aggtatgataagcagaattcg

SEQ ID NO: 43056 - DNA, 21 bp, synthetic construct
  misc_feature 1..21: note = Description of Artificial Sequence: Synthetic oligonucleotide
  source 1..21: mol_type = other DNA
aatgctggtcctaattatgat

SEQ ID NO: 43057 - DNA, 21 bp, synthetic construct
  misc_feature 1..21: note = Description of Artificial Sequence: Synthetic oligonucleotide
  source 1..21: mol_type = other DNA
atcagaagcaaaggcagcgcc

SEQ ID NO: 43058 - DNA, 21 bp, synthetic construct
  misc_feature 1..21: note = Description of Artificial Sequence: Synthetic oligonucleotide
  source 1..21: mol_type = other DNA
gactacgacgccaccagcaga

SEQ ID NO: 43059 - DNA, 21 bp, synthetic construct
  misc_feature 1..21: note = Description of Artificial Sequence: Synthetic oligonucleotide
  source 1..21: mol_type = other DNA
ctttcggctaatccgcataat

SEQ ID NO: 43060 - DNA, 21 bp, synthetic construct
  misc_feature 1..21: note = Description of Artificial Sequence: Synthetic oligonucleotide
  source 1..21: mol_type = other DNA
gtcagaatccccaaaagcaac

SEQ ID NO: 43061 - DNA, 21 bp, synthetic construct
  misc_feature 1..21: note = Description of Artificial Sequence: Synthetic oligonucleotide
  source 1..21: mol_type = other DNA
attgtttctggtaagcttacg

SEQ ID NO: 43062 - DNA, 21 bp, synthetic construct
  misc_feature 1..21: note = Description of Artificial Sequence: Synthetic oligonucleotide
  source 1..21: mol_type = other DNA
attggtaataagcagtcgcag

SEQ ID NO: 43063 - DNA, 21 bp, synthetic construct
  misc_feature 1..21: note = Description of Artificial Sequence: Synthetic oligonucleotide
  source 1..21: mol_type = other DNA
ccctaccaaagccacagcccc

SEQ ID NO: 43064 - DNA, 21 bp, synthetic construct
  misc_feature 1..21: note = Description of Artificial Sequence: Synthetic oligonucleotide
  source 1..21: mol_type = other DNA
gggtctatttcgacggctcat

SEQ ID NO: 43065 - DNA, 21 bp, synthetic construct
  misc_feature 1..21: note = Description of Artificial Sequence: Synthetic oligonucleotide
  source 1..21: mol_type = other DNA
gaaaacaacgccctcagcaga

SEQ ID NO: 43066 - DNA, 21 bp, synthetic construct
  misc_feature 1..21: note = Description of Artificial Sequence: Synthetic oligonucleotide
  source 1..21: mol_type = other DNA
tcgcaggtttctcatagtgtg

SEQ ID NO: 43067 - DNA, 21 bp, synthetic construct
  misc_feature 1..21: note = Description of Artificial Sequence: Synthetic oligonucleotide
  source 1..21: mol_type = other DNA
aattattcgggtgcgcatact

SEQ ID NO: 43068 - DNA, 21 bp, synthetic construct
  misc_feature 1..21: note = Description of Artificial Sequence: Synthetic oligonucleotide
  source 1..21: mol_type = other DNA
ccggtttcgacgcattcgtct

SEQ ID NO: 43069 - DNA, 21 bp, synthetic construct
  misc_feature 1..21: note = Description of Artificial Sequence: Synthetic oligonucleotide
  source 1..21: mol_type = other DNA
gttcatgtgacgagtcagact

SEQ ID NO: 43070 - DNA, 21 bp, synthetic construct
  misc_feature 1..21: note = Description of Artificial Sequence: Synthetic oligonucleotide
  source 1..21: mol_type = other DNA
attaggactaatagtactctt

SEQ ID NO: 43071 - DNA, 21 bp, synthetic construct
  misc_feature 1..21: note = Description of Artificial Sequence: Synthetic oligonucleotide
  source 1..21: mol_type = other DNA
gaagccagaaaagtcaccagc

SEQ ID NO: 43072 - DNA, 21 bp, synthetic construct
  misc_feature 1..21: note = Description of Artificial Sequence: Synthetic oligonucleotide
  source 1..21: mol_type = other DNA
aacagcgtcgccggcatgggc

SEQ ID NO: 43073 - DNA, 21 bp, synthetic construct
  misc_feature 1..21: note = Description of Artificial Sequence: Synthetic oligonucleotide
  source 1..21: mol_type = other DNA
aggggtaatgagaatattaat

SEQ ID NO: 43074 - DNA, 21 bp, synthetic construct
  misc_feature 1..21: note = Description of Artificial Sequence: Synthetic oligonucleotide
  source 1..21: mol_type = other DNA
gacccccaagtcagagccctc

SEQ ID NO: 43075 - DNA, 21 bp, synthetic construct
  misc_feature 1..21: note = Description of Artificial Sequence: Synthetic oligonucleotide
  source 1..21: mol_type = other DNA
gggattacgcatggttctcat

SEQ ID NO: 43076 - DNA, 21 bp, synthetic construct
  misc_feature 1..21: note = Description of Artificial Sequence: Synthetic oligonucleotide
  source 1..21: mol_type = other DNA
gggcaggctgttaatactgct

SEQ ID NO: 43077 - DNA, 21 bp, synthetic construct
  misc_feature 1..21: note = Description of Artificial Sequence: Synthetic oligonucleotide
  source 1..21: mol_type = other DNA
actacttatggtgggaatcgg

SEQ ID NO: 43078 - DNA, 21 bp, synthetic construct
  misc_feature 1..21: note = Description of Artificial Sequence: Synthetic oligonucleotide
  source 1..21: mol_type = other DNA
aataatggggcttcggttgtg

SEQ ID NO: 43079 - DNA, 21 bp, synthetic construct
  misc_feature 1..21: note = Description of Artificial Sequence: Synthetic oligonucleotide
  source 1..21: mol_type = other DNA
cccatcggcagccaacacatc

SEQ ID NO: 43080 - DNA, 21 bp, synthetic construct
  misc_feature 1..21: note = Description of Artificial Sequence: Synthetic oligonucleotide
  source 1..21: mol_type = other DNA
tctgttcagaagtcggttaat

SEQ ID NO: 43081 - DNA, 21 bp, synthetic construct
  misc_feature 1..21: note = Description of Artificial Sequence: Synthetic oligonucleotide
  source 1..21: mol_type = other DNA
gaacccgtccccaaaaccaga

SEQ ID NO: 43082 - DNA, 21 bp, synthetic construct
  misc_feature 1..21: note = Description of Artificial Sequence: Synthetic oligonucleotide
  source 1..21: mol_type = other DNA
ggcaccagcaacagatacacc

SEQ ID NO: 43083 - DNA, 21 bp, synthetic construct
  misc_feature 1..21: note = Description of Artificial Sequence: Synthetic oligonucleotide
  source 1..21: mol_type = other DNA
cggaataatccgactacggtt

SEQ ID NO: 43084 - DNA, 21 bp, synthetic construct
  misc_feature 1..21: note = Description of Artificial Sequence: Synthetic oligonucleotide
  source 1..21: mol_type = other DNA
gatccggctacgaggaagagt

SEQ ID NO: 43085 - DNA, 21 bp, synthetic construct
  misc_feature 1..21: note = Description of Artificial Sequence: Synthetic oligonucleotide
  source 1..21: mol_type = other DNA
cccatgagccacgtcagcggc

SEQ ID NO: 43086 - DNA, 21 bp, synthetic construct
  misc_feature 1..21: note = Description of Artificial Sequence: Synthetic oligonucleotide
  source 1..21: mol_type = other DNA
accaacatccaagccagcaaa

SEQ ID NO: 43087 - DNA, 21 bp, synthetic construct
  misc_feature 1..21: note = Description of Artificial Sequence: Synthetic oligonucleotide
  source 1..21: mol_type = other DNA
aagctggttaatagtaatggt

SEQ ID NO: 43088 - DNA, 21 bp, synthetic construct
  misc_feature 1..21: note = Description of Artificial Sequence: Synthetic oligonucleotide
  source 1..21: mol_type = other DNA
tttacttatgcggaggggaat

SEQ ID NO: 43089 - DNA, 21 bp, synthetic construct
  misc_feature 1..21: note = Description of Artificial Sequence: Synthetic oligonucleotide
  source 1..21: mol_type = other DNA
tggcaagaagaaagaggccaa

SEQ ID NO: 43090 - DNA, 21 bp, synthetic construct
  misc_feature 1..21: note = Description of Artificial Sequence: Synthetic oligonucleotide
  source 1..21: mol_type = other DNA
tacggcaaccccagacaagcc

SEQ ID NO: 43091 - DNA, 21 bp, synthetic construct
  misc_feature 1..21: note = Description of Artificial Sequence: Synthetic oligonucleotide
  source 1..21: mol_type = other DNA
caaagcaccggcagagaaaga

SEQ ID NO: 43092 - DNA, 21 bp, synthetic construct
  misc_feature 1..21: note = Description of Artificial Sequence: Synthetic oligonucleotide
  source 1..21: mol_type = other DNA
aacggcgtccaacaacccaaa

SEQ ID NO: 43093 - DNA, 21 bp, synthetic construct
  misc_feature 1..21: note = Description of Artificial Sequence: Synthetic oligonucleotide
  source 1..21: mol_type = other DNA
caatacaaccaagccggcctc

SEQ ID NO: 43094 - DNA, 21 bp, synthetic construct
  misc_feature 1..21: note = Description of Artificial Sequence: Synthetic oligonucleotide
  source 1..21: mol_type = other DNA
ccgcttaatgctcggggtagt

SEQ ID NO: 43095 - DNA, 21 bp, synthetic construct
  misc_feature 1..21: note = Description of Artificial Sequence: Synthetic oligonucleotide
  source 1..21: mol_type = other DNA
catgctaagagttcttctatg

SEQ ID NO: 43096 - DNA, 21 bp, synthetic construct
  misc_feature 1..21: note = Description of Artificial Sequence: Synthetic oligonucleotide
  source 1..21: mol_type = other DNA
gagcatgagacttcttctcgg

SEQ ID NO: 43097 - DNA, 21 bp, synthetic construct
  misc_feature 1..21: note = Description of Artificial Sequence: Synthetic oligonucleotide
  source 1..21: mol_type = other DNA
caaaaaacccaaaccaccagc

SEQ ID NO: 43098 - DNA, 21 bp, synthetic construct
  misc_feature 1..21: note = Description of Artificial Sequence: Synthetic oligonucleotide
  source 1..21: mol_type = other DNA
cagggggcggctgatcattct

SEQ ID NO: 43099 - DNA, 21 bp, synthetic construct
  misc_feature 1..21: note = Description of Artificial Sequence: Synthetic oligonucleotide
  source 1..21: mol_type = other DNA
attgcttcgagtggtatgcat

SEQ ID NO: 43100 - DNA, 21 bp, synthetic construct
  misc_feature 1..21: note = Description of Artificial Sequence: Synthetic oligonucleotide
  source 1..21: mol_type = other DNA
tcgtatcctagtcagttgaat

SEQ ID NO: 43101 - DNA, 21 bp, synthetic construct
  misc_feature 1..21: note = Description of Artificial Sequence: Synthetic oligonucleotide
  source 1..21: mol_type = other DNA
gtcagaagcaacgtcagcggc

SEQ ID NO: 43102 - DNA, 21 bp, synthetic construct
  misc_feature 1..21: note = Description of Artificial Sequence: Synthetic oligonucleotide
  source 1..21: mol_type = other DNA
cctgggacgaagcagagttcg

SEQ ID NO: 43103 - DNA, 21 bp, synthetic construct
  misc_feature 1..21: note = Description of Artificial Sequence: Synthetic oligonucleotide
  source 1..21: mol_type = other DNA
acccacagcaaaagcttcgtc

SEQ ID NO: 43104 - DNA, 21 bp, synthetic construct
  misc_feature 1..21: note = Description of Artificial Sequence: Synthetic oligonucleotide
  source 1..21: mol_type = other DNA
aggggtacgggtattggttct

SEQ ID NO: 43105 - DNA, 21 bp, synthetic construct
  misc_feature 1..21: note = Description of Artificial Sequence: Synthetic oligonucleotide
  source 1..21: mol_type = other DNA
cccagcagccccaacagcatc

SEQ ID NO: 43106 - DNA, 21 bp, synthetic construct
  misc_feature 1..21: note = Description of Artificial Sequence: Synthetic oligonucleotide
  source 1..21: mol_type = other DNA
cgtgcgacggagggtgttttt

SEQ ID NO: 43107 - DNA, 21 bp, synthetic construct
  misc_feature 1..21: note = Description of Artificial Sequence: Synthetic oligonucleotide
  source 1..21: mol_type = other DNA
cccatcctcgacagaaaaagc

SEQ ID NO: 43108 - DNA, 21 bp, synthetic construct
  misc_feature 1..21: note = Description of Artificial Sequence: Synthetic oligonucleotide
  source 1..21: mol_type = other DNA
gattctattggtagttctaag

SEQ ID NO: 43109 - DNA, 21 bp, synthetic construct
  misc_feature 1..21: note = Description of Artificial Sequence: Synthetic oligonucleotide
  source 1..21: mol_type = other DNA
atgagcagcgaaagacccggc

SEQ ID NO: 43110 - DNA, 21 bp, synthetic construct
  misc_feature 1..21: note = Description of Artificial Sequence: Synthetic oligonucleotide
  source 1..21: mol_type = other DNA
aaagaaaaccccgtcagaagc

SEQ ID NO: 43111 - DNA, 21 bp, synthetic construct
  misc_feature 1..21: note = Description of Artificial Sequence: Synthetic oligonucleotide
  source 1..21: mol_type = other DNA
tattcgggtcctgatctgcgt

SEQ ID NO: 43112 - DNA, 21 bp, synthetic construct
  misc_feature 1..21: note = Description of Artificial Sequence: Synthetic oligonucleotide
  source 1..21: mol_type = other DNA
tacagagtcacccaaagcagc

SEQ ID NO: 43113 - DNA, 21 bp, synthetic construct
  misc_feature 1..21: note = Description of Artificial Sequence: Synthetic oligonucleotide
  source 1..21: mol_type = other DNA
agtacttctagttcggctagt

SEQ ID NO: 43114 - DNA, 21 bp, synthetic construct
  misc_feature 1..21: note = Description of Artificial Sequence: Synthetic oligonucleotide
  source 1..21: mol_type = other DNA
cgtcagtatacgggtgatagt

SEQ ID NO: 43115 - DNA, 21 bp, synthetic construct
  misc_feature 1..21: note = Description of Artificial Sequence: Synthetic oligonucleotide
  source 1..21: mol_type = other DNA
agagaactcaaaaacagcagc

SEQ ID NO: 43116 - DNA, 21 bp, synthetic construct
  misc_feature 1..21: note = Description of Artificial Sequence: Synthetic oligonucleotide
  source 1..21: mol_type = other DNA
ggcaccggcaccaccttcaga

SEQ ID NO: 43117 - DNA, 21 bp, synthetic construct
  misc_feature 1..21: note = Description of Artificial Sequence: Synthetic oligonucleotide
  source 1..21: mol_type = other DNA
ttgatgccttctagttcttcg

SEQ ID NO: 43118 - DNA, 21 bp, synthetic construct
  misc_feature 1..21: note = Description of Artificial Sequence: Synthetic oligonucleotide
  source 1..21: mol_type = other DNA
ccggatgttaaggtgactagg

SEQ ID NO: 43119 - DNA, 21 bp, synthetic construct
  misc_feature 1..21: note = Description of Artificial Sequence: Synthetic oligonucleotide
  source 1..21: mol_type = other DNA
gttgcttcttcggctcatgtt

SEQ ID NO: 43120 - DNA, 21 bp, synthetic construct
  misc_feature 1..21: note = Description of Artificial Sequence: Synthetic oligonucleotide
  source 1..21: mol_type = other DNA
ggtaagacgaatgtgtctagt

SEQ ID NO: 43121 - DNA, 21 bp, synthetic construct
  misc_feature 1..21: note = Description of Artificial Sequence: Synthetic oligonucleotide
  source 1..21: mol_type = other DNA
tttgttagtggtaaggtgcag

SEQ ID NO: 43122 - DNA, 21 bp, synthetic construct
  misc_feature 1..21: note = Description of Artificial Sequence: Synthetic oligonucleotide
  source 1..21: mol_type = other DNA
aatagtcggatttctccttcg

SEQ ID NO: 43123 - DNA, 21 bp, synthetic construct
  misc_feature 1..21: note = Description of Artificial Sequence: Synthetic oligonucleotide
  source 1..21: mol_type = other DNA
accagcagcccccaacccagc

SEQ ID NO: 43124 - DNA, 21 bp, synthetic construct
  misc_feature 1..21: note = Description of Artificial Sequence: Synthetic oligonucleotide
  source 1..21: mol_type = other DNA
ggtacgaatactgggattgtt

SEQ ID NO: 43125 - DNA, 21 bp, synthetic construct
  misc_feature 1..21: note = Description of Artificial Sequence: Synthetic oligonucleotide
  source 1..21: mol_type = other DNA
agtactacgaatagtaagaat

SEQ ID NO: 43126 - DNA, 21 bp, synthetic construct
  misc_feature 1..21: note = Description of Artificial Sequence: Synthetic oligonucleotide
  source 1..21: mol_type = other DNA
agaagcctcagcaccgaaaac

SEQ ID NO: 43127 - DNA, 21 bp, synthetic construct
  misc_feature 1..21: note = Description of Artificial Sequence: Synthetic oligonucleotide
  source 1..21: mol_type = other DNA
ttgcgtcctgctaatactatt

SEQ ID NO: 43128 - DNA, 21 bp, synthetic construct
  misc_feature 1..21: note = Description of Artificial Sequence: Synthetic oligonucleotide
  source 1..21: mol_type = other DNA
cctcaggagtctagggggatg

SEQ ID NO: 43129 - DNA, 21 bp, synthetic construct
  misc_feature 1..21: note = Description of Artificial Sequence: Synthetic oligonucleotide
  source 1..21: mol_type = other DNA
ggcgacaaaggcctccaaaga

SEQ ID NO: 43130 - DNA, 21 bp, synthetic construct
  misc_feature 1..21: note = Description of Artificial Sequence: Synthetic oligonucleotide
  source 1..21: mol_type = other DNA
agtaatagtaggcaggctgat

SEQ ID NO: 43131 - DNA, 21 bp, synthetic construct
  misc_feature 1..21: note = Description of Artificial Sequence: Synthetic oligonucleotide
  source 1..21: mol_type = other DNA
gatgtgaatcctagtgcgaag

SEQ ID NO: 43132 - DNA, 21 bp, synthetic construct
  misc_feature 1..21: note = Description of Artificial Sequence: Synthetic oligonucleotide
  source 1..21: mol_type = other DNA
aggagtccggcgtatcaggat

SEQ ID NO: 43133 - DNA, 21 bp, synthetic construct
  misc_feature 1..21: note = Description of Artificial Sequence: Synthetic oligonucleotide
  source 1..21: mol_type = other DNA
tggactgtgagtcggtctggt

SEQ ID NO: 43134 - DNA, 21 bp, synthetic construct
  misc_feature 1..21: note = Description of Artificial Sequence: Synthetic oligonucleotide
  source 1..21: mol_type = other DNA
gtgagtgataatacttataag

SEQ ID NO: 43135 - DNA, 21 bp, synthetic construct
  misc_feature 1..21: note = Description of Artificial Sequence: Synthetic oligonucleotide
  source 1..21: mol_type = other DNA
gacagaaaacacaccagcacc

SEQ ID NO: 43136 - DNA, 21 bp, synthetic construct
  misc_feature 1..21: note = Description of Artificial Sequence: Synthetic oligonucleotide
  source 1..21: mol_type = other DNA
ggcaccaccaacagcagaaac

SEQ ID NO: 43137 - DNA, 21 bp, synthetic construct
  misc_feature 1..21: note = Description of Artificial Sequence: Synthetic oligonucleotide
  source 1..21: mol_type = other DNA
ggtacttcgacgtctcttcgg

SEQ ID NO: 43138 - DNA, 21 bp, synthetic construct
  misc_feature 1..21: note = Description of Artificial Sequence: Synthetic oligonucleotide
  source 1..21: mol_type = other DNA
attattcagaatgggcagggg

SEQ ID NO: 43139 - DNA, 21 bp, synthetic construct
  misc_feature 1..21: note = Description of Artificial Sequence: Synthetic oligonucleotide
  source 1..21: mol_type = other DNA
tctgattctcggaatcctgtt

SEQ ID NO: 43140 - DNA, 21 bp, synthetic construct
  misc_feature 1..21: note = Description of Artificial Sequence: Synthetic oligonucleotide
  source 1..21: mol_type = other DNA
acggggtctgggagtaatcat

SEQ ID NO: 43141 - DNA, 21 bp, synthetic construct
  misc_feature 1..21: note = Description of Artificial Sequence: Synthetic oligonucleotide
  source 1..21: mol_type = other DNA
tcgaatgagactaagtcttcg

SEQ ID NO: 43142 - DNA, 21 bp, synthetic construct
  misc_feature 1..21: note = Description of Artificial Sequence: Synthetic oligonucleotide
  source 1..21: mol_type = other DNA
gccaccatgagaagcaacgaa

SEQ ID NO: 43143 - DNA, 21 bp, synthetic construct
  misc_feature 1..21: note = Description of Artificial Sequence: Synthetic oligonucleotide
  source 1..21: mol_type = other DNA
cagaatacgcctaagagtact

SEQ ID NO: 43144 - DNA, 21 bp, synthetic construct
  misc_feature 1..21: note = Description of Artificial Sequence: Synthetic oligonucleotide
  source 1..21: mol_type = other DNA
aggtcttctgggggtttgact

SEQ ID NO: 43145 - DNA, 21 bp, synthetic construct
  misc_feature 1..21: note = Description of Artificial Sequence: Synthetic oligonucleotide
  source 1..21: mol_type = other DNA
gcgacggttcagtcggcgact

SEQ ID NO: 43146 - DNA, 21 bp, synthetic construct
  misc_feature 1..21: note = Description of Artificial Sequence: Synthetic oligonucleotide
  source 1..21: mol_type = other DNA
acccccacccccgtcaaccaa

SEQ ID NO: 43147 - DNA, 21 bp, synthetic construct
  misc_feature 1..21: note = Description of Artificial Sequence: Synthetic oligonucleotide
  source 1..21: mol_type = other DNA
agcagcgacctcggcaaaaga

SEQ ID NO: 43148 - DNA, 21 bp, synthetic construct
  misc_feature 1..21: note = Description of Artificial Sequence: Synthetic oligonucleotide
  source 1..21: mol_type = other DNA
tatggtcgtgataagtttagt

SEQ ID NO: 43149 - DNA, 21 bp, synthetic construct
  misc_feature 1..21: note = Description of Artificial Sequence: Synthetic oligonucleotide
  source 1..21: mol_type = other DNA
acggagcaggttggtacgcgt

SEQ ID NO: 43150 - DNA, 21 bp, synthetic construct
  misc_feature 1..21: note = Description of Artificial Sequence: Synthetic oligonucleotide
  source 1..21: mol_type = other DNA
agtacgactccggggttgaag

SEQ ID NO: 43151 - DNA, 21 bp, synthetic construct
  misc_feature 1..21: note = Description of Artificial Sequence: Synthetic oligonucleotide
  source 1..21: mol_type = other DNA
agcttcaccggcaacaccgtc

SEQ ID NO: 43152 - DNA, 21 bp, synthetic construct
  misc_feature 1..21: note = Description of Artificial Sequence: Synthetic oligonucleotide
  source 1..21: mol_type = other DNA
tgtgcggggactagtagtgtg

SEQ ID NO: 43153 - DNA, 21 bp, synthetic construct
  misc_feature 1..21: note = Description of Artificial Sequence: Synthetic oligonucleotide
  source 1..21: mol_type = other DNA
catcttgcttatgataataac

SEQ ID NO: 43154 - DNA, 21 bp, synthetic construct
  misc_feature 1..21: note = Description of Artificial Sequence: Synthetic oligonucleotide
  source 1..21: mol_type = other DNA
aacggcagcgaacaaaaccaa

SEQ ID NO: 43155 - DNA, 21 bp, synthetic construct
  misc_feature 1..21: note = Description of Artificial Sequence: Synthetic oligonucleotide
  source 1..21: mol_type = other DNA
accagcagagtcggccaagtc

SEQ ID NO: 43156 - DNA, 21 bp, synthetic construct
  misc_feature 1..21: note = Description of Artificial Sequence: Synthetic oligonucleotide
  source 1..21: mol_type = other DNA
aactacgacagcctcaaaaaa

SEQ ID NO: 43157 - DNA, 21 bp, synthetic construct
  misc_feature 1..21: note = Description of Artificial Sequence: Synthetic oligonucleotide
  source 1..21: mol_type = other DNA
ggggttccggctgggcatact

SEQ ID NO: 43158 - DNA, 21 bp, synthetic construct
  misc_feature 1..21: note = Description of Artificial Sequence: Synthetic oligonucleotide
  source 1..21: mol_type = other DNA
cactacggcgaaaccagaaac

SEQ ID NO: 43159 - DNA, 21 bp, synthetic construct
  misc_feature 1..21: note = Description of Artificial Sequence: Synthetic oligonucleotide
  source 1..21: mol_type = other DNA
attggggggaataagcctctt

SEQ ID NO: 43160 - DNA, 21 bp, synthetic construct
  misc_feature 1..21: note = Description of Artificial Sequence: Synthetic oligonucleotide
  source 1..21: mol_type = other DNA
ccttttggtgctggtcgtcct

SEQ ID NO: 43161 - DNA, 21 bp, synthetic construct
  misc_feature 1..21: note = Description of Artificial Sequence: Synthetic oligonucleotide
  source 1..21: mol_type = other DNA
atggaaatcaaacccaacaga

SEQ ID NO: 43162 - DNA, 21 bp, synthetic construct
  misc_feature 1..21: note = Description of Artificial Sequence: Synthetic oligonucleotide
  source 1..21: mol_type = other DNA
accctcgaaaacagcagaaga

SEQ ID NO: 43163 - DNA, 21 bp, synthetic construct
  misc_feature 1..21: note = Description of Artificial Sequence: Synthetic oligonucleotide
  source 1..21: mol_type = other DNA
tctggtgttaaggctttttct

SEQ ID NO: 43164 - DNA, 21 bp, synthetic construct
  misc_feature 1..21: note = Description of Artificial Sequence: Synthetic oligonucleotide
  source 1..21: mol_type = other DNA
agcagacaagccaccagcagc

SEQ ID NO: 43165 - DNA, 21 bp, synthetic construct
  misc_feature 1..21: note = Description of Artificial Sequence: Synthetic oligonucleotide
  source 1..21: mol_type = other DNA
actccgcagaattctgtgaag

SEQ ID NO: 43166 - DNA, 21 bp, synthetic construct
  misc_feature 1..21: note = Description of Artificial Sequence: Synthetic oligonucleotide
  source 1..21: mol_type = other DNA
cgggtggatactattactaag

SEQ ID NO: 43167 - DNA, 21 bp, synthetic construct
  misc_feature 1..21: note = Description of Artificial Sequence: Synthetic oligonucleotide
  source 1..21: mol_type = other DNA
ctcgccagccacaaaggccaa

SEQ ID NO: 43168 - DNA, 21 bp, synthetic construct
  misc_feature 1..21: note = Description of Artificial Sequence: Synthetic oligonucleotide
  source 1..21: mol_type = other DNA
tttagtaataatggttcgcat

SEQ ID NO: 43169 - DNA, 21 bp, synthetic construct
  misc_feature 1..21: note = Description of Artificial Sequence: Synthetic oligonucleotide
  source 1..21: mol_type = other DNA
attaagcagtcttcttcggct

SEQ ID NO: 43170 - DNA, 21 bp, synthetic construct
  misc_feature 1..21: note = Description of Artificial Sequence: Synthetic oligonucleotide
  source 1..21: mol_type = other DNA
cacggcgtcaacaaaaccgaa

SEQ ID NO: 43171 - DNA, 21 bp, synthetic construct
  misc_feature 1..21: note = Description of Artificial Sequence: Synthetic oligonucleotide
  source 1..21: mol_type = other DNA
tatgatcagactaggacgcgg

SEQ ID NO: 43172 - DNA, 21 bp, synthetic construct
  misc_feature 1..21: note = Description of Artificial Sequence: Synthetic oligonucleotide
  source 1..21: mol_type = other DNA
aatacgacgggtcatgctggg

SEQ ID NO: 43173 - DNA, 21 bp, synthetic construct
  misc_feature 1..21: note = Description of Artificial Sequence: Synthetic oligonucleotide
  source 1..21: mol_type = other DNA
cctaatctgagtaagagtttg

SEQ ID NO: 43174 - DNA, 21 bp, synthetic construct
  misc_feature 1..21: note = Description of Artificial Sequence: Synthetic oligonucleotide
  source 1..21: mol_type = other DNA
ttgccttcgggtaatactagt

SEQ ID NO: 43175 - DNA, 21 bp, synthetic construct
  misc_feature 1..21: note = Description of Artificial Sequence: Synthetic oligonucleotide
  source 1..21: mol_type = other DNA
gctctttctagtcagaagggt

SEQ ID NO: 43176 - DNA, 21 bp, synthetic construct
  misc_feature 1..21: note = Description of Artificial Sequence: Synthetic oligonucleotide
  source 1..21: mol_type = other DNA
gctatgtctgagcatctgaag

SEQ ID NO: 43177 - DNA, 21 bp, synthetic construct
  misc_feature 1..21: note = Description of Artificial Sequence: Synthetic oligonucleotide
  source 1..21: mol_type = other DNA
caagacagcagcatcagaaac

SEQ ID NO: 43178 - DNA, 21 bp, synthetic construct
  misc_feature 1..21: note = Description of Artificial Sequence: Synthetic oligonucleotide
  source 1..21: mol_type = other DNA
tcgttgagtcttgtgaagggt

SEQ ID NO: 43179 - DNA, 21 bp, synthetic construct
  misc_feature 1..21: note = Description of Artificial Sequence: Synthetic oligonucleotide
  source 1..21: mol_type = other DNA
tatccgaattctgtgcctagt

SEQ ID NO: 43180 - DNA, 21 bp, synthetic construct
  misc_feature 1..21: note = Description of Artificial Sequence: Synthetic oligonucleotide
  source 1..21: mol_type = other DNA
cccagactcctcgacgacggc

SEQ ID NO: 43181 - DNA, 21 bp, synthetic construct
  misc_feature 1..21: note = Description of Artificial Sequence: Synthetic oligonucleotide
  source 1..21: mol_type = other DNA
ggccccaaccccggcaaccac

SEQ ID NO: 43182 - DNA, 21 bp, synthetic construct
  misc_feature 1..21: note = Description of Artificial Sequence: Synthetic oligonucleotide
  source 1..21: mol_type = other DNA
cattctacgactgttgcgaag

SEQ ID NO: 43183 - DNA, 21 bp, synthetic construct
  misc_feature 1..21: note = Description of Artificial Sequence: Synthetic oligonucleotide
  source 1..21: mol_type = other DNA
tctacggatcggtcgtttaat

SEQ ID NO: 43184 - DNA, 21 bp, synthetic construct
  misc_feature 1..21: note = Description of Artificial Sequence: Synthetic oligonucleotide
  source 1..21: mol_type = other DNA
cctctgccggctcatagtcct

SEQ ID NO: 43185 - DNA, 21 bp, synthetic construct
  misc_feature 1..21: note = Description of Artificial Sequence: Synthetic oligonucleotide
  source 1..21: mol_type = other DNA
atggtgtctcatactcatggg

SEQ ID NO: 43186 - DNA, 21 bp, synthetic construct
  misc_feature 1..21: note = Description of Artificial Sequence: Synthetic oligonucleotide
  source 1..21: mol_type = other DNA
cctgtttctaggctgactggg

SEQ ID NO: 43187 - DNA, 21 bp, synthetic construct
  misc_feature 1..21: note = Description of Artificial Sequence: Synthetic oligonucleotide
  source 1..21: mol_type = other DNA
attgggactagtattaattct

SEQ ID NO: 43188 - DNA, 21 bp, synthetic construct
  misc_feature 1..21: note = Description of Artificial Sequence: Synthetic oligonucleotide
  source 1..21: mol_type = other DNA
tctcctaataagacttctctt

SEQ ID NO: 43189 - DNA, 21 bp, synthetic construct
  misc_feature 1..21: note = Description of Artificial Sequence: Synthetic oligonucleotide
  source 1..21: mol_type = other DNA
caaacccaaggccaactcaaa

SEQ ID NO: 43190 - DNA, 21 bp, synthetic construct
  misc_feature 1..21: note = Description of Artificial Sequence: Synthetic oligonucleotide
  source 1..21: mol_type = other DNA
aatttggggacgaatgttctg

SEQ ID NO: 43191 - DNA, 21 bp, synthetic construct
  misc_feature 1..21: note = Description of Artificial Sequence: Synthetic oligonucleotide
  source 1..21: mol_type = other DNA
aacagagaaaaactcagctac

SEQ ID NO: 43192 - DNA, 21 bp, synthetic construct
  misc_feature 1..21: note = Description of Artificial Sequence: Synthetic oligonucleotide
  source 1..21: mol_type = other DNA
gctcagtctacgtatcagtcg

SEQ ID NO: 43193 - DNA, 21 bp, synthetic construct
  misc_feature 1..21: note = Description of Artificial Sequence: Synthetic oligonucleotide
  source 1..21: mol_type = other DNA
aattctagtcataatgtttct

SEQ ID NO: 43194 - DNA, 21 bp, synthetic construct
  misc_feature 1..21: note = Description of Artificial Sequence: Synthetic oligonucleotide
  source 1..21: mol_type = other DNA
tcggataagggtaatactcgg

SEQ ID NO: 43195 - DNA, 21 bp, synthetic construct
  misc_feature 1..21: note = Description of Artificial Sequence: Synthetic oligonucleotide
  source 1..21: mol_type = other DNA
atgaatactcagggtcctatt

SEQ ID NO: 43196 - DNA, 21 bp, synthetic construct
  misc_feature 1..21: note = Description of Artificial Sequence: Synthetic oligonucleotide
  source 1..21: mol_type = other DNA
ggcggccaaaccgccagaatc

SEQ ID NO: 43197 - DNA, 21 bp, synthetic construct
  misc_feature 1..21: note = Description of Artificial Sequence: Synthetic oligonucleotide
  source 1..21: mol_type = other DNA
ttgcatcctaaggggcagact

SEQ ID NO: 43198 - DNA, 21 bp, synthetic construct
  misc_feature 1..21: note = Description of Artificial Sequence: Synthetic oligonucleotide
  source 1..21: mol_type = other DNA
tcttatgggaaggggagttct

SEQ ID NO: 43199 - DNA, 21 bp, synthetic construct
  misc_feature 1..21: note = Description of Artificial Sequence: Synthetic oligonucleotide
  source 1..21: mol_type = other DNA
tacggccaaaccaaaacccaa

SEQ ID NO: 43200 - DNA, 21 bp, synthetic construct
  misc_feature 1..21: note = Description of Artificial Sequence: Synthetic oligonucleotide
  source 1..21: mol_type = other DNA
atgatggtgagttctcgttcg

SEQ ID NO: 43201 - DNA, 21 bp, synthetic construct
  misc_feature 1..21: note = Description of Artificial Sequence: Synthetic oligonucleotide
  source 1..21: mol_type = other DNA
ctcggcaccagccaaatgaaa

SEQ ID NO: 43202 - DNA, 21 bp, synthetic construct
  misc_feature 1..21: note = Description of Artificial Sequence: Synthetic oligonucleotide
  source 1..21: mol_type = other DNA
gcgggtcattctgggagggat

SEQ ID NO: 43203 - DNA, 21 bp, synthetic construct
  misc_feature 1..21: note = Description of Artificial Sequence: Synthetic oligonucleotide
  source 1..21: mol_type = other DNA
catgggagtcgtagtatgtct

SEQ ID NO: 43204 - DNA, 21 bp, synthetic construct
  misc_feature 1..21: note = Description of Artificial Sequence: Synthetic oligonucleotide
  source 1..21: mol_type = other DNA
tcgcagcctggttctaatcat

SEQ ID NO: 43205 - DNA, 21 bp, synthetic construct
  misc_feature 1..21: note = Description of Artificial Sequence: Synthetic oligonucleotide
  source 1..21: mol_type = other DNA
gctatggggtcgagtctgtct

SEQ ID NO: 43206 - DNA, 21 bp, synthetic construct
  misc_feature 1..21: note = Description of Artificial Sequence: Synthetic oligonucleotide
  source 1..21: mol_type = other DNA
gacaaccccagacaagcctac

SEQ ID NO: 43207 - DNA, 21 bp, synthetic construct
  misc_feature 1..21: note = Description of Artificial Sequence: Synthetic oligonucleotide
  source 1..21: mol_type = other DNA
tcgagtgcggggacttatact

SEQ ID NO: 43208 - DNA, 21 bp, synthetic construct
  misc_feature 1..21: note = Description of Artificial Sequence: Synthetic oligonucleotide
  source 1..21: mol_type = other DNA
gacaacatgagcacccccaaa

SEQ ID NO: 43209 - DNA, 21 bp, synthetic construct
  misc_feature 1..21: note = Description of Artificial Sequence: Synthetic oligonucleotide
  source 1..21: mol_type = other DNA
aacgccgtcagaagcgaaaac

SEQ ID NO: 43210 - DNA, 21 bp, synthetic construct
  misc_feature 1..21: note = Description of Artificial Sequence: Synthetic oligonucleotide
  source 1..21: mol_type = other DNA
cctttgtctgggtcgaaggct

SEQ ID NO: 43211 - DNA, 21 bp, synthetic construct
  misc_feature 1..21: note = Description of Artificial Sequence: Synthetic oligonucleotide
  source 1..21: mol_type = other DNA
gaccccctcagaaacagcaac

SEQ ID NO: 43212 - DNA, 21 bp, synthetic construct
  misc_feature 1..21: note = Description of Artificial Sequence: Synthetic oligonucleotide
  source 1..21: mol_type = other DNA
tttaattcgaatcgtgatagt

SEQ ID NO: 43213 - DNA, 21 bp, synthetic construct
  misc_feature 1..21: note = Description of Artificial Sequence: Synthetic oligonucleotide
  source 1..21: mol_type = other DNA
ccgctgggttctagggtgaat

SEQ ID NO: 43214 - DNA, 21 bp, synthetic construct
  misc_feature 1..21: note = Description of Artificial Sequence: Synthetic oligonucleotide
  source 1..21: mol_type = other DNA
actactcataatatgcagggg

SEQ ID NO: 43215 - DNA, 21 bp, synthetic construct
  misc_feature 1..21: note = Description of Artificial Sequence: Synthetic oligonucleotide
  source 1..21: mol_type = other DNA
caaatcagcgccagcaccaga

SEQ ID NO: 43216 - DNA, 21 bp, synthetic construct
  misc_feature 1..21: note = Description of Artificial Sequence: Synthetic oligonucleotide
  source 1..21: mol_type = other DNA
cggtttcagaataatactggg

SEQ ID NO: 43217 - DNA, 21 bp, synthetic construct
  misc_feature 1..21: note = Description of Artificial Sequence: Synthetic oligonucleotide
  source 1..21: mol_type = other DNA
gatcctcataatactagtcgt

SEQ ID NO: 43218 - DNA, 21 bp, synthetic construct
  misc_feature 1..21: note = Description of Artificial Sequence: Synthetic oligonucleotide
  source 1..21: mol_type = other DNA
agaaacgacaccaaactcttc

SEQ ID NO: 43219 - DNA, 21 bp, synthetic construct
  misc_feature 1..21: note = Description of Artificial Sequence: Synthetic oligonucleotide
  source 1..21: mol_type = other DNA
gccacccacagcaaagccagc

SEQ ID NO: 43220 - DNA, 21 bp, synthetic construct
  misc_feature 1..21: note = Description of Artificial Sequence: Synthetic oligonucleotide
  source 1..21: mol_type = other DNA
gaaagaaccccccccagaatc

SEQ ID NO: 43221 - DNA, 21 bp, synthetic construct
  misc_feature 1..21: note = Description of Artificial Sequence: Synthetic oligonucleotide
  source 1..21: mol_type = other DNA
agtttgactcctatgggtcgg

SEQ ID NO: 43222 - DNA, 21 bp, synthetic construct
  misc_feature 1..21: note = Description of Artificial Sequence: Synthetic oligonucleotide
  source 1..21: mol_type = other DNA
actccgattactcctatgact

SEQ ID NO: 43223 - DNA, 21 bp, synthetic construct
  misc_feature 1..21: note = Description of Artificial Sequence: Synthetic oligonucleotide
  source 1..21: mol_type = other DNA
tatcatcttaattctcagtct

SEQ ID NO: 43224 - DNA, 21 bp, synthetic construct
  misc_feature 1..21: note = Description of Artificial Sequence: Synthetic oligonucleotide
  source 1..21: mol_type = other DNA
tttacttctaataaggcgtcg

SEQ ID NO: 43225 - DNA, 21 bp, synthetic construct
  misc_feature 1..21: note = Description of Artificial Sequence: Synthetic oligonucleotide
  source 1..21: mol_type = other DNA
aatagtttttctcggaatagt

SEQ ID NO: 43226 - DNA, 21 bp, synthetic construct
  misc_feature 1..21: note = Description of Artificial Sequence: Synthetic oligonucleotide
  source 1..21: mol_type = other DNA
aaagtcgacaaaagaaccgac

SEQ ID NO: 43227 - DNA, 21 bp, synthetic construct
  misc_feature 1..21: note = Description of Artificial Sequence: Synthetic oligonucleotide
  source 1..21: mol_type = other DNA
aaactcaccggccaaagaagc

SEQ ID NO: 43228 - DNA, 21 bp, synthetic construct
  misc_feature 1..21: note = Description of Artificial Sequence: Synthetic oligonucleotide
  source 1..21: mol_type = other DNA
tattctggtgctagtggtcgt

SEQ ID NO: 43229 - DNA, 21 bp, synthetic construct
  misc_feature 1..21: note = Description of Artificial Sequence: Synthetic oligonucleotide
  source 1..21: mol_type = other DNA
agtcttgggaataggagtttg

SEQ ID NO: 43230 - DNA, 21 bp, synthetic construct
  misc_feature 1..21: note = Description of Artificial Sequence: Synthetic oligonucleotide
  source 1..21: mol_type = other DNA
atgctcaacagcagaaccagc

SEQ ID NO: 43231 - DNA, 21 bp, synthetic construct
  misc_feature 1..21: note = Description of Artificial Sequence: Synthetic oligonucleotide
  source 1..21: mol_type = other DNA
cagattactccgcggagtggg

SEQ ID NO: 43232 - DNA, 21 bp, synthetic construct
  misc_feature 1..21: note = Description of Artificial Sequence: Synthetic oligonucleotide
  source 1..21: mol_type = other DNA
accaacagaaacacctacgtc

SEQ ID NO: 43233 - DNA, 21 bp, synthetic construct
  misc_feature 1..21: note = Description of Artificial Sequence: Synthetic oligonucleotide
  source 1..21: mol_type = other DNA
atggctgggaatccgcatagt

SEQ ID NO: 43234 - DNA, 21 bp, synthetic construct
  misc_feature 1..21: note = Description of Artificial Sequence: Synthetic oligonucleotide
  source 1..21: mol_type = other DNA
atgctcagcggcagcagaaac

SEQ ID NO: 43235 - DNA, 21 bp, synthetic construct
  misc_feature 1..21: note = Description of Artificial Sequence: Synthetic oligonucleotide
  source 1..21: mol_type = other DNA
tcgaatactcgggatattaag

SEQ ID NO: 43236 - DNA, 21 bp, synthetic construct
  misc_feature 1..21: note = Description of Artificial Sequence: Synthetic oligonucleotide
  source 1..21: mol_type = other DNA
aacggttctggactgaatcaa

SEQ ID NO: 43237 - DNA, 21 bp, synthetic construct
  misc_feature 1..21: note = Description of Artificial Sequence: Synthetic oligonucleotide
  source 1..21: mol_type = other DNA
agcatcaaaagcgtcaccaac

SEQ ID NO: 43238 - DNA, 21 bp, synthetic construct
  misc_feature 1..21: note = Description of Artificial Sequence: Synthetic oligonucleotide
  source 1..21: mol_type = other DNA
tctcatgataatggtcagtcg

SEQ ID NO: 43239 - DNA, 21 bp, synthetic construct
  misc_feature 1..21: note = Description of Artificial Sequence: Synthetic oligonucleotide
  source 1..21: mol_type = other DNA
gattatgggaaggggagttct

SEQ ID NO: 43240 - DNA, 21 bp, synthetic construct
  misc_feature 1..21: note = Description of Artificial Sequence: Synthetic oligonucleotide
  source 1..21: mol_type = other DNA
tctacggtgggtcatatgaat

SEQ ID NO: 43241 - DNA, 21 bp, synthetic construct
  misc_feature 1..21: note = Description of Artificial Sequence: Synthetic oligonucleotide
  source 1..21: mol_type = other DNA
agaatgctcgacggccacagc

SEQ ID NO: 43242 - DNA, 21 bp, synthetic construct
  misc_feature 1..21: note = Description of Artificial Sequence: Synthetic oligonucleotide
  source 1..21: mol_type = other DNA
cccatggactacagcagaagc

SEQ ID NO: 43243 - DNA, 21 bp, synthetic construct
  misc_feature 1..21: note = Description of Artificial Sequence: Synthetic oligonucleotide
  source 1..21: mol_type = other DNA
aagggttctaatcattcgggt

SEQ ID NO: 43244 - DNA, 21 bp, synthetic construct
  misc_feature 1..21: note = Description of Artificial Sequence: Synthetic oligonucleotide
  source 1..21: mol_type = other DNA
agttcgaagggtattttggct

SEQ ID NO: 43245 - DNA, 21 bp, synthetic construct
  misc_feature 1..21: note = Description of Artificial Sequence: Synthetic oligonucleotide
  source 1..21: mol_type = other DNA
tctgtggggtctggtgctttg

SEQ ID NO: 43246 - DNA, 21 bp, synthetic construct
  misc_feature 1..21: note = Description of Artificial Sequence: Synthetic oligonucleotide
  source 1..21: mol_type = other DNA
cccatcagcagcagagccggc

SEQ ID NO: 43247 - DNA, 21 bp, synthetic construct
  misc_feature 1..21: note = Description of Artificial Sequence: Synthetic oligonucleotide
  source 1..21: mol_type = other DNA
aaccccgtcgccgccgccacc

SEQ ID NO: 43248 - DNA, 21 bp, synthetic construct
  misc_feature 1..21: note = Description of Artificial Sequence: Synthetic oligonucleotide
  source 1..21: mol_type = other DNA
gctaggctgggtgttactagg

SEQ ID NO: 43249 - DNA, 21 bp, synthetic construct
  misc_feature 1..21: note = Description of Artificial Sequence: Synthetic oligonucleotide
  source 1..21: mol_type = other DNA
agtagggttactgggggtact

SEQ ID NO: 43250 - DNA, 21 bp, synthetic construct
  misc_feature 1..21: note = Description of Artificial Sequence: Synthetic oligonucleotide
  source 1..21: mol_type = other DNA
agctgcaccaccagatgcctc

SEQ ID NO: 43251 - DNA, 21 bp, synthetic construct
  misc_feature 1..21: note = Description of Artificial Sequence: Synthetic oligonucleotide
  source 1..21: mol_type = other DNA
aaaaacatcggcagccacggc

SEQ ID NO: 43252 - DNA, 21 bp, synthetic construct
  misc_feature 1..21: note = Description of Artificial Sequence: Synthetic oligonucleotide
  source 1..21: mol_type = other DNA
gctgttgtgactggtcatcgg

SEQ ID NO: 43253 - DNA, 21 bp, synthetic construct
  misc_feature 1..21: note = Description of Artificial Sequence: Synthetic oligonucleotide
  source 1..21: mol_type = other DNA
aacggcagcggcaccaaccaa

SEQ ID NO: 43254 - DNA, 21 bp, synthetic construct
  misc_feature 1..21: note = Description of Artificial Sequence: Synthetic oligonucleotide
  source 1..21: mol_type = other DNA
agaaacgtcagccaccccggc

SEQ ID NO: 43255 - DNA, 21 bp, synthetic construct
  misc_feature 1..21: note = Description of Artificial Sequence: Synthetic oligonucleotide
  source 1..21: mol_type = other DNA
gtttatagtagtccttcggct

SEQ ID NO: 43256 - DNA, 21 bp, synthetic construct
  misc_feature 1..21: note = Description of Artificial Sequence: Synthetic oligonucleotide
  source 1..21: mol_type = other DNA
aagtataattctcttgcttgt

SEQ ID NO: 43257 - DNA, 21 bp, synthetic construct
  misc_feature 1..21: note = Description of Artificial Sequence: Synthetic oligonucleotide
  source 1..21: mol_type = other DNA
gccaaaacccaaagcgtcaac

SEQ ID NO: 43258 - DNA, 21 bp, synthetic construct
  misc_feature 1..21: note = Description of Artificial Sequence: Synthetic oligonucleotide
  source 1..21: mol_type = other DNA
gggagtaatcttaatagtact

SEQ ID NO: 43259 - DNA, 21 bp, synthetic construct
  misc_feature 1..21: note = Description of Artificial Sequence: Synthetic oligonucleotide
  source 1..21: mol_type = other DNA
aagatttcgtctccttttatt

SEQ ID NO: 43260 - DNA, 21 bp, synthetic construct
  misc_feature 1..21: note = Description of Artificial Sequence: Synthetic oligonucleotide
  source 1..21: mol_type = other DNA
aagacgagtcttaatacgagt

SEQ ID NO: 43261 - DNA, 21 bp, synthetic construct
  misc_feature 1..21: note = Description of Artificial Sequence: Synthetic oligonucleotide
  source 1..21: mol_type = other DNA
aagcatgagggttataatgtg

SEQ ID NO: 43262 - DNA, 21 bp, synthetic construct
  misc_feature 1..21: note = Description of Artificial Sequence: Synthetic oligonucleotide
  source 1..21: mol_type = other DNA
agaaccagccacacccccggc

SEQ ID NO: 43263 - DNA, 21 bp, synthetic construct
  misc_feature 1..21: note = Description of Artificial Sequence: Synthetic oligonucleotide
  source 1..21: mol_type = other DNA
aatggtctgagtcagacgcat

SEQ ID NO: 43264 - DNA, 21 bp, synthetic construct
  misc_feature 1..21: note = Description of Artificial Sequence: Synthetic oligonucleotide
  source 1..21: mol_type = other DNA
gacagaggcagacccgccggc

SEQ ID NO: 43265 - DNA, 21 bp, synthetic construct
  misc_feature 1..21: note = Description of Artificial Sequence: Synthetic oligonucleotide
  source 1..21: mol_type = other DNA
tctaatacgaatgctgctatg

SEQ ID NO: 43266 - DNA, 21 bp, synthetic construct
  misc_feature 1..21: note = Description of Artificial Sequence: Synthetic oligonucleotide
  source 1..21: mol_type = other DNA
caaaaaggcaacaacctcccc

SEQ ID NO: 43267 - DNA, 21 bp, synthetic construct
  misc_feature 1..21: note = Description of Artificial Sequence: Synthetic oligonucleotide
  source 1..21: mol_type = other DNA
aaggatgctggtgattatggg

SEQ ID NO: 43268 - DNA, 21 bp, synthetic construct
  misc_feature 1..21: note = Description of Artificial Sequence: Synthetic oligonucleotide
  source 1..21: mol_type = other DNA
acgctggataatcataggtct

SEQ ID NO: 43269 - DNA, 21 bp, synthetic construct
  misc_feature 1..21: note = Description of Artificial Sequence: Synthetic oligonucleotide
  source 1..21: mol_type = other DNA
tctactactaaggatggtatt

SEQ ID NO: 43270 - DNA, 21 bp, synthetic construct
  misc_feature 1..21: note = Description of Artificial Sequence: Synthetic oligonucleotide
  source 1..21: mol_type = other DNA
aattctggtaatattgtgact

SEQ ID NO: 43271 - DNA, 21 bp, synthetic construct
  misc_feature 1..21: note = Description of Artificial Sequence: Synthetic oligonucleotide
  source 1..21: mol_type = other DNA
agtgatgggcagagttctgtg

SEQ ID NO: 43272 - DNA, 21 bp, synthetic construct
  misc_feature 1..21: note = Description of Artificial Sequence: Synthetic oligonucleotide
  source 1..21: mol_type = other DNA
gccttcggcgaaatcagacaa

SEQ ID NO: 43273 - DNA, 21 bp, synthetic construct
  misc_feature 1..21: note = Description of Artificial Sequence: Synthetic oligonucleotide
  source 1..21: mol_type = other DNA
aaaagccaactcgtcatgcac

SEQ ID NO: 43274 - DNA, 21 bp, synthetic construct
  misc_feature 1..21: note = Description of Artificial Sequence: Synthetic oligonucleotide
  source 1..21: mol_type = other DNA
aatgctgagcctacttcgagt

SEQ ID NO: 43275 - DNA, 21 bp, synthetic construct
  misc_feature 1..21: note = Description of Artificial Sequence: Synthetic oligonucleotide
  source 1..21: mol_type = other DNA
cctcagtatggtgataaggag

SEQ ID NO: 43276 - DNA, 21 bp, synthetic construct
  misc_feature 1..21: note = Description of Artificial Sequence: Synthetic oligonucleotide
  source 1..21: mol_type = other DNA
tcgattatgcatttgagtagt

SEQ ID NO: 43277 - DNA, 21 bp, synthetic construct
  misc_feature 1..21: note = Description of Artificial Sequence: Synthetic oligonucleotide
  source 1..21: mol_type = other DNA
cttaataagtctacgcttccg

SEQ ID NO: 43278 - DNA, 21 bp, synthetic construct
  misc_feature 1..21: note = Description of Artificial Sequence: Synthetic oligonucleotide
  source 1..21: mol_type = other DNA
atgagcaccagcagcagcaga

SEQ ID NO: 43279 - DNA, 21 bp, synthetic construct
  misc_feature 1..21: note = Description of Artificial Sequence: Synthetic oligonucleotide
  source 1..21: mol_type = other DNA
acggtgggggctcgtaatggt

SEQ ID NO: 43280 - DNA, 21 bp, synthetic construct
  misc_feature 1..21: note = Description of Artificial Sequence: Synthetic oligonucleotide
  source 1..21: mol_type = other DNA
ggcagcaccaaacccagcccc

SEQ ID NO: 43281 - DNA, 21 bp, synthetic construct
  misc_feature 1..21: note = Description of Artificial Sequence: Synthetic oligonucleotide
  source 1..21: mol_type = other DNA
aacggttctggacagagtcaa

SEQ ID NO: 43282 - DNA, 21 bp, synthetic construct
  misc_feature 1..21: note = Description of Artificial Sequence: Synthetic oligonucleotide
  source 1..21: mol_type = other DNA
agtagttcggcgcctcgtctt

SEQ ID NO: 43283 - DNA, 21 bp, synthetic construct
  misc_feature 1..21: note = Description of Artificial Sequence: Synthetic oligonucleotide
  source 1..21: mol_type = other DNA
ccttctactcggcagtctaat

SEQ ID NO: 43284 - DNA, 21 bp, synthetic construct
  misc_feature 1..21: note = Description of Artificial Sequence: Synthetic oligonucleotide
  source 1..21: mol_type = other DNA
cccagcgaagtcagaagcagc

SEQ ID NO: 43285 - DNA, 21 bp, synthetic construct
  misc_feature 1..21: note = Description of Artificial Sequence: Synthetic oligonucleotide
  source 1..21: mol_type = other DNA
gtttctggttctaaggttggt

SEQ ID NO: 43286 - DNA, 21 bp, synthetic construct
  misc_feature 1..21: note = Description of Artificial Sequence: Synthetic oligonucleotide
  source 1..21: mol_type = other DNA
ctgatttcgtctaagagtagt

SEQ ID NO: 43287 - DNA, 21 bp, synthetic construct
  misc_feature 1..21: note = Description of Artificial Sequence: Synthetic oligonucleotide
  source 1..21: mol_type = other DNA
cccatccaccccagcagcggc

SEQ ID NO: 43288 - DNA, 21 bp, synthetic construct
  misc_feature 1..21: note = Description of Artificial Sequence: Synthetic oligonucleotide
  source 1..21: mol_type = other DNA
atgattagtggtgcgactagg

SEQ ID NO: 43289 - DNA, 21 bp, synthetic construct
  misc_feature 1..21: note = Description of Artificial Sequence: Synthetic oligonucleotide
  source 1..21: mol_type = other DNA
gataggggtcgtaatactggt

SEQ ID NO: 43290 - DNA, 21 bp, synthetic construct
  misc_feature 1..21: note = Description of Artificial Sequence: Synthetic oligonucleotide
  source 1..21: mol_type = other DNA
ggcagactcgaagcccaaaaa

SEQ ID NO: 43291 - DNA, 21 bp, synthetic construct
  misc_feature 1..21: note = Description of Artificial Sequence: Synthetic oligonucleotide
  source 1..21: mol_type = other DNA
gccggcaacatgccccacagc

SEQ ID NO: 43292 - DNA, 21 bp, synthetic construct
  misc_feature 1..21: note = Description of Artificial Sequence: Synthetic oligonucleotide
  source 1..21: mol_type = other DNA
ggccccatcagacccatccaa

SEQ ID NO: 43293 - DNA, 21 bp, synthetic construct
  misc_feature 1..21: note = Description of Artificial Sequence: Synthetic oligonucleotide
  source 1..21: mol_type = other DNA
cacctcggcgtccccctcaaa

SEQ ID NO: 43294 - DNA, 21 bp, synthetic construct
  misc_feature 1..21: note = Description of Artificial Sequence: Synthetic oligonucleotide
  source 1..21: mol_type = other DNA
gtcaccagaggcctcaacgtc

SEQ ID NO: 43295 - DNA, 21 bp, synthetic construct
  misc_feature 1..21: note = Description of Artificial Sequence: Synthetic oligonucleotide
  source 1..21: mol_type = other DNA
gagattcttggtactcatagg

SEQ ID NO: 43296 - DNA, 21 bp, synthetic construct
  misc_feature 1..21: note = Description of Artificial Sequence: Synthetic oligonucleotide
  source 1..21: mol_type = other DNA
cgtacggatcatgggggtgtg

SEQ ID NO: 43297 - DNA, 21 bp, synthetic construct
  misc_feature 1..21: note = Description of Artificial Sequence: Synthetic oligonucleotide
  source 1..21: mol_type = other DNA
tctatttctaagactcaggct

SEQ ID NO: 43298 - DNA, 21 bp, synthetic construct
  misc_feature 1..21: note = Description of Artificial Sequence: Synthetic oligonucleotide
  source 1..21: mol_type = other DNA
gatgggattaagtcgtatgcg

SEQ ID NO: 43299 - DNA, 21 bp, synthetic construct
  misc_feature 1..21: note = Description of Artificial Sequence: Synthetic oligonucleotide
  source 1..21: mol_type = other DNA
caagtccccgccaccaacaga

SEQ ID NO: 43300 - DNA, 21 bp, synthetic construct
  misc_feature 1..21: note = Description of Artificial Sequence: Synthetic oligonucleotide
  source 1..21: mol_type = other DNA
gccggcgccggcaaagtctac

SEQ ID NO: 43301 - DNA, 21 bp, synthetic construct
  misc_feature 1..21: note = Description of Artificial Sequence: Synthetic oligonucleotide
  source 1..21: mol_type = other DNA
gtttcgggtatgagtgggagt

SEQ ID NO: 43302 - DNA, 21 bp, synthetic construct
  misc_feature 1..21: note = Description of Artificial Sequence: Synthetic oligonucleotide
  source 1..21: mol_type = other DNA
gccggcagcagcccccccacc

SEQ ID NO: 43303 - DNA, 21 bp, synthetic construct
  misc_feature 1..21: note = Description of Artificial Sequence: Synthetic oligonucleotide
  source 1..21: mol_type = other DNA
ccggtgagtggggcgactatt

SEQ ID NO: 43304 - DNA, 21 bp, synthetic construct
  misc_feature 1..21: note = Description of Artificial Sequence: Synthetic oligonucleotide
  source 1..21: mol_type = other DNA
gatcagaatcgtgttccttat

SEQ ID NO: 43305 - DNA, 21 bp, synthetic construct
  misc_feature 1..21: note = Description of Artificial Sequence: Synthetic oligonucleotide
  source 1..21: mol_type = other DNA
acgcctacggggcatcgttct

SEQ ID NO: 43306 - DNA, 21 bp, synthetic construct
  misc_feature 1..21: note = Description of Artificial Sequence: Synthetic oligonucleotide
  source 1..21: mol_type = other DNA
atgggtccgaatcatcttcct

SEQ ID NO: 43307 - DNA, 21 bp, synthetic construct
  misc_feature 1..21: note = Description of Artificial Sequence: Synthetic oligonucleotide
  source 1..21: mol_type = other DNA
agggttattactccttctacg

SEQ ID NO: 43308 - DNA, 21 bp, synthetic construct
  misc_feature 1..21: note = Description of Artificial Sequence: Synthetic oligonucleotide
  source 1..21: mol_type = other DNA
gtccccagcaccgccggcaaa

SEQ ID NO: 43309 - DNA, 21 bp, synthetic construct
  misc_feature 1..21: note = Description of Artificial Sequence: Synthetic oligonucleotide
  source 1..21: mol_type = other DNA
cttttgcatcataatactggg

SEQ ID NO: 43310 - DNA, 21 bp, synthetic construct
  misc_feature 1..21: note = Description of Artificial Sequence: Synthetic oligonucleotide
  source 1..21: mol_type = other DNA
tctattcattcggatcggacg

SEQ ID NO: 43311 - DNA, 21 bp, synthetic construct
  misc_feature 1..21: note = Description of Artificial Sequence: Synthetic oligonucleotide
  source 1..21: mol_type = other DNA
cagaatgtttctactatgaat

SEQ ID NO: 43312 - DNA, 21 bp, synthetic construct
  misc_feature 1..21: note = Description of Artificial Sequence: Synthetic oligonucleotide
  source 1..21: mol_type = other DNA
aataatcctaagaatgttgtt

SEQ ID NO: 43313 - DNA, 21 bp, synthetic construct
  misc_feature 1..21: note = Description of Artificial Sequence: Synthetic oligonucleotide
  source 1..21: mol_type = other DNA
atgactactcagttgaatagt

SEQ ID NO: 43314 - DNA, 21 bp, synthetic construct
  misc_feature 1..21: note = Description of Artificial Sequence: Synthetic oligonucleotide
  source 1..21: mol_type = other DNA
actcagcagaatgggagtaat

SEQ ID NO: 43315 - DNA, 21 bp, synthetic construct
  misc_feature 1..21: note = Description of Artificial Sequence: Synthetic oligonucleotide
  source 1..21: mol_type = other DNA
ggtgtgattaataatgagcgg

SEQ ID NO: 43316 - DNA, 21 bp, synthetic construct
  misc_feature 1..21: note = Description of Artificial Sequence: Synthetic oligonucleotide
  source 1..21: mol_type = other DNA
ttttctcaggggaatcgttcg

SEQ ID NO: 43317 - DNA, 21 bp, synthetic construct
  misc_feature 1..21: note = Description of Artificial Sequence: Synthetic oligonucleotide
  source 1..21: mol_type = other DNA
cctgggacgacttctgcgatg

SEQ ID NO: 43318 - DNA, 21 bp, synthetic construct
  misc_feature 1..21: note = Description of Artificial Sequence: Synthetic oligonucleotide
  source 1..21: mol_type = other DNA
agccacgtcaacagcaccaga

SEQ ID NO: 43319 - DNA, 21 bp, synthetic construct
  misc_feature 1..21: note = Description of Artificial Sequence: Synthetic oligonucleotide
  source 1..21: mol_type = other DNA
cctaatcttcagtcttcgaag

SEQ ID NO: 43320 - DNA, 21 bp, synthetic construct
  misc_feature 1..21: note = Description of Artificial Sequence: Synthetic oligonucleotide
  source 1..21: mol_type = other DNA
gcggggattaattctcaggtg

SEQ ID NO: 43321 - DNA, 21 bp, synthetic construct
  misc_feature 1..21: note = Description of Artificial Sequence: Synthetic oligonucleotide
  source 1..21: mol_type = other DNA
tacctcggcaaagtccaagtc

SEQ ID NO: 43322 - DNA, 21 bp, synthetic construct
  misc_feature 1..21: note = Description of Artificial Sequence: Synthetic oligonucleotide
  source 1..21: mol_type = other DNA
gcgacttctaatggtactctg

SEQ ID NO: 43323 - DNA, 21 bp, synthetic construct
  misc_feature 1..21: note = Description of Artificial Sequence: Synthetic oligonucleotide
  source 1..21: mol_type = other DNA
acccaccaaagcagcaccagc

SEQ ID NO: 43324 - DNA, 21 bp, synthetic construct
  misc_feature 1..21: note = Description of Artificial Sequence: Synthetic oligonucleotide
  source 1..21: mol_type = other DNA
ttgggtgatcgttcttttatt

SEQ ID NO: 43325 - DNA, 21 bp, synthetic construct
  misc_feature 1..21: note = Description of Artificial Sequence: Synthetic oligonucleotide
  source 1..21: mol_type = other DNA
tggagcctcggcagccaaagc

SEQ ID NO: 43326 - DNA, 21 bp, synthetic construct
  misc_feature 1..21: note = Description of Artificial Sequence: Synthetic oligonucleotide
  source 1..21: mol_type = other DNA
agcggcaccaccaccttcggc

SEQ ID NO: 43327 - DNA, 21 bp, synthetic construct
  misc_feature 1..21: note = Description of Artificial Sequence: Synthetic oligonucleotide
  source 1..21: mol_type = other DNA
tgtacgggtagtagttctatg

SEQ ID NO: 43328 - DNA, 21 bp, synthetic construct
  misc_feature 1..21: note = Description of Artificial Sequence: Synthetic oligonucleotide
  source 1..21: mol_type = other DNA
tcgagggattctagtattcat

SEQ ID NO: 43329 - DNA, 21 bp, synthetic construct
  misc_feature 1..21: note = Description of Artificial Sequence: Synthetic oligonucleotide
  source 1..21: mol_type = other DNA
acttcgtctacgacttctttg

SEQ ID NO: 43330 - DNA, 21 bp, synthetic construct
  misc_feature 1..21: note = Description of Artificial Sequence: Synthetic oligonucleotide
  source 1..21: mol_type = other DNA
tttcctgtgaatgcgggtgct

SEQ ID NO: 43331 - DNA, 21 bp, synthetic construct
  misc_feature 1..21: note = Description of Artificial Sequence: Synthetic oligonucleotide
  source 1..21: mol_type = other DNA
aacggcatcaccaaaagcagc

SEQ ID NO: 43332 - DNA, 21 bp, synthetic construct
  misc_feature 1..21: note = Description of Artificial Sequence: Synthetic oligonucleotide
  source 1..21: mol_type = other DNA
accccccaccaaagaagcagc

SEQ ID NO: 43333 - DNA, 21 bp, synthetic construct
  misc_feature 1..21: note = Description of Artificial Sequence: Synthetic oligonucleotide
  source 1..21: mol_type = other DNA
tcgggggcttcgagtaattct

SEQ ID NO: 43334 - DNA, 21 bp, synthetic construct
  misc_feature 1..21: note = Description of Artificial Sequence: Synthetic oligonucleotide
  source 1..21: mol_type = other DNA
actacgcattcgtctattaat

SEQ ID NO: 43335 - DNA, 21 bp, synthetic construct
  misc_feature 1..21: note = Description of Artificial Sequence: Synthetic oligonucleotide
  source 1..21: mol_type = other DNA
gatactgctgtgaattatggt

SEQ ID NO: 43336 - DNA, 21 bp, synthetic construct
  misc_feature 1..21: note = Description of Artificial Sequence: Synthetic oligonucleotide
  source 1..21: mol_type = other DNA
tctcagtggcagtcgtcttct

SEQ ID NO: 43337 - DNA, 21 bp, synthetic construct
  misc_feature 1..21: note = Description of Artificial Sequence: Synthetic oligonucleotide
  source 1..21: mol_type = other DNA
aacggttctggacagaatgaa

SEQ ID NO: 43338 - DNA, 21 bp, synthetic construct
  misc_feature 1..21: note = Description of Artificial Sequence: Synthetic oligonucleotide
  source 1..21: mol_type = other DNA
attagttctggtacgcatggg

SEQ ID NO: 43339 - DNA, 21 bp, synthetic construct
  misc_feature 1..21: note = Description of Artificial Sequence: Synthetic oligonucleotide
  source 1..21: mol_type = other DNA
cccaccgacagaatcaacaga

SEQ ID NO: 43340 - DNA, 21 bp, synthetic construct
  misc_feature 1..21: note = Description of Artificial Sequence: Synthetic oligonucleotide
  source 1..21: mol_type = other DNA
caacaagtcaacaccaccaga

SEQ ID NO: 43341 - DNA, 21 bp, synthetic construct
  misc_feature 1..21: note = Description of Artificial Sequence: Synthetic oligonucleotide
  source 1..21: mol_type = other DNA
tcttctcataaggattatttg

SEQ ID NO: 43342 - DNA, 21 bp, synthetic construct
  misc_feature 1..21: note = Description of Artificial Sequence: Synthetic oligonucleotide
  source 1..21: mol_type = other DNA
gtgaatcagagtggttttagt

SEQ ID NO: 43343 - DNA, 21 bp, synthetic construct
  misc_feature 1..21: note = Description of Artificial Sequence: Synthetic oligonucleotide
  source 1..21: mol_type = other DNA
agtgttgcgggtactagtagg

SEQ ID NO: 43344 - DNA, 21 bp, synthetic construct
  misc_feature 1..21: note = Description of Artificial Sequence: Synthetic oligonucleotide
  source 1..21: mol_type = other DNA
gtcccccacaaccacagcctc

SEQ ID NO: 43345 - DNA, 21 bp, synthetic construct
  misc_feature 1..21: note = Description of Artificial Sequence: Synthetic oligonucleotide
  source 1..21: mol_type = other DNA
tttcagccgaggagttctacg

SEQ ID NO: 43346 - DNA, 21 bp, synthetic construct
  misc_feature 1..21: note = Description of Artificial Sequence: Synthetic oligonucleotide
  source 1..21: mol_type = other DNA
gtccacgaagcccccctcaga

SEQ ID NO: 43347 - DNA, 21 bp, synthetic construct
  misc_feature 1..21: note = Description of Artificial Sequence: Synthetic oligonucleotide
  source 1..21: mol_type = other DNA
ctcatcagcgaaaccagcaga

SEQ ID NO: 43348 - DNA, 21 bp, synthetic construct
  misc_feature 1..21: note = Description of Artificial Sequence: Synthetic oligonucleotide
  source 1..21: mol_type = other DNA
ggcttcagcagccaacaaaga

SEQ ID NO: 43349 - DNA, 21 bp, synthetic construct
  misc_feature 1..21: note = Description of Artificial Sequence: Synthetic oligonucleotide
  source 1..21: mol_type = other DNA
gctacgaatcattcgccgcag

SEQ ID NO: 43350 - DNA, 21 bp, synthetic construct
  misc_feature 1..21: note = Description of Artificial Sequence: Synthetic oligonucleotide
  source 1..21: mol_type = other DNA
agaggcgacaccaaaaacctc

SEQ ID NO: 43351 - DNA, 21 bp, synthetic construct
  misc_feature 1..21: note = Description of Artificial Sequence: Synthetic oligonucleotide
  source 1..21: mol_type = other DNA
agaatcaccagcagcaaccaa

SEQ ID NO: 43352 - DNA, 21 bp, synthetic construct
  misc_feature 1..21: note = Description of Artificial Sequence: Synthetic oligonucleotide
  source 1..21: mol_type = other DNA
atggagagtaaggctaattct

SEQ ID NO: 43353 - DNA, 21 bp, synthetic construct
  misc_feature 1..21: note = Description of Artificial Sequence: Synthetic oligonucleotide
  source 1..21: mol_type = other DNA
tataatcggacttctattgtg

SEQ ID NO: 43354 - DNA, 21 bp, synthetic construct
  misc_feature 1..21: note = Description of Artificial Sequence: Synthetic oligonucleotide
  source 1..21: mol_type = other DNA
agaaccaacgacaccacccac

SEQ ID NO: 43355 - DNA, 21 bp, synthetic construct
  misc_feature 1..21: note = Description of Artificial Sequence: Synthetic oligonucleotide
  source 1..21: mol_type = other DNA
ggtgagcttccggataggagg

SEQ ID NO: 43356 - DNA, 21 bp, synthetic construct
  misc_feature 1..21: note = Description of Artificial Sequence: Synthetic oligonucleotide
  source 1..21: mol_type = other DNA
cacctcatgcaacccgtctgc

SEQ ID NO: 43357 - DNA, 21 bp, synthetic construct
  misc_feature 1..21: note = Description of Artificial Sequence: Synthetic oligonucleotide
  source 1..21: mol_type = other DNA
tgtggtactcctgtggctttg

SEQ ID NO: 43358 - DNA, 21 bp, synthetic construct
  misc_feature 1..21: note = Description of Artificial Sequence: Synthetic oligonucleotide
  source 1..21: mol_type = other DNA
aacagcagcggccaaaacccc

SEQ ID NO: 43359 - DNA, 21 bp, synthetic construct
  misc_feature 1..21: note = Description of Artificial Sequence: Synthetic oligonucleotide
  source 1..21: mol_type = other DNA
tctcagaatgtttcttcgaag

SEQ ID NO: 43360 - DNA, 21 bp, synthetic construct
  misc_feature 1..21: note = Description of Artificial Sequence: Synthetic oligonucleotide
  source 1..21: mol_type = other DNA
gggtctattaaggcgccgcct

SEQ ID NO: 43361 - DNA, 21 bp, synthetic construct
  misc_feature 1..21: note = Description of Artificial Sequence: Synthetic oligonucleotide
  source 1..21: mol_type = other DNA
atgtcgggtggtaatatgcgg

SEQ ID NO: 43362 - DNA, 21 bp, synthetic construct
  misc_feature 1..21: note = Description of Artificial Sequence: Synthetic oligonucleotide
  source 1..21: mol_type = other DNA
caaaccagcgccacccaaaga

SEQ ID NO: 43363 - DNA, 21 bp, synthetic construct
  misc_feature 1..21: note = Description of Artificial Sequence: Synthetic oligonucleotide
  source 1..21: mol_type = other DNA
tctggtgggagttcggttctg

SEQ ID NO: 43364 - DNA, 21 bp, synthetic construct
  misc_feature 1..21: note = Description of Artificial Sequence: Synthetic oligonucleotide
  source 1..21: mol_type = other DNA
accaccagcgccagacccaac

SEQ ID NO: 43365 - DNA, 21 bp, synthetic construct
  misc_feature 1..21: note = Description of Artificial Sequence: Synthetic oligonucleotide
  source 1..21: mol_type = other DNA
gtccaaggcaccggcaacacc

SEQ ID NO: 43366 - DNA, 21 bp, synthetic construct
  misc_feature 1..21: note = Description of Artificial Sequence: Synthetic oligonucleotide
  source 1..21: mol_type = other DNA
ccgagtactagtggtgcgatg

SEQ ID NO: 43367 - DNA, 21 bp, synthetic construct
  misc_feature 1..21: note = Description of Artificial Sequence: Synthetic oligonucleotide
  source 1..21: mol_type = other DNA
tatattgatgcttctgcgcgg

SEQ ID NO: 43368 - DNA, 21 bp, synthetic construct
  misc_feature 1..21: note = Description of Artificial Sequence: Synthetic oligonucleotide
  source 1..21: mol_type = other DNA
cctatttcgcatacgactggt

SEQ ID NO: 43369 - DNA, 21 bp, synthetic construct
  misc_feature 1..21: note = Description of Artificial Sequence: Synthetic oligonucleotide
  source 1..21: mol_type = other DNA
gggtctgggattaagcgtgag

SEQ ID NO: 43370 - DNA, 21 bp, synthetic construct
  misc_feature 1..21: note = Description of Artificial Sequence: Synthetic oligonucleotide
  source 1..21: mol_type = other DNA
cttcctggtcagggtgttggt

SEQ ID NO: 43371 - DNA, 21 bp, synthetic construct
  misc_feature 1..21: note = Description of Artificial Sequence: Synthetic oligonucleotide
  source 1..21: mol_type = other DNA
gtccaaagaagcagcaaccaa

SEQ ID NO: 43372 - DNA, 21 bp, synthetic construct
  misc_feature 1..21: note = Description of Artificial Sequence: Synthetic oligonucleotide
  source 1..21: mol_type = other DNA
agtcttagttcgaagcagatg

SEQ ID NO: 43373 - DNA, 21 bp, synthetic construct
  misc_feature 1..21: note = Description of Artificial Sequence: Synthetic oligonucleotide
  source 1..21: mol_type = other DNA
cctcagaataatcaggcgcat

SEQ ID NO: 43374 - DNA, 21 bp, synthetic construct
  misc_feature 1..21: note = Description of Artificial Sequence: Synthetic oligonucleotide
  source 1..21: mol_type = other DNA
cagcttcgttcggatcagact

SEQ ID NO: 43375 - DNA, 21 bp, synthetic construct
  misc_feature 1..21: note = Description of Artificial Sequence: Synthetic oligonucleotide
  source 1..21: mol_type = other DNA
agcagagaaaccgtccccacc

SEQ ID NO: 43376 - DNA, 21 bp, synthetic construct
  misc_feature 1..21: note = Description of Artificial Sequence: Synthetic oligonucleotide
  source 1..21: mol_type = other DNA
atcaaacccagcagcagcgcc

SEQ ID NO: 43377 - DNA, 21 bp, synthetic construct
  misc_feature 1..21: note = Description of Artificial Sequence: Synthetic oligonucleotide
  source 1..21: mol_type = other DNA
cccaccagccaacaaagaccc

SEQ ID NO: 43378 - DNA, 21 bp, synthetic construct
  misc_feature 1..21: note = Description of Artificial Sequence: Synthetic oligonucleotide
  source 1..21: mol_type = other DNA
caaaacagcaaaggctacgtc

SEQ ID NO: 43379 - DNA, 21 bp, synthetic construct
  misc_feature 1..21: note = Description of Artificial Sequence: Synthetic oligonucleotide
  source 1..21: mol_type = other DNA
ctcgccaccgccaacagcaga

SEQ ID NO: 43380 - DNA, 21 bp, synthetic construct
  misc_feature 1..21: note = Description of Artificial Sequence: Synthetic oligonucleotide
  source 1..21: mol_type = other DNA
tattcggataataagactact

SEQ ID NO: 43381 - DNA, 21 bp, synthetic construct
  misc_feature 1..21: note = Description of Artificial Sequence: Synthetic oligonucleotide
  source 1..21: mol_type = other DNA
gtcaaagtcacccaccaacaa

SEQ ID NO: 43382 - DNA, 21 bp, synthetic construct
  misc_feature 1..21: note = Description of Artificial Sequence: Synthetic oligonucleotide
  source 1..21: mol_type = other DNA
ttggggactagtactattttg

SEQ ID NO: 43383 - DNA, 21 bp, synthetic construct
  misc_feature 1..21: note = Description of Artificial Sequence: Synthetic oligonucleotide
  source 1..21: mol_type = other DNA
aatactcggtcgtctagtggg

SEQ ID NO: 43384 - DNA, 21 bp, synthetic construct
  misc_feature 1..21: note = Description of Artificial Sequence: Synthetic oligonucleotide
  source 1..21: mol_type = other DNA
gtcgtcctcgacaccaacaga

SEQ ID NO: 43385 - DNA, 21 bp, synthetic construct
  misc_feature 1..21: note = Description of Artificial Sequence: Synthetic oligonucleotide
  source 1..21: mol_type = other DNA
gggcaggtgaaggctattggg

SEQ ID NO: 43386 - DNA, 21 bp, synthetic construct
  misc_feature 1..21: note = Description of Artificial Sequence: Synthetic oligonucleotide
  source 1..21: mol_type = other DNA
cccgtcagcagagccaccttc

SEQ ID NO: 43387 - DNA, 21 bp, synthetic construct
  misc_feature 1..21: note = Description of Artificial Sequence: Synthetic oligonucleotide
  source 1..21: mol_type = other DNA
caaagcggcaacaccatccaa

SEQ ID NO: 43388 - DNA, 21 bp, synthetic construct
  misc_feature 1..21: note = Description of Artificial Sequence: Synthetic oligonucleotide
  source 1..21: mol_type = other DNA
gctccggatgttcggcggtgt

SEQ ID NO: 43389 - DNA, 21 bp, synthetic construct
  misc_feature 1..21: note = Description of Artificial Sequence: Synthetic oligonucleotide
  source 1..21: mol_type = other DNA
gcggctaggcctgatgttact

SEQ ID NO: 43390 - DNA, 21 bp, synthetic construct
  misc_feature 1..21: note = Description of Artificial Sequence: Synthetic oligonucleotide
  source 1..21: mol_type = other DNA
tgtccgtcgcagcatgtgatt

SEQ ID NO: 43391 - DNA, 21 bp, synthetic construct
  misc_feature 1..21: note = Description of Artificial Sequence: Synthetic oligonucleotide
  source 1..21: mol_type = other DNA
atgagcgacaccagcaccaga

SEQ ID NO: 43392 - DNA, 21 bp, synthetic construct
  misc_feature 1..21: note = Description of Artificial Sequence: Synthetic oligonucleotide
  source 1..21: mol_type = other DNA
ggcttccacggccaaggcagc

SEQ ID NO: 43393 - DNA, 21 bp, synthetic construct
  misc_feature 1..21: note = Description of Artificial Sequence: Synthetic oligonucleotide
  source 1..21: mol_type = other DNA
caccaactcgaagcccacaaa

SEQ ID NO: 43394 - DNA, 21 bp, synthetic construct
  misc_feature 1..21: note = Description of Artificial Sequence: Synthetic oligonucleotide
  source 1..21: mol_type = other DNA
caaggccaaaacagaaccgtc

SEQ ID NO: 43395 - DNA, 21 bp, synthetic construct
  misc_feature 1..21: note = Description of Artificial Sequence: Synthetic oligonucleotide
  source 1..21: mol_type = other DNA
agtcttcctaatactaatggg

SEQ ID NO: 43396 - DNA, 21 bp, synthetic construct
  misc_feature 1..21: note = Description of Artificial Sequence: Synthetic oligonucleotide
  source 1..21: mol_type = other DNA
agtgcgaataataagtcgggg

SEQ ID NO: 43397 - DNA, 21 bp, synthetic construct
  misc_feature 1..21: note = Description of Artificial Sequence: Synthetic oligonucleotide
  source 1..21: mol_type = other DNA
gttagtaagagtccgtctact

SEQ ID NO: 43398 - DNA, 21 bp, synthetic construct
  misc_feature 1..21: note = Description of Artificial Sequence: Synthetic oligonucleotide
  source 1..21: mol_type = other DNA
ccctacaacagcaaagccagc

SEQ ID NO: 43399 - DNA, 21 bp, synthetic construct
  misc_feature 1..21: note = Description of Artificial Sequence: Synthetic oligonucleotide
  source 1..21: mol_type = other DNA
tcttcgagtgggggtgtgaag

SEQ ID NO: 43400 - DNA, 21 bp, synthetic construct
  misc_feature 1..21: note = Description of Artificial Sequence: Synthetic oligonucleotide
  source 1..21: mol_type = other DNA
atcggcagcggccaaaaccaa

SEQ ID NO: 43401 - DNA, 21 bp, synthetic construct
  misc_feature 1..21: note = Description of Artificial Sequence: Synthetic oligonucleotide
  source 1..21: mol_type = other DNA
aacggttctagacagaatcaa

SEQ ID NO: 43402 - DNA, 21 bp, synthetic construct
  misc_feature 1..21: note = Description of Artificial Sequence: Synthetic oligonucleotide
  source 1..21: mol_type = other DNA
gggatgacgcaggggggtaag

SEQ ID NO: 43403 - DNA, 21 bp, synthetic construct
  misc_feature 1..21: note = Description of Artificial Sequence: Synthetic oligonucleotide
  source 1..21: mol_type = other DNA
ggttcgccgggggttttgcgt

SEQ ID NO: 43404 - DNA, 21 bp, synthetic construct
  misc_feature 1..21: note = Description of Artificial Sequence: Synthetic oligonucleotide
  source 1..21: mol_type = other DNA
ggggatcagcataagccgttg

SEQ ID NO: 43405 - DNA, 21 bp, synthetic construct
  misc_feature 1..21: note = Description of Artificial Sequence: Synthetic oligonucleotide
  source 1..21: mol_type = other DNA
gctggtactggtagttcgctt

SEQ ID NO: 43406 - DNA, 21 bp, synthetic construct
  misc_feature 1..21: note = Description of Artificial Sequence: Synthetic oligonucleotide
  source 1..21: mol_type = other DNA
cacggttctggacagaatcaa

SEQ ID NO: 43407 - DNA, 21 bp, synthetic construct
  misc_feature 1..21: note = Description of Artificial Sequence: Synthetic oligonucleotide
  source 1..21: mol_type = other DNA
caaagcgaccacagaagcctc

SEQ ID NO: 43408 - DNA, 21 bp, synthetic construct
  misc_feature 1..21: note = Description of Artificial Sequence: Synthetic oligonucleotide
  source 1..21: mol_type = other DNA
aacggttctggacagattcaa

SEQ ID NO: 43409 - DNA, 21 bp, synthetic construct
  misc_feature 1..21: note = Description of Artificial Sequence: Synthetic oligonucleotide
  source 1..21: mol_type = other DNA
cccctcgacaaaagcatgatg

SEQ ID NO: 43410 - DNA, 21 bp, synthetic construct
  misc_feature 1..21: note = Description of Artificial Sequence: Synthetic oligonucleotide
  source 1..21: mol_type = other DNA
aaaagagacgcccacaccgcc

SEQ ID NO: 43411 - DNA, 21 bp, synthetic construct
  misc_feature 1..21: note = Description of Artificial Sequence: Synthetic oligonucleotide
  source 1..21: mol_type = other DNA
gctggtcgtactcattcgtgt

SEQ ID NO: 43412 - DNA, 21 bp, synthetic construct
  misc_feature 1..21: note = Description of Artificial Sequence: Synthetic oligonucleotide
  source 1..21: mol_type = other DNA
tgtattagggctggttcttgt

SEQ ID NO: 43413 - DNA, 21 bp, synthetic construct
  misc_feature 1..21: note = Description of Artificial Sequence: Synthetic oligonucleotide
  source 1..21: mol_type = other DNA
ggtactgcgaggggggttgct

SEQ ID NO: 43414 - DNA, 21 bp, synthetic construct
  misc_feature 1..21: note = Description of Artificial Sequence: Synthetic oligonucleotide
  source 1..21: mol_type = other DNA
aacaggtctggacagaatcaa

SEQ ID NO: 43415 - DNA, 21 bp, synthetic construct
  misc_feature 1..21: note = Description of Artificial Sequence: Synthetic oligonucleotide
  source 1..21: mol_type = other DNA
aggacggggaataatcatgag

SEQ ID NO: 43416 - DNA, 21 bp, synthetic construct
  misc_feature 1..21: note = Description of Artificial Sequence: Synthetic oligonucleotide
  source 1..21: mol_type = other DNA
cacaccgacatcaaccaccaa

SEQ ID NO: 43417 - DNA, 21 bp, synthetic construct
  misc_feature 1..21: note = Description of Artificial Sequence: Synthetic oligonucleotide
  source 1..21: mol_type = other DNA
aggactgtgaatagtgctaat

SEQ ID NO: 43418 - DNA, 21 bp, synthetic construct
  misc_feature 1..21: note = Description of Artificial Sequence: Synthetic oligonucleotide
  source 1..21: mol_type = other DNA
cggactactaatgctacgtat

SEQ ID NO: 43419 - DNA, 21 bp, synthetic construct
  misc_feature 1..21: note = Description of Artificial Sequence: Synthetic oligonucleotide
  source 1..21: mol_type = other DNA
aatcctgttaatacgaagtct

SEQ ID NO: 43420 - DNA, 21 bp, synthetic construct
  misc_feature 1..21: note = Description of Artificial Sequence: Synthetic oligonucleotide
  source 1..21: mol_type = other DNA
gctttggcgggtactaagggg

SEQ ID NO: 43421 - DNA, 21 bp, synthetic construct
  misc_feature 1..21: note = Description of Artificial Sequence: Synthetic oligonucleotide
  source 1..21: mol_type = other DNA
cccgtcctcaacaaagccacc

SEQ ID NO: 43422 - DNA, 21 bp, synthetic construct
  misc_feature 1..21: note = Description of Artificial Sequence: Synthetic oligonucleotide
  source 1..21: mol_type = other DNA
caccaagaaagagccagcatg

SEQ ID NO: 43423 - DNA, 21 bp, synthetic construct
  misc_feature 1..21: note = Description of Artificial Sequence: Synthetic oligonucleotide
  source 1..21: mol_type = other DNA
agccaacaaagccccagcatg

SEQ ID NO: 43424 - DNA, 21 bp, synthetic construct
  misc_feature 1..21: note = Description of Artificial Sequence: Synthetic oligonucleotide
  source 1..21: mol_type = other DNA
ccccacggcgacaaaaccagc

SEQ ID NO: 43425 - DNA, 21 bp, synthetic construct
  misc_feature 1..21: note = Description of Artificial Sequence: Synthetic oligonucleotide
  source 1..21: mol_type = other DNA
ctttcgcttaataagtctcag

SEQ ID NO: 43426 - DNA, 21 bp, synthetic construct
  misc_feature 1..21: note = Description of Artificial Sequence: Synthetic oligonucleotide
  source 1..21: mol_type = other DNA
cccagcaacagacaaatcgcc

SEQ ID NO: 43427 - DNA, 21 bp, synthetic construct
  misc_feature 1..21: note = Description of Artificial Sequence: Synthetic oligonucleotide
  source 1..21: mol_type = other DNA
gtgcatacttcgggggtgcag

SEQ ID NO: 43428 - DNA, 21 bp, synthetic construct
  misc_feature 1..21: note = Description of Artificial Sequence: Synthetic oligonucleotide
  source 1..21: mol_type = other DNA
cataagacggcggggtctgct

SEQ ID NO: 43429 - DNA, 21 bp, synthetic construct
  misc_feature 1..21: note = Description of Artificial Sequence: Synthetic oligonucleotide
  source 1..21: mol_type = other DNA
cctaggttgaatgtgggtggt

SEQ ID NO: 43430 - DNA, 21 bp, synthetic construct
  misc_feature 1..21: note = Description of Artificial Sequence: Synthetic oligonucleotide
  source 1..21: mol_type = other DNA
accggcatgagaaacatcggc

SEQ ID NO: 43431 - DNA, 21 bp, synthetic construct
  misc_feature 1..21: note = Description of Artificial Sequence: Synthetic oligonucleotide
  source 1..21: mol_type = other DNA
tgtccgagtacgaagagttgt

SEQ ID NO: 43432 - DNA, 21 bp, synthetic construct
  misc_feature 1..21: note = Description of Artificial Sequence: Synthetic oligonucleotide
  source 1..21: mol_type = other DNA
tacagcggcagcgccggccaa

SEQ ID NO: 43433 - DNA, 21 bp, synthetic construct
  misc_feature 1..21: note = Description of Artificial Sequence: Synthetic oligonucleotide
  source 1..21: mol_type = other DNA
agaaccctcagaagcgtcgac

SEQ ID NO: 43434 - DNA, 21 bp, synthetic construct
  misc_feature 1..21: note = Description of Artificial Sequence: Synthetic oligonucleotide
  source 1..21: mol_type = other DNA
aggggttatgggactagtgtg

SEQ ID NO: 43435 - DNA, 21 bp, synthetic construct
  misc_feature 1..21: note = Description of Artificial Sequence: Synthetic oligonucleotide
  source 1..21: mol_type = other DNA
tttagtagtgcttcttttacg

SEQ ID NO: 43436 - DNA, 21 bp, synthetic construct
  misc_feature 1..21: note = Description of Artificial Sequence: Synthetic oligonucleotide
  source 1..21: mol_type = other DNA
atggatcattctacgcgttct

SEQ ID NO: 43437 - DNA, 21 bp, synthetic construct
  misc_feature 1..21: note = Description of Artificial Sequence: Synthetic oligonucleotide
  source 1..21: mol_type = other DNA
ggttatactgataagcatgtg

SEQ ID NO: 43438 - DNA, 21 bp, synthetic construct
  misc_feature 1..21: note = Description of Artificial Sequence: Synthetic oligonucleotide
  source 1..21: mol_type = other DNA
cctcatttgccgcagtctgct

SEQ ID NO: 43439 - DNA, 21 bp, synthetic construct
  misc_feature 1..21: note = Description of Artificial Sequence: Synthetic oligonucleotide
  source 1..21: mol_type = other DNA
tgtcctgggagttctgcttat

SEQ ID NO: 43440 - DNA, 21 bp, synthetic construct
  misc_feature 1..21: note = Description of Artificial Sequence: Synthetic oligonucleotide
  source 1..21: mol_type = other DNA
gaacccccccacaaaatcctc

SEQ ID NO: 43441 - DNA, 21 bp, synthetic construct
  misc_feature 1..21: note = Description of Artificial Sequence: Synthetic oligonucleotide
  source 1..21: mol_type = other DNA
tcttcgcaggaggttttgcgg

SEQ ID NO: 43442 - DNA, 21 bp, synthetic construct
  misc_feature 1..21: note = Description of Artificial Sequence: Synthetic oligonucleotide
  source 1..21: mol_type = other DNA
aatactgatacgagtgcggtg

SEQ ID NO: 43443 - DNA, 21 bp, synthetic construct
  misc_feature 1..21: note = Description of Artificial Sequence: Synthetic oligonucleotide
  source 1..21: mol_type = other DNA
gacagcacccacagagccacc

SEQ ID NO: 43444 - DNA, 21 bp, synthetic construct
  misc_feature 1..21: note = Description of Artificial Sequence: Synthetic oligonucleotide
  source 1..21: mol_type = other DNA
cccctcgaaagaaccaccaaa

SEQ ID NO: 43445 - DNA, 21 bp, synthetic construct
  misc_feature 1..21: note = Description of Artificial Sequence: Synthetic oligonucleotide
  source 1..21: mol_type = other DNA
agacaaagcaccaacatcggc

SEQ ID NO: 43446 - DNA, 21 bp, synthetic construct
  misc_feature 1..21: note = Description of Artificial Sequence: Synthetic oligonucleotide
  source 1..21: mol_type = other DNA
ggcgacagcaaaagcacctgg

SEQ ID NO: 43447 - DNA, 21 bp, synthetic construct
  misc_feature 1..21: note = Description of Artificial Sequence: Synthetic oligonucleotide
  source 1..21: mol_type = other DNA
ggcagccaaatccccagaatc

SEQ ID NO: 43448 - DNA, 21 bp, synthetic construct
  misc_feature 1..21: note = Description of Artificial Sequence: Synthetic oligonucleotide
  source 1..21: mol_type = other DNA
cacgaaagaggccaaaacggc

SEQ ID NO: 43449 - DNA, 21 bp, synthetic construct
  misc_feature 1..21: note = Description of Artificial Sequence: Synthetic oligonucleotide
  source 1..21: mol_type = other DNA
agagaacccgccagaggcgac

SEQ ID NO: 43450 - DNA, 21 bp, synthetic construct
  misc_feature 1..21: note = Description of Artificial Sequence: Synthetic oligonucleotide
  source 1..21: mol_type = other DNA
gtcagcacccaagccatcagc

SEQ ID NO: 43451 - DNA, 21 bp, synthetic construct
  misc_feature 1..21: note = Description of Artificial Sequence: Synthetic oligonucleotide
  source 1..21: mol_type = other DNA
aataatgctcatagttcgtct

SEQ ID NO: 43452 - DNA, 21 bp, synthetic construct
  misc_feature 1..21: note = Description of Artificial Sequence: Synthetic oligonucleotide
  source 1..21: mol_type = other DNA
tataatcagccggttggtaag

SEQ ID NO: 43453 - DNA, 21 bp, synthetic construct
  misc_feature 1..21: note = Description of Artificial Sequence: Synthetic oligonucleotide
  source 1..21: mol_type = other DNA
gccccccacagcgccgccaac

SEQ ID NO: 43454 - DNA, 21 bp, synthetic construct
  misc_feature 1..21: note = Description of Artificial Sequence: Synthetic oligonucleotide
  source 1..21: mol_type = other DNA
agcagaacccaccccgtcatg

SEQ ID NO: 43455 - DNA, 21 bp, synthetic construct
  misc_feature 1..21: note = Description of Artificial Sequence: Synthetic oligonucleotide
  source 1..21: mol_type = other DNA
gacatggtcagccccagaaac

SEQ ID NO: 43456 - DNA, 21 bp, synthetic construct
  misc_feature 1..21: note = Description of Artificial Sequence: Synthetic oligonucleotide
  source 1..21: mol_type = other DNA
gaccccagagcccaaagccac

SEQ ID NO: 43457 - DNA, 21 bp, synthetic construct
  misc_feature 1..21: note = Description of Artificial Sequence: Synthetic oligonucleotide
  source 1..21: mol_type = other DNA
aacgcccaaggcaccgccaaa

SEQ ID NO: 43458 - DNA, 21 bp, synthetic construct
  misc_feature 1..21: note = Description of Artificial Sequence: Synthetic oligonucleotide
  source 1..21: mol_type = other DNA
actactaataatattcagggg

SEQ ID NO: 43459 - DNA, 21 bp, synthetic construct
  misc_feature 1..21: note = Description of Artificial Sequence: Synthetic oligonucleotide
  source 1..21: mol_type = other DNA
atcagaaccaaagaaagcgcc

SEQ ID NO: 43460 - DNA, 21 bp, synthetic construct
  misc_feature 1..21: note = Description of Artificial Sequence: Synthetic oligonucleotide
  source 1..21: mol_type = other DNA
aatgttagtactggggctact

SEQ ID NO: 43461 - DNA, 21 bp, synthetic construct
  misc_feature 1..21: note = Description of Artificial Sequence: Synthetic oligonucleotide
  source 1..21: mol_type = other DNA
cgtattgattcggcgaagggg

SEQ ID NO: 43462 - DNA, 21 bp, synthetic construct
  misc_feature 1..21: note = Description of Artificial Sequence: Synthetic oligonucleotide
  source 1..21: mol_type = other DNA
gcgtatcctactactggtagt

SEQ ID NO: 43463 - DNA, 21 bp, synthetic construct
  misc_feature 1..21: note = Description of Artificial Sequence: Synthetic oligonucleotide
  source 1..21: mol_type = other DNA
aggcatgagtctaaggcgtat

SEQ ID NO: 43464 - DNA, 21 bp, synthetic construct
  misc_feature 1..21: note = Description of Artificial Sequence: Synthetic oligonucleotide
  source 1..21: mol_type = other DNA
gcccaagtcgacaaaagaagc

SEQ ID NO: 43465 - DNA, 21 bp, synthetic construct
  misc_feature 1..21: note = Description of Artificial Sequence: Synthetic oligonucleotide
  source 1..21: mol_type = other DNA
ggtattcagagttctcctact

SEQ ID NO: 43466 - DNA, 21 bp, synthetic construct
  misc_feature 1..21: note = Description of Artificial Sequence: Synthetic oligonucleotide
  source 1..21: mol_type = other DNA
taccaaaacaaaagcctcacc

SEQ ID NO: 43467 - DNA, 21 bp, synthetic construct
  misc_feature 1..21: note = Description of Artificial Sequence: Synthetic oligonucleotide
  source 1..21: mol_type = other DNA
cgtgtgcttacttctaatgcg

SEQ ID NO: 43468 - DNA, 21 bp, synthetic construct
  misc_feature 1..21: note = Description of Artificial Sequence: Synthetic oligonucleotide
  source 1..21: mol_type = other DNA
accccccacgacggccaaaga

SEQ ID NO: 43469 - DNA, 21 bp, synthetic construct
  misc_feature 1..21: note = Description of Artificial Sequence: Synthetic oligonucleotide
  source 1..21: mol_type = other DNA
ccggtggttgggaagatgagt

SEQ ID NO: 43470 - DNA, 21 bp, synthetic construct
  misc_feature 1..21: note = Description of Artificial Sequence: Synthetic oligonucleotide
  source 1..21: mol_type = other DNA
ttggggtctaatcgttattct

SEQ ID NO: 43471 - DNA, 21 bp, synthetic construct
  misc_feature 1..21: note = Description of Artificial Sequence: Synthetic oligonucleotide
  source 1..21: mol_type = other DNA
gagatgaaggggcatacggct

SEQ ID NO: 43472 - DNA, 21 bp, synthetic construct
  misc_feature 1..21: note = Description of Artificial Sequence: Synthetic oligonucleotide
  source 1..21: mol_type = other DNA
tttgggtctagtactattttg

SEQ ID NO: 43473 - DNA, 21 bp, synthetic construct
  misc_feature 1..21: note = Description of Artificial Sequence: Synthetic oligonucleotide
  source 1..21: mol_type = other DNA
ctcaccaccggccaaagcgtc

SEQ ID NO: 43474 - DNA, 21 bp, synthetic construct
  misc_feature 1..21: note = Description of Artificial Sequence: Synthetic oligonucleotide
  source 1..21: mol_type = other DNA
gccagcagagacagagccggc

SEQ ID NO: 43475 - DNA, 21 bp, synthetic construct
  misc_feature 1..21: note = Description of Artificial Sequence: Synthetic oligonucleotide
  source 1..21: mol_type = other DNA
gcttctgatcaggcgcattgt

SEQ ID NO: 43476 - DNA, 21 bp, synthetic construct
  misc_feature 1..21: note = Description of Artificial Sequence: Synthetic oligonucleotide
  source 1..21: mol_type = other DNA
cccggcaacatgaccagcaga

SEQ ID NO: 43477 - DNA, 21 bp, synthetic construct
  misc_feature 1..21: note = Description of Artificial Sequence: Synthetic oligonucleotide
  source 1..21: mol_type = other DNA
cccgccaacagccccgccacc

SEQ ID NO: 43478 - DNA, 21 bp, synthetic construct
  misc_feature 1..21: note = Description of Artificial Sequence: Synthetic oligonucleotide
  source 1..21: mol_type = other DNA
tttcatgcgaatagtactgtg

SEQ ID NO: 43479 - DNA, 21 bp, synthetic construct
  misc_feature 1..21: note = Description of Artificial Sequence: Synthetic oligonucleotide
  source 1..21: mol_type = other DNA
agtgttagtacgaatttttcg

SEQ ID NO: 43480 - DNA, 21 bp, synthetic construct
  misc_feature 1..21: note = Description of Artificial Sequence: Synthetic oligonucleotide
  source 1..21: mol_type = other DNA
cctgtgtctcgggggagtggg

SEQ ID NO: 43481 - DNA, 21 bp, synthetic construct
  misc_feature 1..21: note = Description of Artificial Sequence: Synthetic oligonucleotide
  source 1..21: mol_type = other DNA
aactgttctggacagaatcaa

SEQ ID NO: 43482 - DNA, 21 bp, synthetic construct
  misc_feature 1..21: note = Description of Artificial Sequence: Synthetic oligonucleotide
  source 1..21: mol_type = other DNA
tacagcatgagacccaccgaa

SEQ ID NO: 43483 - DNA, 21 bp, synthetic construct
  misc_feature 1..21: note = Description of Artificial Sequence: Synthetic oligonucleotide
  source 1..21: mol_type = other DNA
cacgggtcgtctgttcattct

SEQ ID NO: 43484 - DNA, 21 bp, synthetic construct
  misc_feature 1..21: note = Description of Artificial Sequence: Synthetic oligonucleotide
  source 1..21: mol_type = other DNA
tctcagtctaatagttttctg

SEQ ID NO: 43485 - DNA, 21 bp, synthetic construct
  misc_feature 1..21: note = Description of Artificial Sequence: Synthetic oligonucleotide
  source 1..21: mol_type = other DNA
gcgggttctcagactggtgtt

SEQ ID NO: 43486 - DNA, 21 bp, synthetic construct
  misc_feature 1..21: note = Description of Artificial Sequence: Synthetic oligonucleotide
  source 1..21: mol_type = other DNA
cccaccctcggcaccaccaaa

SEQ ID NO: 43487 - DNA, 21 bp, synthetic construct
  misc_feature 1..21: note = Description of Artificial Sequence: Synthetic oligonucleotide
  source 1..21: mol_type = other DNA
cgtacttcgacttctcttctt

SEQ ID NO: 43488 - DNA, 21 bp, synthetic construct
  misc_feature 1..21: note = Description of Artificial Sequence: Synthetic oligonucleotide
  source 1..21: mol_type = other DNA
aatttggggattcctaagggt

SEQ ID NO: 43489 - DNA, 21 bp, synthetic construct
  misc_feature 1..21: note = Description of Artificial Sequence: Synthetic oligonucleotide
  source 1..21: mol_type = other DNA
agaatgggcgtcagcaacacc

SEQ ID NO: 43490 - DNA, 21 bp, synthetic construct
  misc_feature 1..21: note = Description of Artificial Sequence: Synthetic oligonucleotide
  source 1..21: mol_type = other DNA
atgggcatcgccaacatcggc

SEQ ID NO: 43491 - DNA, 21 bp, synthetic construct
  misc_feature 1..21: note = Description of Artificial Sequence: Synthetic oligonucleotide
  source 1..21: mol_type = other DNA
gcgctggcttataataagggg

SEQ ID NO: 43492 - DNA, 21 bp, synthetic construct
  misc_feature 1..21: note = Description of Artificial Sequence: Synthetic oligonucleotide
  source 1..21: mol_type = other DNA
agcgaacaccaacccctcagc

SEQ ID NO: 43493 - DNA, 21 bp, synthetic construct
  misc_feature 1..21: note = Description of Artificial Sequence: Synthetic oligonucleotide
  source 1..21: mol_type = other DNA
gtcaacgaaaacagagtcagc

SEQ ID NO: 43494 - DNA, 21 bp, synthetic construct
  misc_feature 1..21: note = Description of Artificial Sequence: Synthetic oligonucleotide
  source 1..21: mol_type = other DNA
ttcagcacccacgaagtcagc

SEQ ID NO: 43495 - DNA, 21 bp, synthetic construct
  misc_feature 1..21: note = Description of Artificial Sequence: Synthetic oligonucleotide
  source 1..21: mol_type = other DNA
gatacgcatgtgagtggtcgg

SEQ ID NO: 43496 - DNA, 21 bp, synthetic construct
  misc_feature 1..21: note = Description of Artificial Sequence: Synthetic oligonucleotide
  source 1..21: mol_type = other DNA
accagcaacacccccagcatc

SEQ ID NO: 43497 - DNA, 21 bp, synthetic construct
  misc_feature 1..21: note = Description of Artificial Sequence: Synthetic oligonucleotide
  source 1..21: mol_type = other DNA
cccgccagagacagcaaaagc

SEQ ID NO: 43498 - DNA, 21 bp, synthetic construct
  misc_feature 1..21: note = Description of Artificial Sequence: Synthetic oligonucleotide
  source 1..21: mol_type = other DNA
ggtttgcatccgcctcgtact

SEQ ID NO: 43499 - DNA, 21 bp, synthetic construct
  misc_feature 1..21: note = Description of Artificial Sequence: Synthetic oligonucleotide
  source 1..21: mol_type = other DNA
gatacgaataagactagttat

SEQ ID NO: 43500 - DNA, 21 bp, synthetic construct
  misc_feature 1..21: note = Description of Artificial Sequence: Synthetic oligonucleotide
  source 1..21: mol_type = other DNA
tctaatactcattcgcctagt

SEQ ID NO: 43501 - DNA, 21 bp, synthetic construct
  misc_feature 1..21: note = Description of Artificial Sequence: Synthetic oligonucleotide
  source 1..21: mol_type = other DNA
tatttgacgagtacgtctaat

SEQ ID NO: 43502 - DNA, 21 bp, synthetic construct
  misc_feature 1..21: note = Description of Artificial Sequence: Synthetic oligonucleotide
  source 1..21: mol_type = other DNA
tacaaacccggcctccaaagc

SEQ ID NO: 43503 - DNA, 21 bp, synthetic construct
  misc_feature 1..21: note = Description of Artificial Sequence: Synthetic oligonucleotide
  source 1..21: mol_type = other DNA
tttccgaatgttaattctgct

SEQ ID NO: 43504 - DNA, 21 bp, synthetic construct
  misc_feature 1..21: note = Description of Artificial Sequence: Synthetic oligonucleotide
  source 1..21: mol_type = other DNA
ccggggattggtacgcctttt

SEQ ID NO: 43505 - DNA, 21 bp, synthetic construct
  misc_feature 1..21: note = Description of Artificial Sequence: Synthetic oligonucleotide
  source 1..21: mol_type = other DNA
atgatcagagacggcagcagc

SEQ ID NO: 43506 - DNA, 21 bp, synthetic construct
  misc_feature 1..21: note = Description of Artificial Sequence: Synthetic oligonucleotide
  source 1..21: mol_type = other DNA
tggggcagaagcagcatggac

SEQ ID NO: 43507 - DNA, 21 bp, synthetic construct
  misc_feature 1..21: note = Description of Artificial Sequence: Synthetic oligonucleotide
  source 1..21: mol_type = other DNA
attaatactgggagtgttaag

SEQ ID NO: 43508 - DNA, 21 bp, synthetic construct
  misc_feature 1..21: note = Description of Artificial Sequence: Synthetic oligonucleotide
  source 1..21: mol_type = other DNA
ccggggcagaagcagggtatt

SEQ ID NO: 43509 - DNA, 21 bp, synthetic construct
  misc_feature 1..21: note = Description of Artificial Sequence: Synthetic oligonucleotide
  source 1..21: mol_type = other DNA
attacgtctggtagtactcgt

SEQ ID NO: 43510 - DNA, 21 bp, synthetic construct
  misc_feature 1..21: note = Description of Artificial Sequence: Synthetic oligonucleotide
  source 1..21: mol_type = other DNA
actccggttattgggcagggg

SEQ ID NO: 43511 - DNA, 21 bp, synthetic construct
  misc_feature 1..21: note = Description of Artificial Sequence: Synthetic oligonucleotide
  source 1..21: mol_type = other DNA
ccgactcattcttctcgggat

SEQ ID NO: 43512 - DNA, 21 bp, synthetic construct
  misc_feature 1..21: note = Description of Artificial Sequence: Synthetic oligonucleotide
  source 1..21: mol_type = other DNA
cctttttctgagatgcagaag

SEQ ID NO: 43513 - DNA, 21 bp, synthetic construct
  misc_feature 1..21: note = Description of Artificial Sequence: Synthetic oligonucleotide
  source 1..21: mol_type = other DNA
ttgaagtctgtttctgggcag

SEQ ID NO: 43514 - DNA, 21 bp, synthetic construct
  misc_feature 1..21: note = Description of Artificial Sequence: Synthetic oligonucleotide
  source 1..21: mol_type = other DNA
tcgcctgagaagaatatgcgg

SEQ ID NO: 43515 - DNA, 21 bp, synthetic construct
  misc_feature 1..21: note = Description of Artificial Sequence: Synthetic oligonucleotide
  source 1..21: mol_type = other DNA
tctaattttcggtctcttggg

SEQ ID NO: 43516 - DNA, 21 bp, synthetic construct
  misc_feature 1..21: note = Description of Artificial Sequence: Synthetic oligonucleotide
  source 1..21: mol_type = other DNA
cctctgagtcattcgaatatg

SEQ ID NO: 43517 - DNA, 21 bp, synthetic construct
  misc_feature 1..21: note = Description of Artificial Sequence: Synthetic oligonucleotide
  source 1..21: mol_type = other DNA
aatggtaatatttctattggg

SEQ ID NO: 43518 - DNA, 21 bp, synthetic construct
  misc_feature 1..21: note = Description of Artificial Sequence: Synthetic oligonucleotide
  source 1..21: mol_type = other DNA
tggagtggggtgagtattaat

SEQ ID NO: 43519 - DNA, 21 bp, synthetic construct
  misc_feature 1..21: note = Description of Artificial Sequence: Synthetic oligonucleotide
  source 1..21: mol_type = other DNA
aatgcgcctaatagttcgggg

SEQ ID NO: 43520 - DNA, 21 bp, synthetic construct
  misc_feature 1..21: note = Description of Artificial Sequence: Synthetic oligonucleotide
  source 1..21: mol_type = other DNA
actcttcctcgtactagtggt

SEQ ID NO: 43521 - DNA, 21 bp, synthetic construct
  misc_feature 1..21: note = Description of Artificial Sequence: Synthetic oligonucleotide
  source 1..21: mol_type = other DNA
gacctcaccaaccacaccaaa

SEQ ID NO: 43522 - DNA, 21 bp, synthetic construct
  misc_feature 1..21: note = Description of Artificial Sequence: Synthetic oligonucleotide
  source 1..21: mol_type = other DNA
accagcaacaccaaaagcgtc

SEQ ID NO: 43523 - DNA, 21 bp, synthetic construct
  misc_feature 1..21: note = Description of Artificial Sequence: Synthetic oligonucleotide
  source 1..21: mol_type = other DNA
tctttgtatccttctaagggt

SEQ ID NO: 43524 - DNA, 21 bp, synthetic construct
  misc_feature 1..21: note = Description of Artificial Sequence: Synthetic oligonucleotide
  source 1..21: mol_type = other DNA
acgtctcagactaagattgtg

SEQ ID NO: 43525 - DNA, 21 bp, synthetic construct
  misc_feature 1..21: note = Description of Artificial Sequence: Synthetic oligonucleotide
  source 1..21: mol_type = other DNA
actactcataatattaagggg

SEQ ID NO: 43526 - DNA, 21 bp, synthetic construct
  misc_feature 1..21: note = Description of Artificial Sequence: Synthetic oligonucleotide
  source 1..21: mol_type = other DNA
ccgttgcaggcgactggtaag

SEQ ID NO: 43527 - DNA, 21 bp, synthetic construct
  misc_feature 1..21: note = Description of Artificial Sequence: Synthetic oligonucleotide
  source 1..21: mol_type = other DNA
ggtgcttctgagaatatgcgg

SEQ ID NO: 43528 - DNA, 21 bp, synthetic construct
  misc_feature 1..21: note = Description of Artificial Sequence: Synthetic oligonucleotide
  source 1..21: mol_type = other DNA
aatagtacgagtacttctcag

SEQ ID NO: 43529 - DNA, 21 bp, synthetic construct
  misc_feature 1..21: note = Description of Artificial Sequence: Synthetic oligonucleotide
  source 1..21: mol_type = other DNA
gtccaacccagaaccagcacc

SEQ ID NO: 43530 - DNA, 21 bp, synthetic construct
  misc_feature 1..21: note = Description of Artificial Sequence: Synthetic oligonucleotide
  source 1..21: mol_type = other DNA
accacccaaaccccctacaaa

SEQ ID NO: 43531 - DNA, 21 bp, synthetic construct
  misc_feature 1..21: note = Description of Artificial Sequence: Synthetic oligonucleotide
  source 1..21: mol_type = other DNA
ccgcagactaataatcctgat

SEQ ID NO: 43532 - DNA, 21 bp, synthetic construct
  misc_feature 1..21: note = Description of Artificial Sequence: Synthetic oligonucleotide
  source 1..21: mol_type = other DNA
cacggcgaaagcagacaagcc

SEQ ID NO: 43533 - DNA, 21 bp, synthetic construct
  misc_feature 1..21: note = Description of Artificial Sequence: Synthetic oligonucleotide
  source 1..21: mol_type = other DNA
aatgctatgaatactcggggt

SEQ ID NO: 43534 - DNA, 21 bp, synthetic construct
  misc_feature 1..21: note = Description of Artificial Sequence: Synthetic oligonucleotide
  source 1..21: mol_type = other DNA
agtcagagtagtcctgttgcg

SEQ ID NO: 43535 - DNA, 21 bp, synthetic construct
  misc_feature 1..21: note = Description of Artificial Sequence: Synthetic oligonucleotide
  source 1..21: mol_type = other DNA
aacggctacggccaaaaccaa

SEQ ID NO: 43536 - DNA, 21 bp, synthetic construct
  misc_feature 1..21: note = Description of Artificial Sequence: Synthetic oligonucleotide
  source 1..21: mol_type = other DNA
ggtaataggtcttctgggctt

SEQ ID NO: 43537 - DNA, 21 bp, synthetic construct
  misc_feature 1..21: note = Description of Artificial Sequence: Synthetic oligonucleotide
  source 1..21: mol_type = other DNA
gataagactaatttgagttct

SEQ ID NO: 43538 - DNA, 21 bp, synthetic construct
  misc_feature 1..21: note = Description of Artificial Sequence: Synthetic oligonucleotide
  source 1..21: mol_type = other DNA
tcttcgcaggaggtttttcgg

SEQ ID NO: 43539 - DNA, 21 bp, synthetic construct
  misc_feature 1..21: note = Description of Artificial Sequence: Synthetic oligonucleotide
  source 1..21: mol_type = other DNA
gacagagaagccaccagcaga

SEQ ID NO: 43540 - DNA, 21 bp, synthetic construct
  misc_feature 1..21: note = Description of Artificial Sequence: Synthetic oligonucleotide
  source 1..21: mol_type = other DNA
ctgccgactgattctcttcgg

SEQ ID NO: 43541 - DNA, 21 bp, synthetic construct
  misc_feature 1..21: note = Description of Artificial Sequence: Synthetic oligonucleotide
  source 1..21: mol_type = other DNA
accagagacagcagcctccac

SEQ ID NO: 43542 - DNA, 21 bp, synthetic construct
  misc_feature 1..21: note = Description of Artificial Sequence: Synthetic oligonucleotide
  source 1..21: mol_type = other DNA
aaccaaagcagcagcgccaga

SEQ ID NO: 43543 - DNA, 21 bp, synthetic construct
  misc_feature 1..21: note = Description of Artificial Sequence: Synthetic oligonucleotide
  source 1..21: mol_type = other DNA
tcgaatgataattcgttgagg

SEQ ID NO: 43544 - DNA, 21 bp, synthetic construct
  misc_feature 1..21: note = Description of Artificial Sequence: Synthetic oligonucleotide
  source 1..21: mol_type = other DNA
gctcctagtgctggtaattct

SEQ ID NO: 43545 - DNA, 21 bp, synthetic construct
  misc_feature 1..21: note = Description of Artificial Sequence: Synthetic oligonucleotide
  source 1..21: mol_type = other DNA
aacagccacctcgccctcaaa

SEQ ID NO: 43546 - DNA, 21 bp, synthetic construct
  misc_feature 1..21: note = Description of Artificial Sequence: Synthetic oligonucleotide
  source 1..21: mol_type = other DNA
ctggtttcgtctaagagtagt

SEQ ID NO: 43547 - DNA, 21 bp, synthetic construct
  misc_feature 1..21: note = Description of Artificial Sequence: Synthetic oligonucleotide
  source 1..21: mol_type = other DNA
gatcagaagactgttaatcgt

SEQ ID NO: 43548 - DNA, 21 bp, synthetic construct
  misc_feature 1..21: note = Description of Artificial Sequence: Synthetic oligonucleotide
  source 1..21: mol_type = other DNA
caagccgtcgccagacaagcc

SEQ ID NO: 43549 - DNA, 21 bp, synthetic construct
  misc_feature 1..21: note = Description of Artificial Sequence: Synthetic oligonucleotide
  source 1..21: mol_type = other DNA
cctagggagactcataagcag

SEQ ID NO: 43550 - DNA, 21 bp, synthetic construct
  misc_feature 1..21: note = Description of Artificial Sequence: Synthetic oligonucleotide
  source 1..21: mol_type = other DNA
agtgatcaggttaggagtgct

SEQ ID NO: 43551 - DNA, 21 bp, synthetic construct
  misc_feature 1..21: note = Description of Artificial Sequence: Synthetic oligonucleotide
  source 1..21: mol_type = other DNA
tcgaataataaggctaatgtt

SEQ ID NO: 43552 - DNA, 21 bp, synthetic construct
  misc_feature 1..21: note = Description of Artificial Sequence: Synthetic oligonucleotide
  source 1..21: mol_type = other DNA
agtagtacgaagtctagtctg

SEQ ID NO: 43553 - DNA, 21 bp, synthetic construct
  misc_feature 1..21: note = Description of Artificial Sequence: Synthetic oligonucleotide
  source 1..21: mol_type = other DNA
gtgaatacgtctcatacgaat

SEQ ID NO: 43554 - DNA, 21 bp, synthetic construct
  misc_feature 1..21: note = Description of Artificial Sequence: Synthetic oligonucleotide
  source 1..21: mol_type = other DNA
accaccatccccaaaagacaa

SEQ ID NO: 43555 - DNA, 21 bp, synthetic construct
  misc_feature 1..21: note = Description of Artificial Sequence: Synthetic oligonucleotide
  source 1..21: mol_type = other DNA
catgtgcaggatgggaggact

SEQ ID NO: 43556 - DNA, 21 bp, synthetic construct
  misc_feature 1..21: note = Description of Artificial Sequence: Synthetic oligonucleotide
  source 1..21: mol_type = other DNA
ctggattttaagactctgccg

SEQ ID NO: 43557 - DNA, 21 bp, synthetic construct
  misc_feature 1..21: note = Description of Artificial Sequence: Synthetic oligonucleotide
  source 1..21: mol_type = other DNA
agttctttggggcataatgat

SEQ ID NO: 43558 - DNA, 21 bp, synthetic construct
  misc_feature 1..21: note = Description of Artificial Sequence: Synthetic oligonucleotide
  source 1..21: mol_type = other DNA
tttaatacttctaagcttagt

SEQ ID NO: 43559 - DNA, 21 bp, synthetic construct
  misc_feature 1..21: note = Description of Artificial Sequence: Synthetic oligonucleotide
  source 1..21: mol_type = other DNA
ggcagcgcccaaagccccaga

SEQ ID NO: 43560 - DNA, 21 bp, synthetic construct
  misc_feature 1..21: note = Description of Artificial Sequence: Synthetic oligonucleotide
  source 1..21: mol_type = other DNA
gtgcagccgtctggtcgtcct

SEQ ID NO: 43561 - DNA, 21 bp, synthetic construct
  misc_feature 1..21: note = Description of Artificial Sequence: Synthetic oligonucleotide
  source 1..21: mol_type = other DNA
aacggcagcggccaataccaa

SEQ ID NO: 43562 - DNA, 21 bp, synthetic construct
  misc_feature 1..21: note = Description of Artificial Sequence: Synthetic oligonucleotide
  source 1..21: mol_type = other DNA
ggttattcgaatcagatgact

SEQ ID NO: 43563 - DNA, 21 bp, synthetic construct
  misc_feature 1..21: note = Description of Artificial Sequence: Synthetic oligonucleotide
  source 1..21: mol_type = other DNA
aagacttctgagactcgttcg

SEQ ID NO: 43564 - DNA, 21 bp, synthetic construct
  misc_feature 1..21: note = Description of Artificial Sequence: Synthetic oligonucleotide
  source 1..21: mol_type = other DNA
ccgactactaggatggtgaat

SEQ ID NO: 43565 - DNA, 21 bp, synthetic construct
  misc_feature 1..21: note = Description of Artificial Sequence: Synthetic oligonucleotide
  source 1..21: mol_type = other DNA
tcgccggcgagggcttctctt

SEQ ID NO: 43566 - DNA, 21 bp, synthetic construct
  misc_feature 1..21: note = Description of Artificial Sequence: Synthetic oligonucleotide
  source 1..21: mol_type = other DNA
acgtctcgtacttcttatgag

SEQ ID NO: 43567 - DNA, 21 bp, synthetic construct
  misc_feature 1..21: note = Description of Artificial Sequence: Synthetic oligonucleotide
  source 1..21: mol_type = other DNA
agttcgccgtcgaggtctagt

SEQ ID NO: 43568 - DNA, 21 bp, synthetic construct
  misc_feature 1..21: note = Description of Artificial Sequence: Synthetic oligonucleotide
  source 1..21: mol_type = other DNA
agcgtcaacagccaccacggc

SEQ ID NO: 43569 - DNA, 21 bp, synthetic construct
  misc_feature 1..21: note = Description of Artificial Sequence: Synthetic oligonucleotide
  source 1..21: mol_type = other DNA
cttgataagcgttcggttgag

SEQ ID NO: 43570 - DNA, 21 bp, synthetic construct
  misc_feature 1..21: note = Description of Artificial Sequence: Synthetic oligonucleotide
  source 1..21: mol_type = other DNA
cacatcaccagcaaccacgcc

SEQ ID NO: 43571 - DNA, 21 bp, synthetic construct
  misc_feature 1..21: note = Description of Artificial Sequence: Synthetic oligonucleotide
  source 1..21: mol_type = other DNA
agcatcaccgacagacacagc

SEQ ID NO: 43572 - DNA, 21 bp, synthetic construct
  misc_feature 1..21: note = Description of Artificial Sequence: Synthetic oligonucleotide
  source 1..21: mol_type = other DNA
tctggggttactactaggggt

SEQ ID NO: 43573 - DNA, 21 bp, synthetic construct
  misc_feature 1..21: note = Description of Artificial Sequence: Synthetic oligonucleotide
  source 1..21: mol_type = other DNA
cacgccagagccagcaccgcc

SEQ ID NO: 43574 - DNA, 21 bp, synthetic construct
  misc_feature 1..21: note = Description of Artificial Sequence: Synthetic oligonucleotide
  source 1..21: mol_type = other DNA
cttaatggtactcctcagtct

SEQ ID NO: 43575 - DNA, 21 bp, synthetic construct
  misc_feature 1..21: note = Description of Artificial Sequence: Synthetic oligonucleotide
  source 1..21: mol_type = other DNA
ggcatgagcagcccccacatc

SEQ ID NO: 43576 - DNA, 21 bp, synthetic construct
  misc_feature 1..21: note = Description of Artificial Sequence: Synthetic oligonucleotide
  source 1..21: mol_type = other DNA
acttctatgaatggtaataag

SEQ ID NO: 43577 - DNA, 21 bp, synthetic construct
  misc_feature 1..21: note = Description of Artificial Sequence: Synthetic oligonucleotide
  source 1..21: mol_type = other DNA
tctagggtggagattaatcgt

SEQ ID NO: 43578 - DNA, 21 bp, synthetic construct
  misc_feature 1..21: note = Description of Artificial Sequence: Synthetic oligonucleotide
  source 1..21: mol_type = other DNA
ttgcagaagccgagtctggtt

SEQ ID NO: 43579 - DNA, 21 bp, synthetic construct
  misc_feature 1..21: note = Description of Artificial Sequence: Synthetic oligonucleotide
  source 1..21: mol_type = other DNA
ggcggccacaaaagcctcaac

SEQ ID NO: 43580 - DNA, 21 bp, synthetic construct
  misc_feature 1..21: note = Description of Artificial Sequence: Synthetic oligonucleotide
  source 1..21: mol_type = other DNA
gccgaaagcggcggcagcaga

SEQ ID NO: 43581 - DNA, 21 bp, synthetic construct
  misc_feature 1..21: note = Description of Artificial Sequence: Synthetic oligonucleotide
  source 1..21: mol_type = other DNA
gatgggggtaatcagaggagt

SEQ ID NO: 43582 - DNA, 21 bp, synthetic construct
  misc_feature 1..21: note = Description of Artificial Sequence: Synthetic oligonucleotide
  source 1..21: mol_type = other DNA
tacggttctggacagaatcaa

SEQ ID NO: 43583 - DNA, 21 bp, synthetic construct
  misc_feature 1..21: note = Description of Artificial Sequence: Synthetic oligonucleotide
  source 1..21: mol_type = other DNA
gttggttcggatagttctacg

SEQ ID NO: 43584 - DNA, 21 bp, synthetic construct
  misc_feature 1..21: note = Description of Artificial Sequence: Synthetic oligonucleotide
  source 1..21: mol_type = other DNA
cacatgacccacaccaccgcc

SEQ ID NO: 43585 - DNA, 21 bp, synthetic construct
  misc_feature 1..21: note = Description of Artificial Sequence: Synthetic oligonucleotide
  source 1..21: mol_type = other DNA
gataatatttctcggagtagg

SEQ ID NO: 43586 - DNA, 21 bp, synthetic construct
  misc_feature 1..21: note = Description of Artificial Sequence: Synthetic oligonucleotide
  source 1..21: mol_type = other DNA
atggggactcattctattggt

SEQ ID NO: 43587 - DNA, 21 bp, synthetic construct
  misc_feature 1..21: note = Description of Artificial Sequence: Synthetic oligonucleotide
  source 1..21: mol_type = other DNA
ggccaaatcaaaaacctcggc
